United States Patent Application Publication US 2012/0157512 A1 - sequence listing, part 8

SEQ ID NO: 229186 - DNA, 21 bp, Artificial sequence
  SiRNA target sequence
tttaaacttcccaattacaaa

SEQ ID NO: 229187 - DNA, 21 bp, Artificial sequence
  SiRNA target sequence
ttaaacttcccaattacaaac

SEQ ID NO: 229188 - DNA, 21 bp, Artificial sequence
  SiRNA target sequence
taaacttcccaattacaaaca

SEQ ID NO: 229189 - DNA, 21 bp, Artificial sequence
  SiRNA target sequence
aaacttcccaattacaaacaa

SEQ ID NO: 229190 - DNA, 21 bp, Artificial sequence
  SiRNA target sequence
aacttcccaattacaaacaaa

SEQ ID NO: 229191 - DNA, 21 bp, Artificial sequence
  SiRNA target sequence
acttcccaattacaaacaaag

SEQ ID NO: 229192 - DNA, 21 bp, Artificial sequence
  SiRNA target sequence
cttcccaattacaaacaaaga

SEQ ID NO: 229193 - DNA, 21 bp, Artificial sequence
  SiRNA target sequence
ttcccaattacaaacaaagag

SEQ ID NO: 229194 - DNA, 21 bp, Artificial sequence
  SiRNA target sequence
tcccaattacaaacaaagagg

SEQ ID NO: 229195 - DNA, 21 bp, Artificial sequence
  SiRNA target sequence
cccaattacaaacaaagagga

SEQ ID NO: 229196 - DNA, 21 bp, Artificial sequence
  SiRNA target sequence
ccaattacaaacaaagaggat

SEQ ID NO: 229197 - DNA, 21 bp, Artificial sequence
  SiRNA target sequence
caattacaaacaaagaggata

SEQ ID NO: 229198 - DNA, 21 bp, Artificial sequence
  SiRNA target sequence
aattacaaacaaagaggataa

SEQ ID NO: 229199 - DNA, 21 bp, Artificial sequence
  SiRNA target sequence
attacaaacaaagaggataat

SEQ ID NO: 229200 - DNA, 21 bp, Artificial sequence
  SiRNA target sequence
ttacaaacaaagaggataata

SEQ ID NO: 229201 - DNA, 21 bp, Artificial sequence
  SiRNA target sequence
tacaaacaaagaggataatat

SEQ ID NO: 229202 - DNA, 21 bp, Artificial sequence
  SiRNA target sequence
acaaacaaagaggataatata

SEQ ID NO: 229203 - DNA, 21 bp, Artificial sequence
  SiRNA target sequence
caaacaaagaggataatatat

SEQ ID NO: 229204 - DNA, 21 bp, Artificial sequence
  SiRNA target sequence
aaacaaagaggataatatatt

SEQ ID NO: 229205 - DNA, 21 bp, Artificial sequence
  SiRNA target sequence
aacaaagaggataatatattt

SEQ ID NO: 229206 - DNA, 21 bp, Artificial sequence
  SiRNA target sequence
acaaagaggataatatatttg

SEQ ID NO: 229207 - DNA, 21 bp, Artificial sequence
  SiRNA target sequence
caaagaggataatatatttga

SEQ ID NO: 229208 - DNA, 21 bp, Artificial sequence
  SiRNA target sequence
aaagaggataatatatttgat

SEQ ID NO: 229209 - DNA, 21 bp, Artificial sequence
  SiRNA target sequence
aagaggataatatatttgata

SEQ ID NO: 229210 - DNA, 21 bp, Artificial sequence
  SiRNA target sequence
agaggataatatatttgatat

SEQ ID NO: 229211 - DNA, 21 bp, Artificial sequence
  SiRNA target sequence
gaggataatatatttgatatt

SEQ ID NO: 229212 - DNA, 21 bp, Artificial sequence
  SiRNA target sequence
aggataatatatttgatattt

SEQ ID NO: 229213 - DNA, 21 bp, Artificial sequence
  SiRNA target sequence
ggataatatatttgatattta

SEQ ID NO: 229214 - DNA, 21 bp, Artificial sequence
  SiRNA target sequence
gataatatatttgatatttac

SEQ ID NO: 229215 - DNA, 21 bp, Artificial sequence
  SiRNA target sequence
ataatatatttgatatttacc

SEQ ID NO: 229216 - DNA, 21 bp, Artificial sequence
  SiRNA target sequence
taatatatttgatatttaccg

SEQ ID NO: 229217 - DNA, 21 bp, Artificial sequence
  SiRNA target sequence
aatatatttgatatttaccgt

SEQ ID NO: 229218 - DNA, 21 bp, Artificial sequence
  SiRNA target sequence
atatatttgatatttaccgtt

SEQ ID NO: 229219 - DNA, 21 bp, Artificial sequence
  SiRNA target sequence
tatatttgatatttaccgttt

SEQ ID NO: 229220 - DNA, 21 bp, Artificial sequence
  SiRNA target sequence
atatttgatatttaccgttta

SEQ ID NO: 229221 - DNA, 21 bp, Artificial sequence
  SiRNA target sequence
tatttgatatttaccgtttac

SEQ ID NO: 229222 - DNA, 21 bp, Artificial sequence
  SiRNA target sequence
atttgatatttaccgtttacc

SEQ ID NO: 229223 - DNA, 21 bp, Artificial sequence
  SiRNA target sequence
tttgatatttaccgtttaccg

SEQ ID NO: 229224 - DNA, 21 bp, Artificial sequence
  SiRNA target sequence
ttgatatttaccgtttaccgt

SEQ ID NO: 229225 - DNA, 21 bp, Artificial sequence
  SiRNA target sequence
tgatatttaccgtttaccgtc

SEQ ID NO: 229226 - DNA, 21 bp, Artificial sequence
  SiRNA target sequence
gatatttaccgtttaccgtca

SEQ ID NO: 229227 - DNA, 21 bp, Artificial sequence
  SiRNA target sequence
atatttaccgtttaccgtcaa

SEQ ID NO: 229228 - DNA, 21 bp, Artificial sequence
  SiRNA target sequence
tatttaccgtttaccgtcaac

SEQ ID NO: 229229 - DNA, 21 bp, Artificial sequence
  SiRNA target sequence
atttaccgtttaccgtcaact

SEQ ID NO: 229230 - DNA, 21 bp, Artificial sequence
  SiRNA target sequence
tttaccgtttaccgtcaactg

SEQ ID NO: 229231 - DNA, 21 bp, Artificial sequence
  SiRNA target sequence
ttaccgtttaccgtcaactga

SEQ ID NO: 229232 - DNA, 21 bp, Artificial sequence
  SiRNA target sequence
taccgtttaccgtcaactgat

SEQ ID NO: 229233 - DNA, 21 bp, Artificial sequence
  SiRNA target sequence
accgtttaccgtcaactgatt

SEQ ID NO: 229234 - DNA, 21 bp, Artificial sequence
  SiRNA target sequence
ccgtttaccgtcaactgattc

SEQ ID NO: 229235 - DNA, 21 bp, Artificial sequence
  SiRNA target sequence
cgtttaccgtcaactgattct

SEQ ID NO: 229236 - DNA, 21 bp, Artificial sequence
  SiRNA target sequence
gtttaccgtcaactgattcta

SEQ ID NO: 229237 - DNA, 21 bp, Artificial sequence
  SiRNA target sequence
tttaccgtcaactgattctat

SEQ ID NO: 229238 - DNA, 21 bp, Artificial sequence
  SiRNA target sequence
ttaccgtcaactgattctata

SEQ ID NO: 229239 - DNA, 21 bp, Artificial sequence
  SiRNA target sequence
taccgtcaactgattctataa

SEQ ID NO: 229240 - DNA, 21 bp, Artificial sequence
  SiRNA target sequence
accgtcaactgattctataat

SEQ ID NO: 229241 - DNA, 21 bp, Artificial sequence
  SiRNA target sequence
ccgtcaactgattctataatc

SEQ ID NO: 229242 - DNA, 21 bp, Artificial sequence
  SiRNA target sequence
cgtcaactgattctataatca

SEQ ID NO: 229243 - DNA, 21 bp, Artificial sequence
  SiRNA target sequence
gtcaactgattctataatcaa

SEQ ID NO: 229244 - DNA, 21 bp, Artificial sequence
  SiRNA target sequence
tcaactgattctataatcaaa

SEQ ID NO: 229245 - DNA, 21 bp, Artificial sequence
  SiRNA target sequence
caactgattctataatcaaat

SEQ ID NO: 229246 - DNA, 21 bp, Artificial sequence
  SiRNA target sequence
aactgattctataatcaaatt

SEQ ID NO: 229247 - DNA, 21 bp, Artificial sequence
  SiRNA target sequence
actgattctataatcaaatta

SEQ ID NO: 229248 - DNA, 21 bp, Artificial sequence
  SiRNA target sequence
ctgattctataatcaaattag

SEQ ID NO: 229249 - DNA, 21 bp, Artificial sequence
  SiRNA target sequence
tgattctataatcaaattaga

SEQ ID NO: 229250 - DNA, 21 bp, Artificial sequence
  SiRNA target sequence
gattctataatcaaattagaa

SEQ ID NO: 229251 - DNA, 21 bp, Artificial sequence
  SiRNA target sequence
attctataatcaaattagaaa

SEQ ID NO: 229252 - DNA, 21 bp, Artificial sequence
  SiRNA target sequence
ttctataatcaaattagaaaa

SEQ ID NO: 229253 - DNA, 21 bp, Artificial sequence
  SiRNA target sequence
tctataatcaaattagaaaat

SEQ ID NO: 229254 - DNA, 21 bp, Artificial sequence
  SiRNA target sequence
ctataatcaaattagaaaata

SEQ ID NO: 229255 - DNA, 21 bp, Artificial sequence
  SiRNA target sequence
tataatcaaattagaaaatat

SEQ ID NO: 229256 - DNA, 21 bp, Artificial sequence
  SiRNA target sequence
ataatcaaattagaaaatatt

SEQ ID NO: 229257 - DNA, 21 bp, Artificial sequence
  SiRNA target sequence
taatcaaattagaaaatattg

SEQ ID NO: 229258 - DNA, 21 bp, Artificial sequence
  SiRNA target sequence
aatcaaattagaaaatattgt

SEQ ID NO: 229259 - DNA, 21 bp, Artificial sequence
  SiRNA target sequence
atcaaattagaaaatattgtt

SEQ ID NO: 229260 - DNA, 21 bp, Artificial sequence
  SiRNA target sequence
tcaaattagaaaatattgttg

SEQ ID NO: 229261 - DNA, 21 bp, Artificial sequence
  SiRNA target sequence
caaattagaaaatattgttgg

SEQ ID NO: 229262 - DNA, 21 bp, Artificial sequence
  SiRNA target sequence
aaattagaaaatattgttggt

SEQ ID NO: 229263 - DNA, 21 bp, Artificial sequence
  SiRNA target sequence
aattagaaaatattgttggtg

SEQ ID NO: 229264 - DNA, 21 bp, Artificial sequence
  SiRNA target sequence
attagaaaatattgttggtgt

SEQ ID NO: 229265 - DNA, 21 bp, Artificial sequence
  SiRNA target sequence
ttagaaaatattgttggtgtc

SEQ ID NO: 229266 - DNA, 21 bp, Artificial sequence
  SiRNA target sequence
tagaaaatattgttggtgtca

SEQ ID NO: 229267 - DNA, 21 bp, Artificial sequence
  SiRNA target sequence
agaaaatattgttggtgtcat

SEQ ID NO: 229268 - DNA, 21 bp, Artificial sequence
  SiRNA target sequence
gaaaatattgttggtgtcatt

SEQ ID NO: 229269 - DNA, 21 bp, Artificial sequence
  SiRNA target sequence
aaaatattgttggtgtcattt

SEQ ID NO: 229270 - DNA, 21 bp, Artificial sequence
  SiRNA target sequence
aaatattgttggtgtcatttg

SEQ ID NO: 229271 - DNA, 21 bp, Artificial sequence
  SiRNA target sequence
aatattgttggtgtcatttgt

SEQ ID NO: 229272 - DNA, 21 bp, Artificial sequence
  SiRNA target sequence
atattgttggtgtcatttgtg

SEQ ID NO: 229273 - DNA, 21 bp, Artificial sequence
  SiRNA target sequence
tattgttggtgtcatttgtgt

SEQ ID NO: 229274 - DNA, 21 bp, Artificial sequence
  SiRNA target sequence
attgttggtgtcatttgtgta

SEQ ID NO: 229275 - DNA, 21 bp, Artificial sequence
  SiRNA target sequence
ttgttggtgtcatttgtgtat

SEQ ID NO: 229276 - DNA, 21 bp, Artificial sequence
  SiRNA target sequence
tgttggtgtcatttgtgtatc

SEQ ID NO: 229277 - DNA, 21 bp, Artificial sequence
  SiRNA target sequence
gttggtgtcatttgtgtatct

SEQ ID NO: 229278 - DNA, 21 bp, Artificial sequence
  SiRNA target sequence
ttggtgtcatttgtgtatctt

SEQ ID NO: 229279 - DNA, 21 bp, Artificial sequence
  SiRNA target sequence
tggtgtcatttgtgtatcttt

SEQ ID NO: 229280 - DNA, 21 bp, Artificial sequence
  SiRNA target sequence
ggtgtcatttgtgtatcttta

SEQ ID NO: 229281 - DNA, 21 bp, Artificial sequence
  SiRNA target sequence
gtgtcatttgtgtatctttaa

SEQ ID NO: 229282 - DNA, 21 bp, Artificial sequence
  SiRNA target sequence
tgtcatttgtgtatctttaat

SEQ ID NO: 229283 - DNA, 21 bp, Artificial sequence
  SiRNA target sequence
gtcatttgtgtatctttaatg

SEQ ID NO: 229284 - DNA, 21 bp, Artificial sequence
  SiRNA target sequence
tcatttgtgtatctttaatga

SEQ ID NO: 229285 - DNA, 21 bp, Artificial sequence
  SiRNA target sequence
catttgtgtatctttaatgaa

SEQ ID NO: 229286 - DNA, 21 bp, Artificial sequence
  SiRNA target sequence
atttgtgtatctttaatgaag

SEQ ID NO: 229287 - DNA, 21 bp, Artificial sequence
  SiRNA target sequence
tttgtgtatctttaatgaaga

SEQ ID NO: 229288 - DNA, 21 bp, Artificial sequence
  SiRNA target sequence
ttgtgtatctttaatgaagat

SEQ ID NO: 229289 - DNA, 21 bp, Artificial sequence
  SiRNA target sequence
tgtgtatctttaatgaagatt

SEQ ID NO: 229290 - DNA, 21 bp, Artificial sequence
  SiRNA target sequence
gtgtatctttaatgaagattt

SEQ ID NO: 229291 - DNA, 21 bp, Artificial sequence
  SiRNA target sequence
tgtatctttaatgaagatttc

SEQ ID NO: 229292 - DNA, 21 bp, Artificial sequence
  SiRNA target sequence
gtatctttaatgaagatttct

SEQ ID NO: 229293 - DNA, 21 bp, Artificial sequence
  SiRNA target sequence
tatctttaatgaagatttcta

SEQ ID NO: 229294 - DNA, 21 bp, Artificial sequence
  SiRNA target sequence
atctttaatgaagatttctaa

SEQ ID NO: 229295 - DNA, 21 bp, Artificial sequence
  SiRNA target sequence
tctttaatgaagatttctaaa

SEQ ID NO: 229296 - DNA, 21 bp, Artificial sequence
  SiRNA target sequence
ctttaatgaagatttctaaat

SEQ ID NO: 229297 - DNA, 21 bp, Artificial sequence
  SiRNA target sequence
tttaatgaagatttctaaata

SEQ ID NO: 229298 - DNA, 21 bp, Artificial sequence
  SiRNA target sequence
ttaatgaagatttctaaatat

SEQ ID NO: 229299 - DNA, 21 bp, Artificial sequence
  SiRNA target sequence
taatgaagatttctaaatatg

SEQ ID NO: 229300 - DNA, 21 bp, Artificial sequence
  SiRNA target sequence
aatgaagatttctaaatatgc

SEQ ID NO: 229301 - DNA, 21 bp, Artificial sequence
  SiRNA target sequence
atgaagatttctaaatatgca

SEQ ID NO: 229302 - DNA, 21 bp, Artificial sequence
  SiRNA target sequence
tgaagatttctaaatatgcag

SEQ ID NO: 229303 - DNA, 21 bp, Artificial sequence
  SiRNA target sequence
gaagatttctaaatatgcagc

SEQ ID NO: 229304 - DNA, 21 bp, Artificial sequence
  SiRNA target sequence
aagatttctaaatatgcagca

SEQ ID NO: 229305 - DNA, 21 bp, Artificial sequence
  SiRNA target sequence
agatttctaaatatgcagcat

SEQ ID NO: 229306 - DNA, 21 bp, Artificial sequence
  SiRNA target sequence
gatttctaaatatgcagcatt

SEQ ID NO: 229307 - DNA, 21 bp, Artificial sequence
  SiRNA target sequence
atttctaaatatgcagcattt

SEQ ID NO: 229308 - DNA, 21 bp, Artificial sequence
  SiRNA target sequence
tttctaaatatgcagcatttg

SEQ ID NO: 229309 - DNA, 21 bp, Artificial sequence
  SiRNA target sequence
ttctaaatatgcagcatttga

SEQ ID NO: 229310 - DNA, 21 bp, Artificial sequence
  SiRNA target sequence
tctaaatatgcagcatttgat

SEQ ID NO: 229311 - DNA, 21 bp, Artificial sequence
  SiRNA target sequence
ctaaatatgcagcatttgata

SEQ ID NO: 229312 - DNA, 21 bp, Artificial sequence
  SiRNA target sequence
taaatatgcagcatttgatat

SEQ ID NO: 229313 - DNA, 21 bp, Artificial sequence
  SiRNA target sequence
aaatatgcagcatttgatatc

SEQ ID NO: 229314 - DNA, 21 bp, Artificial sequence
  SiRNA target sequence
aatatgcagcatttgatatca

SEQ ID NO: 229315 - DNA, 21 bp, Artificial sequence
  SiRNA target sequence
atatgcagcatttgatatcac

SEQ ID NO: 229316 - DNA, 21 bp, Artificial sequence
  SiRNA target sequence
tatgcagcatttgatatcaca

SEQ ID NO: 229317 - DNA, 21 bp, Artificial sequence
  SiRNA target sequence
atgcagcatttgatatcacaa

SEQ ID NO: 229318 - DNA, 21 bp, Artificial sequence
  SiRNA target sequence
tgcagcatttgatatcacaaa

SEQ ID NO: 229319 - DNA, 21 bp, Artificial sequence
  SiRNA target sequence
gcagcatttgatatcacaaaa

SEQ ID NO: 229320 - DNA, 21 bp, Artificial sequence
  SiRNA target sequence
cagcatttgatatcacaaaag

SEQ ID NO: 229321 - DNA, 21 bp, Artificial sequence
  SiRNA target sequence
agcatttgatatcacaaaaga

SEQ ID NO: 229322 - DNA, 21 bp, Artificial sequence
  SiRNA target sequence
gcatttgatatcacaaaagag

SEQ ID NO: 229323 - DNA, 21 bp, Artificial sequence
  SiRNA target sequence
catttgatatcacaaaagagg

SEQ ID NO: 229324 - DNA, 21 bp, Artificial sequence
  SiRNA target sequence
atttgatatcacaaaagaggc

SEQ ID NO: 229325 - DNA, 21 bp, Artificial sequence
  SiRNA target sequence
tttgatatcacaaaagaggct

SEQ ID NO: 229326 - DNA, 21 bp, Artificial sequence
  SiRNA target sequence
ttgatatcacaaaagaggctt

SEQ ID NO: 229327 - DNA, 21 bp, Artificial sequence
  SiRNA target sequence
tgatatcacaaaagaggcttt

SEQ ID NO: 229328 - DNA, 21 bp, Artificial sequence
  SiRNA target sequence
gatatcacaaaagaggctttg

SEQ ID NO: 229329 - DNA, 21 bp, Artificial sequence
  SiRNA target sequence
atatcacaaaagaggctttgt

SEQ ID NO: 229330 - DNA, 21 bp, Artificial sequence
  SiRNA target sequence
tatcacaaaagaggctttgtc

SEQ ID NO: 229331 - DNA, 21 bp, Artificial sequence
  SiRNA target sequence
atcacaaaagaggctttgtct

SEQ ID NO: 229332 - DNA, 21 bp, Artificial sequence
  SiRNA target sequence
tcacaaaagaggctttgtcta

SEQ ID NO: 229333 - DNA, 21 bp, Artificial sequence
  SiRNA target sequence
cacaaaagaggctttgtctat

SEQ ID NO: 229334 - DNA, 21 bp, Artificial sequence
  SiRNA target sequence
acaaaagaggctttgtctatg

SEQ ID NO: 229335 - DNA, 21 bp, Artificial sequence
  SiRNA target sequence
caaaagaggctttgtctatgc

SEQ ID NO: 229336 - DNA, 21 bp, Artificial sequence
  SiRNA target sequence
aaaagaggctttgtctatgca

SEQ ID NO: 229337 - DNA, 21 bp, Artificial sequence
  SiRNA target sequence
aaagaggctttgtctatgcag

SEQ ID NO: 229338 - DNA, 21 bp, Artificial sequence
  SiRNA target sequence
aagaggctttgtctatgcaga

SEQ ID NO: 229339 - DNA, 21 bp, Artificial sequence
  SiRNA target sequence
agaggctttgtctatgcagat

SEQ ID NO: 229340 - DNA, 21 bp, Artificial sequence
  SiRNA target sequence
gaggctttgtctatgcagatt

SEQ ID NO: 229341 - DNA, 21 bp, Artificial sequence
  SiRNA target sequence
aggctttgtctatgcagattg

SEQ ID NO: 229342 - DNA, 21 bp, Artificial sequence
  SiRNA target sequence
ggctttgtctatgcagattga

SEQ ID NO: 229343 - DNA, 21 bp, Artificial sequence
  SiRNA target sequence
gctttgtctatgcagattgat

SEQ ID NO: 229344 - DNA, 21 bp, Artificial sequence
  SiRNA target sequence
ctttgtctatgcagattgatg

SEQ ID NO: 229345 - DNA, 21 bp, Artificial sequence
  SiRNA target sequence
tttgtctatgcagattgatgg

SEQ ID NO: 229346 - DNA, 21 bp, Artificial sequence
  SiRNA target sequence
ttgtctatgcagattgatggt

SEQ ID NO: 229347 - DNA, 21 bp, Artificial sequence
  SiRNA target sequence
tgtctatgcagattgatggtt

SEQ ID NO: 229348 - DNA, 21 bp, Artificial sequence
  SiRNA target sequence
gtctatgcagattgatggttc

SEQ ID NO: 229349 - DNA, 21 bp, Artificial sequence
  SiRNA target sequence
tctatgcagattgatggttct

SEQ ID NO: 229350 - DNA, 21 bp, Artificial sequence
  SiRNA target sequence
ctatgcagattgatggttcta

SEQ ID NO: 229351 - DNA, 21 bp, Artificial sequence
  SiRNA target sequence
tatgcagattgatggttctat

SEQ ID NO: 229352 - DNA, 21 bp, Artificial sequence
  SiRNA target sequence
atgcagattgatggttctata

SEQ ID NO: 229353 - DNA, 21 bp, Artificial sequence
  SiRNA target sequence
tgcagattgatggttctataa

SEQ ID NO: 229354 - DNA, 21 bp, Artificial sequence
  SiRNA target sequence
gcagattgatggttctataag

SEQ ID NO: 229355 - DNA, 21 bp, Artificial sequence
  SiRNA target sequence
cagattgatggttctataaga

SEQ ID NO: 229356 - DNA, 21 bp, Artificial sequence
  SiRNA target sequence
agattgatggttctataagag

SEQ ID NO: 229357 - DNA, 21 bp, Artificial sequence
  SiRNA target sequence
gattgatggttctataagagc

SEQ ID NO: 229358 - DNA, 21 bp, Artificial sequence
  SiRNA target sequence
attgatggttctataagagcg

SEQ ID NO: 229359 - DNA, 21 bp, Artificial sequence
  SiRNA target sequence
ttgatggttctataagagcga

SEQ ID NO: 229360 - DNA, 21 bp, Artificial sequence
  SiRNA target sequence
tgatggttctataagagcgaa

SEQ ID NO: 229361 - DNA, 21 bp, Artificial sequence
  SiRNA target sequence
gatggttctataagagcgaaa

SEQ ID NO: 229362 - DNA, 21 bp, Artificial sequence
  SiRNA target sequence
atggttctataagagcgaaat

SEQ ID NO: 229363 - DNA, 21 bp, Artificial sequence
  SiRNA target sequence
tggttctataagagcgaaata

SEQ ID NO: 229364 - DNA, 21 bp, Artificial sequence
  SiRNA target sequence
ggttctataagagcgaaatac

SEQ ID NO: 229365 - DNA, 21 bp, Artificial sequence
  SiRNA target sequence
gttctataagagcgaaataca

SEQ ID NO: 229366 - DNA, 21 bp, Artificial sequence
  SiRNA target sequence
ttctataagagcgaaatacaa

SEQ ID NO: 229367 - DNA, 21 bp, Artificial sequence
  SiRNA target sequence
tctataagagcgaaatacaaa

SEQ ID NO: 229368 - DNA, 21 bp, Artificial sequence
  SiRNA target sequence
ctataagagcgaaatacaaag

SEQ ID NO: 229369 - DNA, 21 bp, Artificial sequence
  SiRNA target sequence
tataagagcgaaatacaaagg

SEQ ID NO: 229370 - DNA, 21 bp, Artificial sequence
  SiRNA target sequence
ataagagcgaaatacaaaggt

SEQ ID NO: 229371 - DNA, 21 bp, Artificial sequence
  SiRNA target sequence
taagagcgaaatacaaaggta

SEQ ID NO: 229372 - DNA, 21 bp, Artificial sequence
  SiRNA target sequence
aagagcgaaatacaaaggtat

SEQ ID NO: 229373 - DNA, 21 bp, Artificial sequence
  SiRNA target sequence
agagcgaaatacaaaggtatt

SEQ ID NO: 229374 - DNA, 21 bp, Artificial sequence
  SiRNA target sequence
gagcgaaatacaaaggtattt

SEQ ID NO: 229375 - DNA, 21 bp, Artificial sequence
  SiRNA target sequence
agcgaaatacaaaggtatttt

SEQ ID NO: 229376 - DNA, 21 bp, Artificial sequence
  SiRNA target sequence
gcgaaatacaaaggtattttt

SEQ ID NO: 229377 - DNA, 21 bp, Artificial sequence
  SiRNA target sequence
cgaaatacaaaggtatttttg

SEQ ID NO: 229378 - DNA, 21 bp, Artificial sequence
  SiRNA target sequence
gaaatacaaaggtatttttga

SEQ ID NO: 229379 - DNA, 21 bp, Artificial sequence
  SiRNA target sequence
aaatacaaaggtatttttgat

SEQ ID NO: 229380 - DNA, 21 bp, Artificial sequence
  SiRNA target sequence
aatacaaaggtatttttgatg

SEQ ID NO: 229381 - DNA, 21 bp, Artificial sequence
  SiRNA target sequence
atacaaaggtatttttgatgg

SEQ ID NO: 229382 - DNA, 21 bp, Artificial sequence
  SiRNA target sequence
tacaaaggtatttttgatggt

SEQ ID NO: 229383 - DNA, 21 bp, Artificial sequence
  SiRNA target sequence
acaaaggtatttttgatggtg

SEQ ID NO: 229384 - DNA, 21 bp, Artificial sequence
  SiRNA target sequence
caaaggtatttttgatggtgt

SEQ ID NO: 229385 - DNA, 21 bp, Artificial sequence
  SiRNA target sequence
aaaggtatttttgatggtgta

SEQ ID NO: 229386 - DNA, 21 bp, Artificial sequence
  SiRNA target sequence
aaggtatttttgatggtgtat

SEQ ID NO: 229387 - DNA, 21 bp, Artificial sequence
  SiRNA target sequence
aggtatttttgatggtgtatt

SEQ ID NO: 229388 - DNA, 21 bp, Artificial sequence
  SiRNA target sequence
ggtatttttgatggtgtattt

SEQ ID NO: 229389 - DNA, 21 bp, Artificial sequence
  SiRNA target sequence
gtatttttgatggtgtatttg

SEQ ID NO: 229390 - DNA, 21 bp, Artificial sequence
  SiRNA target sequence
tatttttgatggtgtatttgg

SEQ ID NO: 229391 - DNA, 21 bp, Artificial sequence
  SiRNA target sequence
atttttgatggtgtatttggt

SEQ ID NO: 229392 - DNA, 21 bp, Artificial sequence
  SiRNA target sequence
tttttgatggtgtatttggta

SEQ ID NO: 229393 - DNA, 21 bp, Artificial sequence
  SiRNA target sequence
ttttgatggtgtatttggtaa

SEQ ID NO: 229394 - DNA, 21 bp, Artificial sequence
  SiRNA target sequence
tttgatggtgtatttggtaag

SEQ ID NO: 229395 - DNA, 21 bp, Artificial sequence
  SiRNA target sequence
ttgatggtgtatttggtaagc

SEQ ID NO: 229396 - DNA, 21 bp, Artificial sequence
  SiRNA target sequence
tgatggtgtatttggtaagct

SEQ ID NO: 229397 - DNA, 21 bp, Artificial sequence
  SiRNA target sequence
gatggtgtatttggtaagctg

SEQ ID NO: 229398 - DNA, 21 bp, Artificial sequence
  SiRNA target sequence
atggtgtatttggtaagctgg

SEQ ID NO: 229399 - DNA, 21 bp, Artificial sequence
  SiRNA target sequence
tggtgtatttggtaagctggg

SEQ ID NO: 229400 - DNA, 21 bp, Artificial sequence
  SiRNA target sequence
ggtgtatttggtaagctgggg

SEQ ID NO: 229401 - DNA, 21 bp, Artificial sequence
  SiRNA target sequence
gtgtatttggtaagctgggga

SEQ ID NO: 229402 - DNA, 21 bp, Artificial sequence
  SiRNA target sequence
tgtatttggtaagctggggaa

SEQ ID NO: 229403 - DNA, 21 bp, Artificial sequence
  SiRNA target sequence
gtatttggtaagctggggaaa

SEQ ID NO: 229404 - DNA, 21 bp, Artificial sequence
  SiRNA target sequence
tatttggtaagctggggaaat

SEQ ID NO: 229405 - DNA, 21 bp, Artificial sequence
  SiRNA target sequence
atttggtaagctggggaaatc

SEQ ID NO: 229406 - DNA, 21 bp, Artificial sequence
  SiRNA target sequence
tttggtaagctggggaaatct

SEQ ID NO: 229407 - DNA, 21 bp, Artificial sequence
  SiRNA target sequence
ttggtaagctggggaaatctt

SEQ ID NO: 229408 - DNA, 21 bp, Artificial sequence
  SiRNA target sequence
tggtaagctggggaaatcttt

SEQ ID NO: 229409 - DNA, 21 bp, Artificial sequence
  SiRNA target sequence
ggtaagctggggaaatctttt

SEQ ID NO: 229410 - DNA, 21 bp, Artificial sequence
  SiRNA target sequence
gtaagctggggaaatcttttg

SEQ ID NO: 229411 - DNA, 21 bp, Artificial sequence
  SiRNA target sequence
taagctggggaaatcttttgg

SEQ ID NO: 229412 - DNA, 21 bp, Artificial sequence
  SiRNA target sequence
aagctggggaaatcttttgga

SEQ ID NO: 229413 - DNA, 21 bp, Artificial sequence
  SiRNA target sequence
agctggggaaatcttttggat

SEQ ID NO: 229414 - DNA, 21 bp, Artificial sequence
  SiRNA target sequence
gctggggaaatcttttggatc

SEQ ID NO: 229415 - DNA, 21 bp, Artificial sequence
  SiRNA target sequence
ctggggaaatcttttggatca

SEQ ID NO: 229416 - DNA, 21 bp, Artificial sequence
  SiRNA target sequence
tggggaaatcttttggatcag

SEQ ID NO: 229417 - DNA, 21 bp, Artificial sequence
  SiRNA target sequence
ggggaaatcttttggatcagt

SEQ ID NO: 229418 - DNA, 21 bp, Artificial sequence
  SiRNA target sequence
gggaaatcttttggatcagtt

SEQ ID NO: 229419 - DNA, 21 bp, Artificial sequence
  SiRNA target sequence
ggaaatcttttggatcagttt

SEQ ID NO: 229420 - DNA, 21 bp, Artificial sequence
  SiRNA target sequence
gaaatcttttggatcagttta

SEQ ID NO: 229421 - DNA, 21 bp, Artificial sequence
  SiRNA target sequence
aaatcttttggatcagtttat

SEQ ID NO: 229422 - DNA, 21 bp, Artificial sequence
  SiRNA target sequence
aatcttttggatcagtttatg

SEQ ID NO: 229423 - DNA, 21 bp, Artificial sequence
  SiRNA target sequence
atcttttggatcagtttatgg

SEQ ID NO: 229424 - DNA, 21 bp, Artificial sequence
  SiRNA target sequence
tcttttggatcagtttatgga

SEQ ID NO: 229425 - DNA, 21 bp, Artificial sequence
  SiRNA target sequence
cttttggatcagtttatggat

SEQ ID NO: 229426 - DNA, 21 bp, Artificial sequence
  SiRNA target sequence
ttttggatcagtttatggatt

SEQ ID NO: 229427 - DNA, 21 bp, Artificial sequence
  SiRNA target sequence
tttggatcagtttatggattt

SEQ ID NO: 229428 - DNA, 21 bp, Artificial sequence
  SiRNA target sequence
ttggatcagtttatggattta

SEQ ID NO: 229429 - DNA, 21 bp, Artificial sequence
  SiRNA target sequence
tggatcagtttatggatttac

SEQ ID NO: 229430 - DNA, 21 bp, Artificial sequence
  SiRNA target sequence
ggatcagtttatggatttaca

SEQ ID NO: 229431 - DNA, 21 bp, Artificial sequence
  SiRNA target sequence
gatcagtttatggatttacaa

SEQ ID NO: 229432 - DNA, 21 bp, Artificial sequence
  SiRNA target sequence
atcagtttatggatttacaat

SEQ ID NO: 229433 - DNA, 21 bp, Artificial sequence
  SiRNA target sequence
tcagtttatggatttacaatt

SEQ ID NO: 229434 - DNA, 21 bp, Artificial sequence
  SiRNA target sequence
cagtttatggatttacaatta

SEQ ID NO: 229435 - DNA, 21 bp, Artificial sequence
  SiRNA target sequence
agtttatggatttacaattac

SEQ ID NO: 229436 - DNA, 21 bp, Artificial sequence
  SiRNA target sequence
gtttatggatttacaattact

SEQ ID NO: 229437 - DNA, 21 bp, Artificial sequence
  SiRNA target sequence
tttatggatttacaattacta

SEQ ID NO: 229438 - DNA, 21 bp, Artificial sequence
  SiRNA target sequence
ttatggatttacaattactac

SEQ ID NO: 229439 - DNA, 21 bp, Artificial sequence
  SiRNA target sequence
tatggatttacaattactaca

SEQ ID NO: 229440 - DNA, 21 bp, Artificial sequence
  SiRNA target sequence
atggatttacaattactacat

SEQ ID NO: 229441 - DNA, 21 bp, Artificial sequence
  SiRNA target sequence
tggatttacaattactacatt

SEQ ID NO: 229442 - DNA, 21 bp, Artificial sequence
  SiRNA target sequence
ggatttacaattactacatta

SEQ ID NO: 229443 - DNA, 21 bp, Artificial sequence
  SiRNA target sequence
gatttacaattactacattat

SEQ ID NO: 229444 - DNA, 21 bp, Artificial sequence
  SiRNA target sequence
atttacaattactacattatt

SEQ ID NO: 229445 - DNA, 21 bp, Artificial sequence
  SiRNA target sequence
tttacaattactacattatta

SEQ ID NO: 229446 - DNA, 21 bp, Artificial sequence
  SiRNA target sequence
ttacaattactacattattag

SEQ ID NO: 229447 - DNA, 21 bp, Artificial sequence
  SiRNA target sequence
tacaattactacattattagg

SEQ ID NO: 229448 - DNA, 21 bp, Artificial sequence
  SiRNA target sequence
acaattactacattattagga

SEQ ID NO: 229449 - DNA, 21 bp, Artificial sequence
  SiRNA target sequence
caattactacattattaggaa

SEQ ID NO: 229450 - DNA, 21 bp, Artificial sequence
  SiRNA target sequence
aattactacattattaggaac

SEQ ID NO: 229451 - DNA, 21 bp, Artificial sequence
  SiRNA target sequence
attactacattattaggaaca

SEQ ID NO: 229452 - DNA, 21 bp, Artificial sequence
  SiRNA target sequence
ttactacattattaggaacaa

SEQ ID NO: 229453 - DNA, 21 bp, Artificial sequence
  SiRNA target sequence
tactacattattaggaacaag

SEQ ID NO: 229454 - DNA, 21 bp, Artificial sequence
  SiRNA target sequence
actacattattaggaacaaga

SEQ ID NO: 229455 - DNA, 21 bp, Artificial sequence
  SiRNA target sequence
ctacattattaggaacaagag

SEQ ID NO: 229456 - DNA, 21 bp, Artificial sequence
  SiRNA target sequence
tacattattaggaacaagaga

SEQ ID NO: 229457 - DNA, 21 bp, Artificial sequence
  SiRNA target sequence
acattattaggaacaagagat

SEQ ID NO: 229458 - DNA, 21 bp, Artificial sequence
  SiRNA target sequence
cattattaggaacaagagatg

SEQ ID NO: 229459 - DNA, 21 bp, Artificial sequence
  SiRNA target sequence
attattaggaacaagagatgt

SEQ ID NO: 229460 - DNA, 21 bp, Artificial sequence
  SiRNA target sequence
ttattaggaacaagagatgtt

SEQ ID NO: 229461 - DNA, 21 bp, Artificial sequence
  SiRNA target sequence
tattaggaacaagagatgttc

SEQ ID NO: 229462 - DNA, 21 bp, Artificial sequence
  SiRNA target sequence
attaggaacaagagatgttcg

SEQ ID NO: 229463 - DNA, 21 bp, Artificial sequence
  SiRNA target sequence
ttaggaacaagagatgttcgt

SEQ ID NO: 229464 - DNA, 21 bp, Artificial sequence
  SiRNA target sequence
taggaacaagagatgttcgta

SEQ ID NO: 229465 - DNA, 21 bp, Artificial sequence
  SiRNA target sequence
aggaacaagagatgttcgtag

SEQ ID NO: 229466 - DNA, 21 bp, Artificial sequence
  SiRNA target sequence
ggaacaagagatgttcgtaga

SEQ ID NO: 229467 - DNA, 21 bp, Artificial sequence
  SiRNA target sequence
gaacaagagatgttcgtagag

SEQ ID NO: 229468 - DNA, 21 bp, Artificial sequence
  SiRNA target sequence
aacaagagatgttcgtagagg

SEQ ID NO: 229469 - DNA, 21 bp, Artificial sequence
  SiRNA target sequence
acaagagatgttcgtagaggt

SEQ ID NO: 229470 - DNA, 21 bp, Artificial sequence
  SiRNA target sequence
caagagatgttcgtagaggtg

SEQ ID NO: 229471 - DNA, 21 bp, Artificial sequence
  SiRNA target sequence
aagagatgttcgtagaggtgc

SEQ ID NO: 229472 - DNA, 21 bp, Artificial sequence
  SiRNA target sequence
agagatgttcgtagaggtgct

SEQ ID NO: 229473 - DNA, 21 bp, Artificial sequence
  SiRNA target sequence
gagatgttcgtagaggtgctc

SEQ ID NO: 229474 - DNA, 21 bp, Artificial sequence
  SiRNA target sequence
agatgttcgtagaggtgctcc

SEQ ID NO: 229475 - DNA, 21 bp, Artificial sequence
  SiRNA target sequence
gatgttcgtagaggtgctcct

SEQ ID NO: 229476 - DNA, 21 bp, Artificial sequence
  SiRNA target sequence
atgttcgtagaggtgctccta

SEQ ID NO: 229477 - DNA, 21 bp, Artificial sequence
  SiRNA target sequence
tgttcgtagaggtgctcctat

SEQ ID NO: 229478 - DNA, 21 bp, Artificial sequence
  SiRNA target sequence
gttcgtagaggtgctcctata

SEQ ID NO: 229479 - DNA, 21 bp, Artificial sequence
  SiRNA target sequence
ttcgtagaggtgctcctatat

SEQ ID NO: 229480 - DNA, 21 bp, Artificial sequence
  SiRNA target sequence
tcgtagaggtgctcctatatc

SEQ ID NO: 229481 - DNA, 21 bp, Artificial sequence
  SiRNA target sequence
cgtagaggtgctcctatatcg

SEQ ID NO: 229482 - DNA, 21 bp, Artificial sequence
  SiRNA target sequence
gtagaggtgctcctatatcgc

SEQ ID NO: 229483 - DNA, 21 bp, Artificial sequence
  SiRNA target sequence
tagaggtgctcctatatcgct

SEQ ID NO: 229484 - DNA, 21 bp, Artificial sequence
  SiRNA target sequence
agaggtgctcctatatcgctt

SEQ ID NO: 229485 - DNA, 21 bp, Artificial sequence
  SiRNA target sequence
gaggtgctcctatatcgcttt

SEQ ID NO: 229486 - DNA, 21 bp, Artificial sequence
  SiRNA target sequence
aggtgctcctatatcgctttg

SEQ ID NO: 229487 - DNA, 21 bp, Artificial sequence
  SiRNA target sequence
ggtgctcctatatcgctttgt

SEQ ID NO: 229488 - DNA, 21 bp, Artificial sequence
  SiRNA target sequence
gtgctcctatatcgctttgtg

SEQ ID NO: 229489 - DNA, 21 bp, Artificial sequence
  SiRNA target sequence
tgctcctatatcgctttgtgt

SEQ ID NO: 229490 - DNA, 21 bp, Artificial sequence
  SiRNA target sequence
gctcctatatcgctttgtgtt

SEQ ID NO: 229491 - DNA, 21 bp, Artificial sequence
  SiRNA target sequence
ctcctatatcgctttgtgttc

SEQ ID NO: 229492 - DNA, 21 bp, Artificial sequence
  SiRNA target sequence
tcctatatcgctttgtgttct

SEQ ID NO: 229493 - DNA, 21 bp, Artificial sequence
  SiRNA target sequence
cctatatcgctttgtgttcta

SEQ ID NO: 229494 - DNA, 21 bp, Artificial sequence
  SiRNA target sequence
ctatatcgctttgtgttctaa

SEQ ID NO: 229495 - DNA, 21 bp, Artificial sequence
  SiRNA target sequence
tatatcgctttgtgttctaat

SEQ ID NO: 229496 - DNA, 21 bp, Artificial sequence
  SiRNA target sequence
atatcgctttgtgttctaata

SEQ ID NO: 229497 - DNA, 21 bp, Artificial sequence
  SiRNA target sequence
tatcgctttgtgttctaatat

SEQ ID NO: 229498 - DNA, 21 bp, Artificial sequence
  SiRNA target sequence
atcgctttgtgttctaatatt

SEQ ID NO: 229499 - DNA, 21 bp, Artificial sequence
  SiRNA target sequence
tcgctttgtgttctaatattg

SEQ ID NO: 229500 - DNA, 21 bp, Artificial sequence
  SiRNA target sequence
cgctttgtgttctaatattgt

SEQ ID NO: 229501 - DNA, 21 bp, Artificial sequence
  SiRNA target sequence
gctttgtgttctaatattgtt

SEQ ID NO: 229502 - DNA, 21 bp, Artificial sequence
  SiRNA target sequence
ctttgtgttctaatattgttc

SEQ ID NO: 229503 - DNA, 21 bp, Artificial sequence
  SiRNA target sequence
tttgtgttctaatattgttct

SEQ ID NO: 229504 - DNA, 21 bp, Artificial sequence
  SiRNA target sequence
ttgtgttctaatattgttctg

SEQ ID NO: 229505 - DNA, 21 bp, Artificial sequence
  SiRNA target sequence
tgtgttctaatattgttctgc

SEQ ID NO: 229506 - DNA, 21 bp, Artificial sequence
  SiRNA target sequence
gtgttctaatattgttctgcc

SEQ ID NO: 229507 - DNA, 21 bp, Artificial sequence
  SiRNA target sequence
tgttctaatattgttctgcct

SEQ ID NO: 229508 - DNA, 21 bp, Artificial sequence
  SiRNA target sequence
gttctaatattgttctgcctt

SEQ ID NO: 229509 - DNA, 21 bp, Artificial sequence
  SiRNA target sequence
ttctaatattgttctgcctta

SEQ ID NO: 229510 - DNA, 21 bp, Artificial sequence
  SiRNA target sequence
tctaatattgttctgccttat

SEQ ID NO: 229511 - DNA, 21 bp, Artificial sequence
  SiRNA target sequence
ctaatattgttctgccttata

SEQ ID NO: 229512 - DNA, 21 bp, Artificial sequence
  SiRNA target sequence
taatattgttctgccttatat

SEQ ID NO: 229513 - DNA, 21 bp, Artificial sequence
  SiRNA target sequence
aatattgttctgccttatatg

SEQ ID NO: 229514 - DNA, 21 bp, Artificial sequence
  SiRNA target sequence
atattgttctgccttatatgg

SEQ ID NO: 229515 - DNA, 21 bp, Artificial sequence
  SiRNA target sequence
tattgttctgccttatatggt

SEQ ID NO: 229516 - DNA, 21 bp, Artificial sequence
  SiRNA target sequence
attgttctgccttatatggtt

SEQ ID NO: 229517 - DNA, 21 bp, Artificial sequence
  SiRNA target sequence
ttgttctgccttatatggttt

SEQ ID NO: 229518 - DNA, 21 bp, Artificial sequence
  SiRNA target sequence
tgttctgccttatatggtttt

SEQ ID NO: 229519 - DNA, 21 bp, Artificial sequence
  SiRNA target sequence
gttctgccttatatggtttta

SEQ ID NO: 229520 - DNA, 21 bp, Artificial sequence
  SiRNA target sequence
ttctgccttatatggttttat

SEQ ID NO: 229521 - DNA, 21 bp, Artificial sequence
  SiRNA target sequence
tctgccttatatggttttatt

SEQ ID NO: 229522 - DNA, 21 bp, Artificial sequence
  SiRNA target sequence
ctgccttatatggttttattc

SEQ ID NO: 229523 - DNA, 21 bp, Artificial sequence
  SiRNA target sequence
tgccttatatggttttattct

SEQ ID NO: 229524 - DNA, 21 bp, Artificial sequence
  SiRNA target sequence
gccttatatggttttattctg

SEQ ID NO: 229525 - DNA, 21 bp, Artificial sequence
  SiRNA target sequence
ccttatatggttttattctgt

SEQ ID NO: 229526 - DNA, 21 bp, Artificial sequence
  SiRNA target sequence
cttatatggttttattctgtt

SEQ ID NO: 229527 - DNA, 21 bp, Artificial sequence
  SiRNA target sequence
ttatatggttttattctgttt

SEQ ID NO: 229528 - DNA, 21 bp, Artificial sequence
  SiRNA target sequence
tatatggttttattctgtttt

SEQ ID NO: 229529 - DNA, 21 bp, Artificial sequence
  SiRNA target sequence
atatggttttattctgttttc

SEQ ID NO: 229530 - DNA, 21 bp, Artificial sequence
  SiRNA target sequence
tatggttttattctgttttct

SEQ ID NO: 229531 - DNA, 21 bp, Artificial sequence
  SiRNA target sequence
atggttttattctgttttcta

SEQ ID NO: 229532 - DNA, 21 bp, Artificial sequence
  SiRNA target sequence
tggttttattctgttttctat

SEQ ID NO: 229533 - DNA, 21 bp, Artificial sequence
  SiRNA target sequence
ggttttattctgttttctatc

SEQ ID NO: 229534 - DNA, 21 bp, Artificial sequence
  SiRNA target sequence
gttttattctgttttctatct

SEQ ID NO: 229535 - DNA, 21 bp, Artificial sequence
  SiRNA target sequence
ttttattctgttttctatctc

SEQ ID NO: 229536 - DNA, 21 bp, Artificial sequence
  SiRNA target sequence
tttattctgttttctatctca

SEQ ID NO: 229537 - DNA, 21 bp, Artificial sequence
  SiRNA target sequence
ttattctgttttctatctcaa

SEQ ID NO: 229538 - DNA, 21 bp, Artificial sequence
  SiRNA target sequence
tattctgttttctatctcaat

SEQ ID NO: 229539 - DNA, 21 bp, Artificial sequence
  SiRNA target sequence
attctgttttctatctcaata

SEQ ID NO: 229540 - DNA, 21 bp, Artificial sequence
  SiRNA target sequence
ttctgttttctatctcaatag

SEQ ID NO: 229541 - DNA, 21 bp, Artificial sequence
  SiRNA target sequence
tctgttttctatctcaataga

SEQ ID NO: 229542 - DNA, 21 bp, Artificial sequence
  SiRNA target sequence
ctgttttctatctcaatagaa

SEQ ID NO: 229543 - DNA, 21 bp, Artificial sequence
  SiRNA target sequence
tgttttctatctcaatagaaa

SEQ ID NO: 229544 - DNA, 21 bp, Artificial sequence
  SiRNA target sequence
gttttctatctcaatagaaaa

SEQ ID NO: 229545 - DNA, 21 bp, Artificial sequence
  SiRNA target sequence
ttttctatctcaatagaaaat

SEQ ID NO: 229546 - DNA, 21 bp, Artificial sequence
  SiRNA target sequence
tttctatctcaatagaaaata

SEQ ID NO: 229547 - DNA, 21 bp, Artificial sequence
  SiRNA target sequence
ttctatctcaatagaaaatat

SEQ ID NO: 229548 - DNA, 21 bp, Artificial sequence
  SiRNA target sequence
tctatctcaatagaaaatata

SEQ ID NO: 229549 - DNA, 21 bp, Artificial sequence
  SiRNA target sequence
ctatctcaatagaaaatataa

SEQ ID NO: 229550 - DNA, 21 bp, Artificial sequence
  SiRNA target sequence
tatctcaatagaaaatataaa

SEQ ID NO: 229551 - DNA, 21 bp, Artificial sequence
  SiRNA target sequence
atctcaatagaaaatataaag

SEQ ID NO: 229552 - DNA, 21 bp, Artificial sequence
  SiRNA target sequence
tctcaatagaaaatataaaga

SEQ ID NO: 229553 - DNA, 21 bp, Artificial sequence
  SiRNA target sequence
ctcaatagaaaatataaagaa

SEQ ID NO: 229554 - DNA, 21 bp, Artificial sequence
  SiRNA target sequence
tcaatagaaaatataaagaat

SEQ ID NO: 229555 - DNA, 21 bp, Artificial sequence
  SiRNA target sequence
caatagaaaatataaagaatc

SEQ ID NO: 229556 - DNA, 21 bp, Artificial sequence
  SiRNA target sequence
aatagaaaatataaagaatct

SEQ ID NO: 229557 - DNA, 21 bp, Artificial sequence
  SiRNA target sequence
atagaaaatataaagaatctg

SEQ ID NO: 229558 - DNA, 21 bp, Artificial sequence
  SiRNA target sequence
tagaaaatataaagaatctgt

SEQ ID NO: 229559 - DNA, 21 bp, Artificial sequence
  SiRNA target sequence
agaaaatataaagaatctgtc

SEQ ID NO: 229560 - DNA, 21 bp, Artificial sequence
  SiRNA target sequence
gaaaatataaagaatctgtcg

SEQ ID NO: 229561 - DNA, 21 bp, Artificial sequence
  SiRNA target sequence
aaaatataaagaatctgtcga

SEQ ID NO: 229562 - DNA, 21 bp, Artificial sequence
  SiRNA target sequence
aaatataaagaatctgtcgag

SEQ ID NO: 229563 - DNA, 21 bp, Artificial sequence
  SiRNA target sequence
aatataaagaatctgtcgaga

SEQ ID NO: 229564 - DNA, 21 bp, Artificial sequence
  SiRNA target sequence
atataaagaatctgtcgagaa

SEQ ID NO: 229565 - DNA, 21 bp, Artificial sequence
  SiRNA target sequence
tataaagaatctgtcgagaat

SEQ ID NO: 229566 - DNA, 21 bp, Artificial sequence
  SiRNA target sequence
ataaagaatctgtcgagaata

SEQ ID NO: 229567 - DNA, 21 bp, Artificial sequence
  SiRNA target sequence
taaagaatctgtcgagaataa

SEQ ID NO: 229568 - DNA, 21 bp, Artificial sequence
  SiRNA target sequence
aaagaatctgtcgagaataat

SEQ ID NO: 229569 - DNA, 21 bp, Artificial sequence
  SiRNA target sequence
aagaatctgtcgagaataatg

SEQ ID NO: 229570 - DNA, 21 bp, Artificial sequence
  SiRNA target sequence
agaatctgtcgagaataatgc

SEQ ID NO: 229571 - DNA, 21 bp, Artificial sequence
  SiRNA target sequence
gaatctgtcgagaataatgca

SEQ ID NO: 229572 - DNA, 21 bp, Artificial sequence
  SiRNA target sequence
aatctgtcgagaataatgcac

SEQ ID NO: 229573 - DNA, 21 bp, Artificial sequence
  SiRNA target sequence
atctgtcgagaataatgcacc

SEQ ID NO: 229574 - DNA, 21 bp, Artificial sequence
  SiRNA target sequence
tctgtcgagaataatgcacca

SEQ ID NO: 229575 - DNA, 21 bp, Artificial sequence
  SiRNA target sequence
ctgtcgagaataatgcaccaa

SEQ ID NO: 229576 - DNA, 21 bp, Artificial sequence
  SiRNA target sequence
tgtcgagaataatgcaccaat

SEQ ID NO: 229577 - DNA, 21 bp, Artificial sequence
  SiRNA target sequence
gtcgagaataatgcaccaatt

SEQ ID NO: 229578 - DNA, 21 bp, Artificial sequence
  SiRNA target sequence
tcgagaataatgcaccaattg

SEQ ID NO: 229579 - DNA, 21 bp, Artificial sequence
  SiRNA target sequence
cgagaataatgcaccaattga

SEQ ID NO: 229580 - DNA, 21 bp, Artificial sequence
  SiRNA target sequence
gagaataatgcaccaattgat

SEQ ID NO: 229581 - DNA, 21 bp, Artificial sequence
  SiRNA target sequence
agaataatgcaccaattgata

SEQ ID NO: 229582 - DNA, 21 bp, Artificial sequence
  SiRNA target sequence
gaataatgcaccaattgatat

SEQ ID NO: 229583 - DNA, 21 bp, Artificial sequence
  SiRNA target sequence
aataatgcaccaattgatatt

SEQ ID NO: 229584 - DNA, 21 bp, Artificial sequence
  SiRNA target sequence
ataatgcaccaattgatattg

SEQ ID NO: 229585 - DNA, 21 bp, Artificial sequence
  SiRNA target sequence
taatgcaccaattgatattga

SEQ ID NO: 229586 - DNA, 21 bp, Artificial sequence
  SiRNA target sequence
aatgcaccaattgatattgat

SEQ ID NO: 229587 - DNA, 21 bp, Artificial sequence
  SiRNA target sequence
atgcaccaattgatattgatt

SEQ ID NO: 229588 - DNA, 21 bp, Artificial sequence
  SiRNA target sequence
tgcaccaattgatattgattt

SEQ ID NO: 229589 - DNA, 21 bp, Artificial sequence
  SiRNA target sequence
gcaccaattgatattgattta

SEQ ID NO: 229590 - DNA, 21 bp, Artificial sequence
  SiRNA target sequence
caccaattgatattgatttat

SEQ ID NO: 229591 - DNA, 21 bp, Artificial sequence
  SiRNA target sequence
accaattgatattgatttatt

SEQ ID NO: 229592 - DNA, 21 bp, Artificial sequence
  SiRNA target sequence
ccaattgatattgatttattc

SEQ ID NO: 229593 - DNA, 21 bp, Artificial sequence
  SiRNA target sequence
caattgatattgatttattca

SEQ ID NO: 229594 - DNA, 21 bp, Artificial sequence
  SiRNA target sequence
aattgatattgatttattcac

SEQ ID NO: 229595 - DNA, 21 bp, Artificial sequence
  SiRNA target sequence
attgatattgatttattcact

SEQ ID NO: 229596 - DNA, 21 bp, Artificial sequence
  SiRNA target sequence
ttgatattgatttattcacta

SEQ ID NO: 229597 - DNA, 21 bp, Artificial sequence
  SiRNA target sequence
tgatattgatttattcactag

SEQ ID NO: 229598 - DNA, 21 bp, Artificial sequence
  SiRNA target sequence
gatattgatttattcactagt

SEQ ID NO: 229599 - DNA, 21 bp, Artificial sequence
  SiRNA target sequence
atattgatttattcactagtt

SEQ ID NO: 229600 - DNA, 21 bp, Artificial sequence
  SiRNA target sequence
tattgatttattcactagttc

SEQ ID NO: 229601 - DNA, 21 bp, Artificial sequence
  SiRNA target sequence
attgatttattcactagttca

SEQ ID NO: 229602 - DNA, 21 bp, Artificial sequence
  SiRNA target sequence
ttgatttattcactagttcaa

SEQ ID NO: 229603 - DNA, 21 bp, Artificial sequence
  SiRNA target sequence
tgatttattcactagttcaaa

SEQ ID NO: 229604 - DNA, 21 bp, Artificial sequence
  SiRNA target sequence
gatttattcactagttcaaaa

SEQ ID NO: 229605 - DNA, 21 bp, Artificial sequence
  SiRNA target sequence
atttattcactagttcaaaag

SEQ ID NO: 229606 - DNA, 21 bp, Artificial sequence
  SiRNA target sequence
tttattcactagttcaaaagt

SEQ ID NO: 229607 - DNA, 21 bp, Artificial sequence
  SiRNA target sequence
ttattcactagttcaaaagtc

SEQ ID NO: 229608 - DNA, 21 bp, Artificial sequence
  SiRNA target sequence
tattcactagttcaaaagtca

SEQ ID NO: 229609 - DNA, 21 bp, Artificial sequence
  SiRNA target sequence
attcactagttcaaaagtcaa

SEQ ID NO: 229610 - DNA, 21 bp, Artificial sequence
  SiRNA target sequence
ttcactagttcaaaagtcaag

SEQ ID NO: 229611 - DNA, 21 bp, Artificial sequence
  SiRNA target sequence
tcactagttcaaaagtcaagg

SEQ ID NO: 229612 - DNA, 21 bp, Artificial sequence
  SiRNA target sequence
cactagttcaaaagtcaaggc

SEQ ID NO: 229613 - DNA, 21 bp, Artificial sequence
  SiRNA target sequence
actagttcaaaagtcaaggca

SEQ ID NO: 229614 - DNA, 21 bp, Artificial sequence
  SiRNA target sequence
ctagttcaaaagtcaaggcac

SEQ ID NO: 229615 - DNA, 21 bp, Artificial sequence
  SiRNA target sequence
tagttcaaaagtcaaggcacc

SEQ ID NO: 229616 - DNA, 21 bp, Artificial sequence
  SiRNA target sequence
agttcaaaagtcaaggcacct

SEQ ID NO: 229617 - DNA, 21 bp, Artificial sequence
  SiRNA target sequence
gttcaaaagtcaaggcacctt

SEQ ID NO: 229618 - DNA, 21 bp, Artificial sequence
  SiRNA target sequence
ttcaaaagtcaaggcaccttc

SEQ ID NO: 229619 - DNA, 21 bp, Artificial sequence
  SiRNA target sequence
tcaaaagtcaaggcaccttct

SEQ ID NO: 229620 - DNA, 21 bp, Artificial sequence
  SiRNA target sequence
caaaagtcaaggcaccttctt

SEQ ID NO: 229621 - DNA, 21 bp, Artificial sequence
  SiRNA target sequence
aaaagtcaaggcaccttcttc

SEQ ID NO: 229622 - DNA, 21 bp, Artificial sequence
  SiRNA target sequence
aaagtcaaggcaccttcttct

SEQ ID NO: 229623 - DNA, 21 bp, Artificial sequence
  SiRNA target sequence
aagtcaaggcaccttcttctg

SEQ ID NO: 229624 - DNA, 21 bp, Artificial sequence
  SiRNA target sequence
agtcaaggcaccttcttctga

SEQ ID NO: 229625 - DNA, 21 bp, Artificial sequence
  SiRNA target sequence
gtcaaggcaccttcttctgaa

SEQ ID NO: 229626 - DNA, 21 bp, Artificial sequence
  SiRNA target sequence
tcaaggcaccttcttctgaac

SEQ ID NO: 229627 - DNA, 21 bp, Artificial sequence
  SiRNA target sequence
caaggcaccttcttctgaacc

SEQ ID NO: 229628 - DNA, 21 bp, Artificial sequence
  SiRNA target sequence
aaggcaccttcttctgaacct

SEQ ID NO: 229629 - DNA, 21 bp, Artificial sequence
  SiRNA target sequence
aggcaccttcttctgaaccta

SEQ ID NO: 229630 - DNA, 21 bp, Artificial sequence
  SiRNA target sequence
ggcaccttcttctgaacctac

SEQ ID NO: 229631 - DNA, 21 bp, Artificial sequence
  SiRNA target sequence
gcaccttcttctgaacctact

SEQ ID NO: 229632 - DNA, 21 bp, Artificial sequence
  SiRNA target sequence
caccttcttctgaacctactg

SEQ ID NO: 229633 - DNA, 21 bp, Artificial sequence
  SiRNA target sequence
accttcttctgaacctactgt

SEQ ID NO: 229634 - DNA, 21 bp, Artificial sequence
  SiRNA target sequence
ccttcttctgaacctactgtt

SEQ ID NO: 229635 - DNA, 21 bp, Artificial sequence
  SiRNA target sequence
cttcttctgaacctactgttg

SEQ ID NO: 229636 - DNA, 21 bp, Artificial sequence
  SiRNA target sequence
ttcttctgaacctactgttgc

SEQ ID NO: 229637 - DNA, 21 bp, Artificial sequence
  SiRNA target sequence
tcttctgaacctactgttgct

SEQ ID NO: 229638 - DNA, 21 bp, Artificial sequence
  SiRNA target sequence
cttctgaacctactgttgcta

SEQ ID NO: 229639 - DNA, 21 bp, Artificial sequence
  SiRNA target sequence
ttctgaacctactgttgctac

SEQ ID NO: 229640 - DNA, 21 bp, Artificial sequence
  SiRNA target sequence
tctgaacctactgttgctacc

SEQ ID NO: 229641 - DNA, 21 bp, Artificial sequence
  SiRNA target sequence
ctgaacctactgttgctacca

SEQ ID NO: 229642 - DNA, 21 bp, Artificial sequence
  SiRNA target sequence
tgaacctactgttgctaccaa

SEQ ID NO: 229643 - DNA, 21 bp, Artificial sequence
  SiRNA target sequence
gaacctactgttgctaccaaa

SEQ ID NO: 229644 - DNA, 21 bp, Artificial sequence
  SiRNA target sequence
aacctactgttgctaccaaaa

SEQ ID NO: 229645 - DNA, 21 bp, Artificial sequence
  SiRNA target sequence
acctactgttgctaccaaaag

SEQ ID NO: 229646 - DNA, 21 bp, Artificial sequence
  SiRNA target sequence
cctactgttgctaccaaaagt

SEQ ID NO: 229647 - DNA, 21 bp, Artificial sequence
  SiRNA target sequence
ctactgttgctaccaaaagtg

SEQ ID NO: 229648 - DNA, 21 bp, Artificial sequence
  SiRNA target sequence
tactgttgctaccaaaagtgt

SEQ ID NO: 229649 - DNA, 21 bp, Artificial sequence
  SiRNA target sequence
actgttgctaccaaaagtgtt

SEQ ID NO: 229650 - DNA, 21 bp, Artificial sequence
  SiRNA target sequence
ctgttgctaccaaaagtgtta

SEQ ID NO: 229651 - DNA, 21 bp, Artificial sequence
  SiRNA target sequence
tgttgctaccaaaagtgttac

SEQ ID NO: 229652 - DNA, 21 bp, Artificial sequence
  SiRNA target sequence
gttgctaccaaaagtgttact

SEQ ID NO: 229653 - DNA, 21 bp, Artificial sequence
  SiRNA target sequence
ttgctaccaaaagtgttacta

SEQ ID NO: 229654 - DNA, 21 bp, Artificial sequence
  SiRNA target sequence
tgctaccaaaagtgttactac

SEQ ID NO: 229655 - DNA, 21 bp, Artificial sequence
  SiRNA target sequence
gctaccaaaagtgttactaca

SEQ ID NO: 229656 - DNA, 21 bp, Artificial sequence
  SiRNA target sequence
ctaccaaaagtgttactacag

SEQ ID NO: 229657 - DNA, 21 bp, Artificial sequence
  SiRNA target sequence
taccaaaagtgttactacaga

SEQ ID NO: 229658 - DNA, 21 bp, Artificial sequence
  SiRNA target sequence
accaaaagtgttactacagaa

SEQ ID NO: 229659 - DNA, 21 bp, Artificial sequence
  SiRNA target sequence
ccaaaagtgttactacagaag

SEQ ID NO: 229660 - DNA, 21 bp, Artificial sequence
  SiRNA target sequence
caaaagtgttactacagaaga

SEQ ID NO: 229661 - DNA, 21 bp, Artificial sequence
  SiRNA target sequence
aaaagtgttactacagaagaa

SEQ ID NO: 229662 - DNA, 21 bp, Artificial sequence
  SiRNA target sequence
aaagtgttactacagaagaat

SEQ ID NO: 229663 - DNA, 21 bp, Artificial sequence
  SiRNA target sequence
aagtgttactacagaagaata

SEQ ID NO: 229664 - DNA, 21 bp, Artificial sequence
  SiRNA target sequence
agtgttactacagaagaataa

SEQ ID NO: 229665 - DNA, 22 bp, Artificial sequence
  SiRNA target sequence
atgtcagtagacaattcgaaag

SEQ ID NO: 229666 - DNA, 22 bp, Artificial sequence
  SiRNA target sequence
tgtcagtagacaattcgaaagt

SEQ ID NO: 229667 - DNA, 22 bp, Artificial sequence
  SiRNA target sequence
gtcagtagacaattcgaaagtt

SEQ ID NO: 229668 - DNA, 22 bp, Artificial sequence
  SiRNA target sequence
tcagtagacaattcgaaagttc

SEQ ID NO: 229669 - DNA, 22 bp, Artificial sequence
  SiRNA target sequence
cagtagacaattcgaaagttct

SEQ ID NO: 229670 - DNA, 22 bp, Artificial sequence
  SiRNA target sequence
agtagacaattcgaaagttcta

SEQ ID NO: 229671 - DNA, 22 bp, Artificial sequence
  SiRNA target sequence
gtagacaattcgaaagttctac

SEQ ID NO: 229672 - DNA, 22 bp, Artificial sequence
  SiRNA target sequence
tagacaattcgaaagttctaca

SEQ ID NO: 229673 - DNA, 22 bp, Artificial sequence
  SiRNA target sequence
agacaattcgaaagttctacaa

SEQ ID NO: 229674 - DNA, 22 bp, Artificial sequence
  SiRNA target sequence
gacaattcgaaagttctacaaa

SEQ ID NO: 229675 - DNA, 22 bp, Artificial sequence
  SiRNA target sequence
acaattcgaaagttctacaaaa

SEQ ID NO: 229676 - DNA, 22 bp, Artificial sequence
  SiRNA target sequence
caattcgaaagttctacaaaat

SEQ ID NO: 229677 - DNA, 22 bp, Artificial sequence
  SiRNA target sequence
aattcgaaagttctacaaaata

SEQ ID NO: 229678 - DNA, 22 bp, Artificial sequence
  SiRNA target sequence
attcgaaagttctacaaaataa

SEQ ID NO: 229679 - DNA, 22 bp, Artificial sequence
  SiRNA target sequence
ttcgaaagttctacaaaataac

SEQ ID NO: 229680 - DNA, 22 bp, Artificial sequence
  SiRNA target sequence
tcgaaagttctacaaaataacg

SEQ ID NO: 229681 - DNA, 22 bp, Artificial sequence
  SiRNA target sequence
cgaaagttctacaaaataacga

SEQ ID NO: 229682 - DNA, 22 bp, Artificial sequence
  SiRNA target sequence
gaaagttctacaaaataacgaa

SEQ ID NO: 229683 - DNA, 22 bp, Artificial sequence
  SiRNA target sequence
aaagttctacaaaataacgaaa

SEQ ID NO: 229684 - DNA, 22 bp, Artificial sequence
  SiRNA target sequence
aagttctacaaaataacgaaaa

SEQ ID NO: 229685 - DNA, 22 bp, Artificial sequence
  SiRNA target sequence
agttctacaaaataacgaaaac

SEQ ID NO: 229686 - DNA, 22 bp, Artificial sequence
  SiRNA target sequence
gttctacaaaataacgaaaact

SEQ ID NO: 229687 - DNA, 22 bp, Artificial sequence
  SiRNA target sequence
ttctacaaaataacgaaaactc

SEQ ID NO: 229688 - DNA, 22 bp, Artificial sequence
  SiRNA target sequence
tctacaaaataacgaaaactct

SEQ ID NO: 229689 - DNA, 22 bp, Artificial sequence
  SiRNA target sequence
ctacaaaataacgaaaactctg

SEQ ID NO: 229690 - DNA, 22 bp, Artificial sequence
  SiRNA target sequence
tacaaaataacgaaaactctgc

SEQ ID NO: 229691 - DNA, 22 bp, Artificial sequence
  SiRNA target sequence
acaaaataacgaaaactctgct

SEQ ID NO: 229692 - DNA, 22 bp, Artificial sequence
  SiRNA target sequence
caaaataacgaaaactctgctc

SEQ ID NO: 229693 - DNA, 22 bp, Artificial sequence
  SiRNA target sequence
aaaataacgaaaactctgctct

SEQ ID NO: 229694 - DNA, 22 bp, Artificial sequence
  SiRNA target sequence
aaataacgaaaactctgctctt

SEQ ID NO: 229695 - DNA, 22 bp, Artificial sequence
  SiRNA target sequence
aataacgaaaactctgctcttc

SEQ ID NO: 229696 - DNA, 22 bp, Artificial sequence
  SiRNA target sequence
ataacgaaaactctgctcttcc

SEQ ID NO: 229697 - DNA, 22 bp, Artificial sequence
  SiRNA target sequence
taacgaaaactctgctcttcct

SEQ ID NO: 229698 - DNA, 22 bp, Artificial sequence
  SiRNA target sequence
aacgaaaactctgctcttccta

SEQ ID NO: 229699 - DNA, 22 bp, Artificial sequence
  SiRNA target sequence
acgaaaactctgctcttcctac

SEQ ID NO: 229700 - DNA, 22 bp, Artificial sequence
  SiRNA target sequence
cgaaaactctgctcttcctaca

SEQ ID NO: 229701 - DNA, 22 bp, Artificial sequence
  SiRNA target sequence
gaaaactctgctcttcctacag

SEQ ID NO: 229702 - DNA, 22 bp, Artificial sequence
  SiRNA target sequence
aaaactctgctcttcctacaga

SEQ ID NO: 229703 - DNA, 22 bp, Artificial sequence
  SiRNA target sequence
aaactctgctcttcctacagaa

SEQ ID NO: 229704 - DNA, 22 bp, Artificial sequence
  SiRNA target sequence
aactctgctcttcctacagaag

SEQ ID NO: 229705 - DNA, 22 bp, Artificial sequence
  SiRNA target sequence
actctgctcttcctacagaaga

SEQ ID NO: 229706 - DNA, 22 bp, Artificial sequence
  SiRNA target sequence
ctctgctcttcctacagaagat

SEQ ID NO: 229707 - DNA, 22 bp, Artificial sequence
  SiRNA target sequence
tctgctcttcctacagaagatg

SEQ ID NO: 229708 - DNA, 22 bp, Artificial sequence
  SiRNA target sequence
ctgctcttcctacagaagatga

SEQ ID NO: 229709 - DNA, 22 bp, Artificial sequence
  SiRNA target sequence
tgctcttcctacagaagatgaa

SEQ ID NO: 229710 - DNA, 22 bp, Artificial sequence
  SiRNA target sequence
gctcttcctacagaagatgaaa

SEQ ID NO: 229711 - DNA, 22 bp, Artificial sequence
  SiRNA target sequence
ctcttcctacagaagatgaaat

SEQ ID NO: 229712 - DNA, 22 bp, Artificial sequence
  SiRNA target sequence
tcttcctacagaagatgaaatt

SEQ ID NO: 229713 - DNA, 22 bp, Artificial sequence
  SiRNA target sequence
cttcctacagaagatgaaattg

SEQ ID NO: 229714 - DNA, 22 bp, Artificial sequence
  SiRNA target sequence
ttcctacagaagatgaaattga

SEQ ID NO: 229715 - DNA, 22 bp, Artificial sequence
  SiRNA target sequence
tcctacagaagatgaaattgag

SEQ ID NO: 229716 - DNA, 22 bp, Artificial sequence
  SiRNA target sequence
cctacagaagatgaaattgagt

SEQ ID NO: 229717 - DNA, 22 bp, Artificial sequence
  SiRNA target sequence
ctacagaagatgaaattgagta

SEQ ID NO: 229718 - DNA, 22 bp, Artificial sequence
  SiRNA target sequence
tacagaagatgaaattgagtat

SEQ ID NO: 229719 - DNA, 22 bp, Artificial sequence
  SiRNA target sequence
acagaagatgaaattgagtatg

SEQ ID NO: 229720 - DNA, 22 bp, Artificial sequence
  SiRNA target sequence
cagaagatgaaattgagtatga

SEQ ID NO: 229721 - DNA, 22 bp, Artificial sequence
  SiRNA target sequence
agaagatgaaattgagtatgag

SEQ ID NO: 229722 - DNA, 22 bp, Artificial sequence
  SiRNA target sequence
gaagatgaaattgagtatgagg

SEQ ID NO: 229723 - DNA, 22 bp, Artificial sequence
  SiRNA target sequence
aagatgaaattgagtatgaggc

SEQ ID NO: 229724 - DNA, 22 bp, Artificial sequence
  SiRNA target sequence
agatgaaattgagtatgaggcc

SEQ ID NO: 229725 - DNA, 22 bp, Artificial sequence
  SiRNA target sequence
gatgaaattgagtatgaggcca

SEQ ID NO: 229726 - DNA, 22 bp, Artificial sequence
  SiRNA target sequence
atgaaattgagtatgaggccag

SEQ ID NO: 229727 - DNA, 22 bp, Artificial sequence
  SiRNA target sequence
tgaaattgagtatgaggccagc

SEQ ID NO: 229728 - DNA, 22 bp, Artificial sequence
  SiRNA target sequence
gaaattgagtatgaggccagca

SEQ ID NO: 229729 - DNA, 22 bp, Artificial sequence
  SiRNA target sequence
aaattgagtatgaggccagcaa

SEQ ID NO: 229730 - DNA, 22 bp, Artificial sequence
  SiRNA target sequence
aattgagtatgaggccagcaat

SEQ ID NO: 229731 - DNA, 22 bp, Artificial sequence
  SiRNA target sequence
attgagtatgaggccagcaatg

SEQ ID NO: 229732 - DNA, 22 bp, Artificial sequence
  SiRNA target sequence
ttgagtatgaggccagcaatgg

SEQ ID NO: 229733 - DNA, 22 bp, Artificial sequence
  SiRNA target sequence
tgagtatgaggccagcaatggt

SEQ ID NO: 229734 - DNA, 22 bp, Artificial sequence
  SiRNA target sequence
gagtatgaggccagcaatggtt

SEQ ID NO: 229735 - DNA, 22 bp, Artificial sequence
  SiRNA target sequence
agtatgaggccagcaatggttc

SEQ ID NO: 229736 - DNA, 22 bp, Artificial sequence
  SiRNA target sequence
gtatgaggccagcaatggttct

SEQ ID NO: 229737 - DNA, 22 bp, Artificial sequence
  SiRNA target sequence
tatgaggccagcaatggttctg

SEQ ID NO: 229738 - DNA, 22 bp, Artificial sequence
  SiRNA target sequence
atgaggccagcaatggttctgg

SEQ ID NO: 229739 - DNA, 22 bp, Artificial sequence
  SiRNA target sequence
tgaggccagcaatggttctggt

SEQ ID NO: 229740 - DNA, 22 bp, Artificial sequence
  SiRNA target sequence
gaggccagcaatggttctggta

SEQ ID NO: 229741 - DNA, 22 bp, Artificial sequence
  SiRNA target sequence
aggccagcaatggttctggtat

SEQ ID NO: 229742 - DNA, 22 bp, Artificial sequence
  SiRNA target sequence
ggccagcaatggttctggtata

SEQ ID NO: 229743 - DNA, 22 bp, Artificial sequence
  SiRNA target sequence
gccagcaatggttctggtatat

SEQ ID NO: 229744 - DNA, 22 bp, Artificial sequence
  SiRNA target sequence
ccagcaatggttctggtatata

SEQ ID NO: 229745 - DNA, 22 bp, Artificial sequence
  SiRNA target sequence
cagcaatggttctggtatatat

SEQ ID NO: 229746 - DNA, 22 bp, Artificial sequence
  SiRNA target sequence
agcaatggttctggtatatatt

SEQ ID NO: 229747 - DNA, 22 bp, Artificial sequence
  SiRNA target sequence
gcaatggttctggtatatattc

SEQ ID NO: 229748 - DNA, 22 bp, Artificial sequence
  SiRNA target sequence
caatggttctggtatatattca

SEQ ID NO: 229749 - DNA, 22 bp, Artificial sequence
  SiRNA target sequence
aatggttctggtatatattcac

SEQ ID NO: 229750 - DNA, 22 bp, Artificial sequence
  SiRNA target sequence
atggttctggtatatattcact

SEQ ID NO: 229751 - DNA, 22 bp, Artificial sequence
  SiRNA target sequence
tggttctggtatatattcactt

SEQ ID NO: 229752 - DNA, 22 bp, Artificial sequence
  SiRNA target sequence
ggttctggtatatattcactta

SEQ ID NO: 229753 - DNA, 22 bp, Artificial sequence
  SiRNA target sequence
gttctggtatatattcacttat

SEQ ID NO: 229754 - DNA, 22 bp, Artificial sequence
  SiRNA target sequence
ttctggtatatattcacttatt

SEQ ID NO: 229755 - DNA, 22 bp, Artificial sequence
  SiRNA target sequence
tctggtatatattcacttatta

SEQ ID NO: 229756 - DNA, 22 bp, Artificial sequence
  SiRNA target sequence
ctggtatatattcacttattag

SEQ ID NO: 229757 - DNA, 22 bp, Artificial sequence
  SiRNA target sequence
tggtatatattcacttattaga

SEQ ID NO: 229758 - DNA, 22 bp, Artificial sequence
  SiRNA target sequence
ggtatatattcacttattagag

SEQ ID NO: 229759 - DNA, 22 bp, Artificial sequence
  SiRNA target sequence
gtatatattcacttattagagt

SEQ ID NO: 229760 - DNA, 22 bp, Artificial sequence
  SiRNA target sequence
tatatattcacttattagagta

SEQ ID NO: 229761 - DNA, 22 bp, Artificial sequence
  SiRNA target sequence
atatattcacttattagagtag

SEQ ID NO: 229762 - DNA, 22 bp, Artificial sequence
  SiRNA target sequence
tatattcacttattagagtagc

SEQ ID NO: 229763 - DNA, 22 bp, Artificial sequence
  SiRNA target sequence
atattcacttattagagtagca

SEQ ID NO: 229764 - DNA, 22 bp, Artificial sequence
  SiRNA target sequence
tattcacttattagagtagcaa

SEQ ID NO: 229765 - DNA, 22 bp, Artificial sequence
  SiRNA target sequence
attcacttattagagtagcaaa

SEQ ID NO: 229766 - DNA, 22 bp, Artificial sequence
  SiRNA target sequence
ttcacttattagagtagcaaag

SEQ ID NO: 229767 - DNA, 22 bp, Artificial sequence
  SiRNA target sequence
tcacttattagagtagcaaagg

SEQ ID NO: 229768 - DNA, 22 bp, Artificial sequence
  SiRNA target sequence
cacttattagagtagcaaaggt

SEQ ID NO: 229769 - DNA, 22 bp, Artificial sequence
  SiRNA target sequence
acttattagagtagcaaaggtt

SEQ ID NO: 229770 - DNA, 22 bp, Artificial sequence
  SiRNA target sequence
cttattagagtagcaaaggttg

SEQ ID NO: 229771 - DNA, 22 bp, Artificial sequence
  SiRNA target sequence
ttattagagtagcaaaggttga

SEQ ID NO: 229772 - DNA, 22 bp, Artificial sequence
  SiRNA target sequence
tattagagtagcaaaggttgag

SEQ ID NO: 229773 - DNA, 22 bp, Artificial sequence
  SiRNA target sequence
attagagtagcaaaggttgaga

SEQ ID NO: 229774 - DNA, 22 bp, Artificial sequence
  SiRNA target sequence
ttagagtagcaaaggttgagag

SEQ ID NO: 229775 - DNA, 22 bp, Artificial sequence
  SiRNA target sequence
tagagtagcaaaggttgagaga

SEQ ID NO: 229776 - DNA, 22 bp, Artificial sequence
  SiRNA target sequence
agagtagcaaaggttgagagaa

SEQ ID NO: 229777 - DNA, 22 bp, Artificial sequence
  SiRNA target sequence
gagtagcaaaggttgagagaaa

SEQ ID NO: 229778 - DNA, 22 bp, Artificial sequence
  SiRNA target sequence
agtagcaaaggttgagagaaag

SEQ ID NO: 229779 - DNA, 22 bp, Artificial sequence
  SiRNA target sequence
gtagcaaaggttgagagaaaga

SEQ ID NO: 229780 - DNA, 22 bp, Artificial sequence
  SiRNA target sequence
tagcaaaggttgagagaaagat

SEQ ID NO: 229781 - DNA, 22 bp, Artificial sequence
  SiRNA target sequence
agcaaaggttgagagaaagatg

SEQ ID NO: 229782 - DNA, 22 bp, Artificial sequence
  SiRNA target sequence
gcaaaggttgagagaaagatgt

SEQ ID NO: 229783 - DNA, 22 bp, Artificial sequence
  SiRNA target sequence
caaaggttgagagaaagatgtt

SEQ ID NO: 229784 - DNA, 22 bp, Artificial sequence
  SiRNA target sequence
aaaggttgagagaaagatgttt

SEQ ID NO: 229785 - DNA, 22 bp, Artificial sequence
  SiRNA target sequence
aaggttgagagaaagatgtttt

SEQ ID NO: 229786 - DNA, 22 bp, Artificial sequence
  SiRNA target sequence
aggttgagagaaagatgttttg

SEQ ID NO: 229787 - DNA, 22 bp, Artificial sequence
  SiRNA target sequence
ggttgagagaaagatgttttgg

SEQ ID NO: 229788 - DNA, 22 bp, Artificial sequence
  SiRNA target sequence
gttgagagaaagatgttttgga

SEQ ID NO: 229789 - DNA, 22 bp, Artificial sequence
  SiRNA target sequence
ttgagagaaagatgttttggat

SEQ ID NO: 229790 - DNA, 22 bp, Artificial sequence
  SiRNA target sequence
tgagagaaagatgttttggatc

SEQ ID NO: 229791 - DNA, 22 bp, Artificial sequence
  SiRNA target sequence
gagagaaagatgttttggatca

SEQ ID NO: 229792 - DNA, 22 bp, Artificial sequence
  SiRNA target sequence
agagaaagatgttttggatcat

SEQ ID NO: 229793 - DNA, 22 bp, Artificial sequence
  SiRNA target sequence
gagaaagatgttttggatcatg

SEQ ID NO: 229794 - DNA, 22 bp, Artificial sequence
  SiRNA target sequence
agaaagatgttttggatcatgg

SEQ ID NO: 229795 - DNA, 22 bp, Artificial sequence
  SiRNA target sequence
gaaagatgttttggatcatggc

SEQ ID NO: 229796 - DNA, 22 bp, Artificial sequence
  SiRNA target sequence
aaagatgttttggatcatggca

SEQ ID NO: 229797 - DNA, 22 bp, Artificial sequence
  SiRNA target sequence
aagatgttttggatcatggcag

SEQ ID NO: 229798 - DNA, 22 bp, Artificial sequence
  SiRNA target sequence
agatgttttggatcatggcagc

SEQ ID NO: 229799 - DNA, 22 bp, Artificial sequence
  SiRNA target sequence
gatgttttggatcatggcagct

SEQ ID NO: 229800 - DNA, 22 bp, Artificial sequence
  SiRNA target sequence
atgttttggatcatggcagcta

SEQ ID NO: 229801 - DNA, 22 bp, Artificial sequence
  SiRNA target sequence
tgttttggatcatggcagctat

SEQ ID NO: 229802 - DNA, 22 bp, Artificial sequence
  SiRNA target sequence
gttttggatcatggcagctatg

SEQ ID NO: 229803 - DNA, 22 bp, Artificial sequence
  SiRNA target sequence
ttttggatcatggcagctatgt

SEQ ID NO: 229804 - DNA, 22 bp, Artificial sequence
  SiRNA target sequence
tttggatcatggcagctatgtt

SEQ ID NO: 229805 - DNA, 22 bp, Artificial sequence
  SiRNA target sequence
ttggatcatggcagctatgttc

SEQ ID NO: 229806 - DNA, 22 bp, Artificial sequence
  SiRNA target sequence
tggatcatggcagctatgttct

SEQ ID NO: 229807 - DNA, 22 bp, Artificial sequence
  SiRNA target sequence
ggatcatggcagctatgttctt

SEQ ID NO: 229808 - DNA, 22 bp, Artificial sequence
  SiRNA target sequence
gatcatggcagctatgttcttt

SEQ ID NO: 229809 - DNA, 22 bp, Artificial sequence
  SiRNA target sequence
atcatggcagctatgttcttta

SEQ ID NO: 229810 - DNA, 22 bp, Artificial sequence
  SiRNA target sequence
tcatggcagctatgttctttat

SEQ ID NO: 229811 - DNA, 22 bp, Artificial sequence
  SiRNA target sequence
catggcagctatgttctttatt

SEQ ID NO: 229812 - DNA, 22 bp, Artificial sequence
  SiRNA target sequence
atggcagctatgttctttatta

SEQ ID NO: 229813 - DNA, 22 bp, Artificial sequence
  SiRNA target sequence
tggcagctatgttctttattat

SEQ ID NO: 229814 - DNA, 22 bp, Artificial sequence
  SiRNA target sequence
ggcagctatgttctttattatc

SEQ ID NO: 229815 - DNA, 22 bp, Artificial sequence
  SiRNA target sequence
gcagctatgttctttattatct

SEQ ID NO: 229816 - DNA, 22 bp, Artificial sequence
  SiRNA target sequence
cagctatgttctttattatctc

SEQ ID NO: 229817 - DNA, 22 bp, Artificial sequence
  SiRNA target sequence
agctatgttctttattatctcc

SEQ ID NO: 229818 - DNA, 22 bp, Artificial sequence
  SiRNA target sequence
gctatgttctttattatctcct

SEQ ID NO: 229819 - DNA, 22 bp, Artificial sequence
  SiRNA target sequence
ctatgttctttattatctcctt

SEQ ID NO: 229820 - DNA, 22 bp, Artificial sequence
  SiRNA target sequence
tatgttctttattatctccttt

SEQ ID NO: 229821 - DNA, 22 bp, Artificial sequence
  SiRNA target sequence
atgttctttattatctccttta

SEQ ID NO: 229822 - DNA, 22 bp, Artificial sequence
  SiRNA target sequence
tgttctttattatctcctttat

SEQ ID NO: 229823 - DNA, 22 bp, Artificial sequence
  SiRNA target sequence
gttctttattatctcctttatt

SEQ ID NO: 229824 - DNA, 22 bp, Artificial sequence
  SiRNA target sequence
ttctttattatctcctttattt

SEQ ID NO: 229825 - DNA, 22 bp, Artificial sequence
  SiRNA target sequence
tctttattatctcctttattta

SEQ ID NO: 229826 - DNA, 22 bp, Artificial sequence
  SiRNA target sequence
ctttattatctcctttatttat

SEQ ID NO: 229827 - DNA, 22 bp, Artificial sequence
  SiRNA target sequence
tttattatctcctttatttatt

SEQ ID NO: 229828 - DNA, 22 bp, Artificial sequence
  SiRNA target sequence
ttattatctcctttatttattc

SEQ ID NO: 229829 - DNA, 22 bp, Artificial sequence
  SiRNA target sequence
tattatctcctttatttattcg

SEQ ID NO: 229830 - DNA, 22 bp, Artificial sequence
  SiRNA target sequence
attatctcctttatttattcgg

SEQ ID NO: 229831 - DNA, 22 bp, Artificial sequence
  SiRNA target sequence
ttatctcctttatttattcggt

SEQ ID NO: 229832 - DNA, 22 bp, Artificial sequence
  SiRNA target sequence
tatctcctttatttattcggtg

SEQ ID NO: 229833 - DNA, 22 bp, Artificial sequence
  SiRNA target sequence
atctcctttatttattcggtgg

SEQ ID NO: 229834 - DNA, 22 bp, Artificial sequence
  SiRNA target sequence
tctcctttatttattcggtggc

SEQ ID NO: 229835 - DNA, 22 bp, Artificial sequence
  SiRNA target sequence
ctcctttatttattcggtggct

SEQ ID NO: 229836 - DNA, 22 bp, Artificial sequence
  SiRNA target sequence
tcctttatttattcggtggcta

SEQ ID NO: 229837 - DNA, 22 bp, Artificial sequence
  SiRNA target sequence
cctttatttattcggtggctag

SEQ ID NO: 229838 - DNA, 22 bp, Artificial sequence
  SiRNA target sequence
ctttatttattcggtggctaga

SEQ ID NO: 229839 - DNA, 22 bp, Artificial sequence
  SiRNA target sequence
tttatttattcggtggctagag

SEQ ID NO: 229840 - DNA, 22 bp, Artificial sequence
  SiRNA target sequence
ttatttattcggtggctagagt

SEQ ID NO: 229841 - DNA, 22 bp, Artificial sequence
  SiRNA target sequence
tatttattcggtggctagagtg

SEQ ID NO: 229842 - DNA, 22 bp, Artificial sequence
  SiRNA target sequence
atttattcggtggctagagtgc

SEQ ID NO: 229843 - DNA, 22 bp, Artificial sequence
  SiRNA target sequence
tttattcggtggctagagtgct

SEQ ID NO: 229844 - DNA, 22 bp, Artificial sequence
  SiRNA target sequence
ttattcggtggctagagtgctt

SEQ ID NO: 229845 - DNA, 22 bp, Artificial sequence
  SiRNA target sequence
tattcggtggctagagtgctta

SEQ ID NO: 229846 - DNA, 22 bp, Artificial sequence
  SiRNA target sequence
attcggtggctagagtgcttaa

SEQ ID NO: 229847 - DNA, 22 bp, Artificial sequence
  SiRNA target sequence
ttcggtggctagagtgcttaaa

SEQ ID NO: 229848 - DNA, 22 bp, Artificial sequence
  SiRNA target sequence
tcggtggctagagtgcttaaag

SEQ ID NO: 229849 - DNA, 22 bp, Artificial sequence
  SiRNA target sequence
cggtggctagagtgcttaaaga

SEQ ID NO: 229850 - DNA, 22 bp, Artificial sequence
  SiRNA target sequence
ggtggctagagtgcttaaagat

SEQ ID NO: 229851 - DNA, 22 bp, Artificial sequence
  SiRNA target sequence
gtggctagagtgcttaaagatg

SEQ ID NO: 229852 - DNA, 22 bp, Artificial sequence
  SiRNA target sequence
tggctagagtgcttaaagatgc

SEQ ID NO: 229853 - DNA, 22 bp, Artificial sequence
  SiRNA target sequence
ggctagagtgcttaaagatgcc

SEQ ID NO: 229854 - DNA, 22 bp, Artificial sequence
  SiRNA target sequence
gctagagtgcttaaagatgccg

SEQ ID NO: 229855 - DNA, 22 bp, Artificial sequence
  SiRNA target sequence
ctagagtgcttaaagatgccgc

SEQ ID NO: 229856 - DNA, 22 bp, Artificial sequence
  SiRNA target sequence
tagagtgcttaaagatgccgct

SEQ ID NO: 229857 - DNA, 22 bp, Artificial sequence
  SiRNA target sequence
agagtgcttaaagatgccgctg

SEQ ID NO: 229858 - DNA, 22 bp, Artificial sequence
  SiRNA target sequence
gagtgcttaaagatgccgctgt

SEQ ID NO: 229859 - DNA, 22 bp, Artificial sequence
  SiRNA target sequence
agtgcttaaagatgccgctgtt

SEQ ID NO: 229860 - DNA, 22 bp, Artificial sequence
  SiRNA target sequence
gtgcttaaagatgccgctgtta

SEQ ID NO: 229861 - DNA, 22 bp, Artificial sequence
  SiRNA target sequence
tgcttaaagatgccgctgttat

SEQ ID NO: 229862 - DNA, 22 bp, Artificial sequence
  SiRNA target sequence
gcttaaagatgccgctgttatt

SEQ ID NO: 229863 - DNA, 22 bp, Artificial sequence
  SiRNA target sequence
cttaaagatgccgctgttattg

SEQ ID NO: 229864 - DNA, 22 bp, Artificial sequence
  SiRNA target sequence
ttaaagatgccgctgttattgg

SEQ ID NO: 229865 - DNA, 22 bp, Artificial sequence
  SiRNA target sequence
taaagatgccgctgttattggt

SEQ ID NO: 229866 - DNA, 22 bp, Artificial sequence
  SiRNA target sequence
aaagatgccgctgttattggta

SEQ ID NO: 229867 - DNA, 22 bp, Artificial sequence
  SiRNA target sequence
aagatgccgctgttattggtaa

SEQ ID NO: 229868 - DNA, 22 bp, Artificial sequence
  SiRNA target sequence
agatgccgctgttattggtaaa

SEQ ID NO: 229869 - DNA, 22 bp, Artificial sequence
  SiRNA target sequence
gatgccgctgttattggtaaac

SEQ ID NO: 229870 - DNA, 22 bp, Artificial sequence
  SiRNA target sequence
atgccgctgttattggtaaaca

SEQ ID NO: 229871 - DNA, 22 bp, Artificial sequence
  SiRNA target sequence
tgccgctgttattggtaaacaa

SEQ ID NO: 229872 - DNA, 22 bp, Artificial sequence
  SiRNA target sequence
gccgctgttattggtaaacaac

SEQ ID NO: 229873 - DNA, 22 bp, Artificial sequence
  SiRNA target sequence
ccgctgttattggtaaacaact

SEQ ID NO: 229874 - DNA, 22 bp, Artificial sequence
  SiRNA target sequence
cgctgttattggtaaacaactc

SEQ ID NO: 229875 - DNA, 22 bp, Artificial sequence
  SiRNA target sequence
gctgttattggtaaacaactcc

SEQ ID NO: 229876 - DNA, 22 bp, Artificial sequence
  SiRNA target sequence
ctgttattggtaaacaactccc

SEQ ID NO: 229877 - DNA, 22 bp, Artificial sequence
  SiRNA target sequence
tgttattggtaaacaactccca

SEQ ID NO: 229878 - DNA, 22 bp, Artificial sequence
  SiRNA target sequence
gttattggtaaacaactcccag

SEQ ID NO: 229879 - DNA, 22 bp, Artificial sequence
  SiRNA target sequence
ttattggtaaacaactcccagc

SEQ ID NO: 229880 - DNA, 22 bp, Artificial sequence
  SiRNA target sequence
tattggtaaacaactcccagcg

SEQ ID NO: 229881 - DNA, 22 bp, Artificial sequence
  SiRNA target sequence
attggtaaacaactcccagcgt

SEQ ID NO: 229882 - DNA, 22 bp, Artificial sequence
  SiRNA target sequence
ttggtaaacaactcccagcgtc

SEQ ID NO: 229883 - DNA, 22 bp, Artificial sequence
  SiRNA target sequence
tggtaaacaactcccagcgtca

SEQ ID NO: 229884 - DNA, 22 bp, Artificial sequence
  SiRNA target sequence
ggtaaacaactcccagcgtcaa

SEQ ID NO: 229885 - DNA, 22 bp, Artificial sequence
  SiRNA target sequence
gtaaacaactcccagcgtcaat

SEQ ID NO: 229886 - DNA, 22 bp, Artificial sequence
  SiRNA target sequence
taaacaactcccagcgtcaatt

SEQ ID NO: 229887 - DNA, 22 bp, Artificial sequence
  SiRNA target sequence
aaacaactcccagcgtcaattt

SEQ ID NO: 229888 - DNA, 22 bp, Artificial sequence
  SiRNA target sequence
aacaactcccagcgtcaatttt

SEQ ID NO: 229889 - DNA, 22 bp, Artificial sequence
  SiRNA target sequence
acaactcccagcgtcaattttc

SEQ ID NO: 229890 - DNA, 22 bp, Artificial sequence
  SiRNA target sequence
caactcccagcgtcaattttct

SEQ ID NO: 229891 - DNA, 22 bp, Artificial sequence
  SiRNA target sequence
aactcccagcgtcaattttctt

SEQ ID NO: 229892 - DNA, 22 bp, Artificial sequence
  SiRNA target sequence
actcccagcgtcaattttcttt

SEQ ID NO: 229893 - DNA, 22 bp, Artificial sequence
  SiRNA target sequence
ctcccagcgtcaattttctttt

SEQ ID NO: 229894 - DNA, 22 bp, Artificial sequence
  SiRNA target sequence
tcccagcgtcaattttcttttt

SEQ ID NO: 229895 - DNA, 22 bp, Artificial sequence
  SiRNA target sequence
cccagcgtcaattttctttttg

SEQ ID NO: 229896 - DNA, 22 bp, Artificial sequence
  SiRNA target sequence
ccagcgtcaattttctttttga

SEQ ID NO: 229897 - DNA, 22 bp, Artificial sequence
  SiRNA target sequence
cagcgtcaattttctttttgaa

SEQ ID NO: 229898 - DNA, 22 bp, Artificial sequence
  SiRNA target sequence
agcgtcaattttctttttgaaa

SEQ ID NO: 229899 - DNA, 22 bp, Artificial sequence
  SiRNA target sequence
gcgtcaattttctttttgaaat

SEQ ID NO: 229900 - DNA, 22 bp, Artificial sequence
  SiRNA target sequence
cgtcaattttctttttgaaatt

SEQ ID NO: 229901 - DNA, 22 bp, Artificial sequence
  SiRNA target sequence
gtcaattttctttttgaaattt

SEQ ID NO: 229902 - DNA, 22 bp, Artificial sequence
  SiRNA target sequence
tcaattttctttttgaaatttg

SEQ ID NO: 229903 - DNA, 22 bp, Artificial sequence
  SiRNA target sequence
caattttctttttgaaatttgt

SEQ ID NO: 229904 - DNA, 22 bp, Artificial sequence
  SiRNA target sequence
aattttctttttgaaatttgtt

SEQ ID NO: 229905 - DNA, 22 bp, Artificial sequence
  SiRNA target sequence
attttctttttgaaatttgtta

SEQ ID NO: 229906 - DNA, 22 bp, Artificial sequence
  SiRNA target sequence
ttttctttttgaaatttgttat

SEQ ID NO: 229907 - DNA, 22 bp, Artificial sequence
  SiRNA target sequence
tttctttttgaaatttgttatt

SEQ ID NO: 229908 - DNA, 22 bp, Artificial sequence
  SiRNA target sequence
ttctttttgaaatttgttatta

SEQ ID NO: 229909 - DNA, 22 bp, Artificial sequence
  SiRNA target sequence
tctttttgaaatttgttattat

SEQ ID NO: 229910 - DNA, 22 bp, Artificial sequence
  SiRNA target sequence
ctttttgaaatttgttattatc

SEQ ID NO: 229911 - DNA, 22 bp, Artificial sequence
  SiRNA target sequence
tttttgaaatttgttattatcc

SEQ ID NO: 229912 - DNA, 22 bp, Artificial sequence
  SiRNA target sequence
ttttgaaatttgttattatcct

SEQ ID NO: 229913 - DNA, 22 bp, Artificial sequence
  SiRNA target sequence
tttgaaatttgttattatcctt

SEQ ID NO: 229914 - DNA, 22 bp, Artificial sequence
  SiRNA target sequence
ttgaaatttgttattatccttc

SEQ ID NO: 229915 - DNA, 22 bp, Artificial sequence
  SiRNA target sequence
tgaaatttgttattatccttcc

SEQ ID NO: 229916 - DNA, 22 bp, Artificial sequence
  SiRNA target sequence
gaaatttgttattatccttccg

SEQ ID NO: 229917 - DNA, 22 bp, Artificial sequence
  SiRNA target sequence
aaatttgttattatccttccgt

SEQ ID NO: 229918 - DNA, 22 bp, Artificial sequence
  SiRNA target sequence
aatttgttattatccttccgtt

SEQ ID NO: 229919 - DNA, 22 bp, Artificial sequence
  SiRNA target sequence
atttgttattatccttccgttc

SEQ ID NO: 229920 - DNA, 22 bp, Artificial sequence
  SiRNA target sequence
tttgttattatccttccgttct

SEQ ID NO: 229921 - DNA, 22 bp, Artificial sequence
  SiRNA target sequence
ttgttattatccttccgttctc

SEQ ID NO: 229922 - DNA, 22 bp, Artificial sequence
  SiRNA target sequence
tgttattatccttccgttctca

SEQ ID NO: 229923 - DNA, 22 bp, Artificial sequence
  SiRNA target sequence
gttattatccttccgttctcat

SEQ ID NO: 229924 - DNA, 22 bp, Artificial sequence
  SiRNA target sequence
ttattatccttccgttctcatt

SEQ ID NO: 229925 - DNA, 22 bp, Artificial sequence
  SiRNA target sequence
tattatccttccgttctcattt

SEQ ID NO: 229926 - DNA, 22 bp, Artificial sequence
  SiRNA target sequence
attatccttccgttctcattta

SEQ ID NO: 229927 - DNA, 22 bp, Artificial sequence
  SiRNA target sequence
ttatccttccgttctcatttat

SEQ ID NO: 229928 - DNA, 22 bp, Artificial sequence
  SiRNA target sequence
tatccttccgttctcatttatt

SEQ ID NO: 229929 - DNA, 22 bp, Artificial sequence
  SiRNA target sequence
atccttccgttctcatttattt

SEQ ID NO: 229930 - DNA, 22 bp, Artificial sequence
  SiRNA target sequence
tccttccgttctcatttatttc

SEQ ID NO: 229931 - DNA, 22 bp, Artificial sequence
  SiRNA target sequence
ccttccgttctcatttatttca

SEQ ID NO: 229932 - DNA, 22 bp, Artificial sequence
  SiRNA target sequence
cttccgttctcatttatttcag

SEQ ID NO: 229933 - DNA, 22 bp, Artificial sequence
  SiRNA target sequence
ttccgttctcatttatttcagt

SEQ ID NO: 229934 - DNA, 22 bp, Artificial sequence
  SiRNA target sequence
tccgttctcatttatttcagta

SEQ ID NO: 229935 - DNA, 22 bp, Artificial sequence
  SiRNA target sequence
ccgttctcatttatttcagtag

SEQ ID NO: 229936 - DNA, 22 bp, Artificial sequence
  SiRNA target sequence
cgttctcatttatttcagtagg

SEQ ID NO: 229937 - DNA, 22 bp, Artificial sequence
  SiRNA target sequence
gttctcatttatttcagtaggt

SEQ ID NO: 229938 - DNA, 22 bp, Artificial sequence
  SiRNA target sequence
ttctcatttatttcagtaggta

SEQ ID NO: 229939 - DNA, 22 bp, Artificial sequence
  SiRNA target sequence
tctcatttatttcagtaggtat

SEQ ID NO: 229940 - DNA, 22 bp, Artificial sequence
  SiRNA target sequence
ctcatttatttcagtaggtatt

SEQ ID NO: 229941 - DNA, 22 bp, Artificial sequence
  SiRNA target sequence
tcatttatttcagtaggtatta

SEQ ID NO: 229942 - DNA, 22 bp, Artificial sequence
  SiRNA target sequence
catttatttcagtaggtattat

SEQ ID NO: 229943 - DNA, 22 bp, Artificial sequence
  SiRNA target sequence
atttatttcagtaggtattatt

SEQ ID NO: 229944 - DNA, 22 bp, Artificial sequence
  SiRNA target sequence
tttatttcagtaggtattattc

SEQ ID NO: 229945 - DNA, 22 bp, Artificial sequence
  SiRNA target sequence
ttatttcagtaggtattattca

SEQ ID NO: 229946 - DNA, 22 bp, Artificial sequence
  SiRNA target sequence
tatttcagtaggtattattcag

SEQ ID NO: 229947 - DNA, 22 bp, Artificial sequence
  SiRNA target sequence
atttcagtaggtattattcaga

SEQ ID NO: 229948 - DNA, 22 bp, Artificial sequence
  SiRNA target sequence
tttcagtaggtattattcagaa

SEQ ID NO: 229949 - DNA, 22 bp, Artificial sequence
  SiRNA target sequence
ttcagtaggtattattcagaaa

SEQ ID NO: 229950 - DNA, 22 bp, Artificial sequence
  SiRNA target sequence
tcagtaggtattattcagaaag

SEQ ID NO: 229951 - DNA, 22 bp, Artificial sequence
  SiRNA target sequence
cagtaggtattattcagaaagc

SEQ ID NO: 229952 - DNA, 22 bp, Artificial sequence
  SiRNA target sequence
agtaggtattattcagaaagct

SEQ ID NO: 229953 - DNA, 22 bp, Artificial sequence
  SiRNA target sequence
gtaggtattattcagaaagctt

SEQ ID NO: 229954 - DNA, 22 bp, Artificial sequence
  SiRNA target sequence
taggtattattcagaaagcttt

SEQ ID NO: 229955 - DNA, 22 bp, Artificial sequence
  SiRNA target sequence
aggtattattcagaaagcttta

SEQ ID NO: 229956 - DNA, 22 bp, Artificial sequence
  SiRNA target sequence
ggtattattcagaaagctttag

SEQ ID NO: 229957 - DNA, 22 bp, Artificial sequence
  SiRNA target sequence
gtattattcagaaagctttaga

SEQ ID NO: 229958 - DNA, 22 bp, Artificial sequence
  SiRNA target sequence
tattattcagaaagctttagat

SEQ ID NO: 229959 - DNA, 22 bp, Artificial sequence
  SiRNA target sequence
attattcagaaagctttagata

SEQ ID NO: 229960 - DNA, 22 bp, Artificial sequence
  SiRNA target sequence
ttattcagaaagctttagataa

SEQ ID NO: 229961 - DNA, 22 bp, Artificial sequence
  SiRNA target sequence
tattcagaaagctttagataaa

SEQ ID NO: 229962 - DNA, 22 bp, Artificial sequence
  SiRNA target sequence
attcagaaagctttagataaat

SEQ ID NO: 229963 - DNA, 22 bp, Artificial sequence
  SiRNA target sequence
ttcagaaagctttagataaata

SEQ ID NO: 229964 - DNA, 22 bp, Artificial sequence
  SiRNA target sequence
tcagaaagctttagataaatat

SEQ ID NO: 229965 - DNA, 22 bp, Artificial sequence
  SiRNA target sequence
cagaaagctttagataaatatc

SEQ ID NO: 229966 - DNA, 22 bp, Artificial sequence
  SiRNA target sequence
agaaagctttagataaatatcc

SEQ ID NO: 229967 - DNA, 22 bp, Artificial sequence
  SiRNA target sequence
gaaagctttagataaatatcct

SEQ ID NO: 229968 - DNA, 22 bp, Artificial sequence
  SiRNA target sequence
aaagctttagataaatatcctt

SEQ ID NO: 229969 - DNA, 22 bp, Artificial sequence
  SiRNA target sequence
aagctttagataaatatccttt

SEQ ID NO: 229970 - DNA, 22 bp, Artificial sequence
  SiRNA target sequence
agctttagataaatatcctttt

SEQ ID NO: 229971 - DNA, 22 bp, Artificial sequence
  SiRNA target sequence
gctttagataaatatcctttta

SEQ ID NO: 229972 - DNA, 22 bp, Artificial sequence
  SiRNA target sequence
ctttagataaatatccttttac

SEQ ID NO: 229973 - DNA, 22 bp, Artificial sequence
  SiRNA target sequence
tttagataaatatccttttaca

SEQ ID NO: 229974 - DNA, 22 bp, Artificial sequence
  SiRNA target sequence
ttagataaatatccttttacaa

SEQ ID NO: 229975 - DNA, 22 bp, Artificial sequence
  SiRNA target sequence
tagataaatatccttttacaaa

SEQ ID NO: 229976 - DNA, 22 bp, Artificial sequence
  SiRNA target sequence
agataaatatccttttacaaaa

SEQ ID NO: 229977 - DNA, 22 bp, Artificial sequence
  SiRNA target sequence
gataaatatccttttacaaaaa

SEQ ID NO: 229978 - DNA, 22 bp, Artificial sequence
  SiRNA target sequence
ataaatatccttttacaaaaat

SEQ ID NO: 229979 - DNA, 22 bp, Artificial sequence
  SiRNA target sequence
taaatatccttttacaaaaata

SEQ ID NO: 229980 - DNA, 22 bp, Artificial sequence
  SiRNA target sequence
aaatatccttttacaaaaatat

SEQ ID NO: 229981 - DNA, 22 bp, Artificial sequence
  SiRNA target sequence
aatatccttttacaaaaatatt

SEQ ID NO: 229982 - DNA, 22 bp, Artificial sequence
  SiRNA target sequence
atatccttttacaaaaatattt

SEQ ID NO: 229983 - DNA, 22 bp, Artificial sequence
  SiRNA target sequence
tatccttttacaaaaatatttg

SEQ ID NO: 229984 - DNA, 22 bp, Artificial sequence
  SiRNA target sequence
atccttttacaaaaatatttga

SEQ ID NO: 229985 - DNA, 22 bp, Artificial sequence
  SiRNA target sequence
tccttttacaaaaatatttgat

SEQ ID NO: 229986 - DNA, 22 bp, Artificial sequence
  SiRNA target sequence
ccttttacaaaaatatttgatg

SEQ ID NO: 229987 - DNA, 22 bp, Artificial sequence
  SiRNA target sequence
cttttacaaaaatatttgatgt

SEQ ID NO: 229988 - DNA, 22 bp, Artificial sequence
  SiRNA target sequence
ttttacaaaaatatttgatgta

SEQ ID NO: 229989 - DNA, 22 bp, Artificial sequence
  SiRNA target sequence
tttacaaaaatatttgatgtaa

SEQ ID NO: 229990 - DNA, 22 bp, Artificial sequence
  SiRNA target sequence
ttacaaaaatatttgatgtaac

SEQ ID NO: 229991 - DNA, 22 bp, Artificial sequence
  SiRNA target sequence
tacaaaaatatttgatgtaact

SEQ ID NO: 229992 - DNA, 22 bp, Artificial sequence
  SiRNA target sequence
acaaaaatatttgatgtaactt

SEQ ID NO: 229993 - DNA, 22 bp, Artificial sequence
  SiRNA target sequence
caaaaatatttgatgtaacttt

SEQ ID NO: 229994 - DNA, 22 bp, Artificial sequence
  SiRNA target sequence
aaaaatatttgatgtaacttta

SEQ ID NO: 229995 - DNA, 22 bp, Artificial sequence
  SiRNA target sequence
aaaatatttgatgtaactttaa

SEQ ID NO: 229996 - DNA, 22 bp, Artificial sequence
  SiRNA target sequence
aaatatttgatgtaactttaat

SEQ ID NO: 229997 - DNA, 22 bp, Artificial sequence
  SiRNA target sequence
aatatttgatgtaactttaata

SEQ ID NO: 229998 - DNA, 22 bp, Artificial sequence
  SiRNA target sequence
atatttgatgtaactttaatag

SEQ ID NO: 229999 - DNA, 22 bp, Artificial sequence
  SiRNA target sequence
tatttgatgtaactttaatagt

SEQ ID NO: 230000 - DNA, 22 bp, Artificial sequence
  SiRNA target sequence
atttgatgtaactttaatagtt

SEQ ID NO: 230001 - DNA, 22 bp, Artificial sequence
  SiRNA target sequence
tttgatgtaactttaatagttt

SEQ ID NO: 230002 - DNA, 22 bp, Artificial sequence
  SiRNA target sequence
ttgatgtaactttaatagtttt

SEQ ID NO: 230003 - DNA, 22 bp, Artificial sequence
  SiRNA target sequence
tgatgtaactttaatagttttc

SEQ ID NO: 230004 - DNA, 22 bp, Artificial sequence
  SiRNA target sequence
gatgtaactttaatagttttcg

SEQ ID NO: 230005 - DNA, 22 bp, Artificial sequence
  SiRNA target sequence
atgtaactttaatagttttcgc

SEQ ID NO: 230006 - DNA, 22 bp, Artificial sequence
  SiRNA target sequence
tgtaactttaatagttttcgct

SEQ ID NO: 230007 - DNA, 22 bp, Artificial sequence
  SiRNA target sequence
gtaactttaatagttttcgctg

SEQ ID NO: 230008 - DNA, 22 bp, Artificial sequence
  SiRNA target sequence
taactttaatagttttcgctgt

SEQ ID NO: 230009 - DNA, 22 bp, Artificial sequence
  SiRNA target sequence
aactttaatagttttcgctgtt

SEQ ID NO: 230010 - DNA, 22 bp, Artificial sequence
  SiRNA target sequence
actttaatagttttcgctgttg

SEQ ID NO: 230011 - DNA, 22 bp, Artificial sequence
  SiRNA target sequence
ctttaatagttttcgctgttgc

SEQ ID NO: 230012 - DNA, 22 bp, Artificial sequence
  SiRNA target sequence
tttaatagttttcgctgttgca

SEQ ID NO: 230013 - DNA, 22 bp, Artificial sequence
  SiRNA target sequence
ttaatagttttcgctgttgcat

SEQ ID NO: 230014 - DNA, 22 bp, Artificial sequence
  SiRNA target sequence
taatagttttcgctgttgcatt

SEQ ID NO: 230015 - DNA, 22 bp, Artificial sequence
  SiRNA target sequence
aatagttttcgctgttgcattt

SEQ ID NO: 230016 - DNA, 22 bp, Artificial sequence
  SiRNA target sequence
atagttttcgctgttgcattta

SEQ ID NO: 230017 - DNA, 22 bp, Artificial sequence
  SiRNA target sequence
tagttttcgctgttgcatttac

SEQ ID NO: 230018 - DNA, 22 bp, Artificial sequence
  SiRNA target sequence
agttttcgctgttgcatttact

SEQ ID NO: 230019 - DNA, 22 bp, Artificial sequence
  SiRNA target sequence
gttttcgctgttgcatttacta

SEQ ID NO: 230020 - DNA, 22 bp, Artificial sequence
  SiRNA target sequence
ttttcgctgttgcatttactat

SEQ ID NO: 230021 - DNA, 22 bp, Artificial sequence
  SiRNA target sequence
tttcgctgttgcatttactata

SEQ ID NO: 230022 - DNA, 22 bp, Artificial sequence
  SiRNA target sequence
ttcgctgttgcatttactatac

SEQ ID NO: 230023 - DNA, 22 bp, Artificial sequence
  SiRNA target sequence
tcgctgttgcatttactatact

SEQ ID NO: 230024 - DNA, 22 bp, Artificial sequence
  SiRNA target sequence
cgctgttgcatttactatactt

SEQ ID NO: 230025 - DNA, 22 bp, Artificial sequence
  SiRNA target sequence
gctgttgcatttactatacttg

SEQ ID NO: 230026 - DNA, 22 bp, Artificial sequence
  SiRNA target sequence
ctgttgcatttactatacttgg

SEQ ID NO: 230027 - DNA, 22 bp, Artificial sequence
  SiRNA target sequence
tgttgcatttactatacttggt

SEQ ID NO: 230028 - DNA, 22 bp, Artificial sequence
  SiRNA target sequence
gttgcatttactatacttggta

SEQ ID NO: 230029 - DNA, 22 bp, Artificial sequence
  SiRNA target sequence
ttgcatttactatacttggtag

SEQ ID NO: 230030 - DNA, 22 bp, Artificial sequence
  SiRNA target sequence
tgcatttactatacttggtagt

SEQ ID NO: 230031 - DNA, 22 bp, Artificial sequence
  SiRNA target sequence
gcatttactatacttggtagtt

SEQ ID NO: 230032 - DNA, 22 bp, Artificial sequence
  SiRNA target sequence
catttactatacttggtagttt

SEQ ID NO: 230033 - DNA, 22 bp, Artificial sequence
  SiRNA target sequence
atttactatacttggtagttta

SEQ ID NO: 230034 - DNA, 22 bp, Artificial sequence
  SiRNA target sequence
tttactatacttggtagtttat

SEQ ID NO: 230035 - DNA, 22 bp, Artificial sequence
  SiRNA target sequence
ttactatacttggtagtttatt

SEQ ID NO: 230036 - DNA, 22 bp, Artificial sequence
  SiRNA target sequence
tactatacttggtagtttatta

SEQ ID NO: 230037 - DNA, 22 bp, Artificial sequence
  SiRNA target sequence
actatacttggtagtttattac

SEQ ID NO: 230038 - DNA, 22 bp, Artificial sequence
  SiRNA target sequence
ctatacttggtagtttattact

SEQ ID NO: 230039 - DNA, 22 bp, Artificial sequence
  SiRNA target sequence
tatacttggtagtttattactt

SEQ ID NO: 230040 - DNA, 22 bp, Artificial sequence
  SiRNA target sequence
atacttggtagtttattacttc

SEQ ID NO: 230041 - DNA, 22 bp, Artificial sequence
  SiRNA target sequence
tacttggtagtttattacttcc

SEQ ID NO: 230042 - DNA, 22 bp, Artificial sequence
  SiRNA target sequence
acttggtagtttattacttccc

SEQ ID NO: 230043 - DNA, 22 bp, Artificial sequence
  SiRNA target sequence
cttggtagtttattacttccct

SEQ ID NO: 230044 - DNA, 22 bp, Artificial sequence
  SiRNA target sequence
ttggtagtttattacttccctt

SEQ ID NO: 230045 - DNA, 22 bp, Artificial sequence
  SiRNA target sequence
tggtagtttattacttcccttt

SEQ ID NO: 230046 - DNA, 22 bp, Artificial sequence
  SiRNA target sequence
ggtagtttattacttcccttta

SEQ ID NO: 230047 - DNA, 22 bp, Artificial sequence
  SiRNA target sequence
gtagtttattacttccctttag

SEQ ID NO: 230048 - DNA, 22 bp, Artificial sequence
  SiRNA target sequence
tagtttattacttccctttagt

SEQ ID NO: 230049 - DNA, 22 bp, Artificial sequence
  SiRNA target sequence
agtttattacttccctttagtg

SEQ ID NO: 230050 - DNA, 22 bp, Artificial sequence
  SiRNA target sequence
gtttattacttccctttagtga

SEQ ID NO: 230051 - DNA, 22 bp, Artificial sequence
  SiRNA target sequence
tttattacttccctttagtgat

SEQ ID NO: 230052 - DNA, 22 bp, Artificial sequence
  SiRNA target sequence
ttattacttccctttagtgatt

SEQ ID NO: 230053 - DNA, 22 bp, Artificial sequence
  SiRNA target sequence
tattacttccctttagtgatta

SEQ ID NO: 230054 - DNA, 22 bp, Artificial sequence
  SiRNA target sequence
attacttccctttagtgattat

SEQ ID NO: 230055 - DNA, 22 bp, Artificial sequence
  SiRNA target sequence
ttacttccctttagtgattata

SEQ ID NO: 230056 - DNA, 22 bp, Artificial sequence
  SiRNA target sequence
tacttccctttagtgattatat

SEQ ID NO: 230057 - DNA, 22 bp, Artificial sequence
  SiRNA target sequence
acttccctttagtgattatatt

SEQ ID NO: 230058 - DNA, 22 bp, Artificial sequence
  SiRNA target sequence
cttccctttagtgattatattc

SEQ ID NO: 230059 - DNA, 22 bp, Artificial sequence
  SiRNA target sequence
ttccctttagtgattatattca

SEQ ID NO: 230060 - DNA, 22 bp, Artificial sequence
  SiRNA target sequence
tccctttagtgattatattcag

SEQ ID NO: 230061 - DNA, 22 bp, Artificial sequence
  SiRNA target sequence
ccctttagtgattatattcaga

SEQ ID NO: 230062 - DNA, 22 bp, Artificial sequence
  SiRNA target sequence
cctttagtgattatattcagat

SEQ ID NO: 230063 - DNA, 22 bp, Artificial sequence
  SiRNA target sequence
ctttagtgattatattcagatt

SEQ ID NO: 230064 - DNA, 22 bp, Artificial sequence
  SiRNA target sequence
tttagtgattatattcagattc

SEQ ID NO: 230065 - DNA, 22 bp, Artificial sequence
  SiRNA target sequence
ttagtgattatattcagattca

SEQ ID NO: 230066 - DNA, 22 bp, Artificial sequence
  SiRNA target sequence
tagtgattatattcagattcaa

SEQ ID NO: 230067 - DNA, 22 bp, Artificial sequence
  SiRNA target sequence
agtgattatattcagattcaac

SEQ ID NO: 230068 - DNA, 22 bp, Artificial sequence
  SiRNA target sequence
gtgattatattcagattcaacc

SEQ ID NO: 230069 - DNA, 22 bp, Artificial sequence
  SiRNA target sequence
tgattatattcagattcaaccg

SEQ ID NO: 230070 - DNA, 22 bp, Artificial sequence
  SiRNA target sequence
gattatattcagattcaaccgt

SEQ ID NO: 230071 - DNA, 22 bp, Artificial sequence
  SiRNA target sequence
attatattcagattcaaccgtt

SEQ ID NO: 230072 - DNA, 22 bp, Artificial sequence
  SiRNA target sequence
ttatattcagattcaaccgttt

SEQ ID NO: 230073 - DNA, 22 bp, Artificial sequence
  SiRNA target sequence
tatattcagattcaaccgtttt

SEQ ID NO: 230074 - DNA, 22 bp, Artificial sequence
  SiRNA target sequence
atattcagattcaaccgttttg

SEQ ID NO: 230075 - DNA, 22 bp, Artificial sequence
  SiRNA target sequence
tattcagattcaaccgttttgg

SEQ ID NO: 230076 - DNA, 22 bp, Artificial sequence
  SiRNA target sequence
attcagattcaaccgttttggg

SEQ ID NO: 230077 - DNA, 22 bp, Artificial sequence
  SiRNA target sequence
ttcagattcaaccgttttgggc

SEQ ID NO: 230078 - DNA, 22 bp, Artificial sequence
  SiRNA target sequence
tcagattcaaccgttttgggcc

SEQ ID NO: 230079 - DNA, 22 bp, Artificial sequence
  SiRNA target sequence
cagattcaaccgttttgggcca

SEQ ID NO: 230080 - DNA, 22 bp, Artificial sequence
  SiRNA target sequence
agattcaaccgttttgggccaa

SEQ ID NO: 230081 - DNA, 22 bp, Artificial sequence
  SiRNA target sequence
gattcaaccgttttgggccaaa

SEQ ID NO: 230082 - DNA, 22 bp, Artificial sequence
  SiRNA target sequence
attcaaccgttttgggccaaag

SEQ ID NO: 230083 - DNA, 22 bp, Artificial sequence
  SiRNA target sequence
ttcaaccgttttgggccaaaga

SEQ ID NO: 230084 - DNA, 22 bp, Artificial sequence
  SiRNA target sequence
tcaaccgttttgggccaaagat

SEQ ID NO: 230085 - DNA, 22 bp, Artificial sequence
  SiRNA target sequence
caaccgttttgggccaaagata

SEQ ID NO: 230086 - DNA, 22 bp, Artificial sequence
  SiRNA target sequence
aaccgttttgggccaaagatat

SEQ ID NO: 230087 - DNA, 22 bp, Artificial sequence
  SiRNA target sequence
accgttttgggccaaagatatt

SEQ ID NO: 230088 - DNA, 22 bp, Artificial sequence
  SiRNA target sequence
ccgttttgggccaaagatattt

SEQ ID NO: 230089 - DNA, 22 bp, Artificial sequence
  SiRNA target sequence
cgttttgggccaaagatatttt

SEQ ID NO: 230090 - DNA, 22 bp, Artificial sequence
  SiRNA target sequence
gttttgggccaaagatattttt

SEQ ID NO: 230091 - DNA, 22 bp, Artificial sequence
  SiRNA target sequence
ttttgggccaaagatatttttg

SEQ ID NO: 230092 - DNA, 22 bp, Artificial sequence
  SiRNA target sequence
tttgggccaaagatatttttgc

SEQ ID NO: 230093 - DNA, 22 bp, Artificial sequence
  SiRNA target sequence
ttgggccaaagatatttttgct

SEQ ID NO: 230094 - DNA, 22 bp, Artificial sequence
  SiRNA target sequence
tgggccaaagatatttttgctg

SEQ ID NO: 230095 - DNA, 22 bp, Artificial sequence
  SiRNA target sequence
gggccaaagatatttttgctga

SEQ ID NO: 230096 - DNA, 22 bp, Artificial sequence
  SiRNA target sequence
ggccaaagatatttttgctgat

SEQ ID NO: 230097 - DNA, 22 bp, Artificial sequence
  SiRNA target sequence
gccaaagatatttttgctgatg

SEQ ID NO: 230098 - DNA, 22 bp, Artificial sequence
  SiRNA target sequence
ccaaagatatttttgctgatgg

SEQ ID NO: 230099 - DNA, 22 bp, Artificial sequence
  SiRNA target sequence
caaagatatttttgctgatgga

SEQ ID NO: 230100 - DNA, 22 bp, Artificial sequence
  SiRNA target sequence
aaagatatttttgctgatggaa

SEQ ID NO: 230101 - DNA, 22 bp, Artificial sequence
  SiRNA target sequence
aagatatttttgctgatggaaa

SEQ ID NO: 230102 - DNA, 22 bp, Artificial sequence
  SiRNA target sequence
agatatttttgctgatggaaaa

SEQ ID NO: 230103 - DNA, 22 bp, Artificial sequence
  SiRNA target sequence
gatatttttgctgatggaaaag

SEQ ID NO: 230104 - DNA, 22 bp, Artificial sequence
  SiRNA target sequence
atatttttgctgatggaaaagc

SEQ ID NO: 230105 - DNA, 22 bp, Artificial sequence
  SiRNA target sequence
tatttttgctgatggaaaagct

SEQ ID NO: 230106 - DNA, 22 bp, Artificial sequence
  SiRNA target sequence
atttttgctgatggaaaagctg

SEQ ID NO: 230107 - DNA, 22 bp, Artificial sequence
  SiRNA target sequence
tttttgctgatggaaaagctgt

SEQ ID NO: 230108 - DNA, 22 bp, Artificial sequence
  SiRNA target sequence
ttttgctgatggaaaagctgtt

SEQ ID NO: 230109 - DNA, 22 bp, Artificial sequence
  SiRNA target sequence
tttgctgatggaaaagctgttg

SEQ ID NO: 230110 - DNA, 22 bp, Artificial sequence
  SiRNA target sequence
ttgctgatggaaaagctgttgc

SEQ ID NO: 230111 - DNA, 22 bp, Artificial sequence
  SiRNA target sequence
tgctgatggaaaagctgttgcc

SEQ ID NO: 230112 - DNA, 22 bp, Artificial sequence
  SiRNA target sequence
gctgatggaaaagctgttgcca

SEQ ID NO: 230113 - DNA, 22 bp, Artificial sequence
  SiRNA target sequence
ctgatggaaaagctgttgccag

SEQ ID NO: 230114 - DNA, 22 bp, Artificial sequence
  SiRNA target sequence
tgatggaaaagctgttgccaga

SEQ ID NO: 230115 - DNA, 22 bp, Artificial sequence
  SiRNA target sequence
gatggaaaagctgttgccagaa

SEQ ID NO: 230116 - DNA, 22 bp, Artificial sequence
  SiRNA target sequence
atggaaaagctgttgccagaag

SEQ ID NO: 230117 - DNA, 22 bp, Artificial sequence
  SiRNA target sequence
tggaaaagctgttgccagaagt

SEQ ID NO: 230118 - DNA, 22 bp, Artificial sequence
  SiRNA target sequence
ggaaaagctgttgccagaagta

SEQ ID NO: 230119 - DNA, 22 bp, Artificial sequence
  SiRNA target sequence
gaaaagctgttgccagaagtac

SEQ ID NO: 230120 - DNA, 22 bp, Artificial sequence
  SiRNA target sequence
aaaagctgttgccagaagtaca

SEQ ID NO: 230121 - DNA, 22 bp, Artificial sequence
  SiRNA target sequence
aaagctgttgccagaagtacag

SEQ ID NO: 230122 - DNA, 22 bp, Artificial sequence
  SiRNA target sequence
aagctgttgccagaagtacaga

SEQ ID NO: 230123 - DNA, 22 bp, Artificial sequence
  SiRNA target sequence
agctgttgccagaagtacagat

SEQ ID NO: 230124 - DNA, 22 bp, Artificial sequence
  SiRNA target sequence
gctgttgccagaagtacagatt

SEQ ID NO: 230125 - DNA, 22 bp, Artificial sequence
  SiRNA target sequence
ctgttgccagaagtacagattt

SEQ ID NO: 230126 - DNA, 22 bp, Artificial sequence
  SiRNA target sequence
tgttgccagaagtacagatttt

SEQ ID NO: 230127 - DNA, 22 bp, Artificial sequence
  SiRNA target sequence
gttgccagaagtacagattttt

SEQ ID NO: 230128 - DNA, 22 bp, Artificial sequence
  SiRNA target sequence
ttgccagaagtacagatttttt

SEQ ID NO: 230129 - DNA, 22 bp, Artificial sequence
  SiRNA target sequence
tgccagaagtacagatttttta

SEQ ID NO: 230130 - DNA, 22 bp, Artificial sequence
  SiRNA target sequence
gccagaagtacagattttttat

SEQ ID NO: 230131 - DNA, 22 bp, Artificial sequence
  SiRNA target sequence
ccagaagtacagattttttatt

SEQ ID NO: 230132 - DNA, 22 bp, Artificial sequence
  SiRNA target sequence
cagaagtacagattttttattt

SEQ ID NO: 230133 - DNA, 22 bp, Artificial sequence
  SiRNA target sequence
agaagtacagattttttatttt

SEQ ID NO: 230134 - DNA, 22 bp, Artificial sequence
  SiRNA target sequence
gaagtacagattttttattttc

SEQ ID NO: 230135 - DNA, 22 bp, Artificial sequence
  SiRNA target sequence
aagtacagattttttattttct

SEQ ID NO: 230136 - DNA, 22 bp, Artificial sequence
  SiRNA target sequence
agtacagattttttattttcta

SEQ ID NO: 230137 - DNA, 22 bp, Artificial sequence
  SiRNA target sequence
gtacagattttttattttctat

SEQ ID NO: 230138 - DNA, 22 bp, Artificial sequence
  SiRNA target sequence
tacagattttttattttctatt

SEQ ID NO: 230139 - DNA, 22 bp, Artificial sequence
  SiRNA target sequence
acagattttttattttctattg

SEQ ID NO: 230140 - DNA, 22 bp, Artificial sequence
  SiRNA target sequence
cagattttttattttctattgc

SEQ ID NO: 230141 - DNA, 22 bp, Artificial sequence
  SiRNA target sequence
agattttttattttctattgca

SEQ ID NO: 230142 - DNA, 22 bp, Artificial sequence
  SiRNA target sequence
gattttttattttctattgcac

SEQ ID NO: 230143 - DNA, 22 bp, Artificial sequence
  SiRNA target sequence
attttttattttctattgcact

SEQ ID NO: 230144 - DNA, 22 bp, Artificial sequence
  SiRNA target sequence
ttttttattttctattgcactt

SEQ ID NO: 230145 - DNA, 22 bp, Artificial sequence
  SiRNA target sequence
tttttattttctattgcacttg

SEQ ID NO: 230146 - DNA, 22 bp, Artificial sequence
  SiRNA target sequence
ttttattttctattgcacttgt

SEQ ID NO: 230147 - DNA, 22 bp, Artificial sequence
  SiRNA target sequence
tttattttctattgcacttgtt

SEQ ID NO: 230148 - DNA, 22 bp, Artificial sequence
  SiRNA target sequence
ttattttctattgcacttgttt

SEQ ID NO: 230149 - DNA, 22 bp, Artificial sequence
  SiRNA target sequence
tattttctattgcacttgtttt

SEQ ID NO: 230150 - DNA, 22 bp, Artificial sequence
  SiRNA target sequence
attttctattgcacttgttttc

SEQ ID NO: 230151 - DNA, 22 bp, Artificial sequence
  SiRNA target sequence
ttttctattgcacttgttttca

SEQ ID NO: 230152 - DNA, 22 bp, Artificial sequence
  SiRNA target sequence
tttctattgcacttgttttcaa

SEQ ID NO: 230153 - DNA, 22 bp, Artificial sequence
  SiRNA target sequence
ttctattgcacttgttttcaat

SEQ ID NO: 230154 - DNA, 22 bp, Artificial sequence
  SiRNA target sequence
tctattgcacttgttttcaatg

SEQ ID NO: 230155 - DNA, 22 bp, Artificial sequence
  SiRNA target sequence
ctattgcacttgttttcaatga

SEQ ID NO: 230156 - DNA, 22 bp, Artificial sequence
  SiRNA target sequence
tattgcacttgttttcaatgaa

SEQ ID NO: 230157 - DNA, 22 bp, Artificial sequence
  SiRNA target sequence
attgcacttgttttcaatgaat

SEQ ID NO: 230158 - DNA, 22 bp, Artificial sequence
  SiRNA target sequence
ttgcacttgttttcaatgaatg

SEQ ID NO: 230159 - DNA, 22 bp, Artificial sequence
  SiRNA target sequence
tgcacttgttttcaatgaatgg

SEQ ID NO: 230160 - DNA, 22 bp, Artificial sequence
  SiRNA target sequence
gcacttgttttcaatgaatgga

SEQ ID NO: 230161 - DNA, 22 bp, Artificial sequence
  SiRNA target sequence
cacttgttttcaatgaatggac

SEQ ID NO: 230162 - DNA, 22 bp, Artificial sequence
  SiRNA target sequence
acttgttttcaatgaatggaca

SEQ ID NO: 230163 - DNA, 22 bp, Artificial sequence
  SiRNA target sequence
cttgttttcaatgaatggacaa

SEQ ID NO: 230164 - DNA, 22 bp, Artificial sequence
  SiRNA target sequence
ttgttttcaatgaatggacaag

SEQ ID NO: 230165 - DNA, 22 bp, Artificial sequence
  SiRNA target sequence
tgttttcaatgaatggacaagt

SEQ ID NO: 230166 - DNA, 22 bp, Artificial sequence
  SiRNA target sequence
gttttcaatgaatggacaagtt

SEQ ID NO: 230167 - DNA, 22 bp, Artificial sequence
  SiRNA target sequence
ttttcaatgaatggacaagttc

SEQ ID NO: 230168 - DNA, 22 bp, Artificial sequence
  SiRNA target sequence
tttcaatgaatggacaagttct

SEQ ID NO: 230169 - DNA, 22 bp, Artificial sequence
  SiRNA target sequence
ttcaatgaatggacaagttctg

SEQ ID NO: 230170 - DNA, 22 bp, Artificial sequence
  SiRNA target sequence
tcaatgaatggacaagttctgc

SEQ ID NO: 230171 - DNA, 22 bp, Artificial sequence
  SiRNA target sequence
caatgaatggacaagttctgct

SEQ ID NO: 230172 - DNA, 22 bp, Artificial sequence
  SiRNA target sequence
aatgaatggacaagttctgcta

SEQ ID NO: 230173 - DNA, 22 bp, Artificial sequence
  SiRNA target sequence
atgaatggacaagttctgctat

SEQ ID NO: 230174 - DNA, 22 bp, Artificial sequence
  SiRNA target sequence
tgaatggacaagttctgctatc

SEQ ID NO: 230175 - DNA, 22 bp, Artificial sequence
  SiRNA target sequence
gaatggacaagttctgctatct

SEQ ID NO: 230176 - DNA, 22 bp, Artificial sequence
  SiRNA target sequence
aatggacaagttctgctatcta

SEQ ID NO: 230177 - DNA, 22 bp, Artificial sequence
  SiRNA target sequence
atggacaagttctgctatctat

SEQ ID NO: 230178 - DNA, 22 bp, Artificial sequence
  SiRNA target sequence
tggacaagttctgctatctatg

SEQ ID NO: 230179 - DNA, 22 bp, Artificial sequence
  SiRNA target sequence
ggacaagttctgctatctatgt

SEQ ID NO: 230180 - DNA, 22 bp, Artificial sequence
  SiRNA target sequence
gacaagttctgctatctatgtt

SEQ ID NO: 230181 - DNA, 22 bp, Artificial sequence
  SiRNA target sequence
acaagttctgctatctatgttt

SEQ ID NO: 230182 - DNA, 22 bp, Artificial sequence
  SiRNA target sequence
caagttctgctatctatgtttt

SEQ ID NO: 230183 - DNA, 22 bp, Artificial sequence
  SiRNA target sequence
aagttctgctatctatgtttta

SEQ ID NO: 230184 - DNA, 22 bp, Artificial sequence
  SiRNA target sequence
agttctgctatctatgttttat

SEQ ID NO: 230185 - DNA, 22 bp, Artificial sequence
  SiRNA target sequence
gttctgctatctatgttttatc

SEQ ID NO: 230186 - DNA, 22 bp, Artificial sequence
  SiRNA target sequence
ttctgctatctatgttttatct

SEQ ID NO: 230187 - DNA, 22 bp, Artificial sequence
  SiRNA target sequence
tctgctatctatgttttatctg

SEQ ID NO: 230188 - DNA, 22 bp, Artificial sequence
  SiRNA target sequence
ctgctatctatgttttatctga

SEQ ID NO: 230189 - DNA, 22 bp, Artificial sequence
  SiRNA target sequence
tgctatctatgttttatctgaa

SEQ ID NO: 230190 - DNA, 22 bp, Artificial sequence
  SiRNA target sequence
gctatctatgttttatctgaaa

SEQ ID NO: 230191 - DNA, 22 bp, Artificial sequence
  SiRNA target sequence
ctatctatgttttatctgaaat

SEQ ID NO: 230192 - DNA, 22 bp, Artificial sequence
  SiRNA target sequence
tatctatgttttatctgaaatg

SEQ ID NO: 230193 - DNA, 22 bp, Artificial sequence
  SiRNA target sequence
atctatgttttatctgaaatgt

SEQ ID NO: 230194 - DNA, 22 bp, Artificial sequence
  SiRNA target sequence
tctatgttttatctgaaatgtt

SEQ ID NO: 230195 - DNA, 22 bp, Artificial sequence
  SiRNA target sequence
ctatgttttatctgaaatgttt

SEQ ID NO: 230196 - DNA, 22 bp, Artificial sequence
  SiRNA target sequence
tatgttttatctgaaatgtttg

SEQ ID NO: 230197 - DNA, 22 bp, Artificial sequence
  SiRNA target sequence
atgttttatctgaaatgtttgg

SEQ ID NO: 230198 - DNA, 22 bp, Artificial sequence
  SiRNA target sequence
tgttttatctgaaatgtttggt

SEQ ID NO: 230199 - DNA, 22 bp, Artificial sequence
  SiRNA target sequence
gttttatctgaaatgtttggta

SEQ ID NO: 230200 - DNA, 22 bp, Artificial sequence
  SiRNA target sequence
ttttatctgaaatgtttggtag

SEQ ID NO: 230201 - DNA, 22 bp, Artificial sequence
  SiRNA target sequence
tttatctgaaatgtttggtagt

SEQ ID NO: 230202 - DNA, 22 bp, Artificial sequence
  SiRNA target sequence
ttatctgaaatgtttggtagtt

SEQ ID NO: 230203 - DNA, 22 bp, Artificial sequence
  SiRNA target sequence
tatctgaaatgtttggtagttt

SEQ ID NO: 230204 - DNA, 22 bp, Artificial sequence
  SiRNA target sequence
atctgaaatgtttggtagtttg

SEQ ID NO: 230205 - DNA, 22 bp, Artificial sequence
  SiRNA target sequence
tctgaaatgtttggtagtttga

SEQ ID NO: 230206 - DNA, 22 bp, Artificial sequence
  SiRNA target sequence
ctgaaatgtttggtagtttgat

SEQ ID NO: 230207 - DNA, 22 bp, Artificial sequence
  SiRNA target sequence
tgaaatgtttggtagtttgatt

SEQ ID NO: 230208 - DNA, 22 bp, Artificial sequence
  SiRNA target sequence
gaaatgtttggtagtttgattc

SEQ ID NO: 230209 - DNA, 22 bp, Artificial sequence
  SiRNA target sequence
aaatgtttggtagtttgattct

SEQ ID NO: 230210 - DNA, 22 bp, Artificial sequence
  SiRNA target sequence
aatgtttggtagtttgattctt

SEQ ID NO: 230211 - DNA, 22 bp, Artificial sequence
  SiRNA target sequence
atgtttggtagtttgattcttt

SEQ ID NO: 230212 - DNA, 22 bp, Artificial sequence
  SiRNA target sequence
tgtttggtagtttgattctttc

SEQ ID NO: 230213 - DNA, 22 bp, Artificial sequence
  SiRNA target sequence
gtttggtagtttgattctttca

SEQ ID NO: 230214 - DNA, 22 bp, Artificial sequence
  SiRNA target sequence
tttggtagtttgattctttcat

SEQ ID NO: 230215 - DNA, 22 bp, Artificial sequence
  SiRNA target sequence
ttggtagtttgattctttcata

SEQ ID NO: 230216 - DNA, 22 bp, Artificial sequence
  SiRNA target sequence
tggtagtttgattctttcatat

SEQ ID NO: 230217 - DNA, 22 bp, Artificial sequence
  SiRNA target sequence
ggtagtttgattctttcatatt

SEQ ID NO: 230218 - DNA, 22 bp, Artificial sequence
  SiRNA target sequence
gtagtttgattctttcatattt

SEQ ID NO: 230219 - DNA, 22 bp, Artificial sequence
  SiRNA target sequence
tagtttgattctttcatattta

SEQ ID NO: 230220 - DNA, 22 bp, Artificial sequence
  SiRNA target sequence
agtttgattctttcatatttat

SEQ ID NO: 230221 - DNA, 22 bp, Artificial sequence
  SiRNA target sequence
gtttgattctttcatatttatt

SEQ ID NO: 230222 - DNA, 22 bp, Artificial sequence
  SiRNA target sequence
tttgattctttcatatttattt

SEQ ID NO: 230223 - DNA, 22 bp, Artificial sequence
  SiRNA target sequence
ttgattctttcatatttattta

SEQ ID NO: 230224 - DNA, 22 bp, Artificial sequence
  SiRNA target sequence
tgattctttcatatttatttat

SEQ ID NO: 230225 - DNA, 22 bp, Artificial sequence
  SiRNA target sequence
gattctttcatatttatttatg

SEQ ID NO: 230226 - DNA, 22 bp, Artificial sequence
  SiRNA target sequence
attctttcatatttatttatga

SEQ ID NO: 230227 - DNA, 22 bp, Artificial sequence
  SiRNA target sequence
ttctttcatatttatttatgac

SEQ ID NO: 230228 - DNA, 22 bp, Artificial sequence
  SiRNA target sequence
tctttcatatttatttatgacg

SEQ ID NO: 230229 - DNA, 22 bp, Artificial sequence
  SiRNA target sequence
ctttcatatttatttatgacgt

SEQ ID NO: 230230 - DNA, 22 bp, Artificial sequence
  SiRNA target sequence
tttcatatttatttatgacgtt

SEQ ID NO: 230231 - DNA, 22 bp, Artificial sequence
  SiRNA target sequence
ttcatatttatttatgacgttt

SEQ ID NO: 230232 - DNA, 22 bp, Artificial sequence
  SiRNA target sequence
tcatatttatttatgacgtttg

SEQ ID NO: 230233 - DNA, 22 bp, Artificial sequence
  SiRNA target sequence
catatttatttatgacgtttgc

SEQ ID NO: 230234 - DNA, 22 bp, Artificial sequence
  SiRNA target sequence
atatttatttatgacgtttgct

SEQ ID NO: 230235 - DNA, 22 bp, Artificial sequence
  SiRNA target sequence
tatttatttatgacgtttgcta

SEQ ID NO: 230236 - DNA, 22 bp, Artificial sequence
  SiRNA target sequence
atttatttatgacgtttgctaa

SEQ ID NO: 230237 - DNA, 22 bp, Artificial sequence
  SiRNA target sequence
tttatttatgacgtttgctaat

SEQ ID NO: 230238 - DNA, 22 bp, Artificial sequence
  SiRNA target sequence
ttatttatgacgtttgctaatg

SEQ ID NO: 230239 - DNA, 22 bp, Artificial sequence
  SiRNA target sequence
tatttatgacgtttgctaatgg

SEQ ID NO: 230240 - DNA, 22 bp, Artificial sequence
  SiRNA target sequence
atttatgacgtttgctaatggt

SEQ ID NO: 230241 - DNA, 22 bp, Artificial sequence
  SiRNA target sequence
tttatgacgtttgctaatggtc

SEQ ID NO: 230242 - DNA, 22 bp, Artificial sequence
  SiRNA target sequence
ttatgacgtttgctaatggtct

SEQ ID NO: 230243 - DNA, 22 bp, Artificial sequence
  SiRNA target sequence
tatgacgtttgctaatggtctt

SEQ ID NO: 230244 - DNA, 22 bp, Artificial sequence
  SiRNA target sequence
atgacgtttgctaatggtcttt

SEQ ID NO: 230245 - DNA, 22 bp, Artificial sequence
  SiRNA target sequence
tgacgtttgctaatggtctttc

SEQ ID NO: 230246 - DNA, 22 bp, Artificial sequence
  SiRNA target sequence
gacgtttgctaatggtctttcg

SEQ ID NO: 230247 - DNA, 22 bp, Artificial sequence
  SiRNA target sequence
acgtttgctaatggtctttcga

SEQ ID NO: 230248 - DNA, 22 bp, Artificial sequence
  SiRNA target sequence
cgtttgctaatggtctttcgac

SEQ ID NO: 230249 - DNA, 22 bp, Artificial sequence
  SiRNA target sequence
gtttgctaatggtctttcgact

SEQ ID NO: 230250 - DNA, 22 bp, Artificial sequence
  SiRNA target sequence
tttgctaatggtctttcgactc

SEQ ID NO: 230251 - DNA, 22 bp, Artificial sequence
  SiRNA target sequence
ttgctaatggtctttcgactcc

SEQ ID NO: 230252 - DNA, 22 bp, Artificial sequence
  SiRNA target sequence
tgctaatggtctttcgactcct

SEQ ID NO: 230253 - DNA, 22 bp, Artificial sequence
  SiRNA target sequence
gctaatggtctttcgactcctg

SEQ ID NO: 230254 - DNA, 22 bp, Artificial sequence
  SiRNA target sequence
ctaatggtctttcgactcctgg

SEQ ID NO: 230255 - DNA, 22 bp, Artificial sequence
  SiRNA target sequence
taatggtctttcgactcctgga

SEQ ID NO: 230256 - DNA, 22 bp, Artificial sequence
  SiRNA target sequence
aatggtctttcgactcctggac

SEQ ID NO: 230257 - DNA, 22 bp, Artificial sequence
  SiRNA target sequence
atggtctttcgactcctggaca

SEQ ID NO: 230258 - DNA, 22 bp, Artificial sequence
  SiRNA target sequence
tggtctttcgactcctggacag

SEQ ID NO: 230259 - DNA, 22 bp, Artificial sequence
  SiRNA target sequence
ggtctttcgactcctggacagt

SEQ ID NO: 230260 - DNA, 22 bp, Artificial sequence
  SiRNA target sequence
gtctttcgactcctggacagtc

SEQ ID NO: 230261 - DNA, 22 bp, Artificial sequence
  SiRNA target sequence
tctttcgactcctggacagtcc

SEQ ID NO: 230262 - DNA, 22 bp, Artificial sequence
  SiRNA target sequence
ctttcgactcctggacagtccg

SEQ ID NO: 230263 - DNA, 22 bp, Artificial sequence
  SiRNA target sequence
tttcgactcctggacagtccgc

SEQ ID NO: 230264 - DNA, 22 bp, Artificial sequence
  SiRNA target sequence
ttcgactcctggacagtccgct

SEQ ID NO: 230265 - DNA, 22 bp, Artificial sequence
  SiRNA target sequence
tcgactcctggacagtccgcta

SEQ ID NO: 230266 - DNA, 22 bp, Artificial sequence
  SiRNA target sequence
cgactcctggacagtccgctag

SEQ ID NO: 230267 - DNA, 22 bp, Artificial sequence
  SiRNA target sequence
gactcctggacagtccgctaga

SEQ ID NO: 230268 - DNA, 22 bp, Artificial sequence
  SiRNA target sequence
actcctggacagtccgctagat

SEQ ID NO: 230269 - DNA, 22 bp, Artificial sequence
  SiRNA target sequence
ctcctggacagtccgctagatt

SEQ ID NO: 230270 - DNA, 22 bp, Artificial sequence
  SiRNA target sequence
tcctggacagtccgctagattt

SEQ ID NO: 230271 - DNA, 22 bp, Artificial sequence
  SiRNA target sequence
cctggacagtccgctagatttg

SEQ ID NO: 230272 - DNA, 22 bp, Artificial sequence
  SiRNA target sequence
ctggacagtccgctagatttgt

SEQ ID NO: 230273 - DNA, 22 bp, Artificial sequence
  SiRNA target sequence
tggacagtccgctagatttgtc

SEQ ID NO: 230274 - DNA, 22 bp, Artificial sequence
  SiRNA target sequence
ggacagtccgctagatttgtcc

SEQ ID NO: 230275 - DNA, 22 bp, Artificial sequence
  SiRNA target sequence
gacagtccgctagatttgtccc

SEQ ID NO: 230276 - DNA, 22 bp, Artificial sequence
  SiRNA target sequence
acagtccgctagatttgtccct

SEQ ID NO: 230277 - DNA, 22 bp, Artificial sequence
  SiRNA target sequence
cagtccgctagatttgtccctt

SEQ ID NO: 230278 - DNA, 22 bp, Artificial sequence
  SiRNA target sequence
agtccgctagatttgtcccttt

SEQ ID NO: 230279 - DNA, 22 bp, Artificial sequence
  SiRNA target sequence
gtccgctagatttgtcccttta

SEQ ID NO: 230280 - DNA, 22 bp, Artificial sequence
  SiRNA target sequence
tccgctagatttgtccctttat

SEQ ID NO: 230281 - DNA, 22 bp, Artificial sequence
  SiRNA target sequence
ccgctagatttgtccctttatt

SEQ ID NO: 230282 - DNA, 22 bp, Artificial sequence
  SiRNA target sequence
cgctagatttgtccctttattt

SEQ ID NO: 230283 - DNA, 22 bp, Artificial sequence
  SiRNA target sequence
gctagatttgtccctttatttt

SEQ ID NO: 230284 - DNA, 22 bp, Artificial sequence
  SiRNA target sequence
ctagatttgtccctttatttta

SEQ ID NO: 230285 - DNA, 22 bp, Artificial sequence
  SiRNA target sequence
tagatttgtccctttattttat

SEQ ID NO: 230286 - DNA, 22 bp, Artificial sequence
  SiRNA target sequence
agatttgtccctttattttatg

SEQ ID NO: 230287 - DNA, 22 bp, Artificial sequence
  SiRNA target sequence
gatttgtccctttattttatgt

SEQ ID NO: 230288 - DNA, 22 bp, Artificial sequence
  SiRNA target sequence
atttgtccctttattttatgtt

SEQ ID NO: 230289 - DNA, 22 bp, Artificial sequence
  SiRNA target sequence
tttgtccctttattttatgttg

SEQ ID NO: 230290 - DNA, 22 bp, Artificial sequence
  SiRNA target sequence
ttgtccctttattttatgttgg

SEQ ID NO: 230291 - DNA, 22 bp, Artificial sequence
  SiRNA target sequence
tgtccctttattttatgttgga

SEQ ID NO: 230292 - DNA, 22 bp, Artificial sequence
  SiRNA target sequence
gtccctttattttatgttggat

SEQ ID NO: 230293 - DNA, 22 bp, Artificial sequence
  SiRNA target sequence
tccctttattttatgttggatc

SEQ ID NO: 230294 - DNA, 22 bp, Artificial sequence
  SiRNA target sequence
ccctttattttatgttggatct

SEQ ID NO: 230295 - DNA, 22 bp, Artificial sequence
  SiRNA target sequence
cctttattttatgttggatcta

SEQ ID NO: 230296 - DNA, 22 bp, Artificial sequence
  SiRNA target sequence
ctttattttatgttggatctaa

SEQ ID NO: 230297 - DNA, 22 bp, Artificial sequence
  SiRNA target sequence
tttattttatgttggatctaat

SEQ ID NO: 230298 - DNA, 22 bp, Artificial sequence
  SiRNA target sequence
ttattttatgttggatctaatt

SEQ ID NO: 230299 - DNA, 22 bp, Artificial sequence
  SiRNA target sequence
tattttatgttggatctaattt

SEQ ID NO: 230300 - DNA, 22 bp, Artificial sequence
  SiRNA target sequence
attttatgttggatctaatttg

SEQ ID NO: 230301 - DNA, 22 bp, Artificial sequence
  SiRNA target sequence
ttttatgttggatctaatttgg

SEQ ID NO: 230302 - DNA, 22 bp, Artificial sequence
  SiRNA target sequence
tttatgttggatctaatttggc

SEQ ID NO: 230303 - DNA, 22 bp, Artificial sequence
  SiRNA target sequence
ttatgttggatctaatttggct

SEQ ID NO: 230304 - DNA, 22 bp, Artificial sequence
  SiRNA target sequence
tatgttggatctaatttggctt

SEQ ID NO: 230305 - DNA, 22 bp, Artificial sequence
  SiRNA target sequence
atgttggatctaatttggcttt

SEQ ID NO: 230306 - DNA, 22 bp, Artificial sequence
  SiRNA target sequence
tgttggatctaatttggcttta

SEQ ID NO: 230307 - DNA, 22 bp, Artificial sequence
  SiRNA target sequence
gttggatctaatttggctttac

SEQ ID NO: 230308 - DNA, 22 bp, Artificial sequence
  SiRNA target sequence
ttggatctaatttggctttact

SEQ ID NO: 230309 - DNA, 22 bp, Artificial sequence
  SiRNA target sequence
tggatctaatttggctttactt

SEQ ID NO: 230310 - DNA, 22 bp, Artificial sequence
  SiRNA target sequence
ggatctaatttggctttacttc

SEQ ID NO: 230311 - DNA, 22 bp, Artificial sequence
  SiRNA target sequence
gatctaatttggctttacttct

SEQ ID NO: 230312 - DNA, 22 bp, Artificial sequence
  SiRNA target sequence
atctaatttggctttacttctt

SEQ ID NO: 230313 - DNA, 22 bp, Artificial sequence
  SiRNA target sequence
tctaatttggctttacttcttt

SEQ ID NO: 230314 - DNA, 22 bp, Artificial sequence
  SiRNA target sequence
ctaatttggctttacttctttc

SEQ ID NO: 230315 - DNA, 22 bp, Artificial sequence
  SiRNA target sequence
taatttggctttacttctttca

SEQ ID NO: 230316 - DNA, 22 bp, Artificial sequence
  SiRNA target sequence
aatttggctttacttctttcag

SEQ ID NO: 230317 - DNA, 22 bp, Artificial sequence
  SiRNA target sequence
atttggctttacttctttcagg

SEQ ID NO: 230318 - DNA, 22 bp, Artificial sequence
  SiRNA target sequence
tttggctttacttctttcagga

SEQ ID NO: 230319 - DNA, 22 bp, Artificial sequence
  SiRNA target sequence
ttggctttacttctttcaggaa

SEQ ID NO: 230320 - DNA, 22 bp, Artificial sequence
  SiRNA target sequence
tggctttacttctttcaggaat

SEQ ID NO: 230321 - DNA, 22 bp, Artificial sequence
  SiRNA target sequence
ggctttacttctttcaggaatg

SEQ ID NO: 230322 - DNA, 22 bp, Artificial sequence
  SiRNA target sequence
gctttacttctttcaggaatga

SEQ ID NO: 230323 - DNA, 22 bp, Artificial sequence
  SiRNA target sequence
ctttacttctttcaggaatgat

SEQ ID NO: 230324 - DNA, 22 bp, Artificial sequence
  SiRNA target sequence
tttacttctttcaggaatgata

SEQ ID NO: 230325 - DNA, 22 bp, Artificial sequence
  SiRNA target sequence
ttacttctttcaggaatgataa

SEQ ID NO: 230326 - DNA, 22 bp, Artificial sequence
  SiRNA target sequence
tacttctttcaggaatgataaa

SEQ ID NO: 230327 - DNA, 22 bp, Artificial sequence
  SiRNA target sequence
acttctttcaggaatgataaat

SEQ ID NO: 230328 - DNA, 22 bp, Artificial sequence
  SiRNA target sequence
cttctttcaggaatgataaatt

SEQ ID NO: 230329 - DNA, 22 bp, Artificial sequence
  SiRNA target sequence
ttctttcaggaatgataaatta

SEQ ID NO: 230330 - DNA, 22 bp, Artificial sequence
  SiRNA target sequence
tctttcaggaatgataaattac

SEQ ID NO: 230331 - DNA, 22 bp, Artificial sequence
  SiRNA target sequence
ctttcaggaatgataaattact

SEQ ID NO: 230332 - DNA, 22 bp, Artificial sequence
  SiRNA target sequence
tttcaggaatgataaattactt

SEQ ID NO: 230333 - DNA, 22 bp, Artificial sequence
  SiRNA target sequence
ttcaggaatgataaattacttt

SEQ ID NO: 230334 - DNA, 22 bp, Artificial sequence
  SiRNA target sequence
tcaggaatgataaattactttt

SEQ ID NO: 230335 - DNA, 22 bp, Artificial sequence
  SiRNA target sequence
caggaatgataaattactttta

SEQ ID NO: 230336 - DNA, 22 bp, Artificial sequence
  SiRNA target sequence
aggaatgataaattacttttat

SEQ ID NO: 230337 - DNA, 22 bp, Artificial sequence
  SiRNA target sequence
ggaatgataaattacttttata

SEQ ID NO: 230338 - DNA, 22 bp, Artificial sequence
  SiRNA target sequence
gaatgataaattacttttatag

SEQ ID NO: 230339 - DNA, 22 bp, Artificial sequence
  SiRNA target sequence
aatgataaattacttttatagt

SEQ ID NO: 230340 - DNA, 22 bp, Artificial sequence
  SiRNA target sequence
atgataaattacttttatagtg

SEQ ID NO: 230341 - DNA, 22 bp, Artificial sequence
  SiRNA target sequence
tgataaattacttttatagtgt

SEQ ID NO: 230342 - DNA, 22 bp, Artificial sequence
  SiRNA target sequence
gataaattacttttatagtgta

SEQ ID NO: 230343 - DNA, 22 bp, Artificial sequence
  SiRNA target sequence
ataaattacttttatagtgtaa

SEQ ID NO: 230344 - DNA, 22 bp, Artificial sequence
  SiRNA target sequence
taaattacttttatagtgtaag

SEQ ID NO: 230345 - DNA, 22 bp, Artificial sequence
  SiRNA target sequence
aaattacttttatagtgtaagt

SEQ ID NO: 230346 - DNA, 22 bp, Artificial sequence
  SiRNA target sequence
aattacttttatagtgtaagta

SEQ ID NO: 230347 - DNA, 22 bp, Artificial sequence
  SiRNA target sequence
attacttttatagtgtaagtaa

SEQ ID NO: 230348 - DNA, 22 bp, Artificial sequence
  SiRNA target sequence
ttacttttatagtgtaagtaaa

SEQ ID NO: 230349 - DNA, 22 bp, Artificial sequence
  SiRNA target sequence
tacttttatagtgtaagtaaat

SEQ ID NO: 230350 - DNA, 22 bp, Artificial sequence
  SiRNA target sequence
acttttatagtgtaagtaaatc

SEQ ID NO: 230351 - DNA, 22 bp, Artificial sequence
  SiRNA target sequence
cttttatagtgtaagtaaatct

SEQ ID NO: 230352 - DNA, 22 bp, Artificial sequence
  SiRNA target sequence
ttttatagtgtaagtaaatcta

SEQ ID NO: 230353 - DNA, 22 bp, Artificial sequence
  SiRNA target sequence
tttatagtgtaagtaaatctaa

SEQ ID NO: 230354 - DNA, 22 bp, Artificial sequence
  SiRNA target sequence
ttatagtgtaagtaaatctaaa

SEQ ID NO: 230355 - DNA, 22 bp, Artificial sequence
  SiRNA target sequence
tatagtgtaagtaaatctaaaa

SEQ ID NO: 230356 - DNA, 22 bp, Artificial sequence
  SiRNA target sequence
atagtgtaagtaaatctaaaat

SEQ ID NO: 230357 - DNA, 22 bp, Artificial sequence
  SiRNA target sequence
tagtgtaagtaaatctaaaatg

SEQ ID NO: 230358 - DNA, 22 bp, Artificial sequence
  SiRNA target sequence
agtgtaagtaaatctaaaatgt

SEQ ID NO: 230359 - DNA, 22 bp, Artificial sequence
  SiRNA target sequence
gtgtaagtaaatctaaaatgtc

SEQ ID NO: 230360 - DNA, 22 bp, Artificial sequence
  SiRNA target sequence
tgtaagtaaatctaaaatgtcg

SEQ ID NO: 230361 - DNA, 22 bp, Artificial sequence
  SiRNA target sequence
gtaagtaaatctaaaatgtcgt

SEQ ID NO: 230362 - DNA, 22 bp, Artificial sequence
  SiRNA target sequence
taagtaaatctaaaatgtcgta

SEQ ID NO: 230363 - DNA, 22 bp, Artificial sequence
  SiRNA target sequence
aagtaaatctaaaatgtcgtat

SEQ ID NO: 230364 - DNA, 22 bp, Artificial sequence
  SiRNA target sequence
agtaaatctaaaatgtcgtatg

SEQ ID NO: 230365 - DNA, 22 bp, Artificial sequence
  SiRNA target sequence
gtaaatctaaaatgtcgtatgt

SEQ ID NO: 230366 - DNA, 22 bp, Artificial sequence
  SiRNA target sequence
taaatctaaaatgtcgtatgtt

SEQ ID NO: 230367 - DNA, 22 bp, Artificial sequence
  SiRNA target sequence
aaatctaaaatgtcgtatgttg

SEQ ID NO: 230368 - DNA, 22 bp, Artificial sequence
  SiRNA target sequence
aatctaaaatgtcgtatgttgc

SEQ ID NO: 230369 - DNA, 22 bp, Artificial sequence
  SiRNA target sequence
atctaaaatgtcgtatgttgcg

SEQ ID NO: 230370 - DNA, 22 bp, Artificial sequence
  SiRNA target sequence
tctaaaatgtcgtatgttgcgg

SEQ ID NO: 230371 - DNA, 22 bp, Artificial sequence
  SiRNA target sequence
ctaaaatgtcgtatgttgcggc

SEQ ID NO: 230372 - DNA, 22 bp, Artificial sequence
  SiRNA target sequence
taaaatgtcgtatgttgcggcc

SEQ ID NO: 230373 - DNA, 22 bp, Artificial sequence
  SiRNA target sequence
aaaatgtcgtatgttgcggccg

SEQ ID NO: 230374 - DNA, 22 bp, Artificial sequence
  SiRNA target sequence
aaatgtcgtatgttgcggccga

SEQ ID NO: 230375 - DNA, 22 bp, Artificial sequence
  SiRNA target sequence
aatgtcgtatgttgcggccgaa

SEQ ID NO: 230376 - DNA, 22 bp, Artificial sequence
  SiRNA target sequence
atgtcgtatgttgcggccgaaa

SEQ ID NO: 230377 - DNA, 22 bp, Artificial sequence
  SiRNA target sequence
tgtcgtatgttgcggccgaaag

SEQ ID NO: 230378 - DNA, 22 bp, Artificial sequence
  SiRNA target sequence
gtcgtatgttgcggccgaaaga

SEQ ID NO: 230379 - DNA, 22 bp, Artificial sequence
  SiRNA target sequence
tcgtatgttgcggccgaaagat

SEQ ID NO: 230380 - DNA, 22 bp, Artificial sequence
  SiRNA target sequence
cgtatgttgcggccgaaagatt

SEQ ID NO: 230381 - DNA, 22 bp, Artificial sequence
  SiRNA target sequence
gtatgttgcggccgaaagattt

SEQ ID NO: 230382 - DNA, 22 bp, Artificial sequence
  SiRNA target sequence
tatgttgcggccgaaagatttt

SEQ ID NO: 230383 - DNA, 22 bp, Artificial sequence
  SiRNA target sequence
atgttgcggccgaaagattttt

SEQ ID NO: 230384 - DNA, 22 bp, Artificial sequence
  SiRNA target sequence
tgttgcggccgaaagatttttt

SEQ ID NO: 230385 - DNA, 22 bp, Artificial sequence
  SiRNA target sequence
gttgcggccgaaagatttttta

SEQ ID NO: 230386 - DNA, 22 bp, Artificial sequence
  SiRNA target sequence
ttgcggccgaaagattttttaa

SEQ ID NO: 230387 - DNA, 22 bp, Artificial sequence
  SiRNA target sequence
tgcggccgaaagattttttaat

SEQ ID NO: 230388 - DNA, 22 bp, Artificial sequence
  SiRNA target sequence
gcggccgaaagattttttaatg

SEQ ID NO: 230389 - DNA, 22 bp, Artificial sequence
  SiRNA target sequence
cggccgaaagattttttaatgg

SEQ ID NO: 230390 - DNA, 22 bp, Artificial sequence
  SiRNA target sequence
ggccgaaagattttttaatgga

SEQ ID NO: 230391 - DNA, 22 bp, Artificial sequence
  SiRNA target sequence
gccgaaagattttttaatggat

SEQ ID NO: 230392 - DNA, 22 bp, Artificial sequence
  SiRNA target sequence
ccgaaagattttttaatggatt

SEQ ID NO: 230393 - DNA, 22 bp, Artificial sequence
  SiRNA target sequence
cgaaagattttttaatggattt

SEQ ID NO: 230394 - DNA, 22 bp, Artificial sequence
  SiRNA target sequence
gaaagattttttaatggatttt

SEQ ID NO: 230395 - DNA, 22 bp, Artificial sequence
  SiRNA target sequence
aaagattttttaatggattttt

SEQ ID NO: 230396 - DNA, 22 bp, Artificial sequence
  SiRNA target sequence
aagattttttaatggatttttt

SEQ ID NO: 230397 - DNA, 22 bp, Artificial sequence
  SiRNA target sequence
agattttttaatggattttttt

SEQ ID NO: 230398 - DNA, 22 bp, Artificial sequence
  SiRNA target sequence
gattttttaatggatttttttg

SEQ ID NO: 230399 - DNA, 22 bp, Artificial sequence
  SiRNA target sequence
attttttaatggatttttttgt

SEQ ID NO: 230400 - DNA, 22 bp, Artificial sequence
  SiRNA target sequence
ttttttaatggatttttttgtc

SEQ ID NO: 230401 - DNA, 22 bp, Artificial sequence
  SiRNA target sequence
tttttaatggatttttttgtct

SEQ ID NO: 230402 - DNA, 22 bp, Artificial sequence
  SiRNA target sequence
ttttaatggatttttttgtctg

SEQ ID NO: 230403 - DNA, 22 bp, Artificial sequence
  SiRNA target sequence
tttaatggatttttttgtctga

SEQ ID NO: 230404 - DNA, 22 bp, Artificial sequence
  SiRNA target sequence
ttaatggatttttttgtctgag

SEQ ID NO: 230405 - DNA, 22 bp, Artificial sequence
  SiRNA target sequence
taatggatttttttgtctgagt

SEQ ID NO: 230406 - DNA, 22 bp, Artificial sequence
  SiRNA target sequence
aatggatttttttgtctgagtg

SEQ ID NO: 230407 - DNA, 22 bp, Artificial sequence
  SiRNA target sequence
atggatttttttgtctgagtgg

SEQ ID NO: 230408 - DNA, 22 bp, Artificial sequence
  SiRNA target sequence
tggatttttttgtctgagtgga

SEQ ID NO: 230409 - DNA, 22 bp, Artificial sequence
  SiRNA target sequence
ggatttttttgtctgagtggaa

SEQ ID NO: 230410 - DNA, 22 bp, Artificial sequence
  SiRNA target sequence
gatttttttgtctgagtggaat

SEQ ID NO: 230411 - DNA, 22 bp, Artificial sequence
  SiRNA target sequence
atttttttgtctgagtggaatt

SEQ ID NO: 230412 - DNA, 22 bp, Artificial sequence
  SiRNA target sequence
tttttttgtctgagtggaattc

SEQ ID NO: 230413 - DNA, 22 bp, Artificial sequence
  SiRNA target sequence
ttttttgtctgagtggaattct

SEQ ID NO: 230414 - DNA, 22 bp, Artificial sequence
  SiRNA target sequence
tttttgtctgagtggaattctc

SEQ ID NO: 230415 - DNA, 22 bp, Artificial sequence
  SiRNA target sequence
ttttgtctgagtggaattctct

SEQ ID NO: 230416 - DNA, 22 bp, Artificial sequence
  SiRNA target sequence
tttgtctgagtggaattctctg

SEQ ID NO: 230417 - DNA, 22 bp, Artificial sequence
  SiRNA target sequence
ttgtctgagtggaattctctgt

SEQ ID NO: 230418 - DNA, 22 bp, Artificial sequence
  SiRNA target sequence
tgtctgagtggaattctctgtg

SEQ ID NO: 230419 - DNA, 22 bp, Artificial sequence
  SiRNA target sequence
gtctgagtggaattctctgtgc

SEQ ID NO: 230420 - DNA, 22 bp, Artificial sequence
  SiRNA target sequence
tctgagtggaattctctgtgct

SEQ ID NO: 230421 - DNA, 22 bp, Artificial sequence
  SiRNA target sequence
ctgagtggaattctctgtgctg

SEQ ID NO: 230422 - DNA, 22 bp, Artificial sequence
  SiRNA target sequence
tgagtggaattctctgtgctgt

SEQ ID NO: 230423 - DNA, 22 bp, Artificial sequence
  SiRNA target sequence
gagtggaattctctgtgctgta

SEQ ID NO: 230424 - DNA, 22 bp, Artificial sequence
  SiRNA target sequence
agtggaattctctgtgctgtaa

SEQ ID NO: 230425 - DNA, 22 bp, Artificial sequence
  SiRNA target sequence
gtggaattctctgtgctgtaat

SEQ ID NO: 230426 - DNA, 22 bp, Artificial sequence
  SiRNA target sequence
tggaattctctgtgctgtaatt

SEQ ID NO: 230427 - DNA, 22 bp, Artificial sequence
  SiRNA target sequence
ggaattctctgtgctgtaattt

SEQ ID NO: 230428 - DNA, 22 bp, Artificial sequence
  SiRNA target sequence
gaattctctgtgctgtaattta

SEQ ID NO: 230429 - DNA, 22 bp, Artificial sequence
  SiRNA target sequence
aattctctgtgctgtaatttat

SEQ ID NO: 230430 - DNA, 22 bp, Artificial sequence
  SiRNA target sequence
attctctgtgctgtaatttatc

SEQ ID NO: 230431 - DNA, 22 bp, Artificial sequence
  SiRNA target sequence
ttctctgtgctgtaatttatct

SEQ ID NO: 230432 - DNA, 22 bp, Artificial sequence
  SiRNA target sequence
tctctgtgctgtaatttatctt

SEQ ID NO: 230433 - DNA, 22 bp, Artificial sequence
  SiRNA target sequence
ctctgtgctgtaatttatcttc

SEQ ID NO: 230434 - DNA, 22 bp, Artificial sequence
  SiRNA target sequence
tctgtgctgtaatttatcttct

SEQ ID NO: 230435 - DNA, 22 bp, Artificial sequence
  SiRNA target sequence
ctgtgctgtaatttatcttcta

SEQ ID NO: 230436 - DNA, 22 bp, Artificial sequence
  SiRNA target sequence
tgtgctgtaatttatcttctaa

SEQ ID NO: 230437 - DNA, 22 bp, Artificial sequence
  SiRNA target sequence
gtgctgtaatttatcttctaaa

SEQ ID NO: 230438 - DNA, 22 bp, Artificial sequence
  SiRNA target sequence
tgctgtaatttatcttctaaaa

SEQ ID NO: 230439 - DNA, 22 bp, Artificial sequence
  SiRNA target sequence
gctgtaatttatcttctaaaaa

SEQ ID NO: 230440 - DNA, 22 bp, Artificial sequence
  SiRNA target sequence
ctgtaatttatcttctaaaaaa

SEQ ID NO: 230441 - DNA, 22 bp, Artificial sequence
  SiRNA target sequence
tgtaatttatcttctaaaaaaa

SEQ ID NO: 230442 - DNA, 22 bp, Artificial sequence
  SiRNA target sequence
gtaatttatcttctaaaaaaat

SEQ ID NO: 230443 - DNA, 22 bp, Artificial sequence
  SiRNA target sequence
taatttatcttctaaaaaaata

SEQ ID NO: 230444 - DNA, 22 bp, Artificial sequence
  SiRNA target sequence
aatttatcttctaaaaaaatat

SEQ ID NO: 230445 - DNA, 22 bp, Artificial sequence
  SiRNA target sequence
atttatcttctaaaaaaatatt

SEQ ID NO: 230446 - DNA, 22 bp, Artificial sequence
  SiRNA target sequence
tttatcttctaaaaaaatattt

SEQ ID NO: 230447 - DNA, 22 bp, Artificial sequence
  SiRNA target sequence
ttatcttctaaaaaaatattta

SEQ ID NO: 230448 - DNA, 22 bp, Artificial sequence
  SiRNA target sequence
tatcttctaaaaaaatatttag

SEQ ID NO: 230449 - DNA, 22 bp, Artificial sequence
  SiRNA target sequence
atcttctaaaaaaatatttaga

SEQ ID NO: 230450 - DNA, 22 bp, Artificial sequence
  SiRNA target sequence
tcttctaaaaaaatatttagaa

SEQ ID NO: 230451 - DNA, 22 bp, Artificial sequence
  SiRNA target sequence
cttctaaaaaaatatttagaaa

SEQ ID NO: 230452 - DNA, 22 bp, Artificial sequence
  SiRNA target sequence
ttctaaaaaaatatttagaaaa

SEQ ID NO: 230453 - DNA, 22 bp, Artificial sequence
  SiRNA target sequence
tctaaaaaaatatttagaaaat

SEQ ID NO: 230454 - DNA, 22 bp, Artificial sequence
  SiRNA target sequence
ctaaaaaaatatttagaaaata

SEQ ID NO: 230455 - DNA, 22 bp, Artificial sequence
  SiRNA target sequence
taaaaaaatatttagaaaataa

SEQ ID NO: 230456 - DNA, 22 bp, Artificial sequence
  SiRNA target sequence
aaaaaaatatttagaaaataat

SEQ ID NO: 230457 - DNA, 22 bp, Artificial sequence
  SiRNA target sequence
aaaaaatatttagaaaataatg

SEQ ID NO: 230458 - DNA, 22 bp, Artificial sequence
  SiRNA target sequence
aaaaatatttagaaaataatgt

SEQ ID NO: 230459 - DNA, 22 bp, Artificial sequence
  SiRNA target sequence
aaaatatttagaaaataatgtt

SEQ ID NO: 230460 - DNA, 22 bp, Artificial sequence
  SiRNA target sequence
aaatatttagaaaataatgtta

SEQ ID NO: 230461 - DNA, 22 bp, Artificial sequence
  SiRNA target sequence
aatatttagaaaataatgttac

SEQ ID NO: 230462 - DNA, 22 bp, Artificial sequence
  SiRNA target sequence
atatttagaaaataatgttact

SEQ ID NO: 230463 - DNA, 22 bp, Artificial sequence
  SiRNA target sequence
tatttagaaaataatgttacta

SEQ ID NO: 230464 - DNA, 22 bp, Artificial sequence
  SiRNA target sequence
atttagaaaataatgttactag

SEQ ID NO: 230465 - DNA, 22 bp, Artificial sequence
  SiRNA target sequence
tttagaaaataatgttactagc

SEQ ID NO: 230466 - DNA, 22 bp, Artificial sequence
  SiRNA target sequence
ttagaaaataatgttactagca

SEQ ID NO: 230467 - DNA, 22 bp, Artificial sequence
  SiRNA target sequence
tagaaaataatgttactagcaa

SEQ ID NO: 230468 - DNA, 22 bp, Artificial sequence
  SiRNA target sequence
agaaaataatgttactagcaaa

SEQ ID NO: 230469 - DNA, 22 bp, Artificial sequence
  SiRNA target sequence
gaaaataatgttactagcaaac

SEQ ID NO: 230470 - DNA, 22 bp, Artificial sequence
  SiRNA target sequence
aaaataatgttactagcaaacc

SEQ ID NO: 230471 - DNA, 22 bp, Artificial sequence
  SiRNA target sequence
aaataatgttactagcaaacca

SEQ ID NO: 230472 - DNA, 22 bp, Artificial sequence
  SiRNA target sequence
aataatgttactagcaaaccaa

SEQ ID NO: 230473 - DNA, 22 bp, Artificial sequence
  SiRNA target sequence
ataatgttactagcaaaccaat

SEQ ID NO: 230474 - DNA, 22 bp, Artificial sequence
  SiRNA target sequence
taatgttactagcaaaccaatg

SEQ ID NO: 230475 - DNA, 22 bp, Artificial sequence
  SiRNA target sequence
aatgttactagcaaaccaatgt

SEQ ID NO: 230476 - DNA, 22 bp, Artificial sequence
  SiRNA target sequence
atgttactagcaaaccaatgtt

SEQ ID NO: 230477 - DNA, 22 bp, Artificial sequence
  SiRNA target sequence
tgttactagcaaaccaatgttt

SEQ ID NO: 230478 - DNA, 22 bp, Artificial sequence
  SiRNA target sequence
gttactagcaaaccaatgtttg

SEQ ID NO: 230479 - DNA, 22 bp, Artificial sequence
  SiRNA target sequence
ttactagcaaaccaatgtttgt

SEQ ID NO: 230480 - DNA, 22 bp, Artificial sequence
  SiRNA target sequence
tactagcaaaccaatgtttgtt

SEQ ID NO: 230481 - DNA, 22 bp, Artificial sequence
  SiRNA target sequence
actagcaaaccaatgtttgtta

SEQ ID NO: 230482 - DNA, 22 bp, Artificial sequence
  SiRNA target sequence
ctagcaaaccaatgtttgttag

SEQ ID NO: 230483 - DNA, 22 bp, Artificial sequence
  SiRNA target sequence
tagcaaaccaatgtttgttaga

SEQ ID NO: 230484 - DNA, 22 bp, Artificial sequence
  SiRNA target sequence
agcaaaccaatgtttgttagaa

SEQ ID NO: 230485 - DNA, 22 bp, Artificial sequence
  SiRNA target sequence
gcaaaccaatgtttgttagaaa

SEQ ID NO: 230486 - DNA, 22 bp, Artificial sequence
  SiRNA target sequence
caaaccaatgtttgttagaaag

SEQ ID NO: 230487 - DNA, 22 bp, Artificial sequence
  SiRNA target sequence
aaaccaatgtttgttagaaaga

SEQ ID NO: 230488 - DNA, 22 bp, Artificial sequence
  SiRNA target sequence
aaccaatgtttgttagaaagac

SEQ ID NO: 230489 - DNA, 22 bp, Artificial sequence
  SiRNA target sequence
accaatgtttgttagaaagact

SEQ ID NO: 230490 - DNA, 22 bp, Artificial sequence
  SiRNA target sequence
ccaatgtttgttagaaagactt

SEQ ID NO: 230491 - DNA, 22 bp, Artificial sequence
  SiRNA target sequence
caatgtttgttagaaagacttt

SEQ ID NO: 230492 - DNA, 22 bp, Artificial sequence
  SiRNA target sequence
aatgtttgttagaaagactttt

SEQ ID NO: 230493 - DNA, 22 bp, Artificial sequence
  SiRNA target sequence
atgtttgttagaaagactttta

SEQ ID NO: 230494 - DNA, 22 bp, Artificial sequence
  SiRNA target sequence
tgtttgttagaaagacttttac

SEQ ID NO: 230495 - DNA, 22 bp, Artificial sequence
  SiRNA target sequence
gtttgttagaaagacttttact

SEQ ID NO: 230496 - DNA, 22 bp, Artificial sequence
  SiRNA target sequence
tttgttagaaagacttttacta

SEQ ID NO: 230497 - DNA, 22 bp, Artificial sequence
  SiRNA target sequence
ttgttagaaagacttttactaa

SEQ ID NO: 230498 - DNA, 22 bp, Artificial sequence
  SiRNA target sequence
tgttagaaagacttttactaaa

SEQ ID NO: 230499 - DNA, 22 bp, Artificial sequence
  SiRNA target sequence
gttagaaagacttttactaaaa

SEQ ID NO: 230500 - DNA, 22 bp, Artificial sequence
  SiRNA target sequence
ttagaaagacttttactaaaaa

SEQ ID NO: 230501 - DNA, 22 bp, Artificial sequence
  SiRNA target sequence
tagaaagacttttactaaaaag

SEQ ID NO: 230502 - DNA, 22 bp, Artificial sequence
  SiRNA target sequence
agaaagacttttactaaaaaga

SEQ ID NO: 230503 - DNA, 22 bp, Artificial sequence
  SiRNA target sequence
gaaagacttttactaaaaagaa

SEQ ID NO: 230504 - DNA, 22 bp, Artificial sequence
  SiRNA target sequence
aaagacttttactaaaaagaag

SEQ ID NO: 230505 - DNA, 22 bp, Artificial sequence
  SiRNA target sequence
aagacttttactaaaaagaaga

SEQ ID NO: 230506 - DNA, 22 bp, Artificial sequence
  SiRNA target sequence
agacttttactaaaaagaagag

SEQ ID NO: 230507 - DNA, 22 bp, Artificial sequence
  SiRNA target sequence
gacttttactaaaaagaagagt

SEQ ID NO: 230508 - DNA, 22 bp, Artificial sequence
  SiRNA target sequence
acttttactaaaaagaagagta

SEQ ID NO: 230509 - DNA, 22 bp, Artificial sequence
  SiRNA target sequence
cttttactaaaaagaagagtaa

SEQ ID NO: 230510 - DNA, 22 bp, Artificial sequence
  SiRNA target sequence
ttttactaaaaagaagagtaaa

SEQ ID NO: 230511 - DNA, 22 bp, Artificial sequence
  SiRNA target sequence
tttactaaaaagaagagtaaag

SEQ ID NO: 230512 - DNA, 22 bp, Artificial sequence
  SiRNA target sequence
ttactaaaaagaagagtaaagt

SEQ ID NO: 230513 - DNA, 22 bp, Artificial sequence
  SiRNA target sequence
tactaaaaagaagagtaaagtg

SEQ ID NO: 230514 - DNA, 22 bp, Artificial sequence
  SiRNA target sequence
actaaaaagaagagtaaagtga

SEQ ID NO: 230515 - DNA, 22 bp, Artificial sequence
  SiRNA target sequence
ctaaaaagaagagtaaagtgaa

SEQ ID NO: 230516 - DNA, 22 bp, Artificial sequence
  SiRNA target sequence
taaaaagaagagtaaagtgaag

SEQ ID NO: 230517 - DNA, 22 bp, Artificial sequence
  SiRNA target sequence
aaaaagaagagtaaagtgaagg

SEQ ID NO: 230518 - DNA, 22 bp, Artificial sequence
  SiRNA target sequence
aaaagaagagtaaagtgaaggt

SEQ ID NO: 230519 - DNA, 22 bp, Artificial sequence
  SiRNA target sequence
aaagaagagtaaagtgaaggtt

SEQ ID NO: 230520 - DNA, 22 bp, Artificial sequence
  SiRNA target sequence
aagaagagtaaagtgaaggttg

SEQ ID NO: 230521 - DNA, 22 bp, Artificial sequence
  SiRNA target sequence
agaagagtaaagtgaaggttgg

SEQ ID NO: 230522 - DNA, 22 bp, Artificial sequence
  SiRNA target sequence
gaagagtaaagtgaaggttgga

SEQ ID NO: 230523 - DNA, 22 bp, Artificial sequence
  SiRNA target sequence
aagagtaaagtgaaggttggat

SEQ ID NO: 230524 - DNA, 22 bp, Artificial sequence
  SiRNA target sequence
agagtaaagtgaaggttggatt

SEQ ID NO: 230525 - DNA, 22 bp, Artificial sequence
  SiRNA target sequence
gagtaaagtgaaggttggattt

SEQ ID NO: 230526 - DNA, 22 bp, Artificial sequence
  SiRNA target sequence
agtaaagtgaaggttggatttg

SEQ ID NO: 230527 - DNA, 22 bp, Artificial sequence
  SiRNA target sequence
gtaaagtgaaggttggatttgt

SEQ ID NO: 230528 - DNA, 22 bp, Artificial sequence
  SiRNA target sequence
taaagtgaaggttggatttgtt

SEQ ID NO: 230529 - DNA, 22 bp, Artificial sequence
  SiRNA target sequence
aaagtgaaggttggatttgttg

SEQ ID NO: 230530 - DNA, 22 bp, Artificial sequence
  SiRNA target sequence
aagtgaaggttggatttgttga

SEQ ID NO: 230531 - DNA, 22 bp, Artificial sequence
  SiRNA target sequence
agtgaaggttggatttgttgat

SEQ ID NO: 230532 - DNA, 22 bp, Artificial sequence
  SiRNA target sequence
gtgaaggttggatttgttgatg

SEQ ID NO: 230533 - DNA, 22 bp, Artificial sequence
  SiRNA target sequence
tgaaggttggatttgttgatgg

SEQ ID NO: 230534 - DNA, 22 bp, Artificial sequence
  SiRNA target sequence
gaaggttggatttgttgatgga

SEQ ID NO: 230535 - DNA, 22 bp, Artificial sequence
  SiRNA target sequence
aaggttggatttgttgatggac

SEQ ID NO: 230536 - DNA, 22 bp, Artificial sequence
  SiRNA target sequence
aggttggatttgttgatggact

SEQ ID NO: 230537 - DNA, 22 bp, Artificial sequence
  SiRNA target sequence
ggttggatttgttgatggactt

SEQ ID NO: 230538 - DNA, 22 bp, Artificial sequence
  SiRNA target sequence
gttggatttgttgatggactta

SEQ ID NO: 230539 - DNA, 22 bp, Artificial sequence
  SiRNA target sequence
ttggatttgttgatggacttat

SEQ ID NO: 230540 - DNA, 22 bp, Artificial sequence
  SiRNA target sequence
tggatttgttgatggacttatt

SEQ ID NO: 230541 - DNA, 22 bp, Artificial sequence
  SiRNA target sequence
ggatttgttgatggacttattg

SEQ ID NO: 230542 - DNA, 22 bp, Artificial sequence
  SiRNA target sequence
gatttgttgatggacttattga

SEQ ID NO: 230543 - DNA, 22 bp, Artificial sequence
  SiRNA target sequence
atttgttgatggacttattgag

SEQ ID NO: 230544 - DNA, 22 bp, Artificial sequence
  SiRNA target sequence
tttgttgatggacttattgaga

SEQ ID NO: 230545 - DNA, 22 bp, Artificial sequence
  SiRNA target sequence
ttgttgatggacttattgagat

SEQ ID NO: 230546 - DNA, 22 bp, Artificial sequence
  SiRNA target sequence
tgttgatggacttattgagatg

SEQ ID NO: 230547 - DNA, 22 bp, Artificial sequence
  SiRNA target sequence
gttgatggacttattgagatga

SEQ ID NO: 230548 - DNA, 22 bp, Artificial sequence
  SiRNA target sequence
ttgatggacttattgagatgag

SEQ ID NO: 230549 - DNA, 22 bp, Artificial sequence
  SiRNA target sequence
tgatggacttattgagatgagt

SEQ ID NO: 230550 - DNA, 22 bp, Artificial sequence
  SiRNA target sequence
gatggacttattgagatgagta

SEQ ID NO: 230551 - DNA, 22 bp, Artificial sequence
  SiRNA target sequence
atggacttattgagatgagtaa

SEQ ID NO: 230552 - DNA, 22 bp, Artificial sequence
  SiRNA target sequence
tggacttattgagatgagtaaa

SEQ ID NO: 230553 - DNA, 22 bp, Artificial sequence
  SiRNA target sequence
ggacttattgagatgagtaaat

SEQ ID NO: 230554 - DNA, 22 bp, Artificial sequence
  SiRNA target sequence
gacttattgagatgagtaaatc

SEQ ID NO: 230555 - DNA, 22 bp, Artificial sequence
  SiRNA target sequence
acttattgagatgagtaaatct

SEQ ID NO: 230556 - DNA, 22 bp, Artificial sequence
  SiRNA target sequence
cttattgagatgagtaaatcta

SEQ ID NO: 230557 - DNA, 22 bp, Artificial sequence
  SiRNA target sequence
ttattgagatgagtaaatctaa

SEQ ID NO: 230558 - DNA, 22 bp, Artificial sequence
  SiRNA target sequence
tattgagatgagtaaatctaaa

SEQ ID NO: 230559 - DNA, 22 bp, Artificial sequence
  SiRNA target sequence
attgagatgagtaaatctaaac

SEQ ID NO: 230560 - DNA, 22 bp, Artificial sequence
  SiRNA target sequence
ttgagatgagtaaatctaaact

SEQ ID NO: 230561 - DNA, 22 bp, Artificial sequence
  SiRNA target sequence
tgagatgagtaaatctaaacta

SEQ ID NO: 230562 - DNA, 22 bp, Artificial sequence
  SiRNA target sequence
gagatgagtaaatctaaactac

SEQ ID NO: 230563 - DNA, 22 bp, Artificial sequence
  SiRNA target sequence
agatgagtaaatctaaactact

SEQ ID NO: 230564 - DNA, 22 bp, Artificial sequence
  SiRNA target sequence
gatgagtaaatctaaactactg

SEQ ID NO: 230565 - DNA, 22 bp, Artificial sequence
  SiRNA target sequence
atgagtaaatctaaactactgt

SEQ ID NO: 230566 - DNA, 22 bp, Artificial sequence
  SiRNA target sequence
tgagtaaatctaaactactgtt

SEQ ID NO: 230567 - DNA, 22 bp, Artificial sequence
  SiRNA target sequence
gagtaaatctaaactactgttg

SEQ ID NO: 230568 - DNA, 22 bp, Artificial sequence
  SiRNA target sequence
agtaaatctaaactactgttga

SEQ ID NO: 230569 - DNA, 22 bp, Artificial sequence
  SiRNA target sequence
gtaaatctaaactactgttgaa

SEQ ID NO: 230570 - DNA, 22 bp, Artificial sequence
  SiRNA target sequence
taaatctaaactactgttgaat

SEQ ID NO: 230571 - DNA, 22 bp, Artificial sequence
  SiRNA target sequence
aaatctaaactactgttgaata

SEQ ID NO: 230572 - DNA, 22 bp, Artificial sequence
  SiRNA target sequence
aatctaaactactgttgaatat

SEQ ID NO: 230573 - DNA, 22 bp, Artificial sequence
  SiRNA target sequence
atctaaactactgttgaatatg

SEQ ID NO: 230574 - DNA, 22 bp, Artificial sequence
  SiRNA target sequence
tctaaactactgttgaatatgt

SEQ ID NO: 230575 - DNA, 22 bp, Artificial sequence
  SiRNA target sequence
ctaaactactgttgaatatgtc

SEQ ID NO: 230576 - DNA, 22 bp, Artificial sequence
  SiRNA target sequence
taaactactgttgaatatgtca

SEQ ID NO: 230577 - DNA, 22 bp, Artificial sequence
  SiRNA target sequence
aaactactgttgaatatgtcat

SEQ ID NO: 230578 - DNA, 22 bp, Artificial sequence
  SiRNA target sequence
aactactgttgaatatgtcatt

SEQ ID NO: 230579 - DNA, 22 bp, Artificial sequence
  SiRNA target sequence
actactgttgaatatgtcatta

SEQ ID NO: 230580 - DNA, 22 bp, Artificial sequence
  SiRNA target sequence
ctactgttgaatatgtcattag

SEQ ID NO: 230581 - DNA, 22 bp, Artificial sequence
  SiRNA target sequence
tactgttgaatatgtcattagt

SEQ ID NO: 230582 - DNA, 22 bp, Artificial sequence
  SiRNA target sequence
actgttgaatatgtcattagtc

SEQ ID NO: 230583 - DNA, 22 bp, Artificial sequence
  SiRNA target sequence
ctgttgaatatgtcattagtcg

SEQ ID NO: 230584 - DNA, 22 bp, Artificial sequence
  SiRNA target sequence
tgttgaatatgtcattagtcgt

SEQ ID NO: 230585 - DNA, 22 bp, Artificial sequence
  SiRNA target sequence
gttgaatatgtcattagtcgta

SEQ ID NO: 230586 - DNA, 22 bp, Artificial sequence
  SiRNA target sequence
ttgaatatgtcattagtcgtat

SEQ ID NO: 230587 - DNA, 22 bp, Artificial sequence
  SiRNA target sequence
tgaatatgtcattagtcgtatt

SEQ ID NO: 230588 - DNA, 22 bp, Artificial sequence
  SiRNA target sequence
gaatatgtcattagtcgtatta

SEQ ID NO: 230589 - DNA, 22 bp, Artificial sequence
  SiRNA target sequence
aatatgtcattagtcgtattat

SEQ ID NO: 230590 - DNA, 22 bp, Artificial sequence
  SiRNA target sequence
atatgtcattagtcgtattatt

SEQ ID NO: 230591 - DNA, 22 bp, Artificial sequence
  SiRNA target sequence
tatgtcattagtcgtattattt

SEQ ID NO: 230592 - DNA, 22 bp, Artificial sequence
  SiRNA target sequence
atgtcattagtcgtattatttt

SEQ ID NO: 230593 - DNA, 22 bp, Artificial sequence
  SiRNA target sequence
tgtcattagtcgtattatttta

SEQ ID NO: 230594 - DNA, 22 bp, Artificial sequence
  SiRNA target sequence
gtcattagtcgtattattttat

SEQ ID NO: 230595 - DNA, 22 bp, Artificial sequence
  SiRNA target sequence
tcattagtcgtattattttatg

SEQ ID NO: 230596 - DNA, 22 bp, Artificial sequence
  SiRNA target sequence
cattagtcgtattattttatgc

SEQ ID NO: 230597 - DNA, 22 bp, Artificial sequence
  SiRNA target sequence
attagtcgtattattttatgct

SEQ ID NO: 230598 - DNA, 22 bp, Artificial sequence
  SiRNA target sequence
ttagtcgtattattttatgctg

SEQ ID NO: 230599 - DNA, 22 bp, Artificial sequence
  SiRNA target sequence
tagtcgtattattttatgctgt

SEQ ID NO: 230600 - DNA, 22 bp, Artificial sequence
  SiRNA target sequence
agtcgtattattttatgctgtt

SEQ ID NO: 230601 - DNA, 22 bp, Artificial sequence
  SiRNA target sequence
gtcgtattattttatgctgttt

SEQ ID NO: 230602 - DNA, 22 bp, Artificial sequence
  SiRNA target sequence
tcgtattattttatgctgtttc

SEQ ID NO: 230603 - DNA, 22 bp, Artificial sequence
  SiRNA target sequence
cgtattattttatgctgtttct

SEQ ID NO: 230604 - DNA, 22 bp, Artificial sequence
  SiRNA target sequence
gtattattttatgctgtttcta

SEQ ID NO: 230605 - DNA, 22 bp, Artificial sequence
  SiRNA target sequence
tattattttatgctgtttctac

SEQ ID NO: 230606 - DNA, 22 bp, Artificial sequence
  SiRNA target sequence
attattttatgctgtttctacg

SEQ ID NO: 230607 - DNA, 22 bp, Artificial sequence
  SiRNA target sequence
ttattttatgctgtttctacga

SEQ ID NO: 230608 - DNA, 22 bp, Artificial sequence
  SiRNA target sequence
tattttatgctgtttctacgaa

SEQ ID NO: 230609 - DNA, 22 bp, Artificial sequence
  SiRNA target sequence
attttatgctgtttctacgaat

SEQ ID NO: 230610 - DNA, 22 bp, Artificial sequence
  SiRNA target sequence
ttttatgctgtttctacgaata

SEQ ID NO: 230611 - DNA, 22 bp, Artificial sequence
  SiRNA target sequence
tttatgctgtttctacgaatat

SEQ ID NO: 230612 - DNA, 22 bp, Artificial sequence
  SiRNA target sequence
ttatgctgtttctacgaatatt

SEQ ID NO: 230613 - DNA, 22 bp, Artificial sequence
  SiRNA target sequence
tatgctgtttctacgaatatta

SEQ ID NO: 230614 - DNA, 22 bp, Artificial sequence
  SiRNA target sequence
atgctgtttctacgaatattat

SEQ ID NO: 230615 - DNA, 22 bp, Artificial sequence
  SiRNA target sequence
tgctgtttctacgaatattatt

SEQ ID NO: 230616 - DNA, 22 bp, Artificial sequence
  SiRNA target sequence
gctgtttctacgaatattattg

SEQ ID NO: 230617 - DNA, 22 bp, Artificial sequence
  SiRNA target sequence
ctgtttctacgaatattattga

SEQ ID NO: 230618 - DNA, 22 bp, Artificial sequence
  SiRNA target sequence
tgtttctacgaatattattgag

SEQ ID NO: 230619 - DNA, 22 bp, Artificial sequence
  SiRNA target sequence
gtttctacgaatattattgagt

SEQ ID NO: 230620 - DNA, 22 bp, Artificial sequence
  SiRNA target sequence
tttctacgaatattattgagtc

SEQ ID NO: 230621 - DNA, 22 bp, Artificial sequence
  SiRNA target sequence
ttctacgaatattattgagtca

SEQ ID NO: 230622 - DNA, 22 bp, Artificial sequence
  SiRNA target sequence
tctacgaatattattgagtcag

SEQ ID NO: 230623 - DNA, 22 bp, Artificial sequence
  SiRNA target sequence
ctacgaatattattgagtcagc

SEQ ID NO: 230624 - DNA, 22 bp, Artificial sequence
  SiRNA target sequence
tacgaatattattgagtcagct

SEQ ID NO: 230625 - DNA, 22 bp, Artificial sequence
  SiRNA target sequence
acgaatattattgagtcagctt

SEQ ID NO: 230626 - DNA, 22 bp, Artificial sequence
  SiRNA target sequence
cgaatattattgagtcagctta

SEQ ID NO: 230627 - DNA, 22 bp, Artificial sequence
  SiRNA target sequence
gaatattattgagtcagcttat

SEQ ID NO: 230628 - DNA, 22 bp, Artificial sequence
  SiRNA target sequence
aatattattgagtcagcttata

SEQ ID NO: 230629 - DNA, 22 bp, Artificial sequence
  SiRNA target sequence
atattattgagtcagcttataa

SEQ ID NO: 230630 - DNA, 22 bp, Artificial sequence
  SiRNA target sequence
tattattgagtcagcttataaa

SEQ ID NO: 230631 - DNA, 22 bp, Artificial sequence
  SiRNA target sequence
attattgagtcagcttataaat

SEQ ID NO: 230632 - DNA, 22 bp, Artificial sequence
  SiRNA target sequence
ttattgagtcagcttataaatc

SEQ ID NO: 230633 - DNA, 22 bp, Artificial sequence
  SiRNA target sequence
tattgagtcagcttataaatct

SEQ ID NO: 230634 - DNA, 22 bp, Artificial sequence
  SiRNA target sequence
attgagtcagcttataaatctg

SEQ ID NO: 230635 - DNA, 22 bp, Artificial sequence
  SiRNA target sequence
ttgagtcagcttataaatctgc

SEQ ID NO: 230636 - DNA, 22 bp, Artificial sequence
  SiRNA target sequence
tgagtcagcttataaatctgct

SEQ ID NO: 230637 - DNA, 22 bp, Artificial sequence
  SiRNA target sequence
gagtcagcttataaatctgctt

SEQ ID NO: 230638 - DNA, 22 bp, Artificial sequence
  SiRNA target sequence
agtcagcttataaatctgcttt

SEQ ID NO: 230639 - DNA, 22 bp, Artificial sequence
  SiRNA target sequence
gtcagcttataaatctgcttta

SEQ ID NO: 230640 - DNA, 22 bp, Artificial sequence
  SiRNA target sequence
tcagcttataaatctgctttag

SEQ ID NO: 230641 - DNA, 22 bp, Artificial sequence
  SiRNA target sequence
cagcttataaatctgctttagc

SEQ ID NO: 230642 - DNA, 22 bp, Artificial sequence
  SiRNA target sequence
agcttataaatctgctttagct

SEQ ID NO: 230643 - DNA, 22 bp, Artificial sequence
  SiRNA target sequence
gcttataaatctgctttagctg

SEQ ID NO: 230644 - DNA, 22 bp, Artificial sequence
  SiRNA target sequence
cttataaatctgctttagctgt

SEQ ID NO: 230645 - DNA, 22 bp, Artificial sequence
  SiRNA target sequence
ttataaatctgctttagctgtc

SEQ ID NO: 230646 - DNA, 22 bp, Artificial sequence
  SiRNA target sequence
tataaatctgctttagctgtcg

SEQ ID NO: 230647 - DNA, 22 bp, Artificial sequence
  SiRNA target sequence
ataaatctgctttagctgtcgg

SEQ ID NO: 230648 - DNA, 22 bp, Artificial sequence
  SiRNA target sequence
taaatctgctttagctgtcggt

SEQ ID NO: 230649 - DNA, 22 bp, Artificial sequence
  SiRNA target sequence
aaatctgctttagctgtcggtg

SEQ ID NO: 230650 - DNA, 22 bp, Artificial sequence
  SiRNA target sequence
aatctgctttagctgtcggtgc

SEQ ID NO: 230651 - DNA, 22 bp, Artificial sequence
  SiRNA target sequence
atctgctttagctgtcggtgct

SEQ ID NO: 230652 - DNA, 22 bp, Artificial sequence
  SiRNA target sequence
tctgctttagctgtcggtgcta

SEQ ID NO: 230653 - DNA, 22 bp, Artificial sequence
  SiRNA target sequence
ctgctttagctgtcggtgctaa

SEQ ID NO: 230654 - DNA, 22 bp, Artificial sequence
  SiRNA target sequence
tgctttagctgtcggtgctaat

SEQ ID NO: 230655 - DNA, 22 bp, Artificial sequence
  SiRNA target sequence
gctttagctgtcggtgctaatg

SEQ ID NO: 230656 - DNA, 22 bp, Artificial sequence
  SiRNA target sequence
ctttagctgtcggtgctaatga

SEQ ID NO: 230657 - DNA, 22 bp, Artificial sequence
  SiRNA target sequence
tttagctgtcggtgctaatgaa

SEQ ID NO: 230658 - DNA, 22 bp, Artificial sequence
  SiRNA target sequence
ttagctgtcggtgctaatgaaa

SEQ ID NO: 230659 - DNA, 22 bp, Artificial sequence
  SiRNA target sequence
tagctgtcggtgctaatgaaac

SEQ ID NO: 230660 - DNA, 22 bp, Artificial sequence
  SiRNA target sequence
agctgtcggtgctaatgaaact

SEQ ID NO: 230661 - DNA, 22 bp, Artificial sequence
  SiRNA target sequence
gctgtcggtgctaatgaaactg

SEQ ID NO: 230662 - DNA, 22 bp, Artificial sequence
  SiRNA target sequence
ctgtcggtgctaatgaaactgg

SEQ ID NO: 230663 - DNA, 22 bp, Artificial sequence
  SiRNA target sequence
tgtcggtgctaatgaaactggt

SEQ ID NO: 230664 - DNA, 22 bp, Artificial sequence
  SiRNA target sequence
gtcggtgctaatgaaactggtg

SEQ ID NO: 230665 - DNA, 22 bp, Artificial sequence
  SiRNA target sequence
tcggtgctaatgaaactggtga

SEQ ID NO: 230666 - DNA, 22 bp, Artificial sequence
  SiRNA target sequence
cggtgctaatgaaactggtgag

SEQ ID NO: 230667 - DNA, 22 bp, Artificial sequence
  SiRNA target sequence
ggtgctaatgaaactggtgagg

SEQ ID NO: 230668 - DNA, 22 bp, Artificial sequence
  SiRNA target sequence
gtgctaatgaaactggtgaggc

SEQ ID NO: 230669 - DNA, 22 bp, Artificial sequence
  SiRNA target sequence
tgctaatgaaactggtgaggca

SEQ ID NO: 230670 - DNA, 22 bp, Artificial sequence
  SiRNA target sequence
gctaatgaaactggtgaggcaa

SEQ ID NO: 230671 - DNA, 22 bp, Artificial sequence
  SiRNA target sequence
ctaatgaaactggtgaggcaaa

SEQ ID NO: 230672 - DNA, 22 bp, Artificial sequence
  SiRNA target sequence
taatgaaactggtgaggcaaaa

SEQ ID NO: 230673 - DNA, 22 bp, Artificial sequence
  SiRNA target sequence
aatgaaactggtgaggcaaaat

SEQ ID NO: 230674 - DNA, 22 bp, Artificial sequence
  SiRNA target sequence
atgaaactggtgaggcaaaatc

SEQ ID NO: 230675 - DNA, 22 bp, Artificial sequence
  SiRNA target sequence
tgaaactggtgaggcaaaatct

SEQ ID NO: 230676 - DNA, 22 bp, Artificial sequence
  SiRNA target sequence
gaaactggtgaggcaaaatcta

SEQ ID NO: 230677 - DNA, 22 bp, Artificial sequence
  SiRNA target sequence
aaactggtgaggcaaaatctac

SEQ ID NO: 230678 - DNA, 22 bp, Artificial sequence
  SiRNA target sequence
aactggtgaggcaaaatctacc

SEQ ID NO: 230679 - DNA, 22 bp, Artificial sequence
  SiRNA target sequence
actggtgaggcaaaatctacct

SEQ ID NO: 230680 - DNA, 22 bp, Artificial sequence
  SiRNA target sequence
ctggtgaggcaaaatctaccta

SEQ ID NO: 230681 - DNA, 22 bp, Artificial sequence
  SiRNA target sequence
tggtgaggcaaaatctacctat

SEQ ID NO: 230682 - DNA, 22 bp, Artificial sequence
  SiRNA target sequence
ggtgaggcaaaatctacctatg

SEQ ID NO: 230683 - DNA, 22 bp, Artificial sequence
  SiRNA target sequence
gtgaggcaaaatctacctatgc

SEQ ID NO: 230684 - DNA, 22 bp, Artificial sequence
  SiRNA target sequence
tgaggcaaaatctacctatgct

SEQ ID NO: 230685 - DNA, 22 bp, Artificial sequence
  SiRNA target sequence
gaggcaaaatctacctatgctt

SEQ ID NO: 230686 - DNA, 22 bp, Artificial sequence
  SiRNA target sequence
aggcaaaatctacctatgcttc

SEQ ID NO: 230687 - DNA, 22 bp, Artificial sequence
  SiRNA target sequence
ggcaaaatctacctatgcttca

SEQ ID NO: 230688 - DNA, 22 bp, Artificial sequence
  SiRNA target sequence
gcaaaatctacctatgcttcaa

SEQ ID NO: 230689 - DNA, 22 bp, Artificial sequence
  SiRNA target sequence
caaaatctacctatgcttcaat

SEQ ID NO: 230690 - DNA, 22 bp, Artificial sequence
  SiRNA target sequence
aaaatctacctatgcttcaatt

SEQ ID NO: 230691 - DNA, 22 bp, Artificial sequence
  SiRNA target sequence
aaatctacctatgcttcaattt

SEQ ID NO: 230692 - DNA, 22 bp, Artificial sequence
  SiRNA target sequence
aatctacctatgcttcaattta

SEQ ID NO: 230693 - DNA, 22 bp, Artificial sequence
  SiRNA target sequence
atctacctatgcttcaatttat

SEQ ID NO: 230694 - DNA, 22 bp, Artificial sequence
  SiRNA target sequence
tctacctatgcttcaatttata

SEQ ID NO: 230695 - DNA, 22 bp, Artificial sequence
  SiRNA target sequence
ctacctatgcttcaatttatac

SEQ ID NO: 230696 - DNA, 22 bp, Artificial sequence
  SiRNA target sequence
tacctatgcttcaatttataca

SEQ ID NO: 230697 - DNA, 22 bp, Artificial sequence
  SiRNA target sequence
acctatgcttcaatttatacat

SEQ ID NO: 230698 - DNA, 22 bp, Artificial sequence
  SiRNA target sequence
cctatgcttcaatttatacatc

SEQ ID NO: 230699 - DNA, 22 bp, Artificial sequence
  SiRNA target sequence
ctatgcttcaatttatacatca

SEQ ID NO: 230700 - DNA, 22 bp, Artificial sequence
  SiRNA target sequence
tatgcttcaatttatacatcaa

SEQ ID NO: 230701 - DNA, 22 bp, Artificial sequence
  SiRNA target sequence
atgcttcaatttatacatcaat

SEQ ID NO: 230702 - DNA, 22 bp, Artificial sequence
  SiRNA target sequence
tgcttcaatttatacatcaatt

SEQ ID NO: 230703 - DNA, 22 bp, Artificial sequence
  SiRNA target sequence
gcttcaatttatacatcaattg

SEQ ID NO: 230704 - DNA, 22 bp, Artificial sequence
  SiRNA target sequence
cttcaatttatacatcaattga

SEQ ID NO: 230705 - DNA, 22 bp, Artificial sequence
  SiRNA target sequence
ttcaatttatacatcaattgaa

SEQ ID NO: 230706 - DNA, 22 bp, Artificial sequence
  SiRNA target sequence
tcaatttatacatcaattgaac

SEQ ID NO: 230707 - DNA, 22 bp, Artificial sequence
  SiRNA target sequence
caatttatacatcaattgaaca

SEQ ID NO: 230708 - DNA, 22 bp, Artificial sequence
  SiRNA target sequence
aatttatacatcaattgaacaa

SEQ ID NO: 230709 - DNA, 22 bp, Artificial sequence
  SiRNA target sequence
atttatacatcaattgaacaat

SEQ ID NO: 230710 - DNA, 22 bp, Artificial sequence
  SiRNA target sequence
tttatacatcaattgaacaatc

SEQ ID NO: 230711 - DNA, 22 bp, Artificial sequence
  SiRNA target sequence
ttatacatcaattgaacaatct

SEQ ID NO: 230712 - DNA, 22 bp, Artificial sequence
  SiRNA target sequence
tatacatcaattgaacaatctg

SEQ ID NO: 230713 - DNA, 22 bp, Artificial sequence
  SiRNA target sequence
atacatcaattgaacaatctgg

SEQ ID NO: 230714 - DNA, 22 bp, Artificial sequence
  SiRNA target sequence
tacatcaattgaacaatctgga

SEQ ID NO: 230715 - DNA, 22 bp, Artificial sequence
  SiRNA target sequence
acatcaattgaacaatctggag

SEQ ID NO: 230716 - DNA, 22 bp, Artificial sequence
  SiRNA target sequence
catcaattgaacaatctggagt

SEQ ID NO: 230717 - DNA, 22 bp, Artificial sequence
  SiRNA target sequence
atcaattgaacaatctggagtt

SEQ ID NO: 230718 - DNA, 22 bp, Artificial sequence
  SiRNA target sequence
tcaattgaacaatctggagttg

SEQ ID NO: 230719 - DNA, 22 bp, Artificial sequence
  SiRNA target sequence
caattgaacaatctggagttgc

SEQ ID NO: 230720 - DNA, 22 bp, Artificial sequence
  SiRNA target sequence
aattgaacaatctggagttgct

SEQ ID NO: 230721 - DNA, 22 bp, Artificial sequence
  SiRNA target sequence
attgaacaatctggagttgctg

SEQ ID NO: 230722 - DNA, 22 bp, Artificial sequence
  SiRNA target sequence
ttgaacaatctggagttgctgt

SEQ ID NO: 230723 - DNA, 22 bp, Artificial sequence
  SiRNA target sequence
tgaacaatctggagttgctgtt

SEQ ID NO: 230724 - DNA, 22 bp, Artificial sequence
  SiRNA target sequence
gaacaatctggagttgctgtta

SEQ ID NO: 230725 - DNA, 22 bp, Artificial sequence
  SiRNA target sequence
aacaatctggagttgctgttat

SEQ ID NO: 230726 - DNA, 22 bp, Artificial sequence
  SiRNA target sequence
acaatctggagttgctgttatt

SEQ ID NO: 230727 - DNA, 22 bp, Artificial sequence
  SiRNA target sequence
caatctggagttgctgttattg

SEQ ID NO: 230728 - DNA, 22 bp, Artificial sequence
  SiRNA target sequence
aatctggagttgctgttattgt

SEQ ID NO: 230729 - DNA, 22 bp, Artificial sequence
  SiRNA target sequence
atctggagttgctgttattgtc

SEQ ID NO: 230730 - DNA, 22 bp, Artificial sequence
  SiRNA target sequence
tctggagttgctgttattgtca

SEQ ID NO: 230731 - DNA, 22 bp, Artificial sequence
  SiRNA target sequence
ctggagttgctgttattgtcat

SEQ ID NO: 230732 - DNA, 22 bp, Artificial sequence
  SiRNA target sequence
tggagttgctgttattgtcatg

SEQ ID NO: 230733 - DNA, 22 bp, Artificial sequence
  SiRNA target sequence
ggagttgctgttattgtcatga

SEQ ID NO: 230734 - DNA, 22 bp, Artificial sequence
  SiRNA target sequence
gagttgctgttattgtcatgat

SEQ ID NO: 230735 - DNA, 22 bp, Artificial sequence
  SiRNA target sequence
agttgctgttattgtcatgatt

SEQ ID NO: 230736 - DNA, 22 bp, Artificial sequence
  SiRNA target sequence
gttgctgttattgtcatgattt

SEQ ID NO: 230737 - DNA, 22 bp, Artificial sequence
  SiRNA target sequence
ttgctgttattgtcatgatttt

SEQ ID NO: 230738 - DNA, 22 bp, Artificial sequence
  SiRNA target sequence
tgctgttattgtcatgattttg

SEQ ID NO: 230739 - DNA, 22 bp, Artificial sequence
  SiRNA target sequence
gctgttattgtcatgattttgc

SEQ ID NO: 230740 - DNA, 22 bp, Artificial sequence
  SiRNA target sequence
ctgttattgtcatgattttgct

SEQ ID NO: 230741 - DNA, 22 bp, Artificial sequence
  SiRNA target sequence
tgttattgtcatgattttgcta

SEQ ID NO: 230742 - DNA, 22 bp, Artificial sequence
  SiRNA target sequence
gttattgtcatgattttgctac

SEQ ID NO: 230743 - DNA, 22 bp, Artificial sequence
  SiRNA target sequence
ttattgtcatgattttgctact

SEQ ID NO: 230744 - DNA, 22 bp, Artificial sequence
  SiRNA target sequence
tattgtcatgattttgctactt

SEQ ID NO: 230745 - DNA, 22 bp, Artificial sequence
  SiRNA target sequence
attgtcatgattttgctactta

SEQ ID NO: 230746 - DNA, 22 bp, Artificial sequence
  SiRNA target sequence
ttgtcatgattttgctacttac

SEQ ID NO: 230747 - DNA, 22 bp, Artificial sequence
  SiRNA target sequence
tgtcatgattttgctacttacc

SEQ ID NO: 230748 - DNA, 22 bp, Artificial sequence
  SiRNA target sequence
gtcatgattttgctacttaccc

SEQ ID NO: 230749 - DNA, 22 bp, Artificial sequence
  SiRNA target sequence
tcatgattttgctacttacccc

SEQ ID NO: 230750 - DNA, 22 bp, Artificial sequence
  SiRNA target sequence
catgattttgctacttacccct

SEQ ID NO: 230751 - DNA, 22 bp, Artificial sequence
  SiRNA target sequence
atgattttgctacttacccctt

SEQ ID NO: 230752 - DNA, 22 bp, Artificial sequence
  SiRNA target sequence
tgattttgctacttaccccttt

SEQ ID NO: 230753 - DNA, 22 bp, Artificial sequence
  SiRNA target sequence
gattttgctacttacccctttt

SEQ ID NO: 230754 - DNA, 22 bp, Artificial sequence
  SiRNA target sequence
attttgctacttaccccttttc

SEQ ID NO: 230755 - DNA, 22 bp, Artificial sequence
  SiRNA target sequence
ttttgctacttaccccttttcc

SEQ ID NO: 230756 - DNA, 22 bp, Artificial sequence
  SiRNA target sequence
tttgctacttaccccttttcca

SEQ ID NO: 230757 - DNA, 22 bp, Artificial sequence
  SiRNA target sequence
ttgctacttaccccttttccaa

SEQ ID NO: 230758 - DNA, 22 bp, Artificial sequence
  SiRNA target sequence
tgctacttaccccttttccaag

SEQ ID NO: 230759 - DNA, 22 bp, Artificial sequence
  SiRNA target sequence
gctacttaccccttttccaagg

SEQ ID NO: 230760 - DNA, 22 bp, Artificial sequence
  SiRNA target sequence
ctacttaccccttttccaaggc

SEQ ID NO: 230761 - DNA, 22 bp, Artificial sequence
  SiRNA target sequence
tacttaccccttttccaaggct

SEQ ID NO: 230762 - DNA, 22 bp, Artificial sequence
  SiRNA target sequence
acttaccccttttccaaggctt

SEQ ID NO: 230763 - DNA, 22 bp, Artificial sequence
  SiRNA target sequence
cttaccccttttccaaggctta

SEQ ID NO: 230764 - DNA, 22 bp, Artificial sequence
  SiRNA target sequence
ttaccccttttccaaggcttat

SEQ ID NO: 230765 - DNA, 22 bp, Artificial sequence
  SiRNA target sequence
taccccttttccaaggcttatt

SEQ ID NO: 230766 - DNA, 22 bp, Artificial sequence
  SiRNA target sequence
accccttttccaaggcttatta

SEQ ID NO: 230767 - DNA, 22 bp, Artificial sequence
  SiRNA target sequence
ccccttttccaaggcttattaa

SEQ ID NO: 230768 - DNA, 22 bp, Artificial sequence
  SiRNA target sequence
cccttttccaaggcttattaaa

SEQ ID NO: 230769 - DNA, 22 bp, Artificial sequence
  SiRNA target sequence
ccttttccaaggcttattaaaa

SEQ ID NO: 230770 - DNA, 22 bp, Artificial sequence
  SiRNA target sequence
cttttccaaggcttattaaaac

SEQ ID NO: 230771 - DNA, 22 bp, Artificial sequence
  SiRNA target sequence
ttttccaaggcttattaaaaca

SEQ ID NO: 230772 - DNA, 22 bp, Artificial sequence
  SiRNA target sequence
tttccaaggcttattaaaacaa

SEQ ID NO: 230773 - DNA, 22 bp, Artificial sequence
  SiRNA target sequence
ttccaaggcttattaaaacaaa

SEQ ID NO: 230774 - DNA, 22 bp, Artificial sequence
  SiRNA target sequence
tccaaggcttattaaaacaaaa

SEQ ID NO: 230775 - DNA, 22 bp, Artificial sequence
  SiRNA target sequence
ccaaggcttattaaaacaaaag

SEQ ID NO: 230776 - DNA, 22 bp, Artificial sequence
  SiRNA target sequence
caaggcttattaaaacaaaagg

SEQ ID NO: 230777 - DNA, 22 bp, Artificial sequence
  SiRNA target sequence
aaggcttattaaaacaaaagga

SEQ ID NO: 230778 - DNA, 22 bp, Artificial sequence
  SiRNA target sequence
aggcttattaaaacaaaaggat

SEQ ID NO: 230779 - DNA, 22 bp, Artificial sequence
  SiRNA target sequence
ggcttattaaaacaaaaggatg

SEQ ID NO: 230780 - DNA, 22 bp, Artificial sequence
  SiRNA target sequence
gcttattaaaacaaaaggatgg

SEQ ID NO: 230781 - DNA, 22 bp, Artificial sequence
  SiRNA target sequence
cttattaaaacaaaaggatgga

SEQ ID NO: 230782 - DNA, 22 bp, Artificial sequence
  SiRNA target sequence
ttattaaaacaaaaggatggat

SEQ ID NO: 230783 - DNA, 22 bp, Artificial sequence
  SiRNA target sequence
tattaaaacaaaaggatggatt

SEQ ID NO: 230784 - DNA, 22 bp, Artificial sequence
  SiRNA target sequence
attaaaacaaaaggatggatta

SEQ ID NO: 230785 - DNA, 22 bp, Artificial sequence
  SiRNA target sequence
ttaaaacaaaaggatggattac

SEQ ID NO: 230786 - DNA, 22 bp, Artificial sequence
  SiRNA target sequence
taaaacaaaaggatggattaca

SEQ ID NO: 230787 - DNA, 22 bp, Artificial sequence
  SiRNA target sequence
aaaacaaaaggatggattacaa

SEQ ID NO: 230788 - DNA, 22 bp, Artificial sequence
  SiRNA target sequence
aaacaaaaggatggattacaat

SEQ ID NO: 230789 - DNA, 22 bp, Artificial sequence
  SiRNA target sequence
aacaaaaggatggattacaata

SEQ ID NO: 230790 - DNA, 22 bp, Artificial sequence
  SiRNA target sequence
acaaaaggatggattacaatag

SEQ ID NO: 230791 - DNA, 22 bp, Artificial sequence
  SiRNA target sequence
caaaaggatggattacaatagc

SEQ ID NO: 230792 - DNA, 22 bp, Artificial sequence
  SiRNA target sequence
aaaaggatggattacaatagcc

SEQ ID NO: 230793 - DNA, 22 bp, Artificial sequence
  SiRNA target sequence
aaaggatggattacaatagcca

SEQ ID NO: 230794 - DNA, 22 bp, Artificial sequence
  SiRNA target sequence
aaggatggattacaatagccat

SEQ ID NO: 230795 - DNA, 22 bp, Artificial sequence
  SiRNA target sequence
aggatggattacaatagccatt

SEQ ID NO: 230796 - DNA, 22 bp, Artificial sequence
  SiRNA target sequence
ggatggattacaatagccattc

SEQ ID NO: 230797 - DNA, 22 bp, Artificial sequence
  SiRNA target sequence
gatggattacaatagccattct

SEQ ID NO: 230798 - DNA, 22 bp, Artificial sequence
  SiRNA target sequence
atggattacaatagccattcta

SEQ ID NO: 230799 - DNA, 22 bp, Artificial sequence
  SiRNA target sequence
tggattacaatagccattctat

SEQ ID NO: 230800 - DNA, 22 bp, Artificial sequence
  SiRNA target sequence
ggattacaatagccattctatg

SEQ ID NO: 230801 - DNA, 22 bp, Artificial sequence
  SiRNA target sequence
gattacaatagccattctatgt

SEQ ID NO: 230802 - DNA, 22 bp, Artificial sequence
  SiRNA target sequence
attacaatagccattctatgtc

SEQ ID NO: 230803 - DNA, 22 bp, Artificial sequence
  SiRNA target sequence
ttacaatagccattctatgtcc

SEQ ID NO: 230804 - DNA, 22 bp, Artificial sequence
  SiRNA target sequence
tacaatagccattctatgtcct

SEQ ID NO: 230805 - DNA, 22 bp, Artificial sequence
  SiRNA target sequence
acaatagccattctatgtccta

SEQ ID NO: 230806 - DNA, 22 bp, Artificial sequence
  SiRNA target sequence
caatagccattctatgtcctat

SEQ ID NO: 230807 - DNA, 22 bp, Artificial sequence
  SiRNA target sequence
aatagccattctatgtcctatt

SEQ ID NO: 230808 - DNA, 22 bp, Artificial sequence
  SiRNA target sequence
atagccattctatgtcctatta

SEQ ID NO: 230809 - DNA, 22 bp, Artificial sequence
  SiRNA target sequence
tagccattctatgtcctattat

SEQ ID NO: 230810 - DNA, 22 bp, Artificial sequence
  SiRNA target sequence
agccattctatgtcctattatt

SEQ ID NO: 230811 - DNA, 22 bp, Artificial sequence
  SiRNA target sequence
gccattctatgtcctattatta

SEQ ID NO: 230812 - DNA, 22 bp, Artificial sequence
  SiRNA target sequence
ccattctatgtcctattattac

SEQ ID NO: 230813 - DNA, 22 bp, Artificial sequence
  SiRNA target sequence
cattctatgtcctattattact

SEQ ID NO: 230814 - DNA, 22 bp, Artificial sequence
  SiRNA target sequence
attctatgtcctattattactt

SEQ ID NO: 230815 - DNA, 22 bp, Artificial sequence
  SiRNA target sequence
ttctatgtcctattattacttt

SEQ ID NO: 230816 - DNA, 22 bp, Artificial sequence
  SiRNA target sequence
tctatgtcctattattactttt

SEQ ID NO: 230817 - DNA, 22 bp, Artificial sequence
  SiRNA target sequence
ctatgtcctattattacttttt

SEQ ID NO: 230818 - DNA, 22 bp, Artificial sequence
  SiRNA target sequence
tatgtcctattattactttttt

SEQ ID NO: 230819 - DNA, 22 bp, Artificial sequence
  SiRNA target sequence
atgtcctattattacttttttt

SEQ ID NO: 230820 - DNA, 22 bp, Artificial sequence
  SiRNA target sequence
tgtcctattattactttttttt

SEQ ID NO: 230821 - DNA, 22 bp, Artificial sequence
  SiRNA target sequence
gtcctattattacttttttttc

SEQ ID NO: 230822 - DNA, 22 bp, Artificial sequence
  SiRNA target sequence
tcctattattacttttttttct

SEQ ID NO: 230823 - DNA, 22 bp, Artificial sequence
  SiRNA target sequence
cctattattacttttttttctg

SEQ ID NO: 230824 - DNA, 22 bp, Artificial sequence
  SiRNA target sequence
ctattattacttttttttctgc

SEQ ID NO: 230825 - DNA, 22 bp, Artificial sequence
  SiRNA target sequence
tattattacttttttttctgct

SEQ ID NO: 230826 - DNA, 22 bp, Artificial sequence
  SiRNA target sequence
attattacttttttttctgctt

SEQ ID NO: 230827 - DNA, 22 bp, Artificial sequence
  SiRNA target sequence
ttattacttttttttctgcttt

SEQ ID NO: 230828 - DNA, 22 bp, Artificial sequence
  SiRNA target sequence
tattacttttttttctgctttt

SEQ ID NO: 230829 - DNA, 22 bp, Artificial sequence
  SiRNA target sequence
attacttttttttctgcttttg

SEQ ID NO: 230830 - DNA, 22 bp, Artificial sequence
  SiRNA target sequence
ttacttttttttctgcttttgg

SEQ ID NO: 230831 - DNA, 22 bp, Artificial sequence
  SiRNA target sequence
tacttttttttctgcttttggt

SEQ ID NO: 230832 - DNA, 22 bp, Artificial sequence
  SiRNA target sequence
acttttttttctgcttttggta

SEQ ID NO: 230833 - DNA, 22 bp, Artificial sequence
  SiRNA target sequence
cttttttttctgcttttggtac

SEQ ID NO: 230834 - DNA, 22 bp, Artificial sequence
  SiRNA target sequence
ttttttttctgcttttggtact

SEQ ID NO: 230835 - DNA, 22 bp, Artificial sequence
  SiRNA target sequence
tttttttctgcttttggtactt

SEQ ID NO: 230836 - DNA, 22 bp, Artificial sequence
  SiRNA target sequence
ttttttctgcttttggtacttt

SEQ ID NO: 230837 - DNA, 22 bp, Artificial sequence
  SiRNA target sequence
tttttctgcttttggtactttt

SEQ ID NO: 230838 - DNA, 22 bp, Artificial sequence
  SiRNA target sequence
ttttctgcttttggtacttttg

SEQ ID NO: 230839 - DNA, 22 bp, Artificial sequence
  SiRNA target sequence
tttctgcttttggtacttttgt

SEQ ID NO: 230840 - DNA, 22 bp, Artificial sequence
  SiRNA target sequence
ttctgcttttggtacttttgta

SEQ ID NO: 230841 - DNA, 22 bp, Artificial sequence
  SiRNA target sequence
tctgcttttggtacttttgtat

SEQ ID NO: 230842 - DNA, 22 bp, Artificial sequence
  SiRNA target sequence
ctgcttttggtacttttgtatt

SEQ ID NO: 230843 - DNA, 22 bp, Artificial sequence
  SiRNA target sequence
tgcttttggtacttttgtatta

SEQ ID NO: 230844 - DNA, 22 bp, Artificial sequence
  SiRNA target sequence
gcttttggtacttttgtattag

SEQ ID NO: 230845 - DNA, 22 bp, Artificial sequence
  SiRNA target sequence
cttttggtacttttgtattagc

SEQ ID NO: 230846 - DNA, 22 bp, Artificial sequence
  SiRNA target sequence
ttttggtacttttgtattagct

SEQ ID NO: 230847 - DNA, 22 bp, Artificial sequence
  SiRNA target sequence
tttggtacttttgtattagctt

SEQ ID NO: 230848 - DNA, 22 bp, Artificial sequence
  SiRNA target sequence
ttggtacttttgtattagctta

SEQ ID NO: 230849 - DNA, 22 bp, Artificial sequence
  SiRNA target sequence
tggtacttttgtattagcttat

SEQ ID NO: 230850 - DNA, 22 bp, Artificial sequence
  SiRNA target sequence
ggtacttttgtattagcttatt

SEQ ID NO: 230851 - DNA, 22 bp, Artificial sequence
  SiRNA target sequence
gtacttttgtattagcttattt

SEQ ID NO: 230852 - DNA, 22 bp, Artificial sequence
  SiRNA target sequence
tacttttgtattagcttattta

SEQ ID NO: 230853 - DNA, 22 bp, Artificial sequence
  SiRNA target sequence
acttttgtattagcttatttaa

SEQ ID NO: 230854 - DNA, 22 bp, Artificial sequence
  SiRNA target sequence
cttttgtattagcttatttaaa

SEQ ID NO: 230855 - DNA, 22 bp, Artificial sequence
  SiRNA target sequence
ttttgtattagcttatttaaac

SEQ ID NO: 230856 - DNA, 22 bp, Artificial sequence
  SiRNA target sequence
tttgtattagcttatttaaact

SEQ ID NO: 230857 - DNA, 22 bp, Artificial sequence
  SiRNA target sequence
ttgtattagcttatttaaactt

SEQ ID NO: 230858 - DNA, 22 bp, Artificial sequence
  SiRNA target sequence
tgtattagcttatttaaacttc

SEQ ID NO: 230859 - DNA, 22 bp, Artificial sequence
  SiRNA target sequence
gtattagcttatttaaacttcc

SEQ ID NO: 230860 - DNA, 22 bp, Artificial sequence
  SiRNA target sequence
tattagcttatttaaacttccc

SEQ ID NO: 230861 - DNA, 22 bp, Artificial sequence
  SiRNA target sequence
attagcttatttaaacttccca

SEQ ID NO: 230862 - DNA, 22 bp, Artificial sequence
  SiRNA target sequence
ttagcttatttaaacttcccaa

SEQ ID NO: 230863 - DNA, 22 bp, Artificial sequence
  SiRNA target sequence
tagcttatttaaacttcccaat

SEQ ID NO: 230864 - DNA, 22 bp, Artificial sequence
  SiRNA target sequence
agcttatttaaacttcccaatt

SEQ ID NO: 230865 - DNA, 22 bp, Artificial sequence
  SiRNA target sequence
gcttatttaaacttcccaatta

SEQ ID NO: 230866 - DNA, 22 bp, Artificial sequence
  SiRNA target sequence
cttatttaaacttcccaattac

SEQ ID NO: 230867 - DNA, 22 bp, Artificial sequence
  SiRNA target sequence
ttatttaaacttcccaattaca

SEQ ID NO: 230868 - DNA, 22 bp, Artificial sequence
  SiRNA target sequence
tatttaaacttcccaattacaa

SEQ ID NO: 230869 - DNA, 22 bp, Artificial sequence
  SiRNA target sequence
atttaaacttcccaattacaaa

SEQ ID NO: 230870 - DNA, 22 bp, Artificial sequence
  SiRNA target sequence
tttaaacttcccaattacaaac

SEQ ID NO: 230871 - DNA, 22 bp, Artificial sequence
  SiRNA target sequence
ttaaacttcccaattacaaaca

SEQ ID NO: 230872 - DNA, 22 bp, Artificial sequence
  SiRNA target sequence
taaacttcccaattacaaacaa

SEQ ID NO: 230873 - DNA, 22 bp, Artificial sequence
  SiRNA target sequence
aaacttcccaattacaaacaaa

SEQ ID NO: 230874 - DNA, 22 bp, Artificial sequence
  SiRNA target sequence
aacttcccaattacaaacaaag

SEQ ID NO: 230875 - DNA, 22 bp, Artificial sequence
  SiRNA target sequence
acttcccaattacaaacaaaga

SEQ ID NO: 230876 - DNA, 22 bp, Artificial sequence
  SiRNA target sequence
cttcccaattacaaacaaagag

SEQ ID NO: 230877 - DNA, 22 bp, Artificial sequence
  SiRNA target sequence
ttcccaattacaaacaaagagg

SEQ ID NO: 230878 - DNA, 22 bp, Artificial sequence
  SiRNA target sequence
tcccaattacaaacaaagagga

SEQ ID NO: 230879 - DNA, 22 bp, Artificial sequence
  SiRNA target sequence
cccaattacaaacaaagaggat

SEQ ID NO: 230880 - DNA, 22 bp, Artificial sequence
  SiRNA target sequence
ccaattacaaacaaagaggata

SEQ ID NO: 230881 - DNA, 22 bp, Artificial sequence
  SiRNA target sequence
caattacaaacaaagaggataa

SEQ ID NO: 230882 - DNA, 22 bp, Artificial sequence
  SiRNA target sequence
aattacaaacaaagaggataat

SEQ ID NO: 230883 - DNA, 22 bp, Artificial sequence
  SiRNA target sequence
attacaaacaaagaggataata

SEQ ID NO: 230884 - DNA, 22 bp, Artificial sequence
  SiRNA target sequence
ttacaaacaaagaggataatat

SEQ ID NO: 230885 - DNA, 22 bp, Artificial sequence
  SiRNA target sequence
tacaaacaaagaggataatata

SEQ ID NO: 230886 - DNA, 22 bp, Artificial sequence
  SiRNA target sequence
acaaacaaagaggataatatat

SEQ ID NO: 230887 - DNA, 22 bp, Artificial sequence
  SiRNA target sequence
caaacaaagaggataatatatt

SEQ ID NO: 230888 - DNA, 22 bp, Artificial sequence
  SiRNA target sequence
aaacaaagaggataatatattt

SEQ ID NO: 230889 - DNA, 22 bp, Artificial sequence
  SiRNA target sequence
aacaaagaggataatatatttg

SEQ ID NO: 230890 - DNA, 22 bp, Artificial sequence
  SiRNA target sequence
acaaagaggataatatatttga

SEQ ID NO: 230891 - DNA, 22 bp, Artificial sequence
  SiRNA target sequence
caaagaggataatatatttgat

SEQ ID NO: 230892 - DNA, 22 bp, Artificial sequence
  SiRNA target sequence
aaagaggataatatatttgata

SEQ ID NO: 230893 - DNA, 22 bp, Artificial sequence
  SiRNA target sequence
aagaggataatatatttgatat

SEQ ID NO: 230894 - DNA, 22 bp, Artificial sequence
  SiRNA target sequence
agaggataatatatttgatatt

SEQ ID NO: 230895 - DNA, 22 bp, Artificial sequence
  SiRNA target sequence
gaggataatatatttgatattt

SEQ ID NO: 230896 - DNA, 22 bp, Artificial sequence
  SiRNA target sequence
aggataatatatttgatattta

SEQ ID NO: 230897 - DNA, 22 bp, Artificial sequence
  SiRNA target sequence
ggataatatatttgatatttac

SEQ ID NO: 230898 - DNA, 22 bp, Artificial sequence
  SiRNA target sequence
gataatatatttgatatttacc

SEQ ID NO: 230899 - DNA, 22 bp, Artificial sequence
  SiRNA target sequence
ataatatatttgatatttaccg

SEQ ID NO: 230900 - DNA, 22 bp, Artificial sequence
  SiRNA target sequence
taatatatttgatatttaccgt

SEQ ID NO: 230901 - DNA, 22 bp, Artificial sequence
  SiRNA target sequence
aatatatttgatatttaccgtt

SEQ ID NO: 230902 - DNA, 22 bp, Artificial sequence
  SiRNA target sequence
atatatttgatatttaccgttt

SEQ ID NO: 230903 - DNA, 22 bp, Artificial sequence
  SiRNA target sequence
tatatttgatatttaccgttta

SEQ ID NO: 230904 - DNA, 22 bp, Artificial sequence
  SiRNA target sequence
atatttgatatttaccgtttac

SEQ ID NO: 230905 - DNA, 22 bp, Artificial sequence
  SiRNA target sequence
tatttgatatttaccgtttacc

SEQ ID NO: 230906 - DNA, 22 bp, Artificial sequence
  SiRNA target sequence
atttgatatttaccgtttaccg

SEQ ID NO: 230907 - DNA, 22 bp, Artificial sequence
  SiRNA target sequence
tttgatatttaccgtttaccgt

SEQ ID NO: 230908 - DNA, 22 bp, Artificial sequence
  SiRNA target sequence
ttgatatttaccgtttaccgtc

SEQ ID NO: 230909 - DNA, 22 bp, Artificial sequence
  SiRNA target sequence
tgatatttaccgtttaccgtca

SEQ ID NO: 230910 - DNA, 22 bp, Artificial sequence
  SiRNA target sequence
gatatttaccgtttaccgtcaa

SEQ ID NO: 230911 - DNA, 22 bp, Artificial sequence
  SiRNA target sequence
atatttaccgtttaccgtcaac

SEQ ID NO: 230912 - DNA, 22 bp, Artificial sequence
  SiRNA target sequence
tatttaccgtttaccgtcaact

SEQ ID NO: 230913 - DNA, 22 bp, Artificial sequence
  SiRNA target sequence
atttaccgtttaccgtcaactg

SEQ ID NO: 230914 - DNA, 22 bp, Artificial sequence
  SiRNA target sequence
tttaccgtttaccgtcaactga

SEQ ID NO: 230915 - DNA, 22 bp, Artificial sequence
  SiRNA target sequence
ttaccgtttaccgtcaactgat

SEQ ID NO: 230916 - DNA, 22 bp, Artificial sequence
  SiRNA target sequence
taccgtttaccgtcaactgatt

SEQ ID NO: 230917 - DNA, 22 bp, Artificial sequence
  SiRNA target sequence
accgtttaccgtcaactgattc

SEQ ID NO: 230918 - DNA, 22 bp, Artificial sequence
  SiRNA target sequence
ccgtttaccgtcaactgattct

SEQ ID NO: 230919 - DNA, 22 bp, Artificial sequence
  SiRNA target sequence
cgtttaccgtcaactgattcta

SEQ ID NO: 230920 - DNA, 22 bp, Artificial sequence
  SiRNA target sequence
gtttaccgtcaactgattctat

SEQ ID NO: 230921 - DNA, 22 bp, Artificial sequence
  SiRNA target sequence
tttaccgtcaactgattctata

SEQ ID NO: 230922 - DNA, 22 bp, Artificial sequence
  SiRNA target sequence
ttaccgtcaactgattctataa

SEQ ID NO: 230923 - DNA, 22 bp, Artificial sequence
  SiRNA target sequence
taccgtcaactgattctataat

SEQ ID NO: 230924 - DNA, 22 bp, Artificial sequence
  SiRNA target sequence
accgtcaactgattctataatc

SEQ ID NO: 230925 - DNA, 22 bp, Artificial sequence
  SiRNA target sequence
ccgtcaactgattctataatca

SEQ ID NO: 230926 - DNA, 22 bp, Artificial sequence
  SiRNA target sequence
cgtcaactgattctataatcaa

SEQ ID NO: 230927 - DNA, 22 bp, Artificial sequence
  SiRNA target sequence
gtcaactgattctataatcaaa

SEQ ID NO: 230928 - DNA, 22 bp, Artificial sequence
  SiRNA target sequence
tcaactgattctataatcaaat

SEQ ID NO: 230929 - DNA, 22 bp, Artificial sequence
  SiRNA target sequence
caactgattctataatcaaatt

SEQ ID NO: 230930 - DNA, 22 bp, Artificial sequence
  SiRNA target sequence
aactgattctataatcaaatta

SEQ ID NO: 230931 - DNA, 22 bp, Artificial sequence
  SiRNA target sequence
actgattctataatcaaattag

SEQ ID NO: 230932 - DNA, 22 bp, Artificial sequence
  SiRNA target sequence
ctgattctataatcaaattaga

SEQ ID NO: 230933 - DNA, 22 bp, Artificial sequence
  SiRNA target sequence
tgattctataatcaaattagaa

SEQ ID NO: 230934 - DNA, 22 bp, Artificial sequence
  SiRNA target sequence
gattctataatcaaattagaaa

SEQ ID NO: 230935 - DNA, 22 bp, Artificial sequence
  SiRNA target sequence
attctataatcaaattagaaaa

SEQ ID NO: 230936 - DNA, 22 bp, Artificial sequence
  SiRNA target sequence
ttctataatcaaattagaaaat

SEQ ID NO: 230937 - DNA, 22 bp, Artificial sequence
  SiRNA target sequence
tctataatcaaattagaaaata

SEQ ID NO: 230938 - DNA, 22 bp, Artificial sequence
  SiRNA target sequence
ctataatcaaattagaaaatat

SEQ ID NO: 230939 - DNA, 22 bp, Artificial sequence
  SiRNA target sequence
tataatcaaattagaaaatatt

SEQ ID NO: 230940 - DNA, 22 bp, Artificial sequence
  SiRNA target sequence
ataatcaaattagaaaatattg

SEQ ID NO: 230941 - DNA, 22 bp, Artificial sequence
  SiRNA target sequence
taatcaaattagaaaatattgt

SEQ ID NO: 230942 - DNA, 22 bp, Artificial sequence
  SiRNA target sequence
aatcaaattagaaaatattgtt

SEQ ID NO: 230943 - DNA, 22 bp, Artificial sequence
  SiRNA target sequence
atcaaattagaaaatattgttg

SEQ ID NO: 230944 - DNA, 22 bp, Artificial sequence
  SiRNA target sequence
tcaaattagaaaatattgttgg

SEQ ID NO: 230945 - DNA, 22 bp, Artificial sequence
  SiRNA target sequence
caaattagaaaatattgttggt

SEQ ID NO: 230946 - DNA, 22 bp, Artificial sequence
  SiRNA target sequence
aaattagaaaatattgttggtg

SEQ ID NO: 230947 - DNA, 22 bp, Artificial sequence
  SiRNA target sequence
aattagaaaatattgttggtgt

SEQ ID NO: 230948 - DNA, 22 bp, Artificial sequence
  SiRNA target sequence
attagaaaatattgttggtgtc

SEQ ID NO: 230949 - DNA, 22 bp, Artificial sequence
  SiRNA target sequence
ttagaaaatattgttggtgtca

SEQ ID NO: 230950 - DNA, 22 bp, Artificial sequence
  SiRNA target sequence
tagaaaatattgttggtgtcat

SEQ ID NO: 230951 - DNA, 22 bp, Artificial sequence
  SiRNA target sequence
agaaaatattgttggtgtcatt

SEQ ID NO: 230952 - DNA, 22 bp, Artificial sequence
  SiRNA target sequence
gaaaatattgttggtgtcattt

SEQ ID NO: 230953 - DNA, 22 bp, Artificial sequence
  SiRNA target sequence
aaaatattgttggtgtcatttg

SEQ ID NO: 230954 - DNA, 22 bp, Artificial sequence
  SiRNA target sequence
aaatattgttggtgtcatttgt

SEQ ID NO: 230955 - DNA, 22 bp, Artificial sequence
  SiRNA target sequence
aatattgttggtgtcatttgtg

SEQ ID NO: 230956 - DNA, 22 bp, Artificial sequence
  SiRNA target sequence
atattgttggtgtcatttgtgt

SEQ ID NO: 230957 - DNA, 22 bp, Artificial sequence
  SiRNA target sequence
tattgttggtgtcatttgtgta

SEQ ID NO: 230958 - DNA, 22 bp, Artificial sequence
  SiRNA target sequence
attgttggtgtcatttgtgtat

SEQ ID NO: 230959 - DNA, 22 bp, Artificial sequence
  SiRNA target sequence
ttgttggtgtcatttgtgtatc

SEQ ID NO: 230960 - DNA, 22 bp, Artificial sequence
  SiRNA target sequence
tgttggtgtcatttgtgtatct

SEQ ID NO: 230961 - DNA, 22 bp, Artificial sequence
  SiRNA target sequence
gttggtgtcatttgtgtatctt

SEQ ID NO: 230962 - DNA, 22 bp, Artificial sequence
  SiRNA target sequence
ttggtgtcatttgtgtatcttt

SEQ ID NO: 230963 - DNA, 22 bp, Artificial sequence
  SiRNA target sequence
tggtgtcatttgtgtatcttta

SEQ ID NO: 230964 - DNA, 22 bp, Artificial sequence
  SiRNA target sequence
ggtgtcatttgtgtatctttaa

SEQ ID NO: 230965 - DNA, 22 bp, Artificial sequence
  SiRNA target sequence
gtgtcatttgtgtatctttaat

SEQ ID NO: 230966 - DNA, 22 bp, Artificial sequence
  SiRNA target sequence
tgtcatttgtgtatctttaatg

SEQ ID NO: 230967 - DNA, 22 bp, Artificial sequence
  SiRNA target sequence
gtcatttgtgtatctttaatga

SEQ ID NO: 230968 - DNA, 22 bp, Artificial sequence
  SiRNA target sequence
tcatttgtgtatctttaatgaa

SEQ ID NO: 230969 - DNA, 22 bp, Artificial sequence
  SiRNA target sequence
catttgtgtatctttaatgaag

SEQ ID NO: 230970 - DNA, 22 bp, Artificial sequence
  SiRNA target sequence
atttgtgtatctttaatgaaga

SEQ ID NO: 230971 - DNA, 22 bp, Artificial sequence
  SiRNA target sequence
tttgtgtatctttaatgaagat

SEQ ID NO: 230972 - DNA, 22 bp, Artificial sequence
  SiRNA target sequence
ttgtgtatctttaatgaagatt

SEQ ID NO: 230973 - DNA, 22 bp, Artificial sequence
  SiRNA target sequence
tgtgtatctttaatgaagattt

SEQ ID NO: 230974 - DNA, 22 bp, Artificial sequence
  SiRNA target sequence
gtgtatctttaatgaagatttc

SEQ ID NO: 230975 - DNA, 22 bp, Artificial sequence
  SiRNA target sequence
tgtatctttaatgaagatttct

SEQ ID NO: 230976 - DNA, 22 bp, Artificial sequence
  SiRNA target sequence
gtatctttaatgaagatttcta

SEQ ID NO: 230977 - DNA, 22 bp, Artificial sequence
  SiRNA target sequence
tatctttaatgaagatttctaa

SEQ ID NO: 230978 - DNA, 22 bp, Artificial sequence
  SiRNA target sequence
atctttaatgaagatttctaaa

SEQ ID NO: 230979 - DNA, 22 bp, Artificial sequence
  SiRNA target sequence
tctttaatgaagatttctaaat

SEQ ID NO: 230980 - DNA, 22 bp, Artificial sequence
  SiRNA target sequence
ctttaatgaagatttctaaata

SEQ ID NO: 230981 - DNA, 22 bp, Artificial sequence
  SiRNA target sequence
tttaatgaagatttctaaatat

SEQ ID NO: 230982 - DNA, 22 bp, Artificial sequence
  SiRNA target sequence
ttaatgaagatttctaaatatg

SEQ ID NO: 230983 - DNA, 22 bp, Artificial sequence
  SiRNA target sequence
taatgaagatttctaaatatgc

SEQ ID NO: 230984 - DNA, 22 bp, Artificial sequence
  SiRNA target sequence
aatgaagatttctaaatatgca

SEQ ID NO: 230985 - DNA, 22 bp, Artificial sequence
  SiRNA target sequence
atgaagatttctaaatatgcag

SEQ ID NO: 230986 - DNA, 22 bp, Artificial sequence
  SiRNA target sequence
tgaagatttctaaatatgcagc

SEQ ID NO: 230987 - DNA, 22 bp, Artificial sequence
  SiRNA target sequence
gaagatttctaaatatgcagca

SEQ ID NO: 230988 - DNA, 22 bp, Artificial sequence
  SiRNA target sequence
aagatttctaaatatgcagcat

SEQ ID NO: 230989 - DNA, 22 bp, Artificial sequence
  SiRNA target sequence
agatttctaaatatgcagcatt

SEQ ID NO: 230990 - DNA, 22 bp, Artificial sequence
  SiRNA target sequence
gatttctaaatatgcagcattt

SEQ ID NO: 230991 - DNA, 22 bp, Artificial sequence
  SiRNA target sequence
atttctaaatatgcagcatttg

SEQ ID NO: 230992 - DNA, 22 bp, Artificial sequence
  SiRNA target sequence
tttctaaatatgcagcatttga

SEQ ID NO: 230993 - DNA, 22 bp, Artificial sequence
  SiRNA target sequence
ttctaaatatgcagcatttgat

SEQ ID NO: 230994 - DNA, 22 bp, Artificial sequence
  SiRNA target sequence
tctaaatatgcagcatttgata

SEQ ID NO: 230995 - DNA, 22 bp, Artificial sequence
  SiRNA target sequence
ctaaatatgcagcatttgatat

SEQ ID NO: 230996 - DNA, 22 bp, Artificial sequence
  SiRNA target sequence
taaatatgcagcatttgatatc

SEQ ID NO: 230997 - DNA, 22 bp, Artificial sequence
  SiRNA target sequence
aaatatgcagcatttgatatca

SEQ ID NO: 230998 - DNA, 22 bp, Artificial sequence
  SiRNA target sequence
aatatgcagcatttgatatcac

SEQ ID NO: 230999 - DNA, 22 bp, Artificial sequence
  SiRNA target sequence
atatgcagcatttgatatcaca

SEQ ID NO: 231000 - DNA, 22 bp, Artificial sequence
  SiRNA target sequence
tatgcagcatttgatatcacaa

SEQ ID NO: 231001 - DNA, 22 bp, Artificial sequence
  SiRNA target sequence
atgcagcatttgatatcacaaa

SEQ ID NO: 231002 - DNA, 22 bp, Artificial sequence
  SiRNA target sequence
tgcagcatttgatatcacaaaa

SEQ ID NO: 231003 - DNA, 22 bp, Artificial sequence
  SiRNA target sequence
gcagcatttgatatcacaaaag

SEQ ID NO: 231004 - DNA, 22 bp, Artificial sequence
  SiRNA target sequence
cagcatttgatatcacaaaaga

SEQ ID NO: 231005 - DNA, 22 bp, Artificial sequence
  SiRNA target sequence
agcatttgatatcacaaaagag

SEQ ID NO: 231006 - DNA, 22 bp, Artificial sequence
  SiRNA target sequence
gcatttgatatcacaaaagagg

SEQ ID NO: 231007 - DNA, 22 bp, Artificial sequence
  SiRNA target sequence
catttgatatcacaaaagaggc

SEQ ID NO: 231008 - DNA, 22 bp, Artificial sequence
  SiRNA target sequence
atttgatatcacaaaagaggct

SEQ ID NO: 231009 - DNA, 22 bp, Artificial sequence
  SiRNA target sequence
tttgatatcacaaaagaggctt

SEQ ID NO: 231010 - DNA, 22 bp, Artificial sequence
  SiRNA target sequence
ttgatatcacaaaagaggcttt

SEQ ID NO: 231011 - DNA, 22 bp, Artificial sequence
  SiRNA target sequence
tgatatcacaaaagaggctttg

SEQ ID NO: 231012 - DNA, 22 bp, Artificial sequence
  SiRNA target sequence
gatatcacaaaagaggctttgt

SEQ ID NO: 231013 - DNA, 22 bp, Artificial sequence
  SiRNA target sequence
atatcacaaaagaggctttgtc

SEQ ID NO: 231014 - DNA, 22 bp, Artificial sequence
  SiRNA target sequence
tatcacaaaagaggctttgtct

SEQ ID NO: 231015 - DNA, 22 bp, Artificial sequence
  SiRNA target sequence
atcacaaaagaggctttgtcta

SEQ ID NO: 231016 - DNA, 22 bp, Artificial sequence
  SiRNA target sequence
tcacaaaagaggctttgtctat

SEQ ID NO: 231017 - DNA, 22 bp, Artificial sequence
  SiRNA target sequence
cacaaaagaggctttgtctatg

SEQ ID NO: 231018 - DNA, 22 bp, Artificial sequence
  SiRNA target sequence
acaaaagaggctttgtctatgc

SEQ ID NO: 231019 - DNA, 22 bp, Artificial sequence
  SiRNA target sequence
caaaagaggctttgtctatgca

SEQ ID NO: 231020 - DNA, 22 bp, Artificial sequence
  SiRNA target sequence
aaaagaggctttgtctatgcag

SEQ ID NO: 231021 - DNA, 22 bp, Artificial sequence
  SiRNA target sequence
aaagaggctttgtctatgcaga

SEQ ID NO: 231022 - DNA, 22 bp, Artificial sequence
  SiRNA target sequence
aagaggctttgtctatgcagat

SEQ ID NO: 231023 - DNA, 22 bp, Artificial sequence
  SiRNA target sequence
agaggctttgtctatgcagatt

SEQ ID NO: 231024 - DNA, 22 bp, Artificial sequence
  SiRNA target sequence
gaggctttgtctatgcagattg

SEQ ID NO: 231025 - DNA, 22 bp, Artificial sequence
  SiRNA target sequence
aggctttgtctatgcagattga

SEQ ID NO: 231026 - DNA, 22 bp, Artificial sequence
  SiRNA target sequence
ggctttgtctatgcagattgat

SEQ ID NO: 231027 - DNA, 22 bp, Artificial sequence
  SiRNA target sequence
gctttgtctatgcagattgatg

SEQ ID NO: 231028 - DNA, 22 bp, Artificial sequence
  SiRNA target sequence
ctttgtctatgcagattgatgg

SEQ ID NO: 231029 - DNA, 22 bp, Artificial sequence
  SiRNA target sequence
tttgtctatgcagattgatggt

SEQ ID NO: 231030 - DNA, 22 bp, Artificial sequence
  SiRNA target sequence
ttgtctatgcagattgatggtt

SEQ ID NO: 231031 - DNA, 22 bp, Artificial sequence
  SiRNA target sequence
tgtctatgcagattgatggttc

SEQ ID NO: 231032 - DNA, 22 bp, Artificial sequence
  SiRNA target sequence
gtctatgcagattgatggttct

SEQ ID NO: 231033 - DNA, 22 bp, Artificial sequence
  SiRNA target sequence
tctatgcagattgatggttcta

SEQ ID NO: 231034 - DNA, 22 bp, Artificial sequence
  SiRNA target sequence
ctatgcagattgatggttctat

SEQ ID NO: 231035 - DNA, 22 bp, Artificial sequence
  SiRNA target sequence
tatgcagattgatggttctata

SEQ ID NO: 231036 - DNA, 22 bp, Artificial sequence
  SiRNA target sequence
atgcagattgatggttctataa

SEQ ID NO: 231037 - DNA, 22 bp, Artificial sequence
  SiRNA target sequence
tgcagattgatggttctataag

SEQ ID NO: 231038 - DNA, 22 bp, Artificial sequence
  SiRNA target sequence
gcagattgatggttctataaga

SEQ ID NO: 231039 - DNA, 22 bp, Artificial sequence
  SiRNA target sequence
cagattgatggttctataagag

SEQ ID NO: 231040 - DNA, 22 bp, Artificial sequence
  SiRNA target sequence
agattgatggttctataagagc

SEQ ID NO: 231041 - DNA, 22 bp, Artificial sequence
  SiRNA target sequence
gattgatggttctataagagcg

SEQ ID NO: 231042 - DNA, 22 bp, Artificial sequence
  SiRNA target sequence
attgatggttctataagagcga

SEQ ID NO: 231043 - DNA, 22 bp, Artificial sequence
  SiRNA target sequence
ttgatggttctataagagcgaa

SEQ ID NO: 231044 - DNA, 22 bp, Artificial sequence
  SiRNA target sequence
tgatggttctataagagcgaaa

SEQ ID NO: 231045 - DNA, 22 bp, Artificial sequence
  SiRNA target sequence
gatggttctataagagcgaaat

SEQ ID NO: 231046 - DNA, 22 bp, Artificial sequence
  SiRNA target sequence
atggttctataagagcgaaata

SEQ ID NO: 231047 - DNA, 22 bp, Artificial sequence
  SiRNA target sequence
tggttctataagagcgaaatac

SEQ ID NO: 231048 - DNA, 22 bp, Artificial sequence
  SiRNA target sequence
ggttctataagagcgaaataca

SEQ ID NO: 231049 - DNA, 22 bp, Artificial sequence
  SiRNA target sequence
gttctataagagcgaaatacaa

SEQ ID NO: 231050 - DNA, 22 bp, Artificial sequence
  SiRNA target sequence
ttctataagagcgaaatacaaa

SEQ ID NO: 231051 - DNA, 22 bp, Artificial sequence
  SiRNA target sequence
tctataagagcgaaatacaaag

SEQ ID NO: 231052 - DNA, 22 bp, Artificial sequence
  SiRNA target sequence
ctataagagcgaaatacaaagg

SEQ ID NO: 231053 - DNA, 22 bp, Artificial sequence
  SiRNA target sequence
tataagagcgaaatacaaaggt

SEQ ID NO: 231054 - DNA, 22 bp, Artificial sequence
  SiRNA target sequence
ataagagcgaaatacaaaggta

SEQ ID NO: 231055 - DNA, 22 bp, Artificial sequence
  SiRNA target sequence
taagagcgaaatacaaaggtat

SEQ ID NO: 231056 - DNA, 22 bp, Artificial sequence
  SiRNA target sequence
aagagcgaaatacaaaggtatt

SEQ ID NO: 231057 - DNA, 22 bp, Artificial sequence
  SiRNA target sequence
agagcgaaatacaaaggtattt

SEQ ID NO: 231058 - DNA, 22 bp, Artificial sequence
  SiRNA target sequence
gagcgaaatacaaaggtatttt

SEQ ID NO: 231059 - DNA, 22 bp, Artificial sequence
  SiRNA target sequence
agcgaaatacaaaggtattttt

SEQ ID NO: 231060 - DNA, 22 bp, Artificial sequence
  SiRNA target sequence
gcgaaatacaaaggtatttttg

SEQ ID NO: 231061 - DNA, 22 bp, Artificial sequence
  SiRNA target sequence
cgaaatacaaaggtatttttga

SEQ ID NO: 231062 - DNA, 22 bp, Artificial sequence
  SiRNA target sequence
gaaatacaaaggtatttttgat

SEQ ID NO: 231063 - DNA, 22 bp, Artificial sequence
  SiRNA target sequence
aaatacaaaggtatttttgatg

SEQ ID NO: 231064 - DNA, 22 bp, Artificial sequence
  SiRNA target sequence
aatacaaaggtatttttgatgg

SEQ ID NO: 231065 - DNA, 22 bp, Artificial sequence
  SiRNA target sequence
atacaaaggtatttttgatggt

SEQ ID NO: 231066 - DNA, 22 bp, Artificial sequence
  SiRNA target sequence
tacaaaggtatttttgatggtg

SEQ ID NO: 231067 - DNA, 22 bp, Artificial sequence
  SiRNA target sequence
acaaaggtatttttgatggtgt

SEQ ID NO: 231068 - DNA, 22 bp, Artificial sequence
  SiRNA target sequence
caaaggtatttttgatggtgta

SEQ ID NO: 231069 - DNA, 22 bp, Artificial sequence
  SiRNA target sequence
aaaggtatttttgatggtgtat

SEQ ID NO: 231070 - DNA, 22 bp, Artificial sequence
  SiRNA target sequence
aaggtatttttgatggtgtatt

SEQ ID NO: 231071 - DNA, 22 bp, Artificial sequence
  SiRNA target sequence
aggtatttttgatggtgtattt

SEQ ID NO: 231072 - DNA, 22 bp, Artificial sequence
  SiRNA target sequence
ggtatttttgatggtgtatttg

SEQ ID NO: 231073 - DNA, 22 bp, Artificial sequence
  SiRNA target sequence
gtatttttgatggtgtatttgg

SEQ ID NO: 231074 - DNA, 22 bp, Artificial sequence
  SiRNA target sequence
tatttttgatggtgtatttggt

SEQ ID NO: 231075 - DNA, 22 bp, Artificial sequence
  SiRNA target sequence
atttttgatggtgtatttggta

SEQ ID NO: 231076 - DNA, 22 bp, Artificial sequence
  SiRNA target sequence
tttttgatggtgtatttggtaa

SEQ ID NO: 231077 - DNA, 22 bp, Artificial sequence
  SiRNA target sequence
ttttgatggtgtatttggtaag

SEQ ID NO: 231078 - DNA, 22 bp, Artificial sequence
  SiRNA target sequence
tttgatggtgtatttggtaagc

SEQ ID NO: 231079 - DNA, 22 bp, Artificial sequence
  SiRNA target sequence
ttgatggtgtatttggtaagct

SEQ ID NO: 231080 - DNA, 22 bp, Artificial sequence
  SiRNA target sequence
tgatggtgtatttggtaagctg

SEQ ID NO: 231081 - DNA, 22 bp, Artificial sequence
  SiRNA target sequence
gatggtgtatttggtaagctgg

SEQ ID NO: 231082 - DNA, 22 bp, Artificial sequence
  SiRNA target sequence
atggtgtatttggtaagctggg

SEQ ID NO: 231083 - DNA, 22 bp, Artificial sequence
  SiRNA target sequence
tggtgtatttggtaagctgggg

SEQ ID NO: 231084 - DNA, 22 bp, Artificial sequence
  SiRNA target sequence
ggtgtatttggtaagctgggga

SEQ ID NO: 231085 - DNA, 22 bp, Artificial sequence
  SiRNA target sequence
gtgtatttggtaagctggggaa

SEQ ID NO: 231086 - DNA, 22 bp, Artificial sequence
  SiRNA target sequence
tgtatttggtaagctggggaaa

SEQ ID NO: 231087 - DNA, 22 bp, Artificial sequence
  SiRNA target sequence
gtatttggtaagctggggaaat

SEQ ID NO: 231088 - DNA, 22 bp, Artificial sequence
  SiRNA target sequence
tatttggtaagctggggaaatc

SEQ ID NO: 231089 - DNA, 22 bp, Artificial sequence
  SiRNA target sequence
atttggtaagctggggaaatct

SEQ ID NO: 231090 - DNA, 22 bp, Artificial sequence
  SiRNA target sequence
tttggtaagctggggaaatctt

SEQ ID NO: 231091 - DNA, 22 bp, Artificial sequence
  SiRNA target sequence
ttggtaagctggggaaatcttt

SEQ ID NO: 231092 - DNA, 22 bp, Artificial sequence
  SiRNA target sequence
tggtaagctggggaaatctttt

SEQ ID NO: 231093 - DNA, 22 bp, Artificial sequence
  SiRNA target sequence
ggtaagctggggaaatcttttg

SEQ ID NO: 231094 - DNA, 22 bp, Artificial sequence
  SiRNA target sequence
gtaagctggggaaatcttttgg

SEQ ID NO: 231095 - DNA, 22 bp, Artificial sequence
  SiRNA target sequence
taagctggggaaatcttttgga

SEQ ID NO: 231096 - DNA, 22 bp, Artificial sequence
  SiRNA target sequence
aagctggggaaatcttttggat

SEQ ID NO: 231097 - DNA, 22 bp, Artificial sequence
  SiRNA target sequence
agctggggaaatcttttggatc

SEQ ID NO: 231098 - DNA, 22 bp, Artificial sequence
  SiRNA target sequence
gctggggaaatcttttggatca

SEQ ID NO: 231099 - DNA, 22 bp, Artificial sequence
  SiRNA target sequence
ctggggaaatcttttggatcag

SEQ ID NO: 231100 - DNA, 22 bp, Artificial sequence
  SiRNA target sequence
tggggaaatcttttggatcagt

SEQ ID NO: 231101 - DNA, 22 bp, Artificial sequence
  SiRNA target sequence
ggggaaatcttttggatcagtt

SEQ ID NO: 231102 - DNA, 22 bp, Artificial sequence
  SiRNA target sequence
gggaaatcttttggatcagttt

SEQ ID NO: 231103 - DNA, 22 bp, Artificial sequence
  SiRNA target sequence
ggaaatcttttggatcagttta

SEQ ID NO: 231104 - DNA, 22 bp, Artificial sequence
  SiRNA target sequence
gaaatcttttggatcagtttat

SEQ ID NO: 231105 - DNA, 22 bp, Artificial sequence
  SiRNA target sequence
aaatcttttggatcagtttatg

SEQ ID NO: 231106 - DNA, 22 bp, Artificial sequence
  SiRNA target sequence
aatcttttggatcagtttatgg

SEQ ID NO: 231107 - DNA, 22 bp, Artificial sequence
  SiRNA target sequence
atcttttggatcagtttatgga

SEQ ID NO: 231108 - DNA, 22 bp, Artificial sequence
  SiRNA target sequence
tcttttggatcagtttatggat

SEQ ID NO: 231109 - DNA, 22 bp, Artificial sequence
  SiRNA target sequence
cttttggatcagtttatggatt

SEQ ID NO: 231110 - DNA, 22 bp, Artificial sequence
  SiRNA target sequence
ttttggatcagtttatggattt

SEQ ID NO: 231111 - DNA, 22 bp, Artificial sequence
  SiRNA target sequence
tttggatcagtttatggattta

SEQ ID NO: 231112 - DNA, 22 bp, Artificial sequence
  SiRNA target sequence
ttggatcagtttatggatttac

SEQ ID NO: 231113 - DNA, 22 bp, Artificial sequence
  SiRNA target sequence
tggatcagtttatggatttaca

SEQ ID NO: 231114 - DNA, 22 bp, Artificial sequence
  SiRNA target sequence
ggatcagtttatggatttacaa

SEQ ID NO: 231115 - DNA, 22 bp, Artificial sequence
  SiRNA target sequence
gatcagtttatggatttacaat

SEQ ID NO: 231116 - DNA, 22 bp, Artificial sequence
  SiRNA target sequence
atcagtttatggatttacaatt

SEQ ID NO: 231117 - DNA, 22 bp, Artificial sequence
  SiRNA target sequence
tcagtttatggatttacaatta

SEQ ID NO: 231118 - DNA, 22 bp, Artificial sequence
  SiRNA target sequence
cagtttatggatttacaattac

SEQ ID NO: 231119 - DNA, 22 bp, Artificial sequence
  SiRNA target sequence
agtttatggatttacaattact

SEQ ID NO: 231120 - DNA, 22 bp, Artificial sequence
  SiRNA target sequence
gtttatggatttacaattacta

SEQ ID NO: 231121 - DNA, 22 bp, Artificial sequence
  SiRNA target sequence
tttatggatttacaattactac

SEQ ID NO: 231122 - DNA, 22 bp, Artificial sequence
  SiRNA target sequence
ttatggatttacaattactaca

SEQ ID NO: 231123 - DNA, 22 bp, Artificial sequence
  SiRNA target sequence
tatggatttacaattactacat

SEQ ID NO: 231124 - DNA, 22 bp, Artificial sequence
  SiRNA target sequence
atggatttacaattactacatt

SEQ ID NO: 231125 - DNA, 22 bp, Artificial sequence
  SiRNA target sequence
tggatttacaattactacatta

SEQ ID NO: 231126 - DNA, 22 bp, Artificial sequence
  SiRNA target sequence
ggatttacaattactacattat

SEQ ID NO: 231127 - DNA, 22 bp, Artificial sequence
  SiRNA target sequence
gatttacaattactacattatt

SEQ ID NO: 231128 - DNA, 22 bp, Artificial sequence
  SiRNA target sequence
atttacaattactacattatta

SEQ ID NO: 231129 - DNA, 22 bp, Artificial sequence
  SiRNA target sequence
tttacaattactacattattag

SEQ ID NO: 231130 - DNA, 22 bp, Artificial sequence
  SiRNA target sequence
ttacaattactacattattagg

SEQ ID NO: 231131 - DNA, 22 bp, Artificial sequence
  SiRNA target sequence
tacaattactacattattagga

SEQ ID NO: 231132 - DNA, 22 bp, Artificial sequence
  SiRNA target sequence
acaattactacattattaggaa

SEQ ID NO: 231133 - DNA, 22 bp, Artificial sequence
  SiRNA target sequence
caattactacattattaggaac

SEQ ID NO: 231134 - DNA, 22 bp, Artificial sequence
  SiRNA target sequence
aattactacattattaggaaca

SEQ ID NO: 231135 - DNA, 22 bp, Artificial sequence
  SiRNA target sequence
attactacattattaggaacaa

SEQ ID NO: 231136 - DNA, 22 bp, Artificial sequence
  SiRNA target sequence
ttactacattattaggaacaag

SEQ ID NO: 231137 - DNA, 22 bp, Artificial sequence
  SiRNA target sequence
tactacattattaggaacaaga

SEQ ID NO: 231138 - DNA, 22 bp, Artificial sequence
  SiRNA target sequence
actacattattaggaacaagag

SEQ ID NO: 231139 - DNA, 22 bp, Artificial sequence
  SiRNA target sequence
ctacattattaggaacaagaga

SEQ ID NO: 231140 - DNA, 22 bp, Artificial sequence
  SiRNA target sequence
tacattattaggaacaagagat

SEQ ID NO: 231141 - DNA, 22 bp, Artificial sequence
  SiRNA target sequence
acattattaggaacaagagatg

SEQ ID NO: 231142 - DNA, 22 bp, Artificial sequence
  SiRNA target sequence
cattattaggaacaagagatgt

SEQ ID NO: 231143 - DNA, 22 bp, Artificial sequence
  SiRNA target sequence
attattaggaacaagagatgtt

SEQ ID NO: 231144 - DNA, 22 bp, Artificial sequence
  SiRNA target sequence
ttattaggaacaagagatgttc

SEQ ID NO: 231145 - DNA, 22 bp, Artificial sequence
  SiRNA target sequence
tattaggaacaagagatgttcg

SEQ ID NO: 231146 - DNA, 22 bp, Artificial sequence
  SiRNA target sequence
attaggaacaagagatgttcgt

SEQ ID NO: 231147 - DNA, 22 bp, Artificial sequence
  SiRNA target sequence
ttaggaacaagagatgttcgta

SEQ ID NO: 231148 - DNA, 22 bp, Artificial sequence
  SiRNA target sequence
taggaacaagagatgttcgtag

SEQ ID NO: 231149 - DNA, 22 bp, Artificial sequence
  SiRNA target sequence
aggaacaagagatgttcgtaga

SEQ ID NO: 231150 - DNA, 22 bp, Artificial sequence
  SiRNA target sequence
ggaacaagagatgttcgtagag

SEQ ID NO: 231151 - DNA, 22 bp, Artificial sequence
  SiRNA target sequence
gaacaagagatgttcgtagagg

SEQ ID NO: 231152 - DNA, 22 bp, Artificial sequence
  SiRNA target sequence
aacaagagatgttcgtagaggt

SEQ ID NO: 231153 - DNA, 22 bp, Artificial sequence
  SiRNA target sequence
acaagagatgttcgtagaggtg

SEQ ID NO: 231154 - DNA, 22 bp, Artificial sequence
  SiRNA target sequence
caagagatgttcgtagaggtgc

SEQ ID NO: 231155 - DNA, 22 bp, Artificial sequence
  SiRNA target sequence
aagagatgttcgtagaggtgct

SEQ ID NO: 231156 - DNA, 22 bp, Artificial sequence
  SiRNA target sequence
agagatgttcgtagaggtgctc

SEQ ID NO: 231157 - DNA, 22 bp, Artificial sequence
  SiRNA target sequence
gagatgttcgtagaggtgctcc

SEQ ID NO: 231158 - DNA, 22 bp, Artificial sequence
  SiRNA target sequence
agatgttcgtagaggtgctcct

SEQ ID NO: 231159 - DNA, 22 bp, Artificial sequence
  SiRNA target sequence
gatgttcgtagaggtgctccta

SEQ ID NO: 231160 - DNA, 22 bp, Artificial sequence
  SiRNA target sequence
atgttcgtagaggtgctcctat

SEQ ID NO: 231161 - DNA, 22 bp, Artificial sequence
  SiRNA target sequence
tgttcgtagaggtgctcctata

SEQ ID NO: 231162 - DNA, 22 bp, Artificial sequence
  SiRNA target sequence
gttcgtagaggtgctcctatat

SEQ ID NO: 231163 - DNA, 22 bp, Artificial sequence
  SiRNA target sequence
ttcgtagaggtgctcctatatc

SEQ ID NO: 231164 - DNA, 22 bp, Artificial sequence
  SiRNA target sequence
tcgtagaggtgctcctatatcg

SEQ ID NO: 231165 - DNA, 22 bp, Artificial sequence
  SiRNA target sequence
cgtagaggtgctcctatatcgc

SEQ ID NO: 231166 - DNA, 22 bp, Artificial sequence
  SiRNA target sequence
gtagaggtgctcctatatcgct

SEQ ID NO: 231167 - DNA, 22 bp, Artificial sequence
  SiRNA target sequence
tagaggtgctcctatatcgctt

SEQ ID NO: 231168 - DNA, 22 bp, Artificial sequence
  SiRNA target sequence
agaggtgctcctatatcgcttt

SEQ ID NO: 231169 - DNA, 22 bp, Artificial sequence
  SiRNA target sequence
gaggtgctcctatatcgctttg

SEQ ID NO: 231170 - DNA, 22 bp, Artificial sequence
  SiRNA target sequence
aggtgctcctatatcgctttgt

SEQ ID NO: 231171 - DNA, 22 bp, Artificial sequence
  SiRNA target sequence
ggtgctcctatatcgctttgtg

SEQ ID NO: 231172 - DNA, 22 bp, Artificial sequence
  SiRNA target sequence
gtgctcctatatcgctttgtgt

SEQ ID NO: 231173 - DNA, 22 bp, Artificial sequence
  SiRNA target sequence
tgctcctatatcgctttgtgtt

SEQ ID NO: 231174 - DNA, 22 bp, Artificial sequence
  SiRNA target sequence
gctcctatatcgctttgtgttc

SEQ ID NO: 231175 - DNA, 22 bp, Artificial sequence
  SiRNA target sequence
ctcctatatcgctttgtgttct

SEQ ID NO: 231176 - DNA, 22 bp, Artificial sequence
  SiRNA target sequence
tcctatatcgctttgtgttcta

SEQ ID NO: 231177 - DNA, 22 bp, Artificial sequence
  SiRNA target sequence
cctatatcgctttgtgttctaa

SEQ ID NO: 231178 - DNA, 22 bp, Artificial sequence
  SiRNA target sequence
ctatatcgctttgtgttctaat

SEQ ID NO: 231179 - DNA, 22 bp, Artificial sequence
  SiRNA target sequence
tatatcgctttgtgttctaata

SEQ ID NO: 231180 - DNA, 22 bp, Artificial sequence
  SiRNA target sequence
atatcgctttgtgttctaatat

SEQ ID NO: 231181 - DNA, 22 bp, Artificial sequence
  SiRNA target sequence
tatcgctttgtgttctaatatt

SEQ ID NO: 231182 - DNA, 22 bp, Artificial sequence
  SiRNA target sequence
atcgctttgtgttctaatattg

SEQ ID NO: 231183 - DNA, 22 bp, Artificial sequence
  SiRNA target sequence
tcgctttgtgttctaatattgt

SEQ ID NO: 231184 - DNA, 22 bp, Artificial sequence
  SiRNA target sequence
cgctttgtgttctaatattgtt

SEQ ID NO: 231185 - DNA, 22 bp, Artificial sequence
  SiRNA target sequence
gctttgtgttctaatattgttc

SEQ ID NO: 231186 - DNA, 22 bp, Artificial sequence
  SiRNA target sequence
ctttgtgttctaatattgttct

SEQ ID NO: 231187 - DNA, 22 bp, Artificial sequence
  SiRNA target sequence
tttgtgttctaatattgttctg

SEQ ID NO: 231188 - DNA, 22 bp, Artificial sequence
  SiRNA target sequence
ttgtgttctaatattgttctgc

SEQ ID NO: 231189 - DNA, 22 bp, Artificial sequence
  SiRNA target sequence
tgtgttctaatattgttctgcc

SEQ ID NO: 231190 - DNA, 22 bp, Artificial sequence
  SiRNA target sequence
gtgttctaatattgttctgcct

SEQ ID NO: 231191 - DNA, 22 bp, Artificial sequence
  SiRNA target sequence
tgttctaatattgttctgcctt

SEQ ID NO: 231192 - DNA, 22 bp, Artificial sequence
  SiRNA target sequence
gttctaatattgttctgcctta

SEQ ID NO: 231193 - DNA, 22 bp, Artificial sequence
  SiRNA target sequence
ttctaatattgttctgccttat

SEQ ID NO: 231194 - DNA, 22 bp, Artificial sequence
  SiRNA target sequence
tctaatattgttctgccttata

SEQ ID NO: 231195 - DNA, 22 bp, Artificial sequence
  SiRNA target sequence
ctaatattgttctgccttatat

SEQ ID NO: 231196 - DNA, 22 bp, Artificial sequence
  SiRNA target sequence
taatattgttctgccttatatg

SEQ ID NO: 231197 - DNA, 22 bp, Artificial sequence
  SiRNA target sequence
aatattgttctgccttatatgg

SEQ ID NO: 231198 - DNA, 22 bp, Artificial sequence
  SiRNA target sequence
atattgttctgccttatatggt

SEQ ID NO: 231199 - DNA, 22 bp, Artificial sequence
  SiRNA target sequence
tattgttctgccttatatggtt

SEQ ID NO: 231200 - DNA, 22 bp, Artificial sequence
  SiRNA target sequence
attgttctgccttatatggttt

SEQ ID NO: 231201 - DNA, 22 bp, Artificial sequence
  SiRNA target sequence
ttgttctgccttatatggtttt

SEQ ID NO: 231202 - DNA, 22 bp, Artificial sequence
  SiRNA target sequence
tgttctgccttatatggtttta

SEQ ID NO: 231203 - DNA, 22 bp, Artificial sequence
  SiRNA target sequence
gttctgccttatatggttttat

SEQ ID NO: 231204 - DNA, 22 bp, Artificial sequence
  SiRNA target sequence
ttctgccttatatggttttatt

SEQ ID NO: 231205 - DNA, 22 bp, Artificial sequence
  SiRNA target sequence
tctgccttatatggttttattc

SEQ ID NO: 231206 - DNA, 22 bp, Artificial sequence
  SiRNA target sequence
ctgccttatatggttttattct

SEQ ID NO: 231207 - DNA, 22 bp, Artificial sequence
  SiRNA target sequence
tgccttatatggttttattctg

SEQ ID NO: 231208 - DNA, 22 bp, Artificial sequence
  SiRNA target sequence
gccttatatggttttattctgt

SEQ ID NO: 231209 - DNA, 22 bp, Artificial sequence
  SiRNA target sequence
ccttatatggttttattctgtt

SEQ ID NO: 231210 - DNA, 22 bp, Artificial sequence
  SiRNA target sequence
cttatatggttttattctgttt

SEQ ID NO: 231211 - DNA, 22 bp, Artificial sequence
  SiRNA target sequence
ttatatggttttattctgtttt

SEQ ID NO: 231212 - DNA, 22 bp, Artificial sequence
  SiRNA target sequence
tatatggttttattctgttttc

SEQ ID NO: 231213 - DNA, 22 bp, Artificial sequence
  SiRNA target sequence
atatggttttattctgttttct

SEQ ID NO: 231214 - DNA, 22 bp, Artificial sequence
  SiRNA target sequence
tatggttttattctgttttcta

SEQ ID NO: 231215 - DNA, 22 bp, Artificial sequence
  SiRNA target sequence
atggttttattctgttttctat

SEQ ID NO: 231216 - DNA, 22 bp, Artificial sequence
  SiRNA target sequence
tggttttattctgttttctatc

SEQ ID NO: 231217 - DNA, 22 bp, Artificial sequence
  SiRNA target sequence
ggttttattctgttttctatct

SEQ ID NO: 231218 - DNA, 22 bp, Artificial sequence
  SiRNA target sequence
gttttattctgttttctatctc

SEQ ID NO: 231219 - DNA, 22 bp, Artificial sequence
  SiRNA target sequence
ttttattctgttttctatctca

SEQ ID NO: 231220 - DNA, 22 bp, Artificial sequence
  SiRNA target sequence
tttattctgttttctatctcaa

SEQ ID NO: 231221 - DNA, 22 bp, Artificial sequence
  SiRNA target sequence
ttattctgttttctatctcaat

SEQ ID NO: 231222 - DNA, 22 bp, Artificial sequence
  SiRNA target sequence
tattctgttttctatctcaata

SEQ ID NO: 231223 - DNA, 22 bp, Artificial sequence
  SiRNA target sequence
attctgttttctatctcaatag

SEQ ID NO: 231224 - DNA, 22 bp, Artificial sequence
  SiRNA target sequence
ttctgttttctatctcaataga

SEQ ID NO: 231225 - DNA, 22 bp, Artificial sequence
  SiRNA target sequence
tctgttttctatctcaatagaa

SEQ ID NO: 231226 - DNA, 22 bp, Artificial sequence
  SiRNA target sequence
ctgttttctatctcaatagaaa

SEQ ID NO: 231227 - DNA, 22 bp, Artificial sequence
  SiRNA target sequence
tgttttctatctcaatagaaaa

SEQ ID NO: 231228 - DNA, 22 bp, Artificial sequence
  SiRNA target sequence
gttttctatctcaatagaaaat

SEQ ID NO: 231229 - DNA, 22 bp, Artificial sequence
  SiRNA target sequence
ttttctatctcaatagaaaata

SEQ ID NO: 231230 - DNA, 22 bp, Artificial sequence
  SiRNA target sequence
tttctatctcaatagaaaatat

SEQ ID NO: 231231 - DNA, 22 bp, Artificial sequence
  SiRNA target sequence
ttctatctcaatagaaaatata

SEQ ID NO: 231232 - DNA, 22 bp, Artificial sequence
  SiRNA target sequence
tctatctcaatagaaaatataa

SEQ ID NO: 231233 - DNA, 22 bp, Artificial sequence
  SiRNA target sequence
ctatctcaatagaaaatataaa

SEQ ID NO: 231234 - DNA, 22 bp, Artificial sequence
  SiRNA target sequence
tatctcaatagaaaatataaag

SEQ ID NO: 231235 - DNA, 22 bp, Artificial sequence
  SiRNA target sequence
atctcaatagaaaatataaaga

SEQ ID NO: 231236 - DNA, 22 bp, Artificial sequence
  SiRNA target sequence
tctcaatagaaaatataaagaa

SEQ ID NO: 231237 - DNA, 22 bp, Artificial sequence
  SiRNA target sequence
ctcaatagaaaatataaagaat

SEQ ID NO: 231238 - DNA, 22 bp, Artificial sequence
  SiRNA target sequence
tcaatagaaaatataaagaatc

SEQ ID NO: 231239 - DNA, 22 bp, Artificial sequence
  SiRNA target sequence
caatagaaaatataaagaatct

SEQ ID NO: 231240 - DNA, 22 bp, Artificial sequence
  SiRNA target sequence
aatagaaaatataaagaatctg

SEQ ID NO: 231241 - DNA, 22 bp, Artificial sequence
  SiRNA target sequence
atagaaaatataaagaatctgt

SEQ ID NO: 231242 - DNA, 22 bp, Artificial sequence
  SiRNA target sequence
tagaaaatataaagaatctgtc

SEQ ID NO: 231243 - DNA, 22 bp, Artificial sequence
  SiRNA target sequence
agaaaatataaagaatctgtcg

SEQ ID NO: 231244 - DNA, 22 bp, Artificial sequence
  SiRNA target sequence
gaaaatataaagaatctgtcga

SEQ ID NO: 231245 - DNA, 22 bp, Artificial sequence
  SiRNA target sequence
aaaatataaagaatctgtcgag

SEQ ID NO: 231246 - DNA, 22 bp, Artificial sequence
  SiRNA target sequence
aaatataaagaatctgtcgaga

SEQ ID NO: 231247 - DNA, 22 bp, Artificial sequence
  SiRNA target sequence
aatataaagaatctgtcgagaa

SEQ ID NO: 231248 - DNA, 22 bp, Artificial sequence
  SiRNA target sequence
atataaagaatctgtcgagaat

SEQ ID NO: 231249 - DNA, 22 bp, Artificial sequence
  SiRNA target sequence
tataaagaatctgtcgagaata

SEQ ID NO: 231250 - DNA, 22 bp, Artificial sequence
  SiRNA target sequence
ataaagaatctgtcgagaataa

SEQ ID NO: 231251 - DNA, 22 bp, Artificial sequence
  SiRNA target sequence
taaagaatctgtcgagaataat

SEQ ID NO: 231252 - DNA, 22 bp, Artificial sequence
  SiRNA target sequence
aaagaatctgtcgagaataatg

SEQ ID NO: 231253 - DNA, 22 bp, Artificial sequence
  SiRNA target sequence
aagaatctgtcgagaataatgc

SEQ ID NO: 231254 - DNA, 22 bp, Artificial sequence
  SiRNA target sequence
agaatctgtcgagaataatgca

SEQ ID NO: 231255 - DNA, 22 bp, Artificial sequence
  SiRNA target sequence
gaatctgtcgagaataatgcac

SEQ ID NO: 231256 - DNA, 22 bp, Artificial sequence
  SiRNA target sequence
aatctgtcgagaataatgcacc

SEQ ID NO: 231257 - DNA, 22 bp, Artificial sequence
  SiRNA target sequence
atctgtcgagaataatgcacca

SEQ ID NO: 231258 - DNA, 22 bp, Artificial sequence
  SiRNA target sequence
tctgtcgagaataatgcaccaa

SEQ ID NO: 231259 - DNA, 22 bp, Artificial sequence
  SiRNA target sequence
ctgtcgagaataatgcaccaat

SEQ ID NO: 231260 - DNA, 22 bp, Artificial sequence
  SiRNA target sequence
tgtcgagaataatgcaccaatt

SEQ ID NO: 231261 - DNA, 22 bp, Artificial sequence
  SiRNA target sequence
gtcgagaataatgcaccaattg

SEQ ID NO: 231262 - DNA, 22 bp, Artificial sequence
  SiRNA target sequence
tcgagaataatgcaccaattga

SEQ ID NO: 231263 - DNA, 22 bp, Artificial sequence
  SiRNA target sequence
cgagaataatgcaccaattgat

SEQ ID NO: 231264 - DNA, 22 bp, Artificial sequence
  SiRNA target sequence
gagaataatgcaccaattgata

SEQ ID NO: 231265 - DNA, 22 bp, Artificial sequence
  SiRNA target sequence
agaataatgcaccaattgatat

SEQ ID NO: 231266 - DNA, 22 bp, Artificial sequence
  SiRNA target sequence
gaataatgcaccaattgatatt

SEQ ID NO: 231267 - DNA, 22 bp, Artificial sequence
  SiRNA target sequence
aataatgcaccaattgatattg

SEQ ID NO: 231268 - DNA, 22 bp, Artificial sequence
  SiRNA target sequence
ataatgcaccaattgatattga

SEQ ID NO: 231269 - DNA, 22 bp, Artificial sequence
  SiRNA target sequence
taatgcaccaattgatattgat

SEQ ID NO: 231270 - DNA, 22 bp, Artificial sequence
  SiRNA target sequence
aatgcaccaattgatattgatt

SEQ ID NO: 231271 - DNA, 22 bp, Artificial sequence
  SiRNA target sequence
atgcaccaattgatattgattt

SEQ ID NO: 231272 - DNA, 22 bp, Artificial sequence
  SiRNA target sequence
tgcaccaattgatattgattta

SEQ ID NO: 231273 - DNA, 22 bp, Artificial sequence
  SiRNA target sequence
gcaccaattgatattgatttat

SEQ ID NO: 231274 - DNA, 22 bp, Artificial sequence
  SiRNA target sequence
caccaattgatattgatttatt

SEQ ID NO: 231275 - DNA, 22 bp, Artificial sequence
  SiRNA target sequence
accaattgatattgatttattc

SEQ ID NO: 231276 - DNA, 22 bp, Artificial sequence
  SiRNA target sequence
ccaattgatattgatttattca

SEQ ID NO: 231277 - DNA, 22 bp, Artificial sequence
  SiRNA target sequence
caattgatattgatttattcac

SEQ ID NO: 231278 - DNA, 22 bp, Artificial sequence
  SiRNA target sequence
aattgatattgatttattcact

SEQ ID NO: 231279 - DNA, 22 bp, Artificial sequence
  SiRNA target sequence
attgatattgatttattcacta

SEQ ID NO: 231280 - DNA, 22 bp, Artificial sequence
  SiRNA target sequence
ttgatattgatttattcactag

SEQ ID NO: 231281 - DNA, 22 bp, Artificial sequence
  SiRNA target sequence
tgatattgatttattcactagt

SEQ ID NO: 231282 - DNA, 22 bp, Artificial sequence
  SiRNA target sequence
gatattgatttattcactagtt

SEQ ID NO: 231283 - DNA, 22 bp, Artificial sequence
  SiRNA target sequence
atattgatttattcactagttc

SEQ ID NO: 231284 - DNA, 22 bp, Artificial sequence
  SiRNA target sequence
tattgatttattcactagttca

SEQ ID NO: 231285 - DNA, 22 bp, Artificial sequence
  SiRNA target sequence
attgatttattcactagttcaa

SEQ ID NO: 231286 - DNA, 22 bp, Artificial sequence
  SiRNA target sequence
ttgatttattcactagttcaaa

SEQ ID NO: 231287 - DNA, 22 bp, Artificial sequence
  SiRNA target sequence
tgatttattcactagttcaaaa

SEQ ID NO: 231288 - DNA, 22 bp, Artificial sequence
  SiRNA target sequence
gatttattcactagttcaaaag

SEQ ID NO: 231289 - DNA, 22 bp, Artificial sequence
  SiRNA target sequence
atttattcactagttcaaaagt

SEQ ID NO: 231290 - DNA, 22 bp, Artificial sequence
  SiRNA target sequence
tttattcactagttcaaaagtc

SEQ ID NO: 231291 - DNA, 22 bp, Artificial sequence
  SiRNA target sequence
ttattcactagttcaaaagtca

SEQ ID NO: 231292 - DNA, 22 bp, Artificial sequence
  SiRNA target sequence
tattcactagttcaaaagtcaa

SEQ ID NO: 231293 - DNA, 22 bp, Artificial sequence
  SiRNA target sequence
attcactagttcaaaagtcaag

SEQ ID NO: 231294 - DNA, 22 bp, Artificial sequence
  SiRNA target sequence
ttcactagttcaaaagtcaagg

SEQ ID NO: 231295 - DNA, 22 bp, Artificial sequence
  SiRNA target sequence
tcactagttcaaaagtcaaggc

SEQ ID NO: 231296 - DNA, 22 bp, Artificial sequence
  SiRNA target sequence
cactagttcaaaagtcaaggca

SEQ ID NO: 231297 - DNA, 22 bp, Artificial sequence
  SiRNA target sequence
actagttcaaaagtcaaggcac

SEQ ID NO: 231298 - DNA, 22 bp, Artificial sequence
  SiRNA target sequence
ctagttcaaaagtcaaggcacc

SEQ ID NO: 231299 - DNA, 22 bp, Artificial sequence
  SiRNA target sequence
tagttcaaaagtcaaggcacct

SEQ ID NO: 231300 - DNA, 22 bp, Artificial sequence
  SiRNA target sequence
agttcaaaagtcaaggcacctt

SEQ ID NO: 231301 - DNA, 22 bp, Artificial sequence
  SiRNA target sequence
gttcaaaagtcaaggcaccttc

SEQ ID NO: 231302 - DNA, 22 bp, Artificial sequence
  SiRNA target sequence
ttcaaaagtcaaggcaccttct

SEQ ID NO: 231303 - DNA, 22 bp, Artificial sequence
  SiRNA target sequence
tcaaaagtcaaggcaccttctt

SEQ ID NO: 231304 - DNA, 22 bp, Artificial sequence
  SiRNA target sequence
caaaagtcaaggcaccttcttc

SEQ ID NO: 231305 - DNA, 22 bp, Artificial sequence
  SiRNA target sequence
aaaagtcaaggcaccttcttct

SEQ ID NO: 231306 - DNA, 22 bp, Artificial sequence
  SiRNA target sequence
aaagtcaaggcaccttcttctg

SEQ ID NO: 231307 - DNA, 22 bp, Artificial sequence
  SiRNA target sequence
aagtcaaggcaccttcttctga

SEQ ID NO: 231308 - DNA, 22 bp, Artificial sequence
  SiRNA target sequence
agtcaaggcaccttcttctgaa

SEQ ID NO: 231309 - DNA, 22 bp, Artificial sequence
  SiRNA target sequence
gtcaaggcaccttcttctgaac

SEQ ID NO: 231310 - DNA, 22 bp, Artificial sequence
  SiRNA target sequence
tcaaggcaccttcttctgaacc

SEQ ID NO: 231311 - DNA, 22 bp, Artificial sequence
  SiRNA target sequence
caaggcaccttcttctgaacct

SEQ ID NO: 231312 - DNA, 22 bp, Artificial sequence
  SiRNA target sequence
aaggcaccttcttctgaaccta

SEQ ID NO: 231313 - DNA, 22 bp, Artificial sequence
  SiRNA target sequence
aggcaccttcttctgaacctac

SEQ ID NO: 231314 - DNA, 22 bp, Artificial sequence
  SiRNA target sequence
ggcaccttcttctgaacctact

SEQ ID NO: 231315 - DNA, 22 bp, Artificial sequence
  SiRNA target sequence
gcaccttcttctgaacctactg

SEQ ID NO: 231316 - DNA, 22 bp, Artificial sequence
  SiRNA target sequence
caccttcttctgaacctactgt

SEQ ID NO: 231317 - DNA, 22 bp, Artificial sequence
  SiRNA target sequence
accttcttctgaacctactgtt

SEQ ID NO: 231318 - DNA, 22 bp, Artificial sequence
  SiRNA target sequence
ccttcttctgaacctactgttg

SEQ ID NO: 231319 - DNA, 22 bp, Artificial sequence
  SiRNA target sequence
cttcttctgaacctactgttgc

SEQ ID NO: 231320 - DNA, 22 bp, Artificial sequence
  SiRNA target sequence
ttcttctgaacctactgttgct

SEQ ID NO: 231321 - DNA, 22 bp, Artificial sequence
  SiRNA target sequence
tcttctgaacctactgttgcta

SEQ ID NO: 231322 - DNA, 22 bp, Artificial sequence
  SiRNA target sequence
cttctgaacctactgttgctac

SEQ ID NO: 231323 - DNA, 22 bp, Artificial sequence
  SiRNA target sequence
ttctgaacctactgttgctacc

SEQ ID NO: 231324 - DNA, 22 bp, Artificial sequence
  SiRNA target sequence
tctgaacctactgttgctacca

SEQ ID NO: 231325 - DNA, 22 bp, Artificial sequence
  SiRNA target sequence
ctgaacctactgttgctaccaa

SEQ ID NO: 231326 - DNA, 22 bp, Artificial sequence
  SiRNA target sequence
tgaacctactgttgctaccaaa

SEQ ID NO: 231327 - DNA, 22 bp, Artificial sequence
  SiRNA target sequence
gaacctactgttgctaccaaaa

SEQ ID NO: 231328 - DNA, 22 bp, Artificial sequence
  SiRNA target sequence
aacctactgttgctaccaaaag

SEQ ID NO: 231329 - DNA, 22 bp, Artificial sequence
  SiRNA target sequence
acctactgttgctaccaaaagt

SEQ ID NO: 231330 - DNA, 22 bp, Artificial sequence
  SiRNA target sequence
cctactgttgctaccaaaagtg

SEQ ID NO: 231331 - DNA, 22 bp, Artificial sequence
  SiRNA target sequence
ctactgttgctaccaaaagtgt

SEQ ID NO: 231332 - DNA, 22 bp, Artificial sequence
  SiRNA target sequence
tactgttgctaccaaaagtgtt

SEQ ID NO: 231333 - DNA, 22 bp, Artificial sequence
  SiRNA target sequence
actgttgctaccaaaagtgtta

SEQ ID NO: 231334 - DNA, 22 bp, Artificial sequence
  SiRNA target sequence
ctgttgctaccaaaagtgttac

SEQ ID NO: 231335 - DNA, 22 bp, Artificial sequence
  SiRNA target sequence
tgttgctaccaaaagtgttact

SEQ ID NO: 231336 - DNA, 22 bp, Artificial sequence
  SiRNA target sequence
gttgctaccaaaagtgttacta

SEQ ID NO: 231337 - DNA, 22 bp, Artificial sequence
  SiRNA target sequence
ttgctaccaaaagtgttactac

SEQ ID NO: 231338 - DNA, 22 bp, Artificial sequence
  SiRNA target sequence
tgctaccaaaagtgttactaca

SEQ ID NO: 231339 - DNA, 22 bp, Artificial sequence
  SiRNA target sequence
gctaccaaaagtgttactacag

SEQ ID NO: 231340 - DNA, 22 bp, Artificial sequence
  SiRNA target sequence
ctaccaaaagtgttactacaga

SEQ ID NO: 231341 - DNA, 22 bp, Artificial sequence
  SiRNA target sequence
taccaaaagtgttactacagaa

SEQ ID NO: 231342 - DNA, 22 bp, Artificial sequence
  SiRNA target sequence
accaaaagtgttactacagaag

SEQ ID NO: 231343 - DNA, 22 bp, Artificial sequence
  SiRNA target sequence
ccaaaagtgttactacagaaga

SEQ ID NO: 231344 - DNA, 22 bp, Artificial sequence
  SiRNA target sequence
caaaagtgttactacagaagaa

SEQ ID NO: 231345 - DNA, 22 bp, Artificial sequence
  SiRNA target sequence
aaaagtgttactacagaagaat

SEQ ID NO: 231346 - DNA, 22 bp, Artificial sequence
  SiRNA target sequence
aaagtgttactacagaagaata

SEQ ID NO: 231347 - DNA, 22 bp, Artificial sequence
  SiRNA target sequence
aagtgttactacagaagaataa

SEQ ID NO: 231348 - DNA, 23 bp, Artificial sequence
  SiRNA target sequence
atgtcagtagacaattcgaaagt

SEQ ID NO: 231349 - DNA, 23 bp, Artificial sequence
  SiRNA target sequence
tgtcagtagacaattcgaaagtt

SEQ ID NO: 231350 - DNA, 23 bp, Artificial sequence
  SiRNA target sequence
gtcagtagacaattcgaaagttc

SEQ ID NO: 231351 - DNA, 23 bp, Artificial sequence
  SiRNA target sequence
tcagtagacaattcgaaagttct

SEQ ID NO: 231352 - DNA, 23 bp, Artificial sequence
  SiRNA target sequence
cagtagacaattcgaaagttcta

SEQ ID NO: 231353 - DNA, 23 bp, Artificial sequence
  SiRNA target sequence
agtagacaattcgaaagttctac

SEQ ID NO: 231354 - DNA, 23 bp, Artificial sequence
  SiRNA target sequence
gtagacaattcgaaagttctaca

SEQ ID NO: 231355 - DNA, 23 bp, Artificial sequence
  SiRNA target sequence
tagacaattcgaaagttctacaa

SEQ ID NO: 231356 - DNA, 23 bp, Artificial sequence
  SiRNA target sequence
agacaattcgaaagttctacaaa

SEQ ID NO: 231357 - DNA, 23 bp, Artificial sequence
  SiRNA target sequence
gacaattcgaaagttctacaaaa

SEQ ID NO: 231358 - DNA, 23 bp, Artificial sequence
  SiRNA target sequence
acaattcgaaagttctacaaaat

SEQ ID NO: 231359 - DNA, 23 bp, Artificial sequence
  SiRNA target sequence
caattcgaaagttctacaaaata

SEQ ID NO: 231360 - DNA, 23 bp, Artificial sequence
  SiRNA target sequence
aattcgaaagttctacaaaataa

SEQ ID NO: 231361 - DNA, 23 bp, Artificial sequence
  SiRNA target sequence
attcgaaagttctacaaaataac

SEQ ID NO: 231362 - DNA, 23 bp, Artificial sequence
  SiRNA target sequence
ttcgaaagttctacaaaataacg

SEQ ID NO: 231363 - DNA, 23 bp, Artificial sequence
  SiRNA target sequence
tcgaaagttctacaaaataacga

SEQ ID NO: 231364 - DNA, 23 bp, Artificial sequence
  SiRNA target sequence
cgaaagttctacaaaataacgaa

SEQ ID NO: 231365 - DNA, 23 bp, Artificial sequence
  SiRNA target sequence
gaaagttctacaaaataacgaaa

SEQ ID NO: 231366 - DNA, 23 bp, Artificial sequence
  SiRNA target sequence
aaagttctacaaaataacgaaaa

SEQ ID NO: 231367 - DNA, 23 bp, Artificial sequence
  SiRNA target sequence
aagttctacaaaataacgaaaac

SEQ ID NO: 231368 - DNA, 23 bp, Artificial sequence
  SiRNA target sequence
agttctacaaaataacgaaaact

SEQ ID NO: 231369 - DNA, 23 bp, Artificial sequence
  SiRNA target sequence
gttctacaaaataacgaaaactc

SEQ ID NO: 231370 - DNA, 23 bp, Artificial sequence
  SiRNA target sequence
ttctacaaaataacgaaaactct

SEQ ID NO: 231371 - DNA, 23 bp, Artificial sequence
  SiRNA target sequence
tctacaaaataacgaaaactctg

SEQ ID NO: 231372 - DNA, 23 bp, Artificial sequence
  SiRNA target sequence
ctacaaaataacgaaaactctgc

SEQ ID NO: 231373 - DNA, 23 bp, Artificial sequence
  SiRNA target sequence
tacaaaataacgaaaactctgct

SEQ ID NO: 231374 - DNA, 23 bp, Artificial sequence
  SiRNA target sequence
acaaaataacgaaaactctgctc

SEQ ID NO: 231375 - DNA, 23 bp, Artificial sequence
  SiRNA target sequence
caaaataacgaaaactctgctct

SEQ ID NO: 231376 - DNA, 23 bp, Artificial sequence
  SiRNA target sequence
aaaataacgaaaactctgctctt

SEQ ID NO: 231377 - DNA, 23 bp, Artificial sequence
  SiRNA target sequence
aaataacgaaaactctgctcttc

SEQ ID NO: 231378 - DNA, 23 bp, Artificial sequence
  SiRNA target sequence
aataacgaaaactctgctcttcc

SEQ ID NO: 231379 - DNA, 23 bp, Artificial sequence
  SiRNA target sequence
ataacgaaaactctgctcttcct

SEQ ID NO: 231380 - DNA, 23 bp, Artificial sequence
  SiRNA target sequence
taacgaaaactctgctcttccta

SEQ ID NO: 231381 - DNA, 23 bp, Artificial sequence
  SiRNA target sequence
aacgaaaactctgctcttcctac

SEQ ID NO: 231382 - DNA, 23 bp, Artificial sequence
  SiRNA target sequence
acgaaaactctgctcttcctaca

SEQ ID NO: 231383 - DNA, 23 bp, Artificial sequence
  SiRNA target sequence
cgaaaactctgctcttcctacag

SEQ ID NO: 231384 - DNA, 23 bp, Artificial sequence
  SiRNA target sequence
gaaaactctgctcttcctacaga

SEQ ID NO: 231385 - DNA, 23 bp, Artificial sequence
  SiRNA target sequence
aaaactctgctcttcctacagaa

SEQ ID NO: 231386 - DNA, 23 bp, Artificial sequence
  SiRNA target sequence
aaactctgctcttcctacagaag

SEQ ID NO: 231387 - DNA, 23 bp, Artificial sequence
  SiRNA target sequence
aactctgctcttcctacagaaga

SEQ ID NO: 231388 - DNA, 23 bp, Artificial sequence
  SiRNA target sequence
actctgctcttcctacagaagat

SEQ ID NO: 231389 - DNA, 23 bp, Artificial sequence
  SiRNA target sequence
ctctgctcttcctacagaagatg

SEQ ID NO: 231390 - DNA, 23 bp, Artificial sequence
  SiRNA target sequence
tctgctcttcctacagaagatga

SEQ ID NO: 231391 - DNA, 23 bp, Artificial sequence
  SiRNA target sequence
ctgctcttcctacagaagatgaa

SEQ ID NO: 231392 - DNA, 23 bp, Artificial sequence
  SiRNA target sequence
tgctcttcctacagaagatgaaa

SEQ ID NO: 231393 - DNA, 23 bp, Artificial sequence
  SiRNA target sequence
gctcttcctacagaagatgaaat

SEQ ID NO: 231394 - DNA, 23 bp, Artificial sequence
  SiRNA target sequence
ctcttcctacagaagatgaaatt

SEQ ID NO: 231395 - DNA, 23 bp, Artificial sequence
  SiRNA target sequence
tcttcctacagaagatgaaattg

SEQ ID NO: 231396 - DNA, 23 bp, Artificial sequence
  SiRNA target sequence
cttcctacagaagatgaaattga

SEQ ID NO: 231397 - DNA, 23 bp, Artificial sequence
  SiRNA target sequence
ttcctacagaagatgaaattgag

SEQ ID NO: 231398 - DNA, 23 bp, Artificial sequence
  SiRNA target sequence
tcctacagaagatgaaattgagt

SEQ ID NO: 231399 - DNA, 23 bp, Artificial sequence
  SiRNA target sequence
cctacagaagatgaaattgagta

SEQ ID NO: 231400 - DNA, 23 bp, Artificial sequence
  SiRNA target sequence
ctacagaagatgaaattgagtat

SEQ ID NO: 231401 - DNA, 23 bp, Artificial sequence
  SiRNA target sequence
tacagaagatgaaattgagtatg

SEQ ID NO: 231402 - DNA, 23 bp, Artificial sequence
  SiRNA target sequence
acagaagatgaaattgagtatga

SEQ ID NO: 231403 - DNA, 23 bp, Artificial sequence
  SiRNA target sequence
cagaagatgaaattgagtatgag

SEQ ID NO: 231404 - DNA, 23 bp, Artificial sequence
  SiRNA target sequence
agaagatgaaattgagtatgagg

SEQ ID NO: 231405 - DNA, 23 bp, Artificial sequence
  SiRNA target sequence
gaagatgaaattgagtatgaggc

SEQ ID NO: 231406 - DNA, 23 bp, Artificial sequence
  SiRNA target sequence
aagatgaaattgagtatgaggcc

SEQ ID NO: 231407 - DNA, 23 bp, Artificial sequence
  SiRNA target sequence
agatgaaattgagtatgaggcca

SEQ ID NO: 231408 - DNA, 23 bp, Artificial sequence
  SiRNA target sequence
gatgaaattgagtatgaggccag

SEQ ID NO: 231409 - DNA, 23 bp, Artificial sequence
  SiRNA target sequence
atgaaattgagtatgaggccagc

SEQ ID NO: 231410 - DNA, 23 bp, Artificial sequence
  SiRNA target sequence
tgaaattgagtatgaggccagca

SEQ ID NO: 231411 - DNA, 23 bp, Artificial sequence
  SiRNA target sequence
gaaattgagtatgaggccagcaa

SEQ ID NO: 231412 - DNA, 23 bp, Artificial sequence
  SiRNA target sequence
aaattgagtatgaggccagcaat

SEQ ID NO: 231413 - DNA, 23 bp, Artificial sequence
  SiRNA target sequence
aattgagtatgaggccagcaatg

SEQ ID NO: 231414 - DNA, 23 bp, Artificial sequence
  SiRNA target sequence
attgagtatgaggccagcaatgg

SEQ ID NO: 231415 - DNA, 23 bp, Artificial sequence
  SiRNA target sequence
ttgagtatgaggccagcaatggt

SEQ ID NO: 231416 - DNA, 23 bp, Artificial sequence
  SiRNA target sequence
tgagtatgaggccagcaatggtt

SEQ ID NO: 231417 - DNA, 23 bp, Artificial sequence
  SiRNA target sequence
gagtatgaggccagcaatggttc

SEQ ID NO: 231418 - DNA, 23 bp, Artificial sequence
  SiRNA target sequence
agtatgaggccagcaatggttct

SEQ ID NO: 231419 - DNA, 23 bp, Artificial sequence
  SiRNA target sequence
gtatgaggccagcaatggttctg

SEQ ID NO: 231420 - DNA, 23 bp, Artificial sequence
  SiRNA target sequence
tatgaggccagcaatggttctgg

SEQ ID NO: 231421 - DNA, 23 bp, Artificial sequence
  SiRNA target sequence
atgaggccagcaatggttctggt

SEQ ID NO: 231422 - DNA, 23 bp, Artificial sequence
  SiRNA target sequence
tgaggccagcaatggttctggta

SEQ ID NO: 231423 - DNA, 23 bp, Artificial sequence
  SiRNA target sequence
gaggccagcaatggttctggtat

SEQ ID NO: 231424 - DNA, 23 bp, Artificial sequence
  SiRNA target sequence
aggccagcaatggttctggtata

SEQ ID NO: 231425 - DNA, 23 bp, Artificial sequence
  SiRNA target sequence
ggccagcaatggttctggtatat

SEQ ID NO: 231426 - DNA, 23 bp, Artificial sequence
  SiRNA target sequence
gccagcaatggttctggtatata

SEQ ID NO: 231427 - DNA, 23 bp, Artificial sequence
  SiRNA target sequence
ccagcaatggttctggtatatat

SEQ ID NO: 231428 - DNA, 23 bp, Artificial sequence
  SiRNA target sequence
cagcaatggttctggtatatatt

SEQ ID NO: 231429 - DNA, 23 bp, Artificial sequence
  SiRNA target sequence
agcaatggttctggtatatattc

SEQ ID NO: 231430 - DNA, 23 bp, Artificial sequence
  SiRNA target sequence
gcaatggttctggtatatattca

SEQ ID NO: 231431 - DNA, 23 bp, Artificial sequence
  SiRNA target sequence
caatggttctggtatatattcac

SEQ ID NO: 231432 - DNA, 23 bp, Artificial sequence
  SiRNA target sequence
aatggttctggtatatattcact

SEQ ID NO: 231433 - DNA, 23 bp, Artificial sequence
  SiRNA target sequence
atggttctggtatatattcactt

SEQ ID NO: 231434 - DNA, 23 bp, Artificial sequence
  SiRNA target sequence
tggttctggtatatattcactta

SEQ ID NO: 231435 - DNA, 23 bp, Artificial sequence
  SiRNA target sequence
ggttctggtatatattcacttat

SEQ ID NO: 231436 - DNA, 23 bp, Artificial sequence
  SiRNA target sequence
gttctggtatatattcacttatt

SEQ ID NO: 231437 - DNA, 23 bp, Artificial sequence
  SiRNA target sequence
ttctggtatatattcacttatta

SEQ ID NO: 231438 - DNA, 23 bp, Artificial sequence
  SiRNA target sequence
tctggtatatattcacttattag

SEQ ID NO: 231439 - DNA, 23 bp, Artificial sequence
  SiRNA target sequence
ctggtatatattcacttattaga

SEQ ID NO: 231440 - DNA, 23 bp, Artificial sequence
  SiRNA target sequence
tggtatatattcacttattagag

SEQ ID NO: 231441 - DNA, 23 bp, Artificial sequence
  SiRNA target sequence
ggtatatattcacttattagagt

SEQ ID NO: 231442 - DNA, 23 bp, Artificial sequence
  SiRNA target sequence
gtatatattcacttattagagta

SEQ ID NO: 231443 - DNA, 23 bp, Artificial sequence
  SiRNA target sequence
tatatattcacttattagagtag

SEQ ID NO: 231444 - DNA, 23 bp, Artificial sequence
  SiRNA target sequence
atatattcacttattagagtagc

SEQ ID NO: 231445 - DNA, 23 bp, Artificial sequence
  SiRNA target sequence
tatattcacttattagagtagca

SEQ ID NO: 231446 - DNA, 23 bp, Artificial sequence
  SiRNA target sequence
atattcacttattagagtagcaa

SEQ ID NO: 231447 - DNA, 23 bp, Artificial sequence
  SiRNA target sequence
tattcacttattagagtagcaaa

SEQ ID NO: 231448 - DNA, 23 bp, Artificial sequence
  SiRNA target sequence
attcacttattagagtagcaaag

SEQ ID NO: 231449 - DNA, 23 bp, Artificial sequence
  SiRNA target sequence
ttcacttattagagtagcaaagg

SEQ ID NO: 231450 - DNA, 23 bp, Artificial sequence
  SiRNA target sequence
tcacttattagagtagcaaaggt

SEQ ID NO: 231451 - DNA, 23 bp, Artificial sequence
  SiRNA target sequence
cacttattagagtagcaaaggtt

SEQ ID NO: 231452 - DNA, 23 bp, Artificial sequence
  SiRNA target sequence
acttattagagtagcaaaggttg

SEQ ID NO: 231453 - DNA, 23 bp, Artificial sequence
  SiRNA target sequence
cttattagagtagcaaaggttga

SEQ ID NO: 231454 - DNA, 23 bp, Artificial sequence
  SiRNA target sequence
ttattagagtagcaaaggttgag

SEQ ID NO: 231455 - DNA, 23 bp, Artificial sequence
  SiRNA target sequence
tattagagtagcaaaggttgaga

SEQ ID NO: 231456 - DNA, 23 bp, Artificial sequence
  SiRNA target sequence
attagagtagcaaaggttgagag

SEQ ID NO: 231457 - DNA, 23 bp, Artificial sequence
  SiRNA target sequence
ttagagtagcaaaggttgagaga

SEQ ID NO: 231458 - DNA, 23 bp, Artificial sequence
  SiRNA target sequence
tagagtagcaaaggttgagagaa

SEQ ID NO: 231459 - DNA, 23 bp, Artificial sequence
  SiRNA target sequence
agagtagcaaaggttgagagaaa

SEQ ID NO: 231460 - DNA, 23 bp, Artificial sequence
  SiRNA target sequence
gagtagcaaaggttgagagaaag

SEQ ID NO: 231461 - DNA, 23 bp, Artificial sequence
  SiRNA target sequence
agtagcaaaggttgagagaaaga

SEQ ID NO: 231462 - DNA, 23 bp, Artificial sequence
  SiRNA target sequence
gtagcaaaggttgagagaaagat

SEQ ID NO: 231463 - DNA, 23 bp, Artificial sequence
  SiRNA target sequence
tagcaaaggttgagagaaagatg

SEQ ID NO: 231464 - DNA, 23 bp, Artificial sequence
  SiRNA target sequence
agcaaaggttgagagaaagatgt

SEQ ID NO: 231465 - DNA, 23 bp, Artificial sequence
  SiRNA target sequence
gcaaaggttgagagaaagatgtt

SEQ ID NO: 231466 - DNA, 23 bp, Artificial sequence
  SiRNA target sequence
caaaggttgagagaaagatgttt

SEQ ID NO: 231467 - DNA, 23 bp, Artificial sequence
  SiRNA target sequence
aaaggttgagagaaagatgtttt

SEQ ID NO: 231468 - DNA, 23 bp, Artificial sequence
  SiRNA target sequence
aaggttgagagaaagatgttttg

SEQ ID NO: 231469 - DNA, 23 bp, Artificial sequence
  SiRNA target sequence
aggttgagagaaagatgttttgg

SEQ ID NO: 231470 - DNA, 23 bp, Artificial sequence
  SiRNA target sequence
ggttgagagaaagatgttttgga

SEQ ID NO: 231471 - DNA, 23 bp, Artificial sequence
  SiRNA target sequence
gttgagagaaagatgttttggat

SEQ ID NO: 231472 - DNA, 23 bp, Artificial sequence
  SiRNA target sequence
ttgagagaaagatgttttggatc

SEQ ID NO: 231473 - DNA, 23 bp, Artificial sequence
  SiRNA target sequence
tgagagaaagatgttttggatca

SEQ ID NO: 231474 - DNA, 23 bp, Artificial sequence
  SiRNA target sequence
gagagaaagatgttttggatcat

SEQ ID NO: 231475 - DNA, 23 bp, Artificial sequence
  SiRNA target sequence
agagaaagatgttttggatcatg

SEQ ID NO: 231476 - DNA, 23 bp, Artificial sequence
  SiRNA target sequence
gagaaagatgttttggatcatgg

SEQ ID NO: 231477 - DNA, 23 bp, Artificial sequence
  SiRNA target sequence
agaaagatgttttggatcatggc

SEQ ID NO: 231478 - DNA, 23 bp, Artificial sequence
  SiRNA target sequence
gaaagatgttttggatcatggca

SEQ ID NO: 231479 - DNA, 23 bp, Artificial sequence
  SiRNA target sequence
aaagatgttttggatcatggcag

SEQ ID NO: 231480 - DNA, 23 bp, Artificial sequence
  SiRNA target sequence
aagatgttttggatcatggcagc

SEQ ID NO: 231481 - DNA, 23 bp, Artificial sequence
  SiRNA target sequence
agatgttttggatcatggcagct

SEQ ID NO: 231482 - DNA, 23 bp, Artificial sequence
  SiRNA target sequence
gatgttttggatcatggcagcta

SEQ ID NO: 231483 - DNA, 23 bp, Artificial sequence
  SiRNA target sequence
atgttttggatcatggcagctat

SEQ ID NO: 231484 - DNA, 23 bp, Artificial sequence
  SiRNA target sequence
tgttttggatcatggcagctatg

SEQ ID NO: 231485 - DNA, 23 bp, Artificial sequence
  SiRNA target sequence
gttttggatcatggcagctatgt

SEQ ID NO: 231486 - DNA, 23 bp, Artificial sequence
  SiRNA target sequence
ttttggatcatggcagctatgtt

SEQ ID NO: 231487 - DNA, 23 bp, Artificial sequence
  SiRNA target sequence
tttggatcatggcagctatgttc

SEQ ID NO: 231488 - DNA, 23 bp, Artificial sequence
  SiRNA target sequence
ttggatcatggcagctatgttct

SEQ ID NO: 231489 - DNA, 23 bp, Artificial sequence
  SiRNA target sequence
tggatcatggcagctatgttctt

SEQ ID NO: 231490 - DNA, 23 bp, Artificial sequence
  SiRNA target sequence
ggatcatggcagctatgttcttt

SEQ ID NO: 231491 - DNA, 23 bp, Artificial sequence
  SiRNA target sequence
gatcatggcagctatgttcttta

SEQ ID NO: 231492 - DNA, 23 bp, Artificial sequence
  SiRNA target sequence
atcatggcagctatgttctttat

SEQ ID NO: 231493 - DNA, 23 bp, Artificial sequence
  SiRNA target sequence
tcatggcagctatgttctttatt

SEQ ID NO: 231494 - DNA, 23 bp, Artificial sequence
  SiRNA target sequence
catggcagctatgttctttatta

SEQ ID NO: 231495 - DNA, 23 bp, Artificial sequence
  SiRNA target sequence
atggcagctatgttctttattat

SEQ ID NO: 231496 - DNA, 23 bp, Artificial sequence
  SiRNA target sequence
tggcagctatgttctttattatc

SEQ ID NO: 231497 - DNA, 23 bp, Artificial sequence
  SiRNA target sequence
ggcagctatgttctttattatct

SEQ ID NO: 231498 - DNA, 23 bp, Artificial sequence
  SiRNA target sequence
gcagctatgttctttattatctc

SEQ ID NO: 231499 - DNA, 23 bp, Artificial sequence
  SiRNA target sequence
cagctatgttctttattatctcc

SEQ ID NO: 231500 - DNA, 23 bp, Artificial sequence
  SiRNA target sequence
agctatgttctttattatctcct

SEQ ID NO: 231501 - DNA, 23 bp, Artificial sequence
  SiRNA target sequence
gctatgttctttattatctcctt

SEQ ID NO: 231502 - DNA, 23 bp, Artificial sequence
  SiRNA target sequence
ctatgttctttattatctccttt

SEQ ID NO: 231503 - DNA, 23 bp, Artificial sequence
  SiRNA target sequence
tatgttctttattatctccttta

SEQ ID NO: 231504 - DNA, 23 bp, Artificial sequence
  SiRNA target sequence
atgttctttattatctcctttat

SEQ ID NO: 231505 - DNA, 23 bp, Artificial sequence
  SiRNA target sequence
tgttctttattatctcctttatt

SEQ ID NO: 231506 - DNA, 23 bp, Artificial sequence
  SiRNA target sequence
gttctttattatctcctttattt

SEQ ID NO: 231507 - DNA, 23 bp, Artificial sequence
  SiRNA target sequence
ttctttattatctcctttattta

SEQ ID NO: 231508 - DNA, 23 bp, Artificial sequence
  SiRNA target sequence
tctttattatctcctttatttat

SEQ ID NO: 231509 - DNA, 23 bp, Artificial sequence
  SiRNA target sequence
ctttattatctcctttatttatt

SEQ ID NO: 231510 - DNA, 23 bp, Artificial sequence
  SiRNA target sequence
tttattatctcctttatttattc

SEQ ID NO: 231511 - DNA, 23 bp, Artificial sequence
  SiRNA target sequence
ttattatctcctttatttattcg

SEQ ID NO: 231512 - DNA, 23 bp, Artificial sequence
  SiRNA target sequence
tattatctcctttatttattcgg

SEQ ID NO: 231513 - DNA, 23 bp, Artificial sequence
  SiRNA target sequence
attatctcctttatttattcggt

SEQ ID NO: 231514 - DNA, 23 bp, Artificial sequence
  SiRNA target sequence
ttatctcctttatttattcggtg

SEQ ID NO: 231515 - DNA, 23 bp, Artificial sequence
  SiRNA target sequence
tatctcctttatttattcggtgg

SEQ ID NO: 231516 - DNA, 23 bp, Artificial sequence
  SiRNA target sequence
atctcctttatttattcggtggc

SEQ ID NO: 231517 - DNA, 23 bp, Artificial sequence
  SiRNA target sequence
tctcctttatttattcggtggct

SEQ ID NO: 231518 - DNA, 23 bp, Artificial sequence
  SiRNA target sequence
ctcctttatttattcggtggcta

SEQ ID NO: 231519 - DNA, 23 bp, Artificial sequence
  SiRNA target sequence
tcctttatttattcggtggctag

SEQ ID NO: 231520 - DNA, 23 bp, Artificial sequence
  SiRNA target sequence
cctttatttattcggtggctaga

SEQ ID NO: 231521 - DNA, 23 bp, Artificial sequence
  SiRNA target sequence
ctttatttattcggtggctagag

SEQ ID NO: 231522 - DNA, 23 bp, Artificial sequence
  SiRNA target sequence
tttatttattcggtggctagagt

SEQ ID NO: 231523 - DNA, 23 bp, Artificial sequence
  SiRNA target sequence
ttatttattcggtggctagagtg

SEQ ID NO: 231524 - DNA, 23 bp, Artificial sequence
  SiRNA target sequence
tatttattcggtggctagagtgc

SEQ ID NO: 231525 - DNA, 23 bp, Artificial sequence
  SiRNA target sequence
atttattcggtggctagagtgct

SEQ ID NO: 231526 - DNA, 23 bp, Artificial sequence
  SiRNA target sequence
tttattcggtggctagagtgctt

SEQ ID NO: 231527 - DNA, 23 bp, Artificial sequence
  SiRNA target sequence
ttattcggtggctagagtgctta

SEQ ID NO: 231528 - DNA, 23 bp, Artificial sequence
  SiRNA target sequence
tattcggtggctagagtgcttaa

SEQ ID NO: 231529 - DNA, 23 bp, Artificial sequence
  SiRNA target sequence
attcggtggctagagtgcttaaa

SEQ ID NO: 231530 - DNA, 23 bp, Artificial sequence
  SiRNA target sequence
ttcggtggctagagtgcttaaag

SEQ ID NO: 231531 - DNA, 23 bp, Artificial sequence
  SiRNA target sequence
tcggtggctagagtgcttaaaga

SEQ ID NO: 231532 - DNA, 23 bp, Artificial sequence
  SiRNA target sequence
cggtggctagagtgcttaaagat

SEQ ID NO: 231533 - DNA, 23 bp, Artificial sequence
  SiRNA target sequence
ggtggctagagtgcttaaagatg

SEQ ID NO: 231534 - DNA, 23 bp, Artificial sequence
  SiRNA target sequence
gtggctagagtgcttaaagatgc

SEQ ID NO: 231535 - DNA, 23 bp, Artificial sequence
  SiRNA target sequence
tggctagagtgcttaaagatgcc

SEQ ID NO: 231536 - DNA, 23 bp, Artificial sequence
  SiRNA target sequence
ggctagagtgcttaaagatgccg

SEQ ID NO: 231537 - DNA, 23 bp, Artificial sequence
  SiRNA target sequence
gctagagtgcttaaagatgccgc

SEQ ID NO: 231538 - DNA, 23 bp, Artificial sequence
  SiRNA target sequence
ctagagtgcttaaagatgccgct

SEQ ID NO: 231539 - DNA, 23 bp, Artificial sequence
  SiRNA target sequence
tagagtgcttaaagatgccgctg

SEQ ID NO: 231540 - DNA, 23 bp, Artificial sequence
  SiRNA target sequence
agagtgcttaaagatgccgctgt

SEQ ID NO: 231541 - DNA, 23 bp, Artificial sequence
  SiRNA target sequence
gagtgcttaaagatgccgctgtt

SEQ ID NO: 231542 - DNA, 23 bp, Artificial sequence
  SiRNA target sequence
agtgcttaaagatgccgctgtta

SEQ ID NO: 231543 - DNA, 23 bp, Artificial sequence
  SiRNA target sequence
gtgcttaaagatgccgctgttat

SEQ ID NO: 231544 - DNA, 23 bp, Artificial sequence
  SiRNA target sequence
tgcttaaagatgccgctgttatt

SEQ ID NO: 231545 - DNA, 23 bp, Artificial sequence
  SiRNA target sequence
gcttaaagatgccgctgttattg

SEQ ID NO: 231546 - DNA, 23 bp, Artificial sequence
  SiRNA target sequence
cttaaagatgccgctgttattgg

SEQ ID NO: 231547 - DNA, 23 bp, Artificial sequence
  SiRNA target sequence
ttaaagatgccgctgttattggt

SEQ ID NO: 231548 - DNA, 23 bp, Artificial sequence
  SiRNA target sequence
taaagatgccgctgttattggta

SEQ ID NO: 231549 - DNA, 23 bp, Artificial sequence
  SiRNA target sequence
aaagatgccgctgttattggtaa

SEQ ID NO: 231550 - DNA, 23 bp, Artificial sequence
  SiRNA target sequence
aagatgccgctgttattggtaaa

SEQ ID NO: 231551 - DNA, 23 bp, Artificial sequence
  SiRNA target sequence
agatgccgctgttattggtaaac

SEQ ID NO: 231552 - DNA, 23 bp, Artificial sequence
  SiRNA target sequence
gatgccgctgttattggtaaaca

SEQ ID NO: 231553 - DNA, 23 bp, Artificial sequence
  SiRNA target sequence
atgccgctgttattggtaaacaa

SEQ ID NO: 231554 - DNA, 23 bp, Artificial sequence
  SiRNA target sequence
tgccgctgttattggtaaacaac

SEQ ID NO: 231555 - DNA, 23 bp, Artificial sequence
  SiRNA target sequence
gccgctgttattggtaaacaact

SEQ ID NO: 231556 - DNA, 23 bp, Artificial sequence
  SiRNA target sequence
ccgctgttattggtaaacaactc

SEQ ID NO: 231557 - DNA, 23 bp, Artificial sequence
  SiRNA target sequence
cgctgttattggtaaacaactcc

SEQ ID NO: 231558 - DNA, 23 bp, Artificial sequence
  SiRNA target sequence
gctgttattggtaaacaactccc

SEQ ID NO: 231559 - DNA, 23 bp, Artificial sequence
  SiRNA target sequence
ctgttattggtaaacaactccca

SEQ ID NO: 231560 - DNA, 23 bp, Artificial sequence
  SiRNA target sequence
tgttattggtaaacaactcccag

SEQ ID NO: 231561 - DNA, 23 bp, Artificial sequence
  SiRNA target sequence
gttattggtaaacaactcccagc

SEQ ID NO: 231562 - DNA, 23 bp, Artificial sequence
  SiRNA target sequence
ttattggtaaacaactcccagcg

SEQ ID NO: 231563 - DNA, 23 bp, Artificial sequence
  SiRNA target sequence
tattggtaaacaactcccagcgt

SEQ ID NO: 231564 - DNA, 23 bp, Artificial sequence
  SiRNA target sequence
attggtaaacaactcccagcgtc

SEQ ID NO: 231565 - DNA, 23 bp, Artificial sequence
  SiRNA target sequence
ttggtaaacaactcccagcgtca

SEQ ID NO: 231566 - DNA, 23 bp, Artificial sequence
  SiRNA target sequence
tggtaaacaactcccagcgtcaa

SEQ ID NO: 231567 - DNA, 23 bp, Artificial sequence
  SiRNA target sequence
ggtaaacaactcccagcgtcaat

SEQ ID NO: 231568 - DNA, 23 bp, Artificial sequence
  SiRNA target sequence
gtaaacaactcccagcgtcaatt

SEQ ID NO: 231569 - DNA, 23 bp, Artificial sequence
  SiRNA target sequence
taaacaactcccagcgtcaattt

SEQ ID NO: 231570 - DNA, 23 bp, Artificial sequence
  SiRNA target sequence
aaacaactcccagcgtcaatttt

SEQ ID NO: 231571 - DNA, 23 bp, Artificial sequence
  SiRNA target sequence
aacaactcccagcgtcaattttc

SEQ ID NO: 231572 - DNA, 23 bp, Artificial sequence
  SiRNA target sequence
acaactcccagcgtcaattttct

SEQ ID NO: 231573 - DNA, 23 bp, Artificial sequence
  SiRNA target sequence
caactcccagcgtcaattttctt

SEQ ID NO: 231574 - DNA, 23 bp, Artificial sequence
  SiRNA target sequence
aactcccagcgtcaattttcttt

SEQ ID NO: 231575 - DNA, 23 bp, Artificial sequence
  SiRNA target sequence
actcccagcgtcaattttctttt

SEQ ID NO: 231576 - DNA, 23 bp, Artificial sequence
  SiRNA target sequence
ctcccagcgtcaattttcttttt

SEQ ID NO: 231577 - DNA, 23 bp, Artificial sequence
  SiRNA target sequence
tcccagcgtcaattttctttttg

SEQ ID NO: 231578 - DNA, 23 bp, Artificial sequence
  SiRNA target sequence
cccagcgtcaattttctttttga

SEQ ID NO: 231579 - DNA, 23 bp, Artificial sequence
  SiRNA target sequence
ccagcgtcaattttctttttgaa

SEQ ID NO: 231580 - DNA, 23 bp, Artificial sequence
  SiRNA target sequence
cagcgtcaattttctttttgaaa

SEQ ID NO: 231581 - DNA, 23 bp, Artificial sequence
  SiRNA target sequence
agcgtcaattttctttttgaaat

SEQ ID NO: 231582 - DNA, 23 bp, Artificial sequence
  SiRNA target sequence
gcgtcaattttctttttgaaatt

SEQ ID NO: 231583 - DNA, 23 bp, Artificial sequence
  SiRNA target sequence
cgtcaattttctttttgaaattt

SEQ ID NO: 231584 - DNA, 23 bp, Artificial sequence
  SiRNA target sequence
gtcaattttctttttgaaatttg

SEQ ID NO: 231585 - DNA, 23 bp, Artificial sequence
  SiRNA target sequence
tcaattttctttttgaaatttgt

SEQ ID NO: 231586 - DNA, 23 bp, Artificial sequence
  SiRNA target sequence
caattttctttttgaaatttgtt

SEQ ID NO: 231587 - DNA, 23 bp, Artificial sequence
  SiRNA target sequence
aattttctttttgaaatttgtta

SEQ ID NO: 231588 - DNA, 23 bp, Artificial sequence
  SiRNA target sequence
attttctttttgaaatttgttat

SEQ ID NO: 231589 - DNA, 23 bp, Artificial sequence
  SiRNA target sequence
ttttctttttgaaatttgttatt

SEQ ID NO: 231590 - DNA, 23 bp, Artificial sequence
  SiRNA target sequence
tttctttttgaaatttgttatta

SEQ ID NO: 231591 - DNA, 23 bp, Artificial sequence
  SiRNA target sequence
ttctttttgaaatttgttattat

SEQ ID NO: 231592 - DNA, 23 bp, Artificial sequence
  SiRNA target sequence
tctttttgaaatttgttattatc

SEQ ID NO: 231593 - DNA, 23 bp, Artificial sequence
  SiRNA target sequence
ctttttgaaatttgttattatcc

SEQ ID NO: 231594 - DNA, 23 bp, Artificial sequence
  SiRNA target sequence
tttttgaaatttgttattatcct

SEQ ID NO: 231595 - DNA, 23 bp, Artificial sequence
  SiRNA target sequence
ttttgaaatttgttattatcctt

SEQ ID NO: 231596 - DNA, 23 bp, Artificial sequence
  SiRNA target sequence
tttgaaatttgttattatccttc

SEQ ID NO: 231597 - DNA, 23 bp, Artificial sequence
  SiRNA target sequence
ttgaaatttgttattatccttcc

SEQ ID NO: 231598 - DNA, 23 bp, Artificial sequence
  SiRNA target sequence
tgaaatttgttattatccttccg

SEQ ID NO: 231599 - DNA, 23 bp, Artificial sequence
  SiRNA target sequence
gaaatttgttattatccttccgt

SEQ ID NO: 231600 - DNA, 23 bp, Artificial sequence
  SiRNA target sequence
aaatttgttattatccttccgtt

SEQ ID NO: 231601 - DNA, 23 bp, Artificial sequence
  SiRNA target sequence
aatttgttattatccttccgttc

SEQ ID NO: 231602 - DNA, 23 bp, Artificial sequence
  SiRNA target sequence
atttgttattatccttccgttct

SEQ ID NO: 231603 - DNA, 23 bp, Artificial sequence
  SiRNA target sequence
tttgttattatccttccgttctc

SEQ ID NO: 231604 - DNA, 23 bp, Artificial sequence
  SiRNA target sequence
ttgttattatccttccgttctca

SEQ ID NO: 231605 - DNA, 23 bp, Artificial sequence
  SiRNA target sequence
tgttattatccttccgttctcat

SEQ ID NO: 231606 - DNA, 23 bp, Artificial sequence
  SiRNA target sequence
gttattatccttccgttctcatt

SEQ ID NO: 231607 - DNA, 23 bp, Artificial sequence
  SiRNA target sequence
ttattatccttccgttctcattt

SEQ ID NO: 231608 - DNA, 23 bp, Artificial sequence
  SiRNA target sequence
tattatccttccgttctcattta

SEQ ID NO: 231609 - DNA, 23 bp, Artificial sequence
  SiRNA target sequence
attatccttccgttctcatttat

SEQ ID NO: 231610 - DNA, 23 bp, Artificial sequence
  SiRNA target sequence
ttatccttccgttctcatttatt

SEQ ID NO: 231611 - DNA, 23 bp, Artificial sequence
  SiRNA target sequence
tatccttccgttctcatttattt

SEQ ID NO: 231612 - DNA, 23 bp, Artificial sequence
  SiRNA target sequence
atccttccgttctcatttatttc

SEQ ID NO: 231613 - DNA, 23 bp, Artificial sequence
  SiRNA target sequence
tccttccgttctcatttatttca

SEQ ID NO: 231614 - DNA, 23 bp, Artificial sequence
  SiRNA target sequence
ccttccgttctcatttatttcag

SEQ ID NO: 231615 - DNA, 23 bp, Artificial sequence
  SiRNA target sequence
cttccgttctcatttatttcagt

SEQ ID NO: 231616 - DNA, 23 bp, Artificial sequence
  SiRNA target sequence
ttccgttctcatttatttcagta

SEQ ID NO: 231617 - DNA, 23 bp, Artificial sequence
  SiRNA target sequence
tccgttctcatttatttcagtag

SEQ ID NO: 231618 - DNA, 23 bp, Artificial sequence
  SiRNA target sequence
ccgttctcatttatttcagtagg

SEQ ID NO: 231619 - DNA, 23 bp, Artificial sequence
  SiRNA target sequence
cgttctcatttatttcagtaggt

SEQ ID NO: 231620 - DNA, 23 bp, Artificial sequence
  SiRNA target sequence
gttctcatttatttcagtaggta

SEQ ID NO: 231621 - DNA, 23 bp, Artificial sequence
  SiRNA target sequence
ttctcatttatttcagtaggtat

SEQ ID NO: 231622 - DNA, 23 bp, Artificial sequence
  SiRNA target sequence
tctcatttatttcagtaggtatt

SEQ ID NO: 231623 - DNA, 23 bp, Artificial sequence
  SiRNA target sequence
ctcatttatttcagtaggtatta

SEQ ID NO: 231624 - DNA, 23 bp, Artificial sequence
  SiRNA target sequence
tcatttatttcagtaggtattat

SEQ ID NO: 231625 - DNA, 23 bp, Artificial sequence
  SiRNA target sequence
catttatttcagtaggtattatt

SEQ ID NO: 231626 - DNA, 23 bp, Artificial sequence
  SiRNA target sequence
atttatttcagtaggtattattc

SEQ ID NO: 231627 - DNA, 23 bp, Artificial sequence
  SiRNA target sequence
tttatttcagtaggtattattca

SEQ ID NO: 231628 - DNA, 23 bp, Artificial sequence
  SiRNA target sequence
ttatttcagtaggtattattcag

SEQ ID NO: 231629 - DNA, 23 bp, Artificial sequence
  SiRNA target sequence
tatttcagtaggtattattcaga

SEQ ID NO: 231630 - DNA, 23 bp, Artificial sequence
  SiRNA target sequence
atttcagtaggtattattcagaa

SEQ ID NO: 231631 - DNA, 23 bp, Artificial sequence
  SiRNA target sequence
tttcagtaggtattattcagaaa

SEQ ID NO: 231632 - DNA, 23 bp, Artificial sequence
  SiRNA target sequence
ttcagtaggtattattcagaaag

SEQ ID NO: 231633 - DNA, 23 bp, Artificial sequence
  SiRNA target sequence
tcagtaggtattattcagaaagc

SEQ ID NO: 231634 - DNA, 23 bp, Artificial sequence
  SiRNA target sequence
cagtaggtattattcagaaagct

SEQ ID NO: 231635 - DNA, 23 bp, Artificial sequence
  SiRNA target sequence
agtaggtattattcagaaagctt

SEQ ID NO: 231636 - DNA, 23 bp, Artificial sequence
  SiRNA target sequence
gtaggtattattcagaaagcttt

SEQ ID NO: 231637 - DNA, 23 bp, Artificial sequence
  SiRNA target sequence
taggtattattcagaaagcttta

SEQ ID NO: 231638 - DNA, 23 bp, Artificial sequence
  SiRNA target sequence
aggtattattcagaaagctttag

SEQ ID NO: 231639 - DNA, 23 bp, Artificial sequence
  SiRNA target sequence
ggtattattcagaaagctttaga

SEQ ID NO: 231640 - DNA, 23 bp, Artificial sequence
  SiRNA target sequence
gtattattcagaaagctttagat

SEQ ID NO: 231641 - DNA, 23 bp, Artificial sequence
  SiRNA target sequence
tattattcagaaagctttagata

SEQ ID NO: 231642 - DNA, 23 bp, Artificial sequence
  SiRNA target sequence
attattcagaaagctttagataa

SEQ ID NO: 231643 - DNA, 23 bp, Artificial sequence
  SiRNA target sequence
ttattcagaaagctttagataaa

SEQ ID NO: 231644 - DNA, 23 bp, Artificial sequence
  SiRNA target sequence
tattcagaaagctttagataaat

SEQ ID NO: 231645 - DNA, 23 bp, Artificial sequence
  SiRNA target sequence
attcagaaagctttagataaata

SEQ ID NO: 231646 - DNA, 23 bp, Artificial sequence
  SiRNA target sequence
ttcagaaagctttagataaatat

SEQ ID NO: 231647 - DNA, 23 bp, Artificial sequence
  SiRNA target sequence
tcagaaagctttagataaatatc

SEQ ID NO: 231648 - DNA, 23 bp, Artificial sequence
  SiRNA target sequence
cagaaagctttagataaatatcc

SEQ ID NO: 231649 - DNA, 23 bp, Artificial sequence
  SiRNA target sequence
agaaagctttagataaatatcct

SEQ ID NO: 231650 - DNA, 23 bp, Artificial sequence
  SiRNA target sequence
gaaagctttagataaatatcctt

SEQ ID NO: 231651 - DNA, 23 bp, Artificial sequence
  SiRNA target sequence
aaagctttagataaatatccttt

SEQ ID NO: 231652 - DNA, 23 bp, Artificial sequence
  SiRNA target sequence
aagctttagataaatatcctttt

SEQ ID NO: 231653 - DNA, 23 bp, Artificial sequence
  SiRNA target sequence
agctttagataaatatcctttta

SEQ ID NO: 231654 - DNA, 23 bp, Artificial sequence
  SiRNA target sequence
gctttagataaatatccttttac

SEQ ID NO: 231655 - DNA, 23 bp, Artificial sequence
  SiRNA target sequence
ctttagataaatatccttttaca

SEQ ID NO: 231656 - DNA, 23 bp, Artificial sequence
  SiRNA target sequence
tttagataaatatccttttacaa

SEQ ID NO: 231657 - DNA, 23 bp, Artificial sequence
  SiRNA target sequence
ttagataaatatccttttacaaa

SEQ ID NO: 231658 - DNA, 23 bp, Artificial sequence
  SiRNA target sequence
tagataaatatccttttacaaaa

SEQ ID NO: 231659 - DNA, 23 bp, Artificial sequence
  SiRNA target sequence
agataaatatccttttacaaaaa

SEQ ID NO: 231660 - DNA, 23 bp, Artificial sequence
  SiRNA target sequence
gataaatatccttttacaaaaat

SEQ ID NO: 231661 - DNA, 23 bp, Artificial sequence
  SiRNA target sequence
ataaatatccttttacaaaaata

SEQ ID NO: 231662 - DNA, 23 bp, Artificial sequence
  SiRNA target sequence
taaatatccttttacaaaaatat

SEQ ID NO: 231663 - DNA, 23 bp, Artificial sequence
  SiRNA target sequence
aaatatccttttacaaaaatatt

SEQ ID NO: 231664 - DNA, 23 bp, Artificial sequence
  SiRNA target sequence
aatatccttttacaaaaatattt

SEQ ID NO: 231665 - DNA, 23 bp, Artificial sequence
  SiRNA target sequence
atatccttttacaaaaatatttg

SEQ ID NO: 231666 - DNA, 23 bp, Artificial sequence
  SiRNA target sequence
tatccttttacaaaaatatttga

SEQ ID NO: 231667 - DNA, 23 bp, Artificial sequence
  SiRNA target sequence
atccttttacaaaaatatttgat

SEQ ID NO: 231668 - DNA, 23 bp, Artificial sequence
  SiRNA target sequence
tccttttacaaaaatatttgatg

SEQ ID NO: 231669 - DNA, 23 bp, Artificial sequence
  SiRNA target sequence
ccttttacaaaaatatttgatgt

SEQ ID NO: 231670 - DNA, 23 bp, Artificial sequence
  SiRNA target sequence
cttttacaaaaatatttgatgta

SEQ ID NO: 231671 - DNA, 23 bp, Artificial sequence
  SiRNA target sequence
ttttacaaaaatatttgatgtaa

SEQ ID NO: 231672 - DNA, 23 bp, Artificial sequence
  SiRNA target sequence
tttacaaaaatatttgatgtaac

SEQ ID NO: 231673 - DNA, 23 bp, Artificial sequence
  SiRNA target sequence
ttacaaaaatatttgatgtaact

SEQ ID NO: 231674 - DNA, 23 bp, Artificial sequence
  SiRNA target sequence
tacaaaaatatttgatgtaactt

SEQ ID NO: 231675 - DNA, 23 bp, Artificial sequence
  SiRNA target sequence
acaaaaatatttgatgtaacttt

SEQ ID NO: 231676 - DNA, 23 bp, Artificial sequence
  SiRNA target sequence
caaaaatatttgatgtaacttta

SEQ ID NO: 231677 - DNA, 23 bp, Artificial sequence
  SiRNA target sequence
aaaaatatttgatgtaactttaa

SEQ ID NO: 231678 - DNA, 23 bp, Artificial sequence
  SiRNA target sequence
aaaatatttgatgtaactttaat

SEQ ID NO: 231679 - DNA, 23 bp, Artificial sequence
  SiRNA target sequence
aaatatttgatgtaactttaata

SEQ ID NO: 231680 - DNA, 23 bp, Artificial sequence
  SiRNA target sequence
aatatttgatgtaactttaatag

SEQ ID NO: 231681 - DNA, 23 bp, Artificial sequence
  SiRNA target sequence
atatttgatgtaactttaatagt

SEQ ID NO: 231682 - DNA, 23 bp, Artificial sequence
  SiRNA target sequence
tatttgatgtaactttaatagtt

SEQ ID NO: 231683 - DNA, 23 bp, Artificial sequence
  SiRNA target sequence
atttgatgtaactttaatagttt

SEQ ID NO: 231684 - DNA, 23 bp, Artificial sequence
  SiRNA target sequence
tttgatgtaactttaatagtttt

SEQ ID NO: 231685 - DNA, 23 bp, Artificial sequence
  SiRNA target sequence
ttgatgtaactttaatagttttc

SEQ ID NO: 231686 - DNA, 23 bp, Artificial sequence
  SiRNA target sequence
tgatgtaactttaatagttttcg

SEQ ID NO: 231687 - DNA, 23 bp, Artificial sequence
  SiRNA target sequence
gatgtaactttaatagttttcgc

SEQ ID NO: 231688 - DNA, 23 bp, Artificial sequence
  SiRNA target sequence
atgtaactttaatagttttcgct

SEQ ID NO: 231689 - DNA, 23 bp, Artificial sequence
  SiRNA target sequence
tgtaactttaatagttttcgctg

SEQ ID NO: 231690 - DNA, 23 bp, Artificial sequence
  SiRNA target sequence
gtaactttaatagttttcgctgt

SEQ ID NO: 231691 - DNA, 23 bp, Artificial sequence
  SiRNA target sequence
taactttaatagttttcgctgtt

SEQ ID NO: 231692 - DNA, 23 bp, Artificial sequence
  SiRNA target sequence
aactttaatagttttcgctgttg

SEQ ID NO: 231693 - DNA, 23 bp, Artificial sequence
  SiRNA target sequence
actttaatagttttcgctgttgc

SEQ ID NO: 231694 - DNA, 23 bp, Artificial sequence
  SiRNA target sequence
ctttaatagttttcgctgttgca

SEQ ID NO: 231695 - DNA, 23 bp, Artificial sequence
  SiRNA target sequence
tttaatagttttcgctgttgcat

SEQ ID NO: 231696 - DNA, 23 bp, Artificial sequence
  SiRNA target sequence
ttaatagttttcgctgttgcatt

SEQ ID NO: 231697 - DNA, 23 bp, Artificial sequence
  SiRNA target sequence
taatagttttcgctgttgcattt

SEQ ID NO: 231698 - DNA, 23 bp, Artificial sequence
  SiRNA target sequence
aatagttttcgctgttgcattta

SEQ ID NO: 231699 - DNA, 23 bp, Artificial sequence
  SiRNA target sequence
atagttttcgctgttgcatttac

SEQ ID NO: 231700 - DNA, 23 bp, Artificial sequence
  SiRNA target sequence
tagttttcgctgttgcatttact

SEQ ID NO: 231701 - DNA, 23 bp, Artificial sequence
  SiRNA target sequence
agttttcgctgttgcatttacta

SEQ ID NO: 231702 - DNA, 23 bp, Artificial sequence
  SiRNA target sequence
gttttcgctgttgcatttactat

SEQ ID NO: 231703 - DNA, 23 bp, Artificial sequence
  SiRNA target sequence
ttttcgctgttgcatttactata

SEQ ID NO: 231704 - DNA, 23 bp, Artificial sequence
  SiRNA target sequence
tttcgctgttgcatttactatac

SEQ ID NO: 231705 - DNA, 23 bp, Artificial sequence
  SiRNA target sequence
ttcgctgttgcatttactatact

SEQ ID NO: 231706 - DNA, 23 bp, Artificial sequence
  SiRNA target sequence
tcgctgttgcatttactatactt

SEQ ID NO: 231707 - DNA, 23 bp, Artificial sequence
  SiRNA target sequence
cgctgttgcatttactatacttg

SEQ ID NO: 231708 - DNA, 23 bp, Artificial sequence
  SiRNA target sequence
gctgttgcatttactatacttgg

SEQ ID NO: 231709 - DNA, 23 bp, Artificial sequence
  SiRNA target sequence
ctgttgcatttactatacttggt

SEQ ID NO: 231710 - DNA, 23 bp, Artificial sequence
  SiRNA target sequence
tgttgcatttactatacttggta

SEQ ID NO: 231711 - DNA, 23 bp, Artificial sequence
  SiRNA target sequence
gttgcatttactatacttggtag

SEQ ID NO: 231712 - DNA, 23 bp, Artificial sequence
  SiRNA target sequence
ttgcatttactatacttggtagt

SEQ ID NO: 231713 - DNA, 23 bp, Artificial sequence
  SiRNA target sequence
tgcatttactatacttggtagtt

SEQ ID NO: 231714 - DNA, 23 bp, Artificial sequence
  SiRNA target sequence
gcatttactatacttggtagttt

SEQ ID NO: 231715 - DNA, 23 bp, Artificial sequence
  SiRNA target sequence
catttactatacttggtagttta

SEQ ID NO: 231716 - DNA, 23 bp, Artificial sequence
  SiRNA target sequence
atttactatacttggtagtttat

SEQ ID NO: 231717 - DNA, 23 bp, Artificial sequence
  SiRNA target sequence
tttactatacttggtagtttatt

SEQ ID NO: 231718 - DNA, 23 bp, Artificial sequence
  SiRNA target sequence
ttactatacttggtagtttatta

SEQ ID NO: 231719 - DNA, 23 bp, Artificial sequence
  SiRNA target sequence
tactatacttggtagtttattac

SEQ ID NO: 231720 - DNA, 23 bp, Artificial sequence
  SiRNA target sequence
actatacttggtagtttattact

SEQ ID NO: 231721 - DNA, 23 bp, Artificial sequence
  SiRNA target sequence
ctatacttggtagtttattactt

SEQ ID NO: 231722 - DNA, 23 bp, Artificial sequence
  SiRNA target sequence
tatacttggtagtttattacttc

SEQ ID NO: 231723 - DNA, 23 bp, Artificial sequence
  SiRNA target sequence
atacttggtagtttattacttcc

SEQ ID NO: 231724 - DNA, 23 bp, Artificial sequence
  SiRNA target sequence
tacttggtagtttattacttccc

SEQ ID NO: 231725 - DNA, 23 bp, Artificial sequence
  SiRNA target sequence
acttggtagtttattacttccct

SEQ ID NO: 231726 - DNA, 23 bp, Artificial sequence
  SiRNA target sequence
cttggtagtttattacttccctt

SEQ ID NO: 231727 - DNA, 23 bp, Artificial sequence
  SiRNA target sequence
ttggtagtttattacttcccttt

SEQ ID NO: 231728 - DNA, 23 bp, Artificial sequence
  SiRNA target sequence
tggtagtttattacttcccttta

SEQ ID NO: 231729 - DNA, 23 bp, Artificial sequence
  SiRNA target sequence
ggtagtttattacttccctttag

SEQ ID NO: 231730 - DNA, 23 bp, Artificial sequence
  SiRNA target sequence
gtagtttattacttccctttagt

SEQ ID NO: 231731 - DNA, 23 bp, Artificial sequence
  SiRNA target sequence
tagtttattacttccctttagtg

SEQ ID NO: 231732 - DNA, 23 bp, Artificial sequence
  SiRNA target sequence
agtttattacttccctttagtga

SEQ ID NO: 231733 - DNA, 23 bp, Artificial sequence
  SiRNA target sequence
gtttattacttccctttagtgat

SEQ ID NO: 231734 - DNA, 23 bp, Artificial sequence
  SiRNA target sequence
tttattacttccctttagtgatt

SEQ ID NO: 231735 - DNA, 23 bp, Artificial sequence
  SiRNA target sequence
ttattacttccctttagtgatta

SEQ ID NO: 231736 - DNA, 23 bp, Artificial sequence
  SiRNA target sequence
tattacttccctttagtgattat

SEQ ID NO: 231737 - DNA, 23 bp, Artificial sequence
  SiRNA target sequence
attacttccctttagtgattata

SEQ ID NO: 231738 - DNA, 23 bp, Artificial sequence
  SiRNA target sequence
ttacttccctttagtgattatat

SEQ ID NO: 231739 - DNA, 23 bp, Artificial sequence
  SiRNA target sequence
tacttccctttagtgattatatt

SEQ ID NO: 231740 - DNA, 23 bp, Artificial sequence
  SiRNA target sequence
acttccctttagtgattatattc

SEQ ID NO: 231741 - DNA, 23 bp, Artificial sequence
  SiRNA target sequence
cttccctttagtgattatattca

SEQ ID NO: 231742 - DNA, 23 bp, Artificial sequence
  SiRNA target sequence
ttccctttagtgattatattcag

SEQ ID NO: 231743 - DNA, 23 bp, Artificial sequence
  SiRNA target sequence
tccctttagtgattatattcaga

SEQ ID NO: 231744 - DNA, 23 bp, Artificial sequence
  SiRNA target sequence
ccctttagtgattatattcagat

SEQ ID NO: 231745 - DNA, 23 bp, Artificial sequence
  SiRNA target sequence
cctttagtgattatattcagatt

SEQ ID NO: 231746 - DNA, 23 bp, Artificial sequence
  SiRNA target sequence
ctttagtgattatattcagattc

SEQ ID NO: 231747 - DNA, 23 bp, Artificial sequence
  SiRNA target sequence
tttagtgattatattcagattca

SEQ ID NO: 231748 - DNA, 23 bp, Artificial sequence
  SiRNA target sequence
ttagtgattatattcagattcaa

SEQ ID NO: 231749 - DNA, 23 bp, Artificial sequence
  SiRNA target sequence
tagtgattatattcagattcaac

SEQ ID NO: 231750 - DNA, 23 bp, Artificial sequence
  SiRNA target sequence
agtgattatattcagattcaacc

SEQ ID NO: 231751 - DNA, 23 bp, Artificial sequence
  SiRNA target sequence
gtgattatattcagattcaaccg

SEQ ID NO: 231752 - DNA, 23 bp, Artificial sequence
  SiRNA target sequence
tgattatattcagattcaaccgt

SEQ ID NO: 231753 - DNA, 23 bp, Artificial sequence
  SiRNA target sequence
gattatattcagattcaaccgtt

SEQ ID NO: 231754 - DNA, 23 bp, Artificial sequence
  SiRNA target sequence
attatattcagattcaaccgttt

SEQ ID NO: 231755 - DNA, 23 bp, Artificial sequence
  SiRNA target sequence
ttatattcagattcaaccgtttt

SEQ ID NO: 231756 - DNA, 23 bp, Artificial sequence
  SiRNA target sequence
tatattcagattcaaccgttttg

SEQ ID NO: 231757 - DNA, 23 bp, Artificial sequence
  SiRNA target sequence
atattcagattcaaccgttttgg

SEQ ID NO: 231758 - DNA, 23 bp, Artificial sequence
  SiRNA target sequence
tattcagattcaaccgttttggg

SEQ ID NO: 231759 - DNA, 23 bp, Artificial sequence
  SiRNA target sequence
attcagattcaaccgttttgggc

SEQ ID NO: 231760 - DNA, 23 bp, Artificial sequence
  SiRNA target sequence
ttcagattcaaccgttttgggcc

SEQ ID NO: 231761 - DNA, 23 bp, Artificial sequence
  SiRNA target sequence
tcagattcaaccgttttgggcca

SEQ ID NO: 231762 - DNA, 23 bp, Artificial sequence
  SiRNA target sequence
cagattcaaccgttttgggccaa

SEQ ID NO: 231763 - DNA, 23 bp, Artificial sequence
  SiRNA target sequence
agattcaaccgttttgggccaaa

SEQ ID NO: 231764 - DNA, 23 bp, Artificial sequence
  SiRNA target sequence
gattcaaccgttttgggccaaag

SEQ ID NO: 231765 - DNA, 23 bp, Artificial sequence
  SiRNA target sequence
attcaaccgttttgggccaaaga

SEQ ID NO: 231766 - DNA, 23 bp, Artificial sequence
  SiRNA target sequence
ttcaaccgttttgggccaaagat

SEQ ID NO: 231767 - DNA, 23 bp, Artificial sequence
  SiRNA target sequence
tcaaccgttttgggccaaagata

SEQ ID NO: 231768 - DNA, 23 bp, Artificial sequence
  SiRNA target sequence
caaccgttttgggccaaagatat

SEQ ID NO: 231769 - DNA, 23 bp, Artificial sequence
  SiRNA target sequence
aaccgttttgggccaaagatatt

SEQ ID NO: 231770 - DNA, 23 bp, Artificial sequence
  SiRNA target sequence
accgttttgggccaaagatattt

SEQ ID NO: 231771 - DNA, 23 bp, Artificial sequence
  SiRNA target sequence
ccgttttgggccaaagatatttt

SEQ ID NO: 231772 - DNA, 23 bp, Artificial sequence
  SiRNA target sequence
cgttttgggccaaagatattttt

SEQ ID NO: 231773 - DNA, 23 bp, Artificial sequence
  SiRNA target sequence
gttttgggccaaagatatttttg

SEQ ID NO: 231774 - DNA, 23 bp, Artificial sequence
  SiRNA target sequence
ttttgggccaaagatatttttgc

SEQ ID NO: 231775 - DNA, 23 bp, Artificial sequence
  SiRNA target sequence
tttgggccaaagatatttttgct

SEQ ID NO: 231776 - DNA, 23 bp, Artificial sequence
  SiRNA target sequence
ttgggccaaagatatttttgctg

SEQ ID NO: 231777 - DNA, 23 bp, Artificial sequence
  SiRNA target sequence
tgggccaaagatatttttgctga

SEQ ID NO: 231778 - DNA, 23 bp, Artificial sequence
  SiRNA target sequence
gggccaaagatatttttgctgat

SEQ ID NO: 231779 - DNA, 23 bp, Artificial sequence
  SiRNA target sequence
ggccaaagatatttttgctgatg

SEQ ID NO: 231780 - DNA, 23 bp, Artificial sequence
  SiRNA target sequence
gccaaagatatttttgctgatgg

SEQ ID NO: 231781 - DNA, 23 bp, Artificial sequence
  SiRNA target sequence
ccaaagatatttttgctgatgga

SEQ ID NO: 231782 - DNA, 23 bp, Artificial sequence
  SiRNA target sequence
caaagatatttttgctgatggaa

SEQ ID NO: 231783 - DNA, 23 bp, Artificial sequence
  SiRNA target sequence
aaagatatttttgctgatggaaa

SEQ ID NO: 231784 - DNA, 23 bp, Artificial sequence
  SiRNA target sequence
aagatatttttgctgatggaaaa

SEQ ID NO: 231785 - DNA, 23 bp, Artificial sequence
  SiRNA target sequence
agatatttttgctgatggaaaag

SEQ ID NO: 231786 - DNA, 23 bp, Artificial sequence
  SiRNA target sequence
gatatttttgctgatggaaaagc

SEQ ID NO: 231787 - DNA, 23 bp, Artificial sequence
  SiRNA target sequence
atatttttgctgatggaaaagct

SEQ ID NO: 231788 - DNA, 23 bp, Artificial sequence
  SiRNA target sequence
tatttttgctgatggaaaagctg

SEQ ID NO: 231789 - DNA, 23 bp, Artificial sequence
  SiRNA target sequence
atttttgctgatggaaaagctgt

SEQ ID NO: 231790 - DNA, 23 bp, Artificial sequence
  SiRNA target sequence
tttttgctgatggaaaagctgtt

SEQ ID NO: 231791 - DNA, 23 bp, Artificial sequence
  SiRNA target sequence
ttttgctgatggaaaagctgttg

SEQ ID NO: 231792 - DNA, 23 bp, Artificial sequence
  SiRNA target sequence
tttgctgatggaaaagctgttgc

SEQ ID NO: 231793 - DNA, 23 bp, Artificial sequence
  SiRNA target sequence
ttgctgatggaaaagctgttgcc

SEQ ID NO: 231794 - DNA, 23 bp, Artificial sequence
  SiRNA target sequence
tgctgatggaaaagctgttgcca

SEQ ID NO: 231795 - DNA, 23 bp, Artificial sequence
  SiRNA target sequence
gctgatggaaaagctgttgccag

SEQ ID NO: 231796 - DNA, 23 bp, Artificial sequence
  SiRNA target sequence
ctgatggaaaagctgttgccaga

SEQ ID NO: 231797 - DNA, 23 bp, Artificial sequence
  SiRNA target sequence
tgatggaaaagctgttgccagaa

SEQ ID NO: 231798 - DNA, 23 bp, Artificial sequence
  SiRNA target sequence
gatggaaaagctgttgccagaag

SEQ ID NO: 231799 - DNA, 23 bp, Artificial sequence
  SiRNA target sequence
atggaaaagctgttgccagaagt

SEQ ID NO: 231800 - DNA, 23 bp, Artificial sequence
  SiRNA target sequence
tggaaaagctgttgccagaagta

SEQ ID NO: 231801 - DNA, 23 bp, Artificial sequence
  SiRNA target sequence
ggaaaagctgttgccagaagtac

SEQ ID NO: 231802 - DNA, 23 bp, Artificial sequence
  SiRNA target sequence
gaaaagctgttgccagaagtaca

SEQ ID NO: 231803 - DNA, 23 bp, Artificial sequence
  SiRNA target sequence
aaaagctgttgccagaagtacag

SEQ ID NO: 231804 - DNA, 23 bp, Artificial sequence
  SiRNA target sequence
aaagctgttgccagaagtacaga

SEQ ID NO: 231805 - DNA, 23 bp, Artificial sequence
  SiRNA target sequence
aagctgttgccagaagtacagat

SEQ ID NO: 231806 - DNA, 23 bp, Artificial sequence
  SiRNA target sequence
agctgttgccagaagtacagatt

SEQ ID NO: 231807 - DNA, 23 bp, Artificial sequence
  SiRNA target sequence
gctgttgccagaagtacagattt

SEQ ID NO: 231808 - DNA, 23 bp, Artificial sequence
  SiRNA target sequence
ctgttgccagaagtacagatttt

SEQ ID NO: 231809 - DNA, 23 bp, Artificial sequence
  SiRNA target sequence
tgttgccagaagtacagattttt

SEQ ID NO: 231810 - DNA, 23 bp, Artificial sequence
  SiRNA target sequence
gttgccagaagtacagatttttt

SEQ ID NO: 231811 - DNA, 23 bp, Artificial sequence
  SiRNA target sequence
ttgccagaagtacagatttttta

SEQ ID NO: 231812 - DNA, 23 bp, Artificial sequence
  SiRNA target sequence
tgccagaagtacagattttttat

SEQ ID NO: 231813 - DNA, 23 bp, Artificial sequence
  SiRNA target sequence
gccagaagtacagattttttatt

SEQ ID NO: 231814 - DNA, 23 bp, Artificial sequence
  SiRNA target sequence
ccagaagtacagattttttattt

SEQ ID NO: 231815 - DNA, 23 bp, Artificial sequence
  SiRNA target sequence
cagaagtacagattttttatttt

SEQ ID NO: 231816 - DNA, 23 bp, Artificial sequence
  SiRNA target sequence
agaagtacagattttttattttc

SEQ ID NO: 231817 - DNA, 23 bp, Artificial sequence
  SiRNA target sequence
gaagtacagattttttattttct

SEQ ID NO: 231818 - DNA, 23 bp, Artificial sequence
  SiRNA target sequence
aagtacagattttttattttcta

SEQ ID NO: 231819 - DNA, 23 bp, Artificial sequence
  SiRNA target sequence
agtacagattttttattttctat

SEQ ID NO: 231820 - DNA, 23 bp, Artificial sequence
  SiRNA target sequence
gtacagattttttattttctatt

SEQ ID NO: 231821 - DNA, 23 bp, Artificial sequence
  SiRNA target sequence
tacagattttttattttctattg

SEQ ID NO: 231822 - DNA, 23 bp, Artificial sequence
  SiRNA target sequence
acagattttttattttctattgc

SEQ ID NO: 231823 - DNA, 23 bp, Artificial sequence
  SiRNA target sequence
cagattttttattttctattgca

SEQ ID NO: 231824 - DNA, 23 bp, Artificial sequence
  SiRNA target sequence
agattttttattttctattgcac

SEQ ID NO: 231825 - DNA, 23 bp, Artificial sequence
  SiRNA target sequence
gattttttattttctattgcact

SEQ ID NO: 231826 - DNA, 23 bp, Artificial sequence
  SiRNA target sequence
attttttattttctattgcactt

SEQ ID NO: 231827 - DNA, 23 bp, Artificial sequence
  SiRNA target sequence
ttttttattttctattgcacttg

SEQ ID NO: 231828 - DNA, 23 bp, Artificial sequence
  SiRNA target sequence
tttttattttctattgcacttgt

SEQ ID NO: 231829 - DNA, 23 bp, Artificial sequence
  SiRNA target sequence
ttttattttctattgcacttgtt

SEQ ID NO: 231830 - DNA, 23 bp, Artificial sequence
  SiRNA target sequence
tttattttctattgcacttgttt

SEQ ID NO: 231831 - DNA, 23 bp, Artificial sequence
  SiRNA target sequence
ttattttctattgcacttgtttt

SEQ ID NO: 231832 - DNA, 23 bp, Artificial sequence
  SiRNA target sequence
tattttctattgcacttgttttc

SEQ ID NO: 231833 - DNA, 23 bp, Artificial sequence
  SiRNA target sequence
attttctattgcacttgttttca

SEQ ID NO: 231834 - DNA, 23 bp, Artificial sequence
  SiRNA target sequence
ttttctattgcacttgttttcaa

SEQ ID NO: 231835 - DNA, 23 bp, Artificial sequence
  SiRNA target sequence
tttctattgcacttgttttcaat

SEQ ID NO: 231836 - DNA, 23 bp, Artificial sequence
  SiRNA target sequence
ttctattgcacttgttttcaatg

SEQ ID NO: 231837 - DNA, 23 bp, Artificial sequence
  SiRNA target sequence
tctattgcacttgttttcaatga

SEQ ID NO: 231838 - DNA, 23 bp, Artificial sequence
  SiRNA target sequence
ctattgcacttgttttcaatgaa

SEQ ID NO: 231839 - DNA, 23 bp, Artificial sequence
  SiRNA target sequence
tattgcacttgttttcaatgaat

SEQ ID NO: 231840 - DNA, 23 bp, Artificial sequence
  SiRNA target sequence
attgcacttgttttcaatgaatg

SEQ ID NO: 231841 - DNA, 23 bp, Artificial sequence
  SiRNA target sequence
ttgcacttgttttcaatgaatgg

SEQ ID NO: 231842 - DNA, 23 bp, Artificial sequence
  SiRNA target sequence
tgcacttgttttcaatgaatgga

SEQ ID NO: 231843 - DNA, 23 bp, Artificial sequence
  SiRNA target sequence
gcacttgttttcaatgaatggac

SEQ ID NO: 231844 - DNA, 23 bp, Artificial sequence
  SiRNA target sequence
cacttgttttcaatgaatggaca

SEQ ID NO: 231845 - DNA, 23 bp, Artificial sequence
  SiRNA target sequence
acttgttttcaatgaatggacaa

SEQ ID NO: 231846 - DNA, 23 bp, Artificial sequence
  SiRNA target sequence
cttgttttcaatgaatggacaag

SEQ ID NO: 231847 - DNA, 23 bp, Artificial sequence
  SiRNA target sequence
ttgttttcaatgaatggacaagt

SEQ ID NO: 231848 - DNA, 23 bp, Artificial sequence
  SiRNA target sequence
tgttttcaatgaatggacaagtt

SEQ ID NO: 231849 - DNA, 23 bp, Artificial sequence
  SiRNA target sequence
gttttcaatgaatggacaagttc

SEQ ID NO: 231850 - DNA, 23 bp, Artificial sequence
  SiRNA target sequence
ttttcaatgaatggacaagttct

SEQ ID NO: 231851 - DNA, 23 bp, Artificial sequence
  SiRNA target sequence
tttcaatgaatggacaagttctg

SEQ ID NO: 231852 - DNA, 23 bp, Artificial sequence
  SiRNA target sequence
ttcaatgaatggacaagttctgc

SEQ ID NO: 231853 - DNA, 23 bp, Artificial sequence
  SiRNA target sequence
tcaatgaatggacaagttctgct

SEQ ID NO: 231854 - DNA, 23 bp, Artificial sequence
  SiRNA target sequence
caatgaatggacaagttctgcta

SEQ ID NO: 231855 - DNA, 23 bp, Artificial sequence
  SiRNA target sequence
aatgaatggacaagttctgctat

SEQ ID NO: 231856 - DNA, 23 bp, Artificial sequence
  SiRNA target sequence
atgaatggacaagttctgctatc

SEQ ID NO: 231857 - DNA, 23 bp, Artificial sequence
  SiRNA target sequence
tgaatggacaagttctgctatct

SEQ ID NO: 231858 - DNA, 23 bp, Artificial sequence
  SiRNA target sequence
gaatggacaagttctgctatcta

SEQ ID NO: 231859 - DNA, 23 bp, Artificial sequence
  SiRNA target sequence
aatggacaagttctgctatctat

SEQ ID NO: 231860 - DNA, 23 bp, Artificial sequence
  SiRNA target sequence
atggacaagttctgctatctatg

SEQ ID NO: 231861 - DNA, 23 bp, Artificial sequence
  SiRNA target sequence
tggacaagttctgctatctatgt

SEQ ID NO: 231862 - DNA, 23 bp, Artificial sequence
  SiRNA target sequence
ggacaagttctgctatctatgtt

SEQ ID NO: 231863 - DNA, 23 bp, Artificial sequence
  SiRNA target sequence
gacaagttctgctatctatgttt

SEQ ID NO: 231864 - DNA, 23 bp, Artificial sequence
  SiRNA target sequence
acaagttctgctatctatgtttt

SEQ ID NO: 231865 - DNA, 23 bp, Artificial sequence
  SiRNA target sequence
caagttctgctatctatgtttta

SEQ ID NO: 231866 - DNA, 23 bp, Artificial sequence
  SiRNA target sequence
aagttctgctatctatgttttat

SEQ ID NO: 231867 - DNA, 23 bp, Artificial sequence
  SiRNA target sequence
agttctgctatctatgttttatc

SEQ ID NO: 231868 - DNA, 23 bp, Artificial sequence
  SiRNA target sequence
gttctgctatctatgttttatct

SEQ ID NO: 231869 - DNA, 23 bp, Artificial sequence
  SiRNA target sequence
ttctgctatctatgttttatctg

SEQ ID NO: 231870 - DNA, 23 bp, Artificial sequence
  SiRNA target sequence
tctgctatctatgttttatctga

SEQ ID NO: 231871 - DNA, 23 bp, Artificial sequence
  SiRNA target sequence
ctgctatctatgttttatctgaa

SEQ ID NO: 231872 - DNA, 23 bp, Artificial sequence
  SiRNA target sequence
tgctatctatgttttatctgaaa

SEQ ID NO: 231873 - DNA, 23 bp, Artificial sequence
  SiRNA target sequence
gctatctatgttttatctgaaat

SEQ ID NO: 231874 - DNA, 23 bp, Artificial sequence
  SiRNA target sequence
ctatctatgttttatctgaaatg

SEQ ID NO: 231875 - DNA, 23 bp, Artificial sequence
  SiRNA target sequence
tatctatgttttatctgaaatgt

SEQ ID NO: 231876 - DNA, 23 bp, Artificial sequence
  SiRNA target sequence
atctatgttttatctgaaatgtt

SEQ ID NO: 231877 - DNA, 23 bp, Artificial sequence
  SiRNA target sequence
tctatgttttatctgaaatgttt

SEQ ID NO: 231878 - DNA, 23 bp, Artificial sequence
  SiRNA target sequence
ctatgttttatctgaaatgtttg

SEQ ID NO: 231879 - DNA, 23 bp, Artificial sequence
  SiRNA target sequence
tatgttttatctgaaatgtttgg

SEQ ID NO: 231880 - DNA, 23 bp, Artificial sequence
  SiRNA target sequence
atgttttatctgaaatgtttggt

SEQ ID NO: 231881 - DNA, 23 bp, Artificial sequence
  SiRNA target sequence
tgttttatctgaaatgtttggta

SEQ ID NO: 231882 - DNA, 23 bp, Artificial sequence
  SiRNA target sequence
gttttatctgaaatgtttggtag

SEQ ID NO: 231883 - DNA, 23 bp, Artificial sequence
  SiRNA target sequence
ttttatctgaaatgtttggtagt

SEQ ID NO: 231884 - DNA, 23 bp, Artificial sequence
  SiRNA target sequence
tttatctgaaatgtttggtagtt

SEQ ID NO: 231885 - DNA, 23 bp, Artificial sequence
  SiRNA target sequence
ttatctgaaatgtttggtagttt

SEQ ID NO: 231886 - DNA, 23 bp, Artificial sequence
  SiRNA target sequence
tatctgaaatgtttggtagtttg

SEQ ID NO: 231887 - DNA, 23 bp, Artificial sequence
  SiRNA target sequence
atctgaaatgtttggtagtttga

SEQ ID NO: 231888 - DNA, 23 bp, Artificial sequence
  SiRNA target sequence
tctgaaatgtttggtagtttgat

SEQ ID NO: 231889 - DNA, 23 bp, Artificial sequence
  SiRNA target sequence
ctgaaatgtttggtagtttgatt

SEQ ID NO: 231890 - DNA, 23 bp, Artificial sequence
  SiRNA target sequence
tgaaatgtttggtagtttgattc

SEQ ID NO: 231891 - DNA, 23 bp, Artificial sequence
  SiRNA target sequence
gaaatgtttggtagtttgattct

SEQ ID NO: 231892 - DNA, 23 bp, Artificial sequence
  SiRNA target sequence
aaatgtttggtagtttgattctt

SEQ ID NO: 231893 - DNA, 23 bp, Artificial sequence
  SiRNA target sequence
aatgtttggtagtttgattcttt

SEQ ID NO: 231894 - DNA, 23 bp, Artificial sequence
  SiRNA target sequence
atgtttggtagtttgattctttc

SEQ ID NO: 231895 - DNA, 23 bp, Artificial sequence
  SiRNA target sequence
tgtttggtagtttgattctttca

SEQ ID NO: 231896 - DNA, 23 bp, Artificial sequence
  SiRNA target sequence
gtttggtagtttgattctttcat

SEQ ID NO: 231897 - DNA, 23 bp, Artificial sequence
  SiRNA target sequence
tttggtagtttgattctttcata

SEQ ID NO: 231898 - DNA, 23 bp, Artificial sequence
  SiRNA target sequence
ttggtagtttgattctttcatat

SEQ ID NO: 231899 - DNA, 23 bp, Artificial sequence
  SiRNA target sequence
tggtagtttgattctttcatatt

SEQ ID NO: 231900 - DNA, 23 bp, Artificial sequence
  SiRNA target sequence
ggtagtttgattctttcatattt

SEQ ID NO: 231901 - DNA, 23 bp, Artificial sequence
  SiRNA target sequence
gtagtttgattctttcatattta

SEQ ID NO: 231902 - DNA, 23 bp, Artificial sequence
  SiRNA target sequence
tagtttgattctttcatatttat

SEQ ID NO: 231903 - DNA, 23 bp, Artificial sequence
  SiRNA target sequence
agtttgattctttcatatttatt

SEQ ID NO: 231904 - DNA, 23 bp, Artificial sequence
  SiRNA target sequence
gtttgattctttcatatttattt

SEQ ID NO: 231905 - DNA, 23 bp, Artificial sequence
  SiRNA target sequence
tttgattctttcatatttattta

SEQ ID NO: 231906 - DNA, 23 bp, Artificial sequence
  SiRNA target sequence
ttgattctttcatatttatttat

SEQ ID NO: 231907 - DNA, 23 bp, Artificial sequence
  SiRNA target sequence
tgattctttcatatttatttatg

SEQ ID NO: 231908 - DNA, 23 bp, Artificial sequence
  SiRNA target sequence
gattctttcatatttatttatga

SEQ ID NO: 231909 - DNA, 23 bp, Artificial sequence
  SiRNA target sequence
attctttcatatttatttatgac

SEQ ID NO: 231910 - DNA, 23 bp, Artificial sequence
  SiRNA target sequence
ttctttcatatttatttatgacg

SEQ ID NO: 231911 - DNA, 23 bp, Artificial sequence
  SiRNA target sequence
tctttcatatttatttatgacgt

SEQ ID NO: 231912 - DNA, 23 bp, Artificial sequence
  SiRNA target sequence
ctttcatatttatttatgacgtt

SEQ ID NO: 231913 - DNA, 23 bp, Artificial sequence
  SiRNA target sequence
tttcatatttatttatgacgttt

SEQ ID NO: 231914 - DNA, 23 bp, Artificial sequence
  SiRNA target sequence
ttcatatttatttatgacgtttg

SEQ ID NO: 231915 - DNA, 23 bp, Artificial sequence
  SiRNA target sequence
tcatatttatttatgacgtttgc

SEQ ID NO: 231916 - DNA, 23 bp, Artificial sequence
  SiRNA target sequence
catatttatttatgacgtttgct

SEQ ID NO: 231917 - DNA, 23 bp, Artificial sequence
  SiRNA target sequence
atatttatttatgacgtttgcta

SEQ ID NO: 231918 - DNA, 23 bp, Artificial sequence
  SiRNA target sequence
tatttatttatgacgtttgctaa

SEQ ID NO: 231919 - DNA, 23 bp, Artificial sequence
  SiRNA target sequence
atttatttatgacgtttgctaat

SEQ ID NO: 231920 - DNA, 23 bp, Artificial sequence
  SiRNA target sequence
tttatttatgacgtttgctaatg

SEQ ID NO: 231921 - DNA, 23 bp, Artificial sequence
  SiRNA target sequence
ttatttatgacgtttgctaatgg

SEQ ID NO: 231922 - DNA, 23 bp, Artificial sequence
  SiRNA target sequence
tatttatgacgtttgctaatggt

SEQ ID NO: 231923 - DNA, 23 bp, Artificial sequence
  SiRNA target sequence
atttatgacgtttgctaatggtc

SEQ ID NO: 231924 - DNA, 23 bp, Artificial sequence
  SiRNA target sequence
tttatgacgtttgctaatggtct

SEQ ID NO: 231925 - DNA, 23 bp, Artificial sequence
  SiRNA target sequence
ttatgacgtttgctaatggtctt

SEQ ID NO: 231926 - DNA, 23 bp, Artificial sequence
  SiRNA target sequence
tatgacgtttgctaatggtcttt

SEQ ID NO: 231927 - DNA, 23 bp, Artificial sequence
  SiRNA target sequence
atgacgtttgctaatggtctttc

SEQ ID NO: 231928 - DNA, 23 bp, Artificial sequence
  SiRNA target sequence
tgacgtttgctaatggtctttcg

SEQ ID NO: 231929 - DNA, 23 bp, Artificial sequence
  SiRNA target sequence
gacgtttgctaatggtctttcga

SEQ ID NO: 231930 - DNA, 23 bp, Artificial sequence
  SiRNA target sequence
acgtttgctaatggtctttcgac

SEQ ID NO: 231931 - DNA, 23 bp, Artificial sequence
  SiRNA target sequence
cgtttgctaatggtctttcgact

SEQ ID NO: 231932 - DNA, 23 bp, Artificial sequence
  SiRNA target sequence
gtttgctaatggtctttcgactc

SEQ ID NO: 231933 - DNA, 23 bp, Artificial sequence
  SiRNA target sequence
tttgctaatggtctttcgactcc

SEQ ID NO: 231934 - DNA, 23 bp, Artificial sequence
  SiRNA target sequence
ttgctaatggtctttcgactcct

SEQ ID NO: 231935 - DNA, 23 bp, Artificial sequence
  SiRNA target sequence
tgctaatggtctttcgactcctg

SEQ ID NO: 231936 - DNA, 23 bp, Artificial sequence
  SiRNA target sequence
gctaatggtctttcgactcctgg

SEQ ID NO: 231937 - DNA, 23 bp, Artificial sequence
  SiRNA target sequence
ctaatggtctttcgactcctgga

SEQ ID NO: 231938 - DNA, 23 bp, Artificial sequence
  SiRNA target sequence
taatggtctttcgactcctggac

SEQ ID NO: 231939 - DNA, 23 bp, Artificial sequence
  SiRNA target sequence
aatggtctttcgactcctggaca

SEQ ID NO: 231940 - DNA, 23 bp, Artificial sequence
  SiRNA target sequence
atggtctttcgactcctggacag

SEQ ID NO: 231941 - DNA, 23 bp, Artificial sequence
  SiRNA target sequence
tggtctttcgactcctggacagt

SEQ ID NO: 231942 - DNA, 23 bp, Artificial sequence
  SiRNA target sequence
ggtctttcgactcctggacagtc

SEQ ID NO: 231943 - DNA, 23 bp, Artificial sequence
  SiRNA target sequence
gtctttcgactcctggacagtcc

SEQ ID NO: 231944 - DNA, 23 bp, Artificial sequence
  SiRNA target sequence
tctttcgactcctggacagtccg

SEQ ID NO: 231945 - DNA, 23 bp, Artificial sequence
  SiRNA target sequence
ctttcgactcctggacagtccgc

SEQ ID NO: 231946 - DNA, 23 bp, Artificial sequence
  SiRNA target sequence
tttcgactcctggacagtccgct

SEQ ID NO: 231947 - DNA, 23 bp, Artificial sequence
  SiRNA target sequence
ttcgactcctggacagtccgcta

SEQ ID NO: 231948 - DNA, 23 bp, Artificial sequence
  SiRNA target sequence
tcgactcctggacagtccgctag

SEQ ID NO: 231949 - DNA, 23 bp, Artificial sequence
  SiRNA target sequence
cgactcctggacagtccgctaga

SEQ ID NO: 231950 - DNA, 23 bp, Artificial sequence
  SiRNA target sequence
gactcctggacagtccgctagat

SEQ ID NO: 231951 - DNA, 23 bp, Artificial sequence
  SiRNA target sequence
actcctggacagtccgctagatt

SEQ ID NO: 231952 - DNA, 23 bp, Artificial sequence
  SiRNA target sequence
ctcctggacagtccgctagattt

SEQ ID NO: 231953 - DNA, 23 bp, Artificial sequence
  SiRNA target sequence
tcctggacagtccgctagatttg

SEQ ID NO: 231954 - DNA, 23 bp, Artificial sequence
  SiRNA target sequence
cctggacagtccgctagatttgt

SEQ ID NO: 231955 - DNA, 23 bp, Artificial sequence
  SiRNA target sequence
ctggacagtccgctagatttgtc

SEQ ID NO: 231956 - DNA, 23 bp, Artificial sequence
  SiRNA target sequence
tggacagtccgctagatttgtcc

SEQ ID NO: 231957 - DNA, 23 bp, Artificial sequence
  SiRNA target sequence
ggacagtccgctagatttgtccc

SEQ ID NO: 231958 - DNA, 23 bp, Artificial sequence
  SiRNA target sequence
gacagtccgctagatttgtccct

SEQ ID NO: 231959 - DNA, 23 bp, Artificial sequence
  SiRNA target sequence
acagtccgctagatttgtccctt

SEQ ID NO: 231960 - DNA, 23 bp, Artificial sequence
  SiRNA target sequence
cagtccgctagatttgtcccttt

SEQ ID NO: 231961 - DNA, 23 bp, Artificial sequence
  SiRNA target sequence
agtccgctagatttgtcccttta

SEQ ID NO: 231962 - DNA, 23 bp, Artificial sequence
  SiRNA target sequence
gtccgctagatttgtccctttat

SEQ ID NO: 231963 - DNA, 23 bp, Artificial sequence
  SiRNA target sequence
tccgctagatttgtccctttatt

SEQ ID NO: 231964 - DNA, 23 bp, Artificial sequence
  SiRNA target sequence
ccgctagatttgtccctttattt

SEQ ID NO: 231965 - DNA, 23 bp, Artificial sequence
  SiRNA target sequence
cgctagatttgtccctttatttt

SEQ ID NO: 231966 - DNA, 23 bp, Artificial sequence
  SiRNA target sequence
gctagatttgtccctttatttta

SEQ ID NO: 231967 - DNA, 23 bp, Artificial sequence
  SiRNA target sequence
ctagatttgtccctttattttat

SEQ ID NO: 231968 - DNA, 23 bp, Artificial sequence
  SiRNA target sequence
tagatttgtccctttattttatg

SEQ ID NO: 231969 - DNA, 23 bp, Artificial sequence
  SiRNA target sequence
agatttgtccctttattttatgt

SEQ ID NO: 231970 - DNA, 23 bp, Artificial sequence
  SiRNA target sequence
gatttgtccctttattttatgtt

SEQ ID NO: 231971 - DNA, 23 bp, Artificial sequence
  SiRNA target sequence
atttgtccctttattttatgttg

SEQ ID NO: 231972 - DNA, 23 bp, Artificial sequence
  SiRNA target sequence
tttgtccctttattttatgttgg

SEQ ID NO: 231973 - DNA, 23 bp, Artificial sequence
  SiRNA target sequence
ttgtccctttattttatgttgga

SEQ ID NO: 231974 - DNA, 23 bp, Artificial sequence
  SiRNA target sequence
tgtccctttattttatgttggat

SEQ ID NO: 231975 - DNA, 23 bp, Artificial sequence
  SiRNA target sequence
gtccctttattttatgttggatc

SEQ ID NO: 231976 - DNA, 23 bp, Artificial sequence
  SiRNA target sequence
tccctttattttatgttggatct

SEQ ID NO: 231977 - DNA, 23 bp, Artificial sequence
  SiRNA target sequence
ccctttattttatgttggatcta

SEQ ID NO: 231978 - DNA, 23 bp, Artificial sequence
  SiRNA target sequence
cctttattttatgttggatctaa

SEQ ID NO: 231979 - DNA, 23 bp, Artificial sequence
  SiRNA target sequence
ctttattttatgttggatctaat

SEQ ID NO: 231980 - DNA, 23 bp, Artificial sequence
  SiRNA target sequence
tttattttatgttggatctaatt

SEQ ID NO: 231981 - DNA, 23 bp, Artificial sequence
  SiRNA target sequence
ttattttatgttggatctaattt

SEQ ID NO: 231982 - DNA, 23 bp, Artificial sequence
  SiRNA target sequence
tattttatgttggatctaatttg

SEQ ID NO: 231983 - DNA, 23 bp, Artificial sequence
  SiRNA target sequence
attttatgttggatctaatttgg

SEQ ID NO: 231984 - DNA, 23 bp, Artificial sequence
  SiRNA target sequence
ttttatgttggatctaatttggc

SEQ ID NO: 231985 - DNA, 23 bp, Artificial sequence
  SiRNA target sequence
tttatgttggatctaatttggct

SEQ ID NO: 231986 - DNA, 23 bp, Artificial sequence
  SiRNA target sequence
ttatgttggatctaatttggctt

SEQ ID NO: 231987 - DNA, 23 bp, Artificial sequence
  SiRNA target sequence
tatgttggatctaatttggcttt

SEQ ID NO: 231988 - DNA, 23 bp, Artificial sequence
  SiRNA target sequence
atgttggatctaatttggcttta

SEQ ID NO: 231989 - DNA, 23 bp, Artificial sequence
  SiRNA target sequence
tgttggatctaatttggctttac

SEQ ID NO: 231990 - DNA, 23 bp, Artificial sequence
  SiRNA target sequence
gttggatctaatttggctttact

SEQ ID NO: 231991 - DNA, 23 bp, Artificial sequence
  SiRNA target sequence
ttggatctaatttggctttactt

SEQ ID NO: 231992 - DNA, 23 bp, Artificial sequence
  SiRNA target sequence
tggatctaatttggctttacttc

SEQ ID NO: 231993 - DNA, 23 bp, Artificial sequence
  SiRNA target sequence
ggatctaatttggctttacttct

SEQ ID NO: 231994 - DNA, 23 bp, Artificial sequence
  SiRNA target sequence
gatctaatttggctttacttctt

SEQ ID NO: 231995 - DNA, 23 bp, Artificial sequence
  SiRNA target sequence
atctaatttggctttacttcttt

SEQ ID NO: 231996 - DNA, 23 bp, Artificial sequence
  SiRNA target sequence
tctaatttggctttacttctttc

SEQ ID NO: 231997 - DNA, 23 bp, Artificial sequence
  SiRNA target sequence
ctaatttggctttacttctttca

SEQ ID NO: 231998 - DNA, 23 bp, Artificial sequence
  SiRNA target sequence
taatttggctttacttctttcag

SEQ ID NO: 231999 - DNA, 23 bp, Artificial sequence
  SiRNA target sequence
aatttggctttacttctttcagg

SEQ ID NO: 232000 - DNA, 23 bp, Artificial sequence
  SiRNA target sequence
atttggctttacttctttcagga

SEQ ID NO: 232001 - DNA, 23 bp, Artificial sequence
  SiRNA target sequence
tttggctttacttctttcaggaa

SEQ ID NO: 232002 - DNA, 23 bp, Artificial sequence
  SiRNA target sequence
ttggctttacttctttcaggaat

SEQ ID NO: 232003 - DNA, 23 bp, Artificial sequence
  SiRNA target sequence
tggctttacttctttcaggaatg

SEQ ID NO: 232004 - DNA, 23 bp, Artificial sequence
  SiRNA target sequence
ggctttacttctttcaggaatga

SEQ ID NO: 232005 - DNA, 23 bp, Artificial sequence
  SiRNA target sequence
gctttacttctttcaggaatgat

SEQ ID NO: 232006 - DNA, 23 bp, Artificial sequence
  SiRNA target sequence
ctttacttctttcaggaatgata

SEQ ID NO: 232007 - DNA, 23 bp, Artificial sequence
  SiRNA target sequence
tttacttctttcaggaatgataa

SEQ ID NO: 232008 - DNA, 23 bp, Artificial sequence
  SiRNA target sequence
ttacttctttcaggaatgataaa

SEQ ID NO: 232009 - DNA, 23 bp, Artificial sequence
  SiRNA target sequence
tacttctttcaggaatgataaat

SEQ ID NO: 232010 - DNA, 23 bp, Artificial sequence
  SiRNA target sequence
acttctttcaggaatgataaatt

SEQ ID NO: 232011 - DNA, 23 bp, Artificial sequence
  SiRNA target sequence
cttctttcaggaatgataaatta

SEQ ID NO: 232012 - DNA, 23 bp, Artificial sequence
  SiRNA target sequence
ttctttcaggaatgataaattac

SEQ ID NO: 232013 - DNA, 23 bp, Artificial sequence
  SiRNA target sequence
tctttcaggaatgataaattact

SEQ ID NO: 232014 - DNA, 23 bp, Artificial sequence
  SiRNA target sequence
ctttcaggaatgataaattactt

SEQ ID NO: 232015 - DNA, 23 bp, Artificial sequence
  SiRNA target sequence
tttcaggaatgataaattacttt

SEQ ID NO: 232016 - DNA, 23 bp, Artificial sequence
  SiRNA target sequence
ttcaggaatgataaattactttt

SEQ ID NO: 232017 - DNA, 23 bp, Artificial sequence
  SiRNA target sequence
tcaggaatgataaattactttta

SEQ ID NO: 232018 - DNA, 23 bp, Artificial sequence
  SiRNA target sequence
caggaatgataaattacttttat

SEQ ID NO: 232019 - DNA, 23 bp, Artificial sequence
  SiRNA target sequence
aggaatgataaattacttttata

SEQ ID NO: 232020 - DNA, 23 bp, Artificial sequence
  SiRNA target sequence
ggaatgataaattacttttatag

SEQ ID NO: 232021 - DNA, 23 bp, Artificial sequence
  SiRNA target sequence
gaatgataaattacttttatagt

SEQ ID NO: 232022 - DNA, 23 bp, Artificial sequence
  SiRNA target sequence
aatgataaattacttttatagtg

SEQ ID NO: 232023 - DNA, 23 bp, Artificial sequence
  SiRNA target sequence
atgataaattacttttatagtgt

SEQ ID NO: 232024 - DNA, 23 bp, Artificial sequence
  SiRNA target sequence
tgataaattacttttatagtgta

SEQ ID NO: 232025 - DNA, 23 bp, Artificial sequence
  SiRNA target sequence
gataaattacttttatagtgtaa

SEQ ID NO: 232026 - DNA, 23 bp, Artificial sequence
  SiRNA target sequence
ataaattacttttatagtgtaag

SEQ ID NO: 232027 - DNA, 23 bp, Artificial sequence
  SiRNA target sequence
taaattacttttatagtgtaagt

SEQ ID NO: 232028 - DNA, 23 bp, Artificial sequence
  SiRNA target sequence
aaattacttttatagtgtaagta

SEQ ID NO: 232029 - DNA, 23 bp, Artificial sequence
  SiRNA target sequence
aattacttttatagtgtaagtaa

SEQ ID NO: 232030 - DNA, 23 bp, Artificial sequence
  SiRNA target sequence
attacttttatagtgtaagtaaa

SEQ ID NO: 232031 - DNA, 23 bp, Artificial sequence
  SiRNA target sequence
ttacttttatagtgtaagtaaat

SEQ ID NO: 232032 - DNA, 23 bp, Artificial sequence
  SiRNA target sequence
tacttttatagtgtaagtaaatc

SEQ ID NO: 232033 - DNA, 23 bp, Artificial sequence
  SiRNA target sequence
acttttatagtgtaagtaaatct

SEQ ID NO: 232034 - DNA, 23 bp, Artificial sequence
  SiRNA target sequence
cttttatagtgtaagtaaatcta

SEQ ID NO: 232035 - DNA, 23 bp, Artificial sequence
  SiRNA target sequence
ttttatagtgtaagtaaatctaa

SEQ ID NO: 232036 - DNA, 23 bp, Artificial sequence
  SiRNA target sequence
tttatagtgtaagtaaatctaaa

SEQ ID NO: 232037 - DNA, 23 bp, Artificial sequence
  SiRNA target sequence
ttatagtgtaagtaaatctaaaa

SEQ ID NO: 232038 - DNA, 23 bp, Artificial sequence
  SiRNA target sequence
tatagtgtaagtaaatctaaaat

SEQ ID NO: 232039 - DNA, 23 bp, Artificial sequence
  SiRNA target sequence
atagtgtaagtaaatctaaaatg

SEQ ID NO: 232040 - DNA, 23 bp, Artificial sequence
  SiRNA target sequence
tagtgtaagtaaatctaaaatgt

SEQ ID NO: 232041 - DNA, 23 bp, Artificial sequence
  SiRNA target sequence
agtgtaagtaaatctaaaatgtc

SEQ ID NO: 232042 - DNA, 23 bp, Artificial sequence
  SiRNA target sequence
gtgtaagtaaatctaaaatgtcg

SEQ ID NO: 232043 - DNA, 23 bp, Artificial sequence
  SiRNA target sequence
tgtaagtaaatctaaaatgtcgt

SEQ ID NO: 232044 - DNA, 23 bp, Artificial sequence
  SiRNA target sequence
gtaagtaaatctaaaatgtcgta

SEQ ID NO: 232045 - DNA, 23 bp, Artificial sequence
  SiRNA target sequence
taagtaaatctaaaatgtcgtat

SEQ ID NO: 232046 - DNA, 23 bp, Artificial sequence
  SiRNA target sequence
aagtaaatctaaaatgtcgtatg

SEQ ID NO: 232047 - DNA, 23 bp, Artificial sequence
  SiRNA target sequence
agtaaatctaaaatgtcgtatgt

SEQ ID NO: 232048 - DNA, 23 bp, Artificial sequence
  SiRNA target sequence
gtaaatctaaaatgtcgtatgtt

SEQ ID NO: 232049 - DNA, 23 bp, Artificial sequence
  SiRNA target sequence
taaatctaaaatgtcgtatgttg

SEQ ID NO: 232050 - DNA, 23 bp, Artificial sequence
  SiRNA target sequence
aaatctaaaatgtcgtatgttgc

SEQ ID NO: 232051 - DNA, 23 bp, Artificial sequence
  SiRNA target sequence
aatctaaaatgtcgtatgttgcg

SEQ ID NO: 232052 - DNA, 23 bp, Artificial sequence
  SiRNA target sequence
atctaaaatgtcgtatgttgcgg

SEQ ID NO: 232053 - DNA, 23 bp, Artificial sequence
  SiRNA target sequence
tctaaaatgtcgtatgttgcggc

SEQ ID NO: 232054 - DNA, 23 bp, Artificial sequence
  SiRNA target sequence
ctaaaatgtcgtatgttgcggcc

SEQ ID NO: 232055 - DNA, 23 bp, Artificial sequence
  SiRNA target sequence
taaaatgtcgtatgttgcggccg

SEQ ID NO: 232056 - DNA, 23 bp, Artificial sequence
  SiRNA target sequence
aaaatgtcgtatgttgcggccga

SEQ ID NO: 232057 - DNA, 23 bp, Artificial sequence
  SiRNA target sequence
aaatgtcgtatgttgcggccgaa

SEQ ID NO: 232058 - DNA, 23 bp, Artificial sequence
  SiRNA target sequence
aatgtcgtatgttgcggccgaaa

SEQ ID NO: 232059 - DNA, 23 bp, Artificial sequence
  SiRNA target sequence
atgtcgtatgttgcggccgaaag

SEQ ID NO: 232060 - DNA, 23 bp, Artificial sequence
  SiRNA target sequence
tgtcgtatgttgcggccgaaaga

SEQ ID NO: 232061 - DNA, 23 bp, Artificial sequence
  SiRNA target sequence
gtcgtatgttgcggccgaaagat

SEQ ID NO: 232062 - DNA, 23 bp, Artificial sequence
  SiRNA target sequence
tcgtatgttgcggccgaaagatt

SEQ ID NO: 232063 - DNA, 23 bp, Artificial sequence
  SiRNA target sequence
cgtatgttgcggccgaaagattt

SEQ ID NO: 232064 - DNA, 23 bp, Artificial sequence
  SiRNA target sequence
gtatgttgcggccgaaagatttt

SEQ ID NO: 232065 - DNA, 23 bp, Artificial sequence
  SiRNA target sequence
tatgttgcggccgaaagattttt

SEQ ID NO: 232066 - DNA, 23 bp, Artificial sequence
  SiRNA target sequence
atgttgcggccgaaagatttttt

SEQ ID NO: 232067 - DNA, 23 bp, Artificial sequence
  SiRNA target sequence
tgttgcggccgaaagatttttta

SEQ ID NO: 232068 - DNA, 23 bp, Artificial sequence
  SiRNA target sequence
gttgcggccgaaagattttttaa

SEQ ID NO: 232069 - DNA, 23 bp, Artificial sequence
  SiRNA target sequence
ttgcggccgaaagattttttaat

SEQ ID NO: 232070 - DNA, 23 bp, Artificial sequence
  SiRNA target sequence
tgcggccgaaagattttttaatg

SEQ ID NO: 232071 - DNA, 23 bp, Artificial sequence
  SiRNA target sequence
gcggccgaaagattttttaatgg

SEQ ID NO: 232072 - DNA, 23 bp, Artificial sequence
  SiRNA target sequence
cggccgaaagattttttaatgga

SEQ ID NO: 232073 - DNA, 23 bp, Artificial sequence
  SiRNA target sequence
ggccgaaagattttttaatggat

SEQ ID NO: 232074 - DNA, 23 bp, Artificial sequence
  SiRNA target sequence
gccgaaagattttttaatggatt

SEQ ID NO: 232075 - DNA, 23 bp, Artificial sequence
  SiRNA target sequence
ccgaaagattttttaatggattt

SEQ ID NO: 232076 - DNA, 23 bp, Artificial sequence
  SiRNA target sequence
cgaaagattttttaatggatttt

SEQ ID NO: 232077 - DNA, 23 bp, Artificial sequence
  SiRNA target sequence
gaaagattttttaatggattttt

SEQ ID NO: 232078 - DNA, 23 bp, Artificial sequence
  SiRNA target sequence
aaagattttttaatggatttttt

SEQ ID NO: 232079 - DNA, 23 bp, Artificial sequence
  SiRNA target sequence
aagattttttaatggattttttt

SEQ ID NO: 232080 - DNA, 23 bp, Artificial sequence
  SiRNA target sequence
agattttttaatggatttttttg

SEQ ID NO: 232081 - DNA, 23 bp, Artificial sequence
  SiRNA target sequence
gattttttaatggatttttttgt

SEQ ID NO: 232082 - DNA, 23 bp, Artificial sequence
  SiRNA target sequence
attttttaatggatttttttgtc

SEQ ID NO: 232083 - DNA, 23 bp, Artificial sequence
  SiRNA target sequence
ttttttaatggatttttttgtct

SEQ ID NO: 232084 - DNA, 23 bp, Artificial sequence
  SiRNA target sequence
tttttaatggatttttttgtctg

SEQ ID NO: 232085 - DNA, 23 bp, Artificial sequence
  SiRNA target sequence
ttttaatggatttttttgtctga

SEQ ID NO: 232086 - DNA, 23 bp, Artificial sequence
  SiRNA target sequence
tttaatggatttttttgtctgag

SEQ ID NO: 232087 - DNA, 23 bp, Artificial sequence
  SiRNA target sequence
ttaatggatttttttgtctgagt

SEQ ID NO: 232088 - DNA, 23 bp, Artificial sequence
  SiRNA target sequence
taatggatttttttgtctgagtg

SEQ ID NO: 232089 - DNA, 23 bp, Artificial sequence
  SiRNA target sequence
aatggatttttttgtctgagtgg

SEQ ID NO: 232090 - DNA, 23 bp, Artificial sequence
  SiRNA target sequence
atggatttttttgtctgagtgga

SEQ ID NO: 232091 - DNA, 23 bp, Artificial sequence
  SiRNA target sequence
tggatttttttgtctgagtggaa

SEQ ID NO: 232092 - DNA, 23 bp, Artificial sequence
  SiRNA target sequence
ggatttttttgtctgagtggaat

SEQ ID NO: 232093 - DNA, 23 bp, Artificial sequence
  SiRNA target sequence
gatttttttgtctgagtggaatt

SEQ ID NO: 232094 - DNA, 23 bp, Artificial sequence
  SiRNA target sequence
atttttttgtctgagtggaattc

SEQ ID NO: 232095 - DNA, 23 bp, Artificial sequence
  SiRNA target sequence
tttttttgtctgagtggaattct

SEQ ID NO: 232096 - DNA, 23 bp, Artificial sequence
  SiRNA target sequence
ttttttgtctgagtggaattctc

SEQ ID NO: 232097 - DNA, 23 bp, Artificial sequence
  SiRNA target sequence
tttttgtctgagtggaattctct

SEQ ID NO: 232098 - DNA, 23 bp, Artificial sequence
  SiRNA target sequence
ttttgtctgagtggaattctctg

SEQ ID NO: 232099 - DNA, 23 bp, Artificial sequence
  SiRNA target sequence
tttgtctgagtggaattctctgt

SEQ ID NO: 232100 - DNA, 23 bp, Artificial sequence
  SiRNA target sequence
ttgtctgagtggaattctctgtg

SEQ ID NO: 232101 - DNA, 23 bp, Artificial sequence
  SiRNA target sequence
tgtctgagtggaattctctgtgc

SEQ ID NO: 232102 - DNA, 23 bp, Artificial sequence
  SiRNA target sequence
gtctgagtggaattctctgtgct

SEQ ID NO: 232103 - DNA, 23 bp, Artificial sequence
  SiRNA target sequence
tctgagtggaattctctgtgctg

SEQ ID NO: 232104 - DNA, 23 bp, Artificial sequence
  SiRNA target sequence
ctgagtggaattctctgtgctgt

SEQ ID NO: 232105 - DNA, 23 bp, Artificial sequence
  SiRNA target sequence
tgagtggaattctctgtgctgta

SEQ ID NO: 232106 - DNA, 23 bp, Artificial sequence
  SiRNA target sequence
gagtggaattctctgtgctgtaa

SEQ ID NO: 232107 - DNA, 23 bp, Artificial sequence
  SiRNA target sequence
agtggaattctctgtgctgtaat

SEQ ID NO: 232108 - DNA, 23 bp, Artificial sequence
  SiRNA target sequence
gtggaattctctgtgctgtaatt

SEQ ID NO: 232109 - DNA, 23 bp, Artificial sequence
  SiRNA target sequence
tggaattctctgtgctgtaattt

SEQ ID NO: 232110 - DNA, 23 bp, Artificial sequence
  SiRNA target sequence
ggaattctctgtgctgtaattta

SEQ ID NO: 232111 - DNA, 23 bp, Artificial sequence
  SiRNA target sequence
gaattctctgtgctgtaatttat

SEQ ID NO: 232112 - DNA, 23 bp, Artificial sequence
  SiRNA target sequence
aattctctgtgctgtaatttatc

SEQ ID NO: 232113 - DNA, 23 bp, Artificial sequence
  SiRNA target sequence
attctctgtgctgtaatttatct

SEQ ID NO: 232114 - DNA, 23 bp, Artificial sequence
  SiRNA target sequence
ttctctgtgctgtaatttatctt

SEQ ID NO: 232115 - DNA, 23 bp, Artificial sequence
  SiRNA target sequence
tctctgtgctgtaatttatcttc

SEQ ID NO: 232116 - DNA, 23 bp, Artificial sequence
  SiRNA target sequence
ctctgtgctgtaatttatcttct

SEQ ID NO: 232117 - DNA, 23 bp, Artificial sequence
  SiRNA target sequence
tctgtgctgtaatttatcttcta

SEQ ID NO: 232118 - DNA, 23 bp, Artificial sequence
  SiRNA target sequence
ctgtgctgtaatttatcttctaa

SEQ ID NO: 232119 - DNA, 23 bp, Artificial sequence
  SiRNA target sequence
tgtgctgtaatttatcttctaaa

SEQ ID NO: 232120 - DNA, 23 bp, Artificial sequence
  SiRNA target sequence
gtgctgtaatttatcttctaaaa

SEQ ID NO: 232121 - DNA, 23 bp, Artificial sequence
  SiRNA target sequence
tgctgtaatttatcttctaaaaa

SEQ ID NO: 232122 - DNA, 23 bp, Artificial sequence
  SiRNA target sequence
gctgtaatttatcttctaaaaaa

SEQ ID NO: 232123 - DNA, 23 bp, Artificial sequence
  SiRNA target sequence
ctgtaatttatcttctaaaaaaa

SEQ ID NO: 232124 - DNA, 23 bp, Artificial sequence
  SiRNA target sequence
tgtaatttatcttctaaaaaaat

SEQ ID NO: 232125 - DNA, 23 bp, Artificial sequence
  SiRNA target sequence
gtaatttatcttctaaaaaaata

SEQ ID NO: 232126 - DNA, 23 bp, Artificial sequence
  SiRNA target sequence
taatttatcttctaaaaaaatat

SEQ ID NO: 232127 - DNA, 23 bp, Artificial sequence
  SiRNA target sequence
aatttatcttctaaaaaaatatt

SEQ ID NO: 232128 - DNA, 23 bp, Artificial sequence
  SiRNA target sequence
atttatcttctaaaaaaatattt

SEQ ID NO: 232129 - DNA, 23 bp, Artificial sequence
  SiRNA target sequence
tttatcttctaaaaaaatattta

SEQ ID NO: 232130 - DNA, 23 bp, Artificial sequence
  SiRNA target sequence
ttatcttctaaaaaaatatttag

SEQ ID NO: 232131 - DNA, 23 bp, Artificial sequence
  SiRNA target sequence
tatcttctaaaaaaatatttaga

SEQ ID NO: 232132 - DNA, 23 bp, Artificial sequence
  SiRNA target sequence
atcttctaaaaaaatatttagaa

SEQ ID NO: 232133 - DNA, 23 bp, Artificial sequence
  SiRNA target sequence
tcttctaaaaaaatatttagaaa

SEQ ID NO: 232134 - DNA, 23 bp, Artificial sequence
  SiRNA target sequence
cttctaaaaaaatatttagaaaa

SEQ ID NO: 232135 - DNA, 23 bp, Artificial sequence
  SiRNA target sequence
ttctaaaaaaatatttagaaaat

SEQ ID NO: 232136 - DNA, 23 bp, Artificial sequence
  SiRNA target sequence
tctaaaaaaatatttagaaaata

SEQ ID NO: 232137 - DNA, 23 bp, Artificial sequence
  SiRNA target sequence
ctaaaaaaatatttagaaaataa

SEQ ID NO: 232138 - DNA, 23 bp, Artificial sequence
  SiRNA target sequence
taaaaaaatatttagaaaataat

SEQ ID NO: 232139 - DNA, 23 bp, Artificial sequence
  SiRNA target sequence
aaaaaaatatttagaaaataatg

SEQ ID NO: 232140 - DNA, 23 bp, Artificial sequence
  SiRNA target sequence
aaaaaatatttagaaaataatgt

SEQ ID NO: 232141 - DNA, 23 bp, Artificial sequence
  SiRNA target sequence
aaaaatatttagaaaataatgtt

SEQ ID NO: 232142 - DNA, 23 bp, Artificial sequence
  SiRNA target sequence
aaaatatttagaaaataatgtta

SEQ ID NO: 232143 - DNA, 23 bp, Artificial sequence
  SiRNA target sequence
aaatatttagaaaataatgttac

SEQ ID NO: 232144 - DNA, 23 bp, Artificial sequence
  SiRNA target sequence
aatatttagaaaataatgttact

SEQ ID NO: 232145 - DNA, 23 bp, Artificial sequence
  SiRNA target sequence
atatttagaaaataatgttacta

SEQ ID NO: 232146 - DNA, 23 bp, Artificial sequence
  SiRNA target sequence
tatttagaaaataatgttactag

SEQ ID NO: 232147 - DNA, 23 bp, Artificial sequence
  SiRNA target sequence
atttagaaaataatgttactagc

SEQ ID NO: 232148 - DNA, 23 bp, Artificial sequence
  SiRNA target sequence
tttagaaaataatgttactagca

SEQ ID NO: 232149 - DNA, 23 bp, Artificial sequence
  SiRNA target sequence
ttagaaaataatgttactagcaa

SEQ ID NO: 232150 - DNA, 23 bp, Artificial sequence
  SiRNA target sequence
tagaaaataatgttactagcaaa

SEQ ID NO: 232151 - DNA, 23 bp, Artificial sequence
  SiRNA target sequence
agaaaataatgttactagcaaac

SEQ ID NO: 232152 - DNA, 23 bp, Artificial sequence
  SiRNA target sequence
gaaaataatgttactagcaaacc

SEQ ID NO: 232153 - DNA, 23 bp, Artificial sequence
  SiRNA target sequence
aaaataatgttactagcaaacca

SEQ ID NO: 232154 - DNA, 23 bp, Artificial sequence
  SiRNA target sequence
aaataatgttactagcaaaccaa

SEQ ID NO: 232155 - DNA, 23 bp, Artificial sequence
  SiRNA target sequence
aataatgttactagcaaaccaat

SEQ ID NO: 232156 - DNA, 23 bp, Artificial sequence
  SiRNA target sequence
ataatgttactagcaaaccaatg

SEQ ID NO: 232157 - DNA, 23 bp, Artificial sequence
  SiRNA target sequence
taatgttactagcaaaccaatgt

SEQ ID NO: 232158 - DNA, 23 bp, Artificial sequence
  SiRNA target sequence
aatgttactagcaaaccaatgtt

SEQ ID NO: 232159 - DNA, 23 bp, Artificial sequence
  SiRNA target sequence
atgttactagcaaaccaatgttt

SEQ ID NO: 232160 - DNA, 23 bp, Artificial sequence
  SiRNA target sequence
tgttactagcaaaccaatgtttg

SEQ ID NO: 232161 - DNA, 23 bp, Artificial sequence
  SiRNA target sequence
gttactagcaaaccaatgtttgt

SEQ ID NO: 232162 - DNA, 23 bp, Artificial sequence
  SiRNA target sequence
ttactagcaaaccaatgtttgtt

SEQ ID NO: 232163 - DNA, 23 bp, Artificial sequence
  SiRNA target sequence
tactagcaaaccaatgtttgtta

SEQ ID NO: 232164 - DNA, 23 bp, Artificial sequence
  SiRNA target sequence
actagcaaaccaatgtttgttag

SEQ ID NO: 232165 - DNA, 23 bp, Artificial sequence
  SiRNA target sequence
ctagcaaaccaatgtttgttaga

SEQ ID NO: 232166 - DNA, 23 bp, Artificial sequence
  SiRNA target sequence
tagcaaaccaatgtttgttagaa

SEQ ID NO: 232167 - DNA, 23 bp, Artificial sequence
  SiRNA target sequence
agcaaaccaatgtttgttagaaa

SEQ ID NO: 232168 - DNA, 23 bp, Artificial sequence
  SiRNA target sequence
gcaaaccaatgtttgttagaaag

SEQ ID NO: 232169 - DNA, 23 bp, Artificial sequence
  SiRNA target sequence
caaaccaatgtttgttagaaaga

SEQ ID NO: 232170 - DNA, 23 bp, Artificial sequence
  SiRNA target sequence
aaaccaatgtttgttagaaagac

SEQ ID NO: 232171 - DNA, 23 bp, Artificial sequence
  SiRNA target sequence
aaccaatgtttgttagaaagact

SEQ ID NO: 232172 - DNA, 23 bp, Artificial sequence
  SiRNA target sequence
accaatgtttgttagaaagactt

SEQ ID NO: 232173 - DNA, 23 bp, Artificial sequence
  SiRNA target sequence
ccaatgtttgttagaaagacttt

SEQ ID NO: 232174 - DNA, 23 bp, Artificial sequence
  SiRNA target sequence
caatgtttgttagaaagactttt

SEQ ID NO: 232175 - DNA, 23 bp, Artificial sequence
  SiRNA target sequence
aatgtttgttagaaagactttta

SEQ ID NO: 232176 - DNA, 23 bp, Artificial sequence
  SiRNA target sequence
atgtttgttagaaagacttttac

SEQ ID NO: 232177 - DNA, 23 bp, Artificial sequence
  SiRNA target sequence
tgtttgttagaaagacttttact

SEQ ID NO: 232178 - DNA, 23 bp, Artificial sequence
  SiRNA target sequence
gtttgttagaaagacttttacta

SEQ ID NO: 232179 - DNA, 23 bp, Artificial sequence
  SiRNA target sequence
tttgttagaaagacttttactaa

SEQ ID NO: 232180 - DNA, 23 bp, Artificial sequence
  SiRNA target sequence
ttgttagaaagacttttactaaa

SEQ ID NO: 232181 - DNA, 23 bp, Artificial sequence
  SiRNA target sequence
tgttagaaagacttttactaaaa

SEQ ID NO: 232182 - DNA, 23 bp, Artificial sequence
  SiRNA target sequence
gttagaaagacttttactaaaaa

SEQ ID NO: 232183 - DNA, 23 bp, Artificial sequence
  SiRNA target sequence
ttagaaagacttttactaaaaag

SEQ ID NO: 232184 - DNA, 23 bp, Artificial sequence
  SiRNA target sequence
tagaaagacttttactaaaaaga

SEQ ID NO: 232185 - DNA, 23 bp, Artificial sequence
  SiRNA target sequence
agaaagacttttactaaaaagaa

SEQ ID NO: 232186 - DNA, 23 bp, Artificial sequence
  SiRNA target sequence
gaaagacttttactaaaaagaag

SEQ ID NO: 232187 - DNA, 23 bp, Artificial sequence
  SiRNA target sequence
aaagacttttactaaaaagaaga

SEQ ID NO: 232188 - DNA, 23 bp, Artificial sequence
  SiRNA target sequence
aagacttttactaaaaagaagag

SEQ ID NO: 232189 - DNA, 23 bp, Artificial sequence
  SiRNA target sequence
agacttttactaaaaagaagagt

SEQ ID NO: 232190 - DNA, 23 bp, Artificial sequence
  SiRNA target sequence
gacttttactaaaaagaagagta

SEQ ID NO: 232191 - DNA, 23 bp, Artificial sequence
  SiRNA target sequence
acttttactaaaaagaagagtaa

SEQ ID NO: 232192 - DNA, 23 bp, Artificial sequence
  SiRNA target sequence
cttttactaaaaagaagagtaaa

SEQ ID NO: 232193 - DNA, 23 bp, Artificial sequence
  SiRNA target sequence
ttttactaaaaagaagagtaaag

SEQ ID NO: 232194 - DNA, 23 bp, Artificial sequence
  SiRNA target sequence
tttactaaaaagaagagtaaagt

SEQ ID NO: 232195 - DNA, 23 bp, Artificial sequence
  SiRNA target sequence
ttactaaaaagaagagtaaagtg

SEQ ID NO: 232196 - DNA, 23 bp, Artificial sequence
  SiRNA target sequence
tactaaaaagaagagtaaagtga

SEQ ID NO: 232197 - DNA, 23 bp, Artificial sequence
  SiRNA target sequence
actaaaaagaagagtaaagtgaa

SEQ ID NO: 232198 - DNA, 23 bp, Artificial sequence
  SiRNA target sequence
ctaaaaagaagagtaaagtgaag

SEQ ID NO: 232199 - DNA, 23 bp, Artificial sequence
  SiRNA target sequence
taaaaagaagagtaaagtgaagg

SEQ ID NO: 232200 - DNA, 23 bp, Artificial sequence
  SiRNA target sequence
aaaaagaagagtaaagtgaaggt

SEQ ID NO: 232201 - DNA, 23 bp, Artificial sequence
  SiRNA target sequence
aaaagaagagtaaagtgaaggtt

SEQ ID NO: 232202 - DNA, 23 bp, Artificial sequence
  SiRNA target sequence
aaagaagagtaaagtgaaggttg

SEQ ID NO: 232203 - DNA, 23 bp, Artificial sequence
  SiRNA target sequence
aagaagagtaaagtgaaggttgg

SEQ ID NO: 232204 - DNA, 23 bp, Artificial sequence
  SiRNA target sequence
agaagagtaaagtgaaggttgga

SEQ ID NO: 232205 - DNA, 23 bp, Artificial sequence
  SiRNA target sequence
gaagagtaaagtgaaggttggat

SEQ ID NO: 232206 - DNA, 23 bp, Artificial sequence
  SiRNA target sequence
aagagtaaagtgaaggttggatt

SEQ ID NO: 232207 - DNA, 23 bp, Artificial sequence
  SiRNA target sequence
agagtaaagtgaaggttggattt

SEQ ID NO: 232208 - DNA, 23 bp, Artificial sequence
  SiRNA target sequence
gagtaaagtgaaggttggatttg

SEQ ID NO: 232209 - DNA, 23 bp, Artificial sequence
  SiRNA target sequence
agtaaagtgaaggttggatttgt

SEQ ID NO: 232210 - DNA, 23 bp, Artificial sequence
  SiRNA target sequence
gtaaagtgaaggttggatttgtt

SEQ ID NO: 232211 - DNA, 23 bp, Artificial sequence
  SiRNA target sequence
taaagtgaaggttggatttgttg

SEQ ID NO: 232212 - DNA, 23 bp, Artificial sequence
  SiRNA target sequence
aaagtgaaggttggatttgttga

SEQ ID NO: 232213 - DNA, 23 bp, Artificial sequence
  SiRNA target sequence
aagtgaaggttggatttgttgat

SEQ ID NO: 232214 - DNA, 23 bp, Artificial sequence
  SiRNA target sequence
agtgaaggttggatttgttgatg

SEQ ID NO: 232215 - DNA, 23 bp, Artificial sequence
  SiRNA target sequence
gtgaaggttggatttgttgatgg

SEQ ID NO: 232216 - DNA, 23 bp, Artificial sequence
  SiRNA target sequence
tgaaggttggatttgttgatgga

SEQ ID NO: 232217 - DNA, 23 bp, Artificial sequence
  SiRNA target sequence
gaaggttggatttgttgatggac

SEQ ID NO: 232218 - DNA, 23 bp, Artificial sequence
  SiRNA target sequence
aaggttggatttgttgatggact

SEQ ID NO: 232219 - DNA, 23 bp, Artificial sequence
  SiRNA target sequence
aggttggatttgttgatggactt

SEQ ID NO: 232220 - DNA, 23 bp, Artificial sequence
  SiRNA target sequence
ggttggatttgttgatggactta

SEQ ID NO: 232221 - DNA, 23 bp, Artificial sequence
  SiRNA target sequence
gttggatttgttgatggacttat

SEQ ID NO: 232222 - DNA, 23 bp, Artificial sequence
  SiRNA target sequence
ttggatttgttgatggacttatt

SEQ ID NO: 232223 - DNA, 23 bp, Artificial sequence
  SiRNA target sequence
tggatttgttgatggacttattg

SEQ ID NO: 232224 - DNA, 23 bp, Artificial sequence
  SiRNA target sequence
ggatttgttgatggacttattga

SEQ ID NO: 232225 - DNA, 23 bp, Artificial sequence
  SiRNA target sequence
gatttgttgatggacttattgag

SEQ ID NO: 232226 - DNA, 23 bp, Artificial sequence
  SiRNA target sequence
atttgttgatggacttattgaga

SEQ ID NO: 232227 - DNA, 23 bp, Artificial sequence
  SiRNA target sequence
tttgttgatggacttattgagat

SEQ ID NO: 232228 - DNA, 23 bp, Artificial sequence
  SiRNA target sequence
ttgttgatggacttattgagatg

SEQ ID NO: 232229 - DNA, 23 bp, Artificial sequence
  SiRNA target sequence
tgttgatggacttattgagatga

SEQ ID NO: 232230 - DNA, 23 bp, Artificial sequence
  SiRNA target sequence
gttgatggacttattgagatgag

SEQ ID NO: 232231 - DNA, 23 bp, Artificial sequence
  SiRNA target sequence
ttgatggacttattgagatgagt

SEQ ID NO: 232232 - DNA, 23 bp, Artificial sequence
  SiRNA target sequence
tgatggacttattgagatgagta

SEQ ID NO: 232233 - DNA, 23 bp, Artificial sequence
  SiRNA target sequence
gatggacttattgagatgagtaa

SEQ ID NO: 232234 - DNA, 23 bp, Artificial sequence
  SiRNA target sequence
atggacttattgagatgagtaaa

SEQ ID NO: 232235 - DNA, 23 bp, Artificial sequence
  SiRNA target sequence
tggacttattgagatgagtaaat

SEQ ID NO: 232236 - DNA, 23 bp, Artificial sequence
  SiRNA target sequence
ggacttattgagatgagtaaatc

SEQ ID NO: 232237 - DNA, 23 bp, Artificial sequence
  SiRNA target sequence
gacttattgagatgagtaaatct

SEQ ID NO: 232238 - DNA, 23 bp, Artificial sequence
  SiRNA target sequence
acttattgagatgagtaaatcta

SEQ ID NO: 232239 - DNA, 23 bp, Artificial sequence
  SiRNA target sequence
cttattgagatgagtaaatctaa

SEQ ID NO: 232240 - DNA, 23 bp, Artificial sequence
  SiRNA target sequence
ttattgagatgagtaaatctaaa

SEQ ID NO: 232241 - DNA, 23 bp, Artificial sequence
  SiRNA target sequence
tattgagatgagtaaatctaaac

SEQ ID NO: 232242 - DNA, 23 bp, Artificial sequence
  SiRNA target sequence
attgagatgagtaaatctaaact

SEQ ID NO: 232243 - DNA, 23 bp, Artificial sequence
  SiRNA target sequence
ttgagatgagtaaatctaaacta

SEQ ID NO: 232244 - DNA, 23 bp, Artificial sequence
  SiRNA target sequence
tgagatgagtaaatctaaactac

SEQ ID NO: 232245 - DNA, 23 bp, Artificial sequence
  SiRNA target sequence
gagatgagtaaatctaaactact

SEQ ID NO: 232246 - DNA, 23 bp, Artificial sequence
  SiRNA target sequence
agatgagtaaatctaaactactg

SEQ ID NO: 232247 - DNA, 23 bp, Artificial sequence
  SiRNA target sequence
gatgagtaaatctaaactactgt

SEQ ID NO: 232248 - DNA, 23 bp, Artificial sequence
  SiRNA target sequence
atgagtaaatctaaactactgtt

SEQ ID NO: 232249 - DNA, 23 bp, Artificial sequence
  SiRNA target sequence
tgagtaaatctaaactactgttg

SEQ ID NO: 232250 - DNA, 23 bp, Artificial sequence
  SiRNA target sequence
gagtaaatctaaactactgttga

SEQ ID NO: 232251 - DNA, 23 bp, Artificial sequence
  SiRNA target sequence
agtaaatctaaactactgttgaa

SEQ ID NO: 232252 - DNA, 23 bp, Artificial sequence
  SiRNA target sequence
gtaaatctaaactactgttgaat

SEQ ID NO: 232253 - DNA, 23 bp, Artificial sequence
  SiRNA target sequence
taaatctaaactactgttgaata

SEQ ID NO: 232254 - DNA, 23 bp, Artificial sequence
  SiRNA target sequence
aaatctaaactactgttgaatat

SEQ ID NO: 232255 - DNA, 23 bp, Artificial sequence
  SiRNA target sequence
aatctaaactactgttgaatatg

SEQ ID NO: 232256 - DNA, 23 bp, Artificial sequence
  SiRNA target sequence
atctaaactactgttgaatatgt

SEQ ID NO: 232257 - DNA, 23 bp, Artificial sequence
  SiRNA target sequence
tctaaactactgttgaatatgtc

SEQ ID NO: 232258 - DNA, 23 bp, Artificial sequence
  SiRNA target sequence
ctaaactactgttgaatatgtca

SEQ ID NO: 232259 - DNA, 23 bp, Artificial sequence
  SiRNA target sequence
taaactactgttgaatatgtcat

SEQ ID NO: 232260 - DNA, 23 bp, Artificial sequence
  SiRNA target sequence
aaactactgttgaatatgtcatt

SEQ ID NO: 232261 - DNA, 23 bp, Artificial sequence
  SiRNA target sequence
aactactgttgaatatgtcatta

SEQ ID NO: 232262 - DNA, 23 bp, Artificial sequence
  SiRNA target sequence
actactgttgaatatgtcattag

SEQ ID NO: 232263 - DNA, 23 bp, Artificial sequence
  SiRNA target sequence
ctactgttgaatatgtcattagt

SEQ ID NO: 232264 - DNA, 23 bp, Artificial sequence
  SiRNA target sequence
tactgttgaatatgtcattagtc

SEQ ID NO: 232265 - DNA, 23 bp, Artificial sequence
  SiRNA target sequence
actgttgaatatgtcattagtcg

SEQ ID NO: 232266 - DNA, 23 bp, Artificial sequence
  SiRNA target sequence
ctgttgaatatgtcattagtcgt

SEQ ID NO: 232267 - DNA, 23 bp, Artificial sequence
  SiRNA target sequence
tgttgaatatgtcattagtcgta

SEQ ID NO: 232268 - DNA, 23 bp, Artificial sequence
  SiRNA target sequence
gttgaatatgtcattagtcgtat

SEQ ID NO: 232269 - DNA, 23 bp, Artificial sequence
  SiRNA target sequence
ttgaatatgtcattagtcgtatt

SEQ ID NO: 232270 - DNA, 23 bp, Artificial sequence
  SiRNA target sequence
tgaatatgtcattagtcgtatta

SEQ ID NO: 232271 - DNA, 23 bp, Artificial sequence
  SiRNA target sequence
gaatatgtcattagtcgtattat

SEQ ID NO: 232272 - DNA, 23 bp, Artificial sequence
  SiRNA target sequence
aatatgtcattagtcgtattatt

SEQ ID NO: 232273 - DNA, 23 bp, Artificial sequence
  SiRNA target sequence
atatgtcattagtcgtattattt

SEQ ID NO: 232274 - DNA, 23 bp, Artificial sequence
  SiRNA target sequence
tatgtcattagtcgtattatttt

SEQ ID NO: 232275 - DNA, 23 bp, Artificial sequence
  SiRNA target sequence
atgtcattagtcgtattatttta

SEQ ID NO: 232276 - DNA, 23 bp, Artificial sequence
  SiRNA target sequence
tgtcattagtcgtattattttat

SEQ ID NO: 232277 - DNA, 23 bp, Artificial sequence
  SiRNA target sequence
gtcattagtcgtattattttatg

SEQ ID NO: 232278 - DNA, 23 bp, Artificial sequence
  SiRNA target sequence
tcattagtcgtattattttatgc

SEQ ID NO: 232279 - DNA, 23 bp, Artificial sequence
  SiRNA target sequence
cattagtcgtattattttatgct

SEQ ID NO: 232280 - DNA, 23 bp, Artificial sequence
  SiRNA target sequence
attagtcgtattattttatgctg

SEQ ID NO: 232281 - DNA, 23 bp, Artificial sequence
  SiRNA target sequence
ttagtcgtattattttatgctgt

SEQ ID NO: 232282 - DNA, 23 bp, Artificial sequence
  SiRNA target sequence
tagtcgtattattttatgctgtt

SEQ ID NO: 232283 - DNA, 23 bp, Artificial sequence
  SiRNA target sequence
agtcgtattattttatgctgttt

SEQ ID NO: 232284 - DNA, 23 bp, Artificial sequence
  SiRNA target sequence
gtcgtattattttatgctgtttc

SEQ ID NO: 232285 - DNA, 23 bp, Artificial sequence
  SiRNA target sequence
tcgtattattttatgctgtttct

SEQ ID NO: 232286 - DNA, 23 bp, Artificial sequence
  SiRNA target sequence
cgtattattttatgctgtttcta

SEQ ID NO: 232287 - DNA, 23 bp, Artificial sequence
  SiRNA target sequence
gtattattttatgctgtttctac

SEQ ID NO: 232288 - DNA, 23 bp, Artificial sequence
  SiRNA target sequence
tattattttatgctgtttctacg

SEQ ID NO: 232289 - DNA, 23 bp, Artificial sequence
  SiRNA target sequence
attattttatgctgtttctacga

SEQ ID NO: 232290 - DNA, 23 bp, Artificial sequence
  SiRNA target sequence
ttattttatgctgtttctacgaa

SEQ ID NO: 232291 - DNA, 23 bp, Artificial sequence
  SiRNA target sequence
tattttatgctgtttctacgaat

SEQ ID NO: 232292 - DNA, 23 bp, Artificial sequence
  SiRNA target sequence
attttatgctgtttctacgaata

SEQ ID NO: 232293 - DNA, 23 bp, Artificial sequence
  SiRNA target sequence
ttttatgctgtttctacgaatat

SEQ ID NO: 232294 - DNA, 23 bp, Artificial sequence
  SiRNA target sequence
tttatgctgtttctacgaatatt

SEQ ID NO: 232295 - DNA, 23 bp, Artificial sequence
  SiRNA target sequence
ttatgctgtttctacgaatatta

SEQ ID NO: 232296 - DNA, 23 bp, Artificial sequence
  SiRNA target sequence
tatgctgtttctacgaatattat

SEQ ID NO: 232297 - DNA, 23 bp, Artificial sequence
  SiRNA target sequence
atgctgtttctacgaatattatt

SEQ ID NO: 232298 - DNA, 23 bp, Artificial sequence
  SiRNA target sequence
tgctgtttctacgaatattattg

SEQ ID NO: 232299 - DNA, 23 bp, Artificial sequence
  SiRNA target sequence
gctgtttctacgaatattattga

SEQ ID NO: 232300 - DNA, 23 bp, Artificial sequence
  SiRNA target sequence
ctgtttctacgaatattattgag

SEQ ID NO: 232301 - DNA, 23 bp, Artificial sequence
  SiRNA target sequence
tgtttctacgaatattattgagt

SEQ ID NO: 232302 - DNA, 23 bp, Artificial sequence
  SiRNA target sequence
gtttctacgaatattattgagtc

SEQ ID NO: 232303 - DNA, 23 bp, Artificial sequence
  SiRNA target sequence
tttctacgaatattattgagtca

SEQ ID NO: 232304 - DNA, 23 bp, Artificial sequence
  SiRNA target sequence
ttctacgaatattattgagtcag

SEQ ID NO: 232305 - DNA, 23 bp, Artificial sequence
  SiRNA target sequence
tctacgaatattattgagtcagc

SEQ ID NO: 232306 - DNA, 23 bp, Artificial sequence
  SiRNA target sequence
ctacgaatattattgagtcagct

SEQ ID NO: 232307 - DNA, 23 bp, Artificial sequence
  SiRNA target sequence
tacgaatattattgagtcagctt

SEQ ID NO: 232308 - DNA, 23 bp, Artificial sequence
  SiRNA target sequence
acgaatattattgagtcagctta

SEQ ID NO: 232309 - DNA, 23 bp, Artificial sequence
  SiRNA target sequence
cgaatattattgagtcagcttat

SEQ ID NO: 232310 - DNA, 23 bp, Artificial sequence
  SiRNA target sequence
gaatattattgagtcagcttata

SEQ ID NO: 232311 - DNA, 23 bp, Artificial sequence
  SiRNA target sequence
aatattattgagtcagcttataa

SEQ ID NO: 232312 - DNA, 23 bp, Artificial sequence
  SiRNA target sequence
atattattgagtcagcttataaa

SEQ ID NO: 232313 - DNA, 23 bp, Artificial sequence
  SiRNA target sequence
tattattgagtcagcttataaat

SEQ ID NO: 232314 - DNA, 23 bp, Artificial sequence
  SiRNA target sequence
attattgagtcagcttataaatc

SEQ ID NO: 232315 - DNA, 23 bp, Artificial sequence
  SiRNA target sequence
ttattgagtcagcttataaatct

SEQ ID NO: 232316 - DNA, 23 bp, Artificial sequence
  SiRNA target sequence
tattgagtcagcttataaatctg

SEQ ID NO: 232317 - DNA, 23 bp, Artificial sequence
  SiRNA target sequence
attgagtcagcttataaatctgc

SEQ ID NO: 232318 - DNA, 23 bp, Artificial sequence
  SiRNA target sequence
ttgagtcagcttataaatctgct

SEQ ID NO: 232319 - DNA, 23 bp, Artificial sequence
  SiRNA target sequence
tgagtcagcttataaatctgctt

SEQ ID NO: 232320 - DNA, 23 bp, Artificial sequence
  SiRNA target sequence
gagtcagcttataaatctgcttt

SEQ ID NO: 232321 - DNA, 23 bp, Artificial sequence
  SiRNA target sequence
agtcagcttataaatctgcttta

SEQ ID NO: 232322 - DNA, 23 bp, Artificial sequence
  SiRNA target sequence
gtcagcttataaatctgctttag

SEQ ID NO: 232323 - DNA, 23 bp, Artificial sequence
  SiRNA target sequence
tcagcttataaatctgctttagc

SEQ ID NO: 232324 - DNA, 23 bp, Artificial sequence
  SiRNA target sequence
cagcttataaatctgctttagct

SEQ ID NO: 232325 - DNA, 23 bp, Artificial sequence
  SiRNA target sequence
agcttataaatctgctttagctg

SEQ ID NO: 232326 - DNA, 23 bp, Artificial sequence
  SiRNA target sequence
gcttataaatctgctttagctgt

SEQ ID NO: 232327 - DNA, 23 bp, Artificial sequence
  SiRNA target sequence
cttataaatctgctttagctgtc

SEQ ID NO: 232328 - DNA, 23 bp, Artificial sequence
  SiRNA target sequence
ttataaatctgctttagctgtcg

SEQ ID NO: 232329 - DNA, 23 bp, Artificial sequence
  SiRNA target sequence
tataaatctgctttagctgtcgg

SEQ ID NO: 232330 - DNA, 23 bp, Artificial sequence
  SiRNA target sequence
ataaatctgctttagctgtcggt

SEQ ID NO: 232331 - DNA, 23 bp, Artificial sequence
  SiRNA target sequence
taaatctgctttagctgtcggtg

SEQ ID NO: 232332 - DNA, 23 bp, Artificial sequence
  SiRNA target sequence
aaatctgctttagctgtcggtgc

SEQ ID NO: 232333 - DNA, 23 bp, Artificial sequence
  SiRNA target sequence
aatctgctttagctgtcggtgct

SEQ ID NO: 232334 - DNA, 23 bp, Artificial sequence
  SiRNA target sequence
atctgctttagctgtcggtgcta

SEQ ID NO: 232335 - DNA, 23 bp, Artificial sequence
  SiRNA target sequence
tctgctttagctgtcggtgctaa

SEQ ID NO: 232336 - DNA, 23 bp, Artificial sequence
  SiRNA target sequence
ctgctttagctgtcggtgctaat

SEQ ID NO: 232337 - DNA, 23 bp, Artificial sequence
  SiRNA target sequence
tgctttagctgtcggtgctaatg

SEQ ID NO: 232338 - DNA, 23 bp, Artificial sequence
  SiRNA target sequence
gctttagctgtcggtgctaatga

SEQ ID NO: 232339 - DNA, 23 bp, Artificial sequence
  SiRNA target sequence
ctttagctgtcggtgctaatgaa

SEQ ID NO: 232340 - DNA, 23 bp, Artificial sequence
  SiRNA target sequence
tttagctgtcggtgctaatgaaa

SEQ ID NO: 232341 - DNA, 23 bp, Artificial sequence
  SiRNA target sequence
ttagctgtcggtgctaatgaaac

SEQ ID NO: 232342 - DNA, 23 bp, Artificial sequence
  SiRNA target sequence
tagctgtcggtgctaatgaaact

SEQ ID NO: 232343 - DNA, 23 bp, Artificial sequence
  SiRNA target sequence
agctgtcggtgctaatgaaactg

SEQ ID NO: 232344 - DNA, 23 bp, Artificial sequence
  SiRNA target sequence
gctgtcggtgctaatgaaactgg

SEQ ID NO: 232345 - DNA, 23 bp, Artificial sequence
  SiRNA target sequence
ctgtcggtgctaatgaaactggt

SEQ ID NO: 232346 - DNA, 23 bp, Artificial sequence
  SiRNA target sequence
tgtcggtgctaatgaaactggtg

SEQ ID NO: 232347 - DNA, 23 bp, Artificial sequence
  SiRNA target sequence
gtcggtgctaatgaaactggtga

SEQ ID NO: 232348 - DNA, 23 bp, Artificial sequence
  SiRNA target sequence
tcggtgctaatgaaactggtgag

SEQ ID NO: 232349 - DNA, 23 bp, Artificial sequence
  SiRNA target sequence
cggtgctaatgaaactggtgagg

SEQ ID NO: 232350 - DNA, 23 bp, Artificial sequence
  SiRNA target sequence
ggtgctaatgaaactggtgaggc

SEQ ID NO: 232351 - DNA, 23 bp, Artificial sequence
  SiRNA target sequence
gtgctaatgaaactggtgaggca

SEQ ID NO: 232352 - DNA, 23 bp, Artificial sequence
  SiRNA target sequence
tgctaatgaaactggtgaggcaa

SEQ ID NO: 232353 - DNA, 23 bp, Artificial sequence
  SiRNA target sequence
gctaatgaaactggtgaggcaaa

SEQ ID NO: 232354 - DNA, 23 bp, Artificial sequence
  SiRNA target sequence
ctaatgaaactggtgaggcaaaa

SEQ ID NO: 232355 - DNA, 23 bp, Artificial sequence
  SiRNA target sequence
taatgaaactggtgaggcaaaat

SEQ ID NO: 232356 - DNA, 23 bp, Artificial sequence
  SiRNA target sequence
aatgaaactggtgaggcaaaatc

SEQ ID NO: 232357 - DNA, 23 bp, Artificial sequence
  SiRNA target sequence
atgaaactggtgaggcaaaatct

SEQ ID NO: 232358 - DNA, 23 bp, Artificial sequence
  SiRNA target sequence
tgaaactggtgaggcaaaatcta

SEQ ID NO: 232359 - DNA, 23 bp, Artificial sequence
  SiRNA target sequence
gaaactggtgaggcaaaatctac

SEQ ID NO: 232360 - DNA, 23 bp, Artificial sequence
  SiRNA target sequence
aaactggtgaggcaaaatctacc

SEQ ID NO: 232361 - DNA, 23 bp, Artificial sequence
  SiRNA target sequence
aactggtgaggcaaaatctacct

SEQ ID NO: 232362 - DNA, 23 bp, Artificial sequence
  SiRNA target sequence
actggtgaggcaaaatctaccta

SEQ ID NO: 232363 - DNA, 23 bp, Artificial sequence
  SiRNA target sequence
ctggtgaggcaaaatctacctat

SEQ ID NO: 232364 - DNA, 23 bp, Artificial sequence
  SiRNA target sequence
tggtgaggcaaaatctacctatg

SEQ ID NO: 232365 - DNA, 23 bp, Artificial sequence
  SiRNA target sequence
ggtgaggcaaaatctacctatgc

SEQ ID NO: 232366 - DNA, 23 bp, Artificial sequence
  SiRNA target sequence
gtgaggcaaaatctacctatgct

SEQ ID NO: 232367 - DNA, 23 bp, Artificial sequence
  SiRNA target sequence
tgaggcaaaatctacctatgctt

SEQ ID NO: 232368 - DNA, 23 bp, Artificial sequence
  SiRNA target sequence
gaggcaaaatctacctatgcttc

SEQ ID NO: 232369 - DNA, 23 bp, Artificial sequence
  SiRNA target sequence
aggcaaaatctacctatgcttca

SEQ ID NO: 232370 - DNA, 23 bp, Artificial sequence
  SiRNA target sequence
ggcaaaatctacctatgcttcaa

SEQ ID NO: 232371 - DNA, 23 bp, Artificial sequence
  SiRNA target sequence
gcaaaatctacctatgcttcaat

SEQ ID NO: 232372 - DNA, 23 bp, Artificial sequence
  SiRNA target sequence
caaaatctacctatgcttcaatt

SEQ ID NO: 232373 - DNA, 23 bp, Artificial sequence
  SiRNA target sequence
aaaatctacctatgcttcaattt

SEQ ID NO: 232374 - DNA, 23 bp, Artificial sequence
  SiRNA target sequence
aaatctacctatgcttcaattta

SEQ ID NO: 232375 - DNA, 23 bp, Artificial sequence
  SiRNA target sequence
aatctacctatgcttcaatttat

SEQ ID NO: 232376 - DNA, 23 bp, Artificial sequence
  SiRNA target sequence
atctacctatgcttcaatttata

SEQ ID NO: 232377 - DNA, 23 bp, Artificial sequence
  SiRNA target sequence
tctacctatgcttcaatttatac

SEQ ID NO: 232378 - DNA, 23 bp, Artificial sequence
  SiRNA target sequence
ctacctatgcttcaatttataca

SEQ ID NO: 232379 - DNA, 23 bp, Artificial sequence
  SiRNA target sequence
tacctatgcttcaatttatacat

SEQ ID NO: 232380 - DNA, 23 bp, Artificial sequence
  SiRNA target sequence
acctatgcttcaatttatacatc

SEQ ID NO: 232381 - DNA, 23 bp, Artificial sequence
  SiRNA target sequence
cctatgcttcaatttatacatca

SEQ ID NO: 232382 - DNA, 23 bp, Artificial sequence
  SiRNA target sequence
ctatgcttcaatttatacatcaa

SEQ ID NO: 232383 - DNA, 23 bp, Artificial sequence
  SiRNA target sequence
tatgcttcaatttatacatcaat

SEQ ID NO: 232384 - DNA, 23 bp, Artificial sequence
  SiRNA target sequence
atgcttcaatttatacatcaatt

SEQ ID NO: 232385 - DNA, 23 bp, Artificial sequence
  SiRNA target sequence
tgcttcaatttatacatcaattg

SEQ ID NO: 232386 - DNA, 23 bp, Artificial sequence
  SiRNA target sequence
gcttcaatttatacatcaattga

SEQ ID NO: 232387 - DNA, 23 bp, Artificial sequence
  SiRNA target sequence
cttcaatttatacatcaattgaa

SEQ ID NO: 232388 - DNA, 23 bp, Artificial sequence
  SiRNA target sequence
ttcaatttatacatcaattgaac

SEQ ID NO: 232389 - DNA, 23 bp, Artificial sequence
  SiRNA target sequence
tcaatttatacatcaattgaaca

SEQ ID NO: 232390 - DNA, 23 bp, Artificial sequence
  SiRNA target sequence
caatttatacatcaattgaacaa

SEQ ID NO: 232391 - DNA, 23 bp, Artificial sequence
  SiRNA target sequence
aatttatacatcaattgaacaat

SEQ ID NO: 232392 - DNA, 23 bp, Artificial sequence
  SiRNA target sequence
atttatacatcaattgaacaatc

SEQ ID NO: 232393 - DNA, 23 bp, Artificial sequence
  SiRNA target sequence
tttatacatcaattgaacaatct

SEQ ID NO: 232394 - DNA, 23 bp, Artificial sequence
  SiRNA target sequence
ttatacatcaattgaacaatctg

SEQ ID NO: 232395 - DNA, 23 bp, Artificial sequence
  SiRNA target sequence
tatacatcaattgaacaatctgg

SEQ ID NO: 232396 - DNA, 23 bp, Artificial sequence
  SiRNA target sequence
atacatcaattgaacaatctgga

SEQ ID NO: 232397 - DNA, 23 bp, Artificial sequence
  SiRNA target sequence
tacatcaattgaacaatctggag

SEQ ID NO: 232398 - DNA, 23 bp, Artificial sequence
  SiRNA target sequence
acatcaattgaacaatctggagt

SEQ ID NO: 232399 - DNA, 23 bp, Artificial sequence
  SiRNA target sequence
catcaattgaacaatctggagtt

SEQ ID NO: 232400 - DNA, 23 bp, Artificial sequence
  SiRNA target sequence
atcaattgaacaatctggagttg

SEQ ID NO: 232401 - DNA, 23 bp, Artificial sequence
  SiRNA target sequence
tcaattgaacaatctggagttgc

SEQ ID NO: 232402 - DNA, 23 bp, Artificial sequence
  SiRNA target sequence
caattgaacaatctggagttgct

SEQ ID NO: 232403 - DNA, 23 bp, Artificial sequence
  SiRNA target sequence
aattgaacaatctggagttgctg

SEQ ID NO: 232404 - DNA, 23 bp, Artificial sequence
  SiRNA target sequence
attgaacaatctggagttgctgt

SEQ ID NO: 232405 - DNA, 23 bp, Artificial sequence
  SiRNA target sequence
ttgaacaatctggagttgctgtt

SEQ ID NO: 232406 - DNA, 23 bp, Artificial sequence
  SiRNA target sequence
tgaacaatctggagttgctgtta

SEQ ID NO: 232407 - DNA, 23 bp, Artificial sequence
  SiRNA target sequence
gaacaatctggagttgctgttat

SEQ ID NO: 232408 - DNA, 23 bp, Artificial sequence
  SiRNA target sequence
aacaatctggagttgctgttatt

SEQ ID NO: 232409 - DNA, 23 bp, Artificial sequence
  SiRNA target sequence
acaatctggagttgctgttattg

SEQ ID NO: 232410 - DNA, 23 bp, Artificial sequence
  SiRNA target sequence
caatctggagttgctgttattgt

SEQ ID NO: 232411 - DNA, 23 bp, Artificial sequence
  SiRNA target sequence
aatctggagttgctgttattgtc

SEQ ID NO: 232412 - DNA, 23 bp, Artificial sequence
  SiRNA target sequence
atctggagttgctgttattgtca

SEQ ID NO: 232413 - DNA, 23 bp, Artificial sequence
  SiRNA target sequence
tctggagttgctgttattgtcat

SEQ ID NO: 232414 - DNA, 23 bp, Artificial sequence
  SiRNA target sequence
ctggagttgctgttattgtcatg

SEQ ID NO: 232415 - DNA, 23 bp, Artificial sequence
  SiRNA target sequence
tggagttgctgttattgtcatga

SEQ ID NO: 232416 - DNA, 23 bp, Artificial sequence
  SiRNA target sequence
ggagttgctgttattgtcatgat

SEQ ID NO: 232417 - DNA, 23 bp, Artificial sequence
  SiRNA target sequence
gagttgctgttattgtcatgatt

SEQ ID NO: 232418 - DNA, 23 bp, Artificial sequence
  SiRNA target sequence
agttgctgttattgtcatgattt

SEQ ID NO: 232419 - DNA, 23 bp, Artificial sequence
  SiRNA target sequence
gttgctgttattgtcatgatttt

SEQ ID NO: 232420 - DNA, 23 bp, Artificial sequence
  SiRNA target sequence
ttgctgttattgtcatgattttg

SEQ ID NO: 232421 - DNA, 23 bp, Artificial sequence
  SiRNA target sequence
tgctgttattgtcatgattttgc

SEQ ID NO: 232422 - DNA, 23 bp, Artificial sequence
  SiRNA target sequence
gctgttattgtcatgattttgct

SEQ ID NO: 232423 - DNA, 23 bp, Artificial sequence
  SiRNA target sequence
ctgttattgtcatgattttgcta

SEQ ID NO: 232424 - DNA, 23 bp, Artificial sequence
  SiRNA target sequence
tgttattgtcatgattttgctac

SEQ ID NO: 232425 - DNA, 23 bp, Artificial sequence
  SiRNA target sequence
gttattgtcatgattttgctact

SEQ ID NO: 232426 - DNA, 23 bp, Artificial sequence
  SiRNA target sequence
ttattgtcatgattttgctactt

SEQ ID NO: 232427 - DNA, 23 bp, Artificial sequence
  SiRNA target sequence
tattgtcatgattttgctactta

SEQ ID NO: 232428 - DNA, 23 bp, Artificial sequence
  SiRNA target sequence
attgtcatgattttgctacttac

SEQ ID NO: 232429 - DNA, 23 bp, Artificial sequence
  SiRNA target sequence
ttgtcatgattttgctacttacc

SEQ ID NO: 232430 - DNA, 23 bp, Artificial sequence
  SiRNA target sequence
tgtcatgattttgctacttaccc

SEQ ID NO: 232431 - DNA, 23 bp, Artificial sequence
  SiRNA target sequence
gtcatgattttgctacttacccc

SEQ ID NO: 232432 - DNA, 23 bp, Artificial sequence
  SiRNA target sequence
tcatgattttgctacttacccct

SEQ ID NO: 232433 - DNA, 23 bp, Artificial sequence
  SiRNA target sequence
catgattttgctacttacccctt

SEQ ID NO: 232434 - DNA, 23 bp, Artificial sequence
  SiRNA target sequence
atgattttgctacttaccccttt

SEQ ID NO: 232435 - DNA, 23 bp, Artificial sequence
  SiRNA target sequence
tgattttgctacttacccctttt

SEQ ID NO: 232436 - DNA, 23 bp, Artificial sequence
  SiRNA target sequence
gattttgctacttaccccttttc

SEQ ID NO: 232437 - DNA, 23 bp, Artificial sequence
  SiRNA target sequence
attttgctacttaccccttttcc

SEQ ID NO: 232438 - DNA, 23 bp, Artificial sequence
  SiRNA target sequence
ttttgctacttaccccttttcca

SEQ ID NO: 232439 - DNA, 23 bp, Artificial sequence
  SiRNA target sequence
tttgctacttaccccttttccaa

SEQ ID NO: 232440 - DNA, 23 bp, Artificial sequence
  SiRNA target sequence
ttgctacttaccccttttccaag

SEQ ID NO: 232441 - DNA, 23 bp, Artificial sequence
  SiRNA target sequence
tgctacttaccccttttccaagg

SEQ ID NO: 232442 - DNA, 23 bp, Artificial sequence
  SiRNA target sequence
gctacttaccccttttccaaggc

SEQ ID NO: 232443 - DNA, 23 bp, Artificial sequence
  SiRNA target sequence
ctacttaccccttttccaaggct

SEQ ID NO: 232444 - DNA, 23 bp, Artificial sequence
  SiRNA target sequence
tacttaccccttttccaaggctt

SEQ ID NO: 232445 - DNA, 23 bp, Artificial sequence
  SiRNA target sequence
acttaccccttttccaaggctta

SEQ ID NO: 232446 - DNA, 23 bp, Artificial sequence
  SiRNA target sequence
cttaccccttttccaaggcttat

SEQ ID NO: 232447 - DNA, 23 bp, Artificial sequence
  SiRNA target sequence
ttaccccttttccaaggcttatt

SEQ ID NO: 232448 - DNA, 23 bp, Artificial sequence
  SiRNA target sequence
taccccttttccaaggcttatta

SEQ ID NO: 232449 - DNA, 23 bp, Artificial sequence
  SiRNA target sequence
accccttttccaaggcttattaa

SEQ ID NO: 232450 - DNA, 23 bp, Artificial sequence
  SiRNA target sequence
ccccttttccaaggcttattaaa

SEQ ID NO: 232451 - DNA, 23 bp, Artificial sequence
  SiRNA target sequence
cccttttccaaggcttattaaaa

SEQ ID NO: 232452 - DNA, 23 bp, Artificial sequence
  SiRNA target sequence
ccttttccaaggcttattaaaac

SEQ ID NO: 232453 - DNA, 23 bp, Artificial sequence
  SiRNA target sequence
cttttccaaggcttattaaaaca

SEQ ID NO: 232454 - DNA, 23 bp, Artificial sequence
  SiRNA target sequence
ttttccaaggcttattaaaacaa

SEQ ID NO: 232455 - DNA, 23 bp, Artificial sequence
  SiRNA target sequence
tttccaaggcttattaaaacaaa

SEQ ID NO: 232456 - DNA, 23 bp, Artificial sequence
  SiRNA target sequence
ttccaaggcttattaaaacaaaa

SEQ ID NO: 232457 - DNA, 23 bp, Artificial sequence
  SiRNA target sequence
tccaaggcttattaaaacaaaag

SEQ ID NO: 232458 - DNA, 23 bp, Artificial sequence
  SiRNA target sequence
ccaaggcttattaaaacaaaagg

SEQ ID NO: 232459 - DNA, 23 bp, Artificial sequence
  SiRNA target sequence
caaggcttattaaaacaaaagga

SEQ ID NO: 232460 - DNA, 23 bp, Artificial sequence
  SiRNA target sequence
aaggcttattaaaacaaaaggat

SEQ ID NO: 232461 - DNA, 23 bp, Artificial sequence
  SiRNA target sequence
aggcttattaaaacaaaaggatg

SEQ ID NO: 232462 - DNA, 23 bp, Artificial sequence
  SiRNA target sequence
ggcttattaaaacaaaaggatgg

SEQ ID NO: 232463 - DNA, 23 bp, Artificial sequence
  SiRNA target sequence
gcttattaaaacaaaaggatgga

SEQ ID NO: 232464 - DNA, 23 bp, Artificial sequence
  SiRNA target sequence
cttattaaaacaaaaggatggat

SEQ ID NO: 232465 - DNA, 23 bp, Artificial sequence
  SiRNA target sequence
ttattaaaacaaaaggatggatt

SEQ ID NO: 232466 - DNA, 23 bp, Artificial sequence
  SiRNA target sequence
tattaaaacaaaaggatggatta

SEQ ID NO: 232467 - DNA, 23 bp, Artificial sequence
  SiRNA target sequence
attaaaacaaaaggatggattac

SEQ ID NO: 232468 - DNA, 23 bp, Artificial sequence
  SiRNA target sequence
ttaaaacaaaaggatggattaca

SEQ ID NO: 232469 - DNA, 23 bp, Artificial sequence
  SiRNA target sequence
taaaacaaaaggatggattacaa

SEQ ID NO: 232470 - DNA, 23 bp, Artificial sequence
  SiRNA target sequence
aaaacaaaaggatggattacaat

SEQ ID NO: 232471 - DNA, 23 bp, Artificial sequence
  SiRNA target sequence
aaacaaaaggatggattacaata

SEQ ID NO: 232472 - DNA, 23 bp, Artificial sequence
  SiRNA target sequence
aacaaaaggatggattacaatag

SEQ ID NO: 232473 - DNA, 23 bp, Artificial sequence
  SiRNA target sequence
acaaaaggatggattacaatagc

SEQ ID NO: 232474 - DNA, 23 bp, Artificial sequence
  SiRNA target sequence
caaaaggatggattacaatagcc

SEQ ID NO: 232475 - DNA, 23 bp, Artificial sequence
  SiRNA target sequence
aaaaggatggattacaatagcca

SEQ ID NO: 232476 - DNA, 23 bp, Artificial sequence
  SiRNA target sequence
aaaggatggattacaatagccat

SEQ ID NO: 232477 - DNA, 23 bp, Artificial sequence
  SiRNA target sequence
aaggatggattacaatagccatt

SEQ ID NO: 232478 - DNA, 23 bp, Artificial sequence
  SiRNA target sequence
aggatggattacaatagccattc

SEQ ID NO: 232479 - DNA, 23 bp, Artificial sequence
  SiRNA target sequence
ggatggattacaatagccattct

SEQ ID NO: 232480 - DNA, 23 bp, Artificial sequence
  SiRNA target sequence
gatggattacaatagccattcta

SEQ ID NO: 232481 - DNA, 23 bp, Artificial sequence
  SiRNA target sequence
atggattacaatagccattctat

SEQ ID NO: 232482 - DNA, 23 bp, Artificial sequence
  SiRNA target sequence
tggattacaatagccattctatg

SEQ ID NO: 232483 - DNA, 23 bp, Artificial sequence
  SiRNA target sequence
ggattacaatagccattctatgt

SEQ ID NO: 232484 - DNA, 23 bp, Artificial sequence
  SiRNA target sequence
gattacaatagccattctatgtc

SEQ ID NO: 232485 - DNA, 23 bp, Artificial sequence
  SiRNA target sequence
attacaatagccattctatgtcc

SEQ ID NO: 232486 - DNA, 23 bp, Artificial sequence
  SiRNA target sequence
ttacaatagccattctatgtcct

SEQ ID NO: 232487 - DNA, 23 bp, Artificial sequence
  SiRNA target sequence
tacaatagccattctatgtccta

SEQ ID NO: 232488 - DNA, 23 bp, Artificial sequence
  SiRNA target sequence
acaatagccattctatgtcctat

SEQ ID NO: 232489 - DNA, 23 bp, Artificial sequence
  SiRNA target sequence
caatagccattctatgtcctatt

SEQ ID NO: 232490 - DNA, 23 bp, Artificial sequence
  SiRNA target sequence
aatagccattctatgtcctatta

SEQ ID NO: 232491 - DNA, 23 bp, Artificial sequence
  SiRNA target sequence
atagccattctatgtcctattat

SEQ ID NO: 232492 - DNA, 23 bp, Artificial sequence
  SiRNA target sequence
tagccattctatgtcctattatt

SEQ ID NO: 232493 - DNA, 23 bp, Artificial sequence
  SiRNA target sequence
agccattctatgtcctattatta

SEQ ID NO: 232494 - DNA, 23 bp, Artificial sequence
  SiRNA target sequence
gccattctatgtcctattattac

SEQ ID NO: 232495 - DNA, 23 bp, Artificial sequence
  SiRNA target sequence
ccattctatgtcctattattact

SEQ ID NO: 232496 - DNA, 23 bp, Artificial sequence
  SiRNA target sequence
cattctatgtcctattattactt

SEQ ID NO: 232497 - DNA, 23 bp, Artificial sequence
  SiRNA target sequence
attctatgtcctattattacttt

SEQ ID NO: 232498 - DNA, 23 bp, Artificial sequence
  SiRNA target sequence
ttctatgtcctattattactttt

SEQ ID NO: 232499 - DNA, 23 bp, Artificial sequence
  SiRNA target sequence
tctatgtcctattattacttttt

SEQ ID NO: 232500 - DNA, 23 bp, Artificial sequence
  SiRNA target sequence
ctatgtcctattattactttttt

SEQ ID NO: 232501 - DNA, 23 bp, Artificial sequence
  SiRNA target sequence
tatgtcctattattacttttttt

SEQ ID NO: 232502 - DNA, 23 bp, Artificial sequence
  SiRNA target sequence
atgtcctattattactttttttt

SEQ ID NO: 232503 - DNA, 23 bp, Artificial sequence
  SiRNA target sequence
tgtcctattattacttttttttc

SEQ ID NO: 232504 - DNA, 23 bp, Artificial sequence
  SiRNA target sequence
gtcctattattacttttttttct

SEQ ID NO: 232505 - DNA, 23 bp, Artificial sequence
  SiRNA target sequence
tcctattattacttttttttctg

SEQ ID NO: 232506 - DNA, 23 bp, Artificial sequence
  SiRNA target sequence
cctattattacttttttttctgc

SEQ ID NO: 232507 - DNA, 23 bp, Artificial sequence
  SiRNA target sequence
ctattattacttttttttctgct

SEQ ID NO: 232508 - DNA, 23 bp, Artificial sequence
  SiRNA target sequence
tattattacttttttttctgctt

SEQ ID NO: 232509 - DNA, 23 bp, Artificial sequence
  SiRNA target sequence
attattacttttttttctgcttt

SEQ ID NO: 232510 - DNA, 23 bp, Artificial sequence
  SiRNA target sequence
ttattacttttttttctgctttt

SEQ ID NO: 232511 - DNA, 23 bp, Artificial sequence
  SiRNA target sequence
tattacttttttttctgcttttg

SEQ ID NO: 232512 - DNA, 23 bp, Artificial sequence
  SiRNA target sequence
attacttttttttctgcttttgg

SEQ ID NO: 232513 - DNA, 23 bp, Artificial sequence
  SiRNA target sequence
ttacttttttttctgcttttggt

SEQ ID NO: 232514 - DNA, 23 bp, Artificial sequence
  SiRNA target sequence
tacttttttttctgcttttggta

SEQ ID NO: 232515 - DNA, 23 bp, Artificial sequence
  SiRNA target sequence
acttttttttctgcttttggtac

SEQ ID NO: 232516 - DNA, 23 bp, Artificial sequence
  SiRNA target sequence
cttttttttctgcttttggtact

SEQ ID NO: 232517 - DNA, 23 bp, Artificial sequence
  SiRNA target sequence
ttttttttctgcttttggtactt

SEQ ID NO: 232518 - DNA, 23 bp, Artificial sequence
  SiRNA target sequence
tttttttctgcttttggtacttt

SEQ ID NO: 232519 - DNA, 23 bp, Artificial sequence
  SiRNA target sequence
ttttttctgcttttggtactttt

SEQ ID NO: 232520 - DNA, 23 bp, Artificial sequence
  SiRNA target sequence
tttttctgcttttggtacttttg

SEQ ID NO: 232521 - DNA, 23 bp, Artificial sequence
  SiRNA target sequence
ttttctgcttttggtacttttgt

SEQ ID NO: 232522 - DNA, 23 bp, Artificial sequence
  SiRNA target sequence
tttctgcttttggtacttttgta

SEQ ID NO: 232523 - DNA, 23 bp, Artificial sequence
  SiRNA target sequence
ttctgcttttggtacttttgtat

SEQ ID NO: 232524 - DNA, 23 bp, Artificial sequence
  SiRNA target sequence
tctgcttttggtacttttgtatt

SEQ ID NO: 232525 - DNA, 23 bp, Artificial sequence
  SiRNA target sequence
ctgcttttggtacttttgtatta

SEQ ID NO: 232526 - DNA, 23 bp, Artificial sequence
  SiRNA target sequence
tgcttttggtacttttgtattag

SEQ ID NO: 232527 - DNA, 23 bp, Artificial sequence
  SiRNA target sequence
gcttttggtacttttgtattagc

SEQ ID NO: 232528 - DNA, 23 bp, Artificial sequence
  SiRNA target sequence
cttttggtacttttgtattagct

SEQ ID NO: 232529 - DNA, 23 bp, Artificial sequence
  SiRNA target sequence
ttttggtacttttgtattagctt

SEQ ID NO: 232530 - DNA, 23 bp, Artificial sequence
  SiRNA target sequence
tttggtacttttgtattagctta

SEQ ID NO: 232531 - DNA, 23 bp, Artificial sequence
  SiRNA target sequence
ttggtacttttgtattagcttat

SEQ ID NO: 232532 - DNA, 23 bp, Artificial sequence
  SiRNA target sequence
tggtacttttgtattagcttatt

SEQ ID NO: 232533 - DNA, 23 bp, Artificial sequence
  SiRNA target sequence
ggtacttttgtattagcttattt

SEQ ID NO: 232534 - DNA, 23 bp, Artificial sequence
  SiRNA target sequence
gtacttttgtattagcttattta

SEQ ID NO: 232535 - DNA, 23 bp, Artificial sequence
  SiRNA target sequence
tacttttgtattagcttatttaa

SEQ ID NO: 232536 - DNA, 23 bp, Artificial sequence
  SiRNA target sequence
acttttgtattagcttatttaaa

SEQ ID NO: 232537 - DNA, 23 bp, Artificial sequence
  SiRNA target sequence
cttttgtattagcttatttaaac

SEQ ID NO: 232538 - DNA, 23 bp, Artificial sequence
  SiRNA target sequence
ttttgtattagcttatttaaact

SEQ ID NO: 232539 - DNA, 23 bp, Artificial sequence
  SiRNA target sequence
tttgtattagcttatttaaactt

SEQ ID NO: 232540 - DNA, 23 bp, Artificial sequence
  SiRNA target sequence
ttgtattagcttatttaaacttc

SEQ ID NO: 232541 - DNA, 23 bp, Artificial sequence
  SiRNA target sequence
tgtattagcttatttaaacttcc

SEQ ID NO: 232542 - DNA, 23 bp, Artificial sequence
  SiRNA target sequence
gtattagcttatttaaacttccc

SEQ ID NO: 232543 - DNA, 23 bp, Artificial sequence
  SiRNA target sequence
tattagcttatttaaacttccca

SEQ ID NO: 232544 - DNA, 23 bp, Artificial sequence
  SiRNA target sequence
attagcttatttaaacttcccaa

SEQ ID NO: 232545 - DNA, 23 bp, Artificial sequence
  SiRNA target sequence
ttagcttatttaaacttcccaat

SEQ ID NO: 232546 - DNA, 23 bp, Artificial sequence
  SiRNA target sequence
tagcttatttaaacttcccaatt

SEQ ID NO: 232547 - DNA, 23 bp, Artificial sequence
  SiRNA target sequence
agcttatttaaacttcccaatta

SEQ ID NO: 232548 - DNA, 23 bp, Artificial sequence
  SiRNA target sequence
gcttatttaaacttcccaattac

SEQ ID NO: 232549 - DNA, 23 bp, Artificial sequence
  SiRNA target sequence
cttatttaaacttcccaattaca

SEQ ID NO: 232550 - DNA, 23 bp, Artificial sequence
  SiRNA target sequence
ttatttaaacttcccaattacaa

SEQ ID NO: 232551 - DNA, 23 bp, Artificial sequence
  SiRNA target sequence
tatttaaacttcccaattacaaa

SEQ ID NO: 232552 - DNA, 23 bp, Artificial sequence
  SiRNA target sequence
atttaaacttcccaattacaaac

SEQ ID NO: 232553 - DNA, 23 bp, Artificial sequence
  SiRNA target sequence
tttaaacttcccaattacaaaca

SEQ ID NO: 232554 - DNA, 23 bp, Artificial sequence
  SiRNA target sequence
ttaaacttcccaattacaaacaa

SEQ ID NO: 232555 - DNA, 23 bp, Artificial sequence
  SiRNA target sequence
taaacttcccaattacaaacaaa

SEQ ID NO: 232556 - DNA, 23 bp, Artificial sequence
  SiRNA target sequence
aaacttcccaattacaaacaaag

SEQ ID NO: 232557 - DNA, 23 bp, Artificial sequence
  SiRNA target sequence
aacttcccaattacaaacaaaga

SEQ ID NO: 232558 - DNA, 23 bp, Artificial sequence
  SiRNA target sequence
acttcccaattacaaacaaagag

SEQ ID NO: 232559 - DNA, 23 bp, Artificial sequence
  SiRNA target sequence
cttcccaattacaaacaaagagg

SEQ ID NO: 232560 - DNA, 23 bp, Artificial sequence
  SiRNA target sequence
ttcccaattacaaacaaagagga

SEQ ID NO: 232561 - DNA, 23 bp, Artificial sequence
  SiRNA target sequence
tcccaattacaaacaaagaggat

SEQ ID NO: 232562 - DNA, 23 bp, Artificial sequence
  SiRNA target sequence
cccaattacaaacaaagaggata

SEQ ID NO: 232563 - DNA, 23 bp, Artificial sequence
  SiRNA target sequence
ccaattacaaacaaagaggataa

SEQ ID NO: 232564 - DNA, 23 bp, Artificial sequence
  SiRNA target sequence
caattacaaacaaagaggataat

SEQ ID NO: 232565 - DNA, 23 bp, Artificial sequence
  SiRNA target sequence
aattacaaacaaagaggataata

SEQ ID NO: 232566 - DNA, 23 bp, Artificial sequence
  SiRNA target sequence
attacaaacaaagaggataatat

SEQ ID NO: 232567 - DNA, 23 bp, Artificial sequence
  SiRNA target sequence
ttacaaacaaagaggataatata

SEQ ID NO: 232568 - DNA, 23 bp, Artificial sequence
  SiRNA target sequence
tacaaacaaagaggataatatat

SEQ ID NO: 232569 - DNA, 23 bp, Artificial sequence
  SiRNA target sequence
acaaacaaagaggataatatatt

SEQ ID NO: 232570 - DNA, 23 bp, Artificial sequence
  SiRNA target sequence
caaacaaagaggataatatattt

SEQ ID NO: 232571 - DNA, 23 bp, Artificial sequence
  SiRNA target sequence
aaacaaagaggataatatatttg

SEQ ID NO: 232572 - DNA, 23 bp, Artificial sequence
  SiRNA target sequence
aacaaagaggataatatatttga

SEQ ID NO: 232573 - DNA, 23 bp, Artificial sequence
  SiRNA target sequence
acaaagaggataatatatttgat

SEQ ID NO: 232574 - DNA, 23 bp, Artificial sequence
  SiRNA target sequence
caaagaggataatatatttgata

SEQ ID NO: 232575 - DNA, 23 bp, Artificial sequence
  SiRNA target sequence
aaagaggataatatatttgatat

SEQ ID NO: 232576 - DNA, 23 bp, Artificial sequence
  SiRNA target sequence
aagaggataatatatttgatatt

SEQ ID NO: 232577 - DNA, 23 bp, Artificial sequence
  SiRNA target sequence
agaggataatatatttgatattt

SEQ ID NO: 232578 - DNA, 23 bp, Artificial sequence
  SiRNA target sequence
gaggataatatatttgatattta

SEQ ID NO: 232579 - DNA, 23 bp, Artificial sequence
  SiRNA target sequence
aggataatatatttgatatttac

SEQ ID NO: 232580 - DNA, 23 bp, Artificial sequence
  SiRNA target sequence
ggataatatatttgatatttacc

SEQ ID NO: 232581 - DNA, 23 bp, Artificial sequence
  SiRNA target sequence
gataatatatttgatatttaccg

SEQ ID NO: 232582 - DNA, 23 bp, Artificial sequence
  SiRNA target sequence
ataatatatttgatatttaccgt

SEQ ID NO: 232583 - DNA, 23 bp, Artificial sequence
  SiRNA target sequence
taatatatttgatatttaccgtt

SEQ ID NO: 232584 - DNA, 23 bp, Artificial sequence
  SiRNA target sequence
aatatatttgatatttaccgttt

SEQ ID NO: 232585 - DNA, 23 bp, Artificial sequence
  SiRNA target sequence
atatatttgatatttaccgttta

SEQ ID NO: 232586 - DNA, 23 bp, Artificial sequence
  SiRNA target sequence
tatatttgatatttaccgtttac

SEQ ID NO: 232587 - DNA, 23 bp, Artificial sequence
  SiRNA target sequence
atatttgatatttaccgtttacc

SEQ ID NO: 232588 - DNA, 23 bp, Artificial sequence
  SiRNA target sequence
tatttgatatttaccgtttaccg

SEQ ID NO: 232589 - DNA, 23 bp, Artificial sequence
  SiRNA target sequence
atttgatatttaccgtttaccgt

SEQ ID NO: 232590 - DNA, 23 bp, Artificial sequence
  SiRNA target sequence
tttgatatttaccgtttaccgtc

SEQ ID NO: 232591 - DNA, 23 bp, Artificial sequence
  SiRNA target sequence
ttgatatttaccgtttaccgtca

SEQ ID NO: 232592 - DNA, 23 bp, Artificial sequence
  SiRNA target sequence
tgatatttaccgtttaccgtcaa

SEQ ID NO: 232593 - DNA, 23 bp, Artificial sequence
  SiRNA target sequence
gatatttaccgtttaccgtcaac

SEQ ID NO: 232594 - DNA, 23 bp, Artificial sequence
  SiRNA target sequence
atatttaccgtttaccgtcaact

SEQ ID NO: 232595 - DNA, 23 bp, Artificial sequence
  SiRNA target sequence
tatttaccgtttaccgtcaactg

SEQ ID NO: 232596 - DNA, 23 bp, Artificial sequence
  SiRNA target sequence
atttaccgtttaccgtcaactga

SEQ ID NO: 232597 - DNA, 23 bp, Artificial sequence
  SiRNA target sequence
tttaccgtttaccgtcaactgat

SEQ ID NO: 232598 - DNA, 23 bp, Artificial sequence
  SiRNA target sequence
ttaccgtttaccgtcaactgatt

SEQ ID NO: 232599 - DNA, 23 bp, Artificial sequence
  SiRNA target sequence
taccgtttaccgtcaactgattc

SEQ ID NO: 232600 - DNA, 23 bp, Artificial sequence
  SiRNA target sequence
accgtttaccgtcaactgattct

SEQ ID NO: 232601 - DNA, 23 bp, Artificial sequence
  SiRNA target sequence
ccgtttaccgtcaactgattcta

SEQ ID NO: 232602 - DNA, 23 bp, Artificial sequence
  SiRNA target sequence
cgtttaccgtcaactgattctat

SEQ ID NO: 232603 - DNA, 23 bp, Artificial sequence
  SiRNA target sequence
gtttaccgtcaactgattctata

SEQ ID NO: 232604 - DNA, 23 bp, Artificial sequence
  SiRNA target sequence
tttaccgtcaactgattctataa

SEQ ID NO: 232605 - DNA, 23 bp, Artificial sequence
  SiRNA target sequence
ttaccgtcaactgattctataat

SEQ ID NO: 232606 - DNA, 23 bp, Artificial sequence
  SiRNA target sequence
taccgtcaactgattctataatc

SEQ ID NO: 232607 - DNA, 23 bp, Artificial sequence
  SiRNA target sequence
accgtcaactgattctataatca

SEQ ID NO: 232608 - DNA, 23 bp, Artificial sequence
  SiRNA target sequence
ccgtcaactgattctataatcaa

SEQ ID NO: 232609 - DNA, 23 bp, Artificial sequence
  SiRNA target sequence
cgtcaactgattctataatcaaa

SEQ ID NO: 232610 - DNA, 23 bp, Artificial sequence
  SiRNA target sequence
gtcaactgattctataatcaaat

SEQ ID NO: 232611 - DNA, 23 bp, Artificial sequence
  SiRNA target sequence
tcaactgattctataatcaaatt

SEQ ID NO: 232612 - DNA, 23 bp, Artificial sequence
  SiRNA target sequence
caactgattctataatcaaatta

SEQ ID NO: 232613 - DNA, 23 bp, Artificial sequence
  SiRNA target sequence
aactgattctataatcaaattag

SEQ ID NO: 232614 - DNA, 23 bp, Artificial sequence
  SiRNA target sequence
actgattctataatcaaattaga

SEQ ID NO: 232615 - DNA, 23 bp, Artificial sequence
  SiRNA target sequence
ctgattctataatcaaattagaa

SEQ ID NO: 232616 - DNA, 23 bp, Artificial sequence
  SiRNA target sequence
tgattctataatcaaattagaaa

SEQ ID NO: 232617 - DNA, 23 bp, Artificial sequence
  SiRNA target sequence
gattctataatcaaattagaaaa

SEQ ID NO: 232618 - DNA, 23 bp, Artificial sequence
  SiRNA target sequence
attctataatcaaattagaaaat

SEQ ID NO: 232619 - DNA, 23 bp, Artificial sequence
  SiRNA target sequence
ttctataatcaaattagaaaata

SEQ ID NO: 232620 - DNA, 23 bp, Artificial sequence
  SiRNA target sequence
tctataatcaaattagaaaatat

SEQ ID NO: 232621 - DNA, 23 bp, Artificial sequence
  SiRNA target sequence
ctataatcaaattagaaaatatt

SEQ ID NO: 232622 - DNA, 23 bp, Artificial sequence
  SiRNA target sequence
tataatcaaattagaaaatattg

SEQ ID NO: 232623 - DNA, 23 bp, Artificial sequence
  SiRNA target sequence
ataatcaaattagaaaatattgt

SEQ ID NO: 232624 - DNA, 23 bp, Artificial sequence
  SiRNA target sequence
taatcaaattagaaaatattgtt

SEQ ID NO: 232625 - DNA, 23 bp, Artificial sequence
  SiRNA target sequence
aatcaaattagaaaatattgttg

SEQ ID NO: 232626 - DNA, 23 bp, Artificial sequence
  SiRNA target sequence
atcaaattagaaaatattgttgg

SEQ ID NO: 232627 - DNA, 23 bp, Artificial sequence
  SiRNA target sequence
tcaaattagaaaatattgttggt

SEQ ID NO: 232628 - DNA, 23 bp, Artificial sequence
  SiRNA target sequence
caaattagaaaatattgttggtg

SEQ ID NO: 232629 - DNA, 23 bp, Artificial sequence
  SiRNA target sequence
aaattagaaaatattgttggtgt

SEQ ID NO: 232630 - DNA, 23 bp, Artificial sequence
  SiRNA target sequence
aattagaaaatattgttggtgtc

SEQ ID NO: 232631 - DNA, 23 bp, Artificial sequence
  SiRNA target sequence
attagaaaatattgttggtgtca

SEQ ID NO: 232632 - DNA, 23 bp, Artificial sequence
  SiRNA target sequence
ttagaaaatattgttggtgtcat

SEQ ID NO: 232633 - DNA, 23 bp, Artificial sequence
  SiRNA target sequence
tagaaaatattgttggtgtcatt

SEQ ID NO: 232634 - DNA, 23 bp, Artificial sequence
  SiRNA target sequence
agaaaatattgttggtgtcattt

SEQ ID NO: 232635 - DNA, 23 bp, Artificial sequence
  SiRNA target sequence
gaaaatattgttggtgtcatttg

SEQ ID NO: 232636 - DNA, 23 bp, Artificial sequence
  SiRNA target sequence
aaaatattgttggtgtcatttgt

SEQ ID NO: 232637 - DNA, 23 bp, Artificial sequence
  SiRNA target sequence
aaatattgttggtgtcatttgtg

SEQ ID NO: 232638 - DNA, 23 bp, Artificial sequence
  SiRNA target sequence
aatattgttggtgtcatttgtgt

SEQ ID NO: 232639 - DNA, 23 bp, Artificial sequence
  SiRNA target sequence
atattgttggtgtcatttgtgta

SEQ ID NO: 232640 - DNA, 23 bp, Artificial sequence
  SiRNA target sequence
tattgttggtgtcatttgtgtat

SEQ ID NO: 232641 - DNA, 23 bp, Artificial sequence
  SiRNA target sequence
attgttggtgtcatttgtgtatc

SEQ ID NO: 232642 - DNA, 23 bp, Artificial sequence
  SiRNA target sequence
ttgttggtgtcatttgtgtatct

SEQ ID NO: 232643 - DNA, 23 bp, Artificial sequence
  SiRNA target sequence
tgttggtgtcatttgtgtatctt

SEQ ID NO: 232644 - DNA, 23 bp, Artificial sequence
  SiRNA target sequence
gttggtgtcatttgtgtatcttt

SEQ ID NO: 232645 - DNA, 23 bp, Artificial sequence
  SiRNA target sequence
ttggtgtcatttgtgtatcttta

SEQ ID NO: 232646 - DNA, 23 bp, Artificial sequence
  SiRNA target sequence
tggtgtcatttgtgtatctttaa

SEQ ID NO: 232647 - DNA, 23 bp, Artificial sequence
  SiRNA target sequence
ggtgtcatttgtgtatctttaat

SEQ ID NO: 232648 - DNA, 23 bp, Artificial sequence
  SiRNA target sequence
gtgtcatttgtgtatctttaatg

SEQ ID NO: 232649 - DNA, 23 bp, Artificial sequence
  SiRNA target sequence
tgtcatttgtgtatctttaatga

SEQ ID NO: 232650 - DNA, 23 bp, Artificial sequence
  SiRNA target sequence
gtcatttgtgtatctttaatgaa

SEQ ID NO: 232651 - DNA, 23 bp, Artificial sequence
  SiRNA target sequence
tcatttgtgtatctttaatgaag

SEQ ID NO: 232652 - DNA, 23 bp, Artificial sequence
  SiRNA target sequence
catttgtgtatctttaatgaaga

SEQ ID NO: 232653 - DNA, 23 bp, Artificial sequence
  SiRNA target sequence
atttgtgtatctttaatgaagat

SEQ ID NO: 232654 - DNA, 23 bp, Artificial sequence
  SiRNA target sequence
tttgtgtatctttaatgaagatt

SEQ ID NO: 232655 - DNA, 23 bp, Artificial sequence
  SiRNA target sequence
ttgtgtatctttaatgaagattt

SEQ ID NO: 232656 - DNA, 23 bp, Artificial sequence
  SiRNA target sequence
tgtgtatctttaatgaagatttc

SEQ ID NO: 232657 - DNA, 23 bp, Artificial sequence
  SiRNA target sequence
gtgtatctttaatgaagatttct

SEQ ID NO: 232658 - DNA, 23 bp, Artificial sequence
  SiRNA target sequence
tgtatctttaatgaagatttcta

SEQ ID NO: 232659 - DNA, 23 bp, Artificial sequence
  SiRNA target sequence
gtatctttaatgaagatttctaa

SEQ ID NO: 232660 - DNA, 23 bp, Artificial sequence
  SiRNA target sequence
tatctttaatgaagatttctaaa

SEQ ID NO: 232661 - DNA, 23 bp, Artificial sequence
  SiRNA target sequence
atctttaatgaagatttctaaat

SEQ ID NO: 232662 - DNA, 23 bp, Artificial sequence
  SiRNA target sequence
tctttaatgaagatttctaaata

SEQ ID NO: 232663 - DNA, 23 bp, Artificial sequence
  SiRNA target sequence
ctttaatgaagatttctaaatat

SEQ ID NO: 232664 - DNA, 23 bp, Artificial sequence
  SiRNA target sequence
tttaatgaagatttctaaatatg

SEQ ID NO: 232665 - DNA, 23 bp, Artificial sequence
  SiRNA target sequence
ttaatgaagatttctaaatatgc

SEQ ID NO: 232666 - DNA, 23 bp, Artificial sequence
  SiRNA target sequence
taatgaagatttctaaatatgca

SEQ ID NO: 232667 - DNA, 23 bp, Artificial sequence
  SiRNA target sequence
aatgaagatttctaaatatgcag

SEQ ID NO: 232668 - DNA, 23 bp, Artificial sequence
  SiRNA target sequence
atgaagatttctaaatatgcagc

SEQ ID NO: 232669 - DNA, 23 bp, Artificial sequence
  SiRNA target sequence
tgaagatttctaaatatgcagca

SEQ ID NO: 232670 - DNA, 23 bp, Artificial sequence
  SiRNA target sequence
gaagatttctaaatatgcagcat

SEQ ID NO: 232671 - DNA, 23 bp, Artificial sequence
  SiRNA target sequence
aagatttctaaatatgcagcatt

SEQ ID NO: 232672 - DNA, 23 bp, Artificial sequence
  SiRNA target sequence
agatttctaaatatgcagcattt

SEQ ID NO: 232673 - DNA, 23 bp, Artificial sequence
  SiRNA target sequence
gatttctaaatatgcagcatttg

SEQ ID NO: 232674 - DNA, 23 bp, Artificial sequence
  SiRNA target sequence
atttctaaatatgcagcatttga

SEQ ID NO: 232675 - DNA, 23 bp, Artificial sequence
  SiRNA target sequence
tttctaaatatgcagcatttgat

SEQ ID NO: 232676 - DNA, 23 bp, Artificial sequence
  SiRNA target sequence
ttctaaatatgcagcatttgata

SEQ ID NO: 232677 - DNA, 23 bp, Artificial sequence
  SiRNA target sequence
tctaaatatgcagcatttgatat

SEQ ID NO: 232678 - DNA, 23 bp, Artificial sequence
  SiRNA target sequence
ctaaatatgcagcatttgatatc

SEQ ID NO: 232679 - DNA, 23 bp, Artificial sequence
  SiRNA target sequence
taaatatgcagcatttgatatca

SEQ ID NO: 232680 - DNA, 23 bp, Artificial sequence
  SiRNA target sequence
aaatatgcagcatttgatatcac

SEQ ID NO: 232681 - DNA, 23 bp, Artificial sequence
  SiRNA target sequence
aatatgcagcatttgatatcaca

SEQ ID NO: 232682 - DNA, 23 bp, Artificial sequence
  SiRNA target sequence
atatgcagcatttgatatcacaa

SEQ ID NO: 232683 - DNA, 23 bp, Artificial sequence
  SiRNA target sequence
tatgcagcatttgatatcacaaa

SEQ ID NO: 232684 - DNA, 23 bp, Artificial sequence
  SiRNA target sequence
atgcagcatttgatatcacaaaa

SEQ ID NO: 232685 - DNA, 23 bp, Artificial sequence
  SiRNA target sequence
tgcagcatttgatatcacaaaag

SEQ ID NO: 232686 - DNA, 23 bp, Artificial sequence
  SiRNA target sequence
gcagcatttgatatcacaaaaga

SEQ ID NO: 232687 - DNA, 23 bp, Artificial sequence
  SiRNA target sequence
cagcatttgatatcacaaaagag

SEQ ID NO: 232688 - DNA, 23 bp, Artificial sequence
  SiRNA target sequence
agcatttgatatcacaaaagagg

SEQ ID NO: 232689 - DNA, 23 bp, Artificial sequence
  SiRNA target sequence
gcatttgatatcacaaaagaggc

SEQ ID NO: 232690 - DNA, 23 bp, Artificial sequence
  SiRNA target sequence
catttgatatcacaaaagaggct

SEQ ID NO: 232691 - DNA, 23 bp, Artificial sequence
  SiRNA target sequence
atttgatatcacaaaagaggctt

SEQ ID NO: 232692 - DNA, 23 bp, Artificial sequence
  SiRNA target sequence
tttgatatcacaaaagaggcttt

SEQ ID NO: 232693 - DNA, 23 bp, Artificial sequence
  SiRNA target sequence
ttgatatcacaaaagaggctttg

SEQ ID NO: 232694 - DNA, 23 bp, Artificial sequence
  SiRNA target sequence
tgatatcacaaaagaggctttgt

SEQ ID NO: 232695 - DNA, 23 bp, Artificial sequence
  SiRNA target sequence
gatatcacaaaagaggctttgtc

SEQ ID NO: 232696 - DNA, 23 bp, Artificial sequence
  SiRNA target sequence
atatcacaaaagaggctttgtct

SEQ ID NO: 232697 - DNA, 23 bp, Artificial sequence
  SiRNA target sequence
tatcacaaaagaggctttgtcta

SEQ ID NO: 232698 - DNA, 23 bp, Artificial sequence
  SiRNA target sequence
atcacaaaagaggctttgtctat

SEQ ID NO: 232699 - DNA, 23 bp, Artificial sequence
  SiRNA target sequence
tcacaaaagaggctttgtctatg

SEQ ID NO: 232700 - DNA, 23 bp, Artificial sequence
  SiRNA target sequence
cacaaaagaggctttgtctatgc

SEQ ID NO: 232701 - DNA, 23 bp, Artificial sequence
  SiRNA target sequence
acaaaagaggctttgtctatgca

SEQ ID NO: 232702 - DNA, 23 bp, Artificial sequence
  SiRNA target sequence
caaaagaggctttgtctatgcag

SEQ ID NO: 232703 - DNA, 23 bp, Artificial sequence
  SiRNA target sequence
aaaagaggctttgtctatgcaga

SEQ ID NO: 232704 - DNA, 23 bp, Artificial sequence
  SiRNA target sequence
aaagaggctttgtctatgcagat

SEQ ID NO: 232705 - DNA, 23 bp, Artificial sequence
  SiRNA target sequence
aagaggctttgtctatgcagatt

SEQ ID NO: 232706 - DNA, 23 bp, Artificial sequence
  SiRNA target sequence
agaggctttgtctatgcagattg

SEQ ID NO: 232707 - DNA, 23 bp, Artificial sequence
  SiRNA target sequence
gaggctttgtctatgcagattga

SEQ ID NO: 232708 - DNA, 23 bp, Artificial sequence
  SiRNA target sequence
aggctttgtctatgcagattgat

SEQ ID NO: 232709 - DNA, 23 bp, Artificial sequence
  SiRNA target sequence
ggctttgtctatgcagattgatg

SEQ ID NO: 232710 - DNA, 23 bp, Artificial sequence
  SiRNA target sequence
gctttgtctatgcagattgatgg

SEQ ID NO: 232711 - DNA, 23 bp, Artificial sequence
  SiRNA target sequence
ctttgtctatgcagattgatggt

SEQ ID NO: 232712 - DNA, 23 bp, Artificial sequence
  SiRNA target sequence
tttgtctatgcagattgatggtt

SEQ ID NO: 232713 - DNA, 23 bp, Artificial sequence
  SiRNA target sequence
ttgtctatgcagattgatggttc

SEQ ID NO: 232714 - DNA, 23 bp, Artificial sequence
  SiRNA target sequence
tgtctatgcagattgatggttct

SEQ ID NO: 232715 - DNA, 23 bp, Artificial sequence
  SiRNA target sequence
gtctatgcagattgatggttcta

SEQ ID NO: 232716 - DNA, 23 bp, Artificial sequence
  SiRNA target sequence
tctatgcagattgatggttctat

SEQ ID NO: 232717 - DNA, 23 bp, Artificial sequence
  SiRNA target sequence
ctatgcagattgatggttctata

SEQ ID NO: 232718 - DNA, 23 bp, Artificial sequence
  SiRNA target sequence
tatgcagattgatggttctataa

SEQ ID NO: 232719 - DNA, 23 bp, Artificial sequence
  SiRNA target sequence
atgcagattgatggttctataag

SEQ ID NO: 232720 - DNA, 23 bp, Artificial sequence
  SiRNA target sequence
tgcagattgatggttctataaga

SEQ ID NO: 232721 - DNA, 23 bp, Artificial sequence
  SiRNA target sequence
gcagattgatggttctataagag

SEQ ID NO: 232722 - DNA, 23 bp, Artificial sequence
  SiRNA target sequence
cagattgatggttctataagagc

SEQ ID NO: 232723 - DNA, 23 bp, Artificial sequence
  SiRNA target sequence
agattgatggttctataagagcg

SEQ ID NO: 232724 - DNA, 23 bp, Artificial sequence
  SiRNA target sequence
gattgatggttctataagagcga

SEQ ID NO: 232725 - DNA, 23 bp, Artificial sequence
  SiRNA target sequence
attgatggttctataagagcgaa

SEQ ID NO: 232726 - DNA, 23 bp, Artificial sequence
  SiRNA target sequence
ttgatggttctataagagcgaaa

SEQ ID NO: 232727 - DNA, 23 bp, Artificial sequence
  SiRNA target sequence
tgatggttctataagagcgaaat

SEQ ID NO: 232728 - DNA, 23 bp, Artificial sequence
  SiRNA target sequence
gatggttctataagagcgaaata

SEQ ID NO: 232729 - DNA, 23 bp, Artificial sequence
  SiRNA target sequence
atggttctataagagcgaaatac

SEQ ID NO: 232730 - DNA, 23 bp, Artificial sequence
  SiRNA target sequence
tggttctataagagcgaaataca

SEQ ID NO: 232731 - DNA, 23 bp, Artificial sequence
  SiRNA target sequence
ggttctataagagcgaaatacaa

SEQ ID NO: 232732 - DNA, 23 bp, Artificial sequence
  SiRNA target sequence
gttctataagagcgaaatacaaa

SEQ ID NO: 232733 - DNA, 23 bp, Artificial sequence
  SiRNA target sequence
ttctataagagcgaaatacaaag

SEQ ID NO: 232734 - DNA, 23 bp, Artificial sequence
  SiRNA target sequence
tctataagagcgaaatacaaagg

SEQ ID NO: 232735 - DNA, 23 bp, Artificial sequence
  SiRNA target sequence
ctataagagcgaaatacaaaggt

SEQ ID NO: 232736 - DNA, 23 bp, Artificial sequence
  SiRNA target sequence
tataagagcgaaatacaaaggta

SEQ ID NO: 232737 - DNA, 23 bp, Artificial sequence
  SiRNA target sequence
ataagagcgaaatacaaaggtat

SEQ ID NO: 232738 - DNA, 23 bp, Artificial sequence
  SiRNA target sequence
taagagcgaaatacaaaggtatt

SEQ ID NO: 232739 - DNA, 23 bp, Artificial sequence
  SiRNA target sequence
aagagcgaaatacaaaggtattt

SEQ ID NO: 232740 - DNA, 23 bp, Artificial sequence
  SiRNA target sequence
agagcgaaatacaaaggtatttt

SEQ ID NO: 232741 - DNA, 23 bp, Artificial sequence
  SiRNA target sequence
gagcgaaatacaaaggtattttt

SEQ ID NO: 232742 - DNA, 23 bp, Artificial sequence
  SiRNA target sequence
agcgaaatacaaaggtatttttg

SEQ ID NO: 232743 - DNA, 23 bp, Artificial sequence
  SiRNA target sequence
gcgaaatacaaaggtatttttga

SEQ ID NO: 232744 - DNA, 23 bp, Artificial sequence
  SiRNA target sequence
cgaaatacaaaggtatttttgat

SEQ ID NO: 232745 - DNA, 23 bp, Artificial sequence
  SiRNA target sequence
gaaatacaaaggtatttttgatg

SEQ ID NO: 232746 - DNA, 23 bp, Artificial sequence
  SiRNA target sequence
aaatacaaaggtatttttgatgg

SEQ ID NO: 232747 - DNA, 23 bp, Artificial sequence
  SiRNA target sequence
aatacaaaggtatttttgatggt

SEQ ID NO: 232748 - DNA, 23 bp, Artificial sequence
  SiRNA target sequence
atacaaaggtatttttgatggtg

SEQ ID NO: 232749 - DNA, 23 bp, Artificial sequence
  SiRNA target sequence
tacaaaggtatttttgatggtgt

SEQ ID NO: 232750 - DNA, 23 bp, Artificial sequence
  SiRNA target sequence
acaaaggtatttttgatggtgta

SEQ ID NO: 232751 - DNA, 23 bp, Artificial sequence
  SiRNA target sequence
caaaggtatttttgatggtgtat

SEQ ID NO: 232752 - DNA, 23 bp, Artificial sequence
  SiRNA target sequence
aaaggtatttttgatggtgtatt

SEQ ID NO: 232753 - DNA, 23 bp, Artificial sequence
  SiRNA target sequence
aaggtatttttgatggtgtattt

SEQ ID NO: 232754 - DNA, 23 bp, Artificial sequence
  SiRNA target sequence
aggtatttttgatggtgtatttg

SEQ ID NO: 232755 - DNA, 23 bp, Artificial sequence
  SiRNA target sequence
ggtatttttgatggtgtatttgg

SEQ ID NO: 232756 - DNA, 23 bp, Artificial sequence
  SiRNA target sequence
gtatttttgatggtgtatttggt

SEQ ID NO: 232757 - DNA, 23 bp, Artificial sequence
  SiRNA target sequence
tatttttgatggtgtatttggta

SEQ ID NO: 232758 - DNA, 23 bp, Artificial sequence
  SiRNA target sequence
atttttgatggtgtatttggtaa

SEQ ID NO: 232759 - DNA, 23 bp, Artificial sequence
  SiRNA target sequence
tttttgatggtgtatttggtaag

SEQ ID NO: 232760 - DNA, 23 bp, Artificial sequence
  SiRNA target sequence
ttttgatggtgtatttggtaagc

SEQ ID NO: 232761 - DNA, 23 bp, Artificial sequence
  SiRNA target sequence
tttgatggtgtatttggtaagct

SEQ ID NO: 232762 - DNA, 23 bp, Artificial sequence
  SiRNA target sequence
ttgatggtgtatttggtaagctg

SEQ ID NO: 232763 - DNA, 23 bp, Artificial sequence
  SiRNA target sequence
tgatggtgtatttggtaagctgg

SEQ ID NO: 232764 - DNA, 23 bp, Artificial sequence
  SiRNA target sequence
gatggtgtatttggtaagctggg

SEQ ID NO: 232765 - DNA, 23 bp, Artificial sequence
  SiRNA target sequence
atggtgtatttggtaagctgggg

SEQ ID NO: 232766 - DNA, 23 bp, Artificial sequence
  SiRNA target sequence
tggtgtatttggtaagctgggga

SEQ ID NO: 232767 - DNA, 23 bp, Artificial sequence
  SiRNA target sequence
ggtgtatttggtaagctggggaa

SEQ ID NO: 232768 - DNA, 23 bp, Artificial sequence
  SiRNA target sequence
gtgtatttggtaagctggggaaa

SEQ ID NO: 232769 - DNA, 23 bp, Artificial sequence
  SiRNA target sequence
tgtatttggtaagctggggaaat

SEQ ID NO: 232770 - DNA, 23 bp, Artificial sequence
  SiRNA target sequence
gtatttggtaagctggggaaatc

SEQ ID NO: 232771 - DNA, 23 bp, Artificial sequence
  SiRNA target sequence
tatttggtaagctggggaaatct

SEQ ID NO: 232772 - DNA, 23 bp, Artificial sequence
  SiRNA target sequence
atttggtaagctggggaaatctt

SEQ ID NO: 232773 - DNA, 23 bp, Artificial sequence
  SiRNA target sequence
tttggtaagctggggaaatcttt

SEQ ID NO: 232774 - DNA, 23 bp, Artificial sequence
  SiRNA target sequence
ttggtaagctggggaaatctttt

SEQ ID NO: 232775 - DNA, 23 bp, Artificial sequence
  SiRNA target sequence
tggtaagctggggaaatcttttg

SEQ ID NO: 232776 - DNA, 23 bp, Artificial sequence
  SiRNA target sequence
ggtaagctggggaaatcttttgg

SEQ ID NO: 232777 - DNA, 23 bp, Artificial sequence
  SiRNA target sequence
gtaagctggggaaatcttttgga

SEQ ID NO: 232778 - DNA, 23 bp, Artificial sequence
  SiRNA target sequence
taagctggggaaatcttttggat

SEQ ID NO: 232779 - DNA, 23 bp, Artificial sequence
  SiRNA target sequence
aagctggggaaatcttttggatc

SEQ ID NO: 232780 - DNA, 23 bp, Artificial sequence
  SiRNA target sequence
agctggggaaatcttttggatca

SEQ ID NO: 232781 - DNA, 23 bp, Artificial sequence
  SiRNA target sequence
gctggggaaatcttttggatcag

SEQ ID NO: 232782 - DNA, 23 bp, Artificial sequence
  SiRNA target sequence
ctggggaaatcttttggatcagt

SEQ ID NO: 232783 - DNA, 23 bp, Artificial sequence
  SiRNA target sequence
tggggaaatcttttggatcagtt

SEQ ID NO: 232784 - DNA, 23 bp, Artificial sequence
  SiRNA target sequence
ggggaaatcttttggatcagttt

SEQ ID NO: 232785 - DNA, 23 bp, Artificial sequence
  SiRNA target sequence
gggaaatcttttggatcagttta

SEQ ID NO: 232786 - DNA, 23 bp, Artificial sequence
  SiRNA target sequence
ggaaatcttttggatcagtttat

SEQ ID NO: 232787 - DNA, 23 bp, Artificial sequence
  SiRNA target sequence
gaaatcttttggatcagtttatg

SEQ ID NO: 232788 - DNA, 23 bp, Artificial sequence
  SiRNA target sequence
aaatcttttggatcagtttatgg

SEQ ID NO: 232789 - DNA, 23 bp, Artificial sequence
  SiRNA target sequence
aatcttttggatcagtttatgga

SEQ ID NO: 232790 - DNA, 23 bp, Artificial sequence
  SiRNA target sequence
atcttttggatcagtttatggat

SEQ ID NO: 232791 - DNA, 23 bp, Artificial sequence
  SiRNA target sequence
tcttttggatcagtttatggatt

SEQ ID NO: 232792 - DNA, 23 bp, Artificial sequence
  SiRNA target sequence
cttttggatcagtttatggattt

SEQ ID NO: 232793 - DNA, 23 bp, Artificial sequence
  SiRNA target sequence
ttttggatcagtttatggattta

SEQ ID NO: 232794 - DNA, 23 bp, Artificial sequence
  SiRNA target sequence
tttggatcagtttatggatttac

SEQ ID NO: 232795 - DNA, 23 bp, Artificial sequence
  SiRNA target sequence
ttggatcagtttatggatttaca

SEQ ID NO: 232796 - DNA, 23 bp, Artificial sequence
  SiRNA target sequence
tggatcagtttatggatttacaa

SEQ ID NO: 232797 - DNA, 23 bp, Artificial sequence
  SiRNA target sequence
ggatcagtttatggatttacaat

SEQ ID NO: 232798 - DNA, 23 bp, Artificial sequence
  SiRNA target sequence
gatcagtttatggatttacaatt

SEQ ID NO: 232799 - DNA, 23 bp, Artificial sequence
  SiRNA target sequence
atcagtttatggatttacaatta

SEQ ID NO: 232800 - DNA, 23 bp, Artificial sequence
  SiRNA target sequence
tcagtttatggatttacaattac

SEQ ID NO: 232801 - DNA, 23 bp, Artificial sequence
  SiRNA target sequence
cagtttatggatttacaattact

SEQ ID NO: 232802 - DNA, 23 bp, Artificial sequence
  SiRNA target sequence
agtttatggatttacaattacta

SEQ ID NO: 232803 - DNA, 23 bp, Artificial sequence
  SiRNA target sequence
gtttatggatttacaattactac

SEQ ID NO: 232804 - DNA, 23 bp, Artificial sequence
  SiRNA target sequence
tttatggatttacaattactaca

SEQ ID NO: 232805 - DNA, 23 bp, Artificial sequence
  SiRNA target sequence
ttatggatttacaattactacat

SEQ ID NO: 232806 - DNA, 23 bp, Artificial sequence
  SiRNA target sequence
tatggatttacaattactacatt

SEQ ID NO: 232807 - DNA, 23 bp, Artificial sequence
  SiRNA target sequence
atggatttacaattactacatta

SEQ ID NO: 232808 - DNA, 23 bp, Artificial sequence
  SiRNA target sequence
tggatttacaattactacattat

SEQ ID NO: 232809 - DNA, 23 bp, Artificial sequence
  SiRNA target sequence
ggatttacaattactacattatt

SEQ ID NO: 232810 - DNA, 23 bp, Artificial sequence
  SiRNA target sequence
gatttacaattactacattatta

SEQ ID NO: 232811 - DNA, 23 bp, Artificial sequence
  SiRNA target sequence
atttacaattactacattattag

SEQ ID NO: 232812 - DNA, 23 bp, Artificial sequence
  SiRNA target sequence
tttacaattactacattattagg

SEQ ID NO: 232813 - DNA, 23 bp, Artificial sequence
  SiRNA target sequence
ttacaattactacattattagga

SEQ ID NO: 232814 - DNA, 23 bp, Artificial sequence
  SiRNA target sequence
tacaattactacattattaggaa

SEQ ID NO: 232815 - DNA, 23 bp, Artificial sequence
  SiRNA target sequence
acaattactacattattaggaac

SEQ ID NO: 232816 - DNA, 23 bp, Artificial sequence
  SiRNA target sequence
caattactacattattaggaaca

SEQ ID NO: 232817 - DNA, 23 bp, Artificial sequence
  SiRNA target sequence
aattactacattattaggaacaa

SEQ ID NO: 232818 - DNA, 23 bp, Artificial sequence
  SiRNA target sequence
attactacattattaggaacaag

SEQ ID NO: 232819 - DNA, 23 bp, Artificial sequence
  SiRNA target sequence
ttactacattattaggaacaaga

SEQ ID NO: 232820 - DNA, 23 bp, Artificial sequence
  SiRNA target sequence
tactacattattaggaacaagag

SEQ ID NO: 232821 - DNA, 23 bp, Artificial sequence
  SiRNA target sequence
actacattattaggaacaagaga

SEQ ID NO: 232822 - DNA, 23 bp, Artificial sequence
  SiRNA target sequence
ctacattattaggaacaagagat

SEQ ID NO: 232823 - DNA, 23 bp, Artificial sequence
  SiRNA target sequence
tacattattaggaacaagagatg

SEQ ID NO: 232824 - DNA, 23 bp, Artificial sequence
  SiRNA target sequence
acattattaggaacaagagatgt

SEQ ID NO: 232825 - DNA, 23 bp, Artificial sequence
  SiRNA target sequence
cattattaggaacaagagatgtt

SEQ ID NO: 232826 - DNA, 23 bp, Artificial sequence
  SiRNA target sequence
attattaggaacaagagatgttc

SEQ ID NO: 232827 - DNA, 23 bp, Artificial sequence
  SiRNA target sequence
ttattaggaacaagagatgttcg

SEQ ID NO: 232828 - DNA, 23 bp, Artificial sequence
  SiRNA target sequence
tattaggaacaagagatgttcgt

SEQ ID NO: 232829 - DNA, 23 bp, Artificial sequence
  SiRNA target sequence
attaggaacaagagatgttcgta

SEQ ID NO: 232830 - DNA, 23 bp, Artificial sequence
  SiRNA target sequence
ttaggaacaagagatgttcgtag

SEQ ID NO: 232831 - DNA, 23 bp, Artificial sequence
  SiRNA target sequence
taggaacaagagatgttcgtaga

SEQ ID NO: 232832 - DNA, 23 bp, Artificial sequence
  SiRNA target sequence
aggaacaagagatgttcgtagag

SEQ ID NO: 232833 - DNA, 23 bp, Artificial sequence
  SiRNA target sequence
ggaacaagagatgttcgtagagg

SEQ ID NO: 232834 - DNA, 23 bp, Artificial sequence
  SiRNA target sequence
gaacaagagatgttcgtagaggt

SEQ ID NO: 232835 - DNA, 23 bp, Artificial sequence
  SiRNA target sequence
aacaagagatgttcgtagaggtg

SEQ ID NO: 232836 - DNA, 23 bp, Artificial sequence
  SiRNA target sequence
acaagagatgttcgtagaggtgc

SEQ ID NO: 232837 - DNA, 23 bp, Artificial sequence
  SiRNA target sequence
caagagatgttcgtagaggtgct

SEQ ID NO: 232838 - DNA, 23 bp, Artificial sequence
  SiRNA target sequence
aagagatgttcgtagaggtgctc

SEQ ID NO: 232839 - DNA, 23 bp, Artificial sequence
  SiRNA target sequence
agagatgttcgtagaggtgctcc

SEQ ID NO: 232840 - DNA, 23 bp, Artificial sequence
  SiRNA target sequence
gagatgttcgtagaggtgctcct

SEQ ID NO: 232841 - DNA, 23 bp, Artificial sequence
  SiRNA target sequence
agatgttcgtagaggtgctccta

SEQ ID NO: 232842 - DNA, 23 bp, Artificial sequence
  SiRNA target sequence
gatgttcgtagaggtgctcctat

SEQ ID NO: 232843 - DNA, 23 bp, Artificial sequence
  SiRNA target sequence
atgttcgtagaggtgctcctata

SEQ ID NO: 232844 - DNA, 23 bp, Artificial sequence
  SiRNA target sequence
tgttcgtagaggtgctcctatat

SEQ ID NO: 232845 - DNA, 23 bp, Artificial sequence
  SiRNA target sequence
gttcgtagaggtgctcctatatc

SEQ ID NO: 232846 - DNA, 23 bp, Artificial sequence
  SiRNA target sequence
ttcgtagaggtgctcctatatcg

SEQ ID NO: 232847 - DNA, 23 bp, Artificial sequence
  SiRNA target sequence
tcgtagaggtgctcctatatcgc

SEQ ID NO: 232848 - DNA, 23 bp, Artificial sequence
  SiRNA target sequence
cgtagaggtgctcctatatcgct

SEQ ID NO: 232849 - DNA, 23 bp, Artificial sequence
  SiRNA target sequence
gtagaggtgctcctatatcgctt

SEQ ID NO: 232850 - DNA, 23 bp, Artificial sequence
  SiRNA target sequence
tagaggtgctcctatatcgcttt

SEQ ID NO: 232851 - DNA, 23 bp, Artificial sequence
  SiRNA target sequence
agaggtgctcctatatcgctttg

SEQ ID NO: 232852 - DNA, 23 bp, Artificial sequence
  SiRNA target sequence
gaggtgctcctatatcgctttgt

SEQ ID NO: 232853 - DNA, 23 bp, Artificial sequence
  SiRNA target sequence
aggtgctcctatatcgctttgtg

SEQ ID NO: 232854 - DNA, 23 bp, Artificial sequence
  SiRNA target sequence
ggtgctcctatatcgctttgtgt

SEQ ID NO: 232855 - DNA, 23 bp, Artificial sequence
  SiRNA target sequence
gtgctcctatatcgctttgtgtt

SEQ ID NO: 232856 - DNA, 23 bp, Artificial sequence
  SiRNA target sequence
tgctcctatatcgctttgtgttc

SEQ ID NO: 232857 - DNA, 23 bp, Artificial sequence
  SiRNA target sequence
gctcctatatcgctttgtgttct

SEQ ID NO: 232858 - DNA, 23 bp, Artificial sequence
  SiRNA target sequence
ctcctatatcgctttgtgttcta

SEQ ID NO: 232859 - DNA, 23 bp, Artificial sequence
  SiRNA target sequence
tcctatatcgctttgtgttctaa

SEQ ID NO: 232860 - DNA, 23 bp, Artificial sequence
  SiRNA target sequence
cctatatcgctttgtgttctaat

SEQ ID NO: 232861 - DNA, 23 bp, Artificial sequence
  SiRNA target sequence
ctatatcgctttgtgttctaata

SEQ ID NO: 232862 - DNA, 23 bp, Artificial sequence
  SiRNA target sequence
tatatcgctttgtgttctaatat

SEQ ID NO: 232863 - DNA, 23 bp, Artificial sequence
  SiRNA target sequence
atatcgctttgtgttctaatatt

SEQ ID NO: 232864 - DNA, 23 bp, Artificial sequence
  SiRNA target sequence
tatcgctttgtgttctaatattg

SEQ ID NO: 232865 - DNA, 23 bp, Artificial sequence
  SiRNA target sequence
atcgctttgtgttctaatattgt

SEQ ID NO: 232866 - DNA, 23 bp, Artificial sequence
  SiRNA target sequence
tcgctttgtgttctaatattgtt

SEQ ID NO: 232867 - DNA, 23 bp, Artificial sequence
  SiRNA target sequence
cgctttgtgttctaatattgttc

SEQ ID NO: 232868 - DNA, 23 bp, Artificial sequence
  SiRNA target sequence
gctttgtgttctaatattgttct

SEQ ID NO: 232869 - DNA, 23 bp, Artificial sequence
  SiRNA target sequence
ctttgtgttctaatattgttctg

SEQ ID NO: 232870 - DNA, 23 bp, Artificial sequence
  SiRNA target sequence
tttgtgttctaatattgttctgc

SEQ ID NO: 232871 - DNA, 23 bp, Artificial sequence
  SiRNA target sequence
ttgtgttctaatattgttctgcc

SEQ ID NO: 232872 - DNA, 23 bp, Artificial sequence
  SiRNA target sequence
tgtgttctaatattgttctgcct

SEQ ID NO: 232873 - DNA, 23 bp, Artificial sequence
  SiRNA target sequence
gtgttctaatattgttctgcctt

SEQ ID NO: 232874 - DNA, 23 bp, Artificial sequence
  SiRNA target sequence
tgttctaatattgttctgcctta

SEQ ID NO: 232875 - DNA, 23 bp, Artificial sequence
  SiRNA target sequence
gttctaatattgttctgccttat

SEQ ID NO: 232876 - DNA, 23 bp, Artificial sequence
  SiRNA target sequence
ttctaatattgttctgccttata

SEQ ID NO: 232877 - DNA, 23 bp, Artificial sequence
  SiRNA target sequence
tctaatattgttctgccttatat

SEQ ID NO: 232878 - DNA, 23 bp, Artificial sequence
  SiRNA target sequence
ctaatattgttctgccttatatg

SEQ ID NO: 232879 - DNA, 23 bp, Artificial sequence
  SiRNA target sequence
taatattgttctgccttatatgg

SEQ ID NO: 232880 - DNA, 23 bp, Artificial sequence
  SiRNA target sequence
aatattgttctgccttatatggt

SEQ ID NO: 232881 - DNA, 23 bp, Artificial sequence
  SiRNA target sequence
atattgttctgccttatatggtt

SEQ ID NO: 232882 - DNA, 23 bp, Artificial sequence
  SiRNA target sequence
tattgttctgccttatatggttt

SEQ ID NO: 232883 - DNA, 23 bp, Artificial sequence
  SiRNA target sequence
attgttctgccttatatggtttt

SEQ ID NO: 232884 - DNA, 23 bp, Artificial sequence
  SiRNA target sequence
ttgttctgccttatatggtttta

SEQ ID NO: 232885 - DNA, 23 bp, Artificial sequence
  SiRNA target sequence
tgttctgccttatatggttttat

SEQ ID NO: 232886 - DNA, 23 bp, Artificial sequence
  SiRNA target sequence
gttctgccttatatggttttatt

SEQ ID NO: 232887 - DNA, 23 bp, Artificial sequence
  SiRNA target sequence
ttctgccttatatggttttattc

SEQ ID NO: 232888 - DNA, 23 bp, Artificial sequence
  SiRNA target sequence
tctgccttatatggttttattct

SEQ ID NO: 232889 - DNA, 23 bp, Artificial sequence
  SiRNA target sequence
ctgccttatatggttttattctg

SEQ ID NO: 232890 - DNA, 23 bp, Artificial sequence
  SiRNA target sequence
tgccttatatggttttattctgt

SEQ ID NO: 232891 - DNA, 23 bp, Artificial sequence
  SiRNA target sequence
gccttatatggttttattctgtt

SEQ ID NO: 232892 - DNA, 23 bp, Artificial sequence
  SiRNA target sequence
ccttatatggttttattctgttt

SEQ ID NO: 232893 - DNA, 23 bp, Artificial sequence
  SiRNA target sequence
cttatatggttttattctgtttt

SEQ ID NO: 232894 - DNA, 23 bp, Artificial sequence
  SiRNA target sequence
ttatatggttttattctgttttc

SEQ ID NO: 232895 - DNA, 23 bp, Artificial sequence
  SiRNA target sequence
tatatggttttattctgttttct

SEQ ID NO: 232896 - DNA, 23 bp, Artificial sequence
  SiRNA target sequence
atatggttttattctgttttcta

SEQ ID NO: 232897 - DNA, 23 bp, Artificial sequence
  SiRNA target sequence
tatggttttattctgttttctat

SEQ ID NO: 232898 - DNA, 23 bp, Artificial sequence
  SiRNA target sequence
atggttttattctgttttctatc

SEQ ID NO: 232899 - DNA, 23 bp, Artificial sequence
  SiRNA target sequence
tggttttattctgttttctatct

SEQ ID NO: 232900 - DNA, 23 bp, Artificial sequence
  SiRNA target sequence
ggttttattctgttttctatctc

SEQ ID NO: 232901 - DNA, 23 bp, Artificial sequence
  SiRNA target sequence
gttttattctgttttctatctca

SEQ ID NO: 232902 - DNA, 23 bp, Artificial sequence
  SiRNA target sequence
ttttattctgttttctatctcaa

SEQ ID NO: 232903 - DNA, 23 bp, Artificial sequence
  SiRNA target sequence
tttattctgttttctatctcaat

SEQ ID NO: 232904 - DNA, 23 bp, Artificial sequence
  SiRNA target sequence
ttattctgttttctatctcaata

SEQ ID NO: 232905 - DNA, 23 bp, Artificial sequence
  SiRNA target sequence
tattctgttttctatctcaatag

SEQ ID NO: 232906 - DNA, 23 bp, Artificial sequence
  SiRNA target sequence
attctgttttctatctcaataga

SEQ ID NO: 232907 - DNA, 23 bp, Artificial sequence
  SiRNA target sequence
ttctgttttctatctcaatagaa

SEQ ID NO: 232908 - DNA, 23 bp, Artificial sequence
  SiRNA target sequence
tctgttttctatctcaatagaaa

SEQ ID NO: 232909 - DNA, 23 bp, Artificial sequence
  SiRNA target sequence
ctgttttctatctcaatagaaaa

SEQ ID NO: 232910 - DNA, 23 bp, Artificial sequence
  SiRNA target sequence
tgttttctatctcaatagaaaat

SEQ ID NO: 232911 - DNA, 23 bp, Artificial sequence
  SiRNA target sequence
gttttctatctcaatagaaaata

SEQ ID NO: 232912 - DNA, 23 bp, Artificial sequence
  SiRNA target sequence
ttttctatctcaatagaaaatat

SEQ ID NO: 232913 - DNA, 23 bp, Artificial sequence
  SiRNA target sequence
tttctatctcaatagaaaatata

SEQ ID NO: 232914 - DNA, 23 bp, Artificial sequence
  SiRNA target sequence
ttctatctcaatagaaaatataa

SEQ ID NO: 232915 - DNA, 23 bp, Artificial sequence
  SiRNA target sequence
tctatctcaatagaaaatataaa

SEQ ID NO: 232916 - DNA, 23 bp, Artificial sequence
  SiRNA target sequence
ctatctcaatagaaaatataaag

SEQ ID NO: 232917 - DNA, 23 bp, Artificial sequence
  SiRNA target sequence
tatctcaatagaaaatataaaga

SEQ ID NO: 232918 - DNA, 23 bp, Artificial sequence
  SiRNA target sequence
atctcaatagaaaatataaagaa

SEQ ID NO: 232919 - DNA, 23 bp, Artificial sequence
  SiRNA target sequence
tctcaatagaaaatataaagaat

SEQ ID NO: 232920 - DNA, 23 bp, Artificial sequence
  SiRNA target sequence
ctcaatagaaaatataaagaatc

SEQ ID NO: 232921 - DNA, 23 bp, Artificial sequence
  SiRNA target sequence
tcaatagaaaatataaagaatct

SEQ ID NO: 232922 - DNA, 23 bp, Artificial sequence
  SiRNA target sequence
caatagaaaatataaagaatctg

SEQ ID NO: 232923 - DNA, 23 bp, Artificial sequence
  SiRNA target sequence
aatagaaaatataaagaatctgt

SEQ ID NO: 232924 - DNA, 23 bp, Artificial sequence
  SiRNA target sequence
atagaaaatataaagaatctgtc

SEQ ID NO: 232925 - DNA, 23 bp, Artificial sequence
  SiRNA target sequence
tagaaaatataaagaatctgtcg

SEQ ID NO: 232926 - DNA, 23 bp, Artificial sequence
  SiRNA target sequence
agaaaatataaagaatctgtcga

SEQ ID NO: 232927 - DNA, 23 bp, Artificial sequence
  SiRNA target sequence
gaaaatataaagaatctgtcgag

SEQ ID NO: 232928 - DNA, 23 bp, Artificial sequence
  SiRNA target sequence
aaaatataaagaatctgtcgaga

SEQ ID NO: 232929 - DNA, 23 bp, Artificial sequence
  SiRNA target sequence
aaatataaagaatctgtcgagaa

SEQ ID NO: 232930 - DNA, 23 bp, Artificial sequence
  SiRNA target sequence
aatataaagaatctgtcgagaat

SEQ ID NO: 232931 - DNA, 23 bp, Artificial sequence
  SiRNA target sequence
atataaagaatctgtcgagaata

SEQ ID NO: 232932 - DNA, 23 bp, Artificial sequence
  SiRNA target sequence
tataaagaatctgtcgagaataa

SEQ ID NO: 232933 - DNA, 23 bp, Artificial sequence
  SiRNA target sequence
ataaagaatctgtcgagaataat

SEQ ID NO: 232934 - DNA, 23 bp, Artificial sequence
  SiRNA target sequence
taaagaatctgtcgagaataatg

SEQ ID NO: 232935 - DNA, 23 bp, Artificial sequence
  SiRNA target sequence
aaagaatctgtcgagaataatgc

SEQ ID NO: 232936 - DNA, 23 bp, Artificial sequence
  SiRNA target sequence
aagaatctgtcgagaataatgca

SEQ ID NO: 232937 - DNA, 23 bp, Artificial sequence
  SiRNA target sequence
agaatctgtcgagaataatgcac

SEQ ID NO: 232938 - DNA, 23 bp, Artificial sequence
  SiRNA target sequence
gaatctgtcgagaataatgcacc

SEQ ID NO: 232939 - DNA, 23 bp, Artificial sequence
  SiRNA target sequence
aatctgtcgagaataatgcacca

SEQ ID NO: 232940 - DNA, 23 bp, Artificial sequence
  SiRNA target sequence
atctgtcgagaataatgcaccaa

SEQ ID NO: 232941 - DNA, 23 bp, Artificial sequence
  SiRNA target sequence
tctgtcgagaataatgcaccaat

SEQ ID NO: 232942 - DNA, 23 bp, Artificial sequence
  SiRNA target sequence
ctgtcgagaataatgcaccaatt

SEQ ID NO: 232943 - DNA, 23 bp, Artificial sequence
  SiRNA target sequence
tgtcgagaataatgcaccaattg

SEQ ID NO: 232944 - DNA, 23 bp, Artificial sequence
  SiRNA target sequence
gtcgagaataatgcaccaattga

SEQ ID NO: 232945 - DNA, 23 bp, Artificial sequence
  SiRNA target sequence
tcgagaataatgcaccaattgat

SEQ ID NO: 232946 - DNA, 23 bp, Artificial sequence
  SiRNA target sequence
cgagaataatgcaccaattgata

SEQ ID NO: 232947 - DNA, 23 bp, Artificial sequence
  SiRNA target sequence
gagaataatgcaccaattgatat

SEQ ID NO: 232948 - DNA, 23 bp, Artificial sequence
  SiRNA target sequence
agaataatgcaccaattgatatt

SEQ ID NO: 232949 - DNA, 23 bp, Artificial sequence
  SiRNA target sequence
gaataatgcaccaattgatattg

SEQ ID NO: 232950 - DNA, 23 bp, Artificial sequence
  SiRNA target sequence
aataatgcaccaattgatattga

SEQ ID NO: 232951 - DNA, 23 bp, Artificial sequence
  SiRNA target sequence
ataatgcaccaattgatattgat

SEQ ID NO: 232952 - DNA, 23 bp, Artificial sequence
  SiRNA target sequence
taatgcaccaattgatattgatt

SEQ ID NO: 232953 - DNA, 23 bp, Artificial sequence
  SiRNA target sequence
aatgcaccaattgatattgattt

SEQ ID NO: 232954 - DNA, 23 bp, Artificial sequence
  SiRNA target sequence
atgcaccaattgatattgattta

SEQ ID NO: 232955 - DNA, 23 bp, Artificial sequence
  SiRNA target sequence
tgcaccaattgatattgatttat

SEQ ID NO: 232956 - DNA, 23 bp, Artificial sequence
  SiRNA target sequence
gcaccaattgatattgatttatt

SEQ ID NO: 232957 - DNA, 23 bp, Artificial sequence
  SiRNA target sequence
caccaattgatattgatttattc

SEQ ID NO: 232958 - DNA, 23 bp, Artificial sequence
  SiRNA target sequence
accaattgatattgatttattca

SEQ ID NO: 232959 - DNA, 23 bp, Artificial sequence
  SiRNA target sequence
ccaattgatattgatttattcac

SEQ ID NO: 232960 - DNA, 23 bp, Artificial sequence
  SiRNA target sequence
caattgatattgatttattcact

SEQ ID NO: 232961 - DNA, 23 bp, Artificial sequence
  SiRNA target sequence
aattgatattgatttattcacta

SEQ ID NO: 232962 - DNA, 23 bp, Artificial sequence
  SiRNA target sequence
attgatattgatttattcactag

SEQ ID NO: 232963 - DNA, 23 bp, Artificial sequence
  SiRNA target sequence
ttgatattgatttattcactagt

SEQ ID NO: 232964 - DNA, 23 bp, Artificial sequence
  SiRNA target sequence
tgatattgatttattcactagtt

SEQ ID NO: 232965 - DNA, 23 bp, Artificial sequence
  SiRNA target sequence
gatattgatttattcactagttc

SEQ ID NO: 232966 - DNA, 23 bp, Artificial sequence
  SiRNA target sequence
atattgatttattcactagttca

SEQ ID NO: 232967 - DNA, 23 bp, Artificial sequence
  SiRNA target sequence
tattgatttattcactagttcaa

SEQ ID NO: 232968 - DNA, 23 bp, Artificial sequence
  SiRNA target sequence
attgatttattcactagttcaaa

SEQ ID NO: 232969 - DNA, 23 bp, Artificial sequence
  SiRNA target sequence
ttgatttattcactagttcaaaa

SEQ ID NO: 232970 - DNA, 23 bp, Artificial sequence
  SiRNA target sequence
tgatttattcactagttcaaaag

SEQ ID NO: 232971 - DNA, 23 bp, Artificial sequence
  SiRNA target sequence
gatttattcactagttcaaaagt

SEQ ID NO: 232972 - DNA, 23 bp, Artificial sequence
  SiRNA target sequence
atttattcactagttcaaaagtc

SEQ ID NO: 232973 - DNA, 23 bp, Artificial sequence
  SiRNA target sequence
tttattcactagttcaaaagtca

SEQ ID NO: 232974 - DNA, 23 bp, Artificial sequence
  SiRNA target sequence
ttattcactagttcaaaagtcaa

SEQ ID NO: 232975 - DNA, 23 bp, Artificial sequence
  SiRNA target sequence
tattcactagttcaaaagtcaag

SEQ ID NO: 232976 - DNA, 23 bp, Artificial sequence
  SiRNA target sequence
attcactagttcaaaagtcaagg

SEQ ID NO: 232977 - DNA, 23 bp, Artificial sequence
  SiRNA target sequence
ttcactagttcaaaagtcaaggc

SEQ ID NO: 232978 - DNA, 23 bp, Artificial sequence
  SiRNA target sequence
tcactagttcaaaagtcaaggca

SEQ ID NO: 232979 - DNA, 23 bp, Artificial sequence
  SiRNA target sequence
cactagttcaaaagtcaaggcac

SEQ ID NO: 232980 - DNA, 23 bp, Artificial sequence
  SiRNA target sequence
actagttcaaaagtcaaggcacc

SEQ ID NO: 232981 - DNA, 23 bp, Artificial sequence
  SiRNA target sequence
ctagttcaaaagtcaaggcacct

SEQ ID NO: 232982 - DNA, 23 bp, Artificial sequence
  SiRNA target sequence
tagttcaaaagtcaaggcacctt

SEQ ID NO: 232983 - DNA, 23 bp, Artificial sequence
  SiRNA target sequence
agttcaaaagtcaaggcaccttc

SEQ ID NO: 232984 - DNA, 23 bp, Artificial sequence
  SiRNA target sequence
gttcaaaagtcaaggcaccttct

SEQ ID NO: 232985 - DNA, 23 bp, Artificial sequence
  SiRNA target sequence
ttcaaaagtcaaggcaccttctt

SEQ ID NO: 232986 - DNA, 23 bp, Artificial sequence
  SiRNA target sequence
tcaaaagtcaaggcaccttcttc

SEQ ID NO: 232987 - DNA, 23 bp, Artificial sequence
  SiRNA target sequence
caaaagtcaaggcaccttcttct

SEQ ID NO: 232988 - DNA, 23 bp, Artificial sequence
  SiRNA target sequence
aaaagtcaaggcaccttcttctg

SEQ ID NO: 232989 - DNA, 23 bp, Artificial sequence
  SiRNA target sequence
aaagtcaaggcaccttcttctga

SEQ ID NO: 232990 - DNA, 23 bp, Artificial sequence
  SiRNA target sequence
aagtcaaggcaccttcttctgaa

SEQ ID NO: 232991 - DNA, 23 bp, Artificial sequence
  SiRNA target sequence
agtcaaggcaccttcttctgaac

SEQ ID NO: 232992 - DNA, 23 bp, Artificial sequence
  SiRNA target sequence
gtcaaggcaccttcttctgaacc

SEQ ID NO: 232993 - DNA, 23 bp, Artificial sequence
  SiRNA target sequence
tcaaggcaccttcttctgaacct

SEQ ID NO: 232994 - DNA, 23 bp, Artificial sequence
  SiRNA target sequence
caaggcaccttcttctgaaccta

SEQ ID NO: 232995 - DNA, 23 bp, Artificial sequence
  SiRNA target sequence
aaggcaccttcttctgaacctac

SEQ ID NO: 232996 - DNA, 23 bp, Artificial sequence
  SiRNA target sequence
aggcaccttcttctgaacctact

SEQ ID NO: 232997 - DNA, 23 bp, Artificial sequence
  SiRNA target sequence
ggcaccttcttctgaacctactg

SEQ ID NO: 232998 - DNA, 23 bp, Artificial sequence
  SiRNA target sequence
gcaccttcttctgaacctactgt

SEQ ID NO: 232999 - DNA, 23 bp, Artificial sequence
  SiRNA target sequence
caccttcttctgaacctactgtt

SEQ ID NO: 233000 - DNA, 23 bp, Artificial sequence
  SiRNA target sequence
accttcttctgaacctactgttg

SEQ ID NO: 233001 - DNA, 23 bp, Artificial sequence
  SiRNA target sequence
ccttcttctgaacctactgttgc

SEQ ID NO: 233002 - DNA, 23 bp, Artificial sequence
  SiRNA target sequence
cttcttctgaacctactgttgct

SEQ ID NO: 233003 - DNA, 23 bp, Artificial sequence
  SiRNA target sequence
ttcttctgaacctactgttgcta

SEQ ID NO: 233004 - DNA, 23 bp, Artificial sequence
  SiRNA target sequence
tcttctgaacctactgttgctac

SEQ ID NO: 233005 - DNA, 23 bp, Artificial sequence
  SiRNA target sequence
cttctgaacctactgttgctacc

SEQ ID NO: 233006 - DNA, 23 bp, Artificial sequence
  SiRNA target sequence
ttctgaacctactgttgctacca

SEQ ID NO: 233007 - DNA, 23 bp, Artificial sequence
  SiRNA target sequence
tctgaacctactgttgctaccaa

SEQ ID NO: 233008 - DNA, 23 bp, Artificial sequence
  SiRNA target sequence
ctgaacctactgttgctaccaaa

SEQ ID NO: 233009 - DNA, 23 bp, Artificial sequence
  SiRNA target sequence
tgaacctactgttgctaccaaaa

SEQ ID NO: 233010 - DNA, 23 bp, Artificial sequence
  SiRNA target sequence
gaacctactgttgctaccaaaag

SEQ ID NO: 233011 - DNA, 23 bp, Artificial sequence
  SiRNA target sequence
aacctactgttgctaccaaaagt

SEQ ID NO: 233012 - DNA, 23 bp, Artificial sequence
  SiRNA target sequence
acctactgttgctaccaaaagtg

SEQ ID NO: 233013 - DNA, 23 bp, Artificial sequence
  SiRNA target sequence
cctactgttgctaccaaaagtgt

SEQ ID NO: 233014 - DNA, 23 bp, Artificial sequence
  SiRNA target sequence
ctactgttgctaccaaaagtgtt

SEQ ID NO: 233015 - DNA, 23 bp, Artificial sequence
  SiRNA target sequence
tactgttgctaccaaaagtgtta

SEQ ID NO: 233016 - DNA, 23 bp, Artificial sequence
  SiRNA target sequence
actgttgctaccaaaagtgttac

SEQ ID NO: 233017 - DNA, 23 bp, Artificial sequence
  SiRNA target sequence
ctgttgctaccaaaagtgttact

SEQ ID NO: 233018 - DNA, 23 bp, Artificial sequence
  SiRNA target sequence
tgttgctaccaaaagtgttacta

SEQ ID NO: 233019 - DNA, 23 bp, Artificial sequence
  SiRNA target sequence
gttgctaccaaaagtgttactac

SEQ ID NO: 233020 - DNA, 23 bp, Artificial sequence
  SiRNA target sequence
ttgctaccaaaagtgttactaca

SEQ ID NO: 233021 - DNA, 23 bp, Artificial sequence
  SiRNA target sequence
tgctaccaaaagtgttactacag

SEQ ID NO: 233022 - DNA, 23 bp, Artificial sequence
  SiRNA target sequence
gctaccaaaagtgttactacaga

SEQ ID NO: 233023 - DNA, 23 bp, Artificial sequence
  SiRNA target sequence
ctaccaaaagtgttactacagaa

SEQ ID NO: 233024 - DNA, 23 bp, Artificial sequence
  SiRNA target sequence
taccaaaagtgttactacagaag

SEQ ID NO: 233025 - DNA, 23 bp, Artificial sequence
  SiRNA target sequence
accaaaagtgttactacagaaga

SEQ ID NO: 233026 - DNA, 23 bp, Artificial sequence
  SiRNA target sequence
ccaaaagtgttactacagaagaa

SEQ ID NO: 233027 - DNA, 23 bp, Artificial sequence
  SiRNA target sequence
caaaagtgttactacagaagaat

SEQ ID NO: 233028 - DNA, 23 bp, Artificial sequence
  SiRNA target sequence
aaaagtgttactacagaagaata

SEQ ID NO: 233029 - DNA, 23 bp, Artificial sequence
  SiRNA target sequence
aaagtgttactacagaagaataa

SEQ ID NO: 233030 - DNA, 24 bp, Artificial sequence
  SiRNA target sequence
atgtcagtagacaattcgaaagtt

SEQ ID NO: 233031 - DNA, 24 bp, Artificial sequence
  SiRNA target sequence
tgtcagtagacaattcgaaagttc

SEQ ID NO: 233032 - DNA, 24 bp, Artificial sequence
  SiRNA target sequence
gtcagtagacaattcgaaagttct

SEQ ID NO: 233033 - DNA, 24 bp, Artificial sequence
  SiRNA target sequence
tcagtagacaattcgaaagttcta

SEQ ID NO: 233034 - DNA, 24 bp, Artificial sequence
  SiRNA target sequence
cagtagacaattcgaaagttctac

SEQ ID NO: 233035 - DNA, 24 bp, Artificial sequence
  SiRNA target sequence
agtagacaattcgaaagttctaca

SEQ ID NO: 233036 - DNA, 24 bp, Artificial sequence
  SiRNA target sequence
gtagacaattcgaaagttctacaa

SEQ ID NO: 233037 - DNA, 24 bp, Artificial sequence
  SiRNA target sequence
tagacaattcgaaagttctacaaa

SEQ ID NO: 233038 - DNA, 24 bp, Artificial sequence
  SiRNA target sequence
agacaattcgaaagttctacaaaa

SEQ ID NO: 233039 - DNA, 24 bp, Artificial sequence
  SiRNA target sequence
gacaattcgaaagttctacaaaat

SEQ ID NO: 233040 - DNA, 24 bp, Artificial sequence
  SiRNA target sequence
acaattcgaaagttctacaaaata

SEQ ID NO: 233041 - DNA, 24 bp, Artificial sequence
  SiRNA target sequence
caattcgaaagttctacaaaataa

SEQ ID NO: 233042 - DNA, 24 bp, Artificial sequence
  SiRNA target sequence
aattcgaaagttctacaaaataac

SEQ ID NO: 233043 - DNA, 24 bp, Artificial sequence
  SiRNA target sequence
attcgaaagttctacaaaataacg

SEQ ID NO: 233044 - DNA, 24 bp, Artificial sequence
  SiRNA target sequence
ttcgaaagttctacaaaataacga

SEQ ID NO: 233045 - DNA, 24 bp, Artificial sequence
  SiRNA target sequence
tcgaaagttctacaaaataacgaa

SEQ ID NO: 233046 - DNA, 24 bp, Artificial sequence
  SiRNA target sequence
cgaaagttctacaaaataacgaaa

SEQ ID NO: 233047 - DNA, 24 bp, Artificial sequence
  SiRNA target sequence
gaaagttctacaaaataacgaaaa

SEQ ID NO: 233048 - DNA, 24 bp, Artificial sequence
  SiRNA target sequence
aaagttctacaaaataacgaaaac

SEQ ID NO: 233049 - DNA, 24 bp, Artificial sequence
  SiRNA target sequence
aagttctacaaaataacgaaaact

SEQ ID NO: 233050 - DNA, 24 bp, Artificial sequence
  SiRNA target sequence
agttctacaaaataacgaaaactc

SEQ ID NO: 233051 - DNA, 24 bp, Artificial sequence
  SiRNA target sequence
gttctacaaaataacgaaaactct

SEQ ID NO: 233052 - DNA, 24 bp, Artificial sequence
  SiRNA target sequence
ttctacaaaataacgaaaactctg

SEQ ID NO: 233053 - DNA, 24 bp, Artificial sequence
  SiRNA target sequence
tctacaaaataacgaaaactctgc

SEQ ID NO: 233054 - DNA, 24 bp, Artificial sequence
  SiRNA target sequence
ctacaaaataacgaaaactctgct

SEQ ID NO: 233055 - DNA, 24 bp, Artificial sequence
  SiRNA target sequence
tacaaaataacgaaaactctgctc

SEQ ID NO: 233056 - DNA, 24 bp, Artificial sequence
  SiRNA target sequence
acaaaataacgaaaactctgctct

SEQ ID NO: 233057 - DNA, 24 bp, Artificial sequence
  SiRNA target sequence
caaaataacgaaaactctgctctt

SEQ ID NO: 233058 - DNA, 24 bp, Artificial sequence
  SiRNA target sequence
aaaataacgaaaactctgctcttc

SEQ ID NO: 233059 - DNA, 24 bp, Artificial sequence
  SiRNA target sequence
aaataacgaaaactctgctcttcc

SEQ ID NO: 233060 - DNA, 24 bp, Artificial sequence
  SiRNA target sequence
aataacgaaaactctgctcttcct

SEQ ID NO: 233061 - DNA, 24 bp, Artificial sequence
  SiRNA target sequence
ataacgaaaactctgctcttccta

SEQ ID NO: 233062 - DNA, 24 bp, Artificial sequence
  SiRNA target sequence
taacgaaaactctgctcttcctac

SEQ ID NO: 233063 - DNA, 24 bp, Artificial sequence
  SiRNA target sequence
aacgaaaactctgctcttcctaca

SEQ ID NO: 233064 - DNA, 24 bp, Artificial sequence
  SiRNA target sequence
acgaaaactctgctcttcctacag

SEQ ID NO: 233065 - DNA, 24 bp, Artificial sequence
  SiRNA target sequence
cgaaaactctgctcttcctacaga

SEQ ID NO: 233066 - DNA, 24 bp, Artificial sequence
  SiRNA target sequence
gaaaactctgctcttcctacagaa

SEQ ID NO: 233067 - DNA, 24 bp, Artificial sequence
  SiRNA target sequence
aaaactctgctcttcctacagaag

SEQ ID NO: 233068 - DNA, 24 bp, Artificial sequence
  SiRNA target sequence
aaactctgctcttcctacagaaga

SEQ ID NO: 233069 - DNA, 24 bp, Artificial sequence
  SiRNA target sequence
aactctgctcttcctacagaagat

SEQ ID NO: 233070 - DNA, 24 bp, Artificial sequence
  SiRNA target sequence
actctgctcttcctacagaagatg

SEQ ID NO: 233071 - DNA, 24 bp, Artificial sequence
  SiRNA target sequence
ctctgctcttcctacagaagatga

SEQ ID NO: 233072 - DNA, 24 bp, Artificial sequence
  SiRNA target sequence
tctgctcttcctacagaagatgaa

SEQ ID NO: 233073 - DNA, 24 bp, Artificial sequence
  SiRNA target sequence
ctgctcttcctacagaagatgaaa

SEQ ID NO: 233074 - DNA, 24 bp, Artificial sequence
  SiRNA target sequence
tgctcttcctacagaagatgaaat

SEQ ID NO: 233075 - DNA, 24 bp, Artificial sequence
  SiRNA target sequence
gctcttcctacagaagatgaaatt

SEQ ID NO: 233076 - DNA, 24 bp, Artificial sequence
  SiRNA target sequence
ctcttcctacagaagatgaaattg

SEQ ID NO: 233077 - DNA, 24 bp, Artificial sequence
  SiRNA target sequence
tcttcctacagaagatgaaattga

SEQ ID NO: 233078 - DNA, 24 bp, Artificial sequence
  SiRNA target sequence
cttcctacagaagatgaaattgag

SEQ ID NO: 233079 - DNA, 24 bp, Artificial sequence
  SiRNA target sequence
ttcctacagaagatgaaattgagt

SEQ ID NO: 233080 - DNA, 24 bp, Artificial sequence
  SiRNA target sequence
tcctacagaagatgaaattgagta

SEQ ID NO: 233081 - DNA, 24 bp, Artificial sequence
  SiRNA target sequence
cctacagaagatgaaattgagtat

SEQ ID NO: 233082 - DNA, 24 bp, Artificial sequence
  SiRNA target sequence
ctacagaagatgaaattgagtatg

SEQ ID NO: 233083 - DNA, 24 bp, Artificial sequence
  SiRNA target sequence
tacagaagatgaaattgagtatga

SEQ ID NO: 233084 - DNA, 24 bp, Artificial sequence
  SiRNA target sequence
acagaagatgaaattgagtatgag

SEQ ID NO: 233085 - DNA, 24 bp, Artificial sequence
  SiRNA target sequence
cagaagatgaaattgagtatgagg

SEQ ID NO: 233086 - DNA, 24 bp, Artificial sequence
  SiRNA target sequence
agaagatgaaattgagtatgaggc

SEQ ID NO: 233087 - DNA, 24 bp, Artificial sequence
  SiRNA target sequence
gaagatgaaattgagtatgaggcc

SEQ ID NO: 233088 - DNA, 24 bp, Artificial sequence
  SiRNA target sequence
aagatgaaattgagtatgaggcca

SEQ ID NO: 233089 - DNA, 24 bp, Artificial sequence
  SiRNA target sequence
agatgaaattgagtatgaggccag

SEQ ID NO: 233090 - DNA, 24 bp, Artificial sequence
  SiRNA target sequence
gatgaaattgagtatgaggccagc

SEQ ID NO: 233091 - DNA, 24 bp, Artificial sequence
  SiRNA target sequence
atgaaattgagtatgaggccagca

SEQ ID NO: 233092 - DNA, 24 bp, Artificial sequence
  SiRNA target sequence
tgaaattgagtatgaggccagcaa

SEQ ID NO: 233093 - DNA, 24 bp, Artificial sequence
  SiRNA target sequence
gaaattgagtatgaggccagcaat

SEQ ID NO: 233094 - DNA, 24 bp, Artificial sequence
  SiRNA target sequence
aaattgagtatgaggccagcaatg

SEQ ID NO: 233095 - DNA, 24 bp, Artificial sequence
  SiRNA target sequence
aattgagtatgaggccagcaatgg

SEQ ID NO: 233096 - DNA, 24 bp, Artificial sequence
  SiRNA target sequence
attgagtatgaggccagcaatggt

SEQ ID NO: 233097 - DNA, 24 bp, Artificial sequence
  SiRNA target sequence
ttgagtatgaggccagcaatggtt

SEQ ID NO: 233098 - DNA, 24 bp, Artificial sequence
  SiRNA target sequence
tgagtatgaggccagcaatggttc

SEQ ID NO: 233099 - DNA, 24 bp, Artificial sequence
  SiRNA target sequence
gagtatgaggccagcaatggttct

SEQ ID NO: 233100 - DNA, 24 bp, Artificial sequence
  SiRNA target sequence
agtatgaggccagcaatggttctg

SEQ ID NO: 233101 - DNA, 24 bp, Artificial sequence
  SiRNA target sequence
gtatgaggccagcaatggttctgg

SEQ ID NO: 233102 - DNA, 24 bp, Artificial sequence
  SiRNA target sequence
tatgaggccagcaatggttctggt

SEQ ID NO: 233103 - DNA, 24 bp, Artificial sequence
  SiRNA target sequence
atgaggccagcaatggttctggta

SEQ ID NO: 233104 - DNA, 24 bp, Artificial sequence
  SiRNA target sequence
tgaggccagcaatggttctggtat

SEQ ID NO: 233105 - DNA, 24 bp, Artificial sequence
  SiRNA target sequence
gaggccagcaatggttctggtata

SEQ ID NO: 233106 - DNA, 24 bp, Artificial sequence
  SiRNA target sequence
aggccagcaatggttctggtatat

SEQ ID NO: 233107 - DNA, 24 bp, Artificial sequence
  SiRNA target sequence
ggccagcaatggttctggtatata

SEQ ID NO: 233108 - DNA, 24 bp, Artificial sequence
  SiRNA target sequence
gccagcaatggttctggtatatat

SEQ ID NO: 233109 - DNA, 24 bp, Artificial sequence
  SiRNA target sequence
ccagcaatggttctggtatatatt

SEQ ID NO: 233110 - DNA, 24 bp, Artificial sequence
  SiRNA target sequence
cagcaatggttctggtatatattc

SEQ ID NO: 233111 - DNA, 24 bp, Artificial sequence
  SiRNA target sequence
agcaatggttctggtatatattca

SEQ ID NO: 233112 - DNA, 24 bp, Artificial sequence
  SiRNA target sequence
gcaatggttctggtatatattcac

SEQ ID NO: 233113 - DNA, 24 bp, Artificial sequence
  SiRNA target sequence
caatggttctggtatatattcact

SEQ ID NO: 233114 - DNA, 24 bp, Artificial sequence
  SiRNA target sequence
aatggttctggtatatattcactt

SEQ ID NO: 233115 - DNA, 24 bp, Artificial sequence
  SiRNA target sequence
atggttctggtatatattcactta

SEQ ID NO: 233116 - DNA, 24 bp, Artificial sequence
  SiRNA target sequence
tggttctggtatatattcacttat

SEQ ID NO: 233117 - DNA, 24 bp, Artificial sequence
  SiRNA target sequence
ggttctggtatatattcacttatt

SEQ ID NO: 233118 - DNA, 24 bp, Artificial sequence
  SiRNA target sequence
gttctggtatatattcacttatta

SEQ ID NO: 233119 - DNA, 24 bp, Artificial sequence
  SiRNA target sequence
ttctggtatatattcacttattag

SEQ ID NO: 233120 - DNA, 24 bp, Artificial sequence
  SiRNA target sequence
tctggtatatattcacttattaga

SEQ ID NO: 233121 - DNA, 24 bp, Artificial sequence
  SiRNA target sequence
ctggtatatattcacttattagag

SEQ ID NO: 233122 - DNA, 24 bp, Artificial sequence
  SiRNA target sequence
tggtatatattcacttattagagt

SEQ ID NO: 233123 - DNA, 24 bp, Artificial sequence
  SiRNA target sequence
ggtatatattcacttattagagta

SEQ ID NO: 233124 - DNA, 24 bp, Artificial sequence
  SiRNA target sequence
gtatatattcacttattagagtag

SEQ ID NO: 233125 - DNA, 24 bp, Artificial sequence
  SiRNA target sequence
tatatattcacttattagagtagc

SEQ ID NO: 233126 - DNA, 24 bp, Artificial sequence
  SiRNA target sequence
atatattcacttattagagtagca

SEQ ID NO: 233127 - DNA, 24 bp, Artificial sequence
  SiRNA target sequence
tatattcacttattagagtagcaa

SEQ ID NO: 233128 - DNA, 24 bp, Artificial sequence
  SiRNA target sequence
atattcacttattagagtagcaaa

SEQ ID NO: 233129 - DNA, 24 bp, Artificial sequence
  SiRNA target sequence
tattcacttattagagtagcaaag

SEQ ID NO: 233130 - DNA, 24 bp, Artificial sequence
  SiRNA target sequence
attcacttattagagtagcaaagg

SEQ ID NO: 233131 - DNA, 24 bp, Artificial sequence
  SiRNA target sequence
ttcacttattagagtagcaaaggt

SEQ ID NO: 233132 - DNA, 24 bp, Artificial sequence
  SiRNA target sequence
tcacttattagagtagcaaaggtt

SEQ ID NO: 233133 - DNA, 24 bp, Artificial sequence
  SiRNA target sequence
cacttattagagtagcaaaggttg

SEQ ID NO: 233134 - DNA, 24 bp, Artificial sequence
  SiRNA target sequence
acttattagagtagcaaaggttga

SEQ ID NO: 233135 - DNA, 24 bp, Artificial sequence
  SiRNA target sequence
cttattagagtagcaaaggttgag

SEQ ID NO: 233136 - DNA, 24 bp, Artificial sequence
  SiRNA target sequence
ttattagagtagcaaaggttgaga

SEQ ID NO: 233137 - DNA, 24 bp, Artificial sequence
  SiRNA target sequence
tattagagtagcaaaggttgagag

SEQ ID NO: 233138 - DNA, 24 bp, Artificial sequence
  SiRNA target sequence
attagagtagcaaaggttgagaga

SEQ ID NO: 233139 - DNA, 24 bp, Artificial sequence
  SiRNA target sequence
ttagagtagcaaaggttgagagaa

SEQ ID NO: 233140 - DNA, 24 bp, Artificial sequence
  SiRNA target sequence
tagagtagcaaaggttgagagaaa

SEQ ID NO: 233141 - DNA, 24 bp, Artificial sequence
  SiRNA target sequence
agagtagcaaaggttgagagaaag

SEQ ID NO: 233142 - DNA, 24 bp, Artificial sequence
  SiRNA target sequence
gagtagcaaaggttgagagaaaga

SEQ ID NO: 233143 - DNA, 24 bp, Artificial sequence
  SiRNA target sequence
agtagcaaaggttgagagaaagat

SEQ ID NO: 233144 - DNA, 24 bp, Artificial sequence
  SiRNA target sequence
gtagcaaaggttgagagaaagatg

SEQ ID NO: 233145 - DNA, 24 bp, Artificial sequence
  SiRNA target sequence
tagcaaaggttgagagaaagatgt

SEQ ID NO: 233146 - DNA, 24 bp, Artificial sequence
  SiRNA target sequence
agcaaaggttgagagaaagatgtt

SEQ ID NO: 233147 - DNA, 24 bp, Artificial sequence
  SiRNA target sequence
gcaaaggttgagagaaagatgttt

SEQ ID NO: 233148 - DNA, 24 bp, Artificial sequence
  SiRNA target sequence
caaaggttgagagaaagatgtttt

SEQ ID NO: 233149 - DNA, 24 bp, Artificial sequence
  SiRNA target sequence
aaaggttgagagaaagatgttttg

SEQ ID NO: 233150 - DNA, 24 bp, Artificial sequence
  SiRNA target sequence
aaggttgagagaaagatgttttgg

SEQ ID NO: 233151 - DNA, 24 bp, Artificial sequence
  SiRNA target sequence
aggttgagagaaagatgttttgga

SEQ ID NO: 233152 - DNA, 24 bp, Artificial sequence
  SiRNA target sequence
ggttgagagaaagatgttttggat

SEQ ID NO: 233153 - DNA, 24 bp, Artificial sequence
  SiRNA target sequence
gttgagagaaagatgttttggatc

SEQ ID NO: 233154 - DNA, 24 bp, Artificial sequence
  SiRNA target sequence
ttgagagaaagatgttttggatca

SEQ ID NO: 233155 - DNA, 24 bp, Artificial sequence
  SiRNA target sequence
tgagagaaagatgttttggatcat

SEQ ID NO: 233156 - DNA, 24 bp, Artificial sequence
  SiRNA target sequence
gagagaaagatgttttggatcatg

SEQ ID NO: 233157 - DNA, 24 bp, Artificial sequence
  SiRNA target sequence
agagaaagatgttttggatcatgg

SEQ ID NO: 233158 - DNA, 24 bp, Artificial sequence
  SiRNA target sequence
gagaaagatgttttggatcatggc

SEQ ID NO: 233159 - DNA, 24 bp, Artificial sequence
  SiRNA target sequence
agaaagatgttttggatcatggca

SEQ ID NO: 233160 - DNA, 24 bp, Artificial sequence
  SiRNA target sequence
gaaagatgttttggatcatggcag

SEQ ID NO: 233161 - DNA, 24 bp, Artificial sequence
  SiRNA target sequence
aaagatgttttggatcatggcagc

SEQ ID NO: 233162 - DNA, 24 bp, Artificial sequence
  SiRNA target sequence
aagatgttttggatcatggcagct

SEQ ID NO: 233163 - DNA, 24 bp, Artificial sequence
  SiRNA target sequence
agatgttttggatcatggcagcta

SEQ ID NO: 233164 - DNA, 24 bp, Artificial sequence
  SiRNA target sequence
gatgttttggatcatggcagctat

SEQ ID NO: 233165 - DNA, 24 bp, Artificial sequence
  SiRNA target sequence
atgttttggatcatggcagctatg

SEQ ID NO: 233166 - DNA, 24 bp, Artificial sequence
  SiRNA target sequence
tgttttggatcatggcagctatgt

SEQ ID NO: 233167 - DNA, 24 bp, Artificial sequence
  SiRNA target sequence
gttttggatcatggcagctatgtt

SEQ ID NO: 233168 - DNA, 24 bp, Artificial sequence
  SiRNA target sequence
ttttggatcatggcagctatgttc

SEQ ID NO: 233169 - DNA, 24 bp, Artificial sequence
  SiRNA target sequence
tttggatcatggcagctatgttct

SEQ ID NO: 233170 - DNA, 24 bp, Artificial sequence
  SiRNA target sequence
ttggatcatggcagctatgttctt

SEQ ID NO: 233171 - DNA, 24 bp, Artificial sequence
  SiRNA target sequence
tggatcatggcagctatgttcttt

SEQ ID NO: 233172 - DNA, 24 bp, Artificial sequence
  SiRNA target sequence
ggatcatggcagctatgttcttta

SEQ ID NO: 233173 - DNA, 24 bp, Artificial sequence
  SiRNA target sequence
gatcatggcagctatgttctttat

SEQ ID NO: 233174 - DNA, 24 bp, Artificial sequence
  SiRNA target sequence
atcatggcagctatgttctttatt

SEQ ID NO: 233175 - DNA, 24 bp, Artificial sequence
  SiRNA target sequence
tcatggcagctatgttctttatta

SEQ ID NO: 233176 - DNA, 24 bp, Artificial sequence
  SiRNA target sequence
catggcagctatgttctttattat

SEQ ID NO: 233177 - DNA, 24 bp, Artificial sequence
  SiRNA target sequence
atggcagctatgttctttattatc

SEQ ID NO: 233178 - DNA, 24 bp, Artificial sequence
  SiRNA target sequence
tggcagctatgttctttattatct

SEQ ID NO: 233179 - DNA, 24 bp, Artificial sequence
  SiRNA target sequence
ggcagctatgttctttattatctc

SEQ ID NO: 233180 - DNA, 24 bp, Artificial sequence
  SiRNA target sequence
gcagctatgttctttattatctcc

SEQ ID NO: 233181 - DNA, 24 bp, Artificial sequence
  SiRNA target sequence
cagctatgttctttattatctcct

SEQ ID NO: 233182 - DNA, 24 bp, Artificial sequence
  SiRNA target sequence
agctatgttctttattatctcctt

SEQ ID NO: 233183 - DNA, 24 bp, Artificial sequence
  SiRNA target sequence
gctatgttctttattatctccttt

SEQ ID NO: 233184 - DNA, 24 bp, Artificial sequence
  SiRNA target sequence
ctatgttctttattatctccttta

SEQ ID NO: 233185 - DNA, 24 bp, Artificial sequence
  SiRNA target sequence
tatgttctttattatctcctttat

SEQ ID NO: 233186 - DNA, 24 bp, Artificial sequence
  SiRNA target sequence
atgttctttattatctcctttatt

SEQ ID NO: 233187 - DNA, 24 bp, Artificial sequence
  SiRNA target sequence
tgttctttattatctcctttattt

SEQ ID NO: 233188 - DNA, 24 bp, Artificial sequence
  SiRNA target sequence
gttctttattatctcctttattta

SEQ ID NO: 233189 - DNA, 24 bp, Artificial sequence
  SiRNA target sequence
ttctttattatctcctttatttat

SEQ ID NO: 233190 - DNA, 24 bp, Artificial sequence
  SiRNA target sequence
tctttattatctcctttatttatt

SEQ ID NO: 233191 - DNA, 24 bp, Artificial sequence
  SiRNA target sequence
ctttattatctcctttatttattc

SEQ ID NO: 233192 - DNA, 24 bp, Artificial sequence
  SiRNA target sequence
tttattatctcctttatttattcg

SEQ ID NO: 233193 - DNA, 24 bp, Artificial sequence
  SiRNA target sequence
ttattatctcctttatttattcgg

SEQ ID NO: 233194 - DNA, 24 bp, Artificial sequence
  SiRNA target sequence
tattatctcctttatttattcggt

SEQ ID NO: 233195 - DNA, 24 bp, Artificial sequence
  SiRNA target sequence
attatctcctttatttattcggtg

SEQ ID NO: 233196 - DNA, 24 bp, Artificial sequence
  SiRNA target sequence
ttatctcctttatttattcggtgg

SEQ ID NO: 233197 - DNA, 24 bp, Artificial sequence
  SiRNA target sequence
tatctcctttatttattcggtggc

SEQ ID NO: 233198 - DNA, 24 bp, Artificial sequence
  SiRNA target sequence
atctcctttatttattcggtggct

SEQ ID NO: 233199 - DNA, 24 bp, Artificial sequence
  SiRNA target sequence
tctcctttatttattcggtggcta

SEQ ID NO: 233200 - DNA, 24 bp, Artificial sequence
  SiRNA target sequence
ctcctttatttattcggtggctag

SEQ ID NO: 233201 - DNA, 24 bp, Artificial sequence
  SiRNA target sequence
tcctttatttattcggtggctaga

SEQ ID NO: 233202 - DNA, 24 bp, Artificial sequence
  SiRNA target sequence
cctttatttattcggtggctagag

SEQ ID NO: 233203 - DNA, 24 bp, Artificial sequence
  SiRNA target sequence
ctttatttattcggtggctagagt

SEQ ID NO: 233204 - DNA, 24 bp, Artificial sequence
  SiRNA target sequence
tttatttattcggtggctagagtg

SEQ ID NO: 233205 - DNA, 24 bp, Artificial sequence
  SiRNA target sequence
ttatttattcggtggctagagtgc

SEQ ID NO: 233206 - DNA, 24 bp, Artificial sequence
  SiRNA target sequence
tatttattcggtggctagagtgct

SEQ ID NO: 233207 - DNA, 24 bp, Artificial sequence
  SiRNA target sequence
atttattcggtggctagagtgctt

SEQ ID NO: 233208 - DNA, 24 bp, Artificial sequence
  SiRNA target sequence
tttattcggtggctagagtgctta

SEQ ID NO: 233209 - DNA, 24 bp, Artificial sequence
  SiRNA target sequence
ttattcggtggctagagtgcttaa

SEQ ID NO: 233210 - DNA, 24 bp, Artificial sequence
  SiRNA target sequence
tattcggtggctagagtgcttaaa

SEQ ID NO: 233211 - DNA, 24 bp, Artificial sequence
  SiRNA target sequence
attcggtggctagagtgcttaaag

SEQ ID NO: 233212 - DNA, 24 bp, Artificial sequence
  SiRNA target sequence
ttcggtggctagagtgcttaaaga

SEQ ID NO: 233213 - DNA, 24 bp, Artificial sequence
  SiRNA target sequence
tcggtggctagagtgcttaaagat

SEQ ID NO: 233214 - DNA, 24 bp, Artificial sequence
  SiRNA target sequence
cggtggctagagtgcttaaagatg

SEQ ID NO: 233215 - DNA, 24 bp, Artificial sequence
  SiRNA target sequence
ggtggctagagtgcttaaagatgc

SEQ ID NO: 233216 - DNA, 24 bp, Artificial sequence
  SiRNA target sequence
gtggctagagtgcttaaagatgcc

SEQ ID NO: 233217 - DNA, 24 bp, Artificial sequence
  SiRNA target sequence
tggctagagtgcttaaagatgccg

SEQ ID NO: 233218 - DNA, 24 bp, Artificial sequence
  SiRNA target sequence
ggctagagtgcttaaagatgccgc

SEQ ID NO: 233219 - DNA, 24 bp, Artificial sequence
  SiRNA target sequence
gctagagtgcttaaagatgccgct

SEQ ID NO: 233220 - DNA, 24 bp, Artificial sequence
  SiRNA target sequence
ctagagtgcttaaagatgccgctg

SEQ ID NO: 233221 - DNA, 24 bp, Artificial sequence
  SiRNA target sequence
tagagtgcttaaagatgccgctgt

SEQ ID NO: 233222 - DNA, 24 bp, Artificial sequence
  SiRNA target sequence
agagtgcttaaagatgccgctgtt

SEQ ID NO: 233223 - DNA, 24 bp, Artificial sequence
  SiRNA target sequence
gagtgcttaaagatgccgctgtta

SEQ ID NO: 233224 - DNA, 24 bp, Artificial sequence
  SiRNA target sequence
agtgcttaaagatgccgctgttat

SEQ ID NO: 233225 - DNA, 24 bp, Artificial sequence
  SiRNA target sequence
gtgcttaaagatgccgctgttatt

SEQ ID NO: 233226 - DNA, 24 bp, Artificial sequence
  SiRNA target sequence
tgcttaaagatgccgctgttattg

SEQ ID NO: 233227 - DNA, 24 bp, Artificial sequence
  SiRNA target sequence
gcttaaagatgccgctgttattgg

SEQ ID NO: 233228 - DNA, 24 bp, Artificial sequence
  SiRNA target sequence
cttaaagatgccgctgttattggt

SEQ ID NO: 233229 - DNA, 24 bp, Artificial sequence
  SiRNA target sequence
ttaaagatgccgctgttattggta

SEQ ID NO: 233230 - DNA, 24 bp, Artificial sequence
  SiRNA target sequence
taaagatgccgctgttattggtaa

SEQ ID NO: 233231 - DNA, 24 bp, Artificial sequence
  SiRNA target sequence
aaagatgccgctgttattggtaaa

SEQ ID NO: 233232 - DNA, 24 bp, Artificial sequence
  SiRNA target sequence
aagatgccgctgttattggtaaac

SEQ ID NO: 233233 - DNA, 24 bp, Artificial sequence
  SiRNA target sequence
agatgccgctgttattggtaaaca

SEQ ID NO: 233234 - DNA, 24 bp, Artificial sequence
  SiRNA target sequence
gatgccgctgttattggtaaacaa

SEQ ID NO: 233235 - DNA, 24 bp, Artificial sequence
  SiRNA target sequence
atgccgctgttattggtaaacaac

SEQ ID NO: 233236 - DNA, 24 bp, Artificial sequence
  SiRNA target sequence
tgccgctgttattggtaaacaact

SEQ ID NO: 233237 - DNA, 24 bp, Artificial sequence
  SiRNA target sequence
gccgctgttattggtaaacaactc

SEQ ID NO: 233238 - DNA, 24 bp, Artificial sequence
  SiRNA target sequence
ccgctgttattggtaaacaactcc

SEQ ID NO: 233239 - DNA, 24 bp, Artificial sequence
  SiRNA target sequence
cgctgttattggtaaacaactccc

SEQ ID NO: 233240 - DNA, 24 bp, Artificial sequence
  SiRNA target sequence
gctgttattggtaaacaactccca

SEQ ID NO: 233241 - DNA, 24 bp, Artificial sequence
  SiRNA target sequence
ctgttattggtaaacaactcccag

SEQ ID NO: 233242 - DNA, 24 bp, Artificial sequence
  SiRNA target sequence
tgttattggtaaacaactcccagc

SEQ ID NO: 233243 - DNA, 24 bp, Artificial sequence
  SiRNA target sequence
gttattggtaaacaactcccagcg

SEQ ID NO: 233244 - DNA, 24 bp, Artificial sequence
  SiRNA target sequence
ttattggtaaacaactcccagcgt

SEQ ID NO: 233245 - DNA, 24 bp, Artificial sequence
  SiRNA target sequence
tattggtaaacaactcccagcgtc

SEQ ID NO: 233246 - DNA, 24 bp, Artificial sequence
  SiRNA target sequence
attggtaaacaactcccagcgtca

SEQ ID NO: 233247 - DNA, 24 bp, Artificial sequence
  SiRNA target sequence
ttggtaaacaactcccagcgtcaa

SEQ ID NO: 233248 - DNA, 24 bp, Artificial sequence
  SiRNA target sequence
tggtaaacaactcccagcgtcaat

SEQ ID NO: 233249 - DNA, 24 bp, Artificial sequence
  SiRNA target sequence
ggtaaacaactcccagcgtcaatt

SEQ ID NO: 233250 - DNA, 24 bp, Artificial sequence
  SiRNA target sequence
gtaaacaactcccagcgtcaattt

SEQ ID NO: 233251 - DNA, 24 bp, Artificial sequence
  SiRNA target sequence
taaacaactcccagcgtcaatttt

SEQ ID NO: 233252 - DNA, 24 bp, Artificial sequence
  SiRNA target sequence
aaacaactcccagcgtcaattttc

SEQ ID NO: 233253 - DNA, 24 bp, Artificial sequence
  SiRNA target sequence
aacaactcccagcgtcaattttct

SEQ ID NO: 233254 - DNA, 24 bp, Artificial sequence
  SiRNA target sequence
acaactcccagcgtcaattttctt

SEQ ID NO: 233255 - DNA, 24 bp, Artificial sequence
  SiRNA target sequence
caactcccagcgtcaattttcttt

SEQ ID NO: 233256 - DNA, 24 bp, Artificial sequence
  SiRNA target sequence
aactcccagcgtcaattttctttt

SEQ ID NO: 233257 - DNA, 24 bp, Artificial sequence
  SiRNA target sequence
actcccagcgtcaattttcttttt

SEQ ID NO: 233258 - DNA, 24 bp, Artificial sequence
  SiRNA target sequence
ctcccagcgtcaattttctttttg

SEQ ID NO: 233259 - DNA, 24 bp, Artificial sequence
  SiRNA target sequence
tcccagcgtcaattttctttttga

SEQ ID NO: 233260 - DNA, 24 bp, Artificial sequence
  SiRNA target sequence
cccagcgtcaattttctttttgaa

SEQ ID NO: 233261 - DNA, 24 bp, Artificial sequence
  SiRNA target sequence
ccagcgtcaattttctttttgaaa

SEQ ID NO: 233262 - DNA, 24 bp, Artificial sequence
  SiRNA target sequence
cagcgtcaattttctttttgaaat

SEQ ID NO: 233263 - DNA, 24 bp, Artificial sequence
  SiRNA target sequence
agcgtcaattttctttttgaaatt

SEQ ID NO: 233264 - DNA, 24 bp, Artificial sequence
  SiRNA target sequence
gcgtcaattttctttttgaaattt

SEQ ID NO: 233265 - DNA, 24 bp, Artificial sequence
  SiRNA target sequence
cgtcaattttctttttgaaatttg

SEQ ID NO: 233266 - DNA, 24 bp, Artificial sequence
  SiRNA target sequence
gtcaattttctttttgaaatttgt

SEQ ID NO: 233267 - DNA, 24 bp, Artificial sequence
  SiRNA target sequence
tcaattttctttttgaaatttgtt

SEQ ID NO: 233268 - DNA, 24 bp, Artificial sequence
  SiRNA target sequence
caattttctttttgaaatttgtta

SEQ ID NO: 233269 - DNA, 24 bp, Artificial sequence
  SiRNA target sequence
aattttctttttgaaatttgttat

SEQ ID NO: 233270 - DNA, 24 bp, Artificial sequence
  SiRNA target sequence
attttctttttgaaatttgttatt

SEQ ID NO: 233271 - DNA, 24 bp, Artificial sequence
  SiRNA target sequence
ttttctttttgaaatttgttatta

SEQ ID NO: 233272 - DNA, 24 bp, Artificial sequence
  SiRNA target sequence
tttctttttgaaatttgttattat

SEQ ID NO: 233273 - DNA, 24 bp, Artificial sequence
  SiRNA target sequence
ttctttttgaaatttgttattatc

SEQ ID NO: 233274 - DNA, 24 bp, Artificial sequence
  SiRNA target sequence
tctttttgaaatttgttattatcc

SEQ ID NO: 233275 - DNA, 24 bp, Artificial sequence
  SiRNA target sequence
ctttttgaaatttgttattatcct

SEQ ID NO: 233276 - DNA, 24 bp, Artificial sequence
  SiRNA target sequence
tttttgaaatttgttattatcctt

SEQ ID NO: 233277 - DNA, 24 bp, Artificial sequence
  SiRNA target sequence
ttttgaaatttgttattatccttc

SEQ ID NO: 233278 - DNA, 24 bp, Artificial sequence
  SiRNA target sequence
tttgaaatttgttattatccttcc

SEQ ID NO: 233279 - DNA, 24 bp, Artificial sequence
  SiRNA target sequence
ttgaaatttgttattatccttccg

SEQ ID NO: 233280 - DNA, 24 bp, Artificial sequence
  SiRNA target sequence
tgaaatttgttattatccttccgt

SEQ ID NO: 233281 - DNA, 24 bp, Artificial sequence
  SiRNA target sequence
gaaatttgttattatccttccgtt

SEQ ID NO: 233282 - DNA, 24 bp, Artificial sequence
  SiRNA target sequence
aaatttgttattatccttccgttc

SEQ ID NO: 233283 - DNA, 24 bp, Artificial sequence
  SiRNA target sequence
aatttgttattatccttccgttct

SEQ ID NO: 233284 - DNA, 24 bp, Artificial sequence
  SiRNA target sequence
atttgttattatccttccgttctc

SEQ ID NO: 233285 - DNA, 24 bp, Artificial sequence
  SiRNA target sequence
tttgttattatccttccgttctca

SEQ ID NO: 233286 - DNA, 24 bp, Artificial sequence
  SiRNA target sequence
ttgttattatccttccgttctcat

SEQ ID NO: 233287 - DNA, 24 bp, Artificial sequence
  SiRNA target sequence
tgttattatccttccgttctcatt

SEQ ID NO: 233288 - DNA, 24 bp, Artificial sequence
  SiRNA target sequence
gttattatccttccgttctcattt

SEQ ID NO: 233289 - DNA, 24 bp, Artificial sequence
  SiRNA target sequence
ttattatccttccgttctcattta

SEQ ID NO: 233290 - DNA, 24 bp, Artificial sequence
  SiRNA target sequence
tattatccttccgttctcatttat

SEQ ID NO: 233291 - DNA, 24 bp, Artificial sequence
  SiRNA target sequence
attatccttccgttctcatttatt

SEQ ID NO: 233292 - DNA, 24 bp, Artificial sequence
  SiRNA target sequence
ttatccttccgttctcatttattt

SEQ ID NO: 233293 - DNA, 24 bp, Artificial sequence
  SiRNA target sequence
tatccttccgttctcatttatttc

SEQ ID NO: 233294 - DNA, 24 bp, Artificial sequence
  SiRNA target sequence
atccttccgttctcatttatttca

SEQ ID NO: 233295 - DNA, 24 bp, Artificial sequence
  SiRNA target sequence
tccttccgttctcatttatttcag

SEQ ID NO: 233296 - DNA, 24 bp, Artificial sequence
  SiRNA target sequence
ccttccgttctcatttatttcagt

SEQ ID NO: 233297 - DNA, 24 bp, Artificial sequence
  SiRNA target sequence
cttccgttctcatttatttcagta

SEQ ID NO: 233298 - DNA, 24 bp, Artificial sequence
  SiRNA target sequence
ttccgttctcatttatttcagtag

SEQ ID NO: 233299 - DNA, 24 bp, Artificial sequence
  SiRNA target sequence
tccgttctcatttatttcagtagg

SEQ ID NO: 233300 - DNA, 24 bp, Artificial sequence
  SiRNA target sequence
ccgttctcatttatttcagtaggt

SEQ ID NO: 233301 - DNA, 24 bp, Artificial sequence
  SiRNA target sequence
cgttctcatttatttcagtaggta

SEQ ID NO: 233302 - DNA, 24 bp, Artificial sequence
  SiRNA target sequence
gttctcatttatttcagtaggtat

SEQ ID NO: 233303 - DNA, 24 bp, Artificial sequence
  SiRNA target sequence
ttctcatttatttcagtaggtatt

SEQ ID NO: 233304 - DNA, 24 bp, Artificial sequence
  SiRNA target sequence
tctcatttatttcagtaggtatta

SEQ ID NO: 233305 - DNA, 24 bp, Artificial sequence
  SiRNA target sequence
ctcatttatttcagtaggtattat

SEQ ID NO: 233306 - DNA, 24 bp, Artificial sequence
  SiRNA target sequence
tcatttatttcagtaggtattatt

SEQ ID NO: 233307 - DNA, 24 bp, Artificial sequence
  SiRNA target sequence
catttatttcagtaggtattattc

SEQ ID NO: 233308 - DNA, 24 bp, Artificial sequence
  SiRNA target sequence
atttatttcagtaggtattattca

SEQ ID NO: 233309 - DNA, 24 bp, Artificial sequence
  SiRNA target sequence
tttatttcagtaggtattattcag

SEQ ID NO: 233310 - DNA, 24 bp, Artificial sequence
  SiRNA target sequence
ttatttcagtaggtattattcaga

SEQ ID NO: 233311 - DNA, 24 bp, Artificial sequence
  SiRNA target sequence
tatttcagtaggtattattcagaa

SEQ ID NO: 233312 - DNA, 24 bp, Artificial sequence
  SiRNA target sequence
atttcagtaggtattattcagaaa

SEQ ID NO: 233313 - DNA, 24 bp, Artificial sequence
  SiRNA target sequence
tttcagtaggtattattcagaaag

SEQ ID NO: 233314 - DNA, 24 bp, Artificial sequence
  SiRNA target sequence
ttcagtaggtattattcagaaagc

SEQ ID NO: 233315 - DNA, 24 bp, Artificial sequence
  SiRNA target sequence
tcagtaggtattattcagaaagct

SEQ ID NO: 233316 - DNA, 24 bp, Artificial sequence
  SiRNA target sequence
cagtaggtattattcagaaagctt

SEQ ID NO: 233317 - DNA, 24 bp, Artificial sequence
  SiRNA target sequence
agtaggtattattcagaaagcttt

SEQ ID NO: 233318 - DNA, 24 bp, Artificial sequence
  SiRNA target sequence
gtaggtattattcagaaagcttta

SEQ ID NO: 233319 - DNA, 24 bp, Artificial sequence
  SiRNA target sequence
taggtattattcagaaagctttag

SEQ ID NO: 233320 - DNA, 24 bp, Artificial sequence
  SiRNA target sequence
aggtattattcagaaagctttaga

SEQ ID NO: 233321 - DNA, 24 bp, Artificial sequence
  SiRNA target sequence
ggtattattcagaaagctttagat

SEQ ID NO: 233322 - DNA, 24 bp, Artificial sequence
  SiRNA target sequence
gtattattcagaaagctttagata

SEQ ID NO: 233323 - DNA, 24 bp, Artificial sequence
  SiRNA target sequence
tattattcagaaagctttagataa

SEQ ID NO: 233324 - DNA, 24 bp, Artificial sequence
  SiRNA target sequence
attattcagaaagctttagataaa

SEQ ID NO: 233325 - DNA, 24 bp, Artificial sequence
  SiRNA target sequence
ttattcagaaagctttagataaat

SEQ ID NO: 233326 - DNA, 24 bp, Artificial sequence
  SiRNA target sequence
tattcagaaagctttagataaata

SEQ ID NO: 233327 - DNA, 24 bp, Artificial sequence
  SiRNA target sequence
attcagaaagctttagataaatat

SEQ ID NO: 233328 - DNA, 24 bp, Artificial sequence
  SiRNA target sequence
ttcagaaagctttagataaatatc

SEQ ID NO: 233329 - DNA, 24 bp, Artificial sequence
  SiRNA target sequence
tcagaaagctttagataaatatcc

SEQ ID NO: 233330 - DNA, 24 bp, Artificial sequence
  SiRNA target sequence
cagaaagctttagataaatatcct

SEQ ID NO: 233331 - DNA, 24 bp, Artificial sequence
  SiRNA target sequence
agaaagctttagataaatatcctt

SEQ ID NO: 233332 - DNA, 24 bp, Artificial sequence
  SiRNA target sequence
gaaagctttagataaatatccttt

SEQ ID NO: 233333 - DNA, 24 bp, Artificial sequence
  SiRNA target sequence
aaagctttagataaatatcctttt

SEQ ID NO: 233334 - DNA, 24 bp, Artificial sequence
  SiRNA target sequence
aagctttagataaatatcctttta

SEQ ID NO: 233335 - DNA, 24 bp, Artificial sequence
  SiRNA target sequence
agctttagataaatatccttttac

SEQ ID NO: 233336 - DNA, 24 bp, Artificial sequence
  SiRNA target sequence
gctttagataaatatccttttaca

SEQ ID NO: 233337 - DNA, 24 bp, Artificial sequence
  SiRNA target sequence
ctttagataaatatccttttacaa

SEQ ID NO: 233338 - DNA, 24 bp, Artificial sequence
  SiRNA target sequence
tttagataaatatccttttacaaa

SEQ ID NO: 233339 - DNA, 24 bp, Artificial sequence
  SiRNA target sequence
ttagataaatatccttttacaaaa

SEQ ID NO: 233340 - DNA, 24 bp, Artificial sequence
  SiRNA target sequence
tagataaatatccttttacaaaaa

SEQ ID NO: 233341 - DNA, 24 bp, Artificial sequence
  SiRNA target sequence
agataaatatccttttacaaaaat

SEQ ID NO: 233342 - DNA, 24 bp, Artificial sequence
  SiRNA target sequence
gataaatatccttttacaaaaata

SEQ ID NO: 233343 - DNA, 24 bp, Artificial sequence
  SiRNA target sequence
ataaatatccttttacaaaaatat

SEQ ID NO: 233344 - DNA, 24 bp, Artificial sequence
  SiRNA target sequence
taaatatccttttacaaaaatatt

SEQ ID NO: 233345 - DNA, 24 bp, Artificial sequence
  SiRNA target sequence
aaatatccttttacaaaaatattt

SEQ ID NO: 233346 - DNA, 24 bp, Artificial sequence
  SiRNA target sequence
aatatccttttacaaaaatatttg

SEQ ID NO: 233347 - DNA, 24 bp, Artificial sequence
  SiRNA target sequence
atatccttttacaaaaatatttga

SEQ ID NO: 233348 - DNA, 24 bp, Artificial sequence
  SiRNA target sequence
tatccttttacaaaaatatttgat

SEQ ID NO: 233349 - DNA, 24 bp, Artificial sequence
  SiRNA target sequence
atccttttacaaaaatatttgatg

SEQ ID NO: 233350 - DNA, 24 bp, Artificial sequence
  SiRNA target sequence
tccttttacaaaaatatttgatgt

SEQ ID NO: 233351 - DNA, 24 bp, Artificial sequence
  SiRNA target sequence
ccttttacaaaaatatttgatgta

SEQ ID NO: 233352 - DNA, 24 bp, Artificial sequence
  SiRNA target sequence
cttttacaaaaatatttgatgtaa

SEQ ID NO: 233353 - DNA, 24 bp, Artificial sequence
  SiRNA target sequence
ttttacaaaaatatttgatgtaac

SEQ ID NO: 233354 - DNA, 24 bp, Artificial sequence
  SiRNA target sequence
tttacaaaaatatttgatgtaact

SEQ ID NO: 233355 - DNA, 24 bp, Artificial sequence
  SiRNA target sequence
ttacaaaaatatttgatgtaactt

SEQ ID NO: 233356 - DNA, 24 bp, Artificial sequence
  SiRNA target sequence
tacaaaaatatttgatgtaacttt

SEQ ID NO: 233357 - DNA, 24 bp, Artificial sequence
  SiRNA target sequence
acaaaaatatttgatgtaacttta

SEQ ID NO: 233358 - DNA, 24 bp, Artificial sequence
  SiRNA target sequence
caaaaatatttgatgtaactttaa

SEQ ID NO: 233359 - DNA, 24 bp, Artificial sequence
  SiRNA target sequence
aaaaatatttgatgtaactttaat

SEQ ID NO: 233360 - DNA, 24 bp, Artificial sequence
  SiRNA target sequence
aaaatatttgatgtaactttaata

SEQ ID NO: 233361 - DNA, 24 bp, Artificial sequence
  SiRNA target sequence
aaatatttgatgtaactttaatag

SEQ ID NO: 233362 - DNA, 24 bp, Artificial sequence
  SiRNA target sequence
aatatttgatgtaactttaatagt

SEQ ID NO: 233363 - DNA, 24 bp, Artificial sequence
  SiRNA target sequence
atatttgatgtaactttaatagtt

SEQ ID NO: 233364 - DNA, 24 bp, Artificial sequence
  SiRNA target sequence
tatttgatgtaactttaatagttt

SEQ ID NO: 233365 - DNA, 24 bp, Artificial sequence
  SiRNA target sequence
atttgatgtaactttaatagtttt

SEQ ID NO: 233366 - DNA, 24 bp, Artificial sequence
  SiRNA target sequence
tttgatgtaactttaatagttttc

SEQ ID NO: 233367 - DNA, 24 bp, Artificial sequence
  SiRNA target sequence
ttgatgtaactttaatagttttcg

SEQ ID NO: 233368 - DNA, 24 bp, Artificial sequence
  SiRNA target sequence
tgatgtaactttaatagttttcgc

SEQ ID NO: 233369 - DNA, 24 bp, Artificial sequence
  SiRNA target sequence
gatgtaactttaatagttttcgct

SEQ ID NO: 233370 - DNA, 24 bp, Artificial sequence
  SiRNA target sequence
atgtaactttaatagttttcgctg

SEQ ID NO: 233371 - DNA, 24 bp, Artificial sequence
  SiRNA target sequence
tgtaactttaatagttttcgctgt

SEQ ID NO: 233372 - DNA, 24 bp, Artificial sequence
  SiRNA target sequence
gtaactttaatagttttcgctgtt

SEQ ID NO: 233373 - DNA, 24 bp, Artificial sequence
  SiRNA target sequence
taactttaatagttttcgctgttg

SEQ ID NO: 233374 - DNA, 24 bp, Artificial sequence
  SiRNA target sequence
aactttaatagttttcgctgttgc

SEQ ID NO: 233375 - DNA, 24 bp, Artificial sequence
  SiRNA target sequence
actttaatagttttcgctgttgca

SEQ ID NO: 233376 - DNA, 24 bp, Artificial sequence
  SiRNA target sequence
ctttaatagttttcgctgttgcat

SEQ ID NO: 233377 - DNA, 24 bp, Artificial sequence
  SiRNA target sequence
tttaatagttttcgctgttgcatt

SEQ ID NO: 233378 - DNA, 24 bp, Artificial sequence
  SiRNA target sequence
ttaatagttttcgctgttgcattt

SEQ ID NO: 233379 - DNA, 24 bp, Artificial sequence
  SiRNA target sequence
taatagttttcgctgttgcattta

SEQ ID NO: 233380 - DNA, 24 bp, Artificial sequence
  SiRNA target sequence
aatagttttcgctgttgcatttac

SEQ ID NO: 233381 - DNA, 24 bp, Artificial sequence
  SiRNA target sequence
atagttttcgctgttgcatttact

SEQ ID NO: 233382 - DNA, 24 bp, Artificial sequence
  SiRNA target sequence
tagttttcgctgttgcatttacta

SEQ ID NO: 233383 - DNA, 24 bp, Artificial sequence
  SiRNA target sequence
agttttcgctgttgcatttactat

SEQ ID NO: 233384 - DNA, 24 bp, Artificial sequence
  SiRNA target sequence
gttttcgctgttgcatttactata

SEQ ID NO: 233385 - DNA, 24 bp, Artificial sequence
  SiRNA target sequence
ttttcgctgttgcatttactatac

SEQ ID NO: 233386 - DNA, 24 bp, Artificial sequence
  SiRNA target sequence
tttcgctgttgcatttactatact

SEQ ID NO: 233387 - DNA, 24 bp, Artificial sequence
  SiRNA target sequence
ttcgctgttgcatttactatactt

SEQ ID NO: 233388 - DNA, 24 bp, Artificial sequence
  SiRNA target sequence
tcgctgttgcatttactatacttg

SEQ ID NO: 233389 - DNA, 24 bp, Artificial sequence
  SiRNA target sequence
cgctgttgcatttactatacttgg

SEQ ID NO: 233390 - DNA, 24 bp, Artificial sequence
  SiRNA target sequence
gctgttgcatttactatacttggt

SEQ ID NO: 233391 - DNA, 24 bp, Artificial sequence
  SiRNA target sequence
ctgttgcatttactatacttggta

SEQ ID NO: 233392 - DNA, 24 bp, Artificial sequence
  SiRNA target sequence
tgttgcatttactatacttggtag

SEQ ID NO: 233393 - DNA, 24 bp, Artificial sequence
  SiRNA target sequence
gttgcatttactatacttggtagt

SEQ ID NO: 233394 - DNA, 24 bp, Artificial sequence
  SiRNA target sequence
ttgcatttactatacttggtagtt

SEQ ID NO: 233395 - DNA, 24 bp, Artificial sequence
  SiRNA target sequence
tgcatttactatacttggtagttt

SEQ ID NO: 233396 - DNA, 24 bp, Artificial sequence
  SiRNA target sequence
gcatttactatacttggtagttta

SEQ ID NO: 233397 - DNA, 24 bp, Artificial sequence
  SiRNA target sequence
catttactatacttggtagtttat

SEQ ID NO: 233398 - DNA, 24 bp, Artificial sequence
  SiRNA target sequence
atttactatacttggtagtttatt

SEQ ID NO: 233399 - DNA, 24 bp, Artificial sequence
  SiRNA target sequence
tttactatacttggtagtttatta

SEQ ID NO: 233400 - DNA, 24 bp, Artificial sequence
  SiRNA target sequence
ttactatacttggtagtttattac

SEQ ID NO: 233401 - DNA, 24 bp, Artificial sequence
  SiRNA target sequence
tactatacttggtagtttattact

SEQ ID NO: 233402 - DNA, 24 bp, Artificial sequence
  SiRNA target sequence
actatacttggtagtttattactt

SEQ ID NO: 233403 - DNA, 24 bp, Artificial sequence
  SiRNA target sequence
ctatacttggtagtttattacttc

SEQ ID NO: 233404 - DNA, 24 bp, Artificial sequence
  SiRNA target sequence
tatacttggtagtttattacttcc

SEQ ID NO: 233405 - DNA, 24 bp, Artificial sequence
  SiRNA target sequence
atacttggtagtttattacttccc

SEQ ID NO: 233406 - DNA, 24 bp, Artificial sequence
  SiRNA target sequence
tacttggtagtttattacttccct

SEQ ID NO: 233407 - DNA, 24 bp, Artificial sequence
  SiRNA target sequence
acttggtagtttattacttccctt

SEQ ID NO: 233408 - DNA, 24 bp, Artificial sequence
  SiRNA target sequence
cttggtagtttattacttcccttt

SEQ ID NO: 233409 - DNA, 24 bp, Artificial sequence
  SiRNA target sequence
ttggtagtttattacttcccttta

SEQ ID NO: 233410 - DNA, 24 bp, Artificial sequence
  SiRNA target sequence
tggtagtttattacttccctttag

SEQ ID NO: 233411 - DNA, 24 bp, Artificial sequence
  SiRNA target sequence
ggtagtttattacttccctttagt

SEQ ID NO: 233412 - DNA, 24 bp, Artificial sequence
  SiRNA target sequence
gtagtttattacttccctttagtg

SEQ ID NO: 233413 - DNA, 24 bp, Artificial sequence
  SiRNA target sequence
tagtttattacttccctttagtga

SEQ ID NO: 233414 - DNA, 24 bp, Artificial sequence
  SiRNA target sequence
agtttattacttccctttagtgat

SEQ ID NO: 233415 - DNA, 24 bp, Artificial sequence
  SiRNA target sequence
gtttattacttccctttagtgatt

SEQ ID NO: 233416 - DNA, 24 bp, Artificial sequence
  SiRNA target sequence
tttattacttccctttagtgatta

SEQ ID NO: 233417 - DNA, 24 bp, Artificial sequence
  SiRNA target sequence
ttattacttccctttagtgattat

SEQ ID NO: 233418 - DNA, 24 bp, Artificial sequence
  SiRNA target sequence
tattacttccctttagtgattata

SEQ ID NO: 233419 - DNA, 24 bp, Artificial sequence
  SiRNA target sequence
attacttccctttagtgattatat

SEQ ID NO: 233420 - DNA, 24 bp, Artificial sequence
  SiRNA target sequence
ttacttccctttagtgattatatt

SEQ ID NO: 233421 - DNA, 24 bp, Artificial sequence
  SiRNA target sequence
tacttccctttagtgattatattc

SEQ ID NO: 233422 - DNA, 24 bp, Artificial sequence
  SiRNA target sequence
acttccctttagtgattatattca

SEQ ID NO: 233423 - DNA, 24 bp, Artificial sequence
  SiRNA target sequence
cttccctttagtgattatattcag

SEQ ID NO: 233424 - DNA, 24 bp, Artificial sequence
  SiRNA target sequence
ttccctttagtgattatattcaga

SEQ ID NO: 233425 - DNA, 24 bp, Artificial sequence
  SiRNA target sequence
tccctttagtgattatattcagat

SEQ ID NO: 233426 - DNA, 24 bp, Artificial sequence
  SiRNA target sequence
ccctttagtgattatattcagatt

SEQ ID NO: 233427 - DNA, 24 bp, Artificial sequence
  SiRNA target sequence
cctttagtgattatattcagattc

SEQ ID NO: 233428 - DNA, 24 bp, Artificial sequence
  SiRNA target sequence
ctttagtgattatattcagattca

SEQ ID NO: 233429 - DNA, 24 bp, Artificial sequence
  SiRNA target sequence
tttagtgattatattcagattcaa

SEQ ID NO: 233430 - DNA, 24 bp, Artificial sequence
  SiRNA target sequence
ttagtgattatattcagattcaac

SEQ ID NO: 233431 - DNA, 24 bp, Artificial sequence
  SiRNA target sequence
tagtgattatattcagattcaacc

SEQ ID NO: 233432 - DNA, 24 bp, Artificial sequence
  SiRNA target sequence
agtgattatattcagattcaaccg

SEQ ID NO: 233433 - DNA, 24 bp, Artificial sequence
  SiRNA target sequence
gtgattatattcagattcaaccgt

SEQ ID NO: 233434 - DNA, 24 bp, Artificial sequence
  SiRNA target sequence
tgattatattcagattcaaccgtt

SEQ ID NO: 233435 - DNA, 24 bp, Artificial sequence
  SiRNA target sequence
gattatattcagattcaaccgttt

SEQ ID NO: 233436 - DNA, 24 bp, Artificial sequence
  SiRNA target sequence
attatattcagattcaaccgtttt

SEQ ID NO: 233437 - DNA, 24 bp, Artificial sequence
  SiRNA target sequence
ttatattcagattcaaccgttttg

SEQ ID NO: 233438 - DNA, 24 bp, Artificial sequence
  SiRNA target sequence
tatattcagattcaaccgttttgg

SEQ ID NO: 233439 - DNA, 24 bp, Artificial sequence
  SiRNA target sequence
atattcagattcaaccgttttggg

SEQ ID NO: 233440 - DNA, 24 bp, Artificial sequence
  SiRNA target sequence
tattcagattcaaccgttttgggc

SEQ ID NO: 233441 - DNA, 24 bp, Artificial sequence
  SiRNA target sequence
attcagattcaaccgttttgggcc

SEQ ID NO: 233442 - DNA, 24 bp, Artificial sequence
  SiRNA target sequence
ttcagattcaaccgttttgggcca

SEQ ID NO: 233443 - DNA, 24 bp, Artificial sequence
  SiRNA target sequence
tcagattcaaccgttttgggccaa

SEQ ID NO: 233444 - DNA, 24 bp, Artificial sequence
  SiRNA target sequence
cagattcaaccgttttgggccaaa

SEQ ID NO: 233445 - DNA, 24 bp, Artificial sequence
  SiRNA target sequence
agattcaaccgttttgggccaaag

SEQ ID NO: 233446 - DNA, 24 bp, Artificial sequence
  SiRNA target sequence
gattcaaccgttttgggccaaaga

SEQ ID NO: 233447 - DNA, 24 bp, Artificial sequence
  SiRNA target sequence
attcaaccgttttgggccaaagat

SEQ ID NO: 233448 - DNA, 24 bp, Artificial sequence
  SiRNA target sequence
ttcaaccgttttgggccaaagata

SEQ ID NO: 233449 - DNA, 24 bp, Artificial sequence
  SiRNA target sequence
tcaaccgttttgggccaaagatat

SEQ ID NO: 233450 - DNA, 24 bp, Artificial sequence
  SiRNA target sequence
caaccgttttgggccaaagatatt

SEQ ID NO: 233451 - DNA, 24 bp, Artificial sequence
  SiRNA target sequence
aaccgttttgggccaaagatattt

SEQ ID NO: 233452 - DNA, 24 bp, Artificial sequence
  SiRNA target sequence
accgttttgggccaaagatatttt

SEQ ID NO: 233453 - DNA, 24 bp, Artificial sequence
  SiRNA target sequence
ccgttttgggccaaagatattttt

SEQ ID NO: 233454 - DNA, 24 bp, Artificial sequence
  SiRNA target sequence
cgttttgggccaaagatatttttg

SEQ ID NO: 233455 - DNA, 24 bp, Artificial sequence
  SiRNA target sequence
gttttgggccaaagatatttttgc

SEQ ID NO: 233456 - DNA, 24 bp, Artificial sequence
  SiRNA target sequence
ttttgggccaaagatatttttgct

SEQ ID NO: 233457 - DNA, 24 bp, Artificial sequence
  SiRNA target sequence
tttgggccaaagatatttttgctg

SEQ ID NO: 233458 - DNA, 24 bp, Artificial sequence
  SiRNA target sequence
ttgggccaaagatatttttgctga

SEQ ID NO: 233459 - DNA, 24 bp, Artificial sequence
  SiRNA target sequence
tgggccaaagatatttttgctgat

SEQ ID NO: 233460 - DNA, 24 bp, Artificial sequence
  SiRNA target sequence
gggccaaagatatttttgctgatg

SEQ ID NO: 233461 - DNA, 24 bp, Artificial sequence
  SiRNA target sequence
ggccaaagatatttttgctgatgg

SEQ ID NO: 233462 - DNA, 24 bp, Artificial sequence
  SiRNA target sequence
gccaaagatatttttgctgatgga

SEQ ID NO: 233463 - DNA, 24 bp, Artificial sequence
  SiRNA target sequence
ccaaagatatttttgctgatggaa

SEQ ID NO: 233464 - DNA, 24 bp, Artificial sequence
  SiRNA target sequence
caaagatatttttgctgatggaaa

SEQ ID NO: 233465 - DNA, 24 bp, Artificial sequence
  SiRNA target sequence
aaagatatttttgctgatggaaaa

SEQ ID NO: 233466 - DNA, 24 bp, Artificial sequence
  SiRNA target sequence
aagatatttttgctgatggaaaag

SEQ ID NO: 233467 - DNA, 24 bp, Artificial sequence
  SiRNA target sequence
agatatttttgctgatggaaaagc

SEQ ID NO: 233468 - DNA, 24 bp, Artificial sequence
  SiRNA target sequence
gatatttttgctgatggaaaagct

SEQ ID NO: 233469 - DNA, 24 bp, Artificial sequence
  SiRNA target sequence
atatttttgctgatggaaaagctg

SEQ ID NO: 233470 - DNA, 24 bp, Artificial sequence
  SiRNA target sequence
tatttttgctgatggaaaagctgt

SEQ ID NO: 233471 - DNA, 24 bp, Artificial sequence
  SiRNA target sequence
atttttgctgatggaaaagctgtt

SEQ ID NO: 233472 - DNA, 24 bp, Artificial sequence
  SiRNA target sequence
tttttgctgatggaaaagctgttg

SEQ ID NO: 233473 - DNA, 24 bp, Artificial sequence
  SiRNA target sequence
ttttgctgatggaaaagctgttgc

SEQ ID NO: 233474 - DNA, 24 bp, Artificial sequence
  SiRNA target sequence
tttgctgatggaaaagctgttgcc

SEQ ID NO: 233475 - DNA, 24 bp, Artificial sequence
  SiRNA target sequence
ttgctgatggaaaagctgttgcca

SEQ ID NO: 233476 - DNA, 24 bp, Artificial sequence
  SiRNA target sequence
tgctgatggaaaagctgttgccag

SEQ ID NO: 233477 - DNA, 24 bp, Artificial sequence
  SiRNA target sequence
gctgatggaaaagctgttgccaga

SEQ ID NO: 233478 - DNA, 24 bp, Artificial sequence
  SiRNA target sequence
ctgatggaaaagctgttgccagaa

SEQ ID NO: 233479 - DNA, 24 bp, Artificial sequence
  SiRNA target sequence
tgatggaaaagctgttgccagaag

SEQ ID NO: 233480 - DNA, 24 bp, Artificial sequence
  SiRNA target sequence
gatggaaaagctgttgccagaagt

SEQ ID NO: 233481 - DNA, 24 bp, Artificial sequence
  SiRNA target sequence
atggaaaagctgttgccagaagta

SEQ ID NO: 233482 - DNA, 24 bp, Artificial sequence
  SiRNA target sequence
tggaaaagctgttgccagaagtac

SEQ ID NO: 233483 - DNA, 24 bp, Artificial sequence
  SiRNA target sequence
ggaaaagctgttgccagaagtaca

SEQ ID NO: 233484 - DNA, 24 bp, Artificial sequence
  SiRNA target sequence
gaaaagctgttgccagaagtacag

SEQ ID NO: 233485 - DNA, 24 bp, Artificial sequence
  SiRNA target sequence
aaaagctgttgccagaagtacaga

SEQ ID NO: 233486 - DNA, 24 bp, Artificial sequence
  SiRNA target sequence
aaagctgttgccagaagtacagat

SEQ ID NO: 233487 - DNA, 24 bp, Artificial sequence
  SiRNA target sequence
aagctgttgccagaagtacagatt

SEQ ID NO: 233488 - DNA, 24 bp, Artificial sequence
  SiRNA target sequence
agctgttgccagaagtacagattt

SEQ ID NO: 233489 - DNA, 24 bp, Artificial sequence
  SiRNA target sequence
gctgttgccagaagtacagatttt

SEQ ID NO: 233490 - DNA, 24 bp, Artificial sequence
  SiRNA target sequence
ctgttgccagaagtacagattttt

SEQ ID NO: 233491 - DNA, 24 bp, Artificial sequence
  SiRNA target sequence
tgttgccagaagtacagatttttt

SEQ ID NO: 233492 - DNA, 24 bp, Artificial sequence
  SiRNA target sequence
gttgccagaagtacagatttttta

SEQ ID NO: 233493 - DNA, 24 bp, Artificial sequence
  SiRNA target sequence
ttgccagaagtacagattttttat

SEQ ID NO: 233494 - DNA, 24 bp, Artificial sequence
  SiRNA target sequence
tgccagaagtacagattttttatt

SEQ ID NO: 233495 - DNA, 24 bp, Artificial sequence
  SiRNA target sequence
gccagaagtacagattttttattt

SEQ ID NO: 233496 - DNA, 24 bp, Artificial sequence
  SiRNA target sequence
ccagaagtacagattttttatttt

SEQ ID NO: 233497 - DNA, 24 bp, Artificial sequence
  SiRNA target sequence
cagaagtacagattttttattttc

SEQ ID NO: 233498 - DNA, 24 bp, Artificial sequence
  SiRNA target sequence
agaagtacagattttttattttct

SEQ ID NO: 233499 - DNA, 24 bp, Artificial sequence
  SiRNA target sequence
gaagtacagattttttattttcta

SEQ ID NO: 233500 - DNA, 24 bp, Artificial sequence
  SiRNA target sequence
aagtacagattttttattttctat

SEQ ID NO: 233501 - DNA, 24 bp, Artificial sequence
  SiRNA target sequence
agtacagattttttattttctatt

SEQ ID NO: 233502 - DNA, 24 bp, Artificial sequence
  SiRNA target sequence
gtacagattttttattttctattg

SEQ ID NO: 233503 - DNA, 24 bp, Artificial sequence
  SiRNA target sequence
tacagattttttattttctattgc

SEQ ID NO: 233504 - DNA, 24 bp, Artificial sequence
  SiRNA target sequence
acagattttttattttctattgca

SEQ ID NO: 233505 - DNA, 24 bp, Artificial sequence
  SiRNA target sequence
cagattttttattttctattgcac

SEQ ID NO: 233506 - DNA, 24 bp, Artificial sequence
  SiRNA target sequence
agattttttattttctattgcact

SEQ ID NO: 233507 - DNA, 24 bp, Artificial sequence
  SiRNA target sequence
gattttttattttctattgcactt

SEQ ID NO: 233508 - DNA, 24 bp, Artificial sequence
  SiRNA target sequence
attttttattttctattgcacttg

SEQ ID NO: 233509 - DNA, 24 bp, Artificial sequence
  SiRNA target sequence
ttttttattttctattgcacttgt

SEQ ID NO: 233510 - DNA, 24 bp, Artificial sequence
  SiRNA target sequence
tttttattttctattgcacttgtt

SEQ ID NO: 233511 - DNA, 24 bp, Artificial sequence
  SiRNA target sequence
ttttattttctattgcacttgttt

SEQ ID NO: 233512 - DNA, 24 bp, Artificial sequence
  SiRNA target sequence
tttattttctattgcacttgtttt

SEQ ID NO: 233513 - DNA, 24 bp, Artificial sequence
  SiRNA target sequence
ttattttctattgcacttgttttc

SEQ ID NO: 233514 - DNA, 24 bp, Artificial sequence
  SiRNA target sequence
tattttctattgcacttgttttca

SEQ ID NO: 233515 - DNA, 24 bp, Artificial sequence
  SiRNA target sequence
attttctattgcacttgttttcaa

SEQ ID NO: 233516 - DNA, 24 bp, Artificial sequence
  SiRNA target sequence
ttttctattgcacttgttttcaat

SEQ ID NO: 233517 - DNA, 24 bp, Artificial sequence
  SiRNA target sequence
tttctattgcacttgttttcaatg

SEQ ID NO: 233518 - DNA, 24 bp, Artificial sequence
  SiRNA target sequence
ttctattgcacttgttttcaatga

SEQ ID NO: 233519 - DNA, 24 bp, Artificial sequence
  SiRNA target sequence
tctattgcacttgttttcaatgaa

SEQ ID NO: 233520 - DNA, 24 bp, Artificial sequence
  SiRNA target sequence
ctattgcacttgttttcaatgaat

SEQ ID NO: 233521 - DNA, 24 bp, Artificial sequence
  SiRNA target sequence
tattgcacttgttttcaatgaatg

SEQ ID NO: 233522 - DNA, 24 bp, Artificial sequence
  SiRNA target sequence
attgcacttgttttcaatgaatgg

SEQ ID NO: 233523 - DNA, 24 bp, Artificial sequence
  SiRNA target sequence
ttgcacttgttttcaatgaatgga

SEQ ID NO: 233524 - DNA, 24 bp, Artificial sequence
  SiRNA target sequence
tgcacttgttttcaatgaatggac

SEQ ID NO: 233525 - DNA, 24 bp, Artificial sequence
  SiRNA target sequence
gcacttgttttcaatgaatggaca

SEQ ID NO: 233526 - DNA, 24 bp, Artificial sequence
  SiRNA target sequence
cacttgttttcaatgaatggacaa

SEQ ID NO: 233527 - DNA, 24 bp, Artificial sequence
  SiRNA target sequence
acttgttttcaatgaatggacaag

SEQ ID NO: 233528 - DNA, 24 bp, Artificial sequence
  SiRNA target sequence
cttgttttcaatgaatggacaagt

SEQ ID NO: 233529 - DNA, 24 bp, Artificial sequence
  SiRNA target sequence
ttgttttcaatgaatggacaagtt

SEQ ID NO: 233530 - DNA, 24 bp, Artificial sequence
  SiRNA target sequence
tgttttcaatgaatggacaagttc

SEQ ID NO: 233531 - DNA, 24 bp, Artificial sequence
  SiRNA target sequence
gttttcaatgaatggacaagttct

SEQ ID NO: 233532 - DNA, 24 bp, Artificial sequence
  SiRNA target sequence
ttttcaatgaatggacaagttctg

SEQ ID NO: 233533 - DNA, 24 bp, Artificial sequence
  SiRNA target sequence
tttcaatgaatggacaagttctgc

SEQ ID NO: 233534 - DNA, 24 bp, Artificial sequence
  SiRNA target sequence
ttcaatgaatggacaagttctgct

SEQ ID NO: 233535 - DNA, 24 bp, Artificial sequence
  SiRNA target sequence
tcaatgaatggacaagttctgcta

SEQ ID NO: 233536 - DNA, 24 bp, Artificial sequence
  SiRNA target sequence
caatgaatggacaagttctgctat

SEQ ID NO: 233537 - DNA, 24 bp, Artificial sequence
  SiRNA target sequence
aatgaatggacaagttctgctatc

SEQ ID NO: 233538 - DNA, 24 bp, Artificial sequence
  SiRNA target sequence
atgaatggacaagttctgctatct

SEQ ID NO: 233539 - DNA, 24 bp, Artificial sequence
  SiRNA target sequence
tgaatggacaagttctgctatcta

SEQ ID NO: 233540 - DNA, 24 bp, Artificial sequence
  SiRNA target sequence
gaatggacaagttctgctatctat

SEQ ID NO: 233541 - DNA, 24 bp, Artificial sequence
  SiRNA target sequence
aatggacaagttctgctatctatg

SEQ ID NO: 233542 - DNA, 24 bp, Artificial sequence
  SiRNA target sequence
atggacaagttctgctatctatgt

SEQ ID NO: 233543 - DNA, 24 bp, Artificial sequence
  SiRNA target sequence
tggacaagttctgctatctatgtt

SEQ ID NO: 233544 - DNA, 24 bp, Artificial sequence
  SiRNA target sequence
ggacaagttctgctatctatgttt

SEQ ID NO: 233545 - DNA, 24 bp, Artificial sequence
  SiRNA target sequence
gacaagttctgctatctatgtttt

SEQ ID NO: 233546 - DNA, 24 bp, Artificial sequence
  SiRNA target sequence
acaagttctgctatctatgtttta

SEQ ID NO: 233547 - DNA, 24 bp, Artificial sequence
  SiRNA target sequence
caagttctgctatctatgttttat

SEQ ID NO: 233548 - DNA, 24 bp, Artificial sequence
  SiRNA target sequence
aagttctgctatctatgttttatc

SEQ ID NO: 233549 - DNA, 24 bp, Artificial sequence
  SiRNA target sequence
agttctgctatctatgttttatct

SEQ ID NO: 233550 - DNA, 24 bp, Artificial sequence
  SiRNA target sequence
gttctgctatctatgttttatctg

SEQ ID NO: 233551 - DNA, 24 bp, Artificial sequence
  SiRNA target sequence
ttctgctatctatgttttatctga

SEQ ID NO: 233552 - DNA, 24 bp, Artificial sequence
  SiRNA target sequence
tctgctatctatgttttatctgaa

SEQ ID NO: 233553 - DNA, 24 bp, Artificial sequence
  SiRNA target sequence
ctgctatctatgttttatctgaaa

SEQ ID NO: 233554 - DNA, 24 bp, Artificial sequence
  SiRNA target sequence
tgctatctatgttttatctgaaat

SEQ ID NO: 233555 - DNA, 24 bp, Artificial sequence
  SiRNA target sequence
gctatctatgttttatctgaaatg

SEQ ID NO: 233556 - DNA, 24 bp, Artificial sequence
  SiRNA target sequence
ctatctatgttttatctgaaatgt

SEQ ID NO: 233557 - DNA, 24 bp, Artificial sequence
  SiRNA target sequence
tatctatgttttatctgaaatgtt

SEQ ID NO: 233558 - DNA, 24 bp, Artificial sequence
  SiRNA target sequence
atctatgttttatctgaaatgttt

SEQ ID NO: 233559 - DNA, 24 bp, Artificial sequence
  SiRNA target sequence
tctatgttttatctgaaatgtttg

SEQ ID NO: 233560 - DNA, 24 bp, Artificial sequence
  SiRNA target sequence
ctatgttttatctgaaatgtttgg

SEQ ID NO: 233561 - DNA, 24 bp, Artificial sequence
  SiRNA target sequence
tatgttttatctgaaatgtttggt

SEQ ID NO: 233562 - DNA, 24 bp, Artificial sequence
  SiRNA target sequence
atgttttatctgaaatgtttggta

SEQ ID NO: 233563 - DNA, 24 bp, Artificial sequence
  SiRNA target sequence
tgttttatctgaaatgtttggtag

SEQ ID NO: 233564 - DNA, 24 bp, Artificial sequence
  SiRNA target sequence
gttttatctgaaatgtttggtagt

SEQ ID NO: 233565 - DNA, 24 bp, Artificial sequence
  SiRNA target sequence
ttttatctgaaatgtttggtagtt

SEQ ID NO: 233566 - DNA, 24 bp, Artificial sequence
  SiRNA target sequence
tttatctgaaatgtttggtagttt

SEQ ID NO: 233567 - DNA, 24 bp, Artificial sequence
  SiRNA target sequence
ttatctgaaatgtttggtagtttg

SEQ ID NO: 233568 - DNA, 24 bp, Artificial sequence
  SiRNA target sequence
tatctgaaatgtttggtagtttga

SEQ ID NO: 233569 - DNA, 24 bp, Artificial sequence
  SiRNA target sequence
atctgaaatgtttggtagtttgat

SEQ ID NO: 233570 - DNA, 24 bp, Artificial sequence
  SiRNA target sequence
tctgaaatgtttggtagtttgatt

SEQ ID NO: 233571 - DNA, 24 bp, Artificial sequence
  SiRNA target sequence
ctgaaatgtttggtagtttgattc

SEQ ID NO: 233572 - DNA, 24 bp, Artificial sequence
  SiRNA target sequence
tgaaatgtttggtagtttgattct

SEQ ID NO: 233573 - DNA, 24 bp, Artificial sequence
  SiRNA target sequence
gaaatgtttggtagtttgattctt

SEQ ID NO: 233574 - DNA, 24 bp, Artificial sequence
  SiRNA target sequence
aaatgtttggtagtttgattcttt

SEQ ID NO: 233575 - DNA, 24 bp, Artificial sequence
  SiRNA target sequence
aatgtttggtagtttgattctttc

SEQ ID NO: 233576 - DNA, 24 bp, Artificial sequence
  SiRNA target sequence
atgtttggtagtttgattctttca

SEQ ID NO: 233577 - DNA, 24 bp, Artificial sequence
  SiRNA target sequence
tgtttggtagtttgattctttcat

SEQ ID NO: 233578 - DNA, 24 bp, Artificial sequence
  SiRNA target sequence
gtttggtagtttgattctttcata

SEQ ID NO: 233579 - DNA, 24 bp, Artificial sequence
  SiRNA target sequence
tttggtagtttgattctttcatat

SEQ ID NO: 233580 - DNA, 24 bp, Artificial sequence
  SiRNA target sequence
ttggtagtttgattctttcatatt

SEQ ID NO: 233581 - DNA, 24 bp, Artificial sequence
  SiRNA target sequence
tggtagtttgattctttcatattt

SEQ ID NO: 233582 - DNA, 24 bp, Artificial sequence
  SiRNA target sequence
ggtagtttgattctttcatattta

SEQ ID NO: 233583 - DNA, 24 bp, Artificial sequence
  SiRNA target sequence
gtagtttgattctttcatatttat

SEQ ID NO: 233584 - DNA, 24 bp, Artificial sequence
  SiRNA target sequence
tagtttgattctttcatatttatt

SEQ ID NO: 233585 - DNA, 24 bp, Artificial sequence
  SiRNA target sequence
agtttgattctttcatatttattt

SEQ ID NO: 233586 - DNA, 24 bp, Artificial sequence
  SiRNA target sequence
gtttgattctttcatatttattta

SEQ ID NO: 233587 - DNA, 24 bp, Artificial sequence
  SiRNA target sequence
tttgattctttcatatttatttat

SEQ ID NO: 233588 - DNA, 24 bp, Artificial sequence
  SiRNA target sequence
ttgattctttcatatttatttatg

SEQ ID NO: 233589 - DNA, 24 bp, Artificial sequence
  SiRNA target sequence
tgattctttcatatttatttatga

SEQ ID NO: 233590 - DNA, 24 bp, Artificial sequence
  SiRNA target sequence
gattctttcatatttatttatgac

SEQ ID NO: 233591 - DNA, 24 bp, Artificial sequence
  SiRNA target sequence
attctttcatatttatttatgacg

SEQ ID NO: 233592 - DNA, 24 bp, Artificial sequence
  SiRNA target sequence
ttctttcatatttatttatgacgt

SEQ ID NO: 233593 - DNA, 24 bp, Artificial sequence
  SiRNA target sequence
tctttcatatttatttatgacgtt

SEQ ID NO: 233594 - DNA, 24 bp, Artificial sequence
  SiRNA target sequence
ctttcatatttatttatgacgttt

SEQ ID NO: 233595 - DNA, 24 bp, Artificial sequence
  SiRNA target sequence
tttcatatttatttatgacgtttg

SEQ ID NO: 233596 - DNA, 24 bp, Artificial sequence
  SiRNA target sequence
ttcatatttatttatgacgtttgc

SEQ ID NO: 233597 - DNA, 24 bp, Artificial sequence
  SiRNA target sequence
tcatatttatttatgacgtttgct

SEQ ID NO: 233598 - DNA, 24 bp, Artificial sequence
  SiRNA target sequence
catatttatttatgacgtttgcta

SEQ ID NO: 233599 - DNA, 24 bp, Artificial sequence
  SiRNA target sequence
atatttatttatgacgtttgctaa

SEQ ID NO: 233600 - DNA, 24 bp, Artificial sequence
  SiRNA target sequence
tatttatttatgacgtttgctaat

SEQ ID NO: 233601 - DNA, 24 bp, Artificial sequence
  SiRNA target sequence
atttatttatgacgtttgctaatg

SEQ ID NO: 233602 - DNA, 24 bp, Artificial sequence
  SiRNA target sequence
tttatttatgacgtttgctaatgg

SEQ ID NO: 233603 - DNA, 24 bp, Artificial sequence
  SiRNA target sequence
ttatttatgacgtttgctaatggt

SEQ ID NO: 233604 - DNA, 24 bp, Artificial sequence
  SiRNA target sequence
tatttatgacgtttgctaatggtc

SEQ ID NO: 233605 - DNA, 24 bp, Artificial sequence
  SiRNA target sequence
atttatgacgtttgctaatggtct

SEQ ID NO: 233606 - DNA, 24 bp, Artificial sequence
  SiRNA target sequence
tttatgacgtttgctaatggtctt

SEQ ID NO: 233607 - DNA, 24 bp, Artificial sequence
  SiRNA target sequence
ttatgacgtttgctaatggtcttt

SEQ ID NO: 233608 - DNA, 24 bp, Artificial sequence
  SiRNA target sequence
tatgacgtttgctaatggtctttc

SEQ ID NO: 233609 - DNA, 24 bp, Artificial sequence
  SiRNA target sequence
atgacgtttgctaatggtctttcg

SEQ ID NO: 233610 - DNA, 24 bp, Artificial sequence
  SiRNA target sequence
tgacgtttgctaatggtctttcga

SEQ ID NO: 233611 - DNA, 24 bp, Artificial sequence
  SiRNA target sequence
gacgtttgctaatggtctttcgac

SEQ ID NO: 233612 - DNA, 24 bp, Artificial sequence
  SiRNA target sequence
acgtttgctaatggtctttcgact

SEQ ID NO: 233613 - DNA, 24 bp, Artificial sequence
  SiRNA target sequence
cgtttgctaatggtctttcgactc

SEQ ID NO: 233614 - DNA, 24 bp, Artificial sequence
  SiRNA target sequence
gtttgctaatggtctttcgactcc

SEQ ID NO: 233615 - DNA, 24 bp, Artificial sequence
  SiRNA target sequence
tttgctaatggtctttcgactcct

SEQ ID NO: 233616 - DNA, 24 bp, Artificial sequence
  SiRNA target sequence
ttgctaatggtctttcgactcctg

SEQ ID NO: 233617 - DNA, 24 bp, Artificial sequence
  SiRNA target sequence
tgctaatggtctttcgactcctgg

SEQ ID NO: 233618 - DNA, 24 bp, Artificial sequence
  SiRNA target sequence
gctaatggtctttcgactcctgga

SEQ ID NO: 233619 - DNA, 24 bp, Artificial sequence
  SiRNA target sequence
ctaatggtctttcgactcctggac

SEQ ID NO: 233620 - DNA, 24 bp, Artificial sequence
  SiRNA target sequence
taatggtctttcgactcctggaca

SEQ ID NO: 233621 - DNA, 24 bp, Artificial sequence
  SiRNA target sequence
aatggtctttcgactcctggacag

SEQ ID NO: 233622 - DNA, 24 bp, Artificial sequence
  SiRNA target sequence
atggtctttcgactcctggacagt

SEQ ID NO: 233623 - DNA, 24 bp, Artificial sequence
  SiRNA target sequence
tggtctttcgactcctggacagtc

SEQ ID NO: 233624 - DNA, 24 bp, Artificial sequence
  SiRNA target sequence
ggtctttcgactcctggacagtcc

SEQ ID NO: 233625 - DNA, 24 bp, Artificial sequence
  SiRNA target sequence
gtctttcgactcctggacagtccg

SEQ ID NO: 233626 - DNA, 24 bp, Artificial sequence
  SiRNA target sequence
tctttcgactcctggacagtccgc

SEQ ID NO: 233627 - DNA, 24 bp, Artificial sequence
  SiRNA target sequence
ctttcgactcctggacagtccgct

SEQ ID NO: 233628 - DNA, 24 bp, Artificial sequence
  SiRNA target sequence
tttcgactcctggacagtccgcta

SEQ ID NO: 233629 - DNA, 24 bp, Artificial sequence
  SiRNA target sequence
ttcgactcctggacagtccgctag

SEQ ID NO: 233630 - DNA, 24 bp, Artificial sequence
  SiRNA target sequence
tcgactcctggacagtccgctaga

SEQ ID NO: 233631 - DNA, 24 bp, Artificial sequence
  SiRNA target sequence
cgactcctggacagtccgctagat

SEQ ID NO: 233632 - DNA, 24 bp, Artificial sequence
  SiRNA target sequence
gactcctggacagtccgctagatt

SEQ ID NO: 233633 - DNA, 24 bp, Artificial sequence
  SiRNA target sequence
actcctggacagtccgctagattt

SEQ ID NO: 233634 - DNA, 24 bp, Artificial sequence
  SiRNA target sequence
ctcctggacagtccgctagatttg

SEQ ID NO: 233635 - DNA, 24 bp, Artificial sequence
  SiRNA target sequence
tcctggacagtccgctagatttgt

SEQ ID NO: 233636 - DNA, 24 bp, Artificial sequence
  SiRNA target sequence
cctggacagtccgctagatttgtc

SEQ ID NO: 233637 - DNA, 24 bp, Artificial sequence
  SiRNA target sequence
ctggacagtccgctagatttgtcc

SEQ ID NO: 233638 - DNA, 24 bp, Artificial sequence
  SiRNA target sequence
tggacagtccgctagatttgtccc

SEQ ID NO: 233639 - DNA, 24 bp, Artificial sequence
  SiRNA target sequence
ggacagtccgctagatttgtccct

SEQ ID NO: 233640 - DNA, 24 bp, Artificial sequence
  SiRNA target sequence
gacagtccgctagatttgtccctt

SEQ ID NO: 233641 - DNA, 24 bp, Artificial sequence
  SiRNA target sequence
acagtccgctagatttgtcccttt

SEQ ID NO: 233642 - DNA, 24 bp, Artificial sequence
  SiRNA target sequence
cagtccgctagatttgtcccttta

SEQ ID NO: 233643 - DNA, 24 bp, Artificial sequence
  SiRNA target sequence
agtccgctagatttgtccctttat

SEQ ID NO: 233644 - DNA, 24 bp, Artificial sequence
  SiRNA target sequence
gtccgctagatttgtccctttatt

SEQ ID NO: 233645 - DNA, 24 bp, Artificial sequence
  SiRNA target sequence
tccgctagatttgtccctttattt

SEQ ID NO: 233646 - DNA, 24 bp, Artificial sequence
  SiRNA target sequence
ccgctagatttgtccctttatttt

SEQ ID NO: 233647 - DNA, 24 bp, Artificial sequence
  SiRNA target sequence
cgctagatttgtccctttatttta

SEQ ID NO: 233648 - DNA, 24 bp, Artificial sequence
  SiRNA target sequence
gctagatttgtccctttattttat

SEQ ID NO: 233649 - DNA, 24 bp, Artificial sequence
  SiRNA target sequence
ctagatttgtccctttattttatg

SEQ ID NO: 233650 - DNA, 24 bp, Artificial sequence
  SiRNA target sequence
tagatttgtccctttattttatgt

SEQ ID NO: 233651 - DNA, 24 bp, Artificial sequence
  SiRNA target sequence
agatttgtccctttattttatgtt

SEQ ID NO: 233652 - DNA, 24 bp, Artificial sequence
  SiRNA target sequence
gatttgtccctttattttatgttg

SEQ ID NO: 233653 - DNA, 24 bp, Artificial sequence
  SiRNA target sequence
atttgtccctttattttatgttgg

SEQ ID NO: 233654 - DNA, 24 bp, Artificial sequence
  SiRNA target sequence
tttgtccctttattttatgttgga

SEQ ID NO: 233655 - DNA, 24 bp, Artificial sequence
  SiRNA target sequence
ttgtccctttattttatgttggat

SEQ ID NO: 233656 - DNA, 24 bp, Artificial sequence
  SiRNA target sequence
tgtccctttattttatgttggatc

SEQ ID NO: 233657 - DNA, 24 bp, Artificial sequence
  SiRNA target sequence
gtccctttattttatgttggatct

SEQ ID NO: 233658 - DNA, 24 bp, Artificial sequence
  SiRNA target sequence
tccctttattttatgttggatcta

SEQ ID NO: 233659 - DNA, 24 bp, Artificial sequence
  SiRNA target sequence
ccctttattttatgttggatctaa

SEQ ID NO: 233660 - DNA, 24 bp, Artificial sequence
  SiRNA target sequence
cctttattttatgttggatctaat

SEQ ID NO: 233661 - DNA, 24 bp, Artificial sequence
  SiRNA target sequence
ctttattttatgttggatctaatt

SEQ ID NO: 233662 - DNA, 24 bp, Artificial sequence
  SiRNA target sequence
tttattttatgttggatctaattt

SEQ ID NO: 233663 - DNA, 24 bp, Artificial sequence
  SiRNA target sequence
ttattttatgttggatctaatttg

SEQ ID NO: 233664 - DNA, 24 bp, Artificial sequence
  SiRNA target sequence
tattttatgttggatctaatttgg

SEQ ID NO: 233665 - DNA, 24 bp, Artificial sequence
  SiRNA target sequence
attttatgttggatctaatttggc

SEQ ID NO: 233666 - DNA, 24 bp, Artificial sequence
  SiRNA target sequence
ttttatgttggatctaatttggct

SEQ ID NO: 233667 - DNA, 24 bp, Artificial sequence
  SiRNA target sequence
tttatgttggatctaatttggctt

SEQ ID NO: 233668 - DNA, 24 bp, Artificial sequence
  SiRNA target sequence
ttatgttggatctaatttggcttt

SEQ ID NO: 233669 - DNA, 24 bp, Artificial sequence
  SiRNA target sequence
tatgttggatctaatttggcttta

SEQ ID NO: 233670 - DNA, 24 bp, Artificial sequence
  SiRNA target sequence
atgttggatctaatttggctttac

SEQ ID NO: 233671 - DNA, 24 bp, Artificial sequence
  SiRNA target sequence
tgttggatctaatttggctttact

SEQ ID NO: 233672 - DNA, 24 bp, Artificial sequence
  SiRNA target sequence
gttggatctaatttggctttactt

SEQ ID NO: 233673 - DNA, 24 bp, Artificial sequence
  SiRNA target sequence
ttggatctaatttggctttacttc

SEQ ID NO: 233674 - DNA, 24 bp, Artificial sequence
  SiRNA target sequence
tggatctaatttggctttacttct

SEQ ID NO: 233675 - DNA, 24 bp, Artificial sequence
  SiRNA target sequence
ggatctaatttggctttacttctt

SEQ ID NO: 233676 - DNA, 24 bp, Artificial sequence
  SiRNA target sequence
gatctaatttggctttacttcttt

SEQ ID NO: 233677 - DNA, 24 bp, Artificial sequence
  SiRNA target sequence
atctaatttggctttacttctttc

SEQ ID NO: 233678 - DNA, 24 bp, Artificial sequence
  SiRNA target sequence
tctaatttggctttacttctttca

SEQ ID NO: 233679 - DNA, 24 bp, Artificial sequence
  SiRNA target sequence
ctaatttggctttacttctttcag

SEQ ID NO: 233680 - DNA, 24 bp, Artificial sequence
  SiRNA target sequence
taatttggctttacttctttcagg

SEQ ID NO: 233681 - DNA, 24 bp, Artificial sequence
  SiRNA target sequence
aatttggctttacttctttcagga

SEQ ID NO: 233682 - DNA, 24 bp, Artificial sequence
  SiRNA target sequence
atttggctttacttctttcaggaa

SEQ ID NO: 233683 - DNA, 24 bp, Artificial sequence
  SiRNA target sequence
tttggctttacttctttcaggaat

SEQ ID NO: 233684 - DNA, 24 bp, Artificial sequence
  SiRNA target sequence
ttggctttacttctttcaggaatg

SEQ ID NO: 233685 - DNA, 24 bp, Artificial sequence
  SiRNA target sequence
tggctttacttctttcaggaatga

SEQ ID NO: 233686 - DNA, 24 bp, Artificial sequence
  SiRNA target sequence
ggctttacttctttcaggaatgat

SEQ ID NO: 233687 - DNA, 24 bp, Artificial sequence
  SiRNA target sequence
gctttacttctttcaggaatgata

SEQ ID NO: 233688 - DNA, 24 bp, Artificial sequence
  SiRNA target sequence
ctttacttctttcaggaatgataa

SEQ ID NO: 233689 - DNA, 24 bp, Artificial sequence
  SiRNA target sequence
tttacttctttcaggaatgataaa

SEQ ID NO: 233690 - DNA, 24 bp, Artificial sequence
  SiRNA target sequence
ttacttctttcaggaatgataaat

SEQ ID NO: 233691 - DNA, 24 bp, Artificial sequence
  SiRNA target sequence
tacttctttcaggaatgataaatt

SEQ ID NO: 233692 - DNA, 24 bp, Artificial sequence
  SiRNA target sequence
acttctttcaggaatgataaatta

SEQ ID NO: 233693 - DNA, 24 bp, Artificial sequence
  SiRNA target sequence
cttctttcaggaatgataaattac

SEQ ID NO: 233694 - DNA, 24 bp, Artificial sequence
  SiRNA target sequence
ttctttcaggaatgataaattact

SEQ ID NO: 233695 - DNA, 24 bp, Artificial sequence
  SiRNA target sequence
tctttcaggaatgataaattactt

SEQ ID NO: 233696 - DNA, 24 bp, Artificial sequence
  SiRNA target sequence
ctttcaggaatgataaattacttt

SEQ ID NO: 233697 - DNA, 24 bp, Artificial sequence
  SiRNA target sequence
tttcaggaatgataaattactttt

SEQ ID NO: 233698 - DNA, 24 bp, Artificial sequence
  SiRNA target sequence
ttcaggaatgataaattactttta

SEQ ID NO: 233699 - DNA, 24 bp, Artificial sequence
  SiRNA target sequence
tcaggaatgataaattacttttat

SEQ ID NO: 233700 - DNA, 24 bp, Artificial sequence
  SiRNA target sequence
caggaatgataaattacttttata

SEQ ID NO: 233701 - DNA, 24 bp, Artificial sequence
  SiRNA target sequence
aggaatgataaattacttttatag

SEQ ID NO: 233702 - DNA, 24 bp, Artificial sequence
  SiRNA target sequence
ggaatgataaattacttttatagt

SEQ ID NO: 233703 - DNA, 24 bp, Artificial sequence
  SiRNA target sequence
gaatgataaattacttttatagtg

SEQ ID NO: 233704 - DNA, 24 bp, Artificial sequence
  SiRNA target sequence
aatgataaattacttttatagtgt

SEQ ID NO: 233705 - DNA, 24 bp, Artificial sequence
  SiRNA target sequence
atgataaattacttttatagtgta

SEQ ID NO: 233706 - DNA, 24 bp, Artificial sequence
  SiRNA target sequence
tgataaattacttttatagtgtaa

SEQ ID NO: 233707 - DNA, 24 bp, Artificial sequence
  SiRNA target sequence
gataaattacttttatagtgtaag

SEQ ID NO: 233708 - DNA, 24 bp, Artificial sequence
  SiRNA target sequence
ataaattacttttatagtgtaagt

SEQ ID NO: 233709 - DNA, 24 bp, Artificial sequence
  SiRNA target sequence
taaattacttttatagtgtaagta

SEQ ID NO: 233710 - DNA, 24 bp, Artificial sequence
  SiRNA target sequence
aaattacttttatagtgtaagtaa

SEQ ID NO: 233711 - DNA, 24 bp, Artificial sequence
  SiRNA target sequence
aattacttttatagtgtaagtaaa

SEQ ID NO: 233712 - DNA, 24 bp, Artificial sequence
  SiRNA target sequence
attacttttatagtgtaagtaaat

SEQ ID NO: 233713 - DNA, 24 bp, Artificial sequence
  SiRNA target sequence
ttacttttatagtgtaagtaaatc

SEQ ID NO: 233714 - DNA, 24 bp, Artificial sequence
  SiRNA target sequence
tacttttatagtgtaagtaaatct

SEQ ID NO: 233715 - DNA, 24 bp, Artificial sequence
  SiRNA target sequence
acttttatagtgtaagtaaatcta

SEQ ID NO: 233716 - DNA, 24 bp, Artificial sequence
  SiRNA target sequence
cttttatagtgtaagtaaatctaa

SEQ ID NO: 233717 - DNA, 24 bp, Artificial sequence
  SiRNA target sequence
ttttatagtgtaagtaaatctaaa

SEQ ID NO: 233718 - DNA, 24 bp, Artificial sequence
  SiRNA target sequence
tttatagtgtaagtaaatctaaaa

SEQ ID NO: 233719 - DNA, 24 bp, Artificial sequence
  SiRNA target sequence
ttatagtgtaagtaaatctaaaat

SEQ ID NO: 233720 - DNA, 24 bp, Artificial sequence
  SiRNA target sequence
tatagtgtaagtaaatctaaaatg

SEQ ID NO: 233721 - DNA, 24 bp, Artificial sequence
  SiRNA target sequence
atagtgtaagtaaatctaaaatgt

SEQ ID NO: 233722 - DNA, 24 bp, Artificial sequence
  SiRNA target sequence
tagtgtaagtaaatctaaaatgtc

SEQ ID NO: 233723 - DNA, 24 bp, Artificial sequence
  SiRNA target sequence
agtgtaagtaaatctaaaatgtcg

SEQ ID NO: 233724 - DNA, 24 bp, Artificial sequence
  SiRNA target sequence
gtgtaagtaaatctaaaatgtcgt

SEQ ID NO: 233725 - DNA, 24 bp, Artificial sequence
  SiRNA target sequence
tgtaagtaaatctaaaatgtcgta

SEQ ID NO: 233726 - DNA, 24 bp, Artificial sequence
  SiRNA target sequence
gtaagtaaatctaaaatgtcgtat

SEQ ID NO: 233727 - DNA, 24 bp, Artificial sequence
  SiRNA target sequence
taagtaaatctaaaatgtcgtatg

SEQ ID NO: 233728 - DNA, 24 bp, Artificial sequence
  SiRNA target sequence
aagtaaatctaaaatgtcgtatgt

SEQ ID NO: 233729 - DNA, 24 bp, Artificial sequence
  SiRNA target sequence
agtaaatctaaaatgtcgtatgtt

SEQ ID NO: 233730 - DNA, 24 bp, Artificial sequence
  SiRNA target sequence
gtaaatctaaaatgtcgtatgttg

SEQ ID NO: 233731 - DNA, 24 bp, Artificial sequence
  SiRNA target sequence
taaatctaaaatgtcgtatgttgc

SEQ ID NO: 233732 - DNA, 24 bp, Artificial sequence
  SiRNA target sequence
aaatctaaaatgtcgtatgttgcg

SEQ ID NO: 233733 - DNA, 24 bp, Artificial sequence
  SiRNA target sequence
aatctaaaatgtcgtatgttgcgg

SEQ ID NO: 233734 - DNA, 24 bp, Artificial sequence
  SiRNA target sequence
atctaaaatgtcgtatgttgcggc

SEQ ID NO: 233735 - DNA, 24 bp, Artificial sequence
  SiRNA target sequence
tctaaaatgtcgtatgttgcggcc

SEQ ID NO: 233736 - DNA, 24 bp, Artificial sequence
  SiRNA target sequence
ctaaaatgtcgtatgttgcggccg

SEQ ID NO: 233737 - DNA, 24 bp, Artificial sequence
  SiRNA target sequence
taaaatgtcgtatgttgcggccga

SEQ ID NO: 233738 - DNA, 24 bp, Artificial sequence
  SiRNA target sequence
aaaatgtcgtatgttgcggccgaa

SEQ ID NO: 233739 - DNA, 24 bp, Artificial sequence
  SiRNA target sequence
aaatgtcgtatgttgcggccgaaa

SEQ ID NO: 233740 - DNA, 24 bp, Artificial sequence
  SiRNA target sequence
aatgtcgtatgttgcggccgaaag

SEQ ID NO: 233741 - DNA, 24 bp, Artificial sequence
  SiRNA target sequence
atgtcgtatgttgcggccgaaaga

SEQ ID NO: 233742 - DNA, 24 bp, Artificial sequence
  SiRNA target sequence
tgtcgtatgttgcggccgaaagat

SEQ ID NO: 233743 - DNA, 24 bp, Artificial sequence
  SiRNA target sequence
gtcgtatgttgcggccgaaagatt

SEQ ID NO: 233744 - DNA, 24 bp, Artificial sequence
  SiRNA target sequence
tcgtatgttgcggccgaaagattt

SEQ ID NO: 233745 - DNA, 24 bp, Artificial sequence
  SiRNA target sequence
cgtatgttgcggccgaaagatttt

SEQ ID NO: 233746 - DNA, 24 bp, Artificial sequence
  SiRNA target sequence
gtatgttgcggccgaaagattttt

SEQ ID NO: 233747 - DNA, 24 bp, Artificial sequence
  SiRNA target sequence
tatgttgcggccgaaagatttttt

SEQ ID NO: 233748 - DNA, 24 bp, Artificial sequence
  SiRNA target sequence
atgttgcggccgaaagatttttta

SEQ ID NO: 233749 - DNA, 24 bp, Artificial sequence
  SiRNA target sequence
tgttgcggccgaaagattttttaa

SEQ ID NO: 233750 - DNA, 24 bp, Artificial sequence
  SiRNA target sequence
gttgcggccgaaagattttttaat

SEQ ID NO: 233751 - DNA, 24 bp, Artificial sequence
  SiRNA target sequence
ttgcggccgaaagattttttaatg

SEQ ID NO: 233752 - DNA, 24 bp, Artificial sequence
  SiRNA target sequence
tgcggccgaaagattttttaatgg

SEQ ID NO: 233753 - DNA, 24 bp, Artificial sequence
  SiRNA target sequence
gcggccgaaagattttttaatgga

SEQ ID NO: 233754 - DNA, 24 bp, Artificial sequence
  SiRNA target sequence
cggccgaaagattttttaatggat

SEQ ID NO: 233755 - DNA, 24 bp, Artificial sequence
  SiRNA target sequence
ggccgaaagattttttaatggatt

SEQ ID NO: 233756 - DNA, 24 bp, Artificial sequence
  SiRNA target sequence
gccgaaagattttttaatggattt

SEQ ID NO: 233757 - DNA, 24 bp, Artificial sequence
  SiRNA target sequence
ccgaaagattttttaatggatttt

SEQ ID NO: 233758 - DNA, 24 bp, Artificial sequence
  SiRNA target sequence
cgaaagattttttaatggattttt

SEQ ID NO: 233759 - DNA, 24 bp, Artificial sequence
  SiRNA target sequence
gaaagattttttaatggatttttt

SEQ ID NO: 233760 - DNA, 24 bp, Artificial sequence
  SiRNA target sequence
aaagattttttaatggattttttt

SEQ ID NO: 233761 - DNA, 24 bp, Artificial sequence
  SiRNA target sequence
aagattttttaatggatttttttg

SEQ ID NO: 233762 - DNA, 24 bp, Artificial sequence
  SiRNA target sequence
agattttttaatggatttttttgt

SEQ ID NO: 233763 - DNA, 24 bp, Artificial sequence
  SiRNA target sequence
gattttttaatggatttttttgtc

SEQ ID NO: 233764 - DNA, 24 bp, Artificial sequence
  SiRNA target sequence
attttttaatggatttttttgtct

SEQ ID NO: 233765 - DNA, 24 bp, Artificial sequence
  SiRNA target sequence
ttttttaatggatttttttgtctg

SEQ ID NO: 233766 - DNA, 24 bp, Artificial sequence
  SiRNA target sequence
tttttaatggatttttttgtctga

SEQ ID NO: 233767 - DNA, 24 bp, Artificial sequence
  SiRNA target sequence
ttttaatggatttttttgtctgag

SEQ ID NO: 233768 - DNA, 24 bp, Artificial sequence
  SiRNA target sequence
tttaatggatttttttgtctgagt

SEQ ID NO: 233769 - DNA, 24 bp, Artificial sequence
  SiRNA target sequence
ttaatggatttttttgtctgagtg

SEQ ID NO: 233770 - DNA, 24 bp, Artificial sequence
  SiRNA target sequence
taatggatttttttgtctgagtgg

SEQ ID NO: 233771 - DNA, 24 bp, Artificial sequence
  SiRNA target sequence
aatggatttttttgtctgagtgga

SEQ ID NO: 233772 - DNA, 24 bp, Artificial sequence
  SiRNA target sequence
atggatttttttgtctgagtggaa

SEQ ID NO: 233773 - DNA, 24 bp, Artificial sequence
  SiRNA target sequence
tggatttttttgtctgagtggaat

SEQ ID NO: 233774 - DNA, 24 bp, Artificial sequence
  SiRNA target sequence
ggatttttttgtctgagtggaatt

SEQ ID NO: 233775 - DNA, 24 bp, Artificial sequence
  SiRNA target sequence
gatttttttgtctgagtggaattc

SEQ ID NO: 233776 - DNA, 24 bp, Artificial sequence
  SiRNA target sequence
atttttttgtctgagtggaattct

SEQ ID NO: 233777 - DNA, 24 bp, Artificial sequence
  SiRNA target sequence
tttttttgtctgagtggaattctc

SEQ ID NO: 233778 - DNA, 24 bp, Artificial sequence
  SiRNA target sequence
ttttttgtctgagtggaattctct

SEQ ID NO: 233779 - DNA, 24 bp, Artificial sequence
  SiRNA target sequence
tttttgtctgagtggaattctctg

SEQ ID NO: 233780 - DNA, 24 bp, Artificial sequence
  SiRNA target sequence
ttttgtctgagtggaattctctgt

SEQ ID NO: 233781 - DNA, 24 bp, Artificial sequence
  SiRNA target sequence
tttgtctgagtggaattctctgtg

SEQ ID NO: 233782 - DNA, 24 bp, Artificial sequence
  SiRNA target sequence
ttgtctgagtggaattctctgtgc

SEQ ID NO: 233783 - DNA, 24 bp, Artificial sequence
  SiRNA target sequence
tgtctgagtggaattctctgtgct

SEQ ID NO: 233784 - DNA, 24 bp, Artificial sequence
  SiRNA target sequence
gtctgagtggaattctctgtgctg

SEQ ID NO: 233785 - DNA, 24 bp, Artificial sequence
  SiRNA target sequence
tctgagtggaattctctgtgctgt

SEQ ID NO: 233786 - DNA, 24 bp, Artificial sequence
  SiRNA target sequence
ctgagtggaattctctgtgctgta

SEQ ID NO: 233787 - DNA, 24 bp, Artificial sequence
  SiRNA target sequence
tgagtggaattctctgtgctgtaa

SEQ ID NO: 233788 - DNA, 24 bp, Artificial sequence
  SiRNA target sequence
gagtggaattctctgtgctgtaat

SEQ ID NO: 233789 - DNA, 24 bp, Artificial sequence
  SiRNA target sequence
agtggaattctctgtgctgtaatt

SEQ ID NO: 233790 - DNA, 24 bp, Artificial sequence
  SiRNA target sequence
gtggaattctctgtgctgtaattt

SEQ ID NO: 233791 - DNA, 24 bp, Artificial sequence
  SiRNA target sequence
tggaattctctgtgctgtaattta

SEQ ID NO: 233792 - DNA, 24 bp, Artificial sequence
  SiRNA target sequence
ggaattctctgtgctgtaatttat

SEQ ID NO: 233793 - DNA, 24 bp, Artificial sequence
  SiRNA target sequence
gaattctctgtgctgtaatttatc

SEQ ID NO: 233794 - DNA, 24 bp, Artificial sequence
  SiRNA target sequence
aattctctgtgctgtaatttatct

SEQ ID NO: 233795 - DNA, 24 bp, Artificial sequence
  SiRNA target sequence
attctctgtgctgtaatttatctt

SEQ ID NO: 233796 - DNA, 24 bp, Artificial sequence
  SiRNA target sequence
ttctctgtgctgtaatttatcttc

SEQ ID NO: 233797 - DNA, 24 bp, Artificial sequence
  SiRNA target sequence
tctctgtgctgtaatttatcttct

SEQ ID NO: 233798 - DNA, 24 bp, Artificial sequence
  SiRNA target sequence
ctctgtgctgtaatttatcttcta

SEQ ID NO: 233799 - DNA, 24 bp, Artificial sequence
  SiRNA target sequence
tctgtgctgtaatttatcttctaa

SEQ ID NO: 233800 - DNA, 24 bp, Artificial sequence
  SiRNA target sequence
ctgtgctgtaatttatcttctaaa

SEQ ID NO: 233801 - DNA, 24 bp, Artificial sequence
  SiRNA target sequence
tgtgctgtaatttatcttctaaaa

SEQ ID NO: 233802 - DNA, 24 bp, Artificial sequence
  SiRNA target sequence
gtgctgtaatttatcttctaaaaa

SEQ ID NO: 233803 - DNA, 24 bp, Artificial sequence
  SiRNA target sequence
tgctgtaatttatcttctaaaaaa

SEQ ID NO: 233804 - DNA, 24 bp, Artificial sequence
  SiRNA target sequence
gctgtaatttatcttctaaaaaaa

SEQ ID NO: 233805 - DNA, 24 bp, Artificial sequence
  SiRNA target sequence
ctgtaatttatcttctaaaaaaat

SEQ ID NO: 233806 - DNA, 24 bp, Artificial sequence
  SiRNA target sequence
tgtaatttatcttctaaaaaaata

SEQ ID NO: 233807 - DNA, 24 bp, Artificial sequence
  SiRNA target sequence
gtaatttatcttctaaaaaaatat

SEQ ID NO: 233808 - DNA, 24 bp, Artificial sequence
  SiRNA target sequence
taatttatcttctaaaaaaatatt

SEQ ID NO: 233809 - DNA, 24 bp, Artificial sequence
  SiRNA target sequence
aatttatcttctaaaaaaatattt

SEQ ID NO: 233810 - DNA, 24 bp, Artificial sequence
  SiRNA target sequence
atttatcttctaaaaaaatattta

SEQ ID NO: 233811 - DNA, 24 bp, Artificial sequence
  SiRNA target sequence
tttatcttctaaaaaaatatttag

SEQ ID NO: 233812 - DNA, 24 bp, Artificial sequence
  SiRNA target sequence
ttatcttctaaaaaaatatttaga

SEQ ID NO: 233813 - DNA, 24 bp, Artificial sequence
  SiRNA target sequence
tatcttctaaaaaaatatttagaa

SEQ ID NO: 233814 - DNA, 24 bp, Artificial sequence
  SiRNA target sequence
atcttctaaaaaaatatttagaaa

SEQ ID NO: 233815 - DNA, 24 bp, Artificial sequence
  SiRNA target sequence
tcttctaaaaaaatatttagaaaa

SEQ ID NO: 233816 - DNA, 24 bp, Artificial sequence
  SiRNA target sequence
cttctaaaaaaatatttagaaaat

SEQ ID NO: 233817 - DNA, 24 bp, Artificial sequence
  SiRNA target sequence
ttctaaaaaaatatttagaaaata

SEQ ID NO: 233818 - DNA, 24 bp, Artificial sequence
  SiRNA target sequence
tctaaaaaaatatttagaaaataa

SEQ ID NO: 233819 - DNA, 24 bp, Artificial sequence
  SiRNA target sequence
ctaaaaaaatatttagaaaataat

SEQ ID NO: 233820 - DNA, 24 bp, Artificial sequence
  SiRNA target sequence
taaaaaaatatttagaaaataatg

SEQ ID NO: 233821 - DNA, 24 bp, Artificial sequence
  SiRNA target sequence
aaaaaaatatttagaaaataatgt

SEQ ID NO: 233822 - DNA, 24 bp, Artificial sequence
  SiRNA target sequence
aaaaaatatttagaaaataatgtt

SEQ ID NO: 233823 - DNA, 24 bp, Artificial sequence
  SiRNA target sequence
aaaaatatttagaaaataatgtta

SEQ ID NO: 233824 - DNA, 24 bp, Artificial sequence
  SiRNA target sequence
aaaatatttagaaaataatgttac

SEQ ID NO: 233825 - DNA, 24 bp, Artificial sequence
  SiRNA target sequence
aaatatttagaaaataatgttact

SEQ ID NO: 233826 - DNA, 24 bp, Artificial sequence
  SiRNA target sequence
aatatttagaaaataatgttacta

SEQ ID NO: 233827 - DNA, 24 bp, Artificial sequence
  SiRNA target sequence
atatttagaaaataatgttactag

SEQ ID NO: 233828 - DNA, 24 bp, Artificial sequence
  SiRNA target sequence
tatttagaaaataatgttactagc

SEQ ID NO: 233829 - DNA, 24 bp, Artificial sequence
  SiRNA target sequence
atttagaaaataatgttactagca

SEQ ID NO: 233830 - DNA, 24 bp, Artificial sequence
  SiRNA target sequence
tttagaaaataatgttactagcaa

SEQ ID NO: 233831 - DNA, 24 bp, Artificial sequence
  SiRNA target sequence
ttagaaaataatgttactagcaaa

SEQ ID NO: 233832 - DNA, 24 bp, Artificial sequence
  SiRNA target sequence
tagaaaataatgttactagcaaac

SEQ ID NO: 233833 - DNA, 24 bp, Artificial sequence
  SiRNA target sequence
agaaaataatgttactagcaaacc

SEQ ID NO: 233834 - DNA, 24 bp, Artificial sequence
  SiRNA target sequence
gaaaataatgttactagcaaacca

SEQ ID NO: 233835 - DNA, 24 bp, Artificial sequence
  SiRNA target sequence
aaaataatgttactagcaaaccaa

SEQ ID NO: 233836 - DNA, 24 bp, Artificial sequence
  SiRNA target sequence
aaataatgttactagcaaaccaat

SEQ ID NO: 233837 - DNA, 24 bp, Artificial sequence
  SiRNA target sequence
aataatgttactagcaaaccaatg

SEQ ID NO: 233838 - DNA, 24 bp, Artificial sequence
  SiRNA target sequence
ataatgttactagcaaaccaatgt

SEQ ID NO: 233839 - DNA, 24 bp, Artificial sequence
  SiRNA target sequence
taatgttactagcaaaccaatgtt

SEQ ID NO: 233840 - DNA, 24 bp, Artificial sequence
  SiRNA target sequence
aatgttactagcaaaccaatgttt

SEQ ID NO: 233841 - DNA, 24 bp, Artificial sequence
  SiRNA target sequence
atgttactagcaaaccaatgtttg

SEQ ID NO: 233842 - DNA, 24 bp, Artificial sequence
  SiRNA target sequence
tgttactagcaaaccaatgtttgt

SEQ ID NO: 233843 - DNA, 24 bp, Artificial sequence
  SiRNA target sequence
gttactagcaaaccaatgtttgtt

SEQ ID NO: 233844 - DNA, 24 bp, Artificial sequence
  SiRNA target sequence
ttactagcaaaccaatgtttgtta

SEQ ID NO: 233845 - DNA, 24 bp, Artificial sequence
  SiRNA target sequence
tactagcaaaccaatgtttgttag

SEQ ID NO: 233846 - DNA, 24 bp, Artificial sequence
  SiRNA target sequence
actagcaaaccaatgtttgttaga

SEQ ID NO: 233847 - DNA, 24 bp, Artificial sequence
  SiRNA target sequence
ctagcaaaccaatgtttgttagaa

SEQ ID NO: 233848 - DNA, 24 bp, Artificial sequence
  SiRNA target sequence
tagcaaaccaatgtttgttagaaa

SEQ ID NO: 233849 - DNA, 24 bp, Artificial sequence
  SiRNA target sequence
agcaaaccaatgtttgttagaaag

SEQ ID NO: 233850 - DNA, 24 bp, Artificial sequence
  SiRNA target sequence
gcaaaccaatgtttgttagaaaga

SEQ ID NO: 233851 - DNA, 24 bp, Artificial sequence
  SiRNA target sequence
caaaccaatgtttgttagaaagac

SEQ ID NO: 233852 - DNA, 24 bp, Artificial sequence
  SiRNA target sequence
aaaccaatgtttgttagaaagact

SEQ ID NO: 233853 - DNA, 24 bp, Artificial sequence
  SiRNA target sequence
aaccaatgtttgttagaaagactt

SEQ ID NO: 233854 - DNA, 24 bp, Artificial sequence
  SiRNA target sequence
accaatgtttgttagaaagacttt

SEQ ID NO: 233855 - DNA, 24 bp, Artificial sequence
  SiRNA target sequence
ccaatgtttgttagaaagactttt

SEQ ID NO: 233856 - DNA, 24 bp, Artificial sequence
  SiRNA target sequence
caatgtttgttagaaagactttta

SEQ ID NO: 233857 - DNA, 24 bp, Artificial sequence
  SiRNA target sequence
aatgtttgttagaaagacttttac

SEQ ID NO: 233858 - DNA, 24 bp, Artificial sequence
  SiRNA target sequence
atgtttgttagaaagacttttact

SEQ ID NO: 233859 - DNA, 24 bp, Artificial sequence
  SiRNA target sequence
tgtttgttagaaagacttttacta

SEQ ID NO: 233860 - DNA, 24 bp, Artificial sequence
  SiRNA target sequence
gtttgttagaaagacttttactaa

SEQ ID NO: 233861 - DNA, 24 bp, Artificial sequence
  SiRNA target sequence
tttgttagaaagacttttactaaa

SEQ ID NO: 233862 - DNA, 24 bp, Artificial sequence
  SiRNA target sequence
ttgttagaaagacttttactaaaa

SEQ ID NO: 233863 - DNA, 24 bp, Artificial sequence
  SiRNA target sequence
tgttagaaagacttttactaaaaa

SEQ ID NO: 233864 - DNA, 24 bp, Artificial sequence
  SiRNA target sequence
gttagaaagacttttactaaaaag

SEQ ID NO: 233865 - DNA, 24 bp, Artificial sequence
  SiRNA target sequence
ttagaaagacttttactaaaaaga

SEQ ID NO: 233866 - DNA, 24 bp, Artificial sequence
  SiRNA target sequence
tagaaagacttttactaaaaagaa

SEQ ID NO: 233867 - DNA, 24 bp, Artificial sequence
  SiRNA target sequence
agaaagacttttactaaaaagaag

SEQ ID NO: 233868 - DNA, 24 bp, Artificial sequence
  SiRNA target sequence
gaaagacttttactaaaaagaaga

SEQ ID NO: 233869 - DNA, 24 bp, Artificial sequence
  SiRNA target sequence
aaagacttttactaaaaagaagag

SEQ ID NO: 233870 - DNA, 24 bp, Artificial sequence
  SiRNA target sequence
aagacttttactaaaaagaagagt

SEQ ID NO: 233871 - DNA, 24 bp, Artificial sequence
  SiRNA target sequence
agacttttactaaaaagaagagta

SEQ ID NO: 233872 - DNA, 24 bp, Artificial sequence
  SiRNA target sequence
gacttttactaaaaagaagagtaa

SEQ ID NO: 233873 - DNA, 24 bp, Artificial sequence
  SiRNA target sequence
acttttactaaaaagaagagtaaa

SEQ ID NO: 233874 - DNA, 24 bp, Artificial sequence
  SiRNA target sequence
cttttactaaaaagaagagtaaag

SEQ ID NO: 233875 - DNA, 24 bp, Artificial sequence
  SiRNA target sequence
ttttactaaaaagaagagtaaagt

SEQ ID NO: 233876 - DNA, 24 bp, Artificial sequence
  SiRNA target sequence
tttactaaaaagaagagtaaagtg

SEQ ID NO: 233877 - DNA, 24 bp, Artificial sequence
  SiRNA target sequence
ttactaaaaagaagagtaaagtga

SEQ ID NO: 233878 - DNA, 24 bp, Artificial sequence
  SiRNA target sequence
tactaaaaagaagagtaaagtgaa

SEQ ID NO: 233879 - DNA, 24 bp, Artificial sequence
  SiRNA target sequence
actaaaaagaagagtaaagtgaag

SEQ ID NO: 233880 - DNA, 24 bp, Artificial sequence
  SiRNA target sequence
ctaaaaagaagagtaaagtgaagg

SEQ ID NO: 233881 - DNA, 24 bp, Artificial sequence
  SiRNA target sequence
taaaaagaagagtaaagtgaaggt

SEQ ID NO: 233882 - DNA, 24 bp, Artificial sequence
  SiRNA target sequence
aaaaagaagagtaaagtgaaggtt

SEQ ID NO: 233883 - DNA, 24 bp, Artificial sequence
  SiRNA target sequence
aaaagaagagtaaagtgaaggttg

SEQ ID NO: 233884 - DNA, 24 bp, Artificial sequence
  SiRNA target sequence
aaagaagagtaaagtgaaggttgg

SEQ ID NO: 233885 - DNA, 24 bp, Artificial sequence
  SiRNA target sequence
aagaagagtaaagtgaaggttgga

SEQ ID NO: 233886 - DNA, 24 bp, Artificial sequence
  SiRNA target sequence
agaagagtaaagtgaaggttggat

SEQ ID NO: 233887 - DNA, 24 bp, Artificial sequence
  SiRNA target sequence
gaagagtaaagtgaaggttggatt

SEQ ID NO: 233888 - DNA, 24 bp, Artificial sequence
  SiRNA target sequence
aagagtaaagtgaaggttggattt

SEQ ID NO: 233889 - DNA, 24 bp, Artificial sequence
  SiRNA target sequence
agagtaaagtgaaggttggatttg

SEQ ID NO: 233890 - DNA, 24 bp, Artificial sequence
  SiRNA target sequence
gagtaaagtgaaggttggatttgt

SEQ ID NO: 233891 - DNA, 24 bp, Artificial sequence
  SiRNA target sequence
agtaaagtgaaggttggatttgtt

SEQ ID NO: 233892 - DNA, 24 bp, Artificial sequence
  SiRNA target sequence
gtaaagtgaaggttggatttgttg

SEQ ID NO: 233893 - DNA, 24 bp, Artificial sequence
  SiRNA target sequence
taaagtgaaggttggatttgttga

SEQ ID NO: 233894 - DNA, 24 bp, Artificial sequence
  SiRNA target sequence
aaagtgaaggttggatttgttgat

SEQ ID NO: 233895 - DNA, 24 bp, Artificial sequence
  SiRNA target sequence
aagtgaaggttggatttgttgatg

SEQ ID NO: 233896 - DNA, 24 bp, Artificial sequence
  SiRNA target sequence
agtgaaggttggatttgttgatgg

SEQ ID NO: 233897 - DNA, 24 bp, Artificial sequence
  SiRNA target sequence
gtgaaggttggatttgttgatgga

SEQ ID NO: 233898 - DNA, 24 bp, Artificial sequence
  SiRNA target sequence
tgaaggttggatttgttgatggac

SEQ ID NO: 233899 - DNA, 24 bp, Artificial sequence
  SiRNA target sequence
gaaggttggatttgttgatggact

SEQ ID NO: 233900 - DNA, 24 bp, Artificial sequence
  SiRNA target sequence
aaggttggatttgttgatggactt

SEQ ID NO: 233901 - DNA, 24 bp, Artificial sequence
  SiRNA target sequence
aggttggatttgttgatggactta

SEQ ID NO: 233902 - DNA, 24 bp, Artificial sequence
  SiRNA target sequence
ggttggatttgttgatggacttat

SEQ ID NO: 233903 - DNA, 24 bp, Artificial sequence
  SiRNA target sequence
gttggatttgttgatggacttatt

SEQ ID NO: 233904 - DNA, 24 bp, Artificial sequence
  SiRNA target sequence
ttggatttgttgatggacttattg

SEQ ID NO: 233905 - DNA, 24 bp, Artificial sequence
  SiRNA target sequence
tggatttgttgatggacttattga

SEQ ID NO: 233906 - DNA, 24 bp, Artificial sequence
  SiRNA target sequence
ggatttgttgatggacttattgag

SEQ ID NO: 233907 - DNA, 24 bp, Artificial sequence
  SiRNA target sequence
gatttgttgatggacttattgaga

SEQ ID NO: 233908 - DNA, 24 bp, Artificial sequence
  SiRNA target sequence
atttgttgatggacttattgagat

SEQ ID NO: 233909 - DNA, 24 bp, Artificial sequence
  SiRNA target sequence
tttgttgatggacttattgagatg

SEQ ID NO: 233910 - DNA, 24 bp, Artificial sequence
  SiRNA target sequence
ttgttgatggacttattgagatga

SEQ ID NO: 233911 - DNA, 24 bp, Artificial sequence
  SiRNA target sequence
tgttgatggacttattgagatgag

SEQ ID NO: 233912 - DNA, 24 bp, Artificial sequence
  SiRNA target sequence
gttgatggacttattgagatgagt

SEQ ID NO: 233913 - DNA, 24 bp, Artificial sequence
  SiRNA target sequence
ttgatggacttattgagatgagta

SEQ ID NO: 233914 - DNA, 24 bp, Artificial sequence
  SiRNA target sequence
tgatggacttattgagatgagtaa

SEQ ID NO: 233915 - DNA, 24 bp, Artificial sequence
  SiRNA target sequence
gatggacttattgagatgagtaaa

SEQ ID NO: 233916 - DNA, 24 bp, Artificial sequence
  SiRNA target sequence
atggacttattgagatgagtaaat

SEQ ID NO: 233917 - DNA, 24 bp, Artificial sequence
  SiRNA target sequence
tggacttattgagatgagtaaatc

SEQ ID NO: 233918 - DNA, 24 bp, Artificial sequence
  SiRNA target sequence
ggacttattgagatgagtaaatct

SEQ ID NO: 233919 - DNA, 24 bp, Artificial sequence
  SiRNA target sequence
gacttattgagatgagtaaatcta

SEQ ID NO: 233920 - DNA, 24 bp, Artificial sequence
  SiRNA target sequence
acttattgagatgagtaaatctaa

SEQ ID NO: 233921 - DNA, 24 bp, Artificial sequence
  SiRNA target sequence
cttattgagatgagtaaatctaaa

SEQ ID NO: 233922 - DNA, 24 bp, Artificial sequence
  SiRNA target sequence
ttattgagatgagtaaatctaaac

SEQ ID NO: 233923 - DNA, 24 bp, Artificial sequence
  SiRNA target sequence
tattgagatgagtaaatctaaact

SEQ ID NO: 233924 - DNA, 24 bp, Artificial sequence
  SiRNA target sequence
attgagatgagtaaatctaaacta

SEQ ID NO: 233925 - DNA, 24 bp, Artificial sequence
  SiRNA target sequence
ttgagatgagtaaatctaaactac

SEQ ID NO: 233926 - DNA, 24 bp, Artificial sequence
  SiRNA target sequence
tgagatgagtaaatctaaactact

SEQ ID NO: 233927 - DNA, 24 bp, Artificial sequence
  SiRNA target sequence
gagatgagtaaatctaaactactg

SEQ ID NO: 233928 - DNA, 24 bp, Artificial sequence
  SiRNA target sequence
agatgagtaaatctaaactactgt

SEQ ID NO: 233929 - DNA, 24 bp, Artificial sequence
  SiRNA target sequence
gatgagtaaatctaaactactgtt

SEQ ID NO: 233930 - DNA, 24 bp, Artificial sequence
  SiRNA target sequence
atgagtaaatctaaactactgttg

SEQ ID NO: 233931 - DNA, 24 bp, Artificial sequence
  SiRNA target sequence
tgagtaaatctaaactactgttga

SEQ ID NO: 233932 - DNA, 24 bp, Artificial sequence
  SiRNA target sequence
gagtaaatctaaactactgttgaa

SEQ ID NO: 233933 - DNA, 24 bp, Artificial sequence
  SiRNA target sequence
agtaaatctaaactactgttgaat

SEQ ID NO: 233934 - DNA, 24 bp, Artificial sequence
  SiRNA target sequence
gtaaatctaaactactgttgaata

SEQ ID NO: 233935 - DNA, 24 bp, Artificial sequence
  SiRNA target sequence
taaatctaaactactgttgaatat

SEQ ID NO: 233936 - DNA, 24 bp, Artificial sequence
  SiRNA target sequence
aaatctaaactactgttgaatatg

SEQ ID NO: 233937 - DNA, 24 bp, Artificial sequence
  SiRNA target sequence
aatctaaactactgttgaatatgt

SEQ ID NO: 233938 - DNA, 24 bp, Artificial sequence
  SiRNA target sequence
atctaaactactgttgaatatgtc

SEQ ID NO: 233939 - DNA, 24 bp, Artificial sequence
  SiRNA target sequence
tctaaactactgttgaatatgtca

SEQ ID NO: 233940 - DNA, 24 bp, Artificial sequence
  SiRNA target sequence
ctaaactactgttgaatatgtcat

SEQ ID NO: 233941 - DNA, 24 bp, Artificial sequence
  SiRNA target sequence
taaactactgttgaatatgtcatt

SEQ ID NO: 233942 - DNA, 24 bp, Artificial sequence
  SiRNA target sequence
aaactactgttgaatatgtcatta

SEQ ID NO: 233943 - DNA, 24 bp, Artificial sequence
  SiRNA target sequence
aactactgttgaatatgtcattag

SEQ ID NO: 233944 - DNA, 24 bp, Artificial sequence
  SiRNA target sequence
actactgttgaatatgtcattagt

SEQ ID NO: 233945 - DNA, 24 bp, Artificial sequence
  SiRNA target sequence
ctactgttgaatatgtcattagtc

SEQ ID NO: 233946 - DNA, 24 bp, Artificial sequence
  SiRNA target sequence
tactgttgaatatgtcattagtcg

SEQ ID NO: 233947 - DNA, 24 bp, Artificial sequence
  SiRNA target sequence
actgttgaatatgtcattagtcgt

SEQ ID NO: 233948 - DNA, 24 bp, Artificial sequence
  SiRNA target sequence
ctgttgaatatgtcattagtcgta

SEQ ID NO: 233949 - DNA, 24 bp, Artificial sequence
  SiRNA target sequence
tgttgaatatgtcattagtcgtat

SEQ ID NO: 233950 - DNA, 24 bp, Artificial sequence
  SiRNA target sequence
gttgaatatgtcattagtcgtatt

SEQ ID NO: 233951 - DNA, 24 bp, Artificial sequence
  SiRNA target sequence
ttgaatatgtcattagtcgtatta

SEQ ID NO: 233952 - DNA, 24 bp, Artificial sequence
  SiRNA target sequence
tgaatatgtcattagtcgtattat

SEQ ID NO: 233953 - DNA, 24 bp, Artificial sequence
  SiRNA target sequence
gaatatgtcattagtcgtattatt

SEQ ID NO: 233954 - DNA, 24 bp, Artificial sequence
  SiRNA target sequence
aatatgtcattagtcgtattattt

SEQ ID NO: 233955 - DNA, 24 bp, Artificial sequence
  SiRNA target sequence
atatgtcattagtcgtattatttt

SEQ ID NO: 233956 - DNA, 24 bp, Artificial sequence
  SiRNA target sequence
tatgtcattagtcgtattatttta

SEQ ID NO: 233957 - DNA, 24 bp, Artificial sequence
  SiRNA target sequence
atgtcattagtcgtattattttat

SEQ ID NO: 233958 - DNA, 24 bp, Artificial sequence
  SiRNA target sequence
tgtcattagtcgtattattttatg

SEQ ID NO: 233959 - DNA, 24 bp, Artificial sequence
  SiRNA target sequence
gtcattagtcgtattattttatgc

SEQ ID NO: 233960 - DNA, 24 bp, Artificial sequence
  SiRNA target sequence
tcattagtcgtattattttatgct

SEQ ID NO: 233961 - DNA, 24 bp, Artificial sequence
  SiRNA target sequence
cattagtcgtattattttatgctg

SEQ ID NO: 233962 - DNA, 24 bp, Artificial sequence
  SiRNA target sequence
attagtcgtattattttatgctgt

SEQ ID NO: 233963 - DNA, 24 bp, Artificial sequence
  SiRNA target sequence
ttagtcgtattattttatgctgtt

SEQ ID NO: 233964 - DNA, 24 bp, Artificial sequence
  SiRNA target sequence
tagtcgtattattttatgctgttt

SEQ ID NO: 233965 - DNA, 24 bp, Artificial sequence
  SiRNA target sequence
agtcgtattattttatgctgtttc

SEQ ID NO: 233966 - DNA, 24 bp, Artificial sequence
  SiRNA target sequence
gtcgtattattttatgctgtttct

SEQ ID NO: 233967 - DNA, 24 bp, Artificial sequence
  SiRNA target sequence
tcgtattattttatgctgtttcta

SEQ ID NO: 233968 - DNA, 24 bp, Artificial sequence
  SiRNA target sequence
cgtattattttatgctgtttctac

SEQ ID NO: 233969 - DNA, 24 bp, Artificial sequence
  SiRNA target sequence
gtattattttatgctgtttctacg

SEQ ID NO: 233970 - DNA, 24 bp, Artificial sequence
  SiRNA target sequence
tattattttatgctgtttctacga

SEQ ID NO: 233971 - DNA, 24 bp, Artificial sequence
  SiRNA target sequence
attattttatgctgtttctacgaa

SEQ ID NO: 233972 - DNA, 24 bp, Artificial sequence
  SiRNA target sequence
ttattttatgctgtttctacgaat

SEQ ID NO: 233973 - DNA, 24 bp, Artificial sequence
  SiRNA target sequence
tattttatgctgtttctacgaata

SEQ ID NO: 233974 - DNA, 24 bp, Artificial sequence
  SiRNA target sequence
attttatgctgtttctacgaatat

SEQ ID NO: 233975 - DNA, 24 bp, Artificial sequence
  SiRNA target sequence
ttttatgctgtttctacgaatatt

SEQ ID NO: 233976 - DNA, 24 bp, Artificial sequence
  SiRNA target sequence
tttatgctgtttctacgaatatta

SEQ ID NO: 233977 - DNA, 24 bp, Artificial sequence
  SiRNA target sequence
ttatgctgtttctacgaatattat

SEQ ID NO: 233978 - DNA, 24 bp, Artificial sequence
  SiRNA target sequence
tatgctgtttctacgaatattatt

SEQ ID NO: 233979 - DNA, 24 bp, Artificial sequence
  SiRNA target sequence
atgctgtttctacgaatattattg

SEQ ID NO: 233980 - DNA, 24 bp, Artificial sequence
  SiRNA target sequence
tgctgtttctacgaatattattga

SEQ ID NO: 233981 - DNA, 24 bp, Artificial sequence
  SiRNA target sequence
gctgtttctacgaatattattgag

SEQ ID NO: 233982 - DNA, 24 bp, Artificial sequence
  SiRNA target sequence
ctgtttctacgaatattattgagt

SEQ ID NO: 233983 - DNA, 24 bp, Artificial sequence
  SiRNA target sequence
tgtttctacgaatattattgagtc

SEQ ID NO: 233984 - DNA, 24 bp, Artificial sequence
  SiRNA target sequence
gtttctacgaatattattgagtca

SEQ ID NO: 233985 - DNA, 24 bp, Artificial sequence
  SiRNA target sequence
tttctacgaatattattgagtcag

SEQ ID NO: 233986 - DNA, 24 bp, Artificial sequence
  SiRNA target sequence
ttctacgaatattattgagtcagc

SEQ ID NO: 233987 - DNA, 24 bp, Artificial sequence
  SiRNA target sequence
tctacgaatattattgagtcagct

SEQ ID NO: 233988 - DNA, 24 bp, Artificial sequence
  SiRNA target sequence
ctacgaatattattgagtcagctt

SEQ ID NO: 233989 - DNA, 24 bp, Artificial sequence
  SiRNA target sequence
tacgaatattattgagtcagctta

SEQ ID NO: 233990 - DNA, 24 bp, Artificial sequence
  SiRNA target sequence
acgaatattattgagtcagcttat

SEQ ID NO: 233991 - DNA, 24 bp, Artificial sequence
  SiRNA target sequence
cgaatattattgagtcagcttata

SEQ ID NO: 233992 - DNA, 24 bp, Artificial sequence
  SiRNA target sequence
gaatattattgagtcagcttataa

SEQ ID NO: 233993 - DNA, 24 bp, Artificial sequence
  SiRNA target sequence
aatattattgagtcagcttataaa

SEQ ID NO: 233994 - DNA, 24 bp, Artificial sequence
  SiRNA target sequence
atattattgagtcagcttataaat

SEQ ID NO: 233995 - DNA, 24 bp, Artificial sequence
  SiRNA target sequence
tattattgagtcagcttataaatc

SEQ ID NO: 233996 - DNA, 24 bp, Artificial sequence
  SiRNA target sequence
attattgagtcagcttataaatct

SEQ ID NO: 233997 - DNA, 24 bp, Artificial sequence
  SiRNA target sequence
ttattgagtcagcttataaatctg

SEQ ID NO: 233998 - DNA, 24 bp, Artificial sequence
  SiRNA target sequence
tattgagtcagcttataaatctgc

SEQ ID NO: 233999 - DNA, 24 bp, Artificial sequence
  SiRNA target sequence
attgagtcagcttataaatctgct

SEQ ID NO: 234000 - DNA, 24 bp, Artificial sequence
  SiRNA target sequence
ttgagtcagcttataaatctgctt

SEQ ID NO: 234001 - DNA, 24 bp, Artificial sequence
  SiRNA target sequence
tgagtcagcttataaatctgcttt

SEQ ID NO: 234002 - DNA, 24 bp, Artificial sequence
  SiRNA target sequence
gagtcagcttataaatctgcttta

SEQ ID NO: 234003 - DNA, 24 bp, Artificial sequence
  SiRNA target sequence
agtcagcttataaatctgctttag

SEQ ID NO: 234004 - DNA, 24 bp, Artificial sequence
  SiRNA target sequence
gtcagcttataaatctgctttagc

SEQ ID NO: 234005 - DNA, 24 bp, Artificial sequence
  SiRNA target sequence
tcagcttataaatctgctttagct

SEQ ID NO: 234006 - DNA, 24 bp, Artificial sequence
  SiRNA target sequence
cagcttataaatctgctttagctg

SEQ ID NO: 234007 - DNA, 24 bp, Artificial sequence
  SiRNA target sequence
agcttataaatctgctttagctgt

SEQ ID NO: 234008 - DNA, 24 bp, Artificial sequence
  SiRNA target sequence
gcttataaatctgctttagctgtc

SEQ ID NO: 234009 - DNA, 24 bp, Artificial sequence
  SiRNA target sequence
cttataaatctgctttagctgtcg

SEQ ID NO: 234010 - DNA, 24 bp, Artificial sequence
  SiRNA target sequence
ttataaatctgctttagctgtcgg

SEQ ID NO: 234011 - DNA, 24 bp, Artificial sequence
  SiRNA target sequence
tataaatctgctttagctgtcggt

SEQ ID NO: 234012 - DNA, 24 bp, Artificial sequence
  SiRNA target sequence
ataaatctgctttagctgtcggtg

SEQ ID NO: 234013 - DNA, 24 bp, Artificial sequence
  SiRNA target sequence
taaatctgctttagctgtcggtgc

SEQ ID NO: 234014 - DNA, 24 bp, Artificial sequence
  SiRNA target sequence
aaatctgctttagctgtcggtgct

SEQ ID NO: 234015 - DNA, 24 bp, Artificial sequence
  SiRNA target sequence
aatctgctttagctgtcggtgcta

SEQ ID NO: 234016 - DNA, 24 bp, Artificial sequence
  SiRNA target sequence
atctgctttagctgtcggtgctaa

SEQ ID NO: 234017 - DNA, 24 bp, Artificial sequence
  SiRNA target sequence
tctgctttagctgtcggtgctaat

SEQ ID NO: 234018 - DNA, 24 bp, Artificial sequence
  SiRNA target sequence
ctgctttagctgtcggtgctaatg

SEQ ID NO: 234019 - DNA, 24 bp, Artificial sequence
  SiRNA target sequence
tgctttagctgtcggtgctaatga

SEQ ID NO: 234020 - DNA, 24 bp, Artificial sequence
  SiRNA target sequence
gctttagctgtcggtgctaatgaa

SEQ ID NO: 234021 - DNA, 24 bp, Artificial sequence
  SiRNA target sequence
ctttagctgtcggtgctaatgaaa

SEQ ID NO: 234022 - DNA, 24 bp, Artificial sequence
  SiRNA target sequence
tttagctgtcggtgctaatgaaac

SEQ ID NO: 234023 - DNA, 24 bp, Artificial sequence
  SiRNA target sequence
ttagctgtcggtgctaatgaaact

SEQ ID NO: 234024 - DNA, 24 bp, Artificial sequence
  SiRNA target sequence
tagctgtcggtgctaatgaaactg

SEQ ID NO: 234025 - DNA, 24 bp, Artificial sequence
  SiRNA target sequence
agctgtcggtgctaatgaaactgg

SEQ ID NO: 234026 - DNA, 24 bp, Artificial sequence
  SiRNA target sequence
gctgtcggtgctaatgaaactggt

SEQ ID NO: 234027 - DNA, 24 bp, Artificial sequence
  SiRNA target sequence
ctgtcggtgctaatgaaactggtg

SEQ ID NO: 234028 - DNA, 24 bp, Artificial sequence
  SiRNA target sequence
tgtcggtgctaatgaaactggtga

SEQ ID NO: 234029 - DNA, 24 bp, Artificial sequence
  SiRNA target sequence
gtcggtgctaatgaaactggtgag

SEQ ID NO: 234030 - DNA, 24 bp, Artificial sequence
  SiRNA target sequence
tcggtgctaatgaaactggtgagg

SEQ ID NO: 234031 - DNA, 24 bp, Artificial sequence
  SiRNA target sequence
cggtgctaatgaaactggtgaggc

SEQ ID NO: 234032 - DNA, 24 bp, Artificial sequence
  SiRNA target sequence
ggtgctaatgaaactggtgaggca

SEQ ID NO: 234033 - DNA, 24 bp, Artificial sequence
  SiRNA target sequence
gtgctaatgaaactggtgaggcaa

SEQ ID NO: 234034 - DNA, 24 bp, Artificial sequence
  SiRNA target sequence
tgctaatgaaactggtgaggcaaa

SEQ ID NO: 234035 - DNA, 24 bp, Artificial sequence
  SiRNA target sequence
gctaatgaaactggtgaggcaaaa

SEQ ID NO: 234036 - DNA, 24 bp, Artificial sequence
  SiRNA target sequence
ctaatgaaactggtgaggcaaaat

SEQ ID NO: 234037 - DNA, 24 bp, Artificial sequence
  SiRNA target sequence
taatgaaactggtgaggcaaaatc

SEQ ID NO: 234038 - DNA, 24 bp, Artificial sequence
  SiRNA target sequence
aatgaaactggtgaggcaaaatct

SEQ ID NO: 234039 - DNA, 24 bp, Artificial sequence
  SiRNA target sequence
atgaaactggtgaggcaaaatcta

SEQ ID NO: 234040 - DNA, 24 bp, Artificial sequence
  SiRNA target sequence
tgaaactggtgaggcaaaatctac

SEQ ID NO: 234041 - DNA, 24 bp, Artificial sequence
  SiRNA target sequence
gaaactggtgaggcaaaatctacc

SEQ ID NO: 234042 - DNA, 24 bp, Artificial sequence
  SiRNA target sequence
aaactggtgaggcaaaatctacct

SEQ ID NO: 234043 - DNA, 24 bp, Artificial sequence
  SiRNA target sequence
aactggtgaggcaaaatctaccta

SEQ ID NO: 234044 - DNA, 24 bp, Artificial sequence
  SiRNA target sequence
actggtgaggcaaaatctacctat

SEQ ID NO: 234045 - DNA, 24 bp, Artificial sequence
  SiRNA target sequence
ctggtgaggcaaaatctacctatg

SEQ ID NO: 234046 - DNA, 24 bp, Artificial sequence
  SiRNA target sequence
tggtgaggcaaaatctacctatgc

SEQ ID NO: 234047 - DNA, 24 bp, Artificial sequence
  SiRNA target sequence
ggtgaggcaaaatctacctatgct

SEQ ID NO: 234048 - DNA, 24 bp, Artificial sequence
  SiRNA target sequence
gtgaggcaaaatctacctatgctt

SEQ ID NO: 234049 - DNA, 24 bp, Artificial sequence
  SiRNA target sequence
tgaggcaaaatctacctatgcttc

SEQ ID NO: 234050 - DNA, 24 bp, Artificial sequence
  SiRNA target sequence
gaggcaaaatctacctatgcttca

SEQ ID NO: 234051 - DNA, 24 bp, Artificial sequence
  SiRNA target sequence
aggcaaaatctacctatgcttcaa

SEQ ID NO: 234052 - DNA, 24 bp, Artificial sequence
  SiRNA target sequence
ggcaaaatctacctatgcttcaat

SEQ ID NO: 234053 - DNA, 24 bp, Artificial sequence
  SiRNA target sequence
gcaaaatctacctatgcttcaatt

SEQ ID NO: 234054 - DNA, 24 bp, Artificial sequence
  SiRNA target sequence
caaaatctacctatgcttcaattt

SEQ ID NO: 234055 - DNA, 24 bp, Artificial sequence
  SiRNA target sequence
aaaatctacctatgcttcaattta

SEQ ID NO: 234056 - DNA, 24 bp, Artificial sequence
  SiRNA target sequence
aaatctacctatgcttcaatttat

SEQ ID NO: 234057 - DNA, 24 bp, Artificial sequence
  SiRNA target sequence
aatctacctatgcttcaatttata

SEQ ID NO: 234058 - DNA, 24 bp, Artificial sequence
  SiRNA target sequence
atctacctatgcttcaatttatac

SEQ ID NO: 234059 - DNA, 24 bp, Artificial sequence
  SiRNA target sequence
tctacctatgcttcaatttataca

SEQ ID NO: 234060 - DNA, 24 bp, Artificial sequence
  SiRNA target sequence
ctacctatgcttcaatttatacat

SEQ ID NO: 234061 - DNA, 24 bp, Artificial sequence
  SiRNA target sequence
tacctatgcttcaatttatacatc

SEQ ID NO: 234062 - DNA, 24 bp, Artificial sequence
  SiRNA target sequence
acctatgcttcaatttatacatca

SEQ ID NO: 234063 - DNA, 24 bp, Artificial sequence
  SiRNA target sequence
cctatgcttcaatttatacatcaa

SEQ ID NO: 234064 - DNA, 24 bp, Artificial sequence
  SiRNA target sequence
ctatgcttcaatttatacatcaat

SEQ ID NO: 234065 - DNA, 24 bp, Artificial sequence
  SiRNA target sequence
tatgcttcaatttatacatcaatt

SEQ ID NO: 234066 - DNA, 24 bp, Artificial sequence
  SiRNA target sequence
atgcttcaatttatacatcaattg

SEQ ID NO: 234067 - DNA, 24 bp, Artificial sequence
  SiRNA target sequence
tgcttcaatttatacatcaattga

SEQ ID NO: 234068 - DNA, 24 bp, Artificial sequence
  SiRNA target sequence
gcttcaatttatacatcaattgaa

SEQ ID NO: 234069 - DNA, 24 bp, Artificial sequence
  SiRNA target sequence
cttcaatttatacatcaattgaac

SEQ ID NO: 234070 - DNA, 24 bp, Artificial sequence
  SiRNA target sequence
ttcaatttatacatcaattgaaca

SEQ ID NO: 234071 - DNA, 24 bp, Artificial sequence
  SiRNA target sequence
tcaatttatacatcaattgaacaa

SEQ ID NO: 234072 - DNA, 24 bp, Artificial sequence
  SiRNA target sequence
caatttatacatcaattgaacaat

SEQ ID NO: 234073 - DNA, 24 bp, Artificial sequence
  SiRNA target sequence
aatttatacatcaattgaacaatc

SEQ ID NO: 234074 - DNA, 24 bp, Artificial sequence
  SiRNA target sequence
atttatacatcaattgaacaatct

SEQ ID NO: 234075 - DNA, 24 bp, Artificial sequence
  SiRNA target sequence
tttatacatcaattgaacaatctg

SEQ ID NO: 234076 - DNA, 24 bp, Artificial sequence
  SiRNA target sequence
ttatacatcaattgaacaatctgg

SEQ ID NO: 234077 - DNA, 24 bp, Artificial sequence
  SiRNA target sequence
tatacatcaattgaacaatctgga

SEQ ID NO: 234078 - DNA, 24 bp, Artificial sequence
  SiRNA target sequence
atacatcaattgaacaatctggag

SEQ ID NO: 234079 - DNA, 24 bp, Artificial sequence
  SiRNA target sequence
tacatcaattgaacaatctggagt

SEQ ID NO: 234080 - DNA, 24 bp, Artificial sequence
  SiRNA target sequence
acatcaattgaacaatctggagtt

SEQ ID NO: 234081 - DNA, 24 bp, Artificial sequence
  SiRNA target sequence
catcaattgaacaatctggagttg

SEQ ID NO: 234082 - DNA, 24 bp, Artificial sequence
  SiRNA target sequence
atcaattgaacaatctggagttgc

SEQ ID NO: 234083 - DNA, 24 bp, Artificial sequence
  SiRNA target sequence
tcaattgaacaatctggagttgct

SEQ ID NO: 234084 - DNA, 24 bp, Artificial sequence
  SiRNA target sequence
caattgaacaatctggagttgctg

SEQ ID NO: 234085 - DNA, 24 bp, Artificial sequence
  SiRNA target sequence
aattgaacaatctggagttgctgt

SEQ ID NO: 234086 - DNA, 24 bp, Artificial sequence
  SiRNA target sequence
attgaacaatctggagttgctgtt

SEQ ID NO: 234087 - DNA, 24 bp, Artificial sequence
  SiRNA target sequence
ttgaacaatctggagttgctgtta

SEQ ID NO: 234088 - DNA, 24 bp, Artificial sequence
  SiRNA target sequence
tgaacaatctggagttgctgttat

SEQ ID NO: 234089 - DNA, 24 bp, Artificial sequence
  SiRNA target sequence
gaacaatctggagttgctgttatt

SEQ ID NO: 234090 - DNA, 24 bp, Artificial sequence
  SiRNA target sequence
aacaatctggagttgctgttattg

SEQ ID NO: 234091 - DNA, 24 bp, Artificial sequence
  SiRNA target sequence
acaatctggagttgctgttattgt

SEQ ID NO: 234092 - DNA, 24 bp, Artificial sequence
  SiRNA target sequence
caatctggagttgctgttattgtc

SEQ ID NO: 234093 - DNA, 24 bp, Artificial sequence
  SiRNA target sequence
aatctggagttgctgttattgtca

SEQ ID NO: 234094 - DNA, 24 bp, Artificial sequence
  SiRNA target sequence
atctggagttgctgttattgtcat

SEQ ID NO: 234095 - DNA, 24 bp, Artificial sequence
  SiRNA target sequence
tctggagttgctgttattgtcatg

SEQ ID NO: 234096 - DNA, 24 bp, Artificial sequence
  SiRNA target sequence
ctggagttgctgttattgtcatga

SEQ ID NO: 234097 - DNA, 24 bp, Artificial sequence
  SiRNA target sequence
tggagttgctgttattgtcatgat

SEQ ID NO: 234098 - DNA, 24 bp, Artificial sequence
  SiRNA target sequence
ggagttgctgttattgtcatgatt

SEQ ID NO: 234099 - DNA, 24 bp, Artificial sequence
  SiRNA target sequence
gagttgctgttattgtcatgattt

SEQ ID NO: 234100 - DNA, 24 bp, Artificial sequence
  SiRNA target sequence
agttgctgttattgtcatgatttt

SEQ ID NO: 234101 - DNA, 24 bp, Artificial sequence
  SiRNA target sequence
gttgctgttattgtcatgattttg

SEQ ID NO: 234102 - DNA, 24 bp, Artificial sequence
  SiRNA target sequence
ttgctgttattgtcatgattttgc

SEQ ID NO: 234103 - DNA, 24 bp, Artificial sequence
  SiRNA target sequence
tgctgttattgtcatgattttgct

SEQ ID NO: 234104 - DNA, 24 bp, Artificial sequence
  SiRNA target sequence
gctgttattgtcatgattttgcta

SEQ ID NO: 234105 - DNA, 24 bp, Artificial sequence
  SiRNA target sequence
ctgttattgtcatgattttgctac

SEQ ID NO: 234106 - DNA, 24 bp, Artificial sequence
  SiRNA target sequence
tgttattgtcatgattttgctact

SEQ ID NO: 234107 - DNA, 24 bp, Artificial sequence
  SiRNA target sequence
gttattgtcatgattttgctactt

SEQ ID NO: 234108 - DNA, 24 bp, Artificial sequence
  SiRNA target sequence
ttattgtcatgattttgctactta

SEQ ID NO: 234109 - DNA, 24 bp, Artificial sequence
  SiRNA target sequence
tattgtcatgattttgctacttac

SEQ ID NO: 234110 - DNA, 24 bp, Artificial sequence
  SiRNA target sequence
attgtcatgattttgctacttacc

SEQ ID NO: 234111 - DNA, 24 bp, Artificial sequence
  SiRNA target sequence
ttgtcatgattttgctacttaccc

SEQ ID NO: 234112 - DNA, 24 bp, Artificial sequence
  SiRNA target sequence
tgtcatgattttgctacttacccc

SEQ ID NO: 234113 - DNA, 24 bp, Artificial sequence
  SiRNA target sequence
gtcatgattttgctacttacccct

SEQ ID NO: 234114 - DNA, 24 bp, Artificial sequence
  SiRNA target sequence
tcatgattttgctacttacccctt

SEQ ID NO: 234115 - DNA, 24 bp, Artificial sequence
  SiRNA target sequence
catgattttgctacttaccccttt

SEQ ID NO: 234116 - DNA, 24 bp, Artificial sequence
  SiRNA target sequence
atgattttgctacttacccctttt

SEQ ID NO: 234117 - DNA, 24 bp, Artificial sequence
  SiRNA target sequence
tgattttgctacttaccccttttc

SEQ ID NO: 234118 - DNA, 24 bp, Artificial sequence
  SiRNA target sequence
gattttgctacttaccccttttcc

SEQ ID NO: 234119 - DNA, 24 bp, Artificial sequence
  SiRNA target sequence
attttgctacttaccccttttcca

SEQ ID NO: 234120 - DNA, 24 bp, Artificial sequence
  SiRNA target sequence
ttttgctacttaccccttttccaa

SEQ ID NO: 234121 - DNA, 24 bp, Artificial sequence
  SiRNA target sequence
tttgctacttaccccttttccaag

SEQ ID NO: 234122 - DNA, 24 bp, Artificial sequence
  SiRNA target sequence
ttgctacttaccccttttccaagg

SEQ ID NO: 234123 - DNA, 24 bp, Artificial sequence
  SiRNA target sequence
tgctacttaccccttttccaaggc

SEQ ID NO: 234124 - DNA, 24 bp, Artificial sequence
  SiRNA target sequence
gctacttaccccttttccaaggct

SEQ ID NO: 234125 - DNA, 24 bp, Artificial sequence
  SiRNA target sequence
ctacttaccccttttccaaggctt

SEQ ID NO: 234126 - DNA, 24 bp, Artificial sequence
  SiRNA target sequence
tacttaccccttttccaaggctta

SEQ ID NO: 234127 - DNA, 24 bp, Artificial sequence
  SiRNA target sequence
acttaccccttttccaaggcttat

SEQ ID NO: 234128 - DNA, 24 bp, Artificial sequence
  SiRNA target sequence
cttaccccttttccaaggcttatt

SEQ ID NO: 234129 - DNA, 24 bp, Artificial sequence
  SiRNA target sequence
ttaccccttttccaaggcttatta

SEQ ID NO: 234130 - DNA, 24 bp, Artificial sequence
  SiRNA target sequence
taccccttttccaaggcttattaa

SEQ ID NO: 234131 - DNA, 24 bp, Artificial sequence
  SiRNA target sequence
accccttttccaaggcttattaaa

SEQ ID NO: 234132 - DNA, 24 bp, Artificial sequence
  SiRNA target sequence
ccccttttccaaggcttattaaaa

SEQ ID NO: 234133 - DNA, 24 bp, Artificial sequence
  SiRNA target sequence
cccttttccaaggcttattaaaac

SEQ ID NO: 234134 - DNA, 24 bp, Artificial sequence
  SiRNA target sequence
ccttttccaaggcttattaaaaca

SEQ ID NO: 234135 - DNA, 24 bp, Artificial sequence
  SiRNA target sequence
cttttccaaggcttattaaaacaa

SEQ ID NO: 234136 - DNA, 24 bp, Artificial sequence
  SiRNA target sequence
ttttccaaggcttattaaaacaaa

SEQ ID NO: 234137 - DNA, 24 bp, Artificial sequence
  SiRNA target sequence
tttccaaggcttattaaaacaaaa

SEQ ID NO: 234138 - DNA, 24 bp, Artificial sequence
  SiRNA target sequence
ttccaaggcttattaaaacaaaag

SEQ ID NO: 234139 - DNA, 24 bp, Artificial sequence
  SiRNA target sequence
tccaaggcttattaaaacaaaagg

SEQ ID NO: 234140 - DNA, 24 bp, Artificial sequence
  SiRNA target sequence
ccaaggcttattaaaacaaaagga

SEQ ID NO: 234141 - DNA, 24 bp, Artificial sequence
  SiRNA target sequence
caaggcttattaaaacaaaaggat

SEQ ID NO: 234142 - DNA, 24 bp, Artificial sequence
  SiRNA target sequence
aaggcttattaaaacaaaaggatg

SEQ ID NO: 234143 - DNA, 24 bp, Artificial sequence
  SiRNA target sequence
aggcttattaaaacaaaaggatgg

SEQ ID NO: 234144 - DNA, 24 bp, Artificial sequence
  SiRNA target sequence
ggcttattaaaacaaaaggatgga

SEQ ID NO: 234145 - DNA, 24 bp, Artificial sequence
  SiRNA target sequence
gcttattaaaacaaaaggatggat

SEQ ID NO: 234146 - DNA, 24 bp, Artificial sequence
  SiRNA target sequence
cttattaaaacaaaaggatggatt

SEQ ID NO: 234147 - DNA, 24 bp, Artificial sequence
  SiRNA target sequence
ttattaaaacaaaaggatggatta

SEQ ID NO: 234148 - DNA, 24 bp, Artificial sequence
  SiRNA target sequence
tattaaaacaaaaggatggattac

SEQ ID NO: 234149 - DNA, 24 bp, Artificial sequence
  SiRNA target sequence
attaaaacaaaaggatggattaca

SEQ ID NO: 234150 - DNA, 24 bp, Artificial sequence
  SiRNA target sequence
ttaaaacaaaaggatggattacaa

SEQ ID NO: 234151 - DNA, 24 bp, Artificial sequence
  SiRNA target sequence
taaaacaaaaggatggattacaat

SEQ ID NO: 234152 - DNA, 24 bp, Artificial sequence
  SiRNA target sequence
aaaacaaaaggatggattacaata

SEQ ID NO: 234153 - DNA, 24 bp, Artificial sequence
  SiRNA target sequence
aaacaaaaggatggattacaatag

SEQ ID NO: 234154 - DNA, 24 bp, Artificial sequence
  SiRNA target sequence
aacaaaaggatggattacaatagc

SEQ ID NO: 234155 - DNA, 24 bp, Artificial sequence
  SiRNA target sequence
acaaaaggatggattacaatagcc

SEQ ID NO: 234156 - DNA, 24 bp, Artificial sequence
  SiRNA target sequence
caaaaggatggattacaatagcca

SEQ ID NO: 234157 - DNA, 24 bp, Artificial sequence
  SiRNA target sequence
aaaaggatggattacaatagccat

SEQ ID NO: 234158 - DNA, 24 bp, Artificial sequence
  SiRNA target sequence
aaaggatggattacaatagccatt

SEQ ID NO: 234159 - DNA, 24 bp, Artificial sequence
  SiRNA target sequence
aaggatggattacaatagccattc

SEQ ID NO: 234160 - DNA, 24 bp, Artificial sequence
  SiRNA target sequence
aggatggattacaatagccattct

SEQ ID NO: 234161 - DNA, 24 bp, Artificial sequence
  SiRNA target sequence
ggatggattacaatagccattcta

SEQ ID NO: 234162 - DNA, 24 bp, Artificial sequence
  SiRNA target sequence
gatggattacaatagccattctat

SEQ ID NO: 234163 - DNA, 24 bp, Artificial sequence
  SiRNA target sequence
atggattacaatagccattctatg

SEQ ID NO: 234164 - DNA, 24 bp, Artificial sequence
  SiRNA target sequence
tggattacaatagccattctatgt

SEQ ID NO: 234165 - DNA, 24 bp, Artificial sequence
  SiRNA target sequence
ggattacaatagccattctatgtc

SEQ ID NO: 234166 - DNA, 24 bp, Artificial sequence
  SiRNA target sequence
gattacaatagccattctatgtcc

SEQ ID NO: 234167 - DNA, 24 bp, Artificial sequence
  SiRNA target sequence
attacaatagccattctatgtcct

SEQ ID NO: 234168 - DNA, 24 bp, Artificial sequence
  SiRNA target sequence
ttacaatagccattctatgtccta

SEQ ID NO: 234169 - DNA, 24 bp, Artificial sequence
  SiRNA target sequence
tacaatagccattctatgtcctat

SEQ ID NO: 234170 - DNA, 24 bp, Artificial sequence
  SiRNA target sequence
acaatagccattctatgtcctatt

SEQ ID NO: 234171 - DNA, 24 bp, Artificial sequence
  SiRNA target sequence
caatagccattctatgtcctatta

SEQ ID NO: 234172 - DNA, 24 bp, Artificial sequence
  SiRNA target sequence
aatagccattctatgtcctattat

SEQ ID NO: 234173 - DNA, 24 bp, Artificial sequence
  SiRNA target sequence
atagccattctatgtcctattatt

SEQ ID NO: 234174 - DNA, 24 bp, Artificial sequence
  SiRNA target sequence
tagccattctatgtcctattatta

SEQ ID NO: 234175 - DNA, 24 bp, Artificial sequence
  SiRNA target sequence
agccattctatgtcctattattac

SEQ ID NO: 234176 - DNA, 24 bp, Artificial sequence
  SiRNA target sequence
gccattctatgtcctattattact

SEQ ID NO: 234177 - DNA, 24 bp, Artificial sequence
  SiRNA target sequence
ccattctatgtcctattattactt

SEQ ID NO: 234178 - DNA, 24 bp, Artificial sequence
  SiRNA target sequence
cattctatgtcctattattacttt

SEQ ID NO: 234179 - DNA, 24 bp, Artificial sequence
  SiRNA target sequence
attctatgtcctattattactttt

SEQ ID NO: 234180 - DNA, 24 bp, Artificial sequence
  SiRNA target sequence
ttctatgtcctattattacttttt

SEQ ID NO: 234181 - DNA, 24 bp, Artificial sequence
  SiRNA target sequence
tctatgtcctattattactttttt

SEQ ID NO: 234182 - DNA, 24 bp, Artificial sequence
  SiRNA target sequence
ctatgtcctattattacttttttt

SEQ ID NO: 234183 - DNA, 24 bp, Artificial sequence
  SiRNA target sequence
tatgtcctattattactttttttt

SEQ ID NO: 234184 - DNA, 24 bp, Artificial sequence
  SiRNA target sequence
atgtcctattattacttttttttc

SEQ ID NO: 234185 - DNA, 24 bp, Artificial sequence
  SiRNA target sequence
tgtcctattattacttttttttct

SEQ ID NO: 234186 - DNA, 24 bp, Artificial sequence
  SiRNA target sequence
gtcctattattacttttttttctg

SEQ ID NO: 234187 - DNA, 24 bp, Artificial sequence
  SiRNA target sequence
tcctattattacttttttttctgc

SEQ ID NO: 234188 - DNA, 24 bp, Artificial sequence
  SiRNA target sequence
cctattattacttttttttctgct

SEQ ID NO: 234189 - DNA, 24 bp, Artificial sequence
  SiRNA target sequence
ctattattacttttttttctgctt

SEQ ID NO: 234190 - DNA, 24 bp, Artificial sequence
  SiRNA target sequence
tattattacttttttttctgcttt

SEQ ID NO: 234191 - DNA, 24 bp, Artificial sequence
  SiRNA target sequence
attattacttttttttctgctttt

SEQ ID NO: 234192 - DNA, 24 bp, Artificial sequence
  SiRNA target sequence
ttattacttttttttctgcttttg

SEQ ID NO: 234193 - DNA, 24 bp, Artificial sequence
  SiRNA target sequence
tattacttttttttctgcttttgg

SEQ ID NO: 234194 - DNA, 24 bp, Artificial sequence
  SiRNA target sequence
attacttttttttctgcttttggt

SEQ ID NO: 234195 - DNA, 24 bp, Artificial sequence
  SiRNA target sequence
ttacttttttttctgcttttggta

SEQ ID NO: 234196 - DNA, 24 bp, Artificial sequence
  SiRNA target sequence
tacttttttttctgcttttggtac

SEQ ID NO: 234197 - DNA, 24 bp, Artificial sequence
  SiRNA target sequence
acttttttttctgcttttggtact

SEQ ID NO: 234198 - DNA, 24 bp, Artificial sequence
  SiRNA target sequence
cttttttttctgcttttggtactt

SEQ ID NO: 234199 - DNA, 24 bp, Artificial sequence
  SiRNA target sequence
ttttttttctgcttttggtacttt

SEQ ID NO: 234200 - DNA, 24 bp, Artificial sequence
  SiRNA target sequence
tttttttctgcttttggtactttt

SEQ ID NO: 234201 - DNA, 24 bp, Artificial sequence
  SiRNA target sequence
ttttttctgcttttggtacttttg

SEQ ID NO: 234202 - DNA, 24 bp, Artificial sequence
  SiRNA target sequence
tttttctgcttttggtacttttgt

SEQ ID NO: 234203 - DNA, 24 bp, Artificial sequence
  SiRNA target sequence
ttttctgcttttggtacttttgta

SEQ ID NO: 234204 - DNA, 24 bp, Artificial sequence
  SiRNA target sequence
tttctgcttttggtacttttgtat

SEQ ID NO: 234205 - DNA, 24 bp, Artificial sequence
  SiRNA target sequence
ttctgcttttggtacttttgtatt

SEQ ID NO: 234206 - DNA, 24 bp, Artificial sequence
  SiRNA target sequence
tctgcttttggtacttttgtatta

SEQ ID NO: 234207 - DNA, 24 bp, Artificial sequence
  SiRNA target sequence
ctgcttttggtacttttgtattag

SEQ ID NO: 234208 - DNA, 24 bp, Artificial sequence
  SiRNA target sequence
tgcttttggtacttttgtattagc

SEQ ID NO: 234209 - DNA, 24 bp, Artificial sequence
  SiRNA target sequence
gcttttggtacttttgtattagct

SEQ ID NO: 234210 - DNA, 24 bp, Artificial sequence
  SiRNA target sequence
cttttggtacttttgtattagctt

SEQ ID NO: 234211 - DNA, 24 bp, Artificial sequence
  SiRNA target sequence
ttttggtacttttgtattagctta

SEQ ID NO: 234212 - DNA, 24 bp, Artificial sequence
  SiRNA target sequence
tttggtacttttgtattagcttat

SEQ ID NO: 234213 - DNA, 24 bp, Artificial sequence
  SiRNA target sequence
ttggtacttttgtattagcttatt

SEQ ID NO: 234214 - DNA, 24 bp, Artificial sequence
  SiRNA target sequence
tggtacttttgtattagcttattt

SEQ ID NO: 234215 - DNA, 24 bp, Artificial sequence
  SiRNA target sequence
ggtacttttgtattagcttattta

SEQ ID NO: 234216 - DNA, 24 bp, Artificial sequence
  SiRNA target sequence
gtacttttgtattagcttatttaa

SEQ ID NO: 234217 - DNA, 24 bp, Artificial sequence
  SiRNA target sequence
tacttttgtattagcttatttaaa

SEQ ID NO: 234218 - DNA, 24 bp, Artificial sequence
  SiRNA target sequence
acttttgtattagcttatttaaac

SEQ ID NO: 234219 - DNA, 24 bp, Artificial sequence
  SiRNA target sequence
cttttgtattagcttatttaaact

SEQ ID NO: 234220 - DNA, 24 bp, Artificial sequence
  SiRNA target sequence
ttttgtattagcttatttaaactt

SEQ ID NO: 234221 - DNA, 24 bp, Artificial sequence
  SiRNA target sequence
tttgtattagcttatttaaacttc

SEQ ID NO: 234222 - DNA, 24 bp, Artificial sequence
  SiRNA target sequence
ttgtattagcttatttaaacttcc

SEQ ID NO: 234223 - DNA, 24 bp, Artificial sequence
  SiRNA target sequence
tgtattagcttatttaaacttccc

SEQ ID NO: 234224 - DNA, 24 bp, Artificial sequence
  SiRNA target sequence
gtattagcttatttaaacttccca

SEQ ID NO: 234225 - DNA, 24 bp, Artificial sequence
  SiRNA target sequence
tattagcttatttaaacttcccaa

SEQ ID NO: 234226 - DNA, 24 bp, Artificial sequence
  SiRNA target sequence
attagcttatttaaacttcccaat

SEQ ID NO: 234227 - DNA, 24 bp, Artificial sequence
  SiRNA target sequence
ttagcttatttaaacttcccaatt

SEQ ID NO: 234228 - DNA, 24 bp, Artificial sequence
  SiRNA target sequence
tagcttatttaaacttcccaatta

SEQ ID NO: 234229 - DNA, 24 bp, Artificial sequence
  SiRNA target sequence
agcttatttaaacttcccaattac

SEQ ID NO: 234230 - DNA, 24 bp, Artificial sequence
  SiRNA target sequence
gcttatttaaacttcccaattaca

SEQ ID NO: 234231 - DNA, 24 bp, Artificial sequence
  SiRNA target sequence
cttatttaaacttcccaattacaa

SEQ ID NO: 234232 - DNA, 24 bp, Artificial sequence
  SiRNA target sequence
ttatttaaacttcccaattacaaa

SEQ ID NO: 234233 - DNA, 24 bp, Artificial sequence
  SiRNA target sequence
tatttaaacttcccaattacaaac

SEQ ID NO: 234234 - DNA, 24 bp, Artificial sequence
  SiRNA target sequence
atttaaacttcccaattacaaaca

SEQ ID NO: 234235 - DNA, 24 bp, Artificial sequence
  SiRNA target sequence
tttaaacttcccaattacaaacaa

SEQ ID NO: 234236 - DNA, 24 bp, Artificial sequence
  SiRNA target sequence
ttaaacttcccaattacaaacaaa

SEQ ID NO: 234237 - DNA, 24 bp, Artificial sequence
  SiRNA target sequence
taaacttcccaattacaaacaaag

SEQ ID NO: 234238 - DNA, 24 bp, Artificial sequence
  SiRNA target sequence
aaacttcccaattacaaacaaaga

SEQ ID NO: 234239 - DNA, 24 bp, Artificial sequence
  SiRNA target sequence
aacttcccaattacaaacaaagag

SEQ ID NO: 234240 - DNA, 24 bp, Artificial sequence
  SiRNA target sequence
acttcccaattacaaacaaagagg

SEQ ID NO: 234241 - DNA, 24 bp, Artificial sequence
  SiRNA target sequence
cttcccaattacaaacaaagagga

SEQ ID NO: 234242 - DNA, 24 bp, Artificial sequence
  SiRNA target sequence
ttcccaattacaaacaaagaggat

SEQ ID NO: 234243 - DNA, 24 bp, Artificial sequence
  SiRNA target sequence
tcccaattacaaacaaagaggata

SEQ ID NO: 234244 - DNA, 24 bp, Artificial sequence
  SiRNA target sequence
cccaattacaaacaaagaggataa

SEQ ID NO: 234245 - DNA, 24 bp, Artificial sequence
  SiRNA target sequence
ccaattacaaacaaagaggataat

SEQ ID NO: 234246 - DNA, 24 bp, Artificial sequence
  SiRNA target sequence
caattacaaacaaagaggataata

SEQ ID NO: 234247 - DNA, 24 bp, Artificial sequence
  SiRNA target sequence
aattacaaacaaagaggataatat

SEQ ID NO: 234248 - DNA, 24 bp, Artificial sequence
  SiRNA target sequence
attacaaacaaagaggataatata

SEQ ID NO: 234249 - DNA, 24 bp, Artificial sequence
  SiRNA target sequence
ttacaaacaaagaggataatatat

SEQ ID NO: 234250 - DNA, 24 bp, Artificial sequence
  SiRNA target sequence
tacaaacaaagaggataatatatt

SEQ ID NO: 234251 - DNA, 24 bp, Artificial sequence
  SiRNA target sequence
acaaacaaagaggataatatattt

SEQ ID NO: 234252 - DNA, 24 bp, Artificial sequence
  SiRNA target sequence
caaacaaagaggataatatatttg

SEQ ID NO: 234253 - DNA, 24 bp, Artificial sequence
  SiRNA target sequence
aaacaaagaggataatatatttga

SEQ ID NO: 234254 - DNA, 24 bp, Artificial sequence
  SiRNA target sequence
aacaaagaggataatatatttgat

SEQ ID NO: 234255 - DNA, 24 bp, Artificial sequence
  SiRNA target sequence
acaaagaggataatatatttgata

SEQ ID NO: 234256 - DNA, 24 bp, Artificial sequence
  SiRNA target sequence
caaagaggataatatatttgatat

SEQ ID NO: 234257 - DNA, 24 bp, Artificial sequence
  SiRNA target sequence
aaagaggataatatatttgatatt

SEQ ID NO: 234258 - DNA, 24 bp, Artificial sequence
  SiRNA target sequence
aagaggataatatatttgatattt

SEQ ID NO: 234259 - DNA, 24 bp, Artificial sequence
  SiRNA target sequence
agaggataatatatttgatattta

SEQ ID NO: 234260 - DNA, 24 bp, Artificial sequence
  SiRNA target sequence
gaggataatatatttgatatttac

SEQ ID NO: 234261 - DNA, 24 bp, Artificial sequence
  SiRNA target sequence
aggataatatatttgatatttacc

SEQ ID NO: 234262 - DNA, 24 bp, Artificial sequence
  SiRNA target sequence
ggataatatatttgatatttaccg

SEQ ID NO: 234263 - DNA, 24 bp, Artificial sequence
  SiRNA target sequence
gataatatatttgatatttaccgt

SEQ ID NO: 234264 - DNA, 24 bp, Artificial sequence
  SiRNA target sequence
ataatatatttgatatttaccgtt

SEQ ID NO: 234265 - DNA, 24 bp, Artificial sequence
  SiRNA target sequence
taatatatttgatatttaccgttt

SEQ ID NO: 234266 - DNA, 24 bp, Artificial sequence
  SiRNA target sequence
aatatatttgatatttaccgttta

SEQ ID NO: 234267 - DNA, 24 bp, Artificial sequence
  SiRNA target sequence
atatatttgatatttaccgtttac

SEQ ID NO: 234268 - DNA, 24 bp, Artificial sequence
  SiRNA target sequence
tatatttgatatttaccgtttacc

SEQ ID NO: 234269 - DNA, 24 bp, Artificial sequence
  SiRNA target sequence
atatttgatatttaccgtttaccg

SEQ ID NO: 234270 - DNA, 24 bp, Artificial sequence
  SiRNA target sequence
tatttgatatttaccgtttaccgt

SEQ ID NO: 234271 - DNA, 24 bp, Artificial sequence
  SiRNA target sequence
atttgatatttaccgtttaccgtc

SEQ ID NO: 234272 - DNA, 24 bp, Artificial sequence
  SiRNA target sequence
tttgatatttaccgtttaccgtca

SEQ ID NO: 234273 - DNA, 24 bp, Artificial sequence
  SiRNA target sequence
ttgatatttaccgtttaccgtcaa

SEQ ID NO: 234274 - DNA, 24 bp, Artificial sequence
  SiRNA target sequence
tgatatttaccgtttaccgtcaac

SEQ ID NO: 234275 - DNA, 24 bp, Artificial sequence
  SiRNA target sequence
gatatttaccgtttaccgtcaact

SEQ ID NO: 234276 - DNA, 24 bp, Artificial sequence
  SiRNA target sequence
atatttaccgtttaccgtcaactg

SEQ ID NO: 234277 - DNA, 24 bp, Artificial sequence
  SiRNA target sequence
tatttaccgtttaccgtcaactga

SEQ ID NO: 234278 - DNA, 24 bp, Artificial sequence
  SiRNA target sequence
atttaccgtttaccgtcaactgat

SEQ ID NO: 234279 - DNA, 24 bp, Artificial sequence
  SiRNA target sequence
tttaccgtttaccgtcaactgatt

SEQ ID NO: 234280 - DNA, 24 bp, Artificial sequence
  SiRNA target sequence
ttaccgtttaccgtcaactgattc

SEQ ID NO: 234281 - DNA, 24 bp, Artificial sequence
  SiRNA target sequence
taccgtttaccgtcaactgattct

SEQ ID NO: 234282 - DNA, 24 bp, Artificial sequence
  SiRNA target sequence
accgtttaccgtcaactgattcta

SEQ ID NO: 234283 - DNA, 24 bp, Artificial sequence
  SiRNA target sequence
ccgtttaccgtcaactgattctat

SEQ ID NO: 234284 - DNA, 24 bp, Artificial sequence
  SiRNA target sequence
cgtttaccgtcaactgattctata

SEQ ID NO: 234285 - DNA, 24 bp, Artificial sequence
  SiRNA target sequence
gtttaccgtcaactgattctataa

SEQ ID NO: 234286 - DNA, 24 bp, Artificial sequence
  SiRNA target sequence
tttaccgtcaactgattctataat

SEQ ID NO: 234287 - DNA, 24 bp, Artificial sequence
  SiRNA target sequence
ttaccgtcaactgattctataatc

SEQ ID NO: 234288 - DNA, 24 bp, Artificial sequence
  SiRNA target sequence
taccgtcaactgattctataatca

SEQ ID NO: 234289 - DNA, 24 bp, Artificial sequence
  SiRNA target sequence
accgtcaactgattctataatcaa

SEQ ID NO: 234290 - DNA, 24 bp, Artificial sequence
  SiRNA target sequence
ccgtcaactgattctataatcaaa

SEQ ID NO: 234291 - DNA, 24 bp, Artificial sequence
  SiRNA target sequence
cgtcaactgattctataatcaaat

SEQ ID NO: 234292 - DNA, 24 bp, Artificial sequence
  SiRNA target sequence
gtcaactgattctataatcaaatt

SEQ ID NO: 234293 - DNA, 24 bp, Artificial sequence
  SiRNA target sequence
tcaactgattctataatcaaatta

SEQ ID NO: 234294 - DNA, 24 bp, Artificial sequence
  SiRNA target sequence
caactgattctataatcaaattag

SEQ ID NO: 234295 - DNA, 24 bp, Artificial sequence
  SiRNA target sequence
aactgattctataatcaaattaga

SEQ ID NO: 234296 - DNA, 24 bp, Artificial sequence
  SiRNA target sequence
actgattctataatcaaattagaa

SEQ ID NO: 234297 - DNA, 24 bp, Artificial sequence
  SiRNA target sequence
ctgattctataatcaaattagaaa

SEQ ID NO: 234298 - DNA, 24 bp, Artificial sequence
  SiRNA target sequence
tgattctataatcaaattagaaaa

SEQ ID NO: 234299 - DNA, 24 bp, Artificial sequence
  SiRNA target sequence
gattctataatcaaattagaaaat

SEQ ID NO: 234300 - DNA, 24 bp, Artificial sequence
  SiRNA target sequence
attctataatcaaattagaaaata

SEQ ID NO: 234301 - DNA, 24 bp, Artificial sequence
  SiRNA target sequence
ttctataatcaaattagaaaatat

SEQ ID NO: 234302 - DNA, 24 bp, Artificial sequence
  SiRNA target sequence
tctataatcaaattagaaaatatt

SEQ ID NO: 234303 - DNA, 24 bp, Artificial sequence
  SiRNA target sequence
ctataatcaaattagaaaatattg

SEQ ID NO: 234304 - DNA, 24 bp, Artificial sequence
  SiRNA target sequence
tataatcaaattagaaaatattgt

SEQ ID NO: 234305 - DNA, 24 bp, Artificial sequence
  SiRNA target sequence
ataatcaaattagaaaatattgtt

SEQ ID NO: 234306 - DNA, 24 bp, Artificial sequence
  SiRNA target sequence
taatcaaattagaaaatattgttg

SEQ ID NO: 234307 - DNA, 24 bp, Artificial sequence
  SiRNA target sequence
aatcaaattagaaaatattgttgg

SEQ ID NO: 234308 - DNA, 24 bp, Artificial sequence
  SiRNA target sequence
atcaaattagaaaatattgttggt

SEQ ID NO: 234309 - DNA, 24 bp, Artificial sequence
  SiRNA target sequence
tcaaattagaaaatattgttggtg

SEQ ID NO: 234310 - DNA, 24 bp, Artificial sequence
  SiRNA target sequence
caaattagaaaatattgttggtgt

SEQ ID NO: 234311 - DNA, 24 bp, Artificial sequence
  SiRNA target sequence
aaattagaaaatattgttggtgtc

SEQ ID NO: 234312 - DNA, 24 bp, Artificial sequence
  SiRNA target sequence
aattagaaaatattgttggtgtca

SEQ ID NO: 234313 - DNA, 24 bp, Artificial sequence
  SiRNA target sequence
attagaaaatattgttggtgtcat

SEQ ID NO: 234314 - DNA, 24 bp, Artificial sequence
  SiRNA target sequence
ttagaaaatattgttggtgtcatt

SEQ ID NO: 234315 - DNA, 24 bp, Artificial sequence
  SiRNA target sequence
tagaaaatattgttggtgtcattt

SEQ ID NO: 234316 - DNA, 24 bp, Artificial sequence
  SiRNA target sequence
agaaaatattgttggtgtcatttg

SEQ ID NO: 234317 - DNA, 24 bp, Artificial sequence
  SiRNA target sequence
gaaaatattgttggtgtcatttgt

SEQ ID NO: 234318 - DNA, 24 bp, Artificial sequence
  SiRNA target sequence
aaaatattgttggtgtcatttgtg

SEQ ID NO: 234319 - DNA, 24 bp, Artificial sequence
  SiRNA target sequence
aaatattgttggtgtcatttgtgt

SEQ ID NO: 234320 - DNA, 24 bp, Artificial sequence
  SiRNA target sequence
aatattgttggtgtcatttgtgta

SEQ ID NO: 234321 - DNA, 24 bp, Artificial sequence
  SiRNA target sequence
atattgttggtgtcatttgtgtat

SEQ ID NO: 234322 - DNA, 24 bp, Artificial sequence
  SiRNA target sequence
tattgttggtgtcatttgtgtatc

SEQ ID NO: 234323 - DNA, 24 bp, Artificial sequence
  SiRNA target sequence
attgttggtgtcatttgtgtatct

SEQ ID NO: 234324 - DNA, 24 bp, Artificial sequence
  SiRNA target sequence
ttgttggtgtcatttgtgtatctt

SEQ ID NO: 234325 - DNA, 24 bp, Artificial sequence
  SiRNA target sequence
tgttggtgtcatttgtgtatcttt

SEQ ID NO: 234326 - DNA, 24 bp, Artificial sequence
  SiRNA target sequence
gttggtgtcatttgtgtatcttta

SEQ ID NO: 234327 - DNA, 24 bp, Artificial sequence
  SiRNA target sequence
ttggtgtcatttgtgtatctttaa

SEQ ID NO: 234328 - DNA, 24 bp, Artificial sequence
  SiRNA target sequence
tggtgtcatttgtgtatctttaat

SEQ ID NO: 234329 - DNA, 24 bp, Artificial sequence
  SiRNA target sequence
ggtgtcatttgtgtatctttaatg

SEQ ID NO: 234330 - DNA, 24 bp, Artificial sequence
  SiRNA target sequence
gtgtcatttgtgtatctttaatga

SEQ ID NO: 234331 - DNA, 24 bp, Artificial sequence
  SiRNA target sequence
tgtcatttgtgtatctttaatgaa

SEQ ID NO: 234332 - DNA, 24 bp, Artificial sequence
  SiRNA target sequence
gtcatttgtgtatctttaatgaag

SEQ ID NO: 234333 - DNA, 24 bp, Artificial sequence
  SiRNA target sequence
tcatttgtgtatctttaatgaaga

SEQ ID NO: 234334 - DNA, 24 bp, Artificial sequence
  SiRNA target sequence
catttgtgtatctttaatgaagat

SEQ ID NO: 234335 - DNA, 24 bp, Artificial sequence
  SiRNA target sequence
atttgtgtatctttaatgaagatt

SEQ ID NO: 234336 - DNA, 24 bp, Artificial sequence
  SiRNA target sequence
tttgtgtatctttaatgaagattt

SEQ ID NO: 234337 - DNA, 24 bp, Artificial sequence
  SiRNA target sequence
ttgtgtatctttaatgaagatttc

SEQ ID NO: 234338 - DNA, 24 bp, Artificial sequence
  SiRNA target sequence
tgtgtatctttaatgaagatttct

SEQ ID NO: 234339 - DNA, 24 bp, Artificial sequence
  SiRNA target sequence
gtgtatctttaatgaagatttcta

SEQ ID NO: 234340 - DNA, 24 bp, Artificial sequence
  SiRNA target sequence
tgtatctttaatgaagatttctaa

SEQ ID NO: 234341 - DNA, 24 bp, Artificial sequence
  SiRNA target sequence
gtatctttaatgaagatttctaaa

SEQ ID NO: 234342 - DNA, 24 bp, Artificial sequence
  SiRNA target sequence
tatctttaatgaagatttctaaat

SEQ ID NO: 234343 - DNA, 24 bp, Artificial sequence
  SiRNA target sequence
atctttaatgaagatttctaaata

SEQ ID NO: 234344 - DNA, 24 bp, Artificial sequence
  SiRNA target sequence
tctttaatgaagatttctaaatat

SEQ ID NO: 234345 - DNA, 24 bp, Artificial sequence
  SiRNA target sequence
ctttaatgaagatttctaaatatg

SEQ ID NO: 234346 - DNA, 24 bp, Artificial sequence
  SiRNA target sequence
tttaatgaagatttctaaatatgc

SEQ ID NO: 234347 - DNA, 24 bp, Artificial sequence
  SiRNA target sequence
ttaatgaagatttctaaatatgca

SEQ ID NO: 234348 - DNA, 24 bp, Artificial sequence
  SiRNA target sequence
taatgaagatttctaaatatgcag

SEQ ID NO: 234349 - DNA, 24 bp, Artificial sequence
  SiRNA target sequence
aatgaagatttctaaatatgcagc

SEQ ID NO: 234350 - DNA, 24 bp, Artificial sequence
  SiRNA target sequence
atgaagatttctaaatatgcagca

SEQ ID NO: 234351 - DNA, 24 bp, Artificial sequence
  SiRNA target sequence
tgaagatttctaaatatgcagcat

SEQ ID NO: 234352 - DNA, 24 bp, Artificial sequence
  SiRNA target sequence
gaagatttctaaatatgcagcatt

SEQ ID NO: 234353 - DNA, 24 bp, Artificial sequence
  SiRNA target sequence
aagatttctaaatatgcagcattt

SEQ ID NO: 234354 - DNA, 24 bp, Artificial sequence
  SiRNA target sequence
agatttctaaatatgcagcatttg

SEQ ID NO: 234355 - DNA, 24 bp, Artificial sequence
  SiRNA target sequence
gatttctaaatatgcagcatttga

SEQ ID NO: 234356 - DNA, 24 bp, Artificial sequence
  SiRNA target sequence
atttctaaatatgcagcatttgat

SEQ ID NO: 234357 - DNA, 24 bp, Artificial sequence
  SiRNA target sequence
tttctaaatatgcagcatttgata

SEQ ID NO: 234358 - DNA, 24 bp, Artificial sequence
  SiRNA target sequence
ttctaaatatgcagcatttgatat

SEQ ID NO: 234359 - DNA, 24 bp, Artificial sequence
  SiRNA target sequence
tctaaatatgcagcatttgatatc

SEQ ID NO: 234360 - DNA, 24 bp, Artificial sequence
  SiRNA target sequence
ctaaatatgcagcatttgatatca

SEQ ID NO: 234361 - DNA, 24 bp, Artificial sequence
  SiRNA target sequence
taaatatgcagcatttgatatcac

SEQ ID NO: 234362 - DNA, 24 bp, Artificial sequence
  SiRNA target sequence
aaatatgcagcatttgatatcaca

SEQ ID NO: 234363 - DNA, 24 bp, Artificial sequence
  SiRNA target sequence
aatatgcagcatttgatatcacaa

SEQ ID NO: 234364 - DNA, 24 bp, Artificial sequence
  SiRNA target sequence
atatgcagcatttgatatcacaaa

SEQ ID NO: 234365 - DNA, 24 bp, Artificial sequence
  SiRNA target sequence
tatgcagcatttgatatcacaaaa

SEQ ID NO: 234366 - DNA, 24 bp, Artificial sequence
  SiRNA target sequence
atgcagcatttgatatcacaaaag

SEQ ID NO: 234367 - DNA, 24 bp, Artificial sequence
  SiRNA target sequence
tgcagcatttgatatcacaaaaga

SEQ ID NO: 234368 - DNA, 24 bp, Artificial sequence
  SiRNA target sequence
gcagcatttgatatcacaaaagag

SEQ ID NO: 234369 - DNA, 24 bp, Artificial sequence
  SiRNA target sequence
cagcatttgatatcacaaaagagg

SEQ ID NO: 234370 - DNA, 24 bp, Artificial sequence
  SiRNA target sequence
agcatttgatatcacaaaagaggc

SEQ ID NO: 234371 - DNA, 24 bp, Artificial sequence
  SiRNA target sequence
gcatttgatatcacaaaagaggct

SEQ ID NO: 234372 - DNA, 24 bp, Artificial sequence
  SiRNA target sequence
catttgatatcacaaaagaggctt

SEQ ID NO: 234373 - DNA, 24 bp, Artificial sequence
  SiRNA target sequence
atttgatatcacaaaagaggcttt

SEQ ID NO: 234374 - DNA, 24 bp, Artificial sequence
  SiRNA target sequence
tttgatatcacaaaagaggctttg

SEQ ID NO: 234375 - DNA, 24 bp, Artificial sequence
  SiRNA target sequence
ttgatatcacaaaagaggctttgt

SEQ ID NO: 234376 - DNA, 24 bp, Artificial sequence
  SiRNA target sequence
tgatatcacaaaagaggctttgtc

SEQ ID NO: 234377 - DNA, 24 bp, Artificial sequence
  SiRNA target sequence
gatatcacaaaagaggctttgtct

SEQ ID NO: 234378 - DNA, 24 bp, Artificial sequence
  SiRNA target sequence
atatcacaaaagaggctttgtcta

SEQ ID NO: 234379 - DNA, 24 bp, Artificial sequence
  SiRNA target sequence
tatcacaaaagaggctttgtctat

SEQ ID NO: 234380 - DNA, 24 bp, Artificial sequence
  SiRNA target sequence
atcacaaaagaggctttgtctatg

SEQ ID NO: 234381 - DNA, 24 bp, Artificial sequence
  SiRNA target sequence
tcacaaaagaggctttgtctatgc

SEQ ID NO: 234382 - DNA, 24 bp, Artificial sequence
  SiRNA target sequence
cacaaaagaggctttgtctatgca

SEQ ID NO: 234383 - DNA, 24 bp, Artificial sequence
  SiRNA target sequence
acaaaagaggctttgtctatgcag

SEQ ID NO: 234384 - DNA, 24 bp, Artificial sequence
  SiRNA target sequence
caaaagaggctttgtctatgcaga

SEQ ID NO: 234385 - DNA, 24 bp, Artificial sequence
  SiRNA target sequence
aaaagaggctttgtctatgcagat

SEQ ID NO: 234386 - DNA, 24 bp, Artificial sequence
  SiRNA target sequence
aaagaggctttgtctatgcagatt

SEQ ID NO: 234387 - DNA, 24 bp, Artificial sequence
  SiRNA target sequence
aagaggctttgtctatgcagattg

SEQ ID NO: 234388 - DNA, 24 bp, Artificial sequence
  SiRNA target sequence
agaggctttgtctatgcagattga

SEQ ID NO: 234389 - DNA, 24 bp, Artificial sequence
  SiRNA target sequence
gaggctttgtctatgcagattgat

SEQ ID NO: 234390 - DNA, 24 bp, Artificial sequence
  SiRNA target sequence
aggctttgtctatgcagattgatg

SEQ ID NO: 234391 - DNA, 24 bp, Artificial sequence
  SiRNA target sequence
ggctttgtctatgcagattgatgg

SEQ ID NO: 234392 - DNA, 24 bp, Artificial sequence
  SiRNA target sequence
gctttgtctatgcagattgatggt

SEQ ID NO: 234393 - DNA, 24 bp, Artificial sequence
  SiRNA target sequence
ctttgtctatgcagattgatggtt

SEQ ID NO: 234394 - DNA, 24 bp, Artificial sequence
  SiRNA target sequence
tttgtctatgcagattgatggttc

SEQ ID NO: 234395 - DNA, 24 bp, Artificial sequence
  SiRNA target sequence
ttgtctatgcagattgatggttct

SEQ ID NO: 234396 - DNA, 24 bp, Artificial sequence
  SiRNA target sequence
tgtctatgcagattgatggttcta

SEQ ID NO: 234397 - DNA, 24 bp, Artificial sequence
  SiRNA target sequence
gtctatgcagattgatggttctat

SEQ ID NO: 234398 - DNA, 24 bp, Artificial sequence
  SiRNA target sequence
tctatgcagattgatggttctata

SEQ ID NO: 234399 - DNA, 24 bp, Artificial sequence
  SiRNA target sequence
ctatgcagattgatggttctataa

SEQ ID NO: 234400 - DNA, 24 bp, Artificial sequence
  SiRNA target sequence
tatgcagattgatggttctataag

SEQ ID NO: 234401 - DNA, 24 bp, Artificial sequence
  SiRNA target sequence
atgcagattgatggttctataaga

SEQ ID NO: 234402 - DNA, 24 bp, Artificial sequence
  SiRNA target sequence
tgcagattgatggttctataagag

SEQ ID NO: 234403 - DNA, 24 bp, Artificial sequence
  SiRNA target sequence
gcagattgatggttctataagagc

SEQ ID NO: 234404 - DNA, 24 bp, Artificial sequence
  SiRNA target sequence
cagattgatggttctataagagcg

SEQ ID NO: 234405 - DNA, 24 bp, Artificial sequence
  SiRNA target sequence
agattgatggttctataagagcga

SEQ ID NO: 234406 - DNA, 24 bp, Artificial sequence
  SiRNA target sequence
gattgatggttctataagagcgaa

SEQ ID NO: 234407 - DNA, 24 bp, Artificial sequence
  SiRNA target sequence
attgatggttctataagagcgaaa

SEQ ID NO: 234408 - DNA, 24 bp, Artificial sequence
  SiRNA target sequence
ttgatggttctataagagcgaaat

SEQ ID NO: 234409 - DNA, 24 bp, Artificial sequence
  SiRNA target sequence
tgatggttctataagagcgaaata

SEQ ID NO: 234410 - DNA, 24 bp, Artificial sequence
  SiRNA target sequence
gatggttctataagagcgaaatac

SEQ ID NO: 234411 - DNA, 24 bp, Artificial sequence
  SiRNA target sequence
atggttctataagagcgaaataca

SEQ ID NO: 234412 - DNA, 24 bp, Artificial sequence
  SiRNA target sequence
tggttctataagagcgaaatacaa

SEQ ID NO: 234413 - DNA, 24 bp, Artificial sequence
  SiRNA target sequence
ggttctataagagcgaaatacaaa

SEQ ID NO: 234414 - DNA, 24 bp, Artificial sequence
  SiRNA target sequence
gttctataagagcgaaatacaaag

SEQ ID NO: 234415 - DNA, 24 bp, Artificial sequence
  SiRNA target sequence
ttctataagagcgaaatacaaagg

SEQ ID NO: 234416 - DNA, 24 bp, Artificial sequence
  SiRNA target sequence
tctataagagcgaaatacaaaggt

SEQ ID NO: 234417 - DNA, 24 bp, Artificial sequence
  SiRNA target sequence
ctataagagcgaaatacaaaggta

SEQ ID NO: 234418 - DNA, 24 bp, Artificial sequence
  SiRNA target sequence
tataagagcgaaatacaaaggtat

SEQ ID NO: 234419 - DNA, 24 bp, Artificial sequence
  SiRNA target sequence
ataagagcgaaatacaaaggtatt

SEQ ID NO: 234420 - DNA, 24 bp, Artificial sequence
  SiRNA target sequence
taagagcgaaatacaaaggtattt

SEQ ID NO: 234421 - DNA, 24 bp, Artificial sequence
  SiRNA target sequence
aagagcgaaatacaaaggtatttt

SEQ ID NO: 234422 - DNA, 24 bp, Artificial sequence
  SiRNA target sequence
agagcgaaatacaaaggtattttt

SEQ ID NO: 234423 - DNA, 24 bp, Artificial sequence
  SiRNA target sequence
gagcgaaatacaaaggtatttttg

SEQ ID NO: 234424 - DNA, 24 bp, Artificial sequence
  SiRNA target sequence
agcgaaatacaaaggtatttttga

SEQ ID NO: 234425 - DNA, 24 bp, Artificial sequence
  SiRNA target sequence
gcgaaatacaaaggtatttttgat

SEQ ID NO: 234426 - DNA, 24 bp, Artificial sequence
  SiRNA target sequence
cgaaatacaaaggtatttttgatg

SEQ ID NO: 234427 - DNA, 24 bp, Artificial sequence
  SiRNA target sequence
gaaatacaaaggtatttttgatgg

SEQ ID NO: 234428 - DNA, 24 bp, Artificial sequence
  SiRNA target sequence
aaatacaaaggtatttttgatggt

SEQ ID NO: 234429 - DNA, 24 bp, Artificial sequence
  SiRNA target sequence
aatacaaaggtatttttgatggtg

SEQ ID NO: 234430 - DNA, 24 bp, Artificial sequence
  SiRNA target sequence
atacaaaggtatttttgatggtgt

SEQ ID NO: 234431 - DNA, 24 bp, Artificial sequence
  SiRNA target sequence
tacaaaggtatttttgatggtgta

SEQ ID NO: 234432 - DNA, 24 bp, Artificial sequence
  SiRNA target sequence
acaaaggtatttttgatggtgtat

SEQ ID NO: 234433 - DNA, 24 bp, Artificial sequence
  SiRNA target sequence
caaaggtatttttgatggtgtatt

SEQ ID NO: 234434 - DNA, 24 bp, Artificial sequence
  SiRNA target sequence
aaaggtatttttgatggtgtattt

SEQ ID NO: 234435 - DNA, 24 bp, Artificial sequence
  SiRNA target sequence
aaggtatttttgatggtgtatttg

SEQ ID NO: 234436 - DNA, 24 bp, Artificial sequence
  SiRNA target sequence
aggtatttttgatggtgtatttgg

SEQ ID NO: 234437 - DNA, 24 bp, Artificial sequence
  SiRNA target sequence
ggtatttttgatggtgtatttggt

SEQ ID NO: 234438 - DNA, 24 bp, Artificial sequence
  SiRNA target sequence
gtatttttgatggtgtatttggta

SEQ ID NO: 234439 - DNA, 24 bp, Artificial sequence
  SiRNA target sequence
tatttttgatggtgtatttggtaa

SEQ ID NO: 234440 - DNA, 24 bp, Artificial sequence
  SiRNA target sequence
atttttgatggtgtatttggtaag

SEQ ID NO: 234441 - DNA, 24 bp, Artificial sequence
  SiRNA target sequence
tttttgatggtgtatttggtaagc

SEQ ID NO: 234442 - DNA, 24 bp, Artificial sequence
  SiRNA target sequence
ttttgatggtgtatttggtaagct

SEQ ID NO: 234443 - DNA, 24 bp, Artificial sequence
  SiRNA target sequence
tttgatggtgtatttggtaagctg

SEQ ID NO: 234444 - DNA, 24 bp, Artificial sequence
  SiRNA target sequence
ttgatggtgtatttggtaagctgg

SEQ ID NO: 234445 - DNA, 24 bp, Artificial sequence
  SiRNA target sequence
tgatggtgtatttggtaagctggg

SEQ ID NO: 234446 - DNA, 24 bp, Artificial sequence
  SiRNA target sequence
gatggtgtatttggtaagctgggg

SEQ ID NO: 234447 - DNA, 24 bp, Artificial sequence
  SiRNA target sequence
atggtgtatttggtaagctgggga

SEQ ID NO: 234448 - DNA, 24 bp, Artificial sequence
  SiRNA target sequence
tggtgtatttggtaagctggggaa

SEQ ID NO: 234449 - DNA, 24 bp, Artificial sequence
  SiRNA target sequence
ggtgtatttggtaagctggggaaa

SEQ ID NO: 234450 - DNA, 24 bp, Artificial sequence
  SiRNA target sequence
gtgtatttggtaagctggggaaat

SEQ ID NO: 234451 - DNA, 24 bp, Artificial sequence
  SiRNA target sequence
tgtatttggtaagctggggaaatc

SEQ ID NO: 234452 - DNA, 24 bp, Artificial sequence
  SiRNA target sequence
gtatttggtaagctggggaaatct

SEQ ID NO: 234453 - DNA, 24 bp, Artificial sequence
  SiRNA target sequence
tatttggtaagctggggaaatctt

SEQ ID NO: 234454 - DNA, 24 bp, Artificial sequence
  SiRNA target sequence
atttggtaagctggggaaatcttt

SEQ ID NO: 234455 - DNA, 24 bp, Artificial sequence
  SiRNA target sequence
tttggtaagctggggaaatctttt

SEQ ID NO: 234456 - DNA, 24 bp, Artificial sequence
  SiRNA target sequence
ttggtaagctggggaaatcttttg

SEQ ID NO: 234457 - DNA, 24 bp, Artificial sequence
  SiRNA target sequence
tggtaagctggggaaatcttttgg

SEQ ID NO: 234458 - DNA, 24 bp, Artificial sequence
  SiRNA target sequence
ggtaagctggggaaatcttttgga

SEQ ID NO: 234459 - DNA, 24 bp, Artificial sequence
  SiRNA target sequence
gtaagctggggaaatcttttggat

SEQ ID NO: 234460 - DNA, 24 bp, Artificial sequence
  SiRNA target sequence
taagctggggaaatcttttggatc

SEQ ID NO: 234461 - DNA, 24 bp, Artificial sequence
  SiRNA target sequence
aagctggggaaatcttttggatca

SEQ ID NO: 234462 - DNA, 24 bp, Artificial sequence
  SiRNA target sequence
agctggggaaatcttttggatcag

SEQ ID NO: 234463 - DNA, 24 bp, Artificial sequence
  SiRNA target sequence
gctggggaaatcttttggatcagt

SEQ ID NO: 234464 - DNA, 24 bp, Artificial sequence
  SiRNA target sequence
ctggggaaatcttttggatcagtt

SEQ ID NO: 234465 - DNA, 24 bp, Artificial sequence
  SiRNA target sequence
tggggaaatcttttggatcagttt

SEQ ID NO: 234466 - DNA, 24 bp, Artificial sequence
  SiRNA target sequence
ggggaaatcttttggatcagttta

SEQ ID NO: 234467 - DNA, 24 bp, Artificial sequence
  SiRNA target sequence
gggaaatcttttggatcagtttat

SEQ ID NO: 234468 - DNA, 24 bp, Artificial sequence
  SiRNA target sequence
ggaaatcttttggatcagtttatg

SEQ ID NO: 234469 - DNA, 24 bp, Artificial sequence
  SiRNA target sequence
gaaatcttttggatcagtttatgg

SEQ ID NO: 234470 - DNA, 24 bp, Artificial sequence
  SiRNA target sequence
aaatcttttggatcagtttatgga

SEQ ID NO: 234471 - DNA, 24 bp, Artificial sequence
  SiRNA target sequence
aatcttttggatcagtttatggat

SEQ ID NO: 234472 - DNA, 24 bp, Artificial sequence
  SiRNA target sequence
atcttttggatcagtttatggatt

SEQ ID NO: 234473 - DNA, 24 bp, Artificial sequence
  SiRNA target sequence
tcttttggatcagtttatggattt

SEQ ID NO: 234474 - DNA, 24 bp, Artificial sequence
  SiRNA target sequence
cttttggatcagtttatggattta

SEQ ID NO: 234475 - DNA, 24 bp, Artificial sequence
  SiRNA target sequence
ttttggatcagtttatggatttac

SEQ ID NO: 234476 - DNA, 24 bp, Artificial sequence
  SiRNA target sequence
tttggatcagtttatggatttaca

SEQ ID NO: 234477 - DNA, 24 bp, Artificial sequence
  SiRNA target sequence
ttggatcagtttatggatttacaa

SEQ ID NO: 234478 - DNA, 24 bp, Artificial sequence
  SiRNA target sequence
tggatcagtttatggatttacaat

SEQ ID NO: 234479 - DNA, 24 bp, Artificial sequence
  SiRNA target sequence
ggatcagtttatggatttacaatt

SEQ ID NO: 234480 - DNA, 24 bp, Artificial sequence
  SiRNA target sequence
gatcagtttatggatttacaatta

SEQ ID NO: 234481 - DNA, 24 bp, Artificial sequence
  SiRNA target sequence
atcagtttatggatttacaattac

SEQ ID NO: 234482 - DNA, 24 bp, Artificial sequence
  SiRNA target sequence
tcagtttatggatttacaattact

SEQ ID NO: 234483 - DNA, 24 bp, Artificial sequence
  SiRNA target sequence
cagtttatggatttacaattacta

SEQ ID NO: 234484 - DNA, 24 bp, Artificial sequence
  SiRNA target sequence
agtttatggatttacaattactac

SEQ ID NO: 234485 - DNA, 24 bp, Artificial sequence
  SiRNA target sequence
gtttatggatttacaattactaca

SEQ ID NO: 234486 - DNA, 24 bp, Artificial sequence
  SiRNA target sequence
tttatggatttacaattactacat

SEQ ID NO: 234487 - DNA, 24 bp, Artificial sequence
  SiRNA target sequence
ttatggatttacaattactacatt

SEQ ID NO: 234488 - DNA, 24 bp, Artificial sequence
  SiRNA target sequence
tatggatttacaattactacatta

SEQ ID NO: 234489 - DNA, 24 bp, Artificial sequence
  SiRNA target sequence
atggatttacaattactacattat

SEQ ID NO: 234490 - DNA, 24 bp, Artificial sequence
  SiRNA target sequence
tggatttacaattactacattatt

SEQ ID NO: 234491 - DNA, 24 bp, Artificial sequence
  SiRNA target sequence
ggatttacaattactacattatta

SEQ ID NO: 234492 - DNA, 24 bp, Artificial sequence
  SiRNA target sequence
gatttacaattactacattattag

SEQ ID NO: 234493 - DNA, 24 bp, Artificial sequence
  SiRNA target sequence
atttacaattactacattattagg

SEQ ID NO: 234494 - DNA, 24 bp, Artificial sequence
  SiRNA target sequence
tttacaattactacattattagga

SEQ ID NO: 234495 - DNA, 24 bp, Artificial sequence
  SiRNA target sequence
ttacaattactacattattaggaa

SEQ ID NO: 234496 - DNA, 24 bp, Artificial sequence
  SiRNA target sequence
tacaattactacattattaggaac

SEQ ID NO: 234497 - DNA, 24 bp, Artificial sequence
  SiRNA target sequence
acaattactacattattaggaaca

SEQ ID NO: 234498 - DNA, 24 bp, Artificial sequence
  SiRNA target sequence
caattactacattattaggaacaa

SEQ ID NO: 234499 - DNA, 24 bp, Artificial sequence
  SiRNA target sequence
aattactacattattaggaacaag

SEQ ID NO: 234500 - DNA, 24 bp, Artificial sequence
  SiRNA target sequence
attactacattattaggaacaaga

SEQ ID NO: 234501 - DNA, 24 bp, Artificial sequence
  SiRNA target sequence
ttactacattattaggaacaagag

SEQ ID NO: 234502 - DNA, 24 bp, Artificial sequence
  SiRNA target sequence
tactacattattaggaacaagaga

SEQ ID NO: 234503 - DNA, 24 bp, Artificial sequence
  SiRNA target sequence
actacattattaggaacaagagat

SEQ ID NO: 234504 - DNA, 24 bp, Artificial sequence
  SiRNA target sequence
ctacattattaggaacaagagatg

SEQ ID NO: 234505 - DNA, 24 bp, Artificial sequence
  SiRNA target sequence
tacattattaggaacaagagatgt

SEQ ID NO: 234506 - DNA, 24 bp, Artificial sequence
  SiRNA target sequence
acattattaggaacaagagatgtt

SEQ ID NO: 234507 - DNA, 24 bp, Artificial sequence
  SiRNA target sequence
cattattaggaacaagagatgttc

SEQ ID NO: 234508 - DNA, 24 bp, Artificial sequence
  SiRNA target sequence
attattaggaacaagagatgttcg

SEQ ID NO: 234509 - DNA, 24 bp, Artificial sequence
  SiRNA target sequence
ttattaggaacaagagatgttcgt

SEQ ID NO: 234510 - DNA, 24 bp, Artificial sequence
  SiRNA target sequence
tattaggaacaagagatgttcgta

SEQ ID NO: 234511 - DNA, 24 bp, Artificial sequence
  SiRNA target sequence
attaggaacaagagatgttcgtag

SEQ ID NO: 234512 - DNA, 24 bp, Artificial sequence
  SiRNA target sequence
ttaggaacaagagatgttcgtaga

SEQ ID NO: 234513 - DNA, 24 bp, Artificial sequence
  SiRNA target sequence
taggaacaagagatgttcgtagag

SEQ ID NO: 234514 - DNA, 24 bp, Artificial sequence
  SiRNA target sequence
aggaacaagagatgttcgtagagg

SEQ ID NO: 234515 - DNA, 24 bp, Artificial sequence
  SiRNA target sequence
ggaacaagagatgttcgtagaggt

SEQ ID NO: 234516 - DNA, 24 bp, Artificial sequence
  SiRNA target sequence
gaacaagagatgttcgtagaggtg

SEQ ID NO: 234517 - DNA, 24 bp, Artificial sequence
  SiRNA target sequence
aacaagagatgttcgtagaggtgc

SEQ ID NO: 234518 - DNA, 24 bp, Artificial sequence
  SiRNA target sequence
acaagagatgttcgtagaggtgct

SEQ ID NO: 234519 - DNA, 24 bp, Artificial sequence
  SiRNA target sequence
caagagatgttcgtagaggtgctc

SEQ ID NO: 234520 - DNA, 24 bp, Artificial sequence
  SiRNA target sequence
aagagatgttcgtagaggtgctcc

SEQ ID NO: 234521 - DNA, 24 bp, Artificial sequence
  SiRNA target sequence
agagatgttcgtagaggtgctcct

SEQ ID NO: 234522 - DNA, 24 bp, Artificial sequence
  SiRNA target sequence
gagatgttcgtagaggtgctccta

SEQ ID NO: 234523 - DNA, 24 bp, Artificial sequence
  SiRNA target sequence
agatgttcgtagaggtgctcctat

SEQ ID NO: 234524 - DNA, 24 bp, Artificial sequence
  SiRNA target sequence
gatgttcgtagaggtgctcctata

SEQ ID NO: 234525 - DNA, 24 bp, Artificial sequence
  SiRNA target sequence
atgttcgtagaggtgctcctatat

SEQ ID NO: 234526 - DNA, 24 bp, Artificial sequence
  SiRNA target sequence
tgttcgtagaggtgctcctatatc

SEQ ID NO: 234527 - DNA, 24 bp, Artificial sequence
  SiRNA target sequence
gttcgtagaggtgctcctatatcg

SEQ ID NO: 234528 - DNA, 24 bp, Artificial sequence
  SiRNA target sequence
ttcgtagaggtgctcctatatcgc

SEQ ID NO: 234529 - DNA, 24 bp, Artificial sequence
  SiRNA target sequence
tcgtagaggtgctcctatatcgct

SEQ ID NO: 234530 - DNA, 24 bp, Artificial sequence
  SiRNA target sequence
cgtagaggtgctcctatatcgctt

SEQ ID NO: 234531 - DNA, 24 bp, Artificial sequence
  SiRNA target sequence
gtagaggtgctcctatatcgcttt

SEQ ID NO: 234532 - DNA, 24 bp, Artificial sequence
  SiRNA target sequence
tagaggtgctcctatatcgctttg

SEQ ID NO: 234533 - DNA, 24 bp, Artificial sequence
  SiRNA target sequence
agaggtgctcctatatcgctttgt

SEQ ID NO: 234534 - DNA, 24 bp, Artificial sequence
  SiRNA target sequence
gaggtgctcctatatcgctttgtg

SEQ ID NO: 234535 - DNA, 24 bp, Artificial sequence
  SiRNA target sequence
aggtgctcctatatcgctttgtgt

SEQ ID NO: 234536 - DNA, 24 bp, Artificial sequence
  SiRNA target sequence
ggtgctcctatatcgctttgtgtt

SEQ ID NO: 234537 - DNA, 24 bp, Artificial sequence
  SiRNA target sequence
gtgctcctatatcgctttgtgttc

SEQ ID NO: 234538 - DNA, 24 bp, Artificial sequence
  SiRNA target sequence
tgctcctatatcgctttgtgttct

SEQ ID NO: 234539 - DNA, 24 bp, Artificial sequence
  SiRNA target sequence
gctcctatatcgctttgtgttcta

SEQ ID NO: 234540 - DNA, 24 bp, Artificial sequence
  SiRNA target sequence
ctcctatatcgctttgtgttctaa

SEQ ID NO: 234541 - DNA, 24 bp, Artificial sequence
  SiRNA target sequence
tcctatatcgctttgtgttctaat

SEQ ID NO: 234542 - DNA, 24 bp, Artificial sequence
  SiRNA target sequence
cctatatcgctttgtgttctaata

SEQ ID NO: 234543 - DNA, 24 bp, Artificial sequence
  SiRNA target sequence
ctatatcgctttgtgttctaatat

SEQ ID NO: 234544 - DNA, 24 bp, Artificial sequence
  SiRNA target sequence
tatatcgctttgtgttctaatatt

SEQ ID NO: 234545 - DNA, 24 bp, Artificial sequence
  SiRNA target sequence
atatcgctttgtgttctaatattg

SEQ ID NO: 234546 - DNA, 24 bp, Artificial sequence
  SiRNA target sequence
tatcgctttgtgttctaatattgt

SEQ ID NO: 234547 - DNA, 24 bp, Artificial sequence
  SiRNA target sequence
atcgctttgtgttctaatattgtt

SEQ ID NO: 234548 - DNA, 24 bp, Artificial sequence
  SiRNA target sequence
tcgctttgtgttctaatattgttc

SEQ ID NO: 234549 - DNA, 24 bp, Artificial sequence
  SiRNA target sequence
cgctttgtgttctaatattgttct

SEQ ID NO: 234550 - DNA, 24 bp, Artificial sequence
  SiRNA target sequence
gctttgtgttctaatattgttctg

SEQ ID NO: 234551 - DNA, 24 bp, Artificial sequence
  SiRNA target sequence
ctttgtgttctaatattgttctgc

SEQ ID NO: 234552 - DNA, 24 bp, Artificial sequence
  SiRNA target sequence
tttgtgttctaatattgttctgcc

SEQ ID NO: 234553 - DNA, 24 bp, Artificial sequence
  SiRNA target sequence
ttgtgttctaatattgttctgcct

SEQ ID NO: 234554 - DNA, 24 bp, Artificial sequence
  SiRNA target sequence
tgtgttctaatattgttctgcctt

SEQ ID NO: 234555 - DNA, 24 bp, Artificial sequence
  SiRNA target sequence
gtgttctaatattgttctgcctta

SEQ ID NO: 234556 - DNA, 24 bp, Artificial sequence
  SiRNA target sequence
tgttctaatattgttctgccttat

SEQ ID NO: 234557 - DNA, 24 bp, Artificial sequence
  SiRNA target sequence
gttctaatattgttctgccttata

SEQ ID NO: 234558 - DNA, 24 bp, Artificial sequence
  SiRNA target sequence
ttctaatattgttctgccttatat

SEQ ID NO: 234559 - DNA, 24 bp, Artificial sequence
  SiRNA target sequence
tctaatattgttctgccttatatg

SEQ ID NO: 234560 - DNA, 24 bp, Artificial sequence
  SiRNA target sequence
ctaatattgttctgccttatatgg

SEQ ID NO: 234561 - DNA, 24 bp, Artificial sequence
  SiRNA target sequence
taatattgttctgccttatatggt

SEQ ID NO: 234562 - DNA, 24 bp, Artificial sequence
  SiRNA target sequence
aatattgttctgccttatatggtt

SEQ ID NO: 234563 - DNA, 24 bp, Artificial sequence
  SiRNA target sequence
atattgttctgccttatatggttt

SEQ ID NO: 234564 - DNA, 24 bp, Artificial sequence
  SiRNA target sequence
tattgttctgccttatatggtttt

SEQ ID NO: 234565 - DNA, 24 bp, Artificial sequence
  SiRNA target sequence
attgttctgccttatatggtttta

SEQ ID NO: 234566 - DNA, 24 bp, Artificial sequence
  SiRNA target sequence
ttgttctgccttatatggttttat

SEQ ID NO: 234567 - DNA, 24 bp, Artificial sequence
  SiRNA target sequence
tgttctgccttatatggttttatt

SEQ ID NO: 234568 - DNA, 24 bp, Artificial sequence
  SiRNA target sequence
gttctgccttatatggttttattc

SEQ ID NO: 234569 - DNA, 24 bp, Artificial sequence
  SiRNA target sequence
ttctgccttatatggttttattct

SEQ ID NO: 234570 - DNA, 24 bp, Artificial sequence
  SiRNA target sequence
tctgccttatatggttttattctg

SEQ ID NO: 234571 - DNA, 24 bp, Artificial sequence
  SiRNA target sequence
ctgccttatatggttttattctgt

SEQ ID NO: 234572 - DNA, 24 bp, Artificial sequence
  SiRNA target sequence
tgccttatatggttttattctgtt

SEQ ID NO: 234573 - DNA, 24 bp, Artificial sequence
  SiRNA target sequence
gccttatatggttttattctgttt

SEQ ID NO: 234574 - DNA, 24 bp, Artificial sequence
  SiRNA target sequence
ccttatatggttttattctgtttt

SEQ ID NO: 234575 - DNA, 24 bp, Artificial sequence
  SiRNA target sequence
cttatatggttttattctgttttc

SEQ ID NO: 234576 - DNA, 24 bp, Artificial sequence
  SiRNA target sequence
ttatatggttttattctgttttct

SEQ ID NO: 234577 - DNA, 24 bp, Artificial sequence
  SiRNA target sequence
tatatggttttattctgttttcta

SEQ ID NO: 234578 - DNA, 24 bp, Artificial sequence
  SiRNA target sequence
atatggttttattctgttttctat

SEQ ID NO: 234579 - DNA, 24 bp, Artificial sequence
  SiRNA target sequence
tatggttttattctgttttctatc

SEQ ID NO: 234580 - DNA, 24 bp, Artificial sequence
  SiRNA target sequence
atggttttattctgttttctatct

SEQ ID NO: 234581 - DNA, 24 bp, Artificial sequence
  SiRNA target sequence
tggttttattctgttttctatctc

SEQ ID NO: 234582 - DNA, 24 bp, Artificial sequence
  SiRNA target sequence
ggttttattctgttttctatctca

SEQ ID NO: 234583 - DNA, 24 bp, Artificial sequence
  SiRNA target sequence
gttttattctgttttctatctcaa

SEQ ID NO: 234584 - DNA, 24 bp, Artificial sequence
  SiRNA target sequence
ttttattctgttttctatctcaat

SEQ ID NO: 234585 - DNA, 24 bp, Artificial sequence
  SiRNA target sequence
tttattctgttttctatctcaata

SEQ ID NO: 234586 - DNA, 24 bp, Artificial sequence
  SiRNA target sequence
ttattctgttttctatctcaatag

SEQ ID NO: 234587 - DNA, 24 bp, Artificial sequence
  SiRNA target sequence
tattctgttttctatctcaataga

SEQ ID NO: 234588 - DNA, 24 bp, Artificial sequence
  SiRNA target sequence
attctgttttctatctcaatagaa

SEQ ID NO: 234589 - DNA, 24 bp, Artificial sequence
  SiRNA target sequence
ttctgttttctatctcaatagaaa

SEQ ID NO: 234590 - DNA, 24 bp, Artificial sequence
  SiRNA target sequence
tctgttttctatctcaatagaaaa

SEQ ID NO: 234591 - DNA, 24 bp, Artificial sequence
  SiRNA target sequence
ctgttttctatctcaatagaaaat

SEQ ID NO: 234592 - DNA, 24 bp, Artificial sequence
  SiRNA target sequence
tgttttctatctcaatagaaaata

SEQ ID NO: 234593 - DNA, 24 bp, Artificial sequence
  SiRNA target sequence
gttttctatctcaatagaaaatat

SEQ ID NO: 234594 - DNA, 24 bp, Artificial sequence
  SiRNA target sequence
ttttctatctcaatagaaaatata

SEQ ID NO: 234595 - DNA, 24 bp, Artificial sequence
  SiRNA target sequence
tttctatctcaatagaaaatataa

SEQ ID NO: 234596 - DNA, 24 bp, Artificial sequence
  SiRNA target sequence
ttctatctcaatagaaaatataaa

SEQ ID NO: 234597 - DNA, 24 bp, Artificial sequence
  SiRNA target sequence
tctatctcaatagaaaatataaag

SEQ ID NO: 234598 - DNA, 24 bp, Artificial sequence
  SiRNA target sequence
ctatctcaatagaaaatataaaga

SEQ ID NO: 234599 - DNA, 24 bp, Artificial sequence
  SiRNA target sequence
tatctcaatagaaaatataaagaa

SEQ ID NO: 234600 - DNA, 24 bp, Artificial sequence
  SiRNA target sequence
atctcaatagaaaatataaagaat

SEQ ID NO: 234601 - DNA, 24 bp, Artificial sequence
  SiRNA target sequence
tctcaatagaaaatataaagaatc

SEQ ID NO: 234602 - DNA, 24 bp, Artificial sequence
  SiRNA target sequence
ctcaatagaaaatataaagaatct

SEQ ID NO: 234603 - DNA, 24 bp, Artificial sequence
  SiRNA target sequence
tcaatagaaaatataaagaatctg

SEQ ID NO: 234604 - DNA, 24 bp, Artificial sequence
  SiRNA target sequence
caatagaaaatataaagaatctgt

SEQ ID NO: 234605 - DNA, 24 bp, Artificial sequence
  SiRNA target sequence
aatagaaaatataaagaatctgtc

SEQ ID NO: 234606 - DNA, 24 bp, Artificial sequence
  SiRNA target sequence
atagaaaatataaagaatctgtcg

SEQ ID NO: 234607 - DNA, 24 bp, Artificial sequence
  SiRNA target sequence
tagaaaatataaagaatctgtcga

SEQ ID NO: 234608 - DNA, 24 bp, Artificial sequence
  SiRNA target sequence
agaaaatataaagaatctgtcgag

SEQ ID NO: 234609 - DNA, 24 bp, Artificial sequence
  SiRNA target sequence
gaaaatataaagaatctgtcgaga

SEQ ID NO: 234610 - DNA, 24 bp, Artificial sequence
  SiRNA target sequence
aaaatataaagaatctgtcgagaa

SEQ ID NO: 234611 - DNA, 24 bp, Artificial sequence
  SiRNA target sequence
aaatataaagaatctgtcgagaat

SEQ ID NO: 234612 - DNA, 24 bp, Artificial sequence
  SiRNA target sequence
aatataaagaatctgtcgagaata

SEQ ID NO: 234613 - DNA, 24 bp, Artificial sequence
  SiRNA target sequence
atataaagaatctgtcgagaataa

SEQ ID NO: 234614 - DNA, 24 bp, Artificial sequence
  SiRNA target sequence
tataaagaatctgtcgagaataat

SEQ ID NO: 234615 - DNA, 24 bp, Artificial sequence
  SiRNA target sequence
ataaagaatctgtcgagaataatg

SEQ ID NO: 234616 - DNA, 24 bp, Artificial sequence
  SiRNA target sequence
taaagaatctgtcgagaataatgc

SEQ ID NO: 234617 - DNA, 24 bp, Artificial sequence
  SiRNA target sequence
aaagaatctgtcgagaataatgca

SEQ ID NO: 234618 - DNA, 24 bp, Artificial sequence
  SiRNA target sequence
aagaatctgtcgagaataatgcac

SEQ ID NO: 234619 - DNA, 24 bp, Artificial sequence
  SiRNA target sequence
agaatctgtcgagaataatgcacc

SEQ ID NO: 234620 - DNA, 24 bp, Artificial sequence
  SiRNA target sequence
gaatctgtcgagaataatgcacca

SEQ ID NO: 234621 - DNA, 24 bp, Artificial sequence
  SiRNA target sequence
aatctgtcgagaataatgcaccaa

SEQ ID NO: 234622 - DNA, 24 bp, Artificial sequence
  SiRNA target sequence
atctgtcgagaataatgcaccaat

SEQ ID NO: 234623 - DNA, 24 bp, Artificial sequence
  SiRNA target sequence
tctgtcgagaataatgcaccaatt

SEQ ID NO: 234624 - DNA, 24 bp, Artificial sequence
  SiRNA target sequence
ctgtcgagaataatgcaccaattg

SEQ ID NO: 234625 - DNA, 24 bp, Artificial sequence
  SiRNA target sequence
tgtcgagaataatgcaccaattga

SEQ ID NO: 234626 - DNA, 24 bp, Artificial sequence
  SiRNA target sequence
gtcgagaataatgcaccaattgat

SEQ ID NO: 234627 - DNA, 24 bp, Artificial sequence
  SiRNA target sequence
tcgagaataatgcaccaattgata

SEQ ID NO: 234628 - DNA, 24 bp, Artificial sequence
  SiRNA target sequence
cgagaataatgcaccaattgatat

SEQ ID NO: 234629 - DNA, 24 bp, Artificial sequence
  SiRNA target sequence
gagaataatgcaccaattgatatt

SEQ ID NO: 234630 - DNA, 24 bp, Artificial sequence
  SiRNA target sequence
agaataatgcaccaattgatattg

SEQ ID NO: 234631 - DNA, 24 bp, Artificial sequence
  SiRNA target sequence
gaataatgcaccaattgatattga

SEQ ID NO: 234632 - DNA, 24 bp, Artificial sequence
  SiRNA target sequence
aataatgcaccaattgatattgat

SEQ ID NO: 234633 - DNA, 24 bp, Artificial sequence
  SiRNA target sequence
ataatgcaccaattgatattgatt

SEQ ID NO: 234634 - DNA, 24 bp, Artificial sequence
  SiRNA target sequence
taatgcaccaattgatattgattt

SEQ ID NO: 234635 - DNA, 24 bp, Artificial sequence
  SiRNA target sequence
aatgcaccaattgatattgattta

SEQ ID NO: 234636 - DNA, 24 bp, Artificial sequence
  SiRNA target sequence
atgcaccaattgatattgatttat

SEQ ID NO: 234637 - DNA, 24 bp, Artificial sequence
  SiRNA target sequence
tgcaccaattgatattgatttatt

SEQ ID NO: 234638 - DNA, 24 bp, Artificial sequence
  SiRNA target sequence
gcaccaattgatattgatttattc

SEQ ID NO: 234639 - DNA, 24 bp, Artificial sequence
  SiRNA target sequence
caccaattgatattgatttattca

SEQ ID NO: 234640 - DNA, 24 bp, Artificial sequence
  SiRNA target sequence
accaattgatattgatttattcac

SEQ ID NO: 234641 - DNA, 24 bp, Artificial sequence
  SiRNA target sequence
ccaattgatattgatttattcact

SEQ ID NO: 234642 - DNA, 24 bp, Artificial sequence
  SiRNA target sequence
caattgatattgatttattcacta

SEQ ID NO: 234643 - DNA, 24 bp, Artificial sequence
  SiRNA target sequence
aattgatattgatttattcactag

SEQ ID NO: 234644 - DNA, 24 bp, Artificial sequence
  SiRNA target sequence
attgatattgatttattcactagt

SEQ ID NO: 234645 - DNA, 24 bp, Artificial sequence
  SiRNA target sequence
ttgatattgatttattcactagtt

SEQ ID NO: 234646 - DNA, 24 bp, Artificial sequence
  SiRNA target sequence
tgatattgatttattcactagttc

SEQ ID NO: 234647 - DNA, 24 bp, Artificial sequence
  SiRNA target sequence
gatattgatttattcactagttca

SEQ ID NO: 234648 - DNA, 24 bp, Artificial sequence
  SiRNA target sequence
atattgatttattcactagttcaa

SEQ ID NO: 234649 - DNA, 24 bp, Artificial sequence
  SiRNA target sequence
tattgatttattcactagttcaaa

SEQ ID NO: 234650 - DNA, 24 bp, Artificial sequence
  SiRNA target sequence
attgatttattcactagttcaaaa

SEQ ID NO: 234651 - DNA, 24 bp, Artificial sequence
  SiRNA target sequence
ttgatttattcactagttcaaaag

SEQ ID NO: 234652 - DNA, 24 bp, Artificial sequence
  SiRNA target sequence
tgatttattcactagttcaaaagt

SEQ ID NO: 234653 - DNA, 24 bp, Artificial sequence
  SiRNA target sequence
gatttattcactagttcaaaagtc

SEQ ID NO: 234654 - DNA, 24 bp, Artificial sequence
  SiRNA target sequence
atttattcactagttcaaaagtca

SEQ ID NO: 234655 - DNA, 24 bp, Artificial sequence
  SiRNA target sequence
tttattcactagttcaaaagtcaa

SEQ ID NO: 234656 - DNA, 24 bp, Artificial sequence
  SiRNA target sequence
ttattcactagttcaaaagtcaag

SEQ ID NO: 234657 - DNA, 24 bp, Artificial sequence
  SiRNA target sequence
tattcactagttcaaaagtcaagg

SEQ ID NO: 234658 - DNA, 24 bp, Artificial sequence
  SiRNA target sequence
attcactagttcaaaagtcaaggc

SEQ ID NO: 234659 - DNA, 24 bp, Artificial sequence
  SiRNA target sequence
ttcactagttcaaaagtcaaggca

SEQ ID NO: 234660 - DNA, 24 bp, Artificial sequence
  SiRNA target sequence
tcactagttcaaaagtcaaggcac

SEQ ID NO: 234661 - DNA, 24 bp, Artificial sequence
  SiRNA target sequence
cactagttcaaaagtcaaggcacc

SEQ ID NO: 234662 - DNA, 24 bp, Artificial sequence
  SiRNA target sequence
actagttcaaaagtcaaggcacct

SEQ ID NO: 234663 - DNA, 24 bp, Artificial sequence
  SiRNA target sequence
ctagttcaaaagtcaaggcacctt

SEQ ID NO: 234664 - DNA, 24 bp, Artificial sequence
  SiRNA target sequence
tagttcaaaagtcaaggcaccttc

SEQ ID NO: 234665 - DNA, 24 bp, Artificial sequence
  SiRNA target sequence
agttcaaaagtcaaggcaccttct

SEQ ID NO: 234666 - DNA, 24 bp, Artificial sequence
  SiRNA target sequence
gttcaaaagtcaaggcaccttctt

SEQ ID NO: 234667 - DNA, 24 bp, Artificial sequence
  SiRNA target sequence
ttcaaaagtcaaggcaccttcttc

SEQ ID NO: 234668 - DNA, 24 bp, Artificial sequence
  SiRNA target sequence
tcaaaagtcaaggcaccttcttct

SEQ ID NO: 234669 - DNA, 24 bp, Artificial sequence
  SiRNA target sequence
caaaagtcaaggcaccttcttctg

SEQ ID NO: 234670 - DNA, 24 bp, Artificial sequence
  SiRNA target sequence
aaaagtcaaggcaccttcttctga

SEQ ID NO: 234671 - DNA, 24 bp, Artificial sequence
  SiRNA target sequence
aaagtcaaggcaccttcttctgaa

SEQ ID NO: 234672 - DNA, 24 bp, Artificial sequence
  SiRNA target sequence
aagtcaaggcaccttcttctgaac

SEQ ID NO: 234673 - DNA, 24 bp, Artificial sequence
  SiRNA target sequence
agtcaaggcaccttcttctgaacc

SEQ ID NO: 234674 - DNA, 24 bp, Artificial sequence
  SiRNA target sequence
gtcaaggcaccttcttctgaacct

SEQ ID NO: 234675 - DNA, 24 bp, Artificial sequence
  SiRNA target sequence
tcaaggcaccttcttctgaaccta

SEQ ID NO: 234676 - DNA, 24 bp, Artificial sequence
  SiRNA target sequence
caaggcaccttcttctgaacctac

SEQ ID NO: 234677 - DNA, 24 bp, Artificial sequence
  SiRNA target sequence
aaggcaccttcttctgaacctact

SEQ ID NO: 234678 - DNA, 24 bp, Artificial sequence
  SiRNA target sequence
aggcaccttcttctgaacctactg

SEQ ID NO: 234679 - DNA, 24 bp, Artificial sequence
  SiRNA target sequence
ggcaccttcttctgaacctactgt

SEQ ID NO: 234680 - DNA, 24 bp, Artificial sequence
  SiRNA target sequence
gcaccttcttctgaacctactgtt

SEQ ID NO: 234681 - DNA, 24 bp, Artificial sequence
  SiRNA target sequence
caccttcttctgaacctactgttg

SEQ ID NO: 234682 - DNA, 24 bp, Artificial sequence
  SiRNA target sequence
accttcttctgaacctactgttgc

SEQ ID NO: 234683 - DNA, 24 bp, Artificial sequence
  SiRNA target sequence
ccttcttctgaacctactgttgct

SEQ ID NO: 234684 - DNA, 24 bp, Artificial sequence
  SiRNA target sequence
cttcttctgaacctactgttgcta

SEQ ID NO: 234685 - DNA, 24 bp, Artificial sequence
  SiRNA target sequence
ttcttctgaacctactgttgctac

SEQ ID NO: 234686 - DNA, 24 bp, Artificial sequence
  SiRNA target sequence
tcttctgaacctactgttgctacc

SEQ ID NO: 234687 - DNA, 24 bp, Artificial sequence
  SiRNA target sequence
cttctgaacctactgttgctacca

SEQ ID NO: 234688 - DNA, 24 bp, Artificial sequence
  SiRNA target sequence
ttctgaacctactgttgctaccaa

SEQ ID NO: 234689 - DNA, 24 bp, Artificial sequence
  SiRNA target sequence
tctgaacctactgttgctaccaaa

SEQ ID NO: 234690 - DNA, 24 bp, Artificial sequence
  SiRNA target sequence
ctgaacctactgttgctaccaaaa

SEQ ID NO: 234691 - DNA, 24 bp, Artificial sequence
  SiRNA target sequence
tgaacctactgttgctaccaaaag

SEQ ID NO: 234692 - DNA, 24 bp, Artificial sequence
  SiRNA target sequence
gaacctactgttgctaccaaaagt

SEQ ID NO: 234693 - DNA, 24 bp, Artificial sequence
  SiRNA target sequence
aacctactgttgctaccaaaagtg

SEQ ID NO: 234694 - DNA, 24 bp, Artificial sequence
  SiRNA target sequence
acctactgttgctaccaaaagtgt

SEQ ID NO: 234695 - DNA, 24 bp, Artificial sequence
  SiRNA target sequence
cctactgttgctaccaaaagtgtt

SEQ ID NO: 234696 - DNA, 24 bp, Artificial sequence
  SiRNA target sequence
ctactgttgctaccaaaagtgtta

SEQ ID NO: 234697 - DNA, 24 bp, Artificial sequence
  SiRNA target sequence
tactgttgctaccaaaagtgttac

SEQ ID NO: 234698 - DNA, 24 bp, Artificial sequence
  SiRNA target sequence
actgttgctaccaaaagtgttact

SEQ ID NO: 234699 - DNA, 24 bp, Artificial sequence
  SiRNA target sequence
ctgttgctaccaaaagtgttacta

SEQ ID NO: 234700 - DNA, 24 bp, Artificial sequence
  SiRNA target sequence
tgttgctaccaaaagtgttactac

SEQ ID NO: 234701 - DNA, 24 bp, Artificial sequence
  SiRNA target sequence
gttgctaccaaaagtgttactaca

SEQ ID NO: 234702 - DNA, 24 bp, Artificial sequence
  SiRNA target sequence
ttgctaccaaaagtgttactacag

SEQ ID NO: 234703 - DNA, 24 bp, Artificial sequence
  SiRNA target sequence
tgctaccaaaagtgttactacaga

SEQ ID NO: 234704 - DNA, 24 bp, Artificial sequence
  SiRNA target sequence
gctaccaaaagtgttactacagaa

SEQ ID NO: 234705 - DNA, 24 bp, Artificial sequence
  SiRNA target sequence
ctaccaaaagtgttactacagaag

SEQ ID NO: 234706 - DNA, 24 bp, Artificial sequence
  SiRNA target sequence
taccaaaagtgttactacagaaga

SEQ ID NO: 234707 - DNA, 24 bp, Artificial sequence
  SiRNA target sequence
accaaaagtgttactacagaagaa

SEQ ID NO: 234708 - DNA, 24 bp, Artificial sequence
  SiRNA target sequence
ccaaaagtgttactacagaagaat

SEQ ID NO: 234709 - DNA, 24 bp, Artificial sequence
  SiRNA target sequence
caaaagtgttactacagaagaata

SEQ ID NO: 234710 - DNA, 24 bp, Artificial sequence
  SiRNA target sequence
aaaagtgttactacagaagaataa

SEQ ID NO: 234711 - DNA, 25 bp, Artificial sequence
  SiRNA target sequence
atgtcagtagacaattcgaaagttc

SEQ ID NO: 234712 - DNA, 25 bp, Artificial sequence
  SiRNA target sequence
tgtcagtagacaattcgaaagttct

SEQ ID NO: 234713 - DNA, 25 bp, Artificial sequence
  SiRNA target sequence
gtcagtagacaattcgaaagttcta

SEQ ID NO: 234714 - DNA, 25 bp, Artificial sequence
  SiRNA target sequence
tcagtagacaattcgaaagttctac

SEQ ID NO: 234715 - DNA, 25 bp, Artificial sequence
  SiRNA target sequence
cagtagacaattcgaaagttctaca

SEQ ID NO: 234716 - DNA, 25 bp, Artificial sequence
  SiRNA target sequence
agtagacaattcgaaagttctacaa

SEQ ID NO: 234717 - DNA, 25 bp, Artificial sequence
  SiRNA target sequence
gtagacaattcgaaagttctacaaa

SEQ ID NO: 234718 - DNA, 25 bp, Artificial sequence
  SiRNA target sequence
tagacaattcgaaagttctacaaaa

SEQ ID NO: 234719 - DNA, 25 bp, Artificial sequence
  SiRNA target sequence
agacaattcgaaagttctacaaaat

SEQ ID NO: 234720 - DNA, 25 bp, Artificial sequence
  SiRNA target sequence
gacaattcgaaagttctacaaaata

SEQ ID NO: 234721 - DNA, 25 bp, Artificial sequence
  SiRNA target sequence
acaattcgaaagttctacaaaataa

SEQ ID NO: 234722 - DNA, 25 bp, Artificial sequence
  SiRNA target sequence
caattcgaaagttctacaaaataac

SEQ ID NO: 234723 - DNA, 25 bp, Artificial sequence
  SiRNA target sequence
aattcgaaagttctacaaaataacg

SEQ ID NO: 234724 - DNA, 25 bp, Artificial sequence
  SiRNA target sequence
attcgaaagttctacaaaataacga

SEQ ID NO: 234725 - DNA, 25 bp, Artificial sequence
  SiRNA target sequence
ttcgaaagttctacaaaataacgaa

SEQ ID NO: 234726 - DNA, 25 bp, Artificial sequence
  SiRNA target sequence
tcgaaagttctacaaaataacgaaa

SEQ ID NO: 234727 - DNA, 25 bp, Artificial sequence
  SiRNA target sequence
cgaaagttctacaaaataacgaaaa

SEQ ID NO: 234728 - DNA, 25 bp, Artificial sequence
  SiRNA target sequence
gaaagttctacaaaataacgaaaac

SEQ ID NO: 234729 - DNA, 25 bp, Artificial sequence
  SiRNA target sequence
aaagttctacaaaataacgaaaact

SEQ ID NO: 234730 - DNA, 25 bp, Artificial sequence
  SiRNA target sequence
aagttctacaaaataacgaaaactc

SEQ ID NO: 234731 - DNA, 25 bp, Artificial sequence
  SiRNA target sequence
agttctacaaaataacgaaaactct

SEQ ID NO: 234732 - DNA, 25 bp, Artificial sequence
  SiRNA target sequence
gttctacaaaataacgaaaactctg

SEQ ID NO: 234733 - DNA, 25 bp, Artificial sequence
  SiRNA target sequence
ttctacaaaataacgaaaactctgc

SEQ ID NO: 234734 - DNA, 25 bp, Artificial sequence
  SiRNA target sequence
tctacaaaataacgaaaactctgct

SEQ ID NO: 234735 - DNA, 25 bp, Artificial sequence
  SiRNA target sequence
ctacaaaataacgaaaactctgctc

SEQ ID NO: 234736 - DNA, 25 bp, Artificial sequence
  SiRNA target sequence
tacaaaataacgaaaactctgctct

SEQ ID NO: 234737 - DNA, 25 bp, Artificial sequence
  SiRNA target sequence
acaaaataacgaaaactctgctctt

SEQ ID NO: 234738 - DNA, 25 bp, Artificial sequence
  SiRNA target sequence
caaaataacgaaaactctgctcttc

SEQ ID NO: 234739 - DNA, 25 bp, Artificial sequence
  SiRNA target sequence
aaaataacgaaaactctgctcttcc

SEQ ID NO: 234740 - DNA, 25 bp, Artificial sequence
  SiRNA target sequence
aaataacgaaaactctgctcttcct

SEQ ID NO: 234741 - DNA, 25 bp, Artificial sequence
  SiRNA target sequence
aataacgaaaactctgctcttccta

SEQ ID NO: 234742 - DNA, 25 bp, Artificial sequence
  SiRNA target sequence
ataacgaaaactctgctcttcctac

SEQ ID NO: 234743 - DNA, 25 bp, Artificial sequence
  SiRNA target sequence
taacgaaaactctgctcttcctaca

SEQ ID NO: 234744 - DNA, 25 bp, Artificial sequence
  SiRNA target sequence
aacgaaaactctgctcttcctacag

SEQ ID NO: 234745 - DNA, 25 bp, Artificial sequence
  SiRNA target sequence
acgaaaactctgctcttcctacaga

SEQ ID NO: 234746 - DNA, 25 bp, Artificial sequence
  SiRNA target sequence
cgaaaactctgctcttcctacagaa

SEQ ID NO: 234747 - DNA, 25 bp, Artificial sequence
  SiRNA target sequence
gaaaactctgctcttcctacagaag

SEQ ID NO: 234748 - DNA, 25 bp, Artificial sequence
  SiRNA target sequence
aaaactctgctcttcctacagaaga

SEQ ID NO: 234749 - DNA, 25 bp, Artificial sequence
  SiRNA target sequence
aaactctgctcttcctacagaagat

SEQ ID NO: 234750 - DNA, 25 bp, Artificial sequence
  SiRNA target sequence
aactctgctcttcctacagaagatg

SEQ ID NO: 234751 - DNA, 25 bp, Artificial sequence
  SiRNA target sequence
actctgctcttcctacagaagatga

SEQ ID NO: 234752 - DNA, 25 bp, Artificial sequence
  SiRNA target sequence
ctctgctcttcctacagaagatgaa

SEQ ID NO: 234753 - DNA, 25 bp, Artificial sequence
  SiRNA target sequence
tctgctcttcctacagaagatgaaa

SEQ ID NO: 234754 - DNA, 25 bp, Artificial sequence
  SiRNA target sequence
ctgctcttcctacagaagatgaaat

SEQ ID NO: 234755 - DNA, 25 bp, Artificial sequence
  SiRNA target sequence
tgctcttcctacagaagatgaaatt

SEQ ID NO: 234756 - DNA, 25 bp, Artificial sequence
  SiRNA target sequence
gctcttcctacagaagatgaaattg

SEQ ID NO: 234757 - DNA, 25 bp, Artificial sequence
  SiRNA target sequence
ctcttcctacagaagatgaaattga

SEQ ID NO: 234758 - DNA, 25 bp, Artificial sequence
  SiRNA target sequence
tcttcctacagaagatgaaattgag

SEQ ID NO: 234759 - DNA, 25 bp, Artificial sequence
  SiRNA target sequence
cttcctacagaagatgaaattgagt

SEQ ID NO: 234760 - DNA, 25 bp, Artificial sequence
  SiRNA target sequence
ttcctacagaagatgaaattgagta

SEQ ID NO: 234761 - DNA, 25 bp, Artificial sequence
  SiRNA target sequence
tcctacagaagatgaaattgagtat

SEQ ID NO: 234762 - DNA, 25 bp, Artificial sequence
  SiRNA target sequence
cctacagaagatgaaattgagtatg

SEQ ID NO: 234763 - DNA, 25 bp, Artificial sequence
  SiRNA target sequence
ctacagaagatgaaattgagtatga

SEQ ID NO: 234764 - DNA, 25 bp, Artificial sequence
  SiRNA target sequence
tacagaagatgaaattgagtatgag

SEQ ID NO: 234765 - DNA, 25 bp, Artificial sequence
  SiRNA target sequence
acagaagatgaaattgagtatgagg

SEQ ID NO: 234766 - DNA, 25 bp, Artificial sequence
  SiRNA target sequence
cagaagatgaaattgagtatgaggc

SEQ ID NO: 234767 - DNA, 25 bp, Artificial sequence
  SiRNA target sequence
agaagatgaaattgagtatgaggcc

SEQ ID NO: 234768 - DNA, 25 bp, Artificial sequence
  SiRNA target sequence
gaagatgaaattgagtatgaggcca

SEQ ID NO: 234769 - DNA, 25 bp, Artificial sequence
  SiRNA target sequence
aagatgaaattgagtatgaggccag

SEQ ID NO: 234770 - DNA, 25 bp, Artificial sequence
  SiRNA target sequence
agatgaaattgagtatgaggccagc

SEQ ID NO: 234771 - DNA, 25 bp, Artificial sequence
  SiRNA target sequence
gatgaaattgagtatgaggccagca

SEQ ID NO: 234772 - DNA, 25 bp, Artificial sequence
  SiRNA target sequence
atgaaattgagtatgaggccagcaa

SEQ ID NO: 234773 - DNA, 25 bp, Artificial sequence
  SiRNA target sequence
tgaaattgagtatgaggccagcaat

SEQ ID NO: 234774 - DNA, 25 bp, Artificial sequence
  SiRNA target sequence
gaaattgagtatgaggccagcaatg

SEQ ID NO: 234775 - DNA, 25 bp, Artificial sequence
  SiRNA target sequence
aaattgagtatgaggccagcaatgg

SEQ ID NO: 234776 - DNA, 25 bp, Artificial sequence
  SiRNA target sequence
aattgagtatgaggccagcaatggt

SEQ ID NO: 234777 - DNA, 25 bp, Artificial sequence
  SiRNA target sequence
attgagtatgaggccagcaatggtt

SEQ ID NO: 234778 - DNA, 25 bp, Artificial sequence
  SiRNA target sequence
ttgagtatgaggccagcaatggttc

SEQ ID NO: 234779 - DNA, 25 bp, Artificial sequence
  SiRNA target sequence
tgagtatgaggccagcaatggttct

SEQ ID NO: 234780 - DNA, 25 bp, Artificial sequence
  SiRNA target sequence
gagtatgaggccagcaatggttctg

SEQ ID NO: 234781 - DNA, 25 bp, Artificial sequence
  SiRNA target sequence
agtatgaggccagcaatggttctgg

SEQ ID NO: 234782 - DNA, 25 bp, Artificial sequence
  SiRNA target sequence
gtatgaggccagcaatggttctggt

SEQ ID NO: 234783 - DNA, 25 bp, Artificial sequence
  SiRNA target sequence
tatgaggccagcaatggttctggta

SEQ ID NO: 234784 - DNA, 25 bp, Artificial sequence
  SiRNA target sequence
atgaggccagcaatggttctggtat

SEQ ID NO: 234785 - DNA, 25 bp, Artificial sequence
  SiRNA target sequence
tgaggccagcaatggttctggtata

SEQ ID NO: 234786 - DNA, 25 bp, Artificial sequence
  SiRNA target sequence
gaggccagcaatggttctggtatat

SEQ ID NO: 234787 - DNA, 25 bp, Artificial sequence
  SiRNA target sequence
aggccagcaatggttctggtatata

SEQ ID NO: 234788 - DNA, 25 bp, Artificial sequence
  SiRNA target sequence
ggccagcaatggttctggtatatat

SEQ ID NO: 234789 - DNA, 25 bp, Artificial sequence
  SiRNA target sequence
gccagcaatggttctggtatatatt

SEQ ID NO: 234790 - DNA, 25 bp, Artificial sequence
  SiRNA target sequence
ccagcaatggttctggtatatattc

SEQ ID NO: 234791 - DNA, 25 bp, Artificial sequence
  SiRNA target sequence
cagcaatggttctggtatatattca

SEQ ID NO: 234792 - DNA, 25 bp, Artificial sequence
  SiRNA target sequence
agcaatggttctggtatatattcac

SEQ ID NO: 234793 - DNA, 25 bp, Artificial sequence
  SiRNA target sequence
gcaatggttctggtatatattcact

SEQ ID NO: 234794 - DNA, 25 bp, Artificial sequence
  SiRNA target sequence
caatggttctggtatatattcactt

SEQ ID NO: 234795 - DNA, 25 bp, Artificial sequence
  SiRNA target sequence
aatggttctggtatatattcactta

SEQ ID NO: 234796 - DNA, 25 bp, Artificial sequence
  SiRNA target sequence
atggttctggtatatattcacttat

SEQ ID NO: 234797 - DNA, 25 bp, Artificial sequence
  SiRNA target sequence
tggttctggtatatattcacttatt

SEQ ID NO: 234798 - DNA, 25 bp, Artificial sequence
  SiRNA target sequence
ggttctggtatatattcacttatta

SEQ ID NO: 234799 - DNA, 25 bp, Artificial sequence
  SiRNA target sequence
gttctggtatatattcacttattag

SEQ ID NO: 234800 - DNA, 25 bp, Artificial sequence
  SiRNA target sequence
ttctggtatatattcacttattaga

SEQ ID NO: 234801 - DNA, 25 bp, Artificial sequence
  SiRNA target sequence
tctggtatatattcacttattagag

SEQ ID NO: 234802 - DNA, 25 bp, Artificial sequence
  SiRNA target sequence
ctggtatatattcacttattagagt

SEQ ID NO: 234803 - DNA, 25 bp, Artificial sequence
  SiRNA target sequence
tggtatatattcacttattagagta

SEQ ID NO: 234804 - DNA, 25 bp, Artificial sequence
  SiRNA target sequence
ggtatatattcacttattagagtag

SEQ ID NO: 234805 - DNA, 25 bp, Artificial sequence
  SiRNA target sequence
gtatatattcacttattagagtagc

SEQ ID NO: 234806 - DNA, 25 bp, Artificial sequence
  SiRNA target sequence
tatatattcacttattagagtagca

SEQ ID NO: 234807 - DNA, 25 bp, Artificial sequence
  SiRNA target sequence
atatattcacttattagagtagcaa

SEQ ID NO: 234808 - DNA, 25 bp, Artificial sequence
  SiRNA target sequence
tatattcacttattagagtagcaaa

SEQ ID NO: 234809 - DNA, 25 bp, Artificial sequence
  SiRNA target sequence
atattcacttattagagtagcaaag

SEQ ID NO: 234810 - DNA, 25 bp, Artificial sequence
  SiRNA target sequence
tattcacttattagagtagcaaagg

SEQ ID NO: 234811 - DNA, 25 bp, Artificial sequence
  SiRNA target sequence
attcacttattagagtagcaaaggt

SEQ ID NO: 234812 - DNA, 25 bp, Artificial sequence
  SiRNA target sequence
ttcacttattagagtagcaaaggtt

SEQ ID NO: 234813 - DNA, 25 bp, Artificial sequence
  SiRNA target sequence
tcacttattagagtagcaaaggttg

SEQ ID NO: 234814 - DNA, 25 bp, Artificial sequence
  SiRNA target sequence
cacttattagagtagcaaaggttga

SEQ ID NO: 234815 - DNA, 25 bp, Artificial sequence
  SiRNA target sequence
acttattagagtagcaaaggttgag

SEQ ID NO: 234816 - DNA, 25 bp, Artificial sequence
  SiRNA target sequence
cttattagagtagcaaaggttgaga

SEQ ID NO: 234817 - DNA, 25 bp, Artificial sequence
  SiRNA target sequence
ttattagagtagcaaaggttgagag

SEQ ID NO: 234818 - DNA, 25 bp, Artificial sequence
  SiRNA target sequence
tattagagtagcaaaggttgagaga

SEQ ID NO: 234819 - DNA, 25 bp, Artificial sequence
  SiRNA target sequence
attagagtagcaaaggttgagagaa

SEQ ID NO: 234820 - DNA, 25 bp, Artificial sequence
  SiRNA target sequence
ttagagtagcaaaggttgagagaaa

SEQ ID NO: 234821 - DNA, 25 bp, Artificial sequence
  SiRNA target sequence
tagagtagcaaaggttgagagaaag

SEQ ID NO: 234822 - DNA, 25 bp, Artificial sequence
  SiRNA target sequence
agagtagcaaaggttgagagaaaga

SEQ ID NO: 234823 - DNA, 25 bp, Artificial sequence
  SiRNA target sequence
gagtagcaaaggttgagagaaagat

SEQ ID NO: 234824 - DNA, 25 bp, Artificial sequence
  SiRNA target sequence
agtagcaaaggttgagagaaagatg

SEQ ID NO: 234825 - DNA, 25 bp, Artificial sequence
  SiRNA target sequence
gtagcaaaggttgagagaaagatgt

SEQ ID NO: 234826 - DNA, 25 bp, Artificial sequence
  SiRNA target sequence
tagcaaaggttgagagaaagatgtt

SEQ ID NO: 234827 - DNA, 25 bp, Artificial sequence
  SiRNA target sequence
agcaaaggttgagagaaagatgttt

SEQ ID NO: 234828 - DNA, 25 bp, Artificial sequence
  SiRNA target sequence
gcaaaggttgagagaaagatgtttt

SEQ ID NO: 234829 - DNA, 25 bp, Artificial sequence
  SiRNA target sequence
caaaggttgagagaaagatgttttg

SEQ ID NO: 234830 - DNA, 25 bp, Artificial sequence
  SiRNA target sequence
aaaggttgagagaaagatgttttgg

SEQ ID NO: 234831 - DNA, 25 bp, Artificial sequence
  SiRNA target sequence
aaggttgagagaaagatgttttgga

SEQ ID NO: 234832 - DNA, 25 bp, Artificial sequence
  SiRNA target sequence
aggttgagagaaagatgttttggat

SEQ ID NO: 234833 - DNA, 25 bp, Artificial sequence
  SiRNA target sequence
ggttgagagaaagatgttttggatc

SEQ ID NO: 234834 - DNA, 25 bp, Artificial sequence
  SiRNA target sequence
gttgagagaaagatgttttggatca

SEQ ID NO: 234835 - DNA, 25 bp, Artificial sequence
  SiRNA target sequence
ttgagagaaagatgttttggatcat

SEQ ID NO: 234836 - DNA, 25 bp, Artificial sequence
  SiRNA target sequence
tgagagaaagatgttttggatcatg

SEQ ID NO: 234837 - DNA, 25 bp, Artificial sequence
  SiRNA target sequence
gagagaaagatgttttggatcatgg

SEQ ID NO: 234838 - DNA, 25 bp, Artificial sequence
  SiRNA target sequence
agagaaagatgttttggatcatggc

SEQ ID NO: 234839 - DNA, 25 bp, Artificial sequence
  SiRNA target sequence
gagaaagatgttttggatcatggca

SEQ ID NO: 234840 - DNA, 25 bp, Artificial sequence
  SiRNA target sequence
agaaagatgttttggatcatggcag

SEQ ID NO: 234841 - DNA, 25 bp, Artificial sequence
  SiRNA target sequence
gaaagatgttttggatcatggcagc

SEQ ID NO: 234842 - DNA, 25 bp, Artificial sequence
  SiRNA target sequence
aaagatgttttggatcatggcagct

SEQ ID NO: 234843 - DNA, 25 bp, Artificial sequence
  SiRNA target sequence
aagatgttttggatcatggcagcta

SEQ ID NO: 234844 - DNA, 25 bp, Artificial sequence
  SiRNA target sequence
agatgttttggatcatggcagctat

SEQ ID NO: 234845 - DNA, 25 bp, Artificial sequence
  SiRNA target sequence
gatgttttggatcatggcagctatg

SEQ ID NO: 234846 - DNA, 25 bp, Artificial sequence
  SiRNA target sequence
atgttttggatcatggcagctatgt

SEQ ID NO: 234847 - DNA, 25 bp, Artificial sequence
  SiRNA target sequence
tgttttggatcatggcagctatgtt

SEQ ID NO: 234848 - DNA, 25 bp, Artificial sequence
  SiRNA target sequence
gttttggatcatggcagctatgttc

SEQ ID NO: 234849 - DNA, 25 bp, Artificial sequence
  SiRNA target sequence
ttttggatcatggcagctatgttct

SEQ ID NO: 234850 - DNA, 25 bp, Artificial sequence
  SiRNA target sequence
tttggatcatggcagctatgttctt

SEQ ID NO: 234851 - DNA, 25 bp, Artificial sequence
  SiRNA target sequence
ttggatcatggcagctatgttcttt

SEQ ID NO: 234852 - DNA, 25 bp, Artificial sequence
  SiRNA target sequence
tggatcatggcagctatgttcttta

SEQ ID NO: 234853 - DNA, 25 bp, Artificial sequence
  SiRNA target sequence
ggatcatggcagctatgttctttat

SEQ ID NO: 234854 - DNA, 25 bp, Artificial sequence
  SiRNA target sequence
gatcatggcagctatgttctttatt

SEQ ID NO: 234855 - DNA, 25 bp, Artificial sequence
  SiRNA target sequence
atcatggcagctatgttctttatta

SEQ ID NO: 234856 - DNA, 25 bp, Artificial sequence
  SiRNA target sequence
tcatggcagctatgttctttattat

SEQ ID NO: 234857 - DNA, 25 bp, Artificial sequence
  SiRNA target sequence
catggcagctatgttctttattatc

SEQ ID NO: 234858 - DNA, 25 bp, Artificial sequence
  SiRNA target sequence
atggcagctatgttctttattatct

SEQ ID NO: 234859 - DNA, 25 bp, Artificial sequence
  SiRNA target sequence
tggcagctatgttctttattatctc

SEQ ID NO: 234860 - DNA, 25 bp, Artificial sequence
  SiRNA target sequence
ggcagctatgttctttattatctcc

SEQ ID NO: 234861 - DNA, 25 bp, Artificial sequence
  SiRNA target sequence
gcagctatgttctttattatctcct

SEQ ID NO: 234862 - DNA, 25 bp, Artificial sequence
  SiRNA target sequence
cagctatgttctttattatctcctt

SEQ ID NO: 234863 - DNA, 25 bp, Artificial sequence
  SiRNA target sequence
agctatgttctttattatctccttt

SEQ ID NO: 234864 - DNA, 25 bp, Artificial sequence
  SiRNA target sequence
gctatgttctttattatctccttta

SEQ ID NO: 234865 - DNA, 25 bp, Artificial sequence
  SiRNA target sequence
ctatgttctttattatctcctttat

SEQ ID NO: 234866 - DNA, 25 bp, Artificial sequence
  SiRNA target sequence
tatgttctttattatctcctttatt

SEQ ID NO: 234867 - DNA, 25 bp, Artificial sequence
  SiRNA target sequence
atgttctttattatctcctttattt

SEQ ID NO: 234868 - DNA, 25 bp, Artificial sequence
  SiRNA target sequence
tgttctttattatctcctttattta

SEQ ID NO: 234869 - DNA, 25 bp, Artificial sequence
  SiRNA target sequence
gttctttattatctcctttatttat

SEQ ID NO: 234870 - DNA, 25 bp, Artificial sequence
  SiRNA target sequence
ttctttattatctcctttatttatt

SEQ ID NO: 234871 - DNA, 25 bp, Artificial sequence
  SiRNA target sequence
tctttattatctcctttatttattc

SEQ ID NO: 234872 - DNA, 25 bp, Artificial sequence
  SiRNA target sequence
ctttattatctcctttatttattcg

SEQ ID NO: 234873 - DNA, 25 bp, Artificial sequence
  SiRNA target sequence
tttattatctcctttatttattcgg

SEQ ID NO: 234874 - DNA, 25 bp, Artificial sequence
  SiRNA target sequence
ttattatctcctttatttattcggt

SEQ ID NO: 234875 - DNA, 25 bp, Artificial sequence
  SiRNA target sequence
tattatctcctttatttattcggtg

SEQ ID NO: 234876 - DNA, 25 bp, Artificial sequence
  SiRNA target sequence
attatctcctttatttattcggtgg

SEQ ID NO: 234877 - DNA, 25 bp, Artificial sequence
  SiRNA target sequence
ttatctcctttatttattcggtggc

SEQ ID NO: 234878 - DNA, 25 bp, Artificial sequence
  SiRNA target sequence
tatctcctttatttattcggtggct

SEQ ID NO: 234879 - DNA, 25 bp, Artificial sequence
  SiRNA target sequence
atctcctttatttattcggtggcta

SEQ ID NO: 234880 - DNA, 25 bp, Artificial sequence
  SiRNA target sequence
tctcctttatttattcggtggctag

SEQ ID NO: 234881 - DNA, 25 bp, Artificial sequence
  SiRNA target sequence
ctcctttatttattcggtggctaga

SEQ ID NO: 234882 - DNA, 25 bp, Artificial sequence
  SiRNA target sequence
tcctttatttattcggtggctagag

SEQ ID NO: 234883 - DNA, 25 bp, Artificial sequence
  SiRNA target sequence
cctttatttattcggtggctagagt

SEQ ID NO: 234884 - DNA, 25 bp, Artificial sequence
  SiRNA target sequence
ctttatttattcggtggctagagtg

SEQ ID NO: 234885 - DNA, 25 bp, Artificial sequence
  SiRNA target sequence
tttatttattcggtggctagagtgc

SEQ ID NO: 234886 - DNA, 25 bp, Artificial sequence
  SiRNA target sequence
ttatttattcggtggctagagtgct

SEQ ID NO: 234887 - DNA, 25 bp, Artificial sequence
  SiRNA target sequence
tatttattcggtggctagagtgctt

SEQ ID NO: 234888 - DNA, 25 bp, Artificial sequence
  SiRNA target sequence
atttattcggtggctagagtgctta

SEQ ID NO: 234889 - DNA, 25 bp, Artificial sequence
  SiRNA target sequence
tttattcggtggctagagtgcttaa

SEQ ID NO: 234890 - DNA, 25 bp, Artificial sequence
  SiRNA target sequence
ttattcggtggctagagtgcttaaa

SEQ ID NO: 234891 - DNA, 25 bp, Artificial sequence
  SiRNA target sequence
tattcggtggctagagtgcttaaag

SEQ ID NO: 234892 - DNA, 25 bp, Artificial sequence
  SiRNA target sequence
attcggtggctagagtgcttaaaga

SEQ ID NO: 234893 - DNA, 25 bp, Artificial sequence
  SiRNA target sequence
ttcggtggctagagtgcttaaagat

SEQ ID NO: 234894 - DNA, 25 bp, Artificial sequence
  SiRNA target sequence
tcggtggctagagtgcttaaagatg

SEQ ID NO: 234895 - DNA, 25 bp, Artificial sequence
  SiRNA target sequence
cggtggctagagtgcttaaagatgc

SEQ ID NO: 234896 - DNA, 25 bp, Artificial sequence
  SiRNA target sequence
ggtggctagagtgcttaaagatgcc

SEQ ID NO: 234897 - DNA, 25 bp, Artificial sequence
  SiRNA target sequence
gtggctagagtgcttaaagatgccg

SEQ ID NO: 234898 - DNA, 25 bp, Artificial sequence
  SiRNA target sequence
tggctagagtgcttaaagatgccgc

SEQ ID NO: 234899 - DNA, 25 bp, Artificial sequence
  SiRNA target sequence
ggctagagtgcttaaagatgccgct

SEQ ID NO: 234900 - DNA, 25 bp, Artificial sequence
  SiRNA target sequence
gctagagtgcttaaagatgccgctg

SEQ ID NO: 234901 - DNA, 25 bp, Artificial sequence
  SiRNA target sequence
ctagagtgcttaaagatgccgctgt

SEQ ID NO: 234902 - DNA, 25 bp, Artificial sequence
  SiRNA target sequence
tagagtgcttaaagatgccgctgtt

SEQ ID NO: 234903 - DNA, 25 bp, Artificial sequence
  SiRNA target sequence
agagtgcttaaagatgccgctgtta

SEQ ID NO: 234904 - DNA, 25 bp, Artificial sequence
  SiRNA target sequence
gagtgcttaaagatgccgctgttat

SEQ ID NO: 234905 - DNA, 25 bp, Artificial sequence
  SiRNA target sequence
agtgcttaaagatgccgctgttatt

SEQ ID NO: 234906 - DNA, 25 bp, Artificial sequence
  SiRNA target sequence
gtgcttaaagatgccgctgttattg

SEQ ID NO: 234907 - DNA, 25 bp, Artificial sequence
  SiRNA target sequence
tgcttaaagatgccgctgttattgg

SEQ ID NO: 234908 - DNA, 25 bp, Artificial sequence
  SiRNA target sequence
gcttaaagatgccgctgttattggt

SEQ ID NO: 234909 - DNA, 25 bp, Artificial sequence
  SiRNA target sequence
cttaaagatgccgctgttattggta

SEQ ID NO: 234910 - DNA, 25 bp, Artificial sequence
  SiRNA target sequence
ttaaagatgccgctgttattggtaa

SEQ ID NO: 234911 - DNA, 25 bp, Artificial sequence
  SiRNA target sequence
taaagatgccgctgttattggtaaa

SEQ ID NO: 234912 - DNA, 25 bp, Artificial sequence
  SiRNA target sequence
aaagatgccgctgttattggtaaac

SEQ ID NO: 234913 - DNA, 25 bp, Artificial sequence
  SiRNA target sequence
aagatgccgctgttattggtaaaca

SEQ ID NO: 234914 - DNA, 25 bp, Artificial sequence
  SiRNA target sequence
agatgccgctgttattggtaaacaa

SEQ ID NO: 234915 - DNA, 25 bp, Artificial sequence
  SiRNA target sequence
gatgccgctgttattggtaaacaac

SEQ ID NO: 234916 - DNA, 25 bp, Artificial sequence
  SiRNA target sequence
atgccgctgttattggtaaacaact

SEQ ID NO: 234917 - DNA, 25 bp, Artificial sequence
  SiRNA target sequence
tgccgctgttattggtaaacaactc

SEQ ID NO: 234918 - DNA, 25 bp, Artificial sequence
  SiRNA target sequence
gccgctgttattggtaaacaactcc

SEQ ID NO: 234919 - DNA, 25 bp, Artificial sequence
  SiRNA target sequence
ccgctgttattggtaaacaactccc

SEQ ID NO: 234920 - DNA, 25 bp, Artificial sequence
  SiRNA target sequence
cgctgttattggtaaacaactccca

SEQ ID NO: 234921 - DNA, 25 bp, Artificial sequence
  SiRNA target sequence
gctgttattggtaaacaactcccag

SEQ ID NO: 234922 - DNA, 25 bp, Artificial sequence
  SiRNA target sequence
ctgttattggtaaacaactcccagc

SEQ ID NO: 234923 - DNA, 25 bp, Artificial sequence
  SiRNA target sequence
tgttattggtaaacaactcccagcg

SEQ ID NO: 234924 - DNA, 25 bp, Artificial sequence
  SiRNA target sequence
gttattggtaaacaactcccagcgt

SEQ ID NO: 234925 - DNA, 25 bp, Artificial sequence
  SiRNA target sequence
ttattggtaaacaactcccagcgtc

SEQ ID NO: 234926 - DNA, 25 bp, Artificial sequence
  SiRNA target sequence
tattggtaaacaactcccagcgtca

SEQ ID NO: 234927 - DNA, 25 bp, Artificial sequence
  SiRNA target sequence
attggtaaacaactcccagcgtcaa

SEQ ID NO: 234928 - DNA, 25 bp, Artificial sequence
  SiRNA target sequence
ttggtaaacaactcccagcgtcaat

SEQ ID NO: 234929 - DNA, 25 bp, Artificial sequence
  SiRNA target sequence
tggtaaacaactcccagcgtcaatt

SEQ ID NO: 234930 - DNA, 25 bp, Artificial sequence
  SiRNA target sequence
ggtaaacaactcccagcgtcaattt

SEQ ID NO: 234931 - DNA, 25 bp, Artificial sequence
  SiRNA target sequence
gtaaacaactcccagcgtcaatttt

SEQ ID NO: 234932 - DNA, 25 bp, Artificial sequence
  SiRNA target sequence
taaacaactcccagcgtcaattttc

SEQ ID NO: 234933 - DNA, 25 bp, Artificial sequence
  SiRNA target sequence
aaacaactcccagcgtcaattttct

SEQ ID NO: 234934 - DNA, 25 bp, Artificial sequence
  SiRNA target sequence
aacaactcccagcgtcaattttctt

SEQ ID NO: 234935 - DNA, 25 bp, Artificial sequence
  SiRNA target sequence
acaactcccagcgtcaattttcttt

SEQ ID NO: 234936 - DNA, 25 bp, Artificial sequence
  SiRNA target sequence
caactcccagcgtcaattttctttt

SEQ ID NO: 234937 - DNA, 25 bp, Artificial sequence
  SiRNA target sequence
aactcccagcgtcaattttcttttt

SEQ ID NO: 234938 - DNA, 25 bp, Artificial sequence
  SiRNA target sequence
actcccagcgtcaattttctttttg

SEQ ID NO: 234939 - DNA, 25 bp, Artificial sequence
  SiRNA target sequence
ctcccagcgtcaattttctttttga

SEQ ID NO: 234940 - DNA, 25 bp, Artificial sequence
  SiRNA target sequence
tcccagcgtcaattttctttttgaa

SEQ ID NO: 234941 - DNA, 25 bp, Artificial sequence
  SiRNA target sequence
cccagcgtcaattttctttttgaaa

SEQ ID NO: 234942 - DNA, 25 bp, Artificial sequence
  SiRNA target sequence
ccagcgtcaattttctttttgaaat

SEQ ID NO: 234943 - DNA, 25 bp, Artificial sequence
  SiRNA target sequence
cagcgtcaattttctttttgaaatt

SEQ ID NO: 234944 - DNA, 25 bp, Artificial sequence
  SiRNA target sequence
agcgtcaattttctttttgaaattt

SEQ ID NO: 234945 - DNA, 25 bp, Artificial sequence
  SiRNA target sequence
gcgtcaattttctttttgaaatttg

SEQ ID NO: 234946 - DNA, 25 bp, Artificial sequence
  SiRNA target sequence
cgtcaattttctttttgaaatttgt

SEQ ID NO: 234947 - DNA, 25 bp, Artificial sequence
  SiRNA target sequence
gtcaattttctttttgaaatttgtt

SEQ ID NO: 234948 - DNA, 25 bp, Artificial sequence
  SiRNA target sequence
tcaattttctttttgaaatttgtta

SEQ ID NO: 234949 - DNA, 25 bp, Artificial sequence
  SiRNA target sequence
caattttctttttgaaatttgttat

SEQ ID NO: 234950 - DNA, 25 bp, Artificial sequence
  SiRNA target sequence
aattttctttttgaaatttgttatt

SEQ ID NO: 234951 - DNA, 25 bp, Artificial sequence
  SiRNA target sequence
attttctttttgaaatttgttatta

SEQ ID NO: 234952 - DNA, 25 bp, Artificial sequence
  SiRNA target sequence
ttttctttttgaaatttgttattat

SEQ ID NO: 234953 - DNA, 25 bp, Artificial sequence
  SiRNA target sequence
tttctttttgaaatttgttattatc

SEQ ID NO: 234954 - DNA, 25 bp, Artificial sequence
  SiRNA target sequence
ttctttttgaaatttgttattatcc

SEQ ID NO: 234955 - DNA, 25 bp, Artificial sequence
  SiRNA target sequence
tctttttgaaatttgttattatcct

SEQ ID NO: 234956 - DNA, 25 bp, Artificial sequence
  SiRNA target sequence
ctttttgaaatttgttattatcctt

SEQ ID NO: 234957 - DNA, 25 bp, Artificial sequence
  SiRNA target sequence
tttttgaaatttgttattatccttc

SEQ ID NO: 234958 - DNA, 25 bp, Artificial sequence
  SiRNA target sequence
ttttgaaatttgttattatccttcc

SEQ ID NO: 234959 - DNA, 25 bp, Artificial sequence
  SiRNA target sequence
tttgaaatttgttattatccttccg

SEQ ID NO: 234960 - DNA, 25 bp, Artificial sequence
  SiRNA target sequence
ttgaaatttgttattatccttccgt

SEQ ID NO: 234961 - DNA, 25 bp, Artificial sequence
  SiRNA target sequence
tgaaatttgttattatccttccgtt

SEQ ID NO: 234962 - DNA, 25 bp, Artificial sequence
  SiRNA target sequence
gaaatttgttattatccttccgttc

SEQ ID NO: 234963 - DNA, 25 bp, Artificial sequence
  SiRNA target sequence
aaatttgttattatccttccgttct

SEQ ID NO: 234964 - DNA, 25 bp, Artificial sequence
  SiRNA target sequence
aatttgttattatccttccgttctc

SEQ ID NO: 234965 - DNA, 25 bp, Artificial sequence
  SiRNA target sequence
atttgttattatccttccgttctca

SEQ ID NO: 234966 - DNA, 25 bp, Artificial sequence
  SiRNA target sequence
tttgttattatccttccgttctcat

SEQ ID NO: 234967 - DNA, 25 bp, Artificial sequence
  SiRNA target sequence
ttgttattatccttccgttctcatt

SEQ ID NO: 234968 - DNA, 25 bp, Artificial sequence
  SiRNA target sequence
tgttattatccttccgttctcattt

SEQ ID NO: 234969 - DNA, 25 bp, Artificial sequence
  SiRNA target sequence
gttattatccttccgttctcattta

SEQ ID NO: 234970 - DNA, 25 bp, Artificial sequence
  SiRNA target sequence
ttattatccttccgttctcatttat

SEQ ID NO: 234971 - DNA, 25 bp, Artificial sequence
  SiRNA target sequence
tattatccttccgttctcatttatt

SEQ ID NO: 234972 - DNA, 25 bp, Artificial sequence
  SiRNA target sequence
attatccttccgttctcatttattt

SEQ ID NO: 234973 - DNA, 25 bp, Artificial sequence
  SiRNA target sequence
ttatccttccgttctcatttatttc

SEQ ID NO: 234974 - DNA, 25 bp, Artificial sequence
  SiRNA target sequence
tatccttccgttctcatttatttca

SEQ ID NO: 234975 - DNA, 25 bp, Artificial sequence
  SiRNA target sequence
atccttccgttctcatttatttcag

SEQ ID NO: 234976 - DNA, 25 bp, Artificial sequence
  SiRNA target sequence
tccttccgttctcatttatttcagt

SEQ ID NO: 234977 - DNA, 25 bp, Artificial sequence
  SiRNA target sequence
ccttccgttctcatttatttcagta

SEQ ID NO: 234978 - DNA, 25 bp, Artificial sequence
  SiRNA target sequence
cttccgttctcatttatttcagtag

SEQ ID NO: 234979 - DNA, 25 bp, Artificial sequence
  SiRNA target sequence
ttccgttctcatttatttcagtagg

SEQ ID NO: 234980 - DNA, 25 bp, Artificial sequence
  SiRNA target sequence
tccgttctcatttatttcagtaggt

SEQ ID NO: 234981 - DNA, 25 bp, Artificial sequence
  SiRNA target sequence
ccgttctcatttatttcagtaggta

SEQ ID NO: 234982 - DNA, 25 bp, Artificial sequence
  SiRNA target sequence
cgttctcatttatttcagtaggtat

SEQ ID NO: 234983 - DNA, 25 bp, Artificial sequence
  SiRNA target sequence
gttctcatttatttcagtaggtatt

SEQ ID NO: 234984 - DNA, 25 bp, Artificial sequence
  SiRNA target sequence
ttctcatttatttcagtaggtatta

SEQ ID NO: 234985 - DNA, 25 bp, Artificial sequence
  SiRNA target sequence
tctcatttatttcagtaggtattat

SEQ ID NO: 234986 - DNA, 25 bp, Artificial sequence
  SiRNA target sequence
ctcatttatttcagtaggtattatt

SEQ ID NO: 234987 - DNA, 25 bp, Artificial sequence
  SiRNA target sequence
tcatttatttcagtaggtattattc

SEQ ID NO: 234988 - DNA, 25 bp, Artificial sequence
  SiRNA target sequence
catttatttcagtaggtattattca

SEQ ID NO: 234989 - DNA, 25 bp, Artificial sequence
  SiRNA target sequence
atttatttcagtaggtattattcag

SEQ ID NO: 234990 - DNA, 25 bp, Artificial sequence
  SiRNA target sequence
tttatttcagtaggtattattcaga

SEQ ID NO: 234991 - DNA, 25 bp, Artificial sequence
  SiRNA target sequence
ttatttcagtaggtattattcagaa

SEQ ID NO: 234992 - DNA, 25 bp, Artificial sequence
  SiRNA target sequence
tatttcagtaggtattattcagaaa

SEQ ID NO: 234993 - DNA, 25 bp, Artificial sequence
  SiRNA target sequence
atttcagtaggtattattcagaaag

SEQ ID NO: 234994 - DNA, 25 bp, Artificial sequence
  SiRNA target sequence
tttcagtaggtattattcagaaagc

SEQ ID NO: 234995 - DNA, 25 bp, Artificial sequence
  SiRNA target sequence
ttcagtaggtattattcagaaagct

SEQ ID NO: 234996 - DNA, 25 bp, Artificial sequence
  SiRNA target sequence
tcagtaggtattattcagaaagctt

SEQ ID NO: 234997 - DNA, 25 bp, Artificial sequence
  SiRNA target sequence
cagtaggtattattcagaaagcttt

SEQ ID NO: 234998 - DNA, 25 bp, Artificial sequence
  SiRNA target sequence
agtaggtattattcagaaagcttta

SEQ ID NO: 234999 - DNA, 25 bp, Artificial sequence
  SiRNA target sequence
gtaggtattattcagaaagctttag

SEQ ID NO: 235000 - DNA, 25 bp, Artificial sequence
  SiRNA target sequence
taggtattattcagaaagctttaga

SEQ ID NO: 235001 - DNA, 25 bp, Artificial sequence
  SiRNA target sequence
aggtattattcagaaagctttagat

SEQ ID NO: 235002 - DNA, 25 bp, Artificial sequence
  SiRNA target sequence
ggtattattcagaaagctttagata

SEQ ID NO: 235003 - DNA, 25 bp, Artificial sequence
  SiRNA target sequence
gtattattcagaaagctttagataa

SEQ ID NO: 235004 - DNA, 25 bp, Artificial sequence
  SiRNA target sequence
tattattcagaaagctttagataaa

SEQ ID NO: 235005 - DNA, 25 bp, Artificial sequence
  SiRNA target sequence
attattcagaaagctttagataaat

SEQ ID NO: 235006 - DNA, 25 bp, Artificial sequence
  SiRNA target sequence
ttattcagaaagctttagataaata

SEQ ID NO: 235007 - DNA, 25 bp, Artificial sequence
  SiRNA target sequence
tattcagaaagctttagataaatat

SEQ ID NO: 235008 - DNA, 25 bp, Artificial sequence
  SiRNA target sequence
attcagaaagctttagataaatatc

SEQ ID NO: 235009 - DNA, 25 bp, Artificial sequence
  SiRNA target sequence
ttcagaaagctttagataaatatcc

SEQ ID NO: 235010 - DNA, 25 bp, Artificial sequence
  SiRNA target sequence
tcagaaagctttagataaatatcct

SEQ ID NO: 235011 - DNA, 25 bp, Artificial sequence
  SiRNA target sequence
cagaaagctttagataaatatcctt

SEQ ID NO: 235012 - DNA, 25 bp, Artificial sequence
  SiRNA target sequence
agaaagctttagataaatatccttt

SEQ ID NO: 235013 - DNA, 25 bp, Artificial sequence
  SiRNA target sequence
gaaagctttagataaatatcctttt

SEQ ID NO: 235014 - DNA, 25 bp, Artificial sequence
  SiRNA target sequence
aaagctttagataaatatcctttta

SEQ ID NO: 235015 - DNA, 25 bp, Artificial sequence
  SiRNA target sequence
aagctttagataaatatccttttac

SEQ ID NO: 235016 - DNA, 25 bp, Artificial sequence
  SiRNA target sequence
agctttagataaatatccttttaca

SEQ ID NO: 235017 - DNA, 25 bp, Artificial sequence
  SiRNA target sequence
gctttagataaatatccttttacaa

SEQ ID NO: 235018 - DNA, 25 bp, Artificial sequence
  SiRNA target sequence
ctttagataaatatccttttacaaa

SEQ ID NO: 235019 - DNA, 25 bp, Artificial sequence
  SiRNA target sequence
tttagataaatatccttttacaaaa

SEQ ID NO: 235020 - DNA, 25 bp, Artificial sequence
  SiRNA target sequence
ttagataaatatccttttacaaaaa

SEQ ID NO: 235021 - DNA, 25 bp, Artificial sequence
  SiRNA target sequence
tagataaatatccttttacaaaaat

SEQ ID NO: 235022 - DNA, 25 bp, Artificial sequence
  SiRNA target sequence
agataaatatccttttacaaaaata

SEQ ID NO: 235023 - DNA, 25 bp, Artificial sequence
  SiRNA target sequence
gataaatatccttttacaaaaatat

SEQ ID NO: 235024 - DNA, 25 bp, Artificial sequence
  SiRNA target sequence
ataaatatccttttacaaaaatatt

SEQ ID NO: 235025 - DNA, 25 bp, Artificial sequence
  SiRNA target sequence
taaatatccttttacaaaaatattt

SEQ ID NO: 235026 - DNA, 25 bp, Artificial sequence
  SiRNA target sequence
aaatatccttttacaaaaatatttg

SEQ ID NO: 235027 - DNA, 25 bp, Artificial sequence
  SiRNA target sequence
aatatccttttacaaaaatatttga

SEQ ID NO: 235028 - DNA, 25 bp, Artificial sequence
  SiRNA target sequence
atatccttttacaaaaatatttgat

SEQ ID NO: 235029 - DNA, 25 bp, Artificial sequence
  SiRNA target sequence
tatccttttacaaaaatatttgatg

SEQ ID NO: 235030 - DNA, 25 bp, Artificial sequence
  SiRNA target sequence
atccttttacaaaaatatttgatgt

SEQ ID NO: 235031 - DNA, 25 bp, Artificial sequence
  SiRNA target sequence
tccttttacaaaaatatttgatgta

SEQ ID NO: 235032 - DNA, 25 bp, Artificial sequence
  SiRNA target sequence
ccttttacaaaaatatttgatgtaa

SEQ ID NO: 235033 - DNA, 25 bp, Artificial sequence
  SiRNA target sequence
cttttacaaaaatatttgatgtaac

SEQ ID NO: 235034 - DNA, 25 bp, Artificial sequence
  SiRNA target sequence
ttttacaaaaatatttgatgtaact

SEQ ID NO: 235035 - DNA, 25 bp, Artificial sequence
  SiRNA target sequence
tttacaaaaatatttgatgtaactt

SEQ ID NO: 235036 - DNA, 25 bp, Artificial sequence
  SiRNA target sequence
ttacaaaaatatttgatgtaacttt

SEQ ID NO: 235037 - DNA, 25 bp, Artificial sequence
  SiRNA target sequence
tacaaaaatatttgatgtaacttta

SEQ ID NO: 235038 - DNA, 25 bp, Artificial sequence
  SiRNA target sequence
acaaaaatatttgatgtaactttaa

SEQ ID NO: 235039 - DNA, 25 bp, Artificial sequence
  SiRNA target sequence
caaaaatatttgatgtaactttaat

SEQ ID NO: 235040 - DNA, 25 bp, Artificial sequence
  SiRNA target sequence
aaaaatatttgatgtaactttaata

SEQ ID NO: 235041 - DNA, 25 bp, Artificial sequence
  SiRNA target sequence
aaaatatttgatgtaactttaatag

SEQ ID NO: 235042 - DNA, 25 bp, Artificial sequence
  SiRNA target sequence
aaatatttgatgtaactttaatagt

SEQ ID NO: 235043 - DNA, 25 bp, Artificial sequence
  SiRNA target sequence
aatatttgatgtaactttaatagtt

SEQ ID NO: 235044 - DNA, 25 bp, Artificial sequence
  SiRNA target sequence
atatttgatgtaactttaatagttt

SEQ ID NO: 235045 - DNA, 25 bp, Artificial sequence
  SiRNA target sequence
tatttgatgtaactttaatagtttt

SEQ ID NO: 235046 - DNA, 25 bp, Artificial sequence
  SiRNA target sequence
atttgatgtaactttaatagttttc

SEQ ID NO: 235047 - DNA, 25 bp, Artificial sequence
  SiRNA target sequence
tttgatgtaactttaatagttttcg

SEQ ID NO: 235048 - DNA, 25 bp, Artificial sequence
  SiRNA target sequence
ttgatgtaactttaatagttttcgc

SEQ ID NO: 235049 - DNA, 25 bp, Artificial sequence
  SiRNA target sequence
tgatgtaactttaatagttttcgct

SEQ ID NO: 235050 - DNA, 25 bp, Artificial sequence
  SiRNA target sequence
gatgtaactttaatagttttcgctg

SEQ ID NO: 235051 - DNA, 25 bp, Artificial sequence
  SiRNA target sequence
atgtaactttaatagttttcgctgt

SEQ ID NO: 235052 - DNA, 25 bp, Artificial sequence
  SiRNA target sequence
tgtaactttaatagttttcgctgtt

SEQ ID NO: 235053 - DNA, 25 bp, Artificial sequence
  SiRNA target sequence
gtaactttaatagttttcgctgttg

SEQ ID NO: 235054 - DNA, 25 bp, Artificial sequence
  SiRNA target sequence
taactttaatagttttcgctgttgc

SEQ ID NO: 235055 - DNA, 25 bp, Artificial sequence
  SiRNA target sequence
aactttaatagttttcgctgttgca

SEQ ID NO: 235056 - DNA, 25 bp, Artificial sequence
  SiRNA target sequence
actttaatagttttcgctgttgcat

SEQ ID NO: 235057 - DNA, 25 bp, Artificial sequence
  SiRNA target sequence
ctttaatagttttcgctgttgcatt

SEQ ID NO: 235058 - DNA, 25 bp, Artificial sequence
  SiRNA target sequence
tttaatagttttcgctgttgcattt

SEQ ID NO: 235059 - DNA, 25 bp, Artificial sequence
  SiRNA target sequence
ttaatagttttcgctgttgcattta

SEQ ID NO: 235060 - DNA, 25 bp, Artificial sequence
  SiRNA target sequence
taatagttttcgctgttgcatttac

SEQ ID NO: 235061 - DNA, 25 bp, Artificial sequence
  SiRNA target sequence
aatagttttcgctgttgcatttact

SEQ ID NO: 235062 - DNA, 25 bp, Artificial sequence
  SiRNA target sequence
atagttttcgctgttgcatttacta

SEQ ID NO: 235063 - DNA, 25 bp, Artificial sequence
  SiRNA target sequence
tagttttcgctgttgcatttactat

SEQ ID NO: 235064 - DNA, 25 bp, Artificial sequence
  SiRNA target sequence
agttttcgctgttgcatttactata

SEQ ID NO: 235065 - DNA, 25 bp, Artificial sequence
  SiRNA target sequence
gttttcgctgttgcatttactatac

SEQ ID NO: 235066 - DNA, 25 bp, Artificial sequence
  SiRNA target sequence
ttttcgctgttgcatttactatact

SEQ ID NO: 235067 - DNA, 25 bp, Artificial sequence
  SiRNA target sequence
tttcgctgttgcatttactatactt

SEQ ID NO: 235068 - DNA, 25 bp, Artificial sequence
  SiRNA target sequence
ttcgctgttgcatttactatacttg

SEQ ID NO: 235069 - DNA, 25 bp, Artificial sequence
  SiRNA target sequence
tcgctgttgcatttactatacttgg

SEQ ID NO: 235070 - DNA, 25 bp, Artificial sequence
  SiRNA target sequence
cgctgttgcatttactatacttggt

SEQ ID NO: 235071 - DNA, 25 bp, Artificial sequence
  SiRNA target sequence
gctgttgcatttactatacttggta

SEQ ID NO: 235072 - DNA, 25 bp, Artificial sequence
  SiRNA target sequence
ctgttgcatttactatacttggtag

SEQ ID NO: 235073 - DNA, 25 bp, Artificial sequence
  SiRNA target sequence
tgttgcatttactatacttggtagt

SEQ ID NO: 235074 - DNA, 25 bp, Artificial sequence
  SiRNA target sequence
gttgcatttactatacttggtagtt

SEQ ID NO: 235075 - DNA, 25 bp, Artificial sequence
  SiRNA target sequence
ttgcatttactatacttggtagttt

SEQ ID NO: 235076 - DNA, 25 bp, Artificial sequence
  SiRNA target sequence
tgcatttactatacttggtagttta

SEQ ID NO: 235077 - DNA, 25 bp, Artificial sequence
  SiRNA target sequence
gcatttactatacttggtagtttat

SEQ ID NO: 235078 - DNA, 25 bp, Artificial sequence
  SiRNA target sequence
catttactatacttggtagtttatt

SEQ ID NO: 235079 - DNA, 25 bp, Artificial sequence
  SiRNA target sequence
atttactatacttggtagtttatta

SEQ ID NO: 235080 - DNA, 25 bp, Artificial sequence
  SiRNA target sequence
tttactatacttggtagtttattac

SEQ ID NO: 235081 - DNA, 25 bp, Artificial sequence
  SiRNA target sequence
ttactatacttggtagtttattact

SEQ ID NO: 235082 - DNA, 25 bp, Artificial sequence
  SiRNA target sequence
tactatacttggtagtttattactt

SEQ ID NO: 235083 - DNA, 25 bp, Artificial sequence
  SiRNA target sequence
actatacttggtagtttattacttc

SEQ ID NO: 235084 - DNA, 25 bp, Artificial sequence
  SiRNA target sequence
ctatacttggtagtttattacttcc

SEQ ID NO: 235085 - DNA, 25 bp, Artificial sequence
  SiRNA target sequence
tatacttggtagtttattacttccc

SEQ ID NO: 235086 - DNA, 25 bp, Artificial sequence
  SiRNA target sequence
atacttggtagtttattacttccct

SEQ ID NO: 235087 - DNA, 25 bp, Artificial sequence
  SiRNA target sequence
tacttggtagtttattacttccctt

SEQ ID NO: 235088 - DNA, 25 bp, Artificial sequence
  SiRNA target sequence
acttggtagtttattacttcccttt

SEQ ID NO: 235089 - DNA, 25 bp, Artificial sequence
  SiRNA target sequence
cttggtagtttattacttcccttta

SEQ ID NO: 235090 - DNA, 25 bp, Artificial sequence
  SiRNA target sequence
ttggtagtttattacttccctttag

SEQ ID NO: 235091 - DNA, 25 bp, Artificial sequence
  SiRNA target sequence
tggtagtttattacttccctttagt

SEQ ID NO: 235092 - DNA, 25 bp, Artificial sequence
  SiRNA target sequence
ggtagtttattacttccctttagtg

SEQ ID NO: 235093 - DNA, 25 bp, Artificial sequence
  SiRNA target sequence
gtagtttattacttccctttagtga

SEQ ID NO: 235094 - DNA, 25 bp, Artificial sequence
  SiRNA target sequence
tagtttattacttccctttagtgat

SEQ ID NO: 235095 - DNA, 25 bp, Artificial sequence
  SiRNA target sequence
agtttattacttccctttagtgatt

SEQ ID NO: 235096 - DNA, 25 bp, Artificial sequence
  SiRNA target sequence
gtttattacttccctttagtgatta

SEQ ID NO: 235097 - DNA, 25 bp, Artificial sequence
  SiRNA target sequence
tttattacttccctttagtgattat

SEQ ID NO: 235098 - DNA, 25 bp, Artificial sequence
  SiRNA target sequence
ttattacttccctttagtgattata

SEQ ID NO: 235099 - DNA, 25 bp, Artificial sequence
  SiRNA target sequence
tattacttccctttagtgattatat

SEQ ID NO: 235100 - DNA, 25 bp, Artificial sequence
  SiRNA target sequence
attacttccctttagtgattatatt

SEQ ID NO: 235101 - DNA, 25 bp, Artificial sequence
  SiRNA target sequence
ttacttccctttagtgattatattc

SEQ ID NO: 235102 - DNA, 25 bp, Artificial sequence
  SiRNA target sequence
tacttccctttagtgattatattca

SEQ ID NO: 235103 - DNA, 25 bp, Artificial sequence
  SiRNA target sequence
acttccctttagtgattatattcag

SEQ ID NO: 235104 - DNA, 25 bp, Artificial sequence
  SiRNA target sequence
cttccctttagtgattatattcaga

SEQ ID NO: 235105 - DNA, 25 bp, Artificial sequence
  SiRNA target sequence
ttccctttagtgattatattcagat

SEQ ID NO: 235106 - DNA, 25 bp, Artificial sequence
  SiRNA target sequence
tccctttagtgattatattcagatt

SEQ ID NO: 235107 - DNA, 25 bp, Artificial sequence
  SiRNA target sequence
ccctttagtgattatattcagattc

SEQ ID NO: 235108 - DNA, 25 bp, Artificial sequence
  SiRNA target sequence
cctttagtgattatattcagattca

SEQ ID NO: 235109 - DNA, 25 bp, Artificial sequence
  SiRNA target sequence
ctttagtgattatattcagattcaa

SEQ ID NO: 235110 - DNA, 25 bp, Artificial sequence
  SiRNA target sequence
tttagtgattatattcagattcaac

SEQ ID NO: 235111 - DNA, 25 bp, Artificial sequence
  SiRNA target sequence
ttagtgattatattcagattcaacc

SEQ ID NO: 235112 - DNA, 25 bp, Artificial sequence
  SiRNA target sequence
tagtgattatattcagattcaaccg

SEQ ID NO: 235113 - DNA, 25 bp, Artificial sequence
  SiRNA target sequence
agtgattatattcagattcaaccgt

SEQ ID NO: 235114 - DNA, 25 bp, Artificial sequence
  SiRNA target sequence
gtgattatattcagattcaaccgtt

SEQ ID NO: 235115 - DNA, 25 bp, Artificial sequence
  SiRNA target sequence
tgattatattcagattcaaccgttt

SEQ ID NO: 235116 - DNA, 25 bp, Artificial sequence
  SiRNA target sequence
gattatattcagattcaaccgtttt

SEQ ID NO: 235117 - DNA, 25 bp, Artificial sequence
  SiRNA target sequence
attatattcagattcaaccgttttg

SEQ ID NO: 235118 - DNA, 25 bp, Artificial sequence
  SiRNA target sequence
ttatattcagattcaaccgttttgg

SEQ ID NO: 235119 - DNA, 25 bp, Artificial sequence
  SiRNA target sequence
tatattcagattcaaccgttttggg

SEQ ID NO: 235120 - DNA, 25 bp, Artificial sequence
  SiRNA target sequence
atattcagattcaaccgttttgggc

SEQ ID NO: 235121 - DNA, 25 bp, Artificial sequence
  SiRNA target sequence
tattcagattcaaccgttttgggcc

SEQ ID NO: 235122 - DNA, 25 bp, Artificial sequence
  SiRNA target sequence
attcagattcaaccgttttgggcca

SEQ ID NO: 235123 - DNA, 25 bp, Artificial sequence
  SiRNA target sequence
ttcagattcaaccgttttgggccaa

SEQ ID NO: 235124 - DNA, 25 bp, Artificial sequence
  SiRNA target sequence
tcagattcaaccgttttgggccaaa

SEQ ID NO: 235125 - DNA, 25 bp, Artificial sequence
  SiRNA target sequence
cagattcaaccgttttgggccaaag

SEQ ID NO: 235126 - DNA, 25 bp, Artificial sequence
  SiRNA target sequence
agattcaaccgttttgggccaaaga

SEQ ID NO: 235127 - DNA, 25 bp, Artificial sequence
  SiRNA target sequence
gattcaaccgttttgggccaaagat

SEQ ID NO: 235128 - DNA, 25 bp, Artificial sequence
  SiRNA target sequence
attcaaccgttttgggccaaagata

SEQ ID NO: 235129 - DNA, 25 bp, Artificial sequence
  SiRNA target sequence
ttcaaccgttttgggccaaagatat

SEQ ID NO: 235130 - DNA, 25 bp, Artificial sequence
  SiRNA target sequence
tcaaccgttttgggccaaagatatt

SEQ ID NO: 235131 - DNA, 25 bp, Artificial sequence
  SiRNA target sequence
caaccgttttgggccaaagatattt

SEQ ID NO: 235132 - DNA, 25 bp, Artificial sequence
  SiRNA target sequence
aaccgttttgggccaaagatatttt

SEQ ID NO: 235133 - DNA, 25 bp, Artificial sequence
  SiRNA target sequence
accgttttgggccaaagatattttt

SEQ ID NO: 235134 - DNA, 25 bp, Artificial sequence
  SiRNA target sequence
ccgttttgggccaaagatatttttg

SEQ ID NO: 235135 - DNA, 25 bp, Artificial sequence
  SiRNA target sequence
cgttttgggccaaagatatttttgc

SEQ ID NO: 235136 - DNA, 25 bp, Artificial sequence
  SiRNA target sequence
gttttgggccaaagatatttttgct

SEQ ID NO: 235137 - DNA, 25 bp, Artificial sequence
  SiRNA target sequence
ttttgggccaaagatatttttgctg

SEQ ID NO: 235138 - DNA, 25 bp, Artificial sequence
  SiRNA target sequence
tttgggccaaagatatttttgctga

SEQ ID NO: 235139 - DNA, 25 bp, Artificial sequence
  SiRNA target sequence
ttgggccaaagatatttttgctgat

SEQ ID NO: 235140 - DNA, 25 bp, Artificial sequence
  SiRNA target sequence
tgggccaaagatatttttgctgatg

SEQ ID NO: 235141 - DNA, 25 bp, Artificial sequence
  SiRNA target sequence
gggccaaagatatttttgctgatgg

SEQ ID NO: 235142 - DNA, 25 bp, Artificial sequence
  SiRNA target sequence
ggccaaagatatttttgctgatgga

SEQ ID NO: 235143 - DNA, 25 bp, Artificial sequence
  SiRNA target sequence
gccaaagatatttttgctgatggaa

SEQ ID NO: 235144 - DNA, 25 bp, Artificial sequence
  SiRNA target sequence
ccaaagatatttttgctgatggaaa

SEQ ID NO: 235145 - DNA, 25 bp, Artificial sequence
  SiRNA target sequence
caaagatatttttgctgatggaaaa

SEQ ID NO: 235146 - DNA, 25 bp, Artificial sequence
  SiRNA target sequence
aaagatatttttgctgatggaaaag

SEQ ID NO: 235147 - DNA, 25 bp, Artificial sequence
  SiRNA target sequence
aagatatttttgctgatggaaaagc

SEQ ID NO: 235148 - DNA, 25 bp, Artificial sequence
  SiRNA target sequence
agatatttttgctgatggaaaagct

SEQ ID NO: 235149 - DNA, 25 bp, Artificial sequence
  SiRNA target sequence
gatatttttgctgatggaaaagctg

SEQ ID NO: 235150 - DNA, 25 bp, Artificial sequence
  SiRNA target sequence
atatttttgctgatggaaaagctgt

SEQ ID NO: 235151 - DNA, 25 bp, Artificial sequence
  SiRNA target sequence
tatttttgctgatggaaaagctgtt

SEQ ID NO: 235152 - DNA, 25 bp, Artificial sequence
  SiRNA target sequence
atttttgctgatggaaaagctgttg

SEQ ID NO: 235153 - DNA, 25 bp, Artificial sequence
  SiRNA target sequence
tttttgctgatggaaaagctgttgc

SEQ ID NO: 235154 - DNA, 25 bp, Artificial sequence
  SiRNA target sequence
ttttgctgatggaaaagctgttgcc

SEQ ID NO: 235155 - DNA, 25 bp, Artificial sequence
  SiRNA target sequence
tttgctgatggaaaagctgttgcca

SEQ ID NO: 235156 - DNA, 25 bp, Artificial sequence
  SiRNA target sequence
ttgctgatggaaaagctgttgccag

SEQ ID NO: 235157 - DNA, 25 bp, Artificial sequence
  SiRNA target sequence
tgctgatggaaaagctgttgccaga

SEQ ID NO: 235158 - DNA, 25 bp, Artificial sequence
  SiRNA target sequence
gctgatggaaaagctgttgccagaa

SEQ ID NO: 235159 - DNA, 25 bp, Artificial sequence
  SiRNA target sequence
ctgatggaaaagctgttgccagaag

SEQ ID NO: 235160 - DNA, 25 bp, Artificial sequence
  SiRNA target sequence
tgatggaaaagctgttgccagaagt

SEQ ID NO: 235161 - DNA, 25 bp, Artificial sequence
  SiRNA target sequence
gatggaaaagctgttgccagaagta

SEQ ID NO: 235162 - DNA, 25 bp, Artificial sequence
  SiRNA target sequence
atggaaaagctgttgccagaagtac

SEQ ID NO: 235163 - DNA, 25 bp, Artificial sequence
  SiRNA target sequence
tggaaaagctgttgccagaagtaca

SEQ ID NO: 235164 - DNA, 25 bp, Artificial sequence
  SiRNA target sequence
ggaaaagctgttgccagaagtacag

SEQ ID NO: 235165 - DNA, 25 bp, Artificial sequence
  SiRNA target sequence
gaaaagctgttgccagaagtacaga

SEQ ID NO: 235166 - DNA, 25 bp, Artificial sequence
  SiRNA target sequence
aaaagctgttgccagaagtacagat

SEQ ID NO: 235167 - DNA, 25 bp, Artificial sequence
  SiRNA target sequence
aaagctgttgccagaagtacagatt

SEQ ID NO: 235168 - DNA, 25 bp, Artificial sequence
  SiRNA target sequence
aagctgttgccagaagtacagattt

SEQ ID NO: 235169 - DNA, 25 bp, Artificial sequence
  SiRNA target sequence
agctgttgccagaagtacagatttt

SEQ ID NO: 235170 - DNA, 25 bp, Artificial sequence
  SiRNA target sequence
gctgttgccagaagtacagattttt

SEQ ID NO: 235171 - DNA, 25 bp, Artificial sequence
  SiRNA target sequence
ctgttgccagaagtacagatttttt

SEQ ID NO: 235172 - DNA, 25 bp, Artificial sequence
  SiRNA target sequence
tgttgccagaagtacagatttttta

SEQ ID NO: 235173 - DNA, 25 bp, Artificial sequence
  SiRNA target sequence
gttgccagaagtacagattttttat

SEQ ID NO: 235174 - DNA, 25 bp, Artificial sequence
  SiRNA target sequence
ttgccagaagtacagattttttatt

SEQ ID NO: 235175 - DNA, 25 bp, Artificial sequence
  SiRNA target sequence
tgccagaagtacagattttttattt

SEQ ID NO: 235176 - DNA, 25 bp, Artificial sequence
  SiRNA target sequence
gccagaagtacagattttttatttt

SEQ ID NO: 235177 - DNA, 25 bp, Artificial sequence
  SiRNA target sequence
ccagaagtacagattttttattttc

SEQ ID NO: 235178 - DNA, 25 bp, Artificial sequence
  SiRNA target sequence
cagaagtacagattttttattttct

SEQ ID NO: 235179 - DNA, 25 bp, Artificial sequence
  SiRNA target sequence
agaagtacagattttttattttcta

SEQ ID NO: 235180 - DNA, 25 bp, Artificial sequence
  SiRNA target sequence
gaagtacagattttttattttctat

SEQ ID NO: 235181 - DNA, 25 bp, Artificial sequence
  SiRNA target sequence
aagtacagattttttattttctatt

SEQ ID NO: 235182 - DNA, 25 bp, Artificial sequence
  SiRNA target sequence
agtacagattttttattttctattg

SEQ ID NO: 235183 - DNA, 25 bp, Artificial sequence
  SiRNA target sequence
gtacagattttttattttctattgc

SEQ ID NO: 235184 - DNA, 25 bp, Artificial sequence
  SiRNA target sequence
tacagattttttattttctattgca

SEQ ID NO: 235185 - DNA, 25 bp, Artificial sequence
  SiRNA target sequence
acagattttttattttctattgcac

SEQ ID NO: 235186 - DNA, 25 bp, Artificial sequence
  SiRNA target sequence
cagattttttattttctattgcact

SEQ ID NO: 235187 - DNA, 25 bp, Artificial sequence
  SiRNA target sequence
agattttttattttctattgcactt

SEQ ID NO: 235188 - DNA, 25 bp, Artificial sequence
  SiRNA target sequence
gattttttattttctattgcacttg

SEQ ID NO: 235189 - DNA, 25 bp, Artificial sequence
  SiRNA target sequence
attttttattttctattgcacttgt

SEQ ID NO: 235190 - DNA, 25 bp, Artificial sequence
  SiRNA target sequence
ttttttattttctattgcacttgtt

SEQ ID NO: 235191 - DNA, 25 bp, Artificial sequence
  SiRNA target sequence
tttttattttctattgcacttgttt

SEQ ID NO: 235192 - DNA, 25 bp, Artificial sequence
  SiRNA target sequence
ttttattttctattgcacttgtttt

SEQ ID NO: 235193 - DNA, 25 bp, Artificial sequence
  SiRNA target sequence
tttattttctattgcacttgttttc

SEQ ID NO: 235194 - DNA, 25 bp, Artificial sequence
  SiRNA target sequence
ttattttctattgcacttgttttca

SEQ ID NO: 235195 - DNA, 25 bp, Artificial sequence
  SiRNA target sequence
tattttctattgcacttgttttcaa

SEQ ID NO: 235196 - DNA, 25 bp, Artificial sequence
  SiRNA target sequence
attttctattgcacttgttttcaat

SEQ ID NO: 235197 - DNA, 25 bp, Artificial sequence
  SiRNA target sequence
ttttctattgcacttgttttcaatg

SEQ ID NO: 235198 - DNA, 25 bp, Artificial sequence
  SiRNA target sequence
tttctattgcacttgttttcaatga

SEQ ID NO: 235199 - DNA, 25 bp, Artificial sequence
  SiRNA target sequence
ttctattgcacttgttttcaatgaa

SEQ ID NO: 235200 - DNA, 25 bp, Artificial sequence
  SiRNA target sequence
tctattgcacttgttttcaatgaat

SEQ ID NO: 235201 - DNA, 25 bp, Artificial sequence
  SiRNA target sequence
ctattgcacttgttttcaatgaatg

SEQ ID NO: 235202 - DNA, 25 bp, Artificial sequence
  SiRNA target sequence
tattgcacttgttttcaatgaatgg

SEQ ID NO: 235203 - DNA, 25 bp, Artificial sequence
  SiRNA target sequence
attgcacttgttttcaatgaatgga

SEQ ID NO: 235204 - DNA, 25 bp, Artificial sequence
  SiRNA target sequence
ttgcacttgttttcaatgaatggac

SEQ ID NO: 235205 - DNA, 25 bp, Artificial sequence
  SiRNA target sequence
tgcacttgttttcaatgaatggaca

SEQ ID NO: 235206 - DNA, 25 bp, Artificial sequence
  SiRNA target sequence
gcacttgttttcaatgaatggacaa

SEQ ID NO: 235207 - DNA, 25 bp, Artificial sequence
  SiRNA target sequence
cacttgttttcaatgaatggacaag

SEQ ID NO: 235208 - DNA, 25 bp, Artificial sequence
  SiRNA target sequence
acttgttttcaatgaatggacaagt

SEQ ID NO: 235209 - DNA, 25 bp, Artificial sequence
  SiRNA target sequence
cttgttttcaatgaatggacaagtt

SEQ ID NO: 235210 - DNA, 25 bp, Artificial sequence
  SiRNA target sequence
ttgttttcaatgaatggacaagttc

SEQ ID NO: 235211 - DNA, 25 bp, Artificial sequence
  SiRNA target sequence
tgttttcaatgaatggacaagttct

SEQ ID NO: 235212 - DNA, 25 bp, Artificial sequence
  SiRNA target sequence
gttttcaatgaatggacaagttctg

SEQ ID NO: 235213 - DNA, 25 bp, Artificial sequence
  SiRNA target sequence
ttttcaatgaatggacaagttctgc

SEQ ID NO: 235214 - DNA, 25 bp, Artificial sequence
  SiRNA target sequence
tttcaatgaatggacaagttctgct

SEQ ID NO: 235215 - DNA, 25 bp, Artificial sequence
  SiRNA target sequence
ttcaatgaatggacaagttctgcta

SEQ ID NO: 235216 - DNA, 25 bp, Artificial sequence
  SiRNA target sequence
tcaatgaatggacaagttctgctat

SEQ ID NO: 235217 - DNA, 25 bp, Artificial sequence
  SiRNA target sequence
caatgaatggacaagttctgctatc

SEQ ID NO: 235218 - DNA, 25 bp, Artificial sequence
  SiRNA target sequence
aatgaatggacaagttctgctatct

SEQ ID NO: 235219 - DNA, 25 bp, Artificial sequence
  SiRNA target sequence
atgaatggacaagttctgctatcta

SEQ ID NO: 235220 - DNA, 25 bp, Artificial sequence
  SiRNA target sequence
tgaatggacaagttctgctatctat

SEQ ID NO: 235221 - DNA, 25 bp, Artificial sequence
  SiRNA target sequence
gaatggacaagttctgctatctatg

SEQ ID NO: 235222 - DNA, 25 bp, Artificial sequence
  SiRNA target sequence
aatggacaagttctgctatctatgt

SEQ ID NO: 235223 - DNA, 25 bp, Artificial sequence
  SiRNA target sequence
atggacaagttctgctatctatgtt

SEQ ID NO: 235224 - DNA, 25 bp, Artificial sequence
  SiRNA target sequence
tggacaagttctgctatctatgttt

SEQ ID NO: 235225 - DNA, 25 bp, Artificial sequence
  SiRNA target sequence
ggacaagttctgctatctatgtttt

SEQ ID NO: 235226 - DNA, 25 bp, Artificial sequence
  SiRNA target sequence
gacaagttctgctatctatgtttta

SEQ ID NO: 235227 - DNA, 25 bp, Artificial sequence
  SiRNA target sequence
acaagttctgctatctatgttttat

SEQ ID NO: 235228 - DNA, 25 bp, Artificial sequence
  SiRNA target sequence
caagttctgctatctatgttttatc

SEQ ID NO: 235229 - DNA, 25 bp, Artificial sequence
  SiRNA target sequence
aagttctgctatctatgttttatct

SEQ ID NO: 235230 - DNA, 25 bp, Artificial sequence
  SiRNA target sequence
agttctgctatctatgttttatctg

SEQ ID NO: 235231 - DNA, 25 bp, Artificial sequence
  SiRNA target sequence
gttctgctatctatgttttatctga

SEQ ID NO: 235232 - DNA, 25 bp, Artificial sequence
  SiRNA target sequence
ttctgctatctatgttttatctgaa

SEQ ID NO: 235233 - DNA, 25 bp, Artificial sequence
  SiRNA target sequence
tctgctatctatgttttatctgaaa

SEQ ID NO: 235234 - DNA, 25 bp, Artificial sequence
  SiRNA target sequence
ctgctatctatgttttatctgaaat

SEQ ID NO: 235235 - DNA, 25 bp, Artificial sequence
  SiRNA target sequence
tgctatctatgttttatctgaaatg

SEQ ID NO: 235236 - DNA, 25 bp, Artificial sequence
  SiRNA target sequence
gctatctatgttttatctgaaatgt

SEQ ID NO: 235237 - DNA, 25 bp, Artificial sequence
  SiRNA target sequence
ctatctatgttttatctgaaatgtt

SEQ ID NO: 235238 - DNA, 25 bp, Artificial sequence
  SiRNA target sequence
tatctatgttttatctgaaatgttt

SEQ ID NO: 235239 - DNA, 25 bp, Artificial sequence
  SiRNA target sequence
atctatgttttatctgaaatgtttg

SEQ ID NO: 235240 - DNA, 25 bp, Artificial sequence
  SiRNA target sequence
tctatgttttatctgaaatgtttgg

SEQ ID NO: 235241 - DNA, 25 bp, Artificial sequence
  SiRNA target sequence
ctatgttttatctgaaatgtttggt

SEQ ID NO: 235242 - DNA, 25 bp, Artificial sequence
  SiRNA target sequence
tatgttttatctgaaatgtttggta

SEQ ID NO: 235243 - DNA, 25 bp, Artificial sequence
  SiRNA target sequence
atgttttatctgaaatgtttggtag

SEQ ID NO: 235244 - DNA, 25 bp, Artificial sequence
  SiRNA target sequence
tgttttatctgaaatgtttggtagt

SEQ ID NO: 235245 - DNA, 25 bp, Artificial sequence
  SiRNA target sequence
gttttatctgaaatgtttggtagtt

SEQ ID NO: 235246 - DNA, 25 bp, Artificial sequence
  SiRNA target sequence
ttttatctgaaatgtttggtagttt

SEQ ID NO: 235247 - DNA, 25 bp, Artificial sequence
  SiRNA target sequence
tttatctgaaatgtttggtagtttg

SEQ ID NO: 235248 - DNA, 25 bp, Artificial sequence
  SiRNA target sequence
ttatctgaaatgtttggtagtttga

SEQ ID NO: 235249 - DNA, 25 bp, Artificial sequence
  SiRNA target sequence
tatctgaaatgtttggtagtttgat

SEQ ID NO: 235250 - DNA, 25 bp, Artificial sequence
  SiRNA target sequence
atctgaaatgtttggtagtttgatt

SEQ ID NO: 235251 - DNA, 25 bp, Artificial sequence
  SiRNA target sequence
tctgaaatgtttggtagtttgattc

SEQ ID NO: 235252 - DNA, 25 bp, Artificial sequence
  SiRNA target sequence
ctgaaatgtttggtagtttgattct

SEQ ID NO: 235253 - DNA, 25 bp, Artificial sequence
  SiRNA target sequence
tgaaatgtttggtagtttgattctt

SEQ ID NO: 235254 - DNA, 25 bp, Artificial sequence
  SiRNA target sequence
gaaatgtttggtagtttgattcttt

SEQ ID NO: 235255 - DNA, 25 bp, Artificial sequence
  SiRNA target sequence
aaatgtttggtagtttgattctttc

SEQ ID NO: 235256 - DNA, 25 bp, Artificial sequence
  SiRNA target sequence
aatgtttggtagtttgattctttca

SEQ ID NO: 235257 - DNA, 25 bp, Artificial sequence
  SiRNA target sequence
atgtttggtagtttgattctttcat

SEQ ID NO: 235258 - DNA, 25 bp, Artificial sequence
  SiRNA target sequence
tgtttggtagtttgattctttcata

SEQ ID NO: 235259 - DNA, 25 bp, Artificial sequence
  SiRNA target sequence
gtttggtagtttgattctttcatat

SEQ ID NO: 235260 - DNA, 25 bp, Artificial sequence
  SiRNA target sequence
tttggtagtttgattctttcatatt

SEQ ID NO: 235261 - DNA, 25 bp, Artificial sequence
  SiRNA target sequence
ttggtagtttgattctttcatattt

SEQ ID NO: 235262 - DNA, 25 bp, Artificial sequence
  SiRNA target sequence
tggtagtttgattctttcatattta

SEQ ID NO: 235263 - DNA, 25 bp, Artificial sequence
  SiRNA target sequence
ggtagtttgattctttcatatttat

SEQ ID NO: 235264 - DNA, 25 bp, Artificial sequence
  SiRNA target sequence
gtagtttgattctttcatatttatt

SEQ ID NO: 235265 - DNA, 25 bp, Artificial sequence
  SiRNA target sequence
tagtttgattctttcatatttattt

SEQ ID NO: 235266 - DNA, 25 bp, Artificial sequence
  SiRNA target sequence
agtttgattctttcatatttattta

SEQ ID NO: 235267 - DNA, 25 bp, Artificial sequence
  SiRNA target sequence
gtttgattctttcatatttatttat

SEQ ID NO: 235268 - DNA, 25 bp, Artificial sequence
  SiRNA target sequence
tttgattctttcatatttatttatg

SEQ ID NO: 235269 - DNA, 25 bp, Artificial sequence
  SiRNA target sequence
ttgattctttcatatttatttatga

SEQ ID NO: 235270 - DNA, 25 bp, Artificial sequence
  SiRNA target sequence
tgattctttcatatttatttatgac

SEQ ID NO: 235271 - DNA, 25 bp, Artificial sequence
  SiRNA target sequence
gattctttcatatttatttatgacg

SEQ ID NO: 235272 - DNA, 25 bp, Artificial sequence
  SiRNA target sequence
attctttcatatttatttatgacgt

SEQ ID NO: 235273 - DNA, 25 bp, Artificial sequence
  SiRNA target sequence
ttctttcatatttatttatgacgtt

SEQ ID NO: 235274 - DNA, 25 bp, Artificial sequence
  SiRNA target sequence
tctttcatatttatttatgacgttt

SEQ ID NO: 235275 - DNA, 25 bp, Artificial sequence
  SiRNA target sequence
ctttcatatttatttatgacgtttg

SEQ ID NO: 235276 - DNA, 25 bp, Artificial sequence
  SiRNA target sequence
tttcatatttatttatgacgtttgc

SEQ ID NO: 235277 - DNA, 25 bp, Artificial sequence
  SiRNA target sequence
ttcatatttatttatgacgtttgct

SEQ ID NO: 235278 - DNA, 25 bp, Artificial sequence
  SiRNA target sequence
tcatatttatttatgacgtttgcta

SEQ ID NO: 235279 - DNA, 25 bp, Artificial sequence
  SiRNA target sequence
catatttatttatgacgtttgctaa

SEQ ID NO: 235280 - DNA, 25 bp, Artificial sequence
  SiRNA target sequence
atatttatttatgacgtttgctaat

SEQ ID NO: 235281 - DNA, 25 bp, Artificial sequence
  SiRNA target sequence
tatttatttatgacgtttgctaatg

SEQ ID NO: 235282 - DNA, 25 bp, Artificial sequence
  SiRNA target sequence
atttatttatgacgtttgctaatgg

SEQ ID NO: 235283 - DNA, 25 bp, Artificial sequence
  SiRNA target sequence
tttatttatgacgtttgctaatggt

SEQ ID NO: 235284 - DNA, 25 bp, Artificial sequence
  SiRNA target sequence
ttatttatgacgtttgctaatggtc

SEQ ID NO: 235285 - DNA, 25 bp, Artificial sequence
  SiRNA target sequence
tatttatgacgtttgctaatggtct

SEQ ID NO: 235286 - DNA, 25 bp, Artificial sequence
  SiRNA target sequence
atttatgacgtttgctaatggtctt

SEQ ID NO: 235287 - DNA, 25 bp, Artificial sequence
  SiRNA target sequence
tttatgacgtttgctaatggtcttt

SEQ ID NO: 235288 - DNA, 25 bp, Artificial sequence
  SiRNA target sequence
ttatgacgtttgctaatggtctttc

SEQ ID NO: 235289 - DNA, 25 bp, Artificial sequence
  SiRNA target sequence
tatgacgtttgctaatggtctttcg

SEQ ID NO: 235290 - DNA, 25 bp, Artificial sequence
  SiRNA target sequence
atgacgtttgctaatggtctttcga

SEQ ID NO: 235291 - DNA, 25 bp, Artificial sequence
  SiRNA target sequence
tgacgtttgctaatggtctttcgac

SEQ ID NO: 235292 - DNA, 25 bp, Artificial sequence
  SiRNA target sequence
gacgtttgctaatggtctttcgact

SEQ ID NO: 235293 - DNA, 25 bp, Artificial sequence
  SiRNA target sequence
acgtttgctaatggtctttcgactc

SEQ ID NO: 235294 - DNA, 25 bp, Artificial sequence
  SiRNA target sequence
cgtttgctaatggtctttcgactcc

SEQ ID NO: 235295 - DNA, 25 bp, Artificial sequence
  SiRNA target sequence
gtttgctaatggtctttcgactcct

SEQ ID NO: 235296 - DNA, 25 bp, Artificial sequence
  SiRNA target sequence
tttgctaatggtctttcgactcctg

SEQ ID NO: 235297 - DNA, 25 bp, Artificial sequence
  SiRNA target sequence
ttgctaatggtctttcgactcctgg

SEQ ID NO: 235298 - DNA, 25 bp, Artificial sequence
  SiRNA target sequence
tgctaatggtctttcgactcctgga

SEQ ID NO: 235299 - DNA, 25 bp, Artificial sequence
  SiRNA target sequence
gctaatggtctttcgactcctggac

SEQ ID NO: 235300 - DNA, 25 bp, Artificial sequence
  SiRNA target sequence
ctaatggtctttcgactcctggaca

SEQ ID NO: 235301 - DNA, 25 bp, Artificial sequence
  SiRNA target sequence
taatggtctttcgactcctggacag

SEQ ID NO: 235302 - DNA, 25 bp, Artificial sequence
  SiRNA target sequence
aatggtctttcgactcctggacagt

SEQ ID NO: 235303 - DNA, 25 bp, Artificial sequence
  SiRNA target sequence
atggtctttcgactcctggacagtc

SEQ ID NO: 235304 - DNA, 25 bp, Artificial sequence
  SiRNA target sequence
tggtctttcgactcctggacagtcc

SEQ ID NO: 235305 - DNA, 25 bp, Artificial sequence
  SiRNA target sequence
ggtctttcgactcctggacagtccg

SEQ ID NO: 235306 - DNA, 25 bp, Artificial sequence
  SiRNA target sequence
gtctttcgactcctggacagtccgc

SEQ ID NO: 235307 - DNA, 25 bp, Artificial sequence
  SiRNA target sequence
tctttcgactcctggacagtccgct

SEQ ID NO: 235308 - DNA, 25 bp, Artificial sequence
  SiRNA target sequence
ctttcgactcctggacagtccgcta

SEQ ID NO: 235309 - DNA, 25 bp, Artificial sequence
  SiRNA target sequence
tttcgactcctggacagtccgctag

SEQ ID NO: 235310 - DNA, 25 bp, Artificial sequence
  SiRNA target sequence
ttcgactcctggacagtccgctaga

SEQ ID NO: 235311 - DNA, 25 bp, Artificial sequence
  SiRNA target sequence
tcgactcctggacagtccgctagat

SEQ ID NO: 235312 - DNA, 25 bp, Artificial sequence
  SiRNA target sequence
cgactcctggacagtccgctagatt

SEQ ID NO: 235313 - DNA, 25 bp, Artificial sequence
  SiRNA target sequence
gactcctggacagtccgctagattt

SEQ ID NO: 235314 - DNA, 25 bp, Artificial sequence
  SiRNA target sequence
actcctggacagtccgctagatttg

SEQ ID NO: 235315 - DNA, 25 bp, Artificial sequence
  SiRNA target sequence
ctcctggacagtccgctagatttgt

SEQ ID NO: 235316 - DNA, 25 bp, Artificial sequence
  SiRNA target sequence
tcctggacagtccgctagatttgtc

SEQ ID NO: 235317 - DNA, 25 bp, Artificial sequence
  SiRNA target sequence
cctggacagtccgctagatttgtcc

SEQ ID NO: 235318 - DNA, 25 bp, Artificial sequence
  SiRNA target sequence
ctggacagtccgctagatttgtccc

SEQ ID NO: 235319 - DNA, 25 bp, Artificial sequence
  SiRNA target sequence
tggacagtccgctagatttgtccct

SEQ ID NO: 235320 - DNA, 25 bp, Artificial sequence
  SiRNA target sequence
ggacagtccgctagatttgtccctt

SEQ ID NO: 235321 - DNA, 25 bp, Artificial sequence
  SiRNA target sequence
gacagtccgctagatttgtcccttt

SEQ ID NO: 235322 - DNA, 25 bp, Artificial sequence
  SiRNA target sequence
acagtccgctagatttgtcccttta

SEQ ID NO: 235323 - DNA, 25 bp, Artificial sequence
  SiRNA target sequence
cagtccgctagatttgtccctttat

SEQ ID NO: 235324 - DNA, 25 bp, Artificial sequence
  SiRNA target sequence
agtccgctagatttgtccctttatt

SEQ ID NO: 235325 - DNA, 25 bp, Artificial sequence
  SiRNA target sequence
gtccgctagatttgtccctttattt

SEQ ID NO: 235326 - DNA, 25 bp, Artificial sequence
  SiRNA target sequence
tccgctagatttgtccctttatttt

SEQ ID NO: 235327 - DNA, 25 bp, Artificial sequence
  SiRNA target sequence
ccgctagatttgtccctttatttta

SEQ ID NO: 235328 - DNA, 25 bp, Artificial sequence
  SiRNA target sequence
cgctagatttgtccctttattttat

SEQ ID NO: 235329 - DNA, 25 bp, Artificial sequence
  SiRNA target sequence
gctagatttgtccctttattttatg

SEQ ID NO: 235330 - DNA, 25 bp, Artificial sequence
  SiRNA target sequence
ctagatttgtccctttattttatgt

SEQ ID NO: 235331 - DNA, 25 bp, Artificial sequence
  SiRNA target sequence
tagatttgtccctttattttatgtt

SEQ ID NO: 235332 - DNA, 25 bp, Artificial sequence
  SiRNA target sequence
agatttgtccctttattttatgttg

SEQ ID NO: 235333 - DNA, 25 bp, Artificial sequence
  SiRNA target sequence
gatttgtccctttattttatgttgg

SEQ ID NO: 235334 - DNA, 25 bp, Artificial sequence
  SiRNA target sequence
atttgtccctttattttatgttgga

SEQ ID NO: 235335 - DNA, 25 bp, Artificial sequence
  SiRNA target sequence
tttgtccctttattttatgttggat

SEQ ID NO: 235336 - DNA, 25 bp, Artificial sequence
  SiRNA target sequence
ttgtccctttattttatgttggatc

SEQ ID NO: 235337 - DNA, 25 bp, Artificial sequence
  SiRNA target sequence
tgtccctttattttatgttggatct

SEQ ID NO: 235338 - DNA, 25 bp, Artificial sequence
  SiRNA target sequence
gtccctttattttatgttggatcta

SEQ ID NO: 235339 - DNA, 25 bp, Artificial sequence
  SiRNA target sequence
tccctttattttatgttggatctaa

SEQ ID NO: 235340 - DNA, 25 bp, Artificial sequence
  SiRNA target sequence
ccctttattttatgttggatctaat

SEQ ID NO: 235341 - DNA, 25 bp, Artificial sequence
  SiRNA target sequence
cctttattttatgttggatctaatt

SEQ ID NO: 235342 - DNA, 25 bp, Artificial sequence
  SiRNA target sequence
ctttattttatgttggatctaattt

SEQ ID NO: 235343 - DNA, 25 bp, Artificial sequence
  SiRNA target sequence
tttattttatgttggatctaatttg

SEQ ID NO: 235344 - DNA, 25 bp, Artificial sequence
  SiRNA target sequence
ttattttatgttggatctaatttgg

SEQ ID NO: 235345 - DNA, 25 bp, Artificial sequence
  SiRNA target sequence
tattttatgttggatctaatttggc

SEQ ID NO: 235346 - DNA, 25 bp, Artificial sequence
  SiRNA target sequence
attttatgttggatctaatttggct

SEQ ID NO: 235347 - DNA, 25 bp, Artificial sequence
  SiRNA target sequence
ttttatgttggatctaatttggctt

SEQ ID NO: 235348 - DNA, 25 bp, Artificial sequence
  SiRNA target sequence
tttatgttggatctaatttggcttt

SEQ ID NO: 235349 - DNA, 25 bp, Artificial sequence
  SiRNA target sequence
ttatgttggatctaatttggcttta

SEQ ID NO: 235350 - DNA, 25 bp, Artificial sequence
  SiRNA target sequence
tatgttggatctaatttggctttac

SEQ ID NO: 235351 - DNA, 25 bp, Artificial sequence
  SiRNA target sequence
atgttggatctaatttggctttact

SEQ ID NO: 235352 - DNA, 25 bp, Artificial sequence
  SiRNA target sequence
tgttggatctaatttggctttactt

SEQ ID NO: 235353 - DNA, 25 bp, Artificial sequence
  SiRNA target sequence
gttggatctaatttggctttacttc

SEQ ID NO: 235354 - DNA, 25 bp, Artificial sequence
  SiRNA target sequence
ttggatctaatttggctttacttct

SEQ ID NO: 235355 - DNA, 25 bp, Artificial sequence
  SiRNA target sequence
tggatctaatttggctttacttctt

SEQ ID NO: 235356 - DNA, 25 bp, Artificial sequence
  SiRNA target sequence
ggatctaatttggctttacttcttt

SEQ ID NO: 235357 - DNA, 25 bp, Artificial sequence
  SiRNA target sequence
gatctaatttggctttacttctttc

SEQ ID NO: 235358 - DNA, 25 bp, Artificial sequence
  SiRNA target sequence
atctaatttggctttacttctttca

SEQ ID NO: 235359 - DNA, 25 bp, Artificial sequence
  SiRNA target sequence
tctaatttggctttacttctttcag

SEQ ID NO: 235360 - DNA, 25 bp, Artificial sequence
  SiRNA target sequence
ctaatttggctttacttctttcagg

SEQ ID NO: 235361 - DNA, 25 bp, Artificial sequence
  SiRNA target sequence
taatttggctttacttctttcagga

SEQ ID NO: 235362 - DNA, 25 bp, Artificial sequence
  SiRNA target sequence
aatttggctttacttctttcaggaa

SEQ ID NO: 235363 - DNA, 25 bp, Artificial sequence
  SiRNA target sequence
atttggctttacttctttcaggaat

SEQ ID NO: 235364 - DNA, 25 bp, Artificial sequence
  SiRNA target sequence
tttggctttacttctttcaggaatg

SEQ ID NO: 235365 - DNA, 25 bp, Artificial sequence
  SiRNA target sequence
ttggctttacttctttcaggaatga

SEQ ID NO: 235366 - DNA, 25 bp, Artificial sequence
  SiRNA target sequence
tggctttacttctttcaggaatgat

SEQ ID NO: 235367 - DNA, 25 bp, Artificial sequence
  SiRNA target sequence
ggctttacttctttcaggaatgata

SEQ ID NO: 235368 - DNA, 25 bp, Artificial sequence
  SiRNA target sequence
gctttacttctttcaggaatgataa

SEQ ID NO: 235369 - DNA, 25 bp, Artificial sequence
  SiRNA target sequence
ctttacttctttcaggaatgataaa

SEQ ID NO: 235370 - DNA, 25 bp, Artificial sequence
  SiRNA target sequence
tttacttctttcaggaatgataaat

SEQ ID NO: 235371 - DNA, 25 bp, Artificial sequence
  SiRNA target sequence
ttacttctttcaggaatgataaatt

SEQ ID NO: 235372 - DNA, 25 bp, Artificial sequence
  SiRNA target sequence
tacttctttcaggaatgataaatta

SEQ ID NO: 235373 - DNA, 25 bp, Artificial sequence
  SiRNA target sequence
acttctttcaggaatgataaattac

SEQ ID NO: 235374 - DNA, 25 bp, Artificial sequence
  SiRNA target sequence
cttctttcaggaatgataaattact

SEQ ID NO: 235375 - DNA, 25 bp, Artificial sequence
  SiRNA target sequence
ttctttcaggaatgataaattactt

SEQ ID NO: 235376 - DNA, 25 bp, Artificial sequence
  SiRNA target sequence
tctttcaggaatgataaattacttt

SEQ ID NO: 235377 - DNA, 25 bp, Artificial sequence
  SiRNA target sequence
ctttcaggaatgataaattactttt

SEQ ID NO: 235378 - DNA, 25 bp, Artificial sequence
  SiRNA target sequence
tttcaggaatgataaattactttta

SEQ ID NO: 235379 - DNA, 25 bp, Artificial sequence
  SiRNA target sequence
ttcaggaatgataaattacttttat

SEQ ID NO: 235380 - DNA, 25 bp, Artificial sequence
  SiRNA target sequence
tcaggaatgataaattacttttata

SEQ ID NO: 235381 - DNA, 25 bp, Artificial sequence
  SiRNA target sequence
caggaatgataaattacttttatag

SEQ ID NO: 235382 - DNA, 25 bp, Artificial sequence
  SiRNA target sequence
aggaatgataaattacttttatagt

SEQ ID NO: 235383 - DNA, 25 bp, Artificial sequence
  SiRNA target sequence
ggaatgataaattacttttatagtg

SEQ ID NO: 235384 - DNA, 25 bp, Artificial sequence
  SiRNA target sequence
gaatgataaattacttttatagtgt

SEQ ID NO: 235385 - DNA, 25 bp, Artificial sequence
  SiRNA target sequence
aatgataaattacttttatagtgta

SEQ ID NO: 235386 - DNA, 25 bp, Artificial sequence
  SiRNA target sequence
atgataaattacttttatagtgtaa

SEQ ID NO: 235387 - DNA, 25 bp, Artificial sequence
  SiRNA target sequence
tgataaattacttttatagtgtaag

SEQ ID NO: 235388 - DNA, 25 bp, Artificial sequence
  SiRNA target sequence
gataaattacttttatagtgtaagt

SEQ ID NO: 235389 - DNA, 25 bp, Artificial sequence
  SiRNA target sequence
ataaattacttttatagtgtaagta

SEQ ID NO: 235390 - DNA, 25 bp, Artificial sequence
  SiRNA target sequence
taaattacttttatagtgtaagtaa

SEQ ID NO: 235391 - DNA, 25 bp, Artificial sequence
  SiRNA target sequence
aaattacttttatagtgtaagtaaa

SEQ ID NO: 235392 - DNA, 25 bp, Artificial sequence
  SiRNA target sequence
aattacttttatagtgtaagtaaat

SEQ ID NO: 235393 - DNA, 25 bp, Artificial sequence
  SiRNA target sequence
attacttttatagtgtaagtaaatc

SEQ ID NO: 235394 - DNA, 25 bp, Artificial sequence
  SiRNA target sequence
ttacttttatagtgtaagtaaatct

SEQ ID NO: 235395 - DNA, 25 bp, Artificial sequence
  SiRNA target sequence
tacttttatagtgtaagtaaatcta

SEQ ID NO: 235396 - DNA, 25 bp, Artificial sequence
  SiRNA target sequence
acttttatagtgtaagtaaatctaa

SEQ ID NO: 235397 - DNA, 25 bp, Artificial sequence
  SiRNA target sequence
cttttatagtgtaagtaaatctaaa

SEQ ID NO: 235398 - DNA, 25 bp, Artificial sequence
  SiRNA target sequence
ttttatagtgtaagtaaatctaaaa

SEQ ID NO: 235399 - DNA, 25 bp, Artificial sequence
  SiRNA target sequence
tttatagtgtaagtaaatctaaaat

SEQ ID NO: 235400 - DNA, 25 bp, Artificial sequence
  SiRNA target sequence
ttatagtgtaagtaaatctaaaatg

SEQ ID NO: 235401 - DNA, 25 bp, Artificial sequence
  SiRNA target sequence
tatagtgtaagtaaatctaaaatgt

SEQ ID NO: 235402 - DNA, 25 bp, Artificial sequence
  SiRNA target sequence
atagtgtaagtaaatctaaaatgtc

SEQ ID NO: 235403 - DNA, 25 bp, Artificial sequence
  SiRNA target sequence
tagtgtaagtaaatctaaaatgtcg

SEQ ID NO: 235404 - DNA, 25 bp, Artificial sequence
  SiRNA target sequence
agtgtaagtaaatctaaaatgtcgt

SEQ ID NO: 235405 - DNA, 25 bp, Artificial sequence
  SiRNA target sequence
gtgtaagtaaatctaaaatgtcgta

SEQ ID NO: 235406 - DNA, 25 bp, Artificial sequence
  SiRNA target sequence
tgtaagtaaatctaaaatgtcgtat

SEQ ID NO: 235407 - DNA, 25 bp, Artificial sequence
  SiRNA target sequence
gtaagtaaatctaaaatgtcgtatg

SEQ ID NO: 235408 - DNA, 25 bp, Artificial sequence
  SiRNA target sequence
taagtaaatctaaaatgtcgtatgt

SEQ ID NO: 235409 - DNA, 25 bp, Artificial sequence
  SiRNA target sequence
aagtaaatctaaaatgtcgtatgtt

SEQ ID NO: 235410 - DNA, 25 bp, Artificial sequence
  SiRNA target sequence
agtaaatctaaaatgtcgtatgttg

SEQ ID NO: 235411 - DNA, 25 bp, Artificial sequence
  SiRNA target sequence
gtaaatctaaaatgtcgtatgttgc

SEQ ID NO: 235412 - DNA, 25 bp, Artificial sequence
  SiRNA target sequence
taaatctaaaatgtcgtatgttgcg

SEQ ID NO: 235413 - DNA, 25 bp, Artificial sequence
  SiRNA target sequence
aaatctaaaatgtcgtatgttgcgg

SEQ ID NO: 235414 - DNA, 25 bp, Artificial sequence
  SiRNA target sequence
aatctaaaatgtcgtatgttgcggc

SEQ ID NO: 235415 - DNA, 25 bp, Artificial sequence
  SiRNA target sequence
atctaaaatgtcgtatgttgcggcc

SEQ ID NO: 235416 - DNA, 25 bp, Artificial sequence
  SiRNA target sequence
tctaaaatgtcgtatgttgcggccg

SEQ ID NO: 235417 - DNA, 25 bp, Artificial sequence
  SiRNA target sequence
ctaaaatgtcgtatgttgcggccga

SEQ ID NO: 235418 - DNA, 25 bp, Artificial sequence
  SiRNA target sequence
taaaatgtcgtatgttgcggccgaa

SEQ ID NO: 235419 - DNA, 25 bp, Artificial sequence
  SiRNA target sequence
aaaatgtcgtatgttgcggccgaaa

SEQ ID NO: 235420 - DNA, 25 bp, Artificial sequence
  SiRNA target sequence
aaatgtcgtatgttgcggccgaaag

SEQ ID NO: 235421 - DNA, 25 bp, Artificial sequence
  SiRNA target sequence
aatgtcgtatgttgcggccgaaaga

SEQ ID NO: 235422 - DNA, 25 bp, Artificial sequence
  SiRNA target sequence
atgtcgtatgttgcggccgaaagat

SEQ ID NO: 235423 - DNA, 25 bp, Artificial sequence
  SiRNA target sequence
tgtcgtatgttgcggccgaaagatt

SEQ ID NO: 235424 - DNA, 25 bp, Artificial sequence
  SiRNA target sequence
gtcgtatgttgcggccgaaagattt

SEQ ID NO: 235425 - DNA, 25 bp, Artificial sequence
  SiRNA target sequence
tcgtatgttgcggccgaaagatttt

SEQ ID NO: 235426 - DNA, 25 bp, Artificial sequence
  SiRNA target sequence
cgtatgttgcggccgaaagattttt

SEQ ID NO: 235427 - DNA, 25 bp, Artificial sequence
  SiRNA target sequence
gtatgttgcggccgaaagatttttt

SEQ ID NO: 235428 - DNA, 25 bp, Artificial sequence
  SiRNA target sequence
tatgttgcggccgaaagatttttta

SEQ ID NO: 235429 - DNA, 25 bp, Artificial sequence
  SiRNA target sequence
atgttgcggccgaaagattttttaa

SEQ ID NO: 235430 - DNA, 25 bp, Artificial sequence
  SiRNA target sequence
tgttgcggccgaaagattttttaat

SEQ ID NO: 235431 - DNA, 25 bp, Artificial sequence
  SiRNA target sequence
gttgcggccgaaagattttttaatg

SEQ ID NO: 235432 - DNA, 25 bp, Artificial sequence
  SiRNA target sequence
ttgcggccgaaagattttttaatgg

SEQ ID NO: 235433 - DNA, 25 bp, Artificial sequence
  SiRNA target sequence
tgcggccgaaagattttttaatgga

SEQ ID NO: 235434 - DNA, 25 bp, Artificial sequence
  SiRNA target sequence
gcggccgaaagattttttaatggat

SEQ ID NO: 235435 - DNA, 25 bp, Artificial sequence
  SiRNA target sequence
cggccgaaagattttttaatggatt

SEQ ID NO: 235436 - DNA, 25 bp, Artificial sequence
  SiRNA target sequence
ggccgaaagattttttaatggattt

SEQ ID NO: 235437 - DNA, 25 bp, Artificial sequence
  SiRNA target sequence
gccgaaagattttttaatggatttt

SEQ ID NO: 235438 - DNA, 25 bp, Artificial sequence
  SiRNA target sequence
ccgaaagattttttaatggattttt

SEQ ID NO: 235439 - DNA, 25 bp, Artificial sequence
  SiRNA target sequence
cgaaagattttttaatggatttttt

SEQ ID NO: 235440 - DNA, 25 bp, Artificial sequence
  SiRNA target sequence
gaaagattttttaatggattttttt

SEQ ID NO: 235441 - DNA, 25 bp, Artificial sequence
  SiRNA target sequence
aaagattttttaatggatttttttg

SEQ ID NO: 235442 - DNA, 25 bp, Artificial sequence
  SiRNA target sequence
aagattttttaatggatttttttgt

SEQ ID NO: 235443 - DNA, 25 bp, Artificial sequence
  SiRNA target sequence
agattttttaatggatttttttgtc

SEQ ID NO: 235444 - DNA, 25 bp, Artificial sequence
  SiRNA target sequence
gattttttaatggatttttttgtct

SEQ ID NO: 235445 - DNA, 25 bp, Artificial sequence
  SiRNA target sequence
attttttaatggatttttttgtctg

SEQ ID NO: 235446 - DNA, 25 bp, Artificial sequence
  SiRNA target sequence
ttttttaatggatttttttgtctga

SEQ ID NO: 235447 - DNA, 25 bp, Artificial sequence
  SiRNA target sequence
tttttaatggatttttttgtctgag

SEQ ID NO: 235448 - DNA, 25 bp, Artificial sequence
  SiRNA target sequence
ttttaatggatttttttgtctgagt

SEQ ID NO: 235449 - DNA, 25 bp, Artificial sequence
  SiRNA target sequence
tttaatggatttttttgtctgagtg

SEQ ID NO: 235450 - DNA, 25 bp, Artificial sequence
  SiRNA target sequence
ttaatggatttttttgtctgagtgg

SEQ ID NO: 235451 - DNA, 25 bp, Artificial sequence
  SiRNA target sequence
taatggatttttttgtctgagtgga

SEQ ID NO: 235452 - DNA, 25 bp, Artificial sequence
  SiRNA target sequence
aatggatttttttgtctgagtggaa

SEQ ID NO: 235453 - DNA, 25 bp, Artificial sequence
  SiRNA target sequence
atggatttttttgtctgagtggaat

SEQ ID NO: 235454 - DNA, 25 bp, Artificial sequence
  SiRNA target sequence
tggatttttttgtctgagtggaatt

SEQ ID NO: 235455 - DNA, 25 bp, Artificial sequence
  SiRNA target sequence
ggatttttttgtctgagtggaattc

SEQ ID NO: 235456 - DNA, 25 bp, Artificial sequence
  SiRNA target sequence
gatttttttgtctgagtggaattct

SEQ ID NO: 235457 - DNA, 25 bp, Artificial sequence
  SiRNA target sequence
atttttttgtctgagtggaattctc

SEQ ID NO: 235458 - DNA, 25 bp, Artificial sequence
  SiRNA target sequence
tttttttgtctgagtggaattctct

SEQ ID NO: 235459 - DNA, 25 bp, Artificial sequence
  SiRNA target sequence
ttttttgtctgagtggaattctctg

SEQ ID NO: 235460 - DNA, 25 bp, Artificial sequence
  SiRNA target sequence
tttttgtctgagtggaattctctgt

SEQ ID NO: 235461 - DNA, 25 bp, Artificial sequence
  SiRNA target sequence
ttttgtctgagtggaattctctgtg

SEQ ID NO: 235462 - DNA, 25 bp, Artificial sequence
  SiRNA target sequence
tttgtctgagtggaattctctgtgc

SEQ ID NO: 235463 - DNA, 25 bp, Artificial sequence
  SiRNA target sequence
ttgtctgagtggaattctctgtgct

SEQ ID NO: 235464 - DNA, 25 bp, Artificial sequence
  SiRNA target sequence
tgtctgagtggaattctctgtgctg

SEQ ID NO: 235465 - DNA, 25 bp, Artificial sequence
  SiRNA target sequence
gtctgagtggaattctctgtgctgt

SEQ ID NO: 235466 - DNA, 25 bp, Artificial sequence
  SiRNA target sequence
tctgagtggaattctctgtgctgta

SEQ ID NO: 235467 - DNA, 25 bp, Artificial sequence
  SiRNA target sequence
ctgagtggaattctctgtgctgtaa

SEQ ID NO: 235468 - DNA, 25 bp, Artificial sequence
  SiRNA target sequence
tgagtggaattctctgtgctgtaat

SEQ ID NO: 235469 - DNA, 25 bp, Artificial sequence
  SiRNA target sequence
gagtggaattctctgtgctgtaatt

SEQ ID NO: 235470 - DNA, 25 bp, Artificial sequence
  SiRNA target sequence
agtggaattctctgtgctgtaattt

SEQ ID NO: 235471 - DNA, 25 bp, Artificial sequence
  SiRNA target sequence
gtggaattctctgtgctgtaattta

SEQ ID NO: 235472 - DNA, 25 bp, Artificial sequence
  SiRNA target sequence
tggaattctctgtgctgtaatttat

SEQ ID NO: 235473 - DNA, 25 bp, Artificial sequence
  SiRNA target sequence
ggaattctctgtgctgtaatttatc

SEQ ID NO: 235474 - DNA, 25 bp, Artificial sequence
  SiRNA target sequence
gaattctctgtgctgtaatttatct

SEQ ID NO: 235475 - DNA, 25 bp, Artificial sequence
  SiRNA target sequence
aattctctgtgctgtaatttatctt

SEQ ID NO: 235476 - DNA, 25 bp, Artificial sequence
  SiRNA target sequence
attctctgtgctgtaatttatcttc

SEQ ID NO: 235477 - DNA, 25 bp, Artificial sequence
  SiRNA target sequence
ttctctgtgctgtaatttatcttct

SEQ ID NO: 235478 - DNA, 25 bp, Artificial sequence
  SiRNA target sequence
tctctgtgctgtaatttatcttcta

SEQ ID NO: 235479 - DNA, 25 bp, Artificial sequence
  SiRNA target sequence
ctctgtgctgtaatttatcttctaa

SEQ ID NO: 235480 - DNA, 25 bp, Artificial sequence
  SiRNA target sequence
tctgtgctgtaatttatcttctaaa

SEQ ID NO: 235481 - DNA, 25 bp, Artificial sequence
  SiRNA target sequence
ctgtgctgtaatttatcttctaaaa

SEQ ID NO: 235482 - DNA, 25 bp, Artificial sequence
  SiRNA target sequence
tgtgctgtaatttatcttctaaaaa

SEQ ID NO: 235483 - DNA, 25 bp, Artificial sequence
  SiRNA target sequence
gtgctgtaatttatcttctaaaaaa

SEQ ID NO: 235484 - DNA, 25 bp, Artificial sequence
  SiRNA target sequence
tgctgtaatttatcttctaaaaaaa

SEQ ID NO: 235485 - DNA, 25 bp, Artificial sequence
  SiRNA target sequence
gctgtaatttatcttctaaaaaaat

SEQ ID NO: 235486 - DNA, 25 bp, Artificial sequence
  SiRNA target sequence
ctgtaatttatcttctaaaaaaata

SEQ ID NO: 235487 - DNA, 25 bp, Artificial sequence
  SiRNA target sequence
tgtaatttatcttctaaaaaaatat

SEQ ID NO: 235488 - DNA, 25 bp, Artificial sequence
  SiRNA target sequence
gtaatttatcttctaaaaaaatatt

SEQ ID NO: 235489 - DNA, 25 bp, Artificial sequence
  SiRNA target sequence
taatttatcttctaaaaaaatattt

SEQ ID NO: 235490 - DNA, 25 bp, Artificial sequence
  SiRNA target sequence
aatttatcttctaaaaaaatattta

SEQ ID NO: 235491 - DNA, 25 bp, Artificial sequence
  SiRNA target sequence
atttatcttctaaaaaaatatttag

SEQ ID NO: 235492 - DNA, 25 bp, Artificial sequence
  SiRNA target sequence
tttatcttctaaaaaaatatttaga

SEQ ID NO: 235493 - DNA, 25 bp, Artificial sequence
  SiRNA target sequence
ttatcttctaaaaaaatatttagaa

SEQ ID NO: 235494 - DNA, 25 bp, Artificial sequence
  SiRNA target sequence
tatcttctaaaaaaatatttagaaa

SEQ ID NO: 235495 - DNA, 25 bp, Artificial sequence
  SiRNA target sequence
atcttctaaaaaaatatttagaaaa

SEQ ID NO: 235496 - DNA, 25 bp, Artificial sequence
  SiRNA target sequence
tcttctaaaaaaatatttagaaaat

SEQ ID NO: 235497 - DNA, 25 bp, Artificial sequence
  SiRNA target sequence
cttctaaaaaaatatttagaaaata

SEQ ID NO: 235498 - DNA, 25 bp, Artificial sequence
  SiRNA target sequence
ttctaaaaaaatatttagaaaataa

SEQ ID NO: 235499 - DNA, 25 bp, Artificial sequence
  SiRNA target sequence
tctaaaaaaatatttagaaaataat

SEQ ID NO: 235500 - DNA, 25 bp, Artificial sequence
  SiRNA target sequence
ctaaaaaaatatttagaaaataatg

SEQ ID NO: 235501 - DNA, 25 bp, Artificial sequence
  SiRNA target sequence
taaaaaaatatttagaaaataatgt

SEQ ID NO: 235502 - DNA, 25 bp, Artificial sequence
  SiRNA target sequence
aaaaaaatatttagaaaataatgtt

SEQ ID NO: 235503 - DNA, 25 bp, Artificial sequence
  SiRNA target sequence
aaaaaatatttagaaaataatgtta

SEQ ID NO: 235504 - DNA, 25 bp, Artificial sequence
  SiRNA target sequence
aaaaatatttagaaaataatgttac

SEQ ID NO: 235505 - DNA, 25 bp, Artificial sequence
  SiRNA target sequence
aaaatatttagaaaataatgttact

SEQ ID NO: 235506 - DNA, 25 bp, Artificial sequence
  SiRNA target sequence
aaatatttagaaaataatgttacta

SEQ ID NO: 235507 - DNA, 25 bp, Artificial sequence
  SiRNA target sequence
aatatttagaaaataatgttactag

SEQ ID NO: 235508 - DNA, 25 bp, Artificial sequence
  SiRNA target sequence
atatttagaaaataatgttactagc

SEQ ID NO: 235509 - DNA, 25 bp, Artificial sequence
  SiRNA target sequence
tatttagaaaataatgttactagca

SEQ ID NO: 235510 - DNA, 25 bp, Artificial sequence
  SiRNA target sequence
atttagaaaataatgttactagcaa

SEQ ID NO: 235511 - DNA, 25 bp, Artificial sequence
  SiRNA target sequence
tttagaaaataatgttactagcaaa

SEQ ID NO: 235512 - DNA, 25 bp, Artificial sequence
  SiRNA target sequence
ttagaaaataatgttactagcaaac

SEQ ID NO: 235513 - DNA, 25 bp, Artificial sequence
  SiRNA target sequence
tagaaaataatgttactagcaaacc

SEQ ID NO: 235514 - DNA, 25 bp, Artificial sequence
  SiRNA target sequence
agaaaataatgttactagcaaacca

SEQ ID NO: 235515 - DNA, 25 bp, Artificial sequence
  SiRNA target sequence
gaaaataatgttactagcaaaccaa

SEQ ID NO: 235516 - DNA, 25 bp, Artificial sequence
  SiRNA target sequence
aaaataatgttactagcaaaccaat

SEQ ID NO: 235517 - DNA, 25 bp, Artificial sequence
  SiRNA target sequence
aaataatgttactagcaaaccaatg

SEQ ID NO: 235518 - DNA, 25 bp, Artificial sequence
  SiRNA target sequence
aataatgttactagcaaaccaatgt

SEQ ID NO: 235519 - DNA, 25 bp, Artificial sequence
  SiRNA target sequence
ataatgttactagcaaaccaatgtt

SEQ ID NO: 235520 - DNA, 25 bp, Artificial sequence
  SiRNA target sequence
taatgttactagcaaaccaatgttt

SEQ ID NO: 235521 - DNA, 25 bp, Artificial sequence
  SiRNA target sequence
aatgttactagcaaaccaatgtttg

SEQ ID NO: 235522 - DNA, 25 bp, Artificial sequence
  SiRNA target sequence
atgttactagcaaaccaatgtttgt

SEQ ID NO: 235523 - DNA, 25 bp, Artificial sequence
  SiRNA target sequence
tgttactagcaaaccaatgtttgtt

SEQ ID NO: 235524 - DNA, 25 bp, Artificial sequence
  SiRNA target sequence
gttactagcaaaccaatgtttgtta

SEQ ID NO: 235525 - DNA, 25 bp, Artificial sequence
  SiRNA target sequence
ttactagcaaaccaatgtttgttag

SEQ ID NO: 235526 - DNA, 25 bp, Artificial sequence
  SiRNA target sequence
tactagcaaaccaatgtttgttaga

SEQ ID NO: 235527 - DNA, 25 bp, Artificial sequence
  SiRNA target sequence
actagcaaaccaatgtttgttagaa

SEQ ID NO: 235528 - DNA, 25 bp, Artificial sequence
  SiRNA target sequence
ctagcaaaccaatgtttgttagaaa

SEQ ID NO: 235529 - DNA, 25 bp, Artificial sequence
  SiRNA target sequence
tagcaaaccaatgtttgttagaaag

SEQ ID NO: 235530 - DNA, 25 bp, Artificial sequence
  SiRNA target sequence
agcaaaccaatgtttgttagaaaga

SEQ ID NO: 235531 - DNA, 25 bp, Artificial sequence
  SiRNA target sequence
gcaaaccaatgtttgttagaaagac

SEQ ID NO: 235532 - DNA, 25 bp, Artificial sequence
  SiRNA target sequence
caaaccaatgtttgttagaaagact

SEQ ID NO: 235533 - DNA, 25 bp, Artificial sequence
  SiRNA target sequence
aaaccaatgtttgttagaaagactt

SEQ ID NO: 235534 - DNA, 25 bp, Artificial sequence
  SiRNA target sequence
aaccaatgtttgttagaaagacttt

SEQ ID NO: 235535 - DNA, 25 bp, Artificial sequence
  SiRNA target sequence
accaatgtttgttagaaagactttt

SEQ ID NO: 235536 - DNA, 25 bp, Artificial sequence
  SiRNA target sequence
ccaatgtttgttagaaagactttta

SEQ ID NO: 235537 - DNA, 25 bp, Artificial sequence
  SiRNA target sequence
caatgtttgttagaaagacttttac

SEQ ID NO: 235538 - DNA, 25 bp, Artificial sequence
  SiRNA target sequence
aatgtttgttagaaagacttttact

SEQ ID NO: 235539 - DNA, 25 bp, Artificial sequence
  SiRNA target sequence
atgtttgttagaaagacttttacta

SEQ ID NO: 235540 - DNA, 25 bp, Artificial sequence
  SiRNA target sequence
tgtttgttagaaagacttttactaa

SEQ ID NO: 235541 - DNA, 25 bp, Artificial sequence
  SiRNA target sequence
gtttgttagaaagacttttactaaa

SEQ ID NO: 235542 - DNA, 25 bp, Artificial sequence
  SiRNA target sequence
tttgttagaaagacttttactaaaa

SEQ ID NO: 235543 - DNA, 25 bp, Artificial sequence
  SiRNA target sequence
ttgttagaaagacttttactaaaaa

SEQ ID NO: 235544 - DNA, 25 bp, Artificial sequence
  SiRNA target sequence
tgttagaaagacttttactaaaaag

SEQ ID NO: 235545 - DNA, 25 bp, Artificial sequence
  SiRNA target sequence
gttagaaagacttttactaaaaaga

SEQ ID NO: 235546 - DNA, 25 bp, Artificial sequence
  SiRNA target sequence
ttagaaagacttttactaaaaagaa

SEQ ID NO: 235547 - DNA, 25 bp, Artificial sequence
  SiRNA target sequence
tagaaagacttttactaaaaagaag

SEQ ID NO: 235548 - DNA, 25 bp, Artificial sequence
  SiRNA target sequence
agaaagacttttactaaaaagaaga

SEQ ID NO: 235549 - DNA, 25 bp, Artificial sequence
  SiRNA target sequence
gaaagacttttactaaaaagaagag

SEQ ID NO: 235550 - DNA, 25 bp, Artificial sequence
  SiRNA target sequence
aaagacttttactaaaaagaagagt

SEQ ID NO: 235551 - DNA, 25 bp, Artificial sequence
  SiRNA target sequence
aagacttttactaaaaagaagagta

SEQ ID NO: 235552 - DNA, 25 bp, Artificial sequence
  SiRNA target sequence
agacttttactaaaaagaagagtaa

SEQ ID NO: 235553 - DNA, 25 bp, Artificial sequence
  SiRNA target sequence
gacttttactaaaaagaagagtaaa

SEQ ID NO: 235554 - DNA, 25 bp, Artificial sequence
  SiRNA target sequence
acttttactaaaaagaagagtaaag

SEQ ID NO: 235555 - DNA, 25 bp, Artificial sequence
  SiRNA target sequence
cttttactaaaaagaagagtaaagt

SEQ ID NO: 235556 - DNA, 25 bp, Artificial sequence
  SiRNA target sequence
ttttactaaaaagaagagtaaagtg

SEQ ID NO: 235557 - DNA, 25 bp, Artificial sequence
  SiRNA target sequence
tttactaaaaagaagagtaaagtga

SEQ ID NO: 235558 - DNA, 25 bp, Artificial sequence
  SiRNA target sequence
ttactaaaaagaagagtaaagtgaa

SEQ ID NO: 235559 - DNA, 25 bp, Artificial sequence
  SiRNA target sequence
tactaaaaagaagagtaaagtgaag

SEQ ID NO: 235560 - DNA, 25 bp, Artificial sequence
  SiRNA target sequence
actaaaaagaagagtaaagtgaagg

SEQ ID NO: 235561 - DNA, 25 bp, Artificial sequence
  SiRNA target sequence
ctaaaaagaagagtaaagtgaaggt

SEQ ID NO: 235562 - DNA, 25 bp, Artificial sequence
  SiRNA target sequence
taaaaagaagagtaaagtgaaggtt

SEQ ID NO: 235563 - DNA, 25 bp, Artificial sequence
  SiRNA target sequence
aaaaagaagagtaaagtgaaggttg

SEQ ID NO: 235564 - DNA, 25 bp, Artificial sequence
  SiRNA target sequence
aaaagaagagtaaagtgaaggttgg

SEQ ID NO: 235565 - DNA, 25 bp, Artificial sequence
  SiRNA target sequence
aaagaagagtaaagtgaaggttgga

SEQ ID NO: 235566 - DNA, 25 bp, Artificial sequence
  SiRNA target sequence
aagaagagtaaagtgaaggttggat

SEQ ID NO: 235567 - DNA, 25 bp, Artificial sequence
  SiRNA target sequence
agaagagtaaagtgaaggttggatt

SEQ ID NO: 235568 - DNA, 25 bp, Artificial sequence
  SiRNA target sequence
gaagagtaaagtgaaggttggattt

SEQ ID NO: 235569 - DNA, 25 bp, Artificial sequence
  SiRNA target sequence
aagagtaaagtgaaggttggatttg

SEQ ID NO: 235570 - DNA, 25 bp, Artificial sequence
  SiRNA target sequence
agagtaaagtgaaggttggatttgt

SEQ ID NO: 235571 - DNA, 25 bp, Artificial sequence
  SiRNA target sequence
gagtaaagtgaaggttggatttgtt

SEQ ID NO: 235572 - DNA, 25 bp, Artificial sequence
  SiRNA target sequence
agtaaagtgaaggttggatttgttg

SEQ ID NO: 235573 - DNA, 25 bp, Artificial sequence
  SiRNA target sequence
gtaaagtgaaggttggatttgttga

SEQ ID NO: 235574 - DNA, 25 bp, Artificial sequence
  SiRNA target sequence
taaagtgaaggttggatttgttgat

SEQ ID NO: 235575 - DNA, 25 bp, Artificial sequence
  SiRNA target sequence
aaagtgaaggttggatttgttgatg

SEQ ID NO: 235576 - DNA, 25 bp, Artificial sequence
  SiRNA target sequence
aagtgaaggttggatttgttgatgg

SEQ ID NO: 235577 - DNA, 25 bp, Artificial sequence
  SiRNA target sequence
agtgaaggttggatttgttgatgga

SEQ ID NO: 235578 - DNA, 25 bp, Artificial sequence
  SiRNA target sequence
gtgaaggttggatttgttgatggac

SEQ ID NO: 235579 - DNA, 25 bp, Artificial sequence
  SiRNA target sequence
tgaaggttggatttgttgatggact

SEQ ID NO: 235580 - DNA, 25 bp, Artificial sequence
  SiRNA target sequence
gaaggttggatttgttgatggactt

SEQ ID NO: 235581 - DNA, 25 bp, Artificial sequence
  SiRNA target sequence
aaggttggatttgttgatggactta

SEQ ID NO: 235582 - DNA, 25 bp, Artificial sequence
  SiRNA target sequence
aggttggatttgttgatggacttat

SEQ ID NO: 235583 - DNA, 25 bp, Artificial sequence
  SiRNA target sequence
ggttggatttgttgatggacttatt

SEQ ID NO: 235584 - DNA, 25 bp, Artificial sequence
  SiRNA target sequence
gttggatttgttgatggacttattg

SEQ ID NO: 235585 - DNA, 25 bp, Artificial sequence
  SiRNA target sequence
ttggatttgttgatggacttattga

SEQ ID NO: 235586 - DNA, 25 bp, Artificial sequence
  SiRNA target sequence
tggatttgttgatggacttattgag

SEQ ID NO: 235587 - DNA, 25 bp, Artificial sequence
  SiRNA target sequence
ggatttgttgatggacttattgaga

SEQ ID NO: 235588 - DNA, 25 bp, Artificial sequence
  SiRNA target sequence
gatttgttgatggacttattgagat

SEQ ID NO: 235589 - DNA, 25 bp, Artificial sequence
  SiRNA target sequence
atttgttgatggacttattgagatg

SEQ ID NO: 235590 - DNA, 25 bp, Artificial sequence
  SiRNA target sequence
tttgttgatggacttattgagatga

SEQ ID NO: 235591 - DNA, 25 bp, Artificial sequence
  SiRNA target sequence
ttgttgatggacttattgagatgag

SEQ ID NO: 235592 - DNA, 25 bp, Artificial sequence
  SiRNA target sequence
tgttgatggacttattgagatgagt

SEQ ID NO: 235593 - DNA, 25 bp, Artificial sequence
  SiRNA target sequence
gttgatggacttattgagatgagta

SEQ ID NO: 235594 - DNA, 25 bp, Artificial sequence
  SiRNA target sequence
ttgatggacttattgagatgagtaa

SEQ ID NO: 235595 - DNA, 25 bp, Artificial sequence
  SiRNA target sequence
tgatggacttattgagatgagtaaa

SEQ ID NO: 235596 - DNA, 25 bp, Artificial sequence
  SiRNA target sequence
gatggacttattgagatgagtaaat

SEQ ID NO: 235597 - DNA, 25 bp, Artificial sequence
  SiRNA target sequence
atggacttattgagatgagtaaatc

SEQ ID NO: 235598 - DNA, 25 bp, Artificial sequence
  SiRNA target sequence
tggacttattgagatgagtaaatct

SEQ ID NO: 235599 - DNA, 25 bp, Artificial sequence
  SiRNA target sequence
ggacttattgagatgagtaaatcta

SEQ ID NO: 235600 - DNA, 25 bp, Artificial sequence
  SiRNA target sequence
gacttattgagatgagtaaatctaa

SEQ ID NO: 235601 - DNA, 25 bp, Artificial sequence
  SiRNA target sequence
acttattgagatgagtaaatctaaa

SEQ ID NO: 235602 - DNA, 25 bp, Artificial sequence
  SiRNA target sequence
cttattgagatgagtaaatctaaac

SEQ ID NO: 235603 - DNA, 25 bp, Artificial sequence
  SiRNA target sequence
ttattgagatgagtaaatctaaact

SEQ ID NO: 235604 - DNA, 25 bp, Artificial sequence
  SiRNA target sequence
tattgagatgagtaaatctaaacta

SEQ ID NO: 235605 - DNA, 25 bp, Artificial sequence
  SiRNA target sequence
attgagatgagtaaatctaaactac

SEQ ID NO: 235606 - DNA, 25 bp, Artificial sequence
  SiRNA target sequence
ttgagatgagtaaatctaaactact

SEQ ID NO: 235607 - DNA, 25 bp, Artificial sequence
  SiRNA target sequence
tgagatgagtaaatctaaactactg

SEQ ID NO: 235608 - DNA, 25 bp, Artificial sequence
  SiRNA target sequence
gagatgagtaaatctaaactactgt

SEQ ID NO: 235609 - DNA, 25 bp, Artificial sequence
  SiRNA target sequence
agatgagtaaatctaaactactgtt

SEQ ID NO: 235610 - DNA, 25 bp, Artificial sequence
  SiRNA target sequence
gatgagtaaatctaaactactgttg

SEQ ID NO: 235611 - DNA, 25 bp, Artificial sequence
  SiRNA target sequence
atgagtaaatctaaactactgttga

SEQ ID NO: 235612 - DNA, 25 bp, Artificial sequence
  SiRNA target sequence
tgagtaaatctaaactactgttgaa

SEQ ID NO: 235613 - DNA, 25 bp, Artificial sequence
  SiRNA target sequence
gagtaaatctaaactactgttgaat

SEQ ID NO: 235614 - DNA, 25 bp, Artificial sequence
  SiRNA target sequence
agtaaatctaaactactgttgaata

SEQ ID NO: 235615 - DNA, 25 bp, Artificial sequence
  SiRNA target sequence
gtaaatctaaactactgttgaatat

SEQ ID NO: 235616 - DNA, 25 bp, Artificial sequence
  SiRNA target sequence
taaatctaaactactgttgaatatg

SEQ ID NO: 235617 - DNA, 25 bp, Artificial sequence
  SiRNA target sequence
aaatctaaactactgttgaatatgt

SEQ ID NO: 235618 - DNA, 25 bp, Artificial sequence
  SiRNA target sequence
aatctaaactactgttgaatatgtc

SEQ ID NO: 235619 - DNA, 25 bp, Artificial sequence
  SiRNA target sequence
atctaaactactgttgaatatgtca

SEQ ID NO: 235620 - DNA, 25 bp, Artificial sequence
  SiRNA target sequence
tctaaactactgttgaatatgtcat

SEQ ID NO: 235621 - DNA, 25 bp, Artificial sequence
  SiRNA target sequence
ctaaactactgttgaatatgtcatt

SEQ ID NO: 235622 - DNA, 25 bp, Artificial sequence
  SiRNA target sequence
taaactactgttgaatatgtcatta

SEQ ID NO: 235623 - DNA, 25 bp, Artificial sequence
  SiRNA target sequence
aaactactgttgaatatgtcattag

SEQ ID NO: 235624 - DNA, 25 bp, Artificial sequence
  SiRNA target sequence
aactactgttgaatatgtcattagt

SEQ ID NO: 235625 - DNA, 25 bp, Artificial sequence
  SiRNA target sequence
actactgttgaatatgtcattagtc

SEQ ID NO: 235626 - DNA, 25 bp, Artificial sequence
  SiRNA target sequence
ctactgttgaatatgtcattagtcg

SEQ ID NO: 235627 - DNA, 25 bp, Artificial sequence
  SiRNA target sequence
tactgttgaatatgtcattagtcgt

SEQ ID NO: 235628 - DNA, 25 bp, Artificial sequence
  SiRNA target sequence
actgttgaatatgtcattagtcgta

SEQ ID NO: 235629 - DNA, 25 bp, Artificial sequence
  SiRNA target sequence
ctgttgaatatgtcattagtcgtat

SEQ ID NO: 235630 - DNA, 25 bp, Artificial sequence
  SiRNA target sequence
tgttgaatatgtcattagtcgtatt

SEQ ID NO: 235631 - DNA, 25 bp, Artificial sequence
  SiRNA target sequence
gttgaatatgtcattagtcgtatta

SEQ ID NO: 235632 - DNA, 25 bp, Artificial sequence
  SiRNA target sequence
ttgaatatgtcattagtcgtattat

SEQ ID NO: 235633 - DNA, 25 bp, Artificial sequence
  SiRNA target sequence
tgaatatgtcattagtcgtattatt

SEQ ID NO: 235634 - DNA, 25 bp, Artificial sequence
  SiRNA target sequence
gaatatgtcattagtcgtattattt

SEQ ID NO: 235635 - DNA, 25 bp, Artificial sequence
  SiRNA target sequence
aatatgtcattagtcgtattatttt

SEQ ID NO: 235636 - DNA, 25 bp, Artificial sequence
  SiRNA target sequence
atatgtcattagtcgtattatttta

SEQ ID NO: 235637 - DNA, 25 bp, Artificial sequence
  SiRNA target sequence
tatgtcattagtcgtattattttat

SEQ ID NO: 235638 - DNA, 25 bp, Artificial sequence
  SiRNA target sequence
atgtcattagtcgtattattttatg

SEQ ID NO: 235639 - DNA, 25 bp, Artificial sequence
  SiRNA target sequence
tgtcattagtcgtattattttatgc

SEQ ID NO: 235640 - DNA, 25 bp, Artificial sequence
  SiRNA target sequence
gtcattagtcgtattattttatgct

SEQ ID NO: 235641 - DNA, 25 bp, Artificial sequence
  SiRNA target sequence
tcattagtcgtattattttatgctg

SEQ ID NO: 235642 - DNA, 25 bp, Artificial sequence
  SiRNA target sequence
cattagtcgtattattttatgctgt

SEQ ID NO: 235643 - DNA, 25 bp, Artificial sequence
  SiRNA target sequence
attagtcgtattattttatgctgtt

SEQ ID NO: 235644 - DNA, 25 bp, Artificial sequence
  SiRNA target sequence
ttagtcgtattattttatgctgttt

SEQ ID NO: 235645 - DNA, 25 bp, Artificial sequence
  SiRNA target sequence
tagtcgtattattttatgctgtttc

SEQ ID NO: 235646 - DNA, 25 bp, Artificial sequence
  SiRNA target sequence
agtcgtattattttatgctgtttct

SEQ ID NO: 235647 - DNA, 25 bp, Artificial sequence
  SiRNA target sequence
gtcgtattattttatgctgtttcta

SEQ ID NO: 235648 - DNA, 25 bp, Artificial sequence
  SiRNA target sequence
tcgtattattttatgctgtttctac

SEQ ID NO: 235649 - DNA, 25 bp, Artificial sequence
  SiRNA target sequence
cgtattattttatgctgtttctacg

SEQ ID NO: 235650 - DNA, 25 bp, Artificial sequence
  SiRNA target sequence
gtattattttatgctgtttctacga

SEQ ID NO: 235651 - DNA, 25 bp, Artificial sequence
  SiRNA target sequence
tattattttatgctgtttctacgaa

SEQ ID NO: 235652 - DNA, 25 bp, Artificial sequence
  SiRNA target sequence
attattttatgctgtttctacgaat

SEQ ID NO: 235653 - DNA, 25 bp, Artificial sequence
  SiRNA target sequence
ttattttatgctgtttctacgaata

SEQ ID NO: 235654 - DNA, 25 bp, Artificial sequence
  SiRNA target sequence
tattttatgctgtttctacgaatat

SEQ ID NO: 235655 - DNA, 25 bp, Artificial sequence
  SiRNA target sequence
attttatgctgtttctacgaatatt

SEQ ID NO: 235656 - DNA, 25 bp, Artificial sequence
  SiRNA target sequence
ttttatgctgtttctacgaatatta

SEQ ID NO: 235657 - DNA, 25 bp, Artificial sequence
  SiRNA target sequence
tttatgctgtttctacgaatattat

SEQ ID NO: 235658 - DNA, 25 bp, Artificial sequence
  SiRNA target sequence
ttatgctgtttctacgaatattatt

SEQ ID NO: 235659 - DNA, 25 bp, Artificial sequence
  SiRNA target sequence
tatgctgtttctacgaatattattg

SEQ ID NO: 235660 - DNA, 25 bp, Artificial sequence
  SiRNA target sequence
atgctgtttctacgaatattattga

SEQ ID NO: 235661 - DNA, 25 bp, Artificial sequence
  SiRNA target sequence
tgctgtttctacgaatattattgag

SEQ ID NO: 235662 - DNA, 25 bp, Artificial sequence
  SiRNA target sequence
gctgtttctacgaatattattgagt

SEQ ID NO: 235663 - DNA, 25 bp, Artificial sequence
  SiRNA target sequence
ctgtttctacgaatattattgagtc

SEQ ID NO: 235664 - DNA, 25 bp, Artificial sequence
  SiRNA target sequence
tgtttctacgaatattattgagtca

SEQ ID NO: 235665 - DNA, 25 bp, Artificial sequence
  SiRNA target sequence
gtttctacgaatattattgagtcag

SEQ ID NO: 235666 - DNA, 25 bp, Artificial sequence
  SiRNA target sequence
tttctacgaatattattgagtcagc

SEQ ID NO: 235667 - DNA, 25 bp, Artificial sequence
  SiRNA target sequence
ttctacgaatattattgagtcagct

SEQ ID NO: 235668 - DNA, 25 bp, Artificial sequence
  SiRNA target sequence
tctacgaatattattgagtcagctt

SEQ ID NO: 235669 - DNA, 25 bp, Artificial sequence
  SiRNA target sequence
ctacgaatattattgagtcagctta

SEQ ID NO: 235670 - DNA, 25 bp, Artificial sequence
  SiRNA target sequence
tacgaatattattgagtcagcttat

SEQ ID NO: 235671 - DNA, 25 bp, Artificial sequence
  SiRNA target sequence
acgaatattattgagtcagcttata

SEQ ID NO: 235672 - DNA, 25 bp, Artificial sequence
  SiRNA target sequence
cgaatattattgagtcagcttataa

SEQ ID NO: 235673 - DNA, 25 bp, Artificial sequence
  SiRNA target sequence
gaatattattgagtcagcttataaa

SEQ ID NO: 235674 - DNA, 25 bp, Artificial sequence
  SiRNA target sequence
aatattattgagtcagcttataaat

SEQ ID NO: 235675 - DNA, 25 bp, Artificial sequence
  SiRNA target sequence
atattattgagtcagcttataaatc

SEQ ID NO: 235676 - DNA, 25 bp, Artificial sequence
  SiRNA target sequence
tattattgagtcagcttataaatct

SEQ ID NO: 235677 - DNA, 25 bp, Artificial sequence
  SiRNA target sequence
attattgagtcagcttataaatctg

SEQ ID NO: 235678 - DNA, 25 bp, Artificial sequence
  SiRNA target sequence
ttattgagtcagcttataaatctgc

SEQ ID NO: 235679 - DNA, 25 bp, Artificial sequence
  SiRNA target sequence
tattgagtcagcttataaatctgct

SEQ ID NO: 235680 - DNA, 25 bp, Artificial sequence
  SiRNA target sequence
attgagtcagcttataaatctgctt

SEQ ID NO: 235681 - DNA, 25 bp, Artificial sequence
  SiRNA target sequence
ttgagtcagcttataaatctgcttt

SEQ ID NO: 235682 - DNA, 25 bp, Artificial sequence
  SiRNA target sequence
tgagtcagcttataaatctgcttta

SEQ ID NO: 235683 - DNA, 25 bp, Artificial sequence
  SiRNA target sequence
gagtcagcttataaatctgctttag

SEQ ID NO: 235684 - DNA, 25 bp, Artificial sequence
  SiRNA target sequence
agtcagcttataaatctgctttagc

SEQ ID NO: 235685 - DNA, 25 bp, Artificial sequence
  SiRNA target sequence
gtcagcttataaatctgctttagct

SEQ ID NO: 235686 - DNA, 25 bp, Artificial sequence
  SiRNA target sequence
tcagcttataaatctgctttagctg

SEQ ID NO: 235687 - DNA, 25 bp, Artificial sequence
  SiRNA target sequence
cagcttataaatctgctttagctgt

SEQ ID NO: 235688 - DNA, 25 bp, Artificial sequence
  SiRNA target sequence
agcttataaatctgctttagctgtc

SEQ ID NO: 235689 - DNA, 25 bp, Artificial sequence
  SiRNA target sequence
gcttataaatctgctttagctgtcg

SEQ ID NO: 235690 - DNA, 25 bp, Artificial sequence
  SiRNA target sequence
cttataaatctgctttagctgtcgg

SEQ ID NO: 235691 - DNA, 25 bp, Artificial sequence
  SiRNA target sequence
ttataaatctgctttagctgtcggt

SEQ ID NO: 235692 - DNA, 25 bp, Artificial sequence
  SiRNA target sequence
tataaatctgctttagctgtcggtg

SEQ ID NO: 235693 - DNA, 25 bp, Artificial sequence
  SiRNA target sequence
ataaatctgctttagctgtcggtgc

SEQ ID NO: 235694 - DNA, 25 bp, Artificial sequence
  SiRNA target sequence
taaatctgctttagctgtcggtgct

SEQ ID NO: 235695 - DNA, 25 bp, Artificial sequence
  SiRNA target sequence
aaatctgctttagctgtcggtgcta

SEQ ID NO: 235696 - DNA, 25 bp, Artificial sequence
  SiRNA target sequence
aatctgctttagctgtcggtgctaa

SEQ ID NO: 235697 - DNA, 25 bp, Artificial sequence
  SiRNA target sequence
atctgctttagctgtcggtgctaat

SEQ ID NO: 235698 - DNA, 25 bp, Artificial sequence
  SiRNA target sequence
tctgctttagctgtcggtgctaatg

SEQ ID NO: 235699 - DNA, 25 bp, Artificial sequence
  SiRNA target sequence
ctgctttagctgtcggtgctaatga

SEQ ID NO: 235700 - DNA, 25 bp, Artificial sequence
  SiRNA target sequence
tgctttagctgtcggtgctaatgaa

SEQ ID NO: 235701 - DNA, 25 bp, Artificial sequence
  SiRNA target sequence
gctttagctgtcggtgctaatgaaa

SEQ ID NO: 235702 - DNA, 25 bp, Artificial sequence
  SiRNA target sequence
ctttagctgtcggtgctaatgaaac

SEQ ID NO: 235703 - DNA, 25 bp, Artificial sequence
  SiRNA target sequence
tttagctgtcggtgctaatgaaact

SEQ ID NO: 235704 - DNA, 25 bp, Artificial sequence
  SiRNA target sequence
ttagctgtcggtgctaatgaaactg

SEQ ID NO: 235705 - DNA, 25 bp, Artificial sequence
  SiRNA target sequence
tagctgtcggtgctaatgaaactgg

SEQ ID NO: 235706 - DNA, 25 bp, Artificial sequence
  SiRNA target sequence
agctgtcggtgctaatgaaactggt

SEQ ID NO: 235707 - DNA, 25 bp, Artificial sequence
  SiRNA target sequence
gctgtcggtgctaatgaaactggtg

SEQ ID NO: 235708 - DNA, 25 bp, Artificial sequence
  SiRNA target sequence
ctgtcggtgctaatgaaactggtga

SEQ ID NO: 235709 - DNA, 25 bp, Artificial sequence
  SiRNA target sequence
tgtcggtgctaatgaaactggtgag

SEQ ID NO: 235710 - DNA, 25 bp, Artificial sequence
  SiRNA target sequence
gtcggtgctaatgaaactggtgagg

SEQ ID NO: 235711 - DNA, 25 bp, Artificial sequence
  SiRNA target sequence
tcggtgctaatgaaactggtgaggc

SEQ ID NO: 235712 - DNA, 25 bp, Artificial sequence
  SiRNA target sequence
cggtgctaatgaaactggtgaggca

SEQ ID NO: 235713 - DNA, 25 bp, Artificial sequence
  SiRNA target sequence
ggtgctaatgaaactggtgaggcaa

SEQ ID NO: 235714 - DNA, 25 bp, Artificial sequence
  SiRNA target sequence
gtgctaatgaaactggtgaggcaaa

SEQ ID NO: 235715 - DNA, 25 bp, Artificial sequence
  SiRNA target sequence
tgctaatgaaactggtgaggcaaaa

SEQ ID NO: 235716 - DNA, 25 bp, Artificial sequence
  SiRNA target sequence
gctaatgaaactggtgaggcaaaat

SEQ ID NO: 235717 - DNA, 25 bp, Artificial sequence
  SiRNA target sequence
ctaatgaaactggtgaggcaaaatc

SEQ ID NO: 235718 - DNA, 25 bp, Artificial sequence
  SiRNA target sequence
taatgaaactggtgaggcaaaatct

SEQ ID NO: 235719 - DNA, 25 bp, Artificial sequence
  SiRNA target sequence
aatgaaactggtgaggcaaaatcta

SEQ ID NO: 235720 - DNA, 25 bp, Artificial sequence
  SiRNA target sequence
atgaaactggtgaggcaaaatctac

SEQ ID NO: 235721 - DNA, 25 bp, Artificial sequence
  SiRNA target sequence
tgaaactggtgaggcaaaatctacc

SEQ ID NO: 235722 - DNA, 25 bp, Artificial sequence
  SiRNA target sequence
gaaactggtgaggcaaaatctacct

SEQ ID NO: 235723 - DNA, 25 bp, Artificial sequence
  SiRNA target sequence
aaactggtgaggcaaaatctaccta

SEQ ID NO: 235724 - DNA, 25 bp, Artificial sequence
  SiRNA target sequence
aactggtgaggcaaaatctacctat

SEQ ID NO: 235725 - DNA, 25 bp, Artificial sequence
  SiRNA target sequence
actggtgaggcaaaatctacctatg

SEQ ID NO: 235726 - DNA, 25 bp, Artificial sequence
  SiRNA target sequence
ctggtgaggcaaaatctacctatgc

SEQ ID NO: 235727 - DNA, 25 bp, Artificial sequence
  SiRNA target sequence
tggtgaggcaaaatctacctatgct

SEQ ID NO: 235728 - DNA, 25 bp, Artificial sequence
  SiRNA target sequence
ggtgaggcaaaatctacctatgctt

SEQ ID NO: 235729 - DNA, 25 bp, Artificial sequence
  SiRNA target sequence
gtgaggcaaaatctacctatgcttc

SEQ ID NO: 235730 - DNA, 25 bp, Artificial sequence
  SiRNA target sequence
tgaggcaaaatctacctatgcttca

SEQ ID NO: 235731 - DNA, 25 bp, Artificial sequence
  SiRNA target sequence
gaggcaaaatctacctatgcttcaa

SEQ ID NO: 235732 - DNA, 25 bp, Artificial sequence
  SiRNA target sequence
aggcaaaatctacctatgcttcaat

SEQ ID NO: 235733 - DNA, 25 bp, Artificial sequence
  SiRNA target sequence
ggcaaaatctacctatgcttcaatt

SEQ ID NO: 235734 - DNA, 25 bp, Artificial sequence
  SiRNA target sequence
gcaaaatctacctatgcttcaattt

SEQ ID NO: 235735 - DNA, 25 bp, Artificial sequence
  SiRNA target sequence
caaaatctacctatgcttcaattta

SEQ ID NO: 235736 - DNA, 25 bp, Artificial sequence
  SiRNA target sequence
aaaatctacctatgcttcaatttat

SEQ ID NO: 235737 - DNA, 25 bp, Artificial sequence
  SiRNA target sequence
aaatctacctatgcttcaatttata

SEQ ID NO: 235738 - DNA, 25 bp, Artificial sequence
  SiRNA target sequence
aatctacctatgcttcaatttatac

SEQ ID NO: 235739 - DNA, 25 bp, Artificial sequence
  SiRNA target sequence
atctacctatgcttcaatttataca

SEQ ID NO: 235740 - DNA, 25 bp, Artificial sequence
  SiRNA target sequence
tctacctatgcttcaatttatacat

SEQ ID NO: 235741 - DNA, 25 bp, Artificial sequence
  SiRNA target sequence
ctacctatgcttcaatttatacatc

SEQ ID NO: 235742 - DNA, 25 bp, Artificial sequence
  SiRNA target sequence
tacctatgcttcaatttatacatca

SEQ ID NO: 235743 - DNA, 25 bp, Artificial sequence
  SiRNA target sequence
acctatgcttcaatttatacatcaa

SEQ ID NO: 235744 - DNA, 25 bp, Artificial sequence
  SiRNA target sequence
cctatgcttcaatttatacatcaat

SEQ ID NO: 235745 - DNA, 25 bp, Artificial sequence
  SiRNA target sequence
ctatgcttcaatttatacatcaatt

SEQ ID NO: 235746 - DNA, 25 bp, Artificial sequence
  SiRNA target sequence
tatgcttcaatttatacatcaattg

SEQ ID NO: 235747 - DNA, 25 bp, Artificial sequence
  SiRNA target sequence
atgcttcaatttatacatcaattga

SEQ ID NO: 235748 - DNA, 25 bp, Artificial sequence
  SiRNA target sequence
tgcttcaatttatacatcaattgaa

SEQ ID NO: 235749 - DNA, 25 bp, Artificial sequence
  SiRNA target sequence
gcttcaatttatacatcaattgaac

SEQ ID NO: 235750 - DNA, 25 bp, Artificial sequence
  SiRNA target sequence
cttcaatttatacatcaattgaaca

SEQ ID NO: 235751 - DNA, 25 bp, Artificial sequence
  SiRNA target sequence
ttcaatttatacatcaattgaacaa

SEQ ID NO: 235752 - DNA, 25 bp, Artificial sequence
  SiRNA target sequence
tcaatttatacatcaattgaacaat

SEQ ID NO: 235753 - DNA, 25 bp, Artificial sequence
  SiRNA target sequence
caatttatacatcaattgaacaatc

SEQ ID NO: 235754 - DNA, 25 bp, Artificial sequence
  SiRNA target sequence
aatttatacatcaattgaacaatct

SEQ ID NO: 235755 - DNA, 25 bp, Artificial sequence
  SiRNA target sequence
atttatacatcaattgaacaatctg

SEQ ID NO: 235756 - DNA, 25 bp, Artificial sequence
  SiRNA target sequence
tttatacatcaattgaacaatctgg

SEQ ID NO: 235757 - DNA, 25 bp, Artificial sequence
  SiRNA target sequence
ttatacatcaattgaacaatctgga

SEQ ID NO: 235758 - DNA, 25 bp, Artificial sequence
  SiRNA target sequence
tatacatcaattgaacaatctggag

SEQ ID NO: 235759 - DNA, 25 bp, Artificial sequence
  SiRNA target sequence
atacatcaattgaacaatctggagt

SEQ ID NO: 235760 - DNA, 25 bp, Artificial sequence
  SiRNA target sequence
tacatcaattgaacaatctggagtt

SEQ ID NO: 235761 - DNA, 25 bp, Artificial sequence
  SiRNA target sequence
acatcaattgaacaatctggagttg

SEQ ID NO: 235762 - DNA, 25 bp, Artificial sequence
  SiRNA target sequence
catcaattgaacaatctggagttgc

SEQ ID NO: 235763 - DNA, 25 bp, Artificial sequence
  SiRNA target sequence
atcaattgaacaatctggagttgct

SEQ ID NO: 235764 - DNA, 25 bp, Artificial sequence
  SiRNA target sequence
tcaattgaacaatctggagttgctg

SEQ ID NO: 235765 - DNA, 25 bp, Artificial sequence
  SiRNA target sequence
caattgaacaatctggagttgctgt

SEQ ID NO: 235766 - DNA, 25 bp, Artificial sequence
  SiRNA target sequence
aattgaacaatctggagttgctgtt

SEQ ID NO: 235767 - DNA, 25 bp, Artificial sequence
  SiRNA target sequence
attgaacaatctggagttgctgtta

SEQ ID NO: 235768 - DNA, 25 bp, Artificial sequence
  SiRNA target sequence
ttgaacaatctggagttgctgttat

SEQ ID NO: 235769 - DNA, 25 bp, Artificial sequence
  SiRNA target sequence
tgaacaatctggagttgctgttatt

SEQ ID NO: 235770 - DNA, 25 bp, Artificial sequence
  SiRNA target sequence
gaacaatctggagttgctgttattg

SEQ ID NO: 235771 - DNA, 25 bp, Artificial sequence
  SiRNA target sequence
aacaatctggagttgctgttattgt

SEQ ID NO: 235772 - DNA, 25 bp, Artificial sequence
  SiRNA target sequence
acaatctggagttgctgttattgtc

SEQ ID NO: 235773 - DNA, 25 bp, Artificial sequence
  SiRNA target sequence
caatctggagttgctgttattgtca

SEQ ID NO: 235774 - DNA, 25 bp, Artificial sequence
  SiRNA target sequence
aatctggagttgctgttattgtcat

SEQ ID NO: 235775 - DNA, 25 bp, Artificial sequence
  SiRNA target sequence
atctggagttgctgttattgtcatg

SEQ ID NO: 235776 - DNA, 25 bp, Artificial sequence
  SiRNA target sequence
tctggagttgctgttattgtcatga

SEQ ID NO: 235777 - DNA, 25 bp, Artificial sequence
  SiRNA target sequence
ctggagttgctgttattgtcatgat

SEQ ID NO: 235778 - DNA, 25 bp, Artificial sequence
  SiRNA target sequence
tggagttgctgttattgtcatgatt

SEQ ID NO: 235779 - DNA, 25 bp, Artificial sequence
  SiRNA target sequence
ggagttgctgttattgtcatgattt

SEQ ID NO: 235780 - DNA, 25 bp, Artificial sequence
  SiRNA target sequence
gagttgctgttattgtcatgatttt

SEQ ID NO: 235781 - DNA, 25 bp, Artificial sequence
  SiRNA target sequence
agttgctgttattgtcatgattttg

SEQ ID NO: 235782 - DNA, 25 bp, Artificial sequence
  SiRNA target sequence
gttgctgttattgtcatgattttgc

SEQ ID NO: 235783 - DNA, 25 bp, Artificial sequence
  SiRNA target sequence
ttgctgttattgtcatgattttgct

SEQ ID NO: 235784 - DNA, 25 bp, Artificial sequence
  SiRNA target sequence
tgctgttattgtcatgattttgcta

SEQ ID NO: 235785 - DNA, 25 bp, Artificial sequence
  SiRNA target sequence
gctgttattgtcatgattttgctac

SEQ ID NO: 235786 - DNA, 25 bp, Artificial sequence
  SiRNA target sequence
ctgttattgtcatgattttgctact

SEQ ID NO: 235787 - DNA, 25 bp, Artificial sequence
  SiRNA target sequence
tgttattgtcatgattttgctactt

SEQ ID NO: 235788 - DNA, 25 bp, Artificial sequence
  SiRNA target sequence
gttattgtcatgattttgctactta

SEQ ID NO: 235789 - DNA, 25 bp, Artificial sequence
  SiRNA target sequence
ttattgtcatgattttgctacttac

SEQ ID NO: 235790 - DNA, 25 bp, Artificial sequence
  SiRNA target sequence
tattgtcatgattttgctacttacc

SEQ ID NO: 235791 - DNA, 25 bp, Artificial sequence
  SiRNA target sequence
attgtcatgattttgctacttaccc

SEQ ID NO: 235792 - DNA, 25 bp, Artificial sequence
  SiRNA target sequence
ttgtcatgattttgctacttacccc

SEQ ID NO: 235793 - DNA, 25 bp, Artificial sequence
  SiRNA target sequence
tgtcatgattttgctacttacccct

SEQ ID NO: 235794 - DNA, 25 bp, Artificial sequence
  SiRNA target sequence
gtcatgattttgctacttacccctt

SEQ ID NO: 235795 - DNA, 25 bp, Artificial sequence
  SiRNA target sequence
tcatgattttgctacttaccccttt

SEQ ID NO: 235796 - DNA, 25 bp, Artificial sequence
  SiRNA target sequence
catgattttgctacttacccctttt

SEQ ID NO: 235797 - DNA, 25 bp, Artificial sequence
  SiRNA target sequence
atgattttgctacttaccccttttc

SEQ ID NO: 235798 - DNA, 25 bp, Artificial sequence
  SiRNA target sequence
tgattttgctacttaccccttttcc

SEQ ID NO: 235799 - DNA, 25 bp, Artificial sequence
  SiRNA target sequence
gattttgctacttaccccttttcca

SEQ ID NO: 235800 - DNA, 25 bp, Artificial sequence
  SiRNA target sequence
attttgctacttaccccttttccaa

SEQ ID NO: 235801 - DNA, 25 bp, Artificial sequence
  SiRNA target sequence
ttttgctacttaccccttttccaag

SEQ ID NO: 235802 - DNA, 25 bp, Artificial sequence
  SiRNA target sequence
tttgctacttaccccttttccaagg

SEQ ID NO: 235803 - DNA, 25 bp, Artificial sequence
  SiRNA target sequence
ttgctacttaccccttttccaaggc

SEQ ID NO: 235804 - DNA, 25 bp, Artificial sequence
  SiRNA target sequence
tgctacttaccccttttccaaggct

SEQ ID NO: 235805 - DNA, 25 bp, Artificial sequence
  SiRNA target sequence
gctacttaccccttttccaaggctt

SEQ ID NO: 235806 - DNA, 25 bp, Artificial sequence
  SiRNA target sequence
ctacttaccccttttccaaggctta

SEQ ID NO: 235807 - DNA, 25 bp, Artificial sequence
  SiRNA target sequence
tacttaccccttttccaaggcttat

SEQ ID NO: 235808 - DNA, 25 bp, Artificial sequence
  SiRNA target sequence
acttaccccttttccaaggcttatt

SEQ ID NO: 235809 - DNA, 25 bp, Artificial sequence
  SiRNA target sequence
cttaccccttttccaaggcttatta

SEQ ID NO: 235810 - DNA, 25 bp, Artificial sequence
  SiRNA target sequence
ttaccccttttccaaggcttattaa

SEQ ID NO: 235811 - DNA, 25 bp, Artificial sequence
  SiRNA target sequence
taccccttttccaaggcttattaaa

SEQ ID NO: 235812 - DNA, 25 bp, Artificial sequence
  SiRNA target sequence
accccttttccaaggcttattaaaa

SEQ ID NO: 235813 - DNA, 25 bp, Artificial sequence
  SiRNA target sequence
ccccttttccaaggcttattaaaac

SEQ ID NO: 235814 - DNA, 25 bp, Artificial sequence
  SiRNA target sequence
cccttttccaaggcttattaaaaca

SEQ ID NO: 235815 - DNA, 25 bp, Artificial sequence
  SiRNA target sequence
ccttttccaaggcttattaaaacaa

SEQ ID NO: 235816 - DNA, 25 bp, Artificial sequence
  SiRNA target sequence
cttttccaaggcttattaaaacaaa

SEQ ID NO: 235817 - DNA, 25 bp, Artificial sequence
  SiRNA target sequence
ttttccaaggcttattaaaacaaaa

SEQ ID NO: 235818 - DNA, 25 bp, Artificial sequence
  SiRNA target sequence
tttccaaggcttattaaaacaaaag

SEQ ID NO: 235819 - DNA, 25 bp, Artificial sequence
  SiRNA target sequence
ttccaaggcttattaaaacaaaagg

SEQ ID NO: 235820 - DNA, 25 bp, Artificial sequence
  SiRNA target sequence
tccaaggcttattaaaacaaaagga

SEQ ID NO: 235821 - DNA, 25 bp, Artificial sequence
  SiRNA target sequence
ccaaggcttattaaaacaaaaggat

SEQ ID NO: 235822 - DNA, 25 bp, Artificial sequence
  SiRNA target sequence
caaggcttattaaaacaaaaggatg

SEQ ID NO: 235823 - DNA, 25 bp, Artificial sequence
  SiRNA target sequence
aaggcttattaaaacaaaaggatgg

SEQ ID NO: 235824 - DNA, 25 bp, Artificial sequence
  SiRNA target sequence
aggcttattaaaacaaaaggatgga

SEQ ID NO: 235825 - DNA, 25 bp, Artificial sequence
  SiRNA target sequence
ggcttattaaaacaaaaggatggat

SEQ ID NO: 235826 - DNA, 25 bp, Artificial sequence
  SiRNA target sequence
gcttattaaaacaaaaggatggatt

SEQ ID NO: 235827 - DNA, 25 bp, Artificial sequence
  SiRNA target sequence
cttattaaaacaaaaggatggatta

SEQ ID NO: 235828 - DNA, 25 bp, Artificial sequence
  SiRNA target sequence
ttattaaaacaaaaggatggattac

SEQ ID NO: 235829 - DNA, 25 bp, Artificial sequence
  SiRNA target sequence
tattaaaacaaaaggatggattaca

SEQ ID NO: 235830 - DNA, 25 bp, Artificial sequence
  SiRNA target sequence
attaaaacaaaaggatggattacaa

SEQ ID NO: 235831 - DNA, 25 bp, Artificial sequence
  SiRNA target sequence
ttaaaacaaaaggatggattacaat

SEQ ID NO: 235832 - DNA, 25 bp, Artificial sequence
  SiRNA target sequence
taaaacaaaaggatggattacaata

SEQ ID NO: 235833 - DNA, 25 bp, Artificial sequence
  SiRNA target sequence
aaaacaaaaggatggattacaatag

SEQ ID NO: 235834 - DNA, 25 bp, Artificial sequence
  SiRNA target sequence
aaacaaaaggatggattacaatagc

SEQ ID NO: 235835 - DNA, 25 bp, Artificial sequence
  SiRNA target sequence
aacaaaaggatggattacaatagcc

SEQ ID NO: 235836 - DNA, 25 bp, Artificial sequence
  SiRNA target sequence
acaaaaggatggattacaatagcca

SEQ ID NO: 235837 - DNA, 25 bp, Artificial sequence
  SiRNA target sequence
caaaaggatggattacaatagccat

SEQ ID NO: 235838 - DNA, 25 bp, Artificial sequence
  SiRNA target sequence
aaaaggatggattacaatagccatt

SEQ ID NO: 235839 - DNA, 25 bp, Artificial sequence
  SiRNA target sequence
aaaggatggattacaatagccattc

SEQ ID NO: 235840 - DNA, 25 bp, Artificial sequence
  SiRNA target sequence
aaggatggattacaatagccattct

SEQ ID NO: 235841 - DNA, 25 bp, Artificial sequence
  SiRNA target sequence
aggatggattacaatagccattcta

SEQ ID NO: 235842 - DNA, 25 bp, Artificial sequence
  SiRNA target sequence
ggatggattacaatagccattctat

SEQ ID NO: 235843 - DNA, 25 bp, Artificial sequence
  SiRNA target sequence
gatggattacaatagccattctatg

SEQ ID NO: 235844 - DNA, 25 bp, Artificial sequence
  SiRNA target sequence
atggattacaatagccattctatgt

SEQ ID NO: 235845 - DNA, 25 bp, Artificial sequence
  SiRNA target sequence
tggattacaatagccattctatgtc

SEQ ID NO: 235846 - DNA, 25 bp, Artificial sequence
  SiRNA target sequence
ggattacaatagccattctatgtcc

SEQ ID NO: 235847 - DNA, 25 bp, Artificial sequence
  SiRNA target sequence
gattacaatagccattctatgtcct

SEQ ID NO: 235848 - DNA, 25 bp, Artificial sequence
  SiRNA target sequence
attacaatagccattctatgtccta

SEQ ID NO: 235849 - DNA, 25 bp, Artificial sequence
  SiRNA target sequence
ttacaatagccattctatgtcctat

SEQ ID NO: 235850 - DNA, 25 bp, Artificial sequence
  SiRNA target sequence
tacaatagccattctatgtcctatt

SEQ ID NO: 235851 - DNA, 25 bp, Artificial sequence
  SiRNA target sequence
acaatagccattctatgtcctatta

SEQ ID NO: 235852 - DNA, 25 bp, Artificial sequence
  SiRNA target sequence
caatagccattctatgtcctattat

SEQ ID NO: 235853 - DNA, 25 bp, Artificial sequence
  SiRNA target sequence
aatagccattctatgtcctattatt

SEQ ID NO: 235854 - DNA, 25 bp, Artificial sequence
  SiRNA target sequence
atagccattctatgtcctattatta

SEQ ID NO: 235855 - DNA, 25 bp, Artificial sequence
  SiRNA target sequence
tagccattctatgtcctattattac

SEQ ID NO: 235856 - DNA, 25 bp, Artificial sequence
  SiRNA target sequence
agccattctatgtcctattattact

SEQ ID NO: 235857 - DNA, 25 bp, Artificial sequence
  SiRNA target sequence
gccattctatgtcctattattactt

SEQ ID NO: 235858 - DNA, 25 bp, Artificial sequence
  SiRNA target sequence
ccattctatgtcctattattacttt

SEQ ID NO: 235859 - DNA, 25 bp, Artificial sequence
  SiRNA target sequence
cattctatgtcctattattactttt

SEQ ID NO: 235860 - DNA, 25 bp, Artificial sequence
  SiRNA target sequence
attctatgtcctattattacttttt

SEQ ID NO: 235861 - DNA, 25 bp, Artificial sequence
  SiRNA target sequence
ttctatgtcctattattactttttt

SEQ ID NO: 235862 - DNA, 25 bp, Artificial sequence
  SiRNA target sequence
tctatgtcctattattacttttttt

SEQ ID NO: 235863 - DNA, 25 bp, Artificial sequence
  SiRNA target sequence
ctatgtcctattattactttttttt

SEQ ID NO: 235864 - DNA, 25 bp, Artificial sequence
  SiRNA target sequence
tatgtcctattattacttttttttc

SEQ ID NO: 235865 - DNA, 25 bp, Artificial sequence
  SiRNA target sequence
atgtcctattattacttttttttct

SEQ ID NO: 235866 - DNA, 25 bp, Artificial sequence
  SiRNA target sequence
tgtcctattattacttttttttctg

SEQ ID NO: 235867 - DNA, 25 bp, Artificial sequence
  SiRNA target sequence
gtcctattattacttttttttctgc

SEQ ID NO: 235868 - DNA, 25 bp, Artificial sequence
  SiRNA target sequence
tcctattattacttttttttctgct

SEQ ID NO: 235869 - DNA, 25 bp, Artificial sequence
  SiRNA target sequence
cctattattacttttttttctgctt

SEQ ID NO: 235870 - DNA, 25 bp, Artificial sequence
  SiRNA target sequence
ctattattacttttttttctgcttt

SEQ ID NO: 235871 - DNA, 25 bp, Artificial sequence
  SiRNA target sequence
tattattacttttttttctgctttt

SEQ ID NO: 235872 - DNA, 25 bp, Artificial sequence
  SiRNA target sequence
attattacttttttttctgcttttg

SEQ ID NO: 235873 - DNA, 25 bp, Artificial sequence
  SiRNA target sequence
ttattacttttttttctgcttttgg

SEQ ID NO: 235874 - DNA, 25 bp, Artificial sequence
  SiRNA target sequence
tattacttttttttctgcttttggt

SEQ ID NO: 235875 - DNA, 25 bp, Artificial sequence
  SiRNA target sequence
attacttttttttctgcttttggta

SEQ ID NO: 235876 - DNA, 25 bp, Artificial sequence
  SiRNA target sequence
ttacttttttttctgcttttggtac

SEQ ID NO: 235877 - DNA, 25 bp, Artificial sequence
  SiRNA target sequence
tacttttttttctgcttttggtact

SEQ ID NO: 235878 - DNA, 25 bp, Artificial sequence
  SiRNA target sequence
acttttttttctgcttttggtactt

SEQ ID NO: 235879 - DNA, 25 bp, Artificial sequence
  SiRNA target sequence
cttttttttctgcttttggtacttt

SEQ ID NO: 235880 - DNA, 25 bp, Artificial sequence
  SiRNA target sequence
ttttttttctgcttttggtactttt

SEQ ID NO: 235881 - DNA, 25 bp, Artificial sequence
  SiRNA target sequence
tttttttctgcttttggtacttttg

SEQ ID NO: 235882 - DNA, 25 bp, Artificial sequence
  SiRNA target sequence
ttttttctgcttttggtacttttgt

SEQ ID NO: 235883 - DNA, 25 bp, Artificial sequence
  SiRNA target sequence
tttttctgcttttggtacttttgta

SEQ ID NO: 235884 - DNA, 25 bp, Artificial sequence
  SiRNA target sequence
ttttctgcttttggtacttttgtat

SEQ ID NO: 235885 - DNA, 25 bp, Artificial sequence
  SiRNA target sequence
tttctgcttttggtacttttgtatt

SEQ ID NO: 235886 - DNA, 25 bp, Artificial sequence
  SiRNA target sequence
ttctgcttttggtacttttgtatta

SEQ ID NO: 235887 - DNA, 25 bp, Artificial sequence
  SiRNA target sequence
tctgcttttggtacttttgtattag

SEQ ID NO: 235888 - DNA, 25 bp, Artificial sequence
  SiRNA target sequence
ctgcttttggtacttttgtattagc

SEQ ID NO: 235889 - DNA, 25 bp, Artificial sequence
  SiRNA target sequence
tgcttttggtacttttgtattagct

SEQ ID NO: 235890 - DNA, 25 bp, Artificial sequence
  SiRNA target sequence
gcttttggtacttttgtattagctt

SEQ ID NO: 235891 - DNA, 25 bp, Artificial sequence
  SiRNA target sequence
cttttggtacttttgtattagctta

SEQ ID NO: 235892 - DNA, 25 bp, Artificial sequence
  SiRNA target sequence
ttttggtacttttgtattagcttat

SEQ ID NO: 235893 - DNA, 25 bp, Artificial sequence
  SiRNA target sequence
tttggtacttttgtattagcttatt

SEQ ID NO: 235894 - DNA, 25 bp, Artificial sequence
  SiRNA target sequence
ttggtacttttgtattagcttattt

SEQ ID NO: 235895 - DNA, 25 bp, Artificial sequence
  SiRNA target sequence
tggtacttttgtattagcttattta

SEQ ID NO: 235896 - DNA, 25 bp, Artificial sequence
  SiRNA target sequence
ggtacttttgtattagcttatttaa

SEQ ID NO: 235897 - DNA, 25 bp, Artificial sequence
  SiRNA target sequence
gtacttttgtattagcttatttaaa

SEQ ID NO: 235898 - DNA, 25 bp, Artificial sequence
  SiRNA target sequence
tacttttgtattagcttatttaaac

SEQ ID NO: 235899 - DNA, 25 bp, Artificial sequence
  SiRNA target sequence
acttttgtattagcttatttaaact

SEQ ID NO: 235900 - DNA, 25 bp, Artificial sequence
  SiRNA target sequence
cttttgtattagcttatttaaactt

SEQ ID NO: 235901 - DNA, 25 bp, Artificial sequence
  SiRNA target sequence
ttttgtattagcttatttaaacttc

SEQ ID NO: 235902 - DNA, 25 bp, Artificial sequence
  SiRNA target sequence
tttgtattagcttatttaaacttcc

SEQ ID NO: 235903 - DNA, 25 bp, Artificial sequence
  SiRNA target sequence
ttgtattagcttatttaaacttccc

SEQ ID NO: 235904 - DNA, 25 bp, Artificial sequence
  SiRNA target sequence
tgtattagcttatttaaacttccca

SEQ ID NO: 235905 - DNA, 25 bp, Artificial sequence
  SiRNA target sequence
gtattagcttatttaaacttcccaa

SEQ ID NO: 235906 - DNA, 25 bp, Artificial sequence
  SiRNA target sequence
tattagcttatttaaacttcccaat

SEQ ID NO: 235907 - DNA, 25 bp, Artificial sequence
  SiRNA target sequence
attagcttatttaaacttcccaatt

SEQ ID NO: 235908 - DNA, 25 bp, Artificial sequence
  SiRNA target sequence
ttagcttatttaaacttcccaatta

SEQ ID NO: 235909 - DNA, 25 bp, Artificial sequence
  SiRNA target sequence
tagcttatttaaacttcccaattac

SEQ ID NO: 235910 - DNA, 25 bp, Artificial sequence
  SiRNA target sequence
agcttatttaaacttcccaattaca

SEQ ID NO: 235911 - DNA, 25 bp, Artificial sequence
  SiRNA target sequence
gcttatttaaacttcccaattacaa

SEQ ID NO: 235912 - DNA, 25 bp, Artificial sequence
  SiRNA target sequence
cttatttaaacttcccaattacaaa

SEQ ID NO: 235913 - DNA, 25 bp, Artificial sequence
  SiRNA target sequence
ttatttaaacttcccaattacaaac

SEQ ID NO: 235914 - DNA, 25 bp, Artificial sequence
  SiRNA target sequence
tatttaaacttcccaattacaaaca

SEQ ID NO: 235915 - DNA, 25 bp, Artificial sequence
  SiRNA target sequence
atttaaacttcccaattacaaacaa

SEQ ID NO: 235916 - DNA, 25 bp, Artificial sequence
  SiRNA target sequence
tttaaacttcccaattacaaacaaa

SEQ ID NO: 235917 - DNA, 25 bp, Artificial sequence
  SiRNA target sequence
ttaaacttcccaattacaaacaaag

SEQ ID NO: 235918 - DNA, 25 bp, Artificial sequence
  SiRNA target sequence
taaacttcccaattacaaacaaaga

SEQ ID NO: 235919 - DNA, 25 bp, Artificial sequence
  SiRNA target sequence
aaacttcccaattacaaacaaagag

SEQ ID NO: 235920 - DNA, 25 bp, Artificial sequence
  SiRNA target sequence
aacttcccaattacaaacaaagagg

SEQ ID NO: 235921 - DNA, 25 bp, Artificial sequence
  SiRNA target sequence
acttcccaattacaaacaaagagga

SEQ ID NO: 235922 - DNA, 25 bp, Artificial sequence
  SiRNA target sequence
cttcccaattacaaacaaagaggat

SEQ ID NO: 235923 - DNA, 25 bp, Artificial sequence
  SiRNA target sequence
ttcccaattacaaacaaagaggata

SEQ ID NO: 235924 - DNA, 25 bp, Artificial sequence
  SiRNA target sequence
tcccaattacaaacaaagaggataa

SEQ ID NO: 235925 - DNA, 25 bp, Artificial sequence
  SiRNA target sequence
cccaattacaaacaaagaggataat

SEQ ID NO: 235926 - DNA, 25 bp, Artificial sequence
  SiRNA target sequence
ccaattacaaacaaagaggataata

SEQ ID NO: 235927 - DNA, 25 bp, Artificial sequence
  SiRNA target sequence
caattacaaacaaagaggataatat

SEQ ID NO: 235928 - DNA, 25 bp, Artificial sequence
  SiRNA target sequence
aattacaaacaaagaggataatata

SEQ ID NO: 235929 - DNA, 25 bp, Artificial sequence
  SiRNA target sequence
attacaaacaaagaggataatatat

SEQ ID NO: 235930 - DNA, 25 bp, Artificial sequence
  SiRNA target sequence
ttacaaacaaagaggataatatatt

SEQ ID NO: 235931 - DNA, 25 bp, Artificial sequence
  SiRNA target sequence
tacaaacaaagaggataatatattt

SEQ ID NO: 235932 - DNA, 25 bp, Artificial sequence
  SiRNA target sequence
acaaacaaagaggataatatatttg

SEQ ID NO: 235933 - DNA, 25 bp, Artificial sequence
  SiRNA target sequence
caaacaaagaggataatatatttga

SEQ ID NO: 235934 - DNA, 25 bp, Artificial sequence
  SiRNA target sequence
aaacaaagaggataatatatttgat

SEQ ID NO: 235935 - DNA, 25 bp, Artificial sequence
  SiRNA target sequence
aacaaagaggataatatatttgata

SEQ ID NO: 235936 - DNA, 25 bp, Artificial sequence
  SiRNA target sequence
acaaagaggataatatatttgatat

SEQ ID NO: 235937 - DNA, 25 bp, Artificial sequence
  SiRNA target sequence
caaagaggataatatatttgatatt

SEQ ID NO: 235938 - DNA, 25 bp, Artificial sequence
  SiRNA target sequence
aaagaggataatatatttgatattt

SEQ ID NO: 235939 - DNA, 25 bp, Artificial sequence
  SiRNA target sequence
aagaggataatatatttgatattta

SEQ ID NO: 235940 - DNA, 25 bp, Artificial sequence
  SiRNA target sequence
agaggataatatatttgatatttac

SEQ ID NO: 235941 - DNA, 25 bp, Artificial sequence
  SiRNA target sequence
gaggataatatatttgatatttacc

SEQ ID NO: 235942 - DNA, 25 bp, Artificial sequence
  SiRNA target sequence
aggataatatatttgatatttaccg

SEQ ID NO: 235943 - DNA, 25 bp, Artificial sequence
  SiRNA target sequence
ggataatatatttgatatttaccgt

SEQ ID NO: 235944 - DNA, 25 bp, Artificial sequence
  SiRNA target sequence
gataatatatttgatatttaccgtt

SEQ ID NO: 235945 - DNA, 25 bp, Artificial sequence
  SiRNA target sequence
ataatatatttgatatttaccgttt

SEQ ID NO: 235946 - DNA, 25 bp, Artificial sequence
  SiRNA target sequence
taatatatttgatatttaccgttta

SEQ ID NO: 235947 - DNA, 25 bp, Artificial sequence
  SiRNA target sequence
aatatatttgatatttaccgtttac

SEQ ID NO: 235948 - DNA, 25 bp, Artificial sequence
  SiRNA target sequence
atatatttgatatttaccgtttacc

SEQ ID NO: 235949 - DNA, 25 bp, Artificial sequence
  SiRNA target sequence
tatatttgatatttaccgtttaccg

SEQ ID NO: 235950 - DNA, 25 bp, Artificial sequence
  SiRNA target sequence
atatttgatatttaccgtttaccgt

SEQ ID NO: 235951 - DNA, 25 bp, Artificial sequence
  SiRNA target sequence
tatttgatatttaccgtttaccgtc

SEQ ID NO: 235952 - DNA, 25 bp, Artificial sequence
  SiRNA target sequence
atttgatatttaccgtttaccgtca

SEQ ID NO: 235953 - DNA, 25 bp, Artificial sequence
  SiRNA target sequence
tttgatatttaccgtttaccgtcaa

SEQ ID NO: 235954 - DNA, 25 bp, Artificial sequence
  SiRNA target sequence
ttgatatttaccgtttaccgtcaac

SEQ ID NO: 235955 - DNA, 25 bp, Artificial sequence
  SiRNA target sequence
tgatatttaccgtttaccgtcaact

SEQ ID NO: 235956 - DNA, 25 bp, Artificial sequence
  SiRNA target sequence
gatatttaccgtttaccgtcaactg

SEQ ID NO: 235957 - DNA, 25 bp, Artificial sequence
  SiRNA target sequence
atatttaccgtttaccgtcaactga

SEQ ID NO: 235958 - DNA, 25 bp, Artificial sequence
  SiRNA target sequence
tatttaccgtttaccgtcaactgat

SEQ ID NO: 235959 - DNA, 25 bp, Artificial sequence
  SiRNA target sequence
atttaccgtttaccgtcaactgatt

SEQ ID NO: 235960 - DNA, 25 bp, Artificial sequence
  SiRNA target sequence
tttaccgtttaccgtcaactgattc

SEQ ID NO: 235961 - DNA, 25 bp, Artificial sequence
  SiRNA target sequence
ttaccgtttaccgtcaactgattct

SEQ ID NO: 235962 - DNA, 25 bp, Artificial sequence
  SiRNA target sequence
taccgtttaccgtcaactgattcta

SEQ ID NO: 235963 - DNA, 25 bp, Artificial sequence
  SiRNA target sequence
accgtttaccgtcaactgattctat

SEQ ID NO: 235964 - DNA, 25 bp, Artificial sequence
  SiRNA target sequence
ccgtttaccgtcaactgattctata

SEQ ID NO: 235965 - DNA, 25 bp, Artificial sequence
  SiRNA target sequence
cgtttaccgtcaactgattctataa

SEQ ID NO: 235966 - DNA, 25 bp, Artificial sequence
  SiRNA target sequence
gtttaccgtcaactgattctataat

SEQ ID NO: 235967 - DNA, 25 bp, Artificial sequence
  SiRNA target sequence
tttaccgtcaactgattctataatc

SEQ ID NO: 235968 - DNA, 25 bp, Artificial sequence
  SiRNA target sequence
ttaccgtcaactgattctataatca

SEQ ID NO: 235969 - DNA, 25 bp, Artificial sequence
  SiRNA target sequence
taccgtcaactgattctataatcaa

SEQ ID NO: 235970 - DNA, 25 bp, Artificial sequence
  SiRNA target sequence
accgtcaactgattctataatcaaa

SEQ ID NO: 235971 - DNA, 25 bp, Artificial sequence
  SiRNA target sequence
ccgtcaactgattctataatcaaat

SEQ ID NO: 235972 - DNA, 25 bp, Artificial sequence
  SiRNA target sequence
cgtcaactgattctataatcaaatt

SEQ ID NO: 235973 - DNA, 25 bp, Artificial sequence
  SiRNA target sequence
gtcaactgattctataatcaaatta

SEQ ID NO: 235974 - DNA, 25 bp, Artificial sequence
  SiRNA target sequence
tcaactgattctataatcaaattag

SEQ ID NO: 235975 - DNA, 25 bp, Artificial sequence
  SiRNA target sequence
caactgattctataatcaaattaga

SEQ ID NO: 235976 - DNA, 25 bp, Artificial sequence
  SiRNA target sequence
aactgattctataatcaaattagaa

SEQ ID NO: 235977 - DNA, 25 bp, Artificial sequence
  SiRNA target sequence
actgattctataatcaaattagaaa

SEQ ID NO: 235978 - DNA, 25 bp, Artificial sequence
  SiRNA target sequence
ctgattctataatcaaattagaaaa

SEQ ID NO: 235979 - DNA, 25 bp, Artificial sequence
  SiRNA target sequence
tgattctataatcaaattagaaaat

SEQ ID NO: 235980 - DNA, 25 bp, Artificial sequence
  SiRNA target sequence
gattctataatcaaattagaaaata

SEQ ID NO: 235981 - DNA, 25 bp, Artificial sequence
  SiRNA target sequence
attctataatcaaattagaaaatat

SEQ ID NO: 235982 - DNA, 25 bp, Artificial sequence
  SiRNA target sequence
ttctataatcaaattagaaaatatt

SEQ ID NO: 235983 - DNA, 25 bp, Artificial sequence
  SiRNA target sequence
tctataatcaaattagaaaatattg

SEQ ID NO: 235984 - DNA, 25 bp, Artificial sequence
  SiRNA target sequence
ctataatcaaattagaaaatattgt

SEQ ID NO: 235985 - DNA, 25 bp, Artificial sequence
  SiRNA target sequence
tataatcaaattagaaaatattgtt

SEQ ID NO: 235986 - DNA, 25 bp, Artificial sequence
  SiRNA target sequence
ataatcaaattagaaaatattgttg

SEQ ID NO: 235987 - DNA, 25 bp, Artificial sequence
  SiRNA target sequence
taatcaaattagaaaatattgttgg

SEQ ID NO: 235988 - DNA, 25 bp, Artificial sequence
  SiRNA target sequence
aatcaaattagaaaatattgttggt

SEQ ID NO: 235989 - DNA, 25 bp, Artificial sequence
  SiRNA target sequence
atcaaattagaaaatattgttggtg

SEQ ID NO: 235990 - DNA, 25 bp, Artificial sequence
  SiRNA target sequence
tcaaattagaaaatattgttggtgt

SEQ ID NO: 235991 - DNA, 25 bp, Artificial sequence
  SiRNA target sequence
caaattagaaaatattgttggtgtc

SEQ ID NO: 235992 - DNA, 25 bp, Artificial sequence
  SiRNA target sequence
aaattagaaaatattgttggtgtca

SEQ ID NO: 235993 - DNA, 25 bp, Artificial sequence
  SiRNA target sequence
aattagaaaatattgttggtgtcat

SEQ ID NO: 235994 - DNA, 25 bp, Artificial sequence
  SiRNA target sequence
attagaaaatattgttggtgtcatt

SEQ ID NO: 235995 - DNA, 25 bp, Artificial sequence
  SiRNA target sequence
ttagaaaatattgttggtgtcattt

SEQ ID NO: 235996 - DNA, 25 bp, Artificial sequence
  SiRNA target sequence
tagaaaatattgttggtgtcatttg

SEQ ID NO: 235997 - DNA, 25 bp, Artificial sequence
  SiRNA target sequence
agaaaatattgttggtgtcatttgt

SEQ ID NO: 235998 - DNA, 25 bp, Artificial sequence
  SiRNA target sequence
gaaaatattgttggtgtcatttgtg

SEQ ID NO: 235999 - DNA, 25 bp, Artificial sequence
  SiRNA target sequence
aaaatattgttggtgtcatttgtgt

SEQ ID NO: 236000 - DNA, 25 bp, Artificial sequence
  SiRNA target sequence
aaatattgttggtgtcatttgtgta

SEQ ID NO: 236001 - DNA, 25 bp, Artificial sequence
  SiRNA target sequence
aatattgttggtgtcatttgtgtat

SEQ ID NO: 236002 - DNA, 25 bp, Artificial sequence
  SiRNA target sequence
atattgttggtgtcatttgtgtatc

SEQ ID NO: 236003 - DNA, 25 bp, Artificial sequence
  SiRNA target sequence
tattgttggtgtcatttgtgtatct

SEQ ID NO: 236004 - DNA, 25 bp, Artificial sequence
  SiRNA target sequence
attgttggtgtcatttgtgtatctt

SEQ ID NO: 236005 - DNA, 25 bp, Artificial sequence
  SiRNA target sequence
ttgttggtgtcatttgtgtatcttt

SEQ ID NO: 236006 - DNA, 25 bp, Artificial sequence
  SiRNA target sequence
tgttggtgtcatttgtgtatcttta

SEQ ID NO: 236007 - DNA, 25 bp, Artificial sequence
  SiRNA target sequence
gttggtgtcatttgtgtatctttaa

SEQ ID NO: 236008 - DNA, 25 bp, Artificial sequence
  SiRNA target sequence
ttggtgtcatttgtgtatctttaat

SEQ ID NO: 236009 - DNA, 25 bp, Artificial sequence
  SiRNA target sequence
tggtgtcatttgtgtatctttaatg

SEQ ID NO: 236010 - DNA, 25 bp, Artificial sequence
  SiRNA target sequence
ggtgtcatttgtgtatctttaatga

SEQ ID NO: 236011 - DNA, 25 bp, Artificial sequence
  SiRNA target sequence
gtgtcatttgtgtatctttaatgaa

SEQ ID NO: 236012 - DNA, 25 bp, Artificial sequence
  SiRNA target sequence
tgtcatttgtgtatctttaatgaag

SEQ ID NO: 236013 - DNA, 25 bp, Artificial sequence
  SiRNA target sequence
gtcatttgtgtatctttaatgaaga

SEQ ID NO: 236014 - DNA, 25 bp, Artificial sequence
  SiRNA target sequence
tcatttgtgtatctttaatgaagat

SEQ ID NO: 236015 - DNA, 25 bp, Artificial sequence
  SiRNA target sequence
catttgtgtatctttaatgaagatt

SEQ ID NO: 236016 - DNA, 25 bp, Artificial sequence
  SiRNA target sequence
atttgtgtatctttaatgaagattt

SEQ ID NO: 236017 - DNA, 25 bp, Artificial sequence
  SiRNA target sequence
tttgtgtatctttaatgaagatttc

SEQ ID NO: 236018 - DNA, 25 bp, Artificial sequence
  SiRNA target sequence
ttgtgtatctttaatgaagatttct

SEQ ID NO: 236019 - DNA, 25 bp, Artificial sequence
  SiRNA target sequence
tgtgtatctttaatgaagatttcta

SEQ ID NO: 236020 - DNA, 25 bp, Artificial sequence
  SiRNA target sequence
gtgtatctttaatgaagatttctaa

SEQ ID NO: 236021 - DNA, 25 bp, Artificial sequence
  SiRNA target sequence
tgtatctttaatgaagatttctaaa

SEQ ID NO: 236022 - DNA, 25 bp, Artificial sequence
  SiRNA target sequence
gtatctttaatgaagatttctaaat

SEQ ID NO: 236023 - DNA, 25 bp, Artificial sequence
  SiRNA target sequence
tatctttaatgaagatttctaaata

SEQ ID NO: 236024 - DNA, 25 bp, Artificial sequence
  SiRNA target sequence
atctttaatgaagatttctaaatat

SEQ ID NO: 236025 - DNA, 25 bp, Artificial sequence
  SiRNA target sequence
tctttaatgaagatttctaaatatg

SEQ ID NO: 236026 - DNA, 25 bp, Artificial sequence
  SiRNA target sequence
ctttaatgaagatttctaaatatgc

SEQ ID NO: 236027 - DNA, 25 bp, Artificial sequence
  SiRNA target sequence
tttaatgaagatttctaaatatgca

SEQ ID NO: 236028 - DNA, 25 bp, Artificial sequence
  SiRNA target sequence
ttaatgaagatttctaaatatgcag

SEQ ID NO: 236029 - DNA, 25 bp, Artificial sequence
  SiRNA target sequence
taatgaagatttctaaatatgcagc

SEQ ID NO: 236030 - DNA, 25 bp, Artificial sequence
  SiRNA target sequence
aatgaagatttctaaatatgcagca

SEQ ID NO: 236031 - DNA, 25 bp, Artificial sequence
  SiRNA target sequence
atgaagatttctaaatatgcagcat

SEQ ID NO: 236032 - DNA, 25 bp, Artificial sequence
  SiRNA target sequence
tgaagatttctaaatatgcagcatt

SEQ ID NO: 236033 - DNA, 25 bp, Artificial sequence
  SiRNA target sequence
gaagatttctaaatatgcagcattt

SEQ ID NO: 236034 - DNA, 25 bp, Artificial sequence
  SiRNA target sequence
aagatttctaaatatgcagcatttg

SEQ ID NO: 236035 - DNA, 25 bp, Artificial sequence
  SiRNA target sequence
agatttctaaatatgcagcatttga

SEQ ID NO: 236036 - DNA, 25 bp, Artificial sequence
  SiRNA target sequence
gatttctaaatatgcagcatttgat

SEQ ID NO: 236037 - DNA, 25 bp, Artificial sequence
  SiRNA target sequence
atttctaaatatgcagcatttgata

SEQ ID NO: 236038 - DNA, 25 bp, Artificial sequence
  SiRNA target sequence
tttctaaatatgcagcatttgatat

SEQ ID NO: 236039 - DNA, 25 bp, Artificial sequence
  SiRNA target sequence
ttctaaatatgcagcatttgatatc

SEQ ID NO: 236040 - DNA, 25 bp, Artificial sequence
  SiRNA target sequence
tctaaatatgcagcatttgatatca

SEQ ID NO: 236041 - DNA, 25 bp, Artificial sequence
  SiRNA target sequence
ctaaatatgcagcatttgatatcac

SEQ ID NO: 236042 - DNA, 25 bp, Artificial sequence
  SiRNA target sequence
taaatatgcagcatttgatatcaca

SEQ ID NO: 236043 - DNA, 25 bp, Artificial sequence
  SiRNA target sequence
aaatatgcagcatttgatatcacaa

SEQ ID NO: 236044 - DNA, 25 bp, Artificial sequence
  SiRNA target sequence
aatatgcagcatttgatatcacaaa

SEQ ID NO: 236045 - DNA, 25 bp, Artificial sequence
  SiRNA target sequence
atatgcagcatttgatatcacaaaa

SEQ ID NO: 236046 - DNA, 25 bp, Artificial sequence
  SiRNA target sequence
tatgcagcatttgatatcacaaaag

SEQ ID NO: 236047 - DNA, 25 bp, Artificial sequence
  SiRNA target sequence
atgcagcatttgatatcacaaaaga

SEQ ID NO: 236048 - DNA, 25 bp, Artificial sequence
  SiRNA target sequence
tgcagcatttgatatcacaaaagag

SEQ ID NO: 236049 - DNA, 25 bp, Artificial sequence
  SiRNA target sequence
gcagcatttgatatcacaaaagagg

SEQ ID NO: 236050 - DNA, 25 bp, Artificial sequence
  SiRNA target sequence
cagcatttgatatcacaaaagaggc

SEQ ID NO: 236051 - DNA, 25 bp, Artificial sequence
  SiRNA target sequence
agcatttgatatcacaaaagaggct

SEQ ID NO: 236052 - DNA, 25 bp, Artificial sequence
  SiRNA target sequence
gcatttgatatcacaaaagaggctt

SEQ ID NO: 236053 - DNA, 25 bp, Artificial sequence
  SiRNA target sequence
catttgatatcacaaaagaggcttt

SEQ ID NO: 236054 - DNA, 25 bp, Artificial sequence
  SiRNA target sequence
atttgatatcacaaaagaggctttg

SEQ ID NO: 236055 - DNA, 25 bp, Artificial sequence
  SiRNA target sequence
tttgatatcacaaaagaggctttgt

SEQ ID NO: 236056 - DNA, 25 bp, Artificial sequence
  SiRNA target sequence
ttgatatcacaaaagaggctttgtc

SEQ ID NO: 236057 - DNA, 25 bp, Artificial sequence
  SiRNA target sequence
tgatatcacaaaagaggctttgtct

SEQ ID NO: 236058 - DNA, 25 bp, Artificial sequence
  SiRNA target sequence
gatatcacaaaagaggctttgtcta

SEQ ID NO: 236059 - DNA, 25 bp, Artificial sequence
  SiRNA target sequence
atatcacaaaagaggctttgtctat

SEQ ID NO: 236060 - DNA, 25 bp, Artificial sequence
  SiRNA target sequence
tatcacaaaagaggctttgtctatg

SEQ ID NO: 236061 - DNA, 25 bp, Artificial sequence
  SiRNA target sequence
atcacaaaagaggctttgtctatgc

SEQ ID NO: 236062 - DNA, 25 bp, Artificial sequence
  SiRNA target sequence
tcacaaaagaggctttgtctatgca

SEQ ID NO: 236063 - DNA, 25 bp, Artificial sequence
  SiRNA target sequence
cacaaaagaggctttgtctatgcag

SEQ ID NO: 236064 - DNA, 25 bp, Artificial sequence
  SiRNA target sequence
acaaaagaggctttgtctatgcaga

SEQ ID NO: 236065 - DNA, 25 bp, Artificial sequence
  SiRNA target sequence
caaaagaggctttgtctatgcagat

SEQ ID NO: 236066 - DNA, 25 bp, Artificial sequence
  SiRNA target sequence
aaaagaggctttgtctatgcagatt

SEQ ID NO: 236067 - DNA, 25 bp, Artificial sequence
  SiRNA target sequence
aaagaggctttgtctatgcagattg

SEQ ID NO: 236068 - DNA, 25 bp, Artificial sequence
  SiRNA target sequence
aagaggctttgtctatgcagattga

SEQ ID NO: 236069 - DNA, 25 bp, Artificial sequence
  SiRNA target sequence
agaggctttgtctatgcagattgat

SEQ ID NO: 236070 - DNA, 25 bp, Artificial sequence
  SiRNA target sequence
gaggctttgtctatgcagattgatg

SEQ ID NO: 236071 - DNA, 25 bp, Artificial sequence
  SiRNA target sequence
aggctttgtctatgcagattgatgg

SEQ ID NO: 236072 - DNA, 25 bp, Artificial sequence
  SiRNA target sequence
ggctttgtctatgcagattgatggt

SEQ ID NO: 236073 - DNA, 25 bp, Artificial sequence
  SiRNA target sequence
gctttgtctatgcagattgatggtt

SEQ ID NO: 236074 - DNA, 25 bp, Artificial sequence
  SiRNA target sequence
ctttgtctatgcagattgatggttc

SEQ ID NO: 236075 - DNA, 25 bp, Artificial sequence
  SiRNA target sequence
tttgtctatgcagattgatggttct

SEQ ID NO: 236076 - DNA, 25 bp, Artificial sequence
  SiRNA target sequence
ttgtctatgcagattgatggttcta

SEQ ID NO: 236077 - DNA, 25 bp, Artificial sequence
  SiRNA target sequence
tgtctatgcagattgatggttctat

SEQ ID NO: 236078 - DNA, 25 bp, Artificial sequence
  SiRNA target sequence
gtctatgcagattgatggttctata

SEQ ID NO: 236079 - DNA, 25 bp, Artificial sequence
  SiRNA target sequence
tctatgcagattgatggttctataa

SEQ ID NO: 236080 - DNA, 25 bp, Artificial sequence
  SiRNA target sequence
ctatgcagattgatggttctataag

SEQ ID NO: 236081 - DNA, 25 bp, Artificial sequence
  SiRNA target sequence
tatgcagattgatggttctataaga

SEQ ID NO: 236082 - DNA, 25 bp, Artificial sequence
  SiRNA target sequence
atgcagattgatggttctataagag

SEQ ID NO: 236083 - DNA, 25 bp, Artificial sequence
  SiRNA target sequence
tgcagattgatggttctataagagc

SEQ ID NO: 236084 - DNA, 25 bp, Artificial sequence
  SiRNA target sequence
gcagattgatggttctataagagcg

SEQ ID NO: 236085 - DNA, 25 bp, Artificial sequence
  SiRNA target sequence
cagattgatggttctataagagcga

SEQ ID NO: 236086 - DNA, 25 bp, Artificial sequence
  SiRNA target sequence
agattgatggttctataagagcgaa

SEQ ID NO: 236087 - DNA, 25 bp, Artificial sequence
  SiRNA target sequence
gattgatggttctataagagcgaaa

SEQ ID NO: 236088 - DNA, 25 bp, Artificial sequence
  SiRNA target sequence
attgatggttctataagagcgaaat

SEQ ID NO: 236089 - DNA, 25 bp, Artificial sequence
  SiRNA target sequence
ttgatggttctataagagcgaaata

SEQ ID NO: 236090 - DNA, 25 bp, Artificial sequence
  SiRNA target sequence
tgatggttctataagagcgaaatac

SEQ ID NO: 236091 - DNA, 25 bp, Artificial sequence
  SiRNA target sequence
gatggttctataagagcgaaataca

SEQ ID NO: 236092 - DNA, 25 bp, Artificial sequence
  SiRNA target sequence
atggttctataagagcgaaatacaa

SEQ ID NO: 236093 - DNA, 25 bp, Artificial sequence
  SiRNA target sequence
tggttctataagagcgaaatacaaa

SEQ ID NO: 236094 - DNA, 25 bp, Artificial sequence
  SiRNA target sequence
ggttctataagagcgaaatacaaag

SEQ ID NO: 236095 - DNA, 25 bp, Artificial sequence
  SiRNA target sequence
gttctataagagcgaaatacaaagg

SEQ ID NO: 236096 - DNA, 25 bp, Artificial sequence
  SiRNA target sequence
ttctataagagcgaaatacaaaggt

SEQ ID NO: 236097 - DNA, 25 bp, Artificial sequence
  SiRNA target sequence
tctataagagcgaaatacaaaggta

SEQ ID NO: 236098 - DNA, 25 bp, Artificial sequence
  SiRNA target sequence
ctataagagcgaaatacaaaggtat

SEQ ID NO: 236099 - DNA, 25 bp, Artificial sequence
  SiRNA target sequence
tataagagcgaaatacaaaggtatt

SEQ ID NO: 236100 - DNA, 25 bp, Artificial sequence
  SiRNA target sequence
ataagagcgaaatacaaaggtattt

SEQ ID NO: 236101 - DNA, 25 bp, Artificial sequence
  SiRNA target sequence
taagagcgaaatacaaaggtatttt

SEQ ID NO: 236102 - DNA, 25 bp, Artificial sequence
  SiRNA target sequence
aagagcgaaatacaaaggtattttt

SEQ ID NO: 236103 - DNA, 25 bp, Artificial sequence
  SiRNA target sequence
agagcgaaatacaaaggtatttttg

SEQ ID NO: 236104 - DNA, 25 bp, Artificial sequence
  SiRNA target sequence
gagcgaaatacaaaggtatttttga

SEQ ID NO: 236105 - DNA, 25 bp, Artificial sequence
  SiRNA target sequence
agcgaaatacaaaggtatttttgat

SEQ ID NO: 236106 - DNA, 25 bp, Artificial sequence
  SiRNA target sequence
gcgaaatacaaaggtatttttgatg

SEQ ID NO: 236107 - DNA, 25 bp, Artificial sequence
  SiRNA target sequence
cgaaatacaaaggtatttttgatgg

SEQ ID NO: 236108 - DNA, 25 bp, Artificial sequence
  SiRNA target sequence
gaaatacaaaggtatttttgatggt

SEQ ID NO: 236109 - DNA, 25 bp, Artificial sequence
  SiRNA target sequence
aaatacaaaggtatttttgatggtg

SEQ ID NO: 236110 - DNA, 25 bp, Artificial sequence
  SiRNA target sequence
aatacaaaggtatttttgatggtgt

SEQ ID NO: 236111 - DNA, 25 bp, Artificial sequence
  SiRNA target sequence
atacaaaggtatttttgatggtgta

SEQ ID NO: 236112 - DNA, 25 bp, Artificial sequence
  SiRNA target sequence
tacaaaggtatttttgatggtgtat

SEQ ID NO: 236113 - DNA, 25 bp, Artificial sequence
  SiRNA target sequence
acaaaggtatttttgatggtgtatt

SEQ ID NO: 236114 - DNA, 25 bp, Artificial sequence
  SiRNA target sequence
caaaggtatttttgatggtgtattt

SEQ ID NO: 236115 - DNA, 25 bp, Artificial sequence
  SiRNA target sequence
aaaggtatttttgatggtgtatttg

SEQ ID NO: 236116 - DNA, 25 bp, Artificial sequence
  SiRNA target sequence
aaggtatttttgatggtgtatttgg

SEQ ID NO: 236117 - DNA, 25 bp, Artificial sequence
  SiRNA target sequence
aggtatttttgatggtgtatttggt

SEQ ID NO: 236118 - DNA, 25 bp, Artificial sequence
  SiRNA target sequence
ggtatttttgatggtgtatttggta

SEQ ID NO: 236119 - DNA, 25 bp, Artificial sequence
  SiRNA target sequence
gtatttttgatggtgtatttggtaa

SEQ ID NO: 236120 - DNA, 25 bp, Artificial sequence
  SiRNA target sequence
tatttttgatggtgtatttggtaag

SEQ ID NO: 236121 - DNA, 25 bp, Artificial sequence
  SiRNA target sequence
atttttgatggtgtatttggtaagc

SEQ ID NO: 236122 - DNA, 25 bp, Artificial sequence
  SiRNA target sequence
tttttgatggtgtatttggtaagct

SEQ ID NO: 236123 - DNA, 25 bp, Artificial sequence
  SiRNA target sequence
ttttgatggtgtatttggtaagctg

SEQ ID NO: 236124 - DNA, 25 bp, Artificial sequence
  SiRNA target sequence
tttgatggtgtatttggtaagctgg

SEQ ID NO: 236125 - DNA, 25 bp, Artificial sequence
  SiRNA target sequence
ttgatggtgtatttggtaagctggg

SEQ ID NO: 236126 - DNA, 25 bp, Artificial sequence
  SiRNA target sequence
tgatggtgtatttggtaagctgggg

SEQ ID NO: 236127 - DNA, 25 bp, Artificial sequence
  SiRNA target sequence
gatggtgtatttggtaagctgggga

SEQ ID NO: 236128 - DNA, 25 bp, Artificial sequence
  SiRNA target sequence
atggtgtatttggtaagctggggaa

SEQ ID NO: 236129 - DNA, 25 bp, Artificial sequence
  SiRNA target sequence
tggtgtatttggtaagctggggaaa

SEQ ID NO: 236130 - DNA, 25 bp, Artificial sequence
  SiRNA target sequence
ggtgtatttggtaagctggggaaat

SEQ ID NO: 236131 - DNA, 25 bp, Artificial sequence
  SiRNA target sequence
gtgtatttggtaagctggggaaatc

SEQ ID NO: 236132 - DNA, 25 bp, Artificial sequence
  SiRNA target sequence
tgtatttggtaagctggggaaatct

SEQ ID NO: 236133 - DNA, 25 bp, Artificial sequence
  SiRNA target sequence
gtatttggtaagctggggaaatctt

SEQ ID NO: 236134 - DNA, 25 bp, Artificial sequence
  SiRNA target sequence
tatttggtaagctggggaaatcttt

SEQ ID NO: 236135 - DNA, 25 bp, Artificial sequence
  SiRNA target sequence
atttggtaagctggggaaatctttt

SEQ ID NO: 236136 - DNA, 25 bp, Artificial sequence
  SiRNA target sequence
tttggtaagctggggaaatcttttg

SEQ ID NO: 236137 - DNA, 25 bp, Artificial sequence
  SiRNA target sequence
ttggtaagctggggaaatcttttgg

SEQ ID NO: 236138 - DNA, 25 bp, Artificial sequence
  SiRNA target sequence
tggtaagctggggaaatcttttgga

SEQ ID NO: 236139 - DNA, 25 bp, Artificial sequence
  SiRNA target sequence
ggtaagctggggaaatcttttggat

SEQ ID NO: 236140 - DNA, 25 bp, Artificial sequence
  SiRNA target sequence
gtaagctggggaaatcttttggatc

SEQ ID NO: 236141 - DNA, 25 bp, Artificial sequence
  SiRNA target sequence
taagctggggaaatcttttggatca

SEQ ID NO: 236142 - DNA, 25 bp, Artificial sequence
  SiRNA target sequence
aagctggggaaatcttttggatcag

SEQ ID NO: 236143 - DNA, 25 bp, Artificial sequence
  SiRNA target sequence
agctggggaaatcttttggatcagt

SEQ ID NO: 236144 - DNA, 25 bp, Artificial sequence
  SiRNA target sequence
gctggggaaatcttttggatcagtt

SEQ ID NO: 236145 - DNA, 25 bp, Artificial sequence
  SiRNA target sequence
ctggggaaatcttttggatcagttt

SEQ ID NO: 236146 - DNA, 25 bp, Artificial sequence
  SiRNA target sequence
tggggaaatcttttggatcagttta

SEQ ID NO: 236147 - DNA, 25 bp, Artificial sequence
  SiRNA target sequence
ggggaaatcttttggatcagtttat

SEQ ID NO: 236148 - DNA, 25 bp, Artificial sequence
  SiRNA target sequence
gggaaatcttttggatcagtttatg

SEQ ID NO: 236149 - DNA, 25 bp, Artificial sequence
  SiRNA target sequence
ggaaatcttttggatcagtttatgg

SEQ ID NO: 236150 - DNA, 25 bp, Artificial sequence
  SiRNA target sequence
gaaatcttttggatcagtttatgga

SEQ ID NO: 236151 - DNA, 25 bp, Artificial sequence
  SiRNA target sequence
aaatcttttggatcagtttatggat

SEQ ID NO: 236152 - DNA, 25 bp, Artificial sequence
  SiRNA target sequence
aatcttttggatcagtttatggatt

SEQ ID NO: 236153 - DNA, 25 bp, Artificial sequence
  SiRNA target sequence
atcttttggatcagtttatggattt

SEQ ID NO: 236154 - DNA, 25 bp, Artificial sequence
  SiRNA target sequence
tcttttggatcagtttatggattta

SEQ ID NO: 236155 - DNA, 25 bp, Artificial sequence
  SiRNA target sequence
cttttggatcagtttatggatttac

SEQ ID NO: 236156 - DNA, 25 bp, Artificial sequence
  SiRNA target sequence
ttttggatcagtttatggatttaca

SEQ ID NO: 236157 - DNA, 25 bp, Artificial sequence
  SiRNA target sequence
tttggatcagtttatggatttacaa

SEQ ID NO: 236158 - DNA, 25 bp, Artificial sequence
  SiRNA target sequence
ttggatcagtttatggatttacaat

SEQ ID NO: 236159 - DNA, 25 bp, Artificial sequence
  SiRNA target sequence
tggatcagtttatggatttacaatt

SEQ ID NO: 236160 - DNA, 25 bp, Artificial sequence
  SiRNA target sequence
ggatcagtttatggatttacaatta

SEQ ID NO: 236161 - DNA, 25 bp, Artificial sequence
  SiRNA target sequence
gatcagtttatggatttacaattac

SEQ ID NO: 236162 - DNA, 25 bp, Artificial sequence
  SiRNA target sequence
atcagtttatggatttacaattact

SEQ ID NO: 236163 - DNA, 25 bp, Artificial sequence
  SiRNA target sequence
tcagtttatggatttacaattacta

SEQ ID NO: 236164 - DNA, 25 bp, Artificial sequence
  SiRNA target sequence
cagtttatggatttacaattactac

SEQ ID NO: 236165 - DNA, 25 bp, Artificial sequence
  SiRNA target sequence
agtttatggatttacaattactaca

SEQ ID NO: 236166 - DNA, 25 bp, Artificial sequence
  SiRNA target sequence
gtttatggatttacaattactacat

SEQ ID NO: 236167 - DNA, 25 bp, Artificial sequence
  SiRNA target sequence
tttatggatttacaattactacatt

SEQ ID NO: 236168 - DNA, 25 bp, Artificial sequence
  SiRNA target sequence
ttatggatttacaattactacatta

SEQ ID NO: 236169 - DNA, 25 bp, Artificial sequence
  SiRNA target sequence
tatggatttacaattactacattat

SEQ ID NO: 236170 - DNA, 25 bp, Artificial sequence
  SiRNA target sequence
atggatttacaattactacattatt

SEQ ID NO: 236171 - DNA, 25 bp, Artificial sequence
  SiRNA target sequence
tggatttacaattactacattatta

SEQ ID NO: 236172 - DNA, 25 bp, Artificial sequence
  SiRNA target sequence
ggatttacaattactacattattag

SEQ ID NO: 236173 - DNA, 25 bp, Artificial sequence
  SiRNA target sequence
gatttacaattactacattattagg

SEQ ID NO: 236174 - DNA, 25 bp, Artificial sequence
  SiRNA target sequence
atttacaattactacattattagga

SEQ ID NO: 236175 - DNA, 25 bp, Artificial sequence
  SiRNA target sequence
tttacaattactacattattaggaa

SEQ ID NO: 236176 - DNA, 25 bp, Artificial sequence
  SiRNA target sequence
ttacaattactacattattaggaac

SEQ ID NO: 236177 - DNA, 25 bp, Artificial sequence
  SiRNA target sequence
tacaattactacattattaggaaca

SEQ ID NO: 236178 - DNA, 25 bp, Artificial sequence
  SiRNA target sequence
acaattactacattattaggaacaa

SEQ ID NO: 236179 - DNA, 25 bp, Artificial sequence
  SiRNA target sequence
caattactacattattaggaacaag

SEQ ID NO: 236180 - DNA, 25 bp, Artificial sequence
  SiRNA target sequence
aattactacattattaggaacaaga

SEQ ID NO: 236181 - DNA, 25 bp, Artificial sequence
  SiRNA target sequence
attactacattattaggaacaagag

SEQ ID NO: 236182 - DNA, 25 bp, Artificial sequence
  SiRNA target sequence
ttactacattattaggaacaagaga

SEQ ID NO: 236183 - DNA, 25 bp, Artificial sequence
  SiRNA target sequence
tactacattattaggaacaagagat

SEQ ID NO: 236184 - DNA, 25 bp, Artificial sequence
  SiRNA target sequence
actacattattaggaacaagagatg

SEQ ID NO: 236185 - DNA, 25 bp, Artificial sequence
  SiRNA target sequence
ctacattattaggaacaagagatgt

SEQ ID NO: 236186 - DNA, 25 bp, Artificial sequence
  SiRNA target sequence
tacattattaggaacaagagatgtt

SEQ ID NO: 236187 - DNA, 25 bp, Artificial sequence
  SiRNA target sequence
acattattaggaacaagagatgttc

SEQ ID NO: 236188 - DNA, 25 bp, Artificial sequence
  SiRNA target sequence
cattattaggaacaagagatgttcg

SEQ ID NO: 236189 - DNA, 25 bp, Artificial sequence
  SiRNA target sequence
attattaggaacaagagatgttcgt

SEQ ID NO: 236190 - DNA, 25 bp, Artificial sequence
  SiRNA target sequence
ttattaggaacaagagatgttcgta

SEQ ID NO: 236191 - DNA, 25 bp, Artificial sequence
  SiRNA target sequence
tattaggaacaagagatgttcgtag

SEQ ID NO: 236192 - DNA, 25 bp, Artificial sequence
  SiRNA target sequence
attaggaacaagagatgttcgtaga

SEQ ID NO: 236193 - DNA, 25 bp, Artificial sequence
  SiRNA target sequence
ttaggaacaagagatgttcgtagag

SEQ ID NO: 236194 - DNA, 25 bp, Artificial sequence
  SiRNA target sequence
taggaacaagagatgttcgtagagg

SEQ ID NO: 236195 - DNA, 25 bp, Artificial sequence
  SiRNA target sequence
aggaacaagagatgttcgtagaggt

SEQ ID NO: 236196 - DNA, 25 bp, Artificial sequence
  SiRNA target sequence
ggaacaagagatgttcgtagaggtg

SEQ ID NO: 236197 - DNA, 25 bp, Artificial sequence
  SiRNA target sequence
gaacaagagatgttcgtagaggtgc

SEQ ID NO: 236198 - DNA, 25 bp, Artificial sequence
  SiRNA target sequence
aacaagagatgttcgtagaggtgct

SEQ ID NO: 236199 - DNA, 25 bp, Artificial sequence
  SiRNA target sequence
acaagagatgttcgtagaggtgctc

SEQ ID NO: 236200 - DNA, 25 bp, Artificial sequence
  SiRNA target sequence
caagagatgttcgtagaggtgctcc

SEQ ID NO: 236201 - DNA, 25 bp, Artificial sequence
  SiRNA target sequence
aagagatgttcgtagaggtgctcct

SEQ ID NO: 236202 - DNA, 25 bp, Artificial sequence
  SiRNA target sequence
agagatgttcgtagaggtgctccta

SEQ ID NO: 236203 - DNA, 25 bp, Artificial sequence
  SiRNA target sequence
gagatgttcgtagaggtgctcctat

SEQ ID NO: 236204 - DNA, 25 bp, Artificial sequence
  SiRNA target sequence
agatgttcgtagaggtgctcctata

SEQ ID NO: 236205 - DNA, 25 bp, Artificial sequence
  SiRNA target sequence
gatgttcgtagaggtgctcctatat

SEQ ID NO: 236206 - DNA, 25 bp, Artificial sequence
  SiRNA target sequence
atgttcgtagaggtgctcctatatc

SEQ ID NO: 236207 - DNA, 25 bp, Artificial sequence
  SiRNA target sequence
tgttcgtagaggtgctcctatatcg

SEQ ID NO: 236208 - DNA, 25 bp, Artificial sequence
  SiRNA target sequence
gttcgtagaggtgctcctatatcgc

SEQ ID NO: 236209 - DNA, 25 bp, Artificial sequence
  SiRNA target sequence
ttcgtagaggtgctcctatatcgct

SEQ ID NO: 236210 - DNA, 25 bp, Artificial sequence
  SiRNA target sequence
tcgtagaggtgctcctatatcgctt

SEQ ID NO: 236211 - DNA, 25 bp, Artificial sequence
  SiRNA target sequence
cgtagaggtgctcctatatcgcttt

SEQ ID NO: 236212 - DNA, 25 bp, Artificial sequence
  SiRNA target sequence
gtagaggtgctcctatatcgctttg

SEQ ID NO: 236213 - DNA, 25 bp, Artificial sequence
  SiRNA target sequence
tagaggtgctcctatatcgctttgt

SEQ ID NO: 236214 - DNA, 25 bp, Artificial sequence
  SiRNA target sequence
agaggtgctcctatatcgctttgtg

SEQ ID NO: 236215 - DNA, 25 bp, Artificial sequence
  SiRNA target sequence
gaggtgctcctatatcgctttgtgt

SEQ ID NO: 236216 - DNA, 25 bp, Artificial sequence
  SiRNA target sequence
aggtgctcctatatcgctttgtgtt

SEQ ID NO: 236217 - DNA, 25 bp, Artificial sequence
  SiRNA target sequence
ggtgctcctatatcgctttgtgttc

SEQ ID NO: 236218 - DNA, 25 bp, Artificial sequence
  SiRNA target sequence
gtgctcctatatcgctttgtgttct

SEQ ID NO: 236219 - DNA, 25 bp, Artificial sequence
  SiRNA target sequence
tgctcctatatcgctttgtgttcta

SEQ ID NO: 236220 - DNA, 25 bp, Artificial sequence
  SiRNA target sequence
gctcctatatcgctttgtgttctaa

SEQ ID NO: 236221 - DNA, 25 bp, Artificial sequence
  SiRNA target sequence
ctcctatatcgctttgtgttctaat

SEQ ID NO: 236222 - DNA, 25 bp, Artificial sequence
  SiRNA target sequence
tcctatatcgctttgtgttctaata

SEQ ID NO: 236223 - DNA, 25 bp, Artificial sequence
  SiRNA target sequence
cctatatcgctttgtgttctaatat

SEQ ID NO: 236224 - DNA, 25 bp, Artificial sequence
  SiRNA target sequence
ctatatcgctttgtgttctaatatt

SEQ ID NO: 236225 - DNA, 25 bp, Artificial sequence
  SiRNA target sequence
tatatcgctttgtgttctaatattg

SEQ ID NO: 236226 - DNA, 25 bp, Artificial sequence
  SiRNA target sequence
atatcgctttgtgttctaatattgt

SEQ ID NO: 236227 - DNA, 25 bp, Artificial sequence
  SiRNA target sequence
tatcgctttgtgttctaatattgtt

SEQ ID NO: 236228 - DNA, 25 bp, Artificial sequence
  SiRNA target sequence
atcgctttgtgttctaatattgttc

SEQ ID NO: 236229 - DNA, 25 bp, Artificial sequence
  SiRNA target sequence
tcgctttgtgttctaatattgttct

SEQ ID NO: 236230 - DNA, 25 bp, Artificial sequence
  SiRNA target sequence
cgctttgtgttctaatattgttctg

SEQ ID NO: 236231 - DNA, 25 bp, Artificial sequence
  SiRNA target sequence
gctttgtgttctaatattgttctgc

SEQ ID NO: 236232 - DNA, 25 bp, Artificial sequence
  SiRNA target sequence
ctttgtgttctaatattgttctgcc

SEQ ID NO: 236233 - DNA, 25 bp, Artificial sequence
  SiRNA target sequence
tttgtgttctaatattgttctgcct

SEQ ID NO: 236234 - DNA, 25 bp, Artificial sequence
  SiRNA target sequence
ttgtgttctaatattgttctgcctt

SEQ ID NO: 236235 - DNA, 25 bp, Artificial sequence
  SiRNA target sequence
tgtgttctaatattgttctgcctta

SEQ ID NO: 236236 - DNA, 25 bp, Artificial sequence
  SiRNA target sequence
gtgttctaatattgttctgccttat

SEQ ID NO: 236237 - DNA, 25 bp, Artificial sequence
  SiRNA target sequence
tgttctaatattgttctgccttata

SEQ ID NO: 236238 - DNA, 25 bp, Artificial sequence
  SiRNA target sequence
gttctaatattgttctgccttatat

SEQ ID NO: 236239 - DNA, 25 bp, Artificial sequence
  SiRNA target sequence
ttctaatattgttctgccttatatg

SEQ ID NO: 236240 - DNA, 25 bp, Artificial sequence
  SiRNA target sequence
tctaatattgttctgccttatatgg

SEQ ID NO: 236241 - DNA, 25 bp, Artificial sequence
  SiRNA target sequence
ctaatattgttctgccttatatggt

SEQ ID NO: 236242 - DNA, 25 bp, Artificial sequence
  SiRNA target sequence
taatattgttctgccttatatggtt

SEQ ID NO: 236243 - DNA, 25 bp, Artificial sequence
  SiRNA target sequence
aatattgttctgccttatatggttt

SEQ ID NO: 236244 - DNA, 25 bp, Artificial sequence
  SiRNA target sequence
atattgttctgccttatatggtttt

SEQ ID NO: 236245 - DNA, 25 bp, Artificial sequence
  SiRNA target sequence
tattgttctgccttatatggtttta

SEQ ID NO: 236246 - DNA, 25 bp, Artificial sequence
  SiRNA target sequence
attgttctgccttatatggttttat

SEQ ID NO: 236247 - DNA, 25 bp, Artificial sequence
  SiRNA target sequence
ttgttctgccttatatggttttatt

SEQ ID NO: 236248 - DNA, 25 bp, Artificial sequence
  SiRNA target sequence
tgttctgccttatatggttttattc

SEQ ID NO: 236249 - DNA, 25 bp, Artificial sequence
  SiRNA target sequence
gttctgccttatatggttttattct

SEQ ID NO: 236250 - DNA, 25 bp, Artificial sequence
  SiRNA target sequence
ttctgccttatatggttttattctg

SEQ ID NO: 236251 - DNA, 25 bp, Artificial sequence
  SiRNA target sequence
tctgccttatatggttttattctgt

SEQ ID NO: 236252 - DNA, 25 bp, Artificial sequence
  SiRNA target sequence
ctgccttatatggttttattctgtt

SEQ ID NO: 236253 - DNA, 25 bp, Artificial sequence
  SiRNA target sequence
tgccttatatggttttattctgttt

SEQ ID NO: 236254 - DNA, 25 bp, Artificial sequence
  SiRNA target sequence
gccttatatggttttattctgtttt

SEQ ID NO: 236255 - DNA, 25 bp, Artificial sequence
  SiRNA target sequence
ccttatatggttttattctgttttc

SEQ ID NO: 236256 - DNA, 25 bp, Artificial sequence
  SiRNA target sequence
cttatatggttttattctgttttct

SEQ ID NO: 236257 - DNA, 25 bp, Artificial sequence
  SiRNA target sequence
ttatatggttttattctgttttcta

SEQ ID NO: 236258 - DNA, 25 bp, Artificial sequence
  SiRNA target sequence
tatatggttttattctgttttctat

SEQ ID NO: 236259 - DNA, 25 bp, Artificial sequence
  SiRNA target sequence
atatggttttattctgttttctatc

SEQ ID NO: 236260 - DNA, 25 bp, Artificial sequence
  SiRNA target sequence
tatggttttattctgttttctatct

SEQ ID NO: 236261 - DNA, 25 bp, Artificial sequence
  SiRNA target sequence
atggttttattctgttttctatctc

SEQ ID NO: 236262 - DNA, 25 bp, Artificial sequence
  SiRNA target sequence
tggttttattctgttttctatctca

SEQ ID NO: 236263 - DNA, 25 bp, Artificial sequence
  SiRNA target sequence
ggttttattctgttttctatctcaa

SEQ ID NO: 236264 - DNA, 25 bp, Artificial sequence
  SiRNA target sequence
gttttattctgttttctatctcaat

SEQ ID NO: 236265 - DNA, 25 bp, Artificial sequence
  SiRNA target sequence
ttttattctgttttctatctcaata

SEQ ID NO: 236266 - DNA, 25 bp, Artificial sequence
  SiRNA target sequence
tttattctgttttctatctcaatag

SEQ ID NO: 236267 - DNA, 25 bp, Artificial sequence
  SiRNA target sequence
ttattctgttttctatctcaataga

SEQ ID NO: 236268 - DNA, 25 bp, Artificial sequence
  SiRNA target sequence
tattctgttttctatctcaatagaa

SEQ ID NO: 236269 - DNA, 25 bp, Artificial sequence
  SiRNA target sequence
attctgttttctatctcaatagaaa

SEQ ID NO: 236270 - DNA, 25 bp, Artificial sequence
  SiRNA target sequence
ttctgttttctatctcaatagaaaa

SEQ ID NO: 236271 - DNA, 25 bp, Artificial sequence
  SiRNA target sequence
tctgttttctatctcaatagaaaat

SEQ ID NO: 236272 - DNA, 25 bp, Artificial sequence
  SiRNA target sequence
ctgttttctatctcaatagaaaata

SEQ ID NO: 236273 - DNA, 25 bp, Artificial sequence
  SiRNA target sequence
tgttttctatctcaatagaaaatat

SEQ ID NO: 236274 - DNA, 25 bp, Artificial sequence
  SiRNA target sequence
gttttctatctcaatagaaaatata

SEQ ID NO: 236275 - DNA, 25 bp, Artificial sequence
  SiRNA target sequence
ttttctatctcaatagaaaatataa

SEQ ID NO: 236276 - DNA, 25 bp, Artificial sequence
  SiRNA target sequence
tttctatctcaatagaaaatataaa

SEQ ID NO: 236277 - DNA, 25 bp, Artificial sequence
  SiRNA target sequence
ttctatctcaatagaaaatataaag

SEQ ID NO: 236278 - DNA, 25 bp, Artificial sequence
  SiRNA target sequence
tctatctcaatagaaaatataaaga

SEQ ID NO: 236279 - DNA, 25 bp, Artificial sequence
  SiRNA target sequence
ctatctcaatagaaaatataaagaa

SEQ ID NO: 236280 - DNA, 25 bp, Artificial sequence
  SiRNA target sequence
tatctcaatagaaaatataaagaat

SEQ ID NO: 236281 - DNA, 25 bp, Artificial sequence
  SiRNA target sequence
atctcaatagaaaatataaagaatc

SEQ ID NO: 236282 - DNA, 25 bp, Artificial sequence
  SiRNA target sequence
tctcaatagaaaatataaagaatct

SEQ ID NO: 236283 - DNA, 25 bp, Artificial sequence
  SiRNA target sequence
ctcaatagaaaatataaagaatctg

SEQ ID NO: 236284 - DNA, 25 bp, Artificial sequence
  SiRNA target sequence
tcaatagaaaatataaagaatctgt

SEQ ID NO: 236285 - DNA, 25 bp, Artificial sequence
  SiRNA target sequence
caatagaaaatataaagaatctgtc

SEQ ID NO: 236286 - DNA, 25 bp, Artificial sequence
  SiRNA target sequence
aatagaaaatataaagaatctgtcg

SEQ ID NO: 236287 - DNA, 25 bp, Artificial sequence
  SiRNA target sequence
atagaaaatataaagaatctgtcga

SEQ ID NO: 236288 - DNA, 25 bp, Artificial sequence
  SiRNA target sequence
tagaaaatataaagaatctgtcgag

SEQ ID NO: 236289 - DNA, 25 bp, Artificial sequence
  SiRNA target sequence
agaaaatataaagaatctgtcgaga

SEQ ID NO: 236290 - DNA, 25 bp, Artificial sequence
  SiRNA target sequence
gaaaatataaagaatctgtcgagaa

SEQ ID NO: 236291 - DNA, 25 bp, Artificial sequence
  SiRNA target sequence
aaaatataaagaatctgtcgagaat

SEQ ID NO: 236292 - DNA, 25 bp, Artificial sequence
  SiRNA target sequence
aaatataaagaatctgtcgagaata

SEQ ID NO: 236293 - DNA, 25 bp, Artificial sequence
  SiRNA target sequence
aatataaagaatctgtcgagaataa

SEQ ID NO: 236294 - DNA, 25 bp, Artificial sequence
  SiRNA target sequence
atataaagaatctgtcgagaataat

SEQ ID NO: 236295 - DNA, 25 bp, Artificial sequence
  SiRNA target sequence
tataaagaatctgtcgagaataatg

SEQ ID NO: 236296 - DNA, 25 bp, Artificial sequence
  SiRNA target sequence
ataaagaatctgtcgagaataatgc

SEQ ID NO: 236297 - DNA, 25 bp, Artificial sequence
  SiRNA target sequence
taaagaatctgtcgagaataatgca

SEQ ID NO: 236298 - DNA, 25 bp, Artificial sequence
  SiRNA target sequence
aaagaatctgtcgagaataatgcac

SEQ ID NO: 236299 - DNA, 25 bp, Artificial sequence
  SiRNA target sequence
aagaatctgtcgagaataatgcacc

SEQ ID NO: 236300 - DNA, 25 bp, Artificial sequence
  SiRNA target sequence
agaatctgtcgagaataatgcacca

SEQ ID NO: 236301 - DNA, 25 bp, Artificial sequence
  SiRNA target sequence
gaatctgtcgagaataatgcaccaa

SEQ ID NO: 236302 - DNA, 25 bp, Artificial sequence
  SiRNA target sequence
aatctgtcgagaataatgcaccaat

SEQ ID NO: 236303 - DNA, 25 bp, Artificial sequence
  SiRNA target sequence
atctgtcgagaataatgcaccaatt

SEQ ID NO: 236304 - DNA, 25 bp, Artificial sequence
  SiRNA target sequence
tctgtcgagaataatgcaccaattg

SEQ ID NO: 236305 - DNA, 25 bp, Artificial sequence
  SiRNA target sequence
ctgtcgagaataatgcaccaattga

SEQ ID NO: 236306 - DNA, 25 bp, Artificial sequence
  SiRNA target sequence
tgtcgagaataatgcaccaattgat

SEQ ID NO: 236307 - DNA, 25 bp, Artificial sequence
  SiRNA target sequence
gtcgagaataatgcaccaattgata

SEQ ID NO: 236308 - DNA, 25 bp, Artificial sequence
  SiRNA target sequence
tcgagaataatgcaccaattgatat

SEQ ID NO: 236309 - DNA, 25 bp, Artificial sequence
  SiRNA target sequence
cgagaataatgcaccaattgatatt

SEQ ID NO: 236310 - DNA, 25 bp, Artificial sequence
  SiRNA target sequence
gagaataatgcaccaattgatattg

SEQ ID NO: 236311 - DNA, 25 bp, Artificial sequence
  SiRNA target sequence
agaataatgcaccaattgatattga

SEQ ID NO: 236312 - DNA, 25 bp, Artificial sequence
  SiRNA target sequence
gaataatgcaccaattgatattgat

SEQ ID NO: 236313 - DNA, 25 bp, Artificial sequence
  SiRNA target sequence
aataatgcaccaattgatattgatt

SEQ ID NO: 236314 - DNA, 25 bp, Artificial sequence
  SiRNA target sequence
ataatgcaccaattgatattgattt

SEQ ID NO: 236315 - DNA, 25 bp, Artificial sequence
  SiRNA target sequence
taatgcaccaattgatattgattta

SEQ ID NO: 236316 - DNA, 25 bp, Artificial sequence
  SiRNA target sequence
aatgcaccaattgatattgatttat

SEQ ID NO: 236317 - DNA, 25 bp, Artificial sequence
  SiRNA target sequence
atgcaccaattgatattgatttatt

SEQ ID NO: 236318 - DNA, 25 bp, Artificial sequence
  SiRNA target sequence
tgcaccaattgatattgatttattc

SEQ ID NO: 236319 - DNA, 25 bp, Artificial sequence
  SiRNA target sequence
gcaccaattgatattgatttattca

SEQ ID NO: 236320 - DNA, 25 bp, Artificial sequence
  SiRNA target sequence
caccaattgatattgatttattcac

SEQ ID NO: 236321 - DNA, 25 bp, Artificial sequence
  SiRNA target sequence
accaattgatattgatttattcact

SEQ ID NO: 236322 - DNA, 25 bp, Artificial sequence
  SiRNA target sequence
ccaattgatattgatttattcacta

SEQ ID NO: 236323 - DNA, 25 bp, Artificial sequence
  SiRNA target sequence
caattgatattgatttattcactag

SEQ ID NO: 236324 - DNA, 25 bp, Artificial sequence
  SiRNA target sequence
aattgatattgatttattcactagt

SEQ ID NO: 236325 - DNA, 25 bp, Artificial sequence
  SiRNA target sequence
attgatattgatttattcactagtt

SEQ ID NO: 236326 - DNA, 25 bp, Artificial sequence
  SiRNA target sequence
ttgatattgatttattcactagttc

SEQ ID NO: 236327 - DNA, 25 bp, Artificial sequence
  SiRNA target sequence
tgatattgatttattcactagttca

SEQ ID NO: 236328 - DNA, 25 bp, Artificial sequence
  SiRNA target sequence
gatattgatttattcactagttcaa

SEQ ID NO: 236329 - DNA, 25 bp, Artificial sequence
  SiRNA target sequence
atattgatttattcactagttcaaa

SEQ ID NO: 236330 - DNA, 25 bp, Artificial sequence
  SiRNA target sequence
tattgatttattcactagttcaaaa

SEQ ID NO: 236331 - DNA, 25 bp, Artificial sequence
  SiRNA target sequence
attgatttattcactagttcaaaag

SEQ ID NO: 236332 - DNA, 25 bp, Artificial sequence
  SiRNA target sequence
ttgatttattcactagttcaaaagt

SEQ ID NO: 236333 - DNA, 25 bp, Artificial sequence
  SiRNA target sequence
tgatttattcactagttcaaaagtc

SEQ ID NO: 236334 - DNA, 25 bp, Artificial sequence
  SiRNA target sequence
gatttattcactagttcaaaagtca

SEQ ID NO: 236335 - DNA, 25 bp, Artificial sequence
  SiRNA target sequence
atttattcactagttcaaaagtcaa

SEQ ID NO: 236336 - DNA, 25 bp, Artificial sequence
  SiRNA target sequence
tttattcactagttcaaaagtcaag

SEQ ID NO: 236337 - DNA, 25 bp, Artificial sequence
  SiRNA target sequence
ttattcactagttcaaaagtcaagg

SEQ ID NO: 236338 - DNA, 25 bp, Artificial sequence
  SiRNA target sequence
tattcactagttcaaaagtcaaggc

SEQ ID NO: 236339 - DNA, 25 bp, Artificial sequence
  SiRNA target sequence
attcactagttcaaaagtcaaggca

SEQ ID NO: 236340 - DNA, 25 bp, Artificial sequence
  SiRNA target sequence
ttcactagttcaaaagtcaaggcac

SEQ ID NO: 236341 - DNA, 25 bp, Artificial sequence
  SiRNA target sequence
tcactagttcaaaagtcaaggcacc

SEQ ID NO: 236342 - DNA, 25 bp, Artificial sequence
  SiRNA target sequence
cactagttcaaaagtcaaggcacct

SEQ ID NO: 236343 - DNA, 25 bp, Artificial sequence
  SiRNA target sequence
actagttcaaaagtcaaggcacctt

SEQ ID NO: 236344 - DNA, 25 bp, Artificial sequence
  SiRNA target sequence
ctagttcaaaagtcaaggcaccttc

SEQ ID NO: 236345 - DNA, 25 bp, Artificial sequence
  SiRNA target sequence
tagttcaaaagtcaaggcaccttct

SEQ ID NO: 236346 - DNA, 25 bp, Artificial sequence
  SiRNA target sequence
agttcaaaagtcaaggcaccttctt

SEQ ID NO: 236347 - DNA, 25 bp, Artificial sequence
  SiRNA target sequence
gttcaaaagtcaaggcaccttcttc

SEQ ID NO: 236348 - DNA, 25 bp, Artificial sequence
  SiRNA target sequence
ttcaaaagtcaaggcaccttcttct

SEQ ID NO: 236349 - DNA, 25 bp, Artificial sequence
  SiRNA target sequence
tcaaaagtcaaggcaccttcttctg

SEQ ID NO: 236350 - DNA, 25 bp, Artificial sequence
  SiRNA target sequence
caaaagtcaaggcaccttcttctga

SEQ ID NO: 236351 - DNA, 25 bp, Artificial sequence
  SiRNA target sequence
aaaagtcaaggcaccttcttctgaa

SEQ ID NO: 236352 - DNA, 25 bp, Artificial sequence
  SiRNA target sequence
aaagtcaaggcaccttcttctgaac

SEQ ID NO: 236353 - DNA, 25 bp, Artificial sequence
  SiRNA target sequence
aagtcaaggcaccttcttctgaacc

SEQ ID NO: 236354 - DNA, 25 bp, Artificial sequence
  SiRNA target sequence
agtcaaggcaccttcttctgaacct

SEQ ID NO: 236355 - DNA, 25 bp, Artificial sequence
  SiRNA target sequence
gtcaaggcaccttcttctgaaccta

SEQ ID NO: 236356 - DNA, 25 bp, Artificial sequence
  SiRNA target sequence
tcaaggcaccttcttctgaacctac

SEQ ID NO: 236357 - DNA, 25 bp, Artificial sequence
  SiRNA target sequence
caaggcaccttcttctgaacctact

SEQ ID NO: 236358 - DNA, 25 bp, Artificial sequence
  SiRNA target sequence
aaggcaccttcttctgaacctactg

SEQ ID NO: 236359 - DNA, 25 bp, Artificial sequence
  SiRNA target sequence
aggcaccttcttctgaacctactgt

SEQ ID NO: 236360 - DNA, 25 bp, Artificial sequence
  SiRNA target sequence
ggcaccttcttctgaacctactgtt

SEQ ID NO: 236361 - DNA, 25 bp, Artificial sequence
  SiRNA target sequence
gcaccttcttctgaacctactgttg

SEQ ID NO: 236362 - DNA, 25 bp, Artificial sequence
  SiRNA target sequence
caccttcttctgaacctactgttgc

SEQ ID NO: 236363 - DNA, 25 bp, Artificial sequence
  SiRNA target sequence
accttcttctgaacctactgttgct

SEQ ID NO: 236364 - DNA, 25 bp, Artificial sequence
  SiRNA target sequence
ccttcttctgaacctactgttgcta

SEQ ID NO: 236365 - DNA, 25 bp, Artificial sequence
  SiRNA target sequence
cttcttctgaacctactgttgctac

SEQ ID NO: 236366 - DNA, 25 bp, Artificial sequence
  SiRNA target sequence
ttcttctgaacctactgttgctacc

SEQ ID NO: 236367 - DNA, 25 bp, Artificial sequence
  SiRNA target sequence
tcttctgaacctactgttgctacca

SEQ ID NO: 236368 - DNA, 25 bp, Artificial sequence
  SiRNA target sequence
cttctgaacctactgttgctaccaa

SEQ ID NO: 236369 - DNA, 25 bp, Artificial sequence
  SiRNA target sequence
ttctgaacctactgttgctaccaaa

SEQ ID NO: 236370 - DNA, 25 bp, Artificial sequence
  SiRNA target sequence
tctgaacctactgttgctaccaaaa

SEQ ID NO: 236371 - DNA, 25 bp, Artificial sequence
  SiRNA target sequence
ctgaacctactgttgctaccaaaag

SEQ ID NO: 236372 - DNA, 25 bp, Artificial sequence
  SiRNA target sequence
tgaacctactgttgctaccaaaagt

SEQ ID NO: 236373 - DNA, 25 bp, Artificial sequence
  SiRNA target sequence
gaacctactgttgctaccaaaagtg

SEQ ID NO: 236374 - DNA, 25 bp, Artificial sequence
  SiRNA target sequence
aacctactgttgctaccaaaagtgt

SEQ ID NO: 236375 - DNA, 25 bp, Artificial sequence
  SiRNA target sequence
acctactgttgctaccaaaagtgtt

SEQ ID NO: 236376 - DNA, 25 bp, Artificial sequence
  SiRNA target sequence
cctactgttgctaccaaaagtgtta

SEQ ID NO: 236377 - DNA, 25 bp, Artificial sequence
  SiRNA target sequence
ctactgttgctaccaaaagtgttac

SEQ ID NO: 236378 - DNA, 25 bp, Artificial sequence
  SiRNA target sequence
tactgttgctaccaaaagtgttact

SEQ ID NO: 236379 - DNA, 25 bp, Artificial sequence
  SiRNA target sequence
actgttgctaccaaaagtgttacta

SEQ ID NO: 236380 - DNA, 25 bp, Artificial sequence
  SiRNA target sequence
ctgttgctaccaaaagtgttactac

SEQ ID NO: 236381 - DNA, 25 bp, Artificial sequence
  SiRNA target sequence
tgttgctaccaaaagtgttactaca

SEQ ID NO: 236382 - DNA, 25 bp, Artificial sequence
  SiRNA target sequence
gttgctaccaaaagtgttactacag

SEQ ID NO: 236383 - DNA, 25 bp, Artificial sequence
  SiRNA target sequence
ttgctaccaaaagtgttactacaga

SEQ ID NO: 236384 - DNA, 25 bp, Artificial sequence
  SiRNA target sequence
tgctaccaaaagtgttactacagaa

SEQ ID NO: 236385 - DNA, 25 bp, Artificial sequence
  SiRNA target sequence
gctaccaaaagtgttactacagaag

SEQ ID NO: 236386 - DNA, 25 bp, Artificial sequence
  SiRNA target sequence
ctaccaaaagtgttactacagaaga

SEQ ID NO: 236387 - DNA, 25 bp, Artificial sequence
  SiRNA target sequence
taccaaaagtgttactacagaagaa

SEQ ID NO: 236388 - DNA, 25 bp, Artificial sequence
  SiRNA target sequence
accaaaagtgttactacagaagaat

SEQ ID NO: 236389 - DNA, 25 bp, Artificial sequence
  SiRNA target sequence
ccaaaagtgttactacagaagaata

SEQ ID NO: 236390 - DNA, 25 bp, Artificial sequence
  SiRNA target sequence
caaaagtgttactacagaagaataa

SEQ ID NO: 236391 - DNA, 26 bp, Artificial sequence
  SiRNA target sequence
atgtcagtagacaattcgaaagttct

SEQ ID NO: 236392 - DNA, 26 bp, Artificial sequence
  SiRNA target sequence
tgtcagtagacaattcgaaagttcta

SEQ ID NO: 236393 - DNA, 26 bp, Artificial sequence
  SiRNA target sequence
gtcagtagacaattcgaaagttctac

SEQ ID NO: 236394 - DNA, 26 bp, Artificial sequence
  SiRNA target sequence
tcagtagacaattcgaaagttctaca

SEQ ID NO: 236395 - DNA, 26 bp, Artificial sequence
  SiRNA target sequence
cagtagacaattcgaaagttctacaa

SEQ ID NO: 236396 - DNA, 26 bp, Artificial sequence
  SiRNA target sequence
agtagacaattcgaaagttctacaaa

SEQ ID NO: 236397 - DNA, 26 bp, Artificial sequence
  SiRNA target sequence
gtagacaattcgaaagttctacaaaa

SEQ ID NO: 236398 - DNA, 26 bp, Artificial sequence
  SiRNA target sequence
tagacaattcgaaagttctacaaaat

SEQ ID NO: 236399 - DNA, 26 bp, Artificial sequence
  SiRNA target sequence
agacaattcgaaagttctacaaaata

SEQ ID NO: 236400 - DNA, 26 bp, Artificial sequence
  SiRNA target sequence
gacaattcgaaagttctacaaaataa

SEQ ID NO: 236401 - DNA, 26 bp, Artificial sequence
  SiRNA target sequence
acaattcgaaagttctacaaaataac

SEQ ID NO: 236402 - DNA, 26 bp, Artificial sequence
  SiRNA target sequence
caattcgaaagttctacaaaataacg

SEQ ID NO: 236403 - DNA, 26 bp, Artificial sequence
  SiRNA target sequence
aattcgaaagttctacaaaataacga

SEQ ID NO: 236404 - DNA, 26 bp, Artificial sequence
  SiRNA target sequence
attcgaaagttctacaaaataacgaa

SEQ ID NO: 236405 - DNA, 26 bp, Artificial sequence
  SiRNA target sequence
ttcgaaagttctacaaaataacgaaa

SEQ ID NO: 236406 - DNA, 26 bp, Artificial sequence
  SiRNA target sequence
tcgaaagttctacaaaataacgaaaa

SEQ ID NO: 236407 - DNA, 26 bp, Artificial sequence
  SiRNA target sequence
cgaaagttctacaaaataacgaaaac

SEQ ID NO: 236408 - DNA, 26 bp, Artificial sequence
  SiRNA target sequence
gaaagttctacaaaataacgaaaact

SEQ ID NO: 236409 - DNA, 26 bp, Artificial sequence
  SiRNA target sequence
aaagttctacaaaataacgaaaactc

SEQ ID NO: 236410 - DNA, 26 bp, Artificial sequence
  SiRNA target sequence
aagttctacaaaataacgaaaactct

SEQ ID NO: 236411 - DNA, 26 bp, Artificial sequence
  SiRNA target sequence
agttctacaaaataacgaaaactctg

SEQ ID NO: 236412 - DNA, 26 bp, Artificial sequence
  SiRNA target sequence
gttctacaaaataacgaaaactctgc

SEQ ID NO: 236413 - DNA, 26 bp, Artificial sequence
  SiRNA target sequence
ttctacaaaataacgaaaactctgct

SEQ ID NO: 236414 - DNA, 26 bp, Artificial sequence
  SiRNA target sequence
tctacaaaataacgaaaactctgctc

SEQ ID NO: 236415 - DNA, 26 bp, Artificial sequence
  SiRNA target sequence
ctacaaaataacgaaaactctgctct

SEQ ID NO: 236416 - DNA, 26 bp, Artificial sequence
  SiRNA target sequence
tacaaaataacgaaaactctgctctt

SEQ ID NO: 236417 - DNA, 26 bp, Artificial sequence
  SiRNA target sequence
acaaaataacgaaaactctgctcttc

SEQ ID NO: 236418 - DNA, 26 bp, Artificial sequence
  SiRNA target sequence
caaaataacgaaaactctgctcttcc

SEQ ID NO: 236419 - DNA, 26 bp, Artificial sequence
  SiRNA target sequence
aaaataacgaaaactctgctcttcct

SEQ ID NO: 236420 - DNA, 26 bp, Artificial sequence
  SiRNA target sequence
aaataacgaaaactctgctcttccta

SEQ ID NO: 236421 - DNA, 26 bp, Artificial sequence
  SiRNA target sequence
aataacgaaaactctgctcttcctac

SEQ ID NO: 236422 - DNA, 26 bp, Artificial sequence
  SiRNA target sequence
ataacgaaaactctgctcttcctaca

SEQ ID NO: 236423 - DNA, 26 bp, Artificial sequence
  SiRNA target sequence
taacgaaaactctgctcttcctacag

SEQ ID NO: 236424 - DNA, 26 bp, Artificial sequence
  SiRNA target sequence
aacgaaaactctgctcttcctacaga

SEQ ID NO: 236425 - DNA, 26 bp, Artificial sequence
  SiRNA target sequence
acgaaaactctgctcttcctacagaa

SEQ ID NO: 236426 - DNA, 26 bp, Artificial sequence
  SiRNA target sequence
cgaaaactctgctcttcctacagaag

SEQ ID NO: 236427 - DNA, 26 bp, Artificial sequence
  SiRNA target sequence
gaaaactctgctcttcctacagaaga

SEQ ID NO: 236428 - DNA, 26 bp, Artificial sequence
  SiRNA target sequence
aaaactctgctcttcctacagaagat

SEQ ID NO: 236429 - DNA, 26 bp, Artificial sequence
  SiRNA target sequence
aaactctgctcttcctacagaagatg

SEQ ID NO: 236430 - DNA, 26 bp, Artificial sequence
  SiRNA target sequence
aactctgctcttcctacagaagatga

SEQ ID NO: 236431 - DNA, 26 bp, Artificial sequence
  SiRNA target sequence
actctgctcttcctacagaagatgaa

SEQ ID NO: 236432 - DNA, 26 bp, Artificial sequence
  SiRNA target sequence
ctctgctcttcctacagaagatgaaa

SEQ ID NO: 236433 - DNA, 26 bp, Artificial sequence
  SiRNA target sequence
tctgctcttcctacagaagatgaaat

SEQ ID NO: 236434 - DNA, 26 bp, Artificial sequence
  SiRNA target sequence
ctgctcttcctacagaagatgaaatt

SEQ ID NO: 236435 - DNA, 26 bp, Artificial sequence
  SiRNA target sequence
tgctcttcctacagaagatgaaattg

SEQ ID NO: 236436 - DNA, 26 bp, Artificial sequence
  SiRNA target sequence
gctcttcctacagaagatgaaattga

SEQ ID NO: 236437 - DNA, 26 bp, Artificial sequence
  SiRNA target sequence
ctcttcctacagaagatgaaattgag

SEQ ID NO: 236438 - DNA, 26 bp, Artificial sequence
  SiRNA target sequence
tcttcctacagaagatgaaattgagt

SEQ ID NO: 236439 - DNA, 26 bp, Artificial sequence
  SiRNA target sequence
cttcctacagaagatgaaattgagta

SEQ ID NO: 236440 - DNA, 26 bp, Artificial sequence
  SiRNA target sequence
ttcctacagaagatgaaattgagtat

SEQ ID NO: 236441 - DNA, 26 bp, Artificial sequence
  SiRNA target sequence
tcctacagaagatgaaattgagtatg

SEQ ID NO: 236442 - DNA, 26 bp, Artificial sequence
  SiRNA target sequence
cctacagaagatgaaattgagtatga

SEQ ID NO: 236443 - DNA, 26 bp, Artificial sequence
  SiRNA target sequence
ctacagaagatgaaattgagtatgag

SEQ ID NO: 236444 - DNA, 26 bp, Artificial sequence
  SiRNA target sequence
tacagaagatgaaattgagtatgagg

SEQ ID NO: 236445 - DNA, 26 bp, Artificial sequence
  SiRNA target sequence
acagaagatgaaattgagtatgaggc

SEQ ID NO: 236446 - DNA, 26 bp, Artificial sequence
  SiRNA target sequence
cagaagatgaaattgagtatgaggcc

SEQ ID NO: 236447 - DNA, 26 bp, Artificial sequence
  SiRNA target sequence
agaagatgaaattgagtatgaggcca

SEQ ID NO: 236448 - DNA, 26 bp, Artificial sequence
  SiRNA target sequence
gaagatgaaattgagtatgaggccag

SEQ ID NO: 236449 - DNA, 26 bp, Artificial sequence
  SiRNA target sequence
aagatgaaattgagtatgaggccagc

SEQ ID NO: 236450 - DNA, 26 bp, Artificial sequence
  SiRNA target sequence
agatgaaattgagtatgaggccagca

SEQ ID NO: 236451 - DNA, 26 bp, Artificial sequence
  SiRNA target sequence
gatgaaattgagtatgaggccagcaa

SEQ ID NO: 236452 - DNA, 26 bp, Artificial sequence
  SiRNA target sequence
atgaaattgagtatgaggccagcaat

SEQ ID NO: 236453 - DNA, 26 bp, Artificial sequence
  SiRNA target sequence
tgaaattgagtatgaggccagcaatg

SEQ ID NO: 236454 - DNA, 26 bp, Artificial sequence
  SiRNA target sequence
gaaattgagtatgaggccagcaatgg

SEQ ID NO: 236455 - DNA, 26 bp, Artificial sequence
  SiRNA target sequence
aaattgagtatgaggccagcaatggt

SEQ ID NO: 236456 - DNA, 26 bp, Artificial sequence
  SiRNA target sequence
aattgagtatgaggccagcaatggtt

SEQ ID NO: 236457 - DNA, 26 bp, Artificial sequence
  SiRNA target sequence
attgagtatgaggccagcaatggttc

SEQ ID NO: 236458 - DNA, 26 bp, Artificial sequence
  SiRNA target sequence
ttgagtatgaggccagcaatggttct

SEQ ID NO: 236459 - DNA, 26 bp, Artificial sequence
  SiRNA target sequence
tgagtatgaggccagcaatggttctg

SEQ ID NO: 236460 - DNA, 26 bp, Artificial sequence
  SiRNA target sequence
gagtatgaggccagcaatggttctgg

SEQ ID NO: 236461 - DNA, 26 bp, Artificial sequence
  SiRNA target sequence
agtatgaggccagcaatggttctggt

SEQ ID NO: 236462 - DNA, 26 bp, Artificial sequence
  SiRNA target sequence
gtatgaggccagcaatggttctggta

SEQ ID NO: 236463 - DNA, 26 bp, Artificial sequence
  SiRNA target sequence
tatgaggccagcaatggttctggtat

SEQ ID NO: 236464 - DNA, 26 bp, Artificial sequence
  SiRNA target sequence
atgaggccagcaatggttctggtata

SEQ ID NO: 236465 - DNA, 26 bp, Artificial sequence
  SiRNA target sequence
tgaggccagcaatggttctggtatat

SEQ ID NO: 236466 - DNA, 26 bp, Artificial sequence
  SiRNA target sequence
gaggccagcaatggttctggtatata

SEQ ID NO: 236467 - DNA, 26 bp, Artificial sequence
  SiRNA target sequence
aggccagcaatggttctggtatatat

SEQ ID NO: 236468 - DNA, 26 bp, Artificial sequence
  SiRNA target sequence
ggccagcaatggttctggtatatatt

SEQ ID NO: 236469 - DNA, 26 bp, Artificial sequence
  SiRNA target sequence
gccagcaatggttctggtatatattc

SEQ ID NO: 236470 - DNA, 26 bp, Artificial sequence
  SiRNA target sequence
ccagcaatggttctggtatatattca

SEQ ID NO: 236471 - DNA, 26 bp, Artificial sequence
  SiRNA target sequence
cagcaatggttctggtatatattcac

SEQ ID NO: 236472 - DNA, 26 bp, Artificial sequence
  SiRNA target sequence
agcaatggttctggtatatattcact

SEQ ID NO: 236473 - DNA, 26 bp, Artificial sequence
  SiRNA target sequence
gcaatggttctggtatatattcactt

SEQ ID NO: 236474 - DNA, 26 bp, Artificial sequence
  SiRNA target sequence
caatggttctggtatatattcactta

SEQ ID NO: 236475 - DNA, 26 bp, Artificial sequence
  SiRNA target sequence
aatggttctggtatatattcacttat

SEQ ID NO: 236476 - DNA, 26 bp, Artificial sequence
  SiRNA target sequence
atggttctggtatatattcacttatt

SEQ ID NO: 236477 - DNA, 26 bp, Artificial sequence
  SiRNA target sequence
tggttctggtatatattcacttatta

SEQ ID NO: 236478 - DNA, 26 bp, Artificial sequence
  SiRNA target sequence
ggttctggtatatattcacttattag

SEQ ID NO: 236479 - DNA, 26 bp, Artificial sequence
  SiRNA target sequence
gttctggtatatattcacttattaga

SEQ ID NO: 236480 - DNA, 26 bp, Artificial sequence
  SiRNA target sequence
ttctggtatatattcacttattagag

SEQ ID NO: 236481 - DNA, 26 bp, Artificial sequence
  SiRNA target sequence
tctggtatatattcacttattagagt

SEQ ID NO: 236482 - DNA, 26 bp, Artificial sequence
  SiRNA target sequence
ctggtatatattcacttattagagta

SEQ ID NO: 236483 - DNA, 26 bp, Artificial sequence
  SiRNA target sequence
tggtatatattcacttattagagtag

SEQ ID NO: 236484 - DNA, 26 bp, Artificial sequence
  SiRNA target sequence
ggtatatattcacttattagagtagc

SEQ ID NO: 236485 - DNA, 26 bp, Artificial sequence
  SiRNA target sequence
gtatatattcacttattagagtagca

SEQ ID NO: 236486 - DNA, 26 bp, Artificial sequence
  SiRNA target sequence
tatatattcacttattagagtagcaa

SEQ ID NO: 236487 - DNA, 26 bp, Artificial sequence
  SiRNA target sequence
atatattcacttattagagtagcaaa

SEQ ID NO: 236488 - DNA, 26 bp, Artificial sequence
  SiRNA target sequence
tatattcacttattagagtagcaaag

SEQ ID NO: 236489 - DNA, 26 bp, Artificial sequence
  SiRNA target sequence
atattcacttattagagtagcaaagg

SEQ ID NO: 236490 - DNA, 26 bp, Artificial sequence
  SiRNA target sequence
tattcacttattagagtagcaaaggt

SEQ ID NO: 236491 - DNA, 26 bp, Artificial sequence
  SiRNA target sequence
attcacttattagagtagcaaaggtt

SEQ ID NO: 236492 - DNA, 26 bp, Artificial sequence
  SiRNA target sequence
ttcacttattagagtagcaaaggttg

SEQ ID NO: 236493 - DNA, 26 bp, Artificial sequence
  SiRNA target sequence
tcacttattagagtagcaaaggttga

SEQ ID NO: 236494 - DNA, 26 bp, Artificial sequence
  SiRNA target sequence
cacttattagagtagcaaaggttgag

SEQ ID NO: 236495 - DNA, 26 bp, Artificial sequence
  SiRNA target sequence
acttattagagtagcaaaggttgaga

SEQ ID NO: 236496 - DNA, 26 bp, Artificial sequence
  SiRNA target sequence
cttattagagtagcaaaggttgagag

SEQ ID NO: 236497 - DNA, 26 bp, Artificial sequence
  SiRNA target sequence
ttattagagtagcaaaggttgagaga

SEQ ID NO: 236498 - DNA, 26 bp, Artificial sequence
  SiRNA target sequence
tattagagtagcaaaggttgagagaa

SEQ ID NO: 236499 - DNA, 26 bp, Artificial sequence
  SiRNA target sequence
attagagtagcaaaggttgagagaaa

SEQ ID NO: 236500 - DNA, 26 bp, Artificial sequence
  SiRNA target sequence
ttagagtagcaaaggttgagagaaag

SEQ ID NO: 236501 - DNA, 26 bp, Artificial sequence
  SiRNA target sequence
tagagtagcaaaggttgagagaaaga

SEQ ID NO: 236502 - DNA, 26 bp, Artificial sequence
  SiRNA target sequence
agagtagcaaaggttgagagaaagat

SEQ ID NO: 236503 - DNA, 26 bp, Artificial sequence
  SiRNA target sequence
gagtagcaaaggttgagagaaagatg

SEQ ID NO: 236504 - DNA, 26 bp, Artificial sequence
  SiRNA target sequence
agtagcaaaggttgagagaaagatgt

SEQ ID NO: 236505 - DNA, 26 bp, Artificial sequence
  SiRNA target sequence
gtagcaaaggttgagagaaagatgtt

SEQ ID NO: 236506 - DNA, 26 bp, Artificial sequence
  SiRNA target sequence
tagcaaaggttgagagaaagatgttt

SEQ ID NO: 236507 - DNA, 26 bp, Artificial sequence
  SiRNA target sequence
agcaaaggttgagagaaagatgtttt

SEQ ID NO: 236508 - DNA, 26 bp, Artificial sequence
  SiRNA target sequence
gcaaaggttgagagaaagatgttttg

SEQ ID NO: 236509 - DNA, 26 bp, Artificial sequence
  SiRNA target sequence
caaaggttgagagaaagatgttttgg

SEQ ID NO: 236510 - DNA, 26 bp, Artificial sequence
  SiRNA target sequence
aaaggttgagagaaagatgttttgga

SEQ ID NO: 236511 - DNA, 26 bp, Artificial sequence
  SiRNA target sequence
aaggttgagagaaagatgttttggat

SEQ ID NO: 236512 - DNA, 26 bp, Artificial sequence
  SiRNA target sequence
aggttgagagaaagatgttttggatc

SEQ ID NO: 236513 - DNA, 26 bp, Artificial sequence
  SiRNA target sequence
ggttgagagaaagatgttttggatca

SEQ ID NO: 236514 - DNA, 26 bp, Artificial sequence
  SiRNA target sequence
gttgagagaaagatgttttggatcat

SEQ ID NO: 236515 - DNA, 26 bp, Artificial sequence
  SiRNA target sequence
ttgagagaaagatgttttggatcatg

SEQ ID NO: 236516 - DNA, 26 bp, Artificial sequence
  SiRNA target sequence
tgagagaaagatgttttggatcatgg

SEQ ID NO: 236517 - DNA, 26 bp, Artificial sequence
  SiRNA target sequence
gagagaaagatgttttggatcatggc

SEQ ID NO: 236518 - DNA, 26 bp, Artificial sequence
  SiRNA target sequence
agagaaagatgttttggatcatggca

SEQ ID NO: 236519 - DNA, 26 bp, Artificial sequence
  SiRNA target sequence
gagaaagatgttttggatcatggcag

SEQ ID NO: 236520 - DNA, 26 bp, Artificial sequence
  SiRNA target sequence
agaaagatgttttggatcatggcagc

SEQ ID NO: 236521 - DNA, 26 bp, Artificial sequence
  SiRNA target sequence
gaaagatgttttggatcatggcagct

SEQ ID NO: 236522 - DNA, 26 bp, Artificial sequence
  SiRNA target sequence
aaagatgttttggatcatggcagcta

SEQ ID NO: 236523 - DNA, 26 bp, Artificial sequence
  SiRNA target sequence
aagatgttttggatcatggcagctat

SEQ ID NO: 236524 - DNA, 26 bp, Artificial sequence
  SiRNA target sequence
agatgttttggatcatggcagctatg

SEQ ID NO: 236525 - DNA, 26 bp, Artificial sequence
  SiRNA target sequence
gatgttttggatcatggcagctatgt

SEQ ID NO: 236526 - DNA, 26 bp, Artificial sequence
  SiRNA target sequence
atgttttggatcatggcagctatgtt

SEQ ID NO: 236527 - DNA, 26 bp, Artificial sequence
  SiRNA target sequence
tgttttggatcatggcagctatgttc

SEQ ID NO: 236528 - DNA, 26 bp, Artificial sequence
  SiRNA target sequence
gttttggatcatggcagctatgttct

SEQ ID NO: 236529 - DNA, 26 bp, Artificial sequence
  SiRNA target sequence
ttttggatcatggcagctatgttctt

SEQ ID NO: 236530 - DNA, 26 bp, Artificial sequence
  SiRNA target sequence
tttggatcatggcagctatgttcttt

SEQ ID NO: 236531 - DNA, 26 bp, Artificial sequence
  SiRNA target sequence
ttggatcatggcagctatgttcttta

SEQ ID NO: 236532 - DNA, 26 bp, Artificial sequence
  SiRNA target sequence
tggatcatggcagctatgttctttat

SEQ ID NO: 236533 - DNA, 26 bp, Artificial sequence
  SiRNA target sequence
ggatcatggcagctatgttctttatt

SEQ ID NO: 236534 - DNA, 26 bp, Artificial sequence
  SiRNA target sequence
gatcatggcagctatgttctttatta

SEQ ID NO: 236535 - DNA, 26 bp, Artificial sequence
  SiRNA target sequence
atcatggcagctatgttctttattat

SEQ ID NO: 236536 - DNA, 26 bp, Artificial sequence
  SiRNA target sequence
tcatggcagctatgttctttattatc

SEQ ID NO: 236537 - DNA, 26 bp, Artificial sequence
  SiRNA target sequence
catggcagctatgttctttattatct

SEQ ID NO: 236538 - DNA, 26 bp, Artificial sequence
  SiRNA target sequence
atggcagctatgttctttattatctc

SEQ ID NO: 236539 - DNA, 26 bp, Artificial sequence
  SiRNA target sequence
tggcagctatgttctttattatctcc

SEQ ID NO: 236540 - DNA, 26 bp, Artificial sequence
  SiRNA target sequence
ggcagctatgttctttattatctcct

SEQ ID NO: 236541 - DNA, 26 bp, Artificial sequence
  SiRNA target sequence
gcagctatgttctttattatctcctt

SEQ ID NO: 236542 - DNA, 26 bp, Artificial sequence
  SiRNA target sequence
cagctatgttctttattatctccttt

SEQ ID NO: 236543 - DNA, 26 bp, Artificial sequence
  SiRNA target sequence
agctatgttctttattatctccttta

SEQ ID NO: 236544 - DNA, 26 bp, Artificial sequence
  SiRNA target sequence
gctatgttctttattatctcctttat

SEQ ID NO: 236545 - DNA, 26 bp, Artificial sequence
  SiRNA target sequence
ctatgttctttattatctcctttatt

SEQ ID NO: 236546 - DNA, 26 bp, Artificial sequence
  SiRNA target sequence
tatgttctttattatctcctttattt

SEQ ID NO: 236547 - DNA, 26 bp, Artificial sequence
  SiRNA target sequence
atgttctttattatctcctttattta

SEQ ID NO: 236548 - DNA, 26 bp, Artificial sequence
  SiRNA target sequence
tgttctttattatctcctttatttat

SEQ ID NO: 236549 - DNA, 26 bp, Artificial sequence
  SiRNA target sequence
gttctttattatctcctttatttatt

SEQ ID NO: 236550 - DNA, 26 bp, Artificial sequence
  SiRNA target sequence
ttctttattatctcctttatttattc

SEQ ID NO: 236551 - DNA, 26 bp, Artificial sequence
  SiRNA target sequence
tctttattatctcctttatttattcg

SEQ ID NO: 236552 - DNA, 26 bp, Artificial sequence
  SiRNA target sequence
ctttattatctcctttatttattcgg

SEQ ID NO: 236553 - DNA, 26 bp, Artificial sequence
  SiRNA target sequence
tttattatctcctttatttattcggt

SEQ ID NO: 236554 - DNA, 26 bp, Artificial sequence
  SiRNA target sequence
ttattatctcctttatttattcggtg

SEQ ID NO: 236555 - DNA, 26 bp, Artificial sequence
  SiRNA target sequence
tattatctcctttatttattcggtgg

SEQ ID NO: 236556 - DNA, 26 bp, Artificial sequence
  SiRNA target sequence
attatctcctttatttattcggtggc

SEQ ID NO: 236557 - DNA, 26 bp, Artificial sequence
  SiRNA target sequence
ttatctcctttatttattcggtggct

SEQ ID NO: 236558 - DNA, 26 bp, Artificial sequence
  SiRNA target sequence
tatctcctttatttattcggtggcta

SEQ ID NO: 236559 - DNA, 26 bp, Artificial sequence
  SiRNA target sequence
atctcctttatttattcggtggctag

SEQ ID NO: 236560 - DNA, 26 bp, Artificial sequence
  SiRNA target sequence
tctcctttatttattcggtggctaga

SEQ ID NO: 236561 - DNA, 26 bp, Artificial sequence
  SiRNA target sequence
ctcctttatttattcggtggctagag

SEQ ID NO: 236562 - DNA, 26 bp, Artificial sequence
  SiRNA target sequence
tcctttatttattcggtggctagagt

SEQ ID NO: 236563 - DNA, 26 bp, Artificial sequence
  SiRNA target sequence
cctttatttattcggtggctagagtg

SEQ ID NO: 236564 - DNA, 26 bp, Artificial sequence
  SiRNA target sequence
ctttatttattcggtggctagagtgc

SEQ ID NO: 236565 - DNA, 26 bp, Artificial sequence
  SiRNA target sequence
tttatttattcggtggctagagtgct

SEQ ID NO: 236566 - DNA, 26 bp, Artificial sequence
  SiRNA target sequence
ttatttattcggtggctagagtgctt

SEQ ID NO: 236567 - DNA, 26 bp, Artificial sequence
  SiRNA target sequence
tatttattcggtggctagagtgctta

SEQ ID NO: 236568 - DNA, 26 bp, Artificial sequence
  SiRNA target sequence
atttattcggtggctagagtgcttaa

SEQ ID NO: 236569 - DNA, 26 bp, Artificial sequence
  SiRNA target sequence
tttattcggtggctagagtgcttaaa

SEQ ID NO: 236570 - DNA, 26 bp, Artificial sequence
  SiRNA target sequence
ttattcggtggctagagtgcttaaag

SEQ ID NO: 236571 - DNA, 26 bp, Artificial sequence
  SiRNA target sequence
tattcggtggctagagtgcttaaaga

SEQ ID NO: 236572 - DNA, 26 bp, Artificial sequence
  SiRNA target sequence
attcggtggctagagtgcttaaagat

SEQ ID NO: 236573 - DNA, 26 bp, Artificial sequence
  SiRNA target sequence
ttcggtggctagagtgcttaaagatg

SEQ ID NO: 236574 - DNA, 26 bp, Artificial sequence
  SiRNA target sequence
tcggtggctagagtgcttaaagatgc

SEQ ID NO: 236575 - DNA, 26 bp, Artificial sequence
  SiRNA target sequence
cggtggctagagtgcttaaagatgcc

SEQ ID NO: 236576 - DNA, 26 bp, Artificial sequence
  SiRNA target sequence
ggtggctagagtgcttaaagatgccg

SEQ ID NO: 236577 - DNA, 26 bp, Artificial sequence
  SiRNA target sequence
gtggctagagtgcttaaagatgccgc

SEQ ID NO: 236578 - DNA, 26 bp, Artificial sequence
  SiRNA target sequence
tggctagagtgcttaaagatgccgct

SEQ ID NO: 236579 - DNA, 26 bp, Artificial sequence
  SiRNA target sequence
ggctagagtgcttaaagatgccgctg

SEQ ID NO: 236580 - DNA, 26 bp, Artificial sequence
  SiRNA target sequence
gctagagtgcttaaagatgccgctgt

SEQ ID NO: 236581 - DNA, 26 bp, Artificial sequence
  SiRNA target sequence
ctagagtgcttaaagatgccgctgtt

SEQ ID NO: 236582 - DNA, 26 bp, Artificial sequence
  SiRNA target sequence
tagagtgcttaaagatgccgctgtta

SEQ ID NO: 236583 - DNA, 26 bp, Artificial sequence
  SiRNA target sequence
agagtgcttaaagatgccgctgttat

SEQ ID NO: 236584 - DNA, 26 bp, Artificial sequence
  SiRNA target sequence
gagtgcttaaagatgccgctgttatt

SEQ ID NO: 236585 - DNA, 26 bp, Artificial sequence
  SiRNA target sequence
agtgcttaaagatgccgctgttattg

SEQ ID NO: 236586 - DNA, 26 bp, Artificial sequence
  SiRNA target sequence
gtgcttaaagatgccgctgttattgg

SEQ ID NO: 236587 - DNA, 26 bp, Artificial sequence
  SiRNA target sequence
tgcttaaagatgccgctgttattggt

SEQ ID NO: 236588 - DNA, 26 bp, Artificial sequence
  SiRNA target sequence
gcttaaagatgccgctgttattggta

SEQ ID NO: 236589 - DNA, 26 bp, Artificial sequence
  SiRNA target sequence
cttaaagatgccgctgttattggtaa

SEQ ID NO: 236590 - DNA, 26 bp, Artificial sequence
  SiRNA target sequence
ttaaagatgccgctgttattggtaaa

SEQ ID NO: 236591 - DNA, 26 bp, Artificial sequence
  SiRNA target sequence
taaagatgccgctgttattggtaaac

SEQ ID NO: 236592 - DNA, 26 bp, Artificial sequence
  SiRNA target sequence
aaagatgccgctgttattggtaaaca

SEQ ID NO: 236593 - DNA, 26 bp, Artificial sequence
  SiRNA target sequence
aagatgccgctgttattggtaaacaa

SEQ ID NO: 236594 - DNA, 26 bp, Artificial sequence
  SiRNA target sequence
agatgccgctgttattggtaaacaac

SEQ ID NO: 236595 - DNA, 26 bp, Artificial sequence
  SiRNA target sequence
gatgccgctgttattggtaaacaact

SEQ ID NO: 236596 - DNA, 26 bp, Artificial sequence
  SiRNA target sequence
atgccgctgttattggtaaacaactc

SEQ ID NO: 236597 - DNA, 26 bp, Artificial sequence
  SiRNA target sequence
tgccgctgttattggtaaacaactcc

SEQ ID NO: 236598 - DNA, 26 bp, Artificial sequence
  SiRNA target sequence
gccgctgttattggtaaacaactccc

SEQ ID NO: 236599 - DNA, 26 bp, Artificial sequence
  SiRNA target sequence
ccgctgttattggtaaacaactccca

SEQ ID NO: 236600 - DNA, 26 bp, Artificial sequence
  SiRNA target sequence
cgctgttattggtaaacaactcccag

SEQ ID NO: 236601 - DNA, 26 bp, Artificial sequence
  SiRNA target sequence
gctgttattggtaaacaactcccagc

SEQ ID NO: 236602 - DNA, 26 bp, Artificial sequence
  SiRNA target sequence
ctgttattggtaaacaactcccagcg

SEQ ID NO: 236603 - DNA, 26 bp, Artificial sequence
  SiRNA target sequence
tgttattggtaaacaactcccagcgt

SEQ ID NO: 236604 - DNA, 26 bp, Artificial sequence
  SiRNA target sequence
gttattggtaaacaactcccagcgtc

SEQ ID NO: 236605 - DNA, 26 bp, Artificial sequence
  SiRNA target sequence
ttattggtaaacaactcccagcgtca

SEQ ID NO: 236606 - DNA, 26 bp, Artificial sequence
  SiRNA target sequence
tattggtaaacaactcccagcgtcaa

SEQ ID NO: 236607 - DNA, 26 bp, Artificial sequence
  SiRNA target sequence
attggtaaacaactcccagcgtcaat

SEQ ID NO: 236608 - DNA, 26 bp, Artificial sequence
  SiRNA target sequence
ttggtaaacaactcccagcgtcaatt

SEQ ID NO: 236609 - DNA, 26 bp, Artificial sequence
  SiRNA target sequence
tggtaaacaactcccagcgtcaattt

SEQ ID NO: 236610 - DNA, 26 bp, Artificial sequence
  SiRNA target sequence
ggtaaacaactcccagcgtcaatttt

SEQ ID NO: 236611 - DNA, 26 bp, Artificial sequence
  SiRNA target sequence
gtaaacaactcccagcgtcaattttc

SEQ ID NO: 236612 - DNA, 26 bp, Artificial sequence
  SiRNA target sequence
taaacaactcccagcgtcaattttct

SEQ ID NO: 236613 - DNA, 26 bp, Artificial sequence
  SiRNA target sequence
aaacaactcccagcgtcaattttctt

SEQ ID NO: 236614 - DNA, 26 bp, Artificial sequence
  SiRNA target sequence
aacaactcccagcgtcaattttcttt

SEQ ID NO: 236615 - DNA, 26 bp, Artificial sequence
  SiRNA target sequence
acaactcccagcgtcaattttctttt

SEQ ID NO: 236616 - DNA, 26 bp, Artificial sequence
  SiRNA target sequence
caactcccagcgtcaattttcttttt

SEQ ID NO: 236617 - DNA, 26 bp, Artificial sequence
  SiRNA target sequence
aactcccagcgtcaattttctttttg

SEQ ID NO: 236618 - DNA, 26 bp, Artificial sequence
  SiRNA target sequence
actcccagcgtcaattttctttttga

SEQ ID NO: 236619 - DNA, 26 bp, Artificial sequence
  SiRNA target sequence
ctcccagcgtcaattttctttttgaa

SEQ ID NO: 236620 - DNA, 26 bp, Artificial sequence
  SiRNA target sequence
tcccagcgtcaattttctttttgaaa

SEQ ID NO: 236621 - DNA, 26 bp, Artificial sequence
  SiRNA target sequence
cccagcgtcaattttctttttgaaat

SEQ ID NO: 236622 - DNA, 26 bp, Artificial sequence
  SiRNA target sequence
ccagcgtcaattttctttttgaaatt

SEQ ID NO: 236623 - DNA, 26 bp, Artificial sequence
  SiRNA target sequence
cagcgtcaattttctttttgaaattt

SEQ ID NO: 236624 - DNA, 26 bp, Artificial sequence
  SiRNA target sequence
agcgtcaattttctttttgaaatttg

SEQ ID NO: 236625 - DNA, 26 bp, Artificial sequence
  SiRNA target sequence
gcgtcaattttctttttgaaatttgt

SEQ ID NO: 236626 - DNA, 26 bp, Artificial sequence
  SiRNA target sequence
cgtcaattttctttttgaaatttgtt

SEQ ID NO: 236627 - DNA, 26 bp, Artificial sequence
  SiRNA target sequence
gtcaattttctttttgaaatttgtta

SEQ ID NO: 236628 - DNA, 26 bp, Artificial sequence
  SiRNA target sequence
tcaattttctttttgaaatttgttat

SEQ ID NO: 236629 - DNA, 26 bp, Artificial sequence
  SiRNA target sequence
caattttctttttgaaatttgttatt

SEQ ID NO: 236630 - DNA, 26 bp, Artificial sequence
  SiRNA target sequence
aattttctttttgaaatttgttatta

SEQ ID NO: 236631 - DNA, 26 bp, Artificial sequence
  SiRNA target sequence
attttctttttgaaatttgttattat

SEQ ID NO: 236632 - DNA, 26 bp, Artificial sequence
  SiRNA target sequence
ttttctttttgaaatttgttattatc

SEQ ID NO: 236633 - DNA, 26 bp, Artificial sequence
  SiRNA target sequence
tttctttttgaaatttgttattatcc

SEQ ID NO: 236634 - DNA, 26 bp, Artificial sequence
  SiRNA target sequence
ttctttttgaaatttgttattatcct

SEQ ID NO: 236635 - DNA, 26 bp, Artificial sequence
  SiRNA target sequence
tctttttgaaatttgttattatcctt

SEQ ID NO: 236636 - DNA, 26 bp, Artificial sequence
  SiRNA target sequence
ctttttgaaatttgttattatccttc

SEQ ID NO: 236637 - DNA, 26 bp, Artificial sequence
  SiRNA target sequence
tttttgaaatttgttattatccttcc

SEQ ID NO: 236638 - DNA, 26 bp, Artificial sequence
  SiRNA target sequence
ttttgaaatttgttattatccttccg

SEQ ID NO: 236639 - DNA, 26 bp, Artificial sequence
  SiRNA target sequence
tttgaaatttgttattatccttccgt

SEQ ID NO: 236640 - DNA, 26 bp, Artificial sequence
  SiRNA target sequence
ttgaaatttgttattatccttccgtt

SEQ ID NO: 236641 - DNA, 26 bp, Artificial sequence
  SiRNA target sequence
tgaaatttgttattatccttccgttc

SEQ ID NO: 236642 - DNA, 26 bp, Artificial sequence
  SiRNA target sequence
gaaatttgttattatccttccgttct

SEQ ID NO: 236643 - DNA, 26 bp, Artificial sequence
  SiRNA target sequence
aaatttgttattatccttccgttctc

SEQ ID NO: 236644 - DNA, 26 bp, Artificial sequence
  SiRNA target sequence
aatttgttattatccttccgttctca

SEQ ID NO: 236645 - DNA, 26 bp, Artificial sequence
  SiRNA target sequence
atttgttattatccttccgttctcat

SEQ ID NO: 236646 - DNA, 26 bp, Artificial sequence
  SiRNA target sequence
tttgttattatccttccgttctcatt

SEQ ID NO: 236647 - DNA, 26 bp, Artificial sequence
  SiRNA target sequence
ttgttattatccttccgttctcattt

SEQ ID NO: 236648 - DNA, 26 bp, Artificial sequence
  SiRNA target sequence
tgttattatccttccgttctcattta

SEQ ID NO: 236649 - DNA, 26 bp, Artificial sequence
  SiRNA target sequence
gttattatccttccgttctcatttat

SEQ ID NO: 236650 - DNA, 26 bp, Artificial sequence
  SiRNA target sequence
ttattatccttccgttctcatttatt

SEQ ID NO: 236651 - DNA, 26 bp, Artificial sequence
  SiRNA target sequence
tattatccttccgttctcatttattt

SEQ ID NO: 236652 - DNA, 26 bp, Artificial sequence
  SiRNA target sequence
attatccttccgttctcatttatttc

SEQ ID NO: 236653 - DNA, 26 bp, Artificial sequence
  SiRNA target sequence
ttatccttccgttctcatttatttca

SEQ ID NO: 236654 - DNA, 26 bp, Artificial sequence
  SiRNA target sequence
tatccttccgttctcatttatttcag

SEQ ID NO: 236655 - DNA, 26 bp, Artificial sequence
  SiRNA target sequence
atccttccgttctcatttatttcagt

SEQ ID NO: 236656 - DNA, 26 bp, Artificial sequence
  SiRNA target sequence
tccttccgttctcatttatttcagta

SEQ ID NO: 236657 - DNA, 26 bp, Artificial sequence
  SiRNA target sequence
ccttccgttctcatttatttcagtag

SEQ ID NO: 236658 - DNA, 26 bp, Artificial sequence
  SiRNA target sequence
cttccgttctcatttatttcagtagg

SEQ ID NO: 236659 - DNA, 26 bp, Artificial sequence
  SiRNA target sequence
ttccgttctcatttatttcagtaggt

SEQ ID NO: 236660 - DNA, 26 bp, Artificial sequence
  SiRNA target sequence
tccgttctcatttatttcagtaggta

SEQ ID NO: 236661 - DNA, 26 bp, Artificial sequence
  SiRNA target sequence
ccgttctcatttatttcagtaggtat

SEQ ID NO: 236662 - DNA, 26 bp, Artificial sequence
  SiRNA target sequence
cgttctcatttatttcagtaggtatt

SEQ ID NO: 236663 - DNA, 26 bp, Artificial sequence
  SiRNA target sequence
gttctcatttatttcagtaggtatta

SEQ ID NO: 236664 - DNA, 26 bp, Artificial sequence
  SiRNA target sequence
ttctcatttatttcagtaggtattat

SEQ ID NO: 236665 - DNA, 26 bp, Artificial sequence
  SiRNA target sequence
tctcatttatttcagtaggtattatt

SEQ ID NO: 236666 - DNA, 26 bp, Artificial sequence
  SiRNA target sequence
ctcatttatttcagtaggtattattc

SEQ ID NO: 236667 - DNA, 26 bp, Artificial sequence
  SiRNA target sequence
tcatttatttcagtaggtattattca

SEQ ID NO: 236668 - DNA, 26 bp, Artificial sequence
  SiRNA target sequence
catttatttcagtaggtattattcag

SEQ ID NO: 236669 - DNA, 26 bp, Artificial sequence
  SiRNA target sequence
atttatttcagtaggtattattcaga

SEQ ID NO: 236670 - DNA, 26 bp, Artificial sequence
  SiRNA target sequence
tttatttcagtaggtattattcagaa

SEQ ID NO: 236671 - DNA, 26 bp, Artificial sequence
  SiRNA target sequence
ttatttcagtaggtattattcagaaa

SEQ ID NO: 236672 - DNA, 26 bp, Artificial sequence
  SiRNA target sequence
tatttcagtaggtattattcagaaag

SEQ ID NO: 236673 - DNA, 26 bp, Artificial sequence
  SiRNA target sequence
atttcagtaggtattattcagaaagc

SEQ ID NO: 236674 - DNA, 26 bp, Artificial sequence
  SiRNA target sequence
tttcagtaggtattattcagaaagct

SEQ ID NO: 236675 - DNA, 26 bp, Artificial sequence
  SiRNA target sequence
ttcagtaggtattattcagaaagctt

SEQ ID NO: 236676 - DNA, 26 bp, Artificial sequence
  SiRNA target sequence
tcagtaggtattattcagaaagcttt

SEQ ID NO: 236677 - DNA, 26 bp, Artificial sequence
  SiRNA target sequence
cagtaggtattattcagaaagcttta

SEQ ID NO: 236678 - DNA, 26 bp, Artificial sequence
  SiRNA target sequence
agtaggtattattcagaaagctttag

SEQ ID NO: 236679 - DNA, 26 bp, Artificial sequence
  SiRNA target sequence
gtaggtattattcagaaagctttaga

SEQ ID NO: 236680 - DNA, 26 bp, Artificial sequence
  SiRNA target sequence
taggtattattcagaaagctttagat

SEQ ID NO: 236681 - DNA, 26 bp, Artificial sequence
  SiRNA target sequence
aggtattattcagaaagctttagata

SEQ ID NO: 236682 - DNA, 26 bp, Artificial sequence
  SiRNA target sequence
ggtattattcagaaagctttagataa

SEQ ID NO: 236683 - DNA, 26 bp, Artificial sequence
  SiRNA target sequence
gtattattcagaaagctttagataaa

SEQ ID NO: 236684 - DNA, 26 bp, Artificial sequence
  SiRNA target sequence
tattattcagaaagctttagataaat

SEQ ID NO: 236685 - DNA, 26 bp, Artificial sequence
  SiRNA target sequence
attattcagaaagctttagataaata

SEQ ID NO: 236686 - DNA, 26 bp, Artificial sequence
  SiRNA target sequence
ttattcagaaagctttagataaatat

SEQ ID NO: 236687 - DNA, 26 bp, Artificial sequence
  SiRNA target sequence
tattcagaaagctttagataaatatc

SEQ ID NO: 236688 - DNA, 26 bp, Artificial sequence
  SiRNA target sequence
attcagaaagctttagataaatatcc

SEQ ID NO: 236689 - DNA, 26 bp, Artificial sequence
  SiRNA target sequence
ttcagaaagctttagataaatatcct

SEQ ID NO: 236690 - DNA, 26 bp, Artificial sequence
  SiRNA target sequence
tcagaaagctttagataaatatcctt

SEQ ID NO: 236691 - DNA, 26 bp, Artificial sequence
  SiRNA target sequence
cagaaagctttagataaatatccttt

SEQ ID NO: 236692 - DNA, 26 bp, Artificial sequence
  SiRNA target sequence
agaaagctttagataaatatcctttt

SEQ ID NO: 236693 - DNA, 26 bp, Artificial sequence
  SiRNA target sequence
gaaagctttagataaatatcctttta

SEQ ID NO: 236694 - DNA, 26 bp, Artificial sequence
  SiRNA target sequence
aaagctttagataaatatccttttac

SEQ ID NO: 236695 - DNA, 26 bp, Artificial sequence
  SiRNA target sequence
aagctttagataaatatccttttaca

SEQ ID NO: 236696 - DNA, 26 bp, Artificial sequence
  SiRNA target sequence
agctttagataaatatccttttacaa

SEQ ID NO: 236697 - DNA, 26 bp, Artificial sequence
  SiRNA target sequence
gctttagataaatatccttttacaaa

SEQ ID NO: 236698 - DNA, 26 bp, Artificial sequence
  SiRNA target sequence
ctttagataaatatccttttacaaaa

SEQ ID NO: 236699 - DNA, 26 bp, Artificial sequence
  SiRNA target sequence
tttagataaatatccttttacaaaaa

SEQ ID NO: 236700 - DNA, 26 bp, Artificial sequence
  SiRNA target sequence
ttagataaatatccttttacaaaaat

SEQ ID NO: 236701 - DNA, 26 bp, Artificial sequence
  SiRNA target sequence
tagataaatatccttttacaaaaata

SEQ ID NO: 236702 - DNA, 26 bp, Artificial sequence
  SiRNA target sequence
agataaatatccttttacaaaaatat

SEQ ID NO: 236703 - DNA, 26 bp, Artificial sequence
  SiRNA target sequence
gataaatatccttttacaaaaatatt

SEQ ID NO: 236704 - DNA, 26 bp, Artificial sequence
  SiRNA target sequence
ataaatatccttttacaaaaatattt

SEQ ID NO: 236705 - DNA, 26 bp, Artificial sequence
  SiRNA target sequence
taaatatccttttacaaaaatatttg

SEQ ID NO: 236706 - DNA, 26 bp, Artificial sequence
  SiRNA target sequence
aaatatccttttacaaaaatatttga

SEQ ID NO: 236707 - DNA, 26 bp, Artificial sequence
  SiRNA target sequence
aatatccttttacaaaaatatttgat

SEQ ID NO: 236708 - DNA, 26 bp, Artificial sequence
  SiRNA target sequence
atatccttttacaaaaatatttgatg

SEQ ID NO: 236709 - DNA, 26 bp, Artificial sequence
  SiRNA target sequence
tatccttttacaaaaatatttgatgt

SEQ ID NO: 236710 - DNA, 26 bp, Artificial sequence
  SiRNA target sequence
atccttttacaaaaatatttgatgta

SEQ ID NO: 236711 - DNA, 26 bp, Artificial sequence
  SiRNA target sequence
tccttttacaaaaatatttgatgtaa

SEQ ID NO: 236712 - DNA, 26 bp, Artificial sequence
  SiRNA target sequence
ccttttacaaaaatatttgatgtaac

SEQ ID NO: 236713 - DNA, 26 bp, Artificial sequence
  SiRNA target sequence
cttttacaaaaatatttgatgtaact

SEQ ID NO: 236714 - DNA, 26 bp, Artificial sequence
  SiRNA target sequence
ttttacaaaaatatttgatgtaactt

SEQ ID NO: 236715 - DNA, 26 bp, Artificial sequence
  SiRNA target sequence
tttacaaaaatatttgatgtaacttt

SEQ ID NO: 236716 - DNA, 26 bp, Artificial sequence
  SiRNA target sequence
ttacaaaaatatttgatgtaacttta

SEQ ID NO: 236717 - DNA, 26 bp, Artificial sequence
  SiRNA target sequence
tacaaaaatatttgatgtaactttaa

SEQ ID NO: 236718 - DNA, 26 bp, Artificial sequence
  SiRNA target sequence
acaaaaatatttgatgtaactttaat

SEQ ID NO: 236719 - DNA, 26 bp, Artificial sequence
  SiRNA target sequence
caaaaatatttgatgtaactttaata

SEQ ID NO: 236720 - DNA, 26 bp, Artificial sequence
  SiRNA target sequence
aaaaatatttgatgtaactttaatag

SEQ ID NO: 236721 - DNA, 26 bp, Artificial sequence
  SiRNA target sequence
aaaatatttgatgtaactttaatagt

SEQ ID NO: 236722 - DNA, 26 bp, Artificial sequence
  SiRNA target sequence
aaatatttgatgtaactttaatagtt

SEQ ID NO: 236723 - DNA, 26 bp, Artificial sequence
  SiRNA target sequence
aatatttgatgtaactttaatagttt

SEQ ID NO: 236724 - DNA, 26 bp, Artificial sequence
  SiRNA target sequence
atatttgatgtaactttaatagtttt

SEQ ID NO: 236725 - DNA, 26 bp, Artificial sequence
  SiRNA target sequence
tatttgatgtaactttaatagttttc

SEQ ID NO: 236726 - DNA, 26 bp, Artificial sequence
  SiRNA target sequence
atttgatgtaactttaatagttttcg

SEQ ID NO: 236727 - DNA, 26 bp, Artificial sequence
  SiRNA target sequence
tttgatgtaactttaatagttttcgc

SEQ ID NO: 236728 - DNA, 26 bp, Artificial sequence
  SiRNA target sequence
ttgatgtaactttaatagttttcgct

SEQ ID NO: 236729 - DNA, 26 bp, Artificial sequence
  SiRNA target sequence
tgatgtaactttaatagttttcgctg

SEQ ID NO: 236730 - DNA, 26 bp, Artificial sequence
  SiRNA target sequence
gatgtaactttaatagttttcgctgt

SEQ ID NO: 236731 - DNA, 26 bp, Artificial sequence
  SiRNA target sequence
atgtaactttaatagttttcgctgtt

SEQ ID NO: 236732 - DNA, 26 bp, Artificial sequence
  SiRNA target sequence
tgtaactttaatagttttcgctgttg

SEQ ID NO: 236733 - DNA, 26 bp, Artificial sequence
  SiRNA target sequence
gtaactttaatagttttcgctgttgc

SEQ ID NO: 236734 - DNA, 26 bp, Artificial sequence
  SiRNA target sequence
taactttaatagttttcgctgttgca

SEQ ID NO: 236735 - DNA, 26 bp, Artificial sequence
  SiRNA target sequence
aactttaatagttttcgctgttgcat

SEQ ID NO: 236736 - DNA, 26 bp, Artificial sequence
  SiRNA target sequence
actttaatagttttcgctgttgcatt

SEQ ID NO: 236737 - DNA, 26 bp, Artificial sequence
  SiRNA target sequence
ctttaatagttttcgctgttgcattt

SEQ ID NO: 236738 - DNA, 26 bp, Artificial sequence
  SiRNA target sequence
tttaatagttttcgctgttgcattta

SEQ ID NO: 236739 - DNA, 26 bp, Artificial sequence
  SiRNA target sequence
ttaatagttttcgctgttgcatttac

SEQ ID NO: 236740 - DNA, 26 bp, Artificial sequence
  SiRNA target sequence
taatagttttcgctgttgcatttact

SEQ ID NO: 236741 - DNA, 26 bp, Artificial sequence
  SiRNA target sequence
aatagttttcgctgttgcatttacta

SEQ ID NO: 236742 - DNA, 26 bp, Artificial sequence
  SiRNA target sequence
atagttttcgctgttgcatttactat

SEQ ID NO: 236743 - DNA, 26 bp, Artificial sequence
  SiRNA target sequence
tagttttcgctgttgcatttactata

SEQ ID NO: 236744 - DNA, 26 bp, Artificial sequence
  SiRNA target sequence
agttttcgctgttgcatttactatac

SEQ ID NO: 236745 - DNA, 26 bp, Artificial sequence
  SiRNA target sequence
gttttcgctgttgcatttactatact

SEQ ID NO: 236746 - DNA, 26 bp, Artificial sequence
  SiRNA target sequence
ttttcgctgttgcatttactatactt

SEQ ID NO: 236747 - DNA, 26 bp, Artificial sequence
  SiRNA target sequence
tttcgctgttgcatttactatacttg

SEQ ID NO: 236748 - DNA, 26 bp, Artificial sequence
  SiRNA target sequence
ttcgctgttgcatttactatacttgg

SEQ ID NO: 236749 - DNA, 26 bp, Artificial sequence
  SiRNA target sequence
tcgctgttgcatttactatacttggt

SEQ ID NO: 236750 - DNA, 26 bp, Artificial sequence
  SiRNA target sequence
cgctgttgcatttactatacttggta

SEQ ID NO: 236751 - DNA, 26 bp, Artificial sequence
  SiRNA target sequence
gctgttgcatttactatacttggtag

SEQ ID NO: 236752 - DNA, 26 bp, Artificial sequence
  SiRNA target sequence
ctgttgcatttactatacttggtagt

SEQ ID NO: 236753 - DNA, 26 bp, Artificial sequence
  SiRNA target sequence
tgttgcatttactatacttggtagtt

SEQ ID NO: 236754 - DNA, 26 bp, Artificial sequence
  SiRNA target sequence
gttgcatttactatacttggtagttt

SEQ ID NO: 236755 - DNA, 26 bp, Artificial sequence
  SiRNA target sequence
ttgcatttactatacttggtagttta

SEQ ID NO: 236756 - DNA, 26 bp, Artificial sequence
  SiRNA target sequence
tgcatttactatacttggtagtttat

SEQ ID NO: 236757 - DNA, 26 bp, Artificial sequence
  SiRNA target sequence
gcatttactatacttggtagtttatt

SEQ ID NO: 236758 - DNA, 26 bp, Artificial sequence
  SiRNA target sequence
catttactatacttggtagtttatta

SEQ ID NO: 236759 - DNA, 26 bp, Artificial sequence
  SiRNA target sequence
atttactatacttggtagtttattac

SEQ ID NO: 236760 - DNA, 26 bp, Artificial sequence
  SiRNA target sequence
tttactatacttggtagtttattact

SEQ ID NO: 236761 - DNA, 26 bp, Artificial sequence
  SiRNA target sequence
ttactatacttggtagtttattactt

SEQ ID NO: 236762 - DNA, 26 bp, Artificial sequence
  SiRNA target sequence
tactatacttggtagtttattacttc

SEQ ID NO: 236763 - DNA, 26 bp, Artificial sequence
  SiRNA target sequence
actatacttggtagtttattacttcc

SEQ ID NO: 236764 - DNA, 26 bp, Artificial sequence
  SiRNA target sequence
ctatacttggtagtttattacttccc

SEQ ID NO: 236765 - DNA, 26 bp, Artificial sequence
  SiRNA target sequence
tatacttggtagtttattacttccct

SEQ ID NO: 236766 - DNA, 26 bp, Artificial sequence
  SiRNA target sequence
atacttggtagtttattacttccctt

SEQ ID NO: 236767 - DNA, 26 bp, Artificial sequence
  SiRNA target sequence
tacttggtagtttattacttcccttt

SEQ ID NO: 236768 - DNA, 26 bp, Artificial sequence
  SiRNA target sequence
acttggtagtttattacttcccttta

SEQ ID NO: 236769 - DNA, 26 bp, Artificial sequence
  SiRNA target sequence
cttggtagtttattacttccctttag

SEQ ID NO: 236770 - DNA, 26 bp, Artificial sequence
  SiRNA target sequence
ttggtagtttattacttccctttagt

SEQ ID NO: 236771 - DNA, 26 bp, Artificial sequence
  SiRNA target sequence
tggtagtttattacttccctttagtg

SEQ ID NO: 236772 - DNA, 26 bp, Artificial sequence
  SiRNA target sequence
ggtagtttattacttccctttagtga

SEQ ID NO: 236773 - DNA, 26 bp, Artificial sequence
  SiRNA target sequence
gtagtttattacttccctttagtgat

SEQ ID NO: 236774 - DNA, 26 bp, Artificial sequence
  SiRNA target sequence
tagtttattacttccctttagtgatt

SEQ ID NO: 236775 - DNA, 26 bp, Artificial sequence
  SiRNA target sequence
agtttattacttccctttagtgatta

SEQ ID NO: 236776 - DNA, 26 bp, Artificial sequence
  SiRNA target sequence
gtttattacttccctttagtgattat

SEQ ID NO: 236777 - DNA, 26 bp, Artificial sequence
  SiRNA target sequence
tttattacttccctttagtgattata

SEQ ID NO: 236778 - DNA, 26 bp, Artificial sequence
  SiRNA target sequence
ttattacttccctttagtgattatat

SEQ ID NO: 236779 - DNA, 26 bp, Artificial sequence
  SiRNA target sequence
tattacttccctttagtgattatatt

SEQ ID NO: 236780 - DNA, 26 bp, Artificial sequence
  SiRNA target sequence
attacttccctttagtgattatattc

SEQ ID NO: 236781 - DNA, 26 bp, Artificial sequence
  SiRNA target sequence
ttacttccctttagtgattatattca

SEQ ID NO: 236782 - DNA, 26 bp, Artificial sequence
  SiRNA target sequence
tacttccctttagtgattatattcag

SEQ ID NO: 236783 - DNA, 26 bp, Artificial sequence
  SiRNA target sequence
acttccctttagtgattatattcaga

SEQ ID NO: 236784 - DNA, 26 bp, Artificial sequence
  SiRNA target sequence
cttccctttagtgattatattcagat

SEQ ID NO: 236785 - DNA, 26 bp, Artificial sequence
  SiRNA target sequence
ttccctttagtgattatattcagatt

SEQ ID NO: 236786 - DNA, 26 bp, Artificial sequence
  SiRNA target sequence
tccctttagtgattatattcagattc

SEQ ID NO: 236787 - DNA, 26 bp, Artificial sequence
  SiRNA target sequence
ccctttagtgattatattcagattca

SEQ ID NO: 236788 - DNA, 26 bp, Artificial sequence
  SiRNA target sequence
cctttagtgattatattcagattcaa

SEQ ID NO: 236789 - DNA, 26 bp, Artificial sequence
  SiRNA target sequence
ctttagtgattatattcagattcaac

SEQ ID NO: 236790 - DNA, 26 bp, Artificial sequence
  SiRNA target sequence
tttagtgattatattcagattcaacc

SEQ ID NO: 236791 - DNA, 26 bp, Artificial sequence
  SiRNA target sequence
ttagtgattatattcagattcaaccg

SEQ ID NO: 236792 - DNA, 26 bp, Artificial sequence
  SiRNA target sequence
tagtgattatattcagattcaaccgt

SEQ ID NO: 236793 - DNA, 26 bp, Artificial sequence
  SiRNA target sequence
agtgattatattcagattcaaccgtt

SEQ ID NO: 236794 - DNA, 26 bp, Artificial sequence
  SiRNA target sequence
gtgattatattcagattcaaccgttt

SEQ ID NO: 236795 - DNA, 26 bp, Artificial sequence
  SiRNA target sequence
tgattatattcagattcaaccgtttt

SEQ ID NO: 236796 - DNA, 26 bp, Artificial sequence
  SiRNA target sequence
gattatattcagattcaaccgttttg

SEQ ID NO: 236797 - DNA, 26 bp, Artificial sequence
  SiRNA target sequence
attatattcagattcaaccgttttgg

SEQ ID NO: 236798 - DNA, 26 bp, Artificial sequence
  SiRNA target sequence
ttatattcagattcaaccgttttggg

SEQ ID NO: 236799 - DNA, 26 bp, Artificial sequence
  SiRNA target sequence
tatattcagattcaaccgttttgggc

SEQ ID NO: 236800 - DNA, 26 bp, Artificial sequence
  SiRNA target sequence
atattcagattcaaccgttttgggcc

SEQ ID NO: 236801 - DNA, 26 bp, Artificial sequence
  SiRNA target sequence
tattcagattcaaccgttttgggcca

SEQ ID NO: 236802 - DNA, 26 bp, Artificial sequence
  SiRNA target sequence
attcagattcaaccgttttgggccaa

SEQ ID NO: 236803 - DNA, 26 bp, Artificial sequence
  SiRNA target sequence
ttcagattcaaccgttttgggccaaa

SEQ ID NO: 236804 - DNA, 26 bp, Artificial sequence
  SiRNA target sequence
tcagattcaaccgttttgggccaaag

SEQ ID NO: 236805 - DNA, 26 bp, Artificial sequence
  SiRNA target sequence
cagattcaaccgttttgggccaaaga

SEQ ID NO: 236806 - DNA, 26 bp, Artificial sequence
  SiRNA target sequence
agattcaaccgttttgggccaaagat

SEQ ID NO: 236807 - DNA, 26 bp, Artificial sequence
  SiRNA target sequence
gattcaaccgttttgggccaaagata

SEQ ID NO: 236808 - DNA, 26 bp, Artificial sequence
  SiRNA target sequence
attcaaccgttttgggccaaagatat

SEQ ID NO: 236809 - DNA, 26 bp, Artificial sequence
  SiRNA target sequence
ttcaaccgttttgggccaaagatatt

SEQ ID NO: 236810 - DNA, 26 bp, Artificial sequence
  SiRNA target sequence
tcaaccgttttgggccaaagatattt

SEQ ID NO: 236811 - DNA, 26 bp, Artificial sequence
  SiRNA target sequence
caaccgttttgggccaaagatatttt

SEQ ID NO: 236812 - DNA, 26 bp, Artificial sequence
  SiRNA target sequence
aaccgttttgggccaaagatattttt

SEQ ID NO: 236813 - DNA, 26 bp, Artificial sequence
  SiRNA target sequence
accgttttgggccaaagatatttttg

SEQ ID NO: 236814 - DNA, 26 bp, Artificial sequence
  SiRNA target sequence
ccgttttgggccaaagatatttttgc

SEQ ID NO: 236815 - DNA, 26 bp, Artificial sequence
  SiRNA target sequence
cgttttgggccaaagatatttttgct

SEQ ID NO: 236816 - DNA, 26 bp, Artificial sequence
  SiRNA target sequence
gttttgggccaaagatatttttgctg

SEQ ID NO: 236817 - DNA, 26 bp, Artificial sequence
  SiRNA target sequence
ttttgggccaaagatatttttgctga

SEQ ID NO: 236818 - DNA, 26 bp, Artificial sequence
  SiRNA target sequence
tttgggccaaagatatttttgctgat

SEQ ID NO: 236819 - DNA, 26 bp, Artificial sequence
  SiRNA target sequence
ttgggccaaagatatttttgctgatg

SEQ ID NO: 236820 - DNA, 26 bp, Artificial sequence
  SiRNA target sequence
tgggccaaagatatttttgctgatgg

SEQ ID NO: 236821 - DNA, 26 bp, Artificial sequence
  SiRNA target sequence
gggccaaagatatttttgctgatgga

SEQ ID NO: 236822 - DNA, 26 bp, Artificial sequence
  SiRNA target sequence
ggccaaagatatttttgctgatggaa

SEQ ID NO: 236823 - DNA, 26 bp, Artificial sequence
  SiRNA target sequence
gccaaagatatttttgctgatggaaa

SEQ ID NO: 236824 - DNA, 26 bp, Artificial sequence
  SiRNA target sequence
ccaaagatatttttgctgatggaaaa

SEQ ID NO: 236825 - DNA, 26 bp, Artificial sequence
  SiRNA target sequence
caaagatatttttgctgatggaaaag

SEQ ID NO: 236826 - DNA, 26 bp, Artificial sequence
  SiRNA target sequence
aaagatatttttgctgatggaaaagc

SEQ ID NO: 236827 - DNA, 26 bp, Artificial sequence
  SiRNA target sequence
aagatatttttgctgatggaaaagct

SEQ ID NO: 236828 - DNA, 26 bp, Artificial sequence
  SiRNA target sequence
agatatttttgctgatggaaaagctg

SEQ ID NO: 236829 - DNA, 26 bp, Artificial sequence
  SiRNA target sequence
gatatttttgctgatggaaaagctgt

SEQ ID NO: 236830 - DNA, 26 bp, Artificial sequence
  SiRNA target sequence
atatttttgctgatggaaaagctgtt

SEQ ID NO: 236831 - DNA, 26 bp, Artificial sequence
  SiRNA target sequence
tatttttgctgatggaaaagctgttg

SEQ ID NO: 236832 - DNA, 26 bp, Artificial sequence
  SiRNA target sequence
atttttgctgatggaaaagctgttgc

SEQ ID NO: 236833 - DNA, 26 bp, Artificial sequence
  SiRNA target sequence
tttttgctgatggaaaagctgttgcc

SEQ ID NO: 236834 - DNA, 26 bp, Artificial sequence
  SiRNA target sequence
ttttgctgatggaaaagctgttgcca

SEQ ID NO: 236835 - DNA, 26 bp, Artificial sequence
  SiRNA target sequence
tttgctgatggaaaagctgttgccag

SEQ ID NO: 236836 - DNA, 26 bp, Artificial sequence
  SiRNA target sequence
ttgctgatggaaaagctgttgccaga

SEQ ID NO: 236837 - DNA, 26 bp, Artificial sequence
  SiRNA target sequence
tgctgatggaaaagctgttgccagaa

SEQ ID NO: 236838 - DNA, 26 bp, Artificial sequence
  SiRNA target sequence
gctgatggaaaagctgttgccagaag

SEQ ID NO: 236839 - DNA, 26 bp, Artificial sequence
  SiRNA target sequence
ctgatggaaaagctgttgccagaagt

SEQ ID NO: 236840 - DNA, 26 bp, Artificial sequence
  SiRNA target sequence
tgatggaaaagctgttgccagaagta

SEQ ID NO: 236841 - DNA, 26 bp, Artificial sequence
  SiRNA target sequence
gatggaaaagctgttgccagaagtac

SEQ ID NO: 236842 - DNA, 26 bp, Artificial sequence
  SiRNA target sequence
atggaaaagctgttgccagaagtaca

SEQ ID NO: 236843 - DNA, 26 bp, Artificial sequence
  SiRNA target sequence
tggaaaagctgttgccagaagtacag

SEQ ID NO: 236844 - DNA, 26 bp, Artificial sequence
  SiRNA target sequence
ggaaaagctgttgccagaagtacaga

SEQ ID NO: 236845 - DNA, 26 bp, Artificial sequence
  SiRNA target sequence
gaaaagctgttgccagaagtacagat

SEQ ID NO: 236846 - DNA, 26 bp, Artificial sequence
  SiRNA target sequence
aaaagctgttgccagaagtacagatt

SEQ ID NO: 236847 - DNA, 26 bp, Artificial sequence
  SiRNA target sequence
aaagctgttgccagaagtacagattt

SEQ ID NO: 236848 - DNA, 26 bp, Artificial sequence
  SiRNA target sequence
aagctgttgccagaagtacagatttt

SEQ ID NO: 236849 - DNA, 26 bp, Artificial sequence
  SiRNA target sequence
agctgttgccagaagtacagattttt

SEQ ID NO: 236850 - DNA, 26 bp, Artificial sequence
  SiRNA target sequence
gctgttgccagaagtacagatttttt

SEQ ID NO: 236851 - DNA, 26 bp, Artificial sequence
  SiRNA target sequence
ctgttgccagaagtacagatttttta

SEQ ID NO: 236852 - DNA, 26 bp, Artificial sequence
  SiRNA target sequence
tgttgccagaagtacagattttttat

SEQ ID NO: 236853 - DNA, 26 bp, Artificial sequence
  SiRNA target sequence
gttgccagaagtacagattttttatt

SEQ ID NO: 236854 - DNA, 26 bp, Artificial sequence
  SiRNA target sequence
ttgccagaagtacagattttttattt

SEQ ID NO: 236855 - DNA, 26 bp, Artificial sequence
  SiRNA target sequence
tgccagaagtacagattttttatttt

SEQ ID NO: 236856 - DNA, 26 bp, Artificial sequence
  SiRNA target sequence
gccagaagtacagattttttattttc

SEQ ID NO: 236857 - DNA, 26 bp, Artificial sequence
  SiRNA target sequence
ccagaagtacagattttttattttct

SEQ ID NO: 236858 - DNA, 26 bp, Artificial sequence
  SiRNA target sequence
cagaagtacagattttttattttcta

SEQ ID NO: 236859 - DNA, 26 bp, Artificial sequence
  SiRNA target sequence
agaagtacagattttttattttctat

SEQ ID NO: 236860 - DNA, 26 bp, Artificial sequence
  SiRNA target sequence
gaagtacagattttttattttctatt

SEQ ID NO: 236861 - DNA, 26 bp, Artificial sequence
  SiRNA target sequence
aagtacagattttttattttctattg

SEQ ID NO: 236862 - DNA, 26 bp, Artificial sequence
  SiRNA target sequence
agtacagattttttattttctattgc

SEQ ID NO: 236863 - DNA, 26 bp, Artificial sequence
  SiRNA target sequence
gtacagattttttattttctattgca

SEQ ID NO: 236864 - DNA, 26 bp, Artificial sequence
  SiRNA target sequence
tacagattttttattttctattgcac

SEQ ID NO: 236865 - DNA, 26 bp, Artificial sequence
  SiRNA target sequence
acagattttttattttctattgcact

SEQ ID NO: 236866 - DNA, 26 bp, Artificial sequence
  SiRNA target sequence
cagattttttattttctattgcactt

SEQ ID NO: 236867 - DNA, 26 bp, Artificial sequence
  SiRNA target sequence
agattttttattttctattgcacttg

SEQ ID NO: 236868 - DNA, 26 bp, Artificial sequence
  SiRNA target sequence
gattttttattttctattgcacttgt

SEQ ID NO: 236869 - DNA, 26 bp, Artificial sequence
  SiRNA target sequence
attttttattttctattgcacttgtt

SEQ ID NO: 236870 - DNA, 26 bp, Artificial sequence
  SiRNA target sequence
ttttttattttctattgcacttgttt

SEQ ID NO: 236871 - DNA, 26 bp, Artificial sequence
  SiRNA target sequence
tttttattttctattgcacttgtttt

SEQ ID NO: 236872 - DNA, 26 bp, Artificial sequence
  SiRNA target sequence
ttttattttctattgcacttgttttc

SEQ ID NO: 236873 - DNA, 26 bp, Artificial sequence
  SiRNA target sequence
tttattttctattgcacttgttttca

SEQ ID NO: 236874 - DNA, 26 bp, Artificial sequence
  SiRNA target sequence
ttattttctattgcacttgttttcaa

SEQ ID NO: 236875 - DNA, 26 bp, Artificial sequence
  SiRNA target sequence
tattttctattgcacttgttttcaat

SEQ ID NO: 236876 - DNA, 26 bp, Artificial sequence
  SiRNA target sequence
attttctattgcacttgttttcaatg

SEQ ID NO: 236877 - DNA, 26 bp, Artificial sequence
  SiRNA target sequence
ttttctattgcacttgttttcaatga

SEQ ID NO: 236878 - DNA, 26 bp, Artificial sequence
  SiRNA target sequence
tttctattgcacttgttttcaatgaa

SEQ ID NO: 236879 - DNA, 26 bp, Artificial sequence
  SiRNA target sequence
ttctattgcacttgttttcaatgaat

SEQ ID NO: 236880 - DNA, 26 bp, Artificial sequence
  SiRNA target sequence
tctattgcacttgttttcaatgaatg

SEQ ID NO: 236881 - DNA, 26 bp, Artificial sequence
  SiRNA target sequence
ctattgcacttgttttcaatgaatgg

SEQ ID NO: 236882 - DNA, 26 bp, Artificial sequence
  SiRNA target sequence
tattgcacttgttttcaatgaatgga

SEQ ID NO: 236883 - DNA, 26 bp, Artificial sequence
  SiRNA target sequence
attgcacttgttttcaatgaatggac

SEQ ID NO: 236884 - DNA, 26 bp, Artificial sequence
  SiRNA target sequence
ttgcacttgttttcaatgaatggaca

SEQ ID NO: 236885 - DNA, 26 bp, Artificial sequence
  SiRNA target sequence
tgcacttgttttcaatgaatggacaa

SEQ ID NO: 236886 - DNA, 26 bp, Artificial sequence
  SiRNA target sequence
gcacttgttttcaatgaatggacaag

SEQ ID NO: 236887 - DNA, 26 bp, Artificial sequence
  SiRNA target sequence
cacttgttttcaatgaatggacaagt

SEQ ID NO: 236888 - DNA, 26 bp, Artificial sequence
  SiRNA target sequence
acttgttttcaatgaatggacaagtt

SEQ ID NO: 236889 - DNA, 26 bp, Artificial sequence
  SiRNA target sequence
cttgttttcaatgaatggacaagttc

SEQ ID NO: 236890 - DNA, 26 bp, Artificial sequence
  SiRNA target sequence
ttgttttcaatgaatggacaagttct

SEQ ID NO: 236891 - DNA, 26 bp, Artificial sequence
  SiRNA target sequence
tgttttcaatgaatggacaagttctg

SEQ ID NO: 236892 - DNA, 26 bp, Artificial sequence
  SiRNA target sequence
gttttcaatgaatggacaagttctgc

SEQ ID NO: 236893 - DNA, 26 bp, Artificial sequence
  SiRNA target sequence
ttttcaatgaatggacaagttctgct

SEQ ID NO: 236894 - DNA, 26 bp, Artificial sequence
  SiRNA target sequence
tttcaatgaatggacaagttctgcta

SEQ ID NO: 236895 - DNA, 26 bp, Artificial sequence
  SiRNA target sequence
ttcaatgaatggacaagttctgctat

SEQ ID NO: 236896 - DNA, 26 bp, Artificial sequence
  SiRNA target sequence
tcaatgaatggacaagttctgctatc

SEQ ID NO: 236897 - DNA, 26 bp, Artificial sequence
  SiRNA target sequence
caatgaatggacaagttctgctatct

SEQ ID NO: 236898 - DNA, 26 bp, Artificial sequence
  SiRNA target sequence
aatgaatggacaagttctgctatcta

SEQ ID NO: 236899 - DNA, 26 bp, Artificial sequence
  SiRNA target sequence
atgaatggacaagttctgctatctat

SEQ ID NO: 236900 - DNA, 26 bp, Artificial sequence
  SiRNA target sequence
tgaatggacaagttctgctatctatg

SEQ ID NO: 236901 - DNA, 26 bp, Artificial sequence
  SiRNA target sequence
gaatggacaagttctgctatctatgt

SEQ ID NO: 236902 - DNA, 26 bp, Artificial sequence
  SiRNA target sequence
aatggacaagttctgctatctatgtt

SEQ ID NO: 236903 - DNA, 26 bp, Artificial sequence
  SiRNA target sequence
atggacaagttctgctatctatgttt

SEQ ID NO: 236904 - DNA, 26 bp, Artificial sequence
  SiRNA target sequence
tggacaagttctgctatctatgtttt

SEQ ID NO: 236905 - DNA, 26 bp, Artificial sequence
  SiRNA target sequence
ggacaagttctgctatctatgtttta

SEQ ID NO: 236906 - DNA, 26 bp, Artificial sequence
  SiRNA target sequence
gacaagttctgctatctatgttttat

SEQ ID NO: 236907 - DNA, 26 bp, Artificial sequence
  SiRNA target sequence
acaagttctgctatctatgttttatc

SEQ ID NO: 236908 - DNA, 26 bp, Artificial sequence
  SiRNA target sequence
caagttctgctatctatgttttatct

SEQ ID NO: 236909 - DNA, 26 bp, Artificial sequence
  SiRNA target sequence
aagttctgctatctatgttttatctg

SEQ ID NO: 236910 - DNA, 26 bp, Artificial sequence
  SiRNA target sequence
agttctgctatctatgttttatctga

SEQ ID NO: 236911 - DNA, 26 bp, Artificial sequence
  SiRNA target sequence
gttctgctatctatgttttatctgaa

SEQ ID NO: 236912 - DNA, 26 bp, Artificial sequence
  SiRNA target sequence
ttctgctatctatgttttatctgaaa

SEQ ID NO: 236913 - DNA, 26 bp, Artificial sequence
  SiRNA target sequence
tctgctatctatgttttatctgaaat

SEQ ID NO: 236914 - DNA, 26 bp, Artificial sequence
  SiRNA target sequence
ctgctatctatgttttatctgaaatg

SEQ ID NO: 236915 - DNA, 26 bp, Artificial sequence
  SiRNA target sequence
tgctatctatgttttatctgaaatgt

SEQ ID NO: 236916 - DNA, 26 bp, Artificial sequence
  SiRNA target sequence
gctatctatgttttatctgaaatgtt

SEQ ID NO: 236917 - DNA, 26 bp, Artificial sequence
  SiRNA target sequence
ctatctatgttttatctgaaatgttt

SEQ ID NO: 236918 - DNA, 26 bp, Artificial sequence
  SiRNA target sequence
tatctatgttttatctgaaatgtttg

SEQ ID NO: 236919 - DNA, 26 bp, Artificial sequence
  SiRNA target sequence
atctatgttttatctgaaatgtttgg

SEQ ID NO: 236920 - DNA, 26 bp, Artificial sequence
  SiRNA target sequence
tctatgttttatctgaaatgtttggt

SEQ ID NO: 236921 - DNA, 26 bp, Artificial sequence
  SiRNA target sequence
ctatgttttatctgaaatgtttggta

SEQ ID NO: 236922 - DNA, 26 bp, Artificial sequence
  SiRNA target sequence
tatgttttatctgaaatgtttggtag

SEQ ID NO: 236923 - DNA, 26 bp, Artificial sequence
  SiRNA target sequence
atgttttatctgaaatgtttggtagt

SEQ ID NO: 236924 - DNA, 26 bp, Artificial sequence
  SiRNA target sequence
tgttttatctgaaatgtttggtagtt

SEQ ID NO: 236925 - DNA, 26 bp, Artificial sequence
  SiRNA target sequence
gttttatctgaaatgtttggtagttt

SEQ ID NO: 236926 - DNA, 26 bp, Artificial sequence
  SiRNA target sequence
ttttatctgaaatgtttggtagtttg

SEQ ID NO: 236927 - DNA, 26 bp, Artificial sequence
  SiRNA target sequence
tttatctgaaatgtttggtagtttga

SEQ ID NO: 236928 - DNA, 26 bp, Artificial sequence
  SiRNA target sequence
ttatctgaaatgtttggtagtttgat

SEQ ID NO: 236929 - DNA, 26 bp, Artificial sequence
  SiRNA target sequence
tatctgaaatgtttggtagtttgatt

SEQ ID NO: 236930 - DNA, 26 bp, Artificial sequence
  SiRNA target sequence
atctgaaatgtttggtagtttgattc

SEQ ID NO: 236931 - DNA, 26 bp, Artificial sequence
  SiRNA target sequence
tctgaaatgtttggtagtttgattct

SEQ ID NO: 236932 - DNA, 26 bp, Artificial sequence
  SiRNA target sequence
ctgaaatgtttggtagtttgattctt

SEQ ID NO: 236933 - DNA, 26 bp, Artificial sequence
  SiRNA target sequence
tgaaatgtttggtagtttgattcttt

SEQ ID NO: 236934 - DNA, 26 bp, Artificial sequence
  SiRNA target sequence
gaaatgtttggtagtttgattctttc

SEQ ID NO: 236935 - DNA, 26 bp, Artificial sequence
  SiRNA target sequence
aaatgtttggtagtttgattctttca

SEQ ID NO: 236936 - DNA, 26 bp, Artificial sequence
  SiRNA target sequence
aatgtttggtagtttgattctttcat

SEQ ID NO: 236937 - DNA, 26 bp, Artificial sequence
  SiRNA target sequence
atgtttggtagtttgattctttcata

SEQ ID NO: 236938 - DNA, 26 bp, Artificial sequence
  SiRNA target sequence
tgtttggtagtttgattctttcatat

SEQ ID NO: 236939 - DNA, 26 bp, Artificial sequence
  SiRNA target sequence
gtttggtagtttgattctttcatatt

SEQ ID NO: 236940 - DNA, 26 bp, Artificial sequence
  SiRNA target sequence
tttggtagtttgattctttcatattt

SEQ ID NO: 236941 - DNA, 26 bp, Artificial sequence
  SiRNA target sequence
ttggtagtttgattctttcatattta

SEQ ID NO: 236942 - DNA, 26 bp, Artificial sequence
  SiRNA target sequence
tggtagtttgattctttcatatttat

SEQ ID NO: 236943 - DNA, 26 bp, Artificial sequence
  SiRNA target sequence
ggtagtttgattctttcatatttatt

SEQ ID NO: 236944 - DNA, 26 bp, Artificial sequence
  SiRNA target sequence
gtagtttgattctttcatatttattt

SEQ ID NO: 236945 - DNA, 26 bp, Artificial sequence
  SiRNA target sequence
tagtttgattctttcatatttattta

SEQ ID NO: 236946 - DNA, 26 bp, Artificial sequence
  SiRNA target sequence
agtttgattctttcatatttatttat

SEQ ID NO: 236947 - DNA, 26 bp, Artificial sequence
  SiRNA target sequence
gtttgattctttcatatttatttatg

SEQ ID NO: 236948 - DNA, 26 bp, Artificial sequence
  SiRNA target sequence
tttgattctttcatatttatttatga

SEQ ID NO: 236949 - DNA, 26 bp, Artificial sequence
  SiRNA target sequence
ttgattctttcatatttatttatgac

SEQ ID NO: 236950 - DNA, 26 bp, Artificial sequence
  SiRNA target sequence
tgattctttcatatttatttatgacg

SEQ ID NO: 236951 - DNA, 26 bp, Artificial sequence
  SiRNA target sequence
gattctttcatatttatttatgacgt

SEQ ID NO: 236952 - DNA, 26 bp, Artificial sequence
  SiRNA target sequence
attctttcatatttatttatgacgtt

SEQ ID NO: 236953 - DNA, 26 bp, Artificial sequence
  SiRNA target sequence
ttctttcatatttatttatgacgttt

SEQ ID NO: 236954 - DNA, 26 bp, Artificial sequence
  SiRNA target sequence
tctttcatatttatttatgacgtttg

SEQ ID NO: 236955 - DNA, 26 bp, Artificial sequence
  SiRNA target sequence
ctttcatatttatttatgacgtttgc

SEQ ID NO: 236956 - DNA, 26 bp, Artificial sequence
  SiRNA target sequence
tttcatatttatttatgacgtttgct

SEQ ID NO: 236957 - DNA, 26 bp, Artificial sequence
  SiRNA target sequence
ttcatatttatttatgacgtttgcta

SEQ ID NO: 236958 - DNA, 26 bp, Artificial sequence
  SiRNA target sequence
tcatatttatttatgacgtttgctaa

SEQ ID NO: 236959 - DNA, 26 bp, Artificial sequence
  SiRNA target sequence
catatttatttatgacgtttgctaat

SEQ ID NO: 236960 - DNA, 26 bp, Artificial sequence
  SiRNA target sequence
atatttatttatgacgtttgctaatg

SEQ ID NO: 236961 - DNA, 26 bp, Artificial sequence
  SiRNA target sequence
tatttatttatgacgtttgctaatgg

SEQ ID NO: 236962 - DNA, 26 bp, Artificial sequence
  SiRNA target sequence
atttatttatgacgtttgctaatggt

SEQ ID NO: 236963 - DNA, 26 bp, Artificial sequence
  SiRNA target sequence
tttatttatgacgtttgctaatggtc

SEQ ID NO: 236964 - DNA, 26 bp, Artificial sequence
  SiRNA target sequence
ttatttatgacgtttgctaatggtct

SEQ ID NO: 236965 - DNA, 26 bp, Artificial sequence
  SiRNA target sequence
tatttatgacgtttgctaatggtctt

SEQ ID NO: 236966 - DNA, 26 bp, Artificial sequence
  SiRNA target sequence
atttatgacgtttgctaatggtcttt

SEQ ID NO: 236967 - DNA, 26 bp, Artificial sequence
  SiRNA target sequence
tttatgacgtttgctaatggtctttc

SEQ ID NO: 236968 - DNA, 26 bp, Artificial sequence
  SiRNA target sequence
ttatgacgtttgctaatggtctttcg

SEQ ID NO: 236969 - DNA, 26 bp, Artificial sequence
  SiRNA target sequence
tatgacgtttgctaatggtctttcga

SEQ ID NO: 236970 - DNA, 26 bp, Artificial sequence
  SiRNA target sequence
atgacgtttgctaatggtctttcgac

SEQ ID NO: 236971 - DNA, 26 bp, Artificial sequence
  SiRNA target sequence
tgacgtttgctaatggtctttcgact

SEQ ID NO: 236972 - DNA, 26 bp, Artificial sequence
  SiRNA target sequence
gacgtttgctaatggtctttcgactc

SEQ ID NO: 236973 - DNA, 26 bp, Artificial sequence
  SiRNA target sequence
acgtttgctaatggtctttcgactcc

SEQ ID NO: 236974 - DNA, 26 bp, Artificial sequence
  SiRNA target sequence
cgtttgctaatggtctttcgactcct

SEQ ID NO: 236975 - DNA, 26 bp, Artificial sequence
  SiRNA target sequence
gtttgctaatggtctttcgactcctg

SEQ ID NO: 236976 - DNA, 26 bp, Artificial sequence
  SiRNA target sequence
tttgctaatggtctttcgactcctgg

SEQ ID NO: 236977 - DNA, 26 bp, Artificial sequence
  SiRNA target sequence
ttgctaatggtctttcgactcctgga

SEQ ID NO: 236978 - DNA, 26 bp, Artificial sequence
  SiRNA target sequence
tgctaatggtctttcgactcctggac

SEQ ID NO: 236979 - DNA, 26 bp, Artificial sequence
  SiRNA target sequence
gctaatggtctttcgactcctggaca

SEQ ID NO: 236980 - DNA, 26 bp, Artificial sequence
  SiRNA target sequence
ctaatggtctttcgactcctggacag

SEQ ID NO: 236981 - DNA, 26 bp, Artificial sequence
  SiRNA target sequence
taatggtctttcgactcctggacagt

SEQ ID NO: 236982 - DNA, 26 bp, Artificial sequence
  SiRNA target sequence
aatggtctttcgactcctggacagtc

SEQ ID NO: 236983 - DNA, 26 bp, Artificial sequence
  SiRNA target sequence
atggtctttcgactcctggacagtcc

SEQ ID NO: 236984 - DNA, 26 bp, Artificial sequence
  SiRNA target sequence
tggtctttcgactcctggacagtccg

SEQ ID NO: 236985 - DNA, 26 bp, Artificial sequence
  SiRNA target sequence
ggtctttcgactcctggacagtccgc

SEQ ID NO: 236986 - DNA, 26 bp, Artificial sequence
  SiRNA target sequence
gtctttcgactcctggacagtccgct

SEQ ID NO: 236987 - DNA, 26 bp, Artificial sequence
  SiRNA target sequence
tctttcgactcctggacagtccgcta

SEQ ID NO: 236988 - DNA, 26 bp, Artificial sequence
  SiRNA target sequence
ctttcgactcctggacagtccgctag

SEQ ID NO: 236989 - DNA, 26 bp, Artificial sequence
  SiRNA target sequence
tttcgactcctggacagtccgctaga

SEQ ID NO: 236990 - DNA, 26 bp, Artificial sequence
  SiRNA target sequence
ttcgactcctggacagtccgctagat

SEQ ID NO: 236991 - DNA, 26 bp, Artificial sequence
  SiRNA target sequence
tcgactcctggacagtccgctagatt

SEQ ID NO: 236992 - DNA, 26 bp, Artificial sequence
  SiRNA target sequence
cgactcctggacagtccgctagattt

SEQ ID NO: 236993 - DNA, 26 bp, Artificial sequence
  SiRNA target sequence
gactcctggacagtccgctagatttg

SEQ ID NO: 236994 - DNA, 26 bp, Artificial sequence
  SiRNA target sequence
actcctggacagtccgctagatttgt

SEQ ID NO: 236995 - DNA, 26 bp, Artificial sequence
  SiRNA target sequence
ctcctggacagtccgctagatttgtc

SEQ ID NO: 236996 - DNA, 26 bp, Artificial sequence
  SiRNA target sequence
tcctggacagtccgctagatttgtcc

SEQ ID NO: 236997 - DNA, 26 bp, Artificial sequence
  SiRNA target sequence
cctggacagtccgctagatttgtccc

SEQ ID NO: 236998 - DNA, 26 bp, Artificial sequence
  SiRNA target sequence
ctggacagtccgctagatttgtccct

SEQ ID NO: 236999 - DNA, 26 bp, Artificial sequence
  SiRNA target sequence
tggacagtccgctagatttgtccctt

SEQ ID NO: 237000 - DNA, 26 bp, Artificial sequence
  SiRNA target sequence
ggacagtccgctagatttgtcccttt

SEQ ID NO: 237001 - DNA, 26 bp, Artificial sequence
  SiRNA target sequence
gacagtccgctagatttgtcccttta

SEQ ID NO: 237002 - DNA, 26 bp, Artificial sequence
  SiRNA target sequence
acagtccgctagatttgtccctttat

SEQ ID NO: 237003 - DNA, 26 bp, Artificial sequence
  SiRNA target sequence
cagtccgctagatttgtccctttatt

SEQ ID NO: 237004 - DNA, 26 bp, Artificial sequence
  SiRNA target sequence
agtccgctagatttgtccctttattt

SEQ ID NO: 237005 - DNA, 26 bp, Artificial sequence
  SiRNA target sequence
gtccgctagatttgtccctttatttt

SEQ ID NO: 237006 - DNA, 26 bp, Artificial sequence
  SiRNA target sequence
tccgctagatttgtccctttatttta

SEQ ID NO: 237007 - DNA, 26 bp, Artificial sequence
  SiRNA target sequence
ccgctagatttgtccctttattttat

SEQ ID NO: 237008 - DNA, 26 bp, Artificial sequence
  SiRNA target sequence
cgctagatttgtccctttattttatg

SEQ ID NO: 237009 - DNA, 26 bp, Artificial sequence
  SiRNA target sequence
gctagatttgtccctttattttatgt

SEQ ID NO: 237010 - DNA, 26 bp, Artificial sequence
  SiRNA target sequence
ctagatttgtccctttattttatgtt

SEQ ID NO: 237011 - DNA, 26 bp, Artificial sequence
  SiRNA target sequence
tagatttgtccctttattttatgttg

SEQ ID NO: 237012 - DNA, 26 bp, Artificial sequence
  SiRNA target sequence
agatttgtccctttattttatgttgg

SEQ ID NO: 237013 - DNA, 26 bp, Artificial sequence
  SiRNA target sequence
gatttgtccctttattttatgttgga

SEQ ID NO: 237014 - DNA, 26 bp, Artificial sequence
  SiRNA target sequence
atttgtccctttattttatgttggat

SEQ ID NO: 237015 - DNA, 26 bp, Artificial sequence
  SiRNA target sequence
tttgtccctttattttatgttggatc

SEQ ID NO: 237016 - DNA, 26 bp, Artificial sequence
  SiRNA target sequence
ttgtccctttattttatgttggatct

SEQ ID NO: 237017 - DNA, 26 bp, Artificial sequence
  SiRNA target sequence
tgtccctttattttatgttggatcta

SEQ ID NO: 237018 - DNA, 26 bp, Artificial sequence
  SiRNA target sequence
gtccctttattttatgttggatctaa

SEQ ID NO: 237019 - DNA, 26 bp, Artificial sequence
  SiRNA target sequence
tccctttattttatgttggatctaat

SEQ ID NO: 237020 - DNA, 26 bp, Artificial sequence
  SiRNA target sequence
ccctttattttatgttggatctaatt

SEQ ID NO: 237021 - DNA, 26 bp, Artificial sequence
  SiRNA target sequence
cctttattttatgttggatctaattt

SEQ ID NO: 237022 - DNA, 26 bp, Artificial sequence
  SiRNA target sequence
ctttattttatgttggatctaatttg

SEQ ID NO: 237023 - DNA, 26 bp, Artificial sequence
  SiRNA target sequence
tttattttatgttggatctaatttgg

SEQ ID NO: 237024 - DNA, 26 bp, Artificial sequence
  SiRNA target sequence
ttattttatgttggatctaatttggc

SEQ ID NO: 237025 - DNA, 26 bp, Artificial sequence
  SiRNA target sequence
tattttatgttggatctaatttggct

SEQ ID NO: 237026 - DNA, 26 bp, Artificial sequence
  SiRNA target sequence
attttatgttggatctaatttggctt

SEQ ID NO: 237027 - DNA, 26 bp, Artificial sequence
  SiRNA target sequence
ttttatgttggatctaatttggcttt

SEQ ID NO: 237028 - DNA, 26 bp, Artificial sequence
  SiRNA target sequence
tttatgttggatctaatttggcttta

SEQ ID NO: 237029 - DNA, 26 bp, Artificial sequence
  SiRNA target sequence
ttatgttggatctaatttggctttac

SEQ ID NO: 237030 - DNA, 26 bp, Artificial sequence
  SiRNA target sequence
tatgttggatctaatttggctttact

SEQ ID NO: 237031 - DNA, 26 bp, Artificial sequence
  SiRNA target sequence
atgttggatctaatttggctttactt

SEQ ID NO: 237032 - DNA, 26 bp, Artificial sequence
  SiRNA target sequence
tgttggatctaatttggctttacttc

SEQ ID NO: 237033 - DNA, 26 bp, Artificial sequence
  SiRNA target sequence
gttggatctaatttggctttacttct

SEQ ID NO: 237034 - DNA, 26 bp, Artificial sequence
  SiRNA target sequence
ttggatctaatttggctttacttctt

SEQ ID NO: 237035 - DNA, 26 bp, Artificial sequence
  SiRNA target sequence
tggatctaatttggctttacttcttt

SEQ ID NO: 237036 - DNA, 26 bp, Artificial sequence
  SiRNA target sequence
ggatctaatttggctttacttctttc

SEQ ID NO: 237037 - DNA, 26 bp, Artificial sequence
  SiRNA target sequence
gatctaatttggctttacttctttca

SEQ ID NO: 237038 - DNA, 26 bp, Artificial sequence
  SiRNA target sequence
atctaatttggctttacttctttcag

SEQ ID NO: 237039 - DNA, 26 bp, Artificial sequence
  SiRNA target sequence
tctaatttggctttacttctttcagg

SEQ ID NO: 237040 - DNA, 26 bp, Artificial sequence
  SiRNA target sequence
ctaatttggctttacttctttcagga

SEQ ID NO: 237041 - DNA, 26 bp, Artificial sequence
  SiRNA target sequence
taatttggctttacttctttcaggaa

SEQ ID NO: 237042 - DNA, 26 bp, Artificial sequence
  SiRNA target sequence
aatttggctttacttctttcaggaat

SEQ ID NO: 237043 - DNA, 26 bp, Artificial sequence
  SiRNA target sequence
atttggctttacttctttcaggaatg

SEQ ID NO: 237044 - DNA, 26 bp, Artificial sequence
  SiRNA target sequence
tttggctttacttctttcaggaatga

SEQ ID NO: 237045 - DNA, 26 bp, Artificial sequence
  SiRNA target sequence
ttggctttacttctttcaggaatgat

SEQ ID NO: 237046 - DNA, 26 bp, Artificial sequence
  SiRNA target sequence
tggctttacttctttcaggaatgata

SEQ ID NO: 237047 - DNA, 26 bp, Artificial sequence
  SiRNA target sequence
ggctttacttctttcaggaatgataa

SEQ ID NO: 237048 - DNA, 26 bp, Artificial sequence
  SiRNA target sequence
gctttacttctttcaggaatgataaa

SEQ ID NO: 237049 - DNA, 26 bp, Artificial sequence
  SiRNA target sequence
ctttacttctttcaggaatgataaat

SEQ ID NO: 237050 - DNA, 26 bp, Artificial sequence
  SiRNA target sequence
tttacttctttcaggaatgataaatt

SEQ ID NO: 237051 - DNA, 26 bp, Artificial sequence
  SiRNA target sequence
ttacttctttcaggaatgataaatta

SEQ ID NO: 237052 - DNA, 26 bp, Artificial sequence
  SiRNA target sequence
tacttctttcaggaatgataaattac

SEQ ID NO: 237053 - DNA, 26 bp, Artificial sequence
  SiRNA target sequence
acttctttcaggaatgataaattact

SEQ ID NO: 237054 - DNA, 26 bp, Artificial sequence
  SiRNA target sequence
cttctttcaggaatgataaattactt

SEQ ID NO: 237055 - DNA, 26 bp, Artificial sequence
  SiRNA target sequence
ttctttcaggaatgataaattacttt

SEQ ID NO: 237056 - DNA, 26 bp, Artificial sequence
  SiRNA target sequence
tctttcaggaatgataaattactttt

SEQ ID NO: 237057 - DNA, 26 bp, Artificial sequence
  SiRNA target sequence
ctttcaggaatgataaattactttta

SEQ ID NO: 237058 - DNA, 26 bp, Artificial sequence
  SiRNA target sequence
tttcaggaatgataaattacttttat

SEQ ID NO: 237059 - DNA, 26 bp, Artificial sequence
  SiRNA target sequence
ttcaggaatgataaattacttttata

SEQ ID NO: 237060 - DNA, 26 bp, Artificial sequence
  SiRNA target sequence
tcaggaatgataaattacttttatag

SEQ ID NO: 237061 - DNA, 26 bp, Artificial sequence
  SiRNA target sequence
caggaatgataaattacttttatagt

SEQ ID NO: 237062 - DNA, 26 bp, Artificial sequence
  SiRNA target sequence
aggaatgataaattacttttatagtg

SEQ ID NO: 237063 - DNA, 26 bp, Artificial sequence
  SiRNA target sequence
ggaatgataaattacttttatagtgt

SEQ ID NO: 237064 - DNA, 26 bp, Artificial sequence
  SiRNA target sequence
gaatgataaattacttttatagtgta

SEQ ID NO: 237065 - DNA, 26 bp, Artificial sequence
  SiRNA target sequence
aatgataaattacttttatagtgtaa

SEQ ID NO: 237066 - DNA, 26 bp, Artificial sequence
  SiRNA target sequence
atgataaattacttttatagtgtaag

SEQ ID NO: 237067 - DNA, 26 bp, Artificial sequence
  SiRNA target sequence
tgataaattacttttatagtgtaagt

SEQ ID NO: 237068 - DNA, 26 bp, Artificial sequence
  SiRNA target sequence
gataaattacttttatagtgtaagta

SEQ ID NO: 237069 - DNA, 26 bp, Artificial sequence
  SiRNA target sequence
ataaattacttttatagtgtaagtaa

SEQ ID NO: 237070 - DNA, 26 bp, Artificial sequence
  SiRNA target sequence
taaattacttttatagtgtaagtaaa

SEQ ID NO: 237071 - DNA, 26 bp, Artificial sequence
  SiRNA target sequence
aaattacttttatagtgtaagtaaat

SEQ ID NO: 237072 - DNA, 26 bp, Artificial sequence
  SiRNA target sequence
aattacttttatagtgtaagtaaatc

SEQ ID NO: 237073 - DNA, 26 bp, Artificial sequence
  SiRNA target sequence
attacttttatagtgtaagtaaatct

SEQ ID NO: 237074 - DNA, 26 bp, Artificial sequence
  SiRNA target sequence
ttacttttatagtgtaagtaaatcta

SEQ ID NO: 237075 - DNA, 26 bp, Artificial sequence
  SiRNA target sequence
tacttttatagtgtaagtaaatctaa

SEQ ID NO: 237076 - DNA, 26 bp, Artificial sequence
  SiRNA target sequence
acttttatagtgtaagtaaatctaaa

SEQ ID NO: 237077 - DNA, 26 bp, Artificial sequence
  SiRNA target sequence
cttttatagtgtaagtaaatctaaaa

SEQ ID NO: 237078 - DNA, 26 bp, Artificial sequence
  SiRNA target sequence
ttttatagtgtaagtaaatctaaaat

SEQ ID NO: 237079 - DNA, 26 bp, Artificial sequence
  SiRNA target sequence
tttatagtgtaagtaaatctaaaatg

SEQ ID NO: 237080 - DNA, 26 bp, Artificial sequence
  SiRNA target sequence
ttatagtgtaagtaaatctaaaatgt

SEQ ID NO: 237081 - DNA, 26 bp, Artificial sequence
  SiRNA target sequence
tatagtgtaagtaaatctaaaatgtc

SEQ ID NO: 237082 - DNA, 26 bp, Artificial sequence
  SiRNA target sequence
atagtgtaagtaaatctaaaatgtcg

SEQ ID NO: 237083 - DNA, 26 bp, Artificial sequence
  SiRNA target sequence
tagtgtaagtaaatctaaaatgtcgt

SEQ ID NO: 237084 - DNA, 26 bp, Artificial sequence
  SiRNA target sequence
agtgtaagtaaatctaaaatgtcgta

SEQ ID NO: 237085 - DNA, 26 bp, Artificial sequence
  SiRNA target sequence
gtgtaagtaaatctaaaatgtcgtat

SEQ ID NO: 237086 - DNA, 26 bp, Artificial sequence
  SiRNA target sequence
tgtaagtaaatctaaaatgtcgtatg

SEQ ID NO: 237087 - DNA, 26 bp, Artificial sequence
  SiRNA target sequence
gtaagtaaatctaaaatgtcgtatgt

SEQ ID NO: 237088 - DNA, 26 bp, Artificial sequence
  SiRNA target sequence
taagtaaatctaaaatgtcgtatgtt

SEQ ID NO: 237089 - DNA, 26 bp, Artificial sequence
  SiRNA target sequence
aagtaaatctaaaatgtcgtatgttg

SEQ ID NO: 237090 - DNA, 26 bp, Artificial sequence
  SiRNA target sequence
agtaaatctaaaatgtcgtatgttgc

SEQ ID NO: 237091 - DNA, 26 bp, Artificial sequence
  SiRNA target sequence
gtaaatctaaaatgtcgtatgttgcg

SEQ ID NO: 237092 - DNA, 26 bp, Artificial sequence
  SiRNA target sequence
taaatctaaaatgtcgtatgttgcgg

SEQ ID NO: 237093 - DNA, 26 bp, Artificial sequence
  SiRNA target sequence
aaatctaaaatgtcgtatgttgcggc

SEQ ID NO: 237094 - DNA, 26 bp, Artificial sequence
  SiRNA target sequence
aatctaaaatgtcgtatgttgcggcc

SEQ ID NO: 237095 - DNA, 26 bp, Artificial sequence
  SiRNA target sequence
atctaaaatgtcgtatgttgcggccg

SEQ ID NO: 237096 - DNA, 26 bp, Artificial sequence
  SiRNA target sequence
tctaaaatgtcgtatgttgcggccga

SEQ ID NO: 237097 - DNA, 26 bp, Artificial sequence
  SiRNA target sequence
ctaaaatgtcgtatgttgcggccgaa

SEQ ID NO: 237098 - DNA, 26 bp, Artificial sequence
  SiRNA target sequence
taaaatgtcgtatgttgcggccgaaa

SEQ ID NO: 237099 - DNA, 26 bp, Artificial sequence
  SiRNA target sequence
aaaatgtcgtatgttgcggccgaaag

SEQ ID NO: 237100 - DNA, 26 bp, Artificial sequence
  SiRNA target sequence
aaatgtcgtatgttgcggccgaaaga

SEQ ID NO: 237101 - DNA, 26 bp, Artificial sequence
  SiRNA target sequence
aatgtcgtatgttgcggccgaaagat

SEQ ID NO: 237102 - DNA, 26 bp, Artificial sequence
  SiRNA target sequence
atgtcgtatgttgcggccgaaagatt

SEQ ID NO: 237103 - DNA, 26 bp, Artificial sequence
  SiRNA target sequence
tgtcgtatgttgcggccgaaagattt

SEQ ID NO: 237104 - DNA, 26 bp, Artificial sequence
  SiRNA target sequence
gtcgtatgttgcggccgaaagatttt

SEQ ID NO: 237105 - DNA, 26 bp, Artificial sequence
  SiRNA target sequence
tcgtatgttgcggccgaaagattttt

SEQ ID NO: 237106 - DNA, 26 bp, Artificial sequence
  SiRNA target sequence
cgtatgttgcggccgaaagatttttt

SEQ ID NO: 237107 - DNA, 26 bp, Artificial sequence
  SiRNA target sequence
gtatgttgcggccgaaagatttttta

SEQ ID NO: 237108 - DNA, 26 bp, Artificial sequence
  SiRNA target sequence
tatgttgcggccgaaagattttttaa

SEQ ID NO: 237109 - DNA, 26 bp, Artificial sequence
  SiRNA target sequence
atgttgcggccgaaagattttttaat

SEQ ID NO: 237110 - DNA, 26 bp, Artificial sequence
  SiRNA target sequence
tgttgcggccgaaagattttttaatg

SEQ ID NO: 237111 - DNA, 26 bp, Artificial sequence
  SiRNA target sequence
gttgcggccgaaagattttttaatgg

SEQ ID NO: 237112 - DNA, 26 bp, Artificial sequence
  SiRNA target sequence
ttgcggccgaaagattttttaatgga

SEQ ID NO: 237113 - DNA, 26 bp, Artificial sequence
  SiRNA target sequence
tgcggccgaaagattttttaatggat

SEQ ID NO: 237114 - DNA, 26 bp, Artificial sequence
  SiRNA target sequence
gcggccgaaagattttttaatggatt

SEQ ID NO: 237115 - DNA, 26 bp, Artificial sequence
  SiRNA target sequence
cggccgaaagattttttaatggattt

SEQ ID NO: 237116 - DNA, 26 bp, Artificial sequence
  SiRNA target sequence
ggccgaaagattttttaatggatttt

SEQ ID NO: 237117 - DNA, 26 bp, Artificial sequence
  SiRNA target sequence
gccgaaagattttttaatggattttt

SEQ ID NO: 237118 - DNA, 26 bp, Artificial sequence
  SiRNA target sequence
ccgaaagattttttaatggatttttt

SEQ ID NO: 237119 - DNA, 26 bp, Artificial sequence
  SiRNA target sequence
cgaaagattttttaatggattttttt

SEQ ID NO: 237120 - DNA, 26 bp, Artificial sequence
  SiRNA target sequence
gaaagattttttaatggatttttttg

SEQ ID NO: 237121 - DNA, 26 bp, Artificial sequence
  SiRNA target sequence
aaagattttttaatggatttttttgt

SEQ ID NO: 237122 - DNA, 26 bp, Artificial sequence
  SiRNA target sequence
aagattttttaatggatttttttgtc

SEQ ID NO: 237123 - DNA, 26 bp, Artificial sequence
  SiRNA target sequence
agattttttaatggatttttttgtct

SEQ ID NO: 237124 - DNA, 26 bp, Artificial sequence
  SiRNA target sequence
gattttttaatggatttttttgtctg

SEQ ID NO: 237125 - DNA, 26 bp, Artificial sequence
  SiRNA target sequence
attttttaatggatttttttgtctga

SEQ ID NO: 237126 - DNA, 26 bp, Artificial sequence
  SiRNA target sequence
ttttttaatggatttttttgtctgag

SEQ ID NO: 237127 - DNA, 26 bp, Artificial sequence
  SiRNA target sequence
tttttaatggatttttttgtctgagt

SEQ ID NO: 237128 - DNA, 26 bp, Artificial sequence
  SiRNA target sequence
ttttaatggatttttttgtctgagtg

SEQ ID NO: 237129 - DNA, 26 bp, Artificial sequence
  SiRNA target sequence
tttaatggatttttttgtctgagtgg

SEQ ID NO: 237130 - DNA, 26 bp, Artificial sequence
  SiRNA target sequence
ttaatggatttttttgtctgagtgga

SEQ ID NO: 237131 - DNA, 26 bp, Artificial sequence
  SiRNA target sequence
taatggatttttttgtctgagtggaa

SEQ ID NO: 237132 - DNA, 26 bp, Artificial sequence
  SiRNA target sequence
aatggatttttttgtctgagtggaat

SEQ ID NO: 237133 - DNA, 26 bp, Artificial sequence
  SiRNA target sequence
atggatttttttgtctgagtggaatt

SEQ ID NO: 237134 - DNA, 26 bp, Artificial sequence
  SiRNA target sequence
tggatttttttgtctgagtggaattc

SEQ ID NO: 237135 - DNA, 26 bp, Artificial sequence
  SiRNA target sequence
ggatttttttgtctgagtggaattct

SEQ ID NO: 237136 - DNA, 26 bp, Artificial sequence
  SiRNA target sequence
gatttttttgtctgagtggaattctc

SEQ ID NO: 237137 - DNA, 26 bp, Artificial sequence
  SiRNA target sequence
atttttttgtctgagtggaattctct

SEQ ID NO: 237138 - DNA, 26 bp, Artificial sequence
  SiRNA target sequence
tttttttgtctgagtggaattctctg

SEQ ID NO: 237139 - DNA, 26 bp, Artificial sequence
  SiRNA target sequence
ttttttgtctgagtggaattctctgt

SEQ ID NO: 237140 - DNA, 26 bp, Artificial sequence
  SiRNA target sequence
tttttgtctgagtggaattctctgtg

SEQ ID NO: 237141 - DNA, 26 bp, Artificial sequence
  SiRNA target sequence
ttttgtctgagtggaattctctgtgc

SEQ ID NO: 237142 - DNA, 26 bp, Artificial sequence
  SiRNA target sequence
tttgtctgagtggaattctctgtgct

SEQ ID NO: 237143 - DNA, 26 bp, Artificial sequence
  SiRNA target sequence
ttgtctgagtggaattctctgtgctg

SEQ ID NO: 237144 - DNA, 26 bp, Artificial sequence
  SiRNA target sequence
tgtctgagtggaattctctgtgctgt

SEQ ID NO: 237145 - DNA, 26 bp, Artificial sequence
  SiRNA target sequence
gtctgagtggaattctctgtgctgta

SEQ ID NO: 237146 - DNA, 26 bp, Artificial sequence
  SiRNA target sequence
tctgagtggaattctctgtgctgtaa

SEQ ID NO: 237147 - DNA, 26 bp, Artificial sequence
  SiRNA target sequence
ctgagtggaattctctgtgctgtaat

SEQ ID NO: 237148 - DNA, 26 bp, Artificial sequence
  SiRNA target sequence
tgagtggaattctctgtgctgtaatt

SEQ ID NO: 237149 - DNA, 26 bp, Artificial sequence
  SiRNA target sequence
gagtggaattctctgtgctgtaattt

SEQ ID NO: 237150 - DNA, 26 bp, Artificial sequence
  SiRNA target sequence
agtggaattctctgtgctgtaattta

SEQ ID NO: 237151 - DNA, 26 bp, Artificial sequence
  SiRNA target sequence
gtggaattctctgtgctgtaatttat

SEQ ID NO: 237152 - DNA, 26 bp, Artificial sequence
  SiRNA target sequence
tggaattctctgtgctgtaatttatc

SEQ ID NO: 237153 - DNA, 26 bp, Artificial sequence
  SiRNA target sequence
ggaattctctgtgctgtaatttatct

SEQ ID NO: 237154 - DNA, 26 bp, Artificial sequence
  SiRNA target sequence
gaattctctgtgctgtaatttatctt

SEQ ID NO: 237155 - DNA, 26 bp, Artificial sequence
  SiRNA target sequence
aattctctgtgctgtaatttatcttc

SEQ ID NO: 237156 - DNA, 26 bp, Artificial sequence
  SiRNA target sequence
attctctgtgctgtaatttatcttct

SEQ ID NO: 237157 - DNA, 26 bp, Artificial sequence
  SiRNA target sequence
ttctctgtgctgtaatttatcttcta

SEQ ID NO: 237158 - DNA, 26 bp, Artificial sequence
  SiRNA target sequence
tctctgtgctgtaatttatcttctaa

SEQ ID NO: 237159 - DNA, 26 bp, Artificial sequence
  SiRNA target sequence
ctctgtgctgtaatttatcttctaaa

SEQ ID NO: 237160 - DNA, 26 bp, Artificial sequence
  SiRNA target sequence
tctgtgctgtaatttatcttctaaaa

SEQ ID NO: 237161 - DNA, 26 bp, Artificial sequence
  SiRNA target sequence
ctgtgctgtaatttatcttctaaaaa

SEQ ID NO: 237162 - DNA, 26 bp, Artificial sequence
  SiRNA target sequence
tgtgctgtaatttatcttctaaaaaa

SEQ ID NO: 237163 - DNA, 26 bp, Artificial sequence
  SiRNA target sequence
gtgctgtaatttatcttctaaaaaaa

SEQ ID NO: 237164 - DNA, 26 bp, Artificial sequence
  SiRNA target sequence
tgctgtaatttatcttctaaaaaaat

SEQ ID NO: 237165 - DNA, 26 bp, Artificial sequence
  SiRNA target sequence
gctgtaatttatcttctaaaaaaata

SEQ ID NO: 237166 - DNA, 26 bp, Artificial sequence
  SiRNA target sequence
ctgtaatttatcttctaaaaaaatat

SEQ ID NO: 237167 - DNA, 26 bp, Artificial sequence
  SiRNA target sequence
tgtaatttatcttctaaaaaaatatt

SEQ ID NO: 237168 - DNA, 26 bp, Artificial sequence
  SiRNA target sequence
gtaatttatcttctaaaaaaatattt

SEQ ID NO: 237169 - DNA, 26 bp, Artificial sequence
  SiRNA target sequence
taatttatcttctaaaaaaatattta

SEQ ID NO: 237170 - DNA, 26 bp, Artificial sequence
  SiRNA target sequence
aatttatcttctaaaaaaatatttag

SEQ ID NO: 237171 - DNA, 26 bp, Artificial sequence
  SiRNA target sequence
atttatcttctaaaaaaatatttaga

SEQ ID NO: 237172 - DNA, 26 bp, Artificial sequence
  SiRNA target sequence
tttatcttctaaaaaaatatttagaa

SEQ ID NO: 237173 - DNA, 26 bp, Artificial sequence
  SiRNA target sequence
ttatcttctaaaaaaatatttagaaa

SEQ ID NO: 237174 - DNA, 26 bp, Artificial sequence
  SiRNA target sequence
tatcttctaaaaaaatatttagaaaa

SEQ ID NO: 237175 - DNA, 26 bp, Artificial sequence
  SiRNA target sequence
atcttctaaaaaaatatttagaaaat

SEQ ID NO: 237176 - DNA, 26 bp, Artificial sequence
  SiRNA target sequence
tcttctaaaaaaatatttagaaaata

SEQ ID NO: 237177 - DNA, 26 bp, Artificial sequence
  SiRNA target sequence
cttctaaaaaaatatttagaaaataa

SEQ ID NO: 237178 - DNA, 26 bp, Artificial sequence
  SiRNA target sequence
ttctaaaaaaatatttagaaaataat

SEQ ID NO: 237179 - DNA, 26 bp, Artificial sequence
  SiRNA target sequence
tctaaaaaaatatttagaaaataatg

SEQ ID NO: 237180 - DNA, 26 bp, Artificial sequence
  SiRNA target sequence
ctaaaaaaatatttagaaaataatgt

SEQ ID NO: 237181 - DNA, 26 bp, Artificial sequence
  SiRNA target sequence
taaaaaaatatttagaaaataatgtt

SEQ ID NO: 237182 - DNA, 26 bp, Artificial sequence
  SiRNA target sequence
aaaaaaatatttagaaaataatgtta

SEQ ID NO: 237183 - DNA, 26 bp, Artificial sequence
  SiRNA target sequence
aaaaaatatttagaaaataatgttac

SEQ ID NO: 237184 - DNA, 26 bp, Artificial sequence
  SiRNA target sequence
aaaaatatttagaaaataatgttact

SEQ ID NO: 237185 - DNA, 26 bp, Artificial sequence
  SiRNA target sequence
aaaatatttagaaaataatgttacta

SEQ ID NO: 237186 - DNA, 26 bp, Artificial sequence
  SiRNA target sequence
aaatatttagaaaataatgttactag

SEQ ID NO: 237187 - DNA, 26 bp, Artificial sequence
  SiRNA target sequence
aatatttagaaaataatgttactagc

SEQ ID NO: 237188 - DNA, 26 bp, Artificial sequence
  SiRNA target sequence
atatttagaaaataatgttactagca

SEQ ID NO: 237189 - DNA, 26 bp, Artificial sequence
  SiRNA target sequence
tatttagaaaataatgttactagcaa

SEQ ID NO: 237190 - DNA, 26 bp, Artificial sequence
  SiRNA target sequence
atttagaaaataatgttactagcaaa

SEQ ID NO: 237191 - DNA, 26 bp, Artificial sequence
  SiRNA target sequence
tttagaaaataatgttactagcaaac

SEQ ID NO: 237192 - DNA, 26 bp, Artificial sequence
  SiRNA target sequence
ttagaaaataatgttactagcaaacc

SEQ ID NO: 237193 - DNA, 26 bp, Artificial sequence
  SiRNA target sequence
tagaaaataatgttactagcaaacca

SEQ ID NO: 237194 - DNA, 26 bp, Artificial sequence
  SiRNA target sequence
agaaaataatgttactagcaaaccaa

SEQ ID NO: 237195 - DNA, 26 bp, Artificial sequence
  SiRNA target sequence
gaaaataatgttactagcaaaccaat

SEQ ID NO: 237196 - DNA, 26 bp, Artificial sequence
  SiRNA target sequence
aaaataatgttactagcaaaccaatg

SEQ ID NO: 237197 - DNA, 26 bp, Artificial sequence
  SiRNA target sequence
aaataatgttactagcaaaccaatgt

SEQ ID NO: 237198 - DNA, 26 bp, Artificial sequence
  SiRNA target sequence
aataatgttactagcaaaccaatgtt

SEQ ID NO: 237199 - DNA, 26 bp, Artificial sequence
  SiRNA target sequence
ataatgttactagcaaaccaatgttt

SEQ ID NO: 237200 - DNA, 26 bp, Artificial sequence
  SiRNA target sequence
taatgttactagcaaaccaatgtttg

SEQ ID NO: 237201 - DNA, 26 bp, Artificial sequence
  SiRNA target sequence
aatgttactagcaaaccaatgtttgt

SEQ ID NO: 237202 - DNA, 26 bp, Artificial sequence
  SiRNA target sequence
atgttactagcaaaccaatgtttgtt

SEQ ID NO: 237203 - DNA, 26 bp, Artificial sequence
  SiRNA target sequence
tgttactagcaaaccaatgtttgtta

SEQ ID NO: 237204 - DNA, 26 bp, Artificial sequence
  SiRNA target sequence
gttactagcaaaccaatgtttgttag

SEQ ID NO: 237205 - DNA, 26 bp, Artificial sequence
  SiRNA target sequence
ttactagcaaaccaatgtttgttaga

SEQ ID NO: 237206 - DNA, 26 bp, Artificial sequence
  SiRNA target sequence
tactagcaaaccaatgtttgttagaa

SEQ ID NO: 237207 - DNA, 26 bp, Artificial sequence
  SiRNA target sequence
actagcaaaccaatgtttgttagaaa

SEQ ID NO: 237208 - DNA, 26 bp, Artificial sequence
  SiRNA target sequence
ctagcaaaccaatgtttgttagaaag

SEQ ID NO: 237209 - DNA, 26 bp, Artificial sequence
  SiRNA target sequence
tagcaaaccaatgtttgttagaaaga

SEQ ID NO: 237210 - DNA, 26 bp, Artificial sequence
  SiRNA target sequence
agcaaaccaatgtttgttagaaagac

SEQ ID NO: 237211 - DNA, 26 bp, Artificial sequence
  SiRNA target sequence
gcaaaccaatgtttgttagaaagact

SEQ ID NO: 237212 - DNA, 26 bp, Artificial sequence
  SiRNA target sequence
caaaccaatgtttgttagaaagactt

SEQ ID NO: 237213 - DNA, 26 bp, Artificial sequence
  SiRNA target sequence
aaaccaatgtttgttagaaagacttt

SEQ ID NO: 237214 - DNA, 26 bp, Artificial sequence
  SiRNA target sequence
aaccaatgtttgttagaaagactttt

SEQ ID NO: 237215 - DNA, 26 bp, Artificial sequence
  SiRNA target sequence
accaatgtttgttagaaagactttta

SEQ ID NO: 237216 - DNA, 26 bp, Artificial sequence
  SiRNA target sequence
ccaatgtttgttagaaagacttttac

SEQ ID NO: 237217 - DNA, 26 bp, Artificial sequence
  SiRNA target sequence
caatgtttgttagaaagacttttact

SEQ ID NO: 237218 - DNA, 26 bp, Artificial sequence
  SiRNA target sequence
aatgtttgttagaaagacttttacta

SEQ ID NO: 237219 - DNA, 26 bp, Artificial sequence
  SiRNA target sequence
atgtttgttagaaagacttttactaa

SEQ ID NO: 237220 - DNA, 26 bp, Artificial sequence
  SiRNA target sequence
tgtttgttagaaagacttttactaaa

SEQ ID NO: 237221 - DNA, 26 bp, Artificial sequence
  SiRNA target sequence
gtttgttagaaagacttttactaaaa

SEQ ID NO: 237222 - DNA, 26 bp, Artificial sequence
  SiRNA target sequence
tttgttagaaagacttttactaaaaa

SEQ ID NO: 237223 - DNA, 26 bp, Artificial sequence
  SiRNA target sequence
ttgttagaaagacttttactaaaaag

SEQ ID NO: 237224 - DNA, 26 bp, Artificial sequence
  SiRNA target sequence
tgttagaaagacttttactaaaaaga

SEQ ID NO: 237225 - DNA, 26 bp, Artificial sequence
  SiRNA target sequence
gttagaaagacttttactaaaaagaa

SEQ ID NO: 237226 - DNA, 26 bp, Artificial sequence
  SiRNA target sequence
ttagaaagacttttactaaaaagaag

SEQ ID NO: 237227 - DNA, 26 bp, Artificial sequence
  SiRNA target sequence
tagaaagacttttactaaaaagaaga

SEQ ID NO: 237228 - DNA, 26 bp, Artificial sequence
  SiRNA target sequence
agaaagacttttactaaaaagaagag

SEQ ID NO: 237229 - DNA, 26 bp, Artificial sequence
  SiRNA target sequence
gaaagacttttactaaaaagaagagt

SEQ ID NO: 237230 - DNA, 26 bp, Artificial sequence
  SiRNA target sequence
aaagacttttactaaaaagaagagta

SEQ ID NO: 237231 - DNA, 26 bp, Artificial sequence
  SiRNA target sequence
aagacttttactaaaaagaagagtaa

SEQ ID NO: 237232 - DNA, 26 bp, Artificial sequence
  SiRNA target sequence
agacttttactaaaaagaagagtaaa

SEQ ID NO: 237233 - DNA, 26 bp, Artificial sequence
  SiRNA target sequence
gacttttactaaaaagaagagtaaag

SEQ ID NO: 237234 - DNA, 26 bp, Artificial sequence
  SiRNA target sequence
acttttactaaaaagaagagtaaagt

SEQ ID NO: 237235 - DNA, 26 bp, Artificial sequence
  SiRNA target sequence
cttttactaaaaagaagagtaaagtg

SEQ ID NO: 237236 - DNA, 26 bp, Artificial sequence
  SiRNA target sequence
ttttactaaaaagaagagtaaagtga

SEQ ID NO: 237237 - DNA, 26 bp, Artificial sequence
  SiRNA target sequence
tttactaaaaagaagagtaaagtgaa

SEQ ID NO: 237238 - DNA, 26 bp, Artificial sequence
  SiRNA target sequence
ttactaaaaagaagagtaaagtgaag

SEQ ID NO: 237239 - DNA, 26 bp, Artificial sequence
  SiRNA target sequence
tactaaaaagaagagtaaagtgaagg

SEQ ID NO: 237240 - DNA, 26 bp, Artificial sequence
  SiRNA target sequence
actaaaaagaagagtaaagtgaaggt

SEQ ID NO: 237241 - DNA, 26 bp, Artificial sequence
  SiRNA target sequence
ctaaaaagaagagtaaagtgaaggtt

SEQ ID NO: 237242 - DNA, 26 bp, Artificial sequence
  SiRNA target sequence
taaaaagaagagtaaagtgaaggttg

SEQ ID NO: 237243 - DNA, 26 bp, Artificial sequence
  SiRNA target sequence
aaaaagaagagtaaagtgaaggttgg

SEQ ID NO: 237244 - DNA, 26 bp, Artificial sequence
  SiRNA target sequence
aaaagaagagtaaagtgaaggttgga

SEQ ID NO: 237245 - DNA, 26 bp, Artificial sequence
  SiRNA target sequence
aaagaagagtaaagtgaaggttggat

SEQ ID NO: 237246 - DNA, 26 bp, Artificial sequence
  SiRNA target sequence
aagaagagtaaagtgaaggttggatt

SEQ ID NO: 237247 - DNA, 26 bp, Artificial sequence
  SiRNA target sequence
agaagagtaaagtgaaggttggattt

SEQ ID NO: 237248 - DNA, 26 bp, Artificial sequence
  SiRNA target sequence
gaagagtaaagtgaaggttggatttg

SEQ ID NO: 237249 - DNA, 26 bp, Artificial sequence
  SiRNA target sequence
aagagtaaagtgaaggttggatttgt

SEQ ID NO: 237250 - DNA, 26 bp, Artificial sequence
  SiRNA target sequence
agagtaaagtgaaggttggatttgtt

SEQ ID NO: 237251 - DNA, 26 bp, Artificial sequence
  SiRNA target sequence
gagtaaagtgaaggttggatttgttg

SEQ ID NO: 237252 - DNA, 26 bp, Artificial sequence
  SiRNA target sequence
agtaaagtgaaggttggatttgttga

SEQ ID NO: 237253 - DNA, 26 bp, Artificial sequence
  SiRNA target sequence
gtaaagtgaaggttggatttgttgat

SEQ ID NO: 237254 - DNA, 26 bp, Artificial sequence
  SiRNA target sequence
taaagtgaaggttggatttgttgatg

SEQ ID NO: 237255 - DNA, 26 bp, Artificial sequence
  SiRNA target sequence
aaagtgaaggttggatttgttgatgg

SEQ ID NO: 237256 - DNA, 26 bp, Artificial sequence
  SiRNA target sequence
aagtgaaggttggatttgttgatgga

SEQ ID NO: 237257 - DNA, 26 bp, Artificial sequence
  SiRNA target sequence
agtgaaggttggatttgttgatggac

SEQ ID NO: 237258 - DNA, 26 bp, Artificial sequence
  SiRNA target sequence
gtgaaggttggatttgttgatggact

SEQ ID NO: 237259 - DNA, 26 bp, Artificial sequence
  SiRNA target sequence
tgaaggttggatttgttgatggactt

SEQ ID NO: 237260 - DNA, 26 bp, Artificial sequence
  SiRNA target sequence
gaaggttggatttgttgatggactta

SEQ ID NO: 237261 - DNA, 26 bp, Artificial sequence
  SiRNA target sequence
aaggttggatttgttgatggacttat

SEQ ID NO: 237262 - DNA, 26 bp, Artificial sequence
  SiRNA target sequence
aggttggatttgttgatggacttatt

SEQ ID NO: 237263 - DNA, 26 bp, Artificial sequence
  SiRNA target sequence
ggttggatttgttgatggacttattg

SEQ ID NO: 237264 - DNA, 26 bp, Artificial sequence
  SiRNA target sequence
gttggatttgttgatggacttattga

SEQ ID NO: 237265 - DNA, 26 bp, Artificial sequence
  SiRNA target sequence
ttggatttgttgatggacttattgag

SEQ ID NO: 237266 - DNA, 26 bp, Artificial sequence
  SiRNA target sequence
tggatttgttgatggacttattgaga

SEQ ID NO: 237267 - DNA, 26 bp, Artificial sequence
  SiRNA target sequence
ggatttgttgatggacttattgagat

SEQ ID NO: 237268 - DNA, 26 bp, Artificial sequence
  SiRNA target sequence
gatttgttgatggacttattgagatg

SEQ ID NO: 237269 - DNA, 26 bp, Artificial sequence
  SiRNA target sequence
atttgttgatggacttattgagatga

SEQ ID NO: 237270 - DNA, 26 bp, Artificial sequence
  SiRNA target sequence
tttgttgatggacttattgagatgag

SEQ ID NO: 237271 - DNA, 26 bp, Artificial sequence
  SiRNA target sequence
ttgttgatggacttattgagatgagt

SEQ ID NO: 237272 - DNA, 26 bp, Artificial sequence
  SiRNA target sequence
tgttgatggacttattgagatgagta

SEQ ID NO: 237273 - DNA, 26 bp, Artificial sequence
  SiRNA target sequence
gttgatggacttattgagatgagtaa

SEQ ID NO: 237274 - DNA, 26 bp, Artificial sequence
  SiRNA target sequence
ttgatggacttattgagatgagtaaa

SEQ ID NO: 237275 - DNA, 26 bp, Artificial sequence
  SiRNA target sequence
tgatggacttattgagatgagtaaat

SEQ ID NO: 237276 - DNA, 26 bp, Artificial sequence
  SiRNA target sequence
gatggacttattgagatgagtaaatc

SEQ ID NO: 237277 - DNA, 26 bp, Artificial sequence
  SiRNA target sequence
atggacttattgagatgagtaaatct

SEQ ID NO: 237278 - DNA, 26 bp, Artificial sequence
  SiRNA target sequence
tggacttattgagatgagtaaatcta

SEQ ID NO: 237279 - DNA, 26 bp, Artificial sequence
  SiRNA target sequence
ggacttattgagatgagtaaatctaa

SEQ ID NO: 237280 - DNA, 26 bp, Artificial sequence
  SiRNA target sequence
gacttattgagatgagtaaatctaaa

SEQ ID NO: 237281 - DNA, 26 bp, Artificial sequence
  SiRNA target sequence
acttattgagatgagtaaatctaaac

SEQ ID NO: 237282 - DNA, 26 bp, Artificial sequence
  SiRNA target sequence
cttattgagatgagtaaatctaaact

SEQ ID NO: 237283 - DNA, 26 bp, Artificial sequence
  SiRNA target sequence
ttattgagatgagtaaatctaaacta

SEQ ID NO: 237284 - DNA, 26 bp, Artificial sequence
  SiRNA target sequence
tattgagatgagtaaatctaaactac

SEQ ID NO: 237285 - DNA, 26 bp, Artificial sequence
  SiRNA target sequence
attgagatgagtaaatctaaactact

SEQ ID NO: 237286 - DNA, 26 bp, Artificial sequence
  SiRNA target sequence
ttgagatgagtaaatctaaactactg

SEQ ID NO: 237287 - DNA, 26 bp, Artificial sequence
  SiRNA target sequence
tgagatgagtaaatctaaactactgt

SEQ ID NO: 237288 - DNA, 26 bp, Artificial sequence
  SiRNA target sequence
gagatgagtaaatctaaactactgtt

SEQ ID NO: 237289 - DNA, 26 bp, Artificial sequence
  SiRNA target sequence
agatgagtaaatctaaactactgttg

SEQ ID NO: 237290 - DNA, 26 bp, Artificial sequence
  SiRNA target sequence
gatgagtaaatctaaactactgttga

SEQ ID NO: 237291 - DNA, 26 bp, Artificial sequence
  SiRNA target sequence
atgagtaaatctaaactactgttgaa

SEQ ID NO: 237292 - DNA, 26 bp, Artificial sequence
  SiRNA target sequence
tgagtaaatctaaactactgttgaat

SEQ ID NO: 237293 - DNA, 26 bp, Artificial sequence
  SiRNA target sequence
gagtaaatctaaactactgttgaata

SEQ ID NO: 237294 - DNA, 26 bp, Artificial sequence
  SiRNA target sequence
agtaaatctaaactactgttgaatat

SEQ ID NO: 237295 - DNA, 26 bp, Artificial sequence
  SiRNA target sequence
gtaaatctaaactactgttgaatatg

SEQ ID NO: 237296 - DNA, 26 bp, Artificial sequence
  SiRNA target sequence
taaatctaaactactgttgaatatgt

SEQ ID NO: 237297 - DNA, 26 bp, Artificial sequence
  SiRNA target sequence
aaatctaaactactgttgaatatgtc

SEQ ID NO: 237298 - DNA, 26 bp, Artificial sequence
  SiRNA target sequence
aatctaaactactgttgaatatgtca

SEQ ID NO: 237299 - DNA, 26 bp, Artificial sequence
  SiRNA target sequence
atctaaactactgttgaatatgtcat

SEQ ID NO: 237300 - DNA, 26 bp, Artificial sequence
  SiRNA target sequence
tctaaactactgttgaatatgtcatt

SEQ ID NO: 237301 - DNA, 26 bp, Artificial sequence
  SiRNA target sequence
ctaaactactgttgaatatgtcatta

SEQ ID NO: 237302 - DNA, 26 bp, Artificial sequence
  SiRNA target sequence
taaactactgttgaatatgtcattag

SEQ ID NO: 237303 - DNA, 26 bp, Artificial sequence
  SiRNA target sequence
aaactactgttgaatatgtcattagt

SEQ ID NO: 237304 - DNA, 26 bp, Artificial sequence
  SiRNA target sequence
aactactgttgaatatgtcattagtc

SEQ ID NO: 237305 - DNA, 26 bp, Artificial sequence
  SiRNA target sequence
actactgttgaatatgtcattagtcg

SEQ ID NO: 237306 - DNA, 26 bp, Artificial sequence
  SiRNA target sequence
ctactgttgaatatgtcattagtcgt

SEQ ID NO: 237307 - DNA, 26 bp, Artificial sequence
  SiRNA target sequence
tactgttgaatatgtcattagtcgta

SEQ ID NO: 237308 - DNA, 26 bp, Artificial sequence
  SiRNA target sequence
actgttgaatatgtcattagtcgtat

SEQ ID NO: 237309 - DNA, 26 bp, Artificial sequence
  SiRNA target sequence
ctgttgaatatgtcattagtcgtatt

SEQ ID NO: 237310 - DNA, 26 bp, Artificial sequence
  SiRNA target sequence
tgttgaatatgtcattagtcgtatta

SEQ ID NO: 237311 - DNA, 26 bp, Artificial sequence
  SiRNA target sequence
gttgaatatgtcattagtcgtattat

SEQ ID NO: 237312 - DNA, 26 bp, Artificial sequence
  SiRNA target sequence
ttgaatatgtcattagtcgtattatt

SEQ ID NO: 237313 - DNA, 26 bp, Artificial sequence
  SiRNA target sequence
tgaatatgtcattagtcgtattattt

SEQ ID NO: 237314 - DNA, 26 bp, Artificial sequence
  SiRNA target sequence
gaatatgtcattagtcgtattatttt

SEQ ID NO: 237315 - DNA, 26 bp, Artificial sequence
  SiRNA target sequence
aatatgtcattagtcgtattatttta

SEQ ID NO: 237316 - DNA, 26 bp, Artificial sequence
  SiRNA target sequence
atatgtcattagtcgtattattttat

SEQ ID NO: 237317 - DNA, 26 bp, Artificial sequence
  SiRNA target sequence
tatgtcattagtcgtattattttatg

SEQ ID NO: 237318 - DNA, 26 bp, Artificial sequence
  SiRNA target sequence
atgtcattagtcgtattattttatgc

SEQ ID NO: 237319 - DNA, 26 bp, Artificial sequence
  SiRNA target sequence
tgtcattagtcgtattattttatgct

SEQ ID NO: 237320 - DNA, 26 bp, Artificial sequence
  SiRNA target sequence
gtcattagtcgtattattttatgctg

SEQ ID NO: 237321 - DNA, 26 bp, Artificial sequence
  SiRNA target sequence
tcattagtcgtattattttatgctgt

SEQ ID NO: 237322 - DNA, 26 bp, Artificial sequence
  SiRNA target sequence
cattagtcgtattattttatgctgtt

SEQ ID NO: 237323 - DNA, 26 bp, Artificial sequence
  SiRNA target sequence
attagtcgtattattttatgctgttt

SEQ ID NO: 237324 - DNA, 26 bp, Artificial sequence
  SiRNA target sequence
ttagtcgtattattttatgctgtttc

SEQ ID NO: 237325 - DNA, 26 bp, Artificial sequence
  SiRNA target sequence
tagtcgtattattttatgctgtttct

SEQ ID NO: 237326 - DNA, 26 bp, Artificial sequence
  SiRNA target sequence
agtcgtattattttatgctgtttcta

SEQ ID NO: 237327 - DNA, 26 bp, Artificial sequence
  SiRNA target sequence
gtcgtattattttatgctgtttctac

SEQ ID NO: 237328 - DNA, 26 bp, Artificial sequence
  SiRNA target sequence
tcgtattattttatgctgtttctacg

SEQ ID NO: 237329 - DNA, 26 bp, Artificial sequence
  SiRNA target sequence
cgtattattttatgctgtttctacga

SEQ ID NO: 237330 - DNA, 26 bp, Artificial sequence
  SiRNA target sequence
gtattattttatgctgtttctacgaa

SEQ ID NO: 237331 - DNA, 26 bp, Artificial sequence
  SiRNA target sequence
tattattttatgctgtttctacgaat

SEQ ID NO: 237332 - DNA, 26 bp, Artificial sequence
  SiRNA target sequence
attattttatgctgtttctacgaata

SEQ ID NO: 237333 - DNA, 26 bp, Artificial sequence
  SiRNA target sequence
ttattttatgctgtttctacgaatat

SEQ ID NO: 237334 - DNA, 26 bp, Artificial sequence
  SiRNA target sequence
tattttatgctgtttctacgaatatt

SEQ ID NO: 237335 - DNA, 26 bp, Artificial sequence
  SiRNA target sequence
attttatgctgtttctacgaatatta

SEQ ID NO: 237336 - DNA, 26 bp, Artificial sequence
  SiRNA target sequence
ttttatgctgtttctacgaatattat

SEQ ID NO: 237337 - DNA, 26 bp, Artificial sequence
  SiRNA target sequence
tttatgctgtttctacgaatattatt

SEQ ID NO: 237338 - DNA, 26 bp, Artificial sequence
  SiRNA target sequence
ttatgctgtttctacgaatattattg

SEQ ID NO: 237339 - DNA, 26 bp, Artificial sequence
  SiRNA target sequence
tatgctgtttctacgaatattattga

SEQ ID NO: 237340 - DNA, 26 bp, Artificial sequence
  SiRNA target sequence
atgctgtttctacgaatattattgag

SEQ ID NO: 237341 - DNA, 26 bp, Artificial sequence
  SiRNA target sequence
tgctgtttctacgaatattattgagt

SEQ ID NO: 237342 - DNA, 26 bp, Artificial sequence
  SiRNA target sequence
gctgtttctacgaatattattgagtc

SEQ ID NO: 237343 - DNA, 26 bp, Artificial sequence
  SiRNA target sequence
ctgtttctacgaatattattgagtca

SEQ ID NO: 237344 - DNA, 26 bp, Artificial sequence
  SiRNA target sequence
tgtttctacgaatattattgagtcag

SEQ ID NO: 237345 - DNA, 26 bp, Artificial sequence
  SiRNA target sequence
gtttctacgaatattattgagtcagc

SEQ ID NO: 237346 - DNA, 26 bp, Artificial sequence
  SiRNA target sequence
tttctacgaatattattgagtcagct

SEQ ID NO: 237347 - DNA, 26 bp, Artificial sequence
  SiRNA target sequence
ttctacgaatattattgagtcagctt

SEQ ID NO: 237348 - DNA, 26 bp, Artificial sequence
  SiRNA target sequence
tctacgaatattattgagtcagctta

SEQ ID NO: 237349 - DNA, 26 bp, Artificial sequence
  SiRNA target sequence
ctacgaatattattgagtcagcttat

SEQ ID NO: 237350 - DNA, 26 bp, Artificial sequence
  SiRNA target sequence
tacgaatattattgagtcagcttata

SEQ ID NO: 237351 - DNA, 26 bp, Artificial sequence
  SiRNA target sequence
acgaatattattgagtcagcttataa

SEQ ID NO: 237352 - DNA, 26 bp, Artificial sequence
  SiRNA target sequence
cgaatattattgagtcagcttataaa

SEQ ID NO: 237353 - DNA, 26 bp, Artificial sequence
  SiRNA target sequence
gaatattattgagtcagcttataaat

SEQ ID NO: 237354 - DNA, 26 bp, Artificial sequence
  SiRNA target sequence
aatattattgagtcagcttataaatc

SEQ ID NO: 237355 - DNA, 26 bp, Artificial sequence
  SiRNA target sequence
atattattgagtcagcttataaatct

SEQ ID NO: 237356 - DNA, 26 bp, Artificial sequence
  SiRNA target sequence
tattattgagtcagcttataaatctg

SEQ ID NO: 237357 - DNA, 26 bp, Artificial sequence
  SiRNA target sequence
attattgagtcagcttataaatctgc

SEQ ID NO: 237358 - DNA, 26 bp, Artificial sequence
  SiRNA target sequence
ttattgagtcagcttataaatctgct

SEQ ID NO: 237359 - DNA, 26 bp, Artificial sequence
  SiRNA target sequence
tattgagtcagcttataaatctgctt

SEQ ID NO: 237360 - DNA, 26 bp, Artificial sequence
  SiRNA target sequence
attgagtcagcttataaatctgcttt

SEQ ID NO: 237361 - DNA, 26 bp, Artificial sequence
  SiRNA target sequence
ttgagtcagcttataaatctgcttta

SEQ ID NO: 237362 - DNA, 26 bp, Artificial sequence
  SiRNA target sequence
tgagtcagcttataaatctgctttag

SEQ ID NO: 237363 - DNA, 26 bp, Artificial sequence
  SiRNA target sequence
gagtcagcttataaatctgctttagc

SEQ ID NO: 237364 - DNA, 26 bp, Artificial sequence
  SiRNA target sequence
agtcagcttataaatctgctttagct

SEQ ID NO: 237365 - DNA, 26 bp, Artificial sequence
  SiRNA target sequence
gtcagcttataaatctgctttagctg

SEQ ID NO: 237366 - DNA, 26 bp, Artificial sequence
  SiRNA target sequence
tcagcttataaatctgctttagctgt

SEQ ID NO: 237367 - DNA, 26 bp, Artificial sequence
  SiRNA target sequence
cagcttataaatctgctttagctgtc

SEQ ID NO: 237368 - DNA, 26 bp, Artificial sequence
  SiRNA target sequence
agcttataaatctgctttagctgtcg

SEQ ID NO: 237369 - DNA, 26 bp, Artificial sequence
  SiRNA target sequence
gcttataaatctgctttagctgtcgg

SEQ ID NO: 237370 - DNA, 26 bp, Artificial sequence
  SiRNA target sequence
cttataaatctgctttagctgtcggt

SEQ ID NO: 237371 - DNA, 26 bp, Artificial sequence
  SiRNA target sequence
ttataaatctgctttagctgtcggtg

SEQ ID NO: 237372 - DNA, 26 bp, Artificial sequence
  SiRNA target sequence
tataaatctgctttagctgtcggtgc

SEQ ID NO: 237373 - DNA, 26 bp, Artificial sequence
  SiRNA target sequence
ataaatctgctttagctgtcggtgct

SEQ ID NO: 237374 - DNA, 26 bp, Artificial sequence
  SiRNA target sequence
taaatctgctttagctgtcggtgcta

SEQ ID NO: 237375 - DNA, 26 bp, Artificial sequence
  SiRNA target sequence
aaatctgctttagctgtcggtgctaa

SEQ ID NO: 237376 - DNA, 26 bp, Artificial sequence
  SiRNA target sequence
aatctgctttagctgtcggtgctaat

SEQ ID NO: 237377 - DNA, 26 bp, Artificial sequence
  SiRNA target sequence
atctgctttagctgtcggtgctaatg

SEQ ID NO: 237378 - DNA, 26 bp, Artificial sequence
  SiRNA target sequence
tctgctttagctgtcggtgctaatga

SEQ ID NO: 237379 - DNA, 26 bp, Artificial sequence
  SiRNA target sequence
ctgctttagctgtcggtgctaatgaa

SEQ ID NO: 237380 - DNA, 26 bp, Artificial sequence
  SiRNA target sequence
tgctttagctgtcggtgctaatgaaa

SEQ ID NO: 237381 - DNA, 26 bp, Artificial sequence
  SiRNA target sequence
gctttagctgtcggtgctaatgaaac

SEQ ID NO: 237382 - DNA, 26 bp, Artificial sequence
  SiRNA target sequence
ctttagctgtcggtgctaatgaaact

SEQ ID NO: 237383 - DNA, 26 bp, Artificial sequence
  SiRNA target sequence
tttagctgtcggtgctaatgaaactg

SEQ ID NO: 237384 - DNA, 26 bp, Artificial sequence
  SiRNA target sequence
ttagctgtcggtgctaatgaaactgg

SEQ ID NO: 237385 - DNA, 26 bp, Artificial sequence
  SiRNA target sequence
tagctgtcggtgctaatgaaactggt

SEQ ID NO: 237386 - DNA, 26 bp, Artificial sequence
  SiRNA target sequence
agctgtcggtgctaatgaaactggtg

SEQ ID NO: 237387 - DNA, 26 bp, Artificial sequence
  SiRNA target sequence
gctgtcggtgctaatgaaactggtga

SEQ ID NO: 237388 - DNA, 26 bp, Artificial sequence
  SiRNA target sequence
ctgtcggtgctaatgaaactggtgag

SEQ ID NO: 237389 - DNA, 26 bp, Artificial sequence
  SiRNA target sequence
tgtcggtgctaatgaaactggtgagg

SEQ ID NO: 237390 - DNA, 26 bp, Artificial sequence
  SiRNA target sequence
gtcggtgctaatgaaactggtgaggc

SEQ ID NO: 237391 - DNA, 26 bp, Artificial sequence
  SiRNA target sequence
tcggtgctaatgaaactggtgaggca

SEQ ID NO: 237392 - DNA, 26 bp, Artificial sequence
  SiRNA target sequence
cggtgctaatgaaactggtgaggcaa

SEQ ID NO: 237393 - DNA, 26 bp, Artificial sequence
  SiRNA target sequence
ggtgctaatgaaactggtgaggcaaa

SEQ ID NO: 237394 - DNA, 26 bp, Artificial sequence
  SiRNA target sequence
gtgctaatgaaactggtgaggcaaaa

SEQ ID NO: 237395 - DNA, 26 bp, Artificial sequence
  SiRNA target sequence
tgctaatgaaactggtgaggcaaaat

SEQ ID NO: 237396 - DNA, 26 bp, Artificial sequence
  SiRNA target sequence
gctaatgaaactggtgaggcaaaatc

SEQ ID NO: 237397 - DNA, 26 bp, Artificial sequence
  SiRNA target sequence
ctaatgaaactggtgaggcaaaatct

SEQ ID NO: 237398 - DNA, 26 bp, Artificial sequence
  SiRNA target sequence
taatgaaactggtgaggcaaaatcta

SEQ ID NO: 237399 - DNA, 26 bp, Artificial sequence
  SiRNA target sequence
aatgaaactggtgaggcaaaatctac

SEQ ID NO: 237400 - DNA, 26 bp, Artificial sequence
  SiRNA target sequence
atgaaactggtgaggcaaaatctacc

SEQ ID NO: 237401 - DNA, 26 bp, Artificial sequence
  SiRNA target sequence
tgaaactggtgaggcaaaatctacct

SEQ ID NO: 237402 - DNA, 26 bp, Artificial sequence
  SiRNA target sequence
gaaactggtgaggcaaaatctaccta

SEQ ID NO: 237403 - DNA, 26 bp, Artificial sequence
  SiRNA target sequence
aaactggtgaggcaaaatctacctat

SEQ ID NO: 237404 - DNA, 26 bp, Artificial sequence
  SiRNA target sequence
aactggtgaggcaaaatctacctatg

SEQ ID NO: 237405 - DNA, 26 bp, Artificial sequence
  SiRNA target sequence
actggtgaggcaaaatctacctatgc

SEQ ID NO: 237406 - DNA, 26 bp, Artificial sequence
  SiRNA target sequence
ctggtgaggcaaaatctacctatgct

SEQ ID NO: 237407 - DNA, 26 bp, Artificial sequence
  SiRNA target sequence
tggtgaggcaaaatctacctatgctt

SEQ ID NO: 237408 - DNA, 26 bp, Artificial sequence
  SiRNA target sequence
ggtgaggcaaaatctacctatgcttc

SEQ ID NO: 237409 - DNA, 26 bp, Artificial sequence
  SiRNA target sequence
gtgaggcaaaatctacctatgcttca

SEQ ID NO: 237410 - DNA, 26 bp, Artificial sequence
  SiRNA target sequence
tgaggcaaaatctacctatgcttcaa

SEQ ID NO: 237411 - DNA, 26 bp, Artificial sequence
  SiRNA target sequence
gaggcaaaatctacctatgcttcaat

SEQ ID NO: 237412 - DNA, 26 bp, Artificial sequence
  SiRNA target sequence
aggcaaaatctacctatgcttcaatt

SEQ ID NO: 237413 - DNA, 26 bp, Artificial sequence
  SiRNA target sequence
ggcaaaatctacctatgcttcaattt

SEQ ID NO: 237414 - DNA, 26 bp, Artificial sequence
  SiRNA target sequence
gcaaaatctacctatgcttcaattta

SEQ ID NO: 237415 - DNA, 26 bp, Artificial sequence
  SiRNA target sequence
caaaatctacctatgcttcaatttat

SEQ ID NO: 237416 - DNA, 26 bp, Artificial sequence
  SiRNA target sequence
aaaatctacctatgcttcaatttata

SEQ ID NO: 237417 - DNA, 26 bp, Artificial sequence
  SiRNA target sequence
aaatctacctatgcttcaatttatac

SEQ ID NO: 237418 - DNA, 26 bp, Artificial sequence
  SiRNA target sequence
aatctacctatgcttcaatttataca

SEQ ID NO: 237419 - DNA, 26 bp, Artificial sequence
  SiRNA target sequence
atctacctatgcttcaatttatacat

SEQ ID NO: 237420 - DNA, 26 bp, Artificial sequence
  SiRNA target sequence
tctacctatgcttcaatttatacatc

SEQ ID NO: 237421 - DNA, 26 bp, Artificial sequence
  SiRNA target sequence
ctacctatgcttcaatttatacatca

SEQ ID NO: 237422 - DNA, 26 bp, Artificial sequence
  SiRNA target sequence
tacctatgcttcaatttatacatcaa

SEQ ID NO: 237423 - DNA, 26 bp, Artificial sequence
  SiRNA target sequence
acctatgcttcaatttatacatcaat

SEQ ID NO: 237424 - DNA, 26 bp, Artificial sequence
  SiRNA target sequence
cctatgcttcaatttatacatcaatt

SEQ ID NO: 237425 - DNA, 26 bp, Artificial sequence
  SiRNA target sequence
ctatgcttcaatttatacatcaattg

SEQ ID NO: 237426 - DNA, 26 bp, Artificial sequence
  SiRNA target sequence
tatgcttcaatttatacatcaattga

SEQ ID NO: 237427 - DNA, 26 bp, Artificial sequence
  SiRNA target sequence
atgcttcaatttatacatcaattgaa

SEQ ID NO: 237428 - DNA, 26 bp, Artificial sequence
  SiRNA target sequence
tgcttcaatttatacatcaattgaac

SEQ ID NO: 237429 - DNA, 26 bp, Artificial sequence
  SiRNA target sequence
gcttcaatttatacatcaattgaaca

SEQ ID NO: 237430 - DNA, 26 bp, Artificial sequence
  SiRNA target sequence
cttcaatttatacatcaattgaacaa

SEQ ID NO: 237431 - DNA, 26 bp, Artificial sequence
  SiRNA target sequence
ttcaatttatacatcaattgaacaat

SEQ ID NO: 237432 - DNA, 26 bp, Artificial sequence
  SiRNA target sequence
tcaatttatacatcaattgaacaatc

SEQ ID NO: 237433 - DNA, 26 bp, Artificial sequence
  SiRNA target sequence
caatttatacatcaattgaacaatct

SEQ ID NO: 237434 - DNA, 26 bp, Artificial sequence
  SiRNA target sequence
aatttatacatcaattgaacaatctg

SEQ ID NO: 237435 - DNA, 26 bp, Artificial sequence
  SiRNA target sequence
atttatacatcaattgaacaatctgg

SEQ ID NO: 237436 - DNA, 26 bp, Artificial sequence
  SiRNA target sequence
tttatacatcaattgaacaatctgga

SEQ ID NO: 237437 - DNA, 26 bp, Artificial sequence
  SiRNA target sequence
ttatacatcaattgaacaatctggag

SEQ ID NO: 237438 - DNA, 26 bp, Artificial sequence
  SiRNA target sequence
tatacatcaattgaacaatctggagt

SEQ ID NO: 237439 - DNA, 26 bp, Artificial sequence
  SiRNA target sequence
atacatcaattgaacaatctggagtt

SEQ ID NO: 237440 - DNA, 26 bp, Artificial sequence
  SiRNA target sequence
tacatcaattgaacaatctggagttg

SEQ ID NO: 237441 - DNA, 26 bp, Artificial sequence
  SiRNA target sequence
acatcaattgaacaatctggagttgc

SEQ ID NO: 237442 - DNA, 26 bp, Artificial sequence
  SiRNA target sequence
catcaattgaacaatctggagttgct

SEQ ID NO: 237443 - DNA, 26 bp, Artificial sequence
  SiRNA target sequence
atcaattgaacaatctggagttgctg

SEQ ID NO: 237444 - DNA, 26 bp, Artificial sequence
  SiRNA target sequence
tcaattgaacaatctggagttgctgt

SEQ ID NO: 237445 - DNA, 26 bp, Artificial sequence
  SiRNA target sequence
caattgaacaatctggagttgctgtt

SEQ ID NO: 237446 - DNA, 26 bp, Artificial sequence
  SiRNA target sequence
aattgaacaatctggagttgctgtta

SEQ ID NO: 237447 - DNA, 26 bp, Artificial sequence
  SiRNA target sequence
attgaacaatctggagttgctgttat

SEQ ID NO: 237448 - DNA, 26 bp, Artificial sequence
  SiRNA target sequence
ttgaacaatctggagttgctgttatt

SEQ ID NO: 237449 - DNA, 26 bp, Artificial sequence
  SiRNA target sequence
tgaacaatctggagttgctgttattg

SEQ ID NO: 237450 - DNA, 26 bp, Artificial sequence
  SiRNA target sequence
gaacaatctggagttgctgttattgt

SEQ ID NO: 237451 - DNA, 26 bp, Artificial sequence
  SiRNA target sequence
aacaatctggagttgctgttattgtc

SEQ ID NO: 237452 - DNA, 26 bp, Artificial sequence
  SiRNA target sequence
acaatctggagttgctgttattgtca

SEQ ID NO: 237453 - DNA, 26 bp, Artificial sequence
  SiRNA target sequence
caatctggagttgctgttattgtcat

SEQ ID NO: 237454 - DNA, 26 bp, Artificial sequence
  SiRNA target sequence
aatctggagttgctgttattgtcatg

SEQ ID NO: 237455 - DNA, 26 bp, Artificial sequence
  SiRNA target sequence
atctggagttgctgttattgtcatga

SEQ ID NO: 237456 - DNA, 26 bp, Artificial sequence
  SiRNA target sequence
tctggagttgctgttattgtcatgat

SEQ ID NO: 237457 - DNA, 26 bp, Artificial sequence
  SiRNA target sequence
ctggagttgctgttattgtcatgatt

SEQ ID NO: 237458 - DNA, 26 bp, Artificial sequence
  SiRNA target sequence
tggagttgctgttattgtcatgattt

SEQ ID NO: 237459 - DNA, 26 bp, Artificial sequence
  SiRNA target sequence
ggagttgctgttattgtcatgatttt

SEQ ID NO: 237460 - DNA, 26 bp, Artificial sequence
  SiRNA target sequence
gagttgctgttattgtcatgattttg

SEQ ID NO: 237461 - DNA, 26 bp, Artificial sequence
  SiRNA target sequence
agttgctgttattgtcatgattttgc

SEQ ID NO: 237462 - DNA, 26 bp, Artificial sequence
  SiRNA target sequence
gttgctgttattgtcatgattttgct

SEQ ID NO: 237463 - DNA, 26 bp, Artificial sequence
  SiRNA target sequence
ttgctgttattgtcatgattttgcta

SEQ ID NO: 237464 - DNA, 26 bp, Artificial sequence
  SiRNA target sequence
tgctgttattgtcatgattttgctac

SEQ ID NO: 237465 - DNA, 26 bp, Artificial sequence
  SiRNA target sequence
gctgttattgtcatgattttgctact

SEQ ID NO: 237466 - DNA, 26 bp, Artificial sequence
  SiRNA target sequence
ctgttattgtcatgattttgctactt

SEQ ID NO: 237467 - DNA, 26 bp, Artificial sequence
  SiRNA target sequence
tgttattgtcatgattttgctactta

SEQ ID NO: 237468 - DNA, 26 bp, Artificial sequence
  SiRNA target sequence
gttattgtcatgattttgctacttac

SEQ ID NO: 237469 - DNA, 26 bp, Artificial sequence
  SiRNA target sequence
ttattgtcatgattttgctacttacc

SEQ ID NO: 237470 - DNA, 26 bp, Artificial sequence
  SiRNA target sequence
tattgtcatgattttgctacttaccc

SEQ ID NO: 237471 - DNA, 26 bp, Artificial sequence
  SiRNA target sequence
attgtcatgattttgctacttacccc

SEQ ID NO: 237472 - DNA, 26 bp, Artificial sequence
  SiRNA target sequence
ttgtcatgattttgctacttacccct

SEQ ID NO: 237473 - DNA, 26 bp, Artificial sequence
  SiRNA target sequence
tgtcatgattttgctacttacccctt

SEQ ID NO: 237474 - DNA, 26 bp, Artificial sequence
  SiRNA target sequence
gtcatgattttgctacttaccccttt

SEQ ID NO: 237475 - DNA, 26 bp, Artificial sequence
  SiRNA target sequence
tcatgattttgctacttacccctttt

SEQ ID NO: 237476 - DNA, 26 bp, Artificial sequence
  SiRNA target sequence
catgattttgctacttaccccttttc

SEQ ID NO: 237477 - DNA, 26 bp, Artificial sequence
  SiRNA target sequence
atgattttgctacttaccccttttcc

SEQ ID NO: 237478 - DNA, 26 bp, Artificial sequence
  SiRNA target sequence
tgattttgctacttaccccttttcca

SEQ ID NO: 237479 - DNA, 26 bp, Artificial sequence
  SiRNA target sequence
gattttgctacttaccccttttccaa

SEQ ID NO: 237480 - DNA, 26 bp, Artificial sequence
  SiRNA target sequence
attttgctacttaccccttttccaag

SEQ ID NO: 237481 - DNA, 26 bp, Artificial sequence
  SiRNA target sequence
ttttgctacttaccccttttccaagg

SEQ ID NO: 237482 - DNA, 26 bp, Artificial sequence
  SiRNA target sequence
tttgctacttaccccttttccaaggc

SEQ ID NO: 237483 - DNA, 26 bp, Artificial sequence
  SiRNA target sequence
ttgctacttaccccttttccaaggct

SEQ ID NO: 237484 - DNA, 26 bp, Artificial sequence
  SiRNA target sequence
tgctacttaccccttttccaaggctt

SEQ ID NO: 237485 - DNA, 26 bp, Artificial sequence
  SiRNA target sequence
gctacttaccccttttccaaggctta

SEQ ID NO: 237486 - DNA, 26 bp, Artificial sequence
  SiRNA target sequence
ctacttaccccttttccaaggcttat

SEQ ID NO: 237487 - DNA, 26 bp, Artificial sequence
  SiRNA target sequence
tacttaccccttttccaaggcttatt

SEQ ID NO: 237488 - DNA, 26 bp, Artificial sequence
  SiRNA target sequence
acttaccccttttccaaggcttatta

SEQ ID NO: 237489 - DNA, 26 bp, Artificial sequence
  SiRNA target sequence
cttaccccttttccaaggcttattaa

SEQ ID NO: 237490 - DNA, 26 bp, Artificial sequence
  SiRNA target sequence
ttaccccttttccaaggcttattaaa

SEQ ID NO: 237491 - DNA, 26 bp, Artificial sequence
  SiRNA target sequence
taccccttttccaaggcttattaaaa

SEQ ID NO: 237492 - DNA, 26 bp, Artificial sequence
  SiRNA target sequence
accccttttccaaggcttattaaaac

SEQ ID NO: 237493 - DNA, 26 bp, Artificial sequence
  SiRNA target sequence
ccccttttccaaggcttattaaaaca

SEQ ID NO: 237494 - DNA, 26 bp, Artificial sequence
  SiRNA target sequence
cccttttccaaggcttattaaaacaa

SEQ ID NO: 237495 - DNA, 26 bp, Artificial sequence
  SiRNA target sequence
ccttttccaaggcttattaaaacaaa

SEQ ID NO: 237496 - DNA, 26 bp, Artificial sequence
  SiRNA target sequence
cttttccaaggcttattaaaacaaaa

SEQ ID NO: 237497 - DNA, 26 bp, Artificial sequence
  SiRNA target sequence
ttttccaaggcttattaaaacaaaag

SEQ ID NO: 237498 - DNA, 26 bp, Artificial sequence
  SiRNA target sequence
tttccaaggcttattaaaacaaaagg

SEQ ID NO: 237499 - DNA, 26 bp, Artificial sequence
  SiRNA target sequence
ttccaaggcttattaaaacaaaagga

SEQ ID NO: 237500 - DNA, 26 bp, Artificial sequence
  SiRNA target sequence
tccaaggcttattaaaacaaaaggat

SEQ ID NO: 237501 - DNA, 26 bp, Artificial sequence
  SiRNA target sequence
ccaaggcttattaaaacaaaaggatg

SEQ ID NO: 237502 - DNA, 26 bp, Artificial sequence
  SiRNA target sequence
caaggcttattaaaacaaaaggatgg

SEQ ID NO: 237503 - DNA, 26 bp, Artificial sequence
  SiRNA target sequence
aaggcttattaaaacaaaaggatgga

SEQ ID NO: 237504 - DNA, 26 bp, Artificial sequence
  SiRNA target sequence
aggcttattaaaacaaaaggatggat

SEQ ID NO: 237505 - DNA, 26 bp, Artificial sequence
  SiRNA target sequence
ggcttattaaaacaaaaggatggatt

SEQ ID NO: 237506 - DNA, 26 bp, Artificial sequence
  SiRNA target sequence
gcttattaaaacaaaaggatggatta

SEQ ID NO: 237507 - DNA, 26 bp, Artificial sequence
  SiRNA target sequence
cttattaaaacaaaaggatggattac

SEQ ID NO: 237508 - DNA, 26 bp, Artificial sequence
  SiRNA target sequence
ttattaaaacaaaaggatggattaca

SEQ ID NO: 237509 - DNA, 26 bp, Artificial sequence
  SiRNA target sequence
tattaaaacaaaaggatggattacaa

SEQ ID NO: 237510 - DNA, 26 bp, Artificial sequence
  SiRNA target sequence
attaaaacaaaaggatggattacaat

SEQ ID NO: 237511 - DNA, 26 bp, Artificial sequence
  SiRNA target sequence
ttaaaacaaaaggatggattacaata

SEQ ID NO: 237512 - DNA, 26 bp, Artificial sequence
  SiRNA target sequence
taaaacaaaaggatggattacaatag

SEQ ID NO: 237513 - DNA, 26 bp, Artificial sequence
  SiRNA target sequence
aaaacaaaaggatggattacaatagc

SEQ ID NO: 237514 - DNA, 26 bp, Artificial sequence
  SiRNA target sequence
aaacaaaaggatggattacaatagcc

SEQ ID NO: 237515 - DNA, 26 bp, Artificial sequence
  SiRNA target sequence
aacaaaaggatggattacaatagcca

SEQ ID NO: 237516 - DNA, 26 bp, Artificial sequence
  SiRNA target sequence
acaaaaggatggattacaatagccat

SEQ ID NO: 237517 - DNA, 26 bp, Artificial sequence
  SiRNA target sequence
caaaaggatggattacaatagccatt

SEQ ID NO: 237518 - DNA, 26 bp, Artificial sequence
  SiRNA target sequence
aaaaggatggattacaatagccattc

SEQ ID NO: 237519 - DNA, 26 bp, Artificial sequence
  SiRNA target sequence
aaaggatggattacaatagccattct

SEQ ID NO: 237520 - DNA, 26 bp, Artificial sequence
  SiRNA target sequence
aaggatggattacaatagccattcta

SEQ ID NO: 237521 - DNA, 26 bp, Artificial sequence
  SiRNA target sequence
aggatggattacaatagccattctat

SEQ ID NO: 237522 - DNA, 26 bp, Artificial sequence
  SiRNA target sequence
ggatggattacaatagccattctatg

SEQ ID NO: 237523 - DNA, 26 bp, Artificial sequence
  SiRNA target sequence
gatggattacaatagccattctatgt

SEQ ID NO: 237524 - DNA, 26 bp, Artificial sequence
  SiRNA target sequence
atggattacaatagccattctatgtc

SEQ ID NO: 237525 - DNA, 26 bp, Artificial sequence
  SiRNA target sequence
tggattacaatagccattctatgtcc

SEQ ID NO: 237526 - DNA, 26 bp, Artificial sequence
  SiRNA target sequence
ggattacaatagccattctatgtcct

SEQ ID NO: 237527 - DNA, 26 bp, Artificial sequence
  SiRNA target sequence
gattacaatagccattctatgtccta

SEQ ID NO: 237528 - DNA, 26 bp, Artificial sequence
  SiRNA target sequence
attacaatagccattctatgtcctat

SEQ ID NO: 237529 - DNA, 26 bp, Artificial sequence
  SiRNA target sequence
ttacaatagccattctatgtcctatt

SEQ ID NO: 237530 - DNA, 26 bp, Artificial sequence
  SiRNA target sequence
tacaatagccattctatgtcctatta

SEQ ID NO: 237531 - DNA, 26 bp, Artificial sequence
  SiRNA target sequence
acaatagccattctatgtcctattat

SEQ ID NO: 237532 - DNA, 26 bp, Artificial sequence
  SiRNA target sequence
caatagccattctatgtcctattatt

SEQ ID NO: 237533 - DNA, 26 bp, Artificial sequence
  SiRNA target sequence
aatagccattctatgtcctattatta

SEQ ID NO: 237534 - DNA, 26 bp, Artificial sequence
  SiRNA target sequence
atagccattctatgtcctattattac

SEQ ID NO: 237535 - DNA, 26 bp, Artificial sequence
  SiRNA target sequence
tagccattctatgtcctattattact

SEQ ID NO: 237536 - DNA, 26 bp, Artificial sequence
  SiRNA target sequence
agccattctatgtcctattattactt

SEQ ID NO: 237537 - DNA, 26 bp, Artificial sequence
  SiRNA target sequence
gccattctatgtcctattattacttt

SEQ ID NO: 237538 - DNA, 26 bp, Artificial sequence
  SiRNA target sequence
ccattctatgtcctattattactttt

SEQ ID NO: 237539 - DNA, 26 bp, Artificial sequence
  SiRNA target sequence
cattctatgtcctattattacttttt

SEQ ID NO: 237540 - DNA, 26 bp, Artificial sequence
  SiRNA target sequence
attctatgtcctattattactttttt

SEQ ID NO: 237541 - DNA, 26 bp, Artificial sequence
  SiRNA target sequence
ttctatgtcctattattacttttttt

SEQ ID NO: 237542 - DNA, 26 bp, Artificial sequence
  SiRNA target sequence
tctatgtcctattattactttttttt

SEQ ID NO: 237543 - DNA, 26 bp, Artificial sequence
  SiRNA target sequence
ctatgtcctattattacttttttttc

SEQ ID NO: 237544 - DNA, 26 bp, Artificial sequence
  SiRNA target sequence
tatgtcctattattacttttttttct

SEQ ID NO: 237545 - DNA, 26 bp, Artificial sequence
  SiRNA target sequence
atgtcctattattacttttttttctg

SEQ ID NO: 237546 - DNA, 26 bp, Artificial sequence
  SiRNA target sequence
tgtcctattattacttttttttctgc

SEQ ID NO: 237547 - DNA, 26 bp, Artificial sequence
  SiRNA target sequence
gtcctattattacttttttttctgct

SEQ ID NO: 237548 - DNA, 26 bp, Artificial sequence
  SiRNA target sequence
tcctattattacttttttttctgctt

SEQ ID NO: 237549 - DNA, 26 bp, Artificial sequence
  SiRNA target sequence
cctattattacttttttttctgcttt

SEQ ID NO: 237550 - DNA, 26 bp, Artificial sequence
  SiRNA target sequence
ctattattacttttttttctgctttt

SEQ ID NO: 237551 - DNA, 26 bp, Artificial sequence
  SiRNA target sequence
tattattacttttttttctgcttttg

SEQ ID NO: 237552 - DNA, 26 bp, Artificial sequence
  SiRNA target sequence
attattacttttttttctgcttttgg

SEQ ID NO: 237553 - DNA, 26 bp, Artificial sequence
  SiRNA target sequence
ttattacttttttttctgcttttggt

SEQ ID NO: 237554 - DNA, 26 bp, Artificial sequence
  SiRNA target sequence
tattacttttttttctgcttttggta

SEQ ID NO: 237555 - DNA, 26 bp, Artificial sequence
  SiRNA target sequence
attacttttttttctgcttttggtac

SEQ ID NO: 237556 - DNA, 26 bp, Artificial sequence
  SiRNA target sequence
ttacttttttttctgcttttggtact

SEQ ID NO: 237557 - DNA, 26 bp, Artificial sequence
  SiRNA target sequence
tacttttttttctgcttttggtactt

SEQ ID NO: 237558 - DNA, 26 bp, Artificial sequence
  SiRNA target sequence
acttttttttctgcttttggtacttt

SEQ ID NO: 237559 - DNA, 26 bp, Artificial sequence
  SiRNA target sequence
cttttttttctgcttttggtactttt

SEQ ID NO: 237560 - DNA, 26 bp, Artificial sequence
  SiRNA target sequence
ttttttttctgcttttggtacttttg

SEQ ID NO: 237561 - DNA, 26 bp, Artificial sequence
  SiRNA target sequence
tttttttctgcttttggtacttttgt

SEQ ID NO: 237562 - DNA, 26 bp, Artificial sequence
  SiRNA target sequence
ttttttctgcttttggtacttttgta

SEQ ID NO: 237563 - DNA, 26 bp, Artificial sequence
  SiRNA target sequence
tttttctgcttttggtacttttgtat

SEQ ID NO: 237564 - DNA, 26 bp, Artificial sequence
  SiRNA target sequence
ttttctgcttttggtacttttgtatt

SEQ ID NO: 237565 - DNA, 26 bp, Artificial sequence
  SiRNA target sequence
tttctgcttttggtacttttgtatta

SEQ ID NO: 237566 - DNA, 26 bp, Artificial sequence
  SiRNA target sequence
ttctgcttttggtacttttgtattag

SEQ ID NO: 237567 - DNA, 26 bp, Artificial sequence
  SiRNA target sequence
tctgcttttggtacttttgtattagc

SEQ ID NO: 237568 - DNA, 26 bp, Artificial sequence
  SiRNA target sequence
ctgcttttggtacttttgtattagct

SEQ ID NO: 237569 - DNA, 26 bp, Artificial sequence
  SiRNA target sequence
tgcttttggtacttttgtattagctt

SEQ ID NO: 237570 - DNA, 26 bp, Artificial sequence
  SiRNA target sequence
gcttttggtacttttgtattagctta

SEQ ID NO: 237571 - DNA, 26 bp, Artificial sequence
  SiRNA target sequence
cttttggtacttttgtattagcttat

SEQ ID NO: 237572 - DNA, 26 bp, Artificial sequence
  SiRNA target sequence
ttttggtacttttgtattagcttatt

SEQ ID NO: 237573 - DNA, 26 bp, Artificial sequence
  SiRNA target sequence
tttggtacttttgtattagcttattt

SEQ ID NO: 237574 - DNA, 26 bp, Artificial sequence
  SiRNA target sequence
ttggtacttttgtattagcttattta

SEQ ID NO: 237575 - DNA, 26 bp, Artificial sequence
  SiRNA target sequence
tggtacttttgtattagcttatttaa

SEQ ID NO: 237576 - DNA, 26 bp, Artificial sequence
  SiRNA target sequence
ggtacttttgtattagcttatttaaa

SEQ ID NO: 237577 - DNA, 26 bp, Artificial sequence
  SiRNA target sequence
gtacttttgtattagcttatttaaac

SEQ ID NO: 237578 - DNA, 26 bp, Artificial sequence
  SiRNA target sequence
tacttttgtattagcttatttaaact

SEQ ID NO: 237579 - DNA, 26 bp, Artificial sequence
  SiRNA target sequence
acttttgtattagcttatttaaactt

SEQ ID NO: 237580 - DNA, 26 bp, Artificial sequence
  SiRNA target sequence
cttttgtattagcttatttaaacttc

SEQ ID NO: 237581 - DNA, 26 bp, Artificial sequence
  SiRNA target sequence
ttttgtattagcttatttaaacttcc

SEQ ID NO: 237582 - DNA, 26 bp, Artificial sequence
  SiRNA target sequence
tttgtattagcttatttaaacttccc

SEQ ID NO: 237583 - DNA, 26 bp, Artificial sequence
  SiRNA target sequence
ttgtattagcttatttaaacttccca

SEQ ID NO: 237584 - DNA, 26 bp, Artificial sequence
  SiRNA target sequence
tgtattagcttatttaaacttcccaa

SEQ ID NO: 237585 - DNA, 26 bp, Artificial sequence
  SiRNA target sequence
gtattagcttatttaaacttcccaat

SEQ ID NO: 237586 - DNA, 26 bp, Artificial sequence
  SiRNA target sequence
tattagcttatttaaacttcccaatt

SEQ ID NO: 237587 - DNA, 26 bp, Artificial sequence
  SiRNA target sequence
attagcttatttaaacttcccaatta

SEQ ID NO: 237588 - DNA, 26 bp, Artificial sequence
  SiRNA target sequence
ttagcttatttaaacttcccaattac

SEQ ID NO: 237589 - DNA, 26 bp, Artificial sequence
  SiRNA target sequence
tagcttatttaaacttcccaattaca

SEQ ID NO: 237590 - DNA, 26 bp, Artificial sequence
  SiRNA target sequence
agcttatttaaacttcccaattacaa

SEQ ID NO: 237591 - DNA, 26 bp, Artificial sequence
  SiRNA target sequence
gcttatttaaacttcccaattacaaa

SEQ ID NO: 237592 - DNA, 26 bp, Artificial sequence
  SiRNA target sequence
cttatttaaacttcccaattacaaac

SEQ ID NO: 237593 - DNA, 26 bp, Artificial sequence
  SiRNA target sequence
ttatttaaacttcccaattacaaaca

SEQ ID NO: 237594 - DNA, 26 bp, Artificial sequence
  SiRNA target sequence
tatttaaacttcccaattacaaacaa

SEQ ID NO: 237595 - DNA, 26 bp, Artificial sequence
  SiRNA target sequence
atttaaacttcccaattacaaacaaa

SEQ ID NO: 237596 - DNA, 26 bp, Artificial sequence
  SiRNA target sequence
tttaaacttcccaattacaaacaaag

SEQ ID NO: 237597 - DNA, 26 bp, Artificial sequence
  SiRNA target sequence
ttaaacttcccaattacaaacaaaga

SEQ ID NO: 237598 - DNA, 26 bp, Artificial sequence
  SiRNA target sequence
taaacttcccaattacaaacaaagag

SEQ ID NO: 237599 - DNA, 26 bp, Artificial sequence
  SiRNA target sequence
aaacttcccaattacaaacaaagagg

SEQ ID NO: 237600 - DNA, 26 bp, Artificial sequence
  SiRNA target sequence
aacttcccaattacaaacaaagagga

SEQ ID NO: 237601 - DNA, 26 bp, Artificial sequence
  SiRNA target sequence
acttcccaattacaaacaaagaggat

SEQ ID NO: 237602 - DNA, 26 bp, Artificial sequence
  SiRNA target sequence
cttcccaattacaaacaaagaggata

SEQ ID NO: 237603 - DNA, 26 bp, Artificial sequence
  SiRNA target sequence
ttcccaattacaaacaaagaggataa

SEQ ID NO: 237604 - DNA, 26 bp, Artificial sequence
  SiRNA target sequence
tcccaattacaaacaaagaggataat

SEQ ID NO: 237605 - DNA, 26 bp, Artificial sequence
  SiRNA target sequence
cccaattacaaacaaagaggataata

SEQ ID NO: 237606 - DNA, 26 bp, Artificial sequence
  SiRNA target sequence
ccaattacaaacaaagaggataatat

SEQ ID NO: 237607 - DNA, 26 bp, Artificial sequence
  SiRNA target sequence
caattacaaacaaagaggataatata

SEQ ID NO: 237608 - DNA, 26 bp, Artificial sequence
  SiRNA target sequence
aattacaaacaaagaggataatatat

SEQ ID NO: 237609 - DNA, 26 bp, Artificial sequence
  SiRNA target sequence
attacaaacaaagaggataatatatt

SEQ ID NO: 237610 - DNA, 26 bp, Artificial sequence
  SiRNA target sequence
ttacaaacaaagaggataatatattt

SEQ ID NO: 237611 - DNA, 26 bp, Artificial sequence
  SiRNA target sequence
tacaaacaaagaggataatatatttg

SEQ ID NO: 237612 - DNA, 26 bp, Artificial sequence
  SiRNA target sequence
acaaacaaagaggataatatatttga

SEQ ID NO: 237613 - DNA, 26 bp, Artificial sequence
  SiRNA target sequence
caaacaaagaggataatatatttgat

SEQ ID NO: 237614 - DNA, 26 bp, Artificial sequence
  SiRNA target sequence
aaacaaagaggataatatatttgata

SEQ ID NO: 237615 - DNA, 26 bp, Artificial sequence
  SiRNA target sequence
aacaaagaggataatatatttgatat

SEQ ID NO: 237616 - DNA, 26 bp, Artificial sequence
  SiRNA target sequence
acaaagaggataatatatttgatatt

SEQ ID NO: 237617 - DNA, 26 bp, Artificial sequence
  SiRNA target sequence
caaagaggataatatatttgatattt

SEQ ID NO: 237618 - DNA, 26 bp, Artificial sequence
  SiRNA target sequence
aaagaggataatatatttgatattta

SEQ ID NO: 237619 - DNA, 26 bp, Artificial sequence
  SiRNA target sequence
aagaggataatatatttgatatttac

SEQ ID NO: 237620 - DNA, 26 bp, Artificial sequence
  SiRNA target sequence
agaggataatatatttgatatttacc

SEQ ID NO: 237621 - DNA, 26 bp, Artificial sequence
  SiRNA target sequence
gaggataatatatttgatatttaccg

SEQ ID NO: 237622 - DNA, 26 bp, Artificial sequence
  SiRNA target sequence
aggataatatatttgatatttaccgt

SEQ ID NO: 237623 - DNA, 26 bp, Artificial sequence
  SiRNA target sequence
ggataatatatttgatatttaccgtt

SEQ ID NO: 237624 - DNA, 26 bp, Artificial sequence
  SiRNA target sequence
gataatatatttgatatttaccgttt

SEQ ID NO: 237625 - DNA, 26 bp, Artificial sequence
  SiRNA target sequence
ataatatatttgatatttaccgttta

SEQ ID NO: 237626 - DNA, 26 bp, Artificial sequence
  SiRNA target sequence
taatatatttgatatttaccgtttac

SEQ ID NO: 237627 - DNA, 26 bp, Artificial sequence
  SiRNA target sequence
aatatatttgatatttaccgtttacc

SEQ ID NO: 237628 - DNA, 26 bp, Artificial sequence
  SiRNA target sequence
atatatttgatatttaccgtttaccg

SEQ ID NO: 237629 - DNA, 26 bp, Artificial sequence
  SiRNA target sequence
tatatttgatatttaccgtttaccgt

SEQ ID NO: 237630 - DNA, 26 bp, Artificial sequence
  SiRNA target sequence
atatttgatatttaccgtttaccgtc

SEQ ID NO: 237631 - DNA, 26 bp, Artificial sequence
  SiRNA target sequence
tatttgatatttaccgtttaccgtca

SEQ ID NO: 237632 - DNA, 26 bp, Artificial sequence
  SiRNA target sequence
atttgatatttaccgtttaccgtcaa

SEQ ID NO: 237633 - DNA, 26 bp, Artificial sequence
  SiRNA target sequence
tttgatatttaccgtttaccgtcaac

SEQ ID NO: 237634 - DNA, 26 bp, Artificial sequence
  SiRNA target sequence
ttgatatttaccgtttaccgtcaact

SEQ ID NO: 237635 - DNA, 26 bp, Artificial sequence
  SiRNA target sequence
tgatatttaccgtttaccgtcaactg

SEQ ID NO: 237636 - DNA, 26 bp, Artificial sequence
  SiRNA target sequence
gatatttaccgtttaccgtcaactga

SEQ ID NO: 237637 - DNA, 26 bp, Artificial sequence
  SiRNA target sequence
atatttaccgtttaccgtcaactgat

SEQ ID NO: 237638 - DNA, 26 bp, Artificial sequence
  SiRNA target sequence
tatttaccgtttaccgtcaactgatt

SEQ ID NO: 237639 - DNA, 26 bp, Artificial sequence
  SiRNA target sequence
atttaccgtttaccgtcaactgattc

SEQ ID NO: 237640 - DNA, 26 bp, Artificial sequence
  SiRNA target sequence
tttaccgtttaccgtcaactgattct

SEQ ID NO: 237641 - DNA, 26 bp, Artificial sequence
  SiRNA target sequence
ttaccgtttaccgtcaactgattcta

SEQ ID NO: 237642 - DNA, 26 bp, Artificial sequence
  SiRNA target sequence
taccgtttaccgtcaactgattctat

SEQ ID NO: 237643 - DNA, 26 bp, Artificial sequence
  SiRNA target sequence
accgtttaccgtcaactgattctata

SEQ ID NO: 237644 - DNA, 26 bp, Artificial sequence
  SiRNA target sequence
ccgtttaccgtcaactgattctataa

SEQ ID NO: 237645 - DNA, 26 bp, Artificial sequence
  SiRNA target sequence
cgtttaccgtcaactgattctataat

SEQ ID NO: 237646 - DNA, 26 bp, Artificial sequence
  SiRNA target sequence
gtttaccgtcaactgattctataatc

SEQ ID NO: 237647 - DNA, 26 bp, Artificial sequence
  SiRNA target sequence
tttaccgtcaactgattctataatca

SEQ ID NO: 237648 - DNA, 26 bp, Artificial sequence
  SiRNA target sequence
ttaccgtcaactgattctataatcaa

SEQ ID NO: 237649 - DNA, 26 bp, Artificial sequence
  SiRNA target sequence
taccgtcaactgattctataatcaaa

SEQ ID NO: 237650 - DNA, 26 bp, Artificial sequence
  SiRNA target sequence
accgtcaactgattctataatcaaat

SEQ ID NO: 237651 - DNA, 26 bp, Artificial sequence
  SiRNA target sequence
ccgtcaactgattctataatcaaatt

SEQ ID NO: 237652 - DNA, 26 bp, Artificial sequence
  SiRNA target sequence
cgtcaactgattctataatcaaatta

SEQ ID NO: 237653 - DNA, 26 bp, Artificial sequence
  SiRNA target sequence
gtcaactgattctataatcaaattag

SEQ ID NO: 237654 - DNA, 26 bp, Artificial sequence
  SiRNA target sequence
tcaactgattctataatcaaattaga

SEQ ID NO: 237655 - DNA, 26 bp, Artificial sequence
  SiRNA target sequence
caactgattctataatcaaattagaa

SEQ ID NO: 237656 - DNA, 26 bp, Artificial sequence
  SiRNA target sequence
aactgattctataatcaaattagaaa

SEQ ID NO: 237657 - DNA, 26 bp, Artificial sequence
  SiRNA target sequence
actgattctataatcaaattagaaaa

SEQ ID NO: 237658 - DNA, 26 bp, Artificial sequence
  SiRNA target sequence
ctgattctataatcaaattagaaaat

SEQ ID NO: 237659 - DNA, 26 bp, Artificial sequence
  SiRNA target sequence
tgattctataatcaaattagaaaata

SEQ ID NO: 237660 - DNA, 26 bp, Artificial sequence
  SiRNA target sequence
gattctataatcaaattagaaaatat

SEQ ID NO: 237661 - DNA, 26 bp, Artificial sequence
  SiRNA target sequence
attctataatcaaattagaaaatatt

SEQ ID NO: 237662 - DNA, 26 bp, Artificial sequence
  SiRNA target sequence
ttctataatcaaattagaaaatattg

SEQ ID NO: 237663 - DNA, 26 bp, Artificial sequence
  SiRNA target sequence
tctataatcaaattagaaaatattgt

SEQ ID NO: 237664 - DNA, 26 bp, Artificial sequence
  SiRNA target sequence
ctataatcaaattagaaaatattgtt

SEQ ID NO: 237665 - DNA, 26 bp, Artificial sequence
  SiRNA target sequence
tataatcaaattagaaaatattgttg

SEQ ID NO: 237666 - DNA, 26 bp, Artificial sequence
  SiRNA target sequence
ataatcaaattagaaaatattgttgg

SEQ ID NO: 237667 - DNA, 26 bp, Artificial sequence
  SiRNA target sequence
taatcaaattagaaaatattgttggt

SEQ ID NO: 237668 - DNA, 26 bp, Artificial sequence
  SiRNA target sequence
aatcaaattagaaaatattgttggtg

SEQ ID NO: 237669 - DNA, 26 bp, Artificial sequence
  SiRNA target sequence
atcaaattagaaaatattgttggtgt

SEQ ID NO: 237670 - DNA, 26 bp, Artificial sequence
  SiRNA target sequence
tcaaattagaaaatattgttggtgtc

SEQ ID NO: 237671 - DNA, 26 bp, Artificial sequence
  SiRNA target sequence
caaattagaaaatattgttggtgtca

SEQ ID NO: 237672 - DNA, 26 bp, Artificial sequence
  SiRNA target sequence
aaattagaaaatattgttggtgtcat

SEQ ID NO: 237673 - DNA, 26 bp, Artificial sequence
  SiRNA target sequence
aattagaaaatattgttggtgtcatt

SEQ ID NO: 237674 - DNA, 26 bp, Artificial sequence
  SiRNA target sequence
attagaaaatattgttggtgtcattt

SEQ ID NO: 237675 - DNA, 26 bp, Artificial sequence
  SiRNA target sequence
ttagaaaatattgttggtgtcatttg

SEQ ID NO: 237676 - DNA, 26 bp, Artificial sequence
  SiRNA target sequence
tagaaaatattgttggtgtcatttgt

SEQ ID NO: 237677 - DNA, 26 bp, Artificial sequence
  SiRNA target sequence
agaaaatattgttggtgtcatttgtg

SEQ ID NO: 237678 - DNA, 26 bp, Artificial sequence
  SiRNA target sequence
gaaaatattgttggtgtcatttgtgt

SEQ ID NO: 237679 - DNA, 26 bp, Artificial sequence
  SiRNA target sequence
aaaatattgttggtgtcatttgtgta

SEQ ID NO: 237680 - DNA, 26 bp, Artificial sequence
  SiRNA target sequence
aaatattgttggtgtcatttgtgtat

SEQ ID NO: 237681 - DNA, 26 bp, Artificial sequence
  SiRNA target sequence
aatattgttggtgtcatttgtgtatc

SEQ ID NO: 237682 - DNA, 26 bp, Artificial sequence
  SiRNA target sequence
atattgttggtgtcatttgtgtatct

SEQ ID NO: 237683 - DNA, 26 bp, Artificial sequence
  SiRNA target sequence
tattgttggtgtcatttgtgtatctt

SEQ ID NO: 237684 - DNA, 26 bp, Artificial sequence
  SiRNA target sequence
attgttggtgtcatttgtgtatcttt

SEQ ID NO: 237685 - DNA, 26 bp, Artificial sequence
  SiRNA target sequence
ttgttggtgtcatttgtgtatcttta

SEQ ID NO: 237686 - DNA, 26 bp, Artificial sequence
  SiRNA target sequence
tgttggtgtcatttgtgtatctttaa

SEQ ID NO: 237687 - DNA, 26 bp, Artificial sequence
  SiRNA target sequence
gttggtgtcatttgtgtatctttaat

SEQ ID NO: 237688 - DNA, 26 bp, Artificial sequence
  SiRNA target sequence
ttggtgtcatttgtgtatctttaatg

SEQ ID NO: 237689 - DNA, 26 bp, Artificial sequence
  SiRNA target sequence
tggtgtcatttgtgtatctttaatga

SEQ ID NO: 237690 - DNA, 26 bp, Artificial sequence
  SiRNA target sequence
ggtgtcatttgtgtatctttaatgaa

SEQ ID NO: 237691 - DNA, 26 bp, Artificial sequence
  SiRNA target sequence
gtgtcatttgtgtatctttaatgaag

SEQ ID NO: 237692 - DNA, 26 bp, Artificial sequence
  SiRNA target sequence
tgtcatttgtgtatctttaatgaaga

SEQ ID NO: 237693 - DNA, 26 bp, Artificial sequence
  SiRNA target sequence
gtcatttgtgtatctttaatgaagat

SEQ ID NO: 237694 - DNA, 26 bp, Artificial sequence
  SiRNA target sequence
tcatttgtgtatctttaatgaagatt

SEQ ID NO: 237695 - DNA, 26 bp, Artificial sequence
  SiRNA target sequence
catttgtgtatctttaatgaagattt

SEQ ID NO: 237696 - DNA, 26 bp, Artificial sequence
  SiRNA target sequence
atttgtgtatctttaatgaagatttc

SEQ ID NO: 237697 - DNA, 26 bp, Artificial sequence
  SiRNA target sequence
tttgtgtatctttaatgaagatttct

SEQ ID NO: 237698 - DNA, 26 bp, Artificial sequence
  SiRNA target sequence
ttgtgtatctttaatgaagatttcta

SEQ ID NO: 237699 - DNA, 26 bp, Artificial sequence
  SiRNA target sequence
tgtgtatctttaatgaagatttctaa

SEQ ID NO: 237700 - DNA, 26 bp, Artificial sequence
  SiRNA target sequence
gtgtatctttaatgaagatttctaaa

SEQ ID NO: 237701 - DNA, 26 bp, Artificial sequence
  SiRNA target sequence
tgtatctttaatgaagatttctaaat

SEQ ID NO: 237702 - DNA, 26 bp, Artificial sequence
  SiRNA target sequence
gtatctttaatgaagatttctaaata

SEQ ID NO: 237703 - DNA, 26 bp, Artificial sequence
  SiRNA target sequence
tatctttaatgaagatttctaaatat

SEQ ID NO: 237704 - DNA, 26 bp, Artificial sequence
  SiRNA target sequence
atctttaatgaagatttctaaatatg

SEQ ID NO: 237705 - DNA, 26 bp, Artificial sequence
  SiRNA target sequence
tctttaatgaagatttctaaatatgc

SEQ ID NO: 237706 - DNA, 26 bp, Artificial sequence
  SiRNA target sequence
ctttaatgaagatttctaaatatgca

SEQ ID NO: 237707 - DNA, 26 bp, Artificial sequence
  SiRNA target sequence
tttaatgaagatttctaaatatgcag

SEQ ID NO: 237708 - DNA, 26 bp, Artificial sequence
  SiRNA target sequence
ttaatgaagatttctaaatatgcagc

SEQ ID NO: 237709 - DNA, 26 bp, Artificial sequence
  SiRNA target sequence
taatgaagatttctaaatatgcagca

SEQ ID NO: 237710 - DNA, 26 bp, Artificial sequence
  SiRNA target sequence
aatgaagatttctaaatatgcagcat

SEQ ID NO: 237711 - DNA, 26 bp, Artificial sequence
  SiRNA target sequence
atgaagatttctaaatatgcagcatt

SEQ ID NO: 237712 - DNA, 26 bp, Artificial sequence
  SiRNA target sequence
tgaagatttctaaatatgcagcattt

SEQ ID NO: 237713 - DNA, 26 bp, Artificial sequence
  SiRNA target sequence
gaagatttctaaatatgcagcatttg

SEQ ID NO: 237714 - DNA, 26 bp, Artificial sequence
  SiRNA target sequence
aagatttctaaatatgcagcatttga

SEQ ID NO: 237715 - DNA, 26 bp, Artificial sequence
  SiRNA target sequence
agatttctaaatatgcagcatttgat

SEQ ID NO: 237716 - DNA, 26 bp, Artificial sequence
  SiRNA target sequence
gatttctaaatatgcagcatttgata

SEQ ID NO: 237717 - DNA, 26 bp, Artificial sequence
  SiRNA target sequence
atttctaaatatgcagcatttgatat

SEQ ID NO: 237718 - DNA, 26 bp, Artificial sequence
  SiRNA target sequence
tttctaaatatgcagcatttgatatc

SEQ ID NO: 237719 - DNA, 26 bp, Artificial sequence
  SiRNA target sequence
ttctaaatatgcagcatttgatatca

SEQ ID NO: 237720 - DNA, 26 bp, Artificial sequence
  SiRNA target sequence
tctaaatatgcagcatttgatatcac

SEQ ID NO: 237721 - DNA, 26 bp, Artificial sequence
  SiRNA target sequence
ctaaatatgcagcatttgatatcaca

SEQ ID NO: 237722 - DNA, 26 bp, Artificial sequence
  SiRNA target sequence
taaatatgcagcatttgatatcacaa

SEQ ID NO: 237723 - DNA, 26 bp, Artificial sequence
  SiRNA target sequence
aaatatgcagcatttgatatcacaaa

SEQ ID NO: 237724 - DNA, 26 bp, Artificial sequence
  SiRNA target sequence
aatatgcagcatttgatatcacaaaa

SEQ ID NO: 237725 - DNA, 26 bp, Artificial sequence
  SiRNA target sequence
atatgcagcatttgatatcacaaaag

SEQ ID NO: 237726 - DNA, 26 bp, Artificial sequence
  SiRNA target sequence
tatgcagcatttgatatcacaaaaga

SEQ ID NO: 237727 - DNA, 26 bp, Artificial sequence
  SiRNA target sequence
atgcagcatttgatatcacaaaagag

SEQ ID NO: 237728 - DNA, 26 bp, Artificial sequence
  SiRNA target sequence
tgcagcatttgatatcacaaaagagg

SEQ ID NO: 237729 - DNA, 26 bp, Artificial sequence
  SiRNA target sequence
gcagcatttgatatcacaaaagaggc

SEQ ID NO: 237730 - DNA, 26 bp, Artificial sequence
  SiRNA target sequence
cagcatttgatatcacaaaagaggct

SEQ ID NO: 237731 - DNA, 26 bp, Artificial sequence
  SiRNA target sequence
agcatttgatatcacaaaagaggctt

SEQ ID NO: 237732 - DNA, 26 bp, Artificial sequence
  SiRNA target sequence
gcatttgatatcacaaaagaggcttt

SEQ ID NO: 237733 - DNA, 26 bp, Artificial sequence
  SiRNA target sequence
catttgatatcacaaaagaggctttg

SEQ ID NO: 237734 - DNA, 26 bp, Artificial sequence
  SiRNA target sequence
atttgatatcacaaaagaggctttgt

SEQ ID NO: 237735 - DNA, 26 bp, Artificial sequence
  SiRNA target sequence
tttgatatcacaaaagaggctttgtc

SEQ ID NO: 237736 - DNA, 26 bp, Artificial sequence
  SiRNA target sequence
ttgatatcacaaaagaggctttgtct

SEQ ID NO: 237737 - DNA, 26 bp, Artificial sequence
  SiRNA target sequence
tgatatcacaaaagaggctttgtcta

SEQ ID NO: 237738 - DNA, 26 bp, Artificial sequence
  SiRNA target sequence
gatatcacaaaagaggctttgtctat

SEQ ID NO: 237739 - DNA, 26 bp, Artificial sequence
  SiRNA target sequence
atatcacaaaagaggctttgtctatg

SEQ ID NO: 237740 - DNA, 26 bp, Artificial sequence
  SiRNA target sequence
tatcacaaaagaggctttgtctatgc

SEQ ID NO: 237741 - DNA, 26 bp, Artificial sequence
  SiRNA target sequence
atcacaaaagaggctttgtctatgca

SEQ ID NO: 237742 - DNA, 26 bp, Artificial sequence
  SiRNA target sequence
tcacaaaagaggctttgtctatgcag

SEQ ID NO: 237743 - DNA, 26 bp, Artificial sequence
  SiRNA target sequence
cacaaaagaggctttgtctatgcaga

SEQ ID NO: 237744 - DNA, 26 bp, Artificial sequence
  SiRNA target sequence
acaaaagaggctttgtctatgcagat

SEQ ID NO: 237745 - DNA, 26 bp, Artificial sequence
  SiRNA target sequence
caaaagaggctttgtctatgcagatt

SEQ ID NO: 237746 - DNA, 26 bp, Artificial sequence
  SiRNA target sequence
aaaagaggctttgtctatgcagattg

SEQ ID NO: 237747 - DNA, 26 bp, Artificial sequence
  SiRNA target sequence
aaagaggctttgtctatgcagattga

SEQ ID NO: 237748 - DNA, 26 bp, Artificial sequence
  SiRNA target sequence
aagaggctttgtctatgcagattgat

SEQ ID NO: 237749 - DNA, 26 bp, Artificial sequence
  SiRNA target sequence
agaggctttgtctatgcagattgatg

SEQ ID NO: 237750 - DNA, 26 bp, Artificial sequence
  SiRNA target sequence
gaggctttgtctatgcagattgatgg

SEQ ID NO: 237751 - DNA, 26 bp, Artificial sequence
  SiRNA target sequence
aggctttgtctatgcagattgatggt

SEQ ID NO: 237752 - DNA, 26 bp, Artificial sequence
  SiRNA target sequence
ggctttgtctatgcagattgatggtt

SEQ ID NO: 237753 - DNA, 26 bp, Artificial sequence
  SiRNA target sequence
gctttgtctatgcagattgatggttc

SEQ ID NO: 237754 - DNA, 26 bp, Artificial sequence
  SiRNA target sequence
ctttgtctatgcagattgatggttct

SEQ ID NO: 237755 - DNA, 26 bp, Artificial sequence
  SiRNA target sequence
tttgtctatgcagattgatggttcta

SEQ ID NO: 237756 - DNA, 26 bp, Artificial sequence
  SiRNA target sequence
ttgtctatgcagattgatggttctat

SEQ ID NO: 237757 - DNA, 26 bp, Artificial sequence
  SiRNA target sequence
tgtctatgcagattgatggttctata

SEQ ID NO: 237758 - DNA, 26 bp, Artificial sequence
  SiRNA target sequence
gtctatgcagattgatggttctataa

SEQ ID NO: 237759 - DNA, 26 bp, Artificial sequence
  SiRNA target sequence
tctatgcagattgatggttctataag

SEQ ID NO: 237760 - DNA, 26 bp, Artificial sequence
  SiRNA target sequence
ctatgcagattgatggttctataaga

SEQ ID NO: 237761 - DNA, 26 bp, Artificial sequence
  SiRNA target sequence
tatgcagattgatggttctataagag

SEQ ID NO: 237762 - DNA, 26 bp, Artificial sequence
  SiRNA target sequence
atgcagattgatggttctataagagc

SEQ ID NO: 237763 - DNA, 26 bp, Artificial sequence
  SiRNA target sequence
tgcagattgatggttctataagagcg

SEQ ID NO: 237764 - DNA, 26 bp, Artificial sequence
  SiRNA target sequence
gcagattgatggttctataagagcga

SEQ ID NO: 237765 - DNA, 26 bp, Artificial sequence
  SiRNA target sequence
cagattgatggttctataagagcgaa

SEQ ID NO: 237766 - DNA, 26 bp, Artificial sequence
  SiRNA target sequence
agattgatggttctataagagcgaaa

SEQ ID NO: 237767 - DNA, 26 bp, Artificial sequence
  SiRNA target sequence
gattgatggttctataagagcgaaat

SEQ ID NO: 237768 - DNA, 26 bp, Artificial sequence
  SiRNA target sequence
attgatggttctataagagcgaaata

SEQ ID NO: 237769 - DNA, 26 bp, Artificial sequence
  SiRNA target sequence
ttgatggttctataagagcgaaatac

SEQ ID NO: 237770 - DNA, 26 bp, Artificial sequence
  SiRNA target sequence
tgatggttctataagagcgaaataca

SEQ ID NO: 237771 - DNA, 26 bp, Artificial sequence
  SiRNA target sequence
gatggttctataagagcgaaatacaa

SEQ ID NO: 237772 - DNA, 26 bp, Artificial sequence
  SiRNA target sequence
atggttctataagagcgaaatacaaa

SEQ ID NO: 237773 - DNA, 26 bp, Artificial sequence
  SiRNA target sequence
tggttctataagagcgaaatacaaag

SEQ ID NO: 237774 - DNA, 26 bp, Artificial sequence
  SiRNA target sequence
ggttctataagagcgaaatacaaagg

SEQ ID NO: 237775 - DNA, 26 bp, Artificial sequence
  SiRNA target sequence
gttctataagagcgaaatacaaaggt

SEQ ID NO: 237776 - DNA, 26 bp, Artificial sequence
  SiRNA target sequence
ttctataagagcgaaatacaaaggta

SEQ ID NO: 237777 - DNA, 26 bp, Artificial sequence
  SiRNA target sequence
tctataagagcgaaatacaaaggtat

SEQ ID NO: 237778 - DNA, 26 bp, Artificial sequence
  SiRNA target sequence
ctataagagcgaaatacaaaggtatt

SEQ ID NO: 237779 - DNA, 26 bp, Artificial sequence
  SiRNA target sequence
tataagagcgaaatacaaaggtattt

SEQ ID NO: 237780 - DNA, 26 bp, Artificial sequence
  SiRNA target sequence
ataagagcgaaatacaaaggtatttt

SEQ ID NO: 237781 - DNA, 26 bp, Artificial sequence
  SiRNA target sequence
taagagcgaaatacaaaggtattttt

SEQ ID NO: 237782 - DNA, 26 bp, Artificial sequence
  SiRNA target sequence
aagagcgaaatacaaaggtatttttg

SEQ ID NO: 237783 - DNA, 26 bp, Artificial sequence
  SiRNA target sequence
agagcgaaatacaaaggtatttttga

SEQ ID NO: 237784 - DNA, 26 bp, Artificial sequence
  SiRNA target sequence
gagcgaaatacaaaggtatttttgat

SEQ ID NO: 237785 - DNA, 26 bp, Artificial sequence
  SiRNA target sequence
agcgaaatacaaaggtatttttgatg

SEQ ID NO: 237786 - DNA, 26 bp, Artificial sequence
  SiRNA target sequence
gcgaaatacaaaggtatttttgatgg

SEQ ID NO: 237787 - DNA, 26 bp, Artificial sequence
  SiRNA target sequence
cgaaatacaaaggtatttttgatggt

SEQ ID NO: 237788 - DNA, 26 bp, Artificial sequence
  SiRNA target sequence
gaaatacaaaggtatttttgatggtg

SEQ ID NO: 237789 - DNA, 26 bp, Artificial sequence
  SiRNA target sequence
aaatacaaaggtatttttgatggtgt

SEQ ID NO: 237790 - DNA, 26 bp, Artificial sequence
  SiRNA target sequence
aatacaaaggtatttttgatggtgta

SEQ ID NO: 237791 - DNA, 26 bp, Artificial sequence
  SiRNA target sequence
atacaaaggtatttttgatggtgtat

SEQ ID NO: 237792 - DNA, 26 bp, Artificial sequence
  SiRNA target sequence
tacaaaggtatttttgatggtgtatt

SEQ ID NO: 237793 - DNA, 26 bp, Artificial sequence
  SiRNA target sequence
acaaaggtatttttgatggtgtattt

SEQ ID NO: 237794 - DNA, 26 bp, Artificial sequence
  SiRNA target sequence
caaaggtatttttgatggtgtatttg

SEQ ID NO: 237795 - DNA, 26 bp, Artificial sequence
  SiRNA target sequence
aaaggtatttttgatggtgtatttgg

SEQ ID NO: 237796 - DNA, 26 bp, Artificial sequence
  SiRNA target sequence
aaggtatttttgatggtgtatttggt

SEQ ID NO: 237797 - DNA, 26 bp, Artificial sequence
  SiRNA target sequence
aggtatttttgatggtgtatttggta

SEQ ID NO: 237798 - DNA, 26 bp, Artificial sequence
  SiRNA target sequence
ggtatttttgatggtgtatttggtaa

SEQ ID NO: 237799 - DNA, 26 bp, Artificial sequence
  SiRNA target sequence
gtatttttgatggtgtatttggtaag

SEQ ID NO: 237800 - DNA, 26 bp, Artificial sequence
  SiRNA target sequence
tatttttgatggtgtatttggtaagc

SEQ ID NO: 237801 - DNA, 26 bp, Artificial sequence
  SiRNA target sequence
atttttgatggtgtatttggtaagct

SEQ ID NO: 237802 - DNA, 26 bp, Artificial sequence
  SiRNA target sequence
tttttgatggtgtatttggtaagctg

SEQ ID NO: 237803 - DNA, 26 bp, Artificial sequence
  SiRNA target sequence
ttttgatggtgtatttggtaagctgg

SEQ ID NO: 237804 - DNA, 26 bp, Artificial sequence
  SiRNA target sequence
tttgatggtgtatttggtaagctggg

SEQ ID NO: 237805 - DNA, 26 bp, Artificial sequence
  SiRNA target sequence
ttgatggtgtatttggtaagctgggg

SEQ ID NO: 237806 - DNA, 26 bp, Artificial sequence
  SiRNA target sequence
tgatggtgtatttggtaagctgggga

SEQ ID NO: 237807 - DNA, 26 bp, Artificial sequence
  SiRNA target sequence
gatggtgtatttggtaagctggggaa

SEQ ID NO: 237808 - DNA, 26 bp, Artificial sequence
  SiRNA target sequence
atggtgtatttggtaagctggggaaa

SEQ ID NO: 237809 - DNA, 26 bp, Artificial sequence
  SiRNA target sequence
tggtgtatttggtaagctggggaaat

SEQ ID NO: 237810 - DNA, 26 bp, Artificial sequence
  SiRNA target sequence
ggtgtatttggtaagctggggaaatc

SEQ ID NO: 237811 - DNA, 26 bp, Artificial sequence
  SiRNA target sequence
gtgtatttggtaagctggggaaatct

SEQ ID NO: 237812 - DNA, 26 bp, Artificial sequence
  SiRNA target sequence
tgtatttggtaagctggggaaatctt

SEQ ID NO: 237813 - DNA, 26 bp, Artificial sequence
  SiRNA target sequence
gtatttggtaagctggggaaatcttt

SEQ ID NO: 237814 - DNA, 26 bp, Artificial sequence
  SiRNA target sequence
tatttggtaagctggggaaatctttt

SEQ ID NO: 237815 - DNA, 26 bp, Artificial sequence
  SiRNA target sequence
atttggtaagctggggaaatcttttg

SEQ ID NO: 237816 - DNA, 26 bp, Artificial sequence
  SiRNA target sequence
tttggtaagctggggaaatcttttgg

SEQ ID NO: 237817 - DNA, 26 bp, Artificial sequence
  SiRNA target sequence
ttggtaagctggggaaatcttttgga

SEQ ID NO: 237818 - DNA, 26 bp, Artificial sequence
  SiRNA target sequence
tggtaagctggggaaatcttttggat

SEQ ID NO: 237819 - DNA, 26 bp, Artificial sequence
  SiRNA target sequence
ggtaagctggggaaatcttttggatc

SEQ ID NO: 237820 - DNA, 26 bp, Artificial sequence
  SiRNA target sequence
gtaagctggggaaatcttttggatca

SEQ ID NO: 237821 - DNA, 26 bp, Artificial sequence
  SiRNA target sequence
taagctggggaaatcttttggatcag

SEQ ID NO: 237822 - DNA, 26 bp, Artificial sequence
  SiRNA target sequence
aagctggggaaatcttttggatcagt

SEQ ID NO: 237823 - DNA, 26 bp, Artificial sequence
  SiRNA target sequence
agctggggaaatcttttggatcagtt

SEQ ID NO: 237824 - DNA, 26 bp, Artificial sequence
  SiRNA target sequence
gctggggaaatcttttggatcagttt

SEQ ID NO: 237825 - DNA, 26 bp, Artificial sequence
  SiRNA target sequence
ctggggaaatcttttggatcagttta

SEQ ID NO: 237826 - DNA, 26 bp, Artificial sequence
  SiRNA target sequence
tggggaaatcttttggatcagtttat

SEQ ID NO: 237827 - DNA, 26 bp, Artificial sequence
  SiRNA target sequence
ggggaaatcttttggatcagtttatg

SEQ ID NO: 237828 - DNA, 26 bp, Artificial sequence
  SiRNA target sequence
gggaaatcttttggatcagtttatgg

SEQ ID NO: 237829 - DNA, 26 bp, Artificial sequence
  SiRNA target sequence
ggaaatcttttggatcagtttatgga

SEQ ID NO: 237830 - DNA, 26 bp, Artificial sequence
  SiRNA target sequence
gaaatcttttggatcagtttatggat

SEQ ID NO: 237831 - DNA, 26 bp, Artificial sequence
  SiRNA target sequence
aaatcttttggatcagtttatggatt

SEQ ID NO: 237832 - DNA, 26 bp, Artificial sequence
  SiRNA target sequence
aatcttttggatcagtttatggattt

SEQ ID NO: 237833 - DNA, 26 bp, Artificial sequence
  SiRNA target sequence
atcttttggatcagtttatggattta

SEQ ID NO: 237834 - DNA, 26 bp, Artificial sequence
  SiRNA target sequence
tcttttggatcagtttatggatttac

SEQ ID NO: 237835 - DNA, 26 bp, Artificial sequence
  SiRNA target sequence
cttttggatcagtttatggatttaca

SEQ ID NO: 237836 - DNA, 26 bp, Artificial sequence
  SiRNA target sequence
ttttggatcagtttatggatttacaa

SEQ ID NO: 237837 - DNA, 26 bp, Artificial sequence
  SiRNA target sequence
tttggatcagtttatggatttacaat

SEQ ID NO: 237838 - DNA, 26 bp, Artificial sequence
  SiRNA target sequence
ttggatcagtttatggatttacaatt

SEQ ID NO: 237839 - DNA, 26 bp, Artificial sequence
  SiRNA target sequence
tggatcagtttatggatttacaatta

SEQ ID NO: 237840 - DNA, 26 bp, Artificial sequence
  SiRNA target sequence
ggatcagtttatggatttacaattac

SEQ ID NO: 237841 - DNA, 26 bp, Artificial sequence
  SiRNA target sequence
gatcagtttatggatttacaattact

SEQ ID NO: 237842 - DNA, 26 bp, Artificial sequence
  SiRNA target sequence
atcagtttatggatttacaattacta

SEQ ID NO: 237843 - DNA, 26 bp, Artificial sequence
  SiRNA target sequence
tcagtttatggatttacaattactac

SEQ ID NO: 237844 - DNA, 26 bp, Artificial sequence
  SiRNA target sequence
cagtttatggatttacaattactaca

SEQ ID NO: 237845 - DNA, 26 bp, Artificial sequence
  SiRNA target sequence
agtttatggatttacaattactacat

SEQ ID NO: 237846 - DNA, 26 bp, Artificial sequence
  SiRNA target sequence
gtttatggatttacaattactacatt

SEQ ID NO: 237847 - DNA, 26 bp, Artificial sequence
  SiRNA target sequence
tttatggatttacaattactacatta

SEQ ID NO: 237848 - DNA, 26 bp, Artificial sequence
  SiRNA target sequence
ttatggatttacaattactacattat

SEQ ID NO: 237849 - DNA, 26 bp, Artificial sequence
  SiRNA target sequence
tatggatttacaattactacattatt

SEQ ID NO: 237850 - DNA, 26 bp, Artificial sequence
  SiRNA target sequence
atggatttacaattactacattatta

SEQ ID NO: 237851 - DNA, 26 bp, Artificial sequence
  SiRNA target sequence
tggatttacaattactacattattag

SEQ ID NO: 237852 - DNA, 26 bp, Artificial sequence
  SiRNA target sequence
ggatttacaattactacattattagg

SEQ ID NO: 237853 - DNA, 26 bp, Artificial sequence
  SiRNA target sequence
gatttacaattactacattattagga

SEQ ID NO: 237854 - DNA, 26 bp, Artificial sequence
  SiRNA target sequence
atttacaattactacattattaggaa

SEQ ID NO: 237855 - DNA, 26 bp, Artificial sequence
  SiRNA target sequence
tttacaattactacattattaggaac

SEQ ID NO: 237856 - DNA, 26 bp, Artificial sequence
  SiRNA target sequence
ttacaattactacattattaggaaca

SEQ ID NO: 237857 - DNA, 26 bp, Artificial sequence
  SiRNA target sequence
tacaattactacattattaggaacaa

SEQ ID NO: 237858 - DNA, 26 bp, Artificial sequence
  SiRNA target sequence
acaattactacattattaggaacaag

SEQ ID NO: 237859 - DNA, 26 bp, Artificial sequence
  SiRNA target sequence
caattactacattattaggaacaaga

SEQ ID NO: 237860 - DNA, 26 bp, Artificial sequence
  SiRNA target sequence
aattactacattattaggaacaagag

SEQ ID NO: 237861 - DNA, 26 bp, Artificial sequence
  SiRNA target sequence
attactacattattaggaacaagaga

SEQ ID NO: 237862 - DNA, 26 bp, Artificial sequence
  SiRNA target sequence
ttactacattattaggaacaagagat

SEQ ID NO: 237863 - DNA, 26 bp, Artificial sequence
  SiRNA target sequence
tactacattattaggaacaagagatg

SEQ ID NO: 237864 - DNA, 26 bp, Artificial sequence
  SiRNA target sequence
actacattattaggaacaagagatgt

SEQ ID NO: 237865 - DNA, 26 bp, Artificial sequence
  SiRNA target sequence
ctacattattaggaacaagagatgtt

SEQ ID NO: 237866 - DNA, 26 bp, Artificial sequence
  SiRNA target sequence
tacattattaggaacaagagatgttc

SEQ ID NO: 237867 - DNA, 26 bp, Artificial sequence
  SiRNA target sequence
acattattaggaacaagagatgttcg

SEQ ID NO: 237868 - DNA, 26 bp, Artificial sequence
  SiRNA target sequence
cattattaggaacaagagatgttcgt

SEQ ID NO: 237869 - DNA, 26 bp, Artificial sequence
  SiRNA target sequence
attattaggaacaagagatgttcgta

SEQ ID NO: 237870 - DNA, 26 bp, Artificial sequence
  SiRNA target sequence
ttattaggaacaagagatgttcgtag

SEQ ID NO: 237871 - DNA, 26 bp, Artificial sequence
  SiRNA target sequence
tattaggaacaagagatgttcgtaga

SEQ ID NO: 237872 - DNA, 26 bp, Artificial sequence
  SiRNA target sequence
attaggaacaagagatgttcgtagag

SEQ ID NO: 237873 - DNA, 26 bp, Artificial sequence
  SiRNA target sequence
ttaggaacaagagatgttcgtagagg

SEQ ID NO: 237874 - DNA, 26 bp, Artificial sequence
  SiRNA target sequence
taggaacaagagatgttcgtagaggt

SEQ ID NO: 237875 - DNA, 26 bp, Artificial sequence
  SiRNA target sequence
aggaacaagagatgttcgtagaggtg

SEQ ID NO: 237876 - DNA, 26 bp, Artificial sequence
  SiRNA target sequence
ggaacaagagatgttcgtagaggtgc

SEQ ID NO: 237877 - DNA, 26 bp, Artificial sequence
  SiRNA target sequence
gaacaagagatgttcgtagaggtgct

SEQ ID NO: 237878 - DNA, 26 bp, Artificial sequence
  SiRNA target sequence
aacaagagatgttcgtagaggtgctc

SEQ ID NO: 237879 - DNA, 26 bp, Artificial sequence
  SiRNA target sequence
acaagagatgttcgtagaggtgctcc

SEQ ID NO: 237880 - DNA, 26 bp, Artificial sequence
  SiRNA target sequence
caagagatgttcgtagaggtgctcct

SEQ ID NO: 237881 - DNA, 26 bp, Artificial sequence
  SiRNA target sequence
aagagatgttcgtagaggtgctccta

SEQ ID NO: 237882 - DNA, 26 bp, Artificial sequence
  SiRNA target sequence
agagatgttcgtagaggtgctcctat

SEQ ID NO: 237883 - DNA, 26 bp, Artificial sequence
  SiRNA target sequence
gagatgttcgtagaggtgctcctata

SEQ ID NO: 237884 - DNA, 26 bp, Artificial sequence
  SiRNA target sequence
agatgttcgtagaggtgctcctatat

SEQ ID NO: 237885 - DNA, 26 bp, Artificial sequence
  SiRNA target sequence
gatgttcgtagaggtgctcctatatc

SEQ ID NO: 237886 - DNA, 26 bp, Artificial sequence
  SiRNA target sequence
atgttcgtagaggtgctcctatatcg

SEQ ID NO: 237887 - DNA, 26 bp, Artificial sequence
  SiRNA target sequence
tgttcgtagaggtgctcctatatcgc

SEQ ID NO: 237888 - DNA, 26 bp, Artificial sequence
  SiRNA target sequence
gttcgtagaggtgctcctatatcgct

SEQ ID NO: 237889 - DNA, 26 bp, Artificial sequence
  SiRNA target sequence
ttcgtagaggtgctcctatatcgctt

SEQ ID NO: 237890 - DNA, 26 bp, Artificial sequence
  SiRNA target sequence
tcgtagaggtgctcctatatcgcttt

SEQ ID NO: 237891 - DNA, 26 bp, Artificial sequence
  SiRNA target sequence
cgtagaggtgctcctatatcgctttg

SEQ ID NO: 237892 - DNA, 26 bp, Artificial sequence
  SiRNA target sequence
gtagaggtgctcctatatcgctttgt

SEQ ID NO: 237893 - DNA, 26 bp, Artificial sequence
  SiRNA target sequence
tagaggtgctcctatatcgctttgtg

SEQ ID NO: 237894 - DNA, 26 bp, Artificial sequence
  SiRNA target sequence
agaggtgctcctatatcgctttgtgt

SEQ ID NO: 237895 - DNA, 26 bp, Artificial sequence
  SiRNA target sequence
gaggtgctcctatatcgctttgtgtt

SEQ ID NO: 237896 - DNA, 26 bp, Artificial sequence
  SiRNA target sequence
aggtgctcctatatcgctttgtgttc

SEQ ID NO: 237897 - DNA, 26 bp, Artificial sequence
  SiRNA target sequence
ggtgctcctatatcgctttgtgttct

SEQ ID NO: 237898 - DNA, 26 bp, Artificial sequence
  SiRNA target sequence
gtgctcctatatcgctttgtgttcta

SEQ ID NO: 237899 - DNA, 26 bp, Artificial sequence
  SiRNA target sequence
tgctcctatatcgctttgtgttctaa

SEQ ID NO: 237900 - DNA, 26 bp, Artificial sequence
  SiRNA target sequence
gctcctatatcgctttgtgttctaat

SEQ ID NO: 237901 - DNA, 26 bp, Artificial sequence
  SiRNA target sequence
ctcctatatcgctttgtgttctaata

SEQ ID NO: 237902 - DNA, 26 bp, Artificial sequence
  SiRNA target sequence
tcctatatcgctttgtgttctaatat

SEQ ID NO: 237903 - DNA, 26 bp, Artificial sequence
  SiRNA target sequence
cctatatcgctttgtgttctaatatt

SEQ ID NO: 237904 - DNA, 26 bp, Artificial sequence
  SiRNA target sequence
ctatatcgctttgtgttctaatattg

SEQ ID NO: 237905 - DNA, 26 bp, Artificial sequence
  SiRNA target sequence
tatatcgctttgtgttctaatattgt

SEQ ID NO: 237906 - DNA, 26 bp, Artificial sequence
  SiRNA target sequence
atatcgctttgtgttctaatattgtt

SEQ ID NO: 237907 - DNA, 26 bp, Artificial sequence
  SiRNA target sequence
tatcgctttgtgttctaatattgttc

SEQ ID NO: 237908 - DNA, 26 bp, Artificial sequence
  SiRNA target sequence
atcgctttgtgttctaatattgttct

SEQ ID NO: 237909 - DNA, 26 bp, Artificial sequence
  SiRNA target sequence
tcgctttgtgttctaatattgttctg

SEQ ID NO: 237910 - DNA, 26 bp, Artificial sequence
  SiRNA target sequence
cgctttgtgttctaatattgttctgc

SEQ ID NO: 237911 - DNA, 26 bp, Artificial sequence
  SiRNA target sequence
gctttgtgttctaatattgttctgcc

SEQ ID NO: 237912 - DNA, 26 bp, Artificial sequence
  SiRNA target sequence
ctttgtgttctaatattgttctgcct

SEQ ID NO: 237913 - DNA, 26 bp, Artificial sequence
  SiRNA target sequence
tttgtgttctaatattgttctgcctt

SEQ ID NO: 237914 - DNA, 26 bp, Artificial sequence
  SiRNA target sequence
ttgtgttctaatattgttctgcctta

SEQ ID NO: 237915 - DNA, 26 bp, Artificial sequence
  SiRNA target sequence
tgtgttctaatattgttctgccttat

SEQ ID NO: 237916 - DNA, 26 bp, Artificial sequence
  SiRNA target sequence
gtgttctaatattgttctgccttata

SEQ ID NO: 237917 - DNA, 26 bp, Artificial sequence
  SiRNA target sequence
tgttctaatattgttctgccttatat

SEQ ID NO: 237918 - DNA, 26 bp, Artificial sequence
  SiRNA target sequence
gttctaatattgttctgccttatatg

SEQ ID NO: 237919 - DNA, 26 bp, Artificial sequence
  SiRNA target sequence
ttctaatattgttctgccttatatgg

SEQ ID NO: 237920 - DNA, 26 bp, Artificial sequence
  SiRNA target sequence
tctaatattgttctgccttatatggt

SEQ ID NO: 237921 - DNA, 26 bp, Artificial sequence
  SiRNA target sequence
ctaatattgttctgccttatatggtt

SEQ ID NO: 237922 - DNA, 26 bp, Artificial sequence
  SiRNA target sequence
taatattgttctgccttatatggttt

SEQ ID NO: 237923 - DNA, 26 bp, Artificial sequence
  SiRNA target sequence
aatattgttctgccttatatggtttt

SEQ ID NO: 237924 - DNA, 26 bp, Artificial sequence
  SiRNA target sequence
atattgttctgccttatatggtttta

SEQ ID NO: 237925 - DNA, 26 bp, Artificial sequence
  SiRNA target sequence
tattgttctgccttatatggttttat

SEQ ID NO: 237926 - DNA, 26 bp, Artificial sequence
  SiRNA target sequence
attgttctgccttatatggttttatt

SEQ ID NO: 237927 - DNA, 26 bp, Artificial sequence
  SiRNA target sequence
ttgttctgccttatatggttttattc

SEQ ID NO: 237928 - DNA, 26 bp, Artificial sequence
  SiRNA target sequence
tgttctgccttatatggttttattct

SEQ ID NO: 237929 - DNA, 26 bp, Artificial sequence
  SiRNA target sequence
gttctgccttatatggttttattctg

SEQ ID NO: 237930 - DNA, 26 bp, Artificial sequence
  SiRNA target sequence
ttctgccttatatggttttattctgt

SEQ ID NO: 237931 - DNA, 26 bp, Artificial sequence
  SiRNA target sequence
tctgccttatatggttttattctgtt

SEQ ID NO: 237932 - DNA, 26 bp, Artificial sequence
  SiRNA target sequence
ctgccttatatggttttattctgttt

SEQ ID NO: 237933 - DNA, 26 bp, Artificial sequence
  SiRNA target sequence
tgccttatatggttttattctgtttt

SEQ ID NO: 237934 - DNA, 26 bp, Artificial sequence
  SiRNA target sequence
gccttatatggttttattctgttttc

SEQ ID NO: 237935 - DNA, 26 bp, Artificial sequence
  SiRNA target sequence
ccttatatggttttattctgttttct

SEQ ID NO: 237936 - DNA, 26 bp, Artificial sequence
  SiRNA target sequence
cttatatggttttattctgttttcta

SEQ ID NO: 237937 - DNA, 26 bp, Artificial sequence
  SiRNA target sequence
ttatatggttttattctgttttctat

SEQ ID NO: 237938 - DNA, 26 bp, Artificial sequence
  SiRNA target sequence
tatatggttttattctgttttctatc

SEQ ID NO: 237939 - DNA, 26 bp, Artificial sequence
  SiRNA target sequence
atatggttttattctgttttctatct

SEQ ID NO: 237940 - DNA, 26 bp, Artificial sequence
  SiRNA target sequence
tatggttttattctgttttctatctc

SEQ ID NO: 237941 - DNA, 26 bp, Artificial sequence
  SiRNA target sequence
atggttttattctgttttctatctca

SEQ ID NO: 237942 - DNA, 26 bp, Artificial sequence
  SiRNA target sequence
tggttttattctgttttctatctcaa

SEQ ID NO: 237943 - DNA, 26 bp, Artificial sequence
  SiRNA target sequence
ggttttattctgttttctatctcaat

SEQ ID NO: 237944 - DNA, 26 bp, Artificial sequence
  SiRNA target sequence
gttttattctgttttctatctcaata

SEQ ID NO: 237945 - DNA, 26 bp, Artificial sequence
  SiRNA target sequence
ttttattctgttttctatctcaatag

SEQ ID NO: 237946 - DNA, 26 bp, Artificial sequence
  SiRNA target sequence
tttattctgttttctatctcaataga

SEQ ID NO: 237947 - DNA, 26 bp, Artificial sequence
  SiRNA target sequence
ttattctgttttctatctcaatagaa

SEQ ID NO: 237948 - DNA, 26 bp, Artificial sequence
  SiRNA target sequence
tattctgttttctatctcaatagaaa

SEQ ID NO: 237949 - DNA, 26 bp, Artificial sequence
  SiRNA target sequence
attctgttttctatctcaatagaaaa

SEQ ID NO: 237950 - DNA, 26 bp, Artificial sequence
  SiRNA target sequence
ttctgttttctatctcaatagaaaat

SEQ ID NO: 237951 - DNA, 26 bp, Artificial sequence
  SiRNA target sequence
tctgttttctatctcaatagaaaata

SEQ ID NO: 237952 - DNA, 26 bp, Artificial sequence
  SiRNA target sequence
ctgttttctatctcaatagaaaatat

SEQ ID NO: 237953 - DNA, 26 bp, Artificial sequence
  SiRNA target sequence
tgttttctatctcaatagaaaatata

SEQ ID NO: 237954 - DNA, 26 bp, Artificial sequence
  SiRNA target sequence
gttttctatctcaatagaaaatataa

SEQ ID NO: 237955 - DNA, 26 bp, Artificial sequence
  SiRNA target sequence
ttttctatctcaatagaaaatataaa

SEQ ID NO: 237956 - DNA, 26 bp, Artificial sequence
  SiRNA target sequence
tttctatctcaatagaaaatataaag

SEQ ID NO: 237957 - DNA, 26 bp, Artificial sequence
  SiRNA target sequence
ttctatctcaatagaaaatataaaga

SEQ ID NO: 237958 - DNA, 26 bp, Artificial sequence
  SiRNA target sequence
tctatctcaatagaaaatataaagaa

SEQ ID NO: 237959 - DNA, 26 bp, Artificial sequence
  SiRNA target sequence
ctatctcaatagaaaatataaagaat

SEQ ID NO: 237960 - DNA, 26 bp, Artificial sequence
  SiRNA target sequence
tatctcaatagaaaatataaagaatc

SEQ ID NO: 237961 - DNA, 26 bp, Artificial sequence
  SiRNA target sequence
atctcaatagaaaatataaagaatct

SEQ ID NO: 237962 - DNA, 26 bp, Artificial sequence
  SiRNA target sequence
tctcaatagaaaatataaagaatctg

SEQ ID NO: 237963 - DNA, 26 bp, Artificial sequence
  SiRNA target sequence
ctcaatagaaaatataaagaatctgt

SEQ ID NO: 237964 - DNA, 26 bp, Artificial sequence
  SiRNA target sequence
tcaatagaaaatataaagaatctgtc

SEQ ID NO: 237965 - DNA, 26 bp, Artificial sequence
  SiRNA target sequence
caatagaaaatataaagaatctgtcg

SEQ ID NO: 237966 - DNA, 26 bp, Artificial sequence
  SiRNA target sequence
aatagaaaatataaagaatctgtcga

SEQ ID NO: 237967 - DNA, 26 bp, Artificial sequence
  SiRNA target sequence
atagaaaatataaagaatctgtcgag

SEQ ID NO: 237968 - DNA, 26 bp, Artificial sequence
  SiRNA target sequence
tagaaaatataaagaatctgtcgaga

SEQ ID NO: 237969 - DNA, 26 bp, Artificial sequence
  SiRNA target sequence
agaaaatataaagaatctgtcgagaa

SEQ ID NO: 237970 - DNA, 26 bp, Artificial sequence
  SiRNA target sequence
gaaaatataaagaatctgtcgagaat

SEQ ID NO: 237971 - DNA, 26 bp, Artificial sequence
  SiRNA target sequence
aaaatataaagaatctgtcgagaata

SEQ ID NO: 237972 - DNA, 26 bp, Artificial sequence
  SiRNA target sequence
aaatataaagaatctgtcgagaataa

SEQ ID NO: 237973 - DNA, 26 bp, Artificial sequence
  SiRNA target sequence
aatataaagaatctgtcgagaataat

SEQ ID NO: 237974 - DNA, 26 bp, Artificial sequence
  SiRNA target sequence
atataaagaatctgtcgagaataatg

SEQ ID NO: 237975 - DNA, 26 bp, Artificial sequence
  SiRNA target sequence
tataaagaatctgtcgagaataatgc

SEQ ID NO: 237976 - DNA, 26 bp, Artificial sequence
  SiRNA target sequence
ataaagaatctgtcgagaataatgca

SEQ ID NO: 237977 - DNA, 26 bp, Artificial sequence
  SiRNA target sequence
taaagaatctgtcgagaataatgcac

SEQ ID NO: 237978 - DNA, 26 bp, Artificial sequence
  SiRNA target sequence
aaagaatctgtcgagaataatgcacc

SEQ ID NO: 237979 - DNA, 26 bp, Artificial sequence
  SiRNA target sequence
aagaatctgtcgagaataatgcacca

SEQ ID NO: 237980 - DNA, 26 bp, Artificial sequence
  SiRNA target sequence
agaatctgtcgagaataatgcaccaa

SEQ ID NO: 237981 - DNA, 26 bp, Artificial sequence
  SiRNA target sequence
gaatctgtcgagaataatgcaccaat

SEQ ID NO: 237982 - DNA, 26 bp, Artificial sequence
  SiRNA target sequence
aatctgtcgagaataatgcaccaatt

SEQ ID NO: 237983 - DNA, 26 bp, Artificial sequence
  SiRNA target sequence
atctgtcgagaataatgcaccaattg

SEQ ID NO: 237984 - DNA, 26 bp, Artificial sequence
  SiRNA target sequence
tctgtcgagaataatgcaccaattga

SEQ ID NO: 237985 - DNA, 26 bp, Artificial sequence
  SiRNA target sequence
ctgtcgagaataatgcaccaattgat

SEQ ID NO: 237986 - DNA, 26 bp, Artificial sequence
  SiRNA target sequence
tgtcgagaataatgcaccaattgata

SEQ ID NO: 237987 - DNA, 26 bp, Artificial sequence
  SiRNA target sequence
gtcgagaataatgcaccaattgatat

SEQ ID NO: 237988 - DNA, 26 bp, Artificial sequence
  SiRNA target sequence
tcgagaataatgcaccaattgatatt

SEQ ID NO: 237989 - DNA, 26 bp, Artificial sequence
  SiRNA target sequence
cgagaataatgcaccaattgatattg

SEQ ID NO: 237990 - DNA, 26 bp, Artificial sequence
  SiRNA target sequence
gagaataatgcaccaattgatattga

SEQ ID NO: 237991 - DNA, 26 bp, Artificial sequence
  SiRNA target sequence
agaataatgcaccaattgatattgat

SEQ ID NO: 237992 - DNA, 26 bp, Artificial sequence
  SiRNA target sequence
gaataatgcaccaattgatattgatt

SEQ ID NO: 237993 - DNA, 26 bp, Artificial sequence
  SiRNA target sequence
aataatgcaccaattgatattgattt

SEQ ID NO: 237994 - DNA, 26 bp, Artificial sequence
  SiRNA target sequence
ataatgcaccaattgatattgattta

SEQ ID NO: 237995 - DNA, 26 bp, Artificial sequence
  SiRNA target sequence
taatgcaccaattgatattgatttat

SEQ ID NO: 237996 - DNA, 26 bp, Artificial sequence
  SiRNA target sequence
aatgcaccaattgatattgatttatt

SEQ ID NO: 237997 - DNA, 26 bp, Artificial sequence
  SiRNA target sequence
atgcaccaattgatattgatttattc

SEQ ID NO: 237998 - DNA, 26 bp, Artificial sequence
  SiRNA target sequence
tgcaccaattgatattgatttattca

SEQ ID NO: 237999 - DNA, 26 bp, Artificial sequence
  SiRNA target sequence
gcaccaattgatattgatttattcac

SEQ ID NO: 238000 - DNA, 26 bp, Artificial sequence
  SiRNA target sequence
caccaattgatattgatttattcact

SEQ ID NO: 238001 - DNA, 26 bp, Artificial sequence
  SiRNA target sequence
accaattgatattgatttattcacta

SEQ ID NO: 238002 - DNA, 26 bp, Artificial sequence
  SiRNA target sequence
ccaattgatattgatttattcactag

SEQ ID NO: 238003 - DNA, 26 bp, Artificial sequence
  SiRNA target sequence
caattgatattgatttattcactagt

SEQ ID NO: 238004 - DNA, 26 bp, Artificial sequence
  SiRNA target sequence
aattgatattgatttattcactagtt

SEQ ID NO: 238005 - DNA, 26 bp, Artificial sequence
  SiRNA target sequence
attgatattgatttattcactagttc

SEQ ID NO: 238006 - DNA, 26 bp, Artificial sequence
  SiRNA target sequence
ttgatattgatttattcactagttca

SEQ ID NO: 238007 - DNA, 26 bp, Artificial sequence
  SiRNA target sequence
tgatattgatttattcactagttcaa

SEQ ID NO: 238008 - DNA, 26 bp, Artificial sequence
  SiRNA target sequence
gatattgatttattcactagttcaaa

SEQ ID NO: 238009 - DNA, 26 bp, Artificial sequence
  SiRNA target sequence
atattgatttattcactagttcaaaa

SEQ ID NO: 238010 - DNA, 26 bp, Artificial sequence
  SiRNA target sequence
tattgatttattcactagttcaaaag

SEQ ID NO: 238011 - DNA, 26 bp, Artificial sequence
  SiRNA target sequence
attgatttattcactagttcaaaagt

SEQ ID NO: 238012 - DNA, 26 bp, Artificial sequence
  SiRNA target sequence
ttgatttattcactagttcaaaagtc

SEQ ID NO: 238013 - DNA, 26 bp, Artificial sequence
  SiRNA target sequence
tgatttattcactagttcaaaagtca

SEQ ID NO: 238014 - DNA, 26 bp, Artificial sequence
  SiRNA target sequence
gatttattcactagttcaaaagtcaa

SEQ ID NO: 238015 - DNA, 26 bp, Artificial sequence
  SiRNA target sequence
atttattcactagttcaaaagtcaag

SEQ ID NO: 238016 - DNA, 26 bp, Artificial sequence
  SiRNA target sequence
tttattcactagttcaaaagtcaagg

SEQ ID NO: 238017 - DNA, 26 bp, Artificial sequence
  SiRNA target sequence
ttattcactagttcaaaagtcaaggc

SEQ ID NO: 238018 - DNA, 26 bp, Artificial sequence
  SiRNA target sequence
tattcactagttcaaaagtcaaggca

SEQ ID NO: 238019 - DNA, 26 bp, Artificial sequence
  SiRNA target sequence
attcactagttcaaaagtcaaggcac

SEQ ID NO: 238020 - DNA, 26 bp, Artificial sequence
  SiRNA target sequence
ttcactagttcaaaagtcaaggcacc

SEQ ID NO: 238021 - DNA, 26 bp, Artificial sequence
  SiRNA target sequence
tcactagttcaaaagtcaaggcacct

SEQ ID NO: 238022 - DNA, 26 bp, Artificial sequence
  SiRNA target sequence
cactagttcaaaagtcaaggcacctt

SEQ ID NO: 238023 - DNA, 26 bp, Artificial sequence
  SiRNA target sequence
actagttcaaaagtcaaggcaccttc

SEQ ID NO: 238024 - DNA, 26 bp, Artificial sequence
  SiRNA target sequence
ctagttcaaaagtcaaggcaccttct

SEQ ID NO: 238025 - DNA, 26 bp, Artificial sequence
  SiRNA target sequence
tagttcaaaagtcaaggcaccttctt

SEQ ID NO: 238026 - DNA, 26 bp, Artificial sequence
  SiRNA target sequence
agttcaaaagtcaaggcaccttcttc

SEQ ID NO: 238027 - DNA, 26 bp, Artificial sequence
  SiRNA target sequence
gttcaaaagtcaaggcaccttcttct

SEQ ID NO: 238028 - DNA, 26 bp, Artificial sequence
  SiRNA target sequence
ttcaaaagtcaaggcaccttcttctg

SEQ ID NO: 238029 - DNA, 26 bp, Artificial sequence
  SiRNA target sequence
tcaaaagtcaaggcaccttcttctga

SEQ ID NO: 238030 - DNA, 26 bp, Artificial sequence
  SiRNA target sequence
caaaagtcaaggcaccttcttctgaa

SEQ ID NO: 238031 - DNA, 26 bp, Artificial sequence
  SiRNA target sequence
aaaagtcaaggcaccttcttctgaac

SEQ ID NO: 238032 - DNA, 26 bp, Artificial sequence
  SiRNA target sequence
aaagtcaaggcaccttcttctgaacc

SEQ ID NO: 238033 - DNA, 26 bp, Artificial sequence
  SiRNA target sequence
aagtcaaggcaccttcttctgaacct

SEQ ID NO: 238034 - DNA, 26 bp, Artificial sequence
  SiRNA target sequence
agtcaaggcaccttcttctgaaccta

SEQ ID NO: 238035 - DNA, 26 bp, Artificial sequence
  SiRNA target sequence
gtcaaggcaccttcttctgaacctac

SEQ ID NO: 238036 - DNA, 26 bp, Artificial sequence
  SiRNA target sequence
tcaaggcaccttcttctgaacctact

SEQ ID NO: 238037 - DNA, 26 bp, Artificial sequence
  SiRNA target sequence
caaggcaccttcttctgaacctactg

SEQ ID NO: 238038 - DNA, 26 bp, Artificial sequence
  SiRNA target sequence
aaggcaccttcttctgaacctactgt

SEQ ID NO: 238039 - DNA, 26 bp, Artificial sequence
  SiRNA target sequence
aggcaccttcttctgaacctactgtt

SEQ ID NO: 238040 - DNA, 26 bp, Artificial sequence
  SiRNA target sequence
ggcaccttcttctgaacctactgttg

SEQ ID NO: 238041 - DNA, 26 bp, Artificial sequence
  SiRNA target sequence
gcaccttcttctgaacctactgttgc

SEQ ID NO: 238042 - DNA, 26 bp, Artificial sequence
  SiRNA target sequence
caccttcttctgaacctactgttgct

SEQ ID NO: 238043 - DNA, 26 bp, Artificial sequence
  SiRNA target sequence
accttcttctgaacctactgttgcta

SEQ ID NO: 238044 - DNA, 26 bp, Artificial sequence
  SiRNA target sequence
ccttcttctgaacctactgttgctac

SEQ ID NO: 238045 - DNA, 26 bp, Artificial sequence
  SiRNA target sequence
cttcttctgaacctactgttgctacc

SEQ ID NO: 238046 - DNA, 26 bp, Artificial sequence
  SiRNA target sequence
ttcttctgaacctactgttgctacca

SEQ ID NO: 238047 - DNA, 26 bp, Artificial sequence
  SiRNA target sequence
tcttctgaacctactgttgctaccaa

SEQ ID NO: 238048 - DNA, 26 bp, Artificial sequence
  SiRNA target sequence
cttctgaacctactgttgctaccaaa

SEQ ID NO: 238049 - DNA, 26 bp, Artificial sequence
  SiRNA target sequence
ttctgaacctactgttgctaccaaaa

SEQ ID NO: 238050 - DNA, 26 bp, Artificial sequence
  SiRNA target sequence
tctgaacctactgttgctaccaaaag

SEQ ID NO: 238051 - DNA, 26 bp, Artificial sequence
  SiRNA target sequence
ctgaacctactgttgctaccaaaagt

SEQ ID NO: 238052 - DNA, 26 bp, Artificial sequence
  SiRNA target sequence
tgaacctactgttgctaccaaaagtg

SEQ ID NO: 238053 - DNA, 26 bp, Artificial sequence
  SiRNA target sequence
gaacctactgttgctaccaaaagtgt

SEQ ID NO: 238054 - DNA, 26 bp, Artificial sequence
  SiRNA target sequence
aacctactgttgctaccaaaagtgtt

SEQ ID NO: 238055 - DNA, 26 bp, Artificial sequence
  SiRNA target sequence
acctactgttgctaccaaaagtgtta

SEQ ID NO: 238056 - DNA, 26 bp, Artificial sequence
  SiRNA target sequence
cctactgttgctaccaaaagtgttac

SEQ ID NO: 238057 - DNA, 26 bp, Artificial sequence
  SiRNA target sequence
ctactgttgctaccaaaagtgttact

SEQ ID NO: 238058 - DNA, 26 bp, Artificial sequence
  SiRNA target sequence
tactgttgctaccaaaagtgttacta

SEQ ID NO: 238059 - DNA, 26 bp, Artificial sequence
  SiRNA target sequence
actgttgctaccaaaagtgttactac

SEQ ID NO: 238060 - DNA, 26 bp, Artificial sequence
  SiRNA target sequence
ctgttgctaccaaaagtgttactaca

SEQ ID NO: 238061 - DNA, 26 bp, Artificial sequence
  SiRNA target sequence
tgttgctaccaaaagtgttactacag

SEQ ID NO: 238062 - DNA, 26 bp, Artificial sequence
  SiRNA target sequence
gttgctaccaaaagtgttactacaga

SEQ ID NO: 238063 - DNA, 26 bp, Artificial sequence
  SiRNA target sequence
ttgctaccaaaagtgttactacagaa

SEQ ID NO: 238064 - DNA, 26 bp, Artificial sequence
  SiRNA target sequence
tgctaccaaaagtgttactacagaag

SEQ ID NO: 238065 - DNA, 26 bp, Artificial sequence
  SiRNA target sequence
gctaccaaaagtgttactacagaaga

SEQ ID NO: 238066 - DNA, 26 bp, Artificial sequence
  SiRNA target sequence
ctaccaaaagtgttactacagaagaa

SEQ ID NO: 238067 - DNA, 26 bp, Artificial sequence
  SiRNA target sequence
taccaaaagtgttactacagaagaat

SEQ ID NO: 238068 - DNA, 26 bp, Artificial sequence
  SiRNA target sequence
accaaaagtgttactacagaagaata

SEQ ID NO: 238069 - DNA, 26 bp, Artificial sequence
  SiRNA target sequence
ccaaaagtgttactacagaagaataa

SEQ ID NO: 238070 - DNA, 27 bp, Artificial sequence
  SiRNA target sequence
atgtcagtagacaattcgaaagttcta

SEQ ID NO: 238071 - DNA, 27 bp, Artificial sequence
  SiRNA target sequence
tgtcagtagacaattcgaaagttctac

SEQ ID NO: 238072 - DNA, 27 bp, Artificial sequence
  SiRNA target sequence
gtcagtagacaattcgaaagttctaca

SEQ ID NO: 238073 - DNA, 27 bp, Artificial sequence
  SiRNA target sequence
tcagtagacaattcgaaagttctacaa

SEQ ID NO: 238074 - DNA, 27 bp, Artificial sequence
  SiRNA target sequence
cagtagacaattcgaaagttctacaaa

SEQ ID NO: 238075 - DNA, 27 bp, Artificial sequence
  SiRNA target sequence
agtagacaattcgaaagttctacaaaa

SEQ ID NO: 238076 - DNA, 27 bp, Artificial sequence
  SiRNA target sequence
gtagacaattcgaaagttctacaaaat

SEQ ID NO: 238077 - DNA, 27 bp, Artificial sequence
  SiRNA target sequence
tagacaattcgaaagttctacaaaata

SEQ ID NO: 238078 - DNA, 27 bp, Artificial sequence
  SiRNA target sequence
agacaattcgaaagttctacaaaataa

SEQ ID NO: 238079 - DNA, 27 bp, Artificial sequence
  SiRNA target sequence
gacaattcgaaagttctacaaaataac

SEQ ID NO: 238080 - DNA, 27 bp, Artificial sequence
  SiRNA target sequence
acaattcgaaagttctacaaaataacg

SEQ ID NO: 238081 - DNA, 27 bp, Artificial sequence
  SiRNA target sequence
caattcgaaagttctacaaaataacga

SEQ ID NO: 238082 - DNA, 27 bp, Artificial sequence
  SiRNA target sequence
aattcgaaagttctacaaaataacgaa

SEQ ID NO: 238083 - DNA, 27 bp, Artificial sequence
  SiRNA target sequence
attcgaaagttctacaaaataacgaaa

SEQ ID NO: 238084 - DNA, 27 bp, Artificial sequence
  SiRNA target sequence
ttcgaaagttctacaaaataacgaaaa

SEQ ID NO: 238085 - DNA, 27 bp, Artificial sequence
  SiRNA target sequence
tcgaaagttctacaaaataacgaaaac

SEQ ID NO: 238086 - DNA, 27 bp, Artificial sequence
  SiRNA target sequence
cgaaagttctacaaaataacgaaaact

SEQ ID NO: 238087 - DNA, 27 bp, Artificial sequence
  SiRNA target sequence
gaaagttctacaaaataacgaaaactc

SEQ ID NO: 238088 - DNA, 27 bp, Artificial sequence
  SiRNA target sequence
aaagttctacaaaataacgaaaactct

SEQ ID NO: 238089 - DNA, 27 bp, Artificial sequence
  SiRNA target sequence
aagttctacaaaataacgaaaactctg

SEQ ID NO: 238090 - DNA, 27 bp, Artificial sequence
  SiRNA target sequence
agttctacaaaataacgaaaactctgc

SEQ ID NO: 238091 - DNA, 27 bp, Artificial sequence
  SiRNA target sequence
gttctacaaaataacgaaaactctgct

SEQ ID NO: 238092 - DNA, 27 bp, Artificial sequence
  SiRNA target sequence
ttctacaaaataacgaaaactctgctc

SEQ ID NO: 238093 - DNA, 27 bp, Artificial sequence
  SiRNA target sequence
tctacaaaataacgaaaactctgctct

SEQ ID NO: 238094 - DNA, 27 bp, Artificial sequence
  SiRNA target sequence
ctacaaaataacgaaaactctgctctt

SEQ ID NO: 238095 - DNA, 27 bp, Artificial sequence
  SiRNA target sequence
tacaaaataacgaaaactctgctcttc

SEQ ID NO: 238096 - DNA, 27 bp, Artificial sequence
  SiRNA target sequence
acaaaataacgaaaactctgctcttcc

SEQ ID NO: 238097 - DNA, 27 bp, Artificial sequence
  SiRNA target sequence
caaaataacgaaaactctgctcttcct

SEQ ID NO: 238098 - DNA, 27 bp, Artificial sequence
  SiRNA target sequence
aaaataacgaaaactctgctcttccta

SEQ ID NO: 238099 - DNA, 27 bp, Artificial sequence
  SiRNA target sequence
aaataacgaaaactctgctcttcctac

SEQ ID NO: 238100 - DNA, 27 bp, Artificial sequence
  SiRNA target sequence
aataacgaaaactctgctcttcctaca

SEQ ID NO: 238101 - DNA, 27 bp, Artificial sequence
  SiRNA target sequence
ataacgaaaactctgctcttcctacag

SEQ ID NO: 238102 - DNA, 27 bp, Artificial sequence
  SiRNA target sequence
taacgaaaactctgctcttcctacaga

SEQ ID NO: 238103 - DNA, 27 bp, Artificial sequence
  SiRNA target sequence
aacgaaaactctgctcttcctacagaa

SEQ ID NO: 238104 - DNA, 27 bp, Artificial sequence
  SiRNA target sequence
acgaaaactctgctcttcctacagaag

SEQ ID NO: 238105 - DNA, 27 bp, Artificial sequence
  SiRNA target sequence
cgaaaactctgctcttcctacagaaga

SEQ ID NO: 238106 - DNA, 27 bp, Artificial sequence
  SiRNA target sequence
gaaaactctgctcttcctacagaagat

SEQ ID NO: 238107 - DNA, 27 bp, Artificial sequence
  SiRNA target sequence
aaaactctgctcttcctacagaagatg

SEQ ID NO: 238108 - DNA, 27 bp, Artificial sequence
  SiRNA target sequence
aaactctgctcttcctacagaagatga

SEQ ID NO: 238109 - DNA, 27 bp, Artificial sequence
  SiRNA target sequence
aactctgctcttcctacagaagatgaa

SEQ ID NO: 238110 - DNA, 27 bp, Artificial sequence
  SiRNA target sequence
actctgctcttcctacagaagatgaaa

SEQ ID NO: 238111 - DNA, 27 bp, Artificial sequence
  SiRNA target sequence
ctctgctcttcctacagaagatgaaat

SEQ ID NO: 238112 - DNA, 27 bp, Artificial sequence
  SiRNA target sequence
tctgctcttcctacagaagatgaaatt

SEQ ID NO: 238113 - DNA, 27 bp, Artificial sequence
  SiRNA target sequence
ctgctcttcctacagaagatgaaattg

SEQ ID NO: 238114 - DNA, 27 bp, Artificial sequence
  SiRNA target sequence
tgctcttcctacagaagatgaaattga

SEQ ID NO: 238115 - DNA, 27 bp, Artificial sequence
  SiRNA target sequence
gctcttcctacagaagatgaaattgag

SEQ ID NO: 238116 - DNA, 27 bp, Artificial sequence
  SiRNA target sequence
ctcttcctacagaagatgaaattgagt

SEQ ID NO: 238117 - DNA, 27 bp, Artificial sequence
  SiRNA target sequence
tcttcctacagaagatgaaattgagta

SEQ ID NO: 238118 - DNA, 27 bp, Artificial sequence
  SiRNA target sequence
cttcctacagaagatgaaattgagtat

SEQ ID NO: 238119 - DNA, 27 bp, Artificial sequence
  SiRNA target sequence
ttcctacagaagatgaaattgagtatg

SEQ ID NO: 238120 - DNA, 27 bp, Artificial sequence
  SiRNA target sequence
tcctacagaagatgaaattgagtatga

SEQ ID NO: 238121 - DNA, 27 bp, Artificial sequence
  SiRNA target sequence
cctacagaagatgaaattgagtatgag

SEQ ID NO: 238122 - DNA, 27 bp, Artificial sequence
  SiRNA target sequence
ctacagaagatgaaattgagtatgagg

SEQ ID NO: 238123 - DNA, 27 bp, Artificial sequence
  SiRNA target sequence
tacagaagatgaaattgagtatgaggc

SEQ ID NO: 238124 - DNA, 27 bp, Artificial sequence
  SiRNA target sequence
acagaagatgaaattgagtatgaggcc

SEQ ID NO: 238125 - DNA, 27 bp, Artificial sequence
  SiRNA target sequence
cagaagatgaaattgagtatgaggcca

SEQ ID NO: 238126 - DNA, 27 bp, Artificial sequence
  SiRNA target sequence
agaagatgaaattgagtatgaggccag

SEQ ID NO: 238127 - DNA, 27 bp, Artificial sequence
  SiRNA target sequence
gaagatgaaattgagtatgaggccagc

SEQ ID NO: 238128 - DNA, 27 bp, Artificial sequence
  SiRNA target sequence
aagatgaaattgagtatgaggccagca

SEQ ID NO: 238129 - DNA, 27 bp, Artificial sequence
  SiRNA target sequence
agatgaaattgagtatgaggccagcaa

SEQ ID NO: 238130 - DNA, 27 bp, Artificial sequence
  SiRNA target sequence
gatgaaattgagtatgaggccagcaat

SEQ ID NO: 238131 - DNA, 27 bp, Artificial sequence
  SiRNA target sequence
atgaaattgagtatgaggccagcaatg

SEQ ID NO: 238132 - DNA, 27 bp, Artificial sequence
  SiRNA target sequence
tgaaattgagtatgaggccagcaatgg

SEQ ID NO: 238133 - DNA, 27 bp, Artificial sequence
  SiRNA target sequence
gaaattgagtatgaggccagcaatggt

SEQ ID NO: 238134 - DNA, 27 bp, Artificial sequence
  SiRNA target sequence
aaattgagtatgaggccagcaatggtt

SEQ ID NO: 238135 - DNA, 27 bp, Artificial sequence
  SiRNA target sequence
aattgagtatgaggccagcaatggttc

SEQ ID NO: 238136 - DNA, 27 bp, Artificial sequence
  SiRNA target sequence
attgagtatgaggccagcaatggttct

SEQ ID NO: 238137 - DNA, 27 bp, Artificial sequence
  SiRNA target sequence
ttgagtatgaggccagcaatggttctg

SEQ ID NO: 238138 - DNA, 27 bp, Artificial sequence
  SiRNA target sequence
tgagtatgaggccagcaatggttctgg

SEQ ID NO: 238139 - DNA, 27 bp, Artificial sequence
  SiRNA target sequence
gagtatgaggccagcaatggttctggt

SEQ ID NO: 238140 - DNA, 27 bp, Artificial sequence
  SiRNA target sequence
agtatgaggccagcaatggttctggta

SEQ ID NO: 238141 - DNA, 27 bp, Artificial sequence
  SiRNA target sequence
gtatgaggccagcaatggttctggtat

SEQ ID NO: 238142 - DNA, 27 bp, Artificial sequence
  SiRNA target sequence
tatgaggccagcaatggttctggtata

SEQ ID NO: 238143 - DNA, 27 bp, Artificial sequence
  SiRNA target sequence
atgaggccagcaatggttctggtatat

SEQ ID NO: 238144 - DNA, 27 bp, Artificial sequence
  SiRNA target sequence
tgaggccagcaatggttctggtatata

SEQ ID NO: 238145 - DNA, 27 bp, Artificial sequence
  SiRNA target sequence
gaggccagcaatggttctggtatatat

SEQ ID NO: 238146 - DNA, 27 bp, Artificial sequence
  SiRNA target sequence
aggccagcaatggttctggtatatatt

SEQ ID NO: 238147 - DNA, 27 bp, Artificial sequence
  SiRNA target sequence
ggccagcaatggttctggtatatattc

SEQ ID NO: 238148 - DNA, 27 bp, Artificial sequence
  SiRNA target sequence
gccagcaatggttctggtatatattca

SEQ ID NO: 238149 - DNA, 27 bp, Artificial sequence
  SiRNA target sequence
ccagcaatggttctggtatatattcac

SEQ ID NO: 238150 - DNA, 27 bp, Artificial sequence
  SiRNA target sequence
cagcaatggttctggtatatattcact

SEQ ID NO: 238151 - DNA, 27 bp, Artificial sequence
  SiRNA target sequence
agcaatggttctggtatatattcactt

SEQ ID NO: 238152 - DNA, 27 bp, Artificial sequence
  SiRNA target sequence
gcaatggttctggtatatattcactta

SEQ ID NO: 238153 - DNA, 27 bp, Artificial sequence
  SiRNA target sequence
caatggttctggtatatattcacttat

SEQ ID NO: 238154 - DNA, 27 bp, Artificial sequence
  SiRNA target sequence
aatggttctggtatatattcacttatt

SEQ ID NO: 238155 - DNA, 27 bp, Artificial sequence
  SiRNA target sequence
atggttctggtatatattcacttatta

SEQ ID NO: 238156 - DNA, 27 bp, Artificial sequence
  SiRNA target sequence
tggttctggtatatattcacttattag

SEQ ID NO: 238157 - DNA, 27 bp, Artificial sequence
  SiRNA target sequence
ggttctggtatatattcacttattaga

SEQ ID NO: 238158 - DNA, 27 bp, Artificial sequence
  SiRNA target sequence
gttctggtatatattcacttattagag

SEQ ID NO: 238159 - DNA, 27 bp, Artificial sequence
  SiRNA target sequence
ttctggtatatattcacttattagagt

SEQ ID NO: 238160 - DNA, 27 bp, Artificial sequence
  SiRNA target sequence
tctggtatatattcacttattagagta

SEQ ID NO: 238161 - DNA, 27 bp, Artificial sequence
  SiRNA target sequence
ctggtatatattcacttattagagtag

SEQ ID NO: 238162 - DNA, 27 bp, Artificial sequence
  SiRNA target sequence
tggtatatattcacttattagagtagc

SEQ ID NO: 238163 - DNA, 27 bp, Artificial sequence
  SiRNA target sequence
ggtatatattcacttattagagtagca

SEQ ID NO: 238164 - DNA, 27 bp, Artificial sequence
  SiRNA target sequence
gtatatattcacttattagagtagcaa

SEQ ID NO: 238165 - DNA, 27 bp, Artificial sequence
  SiRNA target sequence
tatatattcacttattagagtagcaaa

SEQ ID NO: 238166 - DNA, 27 bp, Artificial sequence
  SiRNA target sequence
atatattcacttattagagtagcaaag

SEQ ID NO: 238167 - DNA, 27 bp, Artificial sequence
  SiRNA target sequence
tatattcacttattagagtagcaaagg

SEQ ID NO: 238168 - DNA, 27 bp, Artificial sequence
  SiRNA target sequence
atattcacttattagagtagcaaaggt

SEQ ID NO: 238169 - DNA, 27 bp, Artificial sequence
  SiRNA target sequence
tattcacttattagagtagcaaaggtt

SEQ ID NO: 238170 - DNA, 27 bp, Artificial sequence
  SiRNA target sequence
attcacttattagagtagcaaaggttg

SEQ ID NO: 238171 - DNA, 27 bp, Artificial sequence
  SiRNA target sequence
ttcacttattagagtagcaaaggttga

SEQ ID NO: 238172 - DNA, 27 bp, Artificial sequence
  SiRNA target sequence
tcacttattagagtagcaaaggttgag

SEQ ID NO: 238173 - DNA, 27 bp, Artificial sequence
  SiRNA target sequence
cacttattagagtagcaaaggttgaga

SEQ ID NO: 238174 - DNA, 27 bp, Artificial sequence
  SiRNA target sequence
acttattagagtagcaaaggttgagag

SEQ ID NO: 238175 - DNA, 27 bp, Artificial sequence
  SiRNA target sequence
cttattagagtagcaaaggttgagaga

SEQ ID NO: 238176 - DNA, 27 bp, Artificial sequence
  SiRNA target sequence
ttattagagtagcaaaggttgagagaa

SEQ ID NO: 238177 - DNA, 27 bp, Artificial sequence
  SiRNA target sequence
tattagagtagcaaaggttgagagaaa

SEQ ID NO: 238178 - DNA, 27 bp, Artificial sequence
  SiRNA target sequence
attagagtagcaaaggttgagagaaag

SEQ ID NO: 238179 - DNA, 27 bp, Artificial sequence
  SiRNA target sequence
ttagagtagcaaaggttgagagaaaga

SEQ ID NO: 238180 - DNA, 27 bp, Artificial sequence
  SiRNA target sequence
tagagtagcaaaggttgagagaaagat

SEQ ID NO: 238181 - DNA, 27 bp, Artificial sequence
  SiRNA target sequence
agagtagcaaaggttgagagaaagatg

SEQ ID NO: 238182 - DNA, 27 bp, Artificial sequence
  SiRNA target sequence
gagtagcaaaggttgagagaaagatgt

SEQ ID NO: 238183 - DNA, 27 bp, Artificial sequence
  SiRNA target sequence
agtagcaaaggttgagagaaagatgtt

SEQ ID NO: 238184 - DNA, 27 bp, Artificial sequence
  SiRNA target sequence
gtagcaaaggttgagagaaagatgttt

SEQ ID NO: 238185 - DNA, 27 bp, Artificial sequence
  SiRNA target sequence
tagcaaaggttgagagaaagatgtttt

SEQ ID NO: 238186 - DNA, 27 bp, Artificial sequence
  SiRNA target sequence
agcaaaggttgagagaaagatgttttg

SEQ ID NO: 238187 - DNA, 27 bp, Artificial sequence
  SiRNA target sequence
gcaaaggttgagagaaagatgttttgg

SEQ ID NO: 238188 - DNA, 27 bp, Artificial sequence
  SiRNA target sequence
caaaggttgagagaaagatgttttgga

SEQ ID NO: 238189 - DNA, 27 bp, Artificial sequence
  SiRNA target sequence
aaaggttgagagaaagatgttttggat

SEQ ID NO: 238190 - DNA, 27 bp, Artificial sequence
  SiRNA target sequence
aaggttgagagaaagatgttttggatc

SEQ ID NO: 238191 - DNA, 27 bp, Artificial sequence
  SiRNA target sequence
aggttgagagaaagatgttttggatca

SEQ ID NO: 238192 - DNA, 27 bp, Artificial sequence
  SiRNA target sequence
ggttgagagaaagatgttttggatcat

SEQ ID NO: 238193 - DNA, 27 bp, Artificial sequence
  SiRNA target sequence
gttgagagaaagatgttttggatcatg

SEQ ID NO: 238194 - DNA, 27 bp, Artificial sequence
  SiRNA target sequence
ttgagagaaagatgttttggatcatgg

SEQ ID NO: 238195 - DNA, 27 bp, Artificial sequence
  SiRNA target sequence
tgagagaaagatgttttggatcatggc

SEQ ID NO: 238196 - DNA, 27 bp, Artificial sequence
  SiRNA target sequence
gagagaaagatgttttggatcatggca

SEQ ID NO: 238197 - DNA, 27 bp, Artificial sequence
  SiRNA target sequence
agagaaagatgttttggatcatggcag

SEQ ID NO: 238198 - DNA, 27 bp, Artificial sequence
  SiRNA target sequence
gagaaagatgttttggatcatggcagc

SEQ ID NO: 238199 - DNA, 27 bp, Artificial sequence
  SiRNA target sequence
agaaagatgttttggatcatggcagct

SEQ ID NO: 238200 - DNA, 27 bp, Artificial sequence
  SiRNA target sequence
gaaagatgttttggatcatggcagcta

SEQ ID NO: 238201 - DNA, 27 bp, Artificial sequence
  SiRNA target sequence
aaagatgttttggatcatggcagctat

SEQ ID NO: 238202 - DNA, 27 bp, Artificial sequence
  SiRNA target sequence
aagatgttttggatcatggcagctatg

SEQ ID NO: 238203 - DNA, 27 bp, Artificial sequence
  SiRNA target sequence
agatgttttggatcatggcagctatgt

SEQ ID NO: 238204 - DNA, 27 bp, Artificial sequence
  SiRNA target sequence
gatgttttggatcatggcagctatgtt

SEQ ID NO: 238205 - DNA, 27 bp, Artificial sequence
  SiRNA target sequence
atgttttggatcatggcagctatgttc

SEQ ID NO: 238206 - DNA, 27 bp, Artificial sequence
  SiRNA target sequence
tgttttggatcatggcagctatgttct

SEQ ID NO: 238207 - DNA, 27 bp, Artificial sequence
  SiRNA target sequence
gttttggatcatggcagctatgttctt

SEQ ID NO: 238208 - DNA, 27 bp, Artificial sequence
  SiRNA target sequence
ttttggatcatggcagctatgttcttt

SEQ ID NO: 238209 - DNA, 27 bp, Artificial sequence
  SiRNA target sequence
tttggatcatggcagctatgttcttta

SEQ ID NO: 238210 - DNA, 27 bp, Artificial sequence
  SiRNA target sequence
ttggatcatggcagctatgttctttat

SEQ ID NO: 238211 - DNA, 27 bp, Artificial sequence
  SiRNA target sequence
tggatcatggcagctatgttctttatt

SEQ ID NO: 238212 - DNA, 27 bp, Artificial sequence
  SiRNA target sequence
ggatcatggcagctatgttctttatta

SEQ ID NO: 238213 - DNA, 27 bp, Artificial sequence
  SiRNA target sequence
gatcatggcagctatgttctttattat

SEQ ID NO: 238214 - DNA, 27 bp, Artificial sequence
  SiRNA target sequence
atcatggcagctatgttctttattatc

SEQ ID NO: 238215 - DNA, 27 bp, Artificial sequence
  SiRNA target sequence
tcatggcagctatgttctttattatct

SEQ ID NO: 238216 - DNA, 27 bp, Artificial sequence
  SiRNA target sequence
catggcagctatgttctttattatctc

SEQ ID NO: 238217 - DNA, 27 bp, Artificial sequence
  SiRNA target sequence
atggcagctatgttctttattatctcc

SEQ ID NO: 238218 - DNA, 27 bp, Artificial sequence
  SiRNA target sequence
tggcagctatgttctttattatctcct

SEQ ID NO: 238219 - DNA, 27 bp, Artificial sequence
  SiRNA target sequence
ggcagctatgttctttattatctcctt

SEQ ID NO: 238220 - DNA, 27 bp, Artificial sequence
  SiRNA target sequence
gcagctatgttctttattatctccttt

SEQ ID NO: 238221 - DNA, 27 bp, Artificial sequence
  SiRNA target sequence
cagctatgttctttattatctccttta

SEQ ID NO: 238222 - DNA, 27 bp, Artificial sequence
  SiRNA target sequence
agctatgttctttattatctcctttat

SEQ ID NO: 238223 - DNA, 27 bp, Artificial sequence
  SiRNA target sequence
gctatgttctttattatctcctttatt

SEQ ID NO: 238224 - DNA, 27 bp, Artificial sequence
  SiRNA target sequence
ctatgttctttattatctcctttattt

SEQ ID NO: 238225 - DNA, 27 bp, Artificial sequence
  SiRNA target sequence
tatgttctttattatctcctttattta

SEQ ID NO: 238226 - DNA, 27 bp, Artificial sequence
  SiRNA target sequence
atgttctttattatctcctttatttat

SEQ ID NO: 238227 - DNA, 27 bp, Artificial sequence
  SiRNA target sequence
tgttctttattatctcctttatttatt

SEQ ID NO: 238228 - DNA, 27 bp, Artificial sequence
  SiRNA target sequence
gttctttattatctcctttatttattc

SEQ ID NO: 238229 - DNA, 27 bp, Artificial sequence
  SiRNA target sequence
ttctttattatctcctttatttattcg

SEQ ID NO: 238230 - DNA, 27 bp, Artificial sequence
  SiRNA target sequence
tctttattatctcctttatttattcgg

SEQ ID NO: 238231 - DNA, 27 bp, Artificial sequence
  SiRNA target sequence
ctttattatctcctttatttattcggt

SEQ ID NO: 238232 - DNA, 27 bp, Artificial sequence
  SiRNA target sequence
tttattatctcctttatttattcggtg

SEQ ID NO: 238233 - DNA, 27 bp, Artificial sequence
  SiRNA target sequence
ttattatctcctttatttattcggtgg

SEQ ID NO: 238234 - DNA, 27 bp, Artificial sequence
  SiRNA target sequence
tattatctcctttatttattcggtggc

SEQ ID NO: 238235 - DNA, 27 bp, Artificial sequence
  SiRNA target sequence
attatctcctttatttattcggtggct

SEQ ID NO: 238236 - DNA, 27 bp, Artificial sequence
  SiRNA target sequence
ttatctcctttatttattcggtggcta

SEQ ID NO: 238237 - DNA, 27 bp, Artificial sequence
  SiRNA target sequence
tatctcctttatttattcggtggctag

SEQ ID NO: 238238 - DNA, 27 bp, Artificial sequence
  SiRNA target sequence
atctcctttatttattcggtggctaga

SEQ ID NO: 238239 - DNA, 27 bp, Artificial sequence
  SiRNA target sequence
tctcctttatttattcggtggctagag

SEQ ID NO: 238240 - DNA, 27 bp, Artificial sequence
  SiRNA target sequence
ctcctttatttattcggtggctagagt

SEQ ID NO: 238241 - DNA, 27 bp, Artificial sequence
  SiRNA target sequence
tcctttatttattcggtggctagagtg

SEQ ID NO: 238242 - DNA, 27 bp, Artificial sequence
  SiRNA target sequence
cctttatttattcggtggctagagtgc

SEQ ID NO: 238243 - DNA, 27 bp, Artificial sequence
  SiRNA target sequence
ctttatttattcggtggctagagtgct

SEQ ID NO: 238244 - DNA, 27 bp, Artificial sequence
  SiRNA target sequence
tttatttattcggtggctagagtgctt

SEQ ID NO: 238245 - DNA, 27 bp, Artificial sequence
  SiRNA target sequence
ttatttattcggtggctagagtgctta

SEQ ID NO: 238246 - DNA, 27 bp, Artificial sequence
  SiRNA target sequence
tatttattcggtggctagagtgcttaa

SEQ ID NO: 238247 - DNA, 27 bp, Artificial sequence
  SiRNA target sequence
atttattcggtggctagagtgcttaaa

SEQ ID NO: 238248 - DNA, 27 bp, Artificial sequence
  SiRNA target sequence
tttattcggtggctagagtgcttaaag

SEQ ID NO: 238249 - DNA, 27 bp, Artificial sequence
  SiRNA target sequence
ttattcggtggctagagtgcttaaaga

SEQ ID NO: 238250 - DNA, 27 bp, Artificial sequence
  SiRNA target sequence
tattcggtggctagagtgcttaaagat

SEQ ID NO: 238251 - DNA, 27 bp, Artificial sequence
  SiRNA target sequence
attcggtggctagagtgcttaaagatg

SEQ ID NO: 238252 - DNA, 27 bp, Artificial sequence
  SiRNA target sequence
ttcggtggctagagtgcttaaagatgc

SEQ ID NO: 238253 - DNA, 27 bp, Artificial sequence
  SiRNA target sequence
tcggtggctagagtgcttaaagatgcc

SEQ ID NO: 238254 - DNA, 27 bp, Artificial sequence
  SiRNA target sequence
cggtggctagagtgcttaaagatgccg

SEQ ID NO: 238255 - DNA, 27 bp, Artificial sequence
  SiRNA target sequence
ggtggctagagtgcttaaagatgccgc

SEQ ID NO: 238256 - DNA, 27 bp, Artificial sequence
  SiRNA target sequence
gtggctagagtgcttaaagatgccgct

SEQ ID NO: 238257 - DNA, 27 bp, Artificial sequence
  SiRNA target sequence
tggctagagtgcttaaagatgccgctg

SEQ ID NO: 238258 - DNA, 27 bp, Artificial sequence
  SiRNA target sequence
ggctagagtgcttaaagatgccgctgt

SEQ ID NO: 238259 - DNA, 27 bp, Artificial sequence
  SiRNA target sequence
gctagagtgcttaaagatgccgctgtt

SEQ ID NO: 238260 - DNA, 27 bp, Artificial sequence
  SiRNA target sequence
ctagagtgcttaaagatgccgctgtta

SEQ ID NO: 238261 - DNA, 27 bp, Artificial sequence
  SiRNA target sequence
tagagtgcttaaagatgccgctgttat

SEQ ID NO: 238262 - DNA, 27 bp, Artificial sequence
  SiRNA target sequence
agagtgcttaaagatgccgctgttatt

SEQ ID NO: 238263 - DNA, 27 bp, Artificial sequence
  SiRNA target sequence
gagtgcttaaagatgccgctgttattg

SEQ ID NO: 238264 - DNA, 27 bp, Artificial sequence
  SiRNA target sequence
agtgcttaaagatgccgctgttattgg

SEQ ID NO: 238265 - DNA, 27 bp, Artificial sequence
  SiRNA target sequence
gtgcttaaagatgccgctgttattggt

SEQ ID NO: 238266 - DNA, 27 bp, Artificial sequence
  SiRNA target sequence
tgcttaaagatgccgctgttattggta

SEQ ID NO: 238267 - DNA, 27 bp, Artificial sequence
  SiRNA target sequence
gcttaaagatgccgctgttattggtaa

SEQ ID NO: 238268 - DNA, 27 bp, Artificial sequence
  SiRNA target sequence
cttaaagatgccgctgttattggtaaa

SEQ ID NO: 238269 - DNA, 27 bp, Artificial sequence
  SiRNA target sequence
ttaaagatgccgctgttattggtaaac

SEQ ID NO: 238270 - DNA, 27 bp, Artificial sequence
  SiRNA target sequence
taaagatgccgctgttattggtaaaca

SEQ ID NO: 238271 - DNA, 27 bp, Artificial sequence
  SiRNA target sequence
aaagatgccgctgttattggtaaacaa

SEQ ID NO: 238272 - DNA, 27 bp, Artificial sequence
  SiRNA target sequence
aagatgccgctgttattggtaaacaac

SEQ ID NO: 238273 - DNA, 27 bp, Artificial sequence
  SiRNA target sequence
agatgccgctgttattggtaaacaact

SEQ ID NO: 238274 - DNA, 27 bp, Artificial sequence
  SiRNA target sequence
gatgccgctgttattggtaaacaactc

SEQ ID NO: 238275 - DNA, 27 bp, Artificial sequence
  SiRNA target sequence
atgccgctgttattggtaaacaactcc

SEQ ID NO: 238276 - DNA, 27 bp, Artificial sequence
  SiRNA target sequence
tgccgctgttattggtaaacaactccc

SEQ ID NO: 238277 - DNA, 27 bp, Artificial sequence
  SiRNA target sequence
gccgctgttattggtaaacaactccca

SEQ ID NO: 238278 - DNA, 27 bp, Artificial sequence
  SiRNA target sequence
ccgctgttattggtaaacaactcccag

SEQ ID NO: 238279 - DNA, 27 bp, Artificial sequence
  SiRNA target sequence
cgctgttattggtaaacaactcccagc

SEQ ID NO: 238280 - DNA, 27 bp, Artificial sequence
  SiRNA target sequence
gctgttattggtaaacaactcccagcg

SEQ ID NO: 238281 - DNA, 27 bp, Artificial sequence
  SiRNA target sequence
ctgttattggtaaacaactcccagcgt

SEQ ID NO: 238282 - DNA, 27 bp, Artificial sequence
  SiRNA target sequence
tgttattggtaaacaactcccagcgtc

SEQ ID NO: 238283 - DNA, 27 bp, Artificial sequence
  SiRNA target sequence
gttattggtaaacaactcccagcgtca

SEQ ID NO: 238284 - DNA, 27 bp, Artificial sequence
  SiRNA target sequence
ttattggtaaacaactcccagcgtcaa

SEQ ID NO: 238285 - DNA, 27 bp, Artificial sequence
  SiRNA target sequence
tattggtaaacaactcccagcgtcaat

SEQ ID NO: 238286 - DNA, 27 bp, Artificial sequence
  SiRNA target sequence
attggtaaacaactcccagcgtcaatt

SEQ ID NO: 238287 - DNA, 27 bp, Artificial sequence
  SiRNA target sequence
ttggtaaacaactcccagcgtcaattt

SEQ ID NO: 238288 - DNA, 27 bp, Artificial sequence
  SiRNA target sequence
tggtaaacaactcccagcgtcaatttt

SEQ ID NO: 238289 - DNA, 27 bp, Artificial sequence
  SiRNA target sequence
ggtaaacaactcccagcgtcaattttc

SEQ ID NO: 238290 - DNA, 27 bp, Artificial sequence
  SiRNA target sequence
gtaaacaactcccagcgtcaattttct

SEQ ID NO: 238291 - DNA, 27 bp, Artificial sequence
  SiRNA target sequence
taaacaactcccagcgtcaattttctt

SEQ ID NO: 238292 - DNA, 27 bp, Artificial sequence
  SiRNA target sequence
aaacaactcccagcgtcaattttcttt

SEQ ID NO: 238293 - DNA, 27 bp, Artificial sequence
  SiRNA target sequence
aacaactcccagcgtcaattttctttt

SEQ ID NO: 238294 - DNA, 27 bp, Artificial sequence
  SiRNA target sequence
acaactcccagcgtcaattttcttttt

SEQ ID NO: 238295 - DNA, 27 bp, Artificial sequence
  SiRNA target sequence
caactcccagcgtcaattttctttttg

SEQ ID NO: 238296 - DNA, 27 bp, Artificial sequence
  SiRNA target sequence
aactcccagcgtcaattttctttttga

SEQ ID NO: 238297 - DNA, 27 bp, Artificial sequence
  SiRNA target sequence
actcccagcgtcaattttctttttgaa

SEQ ID NO: 238298 - DNA, 27 bp, Artificial sequence
  SiRNA target sequence
ctcccagcgtcaattttctttttgaaa

SEQ ID NO: 238299 - DNA, 27 bp, Artificial sequence
  SiRNA target sequence
tcccagcgtcaattttctttttgaaat

SEQ ID NO: 238300 - DNA, 27 bp, Artificial sequence
  SiRNA target sequence
cccagcgtcaattttctttttgaaatt

SEQ ID NO: 238301 - DNA, 27 bp, Artificial sequence
  SiRNA target sequence
ccagcgtcaattttctttttgaaattt

SEQ ID NO: 238302 - DNA, 27 bp, Artificial sequence
  SiRNA target sequence
cagcgtcaattttctttttgaaatttg

SEQ ID NO: 238303 - DNA, 27 bp, Artificial sequence
  SiRNA target sequence
agcgtcaattttctttttgaaatttgt

SEQ ID NO: 238304 - DNA, 27 bp, Artificial sequence
  SiRNA target sequence
gcgtcaattttctttttgaaatttgtt

SEQ ID NO: 238305 - DNA, 27 bp, Artificial sequence
  SiRNA target sequence
cgtcaattttctttttgaaatttgtta

SEQ ID NO: 238306 - DNA, 27 bp, Artificial sequence
  SiRNA target sequence
gtcaattttctttttgaaatttgttat

SEQ ID NO: 238307 - DNA, 27 bp, Artificial sequence
  SiRNA target sequence
tcaattttctttttgaaatttgttatt

SEQ ID NO: 238308 - DNA, 27 bp, Artificial sequence
  SiRNA target sequence
caattttctttttgaaatttgttatta

SEQ ID NO: 238309 - DNA, 27 bp, Artificial sequence
  SiRNA target sequence
aattttctttttgaaatttgttattat

SEQ ID NO: 238310 - DNA, 27 bp, Artificial sequence
  SiRNA target sequence
attttctttttgaaatttgttattatc

SEQ ID NO: 238311 - DNA, 27 bp, Artificial sequence
  SiRNA target sequence
ttttctttttgaaatttgttattatcc

SEQ ID NO: 238312 - DNA, 27 bp, Artificial sequence
  SiRNA target sequence
tttctttttgaaatttgttattatcct

SEQ ID NO: 238313 - DNA, 27 bp, Artificial sequence
  SiRNA target sequence
ttctttttgaaatttgttattatcctt

SEQ ID NO: 238314 - DNA, 27 bp, Artificial sequence
  SiRNA target sequence
tctttttgaaatttgttattatccttc

SEQ ID NO: 238315 - DNA, 27 bp, Artificial sequence
  SiRNA target sequence
ctttttgaaatttgttattatccttcc

SEQ ID NO: 238316 - DNA, 27 bp, Artificial sequence
  SiRNA target sequence
tttttgaaatttgttattatccttccg

SEQ ID NO: 238317 - DNA, 27 bp, Artificial sequence
  SiRNA target sequence
ttttgaaatttgttattatccttccgt

SEQ ID NO: 238318 - DNA, 27 bp, Artificial sequence
  SiRNA target sequence
tttgaaatttgttattatccttccgtt

SEQ ID NO: 238319 - DNA, 27 bp, Artificial sequence
  SiRNA target sequence
ttgaaatttgttattatccttccgttc

SEQ ID NO: 238320 - DNA, 27 bp, Artificial sequence
  SiRNA target sequence
tgaaatttgttattatccttccgttct

SEQ ID NO: 238321 - DNA, 27 bp, Artificial sequence
  SiRNA target sequence
gaaatttgttattatccttccgttctc

SEQ ID NO: 238322 - DNA, 27 bp, Artificial sequence
  SiRNA target sequence
aaatttgttattatccttccgttctca

SEQ ID NO: 238323 - DNA, 27 bp, Artificial sequence
  SiRNA target sequence
aatttgttattatccttccgttctcat

SEQ ID NO: 238324 - DNA, 27 bp, Artificial sequence
  SiRNA target sequence
atttgttattatccttccgttctcatt

SEQ ID NO: 238325 - DNA, 27 bp, Artificial sequence
  SiRNA target sequence
tttgttattatccttccgttctcattt

SEQ ID NO: 238326 - DNA, 27 bp, Artificial sequence
  SiRNA target sequence
ttgttattatccttccgttctcattta

SEQ ID NO: 238327 - DNA, 27 bp, Artificial sequence
  SiRNA target sequence
tgttattatccttccgttctcatttat

SEQ ID NO: 238328 - DNA, 27 bp, Artificial sequence
  SiRNA target sequence
gttattatccttccgttctcatttatt

SEQ ID NO: 238329 - DNA, 27 bp, Artificial sequence
  SiRNA target sequence
ttattatccttccgttctcatttattt

SEQ ID NO: 238330 - DNA, 27 bp, Artificial sequence
  SiRNA target sequence
tattatccttccgttctcatttatttc

SEQ ID NO: 238331 - DNA, 27 bp, Artificial sequence
  SiRNA target sequence
attatccttccgttctcatttatttca

SEQ ID NO: 238332 - DNA, 27 bp, Artificial sequence
  SiRNA target sequence
ttatccttccgttctcatttatttcag

SEQ ID NO: 238333 - DNA, 27 bp, Artificial sequence
  SiRNA target sequence
tatccttccgttctcatttatttcagt

SEQ ID NO: 238334 - DNA, 27 bp, Artificial sequence
  SiRNA target sequence
atccttccgttctcatttatttcagta

SEQ ID NO: 238335 - DNA, 27 bp, Artificial sequence
  SiRNA target sequence
tccttccgttctcatttatttcagtag

SEQ ID NO: 238336 - DNA, 27 bp, Artificial sequence
  SiRNA target sequence
ccttccgttctcatttatttcagtagg

SEQ ID NO: 238337 - DNA, 27 bp, Artificial sequence
  SiRNA target sequence
cttccgttctcatttatttcagtaggt

SEQ ID NO: 238338 - DNA, 27 bp, Artificial sequence
  SiRNA target sequence
ttccgttctcatttatttcagtaggta

SEQ ID NO: 238339 - DNA, 27 bp, Artificial sequence
  SiRNA target sequence
tccgttctcatttatttcagtaggtat

SEQ ID NO: 238340 - DNA, 27 bp, Artificial sequence
  SiRNA target sequence
ccgttctcatttatttcagtaggtatt

SEQ ID NO: 238341 - DNA, 27 bp, Artificial sequence
  SiRNA target sequence
cgttctcatttatttcagtaggtatta

SEQ ID NO: 238342 - DNA, 27 bp, Artificial sequence
  SiRNA target sequence
gttctcatttatttcagtaggtattat

SEQ ID NO: 238343 - DNA, 27 bp, Artificial sequence
  SiRNA target sequence
ttctcatttatttcagtaggtattatt

SEQ ID NO: 238344 - DNA, 27 bp, Artificial sequence
  SiRNA target sequence
tctcatttatttcagtaggtattattc

SEQ ID NO: 238345 - DNA, 27 bp, Artificial sequence
  SiRNA target sequence
ctcatttatttcagtaggtattattca

SEQ ID NO: 238346 - DNA, 27 bp, Artificial sequence
  SiRNA target sequence
tcatttatttcagtaggtattattcag

SEQ ID NO: 238347 - DNA, 27 bp, Artificial sequence
  SiRNA target sequence
catttatttcagtaggtattattcaga

SEQ ID NO: 238348 - DNA, 27 bp, Artificial sequence
  SiRNA target sequence
atttatttcagtaggtattattcagaa

SEQ ID NO: 238349 - DNA, 27 bp, Artificial sequence
  SiRNA target sequence
tttatttcagtaggtattattcagaaa

SEQ ID NO: 238350 - DNA, 27 bp, Artificial sequence
  SiRNA target sequence
ttatttcagtaggtattattcagaaag

SEQ ID NO: 238351 - DNA, 27 bp, Artificial sequence
  SiRNA target sequence
tatttcagtaggtattattcagaaagc

SEQ ID NO: 238352 - DNA, 27 bp, Artificial sequence
  SiRNA target sequence
atttcagtaggtattattcagaaagct

SEQ ID NO: 238353 - DNA, 27 bp, Artificial sequence
  SiRNA target sequence
tttcagtaggtattattcagaaagctt

SEQ ID NO: 238354 - DNA, 27 bp, Artificial sequence
  SiRNA target sequence
ttcagtaggtattattcagaaagcttt

SEQ ID NO: 238355 - DNA, 27 bp, Artificial sequence
  SiRNA target sequence
tcagtaggtattattcagaaagcttta

SEQ ID NO: 238356 - DNA, 27 bp, Artificial sequence
  SiRNA target sequence
cagtaggtattattcagaaagctttag

SEQ ID NO: 238357 - DNA, 27 bp, Artificial sequence
  SiRNA target sequence
agtaggtattattcagaaagctttaga

SEQ ID NO: 238358 - DNA, 27 bp, Artificial sequence
  SiRNA target sequence
gtaggtattattcagaaagctttagat

SEQ ID NO: 238359 - DNA, 27 bp, Artificial sequence
  SiRNA target sequence
taggtattattcagaaagctttagata

SEQ ID NO: 238360 - DNA, 27 bp, Artificial sequence
  SiRNA target sequence
aggtattattcagaaagctttagataa

SEQ ID NO: 238361 - DNA, 27 bp, Artificial sequence
  SiRNA target sequence
ggtattattcagaaagctttagataaa

SEQ ID NO: 238362 - DNA, 27 bp, Artificial sequence
  SiRNA target sequence
gtattattcagaaagctttagataaat

SEQ ID NO: 238363 - DNA, 27 bp, Artificial sequence
  SiRNA target sequence
tattattcagaaagctttagataaata

SEQ ID NO: 238364 - DNA, 27 bp, Artificial sequence
  SiRNA target sequence
attattcagaaagctttagataaatat

SEQ ID NO: 238365 - DNA, 27 bp, Artificial sequence
  SiRNA target sequence
ttattcagaaagctttagataaatatc

SEQ ID NO: 238366 - DNA, 27 bp, Artificial sequence
  SiRNA target sequence
tattcagaaagctttagataaatatcc

SEQ ID NO: 238367 - DNA, 27 bp, Artificial sequence
  SiRNA target sequence
attcagaaagctttagataaatatcct

SEQ ID NO: 238368 - DNA, 27 bp, Artificial sequence
  SiRNA target sequence
ttcagaaagctttagataaatatcctt

SEQ ID NO: 238369 - DNA, 27 bp, Artificial sequence
  SiRNA target sequence
tcagaaagctttagataaatatccttt

SEQ ID NO: 238370 - DNA, 27 bp, Artificial sequence
  SiRNA target sequence
cagaaagctttagataaatatcctttt

SEQ ID NO: 238371 - DNA, 27 bp, Artificial sequence
  SiRNA target sequence
agaaagctttagataaatatcctttta

SEQ ID NO: 238372 - DNA, 27 bp, Artificial sequence
  SiRNA target sequence
gaaagctttagataaatatccttttac

SEQ ID NO: 238373 - DNA, 27 bp, Artificial sequence
  SiRNA target sequence
aaagctttagataaatatccttttaca

SEQ ID NO: 238374 - DNA, 27 bp, Artificial sequence
  SiRNA target sequence
aagctttagataaatatccttttacaa

SEQ ID NO: 238375 - DNA, 27 bp, Artificial sequence
  SiRNA target sequence
agctttagataaatatccttttacaaa

SEQ ID NO: 238376 - DNA, 27 bp, Artificial sequence
  SiRNA target sequence
gctttagataaatatccttttacaaaa

SEQ ID NO: 238377 - DNA, 27 bp, Artificial sequence
  SiRNA target sequence
ctttagataaatatccttttacaaaaa

SEQ ID NO: 238378 - DNA, 27 bp, Artificial sequence
  SiRNA target sequence
tttagataaatatccttttacaaaaat

SEQ ID NO: 238379 - DNA, 27 bp, Artificial sequence
  SiRNA target sequence
ttagataaatatccttttacaaaaata

SEQ ID NO: 238380 - DNA, 27 bp, Artificial sequence
  SiRNA target sequence
tagataaatatccttttacaaaaatat

SEQ ID NO: 238381 - DNA, 27 bp, Artificial sequence
  SiRNA target sequence
agataaatatccttttacaaaaatatt

SEQ ID NO: 238382 - DNA, 27 bp, Artificial sequence
  SiRNA target sequence
gataaatatccttttacaaaaatattt

SEQ ID NO: 238383 - DNA, 27 bp, Artificial sequence
  SiRNA target sequence
ataaatatccttttacaaaaatatttg

SEQ ID NO: 238384 - DNA, 27 bp, Artificial sequence
  SiRNA target sequence
taaatatccttttacaaaaatatttga

SEQ ID NO: 238385 - DNA, 27 bp, Artificial sequence
  SiRNA target sequence
aaatatccttttacaaaaatatttgat

SEQ ID NO: 238386 - DNA, 27 bp, Artificial sequence
  SiRNA target sequence
aatatccttttacaaaaatatttgatg

SEQ ID NO: 238387 - DNA, 27 bp, Artificial sequence
  SiRNA target sequence
atatccttttacaaaaatatttgatgt

SEQ ID NO: 238388 - DNA, 27 bp, Artificial sequence
  SiRNA target sequence
tatccttttacaaaaatatttgatgta

SEQ ID NO: 238389 - DNA, 27 bp, Artificial sequence
  SiRNA target sequence
atccttttacaaaaatatttgatgtaa

SEQ ID NO: 238390 - DNA, 27 bp, Artificial sequence
  SiRNA target sequence
tccttttacaaaaatatttgatgtaac

SEQ ID NO: 238391 - DNA, 27 bp, Artificial sequence
  SiRNA target sequence
ccttttacaaaaatatttgatgtaact

SEQ ID NO: 238392 - DNA, 27 bp, Artificial sequence
  SiRNA target sequence
cttttacaaaaatatttgatgtaactt

SEQ ID NO: 238393 - DNA, 27 bp, Artificial sequence
  SiRNA target sequence
ttttacaaaaatatttgatgtaacttt

SEQ ID NO: 238394 - DNA, 27 bp, Artificial sequence
  SiRNA target sequence
tttacaaaaatatttgatgtaacttta

SEQ ID NO: 238395 - DNA, 27 bp, Artificial sequence
  SiRNA target sequence
ttacaaaaatatttgatgtaactttaa

SEQ ID NO: 238396 - DNA, 27 bp, Artificial sequence
  SiRNA target sequence
tacaaaaatatttgatgtaactttaat

SEQ ID NO: 238397 - DNA, 27 bp, Artificial sequence
  SiRNA target sequence
acaaaaatatttgatgtaactttaata

SEQ ID NO: 238398 - DNA, 27 bp, Artificial sequence
  SiRNA target sequence
caaaaatatttgatgtaactttaatag

SEQ ID NO: 238399 - DNA, 27 bp, Artificial sequence
  SiRNA target sequence
aaaaatatttgatgtaactttaatagt

SEQ ID NO: 238400 - DNA, 27 bp, Artificial sequence
  SiRNA target sequence
aaaatatttgatgtaactttaatagtt

SEQ ID NO: 238401 - DNA, 27 bp, Artificial sequence
  SiRNA target sequence
aaatatttgatgtaactttaatagttt

SEQ ID NO: 238402 - DNA, 27 bp, Artificial sequence
  SiRNA target sequence
aatatttgatgtaactttaatagtttt

SEQ ID NO: 238403 - DNA, 27 bp, Artificial sequence
  SiRNA target sequence
atatttgatgtaactttaatagttttc

SEQ ID NO: 238404 - DNA, 27 bp, Artificial sequence
  SiRNA target sequence
tatttgatgtaactttaatagttttcg

SEQ ID NO: 238405 - DNA, 27 bp, Artificial sequence
  SiRNA target sequence
atttgatgtaactttaatagttttcgc

SEQ ID NO: 238406 - DNA, 27 bp, Artificial sequence
  SiRNA target sequence
tttgatgtaactttaatagttttcgct

SEQ ID NO: 238407 - DNA, 27 bp, Artificial sequence
  SiRNA target sequence
ttgatgtaactttaatagttttcgctg

SEQ ID NO: 238408 - DNA, 27 bp, Artificial sequence
  SiRNA target sequence
tgatgtaactttaatagttttcgctgt

SEQ ID NO: 238409 - DNA, 27 bp, Artificial sequence
  SiRNA target sequence
gatgtaactttaatagttttcgctgtt

SEQ ID NO: 238410 - DNA, 27 bp, Artificial sequence
  SiRNA target sequence
atgtaactttaatagttttcgctgttg

SEQ ID NO: 238411 - DNA, 27 bp, Artificial sequence
  SiRNA target sequence
tgtaactttaatagttttcgctgttgc

SEQ ID NO: 238412 - DNA, 27 bp, Artificial sequence
  SiRNA target sequence
gtaactttaatagttttcgctgttgca

SEQ ID NO: 238413 - DNA, 27 bp, Artificial sequence
  SiRNA target sequence
taactttaatagttttcgctgttgcat

SEQ ID NO: 238414 - DNA, 27 bp, Artificial sequence
  SiRNA target sequence
aactttaatagttttcgctgttgcatt

SEQ ID NO: 238415 - DNA, 27 bp, Artificial sequence
  SiRNA target sequence
actttaatagttttcgctgttgcattt

SEQ ID NO: 238416 - DNA, 27 bp, Artificial sequence
  SiRNA target sequence
ctttaatagttttcgctgttgcattta

SEQ ID NO: 238417 - DNA, 27 bp, Artificial sequence
  SiRNA target sequence
tttaatagttttcgctgttgcatttac

SEQ ID NO: 238418 - DNA, 27 bp, Artificial sequence
  SiRNA target sequence
ttaatagttttcgctgttgcatttact

SEQ ID NO: 238419 - DNA, 27 bp, Artificial sequence
  SiRNA target sequence
taatagttttcgctgttgcatttacta

SEQ ID NO: 238420 - DNA, 27 bp, Artificial sequence
  SiRNA target sequence
aatagttttcgctgttgcatttactat

SEQ ID NO: 238421 - DNA, 27 bp, Artificial sequence
  SiRNA target sequence
atagttttcgctgttgcatttactata

SEQ ID NO: 238422 - DNA, 27 bp, Artificial sequence
  SiRNA target sequence
tagttttcgctgttgcatttactatac

SEQ ID NO: 238423 - DNA, 27 bp, Artificial sequence
  SiRNA target sequence
agttttcgctgttgcatttactatact

SEQ ID NO: 238424 - DNA, 27 bp, Artificial sequence
  SiRNA target sequence
gttttcgctgttgcatttactatactt

SEQ ID NO: 238425 - DNA, 27 bp, Artificial sequence
  SiRNA target sequence
ttttcgctgttgcatttactatacttg

SEQ ID NO: 238426 - DNA, 27 bp, Artificial sequence
  SiRNA target sequence
tttcgctgttgcatttactatacttgg

SEQ ID NO: 238427 - DNA, 27 bp, Artificial sequence
  SiRNA target sequence
ttcgctgttgcatttactatacttggt

SEQ ID NO: 238428 - DNA, 27 bp, Artificial sequence
  SiRNA target sequence
tcgctgttgcatttactatacttggta

SEQ ID NO: 238429 - DNA, 27 bp, Artificial sequence
  SiRNA target sequence
cgctgttgcatttactatacttggtag

SEQ ID NO: 238430 - DNA, 27 bp, Artificial sequence
  SiRNA target sequence
gctgttgcatttactatacttggtagt

SEQ ID NO: 238431 - DNA, 27 bp, Artificial sequence
  SiRNA target sequence
ctgttgcatttactatacttggtagtt

SEQ ID NO: 238432 - DNA, 27 bp, Artificial sequence
  SiRNA target sequence
tgttgcatttactatacttggtagttt

SEQ ID NO: 238433 - DNA, 27 bp, Artificial sequence
  SiRNA target sequence
gttgcatttactatacttggtagttta

SEQ ID NO: 238434 - DNA, 27 bp, Artificial sequence
  SiRNA target sequence
ttgcatttactatacttggtagtttat

SEQ ID NO: 238435 - DNA, 27 bp, Artificial sequence
  SiRNA target sequence
tgcatttactatacttggtagtttatt

SEQ ID NO: 238436 - DNA, 27 bp, Artificial sequence
  SiRNA target sequence
gcatttactatacttggtagtttatta

SEQ ID NO: 238437 - DNA, 27 bp, Artificial sequence
  SiRNA target sequence
catttactatacttggtagtttattac

SEQ ID NO: 238438 - DNA, 27 bp, Artificial sequence
  SiRNA target sequence
atttactatacttggtagtttattact

SEQ ID NO: 238439 - DNA, 27 bp, Artificial sequence
  SiRNA target sequence
tttactatacttggtagtttattactt

SEQ ID NO: 238440 - DNA, 27 bp, Artificial sequence
  SiRNA target sequence
ttactatacttggtagtttattacttc

SEQ ID NO: 238441 - DNA, 27 bp, Artificial sequence
  SiRNA target sequence
tactatacttggtagtttattacttcc

SEQ ID NO: 238442 - DNA, 27 bp, Artificial sequence
  SiRNA target sequence
actatacttggtagtttattacttccc

SEQ ID NO: 238443 - DNA, 27 bp, Artificial sequence
  SiRNA target sequence
ctatacttggtagtttattacttccct

SEQ ID NO: 238444 - DNA, 27 bp, Artificial sequence
  SiRNA target sequence
tatacttggtagtttattacttccctt

SEQ ID NO: 238445 - DNA, 27 bp, Artificial sequence
  SiRNA target sequence
atacttggtagtttattacttcccttt

SEQ ID NO: 238446 - DNA, 27 bp, Artificial sequence
  SiRNA target sequence
tacttggtagtttattacttcccttta

SEQ ID NO: 238447 - DNA, 27 bp, Artificial sequence
  SiRNA target sequence
acttggtagtttattacttccctttag

SEQ ID NO: 238448 - DNA, 27 bp, Artificial sequence
  SiRNA target sequence
cttggtagtttattacttccctttagt

SEQ ID NO: 238449 - DNA, 27 bp, Artificial sequence
  SiRNA target sequence
ttggtagtttattacttccctttagtg

SEQ ID NO: 238450 - DNA, 27 bp, Artificial sequence
  SiRNA target sequence
tggtagtttattacttccctttagtga

SEQ ID NO: 238451 - DNA, 27 bp, Artificial sequence
  SiRNA target sequence
ggtagtttattacttccctttagtgat

SEQ ID NO: 238452 - DNA, 27 bp, Artificial sequence
  SiRNA target sequence
gtagtttattacttccctttagtgatt

SEQ ID NO: 238453 - DNA, 27 bp, Artificial sequence
  SiRNA target sequence
tagtttattacttccctttagtgatta

SEQ ID NO: 238454 - DNA, 27 bp, Artificial sequence
  SiRNA target sequence
agtttattacttccctttagtgattat

SEQ ID NO: 238455 - DNA, 27 bp, Artificial sequence
  SiRNA target sequence
gtttattacttccctttagtgattata

SEQ ID NO: 238456 - DNA, 27 bp, Artificial sequence
  SiRNA target sequence
tttattacttccctttagtgattatat

SEQ ID NO: 238457 - DNA, 27 bp, Artificial sequence
  SiRNA target sequence
ttattacttccctttagtgattatatt

SEQ ID NO: 238458 - DNA, 27 bp, Artificial sequence
  SiRNA target sequence
tattacttccctttagtgattatattc

SEQ ID NO: 238459 - DNA, 27 bp, Artificial sequence
  SiRNA target sequence
attacttccctttagtgattatattca

SEQ ID NO: 238460 - DNA, 27 bp, Artificial sequence
  SiRNA target sequence
ttacttccctttagtgattatattcag

SEQ ID NO: 238461 - DNA, 27 bp, Artificial sequence
  SiRNA target sequence
tacttccctttagtgattatattcaga

SEQ ID NO: 238462 - DNA, 27 bp, Artificial sequence
  SiRNA target sequence
acttccctttagtgattatattcagat

SEQ ID NO: 238463 - DNA, 27 bp, Artificial sequence
  SiRNA target sequence
cttccctttagtgattatattcagatt

SEQ ID NO: 238464 - DNA, 27 bp, Artificial sequence
  SiRNA target sequence
ttccctttagtgattatattcagattc

SEQ ID NO: 238465 - DNA, 27 bp, Artificial sequence
  SiRNA target sequence
tccctttagtgattatattcagattca

SEQ ID NO: 238466 - DNA, 27 bp, Artificial sequence
  SiRNA target sequence
ccctttagtgattatattcagattcaa

SEQ ID NO: 238467 - DNA, 27 bp, Artificial sequence
  SiRNA target sequence
cctttagtgattatattcagattcaac

SEQ ID NO: 238468 - DNA, 27 bp, Artificial sequence
  SiRNA target sequence
ctttagtgattatattcagattcaacc

SEQ ID NO: 238469 - DNA, 27 bp, Artificial sequence
  SiRNA target sequence
tttagtgattatattcagattcaaccg

SEQ ID NO: 238470 - DNA, 27 bp, Artificial sequence
  SiRNA target sequence
ttagtgattatattcagattcaaccgt

SEQ ID NO: 238471 - DNA, 27 bp, Artificial sequence
  SiRNA target sequence
tagtgattatattcagattcaaccgtt

SEQ ID NO: 238472 - DNA, 27 bp, Artificial sequence
  SiRNA target sequence
agtgattatattcagattcaaccgttt

SEQ ID NO: 238473 - DNA, 27 bp, Artificial sequence
  SiRNA target sequence
gtgattatattcagattcaaccgtttt

SEQ ID NO: 238474 - DNA, 27 bp, Artificial sequence
  SiRNA target sequence
tgattatattcagattcaaccgttttg

SEQ ID NO: 238475 - DNA, 27 bp, Artificial sequence
  SiRNA target sequence
gattatattcagattcaaccgttttgg

SEQ ID NO: 238476 - DNA, 27 bp, Artificial sequence
  SiRNA target sequence
attatattcagattcaaccgttttggg

SEQ ID NO: 238477 - DNA, 27 bp, Artificial sequence
  SiRNA target sequence
ttatattcagattcaaccgttttgggc

SEQ ID NO: 238478 - DNA, 27 bp, Artificial sequence
  SiRNA target sequence
tatattcagattcaaccgttttgggcc

SEQ ID NO: 238479 - DNA, 27 bp, Artificial sequence
  SiRNA target sequence
atattcagattcaaccgttttgggcca

SEQ ID NO: 238480 - DNA, 27 bp, Artificial sequence
  SiRNA target sequence
tattcagattcaaccgttttgggccaa

SEQ ID NO: 238481 - DNA, 27 bp, Artificial sequence
  SiRNA target sequence
attcagattcaaccgttttgggccaaa

SEQ ID NO: 238482 - DNA, 27 bp, Artificial sequence
  SiRNA target sequence
ttcagattcaaccgttttgggccaaag

SEQ ID NO: 238483 - DNA, 27 bp, Artificial sequence
  SiRNA target sequence
tcagattcaaccgttttgggccaaaga

SEQ ID NO: 238484 - DNA, 27 bp, Artificial sequence
  SiRNA target sequence
cagattcaaccgttttgggccaaagat

SEQ ID NO: 238485 - DNA, 27 bp, Artificial sequence
  SiRNA target sequence
agattcaaccgttttgggccaaagata

SEQ ID NO: 238486 - DNA, 27 bp, Artificial sequence
  SiRNA target sequence
gattcaaccgttttgggccaaagatat

SEQ ID NO: 238487 - DNA, 27 bp, Artificial sequence
  SiRNA target sequence
attcaaccgttttgggccaaagatatt

SEQ ID NO: 238488 - DNA, 27 bp, Artificial sequence
  SiRNA target sequence
ttcaaccgttttgggccaaagatattt

SEQ ID NO: 238489 - DNA, 27 bp, Artificial sequence
  SiRNA target sequence
tcaaccgttttgggccaaagatatttt

SEQ ID NO: 238490 - DNA, 27 bp, Artificial sequence
  SiRNA target sequence
caaccgttttgggccaaagatattttt

SEQ ID NO: 238491 - DNA, 27 bp, Artificial sequence
  SiRNA target sequence
aaccgttttgggccaaagatatttttg

SEQ ID NO: 238492 - DNA, 27 bp, Artificial sequence
  SiRNA target sequence
accgttttgggccaaagatatttttgc

SEQ ID NO: 238493 - DNA, 27 bp, Artificial sequence
  SiRNA target sequence
ccgttttgggccaaagatatttttgct

SEQ ID NO: 238494 - DNA, 27 bp, Artificial sequence
  SiRNA target sequence
cgttttgggccaaagatatttttgctg

SEQ ID NO: 238495 - DNA, 27 bp, Artificial sequence
  SiRNA target sequence
gttttgggccaaagatatttttgctga

SEQ ID NO: 238496 - DNA, 27 bp, Artificial sequence
  SiRNA target sequence
ttttgggccaaagatatttttgctgat

SEQ ID NO: 238497 - DNA, 27 bp, Artificial sequence
  SiRNA target sequence
tttgggccaaagatatttttgctgatg

SEQ ID NO: 238498 - DNA, 27 bp, Artificial sequence
  SiRNA target sequence
ttgggccaaagatatttttgctgatgg

SEQ ID NO: 238499 - DNA, 27 bp, Artificial sequence
  SiRNA target sequence
tgggccaaagatatttttgctgatgga

SEQ ID NO: 238500 - DNA, 27 bp, Artificial sequence
  SiRNA target sequence
gggccaaagatatttttgctgatggaa

SEQ ID NO: 238501 - DNA, 27 bp, Artificial sequence
  SiRNA target sequence
ggccaaagatatttttgctgatggaaa

SEQ ID NO: 238502 - DNA, 27 bp, Artificial sequence
  SiRNA target sequence
gccaaagatatttttgctgatggaaaa

SEQ ID NO: 238503 - DNA, 27 bp, Artificial sequence
  SiRNA target sequence
ccaaagatatttttgctgatggaaaag

SEQ ID NO: 238504 - DNA, 27 bp, Artificial sequence
  SiRNA target sequence
caaagatatttttgctgatggaaaagc

SEQ ID NO: 238505 - DNA, 27 bp, Artificial sequence
  SiRNA target sequence
aaagatatttttgctgatggaaaagct

SEQ ID NO: 238506 - DNA, 27 bp, Artificial sequence
  SiRNA target sequence
aagatatttttgctgatggaaaagctg

SEQ ID NO: 238507 - DNA, 27 bp, Artificial sequence
  SiRNA target sequence
agatatttttgctgatggaaaagctgt

SEQ ID NO: 238508 - DNA, 27 bp, Artificial sequence
  SiRNA target sequence
gatatttttgctgatggaaaagctgtt

SEQ ID NO: 238509 - DNA, 27 bp, Artificial sequence
  SiRNA target sequence
atatttttgctgatggaaaagctgttg

SEQ ID NO: 238510 - DNA, 27 bp, Artificial sequence
  SiRNA target sequence
tatttttgctgatggaaaagctgttgc

SEQ ID NO: 238511 - DNA, 27 bp, Artificial sequence
  SiRNA target sequence
atttttgctgatggaaaagctgttgcc

SEQ ID NO: 238512 - DNA, 27 bp, Artificial sequence
  SiRNA target sequence
tttttgctgatggaaaagctgttgcca

SEQ ID NO: 238513 - DNA, 27 bp, Artificial sequence
  SiRNA target sequence
ttttgctgatggaaaagctgttgccag

SEQ ID NO: 238514 - DNA, 27 bp, Artificial sequence
  SiRNA target sequence
tttgctgatggaaaagctgttgccaga

SEQ ID NO: 238515 - DNA, 27 bp, Artificial sequence
  SiRNA target sequence
ttgctgatggaaaagctgttgccagaa

SEQ ID NO: 238516 - DNA, 27 bp, Artificial sequence
  SiRNA target sequence
tgctgatggaaaagctgttgccagaag

SEQ ID NO: 238517 - DNA, 27 bp, Artificial sequence
  SiRNA target sequence
gctgatggaaaagctgttgccagaagt

SEQ ID NO: 238518 - DNA, 27 bp, Artificial sequence
  SiRNA target sequence
ctgatggaaaagctgttgccagaagta

SEQ ID NO: 238519 - DNA, 27 bp, Artificial sequence
  SiRNA target sequence
tgatggaaaagctgttgccagaagtac

SEQ ID NO: 238520 - DNA, 27 bp, Artificial sequence
  SiRNA target sequence
gatggaaaagctgttgccagaagtaca

SEQ ID NO: 238521 - DNA, 27 bp, Artificial sequence
  SiRNA target sequence
atggaaaagctgttgccagaagtacag

SEQ ID NO: 238522 - DNA, 27 bp, Artificial sequence
  SiRNA target sequence
tggaaaagctgttgccagaagtacaga

SEQ ID NO: 238523 - DNA, 27 bp, Artificial sequence
  SiRNA target sequence
ggaaaagctgttgccagaagtacagat

SEQ ID NO: 238524 - DNA, 27 bp, Artificial sequence
  SiRNA target sequence
gaaaagctgttgccagaagtacagatt

SEQ ID NO: 238525 - DNA, 27 bp, Artificial sequence
  SiRNA target sequence
aaaagctgttgccagaagtacagattt

SEQ ID NO: 238526 - DNA, 27 bp, Artificial sequence
  SiRNA target sequence
aaagctgttgccagaagtacagatttt

SEQ ID NO: 238527 - DNA, 27 bp, Artificial sequence
  SiRNA target sequence
aagctgttgccagaagtacagattttt

SEQ ID NO: 238528 - DNA, 27 bp, Artificial sequence
  SiRNA target sequence
agctgttgccagaagtacagatttttt

SEQ ID NO: 238529 - DNA, 27 bp, Artificial sequence
  SiRNA target sequence
gctgttgccagaagtacagatttttta

SEQ ID NO: 238530 - DNA, 27 bp, Artificial sequence
  SiRNA target sequence
ctgttgccagaagtacagattttttat

SEQ ID NO: 238531 - DNA, 27 bp, Artificial sequence
  SiRNA target sequence
tgttgccagaagtacagattttttatt

SEQ ID NO: 238532 - DNA, 27 bp, Artificial sequence
  SiRNA target sequence
gttgccagaagtacagattttttattt

SEQ ID NO: 238533 - DNA, 27 bp, Artificial sequence
  SiRNA target sequence
ttgccagaagtacagattttttatttt

SEQ ID NO: 238534 - DNA, 27 bp, Artificial sequence
  SiRNA target sequence
tgccagaagtacagattttttattttc

SEQ ID NO: 238535 - DNA, 27 bp, Artificial sequence
  SiRNA target sequence
gccagaagtacagattttttattttct

SEQ ID NO: 238536 - DNA, 27 bp, Artificial sequence
  SiRNA target sequence
ccagaagtacagattttttattttcta

SEQ ID NO: 238537 - DNA, 27 bp, Artificial sequence
  SiRNA target sequence
cagaagtacagattttttattttctat

SEQ ID NO: 238538 - DNA, 27 bp, Artificial sequence
  SiRNA target sequence
agaagtacagattttttattttctatt

SEQ ID NO: 238539 - DNA, 27 bp, Artificial sequence
  SiRNA target sequence
gaagtacagattttttattttctattg

SEQ ID NO: 238540 - DNA, 27 bp, Artificial sequence
  SiRNA target sequence
aagtacagattttttattttctattgc

SEQ ID NO: 238541 - DNA, 27 bp, Artificial sequence
  SiRNA target sequence
agtacagattttttattttctattgca

SEQ ID NO: 238542 - DNA, 27 bp, Artificial sequence
  SiRNA target sequence
gtacagattttttattttctattgcac

SEQ ID NO: 238543 - DNA, 27 bp, Artificial sequence
  SiRNA target sequence
tacagattttttattttctattgcact

SEQ ID NO: 238544 - DNA, 27 bp, Artificial sequence
  SiRNA target sequence
acagattttttattttctattgcactt

SEQ ID NO: 238545 - DNA, 27 bp, Artificial sequence
  SiRNA target sequence
cagattttttattttctattgcacttg

SEQ ID NO: 238546 - DNA, 27 bp, Artificial sequence
  SiRNA target sequence
agattttttattttctattgcacttgt

SEQ ID NO: 238547 - DNA, 27 bp, Artificial sequence
  SiRNA target sequence
gattttttattttctattgcacttgtt

SEQ ID NO: 238548 - DNA, 27 bp, Artificial sequence
  SiRNA target sequence
attttttattttctattgcacttgttt

SEQ ID NO: 238549 - DNA, 27 bp, Artificial sequence
  SiRNA target sequence
ttttttattttctattgcacttgtttt

SEQ ID NO: 238550 - DNA, 27 bp, Artificial sequence
  SiRNA target sequence
tttttattttctattgcacttgttttc

SEQ ID NO: 238551 - DNA, 27 bp, Artificial sequence
  SiRNA target sequence
ttttattttctattgcacttgttttca

SEQ ID NO: 238552 - DNA, 27 bp, Artificial sequence
  SiRNA target sequence
tttattttctattgcacttgttttcaa

SEQ ID NO: 238553 - DNA, 27 bp, Artificial sequence
  SiRNA target sequence
ttattttctattgcacttgttttcaat

SEQ ID NO: 238554 - DNA, 27 bp, Artificial sequence
  SiRNA target sequence
tattttctattgcacttgttttcaatg

SEQ ID NO: 238555 - DNA, 27 bp, Artificial sequence
  SiRNA target sequence
attttctattgcacttgttttcaatga

SEQ ID NO: 238556 - DNA, 27 bp, Artificial sequence
  SiRNA target sequence
ttttctattgcacttgttttcaatgaa

SEQ ID NO: 238557 - DNA, 27 bp, Artificial sequence
  SiRNA target sequence
tttctattgcacttgttttcaatgaat

SEQ ID NO: 238558 - DNA, 27 bp, Artificial sequence
  SiRNA target sequence
ttctattgcacttgttttcaatgaatg

SEQ ID NO: 238559 - DNA, 27 bp, Artificial sequence
  SiRNA target sequence
tctattgcacttgttttcaatgaatgg

SEQ ID NO: 238560 - DNA, 27 bp, Artificial sequence
  SiRNA target sequence
ctattgcacttgttttcaatgaatgga

SEQ ID NO: 238561 - DNA, 27 bp, Artificial sequence
  SiRNA target sequence
tattgcacttgttttcaatgaatggac

SEQ ID NO: 238562 - DNA, 27 bp, Artificial sequence
  SiRNA target sequence
attgcacttgttttcaatgaatggaca

SEQ ID NO: 238563 - DNA, 27 bp, Artificial sequence
  SiRNA target sequence
ttgcacttgttttcaatgaatggacaa

SEQ ID NO: 238564 - DNA, 27 bp, Artificial sequence
  SiRNA target sequence
tgcacttgttttcaatgaatggacaag

SEQ ID NO: 238565 - DNA, 27 bp, Artificial sequence
  SiRNA target sequence
gcacttgttttcaatgaatggacaagt

SEQ ID NO: 238566 - DNA, 27 bp, Artificial sequence
  SiRNA target sequence
cacttgttttcaatgaatggacaagtt

SEQ ID NO: 238567 - DNA, 27 bp, Artificial sequence
  SiRNA target sequence
acttgttttcaatgaatggacaagttc

SEQ ID NO: 238568 - DNA, 27 bp, Artificial sequence
  SiRNA target sequence
cttgttttcaatgaatggacaagttct

SEQ ID NO: 238569 - DNA, 27 bp, Artificial sequence
  SiRNA target sequence
ttgttttcaatgaatggacaagttctg

SEQ ID NO: 238570 - DNA, 27 bp, Artificial sequence
  SiRNA target sequence
tgttttcaatgaatggacaagttctgc

SEQ ID NO: 238571 - DNA, 27 bp, Artificial sequence
  SiRNA target sequence
gttttcaatgaatggacaagttctgct

SEQ ID NO: 238572 - DNA, 27 bp, Artificial sequence
  SiRNA target sequence
ttttcaatgaatggacaagttctgcta

SEQ ID NO: 238573 - DNA, 27 bp, Artificial sequence
  SiRNA target sequence
tttcaatgaatggacaagttctgctat

SEQ ID NO: 238574 - DNA, 27 bp, Artificial sequence
  SiRNA target sequence
ttcaatgaatggacaagttctgctatc

SEQ ID NO: 238575 - DNA, 27 bp, Artificial sequence
  SiRNA target sequence
tcaatgaatggacaagttctgctatct

SEQ ID NO: 238576 - DNA, 27 bp, Artificial sequence
  SiRNA target sequence
caatgaatggacaagttctgctatcta

SEQ ID NO: 238577 - DNA, 27 bp, Artificial sequence
  SiRNA target sequence
aatgaatggacaagttctgctatctat

SEQ ID NO: 238578 - DNA, 27 bp, Artificial sequence
  SiRNA target sequence
atgaatggacaagttctgctatctatg

SEQ ID NO: 238579 - DNA, 27 bp, Artificial sequence
  SiRNA target sequence
tgaatggacaagttctgctatctatgt

SEQ ID NO: 238580 - DNA, 27 bp, Artificial sequence
  SiRNA target sequence
gaatggacaagttctgctatctatgtt

SEQ ID NO: 238581 - DNA, 27 bp, Artificial sequence
  SiRNA target sequence
aatggacaagttctgctatctatgttt

SEQ ID NO: 238582 - DNA, 27 bp, Artificial sequence
  SiRNA target sequence
atggacaagttctgctatctatgtttt

SEQ ID NO: 238583 - DNA, 27 bp, Artificial sequence
  SiRNA target sequence
tggacaagttctgctatctatgtttta

SEQ ID NO: 238584 - DNA, 27 bp, Artificial sequence
  SiRNA target sequence
ggacaagttctgctatctatgttttat

SEQ ID NO: 238585 - DNA, 27 bp, Artificial sequence
  SiRNA target sequence
gacaagttctgctatctatgttttatc

SEQ ID NO: 238586 - DNA, 27 bp, Artificial sequence
  SiRNA target sequence
acaagttctgctatctatgttttatct

SEQ ID NO: 238587 - DNA, 27 bp, Artificial sequence
  SiRNA target sequence
caagttctgctatctatgttttatctg

SEQ ID NO: 238588 - DNA, 27 bp, Artificial sequence
  SiRNA target sequence
aagttctgctatctatgttttatctga

SEQ ID NO: 238589 - DNA, 27 bp, Artificial sequence
  SiRNA target sequence
agttctgctatctatgttttatctgaa

SEQ ID NO: 238590 - DNA, 27 bp, Artificial sequence
  SiRNA target sequence
gttctgctatctatgttttatctgaaa

SEQ ID NO: 238591 - DNA, 27 bp, Artificial sequence
  SiRNA target sequence
ttctgctatctatgttttatctgaaat

SEQ ID NO: 238592 - DNA, 27 bp, Artificial sequence
  SiRNA target sequence
tctgctatctatgttttatctgaaatg

SEQ ID NO: 238593 - DNA, 27 bp, Artificial sequence
  SiRNA target sequence
ctgctatctatgttttatctgaaatgt

SEQ ID NO: 238594 - DNA, 27 bp, Artificial sequence
  SiRNA target sequence
tgctatctatgttttatctgaaatgtt

SEQ ID NO: 238595 - DNA, 27 bp, Artificial sequence
  SiRNA target sequence
gctatctatgttttatctgaaatgttt

SEQ ID NO: 238596 - DNA, 27 bp, Artificial sequence
  SiRNA target sequence
ctatctatgttttatctgaaatgtttg

SEQ ID NO: 238597 - DNA, 27 bp, Artificial sequence
  SiRNA target sequence
tatctatgttttatctgaaatgtttgg

SEQ ID NO: 238598 - DNA, 27 bp, Artificial sequence
  SiRNA target sequence
atctatgttttatctgaaatgtttggt

SEQ ID NO: 238599 - DNA, 27 bp, Artificial sequence
  SiRNA target sequence
tctatgttttatctgaaatgtttggta

SEQ ID NO: 238600 - DNA, 27 bp, Artificial sequence
  SiRNA target sequence
ctatgttttatctgaaatgtttggtag

SEQ ID NO: 238601 - DNA, 27 bp, Artificial sequence
  SiRNA target sequence
tatgttttatctgaaatgtttggtagt

SEQ ID NO: 238602 - DNA, 27 bp, Artificial sequence
  SiRNA target sequence
atgttttatctgaaatgtttggtagtt

SEQ ID NO: 238603 - DNA, 27 bp, Artificial sequence
  SiRNA target sequence
tgttttatctgaaatgtttggtagttt

SEQ ID NO: 238604 - DNA, 27 bp, Artificial sequence
  SiRNA target sequence
gttttatctgaaatgtttggtagtttg

SEQ ID NO: 238605 - DNA, 27 bp, Artificial sequence
  SiRNA target sequence
ttttatctgaaatgtttggtagtttga

SEQ ID NO: 238606 - DNA, 27 bp, Artificial sequence
  SiRNA target sequence
tttatctgaaatgtttggtagtttgat

SEQ ID NO: 238607 - DNA, 27 bp, Artificial sequence
  SiRNA target sequence
ttatctgaaatgtttggtagtttgatt

SEQ ID NO: 238608 - DNA, 27 bp, Artificial sequence
  SiRNA target sequence
tatctgaaatgtttggtagtttgattc

SEQ ID NO: 238609 - DNA, 27 bp, Artificial sequence
  SiRNA target sequence
atctgaaatgtttggtagtttgattct

SEQ ID NO: 238610 - DNA, 27 bp, Artificial sequence
  SiRNA target sequence
tctgaaatgtttggtagtttgattctt

SEQ ID NO: 238611 - DNA, 27 bp, Artificial sequence
  SiRNA target sequence
ctgaaatgtttggtagtttgattcttt

SEQ ID NO: 238612 - DNA, 27 bp, Artificial sequence
  SiRNA target sequence
tgaaatgtttggtagtttgattctttc

SEQ ID NO: 238613 - DNA, 27 bp, Artificial sequence
  SiRNA target sequence
gaaatgtttggtagtttgattctttca

SEQ ID NO: 238614 - DNA, 27 bp, Artificial sequence
  SiRNA target sequence
aaatgtttggtagtttgattctttcat

SEQ ID NO: 238615 - DNA, 27 bp, Artificial sequence
  SiRNA target sequence
aatgtttggtagtttgattctttcata

SEQ ID NO: 238616 - DNA, 27 bp, Artificial sequence
  SiRNA target sequence
atgtttggtagtttgattctttcatat

SEQ ID NO: 238617 - DNA, 27 bp, Artificial sequence
  SiRNA target sequence
tgtttggtagtttgattctttcatatt

SEQ ID NO: 238618 - DNA, 27 bp, Artificial sequence
  SiRNA target sequence
gtttggtagtttgattctttcatattt

SEQ ID NO: 238619 - DNA, 27 bp, Artificial sequence
  SiRNA target sequence
tttggtagtttgattctttcatattta

SEQ ID NO: 238620 - DNA, 27 bp, Artificial sequence
  SiRNA target sequence
ttggtagtttgattctttcatatttat

SEQ ID NO: 238621 - DNA, 27 bp, Artificial sequence
  SiRNA target sequence
tggtagtttgattctttcatatttatt

SEQ ID NO: 238622 - DNA, 27 bp, Artificial sequence
  SiRNA target sequence
ggtagtttgattctttcatatttattt

SEQ ID NO: 238623 - DNA, 27 bp, Artificial sequence
  SiRNA target sequence
gtagtttgattctttcatatttattta

SEQ ID NO: 238624 - DNA, 27 bp, Artificial sequence
  SiRNA target sequence
tagtttgattctttcatatttatttat

SEQ ID NO: 238625 - DNA, 27 bp, Artificial sequence
  SiRNA target sequence
agtttgattctttcatatttatttatg

SEQ ID NO: 238626 - DNA, 27 bp, Artificial sequence
  SiRNA target sequence
gtttgattctttcatatttatttatga

SEQ ID NO: 238627 - DNA, 27 bp, Artificial sequence
  SiRNA target sequence
tttgattctttcatatttatttatgac

SEQ ID NO: 238628 - DNA, 27 bp, Artificial sequence
  SiRNA target sequence
ttgattctttcatatttatttatgacg

SEQ ID NO: 238629 - DNA, 27 bp, Artificial sequence
  SiRNA target sequence
tgattctttcatatttatttatgacgt

SEQ ID NO: 238630 - DNA, 27 bp, Artificial sequence
  SiRNA target sequence
gattctttcatatttatttatgacgtt

SEQ ID NO: 238631 - DNA, 27 bp, Artificial sequence
  SiRNA target sequence
attctttcatatttatttatgacgttt

SEQ ID NO: 238632 - DNA, 27 bp, Artificial sequence
  SiRNA target sequence
ttctttcatatttatttatgacgtttg

SEQ ID NO: 238633 - DNA, 27 bp, Artificial sequence
  SiRNA target sequence
tctttcatatttatttatgacgtttgc

SEQ ID NO: 238634 - DNA, 27 bp, Artificial sequence
  SiRNA target sequence
ctttcatatttatttatgacgtttgct

SEQ ID NO: 238635 - DNA, 27 bp, Artificial sequence
  SiRNA target sequence
tttcatatttatttatgacgtttgcta

SEQ ID NO: 238636 - DNA, 27 bp, Artificial sequence
  SiRNA target sequence
ttcatatttatttatgacgtttgctaa

SEQ ID NO: 238637 - DNA, 27 bp, Artificial sequence
  SiRNA target sequence
tcatatttatttatgacgtttgctaat

SEQ ID NO: 238638 - DNA, 27 bp, Artificial sequence
  SiRNA target sequence
catatttatttatgacgtttgctaatg

SEQ ID NO: 238639 - DNA, 27 bp, Artificial sequence
  SiRNA target sequence
atatttatttatgacgtttgctaatgg

SEQ ID NO: 238640 - DNA, 27 bp, Artificial sequence
  SiRNA target sequence
tatttatttatgacgtttgctaatggt

SEQ ID NO: 238641 - DNA, 27 bp, Artificial sequence
  SiRNA target sequence
atttatttatgacgtttgctaatggtc

SEQ ID NO: 238642 - DNA, 27 bp, Artificial sequence
  SiRNA target sequence
tttatttatgacgtttgctaatggtct

SEQ ID NO: 238643 - DNA, 27 bp, Artificial sequence
  SiRNA target sequence
ttatttatgacgtttgctaatggtctt

SEQ ID NO: 238644 - DNA, 27 bp, Artificial sequence
  SiRNA target sequence
tatttatgacgtttgctaatggtcttt

SEQ ID NO: 238645 - DNA, 27 bp, Artificial sequence
  SiRNA target sequence
atttatgacgtttgctaatggtctttc

SEQ ID NO: 238646 - DNA, 27 bp, Artificial sequence
  SiRNA target sequence
tttatgacgtttgctaatggtctttcg

SEQ ID NO: 238647 - DNA, 27 bp, Artificial sequence
  SiRNA target sequence
ttatgacgtttgctaatggtctttcga

SEQ ID NO: 238648 - DNA, 27 bp, Artificial sequence
  SiRNA target sequence
tatgacgtttgctaatggtctttcgac

SEQ ID NO: 238649 - DNA, 27 bp, Artificial sequence
  SiRNA target sequence
atgacgtttgctaatggtctttcgact

SEQ ID NO: 238650 - DNA, 27 bp, Artificial sequence
  SiRNA target sequence
tgacgtttgctaatggtctttcgactc

SEQ ID NO: 238651 - DNA, 27 bp, Artificial sequence
  SiRNA target sequence
gacgtttgctaatggtctttcgactcc

SEQ ID NO: 238652 - DNA, 27 bp, Artificial sequence
  SiRNA target sequence
acgtttgctaatggtctttcgactcct

SEQ ID NO: 238653 - DNA, 27 bp, Artificial sequence
  SiRNA target sequence
cgtttgctaatggtctttcgactcctg

SEQ ID NO: 238654 - DNA, 27 bp, Artificial sequence
  SiRNA target sequence
gtttgctaatggtctttcgactcctgg

SEQ ID NO: 238655 - DNA, 27 bp, Artificial sequence
  SiRNA target sequence
tttgctaatggtctttcgactcctgga

SEQ ID NO: 238656 - DNA, 27 bp, Artificial sequence
  SiRNA target sequence
ttgctaatggtctttcgactcctggac

SEQ ID NO: 238657 - DNA, 27 bp, Artificial sequence
  SiRNA target sequence
tgctaatggtctttcgactcctggaca

SEQ ID NO: 238658 - DNA, 27 bp, Artificial sequence
  SiRNA target sequence
gctaatggtctttcgactcctggacag

SEQ ID NO: 238659 - DNA, 27 bp, Artificial sequence
  SiRNA target sequence
ctaatggtctttcgactcctggacagt

SEQ ID NO: 238660 - DNA, 27 bp, Artificial sequence
  SiRNA target sequence
taatggtctttcgactcctggacagtc

SEQ ID NO: 238661 - DNA, 27 bp, Artificial sequence
  SiRNA target sequence
aatggtctttcgactcctggacagtcc

SEQ ID NO: 238662 - DNA, 27 bp, Artificial sequence
  SiRNA target sequence
atggtctttcgactcctggacagtccg

SEQ ID NO: 238663 - DNA, 27 bp, Artificial sequence
  SiRNA target sequence
tggtctttcgactcctggacagtccgc

SEQ ID NO: 238664 - DNA, 27 bp, Artificial sequence
  SiRNA target sequence
ggtctttcgactcctggacagtccgct

SEQ ID NO: 238665 - DNA, 27 bp, Artificial sequence
  SiRNA target sequence
gtctttcgactcctggacagtccgcta

SEQ ID NO: 238666 - DNA, 27 bp, Artificial sequence
  SiRNA target sequence
tctttcgactcctggacagtccgctag

SEQ ID NO: 238667 - DNA, 27 bp, Artificial sequence
  SiRNA target sequence
ctttcgactcctggacagtccgctaga

SEQ ID NO: 238668 - DNA, 27 bp, Artificial sequence
  SiRNA target sequence
tttcgactcctggacagtccgctagat

SEQ ID NO: 238669 - DNA, 27 bp, Artificial sequence
  SiRNA target sequence
ttcgactcctggacagtccgctagatt

SEQ ID NO: 238670 - DNA, 27 bp, Artificial sequence
  SiRNA target sequence
tcgactcctggacagtccgctagattt

SEQ ID NO: 238671 - DNA, 27 bp, Artificial sequence
  SiRNA target sequence
cgactcctggacagtccgctagatttg

SEQ ID NO: 238672 - DNA, 27 bp, Artificial sequence
  SiRNA target sequence
gactcctggacagtccgctagatttgt

SEQ ID NO: 238673 - DNA, 27 bp, Artificial sequence
  SiRNA target sequence
actcctggacagtccgctagatttgtc

SEQ ID NO: 238674 - DNA, 27 bp, Artificial sequence
  SiRNA target sequence
ctcctggacagtccgctagatttgtcc

SEQ ID NO: 238675 - DNA, 27 bp, Artificial sequence
  SiRNA target sequence
tcctggacagtccgctagatttgtccc

SEQ ID NO: 238676 - DNA, 27 bp, Artificial sequence
  SiRNA target sequence
cctggacagtccgctagatttgtccct

SEQ ID NO: 238677 - DNA, 27 bp, Artificial sequence
  SiRNA target sequence
ctggacagtccgctagatttgtccctt

SEQ ID NO: 238678 - DNA, 27 bp, Artificial sequence
  SiRNA target sequence
tggacagtccgctagatttgtcccttt

SEQ ID NO: 238679 - DNA, 27 bp, Artificial sequence
  SiRNA target sequence
ggacagtccgctagatttgtcccttta

SEQ ID NO: 238680 - DNA, 27 bp, Artificial sequence
  SiRNA target sequence
gacagtccgctagatttgtccctttat

SEQ ID NO: 238681 - DNA, 27 bp, Artificial sequence
  SiRNA target sequence
acagtccgctagatttgtccctttatt

SEQ ID NO: 238682 - DNA, 27 bp, Artificial sequence
  SiRNA target sequence
cagtccgctagatttgtccctttattt

SEQ ID NO: 238683 - DNA, 27 bp, Artificial sequence
  SiRNA target sequence
agtccgctagatttgtccctttatttt

SEQ ID NO: 238684 - DNA, 27 bp, Artificial sequence
  SiRNA target sequence
gtccgctagatttgtccctttatttta

SEQ ID NO: 238685 - DNA, 27 bp, Artificial sequence
  SiRNA target sequence
tccgctagatttgtccctttattttat

SEQ ID NO: 238686 - DNA, 27 bp, Artificial sequence
  SiRNA target sequence
ccgctagatttgtccctttattttatg

SEQ ID NO: 238687 - DNA, 27 bp, Artificial sequence
  SiRNA target sequence
cgctagatttgtccctttattttatgt

SEQ ID NO: 238688 - DNA, 27 bp, Artificial sequence
  SiRNA target sequence
gctagatttgtccctttattttatgtt

SEQ ID NO: 238689 - DNA, 27 bp, Artificial sequence
  SiRNA target sequence
ctagatttgtccctttattttatgttg

SEQ ID NO: 238690 - DNA, 27 bp, Artificial sequence
  SiRNA target sequence
tagatttgtccctttattttatgttgg

SEQ ID NO: 238691 - DNA, 27 bp, Artificial sequence
  SiRNA target sequence
agatttgtccctttattttatgttgga

SEQ ID NO: 238692 - DNA, 27 bp, Artificial sequence
  SiRNA target sequence
gatttgtccctttattttatgttggat

SEQ ID NO: 238693 - DNA, 27 bp, Artificial sequence
  SiRNA target sequence
atttgtccctttattttatgttggatc

SEQ ID NO: 238694 - DNA, 27 bp, Artificial sequence
  SiRNA target sequence
tttgtccctttattttatgttggatct

SEQ ID NO: 238695 - DNA, 27 bp, Artificial sequence
  SiRNA target sequence
ttgtccctttattttatgttggatcta

SEQ ID NO: 238696 - DNA, 27 bp, Artificial sequence
  SiRNA target sequence
tgtccctttattttatgttggatctaa

SEQ ID NO: 238697 - DNA, 27 bp, Artificial sequence
  SiRNA target sequence
gtccctttattttatgttggatctaat

SEQ ID NO: 238698 - DNA, 27 bp, Artificial sequence
  SiRNA target sequence
tccctttattttatgttggatctaatt

SEQ ID NO: 238699 - DNA, 27 bp, Artificial sequence
  SiRNA target sequence
ccctttattttatgttggatctaattt

SEQ ID NO: 238700 - DNA, 27 bp, Artificial sequence
  SiRNA target sequence
cctttattttatgttggatctaatttg

SEQ ID NO: 238701 - DNA, 27 bp, Artificial sequence
  SiRNA target sequence
ctttattttatgttggatctaatttgg

SEQ ID NO: 238702 - DNA, 27 bp, Artificial sequence
  SiRNA target sequence
tttattttatgttggatctaatttggc

SEQ ID NO: 238703 - DNA, 27 bp, Artificial sequence
  SiRNA target sequence
ttattttatgttggatctaatttggct

SEQ ID NO: 238704 - DNA, 27 bp, Artificial sequence
  SiRNA target sequence
tattttatgttggatctaatttggctt

SEQ ID NO: 238705 - DNA, 27 bp, Artificial sequence
  SiRNA target sequence
attttatgttggatctaatttggcttt

SEQ ID NO: 238706 - DNA, 27 bp, Artificial sequence
  SiRNA target sequence
ttttatgttggatctaatttggcttta

SEQ ID NO: 238707 - DNA, 27 bp, Artificial sequence
  SiRNA target sequence
tttatgttggatctaatttggctttac

SEQ ID NO: 238708 - DNA, 27 bp, Artificial sequence
  SiRNA target sequence
ttatgttggatctaatttggctttact

SEQ ID NO: 238709 - DNA, 27 bp, Artificial sequence
  SiRNA target sequence
tatgttggatctaatttggctttactt

SEQ ID NO: 238710 - DNA, 27 bp, Artificial sequence
  SiRNA target sequence
atgttggatctaatttggctttacttc

SEQ ID NO: 238711 - DNA, 27 bp, Artificial sequence
  SiRNA target sequence
tgttggatctaatttggctttacttct

SEQ ID NO: 238712 - DNA, 27 bp, Artificial sequence
  SiRNA target sequence
gttggatctaatttggctttacttctt

SEQ ID NO: 238713 - DNA, 27 bp, Artificial sequence
  SiRNA target sequence
ttggatctaatttggctttacttcttt

SEQ ID NO: 238714 - DNA, 27 bp, Artificial sequence
  SiRNA target sequence
tggatctaatttggctttacttctttc

SEQ ID NO: 238715 - DNA, 27 bp, Artificial sequence
  SiRNA target sequence
ggatctaatttggctttacttctttca

SEQ ID NO: 238716 - DNA, 27 bp, Artificial sequence
  SiRNA target sequence
gatctaatttggctttacttctttcag

SEQ ID NO: 238717 - DNA, 27 bp, Artificial sequence
  SiRNA target sequence
atctaatttggctttacttctttcagg

SEQ ID NO: 238718 - DNA, 27 bp, Artificial sequence
  SiRNA target sequence
tctaatttggctttacttctttcagga

SEQ ID NO: 238719 - DNA, 27 bp, Artificial sequence
  SiRNA target sequence
ctaatttggctttacttctttcaggaa

SEQ ID NO: 238720 - DNA, 27 bp, Artificial sequence
  SiRNA target sequence
taatttggctttacttctttcaggaat

SEQ ID NO: 238721 - DNA, 27 bp, Artificial sequence
  SiRNA target sequence
aatttggctttacttctttcaggaatg

SEQ ID NO: 238722 - DNA, 27 bp, Artificial sequence
  SiRNA target sequence
atttggctttacttctttcaggaatga

SEQ ID NO: 238723 - DNA, 27 bp, Artificial sequence
  SiRNA target sequence
tttggctttacttctttcaggaatgat

SEQ ID NO: 238724 - DNA, 27 bp, Artificial sequence
  SiRNA target sequence
ttggctttacttctttcaggaatgata

SEQ ID NO: 238725 - DNA, 27 bp, Artificial sequence
  SiRNA target sequence
tggctttacttctttcaggaatgataa

SEQ ID NO: 238726 - DNA, 27 bp, Artificial sequence
  SiRNA target sequence
ggctttacttctttcaggaatgataaa

SEQ ID NO: 238727 - DNA, 27 bp, Artificial sequence
  SiRNA target sequence
gctttacttctttcaggaatgataaat

SEQ ID NO: 238728 - DNA, 27 bp, Artificial sequence
  SiRNA target sequence
ctttacttctttcaggaatgataaatt

SEQ ID NO: 238729 - DNA, 27 bp, Artificial sequence
  SiRNA target sequence
tttacttctttcaggaatgataaatta

SEQ ID NO: 238730 - DNA, 27 bp, Artificial sequence
  SiRNA target sequence
ttacttctttcaggaatgataaattac

SEQ ID NO: 238731 - DNA, 27 bp, Artificial sequence
  SiRNA target sequence
tacttctttcaggaatgataaattact

SEQ ID NO: 238732 - DNA, 27 bp, Artificial sequence
  SiRNA target sequence
acttctttcaggaatgataaattactt

SEQ ID NO: 238733 - DNA, 27 bp, Artificial sequence
  SiRNA target sequence
cttctttcaggaatgataaattacttt

SEQ ID NO: 238734 - DNA, 27 bp, Artificial sequence
  SiRNA target sequence
ttctttcaggaatgataaattactttt

SEQ ID NO: 238735 - DNA, 27 bp, Artificial sequence
  SiRNA target sequence
tctttcaggaatgataaattactttta

SEQ ID NO: 238736 - DNA, 27 bp, Artificial sequence
  SiRNA target sequence
ctttcaggaatgataaattacttttat

SEQ ID NO: 238737 - DNA, 27 bp, Artificial sequence
  SiRNA target sequence
tttcaggaatgataaattacttttata

SEQ ID NO: 238738 - DNA, 27 bp, Artificial sequence
  SiRNA target sequence
ttcaggaatgataaattacttttatag

SEQ ID NO: 238739 - DNA, 27 bp, Artificial sequence
  SiRNA target sequence
tcaggaatgataaattacttttatagt

SEQ ID NO: 238740 - DNA, 27 bp, Artificial sequence
  SiRNA target sequence
caggaatgataaattacttttatagtg

SEQ ID NO: 238741 - DNA, 27 bp, Artificial sequence
  SiRNA target sequence
aggaatgataaattacttttatagtgt

SEQ ID NO: 238742 - DNA, 27 bp, Artificial sequence
  SiRNA target sequence
ggaatgataaattacttttatagtgta

SEQ ID NO: 238743 - DNA, 27 bp, Artificial sequence
  SiRNA target sequence
gaatgataaattacttttatagtgtaa

SEQ ID NO: 238744 - DNA, 27 bp, Artificial sequence
  SiRNA target sequence
aatgataaattacttttatagtgtaag

SEQ ID NO: 238745 - DNA, 27 bp, Artificial sequence
  SiRNA target sequence
atgataaattacttttatagtgtaagt

SEQ ID NO: 238746 - DNA, 27 bp, Artificial sequence
  SiRNA target sequence
tgataaattacttttatagtgtaagta

SEQ ID NO: 238747 - DNA, 27 bp, Artificial sequence
  SiRNA target sequence
gataaattacttttatagtgtaagtaa

SEQ ID NO: 238748 - DNA, 27 bp, Artificial sequence
  SiRNA target sequence
ataaattacttttatagtgtaagtaaa

SEQ ID NO: 238749 - DNA, 27 bp, Artificial sequence
  SiRNA target sequence
taaattacttttatagtgtaagtaaat

SEQ ID NO: 238750 - DNA, 27 bp, Artificial sequence
  SiRNA target sequence
aaattacttttatagtgtaagtaaatc

SEQ ID NO: 238751 - DNA, 27 bp, Artificial sequence
  SiRNA target sequence
aattacttttatagtgtaagtaaatct

SEQ ID NO: 238752 - DNA, 27 bp, Artificial sequence
  SiRNA target sequence
attacttttatagtgtaagtaaatcta

SEQ ID NO: 238753 - DNA, 27 bp, Artificial sequence
  SiRNA target sequence
ttacttttatagtgtaagtaaatctaa

SEQ ID NO: 238754 - DNA, 27 bp, Artificial sequence
  SiRNA target sequence
tacttttatagtgtaagtaaatctaaa

SEQ ID NO: 238755 - DNA, 27 bp, Artificial sequence
  SiRNA target sequence
acttttatagtgtaagtaaatctaaaa

SEQ ID NO: 238756 - DNA, 27 bp, Artificial sequence
  SiRNA target sequence
cttttatagtgtaagtaaatctaaaat

SEQ ID NO: 238757 - DNA, 27 bp, Artificial sequence
  SiRNA target sequence
ttttatagtgtaagtaaatctaaaatg

SEQ ID NO: 238758 - DNA, 27 bp, Artificial sequence
  SiRNA target sequence
tttatagtgtaagtaaatctaaaatgt

SEQ ID NO: 238759 - DNA, 27 bp, Artificial sequence
  SiRNA target sequence
ttatagtgtaagtaaatctaaaatgtc

SEQ ID NO: 238760 - DNA, 27 bp, Artificial sequence
  SiRNA target sequence
tatagtgtaagtaaatctaaaatgtcg

SEQ ID NO: 238761 - DNA, 27 bp, Artificial sequence
  SiRNA target sequence
atagtgtaagtaaatctaaaatgtcgt

SEQ ID NO: 238762 - DNA, 27 bp, Artificial sequence
  SiRNA target sequence
tagtgtaagtaaatctaaaatgtcgta

SEQ ID NO: 238763 - DNA, 27 bp, Artificial sequence
  SiRNA target sequence
agtgtaagtaaatctaaaatgtcgtat

SEQ ID NO: 238764 - DNA, 27 bp, Artificial sequence
  SiRNA target sequence
gtgtaagtaaatctaaaatgtcgtatg

SEQ ID NO: 238765 - DNA, 27 bp, Artificial sequence
  SiRNA target sequence
tgtaagtaaatctaaaatgtcgtatgt

SEQ ID NO: 238766 - DNA, 27 bp, Artificial sequence
  SiRNA target sequence
gtaagtaaatctaaaatgtcgtatgtt

SEQ ID NO: 238767 - DNA, 27 bp, Artificial sequence
  SiRNA target sequence
taagtaaatctaaaatgtcgtatgttg

SEQ ID NO: 238768 - DNA, 27 bp, Artificial sequence
  SiRNA target sequence
aagtaaatctaaaatgtcgtatgttgc

SEQ ID NO: 238769 - DNA, 27 bp, Artificial sequence
  SiRNA target sequence
agtaaatctaaaatgtcgtatgttgcg

SEQ ID NO: 238770 - DNA, 27 bp, Artificial sequence
  SiRNA target sequence
gtaaatctaaaatgtcgtatgttgcgg

SEQ ID NO: 238771 - DNA, 27 bp, Artificial sequence
  SiRNA target sequence
taaatctaaaatgtcgtatgttgcggc

SEQ ID NO: 238772 - DNA, 27 bp, Artificial sequence
  SiRNA target sequence
aaatctaaaatgtcgtatgttgcggcc

SEQ ID NO: 238773 - DNA, 27 bp, Artificial sequence
  SiRNA target sequence
aatctaaaatgtcgtatgttgcggccg

SEQ ID NO: 238774 - DNA, 27 bp, Artificial sequence
  SiRNA target sequence
atctaaaatgtcgtatgttgcggccga

SEQ ID NO: 238775 - DNA, 27 bp, Artificial sequence
  SiRNA target sequence
tctaaaatgtcgtatgttgcggccgaa

SEQ ID NO: 238776 - DNA, 27 bp, Artificial sequence
  SiRNA target sequence
ctaaaatgtcgtatgttgcggccgaaa

SEQ ID NO: 238777 - DNA, 27 bp, Artificial sequence
  SiRNA target sequence
taaaatgtcgtatgttgcggccgaaag

SEQ ID NO: 238778 - DNA, 27 bp, Artificial sequence
  SiRNA target sequence
aaaatgtcgtatgttgcggccgaaaga

SEQ ID NO: 238779 - DNA, 27 bp, Artificial sequence
  SiRNA target sequence
aaatgtcgtatgttgcggccgaaagat

SEQ ID NO: 238780 - DNA, 27 bp, Artificial sequence
  SiRNA target sequence
aatgtcgtatgttgcggccgaaagatt

SEQ ID NO: 238781 - DNA, 27 bp, Artificial sequence
  SiRNA target sequence
atgtcgtatgttgcggccgaaagattt

SEQ ID NO: 238782 - DNA, 27 bp, Artificial sequence
  SiRNA target sequence
tgtcgtatgttgcggccgaaagatttt

SEQ ID NO: 238783 - DNA, 27 bp, Artificial sequence
  SiRNA target sequence
gtcgtatgttgcggccgaaagattttt

SEQ ID NO: 238784 - DNA, 27 bp, Artificial sequence
  SiRNA target sequence
tcgtatgttgcggccgaaagatttttt

SEQ ID NO: 238785 - DNA, 27 bp, Artificial sequence
  SiRNA target sequence
cgtatgttgcggccgaaagatttttta

SEQ ID NO: 238786 - DNA, 27 bp, Artificial sequence
  SiRNA target sequence
gtatgttgcggccgaaagattttttaa

SEQ ID NO: 238787 - DNA, 27 bp, Artificial sequence
  SiRNA target sequence
tatgttgcggccgaaagattttttaat

SEQ ID NO: 238788 - DNA, 27 bp, Artificial sequence
  SiRNA target sequence
atgttgcggccgaaagattttttaatg

SEQ ID NO: 238789 - DNA, 27 bp, Artificial sequence
  SiRNA target sequence
tgttgcggccgaaagattttttaatgg

SEQ ID NO: 238790 - DNA, 27 bp, Artificial sequence
  SiRNA target sequence
gttgcggccgaaagattttttaatgga

SEQ ID NO: 238791 - DNA, 27 bp, Artificial sequence
  SiRNA target sequence
ttgcggccgaaagattttttaatggat

SEQ ID NO: 238792 - DNA, 27 bp, Artificial sequence
  SiRNA target sequence
tgcggccgaaagattttttaatggatt

SEQ ID NO: 238793 - DNA, 27 bp, Artificial sequence
  SiRNA target sequence
gcggccgaaagattttttaatggattt

SEQ ID NO: 238794 - DNA, 27 bp, Artificial sequence
  SiRNA target sequence
cggccgaaagattttttaatggatttt

SEQ ID NO: 238795 - DNA, 27 bp, Artificial sequence
  SiRNA target sequence
ggccgaaagattttttaatggattttt

SEQ ID NO: 238796 - DNA, 27 bp, Artificial sequence
  SiRNA target sequence
gccgaaagattttttaatggatttttt

SEQ ID NO: 238797 - DNA, 27 bp, Artificial sequence
  SiRNA target sequence
ccgaaagattttttaatggattttttt

SEQ ID NO: 238798 - DNA, 27 bp, Artificial sequence
  SiRNA target sequence
cgaaagattttttaatggatttttttg

SEQ ID NO: 238799 - DNA, 27 bp, Artificial sequence
  SiRNA target sequence
gaaagattttttaatggatttttttgt

SEQ ID NO: 238800 - DNA, 27 bp, Artificial sequence
  SiRNA target sequence
aaagattttttaatggatttttttgtc

SEQ ID NO: 238801 - DNA, 27 bp, Artificial sequence
  SiRNA target sequence
aagattttttaatggatttttttgtct

SEQ ID NO: 238802 - DNA, 27 bp, Artificial sequence
  SiRNA target sequence
agattttttaatggatttttttgtctg

SEQ ID NO: 238803 - DNA, 27 bp, Artificial sequence
  SiRNA target sequence
gattttttaatggatttttttgtctga

SEQ ID NO: 238804 - DNA, 27 bp, Artificial sequence
  SiRNA target sequence
attttttaatggatttttttgtctgag

SEQ ID NO: 238805 - DNA, 27 bp, Artificial sequence
  SiRNA target sequence
ttttttaatggatttttttgtctgagt

SEQ ID NO: 238806 - DNA, 27 bp, Artificial sequence
  SiRNA target sequence
tttttaatggatttttttgtctgagtg

SEQ ID NO: 238807 - DNA, 27 bp, Artificial sequence
  SiRNA target sequence
ttttaatggatttttttgtctgagtgg

SEQ ID NO: 238808 - DNA, 27 bp, Artificial sequence
  SiRNA target sequence
tttaatggatttttttgtctgagtgga

SEQ ID NO: 238809 - DNA, 27 bp, Artificial sequence
  SiRNA target sequence
ttaatggatttttttgtctgagtggaa

SEQ ID NO: 238810 - DNA, 27 bp, Artificial sequence
  SiRNA target sequence
taatggatttttttgtctgagtggaat

SEQ ID NO: 238811 - DNA, 27 bp, Artificial sequence
  SiRNA target sequence
aatggatttttttgtctgagtggaatt

SEQ ID NO: 238812 - DNA, 27 bp, Artificial sequence
  SiRNA target sequence
atggatttttttgtctgagtggaattc

SEQ ID NO: 238813 - DNA, 27 bp, Artificial sequence
  SiRNA target sequence
tggatttttttgtctgagtggaattct

SEQ ID NO: 238814 - DNA, 27 bp, Artificial sequence
  SiRNA target sequence
ggatttttttgtctgagtggaattctc

SEQ ID NO: 238815 - DNA, 27 bp, Artificial sequence
  SiRNA target sequence
gatttttttgtctgagtggaattctct

SEQ ID NO: 238816 - DNA, 27 bp, Artificial sequence
  SiRNA target sequence
atttttttgtctgagtggaattctctg

SEQ ID NO: 238817 - DNA, 27 bp, Artificial sequence
  SiRNA target sequence
tttttttgtctgagtggaattctctgt

SEQ ID NO: 238818 - DNA, 27 bp, Artificial sequence
  SiRNA target sequence
ttttttgtctgagtggaattctctgtg

SEQ ID NO: 238819 - DNA, 27 bp, Artificial sequence
  SiRNA target sequence
tttttgtctgagtggaattctctgtgc

SEQ ID NO: 238820 - DNA, 27 bp, Artificial sequence
  SiRNA target sequence
ttttgtctgagtggaattctctgtgct

SEQ ID NO: 238821 - DNA, 27 bp, Artificial sequence
  SiRNA target sequence
tttgtctgagtggaattctctgtgctg

SEQ ID NO: 238822 - DNA, 27 bp, Artificial sequence
  SiRNA target sequence
ttgtctgagtggaattctctgtgctgt

SEQ ID NO: 238823 - DNA, 27 bp, Artificial sequence
  SiRNA target sequence
tgtctgagtggaattctctgtgctgta

SEQ ID NO: 238824 - DNA, 27 bp, Artificial sequence
  SiRNA target sequence
gtctgagtggaattctctgtgctgtaa

SEQ ID NO: 238825 - DNA, 27 bp, Artificial sequence
  SiRNA target sequence
tctgagtggaattctctgtgctgtaat

SEQ ID NO: 238826 - DNA, 27 bp, Artificial sequence
  SiRNA target sequence
ctgagtggaattctctgtgctgtaatt

SEQ ID NO: 238827 - DNA, 27 bp, Artificial sequence
  SiRNA target sequence
tgagtggaattctctgtgctgtaattt

SEQ ID NO: 238828 - DNA, 27 bp, Artificial sequence
  SiRNA target sequence
gagtggaattctctgtgctgtaattta

SEQ ID NO: 238829 - DNA, 27 bp, Artificial sequence
  SiRNA target sequence
agtggaattctctgtgctgtaatttat

SEQ ID NO: 238830 - DNA, 27 bp, Artificial sequence
  SiRNA target sequence
gtggaattctctgtgctgtaatttatc

SEQ ID NO: 238831 - DNA, 27 bp, Artificial sequence
  SiRNA target sequence
tggaattctctgtgctgtaatttatct

SEQ ID NO: 238832 - DNA, 27 bp, Artificial sequence
  SiRNA target sequence
ggaattctctgtgctgtaatttatctt

SEQ ID NO: 238833 - DNA, 27 bp, Artificial sequence
  SiRNA target sequence
gaattctctgtgctgtaatttatcttc

SEQ ID NO: 238834 - DNA, 27 bp, Artificial sequence
  SiRNA target sequence
aattctctgtgctgtaatttatcttct

SEQ ID NO: 238835 - DNA, 27 bp, Artificial sequence
  SiRNA target sequence
attctctgtgctgtaatttatcttcta

SEQ ID NO: 238836 - DNA, 27 bp, Artificial sequence
  SiRNA target sequence
ttctctgtgctgtaatttatcttctaa

SEQ ID NO: 238837 - DNA, 27 bp, Artificial sequence
  SiRNA target sequence
tctctgtgctgtaatttatcttctaaa

SEQ ID NO: 238838 - DNA, 27 bp, Artificial sequence
  SiRNA target sequence
ctctgtgctgtaatttatcttctaaaa

SEQ ID NO: 238839 - DNA, 27 bp, Artificial sequence
  SiRNA target sequence
tctgtgctgtaatttatcttctaaaaa

SEQ ID NO: 238840 - DNA, 27 bp, Artificial sequence
  SiRNA target sequence
ctgtgctgtaatttatcttctaaaaaa

SEQ ID NO: 238841 - DNA, 27 bp, Artificial sequence
  SiRNA target sequence
tgtgctgtaatttatcttctaaaaaaa

SEQ ID NO: 238842 - DNA, 27 bp, Artificial sequence
  SiRNA target sequence
gtgctgtaatttatcttctaaaaaaat

SEQ ID NO: 238843 - DNA, 27 bp, Artificial sequence
  SiRNA target sequence
tgctgtaatttatcttctaaaaaaata

SEQ ID NO: 238844 - DNA, 27 bp, Artificial sequence
  SiRNA target sequence
gctgtaatttatcttctaaaaaaatat

SEQ ID NO: 238845 - DNA, 27 bp, Artificial sequence
  SiRNA target sequence
ctgtaatttatcttctaaaaaaatatt

SEQ ID NO: 238846 - DNA, 27 bp, Artificial sequence
  SiRNA target sequence
tgtaatttatcttctaaaaaaatattt

SEQ ID NO: 238847 - DNA, 27 bp, Artificial sequence
  SiRNA target sequence
gtaatttatcttctaaaaaaatattta

SEQ ID NO: 238848 - DNA, 27 bp, Artificial sequence
  SiRNA target sequence
taatttatcttctaaaaaaatatttag

SEQ ID NO: 238849 - DNA, 27 bp, Artificial sequence
  SiRNA target sequence
aatttatcttctaaaaaaatatttaga

SEQ ID NO: 238850 - DNA, 27 bp, Artificial sequence
  SiRNA target sequence
atttatcttctaaaaaaatatttagaa

SEQ ID NO: 238851 - DNA, 27 bp, Artificial sequence
  SiRNA target sequence
tttatcttctaaaaaaatatttagaaa

SEQ ID NO: 238852 - DNA, 27 bp, Artificial sequence
  SiRNA target sequence
ttatcttctaaaaaaatatttagaaaa

SEQ ID NO: 238853 - DNA, 27 bp, Artificial sequence
  SiRNA target sequence
tatcttctaaaaaaatatttagaaaat

SEQ ID NO: 238854 - DNA, 27 bp, Artificial sequence
  SiRNA target sequence
atcttctaaaaaaatatttagaaaata

SEQ ID NO: 238855 - DNA, 27 bp, Artificial sequence
  SiRNA target sequence
tcttctaaaaaaatatttagaaaataa

SEQ ID NO: 238856 - DNA, 27 bp, Artificial sequence
  SiRNA target sequence
cttctaaaaaaatatttagaaaataat

SEQ ID NO: 238857 - DNA, 27 bp, Artificial sequence
  SiRNA target sequence
ttctaaaaaaatatttagaaaataatg

SEQ ID NO: 238858 - DNA, 27 bp, Artificial sequence
  SiRNA target sequence
tctaaaaaaatatttagaaaataatgt

SEQ ID NO: 238859 - DNA, 27 bp, Artificial sequence
  SiRNA target sequence
ctaaaaaaatatttagaaaataatgtt

SEQ ID NO: 238860 - DNA, 27 bp, Artificial sequence
  SiRNA target sequence
taaaaaaatatttagaaaataatgtta

SEQ ID NO: 238861 - DNA, 27 bp, Artificial sequence
  SiRNA target sequence
aaaaaaatatttagaaaataatgttac

SEQ ID NO: 238862 - DNA, 27 bp, Artificial sequence
  SiRNA target sequence
aaaaaatatttagaaaataatgttact

SEQ ID NO: 238863 - DNA, 27 bp, Artificial sequence
  SiRNA target sequence
aaaaatatttagaaaataatgttacta

SEQ ID NO: 238864 - DNA, 27 bp, Artificial sequence
  SiRNA target sequence
aaaatatttagaaaataatgttactag

SEQ ID NO: 238865 - DNA, 27 bp, Artificial sequence
  SiRNA target sequence
aaatatttagaaaataatgttactagc

SEQ ID NO: 238866 - DNA, 27 bp, Artificial sequence
  SiRNA target sequence
aatatttagaaaataatgttactagca

SEQ ID NO: 238867 - DNA, 27 bp, Artificial sequence
  SiRNA target sequence
atatttagaaaataatgttactagcaa

SEQ ID NO: 238868 - DNA, 27 bp, Artificial sequence
  SiRNA target sequence
tatttagaaaataatgttactagcaaa

SEQ ID NO: 238869 - DNA, 27 bp, Artificial sequence
  SiRNA target sequence
atttagaaaataatgttactagcaaac

SEQ ID NO: 238870 - DNA, 27 bp, Artificial sequence
  SiRNA target sequence
tttagaaaataatgttactagcaaacc

SEQ ID NO: 238871 - DNA, 27 bp, Artificial sequence
  SiRNA target sequence
ttagaaaataatgttactagcaaacca

SEQ ID NO: 238872 - DNA, 27 bp, Artificial sequence
  SiRNA target sequence
tagaaaataatgttactagcaaaccaa

SEQ ID NO: 238873 - DNA, 27 bp, Artificial sequence
  SiRNA target sequence
agaaaataatgttactagcaaaccaat

SEQ ID NO: 238874 - DNA, 27 bp, Artificial sequence
  SiRNA target sequence
gaaaataatgttactagcaaaccaatg

SEQ ID NO: 238875 - DNA, 27 bp, Artificial sequence
  SiRNA target sequence
aaaataatgttactagcaaaccaatgt

SEQ ID NO: 238876 - DNA, 27 bp, Artificial sequence
  SiRNA target sequence
aaataatgttactagcaaaccaatgtt

SEQ ID NO: 238877 - DNA, 27 bp, Artificial sequence
  SiRNA target sequence
aataatgttactagcaaaccaatgttt

SEQ ID NO: 238878 - DNA, 27 bp, Artificial sequence
  SiRNA target sequence
ataatgttactagcaaaccaatgtttg

SEQ ID NO: 238879 - DNA, 27 bp, Artificial sequence
  SiRNA target sequence
taatgttactagcaaaccaatgtttgt

SEQ ID NO: 238880 - DNA, 27 bp, Artificial sequence
  SiRNA target sequence
aatgttactagcaaaccaatgtttgtt

SEQ ID NO: 238881 - DNA, 27 bp, Artificial sequence
  SiRNA target sequence
atgttactagcaaaccaatgtttgtta

SEQ ID NO: 238882 - DNA, 27 bp, Artificial sequence
  SiRNA target sequence
tgttactagcaaaccaatgtttgttag

SEQ ID NO: 238883 - DNA, 27 bp, Artificial sequence
  SiRNA target sequence
gttactagcaaaccaatgtttgttaga

SEQ ID NO: 238884 - DNA, 27 bp, Artificial sequence
  SiRNA target sequence
ttactagcaaaccaatgtttgttagaa

SEQ ID NO: 238885 - DNA, 27 bp, Artificial sequence
  SiRNA target sequence
tactagcaaaccaatgtttgttagaaa

SEQ ID NO: 238886 - DNA, 27 bp, Artificial sequence
  SiRNA target sequence
actagcaaaccaatgtttgttagaaag

SEQ ID NO: 238887 - DNA, 27 bp, Artificial sequence
  SiRNA target sequence
ctagcaaaccaatgtttgttagaaaga

SEQ ID NO: 238888 - DNA, 27 bp, Artificial sequence
  SiRNA target sequence
tagcaaaccaatgtttgttagaaagac

SEQ ID NO: 238889 - DNA, 27 bp, Artificial sequence
  SiRNA target sequence
agcaaaccaatgtttgttagaaagact

SEQ ID NO: 238890 - DNA, 27 bp, Artificial sequence
  SiRNA target sequence
gcaaaccaatgtttgttagaaagactt

SEQ ID NO: 238891 - DNA, 27 bp, Artificial sequence
  SiRNA target sequence
caaaccaatgtttgttagaaagacttt

SEQ ID NO: 238892 - DNA, 27 bp, Artificial sequence
  SiRNA target sequence
aaaccaatgtttgttagaaagactttt

SEQ ID NO: 238893 - DNA, 27 bp, Artificial sequence
  SiRNA target sequence
aaccaatgtttgttagaaagactttta

SEQ ID NO: 238894 - DNA, 27 bp, Artificial sequence
  SiRNA target sequence
accaatgtttgttagaaagacttttac

SEQ ID NO: 238895 - DNA, 27 bp, Artificial sequence
  SiRNA target sequence
ccaatgtttgttagaaagacttttact

SEQ ID NO: 238896 - DNA, 27 bp, Artificial sequence
  SiRNA target sequence
caatgtttgttagaaagacttttacta

SEQ ID NO: 238897 - DNA, 27 bp, Artificial sequence
  SiRNA target sequence
aatgtttgttagaaagacttttactaa

SEQ ID NO: 238898 - DNA, 27 bp, Artificial sequence
  SiRNA target sequence
atgtttgttagaaagacttttactaaa

SEQ ID NO: 238899 - DNA, 27 bp, Artificial sequence
  SiRNA target sequence
tgtttgttagaaagacttttactaaaa

SEQ ID NO: 238900 - DNA, 27 bp, Artificial sequence
  SiRNA target sequence
gtttgttagaaagacttttactaaaaa

SEQ ID NO: 238901 - DNA, 27 bp, Artificial sequence
  SiRNA target sequence
tttgttagaaagacttttactaaaaag

SEQ ID NO: 238902 - DNA, 27 bp, Artificial sequence
  SiRNA target sequence
ttgttagaaagacttttactaaaaaga

SEQ ID NO: 238903 - DNA, 27 bp, Artificial sequence
  SiRNA target sequence
tgttagaaagacttttactaaaaagaa

SEQ ID NO: 238904 - DNA, 27 bp, Artificial sequence
  SiRNA target sequence
gttagaaagacttttactaaaaagaag

SEQ ID NO: 238905 - DNA, 27 bp, Artificial sequence
  SiRNA target sequence
ttagaaagacttttactaaaaagaaga

SEQ ID NO: 238906 - DNA, 27 bp, Artificial sequence
  SiRNA target sequence
tagaaagacttttactaaaaagaagag

SEQ ID NO: 238907 - DNA, 27 bp, Artificial sequence
  SiRNA target sequence
agaaagacttttactaaaaagaagagt

SEQ ID NO: 238908 - DNA, 27 bp, Artificial sequence
  SiRNA target sequence
gaaagacttttactaaaaagaagagta

SEQ ID NO: 238909 - DNA, 27 bp, Artificial sequence
  SiRNA target sequence
aaagacttttactaaaaagaagagtaa

SEQ ID NO: 238910 - DNA, 27 bp, Artificial sequence
  SiRNA target sequence
aagacttttactaaaaagaagagtaaa

SEQ ID NO: 238911 - DNA, 27 bp, Artificial sequence
  SiRNA target sequence
agacttttactaaaaagaagagtaaag

SEQ ID NO: 238912 - DNA, 27 bp, Artificial sequence
  SiRNA target sequence
gacttttactaaaaagaagagtaaagt

SEQ ID NO: 238913 - DNA, 27 bp, Artificial sequence
  SiRNA target sequence
acttttactaaaaagaagagtaaagtg

SEQ ID NO: 238914 - DNA, 27 bp, Artificial sequence
  SiRNA target sequence
cttttactaaaaagaagagtaaagtga

SEQ ID NO: 238915 - DNA, 27 bp, Artificial sequence
  SiRNA target sequence
ttttactaaaaagaagagtaaagtgaa

SEQ ID NO: 238916 - DNA, 27 bp, Artificial sequence
  SiRNA target sequence
tttactaaaaagaagagtaaagtgaag

SEQ ID NO: 238917 - DNA, 27 bp, Artificial sequence
  SiRNA target sequence
ttactaaaaagaagagtaaagtgaagg

SEQ ID NO: 238918 - DNA, 27 bp, Artificial sequence
  SiRNA target sequence
tactaaaaagaagagtaaagtgaaggt

SEQ ID NO: 238919 - DNA, 27 bp, Artificial sequence
  SiRNA target sequence
actaaaaagaagagtaaagtgaaggtt

SEQ ID NO: 238920 - DNA, 27 bp, Artificial sequence
  SiRNA target sequence
ctaaaaagaagagtaaagtgaaggttg

SEQ ID NO: 238921 - DNA, 27 bp, Artificial sequence
  SiRNA target sequence
taaaaagaagagtaaagtgaaggttgg

SEQ ID NO: 238922 - DNA, 27 bp, Artificial sequence
  SiRNA target sequence
aaaaagaagagtaaagtgaaggttgga

SEQ ID NO: 238923 - DNA, 27 bp, Artificial sequence
  SiRNA target sequence
aaaagaagagtaaagtgaaggttggat

SEQ ID NO: 238924 - DNA, 27 bp, Artificial sequence
  SiRNA target sequence
aaagaagagtaaagtgaaggttggatt

SEQ ID NO: 238925 - DNA, 27 bp, Artificial sequence
  SiRNA target sequence
aagaagagtaaagtgaaggttggattt

SEQ ID NO: 238926 - DNA, 27 bp, Artificial sequence
  SiRNA target sequence
agaagagtaaagtgaaggttggatttg

SEQ ID NO: 238927 - DNA, 27 bp, Artificial sequence
  SiRNA target sequence
gaagagtaaagtgaaggttggatttgt

SEQ ID NO: 238928 - DNA, 27 bp, Artificial sequence
  SiRNA target sequence
aagagtaaagtgaaggttggatttgtt

SEQ ID NO: 238929 - DNA, 27 bp, Artificial sequence
  SiRNA target sequence
agagtaaagtgaaggttggatttgttg

SEQ ID NO: 238930 - DNA, 27 bp, Artificial sequence
  SiRNA target sequence
gagtaaagtgaaggttggatttgttga

SEQ ID NO: 238931 - DNA, 27 bp, Artificial sequence
  SiRNA target sequence
agtaaagtgaaggttggatttgttgat

SEQ ID NO: 238932 - DNA, 27 bp, Artificial sequence
  SiRNA target sequence
gtaaagtgaaggttggatttgttgatg

SEQ ID NO: 238933 - DNA, 27 bp, Artificial sequence
  SiRNA target sequence
taaagtgaaggttggatttgttgatgg

SEQ ID NO: 238934 - DNA, 27 bp, Artificial sequence
  SiRNA target sequence
aaagtgaaggttggatttgttgatgga

SEQ ID NO: 238935 - DNA, 27 bp, Artificial sequence
  SiRNA target sequence
aagtgaaggttggatttgttgatggac

SEQ ID NO: 238936 - DNA, 27 bp, Artificial sequence
  SiRNA target sequence
agtgaaggttggatttgttgatggact

SEQ ID NO: 238937 - DNA, 27 bp, Artificial sequence
  SiRNA target sequence
gtgaaggttggatttgttgatggactt

SEQ ID NO: 238938 - DNA, 27 bp, Artificial sequence
  SiRNA target sequence
tgaaggttggatttgttgatggactta

SEQ ID NO: 238939 - DNA, 27 bp, Artificial sequence
  SiRNA target sequence
gaaggttggatttgttgatggacttat

SEQ ID NO: 238940 - DNA, 27 bp, Artificial sequence
  SiRNA target sequence
aaggttggatttgttgatggacttatt

SEQ ID NO: 238941 - DNA, 27 bp, Artificial sequence
  SiRNA target sequence
aggttggatttgttgatggacttattg

SEQ ID NO: 238942 - DNA, 27 bp, Artificial sequence
  SiRNA target sequence
ggttggatttgttgatggacttattga

SEQ ID NO: 238943 - DNA, 27 bp, Artificial sequence
  SiRNA target sequence
gttggatttgttgatggacttattgag

SEQ ID NO: 238944 - DNA, 27 bp, Artificial sequence
  SiRNA target sequence
ttggatttgttgatggacttattgaga

SEQ ID NO: 238945 - DNA, 27 bp, Artificial sequence
  SiRNA target sequence
tggatttgttgatggacttattgagat

SEQ ID NO: 238946 - DNA, 27 bp, Artificial sequence
  SiRNA target sequence
ggatttgttgatggacttattgagatg

SEQ ID NO: 238947 - DNA, 27 bp, Artificial sequence
  SiRNA target sequence
gatttgttgatggacttattgagatga

SEQ ID NO: 238948 - DNA, 27 bp, Artificial sequence
  SiRNA target sequence
atttgttgatggacttattgagatgag

SEQ ID NO: 238949 - DNA, 27 bp, Artificial sequence
  SiRNA target sequence
tttgttgatggacttattgagatgagt

SEQ ID NO: 238950 - DNA, 27 bp, Artificial sequence
  SiRNA target sequence
ttgttgatggacttattgagatgagta

SEQ ID NO: 238951 - DNA, 27 bp, Artificial sequence
  SiRNA target sequence
tgttgatggacttattgagatgagtaa

SEQ ID NO: 238952 - DNA, 27 bp, Artificial sequence
  SiRNA target sequence
gttgatggacttattgagatgagtaaa

SEQ ID NO: 238953 - DNA, 27 bp, Artificial sequence
  SiRNA target sequence
ttgatggacttattgagatgagtaaat

SEQ ID NO: 238954 - DNA, 27 bp, Artificial sequence
  SiRNA target sequence
tgatggacttattgagatgagtaaatc

SEQ ID NO: 238955 - DNA, 27 bp, Artificial sequence
  SiRNA target sequence
gatggacttattgagatgagtaaatct

SEQ ID NO: 238956 - DNA, 27 bp, Artificial sequence
  SiRNA target sequence
atggacttattgagatgagtaaatcta

SEQ ID NO: 238957 - DNA, 27 bp, Artificial sequence
  SiRNA target sequence
tggacttattgagatgagtaaatctaa

SEQ ID NO: 238958 - DNA, 27 bp, Artificial sequence
  SiRNA target sequence
ggacttattgagatgagtaaatctaaa

SEQ ID NO: 238959 - DNA, 27 bp, Artificial sequence
  SiRNA target sequence
gacttattgagatgagtaaatctaaac

SEQ ID NO: 238960 - DNA, 27 bp, Artificial sequence
  SiRNA target sequence
acttattgagatgagtaaatctaaact

SEQ ID NO: 238961 - DNA, 27 bp, Artificial sequence
  SiRNA target sequence
cttattgagatgagtaaatctaaacta

SEQ ID NO: 238962 - DNA, 27 bp, Artificial sequence
  SiRNA target sequence
ttattgagatgagtaaatctaaactac

SEQ ID NO: 238963 - DNA, 27 bp, Artificial sequence
  SiRNA target sequence
tattgagatgagtaaatctaaactact

SEQ ID NO: 238964 - DNA, 27 bp, Artificial sequence
  SiRNA target sequence
attgagatgagtaaatctaaactactg

SEQ ID NO: 238965 - DNA, 27 bp, Artificial sequence
  SiRNA target sequence
ttgagatgagtaaatctaaactactgt

SEQ ID NO: 238966 - DNA, 27 bp, Artificial sequence
  SiRNA target sequence
tgagatgagtaaatctaaactactgtt

SEQ ID NO: 238967 - DNA, 27 bp, Artificial sequence
  SiRNA target sequence
gagatgagtaaatctaaactactgttg

SEQ ID NO: 238968 - DNA, 27 bp, Artificial sequence
  SiRNA target sequence
agatgagtaaatctaaactactgttga

SEQ ID NO: 238969 - DNA, 27 bp, Artificial sequence
  SiRNA target sequence
gatgagtaaatctaaactactgttgaa

SEQ ID NO: 238970 - DNA, 27 bp, Artificial sequence
  SiRNA target sequence
atgagtaaatctaaactactgttgaat

SEQ ID NO: 238971 - DNA, 27 bp, Artificial sequence
  SiRNA target sequence
tgagtaaatctaaactactgttgaata

SEQ ID NO: 238972 - DNA, 27 bp, Artificial sequence
  SiRNA target sequence
gagtaaatctaaactactgttgaatat

SEQ ID NO: 238973 - DNA, 27 bp, Artificial sequence
  SiRNA target sequence
agtaaatctaaactactgttgaatatg

SEQ ID NO: 238974 - DNA, 27 bp, Artificial sequence
  SiRNA target sequence
gtaaatctaaactactgttgaatatgt

SEQ ID NO: 238975 - DNA, 27 bp, Artificial sequence
  SiRNA target sequence
taaatctaaactactgttgaatatgtc

SEQ ID NO: 238976 - DNA, 27 bp, Artificial sequence
  SiRNA target sequence
aaatctaaactactgttgaatatgtca

SEQ ID NO: 238977 - DNA, 27 bp, Artificial sequence
  SiRNA target sequence
aatctaaactactgttgaatatgtcat

SEQ ID NO: 238978 - DNA, 27 bp, Artificial sequence
  SiRNA target sequence
atctaaactactgttgaatatgtcatt

SEQ ID NO: 238979 - DNA, 27 bp, Artificial sequence
  SiRNA target sequence
tctaaactactgttgaatatgtcatta

SEQ ID NO: 238980 - DNA, 27 bp, Artificial sequence
  SiRNA target sequence
ctaaactactgttgaatatgtcattag

SEQ ID NO: 238981 - DNA, 27 bp, Artificial sequence
  SiRNA target sequence
taaactactgttgaatatgtcattagt

SEQ ID NO: 238982 - DNA, 27 bp, Artificial sequence
  SiRNA target sequence
aaactactgttgaatatgtcattagtc

SEQ ID NO: 238983 - DNA, 27 bp, Artificial sequence
  SiRNA target sequence
aactactgttgaatatgtcattagtcg

SEQ ID NO: 238984 - DNA, 27 bp, Artificial sequence
  SiRNA target sequence
actactgttgaatatgtcattagtcgt

SEQ ID NO: 238985 - DNA, 27 bp, Artificial sequence
  SiRNA target sequence
ctactgttgaatatgtcattagtcgta

SEQ ID NO: 238986 - DNA, 27 bp, Artificial sequence
  SiRNA target sequence
tactgttgaatatgtcattagtcgtat

SEQ ID NO: 238987 - DNA, 27 bp, Artificial sequence
  SiRNA target sequence
actgttgaatatgtcattagtcgtatt

SEQ ID NO: 238988 - DNA, 27 bp, Artificial sequence
  SiRNA target sequence
ctgttgaatatgtcattagtcgtatta

SEQ ID NO: 238989 - DNA, 27 bp, Artificial sequence
  SiRNA target sequence
tgttgaatatgtcattagtcgtattat

SEQ ID NO: 238990 - DNA, 27 bp, Artificial sequence
  SiRNA target sequence
gttgaatatgtcattagtcgtattatt

SEQ ID NO: 238991 - DNA, 27 bp, Artificial sequence
  SiRNA target sequence
ttgaatatgtcattagtcgtattattt

SEQ ID NO: 238992 - DNA, 27 bp, Artificial sequence
  SiRNA target sequence
tgaatatgtcattagtcgtattatttt

SEQ ID NO: 238993 - DNA, 27 bp, Artificial sequence
  SiRNA target sequence
gaatatgtcattagtcgtattatttta

SEQ ID NO: 238994 - DNA, 27 bp, Artificial sequence
  SiRNA target sequence
aatatgtcattagtcgtattattttat

SEQ ID NO: 238995 - DNA, 27 bp, Artificial sequence
  SiRNA target sequence
atatgtcattagtcgtattattttatg

SEQ ID NO: 238996 - DNA, 27 bp, Artificial sequence
  SiRNA target sequence
tatgtcattagtcgtattattttatgc

SEQ ID NO: 238997 - DNA, 27 bp, Artificial sequence
  SiRNA target sequence
atgtcattagtcgtattattttatgct

SEQ ID NO: 238998 - DNA, 27 bp, Artificial sequence
  SiRNA target sequence
tgtcattagtcgtattattttatgctg

SEQ ID NO: 238999 - DNA, 27 bp, Artificial sequence
  SiRNA target sequence
gtcattagtcgtattattttatgctgt

SEQ ID NO: 239000 - DNA, 27 bp, Artificial sequence
  SiRNA target sequence
tcattagtcgtattattttatgctgtt

SEQ ID NO: 239001 - DNA, 27 bp, Artificial sequence
  SiRNA target sequence
cattagtcgtattattttatgctgttt

SEQ ID NO: 239002 - DNA, 27 bp, Artificial sequence
  SiRNA target sequence
attagtcgtattattttatgctgtttc

SEQ ID NO: 239003 - DNA, 27 bp, Artificial sequence
  SiRNA target sequence
ttagtcgtattattttatgctgtttct

SEQ ID NO: 239004 - DNA, 27 bp, Artificial sequence
  SiRNA target sequence
tagtcgtattattttatgctgtttcta

SEQ ID NO: 239005 - DNA, 27 bp, Artificial sequence
  SiRNA target sequence
agtcgtattattttatgctgtttctac

SEQ ID NO: 239006 - DNA, 27 bp, Artificial sequence
  SiRNA target sequence
gtcgtattattttatgctgtttctacg

SEQ ID NO: 239007 - DNA, 27 bp, Artificial sequence
  SiRNA target sequence
tcgtattattttatgctgtttctacga

SEQ ID NO: 239008 - DNA, 27 bp, Artificial sequence
  SiRNA target sequence
cgtattattttatgctgtttctacgaa

SEQ ID NO: 239009 - DNA, 27 bp, Artificial sequence
  SiRNA target sequence
gtattattttatgctgtttctacgaat

SEQ ID NO: 239010 - DNA, 27 bp, Artificial sequence
  SiRNA target sequence
tattattttatgctgtttctacgaata

SEQ ID NO: 239011 - DNA, 27 bp, Artificial sequence
  SiRNA target sequence
attattttatgctgtttctacgaatat

SEQ ID NO: 239012 - DNA, 27 bp, Artificial sequence
  SiRNA target sequence
ttattttatgctgtttctacgaatatt

SEQ ID NO: 239013 - DNA, 27 bp, Artificial sequence
  SiRNA target sequence
tattttatgctgtttctacgaatatta

SEQ ID NO: 239014 - DNA, 27 bp, Artificial sequence
  SiRNA target sequence
attttatgctgtttctacgaatattat

SEQ ID NO: 239015 - DNA, 27 bp, Artificial sequence
  SiRNA target sequence
ttttatgctgtttctacgaatattatt

SEQ ID NO: 239016 - DNA, 27 bp, Artificial sequence
  SiRNA target sequence
tttatgctgtttctacgaatattattg

SEQ ID NO: 239017 - DNA, 27 bp, Artificial sequence
  SiRNA target sequence
ttatgctgtttctacgaatattattga

SEQ ID NO: 239018 - DNA, 27 bp, Artificial sequence
  SiRNA target sequence
tatgctgtttctacgaatattattgag

SEQ ID NO: 239019 - DNA, 27 bp, Artificial sequence
  SiRNA target sequence
atgctgtttctacgaatattattgagt

SEQ ID NO: 239020 - DNA, 27 bp, Artificial sequence
  SiRNA target sequence
tgctgtttctacgaatattattgagtc

SEQ ID NO: 239021 - DNA, 27 bp, Artificial sequence
  SiRNA target sequence
gctgtttctacgaatattattgagtca

SEQ ID NO: 239022 - DNA, 27 bp, Artificial sequence
  SiRNA target sequence
ctgtttctacgaatattattgagtcag

SEQ ID NO: 239023 - DNA, 27 bp, Artificial sequence
  SiRNA target sequence
tgtttctacgaatattattgagtcagc

SEQ ID NO: 239024 - DNA, 27 bp, Artificial sequence
  SiRNA target sequence
gtttctacgaatattattgagtcagct

SEQ ID NO: 239025 - DNA, 27 bp, Artificial sequence
  SiRNA target sequence
tttctacgaatattattgagtcagctt

SEQ ID NO: 239026 - DNA, 27 bp, Artificial sequence
  SiRNA target sequence
ttctacgaatattattgagtcagctta

SEQ ID NO: 239027 - DNA, 27 bp, Artificial sequence
  SiRNA target sequence
tctacgaatattattgagtcagcttat

SEQ ID NO: 239028 - DNA, 27 bp, Artificial sequence
  SiRNA target sequence
ctacgaatattattgagtcagcttata

SEQ ID NO: 239029 - DNA, 27 bp, Artificial sequence
  SiRNA target sequence
tacgaatattattgagtcagcttataa

SEQ ID NO: 239030 - DNA, 27 bp, Artificial sequence
  SiRNA target sequence
acgaatattattgagtcagcttataaa

SEQ ID NO: 239031 - DNA, 27 bp, Artificial sequence
  SiRNA target sequence
cgaatattattgagtcagcttataaat

SEQ ID NO: 239032 - DNA, 27 bp, Artificial sequence
  SiRNA target sequence
gaatattattgagtcagcttataaatc

SEQ ID NO: 239033 - DNA, 27 bp, Artificial sequence
  SiRNA target sequence
aatattattgagtcagcttataaatct

SEQ ID NO: 239034 - DNA, 27 bp, Artificial sequence
  SiRNA target sequence
atattattgagtcagcttataaatctg

SEQ ID NO: 239035 - DNA, 27 bp, Artificial sequence
  SiRNA target sequence
tattattgagtcagcttataaatctgc

SEQ ID NO: 239036 - DNA, 27 bp, Artificial sequence
  SiRNA target sequence
attattgagtcagcttataaatctgct

SEQ ID NO: 239037 - DNA, 27 bp, Artificial sequence
  SiRNA target sequence
ttattgagtcagcttataaatctgctt

SEQ ID NO: 239038 - DNA, 27 bp, Artificial sequence
  SiRNA target sequence
tattgagtcagcttataaatctgcttt

SEQ ID NO: 239039 - DNA, 27 bp, Artificial sequence
  SiRNA target sequence
attgagtcagcttataaatctgcttta

SEQ ID NO: 239040 - DNA, 27 bp, Artificial sequence
  SiRNA target sequence
ttgagtcagcttataaatctgctttag

SEQ ID NO: 239041 - DNA, 27 bp, Artificial sequence
  SiRNA target sequence
tgagtcagcttataaatctgctttagc

SEQ ID NO: 239042 - DNA, 27 bp, Artificial sequence
  SiRNA target sequence
gagtcagcttataaatctgctttagct

SEQ ID NO: 239043 - DNA, 27 bp, Artificial sequence
  SiRNA target sequence
agtcagcttataaatctgctttagctg

SEQ ID NO: 239044 - DNA, 27 bp, Artificial sequence
  SiRNA target sequence
gtcagcttataaatctgctttagctgt

SEQ ID NO: 239045 - DNA, 27 bp, Artificial sequence
  SiRNA target sequence
tcagcttataaatctgctttagctgtc

SEQ ID NO: 239046 - DNA, 27 bp, Artificial sequence
  SiRNA target sequence
cagcttataaatctgctttagctgtcg

SEQ ID NO: 239047 - DNA, 27 bp, Artificial sequence
  SiRNA target sequence
agcttataaatctgctttagctgtcgg

SEQ ID NO: 239048 - DNA, 27 bp, Artificial sequence
  SiRNA target sequence
gcttataaatctgctttagctgtcggt

SEQ ID NO: 239049 - DNA, 27 bp, Artificial sequence
  SiRNA target sequence
cttataaatctgctttagctgtcggtg

SEQ ID NO: 239050 - DNA, 27 bp, Artificial sequence
  SiRNA target sequence
ttataaatctgctttagctgtcggtgc

SEQ ID NO: 239051 - DNA, 27 bp, Artificial sequence
  SiRNA target sequence
tataaatctgctttagctgtcggtgct

SEQ ID NO: 239052 - DNA, 27 bp, Artificial sequence
  SiRNA target sequence
ataaatctgctttagctgtcggtgcta

SEQ ID NO: 239053 - DNA, 27 bp, Artificial sequence
  SiRNA target sequence
taaatctgctttagctgtcggtgctaa

SEQ ID NO: 239054 - DNA, 27 bp, Artificial sequence
  SiRNA target sequence
aaatctgctttagctgtcggtgctaat

SEQ ID NO: 239055 - DNA, 27 bp, Artificial sequence
  SiRNA target sequence
aatctgctttagctgtcggtgctaatg

SEQ ID NO: 239056 - DNA, 27 bp, Artificial sequence
  SiRNA target sequence
atctgctttagctgtcggtgctaatga

SEQ ID NO: 239057 - DNA, 27 bp, Artificial sequence
  SiRNA target sequence
tctgctttagctgtcggtgctaatgaa

SEQ ID NO: 239058 - DNA, 27 bp, Artificial sequence
  SiRNA target sequence
ctgctttagctgtcggtgctaatgaaa

SEQ ID NO: 239059 - DNA, 27 bp, Artificial sequence
  SiRNA target sequence
tgctttagctgtcggtgctaatgaaac

SEQ ID NO: 239060 - DNA, 27 bp, Artificial sequence
  SiRNA target sequence
gctttagctgtcggtgctaatgaaact

SEQ ID NO: 239061 - DNA, 27 bp, Artificial sequence
  SiRNA target sequence
ctttagctgtcggtgctaatgaaactg

SEQ ID NO: 239062 - DNA, 27 bp, Artificial sequence
  SiRNA target sequence
tttagctgtcggtgctaatgaaactgg

SEQ ID NO: 239063 - DNA, 27 bp, Artificial sequence
  SiRNA target sequence
ttagctgtcggtgctaatgaaactggt

SEQ ID NO: 239064 - DNA, 27 bp, Artificial sequence
  SiRNA target sequence
tagctgtcggtgctaatgaaactggtg

SEQ ID NO: 239065 - DNA, 27 bp, Artificial sequence
  SiRNA target sequence
agctgtcggtgctaatgaaactggtga

SEQ ID NO: 239066 - DNA, 27 bp, Artificial sequence
  SiRNA target sequence
gctgtcggtgctaatgaaactggtgag

SEQ ID NO: 239067 - DNA, 27 bp, Artificial sequence
  SiRNA target sequence
ctgtcggtgctaatgaaactggtgagg

SEQ ID NO: 239068 - DNA, 27 bp, Artificial sequence
  SiRNA target sequence
tgtcggtgctaatgaaactggtgaggc

SEQ ID NO: 239069 - DNA, 27 bp, Artificial sequence
  SiRNA target sequence
gtcggtgctaatgaaactggtgaggca

SEQ ID NO: 239070 - DNA, 27 bp, Artificial sequence
  SiRNA target sequence
tcggtgctaatgaaactggtgaggcaa

SEQ ID NO: 239071 - DNA, 27 bp, Artificial sequence
  SiRNA target sequence
cggtgctaatgaaactggtgaggcaaa

SEQ ID NO: 239072 - DNA, 27 bp, Artificial sequence
  SiRNA target sequence
ggtgctaatgaaactggtgaggcaaaa

SEQ ID NO: 239073 - DNA, 27 bp, Artificial sequence
  SiRNA target sequence
gtgctaatgaaactggtgaggcaaaat

SEQ ID NO: 239074 - DNA, 27 bp, Artificial sequence
  SiRNA target sequence
tgctaatgaaactggtgaggcaaaatc

SEQ ID NO: 239075 - DNA, 27 bp, Artificial sequence
  SiRNA target sequence
gctaatgaaactggtgaggcaaaatct

SEQ ID NO: 239076 - DNA, 27 bp, Artificial sequence
  SiRNA target sequence
ctaatgaaactggtgaggcaaaatcta

SEQ ID NO: 239077 - DNA, 27 bp, Artificial sequence
  SiRNA target sequence
taatgaaactggtgaggcaaaatctac

SEQ ID NO: 239078 - DNA, 27 bp, Artificial sequence
  SiRNA target sequence
aatgaaactggtgaggcaaaatctacc

SEQ ID NO: 239079 - DNA, 27 bp, Artificial sequence
  SiRNA target sequence
atgaaactggtgaggcaaaatctacct

SEQ ID NO: 239080 - DNA, 27 bp, Artificial sequence
  SiRNA target sequence
tgaaactggtgaggcaaaatctaccta

SEQ ID NO: 239081 - DNA, 27 bp, Artificial sequence
  SiRNA target sequence
gaaactggtgaggcaaaatctacctat

SEQ ID NO: 239082 - DNA, 27 bp, Artificial sequence
  SiRNA target sequence
aaactggtgaggcaaaatctacctatg

SEQ ID NO: 239083 - DNA, 27 bp, Artificial sequence
  SiRNA target sequence
aactggtgaggcaaaatctacctatgc

SEQ ID NO: 239084 - DNA, 27 bp, Artificial sequence
  SiRNA target sequence
actggtgaggcaaaatctacctatgct

SEQ ID NO: 239085 - DNA, 27 bp, Artificial sequence
  SiRNA target sequence
ctggtgaggcaaaatctacctatgctt

SEQ ID NO: 239086 - DNA, 27 bp, Artificial sequence
  SiRNA target sequence
tggtgaggcaaaatctacctatgcttc

SEQ ID NO: 239087 - DNA, 27 bp, Artificial sequence
  SiRNA target sequence
ggtgaggcaaaatctacctatgcttca

SEQ ID NO: 239088 - DNA, 27 bp, Artificial sequence
  SiRNA target sequence
gtgaggcaaaatctacctatgcttcaa

SEQ ID NO: 239089 - DNA, 27 bp, Artificial sequence
  SiRNA target sequence
tgaggcaaaatctacctatgcttcaat

SEQ ID NO: 239090 - DNA, 27 bp, Artificial sequence
  SiRNA target sequence
gaggcaaaatctacctatgcttcaatt

SEQ ID NO: 239091 - DNA, 27 bp, Artificial sequence
  SiRNA target sequence
aggcaaaatctacctatgcttcaattt

SEQ ID NO: 239092 - DNA, 27 bp, Artificial sequence
  SiRNA target sequence
ggcaaaatctacctatgcttcaattta

SEQ ID NO: 239093 - DNA, 27 bp, Artificial sequence
  SiRNA target sequence
gcaaaatctacctatgcttcaatttat

SEQ ID NO: 239094 - DNA, 27 bp, Artificial sequence
  SiRNA target sequence
caaaatctacctatgcttcaatttata

SEQ ID NO: 239095 - DNA, 27 bp, Artificial sequence
  SiRNA target sequence
aaaatctacctatgcttcaatttatac

SEQ ID NO: 239096 - DNA, 27 bp, Artificial sequence
  SiRNA target sequence
aaatctacctatgcttcaatttataca

SEQ ID NO: 239097 - DNA, 27 bp, Artificial sequence
  SiRNA target sequence
aatctacctatgcttcaatttatacat

SEQ ID NO: 239098 - DNA, 27 bp, Artificial sequence
  SiRNA target sequence
atctacctatgcttcaatttatacatc

SEQ ID NO: 239099 - DNA, 27 bp, Artificial sequence
  SiRNA target sequence
tctacctatgcttcaatttatacatca

SEQ ID NO: 239100 - DNA, 27 bp, Artificial sequence
  SiRNA target sequence
ctacctatgcttcaatttatacatcaa

SEQ ID NO: 239101 - DNA, 27 bp, Artificial sequence
  SiRNA target sequence
tacctatgcttcaatttatacatcaat

SEQ ID NO: 239102 - DNA, 27 bp, Artificial sequence
  SiRNA target sequence
acctatgcttcaatttatacatcaatt

SEQ ID NO: 239103 - DNA, 27 bp, Artificial sequence
  SiRNA target sequence
cctatgcttcaatttatacatcaattg

SEQ ID NO: 239104 - DNA, 27 bp, Artificial sequence
  SiRNA target sequence
ctatgcttcaatttatacatcaattga

SEQ ID NO: 239105 - DNA, 27 bp, Artificial sequence
  SiRNA target sequence
tatgcttcaatttatacatcaattgaa

SEQ ID NO: 239106 - DNA, 27 bp, Artificial sequence
  SiRNA target sequence
atgcttcaatttatacatcaattgaac

SEQ ID NO: 239107 - DNA, 27 bp, Artificial sequence
  SiRNA target sequence
tgcttcaatttatacatcaattgaaca

SEQ ID NO: 239108 - DNA, 27 bp, Artificial sequence
  SiRNA target sequence
gcttcaatttatacatcaattgaacaa

SEQ ID NO: 239109 - DNA, 27 bp, Artificial sequence
  SiRNA target sequence
cttcaatttatacatcaattgaacaat

SEQ ID NO: 239110 - DNA, 27 bp, Artificial sequence
  SiRNA target sequence
ttcaatttatacatcaattgaacaatc

SEQ ID NO: 239111 - DNA, 27 bp, Artificial sequence
  SiRNA target sequence
tcaatttatacatcaattgaacaatct

SEQ ID NO: 239112 - DNA, 27 bp, Artificial sequence
  SiRNA target sequence
caatttatacatcaattgaacaatctg

SEQ ID NO: 239113 - DNA, 27 bp, Artificial sequence
  SiRNA target sequence
aatttatacatcaattgaacaatctgg

SEQ ID NO: 239114 - DNA, 27 bp, Artificial sequence
  SiRNA target sequence
atttatacatcaattgaacaatctgga

SEQ ID NO: 239115 - DNA, 27 bp, Artificial sequence
  SiRNA target sequence
tttatacatcaattgaacaatctggag

SEQ ID NO: 239116 - DNA, 27 bp, Artificial sequence
  SiRNA target sequence
ttatacatcaattgaacaatctggagt

SEQ ID NO: 239117 - DNA, 27 bp, Artificial sequence
  SiRNA target sequence
tatacatcaattgaacaatctggagtt

SEQ ID NO: 239118 - DNA, 27 bp, Artificial sequence
  SiRNA target sequence
atacatcaattgaacaatctggagttg

SEQ ID NO: 239119 - DNA, 27 bp, Artificial sequence
  SiRNA target sequence
tacatcaattgaacaatctggagttgc

SEQ ID NO: 239120 - DNA, 27 bp, Artificial sequence
  SiRNA target sequence
acatcaattgaacaatctggagttgct

SEQ ID NO: 239121 - DNA, 27 bp, Artificial sequence
  SiRNA target sequence
catcaattgaacaatctggagttgctg

SEQ ID NO: 239122 - DNA, 27 bp, Artificial sequence
  SiRNA target sequence
atcaattgaacaatctggagttgctgt

SEQ ID NO: 239123 - DNA, 27 bp, Artificial sequence
  SiRNA target sequence
tcaattgaacaatctggagttgctgtt

SEQ ID NO: 239124 - DNA, 27 bp, Artificial sequence
  SiRNA target sequence
caattgaacaatctggagttgctgtta

SEQ ID NO: 239125 - DNA, 27 bp, Artificial sequence
  SiRNA target sequence
aattgaacaatctggagttgctgttat

SEQ ID NO: 239126 - DNA, 27 bp, Artificial sequence
  SiRNA target sequence
attgaacaatctggagttgctgttatt

SEQ ID NO: 239127 - DNA, 27 bp, Artificial sequence
  SiRNA target sequence
ttgaacaatctggagttgctgttattg

SEQ ID NO: 239128 - DNA, 27 bp, Artificial sequence
  SiRNA target sequence
tgaacaatctggagttgctgttattgt

SEQ ID NO: 239129 - DNA, 27 bp, Artificial sequence
  SiRNA target sequence
gaacaatctggagttgctgttattgtc

SEQ ID NO: 239130 - DNA, 27 bp, Artificial sequence
  SiRNA target sequence
aacaatctggagttgctgttattgtca

SEQ ID NO: 239131 - DNA, 27 bp, Artificial sequence
  SiRNA target sequence
acaatctggagttgctgttattgtcat

SEQ ID NO: 239132 - DNA, 27 bp, Artificial sequence
  SiRNA target sequence
caatctggagttgctgttattgtcatg

SEQ ID NO: 239133 - DNA, 27 bp, Artificial sequence
  SiRNA target sequence
aatctggagttgctgttattgtcatga

SEQ ID NO: 239134 - DNA, 27 bp, Artificial sequence
  SiRNA target sequence
atctggagttgctgttattgtcatgat

SEQ ID NO: 239135 - DNA, 27 bp, Artificial sequence
  SiRNA target sequence
tctggagttgctgttattgtcatgatt

SEQ ID NO: 239136 - DNA, 27 bp, Artificial sequence
  SiRNA target sequence
ctggagttgctgttattgtcatgattt

SEQ ID NO: 239137 - DNA, 27 bp, Artificial sequence
  SiRNA target sequence
tggagttgctgttattgtcatgatttt

SEQ ID NO: 239138 - DNA, 27 bp, Artificial sequence
  SiRNA target sequence
ggagttgctgttattgtcatgattttg

SEQ ID NO: 239139 - DNA, 27 bp, Artificial sequence
  SiRNA target sequence
gagttgctgttattgtcatgattttgc

SEQ ID NO: 239140 - DNA, 27 bp, Artificial sequence
  SiRNA target sequence
agttgctgttattgtcatgattttgct

SEQ ID NO: 239141 - DNA, 27 bp, Artificial sequence
  SiRNA target sequence
gttgctgttattgtcatgattttgcta

SEQ ID NO: 239142 - DNA, 27 bp, Artificial sequence
  SiRNA target sequence
ttgctgttattgtcatgattttgctac

SEQ ID NO: 239143 - DNA, 27 bp, Artificial sequence
  SiRNA target sequence
tgctgttattgtcatgattttgctact

SEQ ID NO: 239144 - DNA, 27 bp, Artificial sequence
  SiRNA target sequence
gctgttattgtcatgattttgctactt

SEQ ID NO: 239145 - DNA, 27 bp, Artificial sequence
  SiRNA target sequence
ctgttattgtcatgattttgctactta

SEQ ID NO: 239146 - DNA, 27 bp, Artificial sequence
  SiRNA target sequence
tgttattgtcatgattttgctacttac

SEQ ID NO: 239147 - DNA, 27 bp, Artificial sequence
  SiRNA target sequence
gttattgtcatgattttgctacttacc

SEQ ID NO: 239148 - DNA, 27 bp, Artificial sequence
  SiRNA target sequence
ttattgtcatgattttgctacttaccc

SEQ ID NO: 239149 - DNA, 27 bp, Artificial sequence
  SiRNA target sequence
tattgtcatgattttgctacttacccc

SEQ ID NO: 239150 - DNA, 27 bp, Artificial sequence
  SiRNA target sequence
attgtcatgattttgctacttacccct

SEQ ID NO: 239151 - DNA, 27 bp, Artificial sequence
  SiRNA target sequence
ttgtcatgattttgctacttacccctt

SEQ ID NO: 239152 - DNA, 27 bp, Artificial sequence
  SiRNA target sequence
tgtcatgattttgctacttaccccttt

SEQ ID NO: 239153 - DNA, 27 bp, Artificial sequence
  SiRNA target sequence
gtcatgattttgctacttacccctttt

SEQ ID NO: 239154 - DNA, 27 bp, Artificial sequence
  SiRNA target sequence
tcatgattttgctacttaccccttttc

SEQ ID NO: 239155 - DNA, 27 bp, Artificial sequence
  SiRNA target sequence
catgattttgctacttaccccttttcc

SEQ ID NO: 239156 - DNA, 27 bp, Artificial sequence
  SiRNA target sequence
atgattttgctacttaccccttttcca

SEQ ID NO: 239157 - DNA, 27 bp, Artificial sequence
  SiRNA target sequence
tgattttgctacttaccccttttccaa

SEQ ID NO: 239158 - DNA, 27 bp, Artificial sequence
  SiRNA target sequence
gattttgctacttaccccttttccaag

SEQ ID NO: 239159 - DNA, 27 bp, Artificial sequence
  SiRNA target sequence
attttgctacttaccccttttccaagg

SEQ ID NO: 239160 - DNA, 27 bp, Artificial sequence
  SiRNA target sequence
ttttgctacttaccccttttccaaggc

SEQ ID NO: 239161 - DNA, 27 bp, Artificial sequence
  SiRNA target sequence
tttgctacttaccccttttccaaggct

SEQ ID NO: 239162 - DNA, 27 bp, Artificial sequence
  SiRNA target sequence
ttgctacttaccccttttccaaggctt

SEQ ID NO: 239163 - DNA, 27 bp, Artificial sequence
  SiRNA target sequence
tgctacttaccccttttccaaggctta

SEQ ID NO: 239164 - DNA, 27 bp, Artificial sequence
  SiRNA target sequence
gctacttaccccttttccaaggcttat

SEQ ID NO: 239165 - DNA, 27 bp, Artificial sequence
  SiRNA target sequence
ctacttaccccttttccaaggcttatt

SEQ ID NO: 239166 - DNA, 27 bp, Artificial sequence
  SiRNA target sequence
tacttaccccttttccaaggcttatta

SEQ ID NO: 239167 - DNA, 27 bp, Artificial sequence
  SiRNA target sequence
acttaccccttttccaaggcttattaa

SEQ ID NO: 239168 - DNA, 27 bp, Artificial sequence
  SiRNA target sequence
cttaccccttttccaaggcttattaaa

SEQ ID NO: 239169 - DNA, 27 bp, Artificial sequence
  SiRNA target sequence
ttaccccttttccaaggcttattaaaa

SEQ ID NO: 239170 - DNA, 27 bp, Artificial sequence
  SiRNA target sequence
taccccttttccaaggcttattaaaac

SEQ ID NO: 239171 - DNA, 27 bp, Artificial sequence
  SiRNA target sequence
accccttttccaaggcttattaaaaca

SEQ ID NO: 239172 - DNA, 27 bp, Artificial sequence
  SiRNA target sequence
ccccttttccaaggcttattaaaacaa

SEQ ID NO: 239173 - DNA, 27 bp, Artificial sequence
  SiRNA target sequence
cccttttccaaggcttattaaaacaaa

SEQ ID NO: 239174 - DNA, 27 bp, Artificial sequence
  SiRNA target sequence
ccttttccaaggcttattaaaacaaaa

SEQ ID NO: 239175 - DNA, 27 bp, Artificial sequence
  SiRNA target sequence
cttttccaaggcttattaaaacaaaag

SEQ ID NO: 239176 - DNA, 27 bp, Artificial sequence
  SiRNA target sequence
ttttccaaggcttattaaaacaaaagg

SEQ ID NO: 239177 - DNA, 27 bp, Artificial sequence
  SiRNA target sequence
tttccaaggcttattaaaacaaaagga

SEQ ID NO: 239178 - DNA, 27 bp, Artificial sequence
  SiRNA target sequence
ttccaaggcttattaaaacaaaaggat

SEQ ID NO: 239179 - DNA, 27 bp, Artificial sequence
  SiRNA target sequence
tccaaggcttattaaaacaaaaggatg

SEQ ID NO: 239180 - DNA, 27 bp, Artificial sequence
  SiRNA target sequence
ccaaggcttattaaaacaaaaggatgg

SEQ ID NO: 239181 - DNA, 27 bp, Artificial sequence
  SiRNA target sequence
caaggcttattaaaacaaaaggatgga

SEQ ID NO: 239182 - DNA, 27 bp, Artificial sequence
  SiRNA target sequence
aaggcttattaaaacaaaaggatggat

SEQ ID NO: 239183 - DNA, 27 bp, Artificial sequence
  SiRNA target sequence
aggcttattaaaacaaaaggatggatt

SEQ ID NO: 239184 - DNA, 27 bp, Artificial sequence
  SiRNA target sequence
ggcttattaaaacaaaaggatggatta

SEQ ID NO: 239185 - DNA, 27 bp, Artificial sequence
  SiRNA target sequence
gcttattaaaacaaaaggatggattac

SEQ ID NO: 239186 - DNA, 27 bp, Artificial sequence
  SiRNA target sequence
cttattaaaacaaaaggatggattaca

SEQ ID NO: 239187 - DNA, 27 bp, Artificial sequence
  SiRNA target sequence
ttattaaaacaaaaggatggattacaa

SEQ ID NO: 239188 - DNA, 27 bp, Artificial sequence
  SiRNA target sequence
tattaaaacaaaaggatggattacaat

SEQ ID NO: 239189 - DNA, 27 bp, Artificial sequence
  SiRNA target sequence
attaaaacaaaaggatggattacaata

SEQ ID NO: 239190 - DNA, 27 bp, Artificial sequence
  SiRNA target sequence
ttaaaacaaaaggatggattacaatag

SEQ ID NO: 239191 - DNA, 27 bp, Artificial sequence
  SiRNA target sequence
taaaacaaaaggatggattacaatagc

SEQ ID NO: 239192 - DNA, 27 bp, Artificial sequence
  SiRNA target sequence
aaaacaaaaggatggattacaatagcc

SEQ ID NO: 239193 - DNA, 27 bp, Artificial sequence
  SiRNA target sequence
aaacaaaaggatggattacaatagcca

SEQ ID NO: 239194 - DNA, 27 bp, Artificial sequence
  SiRNA target sequence
aacaaaaggatggattacaatagccat

SEQ ID NO: 239195 - DNA, 27 bp, Artificial sequence
  SiRNA target sequence
acaaaaggatggattacaatagccatt

SEQ ID NO: 239196 - DNA, 27 bp, Artificial sequence
  SiRNA target sequence
caaaaggatggattacaatagccattc

SEQ ID NO: 239197 - DNA, 27 bp, Artificial sequence
  SiRNA target sequence
aaaaggatggattacaatagccattct

SEQ ID NO: 239198 - DNA, 27 bp, Artificial sequence
  SiRNA target sequence
aaaggatggattacaatagccattcta

SEQ ID NO: 239199 - DNA, 27 bp, Artificial sequence
  SiRNA target sequence
aaggatggattacaatagccattctat

SEQ ID NO: 239200 - DNA, 27 bp, Artificial sequence
  SiRNA target sequence
aggatggattacaatagccattctatg

SEQ ID NO: 239201 - DNA, 27 bp, Artificial sequence
  SiRNA target sequence
ggatggattacaatagccattctatgt

SEQ ID NO: 239202 - DNA, 27 bp, Artificial sequence
  SiRNA target sequence
gatggattacaatagccattctatgtc

SEQ ID NO: 239203 - DNA, 27 bp, Artificial sequence
  SiRNA target sequence
atggattacaatagccattctatgtcc

SEQ ID NO: 239204 - DNA, 27 bp, Artificial sequence
  SiRNA target sequence
tggattacaatagccattctatgtcct

SEQ ID NO: 239205 - DNA, 27 bp, Artificial sequence
  SiRNA target sequence
ggattacaatagccattctatgtccta

SEQ ID NO: 239206 - DNA, 27 bp, Artificial sequence
  SiRNA target sequence
gattacaatagccattctatgtcctat

SEQ ID NO: 239207 - DNA, 27 bp, Artificial sequence
  SiRNA target sequence
attacaatagccattctatgtcctatt

SEQ ID NO: 239208 - DNA, 27 bp, Artificial sequence
  SiRNA target sequence
ttacaatagccattctatgtcctatta

SEQ ID NO: 239209 - DNA, 27 bp, Artificial sequence
  SiRNA target sequence
tacaatagccattctatgtcctattat

SEQ ID NO: 239210 - DNA, 27 bp, Artificial sequence
  SiRNA target sequence
acaatagccattctatgtcctattatt

SEQ ID NO: 239211 - DNA, 27 bp, Artificial sequence
  SiRNA target sequence
caatagccattctatgtcctattatta

SEQ ID NO: 239212 - DNA, 27 bp, Artificial sequence
  SiRNA target sequence
aatagccattctatgtcctattattac

SEQ ID NO: 239213 - DNA, 27 bp, Artificial sequence
  SiRNA target sequence
atagccattctatgtcctattattact

SEQ ID NO: 239214 - DNA, 27 bp, Artificial sequence
  SiRNA target sequence
tagccattctatgtcctattattactt

SEQ ID NO: 239215 - DNA, 27 bp, Artificial sequence
  SiRNA target sequence
agccattctatgtcctattattacttt

SEQ ID NO: 239216 - DNA, 27 bp, Artificial sequence
  SiRNA target sequence
gccattctatgtcctattattactttt

SEQ ID NO: 239217 - DNA, 27 bp, Artificial sequence
  SiRNA target sequence
ccattctatgtcctattattacttttt

SEQ ID NO: 239218 - DNA, 27 bp, Artificial sequence
  SiRNA target sequence
cattctatgtcctattattactttttt

SEQ ID NO: 239219 - DNA, 27 bp, Artificial sequence
  SiRNA target sequence
attctatgtcctattattacttttttt

SEQ ID NO: 239220 - DNA, 27 bp, Artificial sequence
  SiRNA target sequence
ttctatgtcctattattactttttttt

SEQ ID NO: 239221 - DNA, 27 bp, Artificial sequence
  SiRNA target sequence
tctatgtcctattattacttttttttc

SEQ ID NO: 239222 - DNA, 27 bp, Artificial sequence
  SiRNA target sequence
ctatgtcctattattacttttttttct

SEQ ID NO: 239223 - DNA, 27 bp, Artificial sequence
  SiRNA target sequence
tatgtcctattattacttttttttctg

SEQ ID NO: 239224 - DNA, 27 bp, Artificial sequence
  SiRNA target sequence
atgtcctattattacttttttttctgc

SEQ ID NO: 239225 - DNA, 27 bp, Artificial sequence
  SiRNA target sequence
tgtcctattattacttttttttctgct

SEQ ID NO: 239226 - DNA, 27 bp, Artificial sequence
  SiRNA target sequence
gtcctattattacttttttttctgctt

SEQ ID NO: 239227 - DNA, 27 bp, Artificial sequence
  SiRNA target sequence
tcctattattacttttttttctgcttt

SEQ ID NO: 239228 - DNA, 27 bp, Artificial sequence
  SiRNA target sequence
cctattattacttttttttctgctttt

SEQ ID NO: 239229 - DNA, 27 bp, Artificial sequence
  SiRNA target sequence
ctattattacttttttttctgcttttg

SEQ ID NO: 239230 - DNA, 27 bp, Artificial sequence
  SiRNA target sequence
tattattacttttttttctgcttttgg

SEQ ID NO: 239231 - DNA, 27 bp, Artificial sequence
  SiRNA target sequence
attattacttttttttctgcttttggt

SEQ ID NO: 239232 - DNA, 27 bp, Artificial sequence
  SiRNA target sequence
ttattacttttttttctgcttttggta

SEQ ID NO: 239233 - DNA, 27 bp, Artificial sequence
  SiRNA target sequence
tattacttttttttctgcttttggtac

SEQ ID NO: 239234 - DNA, 27 bp, Artificial sequence
  SiRNA target sequence
attacttttttttctgcttttggtact

SEQ ID NO: 239235 - DNA, 27 bp, Artificial sequence
  SiRNA target sequence
ttacttttttttctgcttttggtactt

SEQ ID NO: 239236 - DNA, 27 bp, Artificial sequence
  SiRNA target sequence
tacttttttttctgcttttggtacttt

SEQ ID NO: 239237 - DNA, 27 bp, Artificial sequence
  SiRNA target sequence
acttttttttctgcttttggtactttt

SEQ ID NO: 239238 - DNA, 27 bp, Artificial sequence
  SiRNA target sequence
cttttttttctgcttttggtacttttg

SEQ ID NO: 239239 - DNA, 27 bp, Artificial sequence
  SiRNA target sequence
ttttttttctgcttttggtacttttgt

SEQ ID NO: 239240 - DNA, 27 bp, Artificial sequence
  SiRNA target sequence
tttttttctgcttttggtacttttgta

SEQ ID NO: 239241 - DNA, 27 bp, Artificial sequence
  SiRNA target sequence
ttttttctgcttttggtacttttgtat

SEQ ID NO: 239242 - DNA, 27 bp, Artificial sequence
  SiRNA target sequence
tttttctgcttttggtacttttgtatt

SEQ ID NO: 239243 - DNA, 27 bp, Artificial sequence
  SiRNA target sequence
ttttctgcttttggtacttttgtatta

SEQ ID NO: 239244 - DNA, 27 bp, Artificial sequence
  SiRNA target sequence
tttctgcttttggtacttttgtattag

SEQ ID NO: 239245 - DNA, 27 bp, Artificial sequence
  SiRNA target sequence
ttctgcttttggtacttttgtattagc

SEQ ID NO: 239246 - DNA, 27 bp, Artificial sequence
  SiRNA target sequence
tctgcttttggtacttttgtattagct

SEQ ID NO: 239247 - DNA, 27 bp, Artificial sequence
  SiRNA target sequence
ctgcttttggtacttttgtattagctt

SEQ ID NO: 239248 - DNA, 27 bp, Artificial sequence
  SiRNA target sequence
tgcttttggtacttttgtattagctta

SEQ ID NO: 239249 - DNA, 27 bp, Artificial sequence
  SiRNA target sequence
gcttttggtacttttgtattagcttat

SEQ ID NO: 239250 - DNA, 27 bp, Artificial sequence
  SiRNA target sequence
cttttggtacttttgtattagcttatt

SEQ ID NO: 239251 - DNA, 27 bp, Artificial sequence
  SiRNA target sequence
ttttggtacttttgtattagcttattt

SEQ ID NO: 239252 - DNA, 27 bp, Artificial sequence
  SiRNA target sequence
tttggtacttttgtattagcttattta

SEQ ID NO: 239253 - DNA, 27 bp, Artificial sequence
  SiRNA target sequence
ttggtacttttgtattagcttatttaa

SEQ ID NO: 239254 - DNA, 27 bp, Artificial sequence
  SiRNA target sequence
tggtacttttgtattagcttatttaaa

SEQ ID NO: 239255 - DNA, 27 bp, Artificial sequence
  SiRNA target sequence
ggtacttttgtattagcttatttaaac

SEQ ID NO: 239256 - DNA, 27 bp, Artificial sequence
  SiRNA target sequence
gtacttttgtattagcttatttaaact

SEQ ID NO: 239257 - DNA, 27 bp, Artificial sequence
  SiRNA target sequence
tacttttgtattagcttatttaaactt

SEQ ID NO: 239258 - DNA, 27 bp, Artificial sequence
  SiRNA target sequence
acttttgtattagcttatttaaacttc

SEQ ID NO: 239259 - DNA, 27 bp, Artificial sequence
  SiRNA target sequence
cttttgtattagcttatttaaacttcc

SEQ ID NO: 239260 - DNA, 27 bp, Artificial sequence
  SiRNA target sequence
ttttgtattagcttatttaaacttccc

SEQ ID NO: 239261 - DNA, 27 bp, Artificial sequence
  SiRNA target sequence
tttgtattagcttatttaaacttccca

SEQ ID NO: 239262 - DNA, 27 bp, Artificial sequence
  SiRNA target sequence
ttgtattagcttatttaaacttcccaa

SEQ ID NO: 239263 - DNA, 27 bp, Artificial sequence
  SiRNA target sequence
tgtattagcttatttaaacttcccaat

SEQ ID NO: 239264 - DNA, 27 bp, Artificial sequence
  SiRNA target sequence
gtattagcttatttaaacttcccaatt

SEQ ID NO: 239265 - DNA, 27 bp, Artificial sequence
  SiRNA target sequence
tattagcttatttaaacttcccaatta

SEQ ID NO: 239266 - DNA, 27 bp, Artificial sequence
  SiRNA target sequence
attagcttatttaaacttcccaattac

SEQ ID NO: 239267 - DNA, 27 bp, Artificial sequence
  SiRNA target sequence
ttagcttatttaaacttcccaattaca

SEQ ID NO: 239268 - DNA, 27 bp, Artificial sequence
  SiRNA target sequence
tagcttatttaaacttcccaattacaa

SEQ ID NO: 239269 - DNA, 27 bp, Artificial sequence
  SiRNA target sequence
agcttatttaaacttcccaattacaaa

SEQ ID NO: 239270 - DNA, 27 bp, Artificial sequence
  SiRNA target sequence
gcttatttaaacttcccaattacaaac

SEQ ID NO: 239271 - DNA, 27 bp, Artificial sequence
  SiRNA target sequence
cttatttaaacttcccaattacaaaca

SEQ ID NO: 239272 - DNA, 27 bp, Artificial sequence
  SiRNA target sequence
ttatttaaacttcccaattacaaacaa

SEQ ID NO: 239273 - DNA, 27 bp, Artificial sequence
  SiRNA target sequence
tatttaaacttcccaattacaaacaaa

SEQ ID NO: 239274 - DNA, 27 bp, Artificial sequence
  SiRNA target sequence
atttaaacttcccaattacaaacaaag

SEQ ID NO: 239275 - DNA, 27 bp, Artificial sequence
  SiRNA target sequence
tttaaacttcccaattacaaacaaaga

SEQ ID NO: 239276 - DNA, 27 bp, Artificial sequence
  SiRNA target sequence
ttaaacttcccaattacaaacaaagag

SEQ ID NO: 239277 - DNA, 27 bp, Artificial sequence
  SiRNA target sequence
taaacttcccaattacaaacaaagagg

SEQ ID NO: 239278 - DNA, 27 bp, Artificial sequence
  SiRNA target sequence
aaacttcccaattacaaacaaagagga

SEQ ID NO: 239279 - DNA, 27 bp, Artificial sequence
  SiRNA target sequence
aacttcccaattacaaacaaagaggat

SEQ ID NO: 239280 - DNA, 27 bp, Artificial sequence
  SiRNA target sequence
acttcccaattacaaacaaagaggata

SEQ ID NO: 239281 - DNA, 27 bp, Artificial sequence
  SiRNA target sequence
cttcccaattacaaacaaagaggataa

SEQ ID NO: 239282 - DNA, 27 bp, Artificial sequence
  SiRNA target sequence
ttcccaattacaaacaaagaggataat

SEQ ID NO: 239283 - DNA, 27 bp, Artificial sequence
  SiRNA target sequence
tcccaattacaaacaaagaggataata

SEQ ID NO: 239284 - DNA, 27 bp, Artificial sequence
  SiRNA target sequence
cccaattacaaacaaagaggataatat

SEQ ID NO: 239285 - DNA, 27 bp, Artificial sequence
  SiRNA target sequence
ccaattacaaacaaagaggataatata

SEQ ID NO: 239286 - DNA, 27 bp, Artificial sequence
  SiRNA target sequence
caattacaaacaaagaggataatatat

SEQ ID NO: 239287 - DNA, 27 bp, Artificial sequence
  SiRNA target sequence
aattacaaacaaagaggataatatatt

SEQ ID NO: 239288 - DNA, 27 bp, Artificial sequence
  SiRNA target sequence
attacaaacaaagaggataatatattt

SEQ ID NO: 239289 - DNA, 27 bp, Artificial sequence
  SiRNA target sequence
ttacaaacaaagaggataatatatttg

SEQ ID NO: 239290 - DNA, 27 bp, Artificial sequence
  SiRNA target sequence
tacaaacaaagaggataatatatttga

SEQ ID NO: 239291 - DNA, 27 bp, Artificial sequence
  SiRNA target sequence
acaaacaaagaggataatatatttgat

SEQ ID NO: 239292 - DNA, 27 bp, Artificial sequence
  SiRNA target sequence
caaacaaagaggataatatatttgata

SEQ ID NO: 239293 - DNA, 27 bp, Artificial sequence
  SiRNA target sequence
aaacaaagaggataatatatttgatat

SEQ ID NO: 239294 - DNA, 27 bp, Artificial sequence
  SiRNA target sequence
aacaaagaggataatatatttgatatt

SEQ ID NO: 239295 - DNA, 27 bp, Artificial sequence
  SiRNA target sequence
acaaagaggataatatatttgatattt

SEQ ID NO: 239296 - DNA, 27 bp, Artificial sequence
  SiRNA target sequence
caaagaggataatatatttgatattta

SEQ ID NO: 239297 - DNA, 27 bp, Artificial sequence
  SiRNA target sequence
aaagaggataatatatttgatatttac

SEQ ID NO: 239298 - DNA, 27 bp, Artificial sequence
  SiRNA target sequence
aagaggataatatatttgatatttacc

SEQ ID NO: 239299 - DNA, 27 bp, Artificial sequence
  SiRNA target sequence
agaggataatatatttgatatttaccg

SEQ ID NO: 239300 - DNA, 27 bp, Artificial sequence
  SiRNA target sequence
gaggataatatatttgatatttaccgt

SEQ ID NO: 239301 - DNA, 27 bp, Artificial sequence
  SiRNA target sequence
aggataatatatttgatatttaccgtt

SEQ ID NO: 239302 - DNA, 27 bp, Artificial sequence
  SiRNA target sequence
ggataatatatttgatatttaccgttt

SEQ ID NO: 239303 - DNA, 27 bp, Artificial sequence
  SiRNA target sequence
gataatatatttgatatttaccgttta

SEQ ID NO: 239304 - DNA, 27 bp, Artificial sequence
  SiRNA target sequence
ataatatatttgatatttaccgtttac

SEQ ID NO: 239305 - DNA, 27 bp, Artificial sequence
  SiRNA target sequence
taatatatttgatatttaccgtttacc

SEQ ID NO: 239306 - DNA, 27 bp, Artificial sequence
  SiRNA target sequence
aatatatttgatatttaccgtttaccg

SEQ ID NO: 239307 - DNA, 27 bp, Artificial sequence
  SiRNA target sequence
atatatttgatatttaccgtttaccgt

SEQ ID NO: 239308 - DNA, 27 bp, Artificial sequence
  SiRNA target sequence
tatatttgatatttaccgtttaccgtc

SEQ ID NO: 239309 - DNA, 27 bp, Artificial sequence
  SiRNA target sequence
atatttgatatttaccgtttaccgtca

SEQ ID NO: 239310 - DNA, 27 bp, Artificial sequence
  SiRNA target sequence
tatttgatatttaccgtttaccgtcaa

SEQ ID NO: 239311 - DNA, 27 bp, Artificial sequence
  SiRNA target sequence
atttgatatttaccgtttaccgtcaac

SEQ ID NO: 239312 - DNA, 27 bp, Artificial sequence
  SiRNA target sequence
tttgatatttaccgtttaccgtcaact

SEQ ID NO: 239313 - DNA, 27 bp, Artificial sequence
  SiRNA target sequence
ttgatatttaccgtttaccgtcaactg

SEQ ID NO: 239314 - DNA, 27 bp, Artificial sequence
  SiRNA target sequence
tgatatttaccgtttaccgtcaactga

SEQ ID NO: 239315 - DNA, 27 bp, Artificial sequence
  SiRNA target sequence
gatatttaccgtttaccgtcaactgat

SEQ ID NO: 239316 - DNA, 27 bp, Artificial sequence
  SiRNA target sequence
atatttaccgtttaccgtcaactgatt

SEQ ID NO: 239317 - DNA, 27 bp, Artificial sequence
  SiRNA target sequence
tatttaccgtttaccgtcaactgattc

SEQ ID NO: 239318 - DNA, 27 bp, Artificial sequence
  SiRNA target sequence
atttaccgtttaccgtcaactgattct

SEQ ID NO: 239319 - DNA, 27 bp, Artificial sequence
  SiRNA target sequence
tttaccgtttaccgtcaactgattcta

SEQ ID NO: 239320 - DNA, 27 bp, Artificial sequence
  SiRNA target sequence
ttaccgtttaccgtcaactgattctat

SEQ ID NO: 239321 - DNA, 27 bp, Artificial sequence
  SiRNA target sequence
taccgtttaccgtcaactgattctata

SEQ ID NO: 239322 - DNA, 27 bp, Artificial sequence
  SiRNA target sequence
accgtttaccgtcaactgattctataa

SEQ ID NO: 239323 - DNA, 27 bp, Artificial sequence
  SiRNA target sequence
ccgtttaccgtcaactgattctataat

SEQ ID NO: 239324 - DNA, 27 bp, Artificial sequence
  SiRNA target sequence
cgtttaccgtcaactgattctataatc

SEQ ID NO: 239325 - DNA, 27 bp, Artificial sequence
  SiRNA target sequence
gtttaccgtcaactgattctataatca

SEQ ID NO: 239326 - DNA, 27 bp, Artificial sequence
  SiRNA target sequence
tttaccgtcaactgattctataatcaa

SEQ ID NO: 239327 - DNA, 27 bp, Artificial sequence
  SiRNA target sequence
ttaccgtcaactgattctataatcaaa

SEQ ID NO: 239328 - DNA, 27 bp, Artificial sequence
  SiRNA target sequence
taccgtcaactgattctataatcaaat

SEQ ID NO: 239329 - DNA, 27 bp, Artificial sequence
  SiRNA target sequence
accgtcaactgattctataatcaaatt

SEQ ID NO: 239330 - DNA, 27 bp, Artificial sequence
  SiRNA target sequence
ccgtcaactgattctataatcaaatta

SEQ ID NO: 239331 - DNA, 27 bp, Artificial sequence
  SiRNA target sequence
cgtcaactgattctataatcaaattag

SEQ ID NO: 239332 - DNA, 27 bp, Artificial sequence
  SiRNA target sequence
gtcaactgattctataatcaaattaga

SEQ ID NO: 239333 - DNA, 27 bp, Artificial sequence
  SiRNA target sequence
tcaactgattctataatcaaattagaa

SEQ ID NO: 239334 - DNA, 27 bp, Artificial sequence
  SiRNA target sequence
caactgattctataatcaaattagaaa

SEQ ID NO: 239335 - DNA, 27 bp, Artificial sequence
  SiRNA target sequence
aactgattctataatcaaattagaaaa

SEQ ID NO: 239336 - DNA, 27 bp, Artificial sequence
  SiRNA target sequence
actgattctataatcaaattagaaaat

SEQ ID NO: 239337 - DNA, 27 bp, Artificial sequence
  SiRNA target sequence
ctgattctataatcaaattagaaaata

SEQ ID NO: 239338 - DNA, 27 bp, Artificial sequence
  SiRNA target sequence
tgattctataatcaaattagaaaatat

SEQ ID NO: 239339 - DNA, 27 bp, Artificial sequence
  SiRNA target sequence
gattctataatcaaattagaaaatatt

SEQ ID NO: 239340 - DNA, 27 bp, Artificial sequence
  SiRNA target sequence
attctataatcaaattagaaaatattg

SEQ ID NO: 239341 - DNA, 27 bp, Artificial sequence
  SiRNA target sequence
ttctataatcaaattagaaaatattgt

SEQ ID NO: 239342 - DNA, 27 bp, Artificial sequence
  SiRNA target sequence
tctataatcaaattagaaaatattgtt

SEQ ID NO: 239343 - DNA, 27 bp, Artificial sequence
  SiRNA target sequence
ctataatcaaattagaaaatattgttg

SEQ ID NO: 239344 - DNA, 27 bp, Artificial sequence
  SiRNA target sequence
tataatcaaattagaaaatattgttgg

SEQ ID NO: 239345 - DNA, 27 bp, Artificial sequence
  SiRNA target sequence
ataatcaaattagaaaatattgttggt

SEQ ID NO: 239346 - DNA, 27 bp, Artificial sequence
  SiRNA target sequence
taatcaaattagaaaatattgttggtg

SEQ ID NO: 239347 - DNA, 27 bp, Artificial sequence
  SiRNA target sequence
aatcaaattagaaaatattgttggtgt

SEQ ID NO: 239348 - DNA, 27 bp, Artificial sequence
  SiRNA target sequence
atcaaattagaaaatattgttggtgtc

SEQ ID NO: 239349 - DNA, 27 bp, Artificial sequence
  SiRNA target sequence
tcaaattagaaaatattgttggtgtca

SEQ ID NO: 239350 - DNA, 27 bp, Artificial sequence
  SiRNA target sequence
caaattagaaaatattgttggtgtcat

SEQ ID NO: 239351 - DNA, 27 bp, Artificial sequence
  SiRNA target sequence
aaattagaaaatattgttggtgtcatt

SEQ ID NO: 239352 - DNA, 27 bp, Artificial sequence
  SiRNA target sequence
aattagaaaatattgttggtgtcattt

SEQ ID NO: 239353 - DNA, 27 bp, Artificial sequence
  SiRNA target sequence
attagaaaatattgttggtgtcatttg

SEQ ID NO: 239354 - DNA, 27 bp, Artificial sequence
  SiRNA target sequence
ttagaaaatattgttggtgtcatttgt

SEQ ID NO: 239355 - DNA, 27 bp, Artificial sequence
  SiRNA target sequence
tagaaaatattgttggtgtcatttgtg

SEQ ID NO: 239356 - DNA, 27 bp, Artificial sequence
  SiRNA target sequence
agaaaatattgttggtgtcatttgtgt

SEQ ID NO: 239357 - DNA, 27 bp, Artificial sequence
  SiRNA target sequence
gaaaatattgttggtgtcatttgtgta

SEQ ID NO: 239358 - DNA, 27 bp, Artificial sequence
  SiRNA target sequence
aaaatattgttggtgtcatttgtgtat

SEQ ID NO: 239359 - DNA, 27 bp, Artificial sequence
  SiRNA target sequence
aaatattgttggtgtcatttgtgtatc

SEQ ID NO: 239360 - DNA, 27 bp, Artificial sequence
  SiRNA target sequence
aatattgttggtgtcatttgtgtatct

SEQ ID NO: 239361 - DNA, 27 bp, Artificial sequence
  SiRNA target sequence
atattgttggtgtcatttgtgtatctt

SEQ ID NO: 239362 - DNA, 27 bp, Artificial sequence
  SiRNA target sequence
tattgttggtgtcatttgtgtatcttt

SEQ ID NO: 239363 - DNA, 27 bp, Artificial sequence
  SiRNA target sequence
attgttggtgtcatttgtgtatcttta

SEQ ID NO: 239364 - DNA, 27 bp, Artificial sequence
  SiRNA target sequence
ttgttggtgtcatttgtgtatctttaa

SEQ ID NO: 239365 - DNA, 27 bp, Artificial sequence
  SiRNA target sequence
tgttggtgtcatttgtgtatctttaat

SEQ ID NO: 239366 - DNA, 27 bp, Artificial sequence
  SiRNA target sequence
gttggtgtcatttgtgtatctttaatg

SEQ ID NO: 239367 - DNA, 27 bp, Artificial sequence
  SiRNA target sequence
ttggtgtcatttgtgtatctttaatga

SEQ ID NO: 239368 - DNA, 27 bp, Artificial sequence
  SiRNA target sequence
tggtgtcatttgtgtatctttaatgaa

SEQ ID NO: 239369 - DNA, 27 bp, Artificial sequence
  SiRNA target sequence
ggtgtcatttgtgtatctttaatgaag

SEQ ID NO: 239370 - DNA, 27 bp, Artificial sequence
  SiRNA target sequence
gtgtcatttgtgtatctttaatgaaga

SEQ ID NO: 239371 - DNA, 27 bp, Artificial sequence
  SiRNA target sequence
tgtcatttgtgtatctttaatgaagat

SEQ ID NO: 239372 - DNA, 27 bp, Artificial sequence
  SiRNA target sequence
gtcatttgtgtatctttaatgaagatt

SEQ ID NO: 239373 - DNA, 27 bp, Artificial sequence
  SiRNA target sequence
tcatttgtgtatctttaatgaagattt

SEQ ID NO: 239374 - DNA, 27 bp, Artificial sequence
  SiRNA target sequence
catttgtgtatctttaatgaagatttc

SEQ ID NO: 239375 - DNA, 27 bp, Artificial sequence
  SiRNA target sequence
atttgtgtatctttaatgaagatttct

SEQ ID NO: 239376 - DNA, 27 bp, Artificial sequence
  SiRNA target sequence
tttgtgtatctttaatgaagatttcta

SEQ ID NO: 239377 - DNA, 27 bp, Artificial sequence
  SiRNA target sequence
ttgtgtatctttaatgaagatttctaa

SEQ ID NO: 239378 - DNA, 27 bp, Artificial sequence
  SiRNA target sequence
tgtgtatctttaatgaagatttctaaa

SEQ ID NO: 239379 - DNA, 27 bp, Artificial sequence
  SiRNA target sequence
gtgtatctttaatgaagatttctaaat

SEQ ID NO: 239380 - DNA, 27 bp, Artificial sequence
  SiRNA target sequence
tgtatctttaatgaagatttctaaata

SEQ ID NO: 239381 - DNA, 27 bp, Artificial sequence
  SiRNA target sequence
gtatctttaatgaagatttctaaatat

SEQ ID NO: 239382 - DNA, 27 bp, Artificial sequence
  SiRNA target sequence
tatctttaatgaagatttctaaatatg

SEQ ID NO: 239383 - DNA, 27 bp, Artificial sequence
  SiRNA target sequence
atctttaatgaagatttctaaatatgc

SEQ ID NO: 239384 - DNA, 27 bp, Artificial sequence
  SiRNA target sequence
tctttaatgaagatttctaaatatgca

SEQ ID NO: 239385 - DNA, 27 bp, Artificial sequence
  SiRNA target sequence
ctttaatgaagatttctaaatatgcag

SEQ ID NO: 239386 - DNA, 27 bp, Artificial sequence
  SiRNA target sequence
tttaatgaagatttctaaatatgcagc

SEQ ID NO: 239387 - DNA, 27 bp, Artificial sequence
  SiRNA target sequence
ttaatgaagatttctaaatatgcagca

SEQ ID NO: 239388 - DNA, 27 bp, Artificial sequence
  SiRNA target sequence
taatgaagatttctaaatatgcagcat

SEQ ID NO: 239389 - DNA, 27 bp, Artificial sequence
  SiRNA target sequence
aatgaagatttctaaatatgcagcatt

SEQ ID NO: 239390 - DNA, 27 bp, Artificial sequence
  SiRNA target sequence
atgaagatttctaaatatgcagcattt

SEQ ID NO: 239391 - DNA, 27 bp, Artificial sequence
  SiRNA target sequence
tgaagatttctaaatatgcagcatttg

SEQ ID NO: 239392 - DNA, 27 bp, Artificial sequence
  SiRNA target sequence
gaagatttctaaatatgcagcatttga

SEQ ID NO: 239393 - DNA, 27 bp, Artificial sequence
  SiRNA target sequence
aagatttctaaatatgcagcatttgat

SEQ ID NO: 239394 - DNA, 27 bp, Artificial sequence
  SiRNA target sequence
agatttctaaatatgcagcatttgata

SEQ ID NO: 239395 - DNA, 27 bp, Artificial sequence
  SiRNA target sequence
gatttctaaatatgcagcatttgatat

SEQ ID NO: 239396 - DNA, 27 bp, Artificial sequence
  SiRNA target sequence
atttctaaatatgcagcatttgatatc

SEQ ID NO: 239397 - DNA, 27 bp, Artificial sequence
  SiRNA target sequence
tttctaaatatgcagcatttgatatca

SEQ ID NO: 239398 - DNA, 27 bp, Artificial sequence
  SiRNA target sequence
ttctaaatatgcagcatttgatatcac

SEQ ID NO: 239399 - DNA, 27 bp, Artificial sequence
  SiRNA target sequence
tctaaatatgcagcatttgatatcaca

SEQ ID NO: 239400 - DNA, 27 bp, Artificial sequence
  SiRNA target sequence
ctaaatatgcagcatttgatatcacaa

SEQ ID NO: 239401 - DNA, 27 bp, Artificial sequence
  SiRNA target sequence
taaatatgcagcatttgatatcacaaa

SEQ ID NO: 239402 - DNA, 27 bp, Artificial sequence
  SiRNA target sequence
aaatatgcagcatttgatatcacaaaa

SEQ ID NO: 239403 - DNA, 27 bp, Artificial sequence
  SiRNA target sequence
aatatgcagcatttgatatcacaaaag

SEQ ID NO: 239404 - DNA, 27 bp, Artificial sequence
  SiRNA target sequence
atatgcagcatttgatatcacaaaaga

SEQ ID NO: 239405 - DNA, 27 bp, Artificial sequence
  SiRNA target sequence
tatgcagcatttgatatcacaaaagag

SEQ ID NO: 239406 - DNA, 27 bp, Artificial sequence
  SiRNA target sequence
atgcagcatttgatatcacaaaagagg

SEQ ID NO: 239407 - DNA, 27 bp, Artificial sequence
  SiRNA target sequence
tgcagcatttgatatcacaaaagaggc

SEQ ID NO: 239408 - DNA, 27 bp, Artificial sequence
  SiRNA target sequence
gcagcatttgatatcacaaaagaggct

SEQ ID NO: 239409 - DNA, 27 bp, Artificial sequence
  SiRNA target sequence
cagcatttgatatcacaaaagaggctt

SEQ ID NO: 239410 - DNA, 27 bp, Artificial sequence
  SiRNA target sequence
agcatttgatatcacaaaagaggcttt

SEQ ID NO: 239411 - DNA, 27 bp, Artificial sequence
  SiRNA target sequence
gcatttgatatcacaaaagaggctttg

SEQ ID NO: 239412 - DNA, 27 bp, Artificial sequence
  SiRNA target sequence
catttgatatcacaaaagaggctttgt

SEQ ID NO: 239413 - DNA, 27 bp, Artificial sequence
  SiRNA target sequence
atttgatatcacaaaagaggctttgtc

SEQ ID NO: 239414 - DNA, 27 bp, Artificial sequence
  SiRNA target sequence
tttgatatcacaaaagaggctttgtct

SEQ ID NO: 239415 - DNA, 27 bp, Artificial sequence
  SiRNA target sequence
ttgatatcacaaaagaggctttgtcta

SEQ ID NO: 239416 - DNA, 27 bp, Artificial sequence
  SiRNA target sequence
tgatatcacaaaagaggctttgtctat

SEQ ID NO: 239417 - DNA, 27 bp, Artificial sequence
  SiRNA target sequence
gatatcacaaaagaggctttgtctatg

SEQ ID NO: 239418 - DNA, 27 bp, Artificial sequence
  SiRNA target sequence
atatcacaaaagaggctttgtctatgc

SEQ ID NO: 239419 - DNA, 27 bp, Artificial sequence
  SiRNA target sequence
tatcacaaaagaggctttgtctatgca

SEQ ID NO: 239420 - DNA, 27 bp, Artificial sequence
  SiRNA target sequence
atcacaaaagaggctttgtctatgcag

SEQ ID NO: 239421 - DNA, 27 bp, Artificial sequence
  SiRNA target sequence
tcacaaaagaggctttgtctatgcaga

SEQ ID NO: 239422 - DNA, 27 bp, Artificial sequence
  SiRNA target sequence
cacaaaagaggctttgtctatgcagat

SEQ ID NO: 239423 - DNA, 27 bp, Artificial sequence
  SiRNA target sequence
acaaaagaggctttgtctatgcagatt

SEQ ID NO: 239424 - DNA, 27 bp, Artificial sequence
  SiRNA target sequence
caaaagaggctttgtctatgcagattg

SEQ ID NO: 239425 - DNA, 27 bp, Artificial sequence
  SiRNA target sequence
aaaagaggctttgtctatgcagattga

SEQ ID NO: 239426 - DNA, 27 bp, Artificial sequence
  SiRNA target sequence
aaagaggctttgtctatgcagattgat

SEQ ID NO: 239427 - DNA, 27 bp, Artificial sequence
  SiRNA target sequence
aagaggctttgtctatgcagattgatg

SEQ ID NO: 239428 - DNA, 27 bp, Artificial sequence
  SiRNA target sequence
agaggctttgtctatgcagattgatgg

SEQ ID NO: 239429 - DNA, 27 bp, Artificial sequence
  SiRNA target sequence
gaggctttgtctatgcagattgatggt

SEQ ID NO: 239430 - DNA, 27 bp, Artificial sequence
  SiRNA target sequence
aggctttgtctatgcagattgatggtt

SEQ ID NO: 239431 - DNA, 27 bp, Artificial sequence
  SiRNA target sequence
ggctttgtctatgcagattgatggttc

SEQ ID NO: 239432 - DNA, 27 bp, Artificial sequence
  SiRNA target sequence
gctttgtctatgcagattgatggttct

SEQ ID NO: 239433 - DNA, 27 bp, Artificial sequence
  SiRNA target sequence
ctttgtctatgcagattgatggttcta

SEQ ID NO: 239434 - DNA, 27 bp, Artificial sequence
  SiRNA target sequence
tttgtctatgcagattgatggttctat

SEQ ID NO: 239435 - DNA, 27 bp, Artificial sequence
  SiRNA target sequence
ttgtctatgcagattgatggttctata

SEQ ID NO: 239436 - DNA, 27 bp, Artificial sequence
  SiRNA target sequence
tgtctatgcagattgatggttctataa

SEQ ID NO: 239437 - DNA, 27 bp, Artificial sequence
  SiRNA target sequence
gtctatgcagattgatggttctataag

SEQ ID NO: 239438 - DNA, 27 bp, Artificial sequence
  SiRNA target sequence
tctatgcagattgatggttctataaga

SEQ ID NO: 239439 - DNA, 27 bp, Artificial sequence
  SiRNA target sequence
ctatgcagattgatggttctataagag

SEQ ID NO: 239440 - DNA, 27 bp, Artificial sequence
  SiRNA target sequence
tatgcagattgatggttctataagagc

SEQ ID NO: 239441 - DNA, 27 bp, Artificial sequence
  SiRNA target sequence
atgcagattgatggttctataagagcg

SEQ ID NO: 239442 - DNA, 27 bp, Artificial sequence
  SiRNA target sequence
tgcagattgatggttctataagagcga

SEQ ID NO: 239443 - DNA, 27 bp, Artificial sequence
  SiRNA target sequence
gcagattgatggttctataagagcgaa

SEQ ID NO: 239444 - DNA, 27 bp, Artificial sequence
  SiRNA target sequence
cagattgatggttctataagagcgaaa

SEQ ID NO: 239445 - DNA, 27 bp, Artificial sequence
  SiRNA target sequence
agattgatggttctataagagcgaaat

SEQ ID NO: 239446 - DNA, 27 bp, Artificial sequence
  SiRNA target sequence
gattgatggttctataagagcgaaata

SEQ ID NO: 239447 - DNA, 27 bp, Artificial sequence
  SiRNA target sequence
attgatggttctataagagcgaaatac

SEQ ID NO: 239448 - DNA, 27 bp, Artificial sequence
  SiRNA target sequence
ttgatggttctataagagcgaaataca

SEQ ID NO: 239449 - DNA, 27 bp, Artificial sequence
  SiRNA target sequence
tgatggttctataagagcgaaatacaa

SEQ ID NO: 239450 - DNA, 27 bp, Artificial sequence
  SiRNA target sequence
gatggttctataagagcgaaatacaaa

SEQ ID NO: 239451 - DNA, 27 bp, Artificial sequence
  SiRNA target sequence
atggttctataagagcgaaatacaaag

SEQ ID NO: 239452 - DNA, 27 bp, Artificial sequence
  SiRNA target sequence
tggttctataagagcgaaatacaaagg

SEQ ID NO: 239453 - DNA, 27 bp, Artificial sequence
  SiRNA target sequence
ggttctataagagcgaaatacaaaggt

SEQ ID NO: 239454 - DNA, 27 bp, Artificial sequence
  SiRNA target sequence
gttctataagagcgaaatacaaaggta

SEQ ID NO: 239455 - DNA, 27 bp, Artificial sequence
  SiRNA target sequence
ttctataagagcgaaatacaaaggtat

SEQ ID NO: 239456 - DNA, 27 bp, Artificial sequence
  SiRNA target sequence
tctataagagcgaaatacaaaggtatt

SEQ ID NO: 239457 - DNA, 27 bp, Artificial sequence
  SiRNA target sequence
ctataagagcgaaatacaaaggtattt

SEQ ID NO: 239458 - DNA, 27 bp, Artificial sequence
  SiRNA target sequence
tataagagcgaaatacaaaggtatttt

SEQ ID NO: 239459 - DNA, 27 bp, Artificial sequence
  SiRNA target sequence
ataagagcgaaatacaaaggtattttt

SEQ ID NO: 239460 - DNA, 27 bp, Artificial sequence
  SiRNA target sequence
taagagcgaaatacaaaggtatttttg

SEQ ID NO: 239461 - DNA, 27 bp, Artificial sequence
  SiRNA target sequence
aagagcgaaatacaaaggtatttttga

SEQ ID NO: 239462 - DNA, 27 bp, Artificial sequence
  SiRNA target sequence
agagcgaaatacaaaggtatttttgat

SEQ ID NO: 239463 - DNA, 27 bp, Artificial sequence
  SiRNA target sequence
gagcgaaatacaaaggtatttttgatg

SEQ ID NO: 239464 - DNA, 27 bp, Artificial sequence
  SiRNA target sequence
agcgaaatacaaaggtatttttgatgg

SEQ ID NO: 239465 - DNA, 27 bp, Artificial sequence
  SiRNA target sequence
gcgaaatacaaaggtatttttgatggt

SEQ ID NO: 239466 - DNA, 27 bp, Artificial sequence
  SiRNA target sequence
cgaaatacaaaggtatttttgatggtg

SEQ ID NO: 239467 - DNA, 27 bp, Artificial sequence
  SiRNA target sequence
gaaatacaaaggtatttttgatggtgt

SEQ ID NO: 239468 - DNA, 27 bp, Artificial sequence
  SiRNA target sequence
aaatacaaaggtatttttgatggtgta

SEQ ID NO: 239469 - DNA, 27 bp, Artificial sequence
  SiRNA target sequence
aatacaaaggtatttttgatggtgtat

SEQ ID NO: 239470 - DNA, 27 bp, Artificial sequence
  SiRNA target sequence
atacaaaggtatttttgatggtgtatt

SEQ ID NO: 239471 - DNA, 27 bp, Artificial sequence
  SiRNA target sequence
tacaaaggtatttttgatggtgtattt

SEQ ID NO: 239472 - DNA, 27 bp, Artificial sequence
  SiRNA target sequence
acaaaggtatttttgatggtgtatttg

SEQ ID NO: 239473 - DNA, 27 bp, Artificial sequence
  SiRNA target sequence
caaaggtatttttgatggtgtatttgg

SEQ ID NO: 239474 - DNA, 27 bp, Artificial sequence
  SiRNA target sequence
aaaggtatttttgatggtgtatttggt

SEQ ID NO: 239475 - DNA, 27 bp, Artificial sequence
  SiRNA target sequence
aaggtatttttgatggtgtatttggta

SEQ ID NO: 239476 - DNA, 27 bp, Artificial sequence
  SiRNA target sequence
aggtatttttgatggtgtatttggtaa

SEQ ID NO: 239477 - DNA, 27 bp, Artificial sequence
  SiRNA target sequence
ggtatttttgatggtgtatttggtaag

SEQ ID NO: 239478 - DNA, 27 bp, Artificial sequence
  SiRNA target sequence
gtatttttgatggtgtatttggtaagc

SEQ ID NO: 239479 - DNA, 27 bp, Artificial sequence
  SiRNA target sequence
tatttttgatggtgtatttggtaagct

SEQ ID NO: 239480 - DNA, 27 bp, Artificial sequence
  SiRNA target sequence
atttttgatggtgtatttggtaagctg

SEQ ID NO: 239481 - DNA, 27 bp, Artificial sequence
  SiRNA target sequence
tttttgatggtgtatttggtaagctgg

SEQ ID NO: 239482 - DNA, 27 bp, Artificial sequence
  SiRNA target sequence
ttttgatggtgtatttggtaagctggg

SEQ ID NO: 239483 - DNA, 27 bp, Artificial sequence
  SiRNA target sequence
tttgatggtgtatttggtaagctgggg

SEQ ID NO: 239484 - DNA, 27 bp, Artificial sequence
  SiRNA target sequence
ttgatggtgtatttggtaagctgggga

SEQ ID NO: 239485 - DNA, 27 bp, Artificial sequence
  SiRNA target sequence
tgatggtgtatttggtaagctggggaa

SEQ ID NO: 239486 - DNA, 27 bp, Artificial sequence
  SiRNA target sequence
gatggtgtatttggtaagctggggaaa

SEQ ID NO: 239487 - DNA, 27 bp, Artificial sequence
  SiRNA target sequence
atggtgtatttggtaagctggggaaat

SEQ ID NO: 239488 - DNA, 27 bp, Artificial sequence
  SiRNA target sequence
tggtgtatttggtaagctggggaaatc

SEQ ID NO: 239489 - DNA, 27 bp, Artificial sequence
  SiRNA target sequence
ggtgtatttggtaagctggggaaatct

SEQ ID NO: 239490 - DNA, 27 bp, Artificial sequence
  SiRNA target sequence
gtgtatttggtaagctggggaaatctt

SEQ ID NO: 239491 - DNA, 27 bp, Artificial sequence
  SiRNA target sequence
tgtatttggtaagctggggaaatcttt

SEQ ID NO: 239492 - DNA, 27 bp, Artificial sequence
  SiRNA target sequence
gtatttggtaagctggggaaatctttt

SEQ ID NO: 239493 - DNA, 27 bp, Artificial sequence
  SiRNA target sequence
tatttggtaagctggggaaatcttttg

SEQ ID NO: 239494 - DNA, 27 bp, Artificial sequence
  SiRNA target sequence
atttggtaagctggggaaatcttttgg

SEQ ID NO: 239495 - DNA, 27 bp, Artificial sequence
  SiRNA target sequence
tttggtaagctggggaaatcttttgga

SEQ ID NO: 239496 - DNA, 27 bp, Artificial sequence
  SiRNA target sequence
ttggtaagctggggaaatcttttggat

SEQ ID NO: 239497 - DNA, 27 bp, Artificial sequence
  SiRNA target sequence
tggtaagctggggaaatcttttggatc

SEQ ID NO: 239498 - DNA, 27 bp, Artificial sequence
  SiRNA target sequence
ggtaagctggggaaatcttttggatca

SEQ ID NO: 239499 - DNA, 27 bp, Artificial sequence
  SiRNA target sequence
gtaagctggggaaatcttttggatcag

SEQ ID NO: 239500 - DNA, 27 bp, Artificial sequence
  SiRNA target sequence
taagctggggaaatcttttggatcagt

SEQ ID NO: 239501 - DNA, 27 bp, Artificial sequence
  SiRNA target sequence
aagctggggaaatcttttggatcagtt

SEQ ID NO: 239502 - DNA, 27 bp, Artificial sequence
  SiRNA target sequence
agctggggaaatcttttggatcagttt

SEQ ID NO: 239503 - DNA, 27 bp, Artificial sequence
  SiRNA target sequence
gctggggaaatcttttggatcagttta

SEQ ID NO: 239504 - DNA, 27 bp, Artificial sequence
  SiRNA target sequence
ctggggaaatcttttggatcagtttat

SEQ ID NO: 239505 - DNA, 27 bp, Artificial sequence
  SiRNA target sequence
tggggaaatcttttggatcagtttatg

SEQ ID NO: 239506 - DNA, 27 bp, Artificial sequence
  SiRNA target sequence
ggggaaatcttttggatcagtttatgg

SEQ ID NO: 239507 - DNA, 27 bp, Artificial sequence
  SiRNA target sequence
gggaaatcttttggatcagtttatgga

SEQ ID NO: 239508 - DNA, 27 bp, Artificial sequence
  SiRNA target sequence
ggaaatcttttggatcagtttatggat

SEQ ID NO: 239509 - DNA, 27 bp, Artificial sequence
  SiRNA target sequence
gaaatcttttggatcagtttatggatt

SEQ ID NO: 239510 - DNA, 27 bp, Artificial sequence
  SiRNA target sequence
aaatcttttggatcagtttatggattt

SEQ ID NO: 239511 - DNA, 27 bp, Artificial sequence
  SiRNA target sequence
aatcttttggatcagtttatggattta

SEQ ID NO: 239512 - DNA, 27 bp, Artificial sequence
  SiRNA target sequence
atcttttggatcagtttatggatttac

SEQ ID NO: 239513 - DNA, 27 bp, Artificial sequence
  SiRNA target sequence
tcttttggatcagtttatggatttaca

SEQ ID NO: 239514 - DNA, 27 bp, Artificial sequence
  SiRNA target sequence
cttttggatcagtttatggatttacaa

SEQ ID NO: 239515 - DNA, 27 bp, Artificial sequence
  SiRNA target sequence
ttttggatcagtttatggatttacaat

SEQ ID NO: 239516 - DNA, 27 bp, Artificial sequence
  SiRNA target sequence
tttggatcagtttatggatttacaatt

SEQ ID NO: 239517 - DNA, 27 bp, Artificial sequence
  SiRNA target sequence
ttggatcagtttatggatttacaatta

SEQ ID NO: 239518 - DNA, 27 bp, Artificial sequence
  SiRNA target sequence
tggatcagtttatggatttacaattac

SEQ ID NO: 239519 - DNA, 27 bp, Artificial sequence
  SiRNA target sequence
ggatcagtttatggatttacaattact

SEQ ID NO: 239520 - DNA, 27 bp, Artificial sequence
  SiRNA target sequence
gatcagtttatggatttacaattacta

SEQ ID NO: 239521 - DNA, 27 bp, Artificial sequence
  SiRNA target sequence
atcagtttatggatttacaattactac

SEQ ID NO: 239522 - DNA, 27 bp, Artificial sequence
  SiRNA target sequence
tcagtttatggatttacaattactaca

SEQ ID NO: 239523 - DNA, 27 bp, Artificial sequence
  SiRNA target sequence
cagtttatggatttacaattactacat

SEQ ID NO: 239524 - DNA, 27 bp, Artificial sequence
  SiRNA target sequence
agtttatggatttacaattactacatt

SEQ ID NO: 239525 - DNA, 27 bp, Artificial sequence
  SiRNA target sequence
gtttatggatttacaattactacatta

SEQ ID NO: 239526 - DNA, 27 bp, Artificial sequence
  SiRNA target sequence
tttatggatttacaattactacattat

SEQ ID NO: 239527 - DNA, 27 bp, Artificial sequence
  SiRNA target sequence
ttatggatttacaattactacattatt

SEQ ID NO: 239528 - DNA, 27 bp, Artificial sequence
  SiRNA target sequence
tatggatttacaattactacattatta

SEQ ID NO: 239529 - DNA, 27 bp, Artificial sequence
  SiRNA target sequence
atggatttacaattactacattattag

SEQ ID NO: 239530 - DNA, 27 bp, Artificial sequence
  SiRNA target sequence
tggatttacaattactacattattagg

SEQ ID NO: 239531 - DNA, 27 bp, Artificial sequence
  SiRNA target sequence
ggatttacaattactacattattagga

SEQ ID NO: 239532 - DNA, 27 bp, Artificial sequence
  SiRNA target sequence
gatttacaattactacattattaggaa

SEQ ID NO: 239533 - DNA, 27 bp, Artificial sequence
  SiRNA target sequence
atttacaattactacattattaggaac

SEQ ID NO: 239534 - DNA, 27 bp, Artificial sequence
  SiRNA target sequence
tttacaattactacattattaggaaca

SEQ ID NO: 239535 - DNA, 27 bp, Artificial sequence
  SiRNA target sequence
ttacaattactacattattaggaacaa

SEQ ID NO: 239536 - DNA, 27 bp, Artificial sequence
  SiRNA target sequence
tacaattactacattattaggaacaag

SEQ ID NO: 239537 - DNA, 27 bp, Artificial sequence
  SiRNA target sequence
acaattactacattattaggaacaaga

SEQ ID NO: 239538 - DNA, 27 bp, Artificial sequence
  SiRNA target sequence
caattactacattattaggaacaagag

SEQ ID NO: 239539 - DNA, 27 bp, Artificial sequence
  SiRNA target sequence
aattactacattattaggaacaagaga

SEQ ID NO: 239540 - DNA, 27 bp, Artificial sequence
  SiRNA target sequence
attactacattattaggaacaagagat

SEQ ID NO: 239541 - DNA, 27 bp, Artificial sequence
  SiRNA target sequence
ttactacattattaggaacaagagatg

SEQ ID NO: 239542 - DNA, 27 bp, Artificial sequence
  SiRNA target sequence
tactacattattaggaacaagagatgt

SEQ ID NO: 239543 - DNA, 27 bp, Artificial sequence
  SiRNA target sequence
actacattattaggaacaagagatgtt

SEQ ID NO: 239544 - DNA, 27 bp, Artificial sequence
  SiRNA target sequence
ctacattattaggaacaagagatgttc

SEQ ID NO: 239545 - DNA, 27 bp, Artificial sequence
  SiRNA target sequence
tacattattaggaacaagagatgttcg

SEQ ID NO: 239546 - DNA, 27 bp, Artificial sequence
  SiRNA target sequence
acattattaggaacaagagatgttcgt

SEQ ID NO: 239547 - DNA, 27 bp, Artificial sequence
  SiRNA target sequence
cattattaggaacaagagatgttcgta

SEQ ID NO: 239548 - DNA, 27 bp, Artificial sequence
  SiRNA target sequence
attattaggaacaagagatgttcgtag

SEQ ID NO: 239549 - DNA, 27 bp, Artificial sequence
  SiRNA target sequence
ttattaggaacaagagatgttcgtaga

SEQ ID NO: 239550 - DNA, 27 bp, Artificial sequence
  SiRNA target sequence
tattaggaacaagagatgttcgtagag

SEQ ID NO: 239551 - DNA, 27 bp, Artificial sequence
  SiRNA target sequence
attaggaacaagagatgttcgtagagg

SEQ ID NO: 239552 - DNA, 27 bp, Artificial sequence
  SiRNA target sequence
ttaggaacaagagatgttcgtagaggt

SEQ ID NO: 239553 - DNA, 27 bp, Artificial sequence
  SiRNA target sequence
taggaacaagagatgttcgtagaggtg

SEQ ID NO: 239554 - DNA, 27 bp, Artificial sequence
  SiRNA target sequence
aggaacaagagatgttcgtagaggtgc

SEQ ID NO: 239555 - DNA, 27 bp, Artificial sequence
  SiRNA target sequence
ggaacaagagatgttcgtagaggtgct

SEQ ID NO: 239556 - DNA, 27 bp, Artificial sequence
  SiRNA target sequence
gaacaagagatgttcgtagaggtgctc

SEQ ID NO: 239557 - DNA, 27 bp, Artificial sequence
  SiRNA target sequence
aacaagagatgttcgtagaggtgctcc

SEQ ID NO: 239558 - DNA, 27 bp, Artificial sequence
  SiRNA target sequence
acaagagatgttcgtagaggtgctcct

SEQ ID NO: 239559 - DNA, 27 bp, Artificial sequence
  SiRNA target sequence
caagagatgttcgtagaggtgctccta

SEQ ID NO: 239560 - DNA, 27 bp, Artificial sequence
  SiRNA target sequence
aagagatgttcgtagaggtgctcctat

SEQ ID NO: 239561 - DNA, 27 bp, Artificial sequence
  SiRNA target sequence
agagatgttcgtagaggtgctcctata

SEQ ID NO: 239562 - DNA, 27 bp, Artificial sequence
  SiRNA target sequence
gagatgttcgtagaggtgctcctatat

SEQ ID NO: 239563 - DNA, 27 bp, Artificial sequence
  SiRNA target sequence
agatgttcgtagaggtgctcctatatc

SEQ ID NO: 239564 - DNA, 27 bp, Artificial sequence
  SiRNA target sequence
gatgttcgtagaggtgctcctatatcg

SEQ ID NO: 239565 - DNA, 27 bp, Artificial sequence
  SiRNA target sequence
atgttcgtagaggtgctcctatatcgc

SEQ ID NO: 239566 - DNA, 27 bp, Artificial sequence
  SiRNA target sequence
tgttcgtagaggtgctcctatatcgct

SEQ ID NO: 239567 - DNA, 27 bp, Artificial sequence
  SiRNA target sequence
gttcgtagaggtgctcctatatcgctt

SEQ ID NO: 239568 - DNA, 27 bp, Artificial sequence
  SiRNA target sequence
ttcgtagaggtgctcctatatcgcttt

SEQ ID NO: 239569 - DNA, 27 bp, Artificial sequence
  SiRNA target sequence
tcgtagaggtgctcctatatcgctttg

SEQ ID NO: 239570 - DNA, 27 bp, Artificial sequence
  SiRNA target sequence
cgtagaggtgctcctatatcgctttgt

SEQ ID NO: 239571 - DNA, 27 bp, Artificial sequence
  SiRNA target sequence
gtagaggtgctcctatatcgctttgtg

SEQ ID NO: 239572 - DNA, 27 bp, Artificial sequence
  SiRNA target sequence
tagaggtgctcctatatcgctttgtgt

SEQ ID NO: 239573 - DNA, 27 bp, Artificial sequence
  SiRNA target sequence
agaggtgctcctatatcgctttgtgtt

SEQ ID NO: 239574 - DNA, 27 bp, Artificial sequence
  SiRNA target sequence
gaggtgctcctatatcgctttgtgttc

SEQ ID NO: 239575 - DNA, 27 bp, Artificial sequence
  SiRNA target sequence
aggtgctcctatatcgctttgtgttct

SEQ ID NO: 239576 - DNA, 27 bp, Artificial sequence
  SiRNA target sequence
ggtgctcctatatcgctttgtgttcta

SEQ ID NO: 239577 - DNA, 27 bp, Artificial sequence
  SiRNA target sequence
gtgctcctatatcgctttgtgttctaa

SEQ ID NO: 239578 - DNA, 27 bp, Artificial sequence
  SiRNA target sequence
tgctcctatatcgctttgtgttctaat

SEQ ID NO: 239579 - DNA, 27 bp, Artificial sequence
  SiRNA target sequence
gctcctatatcgctttgtgttctaata

SEQ ID NO: 239580 - DNA, 27 bp, Artificial sequence
  SiRNA target sequence
ctcctatatcgctttgtgttctaatat

SEQ ID NO: 239581 - DNA, 27 bp, Artificial sequence
  SiRNA target sequence
tcctatatcgctttgtgttctaatatt

SEQ ID NO: 239582 - DNA, 27 bp, Artificial sequence
  SiRNA target sequence
cctatatcgctttgtgttctaatattg

SEQ ID NO: 239583 - DNA, 27 bp, Artificial sequence
  SiRNA target sequence
ctatatcgctttgtgttctaatattgt

SEQ ID NO: 239584 - DNA, 27 bp, Artificial sequence
  SiRNA target sequence
tatatcgctttgtgttctaatattgtt

SEQ ID NO: 239585 - DNA, 27 bp, Artificial sequence
  SiRNA target sequence
atatcgctttgtgttctaatattgttc

SEQ ID NO: 239586 - DNA, 27 bp, Artificial sequence
  SiRNA target sequence
tatcgctttgtgttctaatattgttct

SEQ ID NO: 239587 - DNA, 27 bp, Artificial sequence
  SiRNA target sequence
atcgctttgtgttctaatattgttctg

SEQ ID NO: 239588 - DNA, 27 bp, Artificial sequence
  SiRNA target sequence
tcgctttgtgttctaatattgttctgc

SEQ ID NO: 239589 - DNA, 27 bp, Artificial sequence
  SiRNA target sequence
cgctttgtgttctaatattgttctgcc

SEQ ID NO: 239590 - DNA, 27 bp, Artificial sequence
  SiRNA target sequence
gctttgtgttctaatattgttctgcct

SEQ ID NO: 239591 - DNA, 27 bp, Artificial sequence
  SiRNA target sequence
ctttgtgttctaatattgttctgcctt

SEQ ID NO: 239592 - DNA, 27 bp, Artificial sequence
  SiRNA target sequence
tttgtgttctaatattgttctgcctta

SEQ ID NO: 239593 - DNA, 27 bp, Artificial sequence
  SiRNA target sequence
ttgtgttctaatattgttctgccttat

SEQ ID NO: 239594 - DNA, 27 bp, Artificial sequence
  SiRNA target sequence
tgtgttctaatattgttctgccttata

SEQ ID NO: 239595 - DNA, 27 bp, Artificial sequence
  SiRNA target sequence
gtgttctaatattgttctgccttatat

SEQ ID NO: 239596 - DNA, 27 bp, Artificial sequence
  SiRNA target sequence
tgttctaatattgttctgccttatatg

SEQ ID NO: 239597 - DNA, 27 bp, Artificial sequence
  SiRNA target sequence
gttctaatattgttctgccttatatgg

SEQ ID NO: 239598 - DNA, 27 bp, Artificial sequence
  SiRNA target sequence
ttctaatattgttctgccttatatggt

SEQ ID NO: 239599 - DNA, 27 bp, Artificial sequence
  SiRNA target sequence
tctaatattgttctgccttatatggtt

SEQ ID NO: 239600 - DNA, 27 bp, Artificial sequence
  SiRNA target sequence
ctaatattgttctgccttatatggttt

SEQ ID NO: 239601 - DNA, 27 bp, Artificial sequence
  SiRNA target sequence
taatattgttctgccttatatggtttt

SEQ ID NO: 239602 - DNA, 27 bp, Artificial sequence
  SiRNA target sequence
aatattgttctgccttatatggtttta

SEQ ID NO: 239603 - DNA, 27 bp, Artificial sequence
  SiRNA target sequence
atattgttctgccttatatggttttat

SEQ ID NO: 239604 - DNA, 27 bp, Artificial sequence
  SiRNA target sequence
tattgttctgccttatatggttttatt

SEQ ID NO: 239605 - DNA, 27 bp, Artificial sequence
  SiRNA target sequence
attgttctgccttatatggttttattc

SEQ ID NO: 239606 - DNA, 27 bp, Artificial sequence
  SiRNA target sequence
ttgttctgccttatatggttttattct

SEQ ID NO: 239607 - DNA, 27 bp, Artificial sequence
  SiRNA target sequence
tgttctgccttatatggttttattctg

SEQ ID NO: 239608 - DNA, 27 bp, Artificial sequence
  SiRNA target sequence
gttctgccttatatggttttattctgt

SEQ ID NO: 239609 - DNA, 27 bp, Artificial sequence
  SiRNA target sequence
ttctgccttatatggttttattctgtt

SEQ ID NO: 239610 - DNA, 27 bp, Artificial sequence
  SiRNA target sequence
tctgccttatatggttttattctgttt

SEQ ID NO: 239611 - DNA, 27 bp, Artificial sequence
  SiRNA target sequence
ctgccttatatggttttattctgtttt

SEQ ID NO: 239612 - DNA, 27 bp, Artificial sequence
  SiRNA target sequence
tgccttatatggttttattctgttttc

SEQ ID NO: 239613 - DNA, 27 bp, Artificial sequence
  SiRNA target sequence
gccttatatggttttattctgttttct

SEQ ID NO: 239614 - DNA, 27 bp, Artificial sequence
  SiRNA target sequence
ccttatatggttttattctgttttcta

SEQ ID NO: 239615 - DNA, 27 bp, Artificial sequence
  SiRNA target sequence
cttatatggttttattctgttttctat

SEQ ID NO: 239616 - DNA, 27 bp, Artificial sequence
  SiRNA target sequence
ttatatggttttattctgttttctatc

SEQ ID NO: 239617 - DNA, 27 bp, Artificial sequence
  SiRNA target sequence
tatatggttttattctgttttctatct

SEQ ID NO: 239618 - DNA, 27 bp, Artificial sequence
  SiRNA target sequence
atatggttttattctgttttctatctc

SEQ ID NO: 239619 - DNA, 27 bp, Artificial sequence
  SiRNA target sequence
tatggttttattctgttttctatctca

SEQ ID NO: 239620 - DNA, 27 bp, Artificial sequence
  SiRNA target sequence
atggttttattctgttttctatctcaa

SEQ ID NO: 239621 - DNA, 27 bp, Artificial sequence
  SiRNA target sequence
tggttttattctgttttctatctcaat

SEQ ID NO: 239622 - DNA, 27 bp, Artificial sequence
  SiRNA target sequence
ggttttattctgttttctatctcaata

SEQ ID NO: 239623 - DNA, 27 bp, Artificial sequence
  SiRNA target sequence
gttttattctgttttctatctcaatag

SEQ ID NO: 239624 - DNA, 27 bp, Artificial sequence
  SiRNA target sequence
ttttattctgttttctatctcaataga

SEQ ID NO: 239625 - DNA, 27 bp, Artificial sequence
  SiRNA target sequence
tttattctgttttctatctcaatagaa

SEQ ID NO: 239626 - DNA, 27 bp, Artificial sequence
  SiRNA target sequence
ttattctgttttctatctcaatagaaa

SEQ ID NO: 239627 - DNA, 27 bp, Artificial sequence
  SiRNA target sequence
tattctgttttctatctcaatagaaaa

SEQ ID NO: 239628 - DNA, 27 bp, Artificial sequence
  SiRNA target sequence
attctgttttctatctcaatagaaaat

SEQ ID NO: 239629 - DNA, 27 bp, Artificial sequence
  SiRNA target sequence
ttctgttttctatctcaatagaaaata

SEQ ID NO: 239630 - DNA, 27 bp, Artificial sequence
  SiRNA target sequence
tctgttttctatctcaatagaaaatat

SEQ ID NO: 239631 - DNA, 27 bp, Artificial sequence
  SiRNA target sequence
ctgttttctatctcaatagaaaatata

SEQ ID NO: 239632 - DNA, 27 bp, Artificial sequence
  SiRNA target sequence
tgttttctatctcaatagaaaatataa

SEQ ID NO: 239633 - DNA, 27 bp, Artificial sequence
  SiRNA target sequence
gttttctatctcaatagaaaatataaa

SEQ ID NO: 239634 - DNA, 27 bp, Artificial sequence
  SiRNA target sequence
ttttctatctcaatagaaaatataaag

SEQ ID NO: 239635 - DNA, 27 bp, Artificial sequence
  SiRNA target sequence
tttctatctcaatagaaaatataaaga

SEQ ID NO: 239636 - DNA, 27 bp, Artificial sequence
  SiRNA target sequence
ttctatctcaatagaaaatataaagaa

SEQ ID NO: 239637 - DNA, 27 bp, Artificial sequence
  SiRNA target sequence
tctatctcaatagaaaatataaagaat

SEQ ID NO: 239638 - DNA, 27 bp, Artificial sequence
  SiRNA target sequence
ctatctcaatagaaaatataaagaatc

SEQ ID NO: 239639 - DNA, 27 bp, Artificial sequence
  SiRNA target sequence
tatctcaatagaaaatataaagaatct

SEQ ID NO: 239640 - DNA, 27 bp, Artificial sequence
  SiRNA target sequence
atctcaatagaaaatataaagaatctg

SEQ ID NO: 239641 - DNA, 27 bp, Artificial sequence
  SiRNA target sequence
tctcaatagaaaatataaagaatctgt

SEQ ID NO: 239642 - DNA, 27 bp, Artificial sequence
  SiRNA target sequence
ctcaatagaaaatataaagaatctgtc

SEQ ID NO: 239643 - DNA, 27 bp, Artificial sequence
  SiRNA target sequence
tcaatagaaaatataaagaatctgtcg

SEQ ID NO: 239644 - DNA, 27 bp, Artificial sequence
  SiRNA target sequence
caatagaaaatataaagaatctgtcga

SEQ ID NO: 239645 - DNA, 27 bp, Artificial sequence
  SiRNA target sequence
aatagaaaatataaagaatctgtcgag

SEQ ID NO: 239646 - DNA, 27 bp, Artificial sequence
  SiRNA target sequence
atagaaaatataaagaatctgtcgaga

SEQ ID NO: 239647 - DNA, 27 bp, Artificial sequence
  SiRNA target sequence
tagaaaatataaagaatctgtcgagaa

SEQ ID NO: 239648 - DNA, 27 bp, Artificial sequence
  SiRNA target sequence
agaaaatataaagaatctgtcgagaat

SEQ ID NO: 239649 - DNA, 27 bp, Artificial sequence
  SiRNA target sequence
gaaaatataaagaatctgtcgagaata

SEQ ID NO: 239650 - DNA, 27 bp, Artificial sequence
  SiRNA target sequence
aaaatataaagaatctgtcgagaataa

SEQ ID NO: 239651 - DNA, 27 bp, Artificial sequence
  SiRNA target sequence
aaatataaagaatctgtcgagaataat

SEQ ID NO: 239652 - DNA, 27 bp, Artificial sequence
  SiRNA target sequence
aatataaagaatctgtcgagaataatg

SEQ ID NO: 239653 - DNA, 27 bp, Artificial sequence
  SiRNA target sequence
atataaagaatctgtcgagaataatgc

SEQ ID NO: 239654 - DNA, 27 bp, Artificial sequence
  SiRNA target sequence
tataaagaatctgtcgagaataatgca

SEQ ID NO: 239655 - DNA, 27 bp, Artificial sequence
  SiRNA target sequence
ataaagaatctgtcgagaataatgcac

SEQ ID NO: 239656 - DNA, 27 bp, Artificial sequence
  SiRNA target sequence
taaagaatctgtcgagaataatgcacc

SEQ ID NO: 239657 - DNA, 27 bp, Artificial sequence
  SiRNA target sequence
aaagaatctgtcgagaataatgcacca

SEQ ID NO: 239658 - DNA, 27 bp, Artificial sequence
  SiRNA target sequence
aagaatctgtcgagaataatgcaccaa

SEQ ID NO: 239659 - DNA, 27 bp, Artificial sequence
  SiRNA target sequence
agaatctgtcgagaataatgcaccaat

SEQ ID NO: 239660 - DNA, 27 bp, Artificial sequence
  SiRNA target sequence
gaatctgtcgagaataatgcaccaatt

SEQ ID NO: 239661 - DNA, 27 bp, Artificial sequence
  SiRNA target sequence
aatctgtcgagaataatgcaccaattg

SEQ ID NO: 239662 - DNA, 27 bp, Artificial sequence
  SiRNA target sequence
atctgtcgagaataatgcaccaattga

SEQ ID NO: 239663 - DNA, 27 bp, Artificial sequence
  SiRNA target sequence
tctgtcgagaataatgcaccaattgat

SEQ ID NO: 239664 - DNA, 27 bp, Artificial sequence
  SiRNA target sequence
ctgtcgagaataatgcaccaattgata

SEQ ID NO: 239665 - DNA, 27 bp, Artificial sequence
  SiRNA target sequence
tgtcgagaataatgcaccaattgatat

SEQ ID NO: 239666 - DNA, 27 bp, Artificial sequence
  SiRNA target sequence
gtcgagaataatgcaccaattgatatt

SEQ ID NO: 239667 - DNA, 27 bp, Artificial sequence
  SiRNA target sequence
tcgagaataatgcaccaattgatattg

SEQ ID NO: 239668 - DNA, 27 bp, Artificial sequence
  SiRNA target sequence
cgagaataatgcaccaattgatattga

SEQ ID NO: 239669 - DNA, 27 bp, Artificial sequence
  SiRNA target sequence
gagaataatgcaccaattgatattgat

SEQ ID NO: 239670 - DNA, 27 bp, Artificial sequence
  SiRNA target sequence
agaataatgcaccaattgatattgatt

SEQ ID NO: 239671 - DNA, 27 bp, Artificial sequence
  SiRNA target sequence
gaataatgcaccaattgatattgattt

SEQ ID NO: 239672 - DNA, 27 bp, Artificial sequence
  SiRNA target sequence
aataatgcaccaattgatattgattta

SEQ ID NO: 239673 - DNA, 27 bp, Artificial sequence
  SiRNA target sequence
ataatgcaccaattgatattgatttat

SEQ ID NO: 239674 - DNA, 27 bp, Artificial sequence
  SiRNA target sequence
taatgcaccaattgatattgatttatt

SEQ ID NO: 239675 - DNA, 27 bp, Artificial sequence
  SiRNA target sequence
aatgcaccaattgatattgatttattc

SEQ ID NO: 239676 - DNA, 27 bp, Artificial sequence
  SiRNA target sequence
atgcaccaattgatattgatttattca

SEQ ID NO: 239677 - DNA, 27 bp, Artificial sequence
  SiRNA target sequence
tgcaccaattgatattgatttattcac

SEQ ID NO: 239678 - DNA, 27 bp, Artificial sequence
  SiRNA target sequence
gcaccaattgatattgatttattcact

SEQ ID NO: 239679 - DNA, 27 bp, Artificial sequence
  SiRNA target sequence
caccaattgatattgatttattcacta

SEQ ID NO: 239680 - DNA, 27 bp, Artificial sequence
  SiRNA target sequence
accaattgatattgatttattcactag

SEQ ID NO: 239681 - DNA, 27 bp, Artificial sequence
  SiRNA target sequence
ccaattgatattgatttattcactagt

SEQ ID NO: 239682 - DNA, 27 bp, Artificial sequence
  SiRNA target sequence
caattgatattgatttattcactagtt

SEQ ID NO: 239683 - DNA, 27 bp, Artificial sequence
  SiRNA target sequence
aattgatattgatttattcactagttc

SEQ ID NO: 239684 - DNA, 27 bp, Artificial sequence
  SiRNA target sequence
attgatattgatttattcactagttca

SEQ ID NO: 239685 - DNA, 27 bp, Artificial sequence
  SiRNA target sequence
ttgatattgatttattcactagttcaa

SEQ ID NO: 239686 - DNA, 27 bp, Artificial sequence
  SiRNA target sequence
tgatattgatttattcactagttcaaa

SEQ ID NO: 239687 - DNA, 27 bp, Artificial sequence
  SiRNA target sequence
gatattgatttattcactagttcaaaa

SEQ ID NO: 239688 - DNA, 27 bp, Artificial sequence
  SiRNA target sequence
atattgatttattcactagttcaaaag

SEQ ID NO: 239689 - DNA, 27 bp, Artificial sequence
  SiRNA target sequence
tattgatttattcactagttcaaaagt

SEQ ID NO: 239690 - DNA, 27 bp, Artificial sequence
  SiRNA target sequence
attgatttattcactagttcaaaagtc

SEQ ID NO: 239691 - DNA, 27 bp, Artificial sequence
  SiRNA target sequence
ttgatttattcactagttcaaaagtca

SEQ ID NO: 239692 - DNA, 27 bp, Artificial sequence
  SiRNA target sequence
tgatttattcactagttcaaaagtcaa

SEQ ID NO: 239693 - DNA, 27 bp, Artificial sequence
  SiRNA target sequence
gatttattcactagttcaaaagtcaag

SEQ ID NO: 239694 - DNA, 27 bp, Artificial sequence
  SiRNA target sequence
atttattcactagttcaaaagtcaagg

SEQ ID NO: 239695 - DNA, 27 bp, Artificial sequence
  SiRNA target sequence
tttattcactagttcaaaagtcaaggc

SEQ ID NO: 239696 - DNA, 27 bp, Artificial sequence
  SiRNA target sequence
ttattcactagttcaaaagtcaaggca

SEQ ID NO: 239697 - DNA, 27 bp, Artificial sequence
  SiRNA target sequence
tattcactagttcaaaagtcaaggcac

SEQ ID NO: 239698 - DNA, 27 bp, Artificial sequence
  SiRNA target sequence
attcactagttcaaaagtcaaggcacc

SEQ ID NO: 239699 - DNA, 27 bp, Artificial sequence
  SiRNA target sequence
ttcactagttcaaaagtcaaggcacct

SEQ ID NO: 239700 - DNA, 27 bp, Artificial sequence
  SiRNA target sequence
tcactagttcaaaagtcaaggcacctt

SEQ ID NO: 239701 - DNA, 27 bp, Artificial sequence
  SiRNA target sequence
cactagttcaaaagtcaaggcaccttc

SEQ ID NO: 239702 - DNA, 27 bp, Artificial sequence
  SiRNA target sequence
actagttcaaaagtcaaggcaccttct

SEQ ID NO: 239703 - DNA, 27 bp, Artificial sequence
  SiRNA target sequence
ctagttcaaaagtcaaggcaccttctt

SEQ ID NO: 239704 - DNA, 27 bp, Artificial sequence
  SiRNA target sequence
tagttcaaaagtcaaggcaccttcttc

SEQ ID NO: 239705 - DNA, 27 bp, Artificial sequence
  SiRNA target sequence
agttcaaaagtcaaggcaccttcttct

SEQ ID NO: 239706 - DNA, 27 bp, Artificial sequence
  SiRNA target sequence
gttcaaaagtcaaggcaccttcttctg

SEQ ID NO: 239707 - DNA, 27 bp, Artificial sequence
  SiRNA target sequence
ttcaaaagtcaaggcaccttcttctga

SEQ ID NO: 239708 - DNA, 27 bp, Artificial sequence
  SiRNA target sequence
tcaaaagtcaaggcaccttcttctgaa

SEQ ID NO: 239709 - DNA, 27 bp, Artificial sequence
  SiRNA target sequence
caaaagtcaaggcaccttcttctgaac

SEQ ID NO: 239710 - DNA, 27 bp, Artificial sequence
  SiRNA target sequence
aaaagtcaaggcaccttcttctgaacc

SEQ ID NO: 239711 - DNA, 27 bp, Artificial sequence
  SiRNA target sequence
aaagtcaaggcaccttcttctgaacct

SEQ ID NO: 239712 - DNA, 27 bp, Artificial sequence
  SiRNA target sequence
aagtcaaggcaccttcttctgaaccta

SEQ ID NO: 239713 - DNA, 27 bp, Artificial sequence
  SiRNA target sequence
agtcaaggcaccttcttctgaacctac

SEQ ID NO: 239714 - DNA, 27 bp, Artificial sequence
  SiRNA target sequence
gtcaaggcaccttcttctgaacctact

SEQ ID NO: 239715 - DNA, 27 bp, Artificial sequence
  SiRNA target sequence
tcaaggcaccttcttctgaacctactg

SEQ ID NO: 239716 - DNA, 27 bp, Artificial sequence
  SiRNA target sequence
caaggcaccttcttctgaacctactgt

SEQ ID NO: 239717 - DNA, 27 bp, Artificial sequence
  SiRNA target sequence
aaggcaccttcttctgaacctactgtt

SEQ ID NO: 239718 - DNA, 27 bp, Artificial sequence
  SiRNA target sequence
aggcaccttcttctgaacctactgttg

SEQ ID NO: 239719 - DNA, 27 bp, Artificial sequence
  SiRNA target sequence
ggcaccttcttctgaacctactgttgc

SEQ ID NO: 239720 - DNA, 27 bp, Artificial sequence
  SiRNA target sequence
gcaccttcttctgaacctactgttgct

SEQ ID NO: 239721 - DNA, 27 bp, Artificial sequence
  SiRNA target sequence
caccttcttctgaacctactgttgcta

SEQ ID NO: 239722 - DNA, 27 bp, Artificial sequence
  SiRNA target sequence
accttcttctgaacctactgttgctac

SEQ ID NO: 239723 - DNA, 27 bp, Artificial sequence
  SiRNA target sequence
ccttcttctgaacctactgttgctacc

SEQ ID NO: 239724 - DNA, 27 bp, Artificial sequence
  SiRNA target sequence
cttcttctgaacctactgttgctacca

SEQ ID NO: 239725 - DNA, 27 bp, Artificial sequence
  SiRNA target sequence
ttcttctgaacctactgttgctaccaa

SEQ ID NO: 239726 - DNA, 27 bp, Artificial sequence
  SiRNA target sequence
tcttctgaacctactgttgctaccaaa

SEQ ID NO: 239727 - DNA, 27 bp, Artificial sequence
  SiRNA target sequence
cttctgaacctactgttgctaccaaaa

SEQ ID NO: 239728 - DNA, 27 bp, Artificial sequence
  SiRNA target sequence
ttctgaacctactgttgctaccaaaag

SEQ ID NO: 239729 - DNA, 27 bp, Artificial sequence
  SiRNA target sequence
tctgaacctactgttgctaccaaaagt

SEQ ID NO: 239730 - DNA, 27 bp, Artificial sequence
  SiRNA target sequence
ctgaacctactgttgctaccaaaagtg

SEQ ID NO: 239731 - DNA, 27 bp, Artificial sequence
  SiRNA target sequence
tgaacctactgttgctaccaaaagtgt

SEQ ID NO: 239732 - DNA, 27 bp, Artificial sequence
  SiRNA target sequence
gaacctactgttgctaccaaaagtgtt

SEQ ID NO: 239733 - DNA, 27 bp, Artificial sequence
  SiRNA target sequence
aacctactgttgctaccaaaagtgtta

SEQ ID NO: 239734 - DNA, 27 bp, Artificial sequence
  SiRNA target sequence
acctactgttgctaccaaaagtgttac

SEQ ID NO: 239735 - DNA, 27 bp, Artificial sequence
  SiRNA target sequence
cctactgttgctaccaaaagtgttact

SEQ ID NO: 239736 - DNA, 27 bp, Artificial sequence
  SiRNA target sequence
ctactgttgctaccaaaagtgttacta

SEQ ID NO: 239737 - DNA, 27 bp, Artificial sequence
  SiRNA target sequence
tactgttgctaccaaaagtgttactac

SEQ ID NO: 239738 - DNA, 27 bp, Artificial sequence
  SiRNA target sequence
actgttgctaccaaaagtgttactaca

SEQ ID NO: 239739 - DNA, 27 bp, Artificial sequence
  SiRNA target sequence
ctgttgctaccaaaagtgttactacag

SEQ ID NO: 239740 - DNA, 27 bp, Artificial sequence
  SiRNA target sequence
tgttgctaccaaaagtgttactacaga

SEQ ID NO: 239741 - DNA, 27 bp, Artificial sequence
  SiRNA target sequence
gttgctaccaaaagtgttactacagaa

SEQ ID NO: 239742 - DNA, 27 bp, Artificial sequence
  SiRNA target sequence
ttgctaccaaaagtgttactacagaag

SEQ ID NO: 239743 - DNA, 27 bp, Artificial sequence
  SiRNA target sequence
tgctaccaaaagtgttactacagaaga

SEQ ID NO: 239744 - DNA, 27 bp, Artificial sequence
  SiRNA target sequence
gctaccaaaagtgttactacagaagaa

SEQ ID NO: 239745 - DNA, 27 bp, Artificial sequence
  SiRNA target sequence
ctaccaaaagtgttactacagaagaat

SEQ ID NO: 239746 - DNA, 27 bp, Artificial sequence
  SiRNA target sequence
taccaaaagtgttactacagaagaata

SEQ ID NO: 239747 - DNA, 27 bp, Artificial sequence
  SiRNA target sequence
accaaaagtgttactacagaagaataa

SEQ ID NO: 239748 - DNA, 19 bp, Artificial sequence
  SiRNA target sequence
ttaattaaaatcaacatct

SEQ ID NO: 239749 - DNA, 19 bp, Artificial sequence
  SiRNA target sequence
taattaaaatcaacatcta

SEQ ID NO: 239750 - DNA, 19 bp, Artificial sequence
  SiRNA target sequence
aattaaaatcaacatctat

SEQ ID NO: 239751 - DNA, 19 bp, Artificial sequence
  SiRNA target sequence
attaaaatcaacatctatc

SEQ ID NO: 239752 - DNA, 19 bp, Artificial sequence
  SiRNA target sequence
ttaaaatcaacatctatct

SEQ ID NO: 239753 - DNA, 19 bp, Artificial sequence
  SiRNA target sequence
taaaatcaacatctatctc

SEQ ID NO: 239754 - DNA, 19 bp, Artificial sequence
  SiRNA target sequence
aaaatcaacatctatctca

SEQ ID NO: 239755 - DNA, 19 bp, Artificial sequence
  SiRNA target sequence
aaatcaacatctatctcag

SEQ ID NO: 239756 - DNA, 19 bp, Artificial sequence
  SiRNA target sequence
aatcaacatctatctcaga

SEQ ID NO: 239757 - DNA, 19 bp, Artificial sequence
  SiRNA target sequence
atcaacatctatctcagaa

SEQ ID NO: 239758 - DNA, 19 bp, Artificial sequence
  SiRNA target sequence
tcaacatctatctcagaat

SEQ ID NO: 239759 - DNA, 19 bp, Artificial sequence
  SiRNA target sequence
caacatctatctcagaatt

SEQ ID NO: 239760 - DNA, 19 bp, Artificial sequence
  SiRNA target sequence
aacatctatctcagaattt

SEQ ID NO: 239761 - DNA, 19 bp, Artificial sequence
  SiRNA target sequence
acatctatctcagaatttt

SEQ ID NO: 239762 - DNA, 19 bp, Artificial sequence
  SiRNA target sequence
catctatctcagaattttg

SEQ ID NO: 239763 - DNA, 19 bp, Artificial sequence
  SiRNA target sequence
atctatctcagaattttgt

SEQ ID NO: 239764 - DNA, 19 bp, Artificial sequence
  SiRNA target sequence
tctatctcagaattttgtt

SEQ ID NO: 239765 - DNA, 19 bp, Artificial sequence
  SiRNA target sequence
ctatctcagaattttgttc

SEQ ID NO: 239766 - DNA, 19 bp, Artificial sequence
  SiRNA target sequence
tatctcagaattttgttca

SEQ ID NO: 239767 - DNA, 19 bp, Artificial sequence
  SiRNA target sequence
atctcagaattttgttcaa

SEQ ID NO: 239768 - DNA, 19 bp, Artificial sequence
  SiRNA target sequence
tctcagaattttgttcaat

SEQ ID NO: 239769 - DNA, 19 bp, Artificial sequence
  SiRNA target sequence
ctcagaattttgttcaatt

SEQ ID NO: 239770 - DNA, 19 bp, Artificial sequence
  SiRNA target sequence
tcagaattttgttcaattg

SEQ ID NO: 239771 - DNA, 19 bp, Artificial sequence
  SiRNA target sequence
cagaattttgttcaattga

SEQ ID NO: 239772 - DNA, 19 bp, Artificial sequence
  SiRNA target sequence
agaattttgttcaattgat

SEQ ID NO: 239773 - DNA, 19 bp, Artificial sequence
  SiRNA target sequence
gaattttgttcaattgatt

SEQ ID NO: 239774 - DNA, 19 bp, Artificial sequence
  SiRNA target sequence
aattttgttcaattgattc

SEQ ID NO: 239775 - DNA, 19 bp, Artificial sequence
  SiRNA target sequence
attttgttcaattgattca

SEQ ID NO: 239776 - DNA, 19 bp, Artificial sequence
  SiRNA target sequence
ttttgttcaattgattcat

SEQ ID NO: 239777 - DNA, 19 bp, Artificial sequence
  SiRNA target sequence
tttgttcaattgattcatt

SEQ ID NO: 239778 - DNA, 19 bp, Artificial sequence
  SiRNA target sequence
ttgttcaattgattcatta

SEQ ID NO: 239779 - DNA, 19 bp, Artificial sequence
  SiRNA target sequence
tgttcaattgattcattat

SEQ ID NO: 239780 - DNA, 19 bp, Artificial sequence
  SiRNA target sequence
gttcaattgattcattata

SEQ ID NO: 239781 - DNA, 19 bp, Artificial sequence
  SiRNA target sequence
ttcaattgattcattatat

SEQ ID NO: 239782 - DNA, 19 bp, Artificial sequence
  SiRNA target sequence
tcaattgattcattatatt

SEQ ID NO: 239783 - DNA, 19 bp, Artificial sequence
  SiRNA target sequence
caattgattcattatattt

SEQ ID NO: 239784 - DNA, 19 bp, Artificial sequence
  SiRNA target sequence
aattgattcattatatttt

SEQ ID NO: 239785 - DNA, 19 bp, Artificial sequence
  SiRNA target sequence
attgattcattatattttt

SEQ ID NO: 239786 - DNA, 19 bp, Artificial sequence
  SiRNA target sequence
ttgattcattatatttttt

SEQ ID NO: 239787 - DNA, 19 bp, Artificial sequence
  SiRNA target sequence
tgattcattatatttttta

SEQ ID NO: 239788 - DNA, 19 bp, Artificial sequence
  SiRNA target sequence
gattcattatattttttac

SEQ ID NO: 239789 - DNA, 19 bp, Artificial sequence
  SiRNA target sequence
attcattatattttttact

SEQ ID NO: 239790 - DNA, 19 bp, Artificial sequence
  SiRNA target sequence
ttcattatattttttactt

SEQ ID NO: 239791 - DNA, 19 bp, Artificial sequence
  SiRNA target sequence
tcattatattttttactta

SEQ ID NO: 239792 - DNA, 19 bp, Artificial sequence
  SiRNA target sequence
cattatattttttacttaa

SEQ ID NO: 239793 - DNA, 19 bp, Artificial sequence
  SiRNA target sequence
attatattttttacttaaa

SEQ ID NO: 239794 - DNA, 19 bp, Artificial sequence
  SiRNA target sequence
ttatattttttacttaaat

SEQ ID NO: 239795 - DNA, 19 bp, Artificial sequence
  SiRNA target sequence
tatattttttacttaaata

SEQ ID NO: 239796 - DNA, 19 bp, Artificial sequence
  SiRNA target sequence
atattttttacttaaataa

SEQ ID NO: 239797 - DNA, 19 bp, Artificial sequence
  SiRNA target sequence
tattttttacttaaataac

SEQ ID NO: 239798 - DNA, 19 bp, Artificial sequence
  SiRNA target sequence
attttttacttaaataaca

SEQ ID NO: 239799 - DNA, 19 bp, Artificial sequence
  SiRNA target sequence
ttttttacttaaataacag

SEQ ID NO: 239800 - DNA, 19 bp, Artificial sequence
  SiRNA target sequence
tttttacttaaataacaga

SEQ ID NO: 239801 - DNA, 19 bp, Artificial sequence
  SiRNA target sequence
ttttacttaaataacagac

SEQ ID NO: 239802 - DNA, 19 bp, Artificial sequence
  SiRNA target sequence
tttacttaaataacagaca

SEQ ID NO: 239803 - DNA, 19 bp, Artificial sequence
  SiRNA target sequence
ttacttaaataacagacac

SEQ ID NO: 239804 - DNA, 19 bp, Artificial sequence
  SiRNA target sequence
tacttaaataacagacact

SEQ ID NO: 239805 - DNA, 19 bp, Artificial sequence
  SiRNA target sequence
acttaaataacagacactc

SEQ ID NO: 239806 - DNA, 19 bp, Artificial sequence
  SiRNA target sequence
cttaaataacagacactcc

SEQ ID NO: 239807 - DNA, 19 bp, Artificial sequence
  SiRNA target sequence
ttaaataacagacactcct

SEQ ID NO: 239808 - DNA, 19 bp, Artificial sequence
  SiRNA target sequence
taaataacagacactcctg

SEQ ID NO: 239809 - DNA, 19 bp, Artificial sequence
  SiRNA target sequence
aaataacagacactcctga

SEQ ID NO: 239810 - DNA, 19 bp, Artificial sequence
  SiRNA target sequence
aataacagacactcctgat

SEQ ID NO: 239811 - DNA, 19 bp, Artificial sequence
  SiRNA target sequence
ataacagacactcctgatc

SEQ ID NO: 239812 - DNA, 19 bp, Artificial sequence
  SiRNA target sequence
taacagacactcctgatcc

SEQ ID NO: 239813 - DNA, 19 bp, Artificial sequence
  SiRNA target sequence
aacagacactcctgatcca

SEQ ID NO: 239814 - DNA, 19 bp, Artificial sequence
  SiRNA target sequence
acagacactcctgatccac

SEQ ID NO: 239815 - DNA, 19 bp, Artificial sequence
  SiRNA target sequence
cagacactcctgatccaca

SEQ ID NO: 239816 - DNA, 19 bp, Artificial sequence
  SiRNA target sequence
agacactcctgatccacaa

SEQ ID NO: 239817 - DNA, 19 bp, Artificial sequence
  SiRNA target sequence
gacactcctgatccacaaa

SEQ ID NO: 239818 - DNA, 19 bp, Artificial sequence
  SiRNA target sequence
acactcctgatccacaaaa

SEQ ID NO: 239819 - DNA, 19 bp, Artificial sequence
  SiRNA target sequence
cactcctgatccacaaaaa

SEQ ID NO: 239820 - DNA, 19 bp, Artificial sequence
  SiRNA target sequence
actcctgatccacaaaaaa

SEQ ID NO: 239821 - DNA, 19 bp, Artificial sequence
  SiRNA target sequence
ctcctgatccacaaaaaat

SEQ ID NO: 239822 - DNA, 19 bp, Artificial sequence
  SiRNA target sequence
tcctgatccacaaaaaatt

SEQ ID NO: 239823 - DNA, 19 bp, Artificial sequence
  SiRNA target sequence
cctgatccacaaaaaattt

SEQ ID NO: 239824 - DNA, 19 bp, Artificial sequence
  SiRNA target sequence
ctgatccacaaaaaatttg

SEQ ID NO: 239825 - DNA, 19 bp, Artificial sequence
  SiRNA target sequence
tgatccacaaaaaatttgc

SEQ ID NO: 239826 - DNA, 19 bp, Artificial sequence
  SiRNA target sequence
gatccacaaaaaatttgca

SEQ ID NO: 239827 - DNA, 19 bp, Artificial sequence
  SiRNA target sequence
atccacaaaaaatttgcaa

SEQ ID NO: 239828 - DNA, 19 bp, Artificial sequence
  SiRNA target sequence
tccacaaaaaatttgcaaa

SEQ ID NO: 239829 - DNA, 19 bp, Artificial sequence
  SiRNA target sequence
ccacaaaaaatttgcaaat

SEQ ID NO: 239830 - DNA, 19 bp, Artificial sequence
  SiRNA target sequence
cacaaaaaatttgcaaata

SEQ ID NO: 239831 - DNA, 19 bp, Artificial sequence
  SiRNA target sequence
acaaaaaatttgcaaatat

SEQ ID NO: 239832 - DNA, 19 bp, Artificial sequence
  SiRNA target sequence
caaaaaatttgcaaatatt

SEQ ID NO: 239833 - DNA, 19 bp, Artificial sequence
  SiRNA target sequence
aaaaaatttgcaaatatta

SEQ ID NO: 239834 - DNA, 19 bp, Artificial sequence
  SiRNA target sequence
aaaaatttgcaaatattaa

SEQ ID NO: 239835 - DNA, 19 bp, Artificial sequence
  SiRNA target sequence
aaaatttgcaaatattaaa

SEQ ID NO: 239836 - DNA, 19 bp, Artificial sequence
  SiRNA target sequence
aaatttgcaaatattaaaa

SEQ ID NO: 239837 - DNA, 19 bp, Artificial sequence
  SiRNA target sequence
aatttgcaaatattaaaaa

SEQ ID NO: 239838 - DNA, 19 bp, Artificial sequence
  SiRNA target sequence
atttgcaaatattaaaaat

SEQ ID NO: 239839 - DNA, 19 bp, Artificial sequence
  SiRNA target sequence
tttgcaaatattaaaaata

SEQ ID NO: 239840 - DNA, 19 bp, Artificial sequence
  SiRNA target sequence
ttgcaaatattaaaaatat

SEQ ID NO: 239841 - DNA, 19 bp, Artificial sequence
  SiRNA target sequence
tgcaaatattaaaaatata

SEQ ID NO: 239842 - DNA, 19 bp, Artificial sequence
  SiRNA target sequence
gcaaatattaaaaatataa

SEQ ID NO: 239843 - DNA, 19 bp, Artificial sequence
  SiRNA target sequence
caaatattaaaaatataaa

SEQ ID NO: 239844 - DNA, 19 bp, Artificial sequence
  SiRNA target sequence
aaatattaaaaatataaaa

SEQ ID NO: 239845 - DNA, 19 bp, Artificial sequence
  SiRNA target sequence
aatattaaaaatataaaag

SEQ ID NO: 239846 - DNA, 19 bp, Artificial sequence
  SiRNA target sequence
atattaaaaatataaaaga

SEQ ID NO: 239847 - DNA, 19 bp, Artificial sequence
  SiRNA target sequence
tattaaaaatataaaagac

SEQ ID NO: 239848 - DNA, 19 bp, Artificial sequence
  SiRNA target sequence
attaaaaatataaaagaca

SEQ ID NO: 239849 - DNA, 19 bp, Artificial sequence
  SiRNA target sequence
ttaaaaatataaaagacac

SEQ ID NO: 239850 - DNA, 19 bp, Artificial sequence
  SiRNA target sequence
taaaaatataaaagacacg

SEQ ID NO: 239851 - DNA, 19 bp, Artificial sequence
  SiRNA target sequence
aaaaatataaaagacacgt

SEQ ID NO: 239852 - DNA, 19 bp, Artificial sequence
  SiRNA target sequence
aaaatataaaagacacgta

SEQ ID NO: 239853 - DNA, 19 bp, Artificial sequence
  SiRNA target sequence
aaatataaaagacacgtat

SEQ ID NO: 239854 - DNA, 19 bp, Artificial sequence
  SiRNA target sequence
aatataaaagacacgtatg

SEQ ID NO: 239855 - DNA, 19 bp, Artificial sequence
  SiRNA target sequence
atataaaagacacgtatga

SEQ ID NO: 239856 - DNA, 19 bp, Artificial sequence
  SiRNA target sequence
tataaaagacacgtatgat

SEQ ID NO: 239857 - DNA, 19 bp, Artificial sequence
  SiRNA target sequence
ataaaagacacgtatgata

SEQ ID NO: 239858 - DNA, 19 bp, Artificial sequence
  SiRNA target sequence
taaaagacacgtatgatac

SEQ ID NO: 239859 - DNA, 19 bp, Artificial sequence
  SiRNA target sequence
aaaagacacgtatgatact

SEQ ID NO: 239860 - DNA, 19 bp, Artificial sequence
  SiRNA target sequence
aaagacacgtatgatactt

SEQ ID NO: 239861 - DNA, 19 bp, Artificial sequence
  SiRNA target sequence
aagacacgtatgatacttg

SEQ ID NO: 239862 - DNA, 19 bp, Artificial sequence
  SiRNA target sequence
agacacgtatgatacttgt

SEQ ID NO: 239863 - DNA, 19 bp, Artificial sequence
  SiRNA target sequence
gacacgtatgatacttgtc

SEQ ID NO: 239864 - DNA, 19 bp, Artificial sequence
  SiRNA target sequence
acacgtatgatacttgtct

SEQ ID NO: 239865 - DNA, 19 bp, Artificial sequence
  SiRNA target sequence
cacgtatgatacttgtcta

SEQ ID NO: 239866 - DNA, 19 bp, Artificial sequence
  SiRNA target sequence
acgtatgatacttgtctaa

SEQ ID NO: 239867 - DNA, 19 bp, Artificial sequence
  SiRNA target sequence
cgtatgatacttgtctaat

SEQ ID NO: 239868 - DNA, 19 bp, Artificial sequence
  SiRNA target sequence
gtatgatacttgtctaata

SEQ ID NO: 239869 - DNA, 19 bp, Artificial sequence
  SiRNA target sequence
tatgatacttgtctaatat

SEQ ID NO: 239870 - DNA, 19 bp, Artificial sequence
  SiRNA target sequence
atgatacttgtctaatatc

SEQ ID NO: 239871 - DNA, 19 bp, Artificial sequence
  SiRNA target sequence
tgatacttgtctaatatct

SEQ ID NO: 239872 - DNA, 19 bp, Artificial sequence
  SiRNA target sequence
gatacttgtctaatatctg

SEQ ID NO: 239873 - DNA, 19 bp, Artificial sequence
  SiRNA target sequence
atacttgtctaatatctgg

SEQ ID NO: 239874 - DNA, 19 bp, Artificial sequence
  SiRNA target sequence
tacttgtctaatatctgga

SEQ ID NO: 239875 - DNA, 19 bp, Artificial sequence
  SiRNA target sequence
acttgtctaatatctggaa

SEQ ID NO: 239876 - DNA, 19 bp, Artificial sequence
  SiRNA target sequence
cttgtctaatatctggaat

SEQ ID NO: 239877 - DNA, 19 bp, Artificial sequence
  SiRNA target sequence
ttgtctaatatctggaatt

SEQ ID NO: 239878 - DNA, 19 bp, Artificial sequence
  SiRNA target sequence
tgtctaatatctggaattt

SEQ ID NO: 239879 - DNA, 19 bp, Artificial sequence
  SiRNA target sequence
gtctaatatctggaatttc

SEQ ID NO: 239880 - DNA, 19 bp, Artificial sequence
  SiRNA target sequence
tctaatatctggaatttct

SEQ ID NO: 239881 - DNA, 19 bp, Artificial sequence
  SiRNA target sequence
ctaatatctggaatttcta

SEQ ID NO: 239882 - DNA, 19 bp, Artificial sequence
  SiRNA target sequence
taatatctggaatttctat

SEQ ID NO: 239883 - DNA, 19 bp, Artificial sequence
  SiRNA target sequence
aatatctggaatttctata

SEQ ID NO: 239884 - DNA, 19 bp, Artificial sequence
  SiRNA target sequence
atatctggaatttctataa

SEQ ID NO: 239885 - DNA, 19 bp, Artificial sequence
  SiRNA target sequence
tatctggaatttctataaa

SEQ ID NO: 239886 - DNA, 19 bp, Artificial sequence
  SiRNA target sequence
atctggaatttctataaac

SEQ ID NO: 239887 - DNA, 19 bp, Artificial sequence
  SiRNA target sequence
tctggaatttctataaacg

SEQ ID NO: 239888 - DNA, 19 bp, Artificial sequence
  SiRNA target sequence
ctggaatttctataaacgt

SEQ ID NO: 239889 - DNA, 19 bp, Artificial sequence
  SiRNA target sequence
tggaatttctataaacgtc

SEQ ID NO: 239890 - DNA, 19 bp, Artificial sequence
  SiRNA target sequence
ggaatttctataaacgtca

SEQ ID NO: 239891 - DNA, 19 bp, Artificial sequence
  SiRNA target sequence
gaatttctataaacgtcaa

SEQ ID NO: 239892 - DNA, 19 bp, Artificial sequence
  SiRNA target sequence
aatttctataaacgtcaaa

SEQ ID NO: 239893 - DNA, 19 bp, Artificial sequence
  SiRNA target sequence
atttctataaacgtcaaaa

SEQ ID NO: 239894 - DNA, 19 bp, Artificial sequence
  SiRNA target sequence
tttctataaacgtcaaaaa

SEQ ID NO: 239895 - DNA, 19 bp, Artificial sequence
  SiRNA target sequence
ttctataaacgtcaaaaaa

SEQ ID NO: 239896 - DNA, 19 bp, Artificial sequence
  SiRNA target sequence
tctataaacgtcaaaaaag

SEQ ID NO: 239897 - DNA, 19 bp, Artificial sequence
  SiRNA target sequence
ctataaacgtcaaaaaagt

SEQ ID NO: 239898 - DNA, 19 bp, Artificial sequence
  SiRNA target sequence
tataaacgtcaaaaaagtt

SEQ ID NO: 239899 - DNA, 19 bp, Artificial sequence
  SiRNA target sequence
ataaacgtcaaaaaagttc

SEQ ID NO: 239900 - DNA, 19 bp, Artificial sequence
  SiRNA target sequence
taaacgtcaaaaaagttcc

SEQ ID NO: 239901 - DNA, 19 bp, Artificial sequence
  SiRNA target sequence
aaacgtcaaaaaagttcca

SEQ ID NO: 239902 - DNA, 19 bp, Artificial sequence
  SiRNA target sequence
aacgtcaaaaaagttccat

SEQ ID NO: 239903 - DNA, 19 bp, Artificial sequence
  SiRNA target sequence
acgtcaaaaaagttccata

SEQ ID NO: 239904 - DNA, 19 bp, Artificial sequence
  SiRNA target sequence
cgtcaaaaaagttccatat

SEQ ID NO: 239905 - DNA, 19 bp, Artificial sequence
  SiRNA target sequence
gtcaaaaaagttccatata

SEQ ID NO: 239906 - DNA, 19 bp, Artificial sequence
  SiRNA target sequence
tcaaaaaagttccatataa

SEQ ID NO: 239907 - DNA, 19 bp, Artificial sequence
  SiRNA target sequence
caaaaaagttccatataaa

SEQ ID NO: 239908 - DNA, 19 bp, Artificial sequence
  SiRNA target sequence
aaaaaagttccatataaag

SEQ ID NO: 239909 - DNA, 19 bp, Artificial sequence
  SiRNA target sequence
aaaaagttccatataaaga

SEQ ID NO: 239910 - DNA, 19 bp, Artificial sequence
  SiRNA target sequence
aaaagttccatataaagag

SEQ ID NO: 239911 - DNA, 19 bp, Artificial sequence
  SiRNA target sequence
aaagttccatataaagaga

SEQ ID NO: 239912 - DNA, 19 bp, Artificial sequence
  SiRNA target sequence
aagttccatataaagagat

SEQ ID NO: 239913 - DNA, 19 bp, Artificial sequence
  SiRNA target sequence
agttccatataaagagata

SEQ ID NO: 239914 - DNA, 19 bp, Artificial sequence
  SiRNA target sequence
gttccatataaagagataa

SEQ ID NO: 239915 - DNA, 19 bp, Artificial sequence
  SiRNA target sequence
ttccatataaagagataat

SEQ ID NO: 239916 - DNA, 19 bp, Artificial sequence
  SiRNA target sequence
tccatataaagagataata

SEQ ID NO: 239917 - DNA, 19 bp, Artificial sequence
  SiRNA target sequence
ccatataaagagataatag

SEQ ID NO: 239918 - DNA, 19 bp, Artificial sequence
  SiRNA target sequence
catataaagagataataga

SEQ ID NO: 239919 - DNA, 19 bp, Artificial sequence
  SiRNA target sequence
atataaagagataatagat

SEQ ID NO: 239920 - DNA, 19 bp, Artificial sequence
  SiRNA target sequence
tataaagagataatagatt

SEQ ID NO: 239921 - DNA, 19 bp, Artificial sequence
  SiRNA target sequence
ataaagagataatagattt

SEQ ID NO: 239922 - DNA, 19 bp, Artificial sequence
  SiRNA target sequence
taaagagataatagattta

SEQ ID NO: 239923 - DNA, 19 bp, Artificial sequence
  SiRNA target sequence
aaagagataatagatttac

SEQ ID NO: 239924 - DNA, 19 bp, Artificial sequence
  SiRNA target sequence
aagagataatagatttacc

SEQ ID NO: 239925 - DNA, 19 bp, Artificial sequence
  SiRNA target sequence
agagataatagatttacca

SEQ ID NO: 239926 - DNA, 19 bp, Artificial sequence
  SiRNA target sequence
gagataatagatttaccaa

SEQ ID NO: 239927 - DNA, 19 bp, Artificial sequence
  SiRNA target sequence
agataatagatttaccaat

SEQ ID NO: 239928 - DNA, 19 bp, Artificial sequence
  SiRNA target sequence
gataatagatttaccaatt

SEQ ID NO: 239929 - DNA, 19 bp, Artificial sequence
  SiRNA target sequence
ataatagatttaccaattt

SEQ ID NO: 239930 - DNA, 19 bp, Artificial sequence
  SiRNA target sequence
taatagatttaccaatttt

SEQ ID NO: 239931 - DNA, 19 bp, Artificial sequence
  SiRNA target sequence
aatagatttaccaattttg

SEQ ID NO: 239932 - DNA, 19 bp, Artificial sequence
  SiRNA target sequence
atagatttaccaattttga

SEQ ID NO: 239933 - DNA, 19 bp, Artificial sequence
  SiRNA target sequence
tagatttaccaattttgat

SEQ ID NO: 239934 - DNA, 19 bp, Artificial sequence
  SiRNA target sequence
agatttaccaattttgata

SEQ ID NO: 239935 - DNA, 19 bp, Artificial sequence
  SiRNA target sequence
gatttaccaattttgatac

SEQ ID NO: 239936 - DNA, 19 bp, Artificial sequence
  SiRNA target sequence
atttaccaattttgataca

SEQ ID NO: 239937 - DNA, 19 bp, Artificial sequence
  SiRNA target sequence
tttaccaattttgatacat

SEQ ID NO: 239938 - DNA, 19 bp, Artificial sequence
  SiRNA target sequence
ttaccaattttgatacata

SEQ ID NO: 239939 - DNA, 19 bp, Artificial sequence
  SiRNA target sequence
taccaattttgatacatac

SEQ ID NO: 239940 - DNA, 19 bp, Artificial sequence
  SiRNA target sequence
accaattttgatacataca

SEQ ID NO: 239941 - DNA, 19 bp, Artificial sequence
  SiRNA target sequence
ccaattttgatacatacac

SEQ ID NO: 239942 - DNA, 19 bp, Artificial sequence
  SiRNA target sequence
caattttgatacatacacc

SEQ ID NO: 239943 - DNA, 19 bp, Artificial sequence
  SiRNA target sequence
aattttgatacatacacca

SEQ ID NO: 239944 - DNA, 19 bp, Artificial sequence
  SiRNA target sequence
attttgatacatacaccat

SEQ ID NO: 239945 - DNA, 19 bp, Artificial sequence
  SiRNA target sequence
ttttgatacatacaccatc

SEQ ID NO: 239946 - DNA, 19 bp, Artificial sequence
  SiRNA target sequence
tttgatacatacaccatca

SEQ ID NO: 239947 - DNA, 19 bp, Artificial sequence
  SiRNA target sequence
ttgatacatacaccatcat

SEQ ID NO: 239948 - DNA, 19 bp, Artificial sequence
  SiRNA target sequence
tgatacatacaccatcata

SEQ ID NO: 239949 - DNA, 19 bp, Artificial sequence
  SiRNA target sequence
gatacatacaccatcataa

SEQ ID NO: 239950 - DNA, 19 bp, Artificial sequence
  SiRNA target sequence
atacatacaccatcataaa

SEQ ID NO: 239951 - DNA, 19 bp, Artificial sequence
  SiRNA target sequence
tacatacaccatcataaaa

SEQ ID NO: 239952 - DNA, 19 bp, Artificial sequence
  SiRNA target sequence
acatacaccatcataaaaa

SEQ ID NO: 239953 - DNA, 19 bp, Artificial sequence
  SiRNA target sequence
catacaccatcataaaaac

SEQ ID NO: 239954 - DNA, 19 bp, Artificial sequence
  SiRNA target sequence
atacaccatcataaaaact

SEQ ID NO: 239955 - DNA, 19 bp, Artificial sequence
  SiRNA target sequence
tacaccatcataaaaactt

SEQ ID NO: 239956 - DNA, 19 bp, Artificial sequence
  SiRNA target sequence
acaccatcataaaaacttt

SEQ ID NO: 239957 - DNA, 19 bp, Artificial sequence
  SiRNA target sequence
caccatcataaaaactttt

SEQ ID NO: 239958 - DNA, 19 bp, Artificial sequence
  SiRNA target sequence
accatcataaaaactttta

SEQ ID NO: 239959 - DNA, 19 bp, Artificial sequence
  SiRNA target sequence
ccatcataaaaacttttaa

SEQ ID NO: 239960 - DNA, 19 bp, Artificial sequence
  SiRNA target sequence
catcataaaaacttttaaa

SEQ ID NO: 239961 - DNA, 19 bp, Artificial sequence
  SiRNA target sequence
atcataaaaacttttaaat

SEQ ID NO: 239962 - DNA, 19 bp, Artificial sequence
  SiRNA target sequence
tcataaaaacttttaaatt

SEQ ID NO: 239963 - DNA, 19 bp, Artificial sequence
  SiRNA target sequence
cataaaaacttttaaattt

SEQ ID NO: 239964 - DNA, 19 bp, Artificial sequence
  SiRNA target sequence
ataaaaacttttaaattta

SEQ ID NO: 239965 - DNA, 19 bp, Artificial sequence
  SiRNA target sequence
taaaaacttttaaatttat

SEQ ID NO: 239966 - DNA, 19 bp, Artificial sequence
  SiRNA target sequence
aaaaacttttaaatttata

SEQ ID NO: 239967 - DNA, 19 bp, Artificial sequence
  SiRNA target sequence
aaaacttttaaatttatac

SEQ ID NO: 239968 - DNA, 19 bp, Artificial sequence
  SiRNA target sequence
aaacttttaaatttatacc

SEQ ID NO: 239969 - DNA, 19 bp, Artificial sequence
  SiRNA target sequence
aacttttaaatttatacct

SEQ ID NO: 239970 - DNA, 19 bp, Artificial sequence
  SiRNA target sequence
acttttaaatttatacctg

SEQ ID NO: 239971 - DNA, 19 bp, Artificial sequence
  SiRNA target sequence
cttttaaatttatacctgt

SEQ ID NO: 239972 - DNA, 19 bp, Artificial sequence
  SiRNA target sequence
ttttaaatttatacctgta

SEQ ID NO: 239973 - DNA, 19 bp, Artificial sequence
  SiRNA target sequence
tttaaatttatacctgtat

SEQ ID NO: 239974 - DNA, 19 bp, Artificial sequence
  SiRNA target sequence
ttaaatttatacctgtatt

SEQ ID NO: 239975 - DNA, 19 bp, Artificial sequence
  SiRNA target sequence
taaatttatacctgtattt

SEQ ID NO: 239976 - DNA, 19 bp, Artificial sequence
  SiRNA target sequence
aaatttatacctgtattta

SEQ ID NO: 239977 - DNA, 19 bp, Artificial sequence
  SiRNA target sequence
aatttatacctgtatttaa

SEQ ID NO: 239978 - DNA, 19 bp, Artificial sequence
  SiRNA target sequence
atttatacctgtatttaac

SEQ ID NO: 239979 - DNA, 19 bp, Artificial sequence
  SiRNA target sequence
tttatacctgtatttaaca

SEQ ID NO: 239980 - DNA, 19 bp, Artificial sequence
  SiRNA target sequence
ttatacctgtatttaacag

SEQ ID NO: 239981 - DNA, 19 bp, Artificial sequence
  SiRNA target sequence
tatacctgtatttaacagg

SEQ ID NO: 239982 - DNA, 19 bp, Artificial sequence
  SiRNA target sequence
atacctgtatttaacaggc

SEQ ID NO: 239983 - DNA, 19 bp, Artificial sequence
  SiRNA target sequence
tacctgtatttaacaggca

SEQ ID NO: 239984 - DNA, 19 bp, Artificial sequence
  SiRNA target sequence
acctgtatttaacaggcac

SEQ ID NO: 239985 - DNA, 19 bp, Artificial sequence
  SiRNA target sequence
cctgtatttaacaggcacc

SEQ ID NO: 239986 - DNA, 19 bp, Artificial sequence
  SiRNA target sequence
ctgtatttaacaggcaccc

SEQ ID NO: 239987 - DNA, 19 bp, Artificial sequence
  SiRNA target sequence
tgtatttaacaggcaccct

SEQ ID NO: 239988 - DNA, 19 bp, Artificial sequence
  SiRNA target sequence
gtatttaacaggcaccctc

SEQ ID NO: 239989 - DNA, 19 bp, Artificial sequence
  SiRNA target sequence
tatttaacaggcaccctca

SEQ ID NO: 239990 - DNA, 19 bp, Artificial sequence
  SiRNA target sequence
atttaacaggcaccctcat

SEQ ID NO: 239991 - DNA, 19 bp, Artificial sequence
  SiRNA target sequence
tttaacaggcaccctcata

SEQ ID NO: 239992 - DNA, 19 bp, Artificial sequence
  SiRNA target sequence
ttaacaggcaccctcatag

SEQ ID NO: 239993 - DNA, 19 bp, Artificial sequence
  SiRNA target sequence
taacaggcaccctcataga

SEQ ID NO: 239994 - DNA, 19 bp, Artificial sequence
  SiRNA target sequence
aacaggcaccctcatagaa

SEQ ID NO: 239995 - DNA, 19 bp, Artificial sequence
  SiRNA target sequence
acaggcaccctcatagaaa

SEQ ID NO: 239996 - DNA, 19 bp, Artificial sequence
  SiRNA target sequence
caggcaccctcatagaaag

SEQ ID NO: 239997 - DNA, 19 bp, Artificial sequence
  SiRNA target sequence
aggcaccctcatagaaagc

SEQ ID NO: 239998 - DNA, 19 bp, Artificial sequence
  SiRNA target sequence
ggcaccctcatagaaagca

SEQ ID NO: 239999 - DNA, 19 bp, Artificial sequence
  SiRNA target sequence
gcaccctcatagaaagcat

SEQ ID NO: 240000 - DNA, 19 bp, Artificial sequence
  SiRNA target sequence
caccctcatagaaagcatt

SEQ ID NO: 240001 - DNA, 19 bp, Artificial sequence
  SiRNA target sequence
accctcatagaaagcattt

SEQ ID NO: 240002 - DNA, 19 bp, Artificial sequence
  SiRNA target sequence
ccctcatagaaagcatttc

SEQ ID NO: 240003 - DNA, 19 bp, Artificial sequence
  SiRNA target sequence
cctcatagaaagcatttct

SEQ ID NO: 240004 - DNA, 19 bp, Artificial sequence
  SiRNA target sequence
ctcatagaaagcatttctt

SEQ ID NO: 240005 - DNA, 19 bp, Artificial sequence
  SiRNA target sequence
tcatagaaagcatttcttt

SEQ ID NO: 240006 - DNA, 19 bp, Artificial sequence
  SiRNA target sequence
catagaaagcatttctttt

SEQ ID NO: 240007 - DNA, 19 bp, Artificial sequence
  SiRNA target sequence
atagaaagcatttcttttg

SEQ ID NO: 240008 - DNA, 19 bp, Artificial sequence
  SiRNA target sequence
tagaaagcatttcttttgc

SEQ ID NO: 240009 - DNA, 19 bp, Artificial sequence
  SiRNA target sequence
agaaagcatttcttttgct

SEQ ID NO: 240010 - DNA, 19 bp, Artificial sequence
  SiRNA target sequence
gaaagcatttcttttgcta

SEQ ID NO: 240011 - DNA, 19 bp, Artificial sequence
  SiRNA target sequence
aaagcatttcttttgctaa

SEQ ID NO: 240012 - DNA, 19 bp, Artificial sequence
  SiRNA target sequence
aagcatttcttttgctaaa

SEQ ID NO: 240013 - DNA, 19 bp, Artificial sequence
  SiRNA target sequence
agcatttcttttgctaaat

SEQ ID NO: 240014 - DNA, 19 bp, Artificial sequence
  SiRNA target sequence
gcatttcttttgctaaatc

SEQ ID NO: 240015 - DNA, 19 bp, Artificial sequence
  SiRNA target sequence
catttcttttgctaaatca

SEQ ID NO: 240016 - DNA, 19 bp, Artificial sequence
  SiRNA target sequence
atttcttttgctaaatcaa

SEQ ID NO: 240017 - DNA, 19 bp, Artificial sequence
  SiRNA target sequence
tttcttttgctaaatcaaa

SEQ ID NO: 240018 - DNA, 19 bp, Artificial sequence
  SiRNA target sequence
ttcttttgctaaatcaaat

SEQ ID NO: 240019 - DNA, 19 bp, Artificial sequence
  SiRNA target sequence
tcttttgctaaatcaaata

SEQ ID NO: 240020 - DNA, 19 bp, Artificial sequence
  SiRNA target sequence
cttttgctaaatcaaataa

SEQ ID NO: 240021 - DNA, 19 bp, Artificial sequence
  SiRNA target sequence
ttttgctaaatcaaataaa

SEQ ID NO: 240022 - DNA, 19 bp, Artificial sequence
  SiRNA target sequence
tttgctaaatcaaataaaa

SEQ ID NO: 240023 - DNA, 19 bp, Artificial sequence
  SiRNA target sequence
ttgctaaatcaaataaaac

SEQ ID NO: 240024 - DNA, 19 bp, Artificial sequence
  SiRNA target sequence
tgctaaatcaaataaaaca

SEQ ID NO: 240025 - DNA, 19 bp, Artificial sequence
  SiRNA target sequence
gctaaatcaaataaaacat

SEQ ID NO: 240026 - DNA, 19 bp, Artificial sequence
  SiRNA target sequence
ctaaatcaaataaaacata

SEQ ID NO: 240027 - DNA, 19 bp, Artificial sequence
  SiRNA target sequence
taaatcaaataaaacatat

SEQ ID NO: 240028 - DNA, 19 bp, Artificial sequence
  SiRNA target sequence
aaatcaaataaaacatatt

SEQ ID NO: 240029 - DNA, 19 bp, Artificial sequence
  SiRNA target sequence
aatcaaataaaacatattt

SEQ ID NO: 240030 - DNA, 19 bp, Artificial sequence
  SiRNA target sequence
atcaaataaaacatatttg

SEQ ID NO: 240031 - DNA, 19 bp, Artificial sequence
  SiRNA target sequence
tcaaataaaacatatttgg

SEQ ID NO: 240032 - DNA, 19 bp, Artificial sequence
  SiRNA target sequence
caaataaaacatatttggt

SEQ ID NO: 240033 - DNA, 19 bp, Artificial sequence
  SiRNA target sequence
aaataaaacatatttggta

SEQ ID NO: 240034 - DNA, 19 bp, Artificial sequence
  SiRNA target sequence
aataaaacatatttggtaa

SEQ ID NO: 240035 - DNA, 19 bp, Artificial sequence
  SiRNA target sequence
ataaaacatatttggtaat

SEQ ID NO: 240036 - DNA, 19 bp, Artificial sequence
  SiRNA target sequence
taaaacatatttggtaatt

SEQ ID NO: 240037 - DNA, 19 bp, Artificial sequence
  SiRNA target sequence
aaaacatatttggtaattt

SEQ ID NO: 240038 - DNA, 19 bp, Artificial sequence
  SiRNA target sequence
aaacatatttggtaatttt

SEQ ID NO: 240039 - DNA, 19 bp, Artificial sequence
  SiRNA target sequence
aacatatttggtaatttta

SEQ ID NO: 240040 - DNA, 19 bp, Artificial sequence
  SiRNA target sequence
acatatttggtaattttag

SEQ ID NO: 240041 - DNA, 19 bp, Artificial sequence
  SiRNA target sequence
catatttggtaattttaga

SEQ ID NO: 240042 - DNA, 19 bp, Artificial sequence
  SiRNA target sequence
atatttggtaattttagaa

SEQ ID NO: 240043 - DNA, 19 bp, Artificial sequence
  SiRNA target sequence
tatttggtaattttagaaa

SEQ ID NO: 240044 - DNA, 19 bp, Artificial sequence
  SiRNA target sequence
atttggtaattttagaaaa

SEQ ID NO: 240045 - DNA, 19 bp, Artificial sequence
  SiRNA target sequence
tttggtaattttagaaaat

SEQ ID NO: 240046 - DNA, 19 bp, Artificial sequence
  SiRNA target sequence
ttggtaattttagaaaatg

SEQ ID NO: 240047 - DNA, 19 bp, Artificial sequence
  SiRNA target sequence
tggtaattttagaaaatgc

SEQ ID NO: 240048 - DNA, 19 bp, Artificial sequence
  SiRNA target sequence
ggtaattttagaaaatgca

SEQ ID NO: 240049 - DNA, 19 bp, Artificial sequence
  SiRNA target sequence
gtaattttagaaaatgcaa

SEQ ID NO: 240050 - DNA, 19 bp, Artificial sequence
  SiRNA target sequence
taattttagaaaatgcaaa

SEQ ID NO: 240051 - DNA, 19 bp, Artificial sequence
  SiRNA target sequence
aattttagaaaatgcaaat

SEQ ID NO: 240052 - DNA, 19 bp, Artificial sequence
  SiRNA target sequence
attttagaaaatgcaaatc

SEQ ID NO: 240053 - DNA, 19 bp, Artificial sequence
  SiRNA target sequence
ttttagaaaatgcaaatcc

SEQ ID NO: 240054 - DNA, 19 bp, Artificial sequence
  SiRNA target sequence
tttagaaaatgcaaatcca

SEQ ID NO: 240055 - DNA, 19 bp, Artificial sequence
  SiRNA target sequence
ttagaaaatgcaaatccaa

SEQ ID NO: 240056 - DNA, 19 bp, Artificial sequence
  SiRNA target sequence
tagaaaatgcaaatccaat

SEQ ID NO: 240057 - DNA, 19 bp, Artificial sequence
  SiRNA target sequence
agaaaatgcaaatccaatg

SEQ ID NO: 240058 - DNA, 19 bp, Artificial sequence
  SiRNA target sequence
gaaaatgcaaatccaatgg

SEQ ID NO: 240059 - DNA, 19 bp, Artificial sequence
  SiRNA target sequence
aaaatgcaaatccaatggt

SEQ ID NO: 240060 - DNA, 19 bp, Artificial sequence
  SiRNA target sequence
aaatgcaaatccaatggtt

SEQ ID NO: 240061 - DNA, 19 bp, Artificial sequence
  SiRNA target sequence
aatgcaaatccaatggttg

SEQ ID NO: 240062 - DNA, 19 bp, Artificial sequence
  SiRNA target sequence
atgcaaatccaatggttgc

SEQ ID NO: 240063 - DNA, 19 bp, Artificial sequence
  SiRNA target sequence
tgcaaatccaatggttgca

SEQ ID NO: 240064 - DNA, 19 bp, Artificial sequence
  SiRNA target sequence
gcaaatccaatggttgcac

SEQ ID NO: 240065 - DNA, 19 bp, Artificial sequence
  SiRNA target sequence
caaatccaatggttgcaca

SEQ ID NO: 240066 - DNA, 19 bp, Artificial sequence
  SiRNA target sequence
aaatccaatggttgcacac

SEQ ID NO: 240067 - DNA, 19 bp, Artificial sequence
  SiRNA target sequence
aatccaatggttgcacacc

SEQ ID NO: 240068 - DNA, 19 bp, Artificial sequence
  SiRNA target sequence
atccaatggttgcacacca

SEQ ID NO: 240069 - DNA, 19 bp, Artificial sequence
  SiRNA target sequence
tccaatggttgcacaccaa

SEQ ID NO: 240070 - DNA, 19 bp, Artificial sequence
  SiRNA target sequence
ccaatggttgcacaccaat

SEQ ID NO: 240071 - DNA, 19 bp, Artificial sequence
  SiRNA target sequence
caatggttgcacaccaatt

SEQ ID NO: 240072 - DNA, 19 bp, Artificial sequence
  SiRNA target sequence
aatggttgcacaccaattt

SEQ ID NO: 240073 - DNA, 19 bp, Artificial sequence
  SiRNA target sequence
atggttgcacaccaatttt

SEQ ID NO: 240074 - DNA, 19 bp, Artificial sequence
  SiRNA target sequence
tggttgcacaccaattttc

SEQ ID NO: 240075 - DNA, 19 bp, Artificial sequence
  SiRNA target sequence
ggttgcacaccaattttca

SEQ ID NO: 240076 - DNA, 19 bp, Artificial sequence
  SiRNA target sequence
gttgcacaccaattttcaa

SEQ ID NO: 240077 - DNA, 19 bp, Artificial sequence
  SiRNA target sequence
ttgcacaccaattttcaag

SEQ ID NO: 240078 - DNA, 19 bp, Artificial sequence
  SiRNA target sequence
tgcacaccaattttcaaga

SEQ ID NO: 240079 - DNA, 19 bp, Artificial sequence
  SiRNA target sequence
gcacaccaattttcaagat

SEQ ID NO: 240080 - DNA, 19 bp, Artificial sequence
  SiRNA target sequence
cacaccaattttcaagatt

SEQ ID NO: 240081 - DNA, 19 bp, Artificial sequence
  SiRNA target sequence
acaccaattttcaagattt

SEQ ID NO: 240082 - DNA, 19 bp, Artificial sequence
  SiRNA target sequence
caccaattttcaagattta

SEQ ID NO: 240083 - DNA, 19 bp, Artificial sequence
  SiRNA target sequence
accaattttcaagatttat

SEQ ID NO: 240084 - DNA, 19 bp, Artificial sequence
  SiRNA target sequence
ccaattttcaagatttatt

SEQ ID NO: 240085 - DNA, 19 bp, Artificial sequence
  SiRNA target sequence
caattttcaagatttattc

SEQ ID NO: 240086 - DNA, 19 bp, Artificial sequence
  SiRNA target sequence
aattttcaagatttattct

SEQ ID NO: 240087 - DNA, 19 bp, Artificial sequence
  SiRNA target sequence
attttcaagatttattctt

SEQ ID NO: 240088 - DNA, 19 bp, Artificial sequence
  SiRNA target sequence
ttttcaagatttattctta

SEQ ID NO: 240089 - DNA, 19 bp, Artificial sequence
  SiRNA target sequence
tttcaagatttattcttaa

SEQ ID NO: 240090 - DNA, 19 bp, Artificial sequence
  SiRNA target sequence
ttcaagatttattcttaag

SEQ ID NO: 240091 - DNA, 19 bp, Artificial sequence
  SiRNA target sequence
tcaagatttattcttaaga

SEQ ID NO: 240092 - DNA, 19 bp, Artificial sequence
  SiRNA target sequence
caagatttattcttaagac

SEQ ID NO: 240093 - DNA, 19 bp, Artificial sequence
  SiRNA target sequence
aagatttattcttaagacc

SEQ ID NO: 240094 - DNA, 19 bp, Artificial sequence
  SiRNA target sequence
agatttattcttaagaccg

SEQ ID NO: 240095 - DNA, 19 bp, Artificial sequence
  SiRNA target sequence
gatttattcttaagaccga

SEQ ID NO: 240096 - DNA, 19 bp, Artificial sequence
  SiRNA target sequence
atttattcttaagaccgat

SEQ ID NO: 240097 - DNA, 19 bp, Artificial sequence
  SiRNA target sequence
tttattcttaagaccgatg

SEQ ID NO: 240098 - DNA, 19 bp, Artificial sequence
  SiRNA target sequence
ttattcttaagaccgatgg

SEQ ID NO: 240099 - DNA, 19 bp, Artificial sequence
  SiRNA target sequence
tattcttaagaccgatgga

SEQ ID NO: 240100 - DNA, 19 bp, Artificial sequence
  SiRNA target sequence
attcttaagaccgatggag

SEQ ID NO: 240101 - DNA, 19 bp, Artificial sequence
  SiRNA target sequence
ttcttaagaccgatggagc

SEQ ID NO: 240102 - DNA, 19 bp, Artificial sequence
  SiRNA target sequence
tcttaagaccgatggagct

SEQ ID NO: 240103 - DNA, 19 bp, Artificial sequence
  SiRNA target sequence
cttaagaccgatggagctg

SEQ ID NO: 240104 - DNA, 19 bp, Artificial sequence
  SiRNA target sequence
ttaagaccgatggagctgt

SEQ ID NO: 240105 - DNA, 19 bp, Artificial sequence
  SiRNA target sequence
taagaccgatggagctgtg

SEQ ID NO: 240106 - DNA, 19 bp, Artificial sequence
  SiRNA target sequence
aagaccgatggagctgtgc

SEQ ID NO: 240107 - DNA, 19 bp, Artificial sequence
  SiRNA target sequence
agaccgatggagctgtgcg

SEQ ID NO: 240108 - DNA, 19 bp, Artificial sequence
  SiRNA target sequence
gaccgatggagctgtgcgc

SEQ ID NO: 240109 - DNA, 19 bp, Artificial sequence
  SiRNA target sequence
accgatggagctgtgcgca

SEQ ID NO: 240110 - DNA, 19 bp, Artificial sequence
  SiRNA target sequence
ccgatggagctgtgcgcaa

SEQ ID NO: 240111 - DNA, 19 bp, Artificial sequence
  SiRNA target sequence
cgatggagctgtgcgcaaa

SEQ ID NO: 240112 - DNA, 19 bp, Artificial sequence
  SiRNA target sequence
gatggagctgtgcgcaaat

SEQ ID NO: 240113 - DNA, 19 bp, Artificial sequence
  SiRNA target sequence
atggagctgtgcgcaaatt

SEQ ID NO: 240114 - DNA, 19 bp, Artificial sequence
  SiRNA target sequence
tggagctgtgcgcaaattg

SEQ ID NO: 240115 - DNA, 19 bp, Artificial sequence
  SiRNA target sequence
ggagctgtgcgcaaattgt

SEQ ID NO: 240116 - DNA, 19 bp, Artificial sequence
  SiRNA target sequence
gagctgtgcgcaaattgta

SEQ ID NO: 240117 - DNA, 19 bp, Artificial sequence
  SiRNA target sequence
agctgtgcgcaaattgtaa

SEQ ID NO: 240118 - DNA, 19 bp, Artificial sequence
  SiRNA target sequence
gctgtgcgcaaattgtaaa

SEQ ID NO: 240119 - DNA, 19 bp, Artificial sequence
  SiRNA target sequence
ctgtgcgcaaattgtaaaa

SEQ ID NO: 240120 - DNA, 19 bp, Artificial sequence
  SiRNA target sequence
tgtgcgcaaattgtaaaaa

SEQ ID NO: 240121 - DNA, 19 bp, Artificial sequence
  SiRNA target sequence
gtgcgcaaattgtaaaaag

SEQ ID NO: 240122 - DNA, 19 bp, Artificial sequence
  SiRNA target sequence
tgcgcaaattgtaaaaaga

SEQ ID NO: 240123 - DNA, 19 bp, Artificial sequence
  SiRNA target sequence
gcgcaaattgtaaaaagaa

SEQ ID NO: 240124 - DNA, 19 bp, Artificial sequence
  SiRNA target sequence
cgcaaattgtaaaaagaaa

SEQ ID NO: 240125 - DNA, 19 bp, Artificial sequence
  SiRNA target sequence
gcaaattgtaaaaagaaag

SEQ ID NO: 240126 - DNA, 19 bp, Artificial sequence
  SiRNA target sequence
caaattgtaaaaagaaagt

SEQ ID NO: 240127 - DNA, 19 bp, Artificial sequence
  SiRNA target sequence
aaattgtaaaaagaaagtc

SEQ ID NO: 240128 - DNA, 19 bp, Artificial sequence
  SiRNA target sequence
aattgtaaaaagaaagtcc

SEQ ID NO: 240129 - DNA, 19 bp, Artificial sequence
  SiRNA target sequence
attgtaaaaagaaagtcct

SEQ ID NO: 240130 - DNA, 19 bp, Artificial sequence
  SiRNA target sequence
ttgtaaaaagaaagtcctg

SEQ ID NO: 240131 - DNA, 19 bp, Artificial sequence
  SiRNA target sequence
tgtaaaaagaaagtcctga

SEQ ID NO: 240132 - DNA, 19 bp, Artificial sequence
  SiRNA target sequence
gtaaaaagaaagtcctgaa

SEQ ID NO: 240133 - DNA, 19 bp, Artificial sequence
  SiRNA target sequence
taaaaagaaagtcctgaaa

SEQ ID NO: 240134 - DNA, 19 bp, Artificial sequence
  SiRNA target sequence
aaaaagaaagtcctgaaat

SEQ ID NO: 240135 - DNA, 19 bp, Artificial sequence
  SiRNA target sequence
aaaagaaagtcctgaaatt

SEQ ID NO: 240136 - DNA, 19 bp, Artificial sequence
  SiRNA target sequence
aaagaaagtcctgaaatta

SEQ ID NO: 240137 - DNA, 19 bp, Artificial sequence
  SiRNA target sequence
aagaaagtcctgaaattag

SEQ ID NO: 240138 - DNA, 19 bp, Artificial sequence
  SiRNA target sequence
agaaagtcctgaaattaga

SEQ ID NO: 240139 - DNA, 19 bp, Artificial sequence
  SiRNA target sequence
gaaagtcctgaaattagag

SEQ ID NO: 240140 - DNA, 19 bp, Artificial sequence
  SiRNA target sequence
aaagtcctgaaattagagc

SEQ ID NO: 240141 - DNA, 19 bp, Artificial sequence
  SiRNA target sequence
aagtcctgaaattagagcg

SEQ ID NO: 240142 - DNA, 19 bp, Artificial sequence
  SiRNA target sequence
agtcctgaaattagagcgg

SEQ ID NO: 240143 - DNA, 19 bp, Artificial sequence
  SiRNA target sequence
gtcctgaaattagagcggt

SEQ ID NO: 240144 - DNA, 19 bp, Artificial sequence
  SiRNA target sequence
tcctgaaattagagcggta

SEQ ID NO: 240145 - DNA, 19 bp, Artificial sequence
  SiRNA target sequence
cctgaaattagagcggtaa

SEQ ID NO: 240146 - DNA, 19 bp, Artificial sequence
  SiRNA target sequence
ctgaaattagagcggtaaa

SEQ ID NO: 240147 - DNA, 19 bp, Artificial sequence
  SiRNA target sequence
tgaaattagagcggtaaaa

SEQ ID NO: 240148 - DNA, 19 bp, Artificial sequence
  SiRNA target sequence
gaaattagagcggtaaaaa

SEQ ID NO: 240149 - DNA, 19 bp, Artificial sequence
  SiRNA target sequence
aaattagagcggtaaaaaa

SEQ ID NO: 240150 - DNA, 19 bp, Artificial sequence
  SiRNA target sequence
aattagagcggtaaaaaat

SEQ ID NO: 240151 - DNA, 19 bp, Artificial sequence
  SiRNA target sequence
attagagcggtaaaaaata

SEQ ID NO: 240152 - DNA, 19 bp, Artificial sequence
  SiRNA target sequence
ttagagcggtaaaaaatat

SEQ ID NO: 240153 - DNA, 19 bp, Artificial sequence
  SiRNA target sequence
tagagcggtaaaaaatata

SEQ ID NO: 240154 - DNA, 19 bp, Artificial sequence
  SiRNA target sequence
agagcggtaaaaaatatag

SEQ ID NO: 240155 - DNA, 19 bp, Artificial sequence
  SiRNA target sequence
gagcggtaaaaaatatagc

SEQ ID NO: 240156 - DNA, 19 bp, Artificial sequence
  SiRNA target sequence
agcggtaaaaaatatagca

SEQ ID NO: 240157 - DNA, 19 bp, Artificial sequence
  SiRNA target sequence
gcggtaaaaaatatagcag

SEQ ID NO: 240158 - DNA, 19 bp, Artificial sequence
  SiRNA target sequence
cggtaaaaaatatagcagc

SEQ ID NO: 240159 - DNA, 19 bp, Artificial sequence
  SiRNA target sequence
ggtaaaaaatatagcagca

SEQ ID NO: 240160 - DNA, 19 bp, Artificial sequence
  SiRNA target sequence
gtaaaaaatatagcagcaa

SEQ ID NO: 240161 - DNA, 19 bp, Artificial sequence
  SiRNA target sequence
taaaaaatatagcagcaat

SEQ ID NO: 240162 - DNA, 19 bp, Artificial sequence
  SiRNA target sequence
aaaaaatatagcagcaata

SEQ ID NO: 240163 - DNA, 19 bp, Artificial sequence
  SiRNA target sequence
aaaaatatagcagcaatag

SEQ ID NO: 240164 - DNA, 19 bp, Artificial sequence
  SiRNA target sequence
aaaatatagcagcaatagg

SEQ ID NO: 240165 - DNA, 19 bp, Artificial sequence
  SiRNA target sequence
aaatatagcagcaataggg

SEQ ID NO: 240166 - DNA, 19 bp, Artificial sequence
  SiRNA target sequence
aatatagcagcaatagggg

SEQ ID NO: 240167 - DNA, 19 bp, Artificial sequence
  SiRNA target sequence
atatagcagcaatagggga

SEQ ID NO: 240168 - DNA, 19 bp, Artificial sequence
  SiRNA target sequence
tatagcagcaataggggag

SEQ ID NO: 240169 - DNA, 19 bp, Artificial sequence
  SiRNA target sequence
atagcagcaataggggagg

SEQ ID NO: 240170 - DNA, 19 bp, Artificial sequence
  SiRNA target sequence
tagcagcaataggggaggc

SEQ ID NO: 240171 - DNA, 19 bp, Artificial sequence
  SiRNA target sequence
agcagcaataggggaggca

SEQ ID NO: 240172 - DNA, 19 bp, Artificial sequence
  SiRNA target sequence
gcagcaataggggaggcaa

SEQ ID NO: 240173 - DNA, 19 bp, Artificial sequence
  SiRNA target sequence
cagcaataggggaggcaat

SEQ ID NO: 240174 - DNA, 19 bp, Artificial sequence
  SiRNA target sequence
agcaataggggaggcaata

SEQ ID NO: 240175 - DNA, 19 bp, Artificial sequence
  SiRNA target sequence
gcaataggggaggcaatag

SEQ ID NO: 240176 - DNA, 19 bp, Artificial sequence
  SiRNA target sequence
caataggggaggcaataga

SEQ ID NO: 240177 - DNA, 19 bp, Artificial sequence
  SiRNA target sequence
aataggggaggcaatagat

SEQ ID NO: 240178 - DNA, 19 bp, Artificial sequence
  SiRNA target sequence
ataggggaggcaatagata

SEQ ID NO: 240179 - DNA, 19 bp, Artificial sequence
  SiRNA target sequence
taggggaggcaatagatag

SEQ ID NO: 240180 - DNA, 19 bp, Artificial sequence
  SiRNA target sequence
aggggaggcaatagataga

SEQ ID NO: 240181 - DNA, 19 bp, Artificial sequence
  SiRNA target sequence
ggggaggcaatagatagat

SEQ ID NO: 240182 - DNA, 19 bp, Artificial sequence
  SiRNA target sequence
gggaggcaatagatagata

SEQ ID NO: 240183 - DNA, 19 bp, Artificial sequence
  SiRNA target sequence
ggaggcaatagatagataa

SEQ ID NO: 240184 - DNA, 19 bp, Artificial sequence
  SiRNA target sequence
gaggcaatagatagataaa

SEQ ID NO: 240185 - DNA, 19 bp, Artificial sequence
  SiRNA target sequence
aggcaatagatagataaaa

SEQ ID NO: 240186 - DNA, 19 bp, Artificial sequence
  SiRNA target sequence
ggcaatagatagataaaag

SEQ ID NO: 240187 - DNA, 19 bp, Artificial sequence
  SiRNA target sequence
gcaatagatagataaaaga

SEQ ID NO: 240188 - DNA, 19 bp, Artificial sequence
  SiRNA target sequence
caatagatagataaaagat

SEQ ID NO: 240189 - DNA, 19 bp, Artificial sequence
  SiRNA target sequence
aatagatagataaaagatc

SEQ ID NO: 240190 - DNA, 19 bp, Artificial sequence
  SiRNA target sequence
atagatagataaaagatcc

SEQ ID NO: 240191 - DNA, 19 bp, Artificial sequence
  SiRNA target sequence
tagatagataaaagatcct

SEQ ID NO: 240192 - DNA, 19 bp, Artificial sequence
  SiRNA target sequence
agatagataaaagatcctt

SEQ ID NO: 240193 - DNA, 19 bp, Artificial sequence
  SiRNA target sequence
gatagataaaagatccttg

SEQ ID NO: 240194 - DNA, 19 bp, Artificial sequence
  SiRNA target sequence
atagataaaagatccttga

SEQ ID NO: 240195 - DNA, 19 bp, Artificial sequence
  SiRNA target sequence
tagataaaagatccttgat

SEQ ID NO: 240196 - DNA, 19 bp, Artificial sequence
  SiRNA target sequence
agataaaagatccttgatg

SEQ ID NO: 240197 - DNA, 19 bp, Artificial sequence
  SiRNA target sequence
gataaaagatccttgatgc

SEQ ID NO: 240198 - DNA, 19 bp, Artificial sequence
  SiRNA target sequence
ataaaagatccttgatgca

SEQ ID NO: 240199 - DNA, 19 bp, Artificial sequence
  SiRNA target sequence
taaaagatccttgatgcaa

SEQ ID NO: 240200 - DNA, 19 bp, Artificial sequence
  SiRNA target sequence
aaaagatccttgatgcaat

SEQ ID NO: 240201 - DNA, 19 bp, Artificial sequence
  SiRNA target sequence
aaagatccttgatgcaatg

SEQ ID NO: 240202 - DNA, 19 bp, Artificial sequence
  SiRNA target sequence
aagatccttgatgcaatgc

SEQ ID NO: 240203 - DNA, 19 bp, Artificial sequence
  SiRNA target sequence
agatccttgatgcaatgcg

SEQ ID NO: 240204 - DNA, 19 bp, Artificial sequence
  SiRNA target sequence
gatccttgatgcaatgcga

SEQ ID NO: 240205 - DNA, 19 bp, Artificial sequence
  SiRNA target sequence
atccttgatgcaatgcgat

SEQ ID NO: 240206 - DNA, 19 bp, Artificial sequence
  SiRNA target sequence
tccttgatgcaatgcgatt

SEQ ID NO: 240207 - DNA, 19 bp, Artificial sequence
  SiRNA target sequence
ccttgatgcaatgcgattt

SEQ ID NO: 240208 - DNA, 19 bp, Artificial sequence
  SiRNA target sequence
cttgatgcaatgcgatttc

SEQ ID NO: 240209 - DNA, 19 bp, Artificial sequence
  SiRNA target sequence
ttgatgcaatgcgatttcc

SEQ ID NO: 240210 - DNA, 19 bp, Artificial sequence
  SiRNA target sequence
tgatgcaatgcgatttcca

SEQ ID NO: 240211 - DNA, 19 bp, Artificial sequence
  SiRNA target sequence
gatgcaatgcgatttccac

SEQ ID NO: 240212 - DNA, 19 bp, Artificial sequence
  SiRNA target sequence
atgcaatgcgatttccacg

SEQ ID NO: 240213 - DNA, 19 bp, Artificial sequence
  SiRNA target sequence
tgcaatgcgatttccacgg

SEQ ID NO: 240214 - DNA, 19 bp, Artificial sequence
  SiRNA target sequence
gcaatgcgatttccacgga

SEQ ID NO: 240215 - DNA, 19 bp, Artificial sequence
  SiRNA target sequence
caatgcgatttccacggat

SEQ ID NO: 240216 - DNA, 19 bp, Artificial sequence
  SiRNA target sequence
aatgcgatttccacggatt

SEQ ID NO: 240217 - DNA, 19 bp, Artificial sequence
  SiRNA target sequence
atgcgatttccacggatta

SEQ ID NO: 240218 - DNA, 19 bp, Artificial sequence
  SiRNA target sequence
tgcgatttccacggattac

SEQ ID NO: 240219 - DNA, 19 bp, Artificial sequence
  SiRNA target sequence
gcgatttccacggattaca

SEQ ID NO: 240220 - DNA, 19 bp, Artificial sequence
  SiRNA target sequence
cgatttccacggattacaa

SEQ ID NO: 240221 - DNA, 19 bp, Artificial sequence
  SiRNA target sequence
gatttccacggattacaaa

SEQ ID NO: 240222 - DNA, 19 bp, Artificial sequence
  SiRNA target sequence
atttccacggattacaaag

SEQ ID NO: 240223 - DNA, 19 bp, Artificial sequence
  SiRNA target sequence
tttccacggattacaaagt

SEQ ID NO: 240224 - DNA, 19 bp, Artificial sequence
  SiRNA target sequence
ttccacggattacaaagtt

SEQ ID NO: 240225 - DNA, 19 bp, Artificial sequence
  SiRNA target sequence
tccacggattacaaagtta

SEQ ID NO: 240226 - DNA, 19 bp, Artificial sequence
  SiRNA target sequence
ccacggattacaaagttat

SEQ ID NO: 240227 - DNA, 19 bp, Artificial sequence
  SiRNA target sequence
cacggattacaaagttata

SEQ ID NO: 240228 - DNA, 19 bp, Artificial sequence
  SiRNA target sequence
acggattacaaagttataa

SEQ ID NO: 240229 - DNA, 19 bp, Artificial sequence
  SiRNA target sequence
cggattacaaagttataaa

SEQ ID NO: 240230 - DNA, 19 bp, Artificial sequence
  SiRNA target sequence
ggattacaaagttataaaa

SEQ ID NO: 240231 - DNA, 19 bp, Artificial sequence
  SiRNA target sequence
gattacaaagttataaaat

SEQ ID NO: 240232 - DNA, 19 bp, Artificial sequence
  SiRNA target sequence
attacaaagttataaaata

SEQ ID NO: 240233 - DNA, 19 bp, Artificial sequence
  SiRNA target sequence
ttacaaagttataaaataa

SEQ ID NO: 240234 - DNA, 19 bp, Artificial sequence
  SiRNA target sequence
tacaaagttataaaataat

SEQ ID NO: 240235 - DNA, 19 bp, Artificial sequence
  SiRNA target sequence
acaaagttataaaataatg

SEQ ID NO: 240236 - DNA, 19 bp, Artificial sequence
  SiRNA target sequence
caaagttataaaataatga

SEQ ID NO: 240237 - DNA, 19 bp, Artificial sequence
  SiRNA target sequence
aaagttataaaataatgat

SEQ ID NO: 240238 - DNA, 19 bp, Artificial sequence
  SiRNA target sequence
aagttataaaataatgata

SEQ ID NO: 240239 - DNA, 19 bp, Artificial sequence
  SiRNA target sequence
agttataaaataatgatac

SEQ ID NO: 240240 - DNA, 19 bp, Artificial sequence
  SiRNA target sequence
gttataaaataatgataca

SEQ ID NO: 240241 - DNA, 19 bp, Artificial sequence
  SiRNA target sequence
ttataaaataatgatacag

SEQ ID NO: 240242 - DNA, 19 bp, Artificial sequence
  SiRNA target sequence
tataaaataatgatacagc

SEQ ID NO: 240243 - DNA, 19 bp, Artificial sequence
  SiRNA target sequence
ataaaataatgatacagca

SEQ ID NO: 240244 - DNA, 19 bp, Artificial sequence
  SiRNA target sequence
taaaataatgatacagcac

SEQ ID NO: 240245 - DNA, 19 bp, Artificial sequence
  SiRNA target sequence
aaaataatgatacagcact

SEQ ID NO: 240246 - DNA, 19 bp, Artificial sequence
  SiRNA target sequence
aaataatgatacagcacta

SEQ ID NO: 240247 - DNA, 19 bp, Artificial sequence
  SiRNA target sequence
aataatgatacagcactaa

SEQ ID NO: 240248 - DNA, 19 bp, Artificial sequence
  SiRNA target sequence
ataatgatacagcactaat

SEQ ID NO: 240249 - DNA, 19 bp, Artificial sequence
  SiRNA target sequence
taatgatacagcactaatc

SEQ ID NO: 240250 - DNA, 19 bp, Artificial sequence
  SiRNA target sequence
aatgatacagcactaatcg

SEQ ID NO: 240251 - DNA, 19 bp, Artificial sequence
  SiRNA target sequence
atgatacagcactaatcgt

SEQ ID NO: 240252 - DNA, 19 bp, Artificial sequence
  SiRNA target sequence
tgatacagcactaatcgtt

SEQ ID NO: 240253 - DNA, 19 bp, Artificial sequence
  SiRNA target sequence
gatacagcactaatcgtta

SEQ ID NO: 240254 - DNA, 19 bp, Artificial sequence
  SiRNA target sequence
atacagcactaatcgttaa

SEQ ID NO: 240255 - DNA, 19 bp, Artificial sequence
  SiRNA target sequence
tacagcactaatcgttaag

SEQ ID NO: 240256 - DNA, 19 bp, Artificial sequence
  SiRNA target sequence
acagcactaatcgttaagg

SEQ ID NO: 240257 - DNA, 19 bp, Artificial sequence
  SiRNA target sequence
cagcactaatcgttaagga

SEQ ID NO: 240258 - DNA, 19 bp, Artificial sequence
  SiRNA target sequence
agcactaatcgttaaggaa

SEQ ID NO: 240259 - DNA, 19 bp, Artificial sequence
  SiRNA target sequence
gcactaatcgttaaggaag

SEQ ID NO: 240260 - DNA, 19 bp, Artificial sequence
  SiRNA target sequence
cactaatcgttaaggaagt

SEQ ID NO: 240261 - DNA, 19 bp, Artificial sequence
  SiRNA target sequence
actaatcgttaaggaagtt

SEQ ID NO: 240262 - DNA, 19 bp, Artificial sequence
  SiRNA target sequence
ctaatcgttaaggaagttg

SEQ ID NO: 240263 - DNA, 19 bp, Artificial sequence
  SiRNA target sequence
taatcgttaaggaagttgt

SEQ ID NO: 240264 - DNA, 19 bp, Artificial sequence
  SiRNA target sequence
aatcgttaaggaagttgtt

SEQ ID NO: 240265 - DNA, 19 bp, Artificial sequence
  SiRNA target sequence
atcgttaaggaagttgtta

SEQ ID NO: 240266 - DNA, 19 bp, Artificial sequence
  SiRNA target sequence
tcgttaaggaagttgttac

SEQ ID NO: 240267 - DNA, 19 bp, Artificial sequence
  SiRNA target sequence
cgttaaggaagttgttact

SEQ ID NO: 240268 - DNA, 19 bp, Artificial sequence
  SiRNA target sequence
gttaaggaagttgttacta

SEQ ID NO: 240269 - DNA, 19 bp, Artificial sequence
  SiRNA target sequence
ttaaggaagttgttactaa

SEQ ID NO: 240270 - DNA, 19 bp, Artificial sequence
  SiRNA target sequence
taaggaagttgttactaaa

SEQ ID NO: 240271 - DNA, 19 bp, Artificial sequence
  SiRNA target sequence
aaggaagttgttactaaat

SEQ ID NO: 240272 - DNA, 19 bp, Artificial sequence
  SiRNA target sequence
aggaagttgttactaaata

SEQ ID NO: 240273 - DNA, 19 bp, Artificial sequence
  SiRNA target sequence
ggaagttgttactaaatat

SEQ ID NO: 240274 - DNA, 19 bp, Artificial sequence
  SiRNA target sequence
gaagttgttactaaatatt

SEQ ID NO: 240275 - DNA, 19 bp, Artificial sequence
  SiRNA target sequence
aagttgttactaaatattt

SEQ ID NO: 240276 - DNA, 19 bp, Artificial sequence
  SiRNA target sequence
agttgttactaaatatttt

SEQ ID NO: 240277 - DNA, 19 bp, Artificial sequence
  SiRNA target sequence
gttgttactaaatattttt

SEQ ID NO: 240278 - DNA, 19 bp, Artificial sequence
  SiRNA target sequence
ttgttactaaatatttttg

SEQ ID NO: 240279 - DNA, 19 bp, Artificial sequence
  SiRNA target sequence
tgttactaaatatttttga

SEQ ID NO: 240280 - DNA, 19 bp, Artificial sequence
  SiRNA target sequence
gttactaaatatttttgag

SEQ ID NO: 240281 - DNA, 19 bp, Artificial sequence
  SiRNA target sequence
ttactaaatatttttgaga

SEQ ID NO: 240282 - DNA, 19 bp, Artificial sequence
  SiRNA target sequence
tactaaatatttttgagaa

SEQ ID NO: 240283 - DNA, 19 bp, Artificial sequence
  SiRNA target sequence
actaaatatttttgagaat

SEQ ID NO: 240284 - DNA, 19 bp, Artificial sequence
  SiRNA target sequence
ctaaatatttttgagaata

SEQ ID NO: 240285 - DNA, 19 bp, Artificial sequence
  SiRNA target sequence
taaatatttttgagaataa

SEQ ID NO: 240286 - DNA, 19 bp, Artificial sequence
  SiRNA target sequence
aaatatttttgagaataat

SEQ ID NO: 240287 - DNA, 19 bp, Artificial sequence
  SiRNA target sequence
aatatttttgagaataatc

SEQ ID NO: 240288 - DNA, 19 bp, Artificial sequence
  SiRNA target sequence
atatttttgagaataatct

SEQ ID NO: 240289 - DNA, 19 bp, Artificial sequence
  SiRNA target sequence
tatttttgagaataatctt

SEQ ID NO: 240290 - DNA, 19 bp, Artificial sequence
  SiRNA target sequence
atttttgagaataatcttt

SEQ ID NO: 240291 - DNA, 19 bp, Artificial sequence
  SiRNA target sequence
tttttgagaataatctttc

SEQ ID NO: 240292 - DNA, 19 bp, Artificial sequence
  SiRNA target sequence
ttttgagaataatctttcg

SEQ ID NO: 240293 - DNA, 19 bp, Artificial sequence
  SiRNA target sequence
tttgagaataatctttcgg

SEQ ID NO: 240294 - DNA, 19 bp, Artificial sequence
  SiRNA target sequence
ttgagaataatctttcgga

SEQ ID NO: 240295 - DNA, 19 bp, Artificial sequence
  SiRNA target sequence
tgagaataatctttcggag

SEQ ID NO: 240296 - DNA, 19 bp, Artificial sequence
  SiRNA target sequence
gagaataatctttcggagg

SEQ ID NO: 240297 - DNA, 19 bp, Artificial sequence
  SiRNA target sequence
agaataatctttcggaggc

SEQ ID NO: 240298 - DNA, 19 bp, Artificial sequence
  SiRNA target sequence
gaataatctttcggaggca

SEQ ID NO: 240299 - DNA, 19 bp, Artificial sequence
  SiRNA target sequence
aataatctttcggaggcat

SEQ ID NO: 240300 - DNA, 19 bp, Artificial sequence
  SiRNA target sequence
ataatctttcggaggcata

SEQ ID NO: 240301 - DNA, 19 bp, Artificial sequence
  SiRNA target sequence
taatctttcggaggcatat

SEQ ID NO: 240302 - DNA, 19 bp, Artificial sequence
  SiRNA target sequence
aatctttcggaggcatatt

SEQ ID NO: 240303 - DNA, 19 bp, Artificial sequence
  SiRNA target sequence
atctttcggaggcatatta

SEQ ID NO: 240304 - DNA, 19 bp, Artificial sequence
  SiRNA target sequence
tctttcggaggcatattat

SEQ ID NO: 240305 - DNA, 19 bp, Artificial sequence
  SiRNA target sequence
ctttcggaggcatattatt

SEQ ID NO: 240306 - DNA, 19 bp, Artificial sequence
  SiRNA target sequence
tttcggaggcatattatta

SEQ ID NO: 240307 - DNA, 19 bp, Artificial sequence
  SiRNA target sequence
ttcggaggcatattattaa

SEQ ID NO: 240308 - DNA, 19 bp, Artificial sequence
  SiRNA target sequence
tcggaggcatattattaat

SEQ ID NO: 240309 - DNA, 19 bp, Artificial sequence
  SiRNA target sequence
cggaggcatattattaatt

SEQ ID NO: 240310 - DNA, 19 bp, Artificial sequence
  SiRNA target sequence
ggaggcatattattaattc

SEQ ID NO: 240311 - DNA, 19 bp, Artificial sequence
  SiRNA target sequence
gaggcatattattaattct

SEQ ID NO: 240312 - DNA, 19 bp, Artificial sequence
  SiRNA target sequence
aggcatattattaattctg

SEQ ID NO: 240313 - DNA, 19 bp, Artificial sequence
  SiRNA target sequence
ggcatattattaattctgc

SEQ ID NO: 240314 - DNA, 19 bp, Artificial sequence
  SiRNA target sequence
gcatattattaattctgct

SEQ ID NO: 240315 - DNA, 19 bp, Artificial sequence
  SiRNA target sequence
catattattaattctgctt

SEQ ID NO: 240316 - DNA, 19 bp, Artificial sequence
  SiRNA target sequence
atattattaattctgcttc

SEQ ID NO: 240317 - DNA, 19 bp, Artificial sequence
  SiRNA target sequence
tattattaattctgcttcc

SEQ ID NO: 240318 - DNA, 19 bp, Artificial sequence
  SiRNA target sequence
attattaattctgcttccc

SEQ ID NO: 240319 - DNA, 19 bp, Artificial sequence
  SiRNA target sequence
ttattaattctgcttcccg

SEQ ID NO: 240320 - DNA, 19 bp, Artificial sequence
  SiRNA target sequence
tattaattctgcttcccgt

SEQ ID NO: 240321 - DNA, 19 bp, Artificial sequence
  SiRNA target sequence
attaattctgcttcccgta

SEQ ID NO: 240322 - DNA, 19 bp, Artificial sequence
  SiRNA target sequence
ttaattctgcttcccgtag

SEQ ID NO: 240323 - DNA, 19 bp, Artificial sequence
  SiRNA target sequence
taattctgcttcccgtaga

SEQ ID NO: 240324 - DNA, 19 bp, Artificial sequence
  SiRNA target sequence
aattctgcttcccgtagat

SEQ ID NO: 240325 - DNA, 19 bp, Artificial sequence
  SiRNA target sequence
attctgcttcccgtagata

SEQ ID NO: 240326 - DNA, 19 bp, Artificial sequence
  SiRNA target sequence
ttctgcttcccgtagataa

SEQ ID NO: 240327 - DNA, 19 bp, Artificial sequence
  SiRNA target sequence
tctgcttcccgtagataaa

SEQ ID NO: 240328 - DNA, 19 bp, Artificial sequence
  SiRNA target sequence
ctgcttcccgtagataaag

SEQ ID NO: 240329 - DNA, 19 bp, Artificial sequence
  SiRNA target sequence
tgcttcccgtagataaaga

SEQ ID NO: 240330 - DNA, 19 bp, Artificial sequence
  SiRNA target sequence
gcttcccgtagataaagaa

SEQ ID NO: 240331 - DNA, 19 bp, Artificial sequence
  SiRNA target sequence
cttcccgtagataaagaat

SEQ ID NO: 240332 - DNA, 19 bp, Artificial sequence
  SiRNA target sequence
ttcccgtagataaagaatt

SEQ ID NO: 240333 - DNA, 19 bp, Artificial sequence
  SiRNA target sequence
tcccgtagataaagaattt

SEQ ID NO: 240334 - DNA, 19 bp, Artificial sequence
  SiRNA target sequence
cccgtagataaagaatttt

SEQ ID NO: 240335 - DNA, 19 bp, Artificial sequence
  SiRNA target sequence
ccgtagataaagaattttt

SEQ ID NO: 240336 - DNA, 19 bp, Artificial sequence
  SiRNA target sequence
cgtagataaagaatttttt

SEQ ID NO: 240337 - DNA, 19 bp, Artificial sequence
  SiRNA target sequence
gtagataaagaatttttta

SEQ ID NO: 240338 - DNA, 19 bp, Artificial sequence
  SiRNA target sequence
tagataaagaattttttaa

SEQ ID NO: 240339 - DNA, 19 bp, Artificial sequence
  SiRNA target sequence
agataaagaattttttaag

SEQ ID NO: 240340 - DNA, 19 bp, Artificial sequence
  SiRNA target sequence
gataaagaattttttaagg

SEQ ID NO: 240341 - DNA, 19 bp, Artificial sequence
  SiRNA target sequence
ataaagaattttttaagga

SEQ ID NO: 240342 - DNA, 19 bp, Artificial sequence
  SiRNA target sequence
taaagaattttttaaggac

SEQ ID NO: 240343 - DNA, 19 bp, Artificial sequence
  SiRNA target sequence
aaagaattttttaaggaca

SEQ ID NO: 240344 - DNA, 19 bp, Artificial sequence
  SiRNA target sequence
aagaattttttaaggacat

SEQ ID NO: 240345 - DNA, 19 bp, Artificial sequence
  SiRNA target sequence
agaattttttaaggacata

SEQ ID NO: 240346 - DNA, 19 bp, Artificial sequence
  SiRNA target sequence
gaattttttaaggacatat

SEQ ID NO: 240347 - DNA, 19 bp, Artificial sequence
  SiRNA target sequence
aattttttaaggacatatc

SEQ ID NO: 240348 - DNA, 19 bp, Artificial sequence
  SiRNA target sequence
attttttaaggacatatca

SEQ ID NO: 240349 - DNA, 19 bp, Artificial sequence
  SiRNA target sequence
ttttttaaggacatatcaa

SEQ ID NO: 240350 - DNA, 19 bp, Artificial sequence
  SiRNA target sequence
tttttaaggacatatcaat

SEQ ID NO: 240351 - DNA, 19 bp, Artificial sequence
  SiRNA target sequence
ttttaaggacatatcaata

SEQ ID NO: 240352 - DNA, 19 bp, Artificial sequence
  SiRNA target sequence
tttaaggacatatcaataa

SEQ ID NO: 240353 - DNA, 19 bp, Artificial sequence
  SiRNA target sequence
ttaaggacatatcaataaa

SEQ ID NO: 240354 - DNA, 19 bp, Artificial sequence
  SiRNA target sequence
taaggacatatcaataaat

SEQ ID NO: 240355 - DNA, 19 bp, Artificial sequence
  SiRNA target sequence
aaggacatatcaataaatc

SEQ ID NO: 240356 - DNA, 19 bp, Artificial sequence
  SiRNA target sequence
aggacatatcaataaatcc

SEQ ID NO: 240357 - DNA, 19 bp, Artificial sequence
  SiRNA target sequence
ggacatatcaataaatcct

SEQ ID NO: 240358 - DNA, 19 bp, Artificial sequence
  SiRNA target sequence
gacatatcaataaatcctg

SEQ ID NO: 240359 - DNA, 19 bp, Artificial sequence
  SiRNA target sequence
acatatcaataaatcctgc

SEQ ID NO: 240360 - DNA, 19 bp, Artificial sequence
  SiRNA target sequence
catatcaataaatcctgca

SEQ ID NO: 240361 - DNA, 19 bp, Artificial sequence
  SiRNA target sequence
atatcaataaatcctgcat

SEQ ID NO: 240362 - DNA, 19 bp, Artificial sequence
  SiRNA target sequence
tatcaataaatcctgcatt

SEQ ID NO: 240363 - DNA, 19 bp, Artificial sequence
  SiRNA target sequence
atcaataaatcctgcatta

SEQ ID NO: 240364 - DNA, 19 bp, Artificial sequence
  SiRNA target sequence
tcaataaatcctgcattaa

SEQ ID NO: 240365 - DNA, 19 bp, Artificial sequence
  SiRNA target sequence
caataaatcctgcattaat

SEQ ID NO: 240366 - DNA, 19 bp, Artificial sequence
  SiRNA target sequence
aataaatcctgcattaata

SEQ ID NO: 240367 - DNA, 19 bp, Artificial sequence
  SiRNA target sequence
ataaatcctgcattaatag

SEQ ID NO: 240368 - DNA, 19 bp, Artificial sequence
  SiRNA target sequence
taaatcctgcattaatagc

SEQ ID NO: 240369 - DNA, 19 bp, Artificial sequence
  SiRNA target sequence
aaatcctgcattaatagca

SEQ ID NO: 240370 - DNA, 19 bp, Artificial sequence
  SiRNA target sequence
aatcctgcattaatagcat

SEQ ID NO: 240371 - DNA, 19 bp, Artificial sequence
  SiRNA target sequence
atcctgcattaatagcata

SEQ ID NO: 240372 - DNA, 19 bp, Artificial sequence
  SiRNA target sequence
tcctgcattaatagcatag

SEQ ID NO: 240373 - DNA, 19 bp, Artificial sequence
  SiRNA target sequence
cctgcattaatagcataga

SEQ ID NO: 240374 - DNA, 19 bp, Artificial sequence
  SiRNA target sequence
ctgcattaatagcatagat

SEQ ID NO: 240375 - DNA, 19 bp, Artificial sequence
  SiRNA target sequence
tgcattaatagcatagatt

SEQ ID NO: 240376 - DNA, 19 bp, Artificial sequence
  SiRNA target sequence
gcattaatagcatagatta

SEQ ID NO: 240377 - DNA, 19 bp, Artificial sequence
  SiRNA target sequence
cattaatagcatagattaa

SEQ ID NO: 240378 - DNA, 19 bp, Artificial sequence
  SiRNA target sequence
attaatagcatagattaat

SEQ ID NO: 240379 - DNA, 19 bp, Artificial sequence
  SiRNA target sequence
ttaatagcatagattaatg

SEQ ID NO: 240380 - DNA, 19 bp, Artificial sequence
  SiRNA target sequence
taatagcatagattaatgc

SEQ ID NO: 240381 - DNA, 19 bp, Artificial sequence
  SiRNA target sequence
aatagcatagattaatgcc

SEQ ID NO: 240382 - DNA, 19 bp, Artificial sequence
  SiRNA target sequence
atagcatagattaatgccg

SEQ ID NO: 240383 - DNA, 19 bp, Artificial sequence
  SiRNA target sequence
tagcatagattaatgccgc

SEQ ID NO: 240384 - DNA, 19 bp, Artificial sequence
  SiRNA target sequence
agcatagattaatgccgct

SEQ ID NO: 240385 - DNA, 19 bp, Artificial sequence
  SiRNA target sequence
gcatagattaatgccgctg

SEQ ID NO: 240386 - DNA, 19 bp, Artificial sequence
  SiRNA target sequence
catagattaatgccgctgc

SEQ ID NO: 240387 - DNA, 19 bp, Artificial sequence
  SiRNA target sequence
atagattaatgccgctgca

SEQ ID NO: 240388 - DNA, 19 bp, Artificial sequence
  SiRNA target sequence
tagattaatgccgctgcac

SEQ ID NO: 240389 - DNA, 19 bp, Artificial sequence
  SiRNA target sequence
agattaatgccgctgcaca

SEQ ID NO: 240390 - DNA, 19 bp, Artificial sequence
  SiRNA target sequence
gattaatgccgctgcacac

SEQ ID NO: 240391 - DNA, 19 bp, Artificial sequence
  SiRNA target sequence
attaatgccgctgcacaca

SEQ ID NO: 240392 - DNA, 19 bp, Artificial sequence
  SiRNA target sequence
ttaatgccgctgcacacat

SEQ ID NO: 240393 - DNA, 19 bp, Artificial sequence
  SiRNA target sequence
taatgccgctgcacacata

SEQ ID NO: 240394 - DNA, 19 bp, Artificial sequence
  SiRNA target sequence
aatgccgctgcacacatat

SEQ ID NO: 240395 - DNA, 19 bp, Artificial sequence
  SiRNA target sequence
atgccgctgcacacatatt

SEQ ID NO: 240396 - DNA, 19 bp, Artificial sequence
  SiRNA target sequence
tgccgctgcacacatattt

SEQ ID NO: 240397 - DNA, 19 bp, Artificial sequence
  SiRNA target sequence
gccgctgcacacatatttc

SEQ ID NO: 240398 - DNA, 19 bp, Artificial sequence
  SiRNA target sequence
ccgctgcacacatatttct

SEQ ID NO: 240399 - DNA, 19 bp, Artificial sequence
  SiRNA target sequence
cgctgcacacatatttctt

SEQ ID NO: 240400 - DNA, 19 bp, Artificial sequence
  SiRNA target sequence
gctgcacacatatttctta

SEQ ID NO: 240401 - DNA, 19 bp, Artificial sequence
  SiRNA target sequence
ctgcacacatatttcttaa

SEQ ID NO: 240402 - DNA, 19 bp, Artificial sequence
  SiRNA target sequence
tgcacacatatttcttaaa

SEQ ID NO: 240403 - DNA, 19 bp, Artificial sequence
  SiRNA target sequence
gcacacatatttcttaaaa

SEQ ID NO: 240404 - DNA, 19 bp, Artificial sequence
  SiRNA target sequence
cacacatatttcttaaaaa

SEQ ID NO: 240405 - DNA, 19 bp, Artificial sequence
  SiRNA target sequence
acacatatttcttaaaaat

SEQ ID NO: 240406 - DNA, 19 bp, Artificial sequence
  SiRNA target sequence
cacatatttcttaaaaatt

SEQ ID NO: 240407 - DNA, 19 bp, Artificial sequence
  SiRNA target sequence
acatatttcttaaaaattt

SEQ ID NO: 240408 - DNA, 19 bp, Artificial sequence
  SiRNA target sequence
catatttcttaaaaatttg

SEQ ID NO: 240409 - DNA, 19 bp, Artificial sequence
  SiRNA target sequence
atatttcttaaaaatttgg

SEQ ID NO: 240410 - DNA, 19 bp, Artificial sequence
  SiRNA target sequence
tatttcttaaaaatttgga

SEQ ID NO: 240411 - DNA, 19 bp, Artificial sequence
  SiRNA target sequence
atttcttaaaaatttggat

SEQ ID NO: 240412 - DNA, 19 bp, Artificial sequence
  SiRNA target sequence
tttcttaaaaatttggatt

SEQ ID NO: 240413 - DNA, 19 bp, Artificial sequence
  SiRNA target sequence
ttcttaaaaatttggattg

SEQ ID NO: 240414 - DNA, 19 bp, Artificial sequence
  SiRNA target sequence
tcttaaaaatttggattgt

SEQ ID NO: 240415 - DNA, 19 bp, Artificial sequence
  SiRNA target sequence
cttaaaaatttggattgta

SEQ ID NO: 240416 - DNA, 19 bp, Artificial sequence
  SiRNA target sequence
ttaaaaatttggattgtaa

SEQ ID NO: 240417 - DNA, 19 bp, Artificial sequence
  SiRNA target sequence
taaaaatttggattgtaaa

SEQ ID NO: 240418 - DNA, 19 bp, Artificial sequence
  SiRNA target sequence
aaaaatttggattgtaaaa

SEQ ID NO: 240419 - DNA, 19 bp, Artificial sequence
  SiRNA target sequence
aaaatttggattgtaaaag

SEQ ID NO: 240420 - DNA, 19 bp, Artificial sequence
  SiRNA target sequence
aaatttggattgtaaaaga

SEQ ID NO: 240421 - DNA, 19 bp, Artificial sequence
  SiRNA target sequence
aatttggattgtaaaagat

SEQ ID NO: 240422 - DNA, 19 bp, Artificial sequence
  SiRNA target sequence
atttggattgtaaaagatc

SEQ ID NO: 240423 - DNA, 19 bp, Artificial sequence
  SiRNA target sequence
tttggattgtaaaagatca

SEQ ID NO: 240424 - DNA, 19 bp, Artificial sequence
  SiRNA target sequence
ttggattgtaaaagatcaa

SEQ ID NO: 240425 - DNA, 19 bp, Artificial sequence
  SiRNA target sequence
tggattgtaaaagatcaaa

SEQ ID NO: 240426 - DNA, 19 bp, Artificial sequence
  SiRNA target sequence
ggattgtaaaagatcaaac

SEQ ID NO: 240427 - DNA, 19 bp, Artificial sequence
  SiRNA target sequence
gattgtaaaagatcaaacg

SEQ ID NO: 240428 - DNA, 19 bp, Artificial sequence
  SiRNA target sequence
attgtaaaagatcaaacga

SEQ ID NO: 240429 - DNA, 19 bp, Artificial sequence
  SiRNA target sequence
ttgtaaaagatcaaacgag

SEQ ID NO: 240430 - DNA, 19 bp, Artificial sequence
  SiRNA target sequence
tgtaaaagatcaaacgagg

SEQ ID NO: 240431 - DNA, 19 bp, Artificial sequence
  SiRNA target sequence
gtaaaagatcaaacgagga

SEQ ID NO: 240432 - DNA, 19 bp, Artificial sequence
  SiRNA target sequence
taaaagatcaaacgaggat

SEQ ID NO: 240433 - DNA, 19 bp, Artificial sequence
  SiRNA target sequence
aaaagatcaaacgaggatg

SEQ ID NO: 240434 - DNA, 19 bp, Artificial sequence
  SiRNA target sequence
aaagatcaaacgaggatgt

SEQ ID NO: 240435 - DNA, 19 bp, Artificial sequence
  SiRNA target sequence
aagatcaaacgaggatgtc

SEQ ID NO: 240436 - DNA, 19 bp, Artificial sequence
  SiRNA target sequence
agatcaaacgaggatgtcg

SEQ ID NO: 240437 - DNA, 19 bp, Artificial sequence
  SiRNA target sequence
gatcaaacgaggatgtcgt

SEQ ID NO: 240438 - DNA, 19 bp, Artificial sequence
  SiRNA target sequence
atcaaacgaggatgtcgtt

SEQ ID NO: 240439 - DNA, 19 bp, Artificial sequence
  SiRNA target sequence
tcaaacgaggatgtcgttt

SEQ ID NO: 240440 - DNA, 19 bp, Artificial sequence
  SiRNA target sequence
caaacgaggatgtcgtttt

SEQ ID NO: 240441 - DNA, 19 bp, Artificial sequence
  SiRNA target sequence
aaacgaggatgtcgttttg

SEQ ID NO: 240442 - DNA, 19 bp, Artificial sequence
  SiRNA target sequence
aacgaggatgtcgttttgt

SEQ ID NO: 240443 - DNA, 19 bp, Artificial sequence
  SiRNA target sequence
acgaggatgtcgttttgtc

SEQ ID NO: 240444 - DNA, 19 bp, Artificial sequence
  SiRNA target sequence
cgaggatgtcgttttgtct

SEQ ID NO: 240445 - DNA, 19 bp, Artificial sequence
  SiRNA target sequence
gaggatgtcgttttgtctt

SEQ ID NO: 240446 - DNA, 19 bp, Artificial sequence
  SiRNA target sequence
aggatgtcgttttgtcttc

SEQ ID NO: 240447 - DNA, 19 bp, Artificial sequence
  SiRNA target sequence
ggatgtcgttttgtcttct

SEQ ID NO: 240448 - DNA, 19 bp, Artificial sequence
  SiRNA target sequence
gatgtcgttttgtcttctt

SEQ ID NO: 240449 - DNA, 19 bp, Artificial sequence
  SiRNA target sequence
atgtcgttttgtcttcttc

SEQ ID NO: 240450 - DNA, 19 bp, Artificial sequence
  SiRNA target sequence
tgtcgttttgtcttcttct

SEQ ID NO: 240451 - DNA, 19 bp, Artificial sequence
  SiRNA target sequence
gtcgttttgtcttcttctt

SEQ ID NO: 240452 - DNA, 19 bp, Artificial sequence
  SiRNA target sequence
tcgttttgtcttcttcttt

SEQ ID NO: 240453 - DNA, 19 bp, Artificial sequence
  SiRNA target sequence
cgttttgtcttcttcttta

SEQ ID NO: 240454 - DNA, 19 bp, Artificial sequence
  SiRNA target sequence
gttttgtcttcttctttat

SEQ ID NO: 240455 - DNA, 19 bp, Artificial sequence
  SiRNA target sequence
ttttgtcttcttctttatt

SEQ ID NO: 240456 - DNA, 19 bp, Artificial sequence
  SiRNA target sequence
tttgtcttcttctttattt

SEQ ID NO: 240457 - DNA, 19 bp, Artificial sequence
  SiRNA target sequence
ttgtcttcttctttattta

SEQ ID NO: 240458 - DNA, 19 bp, Artificial sequence
  SiRNA target sequence
tgtcttcttctttatttat

SEQ ID NO: 240459 - DNA, 19 bp, Artificial sequence
  SiRNA target sequence
gtcttcttctttatttata

SEQ ID NO: 240460 - DNA, 19 bp, Artificial sequence
  SiRNA target sequence
tcttcttctttatttatag

SEQ ID NO: 240461 - DNA, 19 bp, Artificial sequence
  SiRNA target sequence
cttcttctttatttatagt

SEQ ID NO: 240462 - DNA, 19 bp, Artificial sequence
  SiRNA target sequence
ttcttctttatttatagtt

SEQ ID NO: 240463 - DNA, 19 bp, Artificial sequence
  SiRNA target sequence
tcttctttatttatagttt

SEQ ID NO: 240464 - DNA, 19 bp, Artificial sequence
  SiRNA target sequence
cttctttatttatagtttc

SEQ ID NO: 240465 - DNA, 19 bp, Artificial sequence
  SiRNA target sequence
ttctttatttatagtttcc

SEQ ID NO: 240466 - DNA, 19 bp, Artificial sequence
  SiRNA target sequence
tctttatttatagtttcct

SEQ ID NO: 240467 - DNA, 19 bp, Artificial sequence
  SiRNA target sequence
ctttatttatagtttcctt

SEQ ID NO: 240468 - DNA, 19 bp, Artificial sequence
  SiRNA target sequence
tttatttatagtttccttt

SEQ ID NO: 240469 - DNA, 19 bp, Artificial sequence
  SiRNA target sequence
ttatttatagtttccttta

SEQ ID NO: 240470 - DNA, 19 bp, Artificial sequence
  SiRNA target sequence
tatttatagtttcctttat

SEQ ID NO: 240471 - DNA, 19 bp, Artificial sequence
  SiRNA target sequence
atttatagtttcctttatt

SEQ ID NO: 240472 - DNA, 19 bp, Artificial sequence
  SiRNA target sequence
tttatagtttcctttattt

SEQ ID NO: 240473 - DNA, 19 bp, Artificial sequence
  SiRNA target sequence
ttatagtttcctttatttc

SEQ ID NO: 240474 - DNA, 19 bp, Artificial sequence
  SiRNA target sequence
tatagtttcctttatttct

SEQ ID NO: 240475 - DNA, 19 bp, Artificial sequence
  SiRNA target sequence
atagtttcctttatttctt

SEQ ID NO: 240476 - DNA, 19 bp, Artificial sequence
  SiRNA target sequence
tagtttcctttatttcttt

SEQ ID NO: 240477 - DNA, 19 bp, Artificial sequence
  SiRNA target sequence
agtttcctttatttcttta

SEQ ID NO: 240478 - DNA, 19 bp, Artificial sequence
  SiRNA target sequence
gtttcctttatttctttag

SEQ ID NO: 240479 - DNA, 19 bp, Artificial sequence
  SiRNA target sequence
tttcctttatttctttagt

SEQ ID NO: 240480 - DNA, 19 bp, Artificial sequence
  SiRNA target sequence
ttcctttatttctttagtt

SEQ ID NO: 240481 - DNA, 19 bp, Artificial sequence
  SiRNA target sequence
tcctttatttctttagttt

SEQ ID NO: 240482 - DNA, 19 bp, Artificial sequence
  SiRNA target sequence
cctttatttctttagtttt

SEQ ID NO: 240483 - DNA, 19 bp, Artificial sequence
  SiRNA target sequence
ctttatttctttagtttta

SEQ ID NO: 240484 - DNA, 19 bp, Artificial sequence
  SiRNA target sequence
tttatttctttagttttaa

SEQ ID NO: 240485 - DNA, 19 bp, Artificial sequence
  SiRNA target sequence
ttatttctttagttttaag

SEQ ID NO: 240486 - DNA, 19 bp, Artificial sequence
  SiRNA target sequence
tatttctttagttttaaga

SEQ ID NO: 240487 - DNA, 19 bp, Artificial sequence
  SiRNA target sequence
atttctttagttttaagag

SEQ ID NO: 240488 - DNA, 19 bp, Artificial sequence
  SiRNA target sequence
tttctttagttttaagagg

SEQ ID NO: 240489 - DNA, 19 bp, Artificial sequence
  SiRNA target sequence
ttctttagttttaagagga

SEQ ID NO: 240490 - DNA, 19 bp, Artificial sequence
  SiRNA target sequence
tctttagttttaagaggaa

SEQ ID NO: 240491 - DNA, 19 bp, Artificial sequence
  SiRNA target sequence
ctttagttttaagaggaat

SEQ ID NO: 240492 - DNA, 19 bp, Artificial sequence
  SiRNA target sequence
tttagttttaagaggaata

SEQ ID NO: 240493 - DNA, 19 bp, Artificial sequence
  SiRNA target sequence
ttagttttaagaggaatat

SEQ ID NO: 240494 - DNA, 19 bp, Artificial sequence
  SiRNA target sequence
tagttttaagaggaatata

SEQ ID NO: 240495 - DNA, 19 bp, Artificial sequence
  SiRNA target sequence
agttttaagaggaatataa

SEQ ID NO: 240496 - DNA, 19 bp, Artificial sequence
  SiRNA target sequence
gttttaagaggaatataac

SEQ ID NO: 240497 - DNA, 19 bp, Artificial sequence
  SiRNA target sequence
ttttaagaggaatataact

SEQ ID NO: 240498 - DNA, 19 bp, Artificial sequence
  SiRNA target sequence
tttaagaggaatataactt

SEQ ID NO: 240499 - DNA, 19 bp, Artificial sequence
  SiRNA target sequence
ttaagaggaatataacttt

SEQ ID NO: 240500 - DNA, 19 bp, Artificial sequence
  SiRNA target sequence
taagaggaatataactttt

SEQ ID NO: 240501 - DNA, 19 bp, Artificial sequence
  SiRNA target sequence
aagaggaatataacttttt

SEQ ID NO: 240502 - DNA, 19 bp, Artificial sequence
  SiRNA target sequence
agaggaatataacttttta

SEQ ID NO: 240503 - DNA, 19 bp, Artificial sequence
  SiRNA target sequence
gaggaatataactttttaa

SEQ ID NO: 240504 - DNA, 19 bp, Artificial sequence
  SiRNA target sequence
aggaatataactttttaaa

SEQ ID NO: 240505 - DNA, 19 bp, Artificial sequence
  SiRNA target sequence
ggaatataactttttaaaa

SEQ ID NO: 240506 - DNA, 19 bp, Artificial sequence
  SiRNA target sequence
gaatataactttttaaaaa

SEQ ID NO: 240507 - DNA, 19 bp, Artificial sequence
  SiRNA target sequence
aatataactttttaaaaag

SEQ ID NO: 240508 - DNA, 19 bp, Artificial sequence
  SiRNA target sequence
atataactttttaaaaagt

SEQ ID NO: 240509 - DNA, 19 bp, Artificial sequence
  SiRNA target sequence
tataactttttaaaaagta

SEQ ID NO: 240510 - DNA, 19 bp, Artificial sequence
  SiRNA target sequence
ataactttttaaaaagtaa

SEQ ID NO: 240511 - DNA, 19 bp, Artificial sequence
  SiRNA target sequence
taactttttaaaaagtaaa

SEQ ID NO: 240512 - DNA, 19 bp, Artificial sequence
  SiRNA target sequence
aactttttaaaaagtaaat

SEQ ID NO: 240513 - DNA, 19 bp, Artificial sequence
  SiRNA target sequence
actttttaaaaagtaaatt

SEQ ID NO: 240514 - DNA, 19 bp, Artificial sequence
  SiRNA target sequence
ctttttaaaaagtaaatta

SEQ ID NO: 240515 - DNA, 19 bp, Artificial sequence
  SiRNA target sequence
tttttaaaaagtaaattaa

SEQ ID NO: 240516 - DNA, 19 bp, Artificial sequence
  SiRNA target sequence
ttttaaaaagtaaattaat

SEQ ID NO: 240517 - DNA, 19 bp, Artificial sequence
  SiRNA target sequence
tttaaaaagtaaattaatg

SEQ ID NO: 240518 - DNA, 19 bp, Artificial sequence
  SiRNA target sequence
ttaaaaagtaaattaatgt

SEQ ID NO: 240519 - DNA, 19 bp, Artificial sequence
  SiRNA target sequence
taaaaagtaaattaatgta

SEQ ID NO: 240520 - DNA, 19 bp, Artificial sequence
  SiRNA target sequence
aaaaagtaaattaatgtag

SEQ ID NO: 240521 - DNA, 19 bp, Artificial sequence
  SiRNA target sequence
aaaagtaaattaatgtagt

SEQ ID NO: 240522 - DNA, 19 bp, Artificial sequence
  SiRNA target sequence
aaagtaaattaatgtagtt

SEQ ID NO: 240523 - DNA, 19 bp, Artificial sequence
  SiRNA target sequence
aagtaaattaatgtagtta

SEQ ID NO: 240524 - DNA, 19 bp, Artificial sequence
  SiRNA target sequence
agtaaattaatgtagttac

SEQ ID NO: 240525 - DNA, 19 bp, Artificial sequence
  SiRNA target sequence
gtaaattaatgtagttaca

SEQ ID NO: 240526 - DNA, 19 bp, Artificial sequence
  SiRNA target sequence
taaattaatgtagttacaa

SEQ ID NO: 240527 - DNA, 19 bp, Artificial sequence
  SiRNA target sequence
aaattaatgtagttacaaa

SEQ ID NO: 240528 - DNA, 19 bp, Artificial sequence
  SiRNA target sequence
aattaatgtagttacaaaa

SEQ ID NO: 240529 - DNA, 19 bp, Artificial sequence
  SiRNA target sequence
attaatgtagttacaaaag

SEQ ID NO: 240530 - DNA, 19 bp, Artificial sequence
  SiRNA target sequence
ttaatgtagttacaaaaga

SEQ ID NO: 240531 - DNA, 19 bp, Artificial sequence
  SiRNA target sequence
taatgtagttacaaaagac

SEQ ID NO: 240532 - DNA, 19 bp, Artificial sequence
  SiRNA target sequence
aatgtagttacaaaagaca

SEQ ID NO: 240533 - DNA, 19 bp, Artificial sequence
  SiRNA target sequence
atgtagttacaaaagacaa

SEQ ID NO: 240534 - DNA, 19 bp, Artificial sequence
  SiRNA target sequence
tgtagttacaaaagacaag

SEQ ID NO: 240535 - DNA, 19 bp, Artificial sequence
  SiRNA target sequence
gtagttacaaaagacaaga

SEQ ID NO: 240536 - DNA, 19 bp, Artificial sequence
  SiRNA target sequence
tagttacaaaagacaagat

SEQ ID NO: 240537 - DNA, 19 bp, Artificial sequence
  SiRNA target sequence
agttacaaaagacaagatc

SEQ ID NO: 240538 - DNA, 19 bp, Artificial sequence
  SiRNA target sequence
gttacaaaagacaagatca

SEQ ID NO: 240539 - DNA, 19 bp, Artificial sequence
  SiRNA target sequence
ttacaaaagacaagatcaa

SEQ ID NO: 240540 - DNA, 19 bp, Artificial sequence
  SiRNA target sequence
tacaaaagacaagatcaaa

SEQ ID NO: 240541 - DNA, 19 bp, Artificial sequence
  SiRNA target sequence
acaaaagacaagatcaaaa

SEQ ID NO: 240542 - DNA, 19 bp, Artificial sequence
  SiRNA target sequence
caaaagacaagatcaaaaa

SEQ ID NO: 240543 - DNA, 19 bp, Artificial sequence
  SiRNA target sequence
aaaagacaagatcaaaaaa

SEQ ID NO: 240544 - DNA, 19 bp, Artificial sequence
  SiRNA target sequence
aaagacaagatcaaaaaaa

SEQ ID NO: 240545 - DNA, 19 bp, Artificial sequence
  SiRNA target sequence
aagacaagatcaaaaaaaa

SEQ ID NO: 240546 - DNA, 19 bp, Artificial sequence
  SiRNA target sequence
agacaagatcaaaaaaaac

SEQ ID NO: 240547 - DNA, 19 bp, Artificial sequence
  SiRNA target sequence
gacaagatcaaaaaaaaca

SEQ ID NO: 240548 - DNA, 19 bp, Artificial sequence
  SiRNA target sequence
acaagatcaaaaaaaacaa

SEQ ID NO: 240549 - DNA, 19 bp, Artificial sequence
  SiRNA target sequence
caagatcaaaaaaaacaaa

SEQ ID NO: 240550 - DNA, 19 bp, Artificial sequence
  SiRNA target sequence
aagatcaaaaaaaacaaac

SEQ ID NO: 240551 - DNA, 19 bp, Artificial sequence
  SiRNA target sequence
agatcaaaaaaaacaaact

SEQ ID NO: 240552 - DNA, 19 bp, Artificial sequence
  SiRNA target sequence
gatcaaaaaaaacaaacta

SEQ ID NO: 240553 - DNA, 19 bp, Artificial sequence
  SiRNA target sequence
atcaaaaaaaacaaactac

SEQ ID NO: 240554 - DNA, 19 bp, Artificial sequence
  SiRNA target sequence
tcaaaaaaaacaaactact

SEQ ID NO: 240555 - DNA, 19 bp, Artificial sequence
  SiRNA target sequence
caaaaaaaacaaactacta

SEQ ID NO: 240556 - DNA, 19 bp, Artificial sequence
  SiRNA target sequence
aaaaaaaacaaactactac

SEQ ID NO: 240557 - DNA, 19 bp, Artificial sequence
  SiRNA target sequence
aaaaaaacaaactactacc

SEQ ID NO: 240558 - DNA, 19 bp, Artificial sequence
  SiRNA target sequence
aaaaaacaaactactaccg

SEQ ID NO: 240559 - DNA, 19 bp, Artificial sequence
  SiRNA target sequence
aaaaacaaactactaccgt

SEQ ID NO: 240560 - DNA, 19 bp, Artificial sequence
  SiRNA target sequence
aaaacaaactactaccgtc

SEQ ID NO: 240561 - DNA, 19 bp, Artificial sequence
  SiRNA target sequence
aaacaaactactaccgtca

SEQ ID NO: 240562 - DNA, 19 bp, Artificial sequence
  SiRNA target sequence
aacaaactactaccgtcaa

SEQ ID NO: 240563 - DNA, 19 bp, Artificial sequence
  SiRNA target sequence
acaaactactaccgtcaat

SEQ ID NO: 240564 - DNA, 19 bp, Artificial sequence
  SiRNA target sequence
caaactactaccgtcaatt

SEQ ID NO: 240565 - DNA, 19 bp, Artificial sequence
  SiRNA target sequence
aaactactaccgtcaattt

SEQ ID NO: 240566 - DNA, 19 bp, Artificial sequence
  SiRNA target sequence
aactactaccgtcaatttt

SEQ ID NO: 240567 - DNA, 19 bp, Artificial sequence
  SiRNA target sequence
actactaccgtcaatttta

SEQ ID NO: 240568 - DNA, 19 bp, Artificial sequence
  SiRNA target sequence
ctactaccgtcaattttat

SEQ ID NO: 240569 - DNA, 19 bp, Artificial sequence
  SiRNA target sequence
tactaccgtcaattttatc

SEQ ID NO: 240570 - DNA, 19 bp, Artificial sequence
  SiRNA target sequence
actaccgtcaattttatca

SEQ ID NO: 240571 - DNA, 19 bp, Artificial sequence
  SiRNA target sequence
ctaccgtcaattttatcat

SEQ ID NO: 240572 - DNA, 19 bp, Artificial sequence
  SiRNA target sequence
taccgtcaattttatcatg

SEQ ID NO: 240573 - DNA, 19 bp, Artificial sequence
  SiRNA target sequence
accgtcaattttatcatgc

SEQ ID NO: 240574 - DNA, 19 bp, Artificial sequence
  SiRNA target sequence
ccgtcaattttatcatgca

SEQ ID NO: 240575 - DNA, 19 bp, Artificial sequence
  SiRNA target sequence
cgtcaattttatcatgcaa

SEQ ID NO: 240576 - DNA, 19 bp, Artificial sequence
  SiRNA target sequence
gtcaattttatcatgcaaa

SEQ ID NO: 240577 - DNA, 19 bp, Artificial sequence
  SiRNA target sequence
tcaattttatcatgcaaac

SEQ ID NO: 240578 - DNA, 19 bp, Artificial sequence
  SiRNA target sequence
caattttatcatgcaaacc

SEQ ID NO: 240579 - DNA, 19 bp, Artificial sequence
  SiRNA target sequence
aattttatcatgcaaacct

SEQ ID NO: 240580 - DNA, 19 bp, Artificial sequence
  SiRNA target sequence
attttatcatgcaaacctg

SEQ ID NO: 240581 - DNA, 19 bp, Artificial sequence
  SiRNA target sequence
ttttatcatgcaaacctgc

SEQ ID NO: 240582 - DNA, 19 bp, Artificial sequence
  SiRNA target sequence
tttatcatgcaaacctgca

SEQ ID NO: 240583 - DNA, 19 bp, Artificial sequence
  SiRNA target sequence
ttatcatgcaaacctgcag

SEQ ID NO: 240584 - DNA, 19 bp, Artificial sequence
  SiRNA target sequence
tatcatgcaaacctgcagg

SEQ ID NO: 240585 - DNA, 19 bp, Artificial sequence
  SiRNA target sequence
atcatgcaaacctgcagga

SEQ ID NO: 240586 - DNA, 19 bp, Artificial sequence
  SiRNA target sequence
tcatgcaaacctgcaggaa

SEQ ID NO: 240587 - DNA, 19 bp, Artificial sequence
  SiRNA target sequence
catgcaaacctgcaggaag

SEQ ID NO: 240588 - DNA, 19 bp, Artificial sequence
  SiRNA target sequence
atgcaaacctgcaggaagt

SEQ ID NO: 240589 - DNA, 19 bp, Artificial sequence
  SiRNA target sequence
tgcaaacctgcaggaagta

SEQ ID NO: 240590 - DNA, 19 bp, Artificial sequence
  SiRNA target sequence
gcaaacctgcaggaagtat

SEQ ID NO: 240591 - DNA, 19 bp, Artificial sequence
  SiRNA target sequence
caaacctgcaggaagtata

SEQ ID NO: 240592 - DNA, 19 bp, Artificial sequence
  SiRNA target sequence
aaacctgcaggaagtatat

SEQ ID NO: 240593 - DNA, 19 bp, Artificial sequence
  SiRNA target sequence
aacctgcaggaagtatatt

SEQ ID NO: 240594 - DNA, 19 bp, Artificial sequence
  SiRNA target sequence
acctgcaggaagtatattt

SEQ ID NO: 240595 - DNA, 19 bp, Artificial sequence
  SiRNA target sequence
cctgcaggaagtatatttg

SEQ ID NO: 240596 - DNA, 19 bp, Artificial sequence
  SiRNA target sequence
ctgcaggaagtatatttgc

SEQ ID NO: 240597 - DNA, 19 bp, Artificial sequence
  SiRNA target sequence
tgcaggaagtatatttgct

SEQ ID NO: 240598 - DNA, 19 bp, Artificial sequence
  SiRNA target sequence
gcaggaagtatatttgcta

SEQ ID NO: 240599 - DNA, 19 bp, Artificial sequence
  SiRNA target sequence
caggaagtatatttgctaa

SEQ ID NO: 240600 - DNA, 19 bp, Artificial sequence
  SiRNA target sequence
aggaagtatatttgctaat

SEQ ID NO: 240601 - DNA, 19 bp, Artificial sequence
  SiRNA target sequence
ggaagtatatttgctaatt

SEQ ID NO: 240602 - DNA, 19 bp, Artificial sequence
  SiRNA target sequence
gaagtatatttgctaattc

SEQ ID NO: 240603 - DNA, 19 bp, Artificial sequence
  SiRNA target sequence
aagtatatttgctaattca

SEQ ID NO: 240604 - DNA, 19 bp, Artificial sequence
  SiRNA target sequence
agtatatttgctaattcat

SEQ ID NO: 240605 - DNA, 19 bp, Artificial sequence
  SiRNA target sequence
gtatatttgctaattcatc

SEQ ID NO: 240606 - DNA, 19 bp, Artificial sequence
  SiRNA target sequence
tatatttgctaattcatct

SEQ ID NO: 240607 - DNA, 19 bp, Artificial sequence
  SiRNA target sequence
atatttgctaattcatctt

SEQ ID NO: 240608 - DNA, 19 bp, Artificial sequence
  SiRNA target sequence
tatttgctaattcatcttt

SEQ ID NO: 240609 - DNA, 19 bp, Artificial sequence
  SiRNA target sequence
atttgctaattcatctttt

SEQ ID NO: 240610 - DNA, 19 bp, Artificial sequence
  SiRNA target sequence
tttgctaattcatctttta

SEQ ID NO: 240611 - DNA, 19 bp, Artificial sequence
  SiRNA target sequence
ttgctaattcatcttttat

SEQ ID NO: 240612 - DNA, 19 bp, Artificial sequence
  SiRNA target sequence
tgctaattcatcttttata

SEQ ID NO: 240613 - DNA, 19 bp, Artificial sequence
  SiRNA target sequence
gctaattcatcttttatat

SEQ ID NO: 240614 - DNA, 19 bp, Artificial sequence
  SiRNA target sequence
ctaattcatcttttatata

SEQ ID NO: 240615 - DNA, 19 bp, Artificial sequence
  SiRNA target sequence
taattcatcttttatataa

SEQ ID NO: 240616 - DNA, 19 bp, Artificial sequence
  SiRNA target sequence
aattcatcttttatataaa

SEQ ID NO: 240617 - DNA, 19 bp, Artificial sequence
  SiRNA target sequence
attcatcttttatataaat

SEQ ID NO: 240618 - DNA, 19 bp, Artificial sequence
  SiRNA target sequence
ttcatcttttatataaata

SEQ ID NO: 240619 - DNA, 19 bp, Artificial sequence
  SiRNA target sequence
tcatcttttatataaataa

SEQ ID NO: 240620 - DNA, 19 bp, Artificial sequence
  SiRNA target sequence
catcttttatataaataaa

SEQ ID NO: 240621 - DNA, 19 bp, Artificial sequence
  SiRNA target sequence
atcttttatataaataaaa

SEQ ID NO: 240622 - DNA, 19 bp, Artificial sequence
  SiRNA target sequence
tcttttatataaataaaag

SEQ ID NO: 240623 - DNA, 19 bp, Artificial sequence
  SiRNA target sequence
cttttatataaataaaagc

SEQ ID NO: 240624 - DNA, 19 bp, Artificial sequence
  SiRNA target sequence
ttttatataaataaaagct

SEQ ID NO: 240625 - DNA, 19 bp, Artificial sequence
  SiRNA target sequence
tttatataaataaaagcta

SEQ ID NO: 240626 - DNA, 19 bp, Artificial sequence
  SiRNA target sequence
ttatataaataaaagctac

SEQ ID NO: 240627 - DNA, 19 bp, Artificial sequence
  SiRNA target sequence
tatataaataaaagctaca

SEQ ID NO: 240628 - DNA, 19 bp, Artificial sequence
  SiRNA target sequence
atataaataaaagctacag

SEQ ID NO: 240629 - DNA, 19 bp, Artificial sequence
  SiRNA target sequence
tataaataaaagctacaga

SEQ ID NO: 240630 - DNA, 19 bp, Artificial sequence
  SiRNA target sequence
ataaataaaagctacagaa

SEQ ID NO: 240631 - DNA, 19 bp, Artificial sequence
  SiRNA target sequence
taaataaaagctacagaaa

SEQ ID NO: 240632 - DNA, 19 bp, Artificial sequence
  SiRNA target sequence
aaataaaagctacagaaat

SEQ ID NO: 240633 - DNA, 19 bp, Artificial sequence
  SiRNA target sequence
aataaaagctacagaaata

SEQ ID NO: 240634 - DNA, 19 bp, Artificial sequence
  SiRNA target sequence
ataaaagctacagaaataa

SEQ ID NO: 240635 - DNA, 19 bp, Artificial sequence
  SiRNA target sequence
taaaagctacagaaataat

SEQ ID NO: 240636 - DNA, 19 bp, Artificial sequence
  SiRNA target sequence
aaaagctacagaaataatc

SEQ ID NO: 240637 - DNA, 19 bp, Artificial sequence
  SiRNA target sequence
aaagctacagaaataatca

SEQ ID NO: 240638 - DNA, 19 bp, Artificial sequence
  SiRNA target sequence
aagctacagaaataatcat

SEQ ID NO: 240639 - DNA, 19 bp, Artificial sequence
  SiRNA target sequence
agctacagaaataatcatt

SEQ ID NO: 240640 - DNA, 19 bp, Artificial sequence
  SiRNA target sequence
gctacagaaataatcattg

SEQ ID NO: 240641 - DNA, 19 bp, Artificial sequence
  SiRNA target sequence
ctacagaaataatcattga

SEQ ID NO: 240642 - DNA, 19 bp, Artificial sequence
  SiRNA target sequence
tacagaaataatcattgaa

SEQ ID NO: 240643 - DNA, 19 bp, Artificial sequence
  SiRNA target sequence
acagaaataatcattgaaa

SEQ ID NO: 240644 - DNA, 19 bp, Artificial sequence
  SiRNA target sequence
cagaaataatcattgaaat

SEQ ID NO: 240645 - DNA, 19 bp, Artificial sequence
  SiRNA target sequence
agaaataatcattgaaatg

SEQ ID NO: 240646 - DNA, 19 bp, Artificial sequence
  SiRNA target sequence
gaaataatcattgaaatgg

SEQ ID NO: 240647 - DNA, 19 bp, Artificial sequence
  SiRNA target sequence
aaataatcattgaaatggc

SEQ ID NO: 240648 - DNA, 19 bp, Artificial sequence
  SiRNA target sequence
aataatcattgaaatggcg

SEQ ID NO: 240649 - DNA, 19 bp, Artificial sequence
  SiRNA target sequence
ataatcattgaaatggcgg

SEQ ID NO: 240650 - DNA, 19 bp, Artificial sequence
  SiRNA target sequence
taatcattgaaatggcggt

SEQ ID NO: 240651 - DNA, 19 bp, Artificial sequence
  SiRNA target sequence
aatcattgaaatggcggtg

SEQ ID NO: 240652 - DNA, 19 bp, Artificial sequence
  SiRNA target sequence
atcattgaaatggcggtga

SEQ ID NO: 240653 - DNA, 19 bp, Artificial sequence
  SiRNA target sequence
tcattgaaatggcggtgat

SEQ ID NO: 240654 - DNA, 19 bp, Artificial sequence
  SiRNA target sequence
cattgaaatggcggtgatt

SEQ ID NO: 240655 - DNA, 19 bp, Artificial sequence
  SiRNA target sequence
attgaaatggcggtgattg

SEQ ID NO: 240656 - DNA, 19 bp, Artificial sequence
  SiRNA target sequence
ttgaaatggcggtgattgt

SEQ ID NO: 240657 - DNA, 19 bp, Artificial sequence
  SiRNA target sequence
tgaaatggcggtgattgtg

SEQ ID NO: 240658 - DNA, 19 bp, Artificial sequence
  SiRNA target sequence
gaaatggcggtgattgtgg

SEQ ID NO: 240659 - DNA, 19 bp, Artificial sequence
  SiRNA target sequence
aaatggcggtgattgtgga

SEQ ID NO: 240660 - DNA, 19 bp, Artificial sequence
  SiRNA target sequence
aatggcggtgattgtggaa

SEQ ID NO: 240661 - DNA, 19 bp, Artificial sequence
  SiRNA target sequence
atggcggtgattgtggaaa

SEQ ID NO: 240662 - DNA, 19 bp, Artificial sequence
  SiRNA target sequence
tggcggtgattgtggaaaa

SEQ ID NO: 240663 - DNA, 19 bp, Artificial sequence
  SiRNA target sequence
ggcggtgattgtggaaaaa

SEQ ID NO: 240664 - DNA, 19 bp, Artificial sequence
  SiRNA target sequence
gcggtgattgtggaaaaat

SEQ ID NO: 240665 - DNA, 19 bp, Artificial sequence
  SiRNA target sequence
cggtgattgtggaaaaatt

SEQ ID NO: 240666 - DNA, 19 bp, Artificial sequence
  SiRNA target sequence
ggtgattgtggaaaaatta

SEQ ID NO: 240667 - DNA, 19 bp, Artificial sequence
  SiRNA target sequence
gtgattgtggaaaaattag

SEQ ID NO: 240668 - DNA, 19 bp, Artificial sequence
  SiRNA target sequence
tgattgtggaaaaattagg

SEQ ID NO: 240669 - DNA, 19 bp, Artificial sequence
  SiRNA target sequence
gattgtggaaaaattagga

SEQ ID NO: 240670 - DNA, 19 bp, Artificial sequence
  SiRNA target sequence
attgtggaaaaattaggaa

SEQ ID NO: 240671 - DNA, 19 bp, Artificial sequence
  SiRNA target sequence
ttgtggaaaaattaggaac

SEQ ID NO: 240672 - DNA, 19 bp, Artificial sequence
  SiRNA target sequence
tgtggaaaaattaggaaca

SEQ ID NO: 240673 - DNA, 19 bp, Artificial sequence
  SiRNA target sequence
gtggaaaaattaggaacaa

SEQ ID NO: 240674 - DNA, 19 bp, Artificial sequence
  SiRNA target sequence
tggaaaaattaggaacaat

SEQ ID NO: 240675 - DNA, 19 bp, Artificial sequence
  SiRNA target sequence
ggaaaaattaggaacaatt

SEQ ID NO: 240676 - DNA, 19 bp, Artificial sequence
  SiRNA target sequence
gaaaaattaggaacaattt

SEQ ID NO: 240677 - DNA, 19 bp, Artificial sequence
  SiRNA target sequence
aaaaattaggaacaatttc

SEQ ID NO: 240678 - DNA, 19 bp, Artificial sequence
  SiRNA target sequence
aaaattaggaacaatttct

SEQ ID NO: 240679 - DNA, 19 bp, Artificial sequence
  SiRNA target sequence
aaattaggaacaatttctt

SEQ ID NO: 240680 - DNA, 19 bp, Artificial sequence
  SiRNA target sequence
aattaggaacaatttcttt

SEQ ID NO: 240681 - DNA, 19 bp, Artificial sequence
  SiRNA target sequence
attaggaacaatttctttc

SEQ ID NO: 240682 - DNA, 19 bp, Artificial sequence
  SiRNA target sequence
ttaggaacaatttctttca

SEQ ID NO: 240683 - DNA, 19 bp, Artificial sequence
  SiRNA target sequence
taggaacaatttctttcat

SEQ ID NO: 240684 - DNA, 19 bp, Artificial sequence
  SiRNA target sequence
aggaacaatttctttcatt

SEQ ID NO: 240685 - DNA, 19 bp, Artificial sequence
  SiRNA target sequence
ggaacaatttctttcattt

SEQ ID NO: 240686 - DNA, 19 bp, Artificial sequence
  SiRNA target sequence
gaacaatttctttcatttc

SEQ ID NO: 240687 - DNA, 19 bp, Artificial sequence
  SiRNA target sequence
aacaatttctttcatttca

SEQ ID NO: 240688 - DNA, 19 bp, Artificial sequence
  SiRNA target sequence
acaatttctttcatttcat

SEQ ID NO: 240689 - DNA, 19 bp, Artificial sequence
  SiRNA target sequence
caatttctttcatttcatc

SEQ ID NO: 240690 - DNA, 19 bp, Artificial sequence
  SiRNA target sequence
aatttctttcatttcatct

SEQ ID NO: 240691 - DNA, 19 bp, Artificial sequence
  SiRNA target sequence
atttctttcatttcatctt

SEQ ID NO: 240692 - DNA, 19 bp, Artificial sequence
  SiRNA target sequence
tttctttcatttcatcttc

SEQ ID NO: 240693 - DNA, 19 bp, Artificial sequence
  SiRNA target sequence
ttctttcatttcatcttct

SEQ ID NO: 240694 - DNA, 19 bp, Artificial sequence
  SiRNA target sequence
tctttcatttcatcttctg

SEQ ID NO: 240695 - DNA, 19 bp, Artificial sequence
  SiRNA target sequence
ctttcatttcatcttctgt

SEQ ID NO: 240696 - DNA, 19 bp, Artificial sequence
  SiRNA target sequence
tttcatttcatcttctgta

SEQ ID NO: 240697 - DNA, 19 bp, Artificial sequence
  SiRNA target sequence
ttcatttcatcttctgtac

SEQ ID NO: 240698 - DNA, 19 bp, Artificial sequence
  SiRNA target sequence
tcatttcatcttctgtaca

SEQ ID NO: 240699 - DNA, 19 bp, Artificial sequence
  SiRNA target sequence
catttcatcttctgtacaa

SEQ ID NO: 240700 - DNA, 19 bp, Artificial sequence
  SiRNA target sequence
atttcatcttctgtacaag

SEQ ID NO: 240701 - DNA, 19 bp, Artificial sequence
  SiRNA target sequence
tttcatcttctgtacaagc

SEQ ID NO: 240702 - DNA, 19 bp, Artificial sequence
  SiRNA target sequence
ttcatcttctgtacaagca

SEQ ID NO: 240703 - DNA, 19 bp, Artificial sequence
  SiRNA target sequence
tcatcttctgtacaagcat

SEQ ID NO: 240704 - DNA, 19 bp, Artificial sequence
  SiRNA target sequence
catcttctgtacaagcatg

SEQ ID NO: 240705 - DNA, 19 bp, Artificial sequence
  SiRNA target sequence
atcttctgtacaagcatga

SEQ ID NO: 240706 - DNA, 19 bp, Artificial sequence
  SiRNA target sequence
tcttctgtacaagcatgat

SEQ ID NO: 240707 - DNA, 19 bp, Artificial sequence
  SiRNA target sequence
cttctgtacaagcatgatt

SEQ ID NO: 240708 - DNA, 19 bp, Artificial sequence
  SiRNA target sequence
ttctgtacaagcatgattg

SEQ ID NO: 240709 - DNA, 19 bp, Artificial sequence
  SiRNA target sequence
tctgtacaagcatgattgg

SEQ ID NO: 240710 - DNA, 19 bp, Artificial sequence
  SiRNA target sequence
ctgtacaagcatgattggc

SEQ ID NO: 240711 - DNA, 19 bp, Artificial sequence
  SiRNA target sequence
tgtacaagcatgattggct

SEQ ID NO: 240712 - DNA, 19 bp, Artificial sequence
  SiRNA target sequence
gtacaagcatgattggcta

SEQ ID NO: 240713 - DNA, 19 bp, Artificial sequence
  SiRNA target sequence
tacaagcatgattggctaa

SEQ ID NO: 240714 - DNA, 19 bp, Artificial sequence
  SiRNA target sequence
acaagcatgattggctaac

SEQ ID NO: 240715 - DNA, 19 bp, Artificial sequence
  SiRNA target sequence
caagcatgattggctaacg

SEQ ID NO: 240716 - DNA, 19 bp, Artificial sequence
  SiRNA target sequence
aagcatgattggctaacgc

SEQ ID NO: 240717 - DNA, 19 bp, Artificial sequence
  SiRNA target sequence
agcatgattggctaacgca

SEQ ID NO: 240718 - DNA, 19 bp, Artificial sequence
  SiRNA target sequence
gcatgattggctaacgcat

SEQ ID NO: 240719 - DNA, 19 bp, Artificial sequence
  SiRNA target sequence
catgattggctaacgcata

SEQ ID NO: 240720 - DNA, 19 bp, Artificial sequence
  SiRNA target sequence
atgattggctaacgcatat

SEQ ID NO: 240721 - DNA, 19 bp, Artificial sequence
  SiRNA target sequence
tgattggctaacgcatata

SEQ ID NO: 240722 - DNA, 19 bp, Artificial sequence
  SiRNA target sequence
gattggctaacgcatataa

SEQ ID NO: 240723 - DNA, 19 bp, Artificial sequence
  SiRNA target sequence
attggctaacgcatataaa

SEQ ID NO: 240724 - DNA, 19 bp, Artificial sequence
  SiRNA target sequence
ttggctaacgcatataaag

SEQ ID NO: 240725 - DNA, 19 bp, Artificial sequence
  SiRNA target sequence
tggctaacgcatataaagc

SEQ ID NO: 240726 - DNA, 19 bp, Artificial sequence
  SiRNA target sequence
ggctaacgcatataaagca

SEQ ID NO: 240727 - DNA, 19 bp, Artificial sequence
  SiRNA target sequence
gctaacgcatataaagcaa

SEQ ID NO: 240728 - DNA, 19 bp, Artificial sequence
  SiRNA target sequence
ctaacgcatataaagcaaa

SEQ ID NO: 240729 - DNA, 19 bp, Artificial sequence
  SiRNA target sequence
taacgcatataaagcaaaa

SEQ ID NO: 240730 - DNA, 19 bp, Artificial sequence
  SiRNA target sequence
aacgcatataaagcaaaac

SEQ ID NO: 240731 - DNA, 19 bp, Artificial sequence
  SiRNA target sequence
acgcatataaagcaaaacc

SEQ ID NO: 240732 - DNA, 19 bp, Artificial sequence
  SiRNA target sequence
cgcatataaagcaaaacca

SEQ ID NO: 240733 - DNA, 19 bp, Artificial sequence
  SiRNA target sequence
gcatataaagcaaaaccaa

SEQ ID NO: 240734 - DNA, 19 bp, Artificial sequence
  SiRNA target sequence
catataaagcaaaaccaac

SEQ ID NO: 240735 - DNA, 19 bp, Artificial sequence
  SiRNA target sequence
atataaagcaaaaccaact

SEQ ID NO: 240736 - DNA, 19 bp, Artificial sequence
  SiRNA target sequence
tataaagcaaaaccaacta

SEQ ID NO: 240737 - DNA, 19 bp, Artificial sequence
  SiRNA target sequence
ataaagcaaaaccaactac

SEQ ID NO: 240738 - DNA, 19 bp, Artificial sequence
  SiRNA target sequence
taaagcaaaaccaactact

SEQ ID NO: 240739 - DNA, 19 bp, Artificial sequence
  SiRNA target sequence
aaagcaaaaccaactacta

SEQ ID NO: 240740 - DNA, 19 bp, Artificial sequence
  SiRNA target sequence
aagcaaaaccaactactag

SEQ ID NO: 240741 - DNA, 19 bp, Artificial sequence
  SiRNA target sequence
agcaaaaccaactactaga

SEQ ID NO: 240742 - DNA, 19 bp, Artificial sequence
  SiRNA target sequence
gcaaaaccaactactagag

SEQ ID NO: 240743 - DNA, 19 bp, Artificial sequence
  SiRNA target sequence
caaaaccaactactagagt

SEQ ID NO: 240744 - DNA, 19 bp, Artificial sequence
  SiRNA target sequence
aaaaccaactactagagta

SEQ ID NO: 240745 - DNA, 19 bp, Artificial sequence
  SiRNA target sequence
aaaccaactactagagtac

SEQ ID NO: 240746 - DNA, 19 bp, Artificial sequence
  SiRNA target sequence
aaccaactactagagtact

SEQ ID NO: 240747 - DNA, 19 bp, Artificial sequence
  SiRNA target sequence
accaactactagagtactc

SEQ ID NO: 240748 - DNA, 19 bp, Artificial sequence
  SiRNA target sequence
ccaactactagagtactcc

SEQ ID NO: 240749 - DNA, 19 bp, Artificial sequence
  SiRNA target sequence
caactactagagtactcca

SEQ ID NO: 240750 - DNA, 19 bp, Artificial sequence
  SiRNA target sequence
aactactagagtactccac

SEQ ID NO: 240751 - DNA, 19 bp, Artificial sequence
  SiRNA target sequence
actactagagtactccaca

SEQ ID NO: 240752 - DNA, 19 bp, Artificial sequence
  SiRNA target sequence
ctactagagtactccacaa

SEQ ID NO: 240753 - DNA, 19 bp, Artificial sequence
  SiRNA target sequence
tactagagtactccacaac

SEQ ID NO: 240754 - DNA, 19 bp, Artificial sequence
  SiRNA target sequence
actagagtactccacaact

SEQ ID NO: 240755 - DNA, 19 bp, Artificial sequence
  SiRNA target sequence
ctagagtactccacaactc

SEQ ID NO: 240756 - DNA, 19 bp, Artificial sequence
  SiRNA target sequence
tagagtactccacaactcc

SEQ ID NO: 240757 - DNA, 19 bp, Artificial sequence
  SiRNA target sequence
agagtactccacaactccg

SEQ ID NO: 240758 - DNA, 19 bp, Artificial sequence
  SiRNA target sequence
gagtactccacaactccga

SEQ ID NO: 240759 - DNA, 19 bp, Artificial sequence
  SiRNA target sequence
agtactccacaactccgat

SEQ ID NO: 240760 - DNA, 19 bp, Artificial sequence
  SiRNA target sequence
gtactccacaactccgata

SEQ ID NO: 240761 - DNA, 19 bp, Artificial sequence
  SiRNA target sequence
tactccacaactccgataa

SEQ ID NO: 240762 - DNA, 19 bp, Artificial sequence
  SiRNA target sequence
actccacaactccgataag

SEQ ID NO: 240763 - DNA, 19 bp, Artificial sequence
  SiRNA target sequence
ctccacaactccgataaga

SEQ ID NO: 240764 - DNA, 19 bp, Artificial sequence
  SiRNA target sequence
tccacaactccgataagat

SEQ ID NO: 240765 - DNA, 19 bp, Artificial sequence
  SiRNA target sequence
ccacaactccgataagatg

SEQ ID NO: 240766 - DNA, 19 bp, Artificial sequence
  SiRNA target sequence
cacaactccgataagatgt

SEQ ID NO: 240767 - DNA, 19 bp, Artificial sequence
  SiRNA target sequence
acaactccgataagatgta

SEQ ID NO: 240768 - DNA, 19 bp, Artificial sequence
  SiRNA target sequence
caactccgataagatgtaa

SEQ ID NO: 240769 - DNA, 19 bp, Artificial sequence
  SiRNA target sequence
aactccgataagatgtaac

SEQ ID NO: 240770 - DNA, 19 bp, Artificial sequence
  SiRNA target sequence
actccgataagatgtaaca

SEQ ID NO: 240771 - DNA, 19 bp, Artificial sequence
  SiRNA target sequence
ctccgataagatgtaacat

SEQ ID NO: 240772 - DNA, 19 bp, Artificial sequence
  SiRNA target sequence
tccgataagatgtaacata

SEQ ID NO: 240773 - DNA, 19 bp, Artificial sequence
  SiRNA target sequence
ccgataagatgtaacataa

SEQ ID NO: 240774 - DNA, 19 bp, Artificial sequence
  SiRNA target sequence
cgataagatgtaacataaa

SEQ ID NO: 240775 - DNA, 19 bp, Artificial sequence
  SiRNA target sequence
gataagatgtaacataaag

SEQ ID NO: 240776 - DNA, 19 bp, Artificial sequence
  SiRNA target sequence
ataagatgtaacataaagt

SEQ ID NO: 240777 - DNA, 19 bp, Artificial sequence
  SiRNA target sequence
taagatgtaacataaagta

SEQ ID NO: 240778 - DNA, 19 bp, Artificial sequence
  SiRNA target sequence
aagatgtaacataaagtac

SEQ ID NO: 240779 - DNA, 19 bp, Artificial sequence
  SiRNA target sequence
agatgtaacataaagtact

SEQ ID NO: 240780 - DNA, 19 bp, Artificial sequence
  SiRNA target sequence
gatgtaacataaagtactt

SEQ ID NO: 240781 - DNA, 19 bp, Artificial sequence
  SiRNA target sequence
atgtaacataaagtactta

SEQ ID NO: 240782 - DNA, 19 bp, Artificial sequence
  SiRNA target sequence
tgtaacataaagtacttat

SEQ ID NO: 240783 - DNA, 19 bp, Artificial sequence
  SiRNA target sequence
gtaacataaagtacttatc

SEQ ID NO: 240784 - DNA, 19 bp, Artificial sequence
  SiRNA target sequence
taacataaagtacttatcc

SEQ ID NO: 240785 - DNA, 19 bp, Artificial sequence
  SiRNA target sequence
aacataaagtacttatcca

SEQ ID NO: 240786 - DNA, 19 bp, Artificial sequence
  SiRNA target sequence
acataaagtacttatccac

SEQ ID NO: 240787 - DNA, 19 bp, Artificial sequence
  SiRNA target sequence
cataaagtacttatccact

SEQ ID NO: 240788 - DNA, 19 bp, Artificial sequence
  SiRNA target sequence
ataaagtacttatccactc

SEQ ID NO: 240789 - DNA, 19 bp, Artificial sequence
  SiRNA target sequence
taaagtacttatccactca

SEQ ID NO: 240790 - DNA, 19 bp, Artificial sequence
  SiRNA target sequence
aaagtacttatccactcac

SEQ ID NO: 240791 - DNA, 19 bp, Artificial sequence
  SiRNA target sequence
aagtacttatccactcact

SEQ ID NO: 240792 - DNA, 19 bp, Artificial sequence
  SiRNA target sequence
agtacttatccactcactg

SEQ ID NO: 240793 - DNA, 19 bp, Artificial sequence
  SiRNA target sequence
gtacttatccactcactgt

SEQ ID NO: 240794 - DNA, 19 bp, Artificial sequence
  SiRNA target sequence
tacttatccactcactgta

SEQ ID NO: 240795 - DNA, 19 bp, Artificial sequence
  SiRNA target sequence
acttatccactcactgtac

SEQ ID NO: 240796 - DNA, 19 bp, Artificial sequence
  SiRNA target sequence
cttatccactcactgtaca

SEQ ID NO: 240797 - DNA, 19 bp, Artificial sequence
  SiRNA target sequence
ttatccactcactgtacat

SEQ ID NO: 240798 - DNA, 19 bp, Artificial sequence
  SiRNA target sequence
tatccactcactgtacata

SEQ ID NO: 240799 - DNA, 19 bp, Artificial sequence
  SiRNA target sequence
atccactcactgtacatat

SEQ ID NO: 240800 - DNA, 19 bp, Artificial sequence
  SiRNA target sequence
tccactcactgtacatata

SEQ ID NO: 240801 - DNA, 19 bp, Artificial sequence
  SiRNA target sequence
ccactcactgtacatatat

SEQ ID NO: 240802 - DNA, 19 bp, Artificial sequence
  SiRNA target sequence
cactcactgtacatatata

SEQ ID NO: 240803 - DNA, 19 bp, Artificial sequence
  SiRNA target sequence
actcactgtacatatataa

SEQ ID NO: 240804 - DNA, 19 bp, Artificial sequence
  SiRNA target sequence
ctcactgtacatatataaa

SEQ ID NO: 240805 - DNA, 19 bp, Artificial sequence
  SiRNA target sequence
tcactgtacatatataaaa

SEQ ID NO: 240806 - DNA, 19 bp, Artificial sequence
  SiRNA target sequence
cactgtacatatataaaaa

SEQ ID NO: 240807 - DNA, 19 bp, Artificial sequence
  SiRNA target sequence
actgtacatatataaaaaa

SEQ ID NO: 240808 - DNA, 19 bp, Artificial sequence
  SiRNA target sequence
ctgtacatatataaaaaag

SEQ ID NO: 240809 - DNA, 19 bp, Artificial sequence
  SiRNA target sequence
tgtacatatataaaaaagg

SEQ ID NO: 240810 - DNA, 19 bp, Artificial sequence
  SiRNA target sequence
gtacatatataaaaaagga

SEQ ID NO: 240811 - DNA, 19 bp, Artificial sequence
  SiRNA target sequence
tacatatataaaaaaggag

SEQ ID NO: 240812 - DNA, 19 bp, Artificial sequence
  SiRNA target sequence
acatatataaaaaaggaga

SEQ ID NO: 240813 - DNA, 19 bp, Artificial sequence
  SiRNA target sequence
catatataaaaaaggagat

SEQ ID NO: 240814 - DNA, 19 bp, Artificial sequence
  SiRNA target sequence
atatataaaaaaggagata

SEQ ID NO: 240815 - DNA, 19 bp, Artificial sequence
  SiRNA target sequence
tatataaaaaaggagataa

SEQ ID NO: 240816 - DNA, 19 bp, Artificial sequence
  SiRNA target sequence
atataaaaaaggagataag

SEQ ID NO: 240817 - DNA, 19 bp, Artificial sequence
  SiRNA target sequence
tataaaaaaggagataagc

SEQ ID NO: 240818 - DNA, 19 bp, Artificial sequence
  SiRNA target sequence
ataaaaaaggagataagcc

SEQ ID NO: 240819 - DNA, 19 bp, Artificial sequence
  SiRNA target sequence
taaaaaaggagataagccc

SEQ ID NO: 240820 - DNA, 19 bp, Artificial sequence
  SiRNA target sequence
aaaaaaggagataagccca

SEQ ID NO: 240821 - DNA, 19 bp, Artificial sequence
  SiRNA target sequence
aaaaaggagataagcccat

SEQ ID NO: 240822 - DNA, 19 bp, Artificial sequence
  SiRNA target sequence
aaaaggagataagcccatc

SEQ ID NO: 240823 - DNA, 19 bp, Artificial sequence
  SiRNA target sequence
aaaggagataagcccatca

SEQ ID NO: 240824 - DNA, 19 bp, Artificial sequence
  SiRNA target sequence
aaggagataagcccatcaa

SEQ ID NO: 240825 - DNA, 19 bp, Artificial sequence
  SiRNA target sequence
aggagataagcccatcaag

SEQ ID NO: 240826 - DNA, 19 bp, Artificial sequence
  SiRNA target sequence
ggagataagcccatcaagc

SEQ ID NO: 240827 - DNA, 19 bp, Artificial sequence
  SiRNA target sequence
gagataagcccatcaagct

SEQ ID NO: 240828 - DNA, 19 bp, Artificial sequence
  SiRNA target sequence
agataagcccatcaagctt

SEQ ID NO: 240829 - DNA, 19 bp, Artificial sequence
  SiRNA target sequence
gataagcccatcaagcttc

SEQ ID NO: 240830 - DNA, 19 bp, Artificial sequence
  SiRNA target sequence
ataagcccatcaagcttct

SEQ ID NO: 240831 - DNA, 19 bp, Artificial sequence
  SiRNA target sequence
taagcccatcaagcttcta

SEQ ID NO: 240832 - DNA, 19 bp, Artificial sequence
  SiRNA target sequence
aagcccatcaagcttctaa

SEQ ID NO: 240833 - DNA, 19 bp, Artificial sequence
  SiRNA target sequence
agcccatcaagcttctaac

SEQ ID NO: 240834 - DNA, 19 bp, Artificial sequence
  SiRNA target sequence
gcccatcaagcttctaact

SEQ ID NO: 240835 - DNA, 19 bp, Artificial sequence
  SiRNA target sequence
cccatcaagcttctaactg

SEQ ID NO: 240836 - DNA, 19 bp, Artificial sequence
  SiRNA target sequence
ccatcaagcttctaactga

SEQ ID NO: 240837 - DNA, 19 bp, Artificial sequence
  SiRNA target sequence
catcaagcttctaactgac

SEQ ID NO: 240838 - DNA, 19 bp, Artificial sequence
  SiRNA target sequence
atcaagcttctaactgaca

SEQ ID NO: 240839 - DNA, 19 bp, Artificial sequence
  SiRNA target sequence
tcaagcttctaactgacat

SEQ ID NO: 240840 - DNA, 19 bp, Artificial sequence
  SiRNA target sequence
caagcttctaactgacatc

SEQ ID NO: 240841 - DNA, 19 bp, Artificial sequence
  SiRNA target sequence
aagcttctaactgacatct

SEQ ID NO: 240842 - DNA, 19 bp, Artificial sequence
  SiRNA target sequence
agcttctaactgacatctt

SEQ ID NO: 240843 - DNA, 19 bp, Artificial sequence
  SiRNA target sequence
gcttctaactgacatctta

SEQ ID NO: 240844 - DNA, 19 bp, Artificial sequence
  SiRNA target sequence
cttctaactgacatcttac

SEQ ID NO: 240845 - DNA, 19 bp, Artificial sequence
  SiRNA target sequence
ttctaactgacatcttacc

SEQ ID NO: 240846 - DNA, 19 bp, Artificial sequence
  SiRNA target sequence
tctaactgacatcttacca

SEQ ID NO: 240847 - DNA, 19 bp, Artificial sequence
  SiRNA target sequence
ctaactgacatcttaccat

SEQ ID NO: 240848 - DNA, 19 bp, Artificial sequence
  SiRNA target sequence
taactgacatcttaccatc

SEQ ID NO: 240849 - DNA, 19 bp, Artificial sequence
  SiRNA target sequence
aactgacatcttaccatca

SEQ ID NO: 240850 - DNA, 19 bp, Artificial sequence
  SiRNA target sequence
actgacatcttaccatcac

SEQ ID NO: 240851 - DNA, 19 bp, Artificial sequence
  SiRNA target sequence
ctgacatcttaccatcaca

SEQ ID NO: 240852 - DNA, 19 bp, Artificial sequence
  SiRNA target sequence
tgacatcttaccatcacaa

SEQ ID NO: 240853 - DNA, 19 bp, Artificial sequence
  SiRNA target sequence
gacatcttaccatcacaaa

SEQ ID NO: 240854 - DNA, 19 bp, Artificial sequence
  SiRNA target sequence
acatcttaccatcacaaaa

SEQ ID NO: 240855 - DNA, 19 bp, Artificial sequence
  SiRNA target sequence
catcttaccatcacaaaaa

SEQ ID NO: 240856 - DNA, 19 bp, Artificial sequence
  SiRNA target sequence
atcttaccatcacaaaaaa

SEQ ID NO: 240857 - DNA, 19 bp, Artificial sequence
  SiRNA target sequence
tcttaccatcacaaaaaat

SEQ ID NO: 240858 - DNA, 19 bp, Artificial sequence
  SiRNA target sequence
cttaccatcacaaaaaata

SEQ ID NO: 240859 - DNA, 19 bp, Artificial sequence
  SiRNA target sequence
ttaccatcacaaaaaatat

SEQ ID NO: 240860 - DNA, 19 bp, Artificial sequence
  SiRNA target sequence
taccatcacaaaaaatatc

SEQ ID NO: 240861 - DNA, 19 bp, Artificial sequence
  SiRNA target sequence
accatcacaaaaaatatct

SEQ ID NO: 240862 - DNA, 19 bp, Artificial sequence
  SiRNA target sequence
ccatcacaaaaaatatcta

SEQ ID NO: 240863 - DNA, 19 bp, Artificial sequence
  SiRNA target sequence
catcacaaaaaatatctag

SEQ ID NO: 240864 - DNA, 19 bp, Artificial sequence
  SiRNA target sequence
atcacaaaaaatatctagt

SEQ ID NO: 240865 - DNA, 19 bp, Artificial sequence
  SiRNA target sequence
tcacaaaaaatatctagtg

SEQ ID NO: 240866 - DNA, 19 bp, Artificial sequence
  SiRNA target sequence
cacaaaaaatatctagtgc

SEQ ID NO: 240867 - DNA, 19 bp, Artificial sequence
  SiRNA target sequence
acaaaaaatatctagtgcc

SEQ ID NO: 240868 - DNA, 19 bp, Artificial sequence
  SiRNA target sequence
caaaaaatatctagtgccc

SEQ ID NO: 240869 - DNA, 19 bp, Artificial sequence
  SiRNA target sequence
aaaaaatatctagtgccca

SEQ ID NO: 240870 - DNA, 19 bp, Artificial sequence
  SiRNA target sequence
aaaaatatctagtgcccat

SEQ ID NO: 240871 - DNA, 19 bp, Artificial sequence
  SiRNA target sequence
aaaatatctagtgcccatt

SEQ ID NO: 240872 - DNA, 19 bp, Artificial sequence
  SiRNA target sequence
aaatatctagtgcccattg

SEQ ID NO: 240873 - DNA, 19 bp, Artificial sequence
  SiRNA target sequence
aatatctagtgcccattgt

SEQ ID NO: 240874 - DNA, 19 bp, Artificial sequence
  SiRNA target sequence
atatctagtgcccattgtg

SEQ ID NO: 240875 - DNA, 19 bp, Artificial sequence
  SiRNA target sequence
tatctagtgcccattgtga

SEQ ID NO: 240876 - DNA, 19 bp, Artificial sequence
  SiRNA target sequence
atctagtgcccattgtgat

SEQ ID NO: 240877 - DNA, 19 bp, Artificial sequence
  SiRNA target sequence
tctagtgcccattgtgatc

SEQ ID NO: 240878 - DNA, 19 bp, Artificial sequence
  SiRNA target sequence
ctagtgcccattgtgatcc

SEQ ID NO: 240879 - DNA, 19 bp, Artificial sequence
  SiRNA target sequence
tagtgcccattgtgatcct

SEQ ID NO: 240880 - DNA, 19 bp, Artificial sequence
  SiRNA target sequence
agtgcccattgtgatcctt

SEQ ID NO: 240881 - DNA, 19 bp, Artificial sequence
  SiRNA target sequence
gtgcccattgtgatccttt

SEQ ID NO: 240882 - DNA, 19 bp, Artificial sequence
  SiRNA target sequence
tgcccattgtgatcctttt

SEQ ID NO: 240883 - DNA, 19 bp, Artificial sequence
  SiRNA target sequence
gcccattgtgatccttttt

SEQ ID NO: 240884 - DNA, 19 bp, Artificial sequence
  SiRNA target sequence
cccattgtgatcctttttg

SEQ ID NO: 240885 - DNA, 19 bp, Artificial sequence
  SiRNA target sequence
ccattgtgatcctttttgg

SEQ ID NO: 240886 - DNA, 19 bp, Artificial sequence
  SiRNA target sequence
cattgtgatcctttttgga

SEQ ID NO: 240887 - DNA, 19 bp, Artificial sequence
  SiRNA target sequence
attgtgatcctttttggat

SEQ ID NO: 240888 - DNA, 19 bp, Artificial sequence
  SiRNA target sequence
ttgtgatcctttttggatt

SEQ ID NO: 240889 - DNA, 19 bp, Artificial sequence
  SiRNA target sequence
tgtgatcctttttggattt

SEQ ID NO: 240890 - DNA, 19 bp, Artificial sequence
  SiRNA target sequence
gtgatcctttttggatttt

SEQ ID NO: 240891 - DNA, 19 bp, Artificial sequence
  SiRNA target sequence
tgatcctttttggatttta

SEQ ID NO: 240892 - DNA, 19 bp, Artificial sequence
  SiRNA target sequence
gatcctttttggattttat

SEQ ID NO: 240893 - DNA, 19 bp, Artificial sequence
  SiRNA target sequence
atcctttttggattttata

SEQ ID NO: 240894 - DNA, 19 bp, Artificial sequence
  SiRNA target sequence
tcctttttggattttatat

SEQ ID NO: 240895 - DNA, 19 bp, Artificial sequence
  SiRNA target sequence
cctttttggattttatatt

SEQ ID NO: 240896 - DNA, 19 bp, Artificial sequence
  SiRNA target sequence
ctttttggattttatattc

SEQ ID NO: 240897 - DNA, 19 bp, Artificial sequence
  SiRNA target sequence
tttttggattttatattca

SEQ ID NO: 240898 - DNA, 19 bp, Artificial sequence
  SiRNA target sequence
ttttggattttatattcaa

SEQ ID NO: 240899 - DNA, 19 bp, Artificial sequence
  SiRNA target sequence
tttggattttatattcaaa

SEQ ID NO: 240900 - DNA, 19 bp, Artificial sequence
  SiRNA target sequence
ttggattttatattcaaat

SEQ ID NO: 240901 - DNA, 19 bp, Artificial sequence
  SiRNA target sequence
tggattttatattcaaatg

SEQ ID NO: 240902 - DNA, 19 bp, Artificial sequence
  SiRNA target sequence
ggattttatattcaaatgg

SEQ ID NO: 240903 - DNA, 19 bp, Artificial sequence
  SiRNA target sequence
gattttatattcaaatgga

SEQ ID NO: 240904 - DNA, 19 bp, Artificial sequence
  SiRNA target sequence
attttatattcaaatggaa

SEQ ID NO: 240905 - DNA, 19 bp, Artificial sequence
  SiRNA target sequence
ttttatattcaaatggaat

SEQ ID NO: 240906 - DNA, 19 bp, Artificial sequence
  SiRNA target sequence
tttatattcaaatggaatt

SEQ ID NO: 240907 - DNA, 19 bp, Artificial sequence
  SiRNA target sequence
ttatattcaaatggaatta

SEQ ID NO: 240908 - DNA, 19 bp, Artificial sequence
  SiRNA target sequence
tatattcaaatggaattaa

SEQ ID NO: 240909 - DNA, 19 bp, Artificial sequence
  SiRNA target sequence
atattcaaatggaattaaa

SEQ ID NO: 240910 - DNA, 19 bp, Artificial sequence
  SiRNA target sequence
tattcaaatggaattaaaa

SEQ ID NO: 240911 - DNA, 19 bp, Artificial sequence
  SiRNA target sequence
attcaaatggaattaaaag

SEQ ID NO: 240912 - DNA, 19 bp, Artificial sequence
  SiRNA target sequence
ttcaaatggaattaaaaga

SEQ ID NO: 240913 - DNA, 19 bp, Artificial sequence
  SiRNA target sequence
tcaaatggaattaaaagag

SEQ ID NO: 240914 - DNA, 19 bp, Artificial sequence
  SiRNA target sequence
caaatggaattaaaagaga

SEQ ID NO: 240915 - DNA, 19 bp, Artificial sequence
  SiRNA target sequence
aaatggaattaaaagagaa

SEQ ID NO: 240916 - DNA, 19 bp, Artificial sequence
  SiRNA target sequence
aatggaattaaaagagaac

SEQ ID NO: 240917 - DNA, 19 bp, Artificial sequence
  SiRNA target sequence
atggaattaaaagagaacc

SEQ ID NO: 240918 - DNA, 19 bp, Artificial sequence
  SiRNA target sequence
tggaattaaaagagaacca

SEQ ID NO: 240919 - DNA, 19 bp, Artificial sequence
  SiRNA target sequence
ggaattaaaagagaaccaa

SEQ ID NO: 240920 - DNA, 19 bp, Artificial sequence
  SiRNA target sequence
gaattaaaagagaaccaat

SEQ ID NO: 240921 - DNA, 19 bp, Artificial sequence
  SiRNA target sequence
aattaaaagagaaccaatt

SEQ ID NO: 240922 - DNA, 19 bp, Artificial sequence
  SiRNA target sequence
attaaaagagaaccaatta

SEQ ID NO: 240923 - DNA, 19 bp, Artificial sequence
  SiRNA target sequence
ttaaaagagaaccaattag

SEQ ID NO: 240924 - DNA, 19 bp, Artificial sequence
  SiRNA target sequence
taaaagagaaccaattaga

SEQ ID NO: 240925 - DNA, 19 bp, Artificial sequence
  SiRNA target sequence
aaaagagaaccaattagaa

SEQ ID NO: 240926 - DNA, 19 bp, Artificial sequence
  SiRNA target sequence
aaagagaaccaattagaaa

SEQ ID NO: 240927 - DNA, 19 bp, Artificial sequence
  SiRNA target sequence
aagagaaccaattagaaaa

SEQ ID NO: 240928 - DNA, 19 bp, Artificial sequence
  SiRNA target sequence
agagaaccaattagaaaaa

SEQ ID NO: 240929 - DNA, 19 bp, Artificial sequence
  SiRNA target sequence
gagaaccaattagaaaaaa

SEQ ID NO: 240930 - DNA, 19 bp, Artificial sequence
  SiRNA target sequence
agaaccaattagaaaaaaa

SEQ ID NO: 240931 - DNA, 19 bp, Artificial sequence
  SiRNA target sequence
gaaccaattagaaaaaaaa

SEQ ID NO: 240932 - DNA, 19 bp, Artificial sequence
  SiRNA target sequence
aaccaattagaaaaaaaat

SEQ ID NO: 240933 - DNA, 19 bp, Artificial sequence
  SiRNA target sequence
accaattagaaaaaaaatg

SEQ ID NO: 240934 - DNA, 19 bp, Artificial sequence
  SiRNA target sequence
ccaattagaaaaaaaatgc

SEQ ID NO: 240935 - DNA, 19 bp, Artificial sequence
  SiRNA target sequence
caattagaaaaaaaatgcc

SEQ ID NO: 240936 - DNA, 19 bp, Artificial sequence
  SiRNA target sequence
aattagaaaaaaaatgcca

SEQ ID NO: 240937 - DNA, 19 bp, Artificial sequence
  SiRNA target sequence
attagaaaaaaaatgccaa

SEQ ID NO: 240938 - DNA, 19 bp, Artificial sequence
  SiRNA target sequence
ttagaaaaaaaatgccaat

SEQ ID NO: 240939 - DNA, 19 bp, Artificial sequence
  SiRNA target sequence
tagaaaaaaaatgccaata

SEQ ID NO: 240940 - DNA, 19 bp, Artificial sequence
  SiRNA target sequence
agaaaaaaaatgccaataa

SEQ ID NO: 240941 - DNA, 19 bp, Artificial sequence
  SiRNA target sequence
gaaaaaaaatgccaataaa

SEQ ID NO: 240942 - DNA, 19 bp, Artificial sequence
  SiRNA target sequence
aaaaaaaatgccaataaaa

SEQ ID NO: 240943 - DNA, 19 bp, Artificial sequence
  SiRNA target sequence
aaaaaaatgccaataaaac

SEQ ID NO: 240944 - DNA, 19 bp, Artificial sequence
  SiRNA target sequence
aaaaaatgccaataaaacc

SEQ ID NO: 240945 - DNA, 19 bp, Artificial sequence
  SiRNA target sequence
aaaaatgccaataaaacca

SEQ ID NO: 240946 - DNA, 19 bp, Artificial sequence
  SiRNA target sequence
aaaatgccaataaaaccaa

SEQ ID NO: 240947 - DNA, 19 bp, Artificial sequence
  SiRNA target sequence
aaatgccaataaaaccaaa

SEQ ID NO: 240948 - DNA, 19 bp, Artificial sequence
  SiRNA target sequence
aatgccaataaaaccaaaa

SEQ ID NO: 240949 - DNA, 19 bp, Artificial sequence
  SiRNA target sequence
atgccaataaaaccaaaaa

SEQ ID NO: 240950 - DNA, 19 bp, Artificial sequence
  SiRNA target sequence
tgccaataaaaccaaaaat

SEQ ID NO: 240951 - DNA, 19 bp, Artificial sequence
  SiRNA target sequence
gccaataaaaccaaaaata

SEQ ID NO: 240952 - DNA, 19 bp, Artificial sequence
  SiRNA target sequence
ccaataaaaccaaaaataa

SEQ ID NO: 240953 - DNA, 19 bp, Artificial sequence
  SiRNA target sequence
caataaaaccaaaaataat

SEQ ID NO: 240954 - DNA, 19 bp, Artificial sequence
  SiRNA target sequence
aataaaaccaaaaataata

SEQ ID NO: 240955 - DNA, 19 bp, Artificial sequence
  SiRNA target sequence
ataaaaccaaaaataataa

SEQ ID NO: 240956 - DNA, 19 bp, Artificial sequence
  SiRNA target sequence
taaaaccaaaaataataaa

SEQ ID NO: 240957 - DNA, 19 bp, Artificial sequence
  SiRNA target sequence
aaaaccaaaaataataaaa

SEQ ID NO: 240958 - DNA, 19 bp, Artificial sequence
  SiRNA target sequence
aaaccaaaaataataaaat

SEQ ID NO: 240959 - DNA, 19 bp, Artificial sequence
  SiRNA target sequence
aaccaaaaataataaaatt

SEQ ID NO: 240960 - DNA, 19 bp, Artificial sequence
  SiRNA target sequence
accaaaaataataaaattc

SEQ ID NO: 240961 - DNA, 19 bp, Artificial sequence
  SiRNA target sequence
ccaaaaataataaaattca

SEQ ID NO: 240962 - DNA, 19 bp, Artificial sequence
  SiRNA target sequence
caaaaataataaaattcac

SEQ ID NO: 240963 - DNA, 19 bp, Artificial sequence
  SiRNA target sequence
aaaaataataaaattcaca

SEQ ID NO: 240964 - DNA, 19 bp, Artificial sequence
  SiRNA target sequence
aaaataataaaattcacaa

SEQ ID NO: 240965 - DNA, 19 bp, Artificial sequence
  SiRNA target sequence
aaataataaaattcacaat

SEQ ID NO: 240966 - DNA, 19 bp, Artificial sequence
  SiRNA target sequence
aataataaaattcacaata

SEQ ID NO: 240967 - DNA, 19 bp, Artificial sequence
  SiRNA target sequence
ataataaaattcacaatac

SEQ ID NO: 240968 - DNA, 19 bp, Artificial sequence
  SiRNA target sequence
taataaaattcacaatact

SEQ ID NO: 240969 - DNA, 19 bp, Artificial sequence
  SiRNA target sequence
aataaaattcacaatacta

SEQ ID NO: 240970 - DNA, 19 bp, Artificial sequence
  SiRNA target sequence
ataaaattcacaatactaa

SEQ ID NO: 240971 - DNA, 19 bp, Artificial sequence
  SiRNA target sequence
taaaattcacaatactaag

SEQ ID NO: 240972 - DNA, 19 bp, Artificial sequence
  SiRNA target sequence
aaaattcacaatactaaga

SEQ ID NO: 240973 - DNA, 19 bp, Artificial sequence
  SiRNA target sequence
aaattcacaatactaagaa

SEQ ID NO: 240974 - DNA, 19 bp, Artificial sequence
  SiRNA target sequence
aattcacaatactaagaat

SEQ ID NO: 240975 - DNA, 19 bp, Artificial sequence
  SiRNA target sequence
attcacaatactaagaata

SEQ ID NO: 240976 - DNA, 19 bp, Artificial sequence
  SiRNA target sequence
ttcacaatactaagaatag

SEQ ID NO: 240977 - DNA, 19 bp, Artificial sequence
  SiRNA target sequence
tcacaatactaagaataga

SEQ ID NO: 240978 - DNA, 19 bp, Artificial sequence
  SiRNA target sequence
cacaatactaagaatagag

SEQ ID NO: 240979 - DNA, 19 bp, Artificial sequence
  SiRNA target sequence
acaatactaagaatagagt

SEQ ID NO: 240980 - DNA, 19 bp, Artificial sequence
  SiRNA target sequence
caatactaagaatagagta

SEQ ID NO: 240981 - DNA, 19 bp, Artificial sequence
  SiRNA target sequence
aatactaagaatagagtac

SEQ ID NO: 240982 - DNA, 19 bp, Artificial sequence
  SiRNA target sequence
atactaagaatagagtaca

SEQ ID NO: 240983 - DNA, 19 bp, Artificial sequence
  SiRNA target sequence
tactaagaatagagtacac

SEQ ID NO: 240984 - DNA, 19 bp, Artificial sequence
  SiRNA target sequence
actaagaatagagtacaca

SEQ ID NO: 240985 - DNA, 19 bp, Artificial sequence
  SiRNA target sequence
ctaagaatagagtacacat

SEQ ID NO: 240986 - DNA, 19 bp, Artificial sequence
  SiRNA target sequence
taagaatagagtacacatt

SEQ ID NO: 240987 - DNA, 19 bp, Artificial sequence
  SiRNA target sequence
aagaatagagtacacattt

SEQ ID NO: 240988 - DNA, 19 bp, Artificial sequence
  SiRNA target sequence
agaatagagtacacattta

SEQ ID NO: 240989 - DNA, 19 bp, Artificial sequence
  SiRNA target sequence
gaatagagtacacatttaa

SEQ ID NO: 240990 - DNA, 19 bp, Artificial sequence
  SiRNA target sequence
aatagagtacacatttaaa

SEQ ID NO: 240991 - DNA, 19 bp, Artificial sequence
  SiRNA target sequence
atagagtacacatttaaag

SEQ ID NO: 240992 - DNA, 19 bp, Artificial sequence
  SiRNA target sequence
tagagtacacatttaaagc

SEQ ID NO: 240993 - DNA, 19 bp, Artificial sequence
  SiRNA target sequence
agagtacacatttaaagcc

SEQ ID NO: 240994 - DNA, 19 bp, Artificial sequence
  SiRNA target sequence
gagtacacatttaaagcct

SEQ ID NO: 240995 - DNA, 19 bp, Artificial sequence
  SiRNA target sequence
agtacacatttaaagcctt

SEQ ID NO: 240996 - DNA, 19 bp, Artificial sequence
  SiRNA target sequence
gtacacatttaaagccttt

SEQ ID NO: 240997 - DNA, 19 bp, Artificial sequence
  SiRNA target sequence
tacacatttaaagcctttt

SEQ ID NO: 240998 - DNA, 19 bp, Artificial sequence
  SiRNA target sequence
acacatttaaagccttttg

SEQ ID NO: 240999 - DNA, 19 bp, Artificial sequence
  SiRNA target sequence
cacatttaaagccttttgg

SEQ ID NO: 241000 - DNA, 19 bp, Artificial sequence
  SiRNA target sequence
acatttaaagccttttgga

SEQ ID NO: 241001 - DNA, 19 bp, Artificial sequence
  SiRNA target sequence
catttaaagccttttggac

SEQ ID NO: 241002 - DNA, 19 bp, Artificial sequence
  SiRNA target sequence
atttaaagccttttggaca

SEQ ID NO: 241003 - DNA, 19 bp, Artificial sequence
  SiRNA target sequence
tttaaagccttttggacat

SEQ ID NO: 241004 - DNA, 19 bp, Artificial sequence
  SiRNA target sequence
ttaaagccttttggacata

SEQ ID NO: 241005 - DNA, 19 bp, Artificial sequence
  SiRNA target sequence
taaagccttttggacatat

SEQ ID NO: 241006 - DNA, 19 bp, Artificial sequence
  SiRNA target sequence
aaagccttttggacatatg

SEQ ID NO: 241007 - DNA, 19 bp, Artificial sequence
  SiRNA target sequence
aagccttttggacatatga

SEQ ID NO: 241008 - DNA, 19 bp, Artificial sequence
  SiRNA target sequence
agccttttggacatatgac

SEQ ID NO: 241009 - DNA, 19 bp, Artificial sequence
  SiRNA target sequence
gccttttggacatatgaca

SEQ ID NO: 241010 - DNA, 19 bp, Artificial sequence
  SiRNA target sequence
ccttttggacatatgacat

SEQ ID NO: 241011 - DNA, 19 bp, Artificial sequence
  SiRNA target sequence
cttttggacatatgacatc

SEQ ID NO: 241012 - DNA, 19 bp, Artificial sequence
  SiRNA target sequence
ttttggacatatgacatca

SEQ ID NO: 241013 - DNA, 19 bp, Artificial sequence
  SiRNA target sequence
tttggacatatgacatcat

SEQ ID NO: 241014 - DNA, 19 bp, Artificial sequence
  SiRNA target sequence
ttggacatatgacatcata

SEQ ID NO: 241015 - DNA, 19 bp, Artificial sequence
  SiRNA target sequence
tggacatatgacatcataa

SEQ ID NO: 241016 - DNA, 19 bp, Artificial sequence
  SiRNA target sequence
ggacatatgacatcataag

SEQ ID NO: 241017 - DNA, 19 bp, Artificial sequence
  SiRNA target sequence
gacatatgacatcataaga

SEQ ID NO: 241018 - DNA, 19 bp, Artificial sequence
  SiRNA target sequence
acatatgacatcataagac

SEQ ID NO: 241019 - DNA, 19 bp, Artificial sequence
  SiRNA target sequence
catatgacatcataagaca

SEQ ID NO: 241020 - DNA, 19 bp, Artificial sequence
  SiRNA target sequence
atatgacatcataagacat

SEQ ID NO: 241021 - DNA, 19 bp, Artificial sequence
  SiRNA target sequence
tatgacatcataagacata

SEQ ID NO: 241022 - DNA, 19 bp, Artificial sequence
  SiRNA target sequence
atgacatcataagacatat

SEQ ID NO: 241023 - DNA, 19 bp, Artificial sequence
  SiRNA target sequence
tgacatcataagacatata

SEQ ID NO: 241024 - DNA, 19 bp, Artificial sequence
  SiRNA target sequence
gacatcataagacatataa

SEQ ID NO: 241025 - DNA, 19 bp, Artificial sequence
  SiRNA target sequence
acatcataagacatataat

SEQ ID NO: 241026 - DNA, 19 bp, Artificial sequence
  SiRNA target sequence
catcataagacatataatt

SEQ ID NO: 241027 - DNA, 19 bp, Artificial sequence
  SiRNA target sequence
atcataagacatataattg

SEQ ID NO: 241028 - DNA, 19 bp, Artificial sequence
  SiRNA target sequence
tcataagacatataattgg

SEQ ID NO: 241029 - DNA, 19 bp, Artificial sequence
  SiRNA target sequence
cataagacatataattggc

SEQ ID NO: 241030 - DNA, 19 bp, Artificial sequence
  SiRNA target sequence
ataagacatataattggca

SEQ ID NO: 241031 - DNA, 19 bp, Artificial sequence
  SiRNA target sequence
taagacatataattggcag

SEQ ID NO: 241032 - DNA, 19 bp, Artificial sequence
  SiRNA target sequence
aagacatataattggcagt

SEQ ID NO: 241033 - DNA, 19 bp, Artificial sequence
  SiRNA target sequence
agacatataattggcagtg

SEQ ID NO: 241034 - DNA, 19 bp, Artificial sequence
  SiRNA target sequence
gacatataattggcagtga

SEQ ID NO: 241035 - DNA, 19 bp, Artificial sequence
  SiRNA target sequence
acatataattggcagtgaa

SEQ ID NO: 241036 - DNA, 19 bp, Artificial sequence
  SiRNA target sequence
catataattggcagtgaaa

SEQ ID NO: 241037 - DNA, 19 bp, Artificial sequence
  SiRNA target sequence
atataattggcagtgaaaa

SEQ ID NO: 241038 - DNA, 19 bp, Artificial sequence
  SiRNA target sequence
tataattggcagtgaaaag

SEQ ID NO: 241039 - DNA, 19 bp, Artificial sequence
  SiRNA target sequence
ataattggcagtgaaaaga

SEQ ID NO: 241040 - DNA, 19 bp, Artificial sequence
  SiRNA target sequence
taattggcagtgaaaagaa

SEQ ID NO: 241041 - DNA, 19 bp, Artificial sequence
  SiRNA target sequence
aattggcagtgaaaagaaa

SEQ ID NO: 241042 - DNA, 19 bp, Artificial sequence
  SiRNA target sequence
attggcagtgaaaagaaaa

SEQ ID NO: 241043 - DNA, 19 bp, Artificial sequence
  SiRNA target sequence
ttggcagtgaaaagaaaag

SEQ ID NO: 241044 - DNA, 19 bp, Artificial sequence
  SiRNA target sequence
tggcagtgaaaagaaaagc

SEQ ID NO: 241045 - DNA, 19 bp, Artificial sequence
  SiRNA target sequence
ggcagtgaaaagaaaagct

SEQ ID NO: 241046 - DNA, 19 bp, Artificial sequence
  SiRNA target sequence
gcagtgaaaagaaaagctt

SEQ ID NO: 241047 - DNA, 19 bp, Artificial sequence
  SiRNA target sequence
cagtgaaaagaaaagcttt

SEQ ID NO: 241048 - DNA, 19 bp, Artificial sequence
  SiRNA target sequence
agtgaaaagaaaagcttta

SEQ ID NO: 241049 - DNA, 19 bp, Artificial sequence
  SiRNA target sequence
gtgaaaagaaaagctttat

SEQ ID NO: 241050 - DNA, 19 bp, Artificial sequence
  SiRNA target sequence
tgaaaagaaaagctttatg

SEQ ID NO: 241051 - DNA, 19 bp, Artificial sequence
  SiRNA target sequence
gaaaagaaaagctttatgt

SEQ ID NO: 241052 - DNA, 19 bp, Artificial sequence
  SiRNA target sequence
aaaagaaaagctttatgta

SEQ ID NO: 241053 - DNA, 19 bp, Artificial sequence
  SiRNA target sequence
aaagaaaagctttatgtag

SEQ ID NO: 241054 - DNA, 19 bp, Artificial sequence
  SiRNA target sequence
aagaaaagctttatgtagt

SEQ ID NO: 241055 - DNA, 19 bp, Artificial sequence
  SiRNA target sequence
agaaaagctttatgtagta

SEQ ID NO: 241056 - DNA, 19 bp, Artificial sequence
  SiRNA target sequence
gaaaagctttatgtagtac

SEQ ID NO: 241057 - DNA, 19 bp, Artificial sequence
  SiRNA target sequence
aaaagctttatgtagtaca

SEQ ID NO: 241058 - DNA, 19 bp, Artificial sequence
  SiRNA target sequence
aaagctttatgtagtacag

SEQ ID NO: 241059 - DNA, 19 bp, Artificial sequence
  SiRNA target sequence
aagctttatgtagtacagt

SEQ ID NO: 241060 - DNA, 19 bp, Artificial sequence
  SiRNA target sequence
agctttatgtagtacagtg

SEQ ID NO: 241061 - DNA, 19 bp, Artificial sequence
  SiRNA target sequence
gctttatgtagtacagtga

SEQ ID NO: 241062 - DNA, 19 bp, Artificial sequence
  SiRNA target sequence
ctttatgtagtacagtgac

SEQ ID NO: 241063 - DNA, 19 bp, Artificial sequence
  SiRNA target sequence
tttatgtagtacagtgacg

SEQ ID NO: 241064 - DNA, 19 bp, Artificial sequence
  SiRNA target sequence
ttatgtagtacagtgacga

SEQ ID NO: 241065 - DNA, 19 bp, Artificial sequence
  SiRNA target sequence
tatgtagtacagtgacgaa

SEQ ID NO: 241066 - DNA, 19 bp, Artificial sequence
  SiRNA target sequence
atgtagtacagtgacgaag

SEQ ID NO: 241067 - DNA, 19 bp, Artificial sequence
  SiRNA target sequence
tgtagtacagtgacgaagg

SEQ ID NO: 241068 - DNA, 19 bp, Artificial sequence
  SiRNA target sequence
gtagtacagtgacgaagga

SEQ ID NO: 241069 - DNA, 19 bp, Artificial sequence
  SiRNA target sequence
tagtacagtgacgaaggaa

SEQ ID NO: 241070 - DNA, 19 bp, Artificial sequence
  SiRNA target sequence
agtacagtgacgaaggaat

SEQ ID NO: 241071 - DNA, 19 bp, Artificial sequence
  SiRNA target sequence
gtacagtgacgaaggaatt

SEQ ID NO: 241072 - DNA, 19 bp, Artificial sequence
  SiRNA target sequence
tacagtgacgaaggaattt

SEQ ID NO: 241073 - DNA, 19 bp, Artificial sequence
  SiRNA target sequence
acagtgacgaaggaatttg

SEQ ID NO: 241074 - DNA, 19 bp, Artificial sequence
  SiRNA target sequence
cagtgacgaaggaatttgt

SEQ ID NO: 241075 - DNA, 19 bp, Artificial sequence
  SiRNA target sequence
agtgacgaaggaatttgtt

SEQ ID NO: 241076 - DNA, 19 bp, Artificial sequence
  SiRNA target sequence
gtgacgaaggaatttgttt

SEQ ID NO: 241077 - DNA, 19 bp, Artificial sequence
  SiRNA target sequence
tgacgaaggaatttgtttt

SEQ ID NO: 241078 - DNA, 19 bp, Artificial sequence
  SiRNA target sequence
gacgaaggaatttgttttg

SEQ ID NO: 241079 - DNA, 19 bp, Artificial sequence
  SiRNA target sequence
acgaaggaatttgttttgt

SEQ ID NO: 241080 - DNA, 19 bp, Artificial sequence
  SiRNA target sequence
cgaaggaatttgttttgtc

SEQ ID NO: 241081 - DNA, 19 bp, Artificial sequence
  SiRNA target sequence
gaaggaatttgttttgtca

SEQ ID NO: 241082 - DNA, 19 bp, Artificial sequence
  SiRNA target sequence
aaggaatttgttttgtcat

SEQ ID NO: 241083 - DNA, 19 bp, Artificial sequence
  SiRNA target sequence
aggaatttgttttgtcata

SEQ ID NO: 241084 - DNA, 19 bp, Artificial sequence
  SiRNA target sequence
ggaatttgttttgtcataa

SEQ ID NO: 241085 - DNA, 19 bp, Artificial sequence
  SiRNA target sequence
gaatttgttttgtcataat

SEQ ID NO: 241086 - DNA, 19 bp, Artificial sequence
  SiRNA target sequence
aatttgttttgtcataatc

SEQ ID NO: 241087 - DNA, 19 bp, Artificial sequence
  SiRNA target sequence
atttgttttgtcataatca

SEQ ID NO: 241088 - DNA, 19 bp, Artificial sequence
  SiRNA target sequence
tttgttttgtcataatcac

SEQ ID NO: 241089 - DNA, 19 bp, Artificial sequence
  SiRNA target sequence
ttgttttgtcataatcacg

SEQ ID NO: 241090 - DNA, 19 bp, Artificial sequence
  SiRNA target sequence
tgttttgtcataatcacga

SEQ ID NO: 241091 - DNA, 19 bp, Artificial sequence
  SiRNA target sequence
gttttgtcataatcacgat

SEQ ID NO: 241092 - DNA, 19 bp, Artificial sequence
  SiRNA target sequence
ttttgtcataatcacgatt

SEQ ID NO: 241093 - DNA, 19 bp, Artificial sequence
  SiRNA target sequence
tttgtcataatcacgattt

SEQ ID NO: 241094 - DNA, 19 bp, Artificial sequence
  SiRNA target sequence
ttgtcataatcacgatttc

SEQ ID NO: 241095 - DNA, 19 bp, Artificial sequence
  SiRNA target sequence
tgtcataatcacgatttct

SEQ ID NO: 241096 - DNA, 19 bp, Artificial sequence
  SiRNA target sequence
gtcataatcacgatttctc

SEQ ID NO: 241097 - DNA, 19 bp, Artificial sequence
  SiRNA target sequence
tcataatcacgatttctct

SEQ ID NO: 241098 - DNA, 19 bp, Artificial sequence
  SiRNA target sequence
cataatcacgatttctctg

SEQ ID NO: 241099 - DNA, 19 bp, Artificial sequence
  SiRNA target sequence
ataatcacgatttctctgt

SEQ ID NO: 241100 - DNA, 19 bp, Artificial sequence
  SiRNA target sequence
taatcacgatttctctgta

SEQ ID NO: 241101 - DNA, 19 bp, Artificial sequence
  SiRNA target sequence
aatcacgatttctctgtaa

SEQ ID NO: 241102 - DNA, 19 bp, Artificial sequence
  SiRNA target sequence
atcacgatttctctgtaaa

SEQ ID NO: 241103 - DNA, 19 bp, Artificial sequence
  SiRNA target sequence
tcacgatttctctgtaaaa

SEQ ID NO: 241104 - DNA, 19 bp, Artificial sequence
  SiRNA target sequence
cacgatttctctgtaaaat

SEQ ID NO: 241105 - DNA, 19 bp, Artificial sequence
  SiRNA target sequence
acgatttctctgtaaaatt

SEQ ID NO: 241106 - DNA, 19 bp, Artificial sequence
  SiRNA target sequence
cgatttctctgtaaaattc

SEQ ID NO: 241107 - DNA, 19 bp, Artificial sequence
  SiRNA target sequence
gatttctctgtaaaattcc

SEQ ID NO: 241108 - DNA, 19 bp, Artificial sequence
  SiRNA target sequence
atttctctgtaaaattcca

SEQ ID NO: 241109 - DNA, 19 bp, Artificial sequence
  SiRNA target sequence
tttctctgtaaaattccaa

SEQ ID NO: 241110 - DNA, 19 bp, Artificial sequence
  SiRNA target sequence
ttctctgtaaaattccaat

SEQ ID NO: 241111 - DNA, 19 bp, Artificial sequence
  SiRNA target sequence
tctctgtaaaattccaata

SEQ ID NO: 241112 - DNA, 19 bp, Artificial sequence
  SiRNA target sequence
ctctgtaaaattccaataa

SEQ ID NO: 241113 - DNA, 19 bp, Artificial sequence
  SiRNA target sequence
tctgtaaaattccaataat

SEQ ID NO: 241114 - DNA, 19 bp, Artificial sequence
  SiRNA target sequence
ctgtaaaattccaataatg

SEQ ID NO: 241115 - DNA, 19 bp, Artificial sequence
  SiRNA target sequence
tgtaaaattccaataatgt

SEQ ID NO: 241116 - DNA, 19 bp, Artificial sequence
  SiRNA target sequence
gtaaaattccaataatgtg

SEQ ID NO: 241117 - DNA, 19 bp, Artificial sequence
  SiRNA target sequence
taaaattccaataatgtgt

SEQ ID NO: 241118 - DNA, 19 bp, Artificial sequence
  SiRNA target sequence
aaaattccaataatgtgtt

SEQ ID NO: 241119 - DNA, 19 bp, Artificial sequence
  SiRNA target sequence
aaattccaataatgtgtta

SEQ ID NO: 241120 - DNA, 19 bp, Artificial sequence
  SiRNA target sequence
aattccaataatgtgttaa

SEQ ID NO: 241121 - DNA, 19 bp, Artificial sequence
  SiRNA target sequence
attccaataatgtgttaat

SEQ ID NO: 241122 - DNA, 19 bp, Artificial sequence
  SiRNA target sequence
ttccaataatgtgttaatc

SEQ ID NO: 241123 - DNA, 19 bp, Artificial sequence
  SiRNA target sequence
tccaataatgtgttaatca

SEQ ID NO: 241124 - DNA, 19 bp, Artificial sequence
  SiRNA target sequence
ccaataatgtgttaatcac

SEQ ID NO: 241125 - DNA, 19 bp, Artificial sequence
  SiRNA target sequence
caataatgtgttaatcaca

SEQ ID NO: 241126 - DNA, 19 bp, Artificial sequence
  SiRNA target sequence
aataatgtgttaatcacac

SEQ ID NO: 241127 - DNA, 19 bp, Artificial sequence
  SiRNA target sequence
ataatgtgttaatcacaca

SEQ ID NO: 241128 - DNA, 19 bp, Artificial sequence
  SiRNA target sequence
taatgtgttaatcacacat

SEQ ID NO: 241129 - DNA, 19 bp, Artificial sequence
  SiRNA target sequence
aatgtgttaatcacacatg

SEQ ID NO: 241130 - DNA, 19 bp, Artificial sequence
  SiRNA target sequence
atgtgttaatcacacatgc

SEQ ID NO: 241131 - DNA, 19 bp, Artificial sequence
  SiRNA target sequence
tgtgttaatcacacatgcc

SEQ ID NO: 241132 - DNA, 19 bp, Artificial sequence
  SiRNA target sequence
gtgttaatcacacatgcca

SEQ ID NO: 241133 - DNA, 19 bp, Artificial sequence
  SiRNA target sequence
tgttaatcacacatgccat

SEQ ID NO: 241134 - DNA, 19 bp, Artificial sequence
  SiRNA target sequence
gttaatcacacatgccatt

SEQ ID NO: 241135 - DNA, 19 bp, Artificial sequence
  SiRNA target sequence
ttaatcacacatgccatta

SEQ ID NO: 241136 - DNA, 19 bp, Artificial sequence
  SiRNA target sequence
taatcacacatgccattaa

SEQ ID NO: 241137 - DNA, 19 bp, Artificial sequence
  SiRNA target sequence
aatcacacatgccattaaa

SEQ ID NO: 241138 - DNA, 19 bp, Artificial sequence
  SiRNA target sequence
atcacacatgccattaaaa

SEQ ID NO: 241139 - DNA, 19 bp, Artificial sequence
  SiRNA target sequence
tcacacatgccattaaaaa

SEQ ID NO: 241140 - DNA, 19 bp, Artificial sequence
  SiRNA target sequence
cacacatgccattaaaaat

SEQ ID NO: 241141 - DNA, 19 bp, Artificial sequence
  SiRNA target sequence
acacatgccattaaaaatg

SEQ ID NO: 241142 - DNA, 19 bp, Artificial sequence
  SiRNA target sequence
cacatgccattaaaaatgt

SEQ ID NO: 241143 - DNA, 19 bp, Artificial sequence
  SiRNA target sequence
acatgccattaaaaatgta

SEQ ID NO: 241144 - DNA, 19 bp, Artificial sequence
  SiRNA target sequence
catgccattaaaaatgtaa

SEQ ID NO: 241145 - DNA, 19 bp, Artificial sequence
  SiRNA target sequence
atgccattaaaaatgtaag

SEQ ID NO: 241146 - DNA, 19 bp, Artificial sequence
  SiRNA target sequence
tgccattaaaaatgtaagt

SEQ ID NO: 241147 - DNA, 19 bp, Artificial sequence
  SiRNA target sequence
gccattaaaaatgtaagtg

SEQ ID NO: 241148 - DNA, 19 bp, Artificial sequence
  SiRNA target sequence
ccattaaaaatgtaagtga

SEQ ID NO: 241149 - DNA, 19 bp, Artificial sequence
  SiRNA target sequence
cattaaaaatgtaagtgac

SEQ ID NO: 241150 - DNA, 19 bp, Artificial sequence
  SiRNA target sequence
attaaaaatgtaagtgaca

SEQ ID NO: 241151 - DNA, 19 bp, Artificial sequence
  SiRNA target sequence
ttaaaaatgtaagtgacaa

SEQ ID NO: 241152 - DNA, 19 bp, Artificial sequence
  SiRNA target sequence
taaaaatgtaagtgacaat

SEQ ID NO: 241153 - DNA, 19 bp, Artificial sequence
  SiRNA target sequence
aaaaatgtaagtgacaata

SEQ ID NO: 241154 - DNA, 19 bp, Artificial sequence
  SiRNA target sequence
aaaatgtaagtgacaataa

SEQ ID NO: 241155 - DNA, 19 bp, Artificial sequence
  SiRNA target sequence
aaatgtaagtgacaataat

SEQ ID NO: 241156 - DNA, 19 bp, Artificial sequence
  SiRNA target sequence
aatgtaagtgacaataata

SEQ ID NO: 241157 - DNA, 19 bp, Artificial sequence
  SiRNA target sequence
atgtaagtgacaataatat

SEQ ID NO: 241158 - DNA, 19 bp, Artificial sequence
  SiRNA target sequence
tgtaagtgacaataatatt

SEQ ID NO: 241159 - DNA, 19 bp, Artificial sequence
  SiRNA target sequence
gtaagtgacaataatattt

SEQ ID NO: 241160 - DNA, 19 bp, Artificial sequence
  SiRNA target sequence
taagtgacaataatatttt

SEQ ID NO: 241161 - DNA, 19 bp, Artificial sequence
  SiRNA target sequence
aagtgacaataatattttt

SEQ ID NO: 241162 - DNA, 19 bp, Artificial sequence
  SiRNA target sequence
agtgacaataatattttta

SEQ ID NO: 241163 - DNA, 19 bp, Artificial sequence
  SiRNA target sequence
gtgacaataatatttttac

SEQ ID NO: 241164 - DNA, 19 bp, Artificial sequence
  SiRNA target sequence
tgacaataatatttttact

SEQ ID NO: 241165 - DNA, 19 bp, Artificial sequence
  SiRNA target sequence
gacaataatatttttactt

SEQ ID NO: 241166 - DNA, 19 bp, Artificial sequence
  SiRNA target sequence
acaataatatttttacttt

SEQ ID NO: 241167 - DNA, 19 bp, Artificial sequence
  SiRNA target sequence
caataatatttttactttt

SEQ ID NO: 241168 - DNA, 19 bp, Artificial sequence
  SiRNA target sequence
aataatatttttacttttg

SEQ ID NO: 241169 - DNA, 19 bp, Artificial sequence
  SiRNA target sequence
ataatatttttacttttgg

SEQ ID NO: 241170 - DNA, 19 bp, Artificial sequence
  SiRNA target sequence
taatatttttacttttggg

SEQ ID NO: 241171 - DNA, 19 bp, Artificial sequence
  SiRNA target sequence
aatatttttacttttggga

SEQ ID NO: 241172 - DNA, 19 bp, Artificial sequence
  SiRNA target sequence
atatttttacttttgggaa

SEQ ID NO: 241173 - DNA, 19 bp, Artificial sequence
  SiRNA target sequence
tatttttacttttgggaat

SEQ ID NO: 241174 - DNA, 19 bp, Artificial sequence
  SiRNA target sequence
atttttacttttgggaatt

SEQ ID NO: 241175 - DNA, 19 bp, Artificial sequence
  SiRNA target sequence
tttttacttttgggaattt

SEQ ID NO: 241176 - DNA, 19 bp, Artificial sequence
  SiRNA target sequence
ttttacttttgggaatttt

SEQ ID NO: 241177 - DNA, 19 bp, Artificial sequence
  SiRNA target sequence
tttacttttgggaattttt

SEQ ID NO: 241178 - DNA, 19 bp, Artificial sequence
  SiRNA target sequence
ttacttttgggaatttttt

SEQ ID NO: 241179 - DNA, 19 bp, Artificial sequence
  SiRNA target sequence
tacttttgggaattttttt

SEQ ID NO: 241180 - DNA, 19 bp, Artificial sequence
  SiRNA target sequence
acttttgggaatttttttg

SEQ ID NO: 241181 - DNA, 19 bp, Artificial sequence
  SiRNA target sequence
cttttgggaatttttttgt

SEQ ID NO: 241182 - DNA, 19 bp, Artificial sequence
  SiRNA target sequence
ttttgggaatttttttgtc

SEQ ID NO: 241183 - DNA, 19 bp, Artificial sequence
  SiRNA target sequence
tttgggaatttttttgtct

SEQ ID NO: 241184 - DNA, 19 bp, Artificial sequence
  SiRNA target sequence
ttgggaatttttttgtctt

SEQ ID NO: 241185 - DNA, 19 bp, Artificial sequence
  SiRNA target sequence
tgggaatttttttgtctta

SEQ ID NO: 241186 - DNA, 19 bp, Artificial sequence
  SiRNA target sequence
gggaatttttttgtcttag

SEQ ID NO: 241187 - DNA, 19 bp, Artificial sequence
  SiRNA target sequence
ggaatttttttgtcttagt

SEQ ID NO: 241188 - DNA, 19 bp, Artificial sequence
  SiRNA target sequence
gaatttttttgtcttagtc

SEQ ID NO: 241189 - DNA, 19 bp, Artificial sequence
  SiRNA target sequence
aatttttttgtcttagtca

SEQ ID NO: 241190 - DNA, 19 bp, Artificial sequence
  SiRNA target sequence
atttttttgtcttagtcat

SEQ ID NO: 241191 - DNA, 20 bp, Artificial sequence
  SiRNA target sequence
ttaattaaaatcaacatcta

SEQ ID NO: 241192 - DNA, 20 bp, Artificial sequence
  SiRNA target sequence
taattaaaatcaacatctat

SEQ ID NO: 241193 - DNA, 20 bp, Artificial sequence
  SiRNA target sequence
aattaaaatcaacatctatc

SEQ ID NO: 241194 - DNA, 20 bp, Artificial sequence
  SiRNA target sequence
attaaaatcaacatctatct

SEQ ID NO: 241195 - DNA, 20 bp, Artificial sequence
  SiRNA target sequence
ttaaaatcaacatctatctc

SEQ ID NO: 241196 - DNA, 20 bp, Artificial sequence
  SiRNA target sequence
taaaatcaacatctatctca

SEQ ID NO: 241197 - DNA, 20 bp, Artificial sequence
  SiRNA target sequence
aaaatcaacatctatctcag

SEQ ID NO: 241198 - DNA, 20 bp, Artificial sequence
  SiRNA target sequence
aaatcaacatctatctcaga

SEQ ID NO: 241199 - DNA, 20 bp, Artificial sequence
  SiRNA target sequence
aatcaacatctatctcagaa

SEQ ID NO: 241200 - DNA, 20 bp, Artificial sequence
  SiRNA target sequence
atcaacatctatctcagaat

SEQ ID NO: 241201 - DNA, 20 bp, Artificial sequence
  SiRNA target sequence
tcaacatctatctcagaatt

SEQ ID NO: 241202 - DNA, 20 bp, Artificial sequence
  SiRNA target sequence
caacatctatctcagaattt

SEQ ID NO: 241203 - DNA, 20 bp, Artificial sequence
  SiRNA target sequence
aacatctatctcagaatttt

SEQ ID NO: 241204 - DNA, 20 bp, Artificial sequence
  SiRNA target sequence
acatctatctcagaattttg

SEQ ID NO: 241205 - DNA, 20 bp, Artificial sequence
  SiRNA target sequence
catctatctcagaattttgt

SEQ ID NO: 241206 - DNA, 20 bp, Artificial sequence
  SiRNA target sequence
atctatctcagaattttgtt

SEQ ID NO: 241207 - DNA, 20 bp, Artificial sequence
  SiRNA target sequence
tctatctcagaattttgttc

SEQ ID NO: 241208 - DNA, 20 bp, Artificial sequence
  SiRNA target sequence
ctatctcagaattttgttca

SEQ ID NO: 241209 - DNA, 20 bp, Artificial sequence
  SiRNA target sequence
tatctcagaattttgttcaa

SEQ ID NO: 241210 - DNA, 20 bp, Artificial sequence
  SiRNA target sequence
atctcagaattttgttcaat

SEQ ID NO: 241211 - DNA, 20 bp, Artificial sequence
  SiRNA target sequence
tctcagaattttgttcaatt

SEQ ID NO: 241212 - DNA, 20 bp, Artificial sequence
  SiRNA target sequence
ctcagaattttgttcaattg

SEQ ID NO: 241213 - DNA, 20 bp, Artificial sequence
  SiRNA target sequence
tcagaattttgttcaattga

SEQ ID NO: 241214 - DNA, 20 bp, Artificial sequence
  SiRNA target sequence
cagaattttgttcaattgat

SEQ ID NO: 241215 - DNA, 20 bp, Artificial sequence
  SiRNA target sequence
agaattttgttcaattgatt

SEQ ID NO: 241216 - DNA, 20 bp, Artificial sequence
  SiRNA target sequence
gaattttgttcaattgattc

SEQ ID NO: 241217 - DNA, 20 bp, Artificial sequence
  SiRNA target sequence
aattttgttcaattgattca

SEQ ID NO: 241218 - DNA, 20 bp, Artificial sequence
  SiRNA target sequence
attttgttcaattgattcat

SEQ ID NO: 241219 - DNA, 20 bp, Artificial sequence
  SiRNA target sequence
ttttgttcaattgattcatt

SEQ ID NO: 241220 - DNA, 20 bp, Artificial sequence
  SiRNA target sequence
tttgttcaattgattcatta

SEQ ID NO: 241221 - DNA, 20 bp, Artificial sequence
  SiRNA target sequence
ttgttcaattgattcattat

SEQ ID NO: 241222 - DNA, 20 bp, Artificial sequence
  SiRNA target sequence
tgttcaattgattcattata

SEQ ID NO: 241223 - DNA, 20 bp, Artificial sequence
  SiRNA target sequence
gttcaattgattcattatat

SEQ ID NO: 241224 - DNA, 20 bp, Artificial sequence
  SiRNA target sequence
ttcaattgattcattatatt

SEQ ID NO: 241225 - DNA, 20 bp, Artificial sequence
  SiRNA target sequence
tcaattgattcattatattt

SEQ ID NO: 241226 - DNA, 20 bp, Artificial sequence
  SiRNA target sequence
caattgattcattatatttt

SEQ ID NO: 241227 - DNA, 20 bp, Artificial sequence
  SiRNA target sequence
aattgattcattatattttt

SEQ ID NO: 241228 - DNA, 20 bp, Artificial sequence
  SiRNA target sequence
attgattcattatatttttt

SEQ ID NO: 241229 - DNA, 20 bp, Artificial sequence
  SiRNA target sequence
ttgattcattatatttttta

SEQ ID NO: 241230 - DNA, 20 bp, Artificial sequence
  SiRNA target sequence
tgattcattatattttttac

SEQ ID NO: 241231 - DNA, 20 bp, Artificial sequence
  SiRNA target sequence
gattcattatattttttact

SEQ ID NO: 241232 - DNA, 20 bp, Artificial sequence
  SiRNA target sequence
attcattatattttttactt

SEQ ID NO: 241233 - DNA, 20 bp, Artificial sequence
  SiRNA target sequence
ttcattatattttttactta

SEQ ID NO: 241234 - DNA, 20 bp, Artificial sequence
  SiRNA target sequence
tcattatattttttacttaa

SEQ ID NO: 241235 - DNA, 20 bp, Artificial sequence
  SiRNA target sequence
cattatattttttacttaaa

SEQ ID NO: 241236 - DNA, 20 bp, Artificial sequence
  SiRNA target sequence
attatattttttacttaaat

SEQ ID NO: 241237 - DNA, 20 bp, Artificial sequence
  SiRNA target sequence
ttatattttttacttaaata

SEQ ID NO: 241238 - DNA, 20 bp, Artificial sequence
  SiRNA target sequence
tatattttttacttaaataa

SEQ ID NO: 241239 - DNA, 20 bp, Artificial sequence
  SiRNA target sequence
atattttttacttaaataac

SEQ ID NO: 241240 - DNA, 20 bp, Artificial sequence
  SiRNA target sequence
tattttttacttaaataaca

SEQ ID NO: 241241 - DNA, 20 bp, Artificial sequence
  SiRNA target sequence
attttttacttaaataacag

SEQ ID NO: 241242 - DNA, 20 bp, Artificial sequence
  SiRNA target sequence
ttttttacttaaataacaga

SEQ ID NO: 241243 - DNA, 20 bp, Artificial sequence
  SiRNA target sequence
tttttacttaaataacagac

SEQ ID NO: 241244 - DNA, 20 bp, Artificial sequence
  SiRNA target sequence
ttttacttaaataacagaca

SEQ ID NO: 241245 - DNA, 20 bp, Artificial sequence
  SiRNA target sequence
tttacttaaataacagacac

SEQ ID NO: 241246 - DNA, 20 bp, Artificial sequence
  SiRNA target sequence
ttacttaaataacagacact

SEQ ID NO: 241247 - DNA, 20 bp, Artificial sequence
  SiRNA target sequence
tacttaaataacagacactc

SEQ ID NO: 241248 - DNA, 20 bp, Artificial sequence
  SiRNA target sequence
acttaaataacagacactcc

SEQ ID NO: 241249 - DNA, 20 bp, Artificial sequence
  SiRNA target sequence
cttaaataacagacactcct

SEQ ID NO: 241250 - DNA, 20 bp, Artificial sequence
  SiRNA target sequence
ttaaataacagacactcctg

SEQ ID NO: 241251 - DNA, 20 bp, Artificial sequence
  SiRNA target sequence
taaataacagacactcctga

SEQ ID NO: 241252 - DNA, 20 bp, Artificial sequence
  SiRNA target sequence
aaataacagacactcctgat

SEQ ID NO: 241253 - DNA, 20 bp, Artificial sequence
  SiRNA target sequence
aataacagacactcctgatc

SEQ ID NO: 241254 - DNA, 20 bp, Artificial sequence
  SiRNA target sequence
ataacagacactcctgatcc

SEQ ID NO: 241255 - DNA, 20 bp, Artificial sequence
  SiRNA target sequence
taacagacactcctgatcca

SEQ ID NO: 241256 - DNA, 20 bp, Artificial sequence
  SiRNA target sequence
aacagacactcctgatccac

SEQ ID NO: 241257 - DNA, 20 bp, Artificial sequence
  SiRNA target sequence
acagacactcctgatccaca

SEQ ID NO: 241258 - DNA, 20 bp, Artificial sequence
  SiRNA target sequence
cagacactcctgatccacaa

SEQ ID NO: 241259 - DNA, 20 bp, Artificial sequence
  SiRNA target sequence
agacactcctgatccacaaa

SEQ ID NO: 241260 - DNA, 20 bp, Artificial sequence
  SiRNA target sequence
gacactcctgatccacaaaa

SEQ ID NO: 241261 - DNA, 20 bp, Artificial sequence
  SiRNA target sequence
acactcctgatccacaaaaa

SEQ ID NO: 241262 - DNA, 20 bp, Artificial sequence
  SiRNA target sequence
cactcctgatccacaaaaaa

SEQ ID NO: 241263 - DNA, 20 bp, Artificial sequence
  SiRNA target sequence
actcctgatccacaaaaaat

SEQ ID NO: 241264 - DNA, 20 bp, Artificial sequence
  SiRNA target sequence
ctcctgatccacaaaaaatt

SEQ ID NO: 241265 - DNA, 20 bp, Artificial sequence
  SiRNA target sequence
tcctgatccacaaaaaattt

SEQ ID NO: 241266 - DNA, 20 bp, Artificial sequence
  SiRNA target sequence
cctgatccacaaaaaatttg

SEQ ID NO: 241267 - DNA, 20 bp, Artificial sequence
  SiRNA target sequence
ctgatccacaaaaaatttgc

SEQ ID NO: 241268 - DNA, 20 bp, Artificial sequence
  SiRNA target sequence
tgatccacaaaaaatttgca

SEQ ID NO: 241269 - DNA, 20 bp, Artificial sequence
  SiRNA target sequence
gatccacaaaaaatttgcaa

SEQ ID NO: 241270 - DNA, 20 bp, Artificial sequence
  SiRNA target sequence
atccacaaaaaatttgcaaa

SEQ ID NO: 241271 - DNA, 20 bp, Artificial sequence
  SiRNA target sequence
tccacaaaaaatttgcaaat

SEQ ID NO: 241272 - DNA, 20 bp, Artificial sequence
  SiRNA target sequence
ccacaaaaaatttgcaaata

SEQ ID NO: 241273 - DNA, 20 bp, Artificial sequence
  SiRNA target sequence
cacaaaaaatttgcaaatat

SEQ ID NO: 241274 - DNA, 20 bp, Artificial sequence
  SiRNA target sequence
acaaaaaatttgcaaatatt

SEQ ID NO: 241275 - DNA, 20 bp, Artificial sequence
  SiRNA target sequence
caaaaaatttgcaaatatta

SEQ ID NO: 241276 - DNA, 20 bp, Artificial sequence
  SiRNA target sequence
aaaaaatttgcaaatattaa

SEQ ID NO: 241277 - DNA, 20 bp, Artificial sequence
  SiRNA target sequence
aaaaatttgcaaatattaaa

SEQ ID NO: 241278 - DNA, 20 bp, Artificial sequence
  SiRNA target sequence
aaaatttgcaaatattaaaa

SEQ ID NO: 241279 - DNA, 20 bp, Artificial sequence
  SiRNA target sequence
aaatttgcaaatattaaaaa

SEQ ID NO: 241280 - DNA, 20 bp, Artificial sequence
  SiRNA target sequence
aatttgcaaatattaaaaat

SEQ ID NO: 241281 - DNA, 20 bp, Artificial sequence
  SiRNA target sequence
atttgcaaatattaaaaata

SEQ ID NO: 241282 - DNA, 20 bp, Artificial sequence
  SiRNA target sequence
tttgcaaatattaaaaatat

SEQ ID NO: 241283 - DNA, 20 bp, Artificial sequence
  SiRNA target sequence
ttgcaaatattaaaaatata

SEQ ID NO: 241284 - DNA, 20 bp, Artificial sequence
  SiRNA target sequence
tgcaaatattaaaaatataa

SEQ ID NO: 241285 - DNA, 20 bp, Artificial sequence
  SiRNA target sequence
gcaaatattaaaaatataaa

SEQ ID NO: 241286 - DNA, 20 bp, Artificial sequence
  SiRNA target sequence
caaatattaaaaatataaaa

SEQ ID NO: 241287 - DNA, 20 bp, Artificial sequence
  SiRNA target sequence
aaatattaaaaatataaaag

SEQ ID NO: 241288 - DNA, 20 bp, Artificial sequence
  SiRNA target sequence
aatattaaaaatataaaaga

SEQ ID NO: 241289 - DNA, 20 bp, Artificial sequence
  SiRNA target sequence
atattaaaaatataaaagac

SEQ ID NO: 241290 - DNA, 20 bp, Artificial sequence
  SiRNA target sequence
tattaaaaatataaaagaca

SEQ ID NO: 241291 - DNA, 20 bp, Artificial sequence
  SiRNA target sequence
attaaaaatataaaagacac

SEQ ID NO: 241292 - DNA, 20 bp, Artificial sequence
  SiRNA target sequence
ttaaaaatataaaagacacg

SEQ ID NO: 241293 - DNA, 20 bp, Artificial sequence
  SiRNA target sequence
taaaaatataaaagacacgt

SEQ ID NO: 241294 - DNA, 20 bp, Artificial sequence
  SiRNA target sequence
aaaaatataaaagacacgta

SEQ ID NO: 241295 - DNA, 20 bp, Artificial sequence
  SiRNA target sequence
aaaatataaaagacacgtat

SEQ ID NO: 241296 - DNA, 20 bp, Artificial sequence
  SiRNA target sequence
aaatataaaagacacgtatg

SEQ ID NO: 241297 - DNA, 20 bp, Artificial sequence
  SiRNA target sequence
aatataaaagacacgtatga

SEQ ID NO: 241298 - DNA, 20 bp, Artificial sequence
  SiRNA target sequence
atataaaagacacgtatgat

SEQ ID NO: 241299 - DNA, 20 bp, Artificial sequence
  SiRNA target sequence
tataaaagacacgtatgata

SEQ ID NO: 241300 - DNA, 20 bp, Artificial sequence
  SiRNA target sequence
ataaaagacacgtatgatac

SEQ ID NO: 241301 - DNA, 20 bp, Artificial sequence
  SiRNA target sequence
taaaagacacgtatgatact

SEQ ID NO: 241302 - DNA, 20 bp, Artificial sequence
  SiRNA target sequence
aaaagacacgtatgatactt

SEQ ID NO: 241303 - DNA, 20 bp, Artificial sequence
  SiRNA target sequence
aaagacacgtatgatacttg

SEQ ID NO: 241304 - DNA, 20 bp, Artificial sequence
  SiRNA target sequence
aagacacgtatgatacttgt

SEQ ID NO: 241305 - DNA, 20 bp, Artificial sequence
  SiRNA target sequence
agacacgtatgatacttgtc

SEQ ID NO: 241306 - DNA, 20 bp, Artificial sequence
  SiRNA target sequence
gacacgtatgatacttgtct

SEQ ID NO: 241307 - DNA, 20 bp, Artificial sequence
  SiRNA target sequence
acacgtatgatacttgtcta

SEQ ID NO: 241308 - DNA, 20 bp, Artificial sequence
  SiRNA target sequence
cacgtatgatacttgtctaa

SEQ ID NO: 241309 - DNA, 20 bp, Artificial sequence
  SiRNA target sequence
acgtatgatacttgtctaat

SEQ ID NO: 241310 - DNA, 20 bp, Artificial sequence
  SiRNA target sequence
cgtatgatacttgtctaata

SEQ ID NO: 241311 - DNA, 20 bp, Artificial sequence
  SiRNA target sequence
gtatgatacttgtctaatat

SEQ ID NO: 241312 - DNA, 20 bp, Artificial sequence
  SiRNA target sequence
tatgatacttgtctaatatc

SEQ ID NO: 241313 - DNA, 20 bp, Artificial sequence
  SiRNA target sequence
atgatacttgtctaatatct

SEQ ID NO: 241314 - DNA, 20 bp, Artificial sequence
  SiRNA target sequence
tgatacttgtctaatatctg

SEQ ID NO: 241315 - DNA, 20 bp, Artificial sequence
  SiRNA target sequence
gatacttgtctaatatctgg

SEQ ID NO: 241316 - DNA, 20 bp, Artificial sequence
  SiRNA target sequence
atacttgtctaatatctgga

SEQ ID NO: 241317 - DNA, 20 bp, Artificial sequence
  SiRNA target sequence
tacttgtctaatatctggaa

SEQ ID NO: 241318 - DNA, 20 bp, Artificial sequence
  SiRNA target sequence
acttgtctaatatctggaat

SEQ ID NO: 241319 - DNA, 20 bp, Artificial sequence
  SiRNA target sequence
cttgtctaatatctggaatt

SEQ ID NO: 241320 - DNA, 20 bp, Artificial sequence
  SiRNA target sequence
ttgtctaatatctggaattt

SEQ ID NO: 241321 - DNA, 20 bp, Artificial sequence
  SiRNA target sequence
tgtctaatatctggaatttc

SEQ ID NO: 241322 - DNA, 20 bp, Artificial sequence
  SiRNA target sequence
gtctaatatctggaatttct

SEQ ID NO: 241323 - DNA, 20 bp, Artificial sequence
  SiRNA target sequence
tctaatatctggaatttcta

SEQ ID NO: 241324 - DNA, 20 bp, Artificial sequence
  SiRNA target sequence
ctaatatctggaatttctat

SEQ ID NO: 241325 - DNA, 20 bp, Artificial sequence
  SiRNA target sequence
taatatctggaatttctata

SEQ ID NO: 241326 - DNA, 20 bp, Artificial sequence
  SiRNA target sequence
aatatctggaatttctataa

SEQ ID NO: 241327 - DNA, 20 bp, Artificial sequence
  SiRNA target sequence
atatctggaatttctataaa

SEQ ID NO: 241328 - DNA, 20 bp, Artificial sequence
  SiRNA target sequence
tatctggaatttctataaac

SEQ ID NO: 241329 - DNA, 20 bp, Artificial sequence
  SiRNA target sequence
atctggaatttctataaacg

SEQ ID NO: 241330 - DNA, 20 bp, Artificial sequence
  SiRNA target sequence
tctggaatttctataaacgt

SEQ ID NO: 241331 - DNA, 20 bp, Artificial sequence
  SiRNA target sequence
ctggaatttctataaacgtc

SEQ ID NO: 241332 - DNA, 20 bp, Artificial sequence
  SiRNA target sequence
tggaatttctataaacgtca

SEQ ID NO: 241333 - DNA, 20 bp, Artificial sequence
  SiRNA target sequence
ggaatttctataaacgtcaa

SEQ ID NO: 241334 - DNA, 20 bp, Artificial sequence
  SiRNA target sequence
gaatttctataaacgtcaaa

SEQ ID NO: 241335 - DNA, 20 bp, Artificial sequence
  SiRNA target sequence
aatttctataaacgtcaaaa

SEQ ID NO: 241336 - DNA, 20 bp, Artificial sequence
  SiRNA target sequence
atttctataaacgtcaaaaa

SEQ ID NO: 241337 - DNA, 20 bp, Artificial sequence
  SiRNA target sequence
tttctataaacgtcaaaaaa

SEQ ID NO: 241338 - DNA, 20 bp, Artificial sequence
  SiRNA target sequence
ttctataaacgtcaaaaaag

SEQ ID NO: 241339 - DNA, 20 bp, Artificial sequence
  SiRNA target sequence
tctataaacgtcaaaaaagt

SEQ ID NO: 241340 - DNA, 20 bp, Artificial sequence
  SiRNA target sequence
ctataaacgtcaaaaaagtt

SEQ ID NO: 241341 - DNA, 20 bp, Artificial sequence
  SiRNA target sequence
tataaacgtcaaaaaagttc

SEQ ID NO: 241342 - DNA, 20 bp, Artificial sequence
  SiRNA target sequence
ataaacgtcaaaaaagttcc

SEQ ID NO: 241343 - DNA, 20 bp, Artificial sequence
  SiRNA target sequence
taaacgtcaaaaaagttcca

SEQ ID NO: 241344 - DNA, 20 bp, Artificial sequence
  SiRNA target sequence
aaacgtcaaaaaagttccat

SEQ ID NO: 241345 - DNA, 20 bp, Artificial sequence
  SiRNA target sequence
aacgtcaaaaaagttccata

SEQ ID NO: 241346 - DNA, 20 bp, Artificial sequence
  SiRNA target sequence
acgtcaaaaaagttccatat

SEQ ID NO: 241347 - DNA, 20 bp, Artificial sequence
  SiRNA target sequence
cgtcaaaaaagttccatata

SEQ ID NO: 241348 - DNA, 20 bp, Artificial sequence
  SiRNA target sequence
gtcaaaaaagttccatataa

SEQ ID NO: 241349 - DNA, 20 bp, Artificial sequence
  SiRNA target sequence
tcaaaaaagttccatataaa

SEQ ID NO: 241350 - DNA, 20 bp, Artificial sequence
  SiRNA target sequence
caaaaaagttccatataaag

SEQ ID NO: 241351 - DNA, 20 bp, Artificial sequence
  SiRNA target sequence
aaaaaagttccatataaaga

SEQ ID NO: 241352 - DNA, 20 bp, Artificial sequence
  SiRNA target sequence
aaaaagttccatataaagag

SEQ ID NO: 241353 - DNA, 20 bp, Artificial sequence
  SiRNA target sequence
aaaagttccatataaagaga

SEQ ID NO: 241354 - DNA, 20 bp, Artificial sequence
  SiRNA target sequence
aaagttccatataaagagat

SEQ ID NO: 241355 - DNA, 20 bp, Artificial sequence
  SiRNA target sequence
aagttccatataaagagata

SEQ ID NO: 241356 - DNA, 20 bp, Artificial sequence
  SiRNA target sequence
agttccatataaagagataa

SEQ ID NO: 241357 - DNA, 20 bp, Artificial sequence
  SiRNA target sequence
gttccatataaagagataat

SEQ ID NO: 241358 - DNA, 20 bp, Artificial sequence
  SiRNA target sequence
ttccatataaagagataata

SEQ ID NO: 241359 - DNA, 20 bp, Artificial sequence
  SiRNA target sequence
tccatataaagagataatag

SEQ ID NO: 241360 - DNA, 20 bp, Artificial sequence
  SiRNA target sequence
ccatataaagagataataga

SEQ ID NO: 241361 - DNA, 20 bp, Artificial sequence
  SiRNA target sequence
catataaagagataatagat

SEQ ID NO: 241362 - DNA, 20 bp, Artificial sequence
  SiRNA target sequence
atataaagagataatagatt

SEQ ID NO: 241363 - DNA, 20 bp, Artificial sequence
  SiRNA target sequence
tataaagagataatagattt

SEQ ID NO: 241364 - DNA, 20 bp, Artificial sequence
  SiRNA target sequence
ataaagagataatagattta

SEQ ID NO: 241365 - DNA, 20 bp, Artificial sequence
  SiRNA target sequence
taaagagataatagatttac

SEQ ID NO: 241366 - DNA, 20 bp, Artificial sequence
  SiRNA target sequence
aaagagataatagatttacc

SEQ ID NO: 241367 - DNA, 20 bp, Artificial sequence
  SiRNA target sequence
aagagataatagatttacca

SEQ ID NO: 241368 - DNA, 20 bp, Artificial sequence
  SiRNA target sequence
agagataatagatttaccaa

SEQ ID NO: 241369 - DNA, 20 bp, Artificial sequence
  SiRNA target sequence
gagataatagatttaccaat

SEQ ID NO: 241370 - DNA, 20 bp, Artificial sequence
  SiRNA target sequence
agataatagatttaccaatt

SEQ ID NO: 241371 - DNA, 20 bp, Artificial sequence
  SiRNA target sequence
gataatagatttaccaattt

SEQ ID NO: 241372 - DNA, 20 bp, Artificial sequence
  SiRNA target sequence
ataatagatttaccaatttt

SEQ ID NO: 241373 - DNA, 20 bp, Artificial sequence
  SiRNA target sequence
taatagatttaccaattttg

SEQ ID NO: 241374 - DNA, 20 bp, Artificial sequence
  SiRNA target sequence
aatagatttaccaattttga

SEQ ID NO: 241375 - DNA, 20 bp, Artificial sequence
  SiRNA target sequence
atagatttaccaattttgat

SEQ ID NO: 241376 - DNA, 20 bp, Artificial sequence
  SiRNA target sequence
tagatttaccaattttgata

SEQ ID NO: 241377 - DNA, 20 bp, Artificial sequence
  SiRNA target sequence
agatttaccaattttgatac

SEQ ID NO: 241378 - DNA, 20 bp, Artificial sequence
  SiRNA target sequence
gatttaccaattttgataca

SEQ ID NO: 241379 - DNA, 20 bp, Artificial sequence
  SiRNA target sequence
atttaccaattttgatacat

SEQ ID NO: 241380 - DNA, 20 bp, Artificial sequence
  SiRNA target sequence
tttaccaattttgatacata

SEQ ID NO: 241381 - DNA, 20 bp, Artificial sequence
  SiRNA target sequence
ttaccaattttgatacatac

SEQ ID NO: 241382 - DNA, 20 bp, Artificial sequence
  SiRNA target sequence
taccaattttgatacataca

SEQ ID NO: 241383 - DNA, 20 bp, Artificial sequence
  SiRNA target sequence
accaattttgatacatacac

SEQ ID NO: 241384 - DNA, 20 bp, Artificial sequence
  SiRNA target sequence
ccaattttgatacatacacc

SEQ ID NO: 241385 - DNA, 20 bp, Artificial sequence
  SiRNA target sequence
caattttgatacatacacca

SEQ ID NO: 241386 - DNA, 20 bp, Artificial sequence
  SiRNA target sequence
aattttgatacatacaccat

SEQ ID NO: 241387 - DNA, 20 bp, Artificial sequence
  SiRNA target sequence
attttgatacatacaccatc

SEQ ID NO: 241388 - DNA, 20 bp, Artificial sequence
  SiRNA target sequence
ttttgatacatacaccatca

SEQ ID NO: 241389 - DNA, 20 bp, Artificial sequence
  SiRNA target sequence
tttgatacatacaccatcat

SEQ ID NO: 241390 - DNA, 20 bp, Artificial sequence
  SiRNA target sequence
ttgatacatacaccatcata

SEQ ID NO: 241391 - DNA, 20 bp, Artificial sequence
  SiRNA target sequence
tgatacatacaccatcataa

SEQ ID NO: 241392 - DNA, 20 bp, Artificial sequence
  SiRNA target sequence
gatacatacaccatcataaa

SEQ ID NO: 241393 - DNA, 20 bp, Artificial sequence
  SiRNA target sequence
atacatacaccatcataaaa

SEQ ID NO: 241394 - DNA, 20 bp, Artificial sequence
  SiRNA target sequence
tacatacaccatcataaaaa

SEQ ID NO: 241395 - DNA, 20 bp, Artificial sequence
  SiRNA target sequence
acatacaccatcataaaaac

SEQ ID NO: 241396 - DNA, 20 bp, Artificial sequence
  SiRNA target sequence
catacaccatcataaaaact

SEQ ID NO: 241397 - DNA, 20 bp, Artificial sequence
  SiRNA target sequence
atacaccatcataaaaactt

SEQ ID NO: 241398 - DNA, 20 bp, Artificial sequence
  SiRNA target sequence
tacaccatcataaaaacttt

SEQ ID NO: 241399 - DNA, 20 bp, Artificial sequence
  SiRNA target sequence
acaccatcataaaaactttt

SEQ ID NO: 241400 - DNA, 20 bp, Artificial sequence
  SiRNA target sequence
caccatcataaaaactttta

SEQ ID NO: 241401 - DNA, 20 bp, Artificial sequence
  SiRNA target sequence
accatcataaaaacttttaa

SEQ ID NO: 241402 - DNA, 20 bp, Artificial sequence
  SiRNA target sequence
ccatcataaaaacttttaaa

SEQ ID NO: 241403 - DNA, 20 bp, Artificial sequence
  SiRNA target sequence
catcataaaaacttttaaat

SEQ ID NO: 241404 - DNA, 20 bp, Artificial sequence
  SiRNA target sequence
atcataaaaacttttaaatt

SEQ ID NO: 241405 - DNA, 20 bp, Artificial sequence
  SiRNA target sequence
tcataaaaacttttaaattt

SEQ ID NO: 241406 - DNA, 20 bp, Artificial sequence
  SiRNA target sequence
cataaaaacttttaaattta

SEQ ID NO: 241407 - DNA, 20 bp, Artificial sequence
  SiRNA target sequence
ataaaaacttttaaatttat

SEQ ID NO: 241408 - DNA, 20 bp, Artificial sequence
  SiRNA target sequence
taaaaacttttaaatttata

SEQ ID NO: 241409 - DNA, 20 bp, Artificial sequence
  SiRNA target sequence
aaaaacttttaaatttatac

SEQ ID NO: 241410 - DNA, 20 bp, Artificial sequence
  SiRNA target sequence
aaaacttttaaatttatacc

SEQ ID NO: 241411 - DNA, 20 bp, Artificial sequence
  SiRNA target sequence
aaacttttaaatttatacct

SEQ ID NO: 241412 - DNA, 20 bp, Artificial sequence
  SiRNA target sequence
aacttttaaatttatacctg

SEQ ID NO: 241413 - DNA, 20 bp, Artificial sequence
  SiRNA target sequence
acttttaaatttatacctgt

SEQ ID NO: 241414 - DNA, 20 bp, Artificial sequence
  SiRNA target sequence
cttttaaatttatacctgta

SEQ ID NO: 241415 - DNA, 20 bp, Artificial sequence
  SiRNA target sequence
ttttaaatttatacctgtat

SEQ ID NO: 241416 - DNA, 20 bp, Artificial sequence
  SiRNA target sequence
tttaaatttatacctgtatt

SEQ ID NO: 241417 - DNA, 20 bp, Artificial sequence
  SiRNA target sequence
ttaaatttatacctgtattt

SEQ ID NO: 241418 - DNA, 20 bp, Artificial sequence
  SiRNA target sequence
taaatttatacctgtattta

SEQ ID NO: 241419 - DNA, 20 bp, Artificial sequence
  SiRNA target sequence
aaatttatacctgtatttaa

SEQ ID NO: 241420 - DNA, 20 bp, Artificial sequence
  SiRNA target sequence
aatttatacctgtatttaac

SEQ ID NO: 241421 - DNA, 20 bp, Artificial sequence
  SiRNA target sequence
atttatacctgtatttaaca

SEQ ID NO: 241422 - DNA, 20 bp, Artificial sequence
  SiRNA target sequence
tttatacctgtatttaacag

SEQ ID NO: 241423 - DNA, 20 bp, Artificial sequence
  SiRNA target sequence
ttatacctgtatttaacagg

SEQ ID NO: 241424 - DNA, 20 bp, Artificial sequence
  SiRNA target sequence
tatacctgtatttaacaggc

SEQ ID NO: 241425 - DNA, 20 bp, Artificial sequence
  SiRNA target sequence
atacctgtatttaacaggca

SEQ ID NO: 241426 - DNA, 20 bp, Artificial sequence
  SiRNA target sequence
tacctgtatttaacaggcac

SEQ ID NO: 241427 - DNA, 20 bp, Artificial sequence
  SiRNA target sequence
acctgtatttaacaggcacc

SEQ ID NO: 241428 - DNA, 20 bp, Artificial sequence
  SiRNA target sequence
cctgtatttaacaggcaccc

SEQ ID NO: 241429 - DNA, 20 bp, Artificial sequence
  SiRNA target sequence
ctgtatttaacaggcaccct

SEQ ID NO: 241430 - DNA, 20 bp, Artificial sequence
  SiRNA target sequence
tgtatttaacaggcaccctc

SEQ ID NO: 241431 - DNA, 20 bp, Artificial sequence
  SiRNA target sequence
gtatttaacaggcaccctca

SEQ ID NO: 241432 - DNA, 20 bp, Artificial sequence
  SiRNA target sequence
tatttaacaggcaccctcat

SEQ ID NO: 241433 - DNA, 20 bp, Artificial sequence
  SiRNA target sequence
atttaacaggcaccctcata

SEQ ID NO: 241434 - DNA, 20 bp, Artificial sequence
  SiRNA target sequence
tttaacaggcaccctcatag

SEQ ID NO: 241435 - DNA, 20 bp, Artificial sequence
  SiRNA target sequence
ttaacaggcaccctcataga

SEQ ID NO: 241436 - DNA, 20 bp, Artificial sequence
  SiRNA target sequence
taacaggcaccctcatagaa

SEQ ID NO: 241437 - DNA, 20 bp, Artificial sequence
  SiRNA target sequence
aacaggcaccctcatagaaa

SEQ ID NO: 241438 - DNA, 20 bp, Artificial sequence
  SiRNA target sequence
acaggcaccctcatagaaag

SEQ ID NO: 241439 - DNA, 20 bp, Artificial sequence
  SiRNA target sequence
caggcaccctcatagaaagc

SEQ ID NO: 241440 - DNA, 20 bp, Artificial sequence
  SiRNA target sequence
aggcaccctcatagaaagca

SEQ ID NO: 241441 - DNA, 20 bp, Artificial sequence
  SiRNA target sequence
ggcaccctcatagaaagcat

SEQ ID NO: 241442 - DNA, 20 bp, Artificial sequence
  SiRNA target sequence
gcaccctcatagaaagcatt

SEQ ID NO: 241443 - DNA, 20 bp, Artificial sequence
  SiRNA target sequence
caccctcatagaaagcattt

SEQ ID NO: 241444 - DNA, 20 bp, Artificial sequence
  SiRNA target sequence
accctcatagaaagcatttc

SEQ ID NO: 241445 - DNA, 20 bp, Artificial sequence
  SiRNA target sequence
ccctcatagaaagcatttct

SEQ ID NO: 241446 - DNA, 20 bp, Artificial sequence
  SiRNA target sequence
cctcatagaaagcatttctt

SEQ ID NO: 241447 - DNA, 20 bp, Artificial sequence
  SiRNA target sequence
ctcatagaaagcatttcttt

SEQ ID NO: 241448 - DNA, 20 bp, Artificial sequence
  SiRNA target sequence
tcatagaaagcatttctttt

SEQ ID NO: 241449 - DNA, 20 bp, Artificial sequence
  SiRNA target sequence
catagaaagcatttcttttg

SEQ ID NO: 241450 - DNA, 20 bp, Artificial sequence
  SiRNA target sequence
atagaaagcatttcttttgc

SEQ ID NO: 241451 - DNA, 20 bp, Artificial sequence
  SiRNA target sequence
tagaaagcatttcttttgct

SEQ ID NO: 241452 - DNA, 20 bp, Artificial sequence
  SiRNA target sequence
agaaagcatttcttttgcta

SEQ ID NO: 241453 - DNA, 20 bp, Artificial sequence
  SiRNA target sequence
gaaagcatttcttttgctaa

SEQ ID NO: 241454 - DNA, 20 bp, Artificial sequence
  SiRNA target sequence
aaagcatttcttttgctaaa

SEQ ID NO: 241455 - DNA, 20 bp, Artificial sequence
  SiRNA target sequence
aagcatttcttttgctaaat

SEQ ID NO: 241456 - DNA, 20 bp, Artificial sequence
  SiRNA target sequence
agcatttcttttgctaaatc

SEQ ID NO: 241457 - DNA, 20 bp, Artificial sequence
  SiRNA target sequence
gcatttcttttgctaaatca

SEQ ID NO: 241458 - DNA, 20 bp, Artificial sequence
  SiRNA target sequence
catttcttttgctaaatcaa

SEQ ID NO: 241459 - DNA, 20 bp, Artificial sequence
  SiRNA target sequence
atttcttttgctaaatcaaa

SEQ ID NO: 241460 - DNA, 20 bp, Artificial sequence
  SiRNA target sequence
tttcttttgctaaatcaaat

SEQ ID NO: 241461 - DNA, 20 bp, Artificial sequence
  SiRNA target sequence
ttcttttgctaaatcaaata

SEQ ID NO: 241462 - DNA, 20 bp, Artificial sequence
  SiRNA target sequence
tcttttgctaaatcaaataa

SEQ ID NO: 241463 - DNA, 20 bp, Artificial sequence
  SiRNA target sequence
cttttgctaaatcaaataaa

SEQ ID NO: 241464 - DNA, 20 bp, Artificial sequence
  SiRNA target sequence
ttttgctaaatcaaataaaa

SEQ ID NO: 241465 - DNA, 20 bp, Artificial sequence
  SiRNA target sequence
tttgctaaatcaaataaaac

SEQ ID NO: 241466 - DNA, 20 bp, Artificial sequence
  SiRNA target sequence
ttgctaaatcaaataaaaca

SEQ ID NO: 241467 - DNA, 20 bp, Artificial sequence
  SiRNA target sequence
tgctaaatcaaataaaacat

SEQ ID NO: 241468 - DNA, 20 bp, Artificial sequence
  SiRNA target sequence
gctaaatcaaataaaacata

SEQ ID NO: 241469 - DNA, 20 bp, Artificial sequence
  SiRNA target sequence
ctaaatcaaataaaacatat

SEQ ID NO: 241470 - DNA, 20 bp, Artificial sequence
  SiRNA target sequence
taaatcaaataaaacatatt

SEQ ID NO: 241471 - DNA, 20 bp, Artificial sequence
  SiRNA target sequence
aaatcaaataaaacatattt

SEQ ID NO: 241472 - DNA, 20 bp, Artificial sequence
  SiRNA target sequence
aatcaaataaaacatatttg

SEQ ID NO: 241473 - DNA, 20 bp, Artificial sequence
  SiRNA target sequence
atcaaataaaacatatttgg

SEQ ID NO: 241474 - DNA, 20 bp, Artificial sequence
  SiRNA target sequence
tcaaataaaacatatttggt

SEQ ID NO: 241475 - DNA, 20 bp, Artificial sequence
  SiRNA target sequence
caaataaaacatatttggta

SEQ ID NO: 241476 - DNA, 20 bp, Artificial sequence
  SiRNA target sequence
aaataaaacatatttggtaa

SEQ ID NO: 241477 - DNA, 20 bp, Artificial sequence
  SiRNA target sequence
aataaaacatatttggtaat

SEQ ID NO: 241478 - DNA, 20 bp, Artificial sequence
  SiRNA target sequence
ataaaacatatttggtaatt

SEQ ID NO: 241479 - DNA, 20 bp, Artificial sequence
  SiRNA target sequence
taaaacatatttggtaattt

SEQ ID NO: 241480 - DNA, 20 bp, Artificial sequence
  SiRNA target sequence
aaaacatatttggtaatttt

SEQ ID NO: 241481 - DNA, 20 bp, Artificial sequence
  SiRNA target sequence
aaacatatttggtaatttta

SEQ ID NO: 241482 - DNA, 20 bp, Artificial sequence
  SiRNA target sequence
aacatatttggtaattttag

SEQ ID NO: 241483 - DNA, 20 bp, Artificial sequence
  SiRNA target sequence
acatatttggtaattttaga

SEQ ID NO: 241484 - DNA, 20 bp, Artificial sequence
  SiRNA target sequence
catatttggtaattttagaa

SEQ ID NO: 241485 - DNA, 20 bp, Artificial sequence
  SiRNA target sequence
atatttggtaattttagaaa

SEQ ID NO: 241486 - DNA, 20 bp, Artificial sequence
  SiRNA target sequence
tatttggtaattttagaaaa

SEQ ID NO: 241487 - DNA, 20 bp, Artificial sequence
  SiRNA target sequence
atttggtaattttagaaaat

SEQ ID NO: 241488 - DNA, 20 bp, Artificial sequence
  SiRNA target sequence
tttggtaattttagaaaatg

SEQ ID NO: 241489 - DNA, 20 bp, Artificial sequence
  SiRNA target sequence
ttggtaattttagaaaatgc

SEQ ID NO: 241490 - DNA, 20 bp, Artificial sequence
  SiRNA target sequence
tggtaattttagaaaatgca

SEQ ID NO: 241491 - DNA, 20 bp, Artificial sequence
  SiRNA target sequence
ggtaattttagaaaatgcaa

SEQ ID NO: 241492 - DNA, 20 bp, Artificial sequence
  SiRNA target sequence
gtaattttagaaaatgcaaa

SEQ ID NO: 241493 - DNA, 20 bp, Artificial sequence
  SiRNA target sequence
taattttagaaaatgcaaat

SEQ ID NO: 241494 - DNA, 20 bp, Artificial sequence
  SiRNA target sequence
aattttagaaaatgcaaatc

SEQ ID NO: 241495 - DNA, 20 bp, Artificial sequence
  SiRNA target sequence
attttagaaaatgcaaatcc

SEQ ID NO: 241496 - DNA, 20 bp, Artificial sequence
  SiRNA target sequence
ttttagaaaatgcaaatcca

SEQ ID NO: 241497 - DNA, 20 bp, Artificial sequence
  SiRNA target sequence
tttagaaaatgcaaatccaa

SEQ ID NO: 241498 - DNA, 20 bp, Artificial sequence
  SiRNA target sequence
ttagaaaatgcaaatccaat

SEQ ID NO: 241499 - DNA, 20 bp, Artificial sequence
  SiRNA target sequence
tagaaaatgcaaatccaatg

SEQ ID NO: 241500 - DNA, 20 bp, Artificial sequence
  SiRNA target sequence
agaaaatgcaaatccaatgg

SEQ ID NO: 241501 - DNA, 20 bp, Artificial sequence
  SiRNA target sequence
gaaaatgcaaatccaatggt

SEQ ID NO: 241502 - DNA, 20 bp, Artificial sequence
  SiRNA target sequence
aaaatgcaaatccaatggtt

SEQ ID NO: 241503 - DNA, 20 bp, Artificial sequence
  SiRNA target sequence
aaatgcaaatccaatggttg

SEQ ID NO: 241504 - DNA, 20 bp, Artificial sequence
  SiRNA target sequence
aatgcaaatccaatggttgc

SEQ ID NO: 241505 - DNA, 20 bp, Artificial sequence
  SiRNA target sequence
atgcaaatccaatggttgca

SEQ ID NO: 241506 - DNA, 20 bp, Artificial sequence
  SiRNA target sequence
tgcaaatccaatggttgcac

SEQ ID NO: 241507 - DNA, 20 bp, Artificial sequence
  SiRNA target sequence
gcaaatccaatggttgcaca

SEQ ID NO: 241508 - DNA, 20 bp, Artificial sequence
  SiRNA target sequence
caaatccaatggttgcacac

SEQ ID NO: 241509 - DNA, 20 bp, Artificial sequence
  SiRNA target sequence
aaatccaatggttgcacacc

SEQ ID NO: 241510 - DNA, 20 bp, Artificial sequence
  SiRNA target sequence
aatccaatggttgcacacca

SEQ ID NO: 241511 - DNA, 20 bp, Artificial sequence
  SiRNA target sequence
atccaatggttgcacaccaa

SEQ ID NO: 241512 - DNA, 20 bp, Artificial sequence
  SiRNA target sequence
tccaatggttgcacaccaat

SEQ ID NO: 241513 - DNA, 20 bp, Artificial sequence
  SiRNA target sequence
ccaatggttgcacaccaatt

SEQ ID NO: 241514 - DNA, 20 bp, Artificial sequence
  SiRNA target sequence
caatggttgcacaccaattt

SEQ ID NO: 241515 - DNA, 20 bp, Artificial sequence
  SiRNA target sequence
aatggttgcacaccaatttt

SEQ ID NO: 241516 - DNA, 20 bp, Artificial sequence
  SiRNA target sequence
atggttgcacaccaattttc

SEQ ID NO: 241517 - DNA, 20 bp, Artificial sequence
  SiRNA target sequence
tggttgcacaccaattttca

SEQ ID NO: 241518 - DNA, 20 bp, Artificial sequence
  SiRNA target sequence
ggttgcacaccaattttcaa

SEQ ID NO: 241519 - DNA, 20 bp, Artificial sequence
  SiRNA target sequence
gttgcacaccaattttcaag

SEQ ID NO: 241520 - DNA, 20 bp, Artificial sequence
  SiRNA target sequence
ttgcacaccaattttcaaga

SEQ ID NO: 241521 - DNA, 20 bp, Artificial sequence
  SiRNA target sequence
tgcacaccaattttcaagat

SEQ ID NO: 241522 - DNA, 20 bp, Artificial sequence
  SiRNA target sequence
gcacaccaattttcaagatt

SEQ ID NO: 241523 - DNA, 20 bp, Artificial sequence
  SiRNA target sequence
cacaccaattttcaagattt

SEQ ID NO: 241524 - DNA, 20 bp, Artificial sequence
  SiRNA target sequence
acaccaattttcaagattta

SEQ ID NO: 241525 - DNA, 20 bp, Artificial sequence
  SiRNA target sequence
caccaattttcaagatttat

SEQ ID NO: 241526 - DNA, 20 bp, Artificial sequence
  SiRNA target sequence
accaattttcaagatttatt

SEQ ID NO: 241527 - DNA, 20 bp, Artificial sequence
  SiRNA target sequence
ccaattttcaagatttattc

SEQ ID NO: 241528 - DNA, 20 bp, Artificial sequence
  SiRNA target sequence
caattttcaagatttattct

SEQ ID NO: 241529 - DNA, 20 bp, Artificial sequence
  SiRNA target sequence
aattttcaagatttattctt

SEQ ID NO: 241530 - DNA, 20 bp, Artificial sequence
  SiRNA target sequence
attttcaagatttattctta

SEQ ID NO: 241531 - DNA, 20 bp, Artificial sequence
  SiRNA target sequence
ttttcaagatttattcttaa

SEQ ID NO: 241532 - DNA, 20 bp, Artificial sequence
  SiRNA target sequence
tttcaagatttattcttaag

SEQ ID NO: 241533 - DNA, 20 bp, Artificial sequence
  SiRNA target sequence
ttcaagatttattcttaaga

SEQ ID NO: 241534 - DNA, 20 bp, Artificial sequence
  SiRNA target sequence
tcaagatttattcttaagac

SEQ ID NO: 241535 - DNA, 20 bp, Artificial sequence
  SiRNA target sequence
caagatttattcttaagacc

SEQ ID NO: 241536 - DNA, 20 bp, Artificial sequence
  SiRNA target sequence
aagatttattcttaagaccg

SEQ ID NO: 241537 - DNA, 20 bp, Artificial sequence
  SiRNA target sequence
agatttattcttaagaccga

SEQ ID NO: 241538 - DNA, 20 bp, Artificial sequence
  SiRNA target sequence
gatttattcttaagaccgat

SEQ ID NO: 241539 - DNA, 20 bp, Artificial sequence
  SiRNA target sequence
atttattcttaagaccgatg

SEQ ID NO: 241540 - DNA, 20 bp, Artificial sequence
  SiRNA target sequence
tttattcttaagaccgatgg

SEQ ID NO: 241541 - DNA, 20 bp, Artificial sequence
  SiRNA target sequence
ttattcttaagaccgatgga

SEQ ID NO: 241542 - DNA, 20 bp, Artificial sequence
  SiRNA target sequence
tattcttaagaccgatggag

SEQ ID NO: 241543 - DNA, 20 bp, Artificial sequence
  SiRNA target sequence
attcttaagaccgatggagc

SEQ ID NO: 241544 - DNA, 20 bp, Artificial sequence
  SiRNA target sequence
ttcttaagaccgatggagct

SEQ ID NO: 241545 - DNA, 20 bp, Artificial sequence
  SiRNA target sequence
tcttaagaccgatggagctg

SEQ ID NO: 241546 - DNA, 20 bp, Artificial sequence
  SiRNA target sequence
cttaagaccgatggagctgt

SEQ ID NO: 241547 - DNA, 20 bp, Artificial sequence
  SiRNA target sequence
ttaagaccgatggagctgtg

SEQ ID NO: 241548 - DNA, 20 bp, Artificial sequence
  SiRNA target sequence
taagaccgatggagctgtgc

SEQ ID NO: 241549 - DNA, 20 bp, Artificial sequence
  SiRNA target sequence
aagaccgatggagctgtgcg

SEQ ID NO: 241550 - DNA, 20 bp, Artificial sequence
  SiRNA target sequence
agaccgatggagctgtgcgc

SEQ ID NO: 241551 - DNA, 20 bp, Artificial sequence
  SiRNA target sequence
gaccgatggagctgtgcgca

SEQ ID NO: 241552 - DNA, 20 bp, Artificial sequence
  SiRNA target sequence
accgatggagctgtgcgcaa

SEQ ID NO: 241553 - DNA, 20 bp, Artificial sequence
  SiRNA target sequence
ccgatggagctgtgcgcaaa

SEQ ID NO: 241554 - DNA, 20 bp, Artificial sequence
  SiRNA target sequence
cgatggagctgtgcgcaaat

SEQ ID NO: 241555 - DNA, 20 bp, Artificial sequence
  SiRNA target sequence
gatggagctgtgcgcaaatt

SEQ ID NO: 241556 - DNA, 20 bp, Artificial sequence
  SiRNA target sequence
atggagctgtgcgcaaattg

SEQ ID NO: 241557 - DNA, 20 bp, Artificial sequence
  SiRNA target sequence
tggagctgtgcgcaaattgt

SEQ ID NO: 241558 - DNA, 20 bp, Artificial sequence
  SiRNA target sequence
ggagctgtgcgcaaattgta

SEQ ID NO: 241559 - DNA, 20 bp, Artificial sequence
  SiRNA target sequence
gagctgtgcgcaaattgtaa

SEQ ID NO: 241560 - DNA, 20 bp, Artificial sequence
  SiRNA target sequence
agctgtgcgcaaattgtaaa

SEQ ID NO: 241561 - DNA, 20 bp, Artificial sequence
  SiRNA target sequence
gctgtgcgcaaattgtaaaa

SEQ ID NO: 241562 - DNA, 20 bp, Artificial sequence
  SiRNA target sequence
ctgtgcgcaaattgtaaaaa

SEQ ID NO: 241563 - DNA, 20 bp, Artificial sequence
  SiRNA target sequence
tgtgcgcaaattgtaaaaag

SEQ ID NO: 241564 - DNA, 20 bp, Artificial sequence
  SiRNA target sequence
gtgcgcaaattgtaaaaaga

SEQ ID NO: 241565 - DNA, 20 bp, Artificial sequence
  SiRNA target sequence
tgcgcaaattgtaaaaagaa

SEQ ID NO: 241566 - DNA, 20 bp, Artificial sequence
  SiRNA target sequence
gcgcaaattgtaaaaagaaa

SEQ ID NO: 241567 - DNA, 20 bp, Artificial sequence
  SiRNA target sequence
cgcaaattgtaaaaagaaag

SEQ ID NO: 241568 - DNA, 20 bp, Artificial sequence
  SiRNA target sequence
gcaaattgtaaaaagaaagt

SEQ ID NO: 241569 - DNA, 20 bp, Artificial sequence
  SiRNA target sequence
caaattgtaaaaagaaagtc

SEQ ID NO: 241570 - DNA, 20 bp, Artificial sequence
  SiRNA target sequence
aaattgtaaaaagaaagtcc

SEQ ID NO: 241571 - DNA, 20 bp, Artificial sequence
  SiRNA target sequence
aattgtaaaaagaaagtcct

SEQ ID NO: 241572 - DNA, 20 bp, Artificial sequence
  SiRNA target sequence
attgtaaaaagaaagtcctg

SEQ ID NO: 241573 - DNA, 20 bp, Artificial sequence
  SiRNA target sequence
ttgtaaaaagaaagtcctga

SEQ ID NO: 241574 - DNA, 20 bp, Artificial sequence
  SiRNA target sequence
tgtaaaaagaaagtcctgaa

SEQ ID NO: 241575 - DNA, 20 bp, Artificial sequence
  SiRNA target sequence
gtaaaaagaaagtcctgaaa

SEQ ID NO: 241576 - DNA, 20 bp, Artificial sequence
  SiRNA target sequence
taaaaagaaagtcctgaaat

SEQ ID NO: 241577 - DNA, 20 bp, Artificial sequence
  SiRNA target sequence
aaaaagaaagtcctgaaatt

SEQ ID NO: 241578 - DNA, 20 bp, Artificial sequence
  SiRNA target sequence
aaaagaaagtcctgaaatta

SEQ ID NO: 241579 - DNA, 20 bp, Artificial sequence
  SiRNA target sequence
aaagaaagtcctgaaattag

SEQ ID NO: 241580 - DNA, 20 bp, Artificial sequence
  SiRNA target sequence
aagaaagtcctgaaattaga

SEQ ID NO: 241581 - DNA, 20 bp, Artificial sequence
  SiRNA target sequence
agaaagtcctgaaattagag

SEQ ID NO: 241582 - DNA, 20 bp, Artificial sequence
  SiRNA target sequence
gaaagtcctgaaattagagc

SEQ ID NO: 241583 - DNA, 20 bp, Artificial sequence
  SiRNA target sequence
aaagtcctgaaattagagcg

SEQ ID NO: 241584 - DNA, 20 bp, Artificial sequence
  SiRNA target sequence
aagtcctgaaattagagcgg

SEQ ID NO: 241585 - DNA, 20 bp, Artificial sequence
  SiRNA target sequence
agtcctgaaattagagcggt

SEQ ID NO: 241586 - DNA, 20 bp, Artificial sequence
  SiRNA target sequence
gtcctgaaattagagcggta

SEQ ID NO: 241587 - DNA, 20 bp, Artificial sequence
  SiRNA target sequence
tcctgaaattagagcggtaa

SEQ ID NO: 241588 - DNA, 20 bp, Artificial sequence
  SiRNA target sequence
cctgaaattagagcggtaaa

SEQ ID NO: 241589 - DNA, 20 bp, Artificial sequence
  SiRNA target sequence
ctgaaattagagcggtaaaa

SEQ ID NO: 241590 - DNA, 20 bp, Artificial sequence
  SiRNA target sequence
tgaaattagagcggtaaaaa

SEQ ID NO: 241591 - DNA, 20 bp, Artificial sequence
  SiRNA target sequence
gaaattagagcggtaaaaaa

SEQ ID NO: 241592 - DNA, 20 bp, Artificial sequence
  SiRNA target sequence
aaattagagcggtaaaaaat

SEQ ID NO: 241593 - DNA, 20 bp, Artificial sequence
  SiRNA target sequence
aattagagcggtaaaaaata

SEQ ID NO: 241594 - DNA, 20 bp, Artificial sequence
  SiRNA target sequence
attagagcggtaaaaaatat

SEQ ID NO: 241595 - DNA, 20 bp, Artificial sequence
  SiRNA target sequence
ttagagcggtaaaaaatata

SEQ ID NO: 241596 - DNA, 20 bp, Artificial sequence
  SiRNA target sequence
tagagcggtaaaaaatatag

SEQ ID NO: 241597 - DNA, 20 bp, Artificial sequence
  SiRNA target sequence
agagcggtaaaaaatatagc

SEQ ID NO: 241598 - DNA, 20 bp, Artificial sequence
  SiRNA target sequence
gagcggtaaaaaatatagca

SEQ ID NO: 241599 - DNA, 20 bp, Artificial sequence
  SiRNA target sequence
agcggtaaaaaatatagcag

SEQ ID NO: 241600 - DNA, 20 bp, Artificial sequence
  SiRNA target sequence
gcggtaaaaaatatagcagc

SEQ ID NO: 241601 - DNA, 20 bp, Artificial sequence
  SiRNA target sequence
cggtaaaaaatatagcagca

SEQ ID NO: 241602 - DNA, 20 bp, Artificial sequence
  SiRNA target sequence
ggtaaaaaatatagcagcaa

SEQ ID NO: 241603 - DNA, 20 bp, Artificial sequence
  SiRNA target sequence
gtaaaaaatatagcagcaat

SEQ ID NO: 241604 - DNA, 20 bp, Artificial sequence
  SiRNA target sequence
taaaaaatatagcagcaata

SEQ ID NO: 241605 - DNA, 20 bp, Artificial sequence
  SiRNA target sequence
aaaaaatatagcagcaatag

SEQ ID NO: 241606 - DNA, 20 bp, Artificial sequence
  SiRNA target sequence
aaaaatatagcagcaatagg

SEQ ID NO: 241607 - DNA, 20 bp, Artificial sequence
  SiRNA target sequence
aaaatatagcagcaataggg

SEQ ID NO: 241608 - DNA, 20 bp, Artificial sequence
  SiRNA target sequence
aaatatagcagcaatagggg

SEQ ID NO: 241609 - DNA, 20 bp, Artificial sequence
  SiRNA target sequence
aatatagcagcaatagggga

SEQ ID NO: 241610 - DNA, 20 bp, Artificial sequence
  SiRNA target sequence
atatagcagcaataggggag

SEQ ID NO: 241611 - DNA, 20 bp, Artificial sequence
  SiRNA target sequence
tatagcagcaataggggagg

SEQ ID NO: 241612 - DNA, 20 bp, Artificial sequence
  SiRNA target sequence
atagcagcaataggggaggc

SEQ ID NO: 241613 - DNA, 20 bp, Artificial sequence
  SiRNA target sequence
tagcagcaataggggaggca

SEQ ID NO: 241614 - DNA, 20 bp, Artificial sequence
  SiRNA target sequence
agcagcaataggggaggcaa

SEQ ID NO: 241615 - DNA, 20 bp, Artificial sequence
  SiRNA target sequence
gcagcaataggggaggcaat

SEQ ID NO: 241616 - DNA, 20 bp, Artificial sequence
  SiRNA target sequence
cagcaataggggaggcaata

SEQ ID NO: 241617 - DNA, 20 bp, Artificial sequence
  SiRNA target sequence
agcaataggggaggcaatag

SEQ ID NO: 241618 - DNA, 20 bp, Artificial sequence
  SiRNA target sequence
gcaataggggaggcaataga

SEQ ID NO: 241619 - DNA, 20 bp, Artificial sequence
  SiRNA target sequence
caataggggaggcaatagat

SEQ ID NO: 241620 - DNA, 20 bp, Artificial sequence
  SiRNA target sequence
aataggggaggcaatagata

SEQ ID NO: 241621 - DNA, 20 bp, Artificial sequence
  SiRNA target sequence
ataggggaggcaatagatag

SEQ ID NO: 241622 - DNA, 20 bp, Artificial sequence
  SiRNA target sequence
taggggaggcaatagataga

SEQ ID NO: 241623 - DNA, 20 bp, Artificial sequence
  SiRNA target sequence
aggggaggcaatagatagat

SEQ ID NO: 241624 - DNA, 20 bp, Artificial sequence
  SiRNA target sequence
ggggaggcaatagatagata

SEQ ID NO: 241625 - DNA, 20 bp, Artificial sequence
  SiRNA target sequence
gggaggcaatagatagataa

SEQ ID NO: 241626 - DNA, 20 bp, Artificial sequence
  SiRNA target sequence
ggaggcaatagatagataaa

SEQ ID NO: 241627 - DNA, 20 bp, Artificial sequence
  SiRNA target sequence
gaggcaatagatagataaaa

SEQ ID NO: 241628 - DNA, 20 bp, Artificial sequence
  SiRNA target sequence
aggcaatagatagataaaag

SEQ ID NO: 241629 - DNA, 20 bp, Artificial sequence
  SiRNA target sequence
ggcaatagatagataaaaga

SEQ ID NO: 241630 - DNA, 20 bp, Artificial sequence
  SiRNA target sequence
gcaatagatagataaaagat

SEQ ID NO: 241631 - DNA, 20 bp, Artificial sequence
  SiRNA target sequence
caatagatagataaaagatc

SEQ ID NO: 241632 - DNA, 20 bp, Artificial sequence
  SiRNA target sequence
aatagatagataaaagatcc

SEQ ID NO: 241633 - DNA, 20 bp, Artificial sequence
  SiRNA target sequence
atagatagataaaagatcct

SEQ ID NO: 241634 - DNA, 20 bp, Artificial sequence
  SiRNA target sequence
tagatagataaaagatcctt

SEQ ID NO: 241635 - DNA, 20 bp, Artificial sequence
  SiRNA target sequence
agatagataaaagatccttg

SEQ ID NO: 241636 - DNA, 20 bp, Artificial sequence
  SiRNA target sequence
gatagataaaagatccttga

SEQ ID NO: 241637 - DNA, 20 bp, Artificial sequence
  SiRNA target sequence
atagataaaagatccttgat

SEQ ID NO: 241638 - DNA, 20 bp, Artificial sequence
  SiRNA target sequence
tagataaaagatccttgatg

SEQ ID NO: 241639 - DNA, 20 bp, Artificial sequence
  SiRNA target sequence
agataaaagatccttgatgc

SEQ ID NO: 241640 - DNA, 20 bp, Artificial sequence
  SiRNA target sequence
gataaaagatccttgatgca

SEQ ID NO: 241641 - DNA, 20 bp, Artificial sequence
  SiRNA target sequence
ataaaagatccttgatgcaa

SEQ ID NO: 241642 - DNA, 20 bp, Artificial sequence
  SiRNA target sequence
taaaagatccttgatgcaat

SEQ ID NO: 241643 - DNA, 20 bp, Artificial sequence
  SiRNA target sequence
aaaagatccttgatgcaatg

SEQ ID NO: 241644 - DNA, 20 bp, Artificial sequence
  SiRNA target sequence
aaagatccttgatgcaatgc

SEQ ID NO: 241645 - DNA, 20 bp, Artificial sequence
  SiRNA target sequence
aagatccttgatgcaatgcg

SEQ ID NO: 241646 - DNA, 20 bp, Artificial sequence
  SiRNA target sequence
agatccttgatgcaatgcga

SEQ ID NO: 241647 - DNA, 20 bp, Artificial sequence
  SiRNA target sequence
gatccttgatgcaatgcgat

SEQ ID NO: 241648 - DNA, 20 bp, Artificial sequence
  SiRNA target sequence
atccttgatgcaatgcgatt

SEQ ID NO: 241649 - DNA, 20 bp, Artificial sequence
  SiRNA target sequence
tccttgatgcaatgcgattt

SEQ ID NO: 241650 - DNA, 20 bp, Artificial sequence
  SiRNA target sequence
ccttgatgcaatgcgatttc

SEQ ID NO: 241651 - DNA, 20 bp, Artificial sequence
  SiRNA target sequence
cttgatgcaatgcgatttcc

SEQ ID NO: 241652 - DNA, 20 bp, Artificial sequence
  SiRNA target sequence
ttgatgcaatgcgatttcca

SEQ ID NO: 241653 - DNA, 20 bp, Artificial sequence
  SiRNA target sequence
tgatgcaatgcgatttccac

SEQ ID NO: 241654 - DNA, 20 bp, Artificial sequence
  SiRNA target sequence
gatgcaatgcgatttccacg

SEQ ID NO: 241655 - DNA, 20 bp, Artificial sequence
  SiRNA target sequence
atgcaatgcgatttccacgg

SEQ ID NO: 241656 - DNA, 20 bp, Artificial sequence
  SiRNA target sequence
tgcaatgcgatttccacgga

SEQ ID NO: 241657 - DNA, 20 bp, Artificial sequence
  SiRNA target sequence
gcaatgcgatttccacggat

SEQ ID NO: 241658 - DNA, 20 bp, Artificial sequence
  SiRNA target sequence
caatgcgatttccacggatt

SEQ ID NO: 241659 - DNA, 20 bp, Artificial sequence
  SiRNA target sequence
aatgcgatttccacggatta

SEQ ID NO: 241660 - DNA, 20 bp, Artificial sequence
  SiRNA target sequence
atgcgatttccacggattac

SEQ ID NO: 241661 - DNA, 20 bp, Artificial sequence
  SiRNA target sequence
tgcgatttccacggattaca

SEQ ID NO: 241662 - DNA, 20 bp, Artificial sequence
  SiRNA target sequence
gcgatttccacggattacaa

SEQ ID NO: 241663 - DNA, 20 bp, Artificial sequence
  SiRNA target sequence
cgatttccacggattacaaa

SEQ ID NO: 241664 - DNA, 20 bp, Artificial sequence
  SiRNA target sequence
gatttccacggattacaaag

SEQ ID NO: 241665 - DNA, 20 bp, Artificial sequence
  SiRNA target sequence
atttccacggattacaaagt

SEQ ID NO: 241666 - DNA, 20 bp, Artificial sequence
  SiRNA target sequence
tttccacggattacaaagtt

SEQ ID NO: 241667 - DNA, 20 bp, Artificial sequence
  SiRNA target sequence
ttccacggattacaaagtta

SEQ ID NO: 241668 - DNA, 20 bp, Artificial sequence
  SiRNA target sequence
tccacggattacaaagttat

SEQ ID NO: 241669 - DNA, 20 bp, Artificial sequence
  SiRNA target sequence
ccacggattacaaagttata

SEQ ID NO: 241670 - DNA, 20 bp, Artificial sequence
  SiRNA target sequence
cacggattacaaagttataa

SEQ ID NO: 241671 - DNA, 20 bp, Artificial sequence
  SiRNA target sequence
acggattacaaagttataaa

SEQ ID NO: 241672 - DNA, 20 bp, Artificial sequence
  SiRNA target sequence
cggattacaaagttataaaa

SEQ ID NO: 241673 - DNA, 20 bp, Artificial sequence
  SiRNA target sequence
ggattacaaagttataaaat

SEQ ID NO: 241674 - DNA, 20 bp, Artificial sequence
  SiRNA target sequence
gattacaaagttataaaata

SEQ ID NO: 241675 - DNA, 20 bp, Artificial sequence
  SiRNA target sequence
attacaaagttataaaataa

SEQ ID NO: 241676 - DNA, 20 bp, Artificial sequence
  SiRNA target sequence
ttacaaagttataaaataat

SEQ ID NO: 241677 - DNA, 20 bp, Artificial sequence
  SiRNA target sequence
tacaaagttataaaataatg

SEQ ID NO: 241678 - DNA, 20 bp, Artificial sequence
  SiRNA target sequence
acaaagttataaaataatga

SEQ ID NO: 241679 - DNA, 20 bp, Artificial sequence
  SiRNA target sequence
caaagttataaaataatgat

SEQ ID NO: 241680 - DNA, 20 bp, Artificial sequence
  SiRNA target sequence
aaagttataaaataatgata

SEQ ID NO: 241681 - DNA, 20 bp, Artificial sequence
  SiRNA target sequence
aagttataaaataatgatac

SEQ ID NO: 241682 - DNA, 20 bp, Artificial sequence
  SiRNA target sequence
agttataaaataatgataca

SEQ ID NO: 241683 - DNA, 20 bp, Artificial sequence
  SiRNA target sequence
gttataaaataatgatacag

SEQ ID NO: 241684 - DNA, 20 bp, Artificial sequence
  SiRNA target sequence
ttataaaataatgatacagc

SEQ ID NO: 241685 - DNA, 20 bp, Artificial sequence
  SiRNA target sequence
tataaaataatgatacagca

SEQ ID NO: 241686 - DNA, 20 bp, Artificial sequence
  SiRNA target sequence
ataaaataatgatacagcac

SEQ ID NO: 241687 - DNA, 20 bp, Artificial sequence
  SiRNA target sequence
taaaataatgatacagcact

SEQ ID NO: 241688 - DNA, 20 bp, Artificial sequence
  SiRNA target sequence
aaaataatgatacagcacta

SEQ ID NO: 241689 - DNA, 20 bp, Artificial sequence
  SiRNA target sequence
aaataatgatacagcactaa

SEQ ID NO: 241690 - DNA, 20 bp, Artificial sequence
  SiRNA target sequence
aataatgatacagcactaat

SEQ ID NO: 241691 - DNA, 20 bp, Artificial sequence
  SiRNA target sequence
ataatgatacagcactaatc

SEQ ID NO: 241692 - DNA, 20 bp, Artificial sequence
  SiRNA target sequence
taatgatacagcactaatcg

SEQ ID NO: 241693 - DNA, 20 bp, Artificial sequence
  SiRNA target sequence
aatgatacagcactaatcgt

SEQ ID NO: 241694 - DNA, 20 bp, Artificial sequence
  SiRNA target sequence
atgatacagcactaatcgtt

SEQ ID NO: 241695 - DNA, 20 bp, Artificial sequence
  SiRNA target sequence
tgatacagcactaatcgtta

SEQ ID NO: 241696 - DNA, 20 bp, Artificial sequence
  SiRNA target sequence
gatacagcactaatcgttaa

SEQ ID NO: 241697 - DNA, 20 bp, Artificial sequence
  SiRNA target sequence
atacagcactaatcgttaag

SEQ ID NO: 241698 - DNA, 20 bp, Artificial sequence
  SiRNA target sequence
tacagcactaatcgttaagg

SEQ ID NO: 241699 - DNA, 20 bp, Artificial sequence
  SiRNA target sequence
acagcactaatcgttaagga

SEQ ID NO: 241700 - DNA, 20 bp, Artificial sequence
  SiRNA target sequence
cagcactaatcgttaaggaa

SEQ ID NO: 241701 - DNA, 20 bp, Artificial sequence
  SiRNA target sequence
agcactaatcgttaaggaag

SEQ ID NO: 241702 - DNA, 20 bp, Artificial sequence
  SiRNA target sequence
gcactaatcgttaaggaagt

SEQ ID NO: 241703 - DNA, 20 bp, Artificial sequence
  SiRNA target sequence
cactaatcgttaaggaagtt

SEQ ID NO: 241704 - DNA, 20 bp, Artificial sequence
  SiRNA target sequence
actaatcgttaaggaagttg

SEQ ID NO: 241705 - DNA, 20 bp, Artificial sequence
  SiRNA target sequence
ctaatcgttaaggaagttgt

SEQ ID NO: 241706 - DNA, 20 bp, Artificial sequence
  SiRNA target sequence
taatcgttaaggaagttgtt

SEQ ID NO: 241707 - DNA, 20 bp, Artificial sequence
  SiRNA target sequence
aatcgttaaggaagttgtta

SEQ ID NO: 241708 - DNA, 20 bp, Artificial sequence
  SiRNA target sequence
atcgttaaggaagttgttac

SEQ ID NO: 241709 - DNA, 20 bp, Artificial sequence
  SiRNA target sequence
tcgttaaggaagttgttact

SEQ ID NO: 241710 - DNA, 20 bp, Artificial sequence
  SiRNA target sequence
cgttaaggaagttgttacta

SEQ ID NO: 241711 - DNA, 20 bp, Artificial sequence
  SiRNA target sequence
gttaaggaagttgttactaa

SEQ ID NO: 241712 - DNA, 20 bp, Artificial sequence
  SiRNA target sequence
ttaaggaagttgttactaaa

SEQ ID NO: 241713 - DNA, 20 bp, Artificial sequence
  SiRNA target sequence
taaggaagttgttactaaat

SEQ ID NO: 241714 - DNA, 20 bp, Artificial sequence
  SiRNA target sequence
aaggaagttgttactaaata

SEQ ID NO: 241715 - DNA, 20 bp, Artificial sequence
  SiRNA target sequence
aggaagttgttactaaatat

SEQ ID NO: 241716 - DNA, 20 bp, Artificial sequence
  SiRNA target sequence
ggaagttgttactaaatatt

SEQ ID NO: 241717 - DNA, 20 bp, Artificial sequence
  SiRNA target sequence
gaagttgttactaaatattt

SEQ ID NO: 241718 - DNA, 20 bp, Artificial sequence
  SiRNA target sequence
aagttgttactaaatatttt

SEQ ID NO: 241719 - DNA, 20 bp, Artificial sequence
  SiRNA target sequence
agttgttactaaatattttt

SEQ ID NO: 241720 - DNA, 20 bp, Artificial sequence
  SiRNA target sequence
gttgttactaaatatttttg

SEQ ID NO: 241721 - DNA, 20 bp, Artificial sequence
  SiRNA target sequence
ttgttactaaatatttttga

SEQ ID NO: 241722 - DNA, 20 bp, Artificial sequence
  SiRNA target sequence
tgttactaaatatttttgag

SEQ ID NO: 241723 - DNA, 20 bp, Artificial sequence
  SiRNA target sequence
gttactaaatatttttgaga

SEQ ID NO: 241724 - DNA, 20 bp, Artificial sequence
  SiRNA target sequence
ttactaaatatttttgagaa

SEQ ID NO: 241725 - DNA, 20 bp, Artificial sequence
  SiRNA target sequence
tactaaatatttttgagaat

SEQ ID NO: 241726 - DNA, 20 bp, Artificial sequence
  SiRNA target sequence
actaaatatttttgagaata

SEQ ID NO: 241727 - DNA, 20 bp, Artificial sequence
  SiRNA target sequence
ctaaatatttttgagaataa

SEQ ID NO: 241728 - DNA, 20 bp, Artificial sequence
  SiRNA target sequence
taaatatttttgagaataat

SEQ ID NO: 241729 - DNA, 20 bp, Artificial sequence
  SiRNA target sequence
aaatatttttgagaataatc

SEQ ID NO: 241730 - DNA, 20 bp, Artificial sequence
  SiRNA target sequence
aatatttttgagaataatct

SEQ ID NO: 241731 - DNA, 20 bp, Artificial sequence
  SiRNA target sequence
atatttttgagaataatctt

SEQ ID NO: 241732 - DNA, 20 bp, Artificial sequence
  SiRNA target sequence
tatttttgagaataatcttt

SEQ ID NO: 241733 - DNA, 20 bp, Artificial sequence
  SiRNA target sequence
atttttgagaataatctttc

SEQ ID NO: 241734 - DNA, 20 bp, Artificial sequence
  SiRNA target sequence
tttttgagaataatctttcg

SEQ ID NO: 241735 - DNA, 20 bp, Artificial sequence
  SiRNA target sequence
ttttgagaataatctttcgg

SEQ ID NO: 241736 - DNA, 20 bp, Artificial sequence
  SiRNA target sequence
tttgagaataatctttcgga

SEQ ID NO: 241737 - DNA, 20 bp, Artificial sequence
  SiRNA target sequence
ttgagaataatctttcggag

SEQ ID NO: 241738 - DNA, 20 bp, Artificial sequence
  SiRNA target sequence
tgagaataatctttcggagg

SEQ ID NO: 241739 - DNA, 20 bp, Artificial sequence
  SiRNA target sequence
gagaataatctttcggaggc

SEQ ID NO: 241740 - DNA, 20 bp, Artificial sequence
  SiRNA target sequence
agaataatctttcggaggca

SEQ ID NO: 241741 - DNA, 20 bp, Artificial sequence
  SiRNA target sequence
gaataatctttcggaggcat

SEQ ID NO: 241742 - DNA, 20 bp, Artificial sequence
  SiRNA target sequence
aataatctttcggaggcata

SEQ ID NO: 241743 - DNA, 20 bp, Artificial sequence
  SiRNA target sequence
ataatctttcggaggcatat

SEQ ID NO: 241744 - DNA, 20 bp, Artificial sequence
  SiRNA target sequence
taatctttcggaggcatatt

SEQ ID NO: 241745 - DNA, 20 bp, Artificial sequence
  SiRNA target sequence
aatctttcggaggcatatta

SEQ ID NO: 241746 - DNA, 20 bp, Artificial sequence
  SiRNA target sequence
atctttcggaggcatattat

SEQ ID NO: 241747 - DNA, 20 bp, Artificial sequence
  SiRNA target sequence
tctttcggaggcatattatt

SEQ ID NO: 241748 - DNA, 20 bp, Artificial sequence
  SiRNA target sequence
ctttcggaggcatattatta

SEQ ID NO: 241749 - DNA, 20 bp, Artificial sequence
  SiRNA target sequence
tttcggaggcatattattaa

SEQ ID NO: 241750 - DNA, 20 bp, Artificial sequence
  SiRNA target sequence
ttcggaggcatattattaat

SEQ ID NO: 241751 - DNA, 20 bp, Artificial sequence
  SiRNA target sequence
tcggaggcatattattaatt

SEQ ID NO: 241752 - DNA, 20 bp, Artificial sequence
  SiRNA target sequence
cggaggcatattattaattc

SEQ ID NO: 241753 - DNA, 20 bp, Artificial sequence
  SiRNA target sequence
ggaggcatattattaattct

SEQ ID NO: 241754 - DNA, 20 bp, Artificial sequence
  SiRNA target sequence
gaggcatattattaattctg

SEQ ID NO: 241755 - DNA, 20 bp, Artificial sequence
  SiRNA target sequence
aggcatattattaattctgc

SEQ ID NO: 241756 - DNA, 20 bp, Artificial sequence
  SiRNA target sequence
ggcatattattaattctgct

SEQ ID NO: 241757 - DNA, 20 bp, Artificial sequence
  SiRNA target sequence
gcatattattaattctgctt

SEQ ID NO: 241758 - DNA, 20 bp, Artificial sequence
  SiRNA target sequence
catattattaattctgcttc

SEQ ID NO: 241759 - DNA, 20 bp, Artificial sequence
  SiRNA target sequence
atattattaattctgcttcc

SEQ ID NO: 241760 - DNA, 20 bp, Artificial sequence
  SiRNA target sequence
tattattaattctgcttccc

SEQ ID NO: 241761 - DNA, 20 bp, Artificial sequence
  SiRNA target sequence
attattaattctgcttcccg

SEQ ID NO: 241762 - DNA, 20 bp, Artificial sequence
  SiRNA target sequence
ttattaattctgcttcccgt

SEQ ID NO: 241763 - DNA, 20 bp, Artificial sequence
  SiRNA target sequence
tattaattctgcttcccgta

SEQ ID NO: 241764 - DNA, 20 bp, Artificial sequence
  SiRNA target sequence
attaattctgcttcccgtag

SEQ ID NO: 241765 - DNA, 20 bp, Artificial sequence
  SiRNA target sequence
ttaattctgcttcccgtaga

SEQ ID NO: 241766 - DNA, 20 bp, Artificial sequence
  SiRNA target sequence
taattctgcttcccgtagat

SEQ ID NO: 241767 - DNA, 20 bp, Artificial sequence
  SiRNA target sequence
aattctgcttcccgtagata

SEQ ID NO: 241768 - DNA, 20 bp, Artificial sequence
  SiRNA target sequence
attctgcttcccgtagataa

SEQ ID NO: 241769 - DNA, 20 bp, Artificial sequence
  SiRNA target sequence
ttctgcttcccgtagataaa

SEQ ID NO: 241770 - DNA, 20 bp, Artificial sequence
  SiRNA target sequence
tctgcttcccgtagataaag

SEQ ID NO: 241771 - DNA, 20 bp, Artificial sequence
  SiRNA target sequence
ctgcttcccgtagataaaga

SEQ ID NO: 241772 - DNA, 20 bp, Artificial sequence
  SiRNA target sequence
tgcttcccgtagataaagaa

SEQ ID NO: 241773 - DNA, 20 bp, Artificial sequence
  SiRNA target sequence
gcttcccgtagataaagaat

SEQ ID NO: 241774 - DNA, 20 bp, Artificial sequence
  SiRNA target sequence
cttcccgtagataaagaatt

SEQ ID NO: 241775 - DNA, 20 bp, Artificial sequence
  SiRNA target sequence
ttcccgtagataaagaattt

SEQ ID NO: 241776 - DNA, 20 bp, Artificial sequence
  SiRNA target sequence
tcccgtagataaagaatttt

SEQ ID NO: 241777 - DNA, 20 bp, Artificial sequence
  SiRNA target sequence
cccgtagataaagaattttt

SEQ ID NO: 241778 - DNA, 20 bp, Artificial sequence
  SiRNA target sequence
ccgtagataaagaatttttt

SEQ ID NO: 241779 - DNA, 20 bp, Artificial sequence
  SiRNA target sequence
cgtagataaagaatttttta

SEQ ID NO: 241780 - DNA, 20 bp, Artificial sequence
  SiRNA target sequence
gtagataaagaattttttaa

SEQ ID NO: 241781 - DNA, 20 bp, Artificial sequence
  SiRNA target sequence
tagataaagaattttttaag

SEQ ID NO: 241782 - DNA, 20 bp, Artificial sequence
  SiRNA target sequence
agataaagaattttttaagg

SEQ ID NO: 241783 - DNA, 20 bp, Artificial sequence
  SiRNA target sequence
gataaagaattttttaagga

SEQ ID NO: 241784 - DNA, 20 bp, Artificial sequence
  SiRNA target sequence
ataaagaattttttaaggac

SEQ ID NO: 241785 - DNA, 20 bp, Artificial sequence
  SiRNA target sequence
taaagaattttttaaggaca

SEQ ID NO: 241786 - DNA, 20 bp, Artificial sequence
  SiRNA target sequence
aaagaattttttaaggacat

SEQ ID NO: 241787 - DNA, 20 bp, Artificial sequence
  SiRNA target sequence
aagaattttttaaggacata

SEQ ID NO: 241788 - DNA, 20 bp, Artificial sequence
  SiRNA target sequence
agaattttttaaggacatat

SEQ ID NO: 241789 - DNA, 20 bp, Artificial sequence
  SiRNA target sequence
gaattttttaaggacatatc

SEQ ID NO: 241790 - DNA, 20 bp, Artificial sequence
  SiRNA target sequence
aattttttaaggacatatca

SEQ ID NO: 241791 - DNA, 20 bp, Artificial sequence
  SiRNA target sequence
attttttaaggacatatcaa

SEQ ID NO: 241792 - DNA, 20 bp, Artificial sequence
  SiRNA target sequence
ttttttaaggacatatcaat

SEQ ID NO: 241793 - DNA, 20 bp, Artificial sequence
  SiRNA target sequence
tttttaaggacatatcaata

SEQ ID NO: 241794 - DNA, 20 bp, Artificial sequence
  SiRNA target sequence
ttttaaggacatatcaataa

SEQ ID NO: 241795 - DNA, 20 bp, Artificial sequence
  SiRNA target sequence
tttaaggacatatcaataaa

SEQ ID NO: 241796 - DNA, 20 bp, Artificial sequence
  SiRNA target sequence
ttaaggacatatcaataaat

SEQ ID NO: 241797 - DNA, 20 bp, Artificial sequence
  SiRNA target sequence
taaggacatatcaataaatc

SEQ ID NO: 241798 - DNA, 20 bp, Artificial sequence
  SiRNA target sequence
aaggacatatcaataaatcc

SEQ ID NO: 241799 - DNA, 20 bp, Artificial sequence
  SiRNA target sequence
aggacatatcaataaatcct

SEQ ID NO: 241800 - DNA, 20 bp, Artificial sequence
  SiRNA target sequence
ggacatatcaataaatcctg

SEQ ID NO: 241801 - DNA, 20 bp, Artificial sequence
  SiRNA target sequence
gacatatcaataaatcctgc

SEQ ID NO: 241802 - DNA, 20 bp, Artificial sequence
  SiRNA target sequence
acatatcaataaatcctgca

SEQ ID NO: 241803 - DNA, 20 bp, Artificial sequence
  SiRNA target sequence
catatcaataaatcctgcat

SEQ ID NO: 241804 - DNA, 20 bp, Artificial sequence
  SiRNA target sequence
atatcaataaatcctgcatt

SEQ ID NO: 241805 - DNA, 20 bp, Artificial sequence
  SiRNA target sequence
tatcaataaatcctgcatta

SEQ ID NO: 241806 - DNA, 20 bp, Artificial sequence
  SiRNA target sequence
atcaataaatcctgcattaa

SEQ ID NO: 241807 - DNA, 20 bp, Artificial sequence
  SiRNA target sequence
tcaataaatcctgcattaat

SEQ ID NO: 241808 - DNA, 20 bp, Artificial sequence
  SiRNA target sequence
caataaatcctgcattaata

SEQ ID NO: 241809 - DNA, 20 bp, Artificial sequence
  SiRNA target sequence
aataaatcctgcattaatag

SEQ ID NO: 241810 - DNA, 20 bp, Artificial sequence
  SiRNA target sequence
ataaatcctgcattaatagc

SEQ ID NO: 241811 - DNA, 20 bp, Artificial sequence
  SiRNA target sequence
taaatcctgcattaatagca

SEQ ID NO: 241812 - DNA, 20 bp, Artificial sequence
  SiRNA target sequence
aaatcctgcattaatagcat

SEQ ID NO: 241813 - DNA, 20 bp, Artificial sequence
  SiRNA target sequence
aatcctgcattaatagcata

SEQ ID NO: 241814 - DNA, 20 bp, Artificial sequence
  SiRNA target sequence
atcctgcattaatagcatag

SEQ ID NO: 241815 - DNA, 20 bp, Artificial sequence
  SiRNA target sequence
tcctgcattaatagcataga

SEQ ID NO: 241816 - DNA, 20 bp, Artificial sequence
  SiRNA target sequence
cctgcattaatagcatagat

SEQ ID NO: 241817 - DNA, 20 bp, Artificial sequence
  SiRNA target sequence
ctgcattaatagcatagatt

SEQ ID NO: 241818 - DNA, 20 bp, Artificial sequence
  SiRNA target sequence
tgcattaatagcatagatta

SEQ ID NO: 241819 - DNA, 20 bp, Artificial sequence
  SiRNA target sequence
gcattaatagcatagattaa

SEQ ID NO: 241820 - DNA, 20 bp, Artificial sequence
  SiRNA target sequence
cattaatagcatagattaat

SEQ ID NO: 241821 - DNA, 20 bp, Artificial sequence
  SiRNA target sequence
attaatagcatagattaatg

SEQ ID NO: 241822 - DNA, 20 bp, Artificial sequence
  SiRNA target sequence
ttaatagcatagattaatgc

SEQ ID NO: 241823 - DNA, 20 bp, Artificial sequence
  SiRNA target sequence
taatagcatagattaatgcc

SEQ ID NO: 241824 - DNA, 20 bp, Artificial sequence
  SiRNA target sequence
aatagcatagattaatgccg

SEQ ID NO: 241825 - DNA, 20 bp, Artificial sequence
  SiRNA target sequence
atagcatagattaatgccgc

SEQ ID NO: 241826 - DNA, 20 bp, Artificial sequence
  SiRNA target sequence
tagcatagattaatgccgct

SEQ ID NO: 241827 - DNA, 20 bp, Artificial sequence
  SiRNA target sequence
agcatagattaatgccgctg

SEQ ID NO: 241828 - DNA, 20 bp, Artificial sequence
  SiRNA target sequence
gcatagattaatgccgctgc

SEQ ID NO: 241829 - DNA, 20 bp, Artificial sequence
  SiRNA target sequence
catagattaatgccgctgca

SEQ ID NO: 241830 - DNA, 20 bp, Artificial sequence
  SiRNA target sequence
atagattaatgccgctgcac

SEQ ID NO: 241831 - DNA, 20 bp, Artificial sequence
  SiRNA target sequence
tagattaatgccgctgcaca

SEQ ID NO: 241832 - DNA, 20 bp, Artificial sequence
  SiRNA target sequence
agattaatgccgctgcacac

SEQ ID NO: 241833 - DNA, 20 bp, Artificial sequence
  SiRNA target sequence
gattaatgccgctgcacaca

SEQ ID NO: 241834 - DNA, 20 bp, Artificial sequence
  SiRNA target sequence
attaatgccgctgcacacat

SEQ ID NO: 241835 - DNA, 20 bp, Artificial sequence
  SiRNA target sequence
ttaatgccgctgcacacata

SEQ ID NO: 241836 - DNA, 20 bp, Artificial sequence
  SiRNA target sequence
taatgccgctgcacacatat

SEQ ID NO: 241837 - DNA, 20 bp, Artificial sequence
  SiRNA target sequence
aatgccgctgcacacatatt

SEQ ID NO: 241838 - DNA, 20 bp, Artificial sequence
  SiRNA target sequence
atgccgctgcacacatattt

SEQ ID NO: 241839 - DNA, 20 bp, Artificial sequence
  SiRNA target sequence
tgccgctgcacacatatttc

SEQ ID NO: 241840 - DNA, 20 bp, Artificial sequence
  SiRNA target sequence
gccgctgcacacatatttct

SEQ ID NO: 241841 - DNA, 20 bp, Artificial sequence
  SiRNA target sequence
ccgctgcacacatatttctt

SEQ ID NO: 241842 - DNA, 20 bp, Artificial sequence
  SiRNA target sequence
cgctgcacacatatttctta

SEQ ID NO: 241843 - DNA, 20 bp, Artificial sequence
  SiRNA target sequence
gctgcacacatatttcttaa

SEQ ID NO: 241844 - DNA, 20 bp, Artificial sequence
  SiRNA target sequence
ctgcacacatatttcttaaa

SEQ ID NO: 241845 - DNA, 20 bp, Artificial sequence
  SiRNA target sequence
tgcacacatatttcttaaaa

SEQ ID NO: 241846 - DNA, 20 bp, Artificial sequence
  SiRNA target sequence
gcacacatatttcttaaaaa

SEQ ID NO: 241847 - DNA, 20 bp, Artificial sequence
  SiRNA target sequence
cacacatatttcttaaaaat

SEQ ID NO: 241848 - DNA, 20 bp, Artificial sequence
  SiRNA target sequence
acacatatttcttaaaaatt

SEQ ID NO: 241849 - DNA, 20 bp, Artificial sequence
  SiRNA target sequence
cacatatttcttaaaaattt

SEQ ID NO: 241850 - DNA, 20 bp, Artificial sequence
  SiRNA target sequence
acatatttcttaaaaatttg

SEQ ID NO: 241851 - DNA, 20 bp, Artificial sequence
  SiRNA target sequence
catatttcttaaaaatttgg

SEQ ID NO: 241852 - DNA, 20 bp, Artificial sequence
  SiRNA target sequence
atatttcttaaaaatttgga

SEQ ID NO: 241853 - DNA, 20 bp, Artificial sequence
  SiRNA target sequence
tatttcttaaaaatttggat

SEQ ID NO: 241854 - DNA, 20 bp, Artificial sequence
  SiRNA target sequence
atttcttaaaaatttggatt

SEQ ID NO: 241855 - DNA, 20 bp, Artificial sequence
  SiRNA target sequence
tttcttaaaaatttggattg

SEQ ID NO: 241856 - DNA, 20 bp, Artificial sequence
  SiRNA target sequence
ttcttaaaaatttggattgt

SEQ ID NO: 241857 - DNA, 20 bp, Artificial sequence
  SiRNA target sequence
tcttaaaaatttggattgta

SEQ ID NO: 241858 - DNA, 20 bp, Artificial sequence
  SiRNA target sequence
cttaaaaatttggattgtaa

SEQ ID NO: 241859 - DNA, 20 bp, Artificial sequence
  SiRNA target sequence
ttaaaaatttggattgtaaa

SEQ ID NO: 241860 - DNA, 20 bp, Artificial sequence
  SiRNA target sequence
taaaaatttggattgtaaaa

SEQ ID NO: 241861 - DNA, 20 bp, Artificial sequence
  SiRNA target sequence
aaaaatttggattgtaaaag

SEQ ID NO: 241862 - DNA, 20 bp, Artificial sequence
  SiRNA target sequence
aaaatttggattgtaaaaga

SEQ ID NO: 241863 - DNA, 20 bp, Artificial sequence
  SiRNA target sequence
aaatttggattgtaaaagat

SEQ ID NO: 241864 - DNA, 20 bp, Artificial sequence
  SiRNA target sequence
aatttggattgtaaaagatc

SEQ ID NO: 241865 - DNA, 20 bp, Artificial sequence
  SiRNA target sequence
atttggattgtaaaagatca

SEQ ID NO: 241866 - DNA, 20 bp, Artificial sequence
  SiRNA target sequence
tttggattgtaaaagatcaa

SEQ ID NO: 241867 - DNA, 20 bp, Artificial sequence
  SiRNA target sequence
ttggattgtaaaagatcaaa

SEQ ID NO: 241868 - DNA, 20 bp, Artificial sequence
  SiRNA target sequence
tggattgtaaaagatcaaac

SEQ ID NO: 241869 - DNA, 20 bp, Artificial sequence
  SiRNA target sequence
ggattgtaaaagatcaaacg

SEQ ID NO: 241870 - DNA, 20 bp, Artificial sequence
  SiRNA target sequence
gattgtaaaagatcaaacga

SEQ ID NO: 241871 - DNA, 20 bp, Artificial sequence
  SiRNA target sequence
attgtaaaagatcaaacgag

SEQ ID NO: 241872 - DNA, 20 bp, Artificial sequence
  SiRNA target sequence
ttgtaaaagatcaaacgagg

SEQ ID NO: 241873 - DNA, 20 bp, Artificial sequence
  SiRNA target sequence
tgtaaaagatcaaacgagga

SEQ ID NO: 241874 - DNA, 20 bp, Artificial sequence
  SiRNA target sequence
gtaaaagatcaaacgaggat

SEQ ID NO: 241875 - DNA, 20 bp, Artificial sequence
  SiRNA target sequence
taaaagatcaaacgaggatg

SEQ ID NO: 241876 - DNA, 20 bp, Artificial sequence
  SiRNA target sequence
aaaagatcaaacgaggatgt

SEQ ID NO: 241877 - DNA, 20 bp, Artificial sequence
  SiRNA target sequence
aaagatcaaacgaggatgtc

SEQ ID NO: 241878 - DNA, 20 bp, Artificial sequence
  SiRNA target sequence
aagatcaaacgaggatgtcg

SEQ ID NO: 241879 - DNA, 20 bp, Artificial sequence
  SiRNA target sequence
agatcaaacgaggatgtcgt

SEQ ID NO: 241880 - DNA, 20 bp, Artificial sequence
  SiRNA target sequence
gatcaaacgaggatgtcgtt

SEQ ID NO: 241881 - DNA, 20 bp, Artificial sequence
  SiRNA target sequence
atcaaacgaggatgtcgttt

SEQ ID NO: 241882 - DNA, 20 bp, Artificial sequence
  SiRNA target sequence
tcaaacgaggatgtcgtttt

SEQ ID NO: 241883 - DNA, 20 bp, Artificial sequence
  SiRNA target sequence
caaacgaggatgtcgttttg

SEQ ID NO: 241884 - DNA, 20 bp, Artificial sequence
  SiRNA target sequence
aaacgaggatgtcgttttgt

SEQ ID NO: 241885 - DNA, 20 bp, Artificial sequence
  SiRNA target sequence
aacgaggatgtcgttttgtc

SEQ ID NO: 241886 - DNA, 20 bp, Artificial sequence
  SiRNA target sequence
acgaggatgtcgttttgtct

SEQ ID NO: 241887 - DNA, 20 bp, Artificial sequence
  SiRNA target sequence
cgaggatgtcgttttgtctt

SEQ ID NO: 241888 - DNA, 20 bp, Artificial sequence
  SiRNA target sequence
gaggatgtcgttttgtcttc

SEQ ID NO: 241889 - DNA, 20 bp, Artificial sequence
  SiRNA target sequence
aggatgtcgttttgtcttct

SEQ ID NO: 241890 - DNA, 20 bp, Artificial sequence
  SiRNA target sequence
ggatgtcgttttgtcttctt

SEQ ID NO: 241891 - DNA, 20 bp, Artificial sequence
  SiRNA target sequence
gatgtcgttttgtcttcttc

SEQ ID NO: 241892 - DNA, 20 bp, Artificial sequence
  SiRNA target sequence
atgtcgttttgtcttcttct

SEQ ID NO: 241893 - DNA, 20 bp, Artificial sequence
  SiRNA target sequence
tgtcgttttgtcttcttctt

SEQ ID NO: 241894 - DNA, 20 bp, Artificial sequence
  SiRNA target sequence
gtcgttttgtcttcttcttt

SEQ ID NO: 241895 - DNA, 20 bp, Artificial sequence
  SiRNA target sequence
tcgttttgtcttcttcttta

SEQ ID NO: 241896 - DNA, 20 bp, Artificial sequence
  SiRNA target sequence
cgttttgtcttcttctttat

SEQ ID NO: 241897 - DNA, 20 bp, Artificial sequence
  SiRNA target sequence
gttttgtcttcttctttatt

SEQ ID NO: 241898 - DNA, 20 bp, Artificial sequence
  SiRNA target sequence
ttttgtcttcttctttattt

SEQ ID NO: 241899 - DNA, 20 bp, Artificial sequence
  SiRNA target sequence
tttgtcttcttctttattta

SEQ ID NO: 241900 - DNA, 20 bp, Artificial sequence
  SiRNA target sequence
ttgtcttcttctttatttat

SEQ ID NO: 241901 - DNA, 20 bp, Artificial sequence
  SiRNA target sequence
tgtcttcttctttatttata

SEQ ID NO: 241902 - DNA, 20 bp, Artificial sequence
  SiRNA target sequence
gtcttcttctttatttatag

SEQ ID NO: 241903 - DNA, 20 bp, Artificial sequence
  SiRNA target sequence
tcttcttctttatttatagt

SEQ ID NO: 241904 - DNA, 20 bp, Artificial sequence
  SiRNA target sequence
cttcttctttatttatagtt

SEQ ID NO: 241905 - DNA, 20 bp, Artificial sequence
  SiRNA target sequence
ttcttctttatttatagttt

SEQ ID NO: 241906 - DNA, 20 bp, Artificial sequence
  SiRNA target sequence
tcttctttatttatagtttc

SEQ ID NO: 241907 - DNA, 20 bp, Artificial sequence
  SiRNA target sequence
cttctttatttatagtttcc

SEQ ID NO: 241908 - DNA, 20 bp, Artificial sequence
  SiRNA target sequence
ttctttatttatagtttcct

SEQ ID NO: 241909 - DNA, 20 bp, Artificial sequence
  SiRNA target sequence
tctttatttatagtttcctt

SEQ ID NO: 241910 - DNA, 20 bp, Artificial sequence
  SiRNA target sequence
ctttatttatagtttccttt

SEQ ID NO: 241911 - DNA, 20 bp, Artificial sequence
  SiRNA target sequence
tttatttatagtttccttta

SEQ ID NO: 241912 - DNA, 20 bp, Artificial sequence
  SiRNA target sequence
ttatttatagtttcctttat

SEQ ID NO: 241913 - DNA, 20 bp, Artificial sequence
  SiRNA target sequence
tatttatagtttcctttatt

SEQ ID NO: 241914 - DNA, 20 bp, Artificial sequence
  SiRNA target sequence
atttatagtttcctttattt

SEQ ID NO: 241915 - DNA, 20 bp, Artificial sequence
  SiRNA target sequence
tttatagtttcctttatttc

SEQ ID NO: 241916 - DNA, 20 bp, Artificial sequence
  SiRNA target sequence
ttatagtttcctttatttct

SEQ ID NO: 241917 - DNA, 20 bp, Artificial sequence
  SiRNA target sequence
tatagtttcctttatttctt

SEQ ID NO: 241918 - DNA, 20 bp, Artificial sequence
  SiRNA target sequence
atagtttcctttatttcttt

SEQ ID NO: 241919 - DNA, 20 bp, Artificial sequence
  SiRNA target sequence
tagtttcctttatttcttta

SEQ ID NO: 241920 - DNA, 20 bp, Artificial sequence
  SiRNA target sequence
agtttcctttatttctttag

SEQ ID NO: 241921 - DNA, 20 bp, Artificial sequence
  SiRNA target sequence
gtttcctttatttctttagt

SEQ ID NO: 241922 - DNA, 20 bp, Artificial sequence
  SiRNA target sequence
tttcctttatttctttagtt

SEQ ID NO: 241923 - DNA, 20 bp, Artificial sequence
  SiRNA target sequence
ttcctttatttctttagttt

SEQ ID NO: 241924 - DNA, 20 bp, Artificial sequence
  SiRNA target sequence
tcctttatttctttagtttt

SEQ ID NO: 241925 - DNA, 20 bp, Artificial sequence
  SiRNA target sequence
cctttatttctttagtttta

SEQ ID NO: 241926 - DNA, 20 bp, Artificial sequence
  SiRNA target sequence
ctttatttctttagttttaa

SEQ ID NO: 241927 - DNA, 20 bp, Artificial sequence
  SiRNA target sequence
tttatttctttagttttaag

SEQ ID NO: 241928 - DNA, 20 bp, Artificial sequence
  SiRNA target sequence
ttatttctttagttttaaga

SEQ ID NO: 241929 - DNA, 20 bp, Artificial sequence
  SiRNA target sequence
tatttctttagttttaagag

SEQ ID NO: 241930 - DNA, 20 bp, Artificial sequence
  SiRNA target sequence
atttctttagttttaagagg

SEQ ID NO: 241931 - DNA, 20 bp, Artificial sequence
  SiRNA target sequence
tttctttagttttaagagga

SEQ ID NO: 241932 - DNA, 20 bp, Artificial sequence
  SiRNA target sequence
ttctttagttttaagaggaa

SEQ ID NO: 241933 - DNA, 20 bp, Artificial sequence
  SiRNA target sequence
tctttagttttaagaggaat

SEQ ID NO: 241934 - DNA, 20 bp, Artificial sequence
  SiRNA target sequence
ctttagttttaagaggaata

SEQ ID NO: 241935 - DNA, 20 bp, Artificial sequence
  SiRNA target sequence
tttagttttaagaggaatat

SEQ ID NO: 241936 - DNA, 20 bp, Artificial sequence
  SiRNA target sequence
ttagttttaagaggaatata

SEQ ID NO: 241937 - DNA, 20 bp, Artificial sequence
  SiRNA target sequence
tagttttaagaggaatataa

SEQ ID NO: 241938 - DNA, 20 bp, Artificial sequence
  SiRNA target sequence
agttttaagaggaatataac

SEQ ID NO: 241939 - DNA, 20 bp, Artificial sequence
  SiRNA target sequence
gttttaagaggaatataact

SEQ ID NO: 241940 - DNA, 20 bp, Artificial sequence
  SiRNA target sequence
ttttaagaggaatataactt

SEQ ID NO: 241941 - DNA, 20 bp, Artificial sequence
  SiRNA target sequence
tttaagaggaatataacttt

SEQ ID NO: 241942 - DNA, 20 bp, Artificial sequence
  SiRNA target sequence
ttaagaggaatataactttt

SEQ ID NO: 241943 - DNA, 20 bp, Artificial sequence
  SiRNA target sequence
taagaggaatataacttttt

SEQ ID NO: 241944 - DNA, 20 bp, Artificial sequence
  SiRNA target sequence
aagaggaatataacttttta

SEQ ID NO: 241945 - DNA, 20 bp, Artificial sequence
  SiRNA target sequence
agaggaatataactttttaa

SEQ ID NO: 241946 - DNA, 20 bp, Artificial sequence
  SiRNA target sequence
gaggaatataactttttaaa

SEQ ID NO: 241947 - DNA, 20 bp, Artificial sequence
  SiRNA target sequence
aggaatataactttttaaaa

SEQ ID NO: 241948 - DNA, 20 bp, Artificial sequence
  SiRNA target sequence
ggaatataactttttaaaaa

SEQ ID NO: 241949 - DNA, 20 bp, Artificial sequence
  SiRNA target sequence
gaatataactttttaaaaag

SEQ ID NO: 241950 - DNA, 20 bp, Artificial sequence
  SiRNA target sequence
aatataactttttaaaaagt

SEQ ID NO: 241951 - DNA, 20 bp, Artificial sequence
  SiRNA target sequence
atataactttttaaaaagta

SEQ ID NO: 241952 - DNA, 20 bp, Artificial sequence
  SiRNA target sequence
tataactttttaaaaagtaa

SEQ ID NO: 241953 - DNA, 20 bp, Artificial sequence
  SiRNA target sequence
ataactttttaaaaagtaaa

SEQ ID NO: 241954 - DNA, 20 bp, Artificial sequence
  SiRNA target sequence
taactttttaaaaagtaaat

SEQ ID NO: 241955 - DNA, 20 bp, Artificial sequence
  SiRNA target sequence
aactttttaaaaagtaaatt

SEQ ID NO: 241956 - DNA, 20 bp, Artificial sequence
  SiRNA target sequence
actttttaaaaagtaaatta

SEQ ID NO: 241957 - DNA, 20 bp, Artificial sequence
  SiRNA target sequence
ctttttaaaaagtaaattaa

SEQ ID NO: 241958 - DNA, 20 bp, Artificial sequence
  SiRNA target sequence
tttttaaaaagtaaattaat

SEQ ID NO: 241959 - DNA, 20 bp, Artificial sequence
  SiRNA target sequence
ttttaaaaagtaaattaatg

SEQ ID NO: 241960 - DNA, 20 bp, Artificial sequence
  SiRNA target sequence
tttaaaaagtaaattaatgt

SEQ ID NO: 241961 - DNA, 20 bp, Artificial sequence
  SiRNA target sequence
ttaaaaagtaaattaatgta

SEQ ID NO: 241962 - DNA, 20 bp, Artificial sequence
  SiRNA target sequence
taaaaagtaaattaatgtag

SEQ ID NO: 241963 - DNA, 20 bp, Artificial sequence
  SiRNA target sequence
aaaaagtaaattaatgtagt

SEQ ID NO: 241964 - DNA, 20 bp, Artificial sequence
  SiRNA target sequence
aaaagtaaattaatgtagtt

SEQ ID NO: 241965 - DNA, 20 bp, Artificial sequence
  SiRNA target sequence
aaagtaaattaatgtagtta

SEQ ID NO: 241966 - DNA, 20 bp, Artificial sequence
  SiRNA target sequence
aagtaaattaatgtagttac

SEQ ID NO: 241967 - DNA, 20 bp, Artificial sequence
  SiRNA target sequence
agtaaattaatgtagttaca

SEQ ID NO: 241968 - DNA, 20 bp, Artificial sequence
  SiRNA target sequence
gtaaattaatgtagttacaa

SEQ ID NO: 241969 - DNA, 20 bp, Artificial sequence
  SiRNA target sequence
taaattaatgtagttacaaa

SEQ ID NO: 241970 - DNA, 20 bp, Artificial sequence
  SiRNA target sequence
aaattaatgtagttacaaaa

SEQ ID NO: 241971 - DNA, 20 bp, Artificial sequence
  SiRNA target sequence
aattaatgtagttacaaaag

SEQ ID NO: 241972 - DNA, 20 bp, Artificial sequence
  SiRNA target sequence
attaatgtagttacaaaaga

SEQ ID NO: 241973 - DNA, 20 bp, Artificial sequence
  SiRNA target sequence
ttaatgtagttacaaaagac

SEQ ID NO: 241974 - DNA, 20 bp, Artificial sequence
  SiRNA target sequence
taatgtagttacaaaagaca

SEQ ID NO: 241975 - DNA, 20 bp, Artificial sequence
  SiRNA target sequence
aatgtagttacaaaagacaa

SEQ ID NO: 241976 - DNA, 20 bp, Artificial sequence
  SiRNA target sequence
atgtagttacaaaagacaag

SEQ ID NO: 241977 - DNA, 20 bp, Artificial sequence
  SiRNA target sequence
tgtagttacaaaagacaaga

SEQ ID NO: 241978 - DNA, 20 bp, Artificial sequence
  SiRNA target sequence
gtagttacaaaagacaagat

SEQ ID NO: 241979 - DNA, 20 bp, Artificial sequence
  SiRNA target sequence
tagttacaaaagacaagatc

SEQ ID NO: 241980 - DNA, 20 bp, Artificial sequence
  SiRNA target sequence
agttacaaaagacaagatca

SEQ ID NO: 241981 - DNA, 20 bp, Artificial sequence
  SiRNA target sequence
gttacaaaagacaagatcaa

SEQ ID NO: 241982 - DNA, 20 bp, Artificial sequence
  SiRNA target sequence
ttacaaaagacaagatcaaa

SEQ ID NO: 241983 - DNA, 20 bp, Artificial sequence
  SiRNA target sequence
tacaaaagacaagatcaaaa

SEQ ID NO: 241984 - DNA, 20 bp, Artificial sequence
  SiRNA target sequence
acaaaagacaagatcaaaaa

SEQ ID NO: 241985 - DNA, 20 bp, Artificial sequence
  SiRNA target sequence
caaaagacaagatcaaaaaa

SEQ ID NO: 241986 - DNA, 20 bp, Artificial sequence
  SiRNA target sequence
aaaagacaagatcaaaaaaa

SEQ ID NO: 241987 - DNA, 20 bp, Artificial sequence
  SiRNA target sequence
aaagacaagatcaaaaaaaa

SEQ ID NO: 241988 - DNA, 20 bp, Artificial sequence
  SiRNA target sequence
aagacaagatcaaaaaaaac

SEQ ID NO: 241989 - DNA, 20 bp, Artificial sequence
  SiRNA target sequence
agacaagatcaaaaaaaaca

SEQ ID NO: 241990 - DNA, 20 bp, Artificial sequence
  SiRNA target sequence
gacaagatcaaaaaaaacaa

SEQ ID NO: 241991 - DNA, 20 bp, Artificial sequence
  SiRNA target sequence
acaagatcaaaaaaaacaaa

SEQ ID NO: 241992 - DNA, 20 bp, Artificial sequence
  SiRNA target sequence
caagatcaaaaaaaacaaac

SEQ ID NO: 241993 - DNA, 20 bp, Artificial sequence
  SiRNA target sequence
aagatcaaaaaaaacaaact

SEQ ID NO: 241994 - DNA, 20 bp, Artificial sequence
  SiRNA target sequence
agatcaaaaaaaacaaacta

SEQ ID NO: 241995 - DNA, 20 bp, Artificial sequence
  SiRNA target sequence
gatcaaaaaaaacaaactac

SEQ ID NO: 241996 - DNA, 20 bp, Artificial sequence
  SiRNA target sequence
atcaaaaaaaacaaactact

SEQ ID NO: 241997 - DNA, 20 bp, Artificial sequence
  SiRNA target sequence
tcaaaaaaaacaaactacta

SEQ ID NO: 241998 - DNA, 20 bp, Artificial sequence
  SiRNA target sequence
caaaaaaaacaaactactac

SEQ ID NO: 241999 - DNA, 20 bp, Artificial sequence
  SiRNA target sequence
aaaaaaaacaaactactacc

SEQ ID NO: 242000 - DNA, 20 bp, Artificial sequence
  SiRNA target sequence
aaaaaaacaaactactaccg

SEQ ID NO: 242001 - DNA, 20 bp, Artificial sequence
  SiRNA target sequence
aaaaaacaaactactaccgt

SEQ ID NO: 242002 - DNA, 20 bp, Artificial sequence
  SiRNA target sequence
aaaaacaaactactaccgtc

SEQ ID NO: 242003 - DNA, 20 bp, Artificial sequence
  SiRNA target sequence
aaaacaaactactaccgtca

SEQ ID NO: 242004 - DNA, 20 bp, Artificial sequence
  SiRNA target sequence
aaacaaactactaccgtcaa

SEQ ID NO: 242005 - DNA, 20 bp, Artificial sequence
  SiRNA target sequence
aacaaactactaccgtcaat

SEQ ID NO: 242006 - DNA, 20 bp, Artificial sequence
  SiRNA target sequence
acaaactactaccgtcaatt

SEQ ID NO: 242007 - DNA, 20 bp, Artificial sequence
  SiRNA target sequence
caaactactaccgtcaattt

SEQ ID NO: 242008 - DNA, 20 bp, Artificial sequence
  SiRNA target sequence
aaactactaccgtcaatttt

SEQ ID NO: 242009 - DNA, 20 bp, Artificial sequence
  SiRNA target sequence
aactactaccgtcaatttta

SEQ ID NO: 242010 - DNA, 20 bp, Artificial sequence
  SiRNA target sequence
actactaccgtcaattttat

SEQ ID NO: 242011 - DNA, 20 bp, Artificial sequence
  SiRNA target sequence
ctactaccgtcaattttatc

SEQ ID NO: 242012 - DNA, 20 bp, Artificial sequence
  SiRNA target sequence
tactaccgtcaattttatca

SEQ ID NO: 242013 - DNA, 20 bp, Artificial sequence
  SiRNA target sequence
actaccgtcaattttatcat

SEQ ID NO: 242014 - DNA, 20 bp, Artificial sequence
  SiRNA target sequence
ctaccgtcaattttatcatg

SEQ ID NO: 242015 - DNA, 20 bp, Artificial sequence
  SiRNA target sequence
taccgtcaattttatcatgc

SEQ ID NO: 242016 - DNA, 20 bp, Artificial sequence
  SiRNA target sequence
accgtcaattttatcatgca

SEQ ID NO: 242017 - DNA, 20 bp, Artificial sequence
  SiRNA target sequence
ccgtcaattttatcatgcaa

SEQ ID NO: 242018 - DNA, 20 bp, Artificial sequence
  SiRNA target sequence
cgtcaattttatcatgcaaa

SEQ ID NO: 242019 - DNA, 20 bp, Artificial sequence
  SiRNA target sequence
gtcaattttatcatgcaaac

SEQ ID NO: 242020 - DNA, 20 bp, Artificial sequence
  SiRNA target sequence
tcaattttatcatgcaaacc

SEQ ID NO: 242021 - DNA, 20 bp, Artificial sequence
  SiRNA target sequence
caattttatcatgcaaacct

SEQ ID NO: 242022 - DNA, 20 bp, Artificial sequence
  SiRNA target sequence
aattttatcatgcaaacctg

SEQ ID NO: 242023 - DNA, 20 bp, Artificial sequence
  SiRNA target sequence
attttatcatgcaaacctgc

SEQ ID NO: 242024 - DNA, 20 bp, Artificial sequence
  SiRNA target sequence
ttttatcatgcaaacctgca

SEQ ID NO: 242025 - DNA, 20 bp, Artificial sequence
  SiRNA target sequence
tttatcatgcaaacctgcag

SEQ ID NO: 242026 - DNA, 20 bp, Artificial sequence
  SiRNA target sequence
ttatcatgcaaacctgcagg

SEQ ID NO: 242027 - DNA, 20 bp, Artificial sequence
  SiRNA target sequence
tatcatgcaaacctgcagga

SEQ ID NO: 242028 - DNA, 20 bp, Artificial sequence
  SiRNA target sequence
atcatgcaaacctgcaggaa

SEQ ID NO: 242029 - DNA, 20 bp, Artificial sequence
  SiRNA target sequence
tcatgcaaacctgcaggaag

SEQ ID NO: 242030 - DNA, 20 bp, Artificial sequence
  SiRNA target sequence
catgcaaacctgcaggaagt

SEQ ID NO: 242031 - DNA, 20 bp, Artificial sequence
  SiRNA target sequence
atgcaaacctgcaggaagta

SEQ ID NO: 242032 - DNA, 20 bp, Artificial sequence
  SiRNA target sequence
tgcaaacctgcaggaagtat

SEQ ID NO: 242033 - DNA, 20 bp, Artificial sequence
  SiRNA target sequence
gcaaacctgcaggaagtata

SEQ ID NO: 242034 - DNA, 20 bp, Artificial sequence
  SiRNA target sequence
caaacctgcaggaagtatat

SEQ ID NO: 242035 - DNA, 20 bp, Artificial sequence
  SiRNA target sequence
aaacctgcaggaagtatatt

SEQ ID NO: 242036 - DNA, 20 bp, Artificial sequence
  SiRNA target sequence
aacctgcaggaagtatattt

SEQ ID NO: 242037 - DNA, 20 bp, Artificial sequence
  SiRNA target sequence
acctgcaggaagtatatttg

SEQ ID NO: 242038 - DNA, 20 bp, Artificial sequence
  SiRNA target sequence
cctgcaggaagtatatttgc

SEQ ID NO: 242039 - DNA, 20 bp, Artificial sequence
  SiRNA target sequence
ctgcaggaagtatatttgct

SEQ ID NO: 242040 - DNA, 20 bp, Artificial sequence
  SiRNA target sequence
tgcaggaagtatatttgcta

SEQ ID NO: 242041 - DNA, 20 bp, Artificial sequence
  SiRNA target sequence
gcaggaagtatatttgctaa

SEQ ID NO: 242042 - DNA, 20 bp, Artificial sequence
  SiRNA target sequence
caggaagtatatttgctaat

SEQ ID NO: 242043 - DNA, 20 bp, Artificial sequence
  SiRNA target sequence
aggaagtatatttgctaatt

SEQ ID NO: 242044 - DNA, 20 bp, Artificial sequence
  SiRNA target sequence
ggaagtatatttgctaattc

SEQ ID NO: 242045 - DNA, 20 bp, Artificial sequence
  SiRNA target sequence
gaagtatatttgctaattca

SEQ ID NO: 242046 - DNA, 20 bp, Artificial sequence
  SiRNA target sequence
aagtatatttgctaattcat

SEQ ID NO: 242047 - DNA, 20 bp, Artificial sequence
  SiRNA target sequence
agtatatttgctaattcatc

SEQ ID NO: 242048 - DNA, 20 bp, Artificial sequence
  SiRNA target sequence
gtatatttgctaattcatct

SEQ ID NO: 242049 - DNA, 20 bp, Artificial sequence
  SiRNA target sequence
tatatttgctaattcatctt

SEQ ID NO: 242050 - DNA, 20 bp, Artificial sequence
  SiRNA target sequence
atatttgctaattcatcttt

SEQ ID NO: 242051 - DNA, 20 bp, Artificial sequence
  SiRNA target sequence
tatttgctaattcatctttt

SEQ ID NO: 242052 - DNA, 20 bp, Artificial sequence
  SiRNA target sequence
atttgctaattcatctttta

SEQ ID NO: 242053 - DNA, 20 bp, Artificial sequence
  SiRNA target sequence
tttgctaattcatcttttat

SEQ ID NO: 242054 - DNA, 20 bp, Artificial sequence
  SiRNA target sequence
ttgctaattcatcttttata

SEQ ID NO: 242055 - DNA, 20 bp, Artificial sequence
  SiRNA target sequence
tgctaattcatcttttatat

SEQ ID NO: 242056 - DNA, 20 bp, Artificial sequence
  SiRNA target sequence
gctaattcatcttttatata

SEQ ID NO: 242057 - DNA, 20 bp, Artificial sequence
  SiRNA target sequence
ctaattcatcttttatataa

SEQ ID NO: 242058 - DNA, 20 bp, Artificial sequence
  SiRNA target sequence
taattcatcttttatataaa

SEQ ID NO: 242059 - DNA, 20 bp, Artificial sequence
  SiRNA target sequence
aattcatcttttatataaat

SEQ ID NO: 242060 - DNA, 20 bp, Artificial sequence
  SiRNA target sequence
attcatcttttatataaata

SEQ ID NO: 242061 - DNA, 20 bp, Artificial sequence
  SiRNA target sequence
ttcatcttttatataaataa

SEQ ID NO: 242062 - DNA, 20 bp, Artificial sequence
  SiRNA target sequence
tcatcttttatataaataaa

SEQ ID NO: 242063 - DNA, 20 bp, Artificial sequence
  SiRNA target sequence
catcttttatataaataaaa

SEQ ID NO: 242064 - DNA, 20 bp, Artificial sequence
  SiRNA target sequence
atcttttatataaataaaag

SEQ ID NO: 242065 - DNA, 20 bp, Artificial sequence
  SiRNA target sequence
tcttttatataaataaaagc

SEQ ID NO: 242066 - DNA, 20 bp, Artificial sequence
  SiRNA target sequence
cttttatataaataaaagct

SEQ ID NO: 242067 - DNA, 20 bp, Artificial sequence
  SiRNA target sequence
ttttatataaataaaagcta

SEQ ID NO: 242068 - DNA, 20 bp, Artificial sequence
  SiRNA target sequence
tttatataaataaaagctac

SEQ ID NO: 242069 - DNA, 20 bp, Artificial sequence
  SiRNA target sequence
ttatataaataaaagctaca

SEQ ID NO: 242070 - DNA, 20 bp, Artificial sequence
  SiRNA target sequence
tatataaataaaagctacag

SEQ ID NO: 242071 - DNA, 20 bp, Artificial sequence
  SiRNA target sequence
atataaataaaagctacaga

SEQ ID NO: 242072 - DNA, 20 bp, Artificial sequence
  SiRNA target sequence
tataaataaaagctacagaa

SEQ ID NO: 242073 - DNA, 20 bp, Artificial sequence
  SiRNA target sequence
ataaataaaagctacagaaa

SEQ ID NO: 242074 - DNA, 20 bp, Artificial sequence
  SiRNA target sequence
taaataaaagctacagaaat

SEQ ID NO: 242075 - DNA, 20 bp, Artificial sequence
  SiRNA target sequence
aaataaaagctacagaaata

SEQ ID NO: 242076 - DNA, 20 bp, Artificial sequence
  SiRNA target sequence
aataaaagctacagaaataa

SEQ ID NO: 242077 - DNA, 20 bp, Artificial sequence
  SiRNA target sequence
ataaaagctacagaaataat

SEQ ID NO: 242078 - DNA, 20 bp, Artificial sequence
  SiRNA target sequence
taaaagctacagaaataatc

SEQ ID NO: 242079 - DNA, 20 bp, Artificial sequence
  SiRNA target sequence
aaaagctacagaaataatca

SEQ ID NO: 242080 - DNA, 20 bp, Artificial sequence
  SiRNA target sequence
aaagctacagaaataatcat

SEQ ID NO: 242081 - DNA, 20 bp, Artificial sequence
  SiRNA target sequence
aagctacagaaataatcatt

SEQ ID NO: 242082 - DNA, 20 bp, Artificial sequence
  SiRNA target sequence
agctacagaaataatcattg

SEQ ID NO: 242083 - DNA, 20 bp, Artificial sequence
  SiRNA target sequence
gctacagaaataatcattga

SEQ ID NO: 242084 - DNA, 20 bp, Artificial sequence
  SiRNA target sequence
ctacagaaataatcattgaa

SEQ ID NO: 242085 - DNA, 20 bp, Artificial sequence
  SiRNA target sequence
tacagaaataatcattgaaa

SEQ ID NO: 242086 - DNA, 20 bp, Artificial sequence
  SiRNA target sequence
acagaaataatcattgaaat

SEQ ID NO: 242087 - DNA, 20 bp, Artificial sequence
  SiRNA target sequence
cagaaataatcattgaaatg

SEQ ID NO: 242088 - DNA, 20 bp, Artificial sequence
  SiRNA target sequence
agaaataatcattgaaatgg

SEQ ID NO: 242089 - DNA, 20 bp, Artificial sequence
  SiRNA target sequence
gaaataatcattgaaatggc

SEQ ID NO: 242090 - DNA, 20 bp, Artificial sequence
  SiRNA target sequence
aaataatcattgaaatggcg

SEQ ID NO: 242091 - DNA, 20 bp, Artificial sequence
  SiRNA target sequence
aataatcattgaaatggcgg

SEQ ID NO: 242092 - DNA, 20 bp, Artificial sequence
  SiRNA target sequence
ataatcattgaaatggcggt

SEQ ID NO: 242093 - DNA, 20 bp, Artificial sequence
  SiRNA target sequence
taatcattgaaatggcggtg

SEQ ID NO: 242094 - DNA, 20 bp, Artificial sequence
  SiRNA target sequence
aatcattgaaatggcggtga

SEQ ID NO: 242095 - DNA, 20 bp, Artificial sequence
  SiRNA target sequence
atcattgaaatggcggtgat

SEQ ID NO: 242096 - DNA, 20 bp, Artificial sequence
  SiRNA target sequence
tcattgaaatggcggtgatt

SEQ ID NO: 242097 - DNA, 20 bp, Artificial sequence
  SiRNA target sequence
cattgaaatggcggtgattg

SEQ ID NO: 242098 - DNA, 20 bp, Artificial sequence
  SiRNA target sequence
attgaaatggcggtgattgt

SEQ ID NO: 242099 - DNA, 20 bp, Artificial sequence
  SiRNA target sequence
ttgaaatggcggtgattgtg

SEQ ID NO: 242100 - DNA, 20 bp, Artificial sequence
  SiRNA target sequence
tgaaatggcggtgattgtgg

SEQ ID NO: 242101 - DNA, 20 bp, Artificial sequence
  SiRNA target sequence
gaaatggcggtgattgtgga

SEQ ID NO: 242102 - DNA, 20 bp, Artificial sequence
  SiRNA target sequence
aaatggcggtgattgtggaa

SEQ ID NO: 242103 - DNA, 20 bp, Artificial sequence
  SiRNA target sequence
aatggcggtgattgtggaaa

SEQ ID NO: 242104 - DNA, 20 bp, Artificial sequence
  SiRNA target sequence
atggcggtgattgtggaaaa

SEQ ID NO: 242105 - DNA, 20 bp, Artificial sequence
  SiRNA target sequence
tggcggtgattgtggaaaaa

SEQ ID NO: 242106 - DNA, 20 bp, Artificial sequence
  SiRNA target sequence
ggcggtgattgtggaaaaat

SEQ ID NO: 242107 - DNA, 20 bp, Artificial sequence
  SiRNA target sequence
gcggtgattgtggaaaaatt

SEQ ID NO: 242108 - DNA, 20 bp, Artificial sequence
  SiRNA target sequence
cggtgattgtggaaaaatta

SEQ ID NO: 242109 - DNA, 20 bp, Artificial sequence
  SiRNA target sequence
ggtgattgtggaaaaattag

SEQ ID NO: 242110 - DNA, 20 bp, Artificial sequence
  SiRNA target sequence
gtgattgtggaaaaattagg

SEQ ID NO: 242111 - DNA, 20 bp, Artificial sequence
  SiRNA target sequence
tgattgtggaaaaattagga

SEQ ID NO: 242112 - DNA, 20 bp, Artificial sequence
  SiRNA target sequence
gattgtggaaaaattaggaa

SEQ ID NO: 242113 - DNA, 20 bp, Artificial sequence
  SiRNA target sequence
attgtggaaaaattaggaac

SEQ ID NO: 242114 - DNA, 20 bp, Artificial sequence
  SiRNA target sequence
ttgtggaaaaattaggaaca

SEQ ID NO: 242115 - DNA, 20 bp, Artificial sequence
  SiRNA target sequence
tgtggaaaaattaggaacaa

SEQ ID NO: 242116 - DNA, 20 bp, Artificial sequence
  SiRNA target sequence
gtggaaaaattaggaacaat

SEQ ID NO: 242117 - DNA, 20 bp, Artificial sequence
  SiRNA target sequence
tggaaaaattaggaacaatt

SEQ ID NO: 242118 - DNA, 20 bp, Artificial sequence
  SiRNA target sequence
ggaaaaattaggaacaattt

SEQ ID NO: 242119 - DNA, 20 bp, Artificial sequence
  SiRNA target sequence
gaaaaattaggaacaatttc

SEQ ID NO: 242120 - DNA, 20 bp, Artificial sequence
  SiRNA target sequence
aaaaattaggaacaatttct

SEQ ID NO: 242121 - DNA, 20 bp, Artificial sequence
  SiRNA target sequence
aaaattaggaacaatttctt

SEQ ID NO: 242122 - DNA, 20 bp, Artificial sequence
  SiRNA target sequence
aaattaggaacaatttcttt

SEQ ID NO: 242123 - DNA, 20 bp, Artificial sequence
  SiRNA target sequence
aattaggaacaatttctttc

SEQ ID NO: 242124 - DNA, 20 bp, Artificial sequence
  SiRNA target sequence
attaggaacaatttctttca

SEQ ID NO: 242125 - DNA, 20 bp, Artificial sequence
  SiRNA target sequence
ttaggaacaatttctttcat

SEQ ID NO: 242126 - DNA, 20 bp, Artificial sequence
  SiRNA target sequence
taggaacaatttctttcatt

SEQ ID NO: 242127 - DNA, 20 bp, Artificial sequence
  SiRNA target sequence
aggaacaatttctttcattt

SEQ ID NO: 242128 - DNA, 20 bp, Artificial sequence
  SiRNA target sequence
ggaacaatttctttcatttc

SEQ ID NO: 242129 - DNA, 20 bp, Artificial sequence
  SiRNA target sequence
gaacaatttctttcatttca

SEQ ID NO: 242130 - DNA, 20 bp, Artificial sequence
  SiRNA target sequence
aacaatttctttcatttcat

SEQ ID NO: 242131 - DNA, 20 bp, Artificial sequence
  SiRNA target sequence
acaatttctttcatttcatc

SEQ ID NO: 242132 - DNA, 20 bp, Artificial sequence
  SiRNA target sequence
caatttctttcatttcatct

SEQ ID NO: 242133 - DNA, 20 bp, Artificial sequence
  SiRNA target sequence
aatttctttcatttcatctt

SEQ ID NO: 242134 - DNA, 20 bp, Artificial sequence
  SiRNA target sequence
atttctttcatttcatcttc

SEQ ID NO: 242135 - DNA, 20 bp, Artificial sequence
  SiRNA target sequence
tttctttcatttcatcttct

SEQ ID NO: 242136 - DNA, 20 bp, Artificial sequence
  SiRNA target sequence
ttctttcatttcatcttctg

SEQ ID NO: 242137 - DNA, 20 bp, Artificial sequence
  SiRNA target sequence
tctttcatttcatcttctgt

SEQ ID NO: 242138 - DNA, 20 bp, Artificial sequence
  SiRNA target sequence
ctttcatttcatcttctgta

SEQ ID NO: 242139 - DNA, 20 bp, Artificial sequence
  SiRNA target sequence
tttcatttcatcttctgtac

SEQ ID NO: 242140 - DNA, 20 bp, Artificial sequence
  SiRNA target sequence
ttcatttcatcttctgtaca

SEQ ID NO: 242141 - DNA, 20 bp, Artificial sequence
  SiRNA target sequence
tcatttcatcttctgtacaa

SEQ ID NO: 242142 - DNA, 20 bp, Artificial sequence
  SiRNA target sequence
catttcatcttctgtacaag

SEQ ID NO: 242143 - DNA, 20 bp, Artificial sequence
  SiRNA target sequence
atttcatcttctgtacaagc

SEQ ID NO: 242144 - DNA, 20 bp, Artificial sequence
  SiRNA target sequence
tttcatcttctgtacaagca

SEQ ID NO: 242145 - DNA, 20 bp, Artificial sequence
  SiRNA target sequence
ttcatcttctgtacaagcat

SEQ ID NO: 242146 - DNA, 20 bp, Artificial sequence
  SiRNA target sequence
tcatcttctgtacaagcatg

SEQ ID NO: 242147 - DNA, 20 bp, Artificial sequence
  SiRNA target sequence
catcttctgtacaagcatga

SEQ ID NO: 242148 - DNA, 20 bp, Artificial sequence
  SiRNA target sequence
atcttctgtacaagcatgat

SEQ ID NO: 242149 - DNA, 20 bp, Artificial sequence
  SiRNA target sequence
tcttctgtacaagcatgatt

SEQ ID NO: 242150 - DNA, 20 bp, Artificial sequence
  SiRNA target sequence
cttctgtacaagcatgattg

SEQ ID NO: 242151 - DNA, 20 bp, Artificial sequence
  SiRNA target sequence
ttctgtacaagcatgattgg

SEQ ID NO: 242152 - DNA, 20 bp, Artificial sequence
  SiRNA target sequence
tctgtacaagcatgattggc

SEQ ID NO: 242153 - DNA, 20 bp, Artificial sequence
  SiRNA target sequence
ctgtacaagcatgattggct

SEQ ID NO: 242154 - DNA, 20 bp, Artificial sequence
  SiRNA target sequence
tgtacaagcatgattggcta

SEQ ID NO: 242155 - DNA, 20 bp, Artificial sequence
  SiRNA target sequence
gtacaagcatgattggctaa

SEQ ID NO: 242156 - DNA, 20 bp, Artificial sequence
  SiRNA target sequence
tacaagcatgattggctaac

SEQ ID NO: 242157 - DNA, 20 bp, Artificial sequence
  SiRNA target sequence
acaagcatgattggctaacg

SEQ ID NO: 242158 - DNA, 20 bp, Artificial sequence
  SiRNA target sequence
caagcatgattggctaacgc

SEQ ID NO: 242159 - DNA, 20 bp, Artificial sequence
  SiRNA target sequence
aagcatgattggctaacgca

SEQ ID NO: 242160 - DNA, 20 bp, Artificial sequence
  SiRNA target sequence
agcatgattggctaacgcat

SEQ ID NO: 242161 - DNA, 20 bp, Artificial sequence
  SiRNA target sequence
gcatgattggctaacgcata

SEQ ID NO: 242162 - DNA, 20 bp, Artificial sequence
  SiRNA target sequence
catgattggctaacgcatat

SEQ ID NO: 242163 - DNA, 20 bp, Artificial sequence
  SiRNA target sequence
atgattggctaacgcatata

SEQ ID NO: 242164 - DNA, 20 bp, Artificial sequence
  SiRNA target sequence
tgattggctaacgcatataa

SEQ ID NO: 242165 - DNA, 20 bp, Artificial sequence
  SiRNA target sequence
gattggctaacgcatataaa

SEQ ID NO: 242166 - DNA, 20 bp, Artificial sequence
  SiRNA target sequence
attggctaacgcatataaag

SEQ ID NO: 242167 - DNA, 20 bp, Artificial sequence
  SiRNA target sequence
ttggctaacgcatataaagc

SEQ ID NO: 242168 - DNA, 20 bp, Artificial sequence
  SiRNA target sequence
tggctaacgcatataaagca

SEQ ID NO: 242169 - DNA, 20 bp, Artificial sequence
  SiRNA target sequence
ggctaacgcatataaagcaa

SEQ ID NO: 242170 - DNA, 20 bp, Artificial sequence
  SiRNA target sequence
gctaacgcatataaagcaaa

SEQ ID NO: 242171 - DNA, 20 bp, Artificial sequence
  SiRNA target sequence
ctaacgcatataaagcaaaa

SEQ ID NO: 242172 - DNA, 20 bp, Artificial sequence
  SiRNA target sequence
taacgcatataaagcaaaac

SEQ ID NO: 242173 - DNA, 20 bp, Artificial sequence
  SiRNA target sequence
aacgcatataaagcaaaacc

SEQ ID NO: 242174 - DNA, 20 bp, Artificial sequence
  SiRNA target sequence
acgcatataaagcaaaacca

SEQ ID NO: 242175 - DNA, 20 bp, Artificial sequence
  SiRNA target sequence
cgcatataaagcaaaaccaa

SEQ ID NO: 242176 - DNA, 20 bp, Artificial sequence
  SiRNA target sequence
gcatataaagcaaaaccaac

SEQ ID NO: 242177 - DNA, 20 bp, Artificial sequence
  SiRNA target sequence
catataaagcaaaaccaact

SEQ ID NO: 242178 - DNA, 20 bp, Artificial sequence
  SiRNA target sequence
atataaagcaaaaccaacta

SEQ ID NO: 242179 - DNA, 20 bp, Artificial sequence
  SiRNA target sequence
tataaagcaaaaccaactac

SEQ ID NO: 242180 - DNA, 20 bp, Artificial sequence
  SiRNA target sequence
ataaagcaaaaccaactact

SEQ ID NO: 242181 - DNA, 20 bp, Artificial sequence
  SiRNA target sequence
taaagcaaaaccaactacta

SEQ ID NO: 242182 - DNA, 20 bp, Artificial sequence
  SiRNA target sequence
aaagcaaaaccaactactag

SEQ ID NO: 242183 - DNA, 20 bp, Artificial sequence
  SiRNA target sequence
aagcaaaaccaactactaga

SEQ ID NO: 242184 - DNA, 20 bp, Artificial sequence
  SiRNA target sequence
agcaaaaccaactactagag

SEQ ID NO: 242185 - DNA, 20 bp, Artificial sequence
  SiRNA target sequence
gcaaaaccaactactagagt

SEQ ID NO: 242186 - DNA, 20 bp, Artificial sequence
  SiRNA target sequence
caaaaccaactactagagta

SEQ ID NO: 242187 - DNA, 20 bp, Artificial sequence
  SiRNA target sequence
aaaaccaactactagagtac

SEQ ID NO: 242188 - DNA, 20 bp, Artificial sequence
  SiRNA target sequence
aaaccaactactagagtact

SEQ ID NO: 242189 - DNA, 20 bp, Artificial sequence
  SiRNA target sequence
aaccaactactagagtactc

SEQ ID NO: 242190 - DNA, 20 bp, Artificial sequence
  SiRNA target sequence
accaactactagagtactcc

SEQ ID NO: 242191 - DNA, 20 bp, Artificial sequence
  SiRNA target sequence
ccaactactagagtactcca

SEQ ID NO: 242192 - DNA, 20 bp, Artificial sequence
  SiRNA target sequence
caactactagagtactccac

SEQ ID NO: 242193 - DNA, 20 bp, Artificial sequence
  SiRNA target sequence
aactactagagtactccaca

SEQ ID NO: 242194 - DNA, 20 bp, Artificial sequence
  SiRNA target sequence
actactagagtactccacaa

SEQ ID NO: 242195 - DNA, 20 bp, Artificial sequence
  SiRNA target sequence
ctactagagtactccacaac

SEQ ID NO: 242196 - DNA, 20 bp, Artificial sequence
  SiRNA target sequence
tactagagtactccacaact

SEQ ID NO: 242197 - DNA, 20 bp, Artificial sequence
  SiRNA target sequence
actagagtactccacaactc

SEQ ID NO: 242198 - DNA, 20 bp, Artificial sequence
  SiRNA target sequence
ctagagtactccacaactcc

SEQ ID NO: 242199 - DNA, 20 bp, Artificial sequence
  SiRNA target sequence
tagagtactccacaactccg

SEQ ID NO: 242200 - DNA, 20 bp, Artificial sequence
  SiRNA target sequence
agagtactccacaactccga

SEQ ID NO: 242201 - DNA, 20 bp, Artificial sequence
  SiRNA target sequence
gagtactccacaactccgat

SEQ ID NO: 242202 - DNA, 20 bp, Artificial sequence
  SiRNA target sequence
agtactccacaactccgata

SEQ ID NO: 242203 - DNA, 20 bp, Artificial sequence
  SiRNA target sequence
gtactccacaactccgataa

SEQ ID NO: 242204 - DNA, 20 bp, Artificial sequence
  SiRNA target sequence
tactccacaactccgataag

SEQ ID NO: 242205 - DNA, 20 bp, Artificial sequence
  SiRNA target sequence
actccacaactccgataaga

SEQ ID NO: 242206 - DNA, 20 bp, Artificial sequence
  SiRNA target sequence
ctccacaactccgataagat

SEQ ID NO: 242207 - DNA, 20 bp, Artificial sequence
  SiRNA target sequence
tccacaactccgataagatg

SEQ ID NO: 242208 - DNA, 20 bp, Artificial sequence
  SiRNA target sequence
ccacaactccgataagatgt

SEQ ID NO: 242209 - DNA, 20 bp, Artificial sequence
  SiRNA target sequence
cacaactccgataagatgta

SEQ ID NO: 242210 - DNA, 20 bp, Artificial sequence
  SiRNA target sequence
acaactccgataagatgtaa

SEQ ID NO: 242211 - DNA, 20 bp, Artificial sequence
  SiRNA target sequence
caactccgataagatgtaac

SEQ ID NO: 242212 - DNA, 20 bp, Artificial sequence
  SiRNA target sequence
aactccgataagatgtaaca

SEQ ID NO: 242213 - DNA, 20 bp, Artificial sequence
  SiRNA target sequence
actccgataagatgtaacat

SEQ ID NO: 242214 - DNA, 20 bp, Artificial sequence
  SiRNA target sequence
ctccgataagatgtaacata

SEQ ID NO: 242215 - DNA, 20 bp, Artificial sequence
  SiRNA target sequence
tccgataagatgtaacataa

SEQ ID NO: 242216 - DNA, 20 bp, Artificial sequence
  SiRNA target sequence
ccgataagatgtaacataaa

SEQ ID NO: 242217 - DNA, 20 bp, Artificial sequence
  SiRNA target sequence
cgataagatgtaacataaag

SEQ ID NO: 242218 - DNA, 20 bp, Artificial sequence
  SiRNA target sequence
gataagatgtaacataaagt

SEQ ID NO: 242219 - DNA, 20 bp, Artificial sequence
  SiRNA target sequence
ataagatgtaacataaagta

SEQ ID NO: 242220 - DNA, 20 bp, Artificial sequence
  SiRNA target sequence
taagatgtaacataaagtac

SEQ ID NO: 242221 - DNA, 20 bp, Artificial sequence
  SiRNA target sequence
aagatgtaacataaagtact

SEQ ID NO: 242222 - DNA, 20 bp, Artificial sequence
  SiRNA target sequence
agatgtaacataaagtactt

SEQ ID NO: 242223 - DNA, 20 bp, Artificial sequence
  SiRNA target sequence
gatgtaacataaagtactta

SEQ ID NO: 242224 - DNA, 20 bp, Artificial sequence
  SiRNA target sequence
atgtaacataaagtacttat

SEQ ID NO: 242225 - DNA, 20 bp, Artificial sequence
  SiRNA target sequence
tgtaacataaagtacttatc

SEQ ID NO: 242226 - DNA, 20 bp, Artificial sequence
  SiRNA target sequence
gtaacataaagtacttatcc

SEQ ID NO: 242227 - DNA, 20 bp, Artificial sequence
  SiRNA target sequence
taacataaagtacttatcca

SEQ ID NO: 242228 - DNA, 20 bp, Artificial sequence
  SiRNA target sequence
aacataaagtacttatccac

SEQ ID NO: 242229 - DNA, 20 bp, Artificial sequence
  SiRNA target sequence
acataaagtacttatccact

SEQ ID NO: 242230 - DNA, 20 bp, Artificial sequence
  SiRNA target sequence
cataaagtacttatccactc

SEQ ID NO: 242231 - DNA, 20 bp, Artificial sequence
  SiRNA target sequence
ataaagtacttatccactca

SEQ ID NO: 242232 - DNA, 20 bp, Artificial sequence
  SiRNA target sequence
taaagtacttatccactcac

SEQ ID NO: 242233 - DNA, 20 bp, Artificial sequence
  SiRNA target sequence
aaagtacttatccactcact

SEQ ID NO: 242234 - DNA, 20 bp, Artificial sequence
  SiRNA target sequence
aagtacttatccactcactg

SEQ ID NO: 242235 - DNA, 20 bp, Artificial sequence
  SiRNA target sequence
agtacttatccactcactgt

SEQ ID NO: 242236 - DNA, 20 bp, Artificial sequence
  SiRNA target sequence
gtacttatccactcactgta

SEQ ID NO: 242237 - DNA, 20 bp, Artificial sequence
  SiRNA target sequence
tacttatccactcactgtac

SEQ ID NO: 242238 - DNA, 20 bp, Artificial sequence
  SiRNA target sequence
acttatccactcactgtaca

SEQ ID NO: 242239 - DNA, 20 bp, Artificial sequence
  SiRNA target sequence
cttatccactcactgtacat

SEQ ID NO: 242240 - DNA, 20 bp, Artificial sequence
  SiRNA target sequence
ttatccactcactgtacata

SEQ ID NO: 242241 - DNA, 20 bp, Artificial sequence
  SiRNA target sequence
tatccactcactgtacatat

SEQ ID NO: 242242 - DNA, 20 bp, Artificial sequence
  SiRNA target sequence
atccactcactgtacatata

SEQ ID NO: 242243 - DNA, 20 bp, Artificial sequence
  SiRNA target sequence
tccactcactgtacatatat

SEQ ID NO: 242244 - DNA, 20 bp, Artificial sequence
  SiRNA target sequence
ccactcactgtacatatata

SEQ ID NO: 242245 - DNA, 20 bp, Artificial sequence
  SiRNA target sequence
cactcactgtacatatataa

SEQ ID NO: 242246 - DNA, 20 bp, Artificial sequence
  SiRNA target sequence
actcactgtacatatataaa

SEQ ID NO: 242247 - DNA, 20 bp, Artificial sequence
  SiRNA target sequence
ctcactgtacatatataaaa

SEQ ID NO: 242248 - DNA, 20 bp, Artificial sequence
  SiRNA target sequence
tcactgtacatatataaaaa

SEQ ID NO: 242249 - DNA, 20 bp, Artificial sequence
  SiRNA target sequence
cactgtacatatataaaaaa

SEQ ID NO: 242250 - DNA, 20 bp, Artificial sequence
  SiRNA target sequence
actgtacatatataaaaaag

SEQ ID NO: 242251 - DNA, 20 bp, Artificial sequence
  SiRNA target sequence
ctgtacatatataaaaaagg

SEQ ID NO: 242252 - DNA, 20 bp, Artificial sequence
  SiRNA target sequence
tgtacatatataaaaaagga

SEQ ID NO: 242253 - DNA, 20 bp, Artificial sequence
  SiRNA target sequence
gtacatatataaaaaaggag

SEQ ID NO: 242254 - DNA, 20 bp, Artificial sequence
  SiRNA target sequence
tacatatataaaaaaggaga

SEQ ID NO: 242255 - DNA, 20 bp, Artificial sequence
  SiRNA target sequence
acatatataaaaaaggagat

SEQ ID NO: 242256 - DNA, 20 bp, Artificial sequence
  SiRNA target sequence
catatataaaaaaggagata

SEQ ID NO: 242257 - DNA, 20 bp, Artificial sequence
  SiRNA target sequence
atatataaaaaaggagataa

SEQ ID NO: 242258 - DNA, 20 bp, Artificial sequence
  SiRNA target sequence
tatataaaaaaggagataag

SEQ ID NO: 242259 - DNA, 20 bp, Artificial sequence
  SiRNA target sequence
atataaaaaaggagataagc

SEQ ID NO: 242260 - DNA, 20 bp, Artificial sequence
  SiRNA target sequence
tataaaaaaggagataagcc

SEQ ID NO: 242261 - DNA, 20 bp, Artificial sequence
  SiRNA target sequence
ataaaaaaggagataagccc

SEQ ID NO: 242262 - DNA, 20 bp, Artificial sequence
  SiRNA target sequence
taaaaaaggagataagccca

SEQ ID NO: 242263 - DNA, 20 bp, Artificial sequence
  SiRNA target sequence
aaaaaaggagataagcccat

SEQ ID NO: 242264 - DNA, 20 bp, Artificial sequence
  SiRNA target sequence
aaaaaggagataagcccatc

SEQ ID NO: 242265 - DNA, 20 bp, Artificial sequence
  SiRNA target sequence
aaaaggagataagcccatca

SEQ ID NO: 242266 - DNA, 20 bp, Artificial sequence
  SiRNA target sequence
aaaggagataagcccatcaa

SEQ ID NO: 242267 - DNA, 20 bp, Artificial sequence
  SiRNA target sequence
aaggagataagcccatcaag

SEQ ID NO: 242268 - DNA, 20 bp, Artificial sequence
  SiRNA target sequence
aggagataagcccatcaagc

SEQ ID NO: 242269 - DNA, 20 bp, Artificial sequence
  SiRNA target sequence
ggagataagcccatcaagct

SEQ ID NO: 242270 - DNA, 20 bp, Artificial sequence
  SiRNA target sequence
gagataagcccatcaagctt

SEQ ID NO: 242271 - DNA, 20 bp, Artificial sequence
  SiRNA target sequence
agataagcccatcaagcttc

SEQ ID NO: 242272 - DNA, 20 bp, Artificial sequence
  SiRNA target sequence
gataagcccatcaagcttct

SEQ ID NO: 242273 - DNA, 20 bp, Artificial sequence
  SiRNA target sequence
ataagcccatcaagcttcta

SEQ ID NO: 242274 - DNA, 20 bp, Artificial sequence
  SiRNA target sequence
taagcccatcaagcttctaa

SEQ ID NO: 242275 - DNA, 20 bp, Artificial sequence
  SiRNA target sequence
aagcccatcaagcttctaac

SEQ ID NO: 242276 - DNA, 20 bp, Artificial sequence
  SiRNA target sequence
agcccatcaagcttctaact

SEQ ID NO: 242277 - DNA, 20 bp, Artificial sequence
  SiRNA target sequence
gcccatcaagcttctaactg

SEQ ID NO: 242278 - DNA, 20 bp, Artificial sequence
  SiRNA target sequence
cccatcaagcttctaactga

SEQ ID NO: 242279 - DNA, 20 bp, Artificial sequence
  SiRNA target sequence
ccatcaagcttctaactgac

SEQ ID NO: 242280 - DNA, 20 bp, Artificial sequence
  SiRNA target sequence
catcaagcttctaactgaca

SEQ ID NO: 242281 - DNA, 20 bp, Artificial sequence
  SiRNA target sequence
atcaagcttctaactgacat

SEQ ID NO: 242282 - DNA, 20 bp, Artificial sequence
  SiRNA target sequence
tcaagcttctaactgacatc

SEQ ID NO: 242283 - DNA, 20 bp, Artificial sequence
  SiRNA target sequence
caagcttctaactgacatct

SEQ ID NO: 242284 - DNA, 20 bp, Artificial sequence
  SiRNA target sequence
aagcttctaactgacatctt

SEQ ID NO: 242285 - DNA, 20 bp, Artificial sequence
  SiRNA target sequence
agcttctaactgacatctta

SEQ ID NO: 242286 - DNA, 20 bp, Artificial sequence
  SiRNA target sequence
gcttctaactgacatcttac

SEQ ID NO: 242287 - DNA, 20 bp, Artificial sequence
  SiRNA target sequence
cttctaactgacatcttacc

SEQ ID NO: 242288 - DNA, 20 bp, Artificial sequence
  SiRNA target sequence
ttctaactgacatcttacca

SEQ ID NO: 242289 - DNA, 20 bp, Artificial sequence
  SiRNA target sequence
tctaactgacatcttaccat

SEQ ID NO: 242290 - DNA, 20 bp, Artificial sequence
  SiRNA target sequence
ctaactgacatcttaccatc

SEQ ID NO: 242291 - DNA, 20 bp, Artificial sequence
  SiRNA target sequence
taactgacatcttaccatca

SEQ ID NO: 242292 - DNA, 20 bp, Artificial sequence
  SiRNA target sequence
aactgacatcttaccatcac

SEQ ID NO: 242293 - DNA, 20 bp, Artificial sequence
  SiRNA target sequence
actgacatcttaccatcaca

SEQ ID NO: 242294 - DNA, 20 bp, Artificial sequence
  SiRNA target sequence
ctgacatcttaccatcacaa

SEQ ID NO: 242295 - DNA, 20 bp, Artificial sequence
  SiRNA target sequence
tgacatcttaccatcacaaa

SEQ ID NO: 242296 - DNA, 20 bp, Artificial sequence
  SiRNA target sequence
gacatcttaccatcacaaaa

SEQ ID NO: 242297 - DNA, 20 bp, Artificial sequence
  SiRNA target sequence
acatcttaccatcacaaaaa

SEQ ID NO: 242298 - DNA, 20 bp, Artificial sequence
  SiRNA target sequence
catcttaccatcacaaaaaa

SEQ ID NO: 242299 - DNA, 20 bp, Artificial sequence
  SiRNA target sequence
atcttaccatcacaaaaaat

SEQ ID NO: 242300 - DNA, 20 bp, Artificial sequence
  SiRNA target sequence
tcttaccatcacaaaaaata

SEQ ID NO: 242301 - DNA, 20 bp, Artificial sequence
  SiRNA target sequence
cttaccatcacaaaaaatat

SEQ ID NO: 242302 - DNA, 20 bp, Artificial sequence
  SiRNA target sequence
ttaccatcacaaaaaatatc

SEQ ID NO: 242303 - DNA, 20 bp, Artificial sequence
  SiRNA target sequence
taccatcacaaaaaatatct

SEQ ID NO: 242304 - DNA, 20 bp, Artificial sequence
  SiRNA target sequence
accatcacaaaaaatatcta

SEQ ID NO: 242305 - DNA, 20 bp, Artificial sequence
  SiRNA target sequence
ccatcacaaaaaatatctag

SEQ ID NO: 242306 - DNA, 20 bp, Artificial sequence
  SiRNA target sequence
catcacaaaaaatatctagt

SEQ ID NO: 242307 - DNA, 20 bp, Artificial sequence
  SiRNA target sequence
atcacaaaaaatatctagtg

SEQ ID NO: 242308 - DNA, 20 bp, Artificial sequence
  SiRNA target sequence
tcacaaaaaatatctagtgc

SEQ ID NO: 242309 - DNA, 20 bp, Artificial sequence
  SiRNA target sequence
cacaaaaaatatctagtgcc

SEQ ID NO: 242310 - DNA, 20 bp, Artificial sequence
  SiRNA target sequence
acaaaaaatatctagtgccc

SEQ ID NO: 242311 - DNA, 20 bp, Artificial sequence
  SiRNA target sequence
caaaaaatatctagtgccca

SEQ ID NO: 242312 - DNA, 20 bp, Artificial sequence
  SiRNA target sequence
aaaaaatatctagtgcccat

SEQ ID NO: 242313 - DNA, 20 bp, Artificial sequence
  SiRNA target sequence
aaaaatatctagtgcccatt

SEQ ID NO: 242314 - DNA, 20 bp, Artificial sequence
  SiRNA target sequence
aaaatatctagtgcccattg

SEQ ID NO: 242315 - DNA, 20 bp, Artificial sequence
  SiRNA target sequence
aaatatctagtgcccattgt

SEQ ID NO: 242316 - DNA, 20 bp, Artificial sequence
  SiRNA target sequence
aatatctagtgcccattgtg

SEQ ID NO: 242317 - DNA, 20 bp, Artificial sequence
  SiRNA target sequence
atatctagtgcccattgtga

SEQ ID NO: 242318 - DNA, 20 bp, Artificial sequence
  SiRNA target sequence
tatctagtgcccattgtgat

SEQ ID NO: 242319 - DNA, 20 bp, Artificial sequence
  SiRNA target sequence
atctagtgcccattgtgatc

SEQ ID NO: 242320 - DNA, 20 bp, Artificial sequence
  SiRNA target sequence
tctagtgcccattgtgatcc

SEQ ID NO: 242321 - DNA, 20 bp, Artificial sequence
  SiRNA target sequence
ctagtgcccattgtgatcct

SEQ ID NO: 242322 - DNA, 20 bp, Artificial sequence
  SiRNA target sequence
tagtgcccattgtgatcctt

SEQ ID NO: 242323 - DNA, 20 bp, Artificial sequence
  SiRNA target sequence
agtgcccattgtgatccttt

SEQ ID NO: 242324 - DNA, 20 bp, Artificial sequence
  SiRNA target sequence
gtgcccattgtgatcctttt

SEQ ID NO: 242325 - DNA, 20 bp, Artificial sequence
  SiRNA target sequence
tgcccattgtgatccttttt

SEQ ID NO: 242326 - DNA, 20 bp, Artificial sequence
  SiRNA target sequence
gcccattgtgatcctttttg

SEQ ID NO: 242327 - DNA, 20 bp, Artificial sequence
  SiRNA target sequence
cccattgtgatcctttttgg

SEQ ID NO: 242328 - DNA, 20 bp, Artificial sequence
  SiRNA target sequence
ccattgtgatcctttttgga

SEQ ID NO: 242329 - DNA, 20 bp, Artificial sequence
  SiRNA target sequence
cattgtgatcctttttggat

SEQ ID NO: 242330 - DNA, 20 bp, Artificial sequence
  SiRNA target sequence
attgtgatcctttttggatt

SEQ ID NO: 242331 - DNA, 20 bp, Artificial sequence
  SiRNA target sequence
ttgtgatcctttttggattt

SEQ ID NO: 242332 - DNA, 20 bp, Artificial sequence
  SiRNA target sequence
tgtgatcctttttggatttt

SEQ ID NO: 242333 - DNA, 20 bp, Artificial sequence
  SiRNA target sequence
gtgatcctttttggatttta

SEQ ID NO: 242334 - DNA, 20 bp, Artificial sequence
  SiRNA target sequence
tgatcctttttggattttat

SEQ ID NO: 242335 - DNA, 20 bp, Artificial sequence
  SiRNA target sequence
gatcctttttggattttata

SEQ ID NO: 242336 - DNA, 20 bp, Artificial sequence
  SiRNA target sequence
atcctttttggattttatat

SEQ ID NO: 242337 - DNA, 20 bp, Artificial sequence
  SiRNA target sequence
tcctttttggattttatatt

SEQ ID NO: 242338 - DNA, 20 bp, Artificial sequence
  SiRNA target sequence
cctttttggattttatattc

SEQ ID NO: 242339 - DNA, 20 bp, Artificial sequence
  SiRNA target sequence
ctttttggattttatattca

SEQ ID NO: 242340 - DNA, 20 bp, Artificial sequence
  SiRNA target sequence
tttttggattttatattcaa

SEQ ID NO: 242341 - DNA, 20 bp, Artificial sequence
  SiRNA target sequence
ttttggattttatattcaaa

SEQ ID NO: 242342 - DNA, 20 bp, Artificial sequence
  SiRNA target sequence
tttggattttatattcaaat

SEQ ID NO: 242343 - DNA, 20 bp, Artificial sequence
  SiRNA target sequence
ttggattttatattcaaatg

SEQ ID NO: 242344 - DNA, 20 bp, Artificial sequence
  SiRNA target sequence
tggattttatattcaaatgg

SEQ ID NO: 242345 - DNA, 20 bp, Artificial sequence
  SiRNA target sequence
ggattttatattcaaatgga

SEQ ID NO: 242346 - DNA, 20 bp, Artificial sequence
  SiRNA target sequence
gattttatattcaaatggaa

SEQ ID NO: 242347 - DNA, 20 bp, Artificial sequence
  SiRNA target sequence
attttatattcaaatggaat

SEQ ID NO: 242348 - DNA, 20 bp, Artificial sequence
  SiRNA target sequence
ttttatattcaaatggaatt

SEQ ID NO: 242349 - DNA, 20 bp, Artificial sequence
  SiRNA target sequence
tttatattcaaatggaatta

SEQ ID NO: 242350 - DNA, 20 bp, Artificial sequence
  SiRNA target sequence
ttatattcaaatggaattaa

SEQ ID NO: 242351 - DNA, 20 bp, Artificial sequence
  SiRNA target sequence
tatattcaaatggaattaaa

SEQ ID NO: 242352 - DNA, 20 bp, Artificial sequence
  SiRNA target sequence
atattcaaatggaattaaaa

SEQ ID NO: 242353 - DNA, 20 bp, Artificial sequence
  SiRNA target sequence
tattcaaatggaattaaaag

SEQ ID NO: 242354 - DNA, 20 bp, Artificial sequence
  SiRNA target sequence
attcaaatggaattaaaaga

SEQ ID NO: 242355 - DNA, 20 bp, Artificial sequence
  SiRNA target sequence
ttcaaatggaattaaaagag

SEQ ID NO: 242356 - DNA, 20 bp, Artificial sequence
  SiRNA target sequence
tcaaatggaattaaaagaga

SEQ ID NO: 242357 - DNA, 20 bp, Artificial sequence
  SiRNA target sequence
caaatggaattaaaagagaa

SEQ ID NO: 242358 - DNA, 20 bp, Artificial sequence
  SiRNA target sequence
aaatggaattaaaagagaac

SEQ ID NO: 242359 - DNA, 20 bp, Artificial sequence
  SiRNA target sequence
aatggaattaaaagagaacc

SEQ ID NO: 242360 - DNA, 20 bp, Artificial sequence
  SiRNA target sequence
atggaattaaaagagaacca

SEQ ID NO: 242361 - DNA, 20 bp, Artificial sequence
  SiRNA target sequence
tggaattaaaagagaaccaa

SEQ ID NO: 242362 - DNA, 20 bp, Artificial sequence
  SiRNA target sequence
ggaattaaaagagaaccaat

SEQ ID NO: 242363 - DNA, 20 bp, Artificial sequence
  SiRNA target sequence
gaattaaaagagaaccaatt

SEQ ID NO: 242364 - DNA, 20 bp, Artificial sequence
  SiRNA target sequence
aattaaaagagaaccaatta

SEQ ID NO: 242365 - DNA, 20 bp, Artificial sequence
  SiRNA target sequence
attaaaagagaaccaattag

SEQ ID NO: 242366 - DNA, 20 bp, Artificial sequence
  SiRNA target sequence
ttaaaagagaaccaattaga

SEQ ID NO: 242367 - DNA, 20 bp, Artificial sequence
  SiRNA target sequence
taaaagagaaccaattagaa

SEQ ID NO: 242368 - DNA, 20 bp, Artificial sequence
  SiRNA target sequence
aaaagagaaccaattagaaa

SEQ ID NO: 242369 - DNA, 20 bp, Artificial sequence
  SiRNA target sequence
aaagagaaccaattagaaaa

SEQ ID NO: 242370 - DNA, 20 bp, Artificial sequence
  SiRNA target sequence
aagagaaccaattagaaaaa

SEQ ID NO: 242371 - DNA, 20 bp, Artificial sequence
  SiRNA target sequence
agagaaccaattagaaaaaa

SEQ ID NO: 242372 - DNA, 20 bp, Artificial sequence
  SiRNA target sequence
gagaaccaattagaaaaaaa

SEQ ID NO: 242373 - DNA, 20 bp, Artificial sequence
  SiRNA target sequence
agaaccaattagaaaaaaaa

SEQ ID NO: 242374 - DNA, 20 bp, Artificial sequence
  SiRNA target sequence
gaaccaattagaaaaaaaat

SEQ ID NO: 242375 - DNA, 20 bp, Artificial sequence
  SiRNA target sequence
aaccaattagaaaaaaaatg

SEQ ID NO: 242376 - DNA, 20 bp, Artificial sequence
  SiRNA target sequence
accaattagaaaaaaaatgc

SEQ ID NO: 242377 - DNA, 20 bp, Artificial sequence
  SiRNA target sequence
ccaattagaaaaaaaatgcc

SEQ ID NO: 242378 - DNA, 20 bp, Artificial sequence
  SiRNA target sequence
caattagaaaaaaaatgcca

SEQ ID NO: 242379 - DNA, 20 bp, Artificial sequence
  SiRNA target sequence
aattagaaaaaaaatgccaa

SEQ ID NO: 242380 - DNA, 20 bp, Artificial sequence
  SiRNA target sequence
attagaaaaaaaatgccaat

SEQ ID NO: 242381 - DNA, 20 bp, Artificial sequence
  SiRNA target sequence
ttagaaaaaaaatgccaata

SEQ ID NO: 242382 - DNA, 20 bp, Artificial sequence
  SiRNA target sequence
tagaaaaaaaatgccaataa

SEQ ID NO: 242383 - DNA, 20 bp, Artificial sequence
  SiRNA target sequence
agaaaaaaaatgccaataaa

SEQ ID NO: 242384 - DNA, 20 bp, Artificial sequence
  SiRNA target sequence
gaaaaaaaatgccaataaaa

SEQ ID NO: 242385 - DNA, 20 bp, Artificial sequence
  SiRNA target sequence
aaaaaaaatgccaataaaac

SEQ ID NO: 242386 - DNA, 20 bp, Artificial sequence
  SiRNA target sequence
aaaaaaatgccaataaaacc

SEQ ID NO: 242387 - DNA, 20 bp, Artificial sequence
  SiRNA target sequence
aaaaaatgccaataaaacca

SEQ ID NO: 242388 - DNA, 20 bp, Artificial sequence
  SiRNA target sequence
aaaaatgccaataaaaccaa

SEQ ID NO: 242389 - DNA, 20 bp, Artificial sequence
  SiRNA target sequence
aaaatgccaataaaaccaaa

SEQ ID NO: 242390 - DNA, 20 bp, Artificial sequence
  SiRNA target sequence
aaatgccaataaaaccaaaa

SEQ ID NO: 242391 - DNA, 20 bp, Artificial sequence
  SiRNA target sequence
aatgccaataaaaccaaaaa

SEQ ID NO: 242392 - DNA, 20 bp, Artificial sequence
  SiRNA target sequence
atgccaataaaaccaaaaat

SEQ ID NO: 242393 - DNA, 20 bp, Artificial sequence
  SiRNA target sequence
tgccaataaaaccaaaaata

SEQ ID NO: 242394 - DNA, 20 bp, Artificial sequence
  SiRNA target sequence
gccaataaaaccaaaaataa

SEQ ID NO: 242395 - DNA, 20 bp, Artificial sequence
  SiRNA target sequence
ccaataaaaccaaaaataat

SEQ ID NO: 242396 - DNA, 20 bp, Artificial sequence
  SiRNA target sequence
caataaaaccaaaaataata

SEQ ID NO: 242397 - DNA, 20 bp, Artificial sequence
  SiRNA target sequence
aataaaaccaaaaataataa

SEQ ID NO: 242398 - DNA, 20 bp, Artificial sequence
  SiRNA target sequence
ataaaaccaaaaataataaa

SEQ ID NO: 242399 - DNA, 20 bp, Artificial sequence
  SiRNA target sequence
taaaaccaaaaataataaaa

SEQ ID NO: 242400 - DNA, 20 bp, Artificial sequence
  SiRNA target sequence
aaaaccaaaaataataaaat

SEQ ID NO: 242401 - DNA, 20 bp, Artificial sequence
  SiRNA target sequence
aaaccaaaaataataaaatt

SEQ ID NO: 242402 - DNA, 20 bp, Artificial sequence
  SiRNA target sequence
aaccaaaaataataaaattc

SEQ ID NO: 242403 - DNA, 20 bp, Artificial sequence
  SiRNA target sequence
accaaaaataataaaattca

SEQ ID NO: 242404 - DNA, 20 bp, Artificial sequence
  SiRNA target sequence
ccaaaaataataaaattcac

SEQ ID NO: 242405 - DNA, 20 bp, Artificial sequence
  SiRNA target sequence
caaaaataataaaattcaca

SEQ ID NO: 242406 - DNA, 20 bp, Artificial sequence
  SiRNA target sequence
aaaaataataaaattcacaa

SEQ ID NO: 242407 - DNA, 20 bp, Artificial sequence
  SiRNA target sequence
aaaataataaaattcacaat

SEQ ID NO: 242408 - DNA, 20 bp, Artificial sequence
  SiRNA target sequence
aaataataaaattcacaata

SEQ ID NO: 242409 - DNA, 20 bp, Artificial sequence
  SiRNA target sequence
aataataaaattcacaatac

SEQ ID NO: 242410 - DNA, 20 bp, Artificial sequence
  SiRNA target sequence
ataataaaattcacaatact

SEQ ID NO: 242411 - DNA, 20 bp, Artificial sequence
  SiRNA target sequence
taataaaattcacaatacta

SEQ ID NO: 242412 - DNA, 20 bp, Artificial sequence
  SiRNA target sequence
aataaaattcacaatactaa

SEQ ID NO: 242413 - DNA, 20 bp, Artificial sequence
  SiRNA target sequence
ataaaattcacaatactaag

SEQ ID NO: 242414 - DNA, 20 bp, Artificial sequence
  SiRNA target sequence
taaaattcacaatactaaga

SEQ ID NO: 242415 - DNA, 20 bp, Artificial sequence
  SiRNA target sequence
aaaattcacaatactaagaa

SEQ ID NO: 242416 - DNA, 20 bp, Artificial sequence
  SiRNA target sequence
aaattcacaatactaagaat

SEQ ID NO: 242417 - DNA, 20 bp, Artificial sequence
  SiRNA target sequence
aattcacaatactaagaata

SEQ ID NO: 242418 - DNA, 20 bp, Artificial sequence
  SiRNA target sequence
attcacaatactaagaatag

SEQ ID NO: 242419 - DNA, 20 bp, Artificial sequence
  SiRNA target sequence
ttcacaatactaagaataga

SEQ ID NO: 242420 - DNA, 20 bp, Artificial sequence
  SiRNA target sequence
tcacaatactaagaatagag

SEQ ID NO: 242421 - DNA, 20 bp, Artificial sequence
  SiRNA target sequence
cacaatactaagaatagagt

SEQ ID NO: 242422 - DNA, 20 bp, Artificial sequence
  SiRNA target sequence
acaatactaagaatagagta

SEQ ID NO: 242423 - DNA, 20 bp, Artificial sequence
  SiRNA target sequence
caatactaagaatagagtac

SEQ ID NO: 242424 - DNA, 20 bp, Artificial sequence
  SiRNA target sequence
aatactaagaatagagtaca

SEQ ID NO: 242425 - DNA, 20 bp, Artificial sequence
  SiRNA target sequence
atactaagaatagagtacac

SEQ ID NO: 242426 - DNA, 20 bp, Artificial sequence
  SiRNA target sequence
tactaagaatagagtacaca

SEQ ID NO: 242427 - DNA, 20 bp, Artificial sequence
  SiRNA target sequence
actaagaatagagtacacat

SEQ ID NO: 242428 - DNA, 20 bp, Artificial sequence
  SiRNA target sequence
ctaagaatagagtacacatt

SEQ ID NO: 242429 - DNA, 20 bp, Artificial sequence
  SiRNA target sequence
taagaatagagtacacattt

SEQ ID NO: 242430 - DNA, 20 bp, Artificial sequence
  SiRNA target sequence
aagaatagagtacacattta

SEQ ID NO: 242431 - DNA, 20 bp, Artificial sequence
  SiRNA target sequence
agaatagagtacacatttaa

SEQ ID NO: 242432 - DNA, 20 bp, Artificial sequence
  SiRNA target sequence
gaatagagtacacatttaaa

SEQ ID NO: 242433 - DNA, 20 bp, Artificial sequence
  SiRNA target sequence
aatagagtacacatttaaag

SEQ ID NO: 242434 - DNA, 20 bp, Artificial sequence
  SiRNA target sequence
atagagtacacatttaaagc

SEQ ID NO: 242435 - DNA, 20 bp, Artificial sequence
  SiRNA target sequence
tagagtacacatttaaagcc

SEQ ID NO: 242436 - DNA, 20 bp, Artificial sequence
  SiRNA target sequence
agagtacacatttaaagcct

SEQ ID NO: 242437 - DNA, 20 bp, Artificial sequence
  SiRNA target sequence
gagtacacatttaaagcctt

SEQ ID NO: 242438 - DNA, 20 bp, Artificial sequence
  SiRNA target sequence
agtacacatttaaagccttt

SEQ ID NO: 242439 - DNA, 20 bp, Artificial sequence
  SiRNA target sequence
gtacacatttaaagcctttt

SEQ ID NO: 242440 - DNA, 20 bp, Artificial sequence
  SiRNA target sequence
tacacatttaaagccttttg

SEQ ID NO: 242441 - DNA, 20 bp, Artificial sequence
  SiRNA target sequence
acacatttaaagccttttgg

SEQ ID NO: 242442 - DNA, 20 bp, Artificial sequence
  SiRNA target sequence
cacatttaaagccttttgga

SEQ ID NO: 242443 - DNA, 20 bp, Artificial sequence
  SiRNA target sequence
acatttaaagccttttggac

SEQ ID NO: 242444 - DNA, 20 bp, Artificial sequence
  SiRNA target sequence
catttaaagccttttggaca

SEQ ID NO: 242445 - DNA, 20 bp, Artificial sequence
  SiRNA target sequence
atttaaagccttttggacat

SEQ ID NO: 242446 - DNA, 20 bp, Artificial sequence
  SiRNA target sequence
tttaaagccttttggacata

SEQ ID NO: 242447 - DNA, 20 bp, Artificial sequence
  SiRNA target sequence
ttaaagccttttggacatat

SEQ ID NO: 242448 - DNA, 20 bp, Artificial sequence
  SiRNA target sequence
taaagccttttggacatatg

SEQ ID NO: 242449 - DNA, 20 bp, Artificial sequence
  SiRNA target sequence
aaagccttttggacatatga

SEQ ID NO: 242450 - DNA, 20 bp, Artificial sequence
  SiRNA target sequence
aagccttttggacatatgac

SEQ ID NO: 242451 - DNA, 20 bp, Artificial sequence
  SiRNA target sequence
agccttttggacatatgaca

SEQ ID NO: 242452 - DNA, 20 bp, Artificial sequence
  SiRNA target sequence
gccttttggacatatgacat

SEQ ID NO: 242453 - DNA, 20 bp, Artificial sequence
  SiRNA target sequence
ccttttggacatatgacatc

SEQ ID NO: 242454 - DNA, 20 bp, Artificial sequence
  SiRNA target sequence
cttttggacatatgacatca

SEQ ID NO: 242455 - DNA, 20 bp, Artificial sequence
  SiRNA target sequence
ttttggacatatgacatcat

SEQ ID NO: 242456 - DNA, 20 bp, Artificial sequence
  SiRNA target sequence
tttggacatatgacatcata

SEQ ID NO: 242457 - DNA, 20 bp, Artificial sequence
  SiRNA target sequence
ttggacatatgacatcataa

SEQ ID NO: 242458 - DNA, 20 bp, Artificial sequence
  SiRNA target sequence
tggacatatgacatcataag

SEQ ID NO: 242459 - DNA, 20 bp, Artificial sequence
  SiRNA target sequence
ggacatatgacatcataaga

SEQ ID NO: 242460 - DNA, 20 bp, Artificial sequence
  SiRNA target sequence
gacatatgacatcataagac

SEQ ID NO: 242461 - DNA, 20 bp, Artificial sequence
  SiRNA target sequence
acatatgacatcataagaca

SEQ ID NO: 242462 - DNA, 20 bp, Artificial sequence
  SiRNA target sequence
catatgacatcataagacat

SEQ ID NO: 242463 - DNA, 20 bp, Artificial sequence
  SiRNA target sequence
atatgacatcataagacata

SEQ ID NO: 242464 - DNA, 20 bp, Artificial sequence
  SiRNA target sequence
tatgacatcataagacatat

SEQ ID NO: 242465 - DNA, 20 bp, Artificial sequence
  SiRNA target sequence
atgacatcataagacatata

SEQ ID NO: 242466 - DNA, 20 bp, Artificial sequence
  SiRNA target sequence
tgacatcataagacatataa

SEQ ID NO: 242467 - DNA, 20 bp, Artificial sequence
  SiRNA target sequence
gacatcataagacatataat

SEQ ID NO: 242468 - DNA, 20 bp, Artificial sequence
  SiRNA target sequence
acatcataagacatataatt

SEQ ID NO: 242469 - DNA, 20 bp, Artificial sequence
  SiRNA target sequence
catcataagacatataattg

SEQ ID NO: 242470 - DNA, 20 bp, Artificial sequence
  SiRNA target sequence
atcataagacatataattgg

SEQ ID NO: 242471 - DNA, 20 bp, Artificial sequence
  SiRNA target sequence
tcataagacatataattggc

SEQ ID NO: 242472 - DNA, 20 bp, Artificial sequence
  SiRNA target sequence
cataagacatataattggca

SEQ ID NO: 242473 - DNA, 20 bp, Artificial sequence
  SiRNA target sequence
ataagacatataattggcag

SEQ ID NO: 242474 - DNA, 20 bp, Artificial sequence
  SiRNA target sequence
taagacatataattggcagt

SEQ ID NO: 242475 - DNA, 20 bp, Artificial sequence
  SiRNA target sequence
aagacatataattggcagtg

SEQ ID NO: 242476 - DNA, 20 bp, Artificial sequence
  SiRNA target sequence
agacatataattggcagtga

SEQ ID NO: 242477 - DNA, 20 bp, Artificial sequence
  SiRNA target sequence
gacatataattggcagtgaa

SEQ ID NO: 242478 - DNA, 20 bp, Artificial sequence
  SiRNA target sequence
acatataattggcagtgaaa

SEQ ID NO: 242479 - DNA, 20 bp, Artificial sequence
  SiRNA target sequence
catataattggcagtgaaaa

SEQ ID NO: 242480 - DNA, 20 bp, Artificial sequence
  SiRNA target sequence
atataattggcagtgaaaag

SEQ ID NO: 242481 - DNA, 20 bp, Artificial sequence
  SiRNA target sequence
tataattggcagtgaaaaga

SEQ ID NO: 242482 - DNA, 20 bp, Artificial sequence
  SiRNA target sequence
ataattggcagtgaaaagaa

SEQ ID NO: 242483 - DNA, 20 bp, Artificial sequence
  SiRNA target sequence
taattggcagtgaaaagaaa

SEQ ID NO: 242484 - DNA, 20 bp, Artificial sequence
  SiRNA target sequence
aattggcagtgaaaagaaaa

SEQ ID NO: 242485 - DNA, 20 bp, Artificial sequence
  SiRNA target sequence
attggcagtgaaaagaaaag

SEQ ID NO: 242486 - DNA, 20 bp, Artificial sequence
  SiRNA target sequence
ttggcagtgaaaagaaaagc

SEQ ID NO: 242487 - DNA, 20 bp, Artificial sequence
  SiRNA target sequence
tggcagtgaaaagaaaagct

SEQ ID NO: 242488 - DNA, 20 bp, Artificial sequence
  SiRNA target sequence
ggcagtgaaaagaaaagctt

SEQ ID NO: 242489 - DNA, 20 bp, Artificial sequence
  SiRNA target sequence
gcagtgaaaagaaaagcttt

SEQ ID NO: 242490 - DNA, 20 bp, Artificial sequence
  SiRNA target sequence
cagtgaaaagaaaagcttta

SEQ ID NO: 242491 - DNA, 20 bp, Artificial sequence
  SiRNA target sequence
agtgaaaagaaaagctttat

SEQ ID NO: 242492 - DNA, 20 bp, Artificial sequence
  SiRNA target sequence
gtgaaaagaaaagctttatg

SEQ ID NO: 242493 - DNA, 20 bp, Artificial sequence
  SiRNA target sequence
tgaaaagaaaagctttatgt

SEQ ID NO: 242494 - DNA, 20 bp, Artificial sequence
  SiRNA target sequence
gaaaagaaaagctttatgta

SEQ ID NO: 242495 - DNA, 20 bp, Artificial sequence
  SiRNA target sequence
aaaagaaaagctttatgtag

SEQ ID NO: 242496 - DNA, 20 bp, Artificial sequence
  SiRNA target sequence
aaagaaaagctttatgtagt

SEQ ID NO: 242497 - DNA, 20 bp, Artificial sequence
  SiRNA target sequence
aagaaaagctttatgtagta

SEQ ID NO: 242498 - DNA, 20 bp, Artificial sequence
  SiRNA target sequence
agaaaagctttatgtagtac

SEQ ID NO: 242499 - DNA, 20 bp, Artificial sequence
  SiRNA target sequence
gaaaagctttatgtagtaca

SEQ ID NO: 242500 - DNA, 20 bp, Artificial sequence
  SiRNA target sequence
aaaagctttatgtagtacag

SEQ ID NO: 242501 - DNA, 20 bp, Artificial sequence
  SiRNA target sequence
aaagctttatgtagtacagt

SEQ ID NO: 242502 - DNA, 20 bp, Artificial sequence
  SiRNA target sequence
aagctttatgtagtacagtg

SEQ ID NO: 242503 - DNA, 20 bp, Artificial sequence
  SiRNA target sequence
agctttatgtagtacagtga

SEQ ID NO: 242504 - DNA, 20 bp, Artificial sequence
  SiRNA target sequence
gctttatgtagtacagtgac

SEQ ID NO: 242505 - DNA, 20 bp, Artificial sequence
  SiRNA target sequence
ctttatgtagtacagtgacg

SEQ ID NO: 242506 - DNA, 20 bp, Artificial sequence
  SiRNA target sequence
tttatgtagtacagtgacga

SEQ ID NO: 242507 - DNA, 20 bp, Artificial sequence
  SiRNA target sequence
ttatgtagtacagtgacgaa

SEQ ID NO: 242508 - DNA, 20 bp, Artificial sequence
  SiRNA target sequence
tatgtagtacagtgacgaag

SEQ ID NO: 242509 - DNA, 20 bp, Artificial sequence
  SiRNA target sequence
atgtagtacagtgacgaagg

SEQ ID NO: 242510 - DNA, 20 bp, Artificial sequence
  SiRNA target sequence
tgtagtacagtgacgaagga

SEQ ID NO: 242511 - DNA, 20 bp, Artificial sequence
  SiRNA target sequence
gtagtacagtgacgaaggaa

SEQ ID NO: 242512 - DNA, 20 bp, Artificial sequence
  SiRNA target sequence
tagtacagtgacgaaggaat

SEQ ID NO: 242513 - DNA, 20 bp, Artificial sequence
  SiRNA target sequence
agtacagtgacgaaggaatt

SEQ ID NO: 242514 - DNA, 20 bp, Artificial sequence
  SiRNA target sequence
gtacagtgacgaaggaattt

SEQ ID NO: 242515 - DNA, 20 bp, Artificial sequence
  SiRNA target sequence
tacagtgacgaaggaatttg

SEQ ID NO: 242516 - DNA, 20 bp, Artificial sequence
  SiRNA target sequence
acagtgacgaaggaatttgt

SEQ ID NO: 242517 - DNA, 20 bp, Artificial sequence
  SiRNA target sequence
cagtgacgaaggaatttgtt

SEQ ID NO: 242518 - DNA, 20 bp, Artificial sequence
  SiRNA target sequence
agtgacgaaggaatttgttt

SEQ ID NO: 242519 - DNA, 20 bp, Artificial sequence
  SiRNA target sequence
gtgacgaaggaatttgtttt

SEQ ID NO: 242520 - DNA, 20 bp, Artificial sequence
  SiRNA target sequence
tgacgaaggaatttgttttg

SEQ ID NO: 242521 - DNA, 20 bp, Artificial sequence
  SiRNA target sequence
gacgaaggaatttgttttgt

SEQ ID NO: 242522 - DNA, 20 bp, Artificial sequence
  SiRNA target sequence
acgaaggaatttgttttgtc

SEQ ID NO: 242523 - DNA, 20 bp, Artificial sequence
  SiRNA target sequence
cgaaggaatttgttttgtca

SEQ ID NO: 242524 - DNA, 20 bp, Artificial sequence
  SiRNA target sequence
gaaggaatttgttttgtcat

SEQ ID NO: 242525 - DNA, 20 bp, Artificial sequence
  SiRNA target sequence
aaggaatttgttttgtcata

SEQ ID NO: 242526 - DNA, 20 bp, Artificial sequence
  SiRNA target sequence
aggaatttgttttgtcataa

SEQ ID NO: 242527 - DNA, 20 bp, Artificial sequence
  SiRNA target sequence
ggaatttgttttgtcataat

SEQ ID NO: 242528 - DNA, 20 bp, Artificial sequence
  SiRNA target sequence
gaatttgttttgtcataatc

SEQ ID NO: 242529 - DNA, 20 bp, Artificial sequence
  SiRNA target sequence
aatttgttttgtcataatca

SEQ ID NO: 242530 - DNA, 20 bp, Artificial sequence
  SiRNA target sequence
atttgttttgtcataatcac

SEQ ID NO: 242531 - DNA, 20 bp, Artificial sequence
  SiRNA target sequence
tttgttttgtcataatcacg

SEQ ID NO: 242532 - DNA, 20 bp, Artificial sequence
  SiRNA target sequence
ttgttttgtcataatcacga

SEQ ID NO: 242533 - DNA, 20 bp, Artificial sequence
  SiRNA target sequence
tgttttgtcataatcacgat

SEQ ID NO: 242534 - DNA, 20 bp, Artificial sequence
  SiRNA target sequence
gttttgtcataatcacgatt

SEQ ID NO: 242535 - DNA, 20 bp, Artificial sequence
  SiRNA target sequence
ttttgtcataatcacgattt

SEQ ID NO: 242536 - DNA, 20 bp, Artificial sequence
  SiRNA target sequence
tttgtcataatcacgatttc

SEQ ID NO: 242537 - DNA, 20 bp, Artificial sequence
  SiRNA target sequence
ttgtcataatcacgatttct

SEQ ID NO: 242538 - DNA, 20 bp, Artificial sequence
  SiRNA target sequence
tgtcataatcacgatttctc

SEQ ID NO: 242539 - DNA, 20 bp, Artificial sequence
  SiRNA target sequence
gtcataatcacgatttctct

SEQ ID NO: 242540 - DNA, 20 bp, Artificial sequence
  SiRNA target sequence
tcataatcacgatttctctg

SEQ ID NO: 242541 - DNA, 20 bp, Artificial sequence
  SiRNA target sequence
cataatcacgatttctctgt

SEQ ID NO: 242542 - DNA, 20 bp, Artificial sequence
  SiRNA target sequence
ataatcacgatttctctgta

SEQ ID NO: 242543 - DNA, 20 bp, Artificial sequence
  SiRNA target sequence
taatcacgatttctctgtaa

SEQ ID NO: 242544 - DNA, 20 bp, Artificial sequence
  SiRNA target sequence
aatcacgatttctctgtaaa

SEQ ID NO: 242545 - DNA, 20 bp, Artificial sequence
  SiRNA target sequence
atcacgatttctctgtaaaa

SEQ ID NO: 242546 - DNA, 20 bp, Artificial sequence
  SiRNA target sequence
tcacgatttctctgtaaaat

SEQ ID NO: 242547 - DNA, 20 bp, Artificial sequence
  SiRNA target sequence
cacgatttctctgtaaaatt

SEQ ID NO: 242548 - DNA, 20 bp, Artificial sequence
  SiRNA target sequence
acgatttctctgtaaaattc

SEQ ID NO: 242549 - DNA, 20 bp, Artificial sequence
  SiRNA target sequence
cgatttctctgtaaaattcc

SEQ ID NO: 242550 - DNA, 20 bp, Artificial sequence
  SiRNA target sequence
gatttctctgtaaaattcca

SEQ ID NO: 242551 - DNA, 20 bp, Artificial sequence
  SiRNA target sequence
atttctctgtaaaattccaa

SEQ ID NO: 242552 - DNA, 20 bp, Artificial sequence
  SiRNA target sequence
tttctctgtaaaattccaat

SEQ ID NO: 242553 - DNA, 20 bp, Artificial sequence
  SiRNA target sequence
ttctctgtaaaattccaata

SEQ ID NO: 242554 - DNA, 20 bp, Artificial sequence
  SiRNA target sequence
tctctgtaaaattccaataa

SEQ ID NO: 242555 - DNA, 20 bp, Artificial sequence
  SiRNA target sequence
ctctgtaaaattccaataat

SEQ ID NO: 242556 - DNA, 20 bp, Artificial sequence
  SiRNA target sequence
tctgtaaaattccaataatg

SEQ ID NO: 242557 - DNA, 20 bp, Artificial sequence
  SiRNA target sequence
ctgtaaaattccaataatgt

SEQ ID NO: 242558 - DNA, 20 bp, Artificial sequence
  SiRNA target sequence
tgtaaaattccaataatgtg

SEQ ID NO: 242559 - DNA, 20 bp, Artificial sequence
  SiRNA target sequence
gtaaaattccaataatgtgt

SEQ ID NO: 242560 - DNA, 20 bp, Artificial sequence
  SiRNA target sequence
taaaattccaataatgtgtt

SEQ ID NO: 242561 - DNA, 20 bp, Artificial sequence
  SiRNA target sequence
aaaattccaataatgtgtta

SEQ ID NO: 242562 - DNA, 20 bp, Artificial sequence
  SiRNA target sequence
aaattccaataatgtgttaa

SEQ ID NO: 242563 - DNA, 20 bp, Artificial sequence
  SiRNA target sequence
aattccaataatgtgttaat

SEQ ID NO: 242564 - DNA, 20 bp, Artificial sequence
  SiRNA target sequence
attccaataatgtgttaatc

SEQ ID NO: 242565 - DNA, 20 bp, Artificial sequence
  SiRNA target sequence
ttccaataatgtgttaatca

SEQ ID NO: 242566 - DNA, 20 bp, Artificial sequence
  SiRNA target sequence
tccaataatgtgttaatcac

SEQ ID NO: 242567 - DNA, 20 bp, Artificial sequence
  SiRNA target sequence
ccaataatgtgttaatcaca

SEQ ID NO: 242568 - DNA, 20 bp, Artificial sequence
  SiRNA target sequence
caataatgtgttaatcacac

SEQ ID NO: 242569 - DNA, 20 bp, Artificial sequence
  SiRNA target sequence
aataatgtgttaatcacaca

SEQ ID NO: 242570 - DNA, 20 bp, Artificial sequence
  SiRNA target sequence
ataatgtgttaatcacacat

SEQ ID NO: 242571 - DNA, 20 bp, Artificial sequence
  SiRNA target sequence
taatgtgttaatcacacatg

SEQ ID NO: 242572 - DNA, 20 bp, Artificial sequence
  SiRNA target sequence
aatgtgttaatcacacatgc

SEQ ID NO: 242573 - DNA, 20 bp, Artificial sequence
  SiRNA target sequence
atgtgttaatcacacatgcc

SEQ ID NO: 242574 - DNA, 20 bp, Artificial sequence
  SiRNA target sequence
tgtgttaatcacacatgcca

SEQ ID NO: 242575 - DNA, 20 bp, Artificial sequence
  SiRNA target sequence
gtgttaatcacacatgccat

SEQ ID NO: 242576 - DNA, 20 bp, Artificial sequence
  SiRNA target sequence
tgttaatcacacatgccatt

SEQ ID NO: 242577 - DNA, 20 bp, Artificial sequence
  SiRNA target sequence
gttaatcacacatgccatta

SEQ ID NO: 242578 - DNA, 20 bp, Artificial sequence
  SiRNA target sequence
ttaatcacacatgccattaa

SEQ ID NO: 242579 - DNA, 20 bp, Artificial sequence
  SiRNA target sequence
taatcacacatgccattaaa

SEQ ID NO: 242580 - DNA, 20 bp, Artificial sequence
  SiRNA target sequence
aatcacacatgccattaaaa

SEQ ID NO: 242581 - DNA, 20 bp, Artificial sequence
  SiRNA target sequence
atcacacatgccattaaaaa

SEQ ID NO: 242582 - DNA, 20 bp, Artificial sequence
  SiRNA target sequence
tcacacatgccattaaaaat

SEQ ID NO: 242583 - DNA, 20 bp, Artificial sequence
  SiRNA target sequence
cacacatgccattaaaaatg

SEQ ID NO: 242584 - DNA, 20 bp, Artificial sequence
  SiRNA target sequence
acacatgccattaaaaatgt

SEQ ID NO: 242585 - DNA, 20 bp, Artificial sequence
  SiRNA target sequence
cacatgccattaaaaatgta

SEQ ID NO: 242586 - DNA, 20 bp, Artificial sequence
  SiRNA target sequence
acatgccattaaaaatgtaa

SEQ ID NO: 242587 - DNA, 20 bp, Artificial sequence
  SiRNA target sequence
catgccattaaaaatgtaag

SEQ ID NO: 242588 - DNA, 20 bp, Artificial sequence
  SiRNA target sequence
atgccattaaaaatgtaagt

SEQ ID NO: 242589 - DNA, 20 bp, Artificial sequence
  SiRNA target sequence
tgccattaaaaatgtaagtg

SEQ ID NO: 242590 - DNA, 20 bp, Artificial sequence
  SiRNA target sequence
gccattaaaaatgtaagtga

SEQ ID NO: 242591 - DNA, 20 bp, Artificial sequence
  SiRNA target sequence
ccattaaaaatgtaagtgac

SEQ ID NO: 242592 - DNA, 20 bp, Artificial sequence
  SiRNA target sequence
cattaaaaatgtaagtgaca

SEQ ID NO: 242593 - DNA, 20 bp, Artificial sequence
  SiRNA target sequence
attaaaaatgtaagtgacaa

SEQ ID NO: 242594 - DNA, 20 bp, Artificial sequence
  SiRNA target sequence
ttaaaaatgtaagtgacaat

SEQ ID NO: 242595 - DNA, 20 bp, Artificial sequence
  SiRNA target sequence
taaaaatgtaagtgacaata

SEQ ID NO: 242596 - DNA, 20 bp, Artificial sequence
  SiRNA target sequence
aaaaatgtaagtgacaataa

SEQ ID NO: 242597 - DNA, 20 bp, Artificial sequence
  SiRNA target sequence
aaaatgtaagtgacaataat

SEQ ID NO: 242598 - DNA, 20 bp, Artificial sequence
  SiRNA target sequence
aaatgtaagtgacaataata

SEQ ID NO: 242599 - DNA, 20 bp, Artificial sequence
  SiRNA target sequence
aatgtaagtgacaataatat

SEQ ID NO: 242600 - DNA, 20 bp, Artificial sequence
  SiRNA target sequence
atgtaagtgacaataatatt

SEQ ID NO: 242601 - DNA, 20 bp, Artificial sequence
  SiRNA target sequence
tgtaagtgacaataatattt

SEQ ID NO: 242602 - DNA, 20 bp, Artificial sequence
  SiRNA target sequence
gtaagtgacaataatatttt

SEQ ID NO: 242603 - DNA, 20 bp, Artificial sequence
  SiRNA target sequence
taagtgacaataatattttt

SEQ ID NO: 242604 - DNA, 20 bp, Artificial sequence
  SiRNA target sequence
aagtgacaataatattttta

SEQ ID NO: 242605 - DNA, 20 bp, Artificial sequence
  SiRNA target sequence
agtgacaataatatttttac

SEQ ID NO: 242606 - DNA, 20 bp, Artificial sequence
  SiRNA target sequence
gtgacaataatatttttact

SEQ ID NO: 242607 - DNA, 20 bp, Artificial sequence
  SiRNA target sequence
tgacaataatatttttactt

SEQ ID NO: 242608 - DNA, 20 bp, Artificial sequence
  SiRNA target sequence
gacaataatatttttacttt

SEQ ID NO: 242609 - DNA, 20 bp, Artificial sequence
  SiRNA target sequence
acaataatatttttactttt

SEQ ID NO: 242610 - DNA, 20 bp, Artificial sequence
  SiRNA target sequence
caataatatttttacttttg

SEQ ID NO: 242611 - DNA, 20 bp, Artificial sequence
  SiRNA target sequence
aataatatttttacttttgg

SEQ ID NO: 242612 - DNA, 20 bp, Artificial sequence
  SiRNA target sequence
ataatatttttacttttggg

SEQ ID NO: 242613 - DNA, 20 bp, Artificial sequence
  SiRNA target sequence
taatatttttacttttggga

SEQ ID NO: 242614 - DNA, 20 bp, Artificial sequence
  SiRNA target sequence
aatatttttacttttgggaa

SEQ ID NO: 242615 - DNA, 20 bp, Artificial sequence
  SiRNA target sequence
atatttttacttttgggaat

SEQ ID NO: 242616 - DNA, 20 bp, Artificial sequence
  SiRNA target sequence
tatttttacttttgggaatt

SEQ ID NO: 242617 - DNA, 20 bp, Artificial sequence
  SiRNA target sequence
atttttacttttgggaattt

SEQ ID NO: 242618 - DNA, 20 bp, Artificial sequence
  SiRNA target sequence
tttttacttttgggaatttt

SEQ ID NO: 242619 - DNA, 20 bp, Artificial sequence
  SiRNA target sequence
ttttacttttgggaattttt

SEQ ID NO: 242620 - DNA, 20 bp, Artificial sequence
  SiRNA target sequence
tttacttttgggaatttttt

SEQ ID NO: 242621 - DNA, 20 bp, Artificial sequence
  SiRNA target sequence
ttacttttgggaattttttt

SEQ ID NO: 242622 - DNA, 20 bp, Artificial sequence
  SiRNA target sequence
tacttttgggaatttttttg

SEQ ID NO: 242623 - DNA, 20 bp, Artificial sequence
  SiRNA target sequence
acttttgggaatttttttgt

SEQ ID NO: 242624 - DNA, 20 bp, Artificial sequence
  SiRNA target sequence
cttttgggaatttttttgtc

SEQ ID NO: 242625 - DNA, 20 bp, Artificial sequence
  SiRNA target sequence
ttttgggaatttttttgtct

SEQ ID NO: 242626 - DNA, 20 bp, Artificial sequence
  SiRNA target sequence
tttgggaatttttttgtctt

SEQ ID NO: 242627 - DNA, 20 bp, Artificial sequence
  SiRNA target sequence
ttgggaatttttttgtctta

SEQ ID NO: 242628 - DNA, 20 bp, Artificial sequence
  SiRNA target sequence
tgggaatttttttgtcttag

SEQ ID NO: 242629 - DNA, 20 bp, Artificial sequence
  SiRNA target sequence
gggaatttttttgtcttagt

SEQ ID NO: 242630 - DNA, 20 bp, Artificial sequence
  SiRNA target sequence
ggaatttttttgtcttagtc

SEQ ID NO: 242631 - DNA, 20 bp, Artificial sequence
  SiRNA target sequence
gaatttttttgtcttagtca

SEQ ID NO: 242632 - DNA, 20 bp, Artificial sequence
  SiRNA target sequence
aatttttttgtcttagtcat

SEQ ID NO: 242633 - DNA, 21 bp, Artificial sequence
  SiRNA target sequence
ttaattaaaatcaacatctat

SEQ ID NO: 242634 - DNA, 21 bp, Artificial sequence
  SiRNA target sequence
taattaaaatcaacatctatc

SEQ ID NO: 242635 - DNA, 21 bp, Artificial sequence
  SiRNA target sequence
aattaaaatcaacatctatct

SEQ ID NO: 242636 - DNA, 21 bp, Artificial sequence
  SiRNA target sequence
attaaaatcaacatctatctc

SEQ ID NO: 242637 - DNA, 21 bp, Artificial sequence
  SiRNA target sequence
ttaaaatcaacatctatctca

SEQ ID NO: 242638 - DNA, 21 bp, Artificial sequence
  SiRNA target sequence
taaaatcaacatctatctcag

SEQ ID NO: 242639 - DNA, 21 bp, Artificial sequence
  SiRNA target sequence
aaaatcaacatctatctcaga

SEQ ID NO: 242640 - DNA, 21 bp, Artificial sequence
  SiRNA target sequence
aaatcaacatctatctcagaa

SEQ ID NO: 242641 - DNA, 21 bp, Artificial sequence
  SiRNA target sequence
aatcaacatctatctcagaat

SEQ ID NO: 242642 - DNA, 21 bp, Artificial sequence
  SiRNA target sequence
atcaacatctatctcagaatt

SEQ ID NO: 242643 - DNA, 21 bp, Artificial sequence
  SiRNA target sequence
tcaacatctatctcagaattt

SEQ ID NO: 242644 - DNA, 21 bp, Artificial sequence
  SiRNA target sequence
caacatctatctcagaatttt

SEQ ID NO: 242645 - DNA, 21 bp, Artificial sequence
  SiRNA target sequence
aacatctatctcagaattttg

SEQ ID NO: 242646 - DNA, 21 bp, Artificial sequence
  SiRNA target sequence
acatctatctcagaattttgt

SEQ ID NO: 242647 - DNA, 21 bp, Artificial sequence
  SiRNA target sequence
catctatctcagaattttgtt

SEQ ID NO: 242648 - DNA, 21 bp, Artificial sequence
  SiRNA target sequence
atctatctcagaattttgttc

SEQ ID NO: 242649 - DNA, 21 bp, Artificial sequence
  SiRNA target sequence
tctatctcagaattttgttca

SEQ ID NO: 242650 - DNA, 21 bp, Artificial sequence
  SiRNA target sequence
ctatctcagaattttgttcaa

SEQ ID NO: 242651 - DNA, 21 bp, Artificial sequence
  SiRNA target sequence
tatctcagaattttgttcaat

SEQ ID NO: 242652 - DNA, 21 bp, Artificial sequence
  SiRNA target sequence
atctcagaattttgttcaatt

SEQ ID NO: 242653 - DNA, 21 bp, Artificial sequence
  SiRNA target sequence
tctcagaattttgttcaattg

SEQ ID NO: 242654 - DNA, 21 bp, Artificial sequence
  SiRNA target sequence
ctcagaattttgttcaattga

SEQ ID NO: 242655 - DNA, 21 bp, Artificial sequence
  SiRNA target sequence
tcagaattttgttcaattgat

SEQ ID NO: 242656 - DNA, 21 bp, Artificial sequence
  SiRNA target sequence
cagaattttgttcaattgatt

SEQ ID NO: 242657 - DNA, 21 bp, Artificial sequence
  SiRNA target sequence
agaattttgttcaattgattc

SEQ ID NO: 242658 - DNA, 21 bp, Artificial sequence
  SiRNA target sequence
gaattttgttcaattgattca

SEQ ID NO: 242659 - DNA, 21 bp, Artificial sequence
  SiRNA target sequence
aattttgttcaattgattcat

SEQ ID NO: 242660 - DNA, 21 bp, Artificial sequence
  SiRNA target sequence
attttgttcaattgattcatt

SEQ ID NO: 242661 - DNA, 21 bp, Artificial sequence
  SiRNA target sequence
ttttgttcaattgattcatta

SEQ ID NO: 242662 - DNA, 21 bp, Artificial sequence
  SiRNA target sequence
tttgttcaattgattcattat

SEQ ID NO: 242663 - DNA, 21 bp, Artificial sequence
  SiRNA target sequence
ttgttcaattgattcattata

SEQ ID NO: 242664 - DNA, 21 bp, Artificial sequence
  SiRNA target sequence
tgttcaattgattcattatat

SEQ ID NO: 242665 - DNA, 21 bp, Artificial sequence
  SiRNA target sequence
gttcaattgattcattatatt

SEQ ID NO: 242666 - DNA, 21 bp, Artificial sequence
  SiRNA target sequence
ttcaattgattcattatattt

SEQ ID NO: 242667 - DNA, 21 bp, Artificial sequence
  SiRNA target sequence
tcaattgattcattatatttt

SEQ ID NO: 242668 - DNA, 21 bp, Artificial sequence
  SiRNA target sequence
caattgattcattatattttt

SEQ ID NO: 242669 - DNA, 21 bp, Artificial sequence
  SiRNA target sequence
aattgattcattatatttttt

SEQ ID NO: 242670 - DNA, 21 bp, Artificial sequence
  SiRNA target sequence
attgattcattatatttttta

SEQ ID NO: 242671 - DNA, 21 bp, Artificial sequence
  SiRNA target sequence
ttgattcattatattttttac

SEQ ID NO: 242672 - DNA, 21 bp, Artificial sequence
  SiRNA target sequence
tgattcattatattttttact

SEQ ID NO: 242673 - DNA, 21 bp, Artificial sequence
  SiRNA target sequence
gattcattatattttttactt

SEQ ID NO: 242674 - DNA, 21 bp, Artificial sequence
  SiRNA target sequence
attcattatattttttactta

SEQ ID NO: 242675 - DNA, 21 bp, Artificial sequence
  SiRNA target sequence
ttcattatattttttacttaa

SEQ ID NO: 242676 - DNA, 21 bp, Artificial sequence
  SiRNA target sequence
tcattatattttttacttaaa

SEQ ID NO: 242677 - DNA, 21 bp, Artificial sequence
  SiRNA target sequence
cattatattttttacttaaat

SEQ ID NO: 242678 - DNA, 21 bp, Artificial sequence
  SiRNA target sequence
attatattttttacttaaata

SEQ ID NO: 242679 - DNA, 21 bp, Artificial sequence
  SiRNA target sequence
ttatattttttacttaaataa

SEQ ID NO: 242680 - DNA, 21 bp, Artificial sequence
  SiRNA target sequence
tatattttttacttaaataac

SEQ ID NO: 242681 - DNA, 21 bp, Artificial sequence
  SiRNA target sequence
atattttttacttaaataaca

SEQ ID NO: 242682 - DNA, 21 bp, Artificial sequence
  SiRNA target sequence
tattttttacttaaataacag

SEQ ID NO: 242683 - DNA, 21 bp, Artificial sequence
  SiRNA target sequence
attttttacttaaataacaga

SEQ ID NO: 242684 - DNA, 21 bp, Artificial sequence
  SiRNA target sequence
ttttttacttaaataacagac

SEQ ID NO: 242685 - DNA, 21 bp, Artificial sequence
  SiRNA target sequence
tttttacttaaataacagaca

SEQ ID NO: 242686 - DNA, 21 bp, Artificial sequence
  SiRNA target sequence
ttttacttaaataacagacac

SEQ ID NO: 242687 - DNA, 21 bp, Artificial sequence
  SiRNA target sequence
tttacttaaataacagacact

SEQ ID NO: 242688 - DNA, 21 bp, Artificial sequence
  SiRNA target sequence
ttacttaaataacagacactc

SEQ ID NO: 242689 - DNA, 21 bp, Artificial sequence
  SiRNA target sequence
tacttaaataacagacactcc

SEQ ID NO: 242690 - DNA, 21 bp, Artificial sequence
  SiRNA target sequence
acttaaataacagacactcct

SEQ ID NO: 242691 - DNA, 21 bp, Artificial sequence
  SiRNA target sequence
cttaaataacagacactcctg

SEQ ID NO: 242692 - DNA, 21 bp, Artificial sequence
  SiRNA target sequence
ttaaataacagacactcctga

SEQ ID NO: 242693 - DNA, 21 bp, Artificial sequence
  SiRNA target sequence
taaataacagacactcctgat

SEQ ID NO: 242694 - DNA, 21 bp, Artificial sequence
  SiRNA target sequence
aaataacagacactcctgatc

SEQ ID NO: 242695 - DNA, 21 bp, Artificial sequence
  SiRNA target sequence
aataacagacactcctgatcc

SEQ ID NO: 242696 - DNA, 21 bp, Artificial sequence
  SiRNA target sequence
ataacagacactcctgatcca

SEQ ID NO: 242697 - DNA, 21 bp, Artificial sequence
  SiRNA target sequence
taacagacactcctgatccac

SEQ ID NO: 242698 - DNA, 21 bp, Artificial sequence
  SiRNA target sequence
aacagacactcctgatccaca

SEQ ID NO: 242699 - DNA, 21 bp, Artificial sequence
  SiRNA target sequence
acagacactcctgatccacaa

SEQ ID NO: 242700 - DNA, 21 bp, Artificial sequence
  SiRNA target sequence
cagacactcctgatccacaaa

SEQ ID NO: 242701 - DNA, 21 bp, Artificial sequence
  SiRNA target sequence
agacactcctgatccacaaaa

SEQ ID NO: 242702 - DNA, 21 bp, Artificial sequence
  SiRNA target sequence
gacactcctgatccacaaaaa

SEQ ID NO: 242703 - DNA, 21 bp, Artificial sequence
  SiRNA target sequence
acactcctgatccacaaaaaa

SEQ ID NO: 242704 - DNA, 21 bp, Artificial sequence
  SiRNA target sequence
cactcctgatccacaaaaaat

SEQ ID NO: 242705 - DNA, 21 bp, Artificial sequence
  SiRNA target sequence
actcctgatccacaaaaaatt

SEQ ID NO: 242706 - DNA, 21 bp, Artificial sequence
  SiRNA target sequence
ctcctgatccacaaaaaattt

SEQ ID NO: 242707 - DNA, 21 bp, Artificial sequence
  SiRNA target sequence
tcctgatccacaaaaaatttg

SEQ ID NO: 242708 - DNA, 21 bp, Artificial sequence
  SiRNA target sequence
cctgatccacaaaaaatttgc

SEQ ID NO: 242709 - DNA, 21 bp, Artificial sequence
  SiRNA target sequence
ctgatccacaaaaaatttgca

SEQ ID NO: 242710 - DNA, 21 bp, Artificial sequence
  SiRNA target sequence
tgatccacaaaaaatttgcaa

SEQ ID NO: 242711 - DNA, 21 bp, Artificial sequence
  SiRNA target sequence
gatccacaaaaaatttgcaaa

SEQ ID NO: 242712 - DNA, 21 bp, Artificial sequence
  SiRNA target sequence
atccacaaaaaatttgcaaat

SEQ ID NO: 242713 - DNA, 21 bp, Artificial sequence
  SiRNA target sequence
tccacaaaaaatttgcaaata

SEQ ID NO: 242714 - DNA, 21 bp, Artificial sequence
  SiRNA target sequence
ccacaaaaaatttgcaaatat

SEQ ID NO: 242715 - DNA, 21 bp, Artificial sequence
  SiRNA target sequence
cacaaaaaatttgcaaatatt

SEQ ID NO: 242716 - DNA, 21 bp, Artificial sequence
  SiRNA target sequence
acaaaaaatttgcaaatatta

SEQ ID NO: 242717 - DNA, 21 bp, Artificial sequence
  SiRNA target sequence
caaaaaatttgcaaatattaa

SEQ ID NO: 242718 - DNA, 21 bp, Artificial sequence
  SiRNA target sequence
aaaaaatttgcaaatattaaa

SEQ ID NO: 242719 - DNA, 21 bp, Artificial sequence
  SiRNA target sequence
aaaaatttgcaaatattaaaa

SEQ ID NO: 242720 - DNA, 21 bp, Artificial sequence
  SiRNA target sequence
aaaatttgcaaatattaaaaa

SEQ ID NO: 242721 - DNA, 21 bp, Artificial sequence
  SiRNA target sequence
aaatttgcaaatattaaaaat

SEQ ID NO: 242722 - DNA, 21 bp, Artificial sequence
  SiRNA target sequence
aatttgcaaatattaaaaata

SEQ ID NO: 242723 - DNA, 21 bp, Artificial sequence
  SiRNA target sequence
atttgcaaatattaaaaatat

SEQ ID NO: 242724 - DNA, 21 bp, Artificial sequence
  SiRNA target sequence
tttgcaaatattaaaaatata

SEQ ID NO: 242725 - DNA, 21 bp, Artificial sequence
  SiRNA target sequence
ttgcaaatattaaaaatataa

SEQ ID NO: 242726 - DNA, 21 bp, Artificial sequence
  SiRNA target sequence
tgcaaatattaaaaatataaa

SEQ ID NO: 242727 - DNA, 21 bp, Artificial sequence
  SiRNA target sequence
gcaaatattaaaaatataaaa

SEQ ID NO: 242728 - DNA, 21 bp, Artificial sequence
  SiRNA target sequence
caaatattaaaaatataaaag

SEQ ID NO: 242729 - DNA, 21 bp, Artificial sequence
  SiRNA target sequence
aaatattaaaaatataaaaga

SEQ ID NO: 242730 - DNA, 21 bp, Artificial sequence
  SiRNA target sequence
aatattaaaaatataaaagac

SEQ ID NO: 242731 - DNA, 21 bp, Artificial sequence
  SiRNA target sequence
atattaaaaatataaaagaca

SEQ ID NO: 242732 - DNA, 21 bp, Artificial sequence
  SiRNA target sequence
tattaaaaatataaaagacac

SEQ ID NO: 242733 - DNA, 21 bp, Artificial sequence
  SiRNA target sequence
attaaaaatataaaagacacg

SEQ ID NO: 242734 - DNA, 21 bp, Artificial sequence
  SiRNA target sequence
ttaaaaatataaaagacacgt

SEQ ID NO: 242735 - DNA, 21 bp, Artificial sequence
  SiRNA target sequence
taaaaatataaaagacacgta

SEQ ID NO: 242736 - DNA, 21 bp, Artificial sequence
  SiRNA target sequence
aaaaatataaaagacacgtat

SEQ ID NO: 242737 - DNA, 21 bp, Artificial sequence
  SiRNA target sequence
aaaatataaaagacacgtatg

SEQ ID NO: 242738 - DNA, 21 bp, Artificial sequence
  SiRNA target sequence
aaatataaaagacacgtatga

SEQ ID NO: 242739 - DNA, 21 bp, Artificial sequence
  SiRNA target sequence
aatataaaagacacgtatgat

SEQ ID NO: 242740 - DNA, 21 bp, Artificial sequence
  SiRNA target sequence
atataaaagacacgtatgata

SEQ ID NO: 242741 - DNA, 21 bp, Artificial sequence
  SiRNA target sequence
tataaaagacacgtatgatac

SEQ ID NO: 242742 - DNA, 21 bp, Artificial sequence
  SiRNA target sequence
ataaaagacacgtatgatact

SEQ ID NO: 242743 - DNA, 21 bp, Artificial sequence
  SiRNA target sequence
taaaagacacgtatgatactt

SEQ ID NO: 242744 - DNA, 21 bp, Artificial sequence
  SiRNA target sequence
aaaagacacgtatgatacttg

SEQ ID NO: 242745 - DNA, 21 bp, Artificial sequence
  SiRNA target sequence
aaagacacgtatgatacttgt

SEQ ID NO: 242746 - DNA, 21 bp, Artificial sequence
  SiRNA target sequence
aagacacgtatgatacttgtc

SEQ ID NO: 242747 - DNA, 21 bp, Artificial sequence
  SiRNA target sequence
agacacgtatgatacttgtct

SEQ ID NO: 242748 - DNA, 21 bp, Artificial sequence
  SiRNA target sequence
gacacgtatgatacttgtcta

SEQ ID NO: 242749 - DNA, 21 bp, Artificial sequence
  SiRNA target sequence
acacgtatgatacttgtctaa

SEQ ID NO: 242750 - DNA, 21 bp, Artificial sequence
  SiRNA target sequence
cacgtatgatacttgtctaat

SEQ ID NO: 242751 - DNA, 21 bp, Artificial sequence
  SiRNA target sequence
acgtatgatacttgtctaata

SEQ ID NO: 242752 - DNA, 21 bp, Artificial sequence
  SiRNA target sequence
cgtatgatacttgtctaatat

SEQ ID NO: 242753 - DNA, 21 bp, Artificial sequence
  SiRNA target sequence
gtatgatacttgtctaatatc

SEQ ID NO: 242754 - DNA, 21 bp, Artificial sequence
  SiRNA target sequence
tatgatacttgtctaatatct

SEQ ID NO: 242755 - DNA, 21 bp, Artificial sequence
  SiRNA target sequence
atgatacttgtctaatatctg

SEQ ID NO: 242756 - DNA, 21 bp, Artificial sequence
  SiRNA target sequence
tgatacttgtctaatatctgg

SEQ ID NO: 242757 - DNA, 21 bp, Artificial sequence
  SiRNA target sequence
gatacttgtctaatatctgga

SEQ ID NO: 242758 - DNA, 21 bp, Artificial sequence
  SiRNA target sequence
atacttgtctaatatctggaa

SEQ ID NO: 242759 - DNA, 21 bp, Artificial sequence
  SiRNA target sequence
tacttgtctaatatctggaat

SEQ ID NO: 242760 - DNA, 21 bp, Artificial sequence
  SiRNA target sequence
acttgtctaatatctggaatt

SEQ ID NO: 242761 - DNA, 21 bp, Artificial sequence
  SiRNA target sequence
cttgtctaatatctggaattt

SEQ ID NO: 242762 - DNA, 21 bp, Artificial sequence
  SiRNA target sequence
ttgtctaatatctggaatttc

SEQ ID NO: 242763 - DNA, 21 bp, Artificial sequence
  SiRNA target sequence
tgtctaatatctggaatttct

SEQ ID NO: 242764 - DNA, 21 bp, Artificial sequence
  SiRNA target sequence
gtctaatatctggaatttcta

SEQ ID NO: 242765 - DNA, 21 bp, Artificial sequence
  SiRNA target sequence
tctaatatctggaatttctat

SEQ ID NO: 242766 - DNA, 21 bp, Artificial sequence
  SiRNA target sequence
ctaatatctggaatttctata

SEQ ID NO: 242767 - DNA, 21 bp, Artificial sequence
  SiRNA target sequence
taatatctggaatttctataa

SEQ ID NO: 242768 - DNA, 21 bp, Artificial sequence
  SiRNA target sequence
aatatctggaatttctataaa

SEQ ID NO: 242769 - DNA, 21 bp, Artificial sequence
  SiRNA target sequence
atatctggaatttctataaac

SEQ ID NO: 242770 - DNA, 21 bp, Artificial sequence
  SiRNA target sequence
tatctggaatttctataaacg

SEQ ID NO: 242771 - DNA, 21 bp, Artificial sequence
  SiRNA target sequence
atctggaatttctataaacgt

SEQ ID NO: 242772 - DNA, 21 bp, Artificial sequence
  SiRNA target sequence
tctggaatttctataaacgtc

SEQ ID NO: 242773 - DNA, 21 bp, Artificial sequence
  SiRNA target sequence
ctggaatttctataaacgtca

SEQ ID NO: 242774 - DNA, 21 bp, Artificial sequence
  SiRNA target sequence
tggaatttctataaacgtcaa

SEQ ID NO: 242775 - DNA, 21 bp, Artificial sequence
  SiRNA target sequence
ggaatttctataaacgtcaaa

SEQ ID NO: 242776 - DNA, 21 bp, Artificial sequence
  SiRNA target sequence
gaatttctataaacgtcaaaa

SEQ ID NO: 242777 - DNA, 21 bp, Artificial sequence
  SiRNA target sequence
aatttctataaacgtcaaaaa

SEQ ID NO: 242778 - DNA, 21 bp, Artificial sequence
  SiRNA target sequence
atttctataaacgtcaaaaaa

SEQ ID NO: 242779 - DNA, 21 bp, Artificial sequence
  SiRNA target sequence
tttctataaacgtcaaaaaag

SEQ ID NO: 242780 - DNA, 21 bp, Artificial sequence
  SiRNA target sequence
ttctataaacgtcaaaaaagt

SEQ ID NO: 242781 - DNA, 21 bp, Artificial sequence
  SiRNA target sequence
tctataaacgtcaaaaaagtt

SEQ ID NO: 242782 - DNA, 21 bp, Artificial sequence
  SiRNA target sequence
ctataaacgtcaaaaaagttc

SEQ ID NO: 242783 - DNA, 21 bp, Artificial sequence
  SiRNA target sequence
tataaacgtcaaaaaagttcc

SEQ ID NO: 242784 - DNA, 21 bp, Artificial sequence
  SiRNA target sequence
ataaacgtcaaaaaagttcca

SEQ ID NO: 242785 - DNA, 21 bp, Artificial sequence
  SiRNA target sequence
taaacgtcaaaaaagttccat

SEQ ID NO: 242786 - DNA, 21 bp, Artificial sequence
  SiRNA target sequence
aaacgtcaaaaaagttccata

SEQ ID NO: 242787 - DNA, 21 bp, Artificial sequence
  SiRNA target sequence
aacgtcaaaaaagttccatat

SEQ ID NO: 242788 - DNA, 21 bp, Artificial sequence
  SiRNA target sequence
acgtcaaaaaagttccatata

SEQ ID NO: 242789 - DNA, 21 bp, Artificial sequence
  SiRNA target sequence
cgtcaaaaaagttccatataa

SEQ ID NO: 242790 - DNA, 21 bp, Artificial sequence
  SiRNA target sequence
gtcaaaaaagttccatataaa

SEQ ID NO: 242791 - DNA, 21 bp, Artificial sequence
  SiRNA target sequence
tcaaaaaagttccatataaag

SEQ ID NO: 242792 - DNA, 21 bp, Artificial sequence
  SiRNA target sequence
caaaaaagttccatataaaga

SEQ ID NO: 242793 - DNA, 21 bp, Artificial sequence
  SiRNA target sequence
aaaaaagttccatataaagag

SEQ ID NO: 242794 - DNA, 21 bp, Artificial sequence
  SiRNA target sequence
aaaaagttccatataaagaga

SEQ ID NO: 242795 - DNA, 21 bp, Artificial sequence
  SiRNA target sequence
aaaagttccatataaagagat

SEQ ID NO: 242796 - DNA, 21 bp, Artificial sequence
  SiRNA target sequence
aaagttccatataaagagata

SEQ ID NO: 242797 - DNA, 21 bp, Artificial sequence
  SiRNA target sequence
aagttccatataaagagataa

SEQ ID NO: 242798 - DNA, 21 bp, Artificial sequence
  SiRNA target sequence
agttccatataaagagataat

SEQ ID NO: 242799 - DNA, 21 bp, Artificial sequence
  SiRNA target sequence
gttccatataaagagataata

SEQ ID NO: 242800 - DNA, 21 bp, Artificial sequence
  SiRNA target sequence
ttccatataaagagataatag

SEQ ID NO: 242801 - DNA, 21 bp, Artificial sequence
  SiRNA target sequence
tccatataaagagataataga

SEQ ID NO: 242802 - DNA, 21 bp, Artificial sequence
  SiRNA target sequence
ccatataaagagataatagat

SEQ ID NO: 242803 - DNA, 21 bp, Artificial sequence
  SiRNA target sequence
catataaagagataatagatt

SEQ ID NO: 242804 - DNA, 21 bp, Artificial sequence
  SiRNA target sequence
atataaagagataatagattt

SEQ ID NO: 242805 - DNA, 21 bp, Artificial sequence
  SiRNA target sequence
tataaagagataatagattta

SEQ ID NO: 242806 - DNA, 21 bp, Artificial sequence
  SiRNA target sequence
ataaagagataatagatttac

SEQ ID NO: 242807 - DNA, 21 bp, Artificial sequence
  SiRNA target sequence
taaagagataatagatttacc

SEQ ID NO: 242808 - DNA, 21 bp, Artificial sequence
  SiRNA target sequence
aaagagataatagatttacca

SEQ ID NO: 242809 - DNA, 21 bp, Artificial sequence
  SiRNA target sequence
aagagataatagatttaccaa

SEQ ID NO: 242810 - DNA, 21 bp, Artificial sequence
  SiRNA target sequence
agagataatagatttaccaat

SEQ ID NO: 242811 - DNA, 21 bp, Artificial sequence
  SiRNA target sequence
gagataatagatttaccaatt

SEQ ID NO: 242812 - DNA, 21 bp, Artificial sequence
  SiRNA target sequence
agataatagatttaccaattt

SEQ ID NO: 242813 - DNA, 21 bp, Artificial sequence
  SiRNA target sequence
gataatagatttaccaatttt

SEQ ID NO: 242814 - DNA, 21 bp, Artificial sequence
  SiRNA target sequence
ataatagatttaccaattttg

SEQ ID NO: 242815 - DNA, 21 bp, Artificial sequence
  SiRNA target sequence
taatagatttaccaattttga

SEQ ID NO: 242816 - DNA, 21 bp, Artificial sequence
  SiRNA target sequence
aatagatttaccaattttgat

SEQ ID NO: 242817 - DNA, 21 bp, Artificial sequence
  SiRNA target sequence
atagatttaccaattttgata

SEQ ID NO: 242818 - DNA, 21 bp, Artificial sequence
  SiRNA target sequence
tagatttaccaattttgatac

SEQ ID NO: 242819 - DNA, 21 bp, Artificial sequence
  SiRNA target sequence
agatttaccaattttgataca

SEQ ID NO: 242820 - DNA, 21 bp, Artificial sequence
  SiRNA target sequence
gatttaccaattttgatacat

SEQ ID NO: 242821 - DNA, 21 bp, Artificial sequence
  SiRNA target sequence
atttaccaattttgatacata

SEQ ID NO: 242822 - DNA, 21 bp, Artificial sequence
  SiRNA target sequence
tttaccaattttgatacatac

SEQ ID NO: 242823 - DNA, 21 bp, Artificial sequence
  SiRNA target sequence
ttaccaattttgatacataca

SEQ ID NO: 242824 - DNA, 21 bp, Artificial sequence
  SiRNA target sequence
taccaattttgatacatacac

SEQ ID NO: 242825 - DNA, 21 bp, Artificial sequence
  SiRNA target sequence
accaattttgatacatacacc

SEQ ID NO: 242826 - DNA, 21 bp, Artificial sequence
  SiRNA target sequence
ccaattttgatacatacacca

SEQ ID NO: 242827 - DNA, 21 bp, Artificial sequence
  SiRNA target sequence
caattttgatacatacaccat

SEQ ID NO: 242828 - DNA, 21 bp, Artificial sequence
  SiRNA target sequence
aattttgatacatacaccatc

SEQ ID NO: 242829 - DNA, 21 bp, Artificial sequence
  SiRNA target sequence
attttgatacatacaccatca

SEQ ID NO: 242830 - DNA, 21 bp, Artificial sequence
  SiRNA target sequence
ttttgatacatacaccatcat

SEQ ID NO: 242831 - DNA, 21 bp, Artificial sequence
  SiRNA target sequence
tttgatacatacaccatcata

SEQ ID NO: 242832 - DNA, 21 bp, Artificial sequence
  SiRNA target sequence
ttgatacatacaccatcataa

SEQ ID NO: 242833 - DNA, 21 bp, Artificial sequence
  SiRNA target sequence
tgatacatacaccatcataaa

SEQ ID NO: 242834 - DNA, 21 bp, Artificial sequence
  SiRNA target sequence
gatacatacaccatcataaaa

SEQ ID NO: 242835 - DNA, 21 bp, Artificial sequence
  SiRNA target sequence
atacatacaccatcataaaaa

SEQ ID NO: 242836 - DNA, 21 bp, Artificial sequence
  SiRNA target sequence
tacatacaccatcataaaaac

SEQ ID NO: 242837 - DNA, 21 bp, Artificial sequence
  SiRNA target sequence
acatacaccatcataaaaact

SEQ ID NO: 242838 - DNA, 21 bp, Artificial sequence
  SiRNA target sequence
catacaccatcataaaaactt

SEQ ID NO: 242839 - DNA, 21 bp, Artificial sequence
  SiRNA target sequence
atacaccatcataaaaacttt

SEQ ID NO: 242840 - DNA, 21 bp, Artificial sequence
  SiRNA target sequence
tacaccatcataaaaactttt

SEQ ID NO: 242841 - DNA, 21 bp, Artificial sequence
  SiRNA target sequence
acaccatcataaaaactttta

SEQ ID NO: 242842 - DNA, 21 bp, Artificial sequence
  SiRNA target sequence
caccatcataaaaacttttaa

SEQ ID NO: 242843 - DNA, 21 bp, Artificial sequence
  SiRNA target sequence
accatcataaaaacttttaaa

SEQ ID NO: 242844 - DNA, 21 bp, Artificial sequence
  SiRNA target sequence
ccatcataaaaacttttaaat

SEQ ID NO: 242845 - DNA, 21 bp, Artificial sequence
  SiRNA target sequence
catcataaaaacttttaaatt

SEQ ID NO: 242846 - DNA, 21 bp, Artificial sequence
  SiRNA target sequence
atcataaaaacttttaaattt

SEQ ID NO: 242847 - DNA, 21 bp, Artificial sequence
  SiRNA target sequence
tcataaaaacttttaaattta

SEQ ID NO: 242848 - DNA, 21 bp, Artificial sequence
  SiRNA target sequence
cataaaaacttttaaatttat

SEQ ID NO: 242849 - DNA, 21 bp, Artificial sequence
  SiRNA target sequence
ataaaaacttttaaatttata

SEQ ID NO: 242850 - DNA, 21 bp, Artificial sequence
  SiRNA target sequence
taaaaacttttaaatttatac

SEQ ID NO: 242851 - DNA, 21 bp, Artificial sequence
  SiRNA target sequence
aaaaacttttaaatttatacc

SEQ ID NO: 242852 - DNA, 21 bp, Artificial sequence
  SiRNA target sequence
aaaacttttaaatttatacct

SEQ ID NO: 242853 - DNA, 21 bp, Artificial sequence
  SiRNA target sequence
aaacttttaaatttatacctg

SEQ ID NO: 242854 - DNA, 21 bp, Artificial sequence
  SiRNA target sequence
aacttttaaatttatacctgt

SEQ ID NO: 242855 - DNA, 21 bp, Artificial sequence
  SiRNA target sequence
acttttaaatttatacctgta

SEQ ID NO: 242856 - DNA, 21 bp, Artificial sequence
  SiRNA target sequence
cttttaaatttatacctgtat

SEQ ID NO: 242857 - DNA, 21 bp, Artificial sequence
  SiRNA target sequence
ttttaaatttatacctgtatt

SEQ ID NO: 242858 - DNA, 21 bp, Artificial sequence
  SiRNA target sequence
tttaaatttatacctgtattt

SEQ ID NO: 242859 - DNA, 21 bp, Artificial sequence
  SiRNA target sequence
ttaaatttatacctgtattta

SEQ ID NO: 242860 - DNA, 21 bp, Artificial sequence
  SiRNA target sequence
taaatttatacctgtatttaa

SEQ ID NO: 242861 - DNA, 21 bp, Artificial sequence
  SiRNA target sequence
aaatttatacctgtatttaac

SEQ ID NO: 242862 - DNA, 21 bp, Artificial sequence
  SiRNA target sequence
aatttatacctgtatttaaca

SEQ ID NO: 242863 - DNA, 21 bp, Artificial sequence
  SiRNA target sequence
atttatacctgtatttaacag

SEQ ID NO: 242864 - DNA, 21 bp, Artificial sequence
  SiRNA target sequence
tttatacctgtatttaacagg

SEQ ID NO: 242865 - DNA, 21 bp, Artificial sequence
  SiRNA target sequence
ttatacctgtatttaacaggc

SEQ ID NO: 242866 - DNA, 21 bp, Artificial sequence
  SiRNA target sequence
tatacctgtatttaacaggca

SEQ ID NO: 242867 - DNA, 21 bp, Artificial sequence
  SiRNA target sequence
atacctgtatttaacaggcac

SEQ ID NO: 242868 - DNA, 21 bp, Artificial sequence
  SiRNA target sequence
tacctgtatttaacaggcacc

SEQ ID NO: 242869 - DNA, 21 bp, Artificial sequence
  SiRNA target sequence
acctgtatttaacaggcaccc

SEQ ID NO: 242870 - DNA, 21 bp, Artificial sequence
  SiRNA target sequence
cctgtatttaacaggcaccct

SEQ ID NO: 242871 - DNA, 21 bp, Artificial sequence
  SiRNA target sequence
ctgtatttaacaggcaccctc

SEQ ID NO: 242872 - DNA, 21 bp, Artificial sequence
  SiRNA target sequence
tgtatttaacaggcaccctca

SEQ ID NO: 242873 - DNA, 21 bp, Artificial sequence
  SiRNA target sequence
gtatttaacaggcaccctcat

SEQ ID NO: 242874 - DNA, 21 bp, Artificial sequence
  SiRNA target sequence
tatttaacaggcaccctcata

SEQ ID NO: 242875 - DNA, 21 bp, Artificial sequence
  SiRNA target sequence
atttaacaggcaccctcatag

SEQ ID NO: 242876 - DNA, 21 bp, Artificial sequence
  SiRNA target sequence
tttaacaggcaccctcataga

SEQ ID NO: 242877 - DNA, 21 bp, Artificial sequence
  SiRNA target sequence
ttaacaggcaccctcatagaa

SEQ ID NO: 242878 - DNA, 21 bp, Artificial sequence
  SiRNA target sequence
taacaggcaccctcatagaaa

SEQ ID NO: 242879 - DNA, 21 bp, Artificial sequence
  SiRNA target sequence
aacaggcaccctcatagaaag

SEQ ID NO: 242880 - DNA, 21 bp, Artificial sequence
  SiRNA target sequence
acaggcaccctcatagaaagc

SEQ ID NO: 242881 - DNA, 21 bp, Artificial sequence
  SiRNA target sequence
caggcaccctcatagaaagca

SEQ ID NO: 242882 - DNA, 21 bp, Artificial sequence
  SiRNA target sequence
aggcaccctcatagaaagcat

SEQ ID NO: 242883 - DNA, 21 bp, Artificial sequence
  SiRNA target sequence
ggcaccctcatagaaagcatt

SEQ ID NO: 242884 - DNA, 21 bp, Artificial sequence
  SiRNA target sequence
gcaccctcatagaaagcattt

SEQ ID NO: 242885 - DNA, 21 bp, Artificial sequence
  SiRNA target sequence
caccctcatagaaagcatttc

SEQ ID NO: 242886 - DNA, 21 bp, Artificial sequence
  SiRNA target sequence
accctcatagaaagcatttct

SEQ ID NO: 242887 - DNA, 21 bp, Artificial sequence
  SiRNA target sequence
ccctcatagaaagcatttctt

SEQ ID NO: 242888 - DNA, 21 bp, Artificial sequence
  SiRNA target sequence
cctcatagaaagcatttcttt

SEQ ID NO: 242889 - DNA, 21 bp, Artificial sequence
  SiRNA target sequence
ctcatagaaagcatttctttt

SEQ ID NO: 242890 - DNA, 21 bp, Artificial sequence
  SiRNA target sequence
tcatagaaagcatttcttttg

SEQ ID NO: 242891 - DNA, 21 bp, Artificial sequence
  SiRNA target sequence
catagaaagcatttcttttgc

SEQ ID NO: 242892 - DNA, 21 bp, Artificial sequence
  SiRNA target sequence
atagaaagcatttcttttgct

SEQ ID NO: 242893 - DNA, 21 bp, Artificial sequence
  SiRNA target sequence
tagaaagcatttcttttgcta

SEQ ID NO: 242894 - DNA, 21 bp, Artificial sequence
  SiRNA target sequence
agaaagcatttcttttgctaa

SEQ ID NO: 242895 - DNA, 21 bp, Artificial sequence
  SiRNA target sequence
gaaagcatttcttttgctaaa

SEQ ID NO: 242896 - DNA, 21 bp, Artificial sequence
  SiRNA target sequence
aaagcatttcttttgctaaat

SEQ ID NO: 242897 - DNA, 21 bp, Artificial sequence
  SiRNA target sequence
aagcatttcttttgctaaatc

SEQ ID NO: 242898 - DNA, 21 bp, Artificial sequence
  SiRNA target sequence
agcatttcttttgctaaatca

SEQ ID NO: 242899 - DNA, 21 bp, Artificial sequence
  SiRNA target sequence
gcatttcttttgctaaatcaa

SEQ ID NO: 242900 - DNA, 21 bp, Artificial sequence
  SiRNA target sequence
catttcttttgctaaatcaaa

SEQ ID NO: 242901 - DNA, 21 bp, Artificial sequence
  SiRNA target sequence
atttcttttgctaaatcaaat

SEQ ID NO: 242902 - DNA, 21 bp, Artificial sequence
  SiRNA target sequence
tttcttttgctaaatcaaata

SEQ ID NO: 242903 - DNA, 21 bp, Artificial sequence
  SiRNA target sequence
ttcttttgctaaatcaaataa

SEQ ID NO: 242904 - DNA, 21 bp, Artificial sequence
  SiRNA target sequence
tcttttgctaaatcaaataaa

SEQ ID NO: 242905 - DNA, 21 bp, Artificial sequence
  SiRNA target sequence
cttttgctaaatcaaataaaa

SEQ ID NO: 242906 - DNA, 21 bp, Artificial sequence
  SiRNA target sequence
ttttgctaaatcaaataaaac

SEQ ID NO: 242907 - DNA, 21 bp, Artificial sequence
  SiRNA target sequence
tttgctaaatcaaataaaaca

SEQ ID NO: 242908 - DNA, 21 bp, Artificial sequence
  SiRNA target sequence
ttgctaaatcaaataaaacat

SEQ ID NO: 242909 - DNA, 21 bp, Artificial sequence
  SiRNA target sequence
tgctaaatcaaataaaacata

SEQ ID NO: 242910 - DNA, 21 bp, Artificial sequence
  SiRNA target sequence
gctaaatcaaataaaacatat

SEQ ID NO: 242911 - DNA, 21 bp, Artificial sequence
  SiRNA target sequence
ctaaatcaaataaaacatatt

SEQ ID NO: 242912 - DNA, 21 bp, Artificial sequence
  SiRNA target sequence
taaatcaaataaaacatattt

SEQ ID NO: 242913 - DNA, 21 bp, Artificial sequence
  SiRNA target sequence
aaatcaaataaaacatatttg

SEQ ID NO: 242914 - DNA, 21 bp, Artificial sequence
  SiRNA target sequence
aatcaaataaaacatatttgg

SEQ ID NO: 242915 - DNA, 21 bp, Artificial sequence
  SiRNA target sequence
atcaaataaaacatatttggt

SEQ ID NO: 242916 - DNA, 21 bp, Artificial sequence
  SiRNA target sequence
tcaaataaaacatatttggta

SEQ ID NO: 242917 - DNA, 21 bp, Artificial sequence
  SiRNA target sequence
caaataaaacatatttggtaa

SEQ ID NO: 242918 - DNA, 21 bp, Artificial sequence
  SiRNA target sequence
aaataaaacatatttggtaat

SEQ ID NO: 242919 - DNA, 21 bp, Artificial sequence
  SiRNA target sequence
aataaaacatatttggtaatt

SEQ ID NO: 242920 - DNA, 21 bp, Artificial sequence
  SiRNA target sequence
ataaaacatatttggtaattt

SEQ ID NO: 242921 - DNA, 21 bp, Artificial sequence
  SiRNA target sequence
taaaacatatttggtaatttt

SEQ ID NO: 242922 - DNA, 21 bp, Artificial sequence
  SiRNA target sequence
aaaacatatttggtaatttta

SEQ ID NO: 242923 - DNA, 21 bp, Artificial sequence
  SiRNA target sequence
aaacatatttggtaattttag

SEQ ID NO: 242924 - DNA, 21 bp, Artificial sequence
  SiRNA target sequence
aacatatttggtaattttaga

SEQ ID NO: 242925 - DNA, 21 bp, Artificial sequence
  SiRNA target sequence
acatatttggtaattttagaa

SEQ ID NO: 242926 - DNA, 21 bp, Artificial sequence
  SiRNA target sequence
catatttggtaattttagaaa

SEQ ID NO: 242927 - DNA, 21 bp, Artificial sequence
  SiRNA target sequence
atatttggtaattttagaaaa

SEQ ID NO: 242928 - DNA, 21 bp, Artificial sequence
  SiRNA target sequence
tatttggtaattttagaaaat

SEQ ID NO: 242929 - DNA, 21 bp, Artificial sequence
  SiRNA target sequence
atttggtaattttagaaaatg

SEQ ID NO: 242930 - DNA, 21 bp, Artificial sequence
  SiRNA target sequence
tttggtaattttagaaaatgc

SEQ ID NO: 242931 - DNA, 21 bp, Artificial sequence
  SiRNA target sequence
ttggtaattttagaaaatgca

SEQ ID NO: 242932 - DNA, 21 bp, Artificial sequence
  SiRNA target sequence
tggtaattttagaaaatgcaa

SEQ ID NO: 242933 - DNA, 21 bp, Artificial sequence
  SiRNA target sequence
ggtaattttagaaaatgcaaa

SEQ ID NO: 242934 - DNA, 21 bp, Artificial sequence
  SiRNA target sequence
gtaattttagaaaatgcaaat

SEQ ID NO: 242935 - DNA, 21 bp, Artificial sequence
  SiRNA target sequence
taattttagaaaatgcaaatc

SEQ ID NO: 242936 - DNA, 21 bp, Artificial sequence
  SiRNA target sequence
aattttagaaaatgcaaatcc

SEQ ID NO: 242937 - DNA, 21 bp, Artificial sequence
  SiRNA target sequence
attttagaaaatgcaaatcca

SEQ ID NO: 242938 - DNA, 21 bp, Artificial sequence
  SiRNA target sequence
ttttagaaaatgcaaatccaa

SEQ ID NO: 242939 - DNA, 21 bp, Artificial sequence
  SiRNA target sequence
tttagaaaatgcaaatccaat

SEQ ID NO: 242940 - DNA, 21 bp, Artificial sequence
  SiRNA target sequence
ttagaaaatgcaaatccaatg

SEQ ID NO: 242941 - DNA, 21 bp, Artificial sequence
  SiRNA target sequence
tagaaaatgcaaatccaatgg

SEQ ID NO: 242942 - DNA, 21 bp, Artificial sequence
  SiRNA target sequence
agaaaatgcaaatccaatggt

SEQ ID NO: 242943 - DNA, 21 bp, Artificial sequence
  SiRNA target sequence
gaaaatgcaaatccaatggtt

SEQ ID NO: 242944 - DNA, 21 bp, Artificial sequence
  SiRNA target sequence
aaaatgcaaatccaatggttg

SEQ ID NO: 242945 - DNA, 21 bp, Artificial sequence
  SiRNA target sequence
aaatgcaaatccaatggttgc

SEQ ID NO: 242946 - DNA, 21 bp, Artificial sequence
  SiRNA target sequence
aatgcaaatccaatggttgca

SEQ ID NO: 242947 - DNA, 21 bp, Artificial sequence
  SiRNA target sequence
atgcaaatccaatggttgcac

SEQ ID NO: 242948 - DNA, 21 bp, Artificial sequence
  SiRNA target sequence
tgcaaatccaatggttgcaca

SEQ ID NO: 242949 - DNA, 21 bp, Artificial sequence
  SiRNA target sequence
gcaaatccaatggttgcacac

SEQ ID NO: 242950 - DNA, 21 bp, Artificial sequence
  SiRNA target sequence
caaatccaatggttgcacacc

SEQ ID NO: 242951 - DNA, 21 bp, Artificial sequence
  SiRNA target sequence
aaatccaatggttgcacacca

SEQ ID NO: 242952 - DNA, 21 bp, Artificial sequence
  SiRNA target sequence
aatccaatggttgcacaccaa

SEQ ID NO: 242953 - DNA, 21 bp, Artificial sequence
  SiRNA target sequence
atccaatggttgcacaccaat

SEQ ID NO: 242954 - DNA, 21 bp, Artificial sequence
  SiRNA target sequence
tccaatggttgcacaccaatt

SEQ ID NO: 242955 - DNA, 21 bp, Artificial sequence
  SiRNA target sequence
ccaatggttgcacaccaattt

SEQ ID NO: 242956 - DNA, 21 bp, Artificial sequence
  SiRNA target sequence
caatggttgcacaccaatttt

SEQ ID NO: 242957 - DNA, 21 bp, Artificial sequence
  SiRNA target sequence
aatggttgcacaccaattttc

SEQ ID NO: 242958 - DNA, 21 bp, Artificial sequence
  SiRNA target sequence
atggttgcacaccaattttca

SEQ ID NO: 242959 - DNA, 21 bp, Artificial sequence
  SiRNA target sequence
tggttgcacaccaattttcaa

SEQ ID NO: 242960 - DNA, 21 bp, Artificial sequence
  SiRNA target sequence
ggttgcacaccaattttcaag

SEQ ID NO: 242961 - DNA, 21 bp, Artificial sequence
  SiRNA target sequence
gttgcacaccaattttcaaga

SEQ ID NO: 242962 - DNA, 21 bp, Artificial sequence
  SiRNA target sequence
ttgcacaccaattttcaagat

SEQ ID NO: 242963 - DNA, 21 bp, Artificial sequence
  SiRNA target sequence
tgcacaccaattttcaagatt

SEQ ID NO: 242964 - DNA, 21 bp, Artificial sequence
  SiRNA target sequence
gcacaccaattttcaagattt

SEQ ID NO: 242965 - DNA, 21 bp, Artificial sequence
  SiRNA target sequence
cacaccaattttcaagattta

SEQ ID NO: 242966 - DNA, 21 bp, Artificial sequence
  SiRNA target sequence
acaccaattttcaagatttat

SEQ ID NO: 242967 - DNA, 21 bp, Artificial sequence
  SiRNA target sequence
caccaattttcaagatttatt

SEQ ID NO: 242968 - DNA, 21 bp, Artificial sequence
  SiRNA target sequence
accaattttcaagatttattc

SEQ ID NO: 242969 - DNA, 21 bp, Artificial sequence
  SiRNA target sequence
ccaattttcaagatttattct

SEQ ID NO: 242970 - DNA, 21 bp, Artificial sequence
  SiRNA target sequence
caattttcaagatttattctt

SEQ ID NO: 242971 - DNA, 21 bp, Artificial sequence
  SiRNA target sequence
aattttcaagatttattctta

SEQ ID NO: 242972 - DNA, 21 bp, Artificial sequence
  SiRNA target sequence
attttcaagatttattcttaa

SEQ ID NO: 242973 - DNA, 21 bp, Artificial sequence
  SiRNA target sequence
ttttcaagatttattcttaag

SEQ ID NO: 242974 - DNA, 21 bp, Artificial sequence
  SiRNA target sequence
tttcaagatttattcttaaga

SEQ ID NO: 242975 - DNA, 21 bp, Artificial sequence
  SiRNA target sequence
ttcaagatttattcttaagac

SEQ ID NO: 242976 - DNA, 21 bp, Artificial sequence
  SiRNA target sequence
tcaagatttattcttaagacc

SEQ ID NO: 242977 - DNA, 21 bp, Artificial sequence
  SiRNA target sequence
caagatttattcttaagaccg

SEQ ID NO: 242978 - DNA, 21 bp, Artificial sequence
  SiRNA target sequence
aagatttattcttaagaccga

SEQ ID NO: 242979 - DNA, 21 bp, Artificial sequence
  SiRNA target sequence
agatttattcttaagaccgat

SEQ ID NO: 242980 - DNA, 21 bp, Artificial sequence
  SiRNA target sequence
gatttattcttaagaccgatg

SEQ ID NO: 242981 - DNA, 21 bp, Artificial sequence
  SiRNA target sequence
atttattcttaagaccgatgg

SEQ ID NO: 242982 - DNA, 21 bp, Artificial sequence
  SiRNA target sequence
tttattcttaagaccgatgga

SEQ ID NO: 242983 - DNA, 21 bp, Artificial sequence
  SiRNA target sequence
ttattcttaagaccgatggag

SEQ ID NO: 242984 - DNA, 21 bp, Artificial sequence
  SiRNA target sequence
tattcttaagaccgatggagc

SEQ ID NO: 242985 - DNA, 21 bp, Artificial sequence
  SiRNA target sequence
attcttaagaccgatggagct

SEQ ID NO: 242986 - DNA, 21 bp, Artificial sequence
  SiRNA target sequence
ttcttaagaccgatggagctg

SEQ ID NO: 242987 - DNA, 21 bp, Artificial sequence
  SiRNA target sequence
tcttaagaccgatggagctgt

SEQ ID NO: 242988 - DNA, 21 bp, Artificial sequence
  SiRNA target sequence
cttaagaccgatggagctgtg

SEQ ID NO: 242989 - DNA, 21 bp, Artificial sequence
  SiRNA target sequence
ttaagaccgatggagctgtgc

SEQ ID NO: 242990 - DNA, 21 bp, Artificial sequence
  SiRNA target sequence
taagaccgatggagctgtgcg

SEQ ID NO: 242991 - DNA, 21 bp, Artificial sequence
  SiRNA target sequence
aagaccgatggagctgtgcgc

SEQ ID NO: 242992 - DNA, 21 bp, Artificial sequence
  SiRNA target sequence
agaccgatggagctgtgcgca

SEQ ID NO: 242993 - DNA, 21 bp, Artificial sequence
  SiRNA target sequence
gaccgatggagctgtgcgcaa

SEQ ID NO: 242994 - DNA, 21 bp, Artificial sequence
  SiRNA target sequence
accgatggagctgtgcgcaaa

SEQ ID NO: 242995 - DNA, 21 bp, Artificial sequence
  SiRNA target sequence
ccgatggagctgtgcgcaaat

SEQ ID NO: 242996 - DNA, 21 bp, Artificial sequence
  SiRNA target sequence
cgatggagctgtgcgcaaatt

SEQ ID NO: 242997 - DNA, 21 bp, Artificial sequence
  SiRNA target sequence
gatggagctgtgcgcaaattg

SEQ ID NO: 242998 - DNA, 21 bp, Artificial sequence
  SiRNA target sequence
atggagctgtgcgcaaattgt

SEQ ID NO: 242999 - DNA, 21 bp, Artificial sequence
  SiRNA target sequence
tggagctgtgcgcaaattgta

SEQ ID NO: 243000 - DNA, 21 bp, Artificial sequence
  SiRNA target sequence
ggagctgtgcgcaaattgtaa

SEQ ID NO: 243001 - DNA, 21 bp, Artificial sequence
  SiRNA target sequence
gagctgtgcgcaaattgtaaa

SEQ ID NO: 243002 - DNA, 21 bp, Artificial sequence
  SiRNA target sequence
agctgtgcgcaaattgtaaaa

SEQ ID NO: 243003 - DNA, 21 bp, Artificial sequence
  SiRNA target sequence
gctgtgcgcaaattgtaaaaa

SEQ ID NO: 243004 - DNA, 21 bp, Artificial sequence
  SiRNA target sequence
ctgtgcgcaaattgtaaaaag

SEQ ID NO: 243005 - DNA, 21 bp, Artificial sequence
  SiRNA target sequence
tgtgcgcaaattgtaaaaaga

SEQ ID NO: 243006 - DNA, 21 bp, Artificial sequence
  SiRNA target sequence
gtgcgcaaattgtaaaaagaa

SEQ ID NO: 243007 - DNA, 21 bp, Artificial sequence
  SiRNA target sequence
tgcgcaaattgtaaaaagaaa

SEQ ID NO: 243008 - DNA, 21 bp, Artificial sequence
  SiRNA target sequence
gcgcaaattgtaaaaagaaag

SEQ ID NO: 243009 - DNA, 21 bp, Artificial sequence
  SiRNA target sequence
cgcaaattgtaaaaagaaagt

SEQ ID NO: 243010 - DNA, 21 bp, Artificial sequence
  SiRNA target sequence
gcaaattgtaaaaagaaagtc

SEQ ID NO: 243011 - DNA, 21 bp, Artificial sequence
  SiRNA target sequence
caaattgtaaaaagaaagtcc

SEQ ID NO: 243012 - DNA, 21 bp, Artificial sequence
  SiRNA target sequence
aaattgtaaaaagaaagtcct

SEQ ID NO: 243013 - DNA, 21 bp, Artificial sequence
  SiRNA target sequence
aattgtaaaaagaaagtcctg

SEQ ID NO: 243014 - DNA, 21 bp, Artificial sequence
  SiRNA target sequence
attgtaaaaagaaagtcctga

SEQ ID NO: 243015 - DNA, 21 bp, Artificial sequence
  SiRNA target sequence
ttgtaaaaagaaagtcctgaa

SEQ ID NO: 243016 - DNA, 21 bp, Artificial sequence
  SiRNA target sequence
tgtaaaaagaaagtcctgaaa

SEQ ID NO: 243017 - DNA, 21 bp, Artificial sequence
  SiRNA target sequence
gtaaaaagaaagtcctgaaat

SEQ ID NO: 243018 - DNA, 21 bp, Artificial sequence
  SiRNA target sequence
taaaaagaaagtcctgaaatt

SEQ ID NO: 243019 - DNA, 21 bp, Artificial sequence
  SiRNA target sequence
aaaaagaaagtcctgaaatta

SEQ ID NO: 243020 - DNA, 21 bp, Artificial sequence
  SiRNA target sequence
aaaagaaagtcctgaaattag

SEQ ID NO: 243021 - DNA, 21 bp, Artificial sequence
  SiRNA target sequence
aaagaaagtcctgaaattaga

SEQ ID NO: 243022 - DNA, 21 bp, Artificial sequence
  SiRNA target sequence
aagaaagtcctgaaattagag

SEQ ID NO: 243023 - DNA, 21 bp, Artificial sequence
  SiRNA target sequence
agaaagtcctgaaattagagc

SEQ ID NO: 243024 - DNA, 21 bp, Artificial sequence
  SiRNA target sequence
gaaagtcctgaaattagagcg

SEQ ID NO: 243025 - DNA, 21 bp, Artificial sequence
  SiRNA target sequence
aaagtcctgaaattagagcgg

SEQ ID NO: 243026 - DNA, 21 bp, Artificial sequence
  SiRNA target sequence
aagtcctgaaattagagcggt

SEQ ID NO: 243027 - DNA, 21 bp, Artificial sequence
  SiRNA target sequence
agtcctgaaattagagcggta

SEQ ID NO: 243028 - DNA, 21 bp, Artificial sequence
  SiRNA target sequence
gtcctgaaattagagcggtaa

SEQ ID NO: 243029 - DNA, 21 bp, Artificial sequence
  SiRNA target sequence
tcctgaaattagagcggtaaa

SEQ ID NO: 243030 - DNA, 21 bp, Artificial sequence
  SiRNA target sequence
cctgaaattagagcggtaaaa

SEQ ID NO: 243031 - DNA, 21 bp, Artificial sequence
  SiRNA target sequence
ctgaaattagagcggtaaaaa

SEQ ID NO: 243032 - DNA, 21 bp, Artificial sequence
  SiRNA target sequence
tgaaattagagcggtaaaaaa

SEQ ID NO: 243033 - DNA, 21 bp, Artificial sequence
  SiRNA target sequence
gaaattagagcggtaaaaaat

SEQ ID NO: 243034 - DNA, 21 bp, Artificial sequence
  SiRNA target sequence
aaattagagcggtaaaaaata

SEQ ID NO: 243035 - DNA, 21 bp, Artificial sequence
  SiRNA target sequence
aattagagcggtaaaaaatat

SEQ ID NO: 243036 - DNA, 21 bp, Artificial sequence
  SiRNA target sequence
attagagcggtaaaaaatata

SEQ ID NO: 243037 - DNA, 21 bp, Artificial sequence
  SiRNA target sequence
ttagagcggtaaaaaatatag

SEQ ID NO: 243038 - DNA, 21 bp, Artificial sequence
  SiRNA target sequence
tagagcggtaaaaaatatagc

SEQ ID NO: 243039 - DNA, 21 bp, Artificial sequence
  SiRNA target sequence
agagcggtaaaaaatatagca

SEQ ID NO: 243040 - DNA, 21 bp, Artificial sequence
  SiRNA target sequence
gagcggtaaaaaatatagcag

SEQ ID NO: 243041 - DNA, 21 bp, Artificial sequence
  SiRNA target sequence
agcggtaaaaaatatagcagc

SEQ ID NO: 243042 - DNA, 21 bp, Artificial sequence
  SiRNA target sequence
gcggtaaaaaatatagcagca

SEQ ID NO: 243043 - DNA, 21 bp, Artificial sequence
  SiRNA target sequence
cggtaaaaaatatagcagcaa

SEQ ID NO: 243044 - DNA, 21 bp, Artificial sequence
  SiRNA target sequence
ggtaaaaaatatagcagcaat

SEQ ID NO: 243045 - DNA, 21 bp, Artificial sequence
  SiRNA target sequence
gtaaaaaatatagcagcaata

SEQ ID NO: 243046 - DNA, 21 bp, Artificial sequence
  SiRNA target sequence
taaaaaatatagcagcaatag

SEQ ID NO: 243047 - DNA, 21 bp, Artificial sequence
  SiRNA target sequence
aaaaaatatagcagcaatagg

SEQ ID NO: 243048 - DNA, 21 bp, Artificial sequence
  SiRNA target sequence
aaaaatatagcagcaataggg

SEQ ID NO: 243049 - DNA, 21 bp, Artificial sequence
  SiRNA target sequence
aaaatatagcagcaatagggg

SEQ ID NO: 243050 - DNA, 21 bp, Artificial sequence
  SiRNA target sequence
aaatatagcagcaatagggga

SEQ ID NO: 243051 - DNA, 21 bp, Artificial sequence
  SiRNA target sequence
aatatagcagcaataggggag

SEQ ID NO: 243052 - DNA, 21 bp, Artificial sequence
  SiRNA target sequence
atatagcagcaataggggagg

SEQ ID NO: 243053 - DNA, 21 bp, Artificial sequence
  SiRNA target sequence
tatagcagcaataggggaggc

SEQ ID NO: 243054 - DNA, 21 bp, Artificial sequence
  SiRNA target sequence
atagcagcaataggggaggca

SEQ ID NO: 243055 - DNA, 21 bp, Artificial sequence
  SiRNA target sequence
tagcagcaataggggaggcaa

SEQ ID NO: 243056 - DNA, 21 bp, Artificial sequence
  SiRNA target sequence
agcagcaataggggaggcaat

SEQ ID NO: 243057 - DNA, 21 bp, Artificial sequence
  SiRNA target sequence
gcagcaataggggaggcaata

SEQ ID NO: 243058 - DNA, 21 bp, Artificial sequence
  SiRNA target sequence
cagcaataggggaggcaatag

SEQ ID NO: 243059 - DNA, 21 bp, Artificial sequence
  SiRNA target sequence
agcaataggggaggcaataga

SEQ ID NO: 243060 - DNA, 21 bp, Artificial sequence
  SiRNA target sequence
gcaataggggaggcaatagat

SEQ ID NO: 243061 - DNA, 21 bp, Artificial sequence
  SiRNA target sequence
caataggggaggcaatagata

SEQ ID NO: 243062 - DNA, 21 bp, Artificial sequence
  SiRNA target sequence
aataggggaggcaatagatag

SEQ ID NO: 243063 - DNA, 21 bp, Artificial sequence
  SiRNA target sequence
ataggggaggcaatagataga

SEQ ID NO: 243064 - DNA, 21 bp, Artificial sequence
  SiRNA target sequence
taggggaggcaatagatagat

SEQ ID NO: 243065 - DNA, 21 bp, Artificial sequence
  SiRNA target sequence
aggggaggcaatagatagata

SEQ ID NO: 243066 - DNA, 21 bp, Artificial sequence
  SiRNA target sequence
ggggaggcaatagatagataa

SEQ ID NO: 243067 - DNA, 21 bp, Artificial sequence
  SiRNA target sequence
gggaggcaatagatagataaa

SEQ ID NO: 243068 - DNA, 21 bp, Artificial sequence
  SiRNA target sequence
ggaggcaatagatagataaaa

SEQ ID NO: 243069 - DNA, 21 bp, Artificial sequence
  SiRNA target sequence
gaggcaatagatagataaaag

SEQ ID NO: 243070 - DNA, 21 bp, Artificial sequence
  SiRNA target sequence
aggcaatagatagataaaaga

SEQ ID NO: 243071 - DNA, 21 bp, Artificial sequence
  SiRNA target sequence
ggcaatagatagataaaagat

SEQ ID NO: 243072 - DNA, 21 bp, Artificial sequence
  SiRNA target sequence
gcaatagatagataaaagatc

SEQ ID NO: 243073 - DNA, 21 bp, Artificial sequence
  SiRNA target sequence
caatagatagataaaagatcc

SEQ ID NO: 243074 - DNA, 21 bp, Artificial sequence
  SiRNA target sequence
aatagatagataaaagatcct

SEQ ID NO: 243075 - DNA, 21 bp, Artificial sequence
  SiRNA target sequence
atagatagataaaagatcctt

SEQ ID NO: 243076 - DNA, 21 bp, Artificial sequence
  SiRNA target sequence
tagatagataaaagatccttg

SEQ ID NO: 243077 - DNA, 21 bp, Artificial sequence
  SiRNA target sequence
agatagataaaagatccttga

SEQ ID NO: 243078 - DNA, 21 bp, Artificial sequence
  SiRNA target sequence
gatagataaaagatccttgat

SEQ ID NO: 243079 - DNA, 21 bp, Artificial sequence
  SiRNA target sequence
atagataaaagatccttgatg

SEQ ID NO: 243080 - DNA, 21 bp, Artificial sequence
  SiRNA target sequence
tagataaaagatccttgatgc

SEQ ID NO: 243081 - DNA, 21 bp, Artificial sequence
  SiRNA target sequence
agataaaagatccttgatgca

SEQ ID NO: 243082 - DNA, 21 bp, Artificial sequence
  SiRNA target sequence
gataaaagatccttgatgcaa

SEQ ID NO: 243083 - DNA, 21 bp, Artificial sequence
  SiRNA target sequence
ataaaagatccttgatgcaat

SEQ ID NO: 243084 - DNA, 21 bp, Artificial sequence
  SiRNA target sequence
taaaagatccttgatgcaatg

SEQ ID NO: 243085 - DNA, 21 bp, Artificial sequence
  SiRNA target sequence
aaaagatccttgatgcaatgc

SEQ ID NO: 243086 - DNA, 21 bp, Artificial sequence
  SiRNA target sequence
aaagatccttgatgcaatgcg

SEQ ID NO: 243087 - DNA, 21 bp, Artificial sequence
  SiRNA target sequence
aagatccttgatgcaatgcga

SEQ ID NO: 243088 - DNA, 21 bp, Artificial sequence
  SiRNA target sequence
agatccttgatgcaatgcgat

SEQ ID NO: 243089 - DNA, 21 bp, Artificial sequence
  SiRNA target sequence
gatccttgatgcaatgcgatt

SEQ ID NO: 243090 - DNA, 21 bp, Artificial sequence
  SiRNA target sequence
atccttgatgcaatgcgattt

SEQ ID NO: 243091 - DNA, 21 bp, Artificial sequence
  SiRNA target sequence
tccttgatgcaatgcgatttc

SEQ ID NO: 243092 - DNA, 21 bp, Artificial sequence
  SiRNA target sequence
ccttgatgcaatgcgatttcc

SEQ ID NO: 243093 - DNA, 21 bp, Artificial sequence
  SiRNA target sequence
cttgatgcaatgcgatttcca

SEQ ID NO: 243094 - DNA, 21 bp, Artificial sequence
  SiRNA target sequence
ttgatgcaatgcgatttccac

SEQ ID NO: 243095 - DNA, 21 bp, Artificial sequence
  SiRNA target sequence
tgatgcaatgcgatttccacg

SEQ ID NO: 243096 - DNA, 21 bp, Artificial sequence
  SiRNA target sequence
gatgcaatgcgatttccacgg

SEQ ID NO: 243097 - DNA, 21 bp, Artificial sequence
  SiRNA target sequence
atgcaatgcgatttccacgga

SEQ ID NO: 243098 - DNA, 21 bp, Artificial sequence
  SiRNA target sequence
tgcaatgcgatttccacggat

SEQ ID NO: 243099 - DNA, 21 bp, Artificial sequence
  SiRNA target sequence
gcaatgcgatttccacggatt

SEQ ID NO: 243100 - DNA, 21 bp, Artificial sequence
  SiRNA target sequence
caatgcgatttccacggatta

SEQ ID NO: 243101 - DNA, 21 bp, Artificial sequence
  SiRNA target sequence
aatgcgatttccacggattac

SEQ ID NO: 243102 - DNA, 21 bp, Artificial sequence
  SiRNA target sequence
atgcgatttccacggattaca

SEQ ID NO: 243103 - DNA, 21 bp, Artificial sequence
  SiRNA target sequence
tgcgatttccacggattacaa

SEQ ID NO: 243104 - DNA, 21 bp, Artificial sequence
  SiRNA target sequence
gcgatttccacggattacaaa

SEQ ID NO: 243105 - DNA, 21 bp, Artificial sequence
  SiRNA target sequence
cgatttccacggattacaaag

SEQ ID NO: 243106 - DNA, 21 bp, Artificial sequence
  SiRNA target sequence
gatttccacggattacaaagt

SEQ ID NO: 243107 - DNA, 21 bp, Artificial sequence
  SiRNA target sequence
atttccacggattacaaagtt

SEQ ID NO: 243108 - DNA, 21 bp, Artificial sequence
  SiRNA target sequence
tttccacggattacaaagtta

SEQ ID NO: 243109 - DNA, 21 bp, Artificial sequence
  SiRNA target sequence
ttccacggattacaaagttat

SEQ ID NO: 243110 - DNA, 21 bp, Artificial sequence
  SiRNA target sequence
tccacggattacaaagttata

SEQ ID NO: 243111 - DNA, 21 bp, Artificial sequence
  SiRNA target sequence
ccacggattacaaagttataa

SEQ ID NO: 243112 - DNA, 21 bp, Artificial sequence
  SiRNA target sequence
cacggattacaaagttataaa

SEQ ID NO: 243113 - DNA, 21 bp, Artificial sequence
  SiRNA target sequence
acggattacaaagttataaaa

SEQ ID NO: 243114 - DNA, 21 bp, Artificial sequence
  SiRNA target sequence
cggattacaaagttataaaat

SEQ ID NO: 243115 - DNA, 21 bp, Artificial sequence
  SiRNA target sequence
ggattacaaagttataaaata

SEQ ID NO: 243116 - DNA, 21 bp, Artificial sequence
  SiRNA target sequence
gattacaaagttataaaataa

SEQ ID NO: 243117 - DNA, 21 bp, Artificial sequence
  SiRNA target sequence
attacaaagttataaaataat

SEQ ID NO: 243118 - DNA, 21 bp, Artificial sequence
  SiRNA target sequence
ttacaaagttataaaataatg

SEQ ID NO: 243119 - DNA, 21 bp, Artificial sequence
  SiRNA target sequence
tacaaagttataaaataatga

SEQ ID NO: 243120 - DNA, 21 bp, Artificial sequence
  SiRNA target sequence
acaaagttataaaataatgat

SEQ ID NO: 243121 - DNA, 21 bp, Artificial sequence
  SiRNA target sequence
caaagttataaaataatgata

SEQ ID NO: 243122 - DNA, 21 bp, Artificial sequence
  SiRNA target sequence
aaagttataaaataatgatac

SEQ ID NO: 243123 - DNA, 21 bp, Artificial sequence
  SiRNA target sequence
aagttataaaataatgataca

SEQ ID NO: 243124 - DNA, 21 bp, Artificial sequence
  SiRNA target sequence
agttataaaataatgatacag

SEQ ID NO: 243125 - DNA, 21 bp, Artificial sequence
  SiRNA target sequence
gttataaaataatgatacagc

SEQ ID NO: 243126 - DNA, 21 bp, Artificial sequence
  SiRNA target sequence
ttataaaataatgatacagca

SEQ ID NO: 243127 - DNA, 21 bp, Artificial sequence
  SiRNA target sequence
tataaaataatgatacagcac

SEQ ID NO: 243128 - DNA, 21 bp, Artificial sequence
  SiRNA target sequence
ataaaataatgatacagcact

SEQ ID NO: 243129 - DNA, 21 bp, Artificial sequence
  SiRNA target sequence
taaaataatgatacagcacta

SEQ ID NO: 243130 - DNA, 21 bp, Artificial sequence
  SiRNA target sequence
aaaataatgatacagcactaa

SEQ ID NO: 243131 - DNA, 21 bp, Artificial sequence
  SiRNA target sequence
aaataatgatacagcactaat

SEQ ID NO: 243132 - DNA, 21 bp, Artificial sequence
  SiRNA target sequence
aataatgatacagcactaatc

SEQ ID NO: 243133 - DNA, 21 bp, Artificial sequence
  SiRNA target sequence
ataatgatacagcactaatcg

SEQ ID NO: 243134 - DNA, 21 bp, Artificial sequence
  SiRNA target sequence
taatgatacagcactaatcgt

SEQ ID NO: 243135 - DNA, 21 bp, Artificial sequence
  SiRNA target sequence
aatgatacagcactaatcgtt

SEQ ID NO: 243136 - DNA, 21 bp, Artificial sequence
  SiRNA target sequence
atgatacagcactaatcgtta

SEQ ID NO: 243137 - DNA, 21 bp, Artificial sequence
  SiRNA target sequence
tgatacagcactaatcgttaa

SEQ ID NO: 243138 - DNA, 21 bp, Artificial sequence
  SiRNA target sequence
gatacagcactaatcgttaag

SEQ ID NO: 243139 - DNA, 21 bp, Artificial sequence
  SiRNA target sequence
atacagcactaatcgttaagg

SEQ ID NO: 243140 - DNA, 21 bp, Artificial sequence
  SiRNA target sequence
tacagcactaatcgttaagga

SEQ ID NO: 243141 - DNA, 21 bp, Artificial sequence
  SiRNA target sequence
acagcactaatcgttaaggaa

SEQ ID NO: 243142 - DNA, 21 bp, Artificial sequence
  SiRNA target sequence
cagcactaatcgttaaggaag

SEQ ID NO: 243143 - DNA, 21 bp, Artificial sequence
  SiRNA target sequence
agcactaatcgttaaggaagt

SEQ ID NO: 243144 - DNA, 21 bp, Artificial sequence
  SiRNA target sequence
gcactaatcgttaaggaagtt

SEQ ID NO: 243145 - DNA, 21 bp, Artificial sequence
  SiRNA target sequence
cactaatcgttaaggaagttg

SEQ ID NO: 243146 - DNA, 21 bp, Artificial sequence
  SiRNA target sequence
actaatcgttaaggaagttgt

SEQ ID NO: 243147 - DNA, 21 bp, Artificial sequence
  SiRNA target sequence
ctaatcgttaaggaagttgtt

SEQ ID NO: 243148 - DNA, 21 bp, Artificial sequence
  SiRNA target sequence
taatcgttaaggaagttgtta

SEQ ID NO: 243149 - DNA, 21 bp, Artificial sequence
  SiRNA target sequence
aatcgttaaggaagttgttac

SEQ ID NO: 243150 - DNA, 21 bp, Artificial sequence
  SiRNA target sequence
atcgttaaggaagttgttact

SEQ ID NO: 243151 - DNA, 21 bp, Artificial sequence
  SiRNA target sequence
tcgttaaggaagttgttacta

SEQ ID NO: 243152 - DNA, 21 bp, Artificial sequence
  SiRNA target sequence
cgttaaggaagttgttactaa

SEQ ID NO: 243153 - DNA, 21 bp, Artificial sequence
  SiRNA target sequence
gttaaggaagttgttactaaa

SEQ ID NO: 243154 - DNA, 21 bp, Artificial sequence
  SiRNA target sequence
ttaaggaagttgttactaaat

SEQ ID NO: 243155 - DNA, 21 bp, Artificial sequence
  SiRNA target sequence
taaggaagttgttactaaata

SEQ ID NO: 243156 - DNA, 21 bp, Artificial sequence
  SiRNA target sequence
aaggaagttgttactaaatat

SEQ ID NO: 243157 - DNA, 21 bp, Artificial sequence
  SiRNA target sequence
aggaagttgttactaaatatt

SEQ ID NO: 243158 - DNA, 21 bp, Artificial sequence
  SiRNA target sequence
ggaagttgttactaaatattt

SEQ ID NO: 243159 - DNA, 21 bp, Artificial sequence
  SiRNA target sequence
gaagttgttactaaatatttt

SEQ ID NO: 243160 - DNA, 21 bp, Artificial sequence
  SiRNA target sequence
aagttgttactaaatattttt

SEQ ID NO: 243161 - DNA, 21 bp, Artificial sequence
  SiRNA target sequence
agttgttactaaatatttttg

SEQ ID NO: 243162 - DNA, 21 bp, Artificial sequence
  SiRNA target sequence
gttgttactaaatatttttga

SEQ ID NO: 243163 - DNA, 21 bp, Artificial sequence
  SiRNA target sequence
ttgttactaaatatttttgag

SEQ ID NO: 243164 - DNA, 21 bp, Artificial sequence
  SiRNA target sequence
tgttactaaatatttttgaga

SEQ ID NO: 243165 - DNA, 21 bp, Artificial sequence
  SiRNA target sequence
gttactaaatatttttgagaa

SEQ ID NO: 243166 - DNA, 21 bp, Artificial sequence
  SiRNA target sequence
ttactaaatatttttgagaat

SEQ ID NO: 243167 - DNA, 21 bp, Artificial sequence
  SiRNA target sequence
tactaaatatttttgagaata

SEQ ID NO: 243168 - DNA, 21 bp, Artificial sequence
  SiRNA target sequence
actaaatatttttgagaataa

SEQ ID NO: 243169 - DNA, 21 bp, Artificial sequence
  SiRNA target sequence
ctaaatatttttgagaataat

SEQ ID NO: 243170 - DNA, 21 bp, Artificial sequence
  SiRNA target sequence
taaatatttttgagaataatc

SEQ ID NO: 243171 - DNA, 21 bp, Artificial sequence
  SiRNA target sequence
aaatatttttgagaataatct

SEQ ID NO: 243172 - DNA, 21 bp, Artificial sequence
  SiRNA target sequence
aatatttttgagaataatctt

SEQ ID NO: 243173 - DNA, 21 bp, Artificial sequence
  SiRNA target sequence
atatttttgagaataatcttt

SEQ ID NO: 243174 - DNA, 21 bp, Artificial sequence
  SiRNA target sequence
tatttttgagaataatctttc

SEQ ID NO: 243175 - DNA, 21 bp, Artificial sequence
  SiRNA target sequence
atttttgagaataatctttcg

SEQ ID NO: 243176 - DNA, 21 bp, Artificial sequence
  SiRNA target sequence
tttttgagaataatctttcgg

SEQ ID NO: 243177 - DNA, 21 bp, Artificial sequence
  SiRNA target sequence
ttttgagaataatctttcgga

SEQ ID NO: 243178 - DNA, 21 bp, Artificial sequence
  SiRNA target sequence
tttgagaataatctttcggag

SEQ ID NO: 243179 - DNA, 21 bp, Artificial sequence
  SiRNA target sequence
ttgagaataatctttcggagg

SEQ ID NO: 243180 - DNA, 21 bp, Artificial sequence
  SiRNA target sequence
tgagaataatctttcggaggc

SEQ ID NO: 243181 - DNA, 21 bp, Artificial sequence
  SiRNA target sequence
gagaataatctttcggaggca

SEQ ID NO: 243182 - DNA, 21 bp, Artificial sequence
  SiRNA target sequence
agaataatctttcggaggcat

SEQ ID NO: 243183 - DNA, 21 bp, Artificial sequence
  SiRNA target sequence
gaataatctttcggaggcata

SEQ ID NO: 243184 - DNA, 21 bp, Artificial sequence
  SiRNA target sequence
aataatctttcggaggcatat

SEQ ID NO: 243185 - DNA, 21 bp, Artificial sequence
  SiRNA target sequence
ataatctttcggaggcatatt

SEQ ID NO: 243186 - DNA, 21 bp, Artificial sequence
  SiRNA target sequence
taatctttcggaggcatatta

SEQ ID NO: 243187 - DNA, 21 bp, Artificial sequence
  SiRNA target sequence
aatctttcggaggcatattat

SEQ ID NO: 243188 - DNA, 21 bp, Artificial sequence
  SiRNA target sequence
atctttcggaggcatattatt

SEQ ID NO: 243189 - DNA, 21 bp, Artificial sequence
  SiRNA target sequence
tctttcggaggcatattatta

SEQ ID NO: 243190 - DNA, 21 bp, Artificial sequence
  SiRNA target sequence
ctttcggaggcatattattaa

SEQ ID NO: 243191 - DNA, 21 bp, Artificial sequence
  SiRNA target sequence
tttcggaggcatattattaat

SEQ ID NO: 243192 - DNA, 21 bp, Artificial sequence
  SiRNA target sequence
ttcggaggcatattattaatt

SEQ ID NO: 243193 - DNA, 21 bp, Artificial sequence
  SiRNA target sequence
tcggaggcatattattaattc

SEQ ID NO: 243194 - DNA, 21 bp, Artificial sequence
  SiRNA target sequence
cggaggcatattattaattct

SEQ ID NO: 243195 - DNA, 21 bp, Artificial sequence
  SiRNA target sequence
ggaggcatattattaattctg

SEQ ID NO: 243196 - DNA, 21 bp, Artificial sequence
  SiRNA target sequence
gaggcatattattaattctgc

SEQ ID NO: 243197 - DNA, 21 bp, Artificial sequence
  SiRNA target sequence
aggcatattattaattctgct

SEQ ID NO: 243198 - DNA, 21 bp, Artificial sequence
  SiRNA target sequence
ggcatattattaattctgctt

SEQ ID NO: 243199 - DNA, 21 bp, Artificial sequence
  SiRNA target sequence
gcatattattaattctgcttc

SEQ ID NO: 243200 - DNA, 21 bp, Artificial sequence
  SiRNA target sequence
catattattaattctgcttcc

SEQ ID NO: 243201 - DNA, 21 bp, Artificial sequence
  SiRNA target sequence
atattattaattctgcttccc

SEQ ID NO: 243202 - DNA, 21 bp, Artificial sequence
  SiRNA target sequence
tattattaattctgcttcccg

SEQ ID NO: 243203 - DNA, 21 bp, Artificial sequence
  SiRNA target sequence
attattaattctgcttcccgt

SEQ ID NO: 243204 - DNA, 21 bp, Artificial sequence
  SiRNA target sequence
ttattaattctgcttcccgta

SEQ ID NO: 243205 - DNA, 21 bp, Artificial sequence
  SiRNA target sequence
tattaattctgcttcccgtag

SEQ ID NO: 243206 - DNA, 21 bp, Artificial sequence
  SiRNA target sequence
attaattctgcttcccgtaga

SEQ ID NO: 243207 - DNA, 21 bp, Artificial sequence
  SiRNA target sequence
ttaattctgcttcccgtagat

SEQ ID NO: 243208 - DNA, 21 bp, Artificial sequence
  SiRNA target sequence
taattctgcttcccgtagata

SEQ ID NO: 243209 - DNA, 21 bp, Artificial sequence
  SiRNA target sequence
aattctgcttcccgtagataa

SEQ ID NO: 243210 - DNA, 21 bp, Artificial sequence
  SiRNA target sequence
attctgcttcccgtagataaa

SEQ ID NO: 243211 - DNA, 21 bp, Artificial sequence
  SiRNA target sequence
ttctgcttcccgtagataaag

SEQ ID NO: 243212 - DNA, 21 bp, Artificial sequence
  SiRNA target sequence
tctgcttcccgtagataaaga

SEQ ID NO: 243213 - DNA, 21 bp, Artificial sequence
  SiRNA target sequence
ctgcttcccgtagataaagaa

SEQ ID NO: 243214 - DNA, 21 bp, Artificial sequence
  SiRNA target sequence
tgcttcccgtagataaagaat

SEQ ID NO: 243215 - DNA, 21 bp, Artificial sequence
  SiRNA target sequence
gcttcccgtagataaagaatt

SEQ ID NO: 243216 - DNA, 21 bp, Artificial sequence
  SiRNA target sequence
cttcccgtagataaagaattt

SEQ ID NO: 243217 - DNA, 21 bp, Artificial sequence
  SiRNA target sequence
ttcccgtagataaagaatttt

SEQ ID NO: 243218 - DNA, 21 bp, Artificial sequence
  SiRNA target sequence
tcccgtagataaagaattttt

SEQ ID NO: 243219 - DNA, 21 bp, Artificial sequence
  SiRNA target sequence
cccgtagataaagaatttttt

SEQ ID NO: 243220 - DNA, 21 bp, Artificial sequence
  SiRNA target sequence
ccgtagataaagaatttttta

SEQ ID NO: 243221 - DNA, 21 bp, Artificial sequence
  SiRNA target sequence
cgtagataaagaattttttaa

SEQ ID NO: 243222 - DNA, 21 bp, Artificial sequence
  SiRNA target sequence
gtagataaagaattttttaag

SEQ ID NO: 243223 - DNA, 21 bp, Artificial sequence
  SiRNA target sequence
tagataaagaattttttaagg

SEQ ID NO: 243224 - DNA, 21 bp, Artificial sequence
  SiRNA target sequence
agataaagaattttttaagga

SEQ ID NO: 243225 - DNA, 21 bp, Artificial sequence
  SiRNA target sequence
gataaagaattttttaaggac

SEQ ID NO: 243226 - DNA, 21 bp, Artificial sequence
  SiRNA target sequence
ataaagaattttttaaggaca

SEQ ID NO: 243227 - DNA, 21 bp, Artificial sequence
  SiRNA target sequence
taaagaattttttaaggacat

SEQ ID NO: 243228 - DNA, 21 bp, Artificial sequence
  SiRNA target sequence
aaagaattttttaaggacata

SEQ ID NO: 243229 - DNA, 21 bp, Artificial sequence
  SiRNA target sequence
aagaattttttaaggacatat

SEQ ID NO: 243230 - DNA, 21 bp, Artificial sequence
  SiRNA target sequence
agaattttttaaggacatatc

SEQ ID NO: 243231 - DNA, 21 bp, Artificial sequence
  SiRNA target sequence
gaattttttaaggacatatca

SEQ ID NO: 243232 - DNA, 21 bp, Artificial sequence
  SiRNA target sequence
aattttttaaggacatatcaa

SEQ ID NO: 243233 - DNA, 21 bp, Artificial sequence
  SiRNA target sequence
attttttaaggacatatcaat

SEQ ID NO: 243234 - DNA, 21 bp, Artificial sequence
  SiRNA target sequence
ttttttaaggacatatcaata

SEQ ID NO: 243235 - DNA, 21 bp, Artificial sequence
  SiRNA target sequence
tttttaaggacatatcaataa

SEQ ID NO: 243236 - DNA, 21 bp, Artificial sequence
  SiRNA target sequence
ttttaaggacatatcaataaa

SEQ ID NO: 243237 - DNA, 21 bp, Artificial sequence
  SiRNA target sequence
tttaaggacatatcaataaat

SEQ ID NO: 243238 - DNA, 21 bp, Artificial sequence
  SiRNA target sequence
ttaaggacatatcaataaatc

SEQ ID NO: 243239 - DNA, 21 bp, Artificial sequence
  SiRNA target sequence
taaggacatatcaataaatcc

SEQ ID NO: 243240 - DNA, 21 bp, Artificial sequence
  SiRNA target sequence
aaggacatatcaataaatcct

SEQ ID NO: 243241 - DNA, 21 bp, Artificial sequence
  SiRNA target sequence
aggacatatcaataaatcctg

SEQ ID NO: 243242 - DNA, 21 bp, Artificial sequence
  SiRNA target sequence
ggacatatcaataaatcctgc

SEQ ID NO: 243243 - DNA, 21 bp, Artificial sequence
  SiRNA target sequence
gacatatcaataaatcctgca

SEQ ID NO: 243244 - DNA, 21 bp, Artificial sequence
  SiRNA target sequence
acatatcaataaatcctgcat

SEQ ID NO: 243245 - DNA, 21 bp, Artificial sequence
  SiRNA target sequence
catatcaataaatcctgcatt

SEQ ID NO: 243246 - DNA, 21 bp, Artificial sequence
  SiRNA target sequence
atatcaataaatcctgcatta

SEQ ID NO: 243247 - DNA, 21 bp, Artificial sequence
  SiRNA target sequence
tatcaataaatcctgcattaa

SEQ ID NO: 243248 - DNA, 21 bp, Artificial sequence
  SiRNA target sequence
atcaataaatcctgcattaat

SEQ ID NO: 243249 - DNA, 21 bp, Artificial sequence
  SiRNA target sequence
tcaataaatcctgcattaata

SEQ ID NO: 243250 - DNA, 21 bp, Artificial sequence
  SiRNA target sequence
caataaatcctgcattaatag

SEQ ID NO: 243251 - DNA, 21 bp, Artificial sequence
  SiRNA target sequence
aataaatcctgcattaatagc

SEQ ID NO: 243252 - DNA, 21 bp, Artificial sequence
  SiRNA target sequence
ataaatcctgcattaatagca

SEQ ID NO: 243253 - DNA, 21 bp, Artificial sequence
  SiRNA target sequence
taaatcctgcattaatagcat

SEQ ID NO: 243254 - DNA, 21 bp, Artificial sequence
  SiRNA target sequence
aaatcctgcattaatagcata

SEQ ID NO: 243255 - DNA, 21 bp, Artificial sequence
  SiRNA target sequence
aatcctgcattaatagcatag

SEQ ID NO: 243256 - DNA, 21 bp, Artificial sequence
  SiRNA target sequence
atcctgcattaatagcataga

SEQ ID NO: 243257 - DNA, 21 bp, Artificial sequence
  SiRNA target sequence
tcctgcattaatagcatagat

SEQ ID NO: 243258 - DNA, 21 bp, Artificial sequence
  SiRNA target sequence
cctgcattaatagcatagatt

SEQ ID NO: 243259 - DNA, 21 bp, Artificial sequence
  SiRNA target sequence
ctgcattaatagcatagatta

SEQ ID NO: 243260 - DNA, 21 bp, Artificial sequence
  SiRNA target sequence
tgcattaatagcatagattaa

SEQ ID NO: 243261 - DNA, 21 bp, Artificial sequence
  SiRNA target sequence
gcattaatagcatagattaat

SEQ ID NO: 243262 - DNA, 21 bp, Artificial sequence
  SiRNA target sequence
cattaatagcatagattaatg

SEQ ID NO: 243263 - DNA, 21 bp, Artificial sequence
  SiRNA target sequence
attaatagcatagattaatgc

SEQ ID NO: 243264 - DNA, 21 bp, Artificial sequence
  SiRNA target sequence
ttaatagcatagattaatgcc

SEQ ID NO: 243265 - DNA, 21 bp, Artificial sequence
  SiRNA target sequence
taatagcatagattaatgccg

SEQ ID NO: 243266 - DNA, 21 bp, Artificial sequence
  SiRNA target sequence
aatagcatagattaatgccgc

SEQ ID NO: 243267 - DNA, 21 bp, Artificial sequence
  SiRNA target sequence
atagcatagattaatgccgct

SEQ ID NO: 243268 - DNA, 21 bp, Artificial sequence
  SiRNA target sequence
tagcatagattaatgccgctg

SEQ ID NO: 243269 - DNA, 21 bp, Artificial sequence
  SiRNA target sequence
agcatagattaatgccgctgc

SEQ ID NO: 243270 - DNA, 21 bp, Artificial sequence
  SiRNA target sequence
gcatagattaatgccgctgca

SEQ ID NO: 243271 - DNA, 21 bp, Artificial sequence
  SiRNA target sequence
catagattaatgccgctgcac

SEQ ID NO: 243272 - DNA, 21 bp, Artificial sequence
  SiRNA target sequence
atagattaatgccgctgcaca

SEQ ID NO: 243273 - DNA, 21 bp, Artificial sequence
  SiRNA target sequence
tagattaatgccgctgcacac

SEQ ID NO: 243274 - DNA, 21 bp, Artificial sequence
  SiRNA target sequence
agattaatgccgctgcacaca

SEQ ID NO: 243275 - DNA, 21 bp, Artificial sequence
  SiRNA target sequence
gattaatgccgctgcacacat

SEQ ID NO: 243276 - DNA, 21 bp, Artificial sequence
  SiRNA target sequence
attaatgccgctgcacacata

SEQ ID NO: 243277 - DNA, 21 bp, Artificial sequence
  SiRNA target sequence
ttaatgccgctgcacacatat

SEQ ID NO: 243278 - DNA, 21 bp, Artificial sequence
  SiRNA target sequence
taatgccgctgcacacatatt

SEQ ID NO: 243279 - DNA, 21 bp, Artificial sequence
  SiRNA target sequence
aatgccgctgcacacatattt

SEQ ID NO: 243280 - DNA, 21 bp, Artificial sequence
  SiRNA target sequence
atgccgctgcacacatatttc

SEQ ID NO: 243281 - DNA, 21 bp, Artificial sequence
  SiRNA target sequence
tgccgctgcacacatatttct

SEQ ID NO: 243282 - DNA, 21 bp, Artificial sequence
  SiRNA target sequence
gccgctgcacacatatttctt

SEQ ID NO: 243283 - DNA, 21 bp, Artificial sequence
  SiRNA target sequence
ccgctgcacacatatttctta

SEQ ID NO: 243284 - DNA, 21 bp, Artificial sequence
  SiRNA target sequence
cgctgcacacatatttcttaa

SEQ ID NO: 243285 - DNA, 21 bp, Artificial sequence
  SiRNA target sequence
gctgcacacatatttcttaaa

SEQ ID NO: 243286 - DNA, 21 bp, Artificial sequence
  SiRNA target sequence
ctgcacacatatttcttaaaa

SEQ ID NO: 243287 - DNA, 21 bp, Artificial sequence
  SiRNA target sequence
tgcacacatatttcttaaaaa

SEQ ID NO: 243288 - DNA, 21 bp, Artificial sequence
  SiRNA target sequence
gcacacatatttcttaaaaat

SEQ ID NO: 243289 - DNA, 21 bp, Artificial sequence
  SiRNA target sequence
cacacatatttcttaaaaatt

SEQ ID NO: 243290 - DNA, 21 bp, Artificial sequence
  SiRNA target sequence
acacatatttcttaaaaattt

SEQ ID NO: 243291 - DNA, 21 bp, Artificial sequence
  SiRNA target sequence
cacatatttcttaaaaatttg

SEQ ID NO: 243292 - DNA, 21 bp, Artificial sequence
  SiRNA target sequence
acatatttcttaaaaatttgg

SEQ ID NO: 243293 - DNA, 21 bp, Artificial sequence
  SiRNA target sequence
catatttcttaaaaatttgga

SEQ ID NO: 243294 - DNA, 21 bp, Artificial sequence
  SiRNA target sequence
atatttcttaaaaatttggat

SEQ ID NO: 243295 - DNA, 21 bp, Artificial sequence
  SiRNA target sequence
tatttcttaaaaatttggatt

SEQ ID NO: 243296 - DNA, 21 bp, Artificial sequence
  SiRNA target sequence
atttcttaaaaatttggattg

SEQ ID NO: 243297 - DNA, 21 bp, Artificial sequence
  SiRNA target sequence
tttcttaaaaatttggattgt

SEQ ID NO: 243298 - DNA, 21 bp, Artificial sequence
  SiRNA target sequence
ttcttaaaaatttggattgta

SEQ ID NO: 243299 - DNA, 21 bp, Artificial sequence
  SiRNA target sequence
tcttaaaaatttggattgtaa

SEQ ID NO: 243300 - DNA, 21 bp, Artificial sequence
  SiRNA target sequence
cttaaaaatttggattgtaaa

SEQ ID NO: 243301 - DNA, 21 bp, Artificial sequence
  SiRNA target sequence
ttaaaaatttggattgtaaaa

SEQ ID NO: 243302 - DNA, 21 bp, Artificial sequence
  SiRNA target sequence
taaaaatttggattgtaaaag

SEQ ID NO: 243303 - DNA, 21 bp, Artificial sequence
  SiRNA target sequence
aaaaatttggattgtaaaaga

SEQ ID NO: 243304 - DNA, 21 bp, Artificial sequence
  SiRNA target sequence
aaaatttggattgtaaaagat

SEQ ID NO: 243305 - DNA, 21 bp, Artificial sequence
  SiRNA target sequence
aaatttggattgtaaaagatc

SEQ ID NO: 243306 - DNA, 21 bp, Artificial sequence
  SiRNA target sequence
aatttggattgtaaaagatca

SEQ ID NO: 243307 - DNA, 21 bp, Artificial sequence
  SiRNA target sequence
atttggattgtaaaagatcaa

SEQ ID NO: 243308 - DNA, 21 bp, Artificial sequence
  SiRNA target sequence
tttggattgtaaaagatcaaa

SEQ ID NO: 243309 - DNA, 21 bp, Artificial sequence
  SiRNA target sequence
ttggattgtaaaagatcaaac

SEQ ID NO: 243310 - DNA, 21 bp, Artificial sequence
  SiRNA target sequence
tggattgtaaaagatcaaacg

SEQ ID NO: 243311 - DNA, 21 bp, Artificial sequence
  SiRNA target sequence
ggattgtaaaagatcaaacga

SEQ ID NO: 243312 - DNA, 21 bp, Artificial sequence
  SiRNA target sequence
gattgtaaaagatcaaacgag

SEQ ID NO: 243313 - DNA, 21 bp, Artificial sequence
  SiRNA target sequence
attgtaaaagatcaaacgagg

SEQ ID NO: 243314 - DNA, 21 bp, Artificial sequence
  SiRNA target sequence
ttgtaaaagatcaaacgagga

SEQ ID NO: 243315 - DNA, 21 bp, Artificial sequence
  SiRNA target sequence
tgtaaaagatcaaacgaggat

SEQ ID NO: 243316 - DNA, 21 bp, Artificial sequence
  SiRNA target sequence
gtaaaagatcaaacgaggatg

SEQ ID NO: 243317 - DNA, 21 bp, Artificial sequence
  SiRNA target sequence
taaaagatcaaacgaggatgt

SEQ ID NO: 243318 - DNA, 21 bp, Artificial sequence
  SiRNA target sequence
aaaagatcaaacgaggatgtc

SEQ ID NO: 243319 - DNA, 21 bp, Artificial sequence
  SiRNA target sequence
aaagatcaaacgaggatgtcg

SEQ ID NO: 243320 - DNA, 21 bp, Artificial sequence
  SiRNA target sequence
aagatcaaacgaggatgtcgt

SEQ ID NO: 243321 - DNA, 21 bp, Artificial sequence
  SiRNA target sequence
agatcaaacgaggatgtcgtt

SEQ ID NO: 243322 - DNA, 21 bp, Artificial sequence
  SiRNA target sequence
gatcaaacgaggatgtcgttt

SEQ ID NO: 243323 - DNA, 21 bp, Artificial sequence
  SiRNA target sequence
atcaaacgaggatgtcgtttt

SEQ ID NO: 243324 - DNA, 21 bp, Artificial sequence
  SiRNA target sequence
tcaaacgaggatgtcgttttg

SEQ ID NO: 243325 - DNA, 21 bp, Artificial sequence
  SiRNA target sequence
caaacgaggatgtcgttttgt

SEQ ID NO: 243326 - DNA, 21 bp, Artificial sequence
  SiRNA target sequence
aaacgaggatgtcgttttgtc

SEQ ID NO: 243327 - DNA, 21 bp, Artificial sequence
  SiRNA target sequence
aacgaggatgtcgttttgtct

SEQ ID NO: 243328 - DNA, 21 bp, Artificial sequence
  SiRNA target sequence
acgaggatgtcgttttgtctt

SEQ ID NO: 243329 - DNA, 21 bp, Artificial sequence
  SiRNA target sequence
cgaggatgtcgttttgtcttc

SEQ ID NO: 243330 - DNA, 21 bp, Artificial sequence
  SiRNA target sequence
gaggatgtcgttttgtcttct

SEQ ID NO: 243331 - DNA, 21 bp, Artificial sequence
  SiRNA target sequence
aggatgtcgttttgtcttctt

SEQ ID NO: 243332 - DNA, 21 bp, Artificial sequence
  SiRNA target sequence
ggatgtcgttttgtcttcttc

SEQ ID NO: 243333 - DNA, 21 bp, Artificial sequence
  SiRNA target sequence
gatgtcgttttgtcttcttct

SEQ ID NO: 243334 - DNA, 21 bp, Artificial sequence
  SiRNA target sequence
atgtcgttttgtcttcttctt

SEQ ID NO: 243335 - DNA, 21 bp, Artificial sequence
  SiRNA target sequence
tgtcgttttgtcttcttcttt

SEQ ID NO: 243336 - DNA, 21 bp, Artificial sequence
  SiRNA target sequence
gtcgttttgtcttcttcttta

SEQ ID NO: 243337 - DNA, 21 bp, Artificial sequence
  SiRNA target sequence
tcgttttgtcttcttctttat

SEQ ID NO: 243338 - DNA, 21 bp, Artificial sequence
  SiRNA target sequence
cgttttgtcttcttctttatt

SEQ ID NO: 243339 - DNA, 21 bp, Artificial sequence
  SiRNA target sequence
gttttgtcttcttctttattt

SEQ ID NO: 243340 - DNA, 21 bp, Artificial sequence
  SiRNA target sequence
ttttgtcttcttctttattta

SEQ ID NO: 243341 - DNA, 21 bp, Artificial sequence
  SiRNA target sequence
tttgtcttcttctttatttat

SEQ ID NO: 243342 - DNA, 21 bp, Artificial sequence
  SiRNA target sequence
ttgtcttcttctttatttata

SEQ ID NO: 243343 - DNA, 21 bp, Artificial sequence
  SiRNA target sequence
tgtcttcttctttatttatag

SEQ ID NO: 243344 - DNA, 21 bp, Artificial sequence
  SiRNA target sequence
gtcttcttctttatttatagt

SEQ ID NO: 243345 - DNA, 21 bp, Artificial sequence
  SiRNA target sequence
tcttcttctttatttatagtt

SEQ ID NO: 243346 - DNA, 21 bp, Artificial sequence
  SiRNA target sequence
cttcttctttatttatagttt

SEQ ID NO: 243347 - DNA, 21 bp, Artificial sequence
  SiRNA target sequence
ttcttctttatttatagtttc

SEQ ID NO: 243348 - DNA, 21 bp, Artificial sequence
  SiRNA target sequence
tcttctttatttatagtttcc

SEQ ID NO: 243349 - DNA, 21 bp, Artificial sequence
  SiRNA target sequence
cttctttatttatagtttcct

SEQ ID NO: 243350 - DNA, 21 bp, Artificial sequence
  SiRNA target sequence
ttctttatttatagtttcctt

SEQ ID NO: 243351 - DNA, 21 bp, Artificial sequence
  SiRNA target sequence
tctttatttatagtttccttt

SEQ ID NO: 243352 - DNA, 21 bp, Artificial sequence
  SiRNA target sequence
ctttatttatagtttccttta

SEQ ID NO: 243353 - DNA, 21 bp, Artificial sequence
  SiRNA target sequence
tttatttatagtttcctttat

SEQ ID NO: 243354 - DNA, 21 bp, Artificial sequence
  SiRNA target sequence
ttatttatagtttcctttatt

SEQ ID NO: 243355 - DNA, 21 bp, Artificial sequence
  SiRNA target sequence
tatttatagtttcctttattt

SEQ ID NO: 243356 - DNA, 21 bp, Artificial sequence
  SiRNA target sequence
atttatagtttcctttatttc

SEQ ID NO: 243357 - DNA, 21 bp, Artificial sequence
  SiRNA target sequence
tttatagtttcctttatttct

SEQ ID NO: 243358 - DNA, 21 bp, Artificial sequence
  SiRNA target sequence
ttatagtttcctttatttctt

SEQ ID NO: 243359 - DNA, 21 bp, Artificial sequence
  SiRNA target sequence
tatagtttcctttatttcttt

SEQ ID NO: 243360 - DNA, 21 bp, Artificial sequence
  SiRNA target sequence
atagtttcctttatttcttta

SEQ ID NO: 243361 - DNA, 21 bp, Artificial sequence
  SiRNA target sequence
tagtttcctttatttctttag

SEQ ID NO: 243362 - DNA, 21 bp, Artificial sequence
  SiRNA target sequence
agtttcctttatttctttagt

SEQ ID NO: 243363 - DNA, 21 bp, Artificial sequence
  SiRNA target sequence
gtttcctttatttctttagtt

SEQ ID NO: 243364 - DNA, 21 bp, Artificial sequence
  SiRNA target sequence
tttcctttatttctttagttt

SEQ ID NO: 243365 - DNA, 21 bp, Artificial sequence
  SiRNA target sequence
ttcctttatttctttagtttt

SEQ ID NO: 243366 - DNA, 21 bp, Artificial sequence
  SiRNA target sequence
tcctttatttctttagtttta

SEQ ID NO: 243367 - DNA, 21 bp, Artificial sequence
  SiRNA target sequence
cctttatttctttagttttaa

SEQ ID NO: 243368 - DNA, 21 bp, Artificial sequence
  SiRNA target sequence
ctttatttctttagttttaag

SEQ ID NO: 243369 - DNA, 21 bp, Artificial sequence
  SiRNA target sequence
tttatttctttagttttaaga

SEQ ID NO: 243370 - DNA, 21 bp, Artificial sequence
  SiRNA target sequence
ttatttctttagttttaagag

SEQ ID NO: 243371 - DNA, 21 bp, Artificial sequence
  SiRNA target sequence
tatttctttagttttaagagg

SEQ ID NO: 243372 - DNA, 21 bp, Artificial sequence
  SiRNA target sequence
atttctttagttttaagagga

SEQ ID NO: 243373 - DNA, 21 bp, Artificial sequence
  SiRNA target sequence
tttctttagttttaagaggaa

SEQ ID NO: 243374 - DNA, 21 bp, Artificial sequence
  SiRNA target sequence
ttctttagttttaagaggaat

SEQ ID NO: 243375 - DNA, 21 bp, Artificial sequence
  SiRNA target sequence
tctttagttttaagaggaata

SEQ ID NO: 243376 - DNA, 21 bp, Artificial sequence
  SiRNA target sequence
ctttagttttaagaggaatat

SEQ ID NO: 243377 - DNA, 21 bp, Artificial sequence
  SiRNA target sequence
tttagttttaagaggaatata

SEQ ID NO: 243378 - DNA, 21 bp, Artificial sequence
  SiRNA target sequence
ttagttttaagaggaatataa

SEQ ID NO: 243379 - DNA, 21 bp, Artificial sequence
  SiRNA target sequence
tagttttaagaggaatataac

SEQ ID NO: 243380 - DNA, 21 bp, Artificial sequence
  SiRNA target sequence
agttttaagaggaatataact

SEQ ID NO: 243381 - DNA, 21 bp, Artificial sequence
  SiRNA target sequence
gttttaagaggaatataactt

SEQ ID NO: 243382 - DNA, 21 bp, Artificial sequence
  SiRNA target sequence
ttttaagaggaatataacttt

SEQ ID NO: 243383 - DNA, 21 bp, Artificial sequence
  SiRNA target sequence
tttaagaggaatataactttt

SEQ ID NO: 243384 - DNA, 21 bp, Artificial sequence
  SiRNA target sequence
ttaagaggaatataacttttt

SEQ ID NO: 243385 - DNA, 21 bp, Artificial sequence
  SiRNA target sequence
taagaggaatataacttttta

SEQ ID NO: 243386 - DNA, 21 bp, Artificial sequence
  SiRNA target sequence
aagaggaatataactttttaa

SEQ ID NO: 243387 - DNA, 21 bp, Artificial sequence
  SiRNA target sequence
agaggaatataactttttaaa

SEQ ID NO: 243388 - DNA, 21 bp, Artificial sequence
  SiRNA target sequence
gaggaatataactttttaaaa

SEQ ID NO: 243389 - DNA, 21 bp, Artificial sequence
  SiRNA target sequence
aggaatataactttttaaaaa

SEQ ID NO: 243390 - DNA, 21 bp, Artificial sequence
  SiRNA target sequence
ggaatataactttttaaaaag

SEQ ID NO: 243391 - DNA, 21 bp, Artificial sequence
  SiRNA target sequence
gaatataactttttaaaaagt

SEQ ID NO: 243392 - DNA, 21 bp, Artificial sequence
  SiRNA target sequence
aatataactttttaaaaagta

SEQ ID NO: 243393 - DNA, 21 bp, Artificial sequence
  SiRNA target sequence
atataactttttaaaaagtaa

SEQ ID NO: 243394 - DNA, 21 bp, Artificial sequence
  SiRNA target sequence
tataactttttaaaaagtaaa

SEQ ID NO: 243395 - DNA, 21 bp, Artificial sequence
  SiRNA target sequence
ataactttttaaaaagtaaat

SEQ ID NO: 243396 - DNA, 21 bp, Artificial sequence
  SiRNA target sequence
taactttttaaaaagtaaatt

SEQ ID NO: 243397 - DNA, 21 bp, Artificial sequence
  SiRNA target sequence
aactttttaaaaagtaaatta

SEQ ID NO: 243398 - DNA, 21 bp, Artificial sequence
  SiRNA target sequence
actttttaaaaagtaaattaa

SEQ ID NO: 243399 - DNA, 21 bp, Artificial sequence
  SiRNA target sequence
ctttttaaaaagtaaattaat

SEQ ID NO: 243400 - DNA, 21 bp, Artificial sequence
  SiRNA target sequence
tttttaaaaagtaaattaatg

SEQ ID NO: 243401 - DNA, 21 bp, Artificial sequence
  SiRNA target sequence
ttttaaaaagtaaattaatgt

SEQ ID NO: 243402 - DNA, 21 bp, Artificial sequence
  SiRNA target sequence
tttaaaaagtaaattaatgta

SEQ ID NO: 243403 - DNA, 21 bp, Artificial sequence
  SiRNA target sequence
ttaaaaagtaaattaatgtag

SEQ ID NO: 243404 - DNA, 21 bp, Artificial sequence
  SiRNA target sequence
taaaaagtaaattaatgtagt

SEQ ID NO: 243405 - DNA, 21 bp, Artificial sequence
  SiRNA target sequence
aaaaagtaaattaatgtagtt

SEQ ID NO: 243406 - DNA, 21 bp, Artificial sequence
  SiRNA target sequence
aaaagtaaattaatgtagtta

SEQ ID NO: 243407 - DNA, 21 bp, Artificial sequence
  SiRNA target sequence
aaagtaaattaatgtagttac

SEQ ID NO: 243408 - DNA, 21 bp, Artificial sequence
  SiRNA target sequence
aagtaaattaatgtagttaca

SEQ ID NO: 243409 - DNA, 21 bp, Artificial sequence
  SiRNA target sequence
agtaaattaatgtagttacaa

SEQ ID NO: 243410 - DNA, 21 bp, Artificial sequence
  SiRNA target sequence
gtaaattaatgtagttacaaa

SEQ ID NO: 243411 - DNA, 21 bp, Artificial sequence
  SiRNA target sequence
taaattaatgtagttacaaaa

SEQ ID NO: 243412 - DNA, 21 bp, Artificial sequence
  SiRNA target sequence
aaattaatgtagttacaaaag

SEQ ID NO: 243413 - DNA, 21 bp, Artificial sequence
  SiRNA target sequence
aattaatgtagttacaaaaga

SEQ ID NO: 243414 - DNA, 21 bp, Artificial sequence
  SiRNA target sequence
attaatgtagttacaaaagac

SEQ ID NO: 243415 - DNA, 21 bp, Artificial sequence
  SiRNA target sequence
ttaatgtagttacaaaagaca

SEQ ID NO: 243416 - DNA, 21 bp, Artificial sequence
  SiRNA target sequence
taatgtagttacaaaagacaa

SEQ ID NO: 243417 - DNA, 21 bp, Artificial sequence
  SiRNA target sequence
aatgtagttacaaaagacaag

SEQ ID NO: 243418 - DNA, 21 bp, Artificial sequence
  SiRNA target sequence
atgtagttacaaaagacaaga

SEQ ID NO: 243419 - DNA, 21 bp, Artificial sequence
  SiRNA target sequence
tgtagttacaaaagacaagat

SEQ ID NO: 243420 - DNA, 21 bp, Artificial sequence
  SiRNA target sequence
gtagttacaaaagacaagatc

SEQ ID NO: 243421 - DNA, 21 bp, Artificial sequence
  SiRNA target sequence
tagttacaaaagacaagatca

SEQ ID NO: 243422 - DNA, 21 bp, Artificial sequence
  SiRNA target sequence
agttacaaaagacaagatcaa

SEQ ID NO: 243423 - DNA, 21 bp, Artificial sequence
  SiRNA target sequence
gttacaaaagacaagatcaaa

SEQ ID NO: 243424 - DNA, 21 bp, Artificial sequence
  SiRNA target sequence
ttacaaaagacaagatcaaaa

SEQ ID NO: 243425 - DNA, 21 bp, Artificial sequence
  SiRNA target sequence
tacaaaagacaagatcaaaaa

SEQ ID NO: 243426 - DNA, 21 bp, Artificial sequence
  SiRNA target sequence
acaaaagacaagatcaaaaaa

SEQ ID NO: 243427 - DNA, 21 bp, Artificial sequence
  SiRNA target sequence
caaaagacaagatcaaaaaaa

SEQ ID NO: 243428 - DNA, 21 bp, Artificial sequence
  SiRNA target sequence
aaaagacaagatcaaaaaaaa

SEQ ID NO: 243429 - DNA, 21 bp, Artificial sequence
  SiRNA target sequence
aaagacaagatcaaaaaaaac

SEQ ID NO: 243430 - DNA, 21 bp, Artificial sequence
  SiRNA target sequence
aagacaagatcaaaaaaaaca

SEQ ID NO: 243431 - DNA, 21 bp, Artificial sequence
  SiRNA target sequence
agacaagatcaaaaaaaacaa

SEQ ID NO: 243432 - DNA, 21 bp, Artificial sequence
  SiRNA target sequence
gacaagatcaaaaaaaacaaa

SEQ ID NO: 243433 - DNA, 21 bp, Artificial sequence
  SiRNA target sequence
acaagatcaaaaaaaacaaac

SEQ ID NO: 243434 - DNA, 21 bp, Artificial sequence
  SiRNA target sequence
caagatcaaaaaaaacaaact

SEQ ID NO: 243435 - DNA, 21 bp, Artificial sequence
  SiRNA target sequence
aagatcaaaaaaaacaaacta

SEQ ID NO: 243436 - DNA, 21 bp, Artificial sequence
  SiRNA target sequence
agatcaaaaaaaacaaactac

SEQ ID NO: 243437 - DNA, 21 bp, Artificial sequence
  SiRNA target sequence
gatcaaaaaaaacaaactact

SEQ ID NO: 243438 - DNA, 21 bp, Artificial sequence
  SiRNA target sequence
atcaaaaaaaacaaactacta

SEQ ID NO: 243439 - DNA, 21 bp, Artificial sequence
  SiRNA target sequence
tcaaaaaaaacaaactactac

SEQ ID NO: 243440 - DNA, 21 bp, Artificial sequence
  SiRNA target sequence
caaaaaaaacaaactactacc

SEQ ID NO: 243441 - DNA, 21 bp, Artificial sequence
  SiRNA target sequence
aaaaaaaacaaactactaccg

SEQ ID NO: 243442 - DNA, 21 bp, Artificial sequence
  SiRNA target sequence
aaaaaaacaaactactaccgt

SEQ ID NO: 243443 - DNA, 21 bp, Artificial sequence
  SiRNA target sequence
aaaaaacaaactactaccgtc

SEQ ID NO: 243444 - DNA, 21 bp, Artificial sequence
  SiRNA target sequence
aaaaacaaactactaccgtca

SEQ ID NO: 243445 - DNA, 21 bp, Artificial sequence
  SiRNA target sequence
aaaacaaactactaccgtcaa

SEQ ID NO: 243446 - DNA, 21 bp, Artificial sequence
  SiRNA target sequence
aaacaaactactaccgtcaat

SEQ ID NO: 243447 - DNA, 21 bp, Artificial sequence
  SiRNA target sequence
aacaaactactaccgtcaatt

SEQ ID NO: 243448 - DNA, 21 bp, Artificial sequence
  SiRNA target sequence
acaaactactaccgtcaattt

SEQ ID NO: 243449 - DNA, 21 bp, Artificial sequence
  SiRNA target sequence
caaactactaccgtcaatttt

SEQ ID NO: 243450 - DNA, 21 bp, Artificial sequence
  SiRNA target sequence
aaactactaccgtcaatttta

SEQ ID NO: 243451 - DNA, 21 bp, Artificial sequence
  SiRNA target sequence
aactactaccgtcaattttat

SEQ ID NO: 243452 - DNA, 21 bp, Artificial sequence
  SiRNA target sequence
actactaccgtcaattttatc

SEQ ID NO: 243453 - DNA, 21 bp, Artificial sequence
  SiRNA target sequence
ctactaccgtcaattttatca

SEQ ID NO: 243454 - DNA, 21 bp, Artificial sequence
  SiRNA target sequence
tactaccgtcaattttatcat

SEQ ID NO: 243455 - DNA, 21 bp, Artificial sequence
  SiRNA target sequence
actaccgtcaattttatcatg

SEQ ID NO: 243456 - DNA, 21 bp, Artificial sequence
  SiRNA target sequence
ctaccgtcaattttatcatgc

SEQ ID NO: 243457 - DNA, 21 bp, Artificial sequence
  SiRNA target sequence
taccgtcaattttatcatgca

SEQ ID NO: 243458 - DNA, 21 bp, Artificial sequence
  SiRNA target sequence
accgtcaattttatcatgcaa

SEQ ID NO: 243459 - DNA, 21 bp, Artificial sequence
  SiRNA target sequence
ccgtcaattttatcatgcaaa

SEQ ID NO: 243460 - DNA, 21 bp, Artificial sequence
  SiRNA target sequence
cgtcaattttatcatgcaaac

SEQ ID NO: 243461 - DNA, 21 bp, Artificial sequence
  SiRNA target sequence
gtcaattttatcatgcaaacc

SEQ ID NO: 243462 - DNA, 21 bp, Artificial sequence
  SiRNA target sequence
tcaattttatcatgcaaacct

SEQ ID NO: 243463 - DNA, 21 bp, Artificial sequence
  SiRNA target sequence
caattttatcatgcaaacctg

SEQ ID NO: 243464 - DNA, 21 bp, Artificial sequence
  SiRNA target sequence
aattttatcatgcaaacctgc

SEQ ID NO: 243465 - DNA, 21 bp, Artificial sequence
  SiRNA target sequence
attttatcatgcaaacctgca

SEQ ID NO: 243466 - DNA, 21 bp, Artificial sequence
  SiRNA target sequence
ttttatcatgcaaacctgcag

SEQ ID NO: 243467 - DNA, 21 bp, Artificial sequence
  SiRNA target sequence
tttatcatgcaaacctgcagg

SEQ ID NO: 243468 - DNA, 21 bp, Artificial sequence
  SiRNA target sequence
ttatcatgcaaacctgcagga

SEQ ID NO: 243469 - DNA, 21 bp, Artificial sequence
  SiRNA target sequence
tatcatgcaaacctgcaggaa

SEQ ID NO: 243470 - DNA, 21 bp, Artificial sequence
  SiRNA target sequence
atcatgcaaacctgcaggaag

SEQ ID NO: 243471 - DNA, 21 bp, Artificial sequence
  SiRNA target sequence
tcatgcaaacctgcaggaagt

SEQ ID NO: 243472 - DNA, 21 bp, Artificial sequence
  SiRNA target sequence
catgcaaacctgcaggaagta

SEQ ID NO: 243473 - DNA, 21 bp, Artificial sequence
  SiRNA target sequence
atgcaaacctgcaggaagtat

SEQ ID NO: 243474 - DNA, 21 bp, Artificial sequence
  SiRNA target sequence
tgcaaacctgcaggaagtata

SEQ ID NO: 243475 - DNA, 21 bp, Artificial sequence
  SiRNA target sequence
gcaaacctgcaggaagtatat

SEQ ID NO: 243476 - DNA, 21 bp, Artificial sequence
  SiRNA target sequence
caaacctgcaggaagtatatt

SEQ ID NO: 243477 - DNA, 21 bp, Artificial sequence
  SiRNA target sequence
aaacctgcaggaagtatattt

SEQ ID NO: 243478 - DNA, 21 bp, Artificial sequence
  SiRNA target sequence
aacctgcaggaagtatatttg

SEQ ID NO: 243479 - DNA, 21 bp, Artificial sequence
  SiRNA target sequence
acctgcaggaagtatatttgc

SEQ ID NO: 243480 - DNA, 21 bp, Artificial sequence
  SiRNA target sequence
cctgcaggaagtatatttgct

SEQ ID NO: 243481 - DNA, 21 bp, Artificial sequence
  SiRNA target sequence
ctgcaggaagtatatttgcta

SEQ ID NO: 243482 - DNA, 21 bp, Artificial sequence
  SiRNA target sequence
tgcaggaagtatatttgctaa

SEQ ID NO: 243483 - DNA, 21 bp, Artificial sequence
  SiRNA target sequence
gcaggaagtatatttgctaat

SEQ ID NO: 243484 - DNA, 21 bp, Artificial sequence
  SiRNA target sequence
caggaagtatatttgctaatt

SEQ ID NO: 243485 - DNA, 21 bp, Artificial sequence
  SiRNA target sequence
aggaagtatatttgctaattc

SEQ ID NO: 243486 - DNA, 21 bp, Artificial sequence
  SiRNA target sequence
ggaagtatatttgctaattca

SEQ ID NO: 243487 - DNA, 21 bp, Artificial sequence
  SiRNA target sequence
gaagtatatttgctaattcat

SEQ ID NO: 243488 - DNA, 21 bp, Artificial sequence
  SiRNA target sequence
aagtatatttgctaattcatc

SEQ ID NO: 243489 - DNA, 21 bp, Artificial sequence
  SiRNA target sequence
agtatatttgctaattcatct

SEQ ID NO: 243490 - DNA, 21 bp, Artificial sequence
  SiRNA target sequence
gtatatttgctaattcatctt

SEQ ID NO: 243491 - DNA, 21 bp, Artificial sequence
  SiRNA target sequence
tatatttgctaattcatcttt

SEQ ID NO: 243492 - DNA, 21 bp, Artificial sequence
  SiRNA target sequence
atatttgctaattcatctttt

SEQ ID NO: 243493 - DNA, 21 bp, Artificial sequence
  SiRNA target sequence
tatttgctaattcatctttta

SEQ ID NO: 243494 - DNA, 21 bp, Artificial sequence
  SiRNA target sequence
atttgctaattcatcttttat

SEQ ID NO: 243495 - DNA, 21 bp, Artificial sequence
  SiRNA target sequence
tttgctaattcatcttttata

SEQ ID NO: 243496 - DNA, 21 bp, Artificial sequence
  SiRNA target sequence
ttgctaattcatcttttatat

SEQ ID NO: 243497 - DNA, 21 bp, Artificial sequence
  SiRNA target sequence
tgctaattcatcttttatata

SEQ ID NO: 243498 - DNA, 21 bp, Artificial sequence
  SiRNA target sequence
gctaattcatcttttatataa

SEQ ID NO: 243499 - DNA, 21 bp, Artificial sequence
  SiRNA target sequence
ctaattcatcttttatataaa

SEQ ID NO: 243500 - DNA, 21 bp, Artificial sequence
  SiRNA target sequence
taattcatcttttatataaat

SEQ ID NO: 243501 - DNA, 21 bp, Artificial sequence
  SiRNA target sequence
aattcatcttttatataaata

SEQ ID NO: 243502 - DNA, 21 bp, Artificial sequence
  SiRNA target sequence
attcatcttttatataaataa

SEQ ID NO: 243503 - DNA, 21 bp, Artificial sequence
  SiRNA target sequence
ttcatcttttatataaataaa

SEQ ID NO: 243504 - DNA, 21 bp, Artificial sequence
  SiRNA target sequence
tcatcttttatataaataaaa

SEQ ID NO: 243505 - DNA, 21 bp, Artificial sequence
  SiRNA target sequence
catcttttatataaataaaag

SEQ ID NO: 243506 - DNA, 21 bp, Artificial sequence
  SiRNA target sequence
atcttttatataaataaaagc

SEQ ID NO: 243507 - DNA, 21 bp, Artificial sequence
  SiRNA target sequence
tcttttatataaataaaagct

SEQ ID NO: 243508 - DNA, 21 bp, Artificial sequence
  SiRNA target sequence
cttttatataaataaaagcta

SEQ ID NO: 243509 - DNA, 21 bp, Artificial sequence
  SiRNA target sequence
ttttatataaataaaagctac

SEQ ID NO: 243510 - DNA, 21 bp, Artificial sequence
  SiRNA target sequence
tttatataaataaaagctaca

SEQ ID NO: 243511 - DNA, 21 bp, Artificial sequence
  SiRNA target sequence
ttatataaataaaagctacag

SEQ ID NO: 243512 - DNA, 21 bp, Artificial sequence
  SiRNA target sequence
tatataaataaaagctacaga

SEQ ID NO: 243513 - DNA, 21 bp, Artificial sequence
  SiRNA target sequence
atataaataaaagctacagaa

SEQ ID NO: 243514 - DNA, 21 bp, Artificial sequence
  SiRNA target sequence
tataaataaaagctacagaaa

SEQ ID NO: 243515 - DNA, 21 bp, Artificial sequence
  SiRNA target sequence
ataaataaaagctacagaaat

SEQ ID NO: 243516 - DNA, 21 bp, Artificial sequence
  SiRNA target sequence
taaataaaagctacagaaata

SEQ ID NO: 243517 - DNA, 21 bp, Artificial sequence
  SiRNA target sequence
aaataaaagctacagaaataa

SEQ ID NO: 243518 - DNA, 21 bp, Artificial sequence
  SiRNA target sequence
aataaaagctacagaaataat

SEQ ID NO: 243519 - DNA, 21 bp, Artificial sequence
  SiRNA target sequence
ataaaagctacagaaataatc

SEQ ID NO: 243520 - DNA, 21 bp, Artificial sequence
  SiRNA target sequence
taaaagctacagaaataatca

SEQ ID NO: 243521 - DNA, 21 bp, Artificial sequence
  SiRNA target sequence
aaaagctacagaaataatcat

SEQ ID NO: 243522 - DNA, 21 bp, Artificial sequence
  SiRNA target sequence
aaagctacagaaataatcatt

SEQ ID NO: 243523 - DNA, 21 bp, Artificial sequence
  SiRNA target sequence
aagctacagaaataatcattg

SEQ ID NO: 243524 - DNA, 21 bp, Artificial sequence
  SiRNA target sequence
agctacagaaataatcattga

SEQ ID NO: 243525 - DNA, 21 bp, Artificial sequence
  SiRNA target sequence
gctacagaaataatcattgaa

SEQ ID NO: 243526 - DNA, 21 bp, Artificial sequence
  SiRNA target sequence
ctacagaaataatcattgaaa

SEQ ID NO: 243527 - DNA, 21 bp, Artificial sequence
  SiRNA target sequence
tacagaaataatcattgaaat

SEQ ID NO: 243528 - DNA, 21 bp, Artificial sequence
  SiRNA target sequence
acagaaataatcattgaaatg

SEQ ID NO: 243529 - DNA, 21 bp, Artificial sequence
  SiRNA target sequence
cagaaataatcattgaaatgg

SEQ ID NO: 243530 - DNA, 21 bp, Artificial sequence
  SiRNA target sequence
agaaataatcattgaaatggc

SEQ ID NO: 243531 - DNA, 21 bp, Artificial sequence
  SiRNA target sequence
gaaataatcattgaaatggcg

SEQ ID NO: 243532 - DNA, 21 bp, Artificial sequence
  SiRNA target sequence
aaataatcattgaaatggcgg

SEQ ID NO: 243533 - DNA, 21 bp, Artificial sequence
  SiRNA target sequence
aataatcattgaaatggcggt

SEQ ID NO: 243534 - DNA, 21 bp, Artificial sequence
  SiRNA target sequence
ataatcattgaaatggcggtg

SEQ ID NO: 243535 - DNA, 21 bp, Artificial sequence
  SiRNA target sequence
taatcattgaaatggcggtga

SEQ ID NO: 243536 - DNA, 21 bp, Artificial sequence
  SiRNA target sequence
aatcattgaaatggcggtgat

SEQ ID NO: 243537 - DNA, 21 bp, Artificial sequence
  SiRNA target sequence
atcattgaaatggcggtgatt

SEQ ID NO: 243538 - DNA, 21 bp, Artificial sequence
  SiRNA target sequence
tcattgaaatggcggtgattg

SEQ ID NO: 243539 - DNA, 21 bp, Artificial sequence
  SiRNA target sequence
cattgaaatggcggtgattgt

SEQ ID NO: 243540 - DNA, 21 bp, Artificial sequence
  SiRNA target sequence
attgaaatggcggtgattgtg

SEQ ID NO: 243541 - DNA, 21 bp, Artificial sequence
  SiRNA target sequence
ttgaaatggcggtgattgtgg

SEQ ID NO: 243542 - DNA, 21 bp, Artificial sequence
  SiRNA target sequence
tgaaatggcggtgattgtgga

SEQ ID NO: 243543 - DNA, 21 bp, Artificial sequence
  SiRNA target sequence
gaaatggcggtgattgtggaa

SEQ ID NO: 243544 - DNA, 21 bp, Artificial sequence
  SiRNA target sequence
aaatggcggtgattgtggaaa

SEQ ID NO: 243545 - DNA, 21 bp, Artificial sequence
  SiRNA target sequence
aatggcggtgattgtggaaaa

SEQ ID NO: 243546 - DNA, 21 bp, Artificial sequence
  SiRNA target sequence
atggcggtgattgtggaaaaa

SEQ ID NO: 243547 - DNA, 21 bp, Artificial sequence
  SiRNA target sequence
tggcggtgattgtggaaaaat

SEQ ID NO: 243548 - DNA, 21 bp, Artificial sequence
  SiRNA target sequence
ggcggtgattgtggaaaaatt

SEQ ID NO: 243549 - DNA, 21 bp, Artificial sequence
  SiRNA target sequence
gcggtgattgtggaaaaatta

SEQ ID NO: 243550 - DNA, 21 bp, Artificial sequence
  SiRNA target sequence
cggtgattgtggaaaaattag

SEQ ID NO: 243551 - DNA, 21 bp, Artificial sequence
  SiRNA target sequence
ggtgattgtggaaaaattagg

SEQ ID NO: 243552 - DNA, 21 bp, Artificial sequence
  SiRNA target sequence
gtgattgtggaaaaattagga

SEQ ID NO: 243553 - DNA, 21 bp, Artificial sequence
  SiRNA target sequence
tgattgtggaaaaattaggaa

SEQ ID NO: 243554 - DNA, 21 bp, Artificial sequence
  SiRNA target sequence
gattgtggaaaaattaggaac

SEQ ID NO: 243555 - DNA, 21 bp, Artificial sequence
  SiRNA target sequence
attgtggaaaaattaggaaca

SEQ ID NO: 243556 - DNA, 21 bp, Artificial sequence
  SiRNA target sequence
ttgtggaaaaattaggaacaa

SEQ ID NO: 243557 - DNA, 21 bp, Artificial sequence
  SiRNA target sequence
tgtggaaaaattaggaacaat

SEQ ID NO: 243558 - DNA, 21 bp, Artificial sequence
  SiRNA target sequence
gtggaaaaattaggaacaatt

SEQ ID NO: 243559 - DNA, 21 bp, Artificial sequence
  SiRNA target sequence
tggaaaaattaggaacaattt

SEQ ID NO: 243560 - DNA, 21 bp, Artificial sequence
  SiRNA target sequence
ggaaaaattaggaacaatttc

SEQ ID NO: 243561 - DNA, 21 bp, Artificial sequence
  SiRNA target sequence
gaaaaattaggaacaatttct

SEQ ID NO: 243562 - DNA, 21 bp, Artificial sequence
  SiRNA target sequence
aaaaattaggaacaatttctt

SEQ ID NO: 243563 - DNA, 21 bp, Artificial sequence
  SiRNA target sequence
aaaattaggaacaatttcttt

SEQ ID NO: 243564 - DNA, 21 bp, Artificial sequence
  SiRNA target sequence
aaattaggaacaatttctttc

SEQ ID NO: 243565 - DNA, 21 bp, Artificial sequence
  SiRNA target sequence
aattaggaacaatttctttca

SEQ ID NO: 243566 - DNA, 21 bp, Artificial sequence
  SiRNA target sequence
attaggaacaatttctttcat

SEQ ID NO: 243567 - DNA, 21 bp, Artificial sequence
  SiRNA target sequence
ttaggaacaatttctttcatt

SEQ ID NO: 243568 - DNA, 21 bp, Artificial sequence
  SiRNA target sequence
taggaacaatttctttcattt

SEQ ID NO: 243569 - DNA, 21 bp, Artificial sequence
  SiRNA target sequence
aggaacaatttctttcatttc

SEQ ID NO: 243570 - DNA, 21 bp, Artificial sequence
  SiRNA target sequence
ggaacaatttctttcatttca

SEQ ID NO: 243571 - DNA, 21 bp, Artificial sequence
  SiRNA target sequence
gaacaatttctttcatttcat

SEQ ID NO: 243572 - DNA, 21 bp, Artificial sequence
  SiRNA target sequence
aacaatttctttcatttcatc

SEQ ID NO: 243573 - DNA, 21 bp, Artificial sequence
  SiRNA target sequence
acaatttctttcatttcatct

SEQ ID NO: 243574 - DNA, 21 bp, Artificial sequence
  SiRNA target sequence
caatttctttcatttcatctt

SEQ ID NO: 243575 - DNA, 21 bp, Artificial sequence
  SiRNA target sequence
aatttctttcatttcatcttc

SEQ ID NO: 243576 - DNA, 21 bp, Artificial sequence
  SiRNA target sequence
atttctttcatttcatcttct

SEQ ID NO: 243577 - DNA, 21 bp, Artificial sequence
  SiRNA target sequence
tttctttcatttcatcttctg

SEQ ID NO: 243578 - DNA, 21 bp, Artificial sequence
  SiRNA target sequence
ttctttcatttcatcttctgt

SEQ ID NO: 243579 - DNA, 21 bp, Artificial sequence
  SiRNA target sequence
tctttcatttcatcttctgta

SEQ ID NO: 243580 - DNA, 21 bp, Artificial sequence
  SiRNA target sequence
ctttcatttcatcttctgtac

SEQ ID NO: 243581 - DNA, 21 bp, Artificial sequence
  SiRNA target sequence
tttcatttcatcttctgtaca

SEQ ID NO: 243582 - DNA, 21 bp, Artificial sequence
  SiRNA target sequence
ttcatttcatcttctgtacaa

SEQ ID NO: 243583 - DNA, 21 bp, Artificial sequence
  SiRNA target sequence
tcatttcatcttctgtacaag

SEQ ID NO: 243584 - DNA, 21 bp, Artificial sequence
  SiRNA target sequence
catttcatcttctgtacaagc

SEQ ID NO: 243585 - DNA, 21 bp, Artificial sequence
  SiRNA target sequence
atttcatcttctgtacaagca

SEQ ID NO: 243586 - DNA, 21 bp, Artificial sequence
  SiRNA target sequence
tttcatcttctgtacaagcat

SEQ ID NO: 243587 - DNA, 21 bp, Artificial sequence
  SiRNA target sequence
ttcatcttctgtacaagcatg

SEQ ID NO: 243588 - DNA, 21 bp, Artificial sequence
  SiRNA target sequence
tcatcttctgtacaagcatga

SEQ ID NO: 243589 - DNA, 21 bp, Artificial sequence
  SiRNA target sequence
catcttctgtacaagcatgat

SEQ ID NO: 243590 - DNA, 21 bp, Artificial sequence
  SiRNA target sequence
atcttctgtacaagcatgatt

SEQ ID NO: 243591 - DNA, 21 bp, Artificial sequence
  SiRNA target sequence
tcttctgtacaagcatgattg

SEQ ID NO: 243592 - DNA, 21 bp, Artificial sequence
  SiRNA target sequence
cttctgtacaagcatgattgg

SEQ ID NO: 243593 - DNA, 21 bp, Artificial sequence
  SiRNA target sequence
ttctgtacaagcatgattggc

SEQ ID NO: 243594 - DNA, 21 bp, Artificial sequence
  SiRNA target sequence
tctgtacaagcatgattggct

SEQ ID NO: 243595 - DNA, 21 bp, Artificial sequence
  SiRNA target sequence
ctgtacaagcatgattggcta

SEQ ID NO: 243596 - DNA, 21 bp, Artificial sequence
  SiRNA target sequence
tgtacaagcatgattggctaa

SEQ ID NO: 243597 - DNA, 21 bp, Artificial sequence
  SiRNA target sequence
gtacaagcatgattggctaac

SEQ ID NO: 243598 - DNA, 21 bp, Artificial sequence
  SiRNA target sequence
tacaagcatgattggctaacg

SEQ ID NO: 243599 - DNA, 21 bp, Artificial sequence
  SiRNA target sequence
acaagcatgattggctaacgc

SEQ ID NO: 243600 - DNA, 21 bp, Artificial sequence
  SiRNA target sequence
caagcatgattggctaacgca

SEQ ID NO: 243601 - DNA, 21 bp, Artificial sequence
  SiRNA target sequence
aagcatgattggctaacgcat

SEQ ID NO: 243602 - DNA, 21 bp, Artificial sequence
  SiRNA target sequence
agcatgattggctaacgcata

SEQ ID NO: 243603 - DNA, 21 bp, Artificial sequence
  SiRNA target sequence
gcatgattggctaacgcatat

SEQ ID NO: 243604 - DNA, 21 bp, Artificial sequence
  SiRNA target sequence
catgattggctaacgcatata

SEQ ID NO: 243605 - DNA, 21 bp, Artificial sequence
  SiRNA target sequence
atgattggctaacgcatataa

SEQ ID NO: 243606 - DNA, 21 bp, Artificial sequence
  SiRNA target sequence
tgattggctaacgcatataaa

SEQ ID NO: 243607 - DNA, 21 bp, Artificial sequence
  SiRNA target sequence
gattggctaacgcatataaag

SEQ ID NO: 243608 - DNA, 21 bp, Artificial sequence
  SiRNA target sequence
attggctaacgcatataaagc

SEQ ID NO: 243609 - DNA, 21 bp, Artificial sequence
  SiRNA target sequence
ttggctaacgcatataaagca

SEQ ID NO: 243610 - DNA, 21 bp, Artificial sequence
  SiRNA target sequence
tggctaacgcatataaagcaa

SEQ ID NO: 243611 - DNA, 21 bp, Artificial sequence
  SiRNA target sequence
ggctaacgcatataaagcaaa

SEQ ID NO: 243612 - DNA, 21 bp, Artificial sequence
  SiRNA target sequence
gctaacgcatataaagcaaaa

SEQ ID NO: 243613 - DNA, 21 bp, Artificial sequence
  SiRNA target sequence
ctaacgcatataaagcaaaac

SEQ ID NO: 243614 - DNA, 21 bp, Artificial sequence
  SiRNA target sequence
taacgcatataaagcaaaacc

SEQ ID NO: 243615 - DNA, 21 bp, Artificial sequence
  SiRNA target sequence
aacgcatataaagcaaaacca

SEQ ID NO: 243616 - DNA, 21 bp, Artificial sequence
  SiRNA target sequence
acgcatataaagcaaaaccaa

SEQ ID NO: 243617 - DNA, 21 bp, Artificial sequence
  SiRNA target sequence
cgcatataaagcaaaaccaac

SEQ ID NO: 243618 - DNA, 21 bp, Artificial sequence
  SiRNA target sequence
gcatataaagcaaaaccaact

SEQ ID NO: 243619 - DNA, 21 bp, Artificial sequence
  SiRNA target sequence
catataaagcaaaaccaacta

SEQ ID NO: 243620 - DNA, 21 bp, Artificial sequence
  SiRNA target sequence
atataaagcaaaaccaactac

SEQ ID NO: 243621 - DNA, 21 bp, Artificial sequence
  SiRNA target sequence
tataaagcaaaaccaactact

SEQ ID NO: 243622 - DNA, 21 bp, Artificial sequence
  SiRNA target sequence
ataaagcaaaaccaactacta

SEQ ID NO: 243623 - DNA, 21 bp, Artificial sequence
  SiRNA target sequence
taaagcaaaaccaactactag

SEQ ID NO: 243624 - DNA, 21 bp, Artificial sequence
  SiRNA target sequence
aaagcaaaaccaactactaga

SEQ ID NO: 243625 - DNA, 21 bp, Artificial sequence
  SiRNA target sequence
aagcaaaaccaactactagag

SEQ ID NO: 243626 - DNA, 21 bp, Artificial sequence
  SiRNA target sequence
agcaaaaccaactactagagt

SEQ ID NO: 243627 - DNA, 21 bp, Artificial sequence
  SiRNA target sequence
gcaaaaccaactactagagta

SEQ ID NO: 243628 - DNA, 21 bp, Artificial sequence
  SiRNA target sequence
caaaaccaactactagagtac

SEQ ID NO: 243629 - DNA, 21 bp, Artificial sequence
  SiRNA target sequence
aaaaccaactactagagtact

SEQ ID NO: 243630 - DNA, 21 bp, Artificial sequence
  SiRNA target sequence
aaaccaactactagagtactc

SEQ ID NO: 243631 - DNA, 21 bp, Artificial sequence
  SiRNA target sequence
aaccaactactagagtactcc

SEQ ID NO: 243632 - DNA, 21 bp, Artificial sequence
  SiRNA target sequence
accaactactagagtactcca

SEQ ID NO: 243633 - DNA, 21 bp, Artificial sequence
  SiRNA target sequence
ccaactactagagtactccac

SEQ ID NO: 243634 - DNA, 21 bp, Artificial sequence
  SiRNA target sequence
caactactagagtactccaca

SEQ ID NO: 243635 - DNA, 21 bp, Artificial sequence
  SiRNA target sequence
aactactagagtactccacaa

SEQ ID NO: 243636 - DNA, 21 bp, Artificial sequence
  SiRNA target sequence
actactagagtactccacaac

SEQ ID NO: 243637 - DNA, 21 bp, Artificial sequence
  SiRNA target sequence
ctactagagtactccacaact

SEQ ID NO: 243638 - DNA, 21 bp, Artificial sequence
  SiRNA target sequence
tactagagtactccacaactc

SEQ ID NO: 243639 - DNA, 21 bp, Artificial sequence
  SiRNA target sequence
actagagtactccacaactcc

SEQ ID NO: 243640 - DNA, 21 bp, Artificial sequence
  SiRNA target sequence
ctagagtactccacaactccg

SEQ ID NO: 243641 - DNA, 21 bp, Artificial sequence
  SiRNA target sequence
tagagtactccacaactccga

SEQ ID NO: 243642 - DNA, 21 bp, Artificial sequence
  SiRNA target sequence
agagtactccacaactccgat

SEQ ID NO: 243643 - DNA, 21 bp, Artificial sequence
  SiRNA target sequence
gagtactccacaactccgata

SEQ ID NO: 243644 - DNA, 21 bp, Artificial sequence
  SiRNA target sequence
agtactccacaactccgataa

SEQ ID NO: 243645 - DNA, 21 bp, Artificial sequence
  SiRNA target sequence
gtactccacaactccgataag

SEQ ID NO: 243646 - DNA, 21 bp, Artificial sequence
  SiRNA target sequence
tactccacaactccgataaga

SEQ ID NO: 243647 - DNA, 21 bp, Artificial sequence
  SiRNA target sequence
actccacaactccgataagat

SEQ ID NO: 243648 - DNA, 21 bp, Artificial sequence
  SiRNA target sequence
ctccacaactccgataagatg

SEQ ID NO: 243649 - DNA, 21 bp, Artificial sequence
  SiRNA target sequence
tccacaactccgataagatgt

SEQ ID NO: 243650 - DNA, 21 bp, Artificial sequence
  SiRNA target sequence
ccacaactccgataagatgta

SEQ ID NO: 243651 - DNA, 21 bp, Artificial sequence
  SiRNA target sequence
cacaactccgataagatgtaa

SEQ ID NO: 243652 - DNA, 21 bp, Artificial sequence
  SiRNA target sequence
acaactccgataagatgtaac

SEQ ID NO: 243653 - DNA, 21 bp, Artificial sequence
  SiRNA target sequence
caactccgataagatgtaaca

SEQ ID NO: 243654 - DNA, 21 bp, Artificial sequence
  SiRNA target sequence
aactccgataagatgtaacat

SEQ ID NO: 243655 - DNA, 21 bp, Artificial sequence
  SiRNA target sequence
actccgataagatgtaacata

SEQ ID NO: 243656 - DNA, 21 bp, Artificial sequence
  SiRNA target sequence
ctccgataagatgtaacataa

SEQ ID NO: 243657 - DNA, 21 bp, Artificial sequence
  SiRNA target sequence
tccgataagatgtaacataaa

SEQ ID NO: 243658 - DNA, 21 bp, Artificial sequence
  SiRNA target sequence
ccgataagatgtaacataaag

SEQ ID NO: 243659 - DNA, 21 bp, Artificial sequence
  SiRNA target sequence
cgataagatgtaacataaagt

SEQ ID NO: 243660 - DNA, 21 bp, Artificial sequence
  SiRNA target sequence
gataagatgtaacataaagta

SEQ ID NO: 243661 - DNA, 21 bp, Artificial sequence
  SiRNA target sequence
ataagatgtaacataaagtac

SEQ ID NO: 243662 - DNA, 21 bp, Artificial sequence
  SiRNA target sequence
taagatgtaacataaagtact

SEQ ID NO: 243663 - DNA, 21 bp, Artificial sequence
  SiRNA target sequence
aagatgtaacataaagtactt

SEQ ID NO: 243664 - DNA, 21 bp, Artificial sequence
  SiRNA target sequence
agatgtaacataaagtactta

SEQ ID NO: 243665 - DNA, 21 bp, Artificial sequence
  SiRNA target sequence
gatgtaacataaagtacttat

SEQ ID NO: 243666 - DNA, 21 bp, Artificial sequence
  SiRNA target sequence
atgtaacataaagtacttatc

SEQ ID NO: 243667 - DNA, 21 bp, Artificial sequence
  SiRNA target sequence
tgtaacataaagtacttatcc

SEQ ID NO: 243668 - DNA, 21 bp, Artificial sequence
  SiRNA target sequence
gtaacataaagtacttatcca

SEQ ID NO: 243669 - DNA, 21 bp, Artificial sequence
  SiRNA target sequence
taacataaagtacttatccac

SEQ ID NO: 243670 - DNA, 21 bp, Artificial sequence
  SiRNA target sequence
aacataaagtacttatccact

SEQ ID NO: 243671 - DNA, 21 bp, Artificial sequence
  SiRNA target sequence
acataaagtacttatccactc

SEQ ID NO: 243672 - DNA, 21 bp, Artificial sequence
  SiRNA target sequence
cataaagtacttatccactca

SEQ ID NO: 243673 - DNA, 21 bp, Artificial sequence
  SiRNA target sequence
ataaagtacttatccactcac

SEQ ID NO: 243674 - DNA, 21 bp, Artificial sequence
  SiRNA target sequence
taaagtacttatccactcact

SEQ ID NO: 243675 - DNA, 21 bp, Artificial sequence
  SiRNA target sequence
aaagtacttatccactcactg

SEQ ID NO: 243676 - DNA, 21 bp, Artificial sequence
  SiRNA target sequence
aagtacttatccactcactgt

SEQ ID NO: 243677 - DNA, 21 bp, Artificial sequence
  SiRNA target sequence
agtacttatccactcactgta

SEQ ID NO: 243678 - DNA, 21 bp, Artificial sequence
  SiRNA target sequence
gtacttatccactcactgtac

SEQ ID NO: 243679 - DNA, 21 bp, Artificial sequence
  SiRNA target sequence
tacttatccactcactgtaca

SEQ ID NO: 243680 - DNA, 21 bp, Artificial sequence
  SiRNA target sequence
acttatccactcactgtacat

SEQ ID NO: 243681 - DNA, 21 bp, Artificial sequence
  SiRNA target sequence
cttatccactcactgtacata

SEQ ID NO: 243682 - DNA, 21 bp, Artificial sequence
  SiRNA target sequence
ttatccactcactgtacatat

SEQ ID NO: 243683 - DNA, 21 bp, Artificial sequence
  SiRNA target sequence
tatccactcactgtacatata

SEQ ID NO: 243684 - DNA, 21 bp, Artificial sequence
  SiRNA target sequence
atccactcactgtacatatat

SEQ ID NO: 243685 - DNA, 21 bp, Artificial sequence
  SiRNA target sequence
tccactcactgtacatatata

SEQ ID NO: 243686 - DNA, 21 bp, Artificial sequence
  SiRNA target sequence
ccactcactgtacatatataa

SEQ ID NO: 243687 - DNA, 21 bp, Artificial sequence
  SiRNA target sequence
cactcactgtacatatataaa

SEQ ID NO: 243688 - DNA, 21 bp, Artificial sequence
  SiRNA target sequence
actcactgtacatatataaaa

SEQ ID NO: 243689 - DNA, 21 bp, Artificial sequence
  SiRNA target sequence
ctcactgtacatatataaaaa

SEQ ID NO: 243690 - DNA, 21 bp, Artificial sequence
  SiRNA target sequence
tcactgtacatatataaaaaa

SEQ ID NO: 243691 - DNA, 21 bp, Artificial sequence
  SiRNA target sequence
cactgtacatatataaaaaag

SEQ ID NO: 243692 - DNA, 21 bp, Artificial sequence
  SiRNA target sequence
actgtacatatataaaaaagg

SEQ ID NO: 243693 - DNA, 21 bp, Artificial sequence
  SiRNA target sequence
ctgtacatatataaaaaagga

SEQ ID NO: 243694 - DNA, 21 bp, Artificial sequence
  SiRNA target sequence
tgtacatatataaaaaaggag

SEQ ID NO: 243695 - DNA, 21 bp, Artificial sequence
  SiRNA target sequence
gtacatatataaaaaaggaga

SEQ ID NO: 243696 - DNA, 21 bp, Artificial sequence
  SiRNA target sequence
tacatatataaaaaaggagat

SEQ ID NO: 243697 - DNA, 21 bp, Artificial sequence
  SiRNA target sequence
acatatataaaaaaggagata

SEQ ID NO: 243698 - DNA, 21 bp, Artificial sequence
  SiRNA target sequence
catatataaaaaaggagataa

SEQ ID NO: 243699 - DNA, 21 bp, Artificial sequence
  SiRNA target sequence
atatataaaaaaggagataag

SEQ ID NO: 243700 - DNA, 21 bp, Artificial sequence
  SiRNA target sequence
tatataaaaaaggagataagc

SEQ ID NO: 243701 - DNA, 21 bp, Artificial sequence
  SiRNA target sequence
atataaaaaaggagataagcc

SEQ ID NO: 243702 - DNA, 21 bp, Artificial sequence
  SiRNA target sequence
tataaaaaaggagataagccc

SEQ ID NO: 243703 - DNA, 21 bp, Artificial sequence
  SiRNA target sequence
ataaaaaaggagataagccca

SEQ ID NO: 243704 - DNA, 21 bp, Artificial sequence
  SiRNA target sequence
taaaaaaggagataagcccat

SEQ ID NO: 243705 - DNA, 21 bp, Artificial sequence
  SiRNA target sequence
aaaaaaggagataagcccatc

SEQ ID NO: 243706 - DNA, 21 bp, Artificial sequence
  SiRNA target sequence
aaaaaggagataagcccatca

SEQ ID NO: 243707 - DNA, 21 bp, Artificial sequence
  SiRNA target sequence
aaaaggagataagcccatcaa

SEQ ID NO: 243708 - DNA, 21 bp, Artificial sequence
  SiRNA target sequence
aaaggagataagcccatcaag

SEQ ID NO: 243709 - DNA, 21 bp, Artificial sequence
  SiRNA target sequence
aaggagataagcccatcaagc

SEQ ID NO: 243710 - DNA, 21 bp, Artificial sequence
  SiRNA target sequence
aggagataagcccatcaagct

SEQ ID NO: 243711 - DNA, 21 bp, Artificial sequence
  SiRNA target sequence
ggagataagcccatcaagctt

SEQ ID NO: 243712 - DNA, 21 bp, Artificial sequence
  SiRNA target sequence
gagataagcccatcaagcttc

SEQ ID NO: 243713 - DNA, 21 bp, Artificial sequence
  SiRNA target sequence
agataagcccatcaagcttct

SEQ ID NO: 243714 - DNA, 21 bp, Artificial sequence
  SiRNA target sequence
gataagcccatcaagcttcta

SEQ ID NO: 243715 - DNA, 21 bp, Artificial sequence
  SiRNA target sequence
ataagcccatcaagcttctaa

SEQ ID NO: 243716 - DNA, 21 bp, Artificial sequence
  SiRNA target sequence
taagcccatcaagcttctaac

SEQ ID NO: 243717 - DNA, 21 bp, Artificial sequence
  SiRNA target sequence
aagcccatcaagcttctaact

SEQ ID NO: 243718 - DNA, 21 bp, Artificial sequence
  SiRNA target sequence
agcccatcaagcttctaactg

SEQ ID NO: 243719 - DNA, 21 bp, Artificial sequence
  SiRNA target sequence
gcccatcaagcttctaactga

SEQ ID NO: 243720 - DNA, 21 bp, Artificial sequence
  SiRNA target sequence
cccatcaagcttctaactgac

SEQ ID NO: 243721 - DNA, 21 bp, Artificial sequence
  SiRNA target sequence
ccatcaagcttctaactgaca

SEQ ID NO: 243722 - DNA, 21 bp, Artificial sequence
  SiRNA target sequence
catcaagcttctaactgacat

SEQ ID NO: 243723 - DNA, 21 bp, Artificial sequence
  SiRNA target sequence
atcaagcttctaactgacatc

SEQ ID NO: 243724 - DNA, 21 bp, Artificial sequence
  SiRNA target sequence
tcaagcttctaactgacatct

SEQ ID NO: 243725 - DNA, 21 bp, Artificial sequence
  SiRNA target sequence
caagcttctaactgacatctt

SEQ ID NO: 243726 - DNA, 21 bp, Artificial sequence
  SiRNA target sequence
aagcttctaactgacatctta

SEQ ID NO: 243727 - DNA, 21 bp, Artificial sequence
  SiRNA target sequence
agcttctaactgacatcttac

SEQ ID NO: 243728 - DNA, 21 bp, Artificial sequence
  SiRNA target sequence
gcttctaactgacatcttacc

SEQ ID NO: 243729 - DNA, 21 bp, Artificial sequence
  SiRNA target sequence
cttctaactgacatcttacca

SEQ ID NO: 243730 - DNA, 21 bp, Artificial sequence
  SiRNA target sequence
ttctaactgacatcttaccat

SEQ ID NO: 243731 - DNA, 21 bp, Artificial sequence
  SiRNA target sequence
tctaactgacatcttaccatc

SEQ ID NO: 243732 - DNA, 21 bp, Artificial sequence
  SiRNA target sequence
ctaactgacatcttaccatca

SEQ ID NO: 243733 - DNA, 21 bp, Artificial sequence
  SiRNA target sequence
taactgacatcttaccatcac

SEQ ID NO: 243734 - DNA, 21 bp, Artificial sequence
  SiRNA target sequence
aactgacatcttaccatcaca

SEQ ID NO: 243735 - DNA, 21 bp, Artificial sequence
  SiRNA target sequence
actgacatcttaccatcacaa

SEQ ID NO: 243736 - DNA, 21 bp, Artificial sequence
  SiRNA target sequence
ctgacatcttaccatcacaaa

SEQ ID NO: 243737 - DNA, 21 bp, Artificial sequence
  SiRNA target sequence
tgacatcttaccatcacaaaa

SEQ ID NO: 243738 - DNA, 21 bp, Artificial sequence
  SiRNA target sequence
gacatcttaccatcacaaaaa

SEQ ID NO: 243739 - DNA, 21 bp, Artificial sequence
  SiRNA target sequence
acatcttaccatcacaaaaaa

SEQ ID NO: 243740 - DNA, 21 bp, Artificial sequence
  SiRNA target sequence
catcttaccatcacaaaaaat

SEQ ID NO: 243741 - DNA, 21 bp, Artificial sequence
  SiRNA target sequence
atcttaccatcacaaaaaata

SEQ ID NO: 243742 - DNA, 21 bp, Artificial sequence
  SiRNA target sequence
tcttaccatcacaaaaaatat

SEQ ID NO: 243743 - DNA, 21 bp, Artificial sequence
  SiRNA target sequence
cttaccatcacaaaaaatatc

SEQ ID NO: 243744 - DNA, 21 bp, Artificial sequence
  SiRNA target sequence
ttaccatcacaaaaaatatct

SEQ ID NO: 243745 - DNA, 21 bp, Artificial sequence
  SiRNA target sequence
taccatcacaaaaaatatcta

SEQ ID NO: 243746 - DNA, 21 bp, Artificial sequence
  SiRNA target sequence
accatcacaaaaaatatctag

SEQ ID NO: 243747 - DNA, 21 bp, Artificial sequence
  SiRNA target sequence
ccatcacaaaaaatatctagt

SEQ ID NO: 243748 - DNA, 21 bp, Artificial sequence
  SiRNA target sequence
catcacaaaaaatatctagtg

SEQ ID NO: 243749 - DNA, 21 bp, Artificial sequence
  SiRNA target sequence
atcacaaaaaatatctagtgc

SEQ ID NO: 243750 - DNA, 21 bp, Artificial sequence
  SiRNA target sequence
tcacaaaaaatatctagtgcc

SEQ ID NO: 243751 - DNA, 21 bp, Artificial sequence
  SiRNA target sequence
cacaaaaaatatctagtgccc

SEQ ID NO: 243752 - DNA, 21 bp, Artificial sequence
  SiRNA target sequence
acaaaaaatatctagtgccca

SEQ ID NO: 243753 - DNA, 21 bp, Artificial sequence
  SiRNA target sequence
caaaaaatatctagtgcccat

SEQ ID NO: 243754 - DNA, 21 bp, Artificial sequence
  SiRNA target sequence
aaaaaatatctagtgcccatt

SEQ ID NO: 243755 - DNA, 21 bp, Artificial sequence
  SiRNA target sequence
aaaaatatctagtgcccattg

SEQ ID NO: 243756 - DNA, 21 bp, Artificial sequence
  SiRNA target sequence
aaaatatctagtgcccattgt

SEQ ID NO: 243757 - DNA, 21 bp, Artificial sequence
  SiRNA target sequence
aaatatctagtgcccattgtg

SEQ ID NO: 243758 - DNA, 21 bp, Artificial sequence
  SiRNA target sequence
aatatctagtgcccattgtga

SEQ ID NO: 243759 - DNA, 21 bp, Artificial sequence
  SiRNA target sequence
atatctagtgcccattgtgat

SEQ ID NO: 243760 - DNA, 21 bp, Artificial sequence
  SiRNA target sequence
tatctagtgcccattgtgatc

SEQ ID NO: 243761 - DNA, 21 bp, Artificial sequence
  SiRNA target sequence
atctagtgcccattgtgatcc

SEQ ID NO: 243762 - DNA, 21 bp, Artificial sequence
  SiRNA target sequence
tctagtgcccattgtgatcct

SEQ ID NO: 243763 - DNA, 21 bp, Artificial sequence
  SiRNA target sequence
ctagtgcccattgtgatcctt

SEQ ID NO: 243764 - DNA, 21 bp, Artificial sequence
  SiRNA target sequence
tagtgcccattgtgatccttt

SEQ ID NO: 243765 - DNA, 21 bp, Artificial sequence
  SiRNA target sequence
agtgcccattgtgatcctttt

SEQ ID NO: 243766 - DNA, 21 bp, Artificial sequence
  SiRNA target sequence
gtgcccattgtgatccttttt

SEQ ID NO: 243767 - DNA, 21 bp, Artificial sequence
  SiRNA target sequence
tgcccattgtgatcctttttg

SEQ ID NO: 243768 - DNA, 21 bp, Artificial sequence
  SiRNA target sequence
gcccattgtgatcctttttgg

SEQ ID NO: 243769 - DNA, 21 bp, Artificial sequence
  SiRNA target sequence
cccattgtgatcctttttgga

SEQ ID NO: 243770 - DNA, 21 bp, Artificial sequence
  SiRNA target sequence
ccattgtgatcctttttggat

SEQ ID NO: 243771 - DNA, 21 bp, Artificial sequence
  SiRNA target sequence
cattgtgatcctttttggatt

SEQ ID NO: 243772 - DNA, 21 bp, Artificial sequence
  SiRNA target sequence
attgtgatcctttttggattt

SEQ ID NO: 243773 - DNA, 21 bp, Artificial sequence
  SiRNA target sequence
ttgtgatcctttttggatttt

SEQ ID NO: 243774 - DNA, 21 bp, Artificial sequence
  SiRNA target sequence
tgtgatcctttttggatttta

SEQ ID NO: 243775 - DNA, 21 bp, Artificial sequence
  SiRNA target sequence
gtgatcctttttggattttat

SEQ ID NO: 243776 - DNA, 21 bp, Artificial sequence
  SiRNA target sequence
tgatcctttttggattttata

SEQ ID NO: 243777 - DNA, 21 bp, Artificial sequence
  SiRNA target sequence
gatcctttttggattttatat

SEQ ID NO: 243778 - DNA, 21 bp, Artificial sequence
  SiRNA target sequence
atcctttttggattttatatt

SEQ ID NO: 243779 - DNA, 21 bp, Artificial sequence
  SiRNA target sequence
tcctttttggattttatattc

SEQ ID NO: 243780 - DNA, 21 bp, Artificial sequence
  SiRNA target sequence
cctttttggattttatattca

SEQ ID NO: 243781 - DNA, 21 bp, Artificial sequence
  SiRNA target sequence
ctttttggattttatattcaa

SEQ ID NO: 243782 - DNA, 21 bp, Artificial sequence
  SiRNA target sequence
tttttggattttatattcaaa

SEQ ID NO: 243783 - DNA, 21 bp, Artificial sequence
  SiRNA target sequence
ttttggattttatattcaaat

SEQ ID NO: 243784 - DNA, 21 bp, Artificial sequence
  SiRNA target sequence
tttggattttatattcaaatg

SEQ ID NO: 243785 - DNA, 21 bp, Artificial sequence
  SiRNA target sequence
ttggattttatattcaaatgg

SEQ ID NO: 243786 - DNA, 21 bp, Artificial sequence
  SiRNA target sequence
tggattttatattcaaatgga

SEQ ID NO: 243787 - DNA, 21 bp, Artificial sequence
  SiRNA target sequence
ggattttatattcaaatggaa

SEQ ID NO: 243788 - DNA, 21 bp, Artificial sequence
  SiRNA target sequence
gattttatattcaaatggaat

SEQ ID NO: 243789 - DNA, 21 bp, Artificial sequence
  SiRNA target sequence
attttatattcaaatggaatt

SEQ ID NO: 243790 - DNA, 21 bp, Artificial sequence
  SiRNA target sequence
ttttatattcaaatggaatta

SEQ ID NO: 243791 - DNA, 21 bp, Artificial sequence
  SiRNA target sequence
tttatattcaaatggaattaa

SEQ ID NO: 243792 - DNA, 21 bp, Artificial sequence
  SiRNA target sequence
ttatattcaaatggaattaaa

SEQ ID NO: 243793 - DNA, 21 bp, Artificial sequence
  SiRNA target sequence
tatattcaaatggaattaaaa

SEQ ID NO: 243794 - DNA, 21 bp, Artificial sequence
  SiRNA target sequence
atattcaaatggaattaaaag

SEQ ID NO: 243795 - DNA, 21 bp, Artificial sequence
  SiRNA target sequence
tattcaaatggaattaaaaga

SEQ ID NO: 243796 - DNA, 21 bp, Artificial sequence
  SiRNA target sequence
attcaaatggaattaaaagag

SEQ ID NO: 243797 - DNA, 21 bp, Artificial sequence
  SiRNA target sequence
ttcaaatggaattaaaagaga

SEQ ID NO: 243798 - DNA, 21 bp, Artificial sequence
  SiRNA target sequence
tcaaatggaattaaaagagaa

SEQ ID NO: 243799 - DNA, 21 bp, Artificial sequence
  SiRNA target sequence
caaatggaattaaaagagaac

SEQ ID NO: 243800 - DNA, 21 bp, Artificial sequence
  SiRNA target sequence
aaatggaattaaaagagaacc

SEQ ID NO: 243801 - DNA, 21 bp, Artificial sequence
  SiRNA target sequence
aatggaattaaaagagaacca

SEQ ID NO: 243802 - DNA, 21 bp, Artificial sequence
  SiRNA target sequence
atggaattaaaagagaaccaa

SEQ ID NO: 243803 - DNA, 21 bp, Artificial sequence
  SiRNA target sequence
tggaattaaaagagaaccaat

SEQ ID NO: 243804 - DNA, 21 bp, Artificial sequence
  SiRNA target sequence
ggaattaaaagagaaccaatt

SEQ ID NO: 243805 - DNA, 21 bp, Artificial sequence
  SiRNA target sequence
gaattaaaagagaaccaatta

SEQ ID NO: 243806 - DNA, 21 bp, Artificial sequence
  SiRNA target sequence
aattaaaagagaaccaattag

SEQ ID NO: 243807 - DNA, 21 bp, Artificial sequence
  SiRNA target sequence
attaaaagagaaccaattaga

SEQ ID NO: 243808 - DNA, 21 bp, Artificial sequence
  SiRNA target sequence
ttaaaagagaaccaattagaa

SEQ ID NO: 243809 - DNA, 21 bp, Artificial sequence
  SiRNA target sequence
taaaagagaaccaattagaaa

SEQ ID NO: 243810 - DNA, 21 bp, Artificial sequence
  SiRNA target sequence
aaaagagaaccaattagaaaa

SEQ ID NO: 243811 - DNA, 21 bp, Artificial sequence
  SiRNA target sequence
aaagagaaccaattagaaaaa

SEQ ID NO: 243812 - DNA, 21 bp, Artificial sequence
  SiRNA target sequence
aagagaaccaattagaaaaaa

SEQ ID NO: 243813 - DNA, 21 bp, Artificial sequence
  SiRNA target sequence
agagaaccaattagaaaaaaa

SEQ ID NO: 243814 - DNA, 21 bp, Artificial sequence
  SiRNA target sequence
gagaaccaattagaaaaaaaa

SEQ ID NO: 243815 - DNA, 21 bp, Artificial sequence
  SiRNA target sequence
agaaccaattagaaaaaaaat

SEQ ID NO: 243816 - DNA, 21 bp, Artificial sequence
  SiRNA target sequence
gaaccaattagaaaaaaaatg

SEQ ID NO: 243817 - DNA, 21 bp, Artificial sequence
  SiRNA target sequence
aaccaattagaaaaaaaatgc

SEQ ID NO: 243818 - DNA, 21 bp, Artificial sequence
  SiRNA target sequence
accaattagaaaaaaaatgcc

SEQ ID NO: 243819 - DNA, 21 bp, Artificial sequence
  SiRNA target sequence
ccaattagaaaaaaaatgcca

SEQ ID NO: 243820 - DNA, 21 bp, Artificial sequence
  SiRNA target sequence
caattagaaaaaaaatgccaa

SEQ ID NO: 243821 - DNA, 21 bp, Artificial sequence
  SiRNA target sequence
aattagaaaaaaaatgccaat

SEQ ID NO: 243822 - DNA, 21 bp, Artificial sequence
  SiRNA target sequence
attagaaaaaaaatgccaata

SEQ ID NO: 243823 - DNA, 21 bp, Artificial sequence
  SiRNA target sequence
ttagaaaaaaaatgccaataa

SEQ ID NO: 243824 - DNA, 21 bp, Artificial sequence
  SiRNA target sequence
tagaaaaaaaatgccaataaa

SEQ ID NO: 243825 - DNA, 21 bp, Artificial sequence
  SiRNA target sequence
agaaaaaaaatgccaataaaa

SEQ ID NO: 243826 - DNA, 21 bp, Artificial sequence
  SiRNA target sequence
gaaaaaaaatgccaataaaac

SEQ ID NO: 243827 - DNA, 21 bp, Artificial sequence
  SiRNA target sequence
aaaaaaaatgccaataaaacc

SEQ ID NO: 243828 - DNA, 21 bp, Artificial sequence
  SiRNA target sequence
aaaaaaatgccaataaaacca

SEQ ID NO: 243829 - DNA, 21 bp, Artificial sequence
  SiRNA target sequence
aaaaaatgccaataaaaccaa

SEQ ID NO: 243830 - DNA, 21 bp, Artificial sequence
  SiRNA target sequence
aaaaatgccaataaaaccaaa

SEQ ID NO: 243831 - DNA, 21 bp, Artificial sequence
  SiRNA target sequence
aaaatgccaataaaaccaaaa

SEQ ID NO: 243832 - DNA, 21 bp, Artificial sequence
  SiRNA target sequence
aaatgccaataaaaccaaaaa

SEQ ID NO: 243833 - DNA, 21 bp, Artificial sequence
  SiRNA target sequence
aatgccaataaaaccaaaaat

SEQ ID NO: 243834 - DNA, 21 bp, Artificial sequence
  SiRNA target sequence
atgccaataaaaccaaaaata

SEQ ID NO: 243835 - DNA, 21 bp, Artificial sequence
  SiRNA target sequence
tgccaataaaaccaaaaataa

SEQ ID NO: 243836 - DNA, 21 bp, Artificial sequence
  SiRNA target sequence
gccaataaaaccaaaaataat

SEQ ID NO: 243837 - DNA, 21 bp, Artificial sequence
  SiRNA target sequence
ccaataaaaccaaaaataata

SEQ ID NO: 243838 - DNA, 21 bp, Artificial sequence
  SiRNA target sequence
caataaaaccaaaaataataa

SEQ ID NO: 243839 - DNA, 21 bp, Artificial sequence
  SiRNA target sequence
aataaaaccaaaaataataaa

SEQ ID NO: 243840 - DNA, 21 bp, Artificial sequence
  SiRNA target sequence
ataaaaccaaaaataataaaa

SEQ ID NO: 243841 - DNA, 21 bp, Artificial sequence
  SiRNA target sequence
taaaaccaaaaataataaaat

SEQ ID NO: 243842 - DNA, 21 bp, Artificial sequence
  SiRNA target sequence
aaaaccaaaaataataaaatt

SEQ ID NO: 243843 - DNA, 21 bp, Artificial sequence
  SiRNA target sequence
aaaccaaaaataataaaattc

SEQ ID NO: 243844 - DNA, 21 bp, Artificial sequence
  SiRNA target sequence
aaccaaaaataataaaattca

SEQ ID NO: 243845 - DNA, 21 bp, Artificial sequence
  SiRNA target sequence
accaaaaataataaaattcac

SEQ ID NO: 243846 - DNA, 21 bp, Artificial sequence
  SiRNA target sequence
ccaaaaataataaaattcaca

SEQ ID NO: 243847 - DNA, 21 bp, Artificial sequence
  SiRNA target sequence
caaaaataataaaattcacaa

SEQ ID NO: 243848 - DNA, 21 bp, Artificial sequence
  SiRNA target sequence
aaaaataataaaattcacaat

SEQ ID NO: 243849 - DNA, 21 bp, Artificial sequence
  SiRNA target sequence
aaaataataaaattcacaata

SEQ ID NO: 243850 - DNA, 21 bp, Artificial sequence
  SiRNA target sequence
aaataataaaattcacaatac

SEQ ID NO: 243851 - DNA, 21 bp, Artificial sequence
  SiRNA target sequence
aataataaaattcacaatact

SEQ ID NO: 243852 - DNA, 21 bp, Artificial sequence
  SiRNA target sequence
ataataaaattcacaatacta

SEQ ID NO: 243853 - DNA, 21 bp, Artificial sequence
  SiRNA target sequence
taataaaattcacaatactaa

SEQ ID NO: 243854 - DNA, 21 bp, Artificial sequence
  SiRNA target sequence
aataaaattcacaatactaag

SEQ ID NO: 243855 - DNA, 21 bp, Artificial sequence
  SiRNA target sequence
ataaaattcacaatactaaga

SEQ ID NO: 243856 - DNA, 21 bp, Artificial sequence
  SiRNA target sequence
taaaattcacaatactaagaa

SEQ ID NO: 243857 - DNA, 21 bp, Artificial sequence
  SiRNA target sequence
aaaattcacaatactaagaat

SEQ ID NO: 243858 - DNA, 21 bp, Artificial sequence
  SiRNA target sequence
aaattcacaatactaagaata

SEQ ID NO: 243859 - DNA, 21 bp, Artificial sequence
  SiRNA target sequence
aattcacaatactaagaatag

SEQ ID NO: 243860 - DNA, 21 bp, Artificial sequence
  SiRNA target sequence
attcacaatactaagaataga

SEQ ID NO: 243861 - DNA, 21 bp, Artificial sequence
  SiRNA target sequence
ttcacaatactaagaatagag

SEQ ID NO: 243862 - DNA, 21 bp, Artificial sequence
  SiRNA target sequence
tcacaatactaagaatagagt

SEQ ID NO: 243863 - DNA, 21 bp, Artificial sequence
  SiRNA target sequence
cacaatactaagaatagagta

SEQ ID NO: 243864 - DNA, 21 bp, Artificial sequence
  SiRNA target sequence
acaatactaagaatagagtac

SEQ ID NO: 243865 - DNA, 21 bp, Artificial sequence
  SiRNA target sequence
caatactaagaatagagtaca

SEQ ID NO: 243866 - DNA, 21 bp, Artificial sequence
  SiRNA target sequence
aatactaagaatagagtacac

SEQ ID NO: 243867 - DNA, 21 bp, Artificial sequence
  SiRNA target sequence
atactaagaatagagtacaca

SEQ ID NO: 243868 - DNA, 21 bp, Artificial sequence
  SiRNA target sequence
tactaagaatagagtacacat

SEQ ID NO: 243869 - DNA, 21 bp, Artificial sequence
  SiRNA target sequence
actaagaatagagtacacatt

SEQ ID NO: 243870 - DNA, 21 bp, Artificial sequence
  SiRNA target sequence
ctaagaatagagtacacattt

SEQ ID NO: 243871 - DNA, 21 bp, Artificial sequence
  SiRNA target sequence
taagaatagagtacacattta

SEQ ID NO: 243872 - DNA, 21 bp, Artificial sequence
  SiRNA target sequence
aagaatagagtacacatttaa

SEQ ID NO: 243873 - DNA, 21 bp, Artificial sequence
  SiRNA target sequence
agaatagagtacacatttaaa

SEQ ID NO: 243874 - DNA, 21 bp, Artificial sequence
  SiRNA target sequence
gaatagagtacacatttaaag

SEQ ID NO: 243875 - DNA, 21 bp, Artificial sequence
  SiRNA target sequence
aatagagtacacatttaaagc

SEQ ID NO: 243876 - DNA, 21 bp, Artificial sequence
  SiRNA target sequence
atagagtacacatttaaagcc

SEQ ID NO: 243877 - DNA, 21 bp, Artificial sequence
  SiRNA target sequence
tagagtacacatttaaagcct

SEQ ID NO: 243878 - DNA, 21 bp, Artificial sequence
  SiRNA target sequence
agagtacacatttaaagcctt

SEQ ID NO: 243879 - DNA, 21 bp, Artificial sequence
  SiRNA target sequence
gagtacacatttaaagccttt

SEQ ID NO: 243880 - DNA, 21 bp, Artificial sequence
  SiRNA target sequence
agtacacatttaaagcctttt

SEQ ID NO: 243881 - DNA, 21 bp, Artificial sequence
  SiRNA target sequence
gtacacatttaaagccttttg

SEQ ID NO: 243882 - DNA, 21 bp, Artificial sequence
  SiRNA target sequence
tacacatttaaagccttttgg

SEQ ID NO: 243883 - DNA, 21 bp, Artificial sequence
  SiRNA target sequence
acacatttaaagccttttgga

SEQ ID NO: 243884 - DNA, 21 bp, Artificial sequence
  SiRNA target sequence
cacatttaaagccttttggac

SEQ ID NO: 243885 - DNA, 21 bp, Artificial sequence
  SiRNA target sequence
acatttaaagccttttggaca

SEQ ID NO: 243886 - DNA, 21 bp, Artificial sequence
  SiRNA target sequence
catttaaagccttttggacat

SEQ ID NO: 243887 - DNA, 21 bp, Artificial sequence
  SiRNA target sequence
atttaaagccttttggacata

SEQ ID NO: 243888 - DNA, 21 bp, Artificial sequence
  SiRNA target sequence
tttaaagccttttggacatat

SEQ ID NO: 243889 - DNA, 21 bp, Artificial sequence
  SiRNA target sequence
ttaaagccttttggacatatg

SEQ ID NO: 243890 - DNA, 21 bp, Artificial sequence
  SiRNA target sequence
taaagccttttggacatatga

SEQ ID NO: 243891 - DNA, 21 bp, Artificial sequence
  SiRNA target sequence
aaagccttttggacatatgac

SEQ ID NO: 243892 - DNA, 21 bp, Artificial sequence
  SiRNA target sequence
aagccttttggacatatgaca

SEQ ID NO: 243893 - DNA, 21 bp, Artificial sequence
  SiRNA target sequence
agccttttggacatatgacat

SEQ ID NO: 243894 - DNA, 21 bp, Artificial sequence
  SiRNA target sequence
gccttttggacatatgacatc

SEQ ID NO: 243895 - DNA, 21 bp, Artificial sequence
  SiRNA target sequence
ccttttggacatatgacatca

SEQ ID NO: 243896 - DNA, 21 bp, Artificial sequence
  SiRNA target sequence
cttttggacatatgacatcat

SEQ ID NO: 243897 - DNA, 21 bp, Artificial sequence
  SiRNA target sequence
ttttggacatatgacatcata

SEQ ID NO: 243898 - DNA, 21 bp, Artificial sequence
  SiRNA target sequence
tttggacatatgacatcataa

SEQ ID NO: 243899 - DNA, 21 bp, Artificial sequence
  SiRNA target sequence
ttggacatatgacatcataag

SEQ ID NO: 243900 - DNA, 21 bp, Artificial sequence
  SiRNA target sequence
tggacatatgacatcataaga

SEQ ID NO: 243901 - DNA, 21 bp, Artificial sequence
  SiRNA target sequence
ggacatatgacatcataagac

SEQ ID NO: 243902 - DNA, 21 bp, Artificial sequence
  SiRNA target sequence
gacatatgacatcataagaca

SEQ ID NO: 243903 - DNA, 21 bp, Artificial sequence
  SiRNA target sequence
acatatgacatcataagacat

SEQ ID NO: 243904 - DNA, 21 bp, Artificial sequence
  SiRNA target sequence
catatgacatcataagacata

SEQ ID NO: 243905 - DNA, 21 bp, Artificial sequence
  SiRNA target sequence
atatgacatcataagacatat

SEQ ID NO: 243906 - DNA, 21 bp, Artificial sequence
  SiRNA target sequence
tatgacatcataagacatata

SEQ ID NO: 243907 - DNA, 21 bp, Artificial sequence
  SiRNA target sequence
atgacatcataagacatataa

SEQ ID NO: 243908 - DNA, 21 bp, Artificial sequence
  SiRNA target sequence
tgacatcataagacatataat

SEQ ID NO: 243909 - DNA, 21 bp, Artificial sequence
  SiRNA target sequence
gacatcataagacatataatt

SEQ ID NO: 243910 - DNA, 21 bp, Artificial sequence
  SiRNA target sequence
acatcataagacatataattg

SEQ ID NO: 243911 - DNA, 21 bp, Artificial sequence
  SiRNA target sequence
catcataagacatataattgg

SEQ ID NO: 243912 - DNA, 21 bp, Artificial sequence
  SiRNA target sequence
atcataagacatataattggc

SEQ ID NO: 243913 - DNA, 21 bp, Artificial sequence
  SiRNA target sequence
tcataagacatataattggca

SEQ ID NO: 243914 - DNA, 21 bp, Artificial sequence
  SiRNA target sequence
cataagacatataattggcag

SEQ ID NO: 243915 - DNA, 21 bp, Artificial sequence
  SiRNA target sequence
ataagacatataattggcagt

SEQ ID NO: 243916 - DNA, 21 bp, Artificial sequence
  SiRNA target sequence
taagacatataattggcagtg

SEQ ID NO: 243917 - DNA, 21 bp, Artificial sequence
  SiRNA target sequence
aagacatataattggcagtga

SEQ ID NO: 243918 - DNA, 21 bp, Artificial sequence
  SiRNA target sequence
agacatataattggcagtgaa

SEQ ID NO: 243919 - DNA, 21 bp, Artificial sequence
  SiRNA target sequence
gacatataattggcagtgaaa

SEQ ID NO: 243920 - DNA, 21 bp, Artificial sequence
  SiRNA target sequence
acatataattggcagtgaaaa

SEQ ID NO: 243921 - DNA, 21 bp, Artificial sequence
  SiRNA target sequence
catataattggcagtgaaaag

SEQ ID NO: 243922 - DNA, 21 bp, Artificial sequence
  SiRNA target sequence
atataattggcagtgaaaaga

SEQ ID NO: 243923 - DNA, 21 bp, Artificial sequence
  SiRNA target sequence
tataattggcagtgaaaagaa

SEQ ID NO: 243924 - DNA, 21 bp, Artificial sequence
  SiRNA target sequence
ataattggcagtgaaaagaaa

SEQ ID NO: 243925 - DNA, 21 bp, Artificial sequence
  SiRNA target sequence
taattggcagtgaaaagaaaa

SEQ ID NO: 243926 - DNA, 21 bp, Artificial sequence
  SiRNA target sequence
aattggcagtgaaaagaaaag

SEQ ID NO: 243927 - DNA, 21 bp, Artificial sequence
  SiRNA target sequence
attggcagtgaaaagaaaagc

SEQ ID NO: 243928 - DNA, 21 bp, Artificial sequence
  SiRNA target sequence
ttggcagtgaaaagaaaagct

SEQ ID NO: 243929 - DNA, 21 bp, Artificial sequence
  SiRNA target sequence
tggcagtgaaaagaaaagctt

SEQ ID NO: 243930 - DNA, 21 bp, Artificial sequence
  SiRNA target sequence
ggcagtgaaaagaaaagcttt

SEQ ID NO: 243931 - DNA, 21 bp, Artificial sequence
  SiRNA target sequence
gcagtgaaaagaaaagcttta

SEQ ID NO: 243932 - DNA, 21 bp, Artificial sequence
  SiRNA target sequence
cagtgaaaagaaaagctttat

SEQ ID NO: 243933 - DNA, 21 bp, Artificial sequence
  SiRNA target sequence
agtgaaaagaaaagctttatg

SEQ ID NO: 243934 - DNA, 21 bp, Artificial sequence
  SiRNA target sequence
gtgaaaagaaaagctttatgt

SEQ ID NO: 243935 - DNA, 21 bp, Artificial sequence
  SiRNA target sequence
tgaaaagaaaagctttatgta

SEQ ID NO: 243936 - DNA, 21 bp, Artificial sequence
  SiRNA target sequence
gaaaagaaaagctttatgtag

SEQ ID NO: 243937 - DNA, 21 bp, Artificial sequence
  SiRNA target sequence
aaaagaaaagctttatgtagt

SEQ ID NO: 243938 - DNA, 21 bp, Artificial sequence
  SiRNA target sequence
aaagaaaagctttatgtagta

SEQ ID NO: 243939 - DNA, 21 bp, Artificial sequence
  SiRNA target sequence
aagaaaagctttatgtagtac

SEQ ID NO: 243940 - DNA, 21 bp, Artificial sequence
  SiRNA target sequence
agaaaagctttatgtagtaca

SEQ ID NO: 243941 - DNA, 21 bp, Artificial sequence
  SiRNA target sequence
gaaaagctttatgtagtacag

SEQ ID NO: 243942 - DNA, 21 bp, Artificial sequence
  SiRNA target sequence
aaaagctttatgtagtacagt

SEQ ID NO: 243943 - DNA, 21 bp, Artificial sequence
  SiRNA target sequence
aaagctttatgtagtacagtg

SEQ ID NO: 243944 - DNA, 21 bp, Artificial sequence
  SiRNA target sequence
aagctttatgtagtacagtga

SEQ ID NO: 243945 - DNA, 21 bp, Artificial sequence
  SiRNA target sequence
agctttatgtagtacagtgac

SEQ ID NO: 243946 - DNA, 21 bp, Artificial sequence
  SiRNA target sequence
gctttatgtagtacagtgacg

SEQ ID NO: 243947 - DNA, 21 bp, Artificial sequence
  SiRNA target sequence
ctttatgtagtacagtgacga

SEQ ID NO: 243948 - DNA, 21 bp, Artificial sequence
  SiRNA target sequence
tttatgtagtacagtgacgaa

SEQ ID NO: 243949 - DNA, 21 bp, Artificial sequence
  SiRNA target sequence
ttatgtagtacagtgacgaag

SEQ ID NO: 243950 - DNA, 21 bp, Artificial sequence
  SiRNA target sequence
tatgtagtacagtgacgaagg

SEQ ID NO: 243951 - DNA, 21 bp, Artificial sequence
  SiRNA target sequence
atgtagtacagtgacgaagga

SEQ ID NO: 243952 - DNA, 21 bp, Artificial sequence
  SiRNA target sequence
tgtagtacagtgacgaaggaa

SEQ ID NO: 243953 - DNA, 21 bp, Artificial sequence
  SiRNA target sequence
gtagtacagtgacgaaggaat

SEQ ID NO: 243954 - DNA, 21 bp, Artificial sequence
  SiRNA target sequence
tagtacagtgacgaaggaatt

SEQ ID NO: 243955 - DNA, 21 bp, Artificial sequence
  SiRNA target sequence
agtacagtgacgaaggaattt

SEQ ID NO: 243956 - DNA, 21 bp, Artificial sequence
  SiRNA target sequence
gtacagtgacgaaggaatttg

SEQ ID NO: 243957 - DNA, 21 bp, Artificial sequence
  SiRNA target sequence
tacagtgacgaaggaatttgt

SEQ ID NO: 243958 - DNA, 21 bp, Artificial sequence
  SiRNA target sequence
acagtgacgaaggaatttgtt

SEQ ID NO: 243959 - DNA, 21 bp, Artificial sequence
  SiRNA target sequence
cagtgacgaaggaatttgttt

SEQ ID NO: 243960 - DNA, 21 bp, Artificial sequence
  SiRNA target sequence
agtgacgaaggaatttgtttt

SEQ ID NO: 243961 - DNA, 21 bp, Artificial sequence
  SiRNA target sequence
gtgacgaaggaatttgttttg

SEQ ID NO: 243962 - DNA, 21 bp, Artificial sequence
  SiRNA target sequence
tgacgaaggaatttgttttgt

SEQ ID NO: 243963 - DNA, 21 bp, Artificial sequence
  SiRNA target sequence
gacgaaggaatttgttttgtc

SEQ ID NO: 243964 - DNA, 21 bp, Artificial sequence
  SiRNA target sequence
acgaaggaatttgttttgtca

SEQ ID NO: 243965 - DNA, 21 bp, Artificial sequence
  SiRNA target sequence
cgaaggaatttgttttgtcat

SEQ ID NO: 243966 - DNA, 21 bp, Artificial sequence
  SiRNA target sequence
gaaggaatttgttttgtcata

SEQ ID NO: 243967 - DNA, 21 bp, Artificial sequence
  SiRNA target sequence
aaggaatttgttttgtcataa

SEQ ID NO: 243968 - DNA, 21 bp, Artificial sequence
  SiRNA target sequence
aggaatttgttttgtcataat

SEQ ID NO: 243969 - DNA, 21 bp, Artificial sequence
  SiRNA target sequence
ggaatttgttttgtcataatc

SEQ ID NO: 243970 - DNA, 21 bp, Artificial sequence
  SiRNA target sequence
gaatttgttttgtcataatca

SEQ ID NO: 243971 - DNA, 21 bp, Artificial sequence
  SiRNA target sequence
aatttgttttgtcataatcac

SEQ ID NO: 243972 - DNA, 21 bp, Artificial sequence
  SiRNA target sequence
atttgttttgtcataatcacg

SEQ ID NO: 243973 - DNA, 21 bp, Artificial sequence
  SiRNA target sequence
tttgttttgtcataatcacga

SEQ ID NO: 243974 - DNA, 21 bp, Artificial sequence
  SiRNA target sequence
ttgttttgtcataatcacgat

SEQ ID NO: 243975 - DNA, 21 bp, Artificial sequence
  SiRNA target sequence
tgttttgtcataatcacgatt

SEQ ID NO: 243976 - DNA, 21 bp, Artificial sequence
  SiRNA target sequence
gttttgtcataatcacgattt

SEQ ID NO: 243977 - DNA, 21 bp, Artificial sequence
  SiRNA target sequence
ttttgtcataatcacgatttc

SEQ ID NO: 243978 - DNA, 21 bp, Artificial sequence
  SiRNA target sequence
tttgtcataatcacgatttct

SEQ ID NO: 243979 - DNA, 21 bp, Artificial sequence
  SiRNA target sequence
ttgtcataatcacgatttctc

SEQ ID NO: 243980 - DNA, 21 bp, Artificial sequence
  SiRNA target sequence
tgtcataatcacgatttctct

SEQ ID NO: 243981 - DNA, 21 bp, Artificial sequence
  SiRNA target sequence
gtcataatcacgatttctctg

SEQ ID NO: 243982 - DNA, 21 bp, Artificial sequence
  SiRNA target sequence
tcataatcacgatttctctgt

SEQ ID NO: 243983 - DNA, 21 bp, Artificial sequence
  SiRNA target sequence
cataatcacgatttctctgta

SEQ ID NO: 243984 - DNA, 21 bp, Artificial sequence
  SiRNA target sequence
ataatcacgatttctctgtaa

SEQ ID NO: 243985 - DNA, 21 bp, Artificial sequence
  SiRNA target sequence
taatcacgatttctctgtaaa

SEQ ID NO: 243986 - DNA, 21 bp, Artificial sequence
  SiRNA target sequence
aatcacgatttctctgtaaaa

SEQ ID NO: 243987 - DNA, 21 bp, Artificial sequence
  SiRNA target sequence
atcacgatttctctgtaaaat

SEQ ID NO: 243988 - DNA, 21 bp, Artificial sequence
  SiRNA target sequence
tcacgatttctctgtaaaatt

SEQ ID NO: 243989 - DNA, 21 bp, Artificial sequence
  SiRNA target sequence
cacgatttctctgtaaaattc

SEQ ID NO: 243990 - DNA, 21 bp, Artificial sequence
  SiRNA target sequence
acgatttctctgtaaaattcc

SEQ ID NO: 243991 - DNA, 21 bp, Artificial sequence
  SiRNA target sequence
cgatttctctgtaaaattcca

SEQ ID NO: 243992 - DNA, 21 bp, Artificial sequence
  SiRNA target sequence
gatttctctgtaaaattccaa

SEQ ID NO: 243993 - DNA, 21 bp, Artificial sequence
  SiRNA target sequence
atttctctgtaaaattccaat

SEQ ID NO: 243994 - DNA, 21 bp, Artificial sequence
  SiRNA target sequence
tttctctgtaaaattccaata

SEQ ID NO: 243995 - DNA, 21 bp, Artificial sequence
  SiRNA target sequence
ttctctgtaaaattccaataa

SEQ ID NO: 243996 - DNA, 21 bp, Artificial sequence
  SiRNA target sequence
tctctgtaaaattccaataat

SEQ ID NO: 243997 - DNA, 21 bp, Artificial sequence
  SiRNA target sequence
ctctgtaaaattccaataatg

SEQ ID NO: 243998 - DNA, 21 bp, Artificial sequence
  SiRNA target sequence
tctgtaaaattccaataatgt

SEQ ID NO: 243999 - DNA, 21 bp, Artificial sequence
  SiRNA target sequence
ctgtaaaattccaataatgtg

SEQ ID NO: 244000 - DNA, 21 bp, Artificial sequence
  SiRNA target sequence
tgtaaaattccaataatgtgt

SEQ ID NO: 244001 - DNA, 21 bp, Artificial sequence
  SiRNA target sequence
gtaaaattccaataatgtgtt

SEQ ID NO: 244002 - DNA, 21 bp, Artificial sequence
  SiRNA target sequence
taaaattccaataatgtgtta

SEQ ID NO: 244003 - DNA, 21 bp, Artificial sequence
  SiRNA target sequence
aaaattccaataatgtgttaa

SEQ ID NO: 244004 - DNA, 21 bp, Artificial sequence
  SiRNA target sequence
aaattccaataatgtgttaat

SEQ ID NO: 244005 - DNA, 21 bp, Artificial sequence
  SiRNA target sequence
aattccaataatgtgttaatc

SEQ ID NO: 244006 - DNA, 21 bp, Artificial sequence
  SiRNA target sequence
attccaataatgtgttaatca

SEQ ID NO: 244007 - DNA, 21 bp, Artificial sequence
  SiRNA target sequence
ttccaataatgtgttaatcac

SEQ ID NO: 244008 - DNA, 21 bp, Artificial sequence
  SiRNA target sequence
tccaataatgtgttaatcaca

SEQ ID NO: 244009 - DNA, 21 bp, Artificial sequence
  SiRNA target sequence
ccaataatgtgttaatcacac

SEQ ID NO: 244010 - DNA, 21 bp, Artificial sequence
  SiRNA target sequence
caataatgtgttaatcacaca

SEQ ID NO: 244011 - DNA, 21 bp, Artificial sequence
  SiRNA target sequence
aataatgtgttaatcacacat

SEQ ID NO: 244012 - DNA, 21 bp, Artificial sequence
  SiRNA target sequence
ataatgtgttaatcacacatg

SEQ ID NO: 244013 - DNA, 21 bp, Artificial sequence
  SiRNA target sequence
taatgtgttaatcacacatgc

SEQ ID NO: 244014 - DNA, 21 bp, Artificial sequence
  SiRNA target sequence
aatgtgttaatcacacatgcc

SEQ ID NO: 244015 - DNA, 21 bp, Artificial sequence
  SiRNA target sequence
atgtgttaatcacacatgcca

SEQ ID NO: 244016 - DNA, 21 bp, Artificial sequence
  SiRNA target sequence
tgtgttaatcacacatgccat

SEQ ID NO: 244017 - DNA, 21 bp, Artificial sequence
  SiRNA target sequence
gtgttaatcacacatgccatt

SEQ ID NO: 244018 - DNA, 21 bp, Artificial sequence
  SiRNA target sequence
tgttaatcacacatgccatta

SEQ ID NO: 244019 - DNA, 21 bp, Artificial sequence
  SiRNA target sequence
gttaatcacacatgccattaa

SEQ ID NO: 244020 - DNA, 21 bp, Artificial sequence
  SiRNA target sequence
ttaatcacacatgccattaaa

SEQ ID NO: 244021 - DNA, 21 bp, Artificial sequence
  SiRNA target sequence
taatcacacatgccattaaaa

SEQ ID NO: 244022 - DNA, 21 bp, Artificial sequence
  SiRNA target sequence
aatcacacatgccattaaaaa

SEQ ID NO: 244023 - DNA, 21 bp, Artificial sequence
  SiRNA target sequence
atcacacatgccattaaaaat

SEQ ID NO: 244024 - DNA, 21 bp, Artificial sequence
  SiRNA target sequence
tcacacatgccattaaaaatg

SEQ ID NO: 244025 - DNA, 21 bp, Artificial sequence
  SiRNA target sequence
cacacatgccattaaaaatgt

SEQ ID NO: 244026 - DNA, 21 bp, Artificial sequence
  SiRNA target sequence
acacatgccattaaaaatgta

SEQ ID NO: 244027 - DNA, 21 bp, Artificial sequence
  SiRNA target sequence
cacatgccattaaaaatgtaa

SEQ ID NO: 244028 - DNA, 21 bp, Artificial sequence
  SiRNA target sequence
acatgccattaaaaatgtaag

SEQ ID NO: 244029 - DNA, 21 bp, Artificial sequence
  SiRNA target sequence
catgccattaaaaatgtaagt

SEQ ID NO: 244030 - DNA, 21 bp, Artificial sequence
  SiRNA target sequence
atgccattaaaaatgtaagtg

SEQ ID NO: 244031 - DNA, 21 bp, Artificial sequence
  SiRNA target sequence
tgccattaaaaatgtaagtga

SEQ ID NO: 244032 - DNA, 21 bp, Artificial sequence
  SiRNA target sequence
gccattaaaaatgtaagtgac

SEQ ID NO: 244033 - DNA, 21 bp, Artificial sequence
  SiRNA target sequence
ccattaaaaatgtaagtgaca

SEQ ID NO: 244034 - DNA, 21 bp, Artificial sequence
  SiRNA target sequence
cattaaaaatgtaagtgacaa

SEQ ID NO: 244035 - DNA, 21 bp, Artificial sequence
  SiRNA target sequence
attaaaaatgtaagtgacaat

SEQ ID NO: 244036 - DNA, 21 bp, Artificial sequence
  SiRNA target sequence
ttaaaaatgtaagtgacaata

SEQ ID NO: 244037 - DNA, 21 bp, Artificial sequence
  SiRNA target sequence
taaaaatgtaagtgacaataa

SEQ ID NO: 244038 - DNA, 21 bp, Artificial sequence
  SiRNA target sequence
aaaaatgtaagtgacaataat

SEQ ID NO: 244039 - DNA, 21 bp, Artificial sequence
  SiRNA target sequence
aaaatgtaagtgacaataata

SEQ ID NO: 244040 - DNA, 21 bp, Artificial sequence
  SiRNA target sequence
aaatgtaagtgacaataatat

SEQ ID NO: 244041 - DNA, 21 bp, Artificial sequence
  SiRNA target sequence
aatgtaagtgacaataatatt

SEQ ID NO: 244042 - DNA, 21 bp, Artificial sequence
  SiRNA target sequence
atgtaagtgacaataatattt

SEQ ID NO: 244043 - DNA, 21 bp, Artificial sequence
  SiRNA target sequence
tgtaagtgacaataatatttt

SEQ ID NO: 244044 - DNA, 21 bp, Artificial sequence
  SiRNA target sequence
gtaagtgacaataatattttt

SEQ ID NO: 244045 - DNA, 21 bp, Artificial sequence
  SiRNA target sequence
taagtgacaataatattttta

SEQ ID NO: 244046 - DNA, 21 bp, Artificial sequence
  SiRNA target sequence
aagtgacaataatatttttac

SEQ ID NO: 244047 - DNA, 21 bp, Artificial sequence
  SiRNA target sequence
agtgacaataatatttttact

SEQ ID NO: 244048 - DNA, 21 bp, Artificial sequence
  SiRNA target sequence
gtgacaataatatttttactt

SEQ ID NO: 244049 - DNA, 21 bp, Artificial sequence
  SiRNA target sequence
tgacaataatatttttacttt

SEQ ID NO: 244050 - DNA, 21 bp, Artificial sequence
  SiRNA target sequence
gacaataatatttttactttt

SEQ ID NO: 244051 - DNA, 21 bp, Artificial sequence
  SiRNA target sequence
acaataatatttttacttttg

SEQ ID NO: 244052 - DNA, 21 bp, Artificial sequence
  SiRNA target sequence
caataatatttttacttttgg

SEQ ID NO: 244053 - DNA, 21 bp, Artificial sequence
  SiRNA target sequence
aataatatttttacttttggg

SEQ ID NO: 244054 - DNA, 21 bp, Artificial sequence
  SiRNA target sequence
ataatatttttacttttggga

SEQ ID NO: 244055 - DNA, 21 bp, Artificial sequence
  SiRNA target sequence
taatatttttacttttgggaa

SEQ ID NO: 244056 - DNA, 21 bp, Artificial sequence
  SiRNA target sequence
aatatttttacttttgggaat

SEQ ID NO: 244057 - DNA, 21 bp, Artificial sequence
  SiRNA target sequence
atatttttacttttgggaatt

SEQ ID NO: 244058 - DNA, 21 bp, Artificial sequence
  SiRNA target sequence
tatttttacttttgggaattt

SEQ ID NO: 244059 - DNA, 21 bp, Artificial sequence
  SiRNA target sequence
atttttacttttgggaatttt

SEQ ID NO: 244060 - DNA, 21 bp, Artificial sequence
  SiRNA target sequence
tttttacttttgggaattttt

SEQ ID NO: 244061 - DNA, 21 bp, Artificial sequence
  SiRNA target sequence
ttttacttttgggaatttttt

SEQ ID NO: 244062 - DNA, 21 bp, Artificial sequence
  SiRNA target sequence
tttacttttgggaattttttt

SEQ ID NO: 244063 - DNA, 21 bp, Artificial sequence
  SiRNA target sequence
ttacttttgggaatttttttg

SEQ ID NO: 244064 - DNA, 21 bp, Artificial sequence
  SiRNA target sequence
tacttttgggaatttttttgt

SEQ ID NO: 244065 - DNA, 21 bp, Artificial sequence
  SiRNA target sequence
acttttgggaatttttttgtc

SEQ ID NO: 244066 - DNA, 21 bp, Artificial sequence
  SiRNA target sequence
cttttgggaatttttttgtct

SEQ ID NO: 244067 - DNA, 21 bp, Artificial sequence
  SiRNA target sequence
ttttgggaatttttttgtctt

SEQ ID NO: 244068 - DNA, 21 bp, Artificial sequence
  SiRNA target sequence
tttgggaatttttttgtctta

SEQ ID NO: 244069 - DNA, 21 bp, Artificial sequence
  SiRNA target sequence
ttgggaatttttttgtcttag

SEQ ID NO: 244070 - DNA, 21 bp, Artificial sequence
  SiRNA target sequence
tgggaatttttttgtcttagt

SEQ ID NO: 244071 - DNA, 21 bp, Artificial sequence
  SiRNA target sequence
gggaatttttttgtcttagtc

SEQ ID NO: 244072 - DNA, 21 bp, Artificial sequence
  SiRNA target sequence
ggaatttttttgtcttagtca

SEQ ID NO: 244073 - DNA, 21 bp, Artificial sequence
  SiRNA target sequence
gaatttttttgtcttagtcat

SEQ ID NO: 244074 - DNA, 22 bp, Artificial sequence
  SiRNA target sequence
ttaattaaaatcaacatctatc

SEQ ID NO: 244075 - DNA, 22 bp, Artificial sequence
  SiRNA target sequence
taattaaaatcaacatctatct

SEQ ID NO: 244076 - DNA, 22 bp, Artificial sequence
  SiRNA target sequence
aattaaaatcaacatctatctc

SEQ ID NO: 244077 - DNA, 22 bp, Artificial sequence
  SiRNA target sequence
attaaaatcaacatctatctca

SEQ ID NO: 244078 - DNA, 22 bp, Artificial sequence
  SiRNA target sequence
ttaaaatcaacatctatctcag

SEQ ID NO: 244079 - DNA, 22 bp, Artificial sequence
  SiRNA target sequence
taaaatcaacatctatctcaga

SEQ ID NO: 244080 - DNA, 22 bp, Artificial sequence
  SiRNA target sequence
aaaatcaacatctatctcagaa

SEQ ID NO: 244081 - DNA, 22 bp, Artificial sequence
  SiRNA target sequence
aaatcaacatctatctcagaat

SEQ ID NO: 244082 - DNA, 22 bp, Artificial sequence
  SiRNA target sequence
aatcaacatctatctcagaatt

SEQ ID NO: 244083 - DNA, 22 bp, Artificial sequence
  SiRNA target sequence
atcaacatctatctcagaattt

SEQ ID NO: 244084 - DNA, 22 bp, Artificial sequence
  SiRNA target sequence
tcaacatctatctcagaatttt

SEQ ID NO: 244085 - DNA, 22 bp, Artificial sequence
  SiRNA target sequence
caacatctatctcagaattttg

SEQ ID NO: 244086 - DNA, 22 bp, Artificial sequence
  SiRNA target sequence
aacatctatctcagaattttgt

SEQ ID NO: 244087 - DNA, 22 bp, Artificial sequence
  SiRNA target sequence
acatctatctcagaattttgtt

SEQ ID NO: 244088 - DNA, 22 bp, Artificial sequence
  SiRNA target sequence
catctatctcagaattttgttc

SEQ ID NO: 244089 - DNA, 22 bp, Artificial sequence
  SiRNA target sequence
atctatctcagaattttgttca

SEQ ID NO: 244090 - DNA, 22 bp, Artificial sequence
  SiRNA target sequence
tctatctcagaattttgttcaa

SEQ ID NO: 244091 - DNA, 22 bp, Artificial sequence
  SiRNA target sequence
ctatctcagaattttgttcaat

SEQ ID NO: 244092 - DNA, 22 bp, Artificial sequence
  SiRNA target sequence
tatctcagaattttgttcaatt

SEQ ID NO: 244093 - DNA, 22 bp, Artificial sequence
  SiRNA target sequence
atctcagaattttgttcaattg

SEQ ID NO: 244094 - DNA, 22 bp, Artificial sequence
  SiRNA target sequence
tctcagaattttgttcaattga

SEQ ID NO: 244095 - DNA, 22 bp, Artificial sequence
  SiRNA target sequence
ctcagaattttgttcaattgat

SEQ ID NO: 244096 - DNA, 22 bp, Artificial sequence
  SiRNA target sequence
tcagaattttgttcaattgatt

SEQ ID NO: 244097 - DNA, 22 bp, Artificial sequence
  SiRNA target sequence
cagaattttgttcaattgattc

SEQ ID NO: 244098 - DNA, 22 bp, Artificial sequence
  SiRNA target sequence
agaattttgttcaattgattca

SEQ ID NO: 244099 - DNA, 22 bp, Artificial sequence
  SiRNA target sequence
gaattttgttcaattgattcat

SEQ ID NO: 244100 - DNA, 22 bp, Artificial sequence
  SiRNA target sequence
aattttgttcaattgattcatt

SEQ ID NO: 244101 - DNA, 22 bp, Artificial sequence
  SiRNA target sequence
attttgttcaattgattcatta

SEQ ID NO: 244102 - DNA, 22 bp, Artificial sequence
  SiRNA target sequence
ttttgttcaattgattcattat

SEQ ID NO: 244103 - DNA, 22 bp, Artificial sequence
  SiRNA target sequence
tttgttcaattgattcattata

SEQ ID NO: 244104 - DNA, 22 bp, Artificial sequence
  SiRNA target sequence
ttgttcaattgattcattatat

SEQ ID NO: 244105 - DNA, 22 bp, Artificial sequence
  SiRNA target sequence
tgttcaattgattcattatatt

SEQ ID NO: 244106 - DNA, 22 bp, Artificial sequence
  SiRNA target sequence
gttcaattgattcattatattt

SEQ ID NO: 244107 - DNA, 22 bp, Artificial sequence
  SiRNA target sequence
ttcaattgattcattatatttt

SEQ ID NO: 244108 - DNA, 22 bp, Artificial sequence
  SiRNA target sequence
tcaattgattcattatattttt

SEQ ID NO: 244109 - DNA, 22 bp, Artificial sequence
  SiRNA target sequence
caattgattcattatatttttt

SEQ ID NO: 244110 - DNA, 22 bp, Artificial sequence
  SiRNA target sequence
aattgattcattatatttttta

SEQ ID NO: 244111 - DNA, 22 bp, Artificial sequence
  SiRNA target sequence
attgattcattatattttttac

SEQ ID NO: 244112 - DNA, 22 bp, Artificial sequence
  SiRNA target sequence
ttgattcattatattttttact

SEQ ID NO: 244113 - DNA, 22 bp, Artificial sequence
  SiRNA target sequence
tgattcattatattttttactt

SEQ ID NO: 244114 - DNA, 22 bp, Artificial sequence
  SiRNA target sequence
gattcattatattttttactta

SEQ ID NO: 244115 - DNA, 22 bp, Artificial sequence
  SiRNA target sequence
attcattatattttttacttaa

SEQ ID NO: 244116 - DNA, 22 bp, Artificial sequence
  SiRNA target sequence
ttcattatattttttacttaaa

SEQ ID NO: 244117 - DNA, 22 bp, Artificial sequence
  SiRNA target sequence
tcattatattttttacttaaat

SEQ ID NO: 244118 - DNA, 22 bp, Artificial sequence
  SiRNA target sequence
cattatattttttacttaaata

SEQ ID NO: 244119 - DNA, 22 bp, Artificial sequence
  SiRNA target sequence
attatattttttacttaaataa

SEQ ID NO: 244120 - DNA, 22 bp, Artificial sequence
  SiRNA target sequence
ttatattttttacttaaataac

SEQ ID NO: 244121 - DNA, 22 bp, Artificial sequence
  SiRNA target sequence
tatattttttacttaaataaca

SEQ ID NO: 244122 - DNA, 22 bp, Artificial sequence
  SiRNA target sequence
atattttttacttaaataacag

SEQ ID NO: 244123 - DNA, 22 bp, Artificial sequence
  SiRNA target sequence
tattttttacttaaataacaga

SEQ ID NO: 244124 - DNA, 22 bp, Artificial sequence
  SiRNA target sequence
attttttacttaaataacagac

SEQ ID NO: 244125 - DNA, 22 bp, Artificial sequence
  SiRNA target sequence
ttttttacttaaataacagaca

SEQ ID NO: 244126 - DNA, 22 bp, Artificial sequence
  SiRNA target sequence
tttttacttaaataacagacac

SEQ ID NO: 244127 - DNA, 22 bp, Artificial sequence
  SiRNA target sequence
ttttacttaaataacagacact

SEQ ID NO: 244128 - DNA, 22 bp, Artificial sequence
  SiRNA target sequence
tttacttaaataacagacactc

SEQ ID NO: 244129 - DNA, 22 bp, Artificial sequence
  SiRNA target sequence
ttacttaaataacagacactcc

SEQ ID NO: 244130 - DNA, 22 bp, Artificial sequence
  SiRNA target sequence
tacttaaataacagacactcct

SEQ ID NO: 244131 - DNA, 22 bp, Artificial sequence
  SiRNA target sequence
acttaaataacagacactcctg

SEQ ID NO: 244132 - DNA, 22 bp, Artificial sequence
  SiRNA target sequence
cttaaataacagacactcctga

SEQ ID NO: 244133 - DNA, 22 bp, Artificial sequence
  SiRNA target sequence
ttaaataacagacactcctgat

SEQ ID NO: 244134 - DNA, 22 bp, Artificial sequence
  SiRNA target sequence
taaataacagacactcctgatc

SEQ ID NO: 244135 - DNA, 22 bp, Artificial sequence
  SiRNA target sequence
aaataacagacactcctgatcc

SEQ ID NO: 244136 - DNA, 22 bp, Artificial sequence
  SiRNA target sequence
aataacagacactcctgatcca

SEQ ID NO: 244137 - DNA, 22 bp, Artificial sequence
  SiRNA target sequence
ataacagacactcctgatccac

SEQ ID NO: 244138 - DNA, 22 bp, Artificial sequence
  SiRNA target sequence
taacagacactcctgatccaca

SEQ ID NO: 244139 - DNA, 22 bp, Artificial sequence
  SiRNA target sequence
aacagacactcctgatccacaa

SEQ ID NO: 244140 - DNA, 22 bp, Artificial sequence
  SiRNA target sequence
acagacactcctgatccacaaa

SEQ ID NO: 244141 - DNA, 22 bp, Artificial sequence
  SiRNA target sequence
cagacactcctgatccacaaaa

SEQ ID NO: 244142 - DNA, 22 bp, Artificial sequence
  SiRNA target sequence
agacactcctgatccacaaaaa

SEQ ID NO: 244143 - DNA, 22 bp, Artificial sequence
  SiRNA target sequence
gacactcctgatccacaaaaaa

SEQ ID NO: 244144 - DNA, 22 bp, Artificial sequence
  SiRNA target sequence
acactcctgatccacaaaaaat

SEQ ID NO: 244145 - DNA, 22 bp, Artificial sequence
  SiRNA target sequence
cactcctgatccacaaaaaatt

SEQ ID NO: 244146 - DNA, 22 bp, Artificial sequence
  SiRNA target sequence
actcctgatccacaaaaaattt

SEQ ID NO: 244147 - DNA, 22 bp, Artificial sequence
  SiRNA target sequence
ctcctgatccacaaaaaatttg

SEQ ID NO: 244148 - DNA, 22 bp, Artificial sequence
  SiRNA target sequence
tcctgatccacaaaaaatttgc

SEQ ID NO: 244149 - DNA, 22 bp, Artificial sequence
  SiRNA target sequence
cctgatccacaaaaaatttgca

SEQ ID NO: 244150 - DNA, 22 bp, Artificial sequence
  SiRNA target sequence
ctgatccacaaaaaatttgcaa

SEQ ID NO: 244151 - DNA, 22 bp, Artificial sequence
  SiRNA target sequence
tgatccacaaaaaatttgcaaa

SEQ ID NO: 244152 - DNA, 22 bp, Artificial sequence
  SiRNA target sequence
gatccacaaaaaatttgcaaat

SEQ ID NO: 244153 - DNA, 22 bp, Artificial sequence
  SiRNA target sequence
atccacaaaaaatttgcaaata

SEQ ID NO: 244154 - DNA, 22 bp, Artificial sequence
  SiRNA target sequence
tccacaaaaaatttgcaaatat

SEQ ID NO: 244155 - DNA, 22 bp, Artificial sequence
  SiRNA target sequence
ccacaaaaaatttgcaaatatt

SEQ ID NO: 244156 - DNA, 22 bp, Artificial sequence
  SiRNA target sequence
cacaaaaaatttgcaaatatta

SEQ ID NO: 244157 - DNA, 22 bp, Artificial sequence
  SiRNA target sequence
acaaaaaatttgcaaatattaa

SEQ ID NO: 244158 - DNA, 22 bp, Artificial sequence
  SiRNA target sequence
caaaaaatttgcaaatattaaa

SEQ ID NO: 244159 - DNA, 22 bp, Artificial sequence
  SiRNA target sequence
aaaaaatttgcaaatattaaaa

SEQ ID NO: 244160 - DNA, 22 bp, Artificial sequence
  SiRNA target sequence
aaaaatttgcaaatattaaaaa

SEQ ID NO: 244161 - DNA, 22 bp, Artificial sequence
  SiRNA target sequence
aaaatttgcaaatattaaaaat

SEQ ID NO: 244162 - DNA, 22 bp, Artificial sequence
  SiRNA target sequence
aaatttgcaaatattaaaaata

SEQ ID NO: 244163 - DNA, 22 bp, Artificial sequence
  SiRNA target sequence
aatttgcaaatattaaaaatat

SEQ ID NO: 244164 - DNA, 22 bp, Artificial sequence
  SiRNA target sequence
atttgcaaatattaaaaatata

SEQ ID NO: 244165 - DNA, 22 bp, Artificial sequence
  SiRNA target sequence
tttgcaaatattaaaaatataa

SEQ ID NO: 244166 - DNA, 22 bp, Artificial sequence
  SiRNA target sequence
ttgcaaatattaaaaatataaa

SEQ ID NO: 244167 - DNA, 22 bp, Artificial sequence
  SiRNA target sequence
tgcaaatattaaaaatataaaa

SEQ ID NO: 244168 - DNA, 22 bp, Artificial sequence
  SiRNA target sequence
gcaaatattaaaaatataaaag

SEQ ID NO: 244169 - DNA, 22 bp, Artificial sequence
  SiRNA target sequence
caaatattaaaaatataaaaga

SEQ ID NO: 244170 - DNA, 22 bp, Artificial sequence
  SiRNA target sequence
aaatattaaaaatataaaagac

SEQ ID NO: 244171 - DNA, 22 bp, Artificial sequence
  SiRNA target sequence
aatattaaaaatataaaagaca

SEQ ID NO: 244172 - DNA, 22 bp, Artificial sequence
  SiRNA target sequence
atattaaaaatataaaagacac

SEQ ID NO: 244173 - DNA, 22 bp, Artificial sequence
  SiRNA target sequence
tattaaaaatataaaagacacg

SEQ ID NO: 244174 - DNA, 22 bp, Artificial sequence
  SiRNA target sequence
attaaaaatataaaagacacgt

SEQ ID NO: 244175 - DNA, 22 bp, Artificial sequence
  SiRNA target sequence
ttaaaaatataaaagacacgta

SEQ ID NO: 244176 - DNA, 22 bp, Artificial sequence
  SiRNA target sequence
taaaaatataaaagacacgtat

SEQ ID NO: 244177 - DNA, 22 bp, Artificial sequence
  SiRNA target sequence
aaaaatataaaagacacgtatg

SEQ ID NO: 244178 - DNA, 22 bp, Artificial sequence
  SiRNA target sequence
aaaatataaaagacacgtatga

SEQ ID NO: 244179 - DNA, 22 bp, Artificial sequence
  SiRNA target sequence
aaatataaaagacacgtatgat

SEQ ID NO: 244180 - DNA, 22 bp, Artificial sequence
  SiRNA target sequence
aatataaaagacacgtatgata

SEQ ID NO: 244181 - DNA, 22 bp, Artificial sequence
  SiRNA target sequence
atataaaagacacgtatgatac

SEQ ID NO: 244182 - DNA, 22 bp, Artificial sequence
  SiRNA target sequence
tataaaagacacgtatgatact

SEQ ID NO: 244183 - DNA, 22 bp, Artificial sequence
  SiRNA target sequence
ataaaagacacgtatgatactt

SEQ ID NO: 244184 - DNA, 22 bp, Artificial sequence
  SiRNA target sequence
taaaagacacgtatgatacttg

SEQ ID NO: 244185 - DNA, 22 bp, Artificial sequence
  SiRNA target sequence
aaaagacacgtatgatacttgt

SEQ ID NO: 244186 - DNA, 22 bp, Artificial sequence
  SiRNA target sequence
aaagacacgtatgatacttgtc

SEQ ID NO: 244187 - DNA, 22 bp, Artificial sequence
  SiRNA target sequence
aagacacgtatgatacttgtct

SEQ ID NO: 244188 - DNA, 22 bp, Artificial sequence
  SiRNA target sequence
agacacgtatgatacttgtcta

SEQ ID NO: 244189 - DNA, 22 bp, Artificial sequence
  SiRNA target sequence
gacacgtatgatacttgtctaa

SEQ ID NO: 244190 - DNA, 22 bp, Artificial sequence
  SiRNA target sequence
acacgtatgatacttgtctaat

SEQ ID NO: 244191 - DNA, 22 bp, Artificial sequence
  SiRNA target sequence
cacgtatgatacttgtctaata

SEQ ID NO: 244192 - DNA, 22 bp, Artificial sequence
  SiRNA target sequence
acgtatgatacttgtctaatat

SEQ ID NO: 244193 - DNA, 22 bp, Artificial sequence
  SiRNA target sequence
cgtatgatacttgtctaatatc

SEQ ID NO: 244194 - DNA, 22 bp, Artificial sequence
  SiRNA target sequence
gtatgatacttgtctaatatct

SEQ ID NO: 244195 - DNA, 22 bp, Artificial sequence
  SiRNA target sequence
tatgatacttgtctaatatctg

SEQ ID NO: 244196 - DNA, 22 bp, Artificial sequence
  SiRNA target sequence
atgatacttgtctaatatctgg

SEQ ID NO: 244197 - DNA, 22 bp, Artificial sequence
  SiRNA target sequence
tgatacttgtctaatatctgga

SEQ ID NO: 244198 - DNA, 22 bp, Artificial sequence
  SiRNA target sequence
gatacttgtctaatatctggaa

SEQ ID NO: 244199 - DNA, 22 bp, Artificial sequence
  SiRNA target sequence
atacttgtctaatatctggaat

SEQ ID NO: 244200 - DNA, 22 bp, Artificial sequence
  SiRNA target sequence
tacttgtctaatatctggaatt

SEQ ID NO: 244201 - DNA, 22 bp, Artificial sequence
  SiRNA target sequence
acttgtctaatatctggaattt

SEQ ID NO: 244202 - DNA, 22 bp, Artificial sequence
  SiRNA target sequence
cttgtctaatatctggaatttc

SEQ ID NO: 244203 - DNA, 22 bp, Artificial sequence
  SiRNA target sequence
ttgtctaatatctggaatttct

SEQ ID NO: 244204 - DNA, 22 bp, Artificial sequence
  SiRNA target sequence
tgtctaatatctggaatttcta

SEQ ID NO: 244205 - DNA, 22 bp, Artificial sequence
  SiRNA target sequence
gtctaatatctggaatttctat

SEQ ID NO: 244206 - DNA, 22 bp, Artificial sequence
  SiRNA target sequence
tctaatatctggaatttctata

SEQ ID NO: 244207 - DNA, 22 bp, Artificial sequence
  SiRNA target sequence
ctaatatctggaatttctataa

SEQ ID NO: 244208 - DNA, 22 bp, Artificial sequence
  SiRNA target sequence
taatatctggaatttctataaa

SEQ ID NO: 244209 - DNA, 22 bp, Artificial sequence
  SiRNA target sequence
aatatctggaatttctataaac

SEQ ID NO: 244210 - DNA, 22 bp, Artificial sequence
  SiRNA target sequence
atatctggaatttctataaacg

SEQ ID NO: 244211 - DNA, 22 bp, Artificial sequence
  SiRNA target sequence
tatctggaatttctataaacgt

SEQ ID NO: 244212 - DNA, 22 bp, Artificial sequence
  SiRNA target sequence
atctggaatttctataaacgtc

SEQ ID NO: 244213 - DNA, 22 bp, Artificial sequence
  SiRNA target sequence
tctggaatttctataaacgtca

SEQ ID NO: 244214 - DNA, 22 bp, Artificial sequence
  SiRNA target sequence
ctggaatttctataaacgtcaa

SEQ ID NO: 244215 - DNA, 22 bp, Artificial sequence
  SiRNA target sequence
tggaatttctataaacgtcaaa

SEQ ID NO: 244216 - DNA, 22 bp, Artificial sequence
  SiRNA target sequence
ggaatttctataaacgtcaaaa

SEQ ID NO: 244217 - DNA, 22 bp, Artificial sequence
  SiRNA target sequence
gaatttctataaacgtcaaaaa

SEQ ID NO: 244218 - DNA, 22 bp, Artificial sequence
  SiRNA target sequence
aatttctataaacgtcaaaaaa

SEQ ID NO: 244219 - DNA, 22 bp, Artificial sequence
  SiRNA target sequence
atttctataaacgtcaaaaaag

SEQ ID NO: 244220 - DNA, 22 bp, Artificial sequence
  SiRNA target sequence
tttctataaacgtcaaaaaagt

SEQ ID NO: 244221 - DNA, 22 bp, Artificial sequence
  SiRNA target sequence
ttctataaacgtcaaaaaagtt

SEQ ID NO: 244222 - DNA, 22 bp, Artificial sequence
  SiRNA target sequence
tctataaacgtcaaaaaagttc

SEQ ID NO: 244223 - DNA, 22 bp, Artificial sequence
  SiRNA target sequence
ctataaacgtcaaaaaagttcc

SEQ ID NO: 244224 - DNA, 22 bp, Artificial sequence
  SiRNA target sequence
tataaacgtcaaaaaagttcca

SEQ ID NO: 244225 - DNA, 22 bp, Artificial sequence
  SiRNA target sequence
ataaacgtcaaaaaagttccat

SEQ ID NO: 244226 - DNA, 22 bp, Artificial sequence
  SiRNA target sequence
taaacgtcaaaaaagttccata

SEQ ID NO: 244227 - DNA, 22 bp, Artificial sequence
  SiRNA target sequence
aaacgtcaaaaaagttccatat

SEQ ID NO: 244228 - DNA, 22 bp, Artificial sequence
  SiRNA target sequence
aacgtcaaaaaagttccatata

SEQ ID NO: 244229 - DNA, 22 bp, Artificial sequence
  SiRNA target sequence
acgtcaaaaaagttccatataa

SEQ ID NO: 244230 - DNA, 22 bp, Artificial sequence
  SiRNA target sequence
cgtcaaaaaagttccatataaa

SEQ ID NO: 244231 - DNA, 22 bp, Artificial sequence
  SiRNA target sequence
gtcaaaaaagttccatataaag

SEQ ID NO: 244232 - DNA, 22 bp, Artificial sequence
  SiRNA target sequence
tcaaaaaagttccatataaaga

SEQ ID NO: 244233 - DNA, 22 bp, Artificial sequence
  SiRNA target sequence
caaaaaagttccatataaagag

SEQ ID NO: 244234 - DNA, 22 bp, Artificial sequence
  SiRNA target sequence
aaaaaagttccatataaagaga

SEQ ID NO: 244235 - DNA, 22 bp, Artificial sequence
  SiRNA target sequence
aaaaagttccatataaagagat

SEQ ID NO: 244236 - DNA, 22 bp, Artificial sequence
  SiRNA target sequence
aaaagttccatataaagagata

SEQ ID NO: 244237 - DNA, 22 bp, Artificial sequence
  SiRNA target sequence
aaagttccatataaagagataa

SEQ ID NO: 244238 - DNA, 22 bp, Artificial sequence
  SiRNA target sequence
aagttccatataaagagataat

SEQ ID NO: 244239 - DNA, 22 bp, Artificial sequence
  SiRNA target sequence
agttccatataaagagataata

SEQ ID NO: 244240 - DNA, 22 bp, Artificial sequence
  SiRNA target sequence
gttccatataaagagataatag

SEQ ID NO: 244241 - DNA, 22 bp, Artificial sequence
  SiRNA target sequence
ttccatataaagagataataga

SEQ ID NO: 244242 - DNA, 22 bp, Artificial sequence
  SiRNA target sequence
tccatataaagagataatagat

SEQ ID NO: 244243 - DNA, 22 bp, Artificial sequence
  SiRNA target sequence
ccatataaagagataatagatt

SEQ ID NO: 244244 - DNA, 22 bp, Artificial sequence
  SiRNA target sequence
catataaagagataatagattt

SEQ ID NO: 244245 - DNA, 22 bp, Artificial sequence
  SiRNA target sequence
atataaagagataatagattta

SEQ ID NO: 244246 - DNA, 22 bp, Artificial sequence
  SiRNA target sequence
tataaagagataatagatttac

SEQ ID NO: 244247 - DNA, 22 bp, Artificial sequence
  SiRNA target sequence
ataaagagataatagatttacc

SEQ ID NO: 244248 - DNA, 22 bp, Artificial sequence
  SiRNA target sequence
taaagagataatagatttacca

SEQ ID NO: 244249 - DNA, 22 bp, Artificial sequence
  SiRNA target sequence
aaagagataatagatttaccaa

SEQ ID NO: 244250 - DNA, 22 bp, Artificial sequence
  SiRNA target sequence
aagagataatagatttaccaat

SEQ ID NO: 244251 - DNA, 22 bp, Artificial sequence
  SiRNA target sequence
agagataatagatttaccaatt

SEQ ID NO: 244252 - DNA, 22 bp, Artificial sequence
  SiRNA target sequence
gagataatagatttaccaattt

SEQ ID NO: 244253 - DNA, 22 bp, Artificial sequence
  SiRNA target sequence
agataatagatttaccaatttt

SEQ ID NO: 244254 - DNA, 22 bp, Artificial sequence
  SiRNA target sequence
gataatagatttaccaattttg

SEQ ID NO: 244255 - DNA, 22 bp, Artificial sequence
  SiRNA target sequence
ataatagatttaccaattttga

SEQ ID NO: 244256 - DNA, 22 bp, Artificial sequence
  SiRNA target sequence
taatagatttaccaattttgat

SEQ ID NO: 244257 - DNA, 22 bp, Artificial sequence
  SiRNA target sequence
aatagatttaccaattttgata

SEQ ID NO: 244258 - DNA, 22 bp, Artificial sequence
  SiRNA target sequence
atagatttaccaattttgatac

SEQ ID NO: 244259 - DNA, 22 bp, Artificial sequence
  SiRNA target sequence
tagatttaccaattttgataca

SEQ ID NO: 244260 - DNA, 22 bp, Artificial sequence
  SiRNA target sequence
agatttaccaattttgatacat

SEQ ID NO: 244261 - DNA, 22 bp, Artificial sequence
  SiRNA target sequence
gatttaccaattttgatacata

SEQ ID NO: 244262 - DNA, 22 bp, Artificial sequence
  SiRNA target sequence
atttaccaattttgatacatac

SEQ ID NO: 244263 - DNA, 22 bp, Artificial sequence
  SiRNA target sequence
tttaccaattttgatacataca

SEQ ID NO: 244264 - DNA, 22 bp, Artificial sequence
  SiRNA target sequence
ttaccaattttgatacatacac

SEQ ID NO: 244265 - DNA, 22 bp, Artificial sequence
  SiRNA target sequence
taccaattttgatacatacacc

SEQ ID NO: 244266 - DNA, 22 bp, Artificial sequence
  SiRNA target sequence
accaattttgatacatacacca

SEQ ID NO: 244267 - DNA, 22 bp, Artificial sequence
  SiRNA target sequence
ccaattttgatacatacaccat

SEQ ID NO: 244268 - DNA, 22 bp, Artificial sequence
  SiRNA target sequence
caattttgatacatacaccatc

SEQ ID NO: 244269 - DNA, 22 bp, Artificial sequence
  SiRNA target sequence
aattttgatacatacaccatca

SEQ ID NO: 244270 - DNA, 22 bp, Artificial sequence
  SiRNA target sequence
attttgatacatacaccatcat

SEQ ID NO: 244271 - DNA, 22 bp, Artificial sequence
  SiRNA target sequence
ttttgatacatacaccatcata

SEQ ID NO: 244272 - DNA, 22 bp, Artificial sequence
  SiRNA target sequence
tttgatacatacaccatcataa

SEQ ID NO: 244273 - DNA, 22 bp, Artificial sequence
  SiRNA target sequence
ttgatacatacaccatcataaa

SEQ ID NO: 244274 - DNA, 22 bp, Artificial sequence
  SiRNA target sequence
tgatacatacaccatcataaaa

SEQ ID NO: 244275 - DNA, 22 bp, Artificial sequence
  SiRNA target sequence
gatacatacaccatcataaaaa

SEQ ID NO: 244276 - DNA, 22 bp, Artificial sequence
  SiRNA target sequence
atacatacaccatcataaaaac

SEQ ID NO: 244277 - DNA, 22 bp, Artificial sequence
  SiRNA target sequence
tacatacaccatcataaaaact

SEQ ID NO: 244278 - DNA, 22 bp, Artificial sequence
  SiRNA target sequence
acatacaccatcataaaaactt

SEQ ID NO: 244279 - DNA, 22 bp, Artificial sequence
  SiRNA target sequence
catacaccatcataaaaacttt

SEQ ID NO: 244280 - DNA, 22 bp, Artificial sequence
  SiRNA target sequence
atacaccatcataaaaactttt

SEQ ID NO: 244281 - DNA, 22 bp, Artificial sequence
  SiRNA target sequence
tacaccatcataaaaactttta

SEQ ID NO: 244282 - DNA, 22 bp, Artificial sequence
  SiRNA target sequence
acaccatcataaaaacttttaa

SEQ ID NO: 244283 - DNA, 22 bp, Artificial sequence
  SiRNA target sequence
caccatcataaaaacttttaaa

SEQ ID NO: 244284 - DNA, 22 bp, Artificial sequence
  SiRNA target sequence
accatcataaaaacttttaaat

SEQ ID NO: 244285 - DNA, 22 bp, Artificial sequence
  SiRNA target sequence
ccatcataaaaacttttaaatt

SEQ ID NO: 244286 - DNA, 22 bp, Artificial sequence
  SiRNA target sequence
catcataaaaacttttaaattt

SEQ ID NO: 244287 - DNA, 22 bp, Artificial sequence
  SiRNA target sequence
atcataaaaacttttaaattta

SEQ ID NO: 244288 - DNA, 22 bp, Artificial sequence
  SiRNA target sequence
tcataaaaacttttaaatttat

SEQ ID NO: 244289 - DNA, 22 bp, Artificial sequence
  SiRNA target sequence
cataaaaacttttaaatttata

SEQ ID NO: 244290 - DNA, 22 bp, Artificial sequence
  SiRNA target sequence
ataaaaacttttaaatttatac

SEQ ID NO: 244291 - DNA, 22 bp, Artificial sequence
  SiRNA target sequence
taaaaacttttaaatttatacc

SEQ ID NO: 244292 - DNA, 22 bp, Artificial sequence
  SiRNA target sequence
aaaaacttttaaatttatacct

SEQ ID NO: 244293 - DNA, 22 bp, Artificial sequence
  SiRNA target sequence
aaaacttttaaatttatacctg

SEQ ID NO: 244294 - DNA, 22 bp, Artificial sequence
  SiRNA target sequence
aaacttttaaatttatacctgt

SEQ ID NO: 244295 - DNA, 22 bp, Artificial sequence
  SiRNA target sequence
aacttttaaatttatacctgta

SEQ ID NO: 244296 - DNA, 22 bp, Artificial sequence
  SiRNA target sequence
acttttaaatttatacctgtat

SEQ ID NO: 244297 - DNA, 22 bp, Artificial sequence
  SiRNA target sequence
cttttaaatttatacctgtatt

SEQ ID NO: 244298 - DNA, 22 bp, Artificial sequence
  SiRNA target sequence
ttttaaatttatacctgtattt

SEQ ID NO: 244299 - DNA, 22 bp, Artificial sequence
  SiRNA target sequence
tttaaatttatacctgtattta

SEQ ID NO: 244300 - DNA, 22 bp, Artificial sequence
  SiRNA target sequence
ttaaatttatacctgtatttaa

SEQ ID NO: 244301 - DNA, 22 bp, Artificial sequence
  SiRNA target sequence
taaatttatacctgtatttaac

SEQ ID NO: 244302 - DNA, 22 bp, Artificial sequence
  SiRNA target sequence
aaatttatacctgtatttaaca

SEQ ID NO: 244303 - DNA, 22 bp, Artificial sequence
  SiRNA target sequence
aatttatacctgtatttaacag

SEQ ID NO: 244304 - DNA, 22 bp, Artificial sequence
  SiRNA target sequence
atttatacctgtatttaacagg

SEQ ID NO: 244305 - DNA, 22 bp, Artificial sequence
  SiRNA target sequence
tttatacctgtatttaacaggc

SEQ ID NO: 244306 - DNA, 22 bp, Artificial sequence
  SiRNA target sequence
ttatacctgtatttaacaggca

SEQ ID NO: 244307 - DNA, 22 bp, Artificial sequence
  SiRNA target sequence
tatacctgtatttaacaggcac

SEQ ID NO: 244308 - DNA, 22 bp, Artificial sequence
  SiRNA target sequence
atacctgtatttaacaggcacc

SEQ ID NO: 244309 - DNA, 22 bp, Artificial sequence
  SiRNA target sequence
tacctgtatttaacaggcaccc

SEQ ID NO: 244310 - DNA, 22 bp, Artificial sequence
  SiRNA target sequence
acctgtatttaacaggcaccct

SEQ ID NO: 244311 - DNA, 22 bp, Artificial sequence
  SiRNA target sequence
cctgtatttaacaggcaccctc

SEQ ID NO: 244312 - DNA, 22 bp, Artificial sequence
  SiRNA target sequence
ctgtatttaacaggcaccctca

SEQ ID NO: 244313 - DNA, 22 bp, Artificial sequence
  SiRNA target sequence
tgtatttaacaggcaccctcat

SEQ ID NO: 244314 - DNA, 22 bp, Artificial sequence
  SiRNA target sequence
gtatttaacaggcaccctcata

SEQ ID NO: 244315 - DNA, 22 bp, Artificial sequence
  SiRNA target sequence
tatttaacaggcaccctcatag

SEQ ID NO: 244316 - DNA, 22 bp, Artificial sequence
  SiRNA target sequence
atttaacaggcaccctcataga

SEQ ID NO: 244317 - DNA, 22 bp, Artificial sequence
  SiRNA target sequence
tttaacaggcaccctcatagaa

SEQ ID NO: 244318 - DNA, 22 bp, Artificial sequence
  SiRNA target sequence
ttaacaggcaccctcatagaaa

SEQ ID NO: 244319 - DNA, 22 bp, Artificial sequence
  SiRNA target sequence
taacaggcaccctcatagaaag

SEQ ID NO: 244320 - DNA, 22 bp, Artificial sequence
  SiRNA target sequence
aacaggcaccctcatagaaagc

SEQ ID NO: 244321 - DNA, 22 bp, Artificial sequence
  SiRNA target sequence
acaggcaccctcatagaaagca

SEQ ID NO: 244322 - DNA, 22 bp, Artificial sequence
  SiRNA target sequence
caggcaccctcatagaaagcat

SEQ ID NO: 244323 - DNA, 22 bp, Artificial sequence
  SiRNA target sequence
aggcaccctcatagaaagcatt

SEQ ID NO: 244324 - DNA, 22 bp, Artificial sequence
  SiRNA target sequence
ggcaccctcatagaaagcattt

SEQ ID NO: 244325 - DNA, 22 bp, Artificial sequence
  SiRNA target sequence
gcaccctcatagaaagcatttc

SEQ ID NO: 244326 - DNA, 22 bp, Artificial sequence
  SiRNA target sequence
caccctcatagaaagcatttct

SEQ ID NO: 244327 - DNA, 22 bp, Artificial sequence
  SiRNA target sequence
accctcatagaaagcatttctt

SEQ ID NO: 244328 - DNA, 22 bp, Artificial sequence
  SiRNA target sequence
ccctcatagaaagcatttcttt

SEQ ID NO: 244329 - DNA, 22 bp, Artificial sequence
  SiRNA target sequence
cctcatagaaagcatttctttt

SEQ ID NO: 244330 - DNA, 22 bp, Artificial sequence
  SiRNA target sequence
ctcatagaaagcatttcttttg

SEQ ID NO: 244331 - DNA, 22 bp, Artificial sequence
  SiRNA target sequence
tcatagaaagcatttcttttgc

SEQ ID NO: 244332 - DNA, 22 bp, Artificial sequence
  SiRNA target sequence
catagaaagcatttcttttgct

SEQ ID NO: 244333 - DNA, 22 bp, Artificial sequence
  SiRNA target sequence
atagaaagcatttcttttgcta

SEQ ID NO: 244334 - DNA, 22 bp, Artificial sequence
  SiRNA target sequence
tagaaagcatttcttttgctaa

SEQ ID NO: 244335 - DNA, 22 bp, Artificial sequence
  SiRNA target sequence
agaaagcatttcttttgctaaa

SEQ ID NO: 244336 - DNA, 22 bp, Artificial sequence
  SiRNA target sequence
gaaagcatttcttttgctaaat

SEQ ID NO: 244337 - DNA, 22 bp, Artificial sequence
  SiRNA target sequence
aaagcatttcttttgctaaatc

SEQ ID NO: 244338 - DNA, 22 bp, Artificial sequence
  SiRNA target sequence
aagcatttcttttgctaaatca

SEQ ID NO: 244339 - DNA, 22 bp, Artificial sequence
  SiRNA target sequence
agcatttcttttgctaaatcaa

SEQ ID NO: 244340 - DNA, 22 bp, Artificial sequence
  SiRNA target sequence
gcatttcttttgctaaatcaaa

SEQ ID NO: 244341 - DNA, 22 bp, Artificial sequence
  SiRNA target sequence
catttcttttgctaaatcaaat

SEQ ID NO: 244342 - DNA, 22 bp, Artificial sequence
  SiRNA target sequence
atttcttttgctaaatcaaata

SEQ ID NO: 244343 - DNA, 22 bp, Artificial sequence
  SiRNA target sequence
tttcttttgctaaatcaaataa

SEQ ID NO: 244344 - DNA, 22 bp, Artificial sequence
  SiRNA target sequence
ttcttttgctaaatcaaataaa

SEQ ID NO: 244345 - DNA, 22 bp, Artificial sequence
  SiRNA target sequence
tcttttgctaaatcaaataaaa

SEQ ID NO: 244346 - DNA, 22 bp, Artificial sequence
  SiRNA target sequence
cttttgctaaatcaaataaaac

SEQ ID NO: 244347 - DNA, 22 bp, Artificial sequence
  SiRNA target sequence
ttttgctaaatcaaataaaaca

SEQ ID NO: 244348 - DNA, 22 bp, Artificial sequence
  SiRNA target sequence
tttgctaaatcaaataaaacat

SEQ ID NO: 244349 - DNA, 22 bp, Artificial sequence
  SiRNA target sequence
ttgctaaatcaaataaaacata

SEQ ID NO: 244350 - DNA, 22 bp, Artificial sequence
  SiRNA target sequence
tgctaaatcaaataaaacatat

SEQ ID NO: 244351 - DNA, 22 bp, Artificial sequence
  SiRNA target sequence
gctaaatcaaataaaacatatt

SEQ ID NO: 244352 - DNA, 22 bp, Artificial sequence
  SiRNA target sequence
ctaaatcaaataaaacatattt

SEQ ID NO: 244353 - DNA, 22 bp, Artificial sequence
  SiRNA target sequence
taaatcaaataaaacatatttg

SEQ ID NO: 244354 - DNA, 22 bp, Artificial sequence
  SiRNA target sequence
aaatcaaataaaacatatttgg

SEQ ID NO: 244355 - DNA, 22 bp, Artificial sequence
  SiRNA target sequence
aatcaaataaaacatatttggt

SEQ ID NO: 244356 - DNA, 22 bp, Artificial sequence
  SiRNA target sequence
atcaaataaaacatatttggta

SEQ ID NO: 244357 - DNA, 22 bp, Artificial sequence
  SiRNA target sequence
tcaaataaaacatatttggtaa

SEQ ID NO: 244358 - DNA, 22 bp, Artificial sequence
  SiRNA target sequence
caaataaaacatatttggtaat

SEQ ID NO: 244359 - DNA, 22 bp, Artificial sequence
  SiRNA target sequence
aaataaaacatatttggtaatt

SEQ ID NO: 244360 - DNA, 22 bp, Artificial sequence
  SiRNA target sequence
aataaaacatatttggtaattt

SEQ ID NO: 244361 - DNA, 22 bp, Artificial sequence
  SiRNA target sequence
ataaaacatatttggtaatttt

SEQ ID NO: 244362 - DNA, 22 bp, Artificial sequence
  SiRNA target sequence
taaaacatatttggtaatttta

SEQ ID NO: 244363 - DNA, 22 bp, Artificial sequence
  SiRNA target sequence
aaaacatatttggtaattttag

SEQ ID NO: 244364 - DNA, 22 bp, Artificial sequence
  SiRNA target sequence
aaacatatttggtaattttaga

SEQ ID NO: 244365 - DNA, 22 bp, Artificial sequence
  SiRNA target sequence
aacatatttggtaattttagaa

SEQ ID NO: 244366 - DNA, 22 bp, Artificial sequence
  SiRNA target sequence
acatatttggtaattttagaaa

SEQ ID NO: 244367 - DNA, 22 bp, Artificial sequence
  SiRNA target sequence
catatttggtaattttagaaaa

SEQ ID NO: 244368 - DNA, 22 bp, Artificial sequence
  SiRNA target sequence
atatttggtaattttagaaaat

SEQ ID NO: 244369 - DNA, 22 bp, Artificial sequence
  SiRNA target sequence
tatttggtaattttagaaaatg

SEQ ID NO: 244370 - DNA, 22 bp, Artificial sequence
  SiRNA target sequence
atttggtaattttagaaaatgc

SEQ ID NO: 244371 - DNA, 22 bp, Artificial sequence
  SiRNA target sequence
tttggtaattttagaaaatgca

SEQ ID NO: 244372 - DNA, 22 bp, Artificial sequence
  SiRNA target sequence
ttggtaattttagaaaatgcaa

SEQ ID NO: 244373 - DNA, 22 bp, Artificial sequence
  SiRNA target sequence
tggtaattttagaaaatgcaaa

SEQ ID NO: 244374 - DNA, 22 bp, Artificial sequence
  SiRNA target sequence
ggtaattttagaaaatgcaaat

SEQ ID NO: 244375 - DNA, 22 bp, Artificial sequence
  SiRNA target sequence
gtaattttagaaaatgcaaatc

SEQ ID NO: 244376 - DNA, 22 bp, Artificial sequence
  SiRNA target sequence
taattttagaaaatgcaaatcc

SEQ ID NO: 244377 - DNA, 22 bp, Artificial sequence
  SiRNA target sequence
aattttagaaaatgcaaatcca

SEQ ID NO: 244378 - DNA, 22 bp, Artificial sequence
  SiRNA target sequence
attttagaaaatgcaaatccaa

SEQ ID NO: 244379 - DNA, 22 bp, Artificial sequence
  SiRNA target sequence
ttttagaaaatgcaaatccaat

SEQ ID NO: 244380 - DNA, 22 bp, Artificial sequence
  SiRNA target sequence
tttagaaaatgcaaatccaatg

SEQ ID NO: 244381 - DNA, 22 bp, Artificial sequence
  SiRNA target sequence
ttagaaaatgcaaatccaatgg

SEQ ID NO: 244382 - DNA, 22 bp, Artificial sequence
  SiRNA target sequence
tagaaaatgcaaatccaatggt

SEQ ID NO: 244383 - DNA, 22 bp, Artificial sequence
  SiRNA target sequence
agaaaatgcaaatccaatggtt

SEQ ID NO: 244384 - DNA, 22 bp, Artificial sequence
  SiRNA target sequence
gaaaatgcaaatccaatggttg

SEQ ID NO: 244385 - DNA, 22 bp, Artificial sequence
  SiRNA target sequence
aaaatgcaaatccaatggttgc

SEQ ID NO: 244386 - DNA, 22 bp, Artificial sequence
  SiRNA target sequence
aaatgcaaatccaatggttgca

SEQ ID NO: 244387 - DNA, 22 bp, Artificial sequence
  SiRNA target sequence
aatgcaaatccaatggttgcac

SEQ ID NO: 244388 - DNA, 22 bp, Artificial sequence
  SiRNA target sequence
atgcaaatccaatggttgcaca

SEQ ID NO: 244389 - DNA, 22 bp, Artificial sequence
  SiRNA target sequence
tgcaaatccaatggttgcacac

SEQ ID NO: 244390 - DNA, 22 bp, Artificial sequence
  SiRNA target sequence
gcaaatccaatggttgcacacc

SEQ ID NO: 244391 - DNA, 22 bp, Artificial sequence
  SiRNA target sequence
caaatccaatggttgcacacca

SEQ ID NO: 244392 - DNA, 22 bp, Artificial sequence
  SiRNA target sequence
aaatccaatggttgcacaccaa

SEQ ID NO: 244393 - DNA, 22 bp, Artificial sequence
  SiRNA target sequence
aatccaatggttgcacaccaat

SEQ ID NO: 244394 - DNA, 22 bp, Artificial sequence
  SiRNA target sequence
atccaatggttgcacaccaatt

SEQ ID NO: 244395 - DNA, 22 bp, Artificial sequence
  SiRNA target sequence
tccaatggttgcacaccaattt

SEQ ID NO: 244396 - DNA, 22 bp, Artificial sequence
  SiRNA target sequence
ccaatggttgcacaccaatttt

SEQ ID NO: 244397 - DNA, 22 bp, Artificial sequence
  SiRNA target sequence
caatggttgcacaccaattttc

SEQ ID NO: 244398 - DNA, 22 bp, Artificial sequence
  SiRNA target sequence
aatggttgcacaccaattttca

SEQ ID NO: 244399 - DNA, 22 bp, Artificial sequence
  SiRNA target sequence
atggttgcacaccaattttcaa

SEQ ID NO: 244400 - DNA, 22 bp, Artificial sequence
  SiRNA target sequence
tggttgcacaccaattttcaag

SEQ ID NO: 244401 - DNA, 22 bp, Artificial sequence
  SiRNA target sequence
ggttgcacaccaattttcaaga

SEQ ID NO: 244402 - DNA, 22 bp, Artificial sequence
  SiRNA target sequence
gttgcacaccaattttcaagat

SEQ ID NO: 244403 - DNA, 22 bp, Artificial sequence
  SiRNA target sequence
ttgcacaccaattttcaagatt

SEQ ID NO: 244404 - DNA, 22 bp, Artificial sequence
  SiRNA target sequence
tgcacaccaattttcaagattt

SEQ ID NO: 244405 - DNA, 22 bp, Artificial sequence
  SiRNA target sequence
gcacaccaattttcaagattta

SEQ ID NO: 244406 - DNA, 22 bp, Artificial sequence
  SiRNA target sequence
cacaccaattttcaagatttat

SEQ ID NO: 244407 - DNA, 22 bp, Artificial sequence
  SiRNA target sequence
acaccaattttcaagatttatt

SEQ ID NO: 244408 - DNA, 22 bp, Artificial sequence
  SiRNA target sequence
caccaattttcaagatttattc

SEQ ID NO: 244409 - DNA, 22 bp, Artificial sequence
  SiRNA target sequence
accaattttcaagatttattct

SEQ ID NO: 244410 - DNA, 22 bp, Artificial sequence
  SiRNA target sequence
ccaattttcaagatttattctt

SEQ ID NO: 244411 - DNA, 22 bp, Artificial sequence
  SiRNA target sequence
caattttcaagatttattctta

SEQ ID NO: 244412 - DNA, 22 bp, Artificial sequence
  SiRNA target sequence
aattttcaagatttattcttaa

SEQ ID NO: 244413 - DNA, 22 bp, Artificial sequence
  SiRNA target sequence
attttcaagatttattcttaag

SEQ ID NO: 244414 - DNA, 22 bp, Artificial sequence
  SiRNA target sequence
ttttcaagatttattcttaaga

SEQ ID NO: 244415 - DNA, 22 bp, Artificial sequence
  SiRNA target sequence
tttcaagatttattcttaagac

SEQ ID NO: 244416 - DNA, 22 bp, Artificial sequence
  SiRNA target sequence
ttcaagatttattcttaagacc

SEQ ID NO: 244417 - DNA, 22 bp, Artificial sequence
  SiRNA target sequence
tcaagatttattcttaagaccg

SEQ ID NO: 244418 - DNA, 22 bp, Artificial sequence
  SiRNA target sequence
caagatttattcttaagaccga

SEQ ID NO: 244419 - DNA, 22 bp, Artificial sequence
  SiRNA target sequence
aagatttattcttaagaccgat

SEQ ID NO: 244420 - DNA, 22 bp, Artificial sequence
  SiRNA target sequence
agatttattcttaagaccgatg

SEQ ID NO: 244421 - DNA, 22 bp, Artificial sequence
  SiRNA target sequence
gatttattcttaagaccgatgg

SEQ ID NO: 244422 - DNA, 22 bp, Artificial sequence
  SiRNA target sequence
atttattcttaagaccgatgga

SEQ ID NO: 244423 - DNA, 22 bp, Artificial sequence
  SiRNA target sequence
tttattcttaagaccgatggag

SEQ ID NO: 244424 - DNA, 22 bp, Artificial sequence
  SiRNA target sequence
ttattcttaagaccgatggagc

SEQ ID NO: 244425 - DNA, 22 bp, Artificial sequence
  SiRNA target sequence
tattcttaagaccgatggagct

SEQ ID NO: 244426 - DNA, 22 bp, Artificial sequence
  SiRNA target sequence
attcttaagaccgatggagctg

SEQ ID NO: 244427 - DNA, 22 bp, Artificial sequence
  SiRNA target sequence
ttcttaagaccgatggagctgt

SEQ ID NO: 244428 - DNA, 22 bp, Artificial sequence
  SiRNA target sequence
tcttaagaccgatggagctgtg

SEQ ID NO: 244429 - DNA, 22 bp, Artificial sequence
  SiRNA target sequence
cttaagaccgatggagctgtgc

SEQ ID NO: 244430 - DNA, 22 bp, Artificial sequence
  SiRNA target sequence
ttaagaccgatggagctgtgcg

SEQ ID NO: 244431 - DNA, 22 bp, Artificial sequence
  SiRNA target sequence
taagaccgatggagctgtgcgc

SEQ ID NO: 244432 - DNA, 22 bp, Artificial sequence
  SiRNA target sequence
aagaccgatggagctgtgcgca

SEQ ID NO: 244433 - DNA, 22 bp, Artificial sequence
  SiRNA target sequence
agaccgatggagctgtgcgcaa

SEQ ID NO: 244434 - DNA, 22 bp, Artificial sequence
  SiRNA target sequence
gaccgatggagctgtgcgcaaa

SEQ ID NO: 244435 - DNA, 22 bp, Artificial sequence
  SiRNA target sequence
accgatggagctgtgcgcaaat

SEQ ID NO: 244436 - DNA, 22 bp, Artificial sequence
  SiRNA target sequence
ccgatggagctgtgcgcaaatt

SEQ ID NO: 244437 - DNA, 22 bp, Artificial sequence
  SiRNA target sequence
cgatggagctgtgcgcaaattg

SEQ ID NO: 244438 - DNA, 22 bp, Artificial sequence
  SiRNA target sequence
gatggagctgtgcgcaaattgt

SEQ ID NO: 244439 - DNA, 22 bp, Artificial sequence
  SiRNA target sequence
atggagctgtgcgcaaattgta

SEQ ID NO: 244440 - DNA, 22 bp, Artificial sequence
  SiRNA target sequence
tggagctgtgcgcaaattgtaa

SEQ ID NO: 244441 - DNA, 22 bp, Artificial sequence
  SiRNA target sequence
ggagctgtgcgcaaattgtaaa

SEQ ID NO: 244442 - DNA, 22 bp, Artificial sequence
  SiRNA target sequence
gagctgtgcgcaaattgtaaaa

SEQ ID NO: 244443 - DNA, 22 bp, Artificial sequence
  SiRNA target sequence
agctgtgcgcaaattgtaaaaa

SEQ ID NO: 244444 - DNA, 22 bp, Artificial sequence
  SiRNA target sequence
gctgtgcgcaaattgtaaaaag

SEQ ID NO: 244445 - DNA, 22 bp, Artificial sequence
  SiRNA target sequence
ctgtgcgcaaattgtaaaaaga

SEQ ID NO: 244446 - DNA, 22 bp, Artificial sequence
  SiRNA target sequence
tgtgcgcaaattgtaaaaagaa

SEQ ID NO: 244447 - DNA, 22 bp, Artificial sequence
  SiRNA target sequence
gtgcgcaaattgtaaaaagaaa

SEQ ID NO: 244448 - DNA, 22 bp, Artificial sequence
  SiRNA target sequence
tgcgcaaattgtaaaaagaaag

SEQ ID NO: 244449 - DNA, 22 bp, Artificial sequence
  SiRNA target sequence
gcgcaaattgtaaaaagaaagt

SEQ ID NO: 244450 - DNA, 22 bp, Artificial sequence
  SiRNA target sequence
cgcaaattgtaaaaagaaagtc

SEQ ID NO: 244451 - DNA, 22 bp, Artificial sequence
  SiRNA target sequence
gcaaattgtaaaaagaaagtcc

SEQ ID NO: 244452 - DNA, 22 bp, Artificial sequence
  SiRNA target sequence
caaattgtaaaaagaaagtcct

SEQ ID NO: 244453 - DNA, 22 bp, Artificial sequence
  SiRNA target sequence
aaattgtaaaaagaaagtcctg

SEQ ID NO: 244454 - DNA, 22 bp, Artificial sequence
  SiRNA target sequence
aattgtaaaaagaaagtcctga

SEQ ID NO: 244455 - DNA, 22 bp, Artificial sequence
  SiRNA target sequence
attgtaaaaagaaagtcctgaa

SEQ ID NO: 244456 - DNA, 22 bp, Artificial sequence
  SiRNA target sequence
ttgtaaaaagaaagtcctgaaa

SEQ ID NO: 244457 - DNA, 22 bp, Artificial sequence
  SiRNA target sequence
tgtaaaaagaaagtcctgaaat

SEQ ID NO: 244458 - DNA, 22 bp, Artificial sequence
  SiRNA target sequence
gtaaaaagaaagtcctgaaatt

SEQ ID NO: 244459 - DNA, 22 bp, Artificial sequence
  SiRNA target sequence
taaaaagaaagtcctgaaatta

SEQ ID NO: 244460 - DNA, 22 bp, Artificial sequence
  SiRNA target sequence
aaaaagaaagtcctgaaattag

SEQ ID NO: 244461 - DNA, 22 bp, Artificial sequence
  SiRNA target sequence
aaaagaaagtcctgaaattaga

SEQ ID NO: 244462 - DNA, 22 bp, Artificial sequence
  SiRNA target sequence
aaagaaagtcctgaaattagag

SEQ ID NO: 244463 - DNA, 22 bp, Artificial sequence
  SiRNA target sequence
aagaaagtcctgaaattagagc

SEQ ID NO: 244464 - DNA, 22 bp, Artificial sequence
  SiRNA target sequence
agaaagtcctgaaattagagcg

SEQ ID NO: 244465 - DNA, 22 bp, Artificial sequence
  SiRNA target sequence
gaaagtcctgaaattagagcgg

SEQ ID NO: 244466 - DNA, 22 bp, Artificial sequence
  SiRNA target sequence
aaagtcctgaaattagagcggt

SEQ ID NO: 244467 - DNA, 22 bp, Artificial sequence
  SiRNA target sequence
aagtcctgaaattagagcggta

SEQ ID NO: 244468 - DNA, 22 bp, Artificial sequence
  SiRNA target sequence
agtcctgaaattagagcggtaa

SEQ ID NO: 244469 - DNA, 22 bp, Artificial sequence
  SiRNA target sequence
gtcctgaaattagagcggtaaa

SEQ ID NO: 244470 - DNA, 22 bp, Artificial sequence
  SiRNA target sequence
tcctgaaattagagcggtaaaa

SEQ ID NO: 244471 - DNA, 22 bp, Artificial sequence
  SiRNA target sequence
cctgaaattagagcggtaaaaa

SEQ ID NO: 244472 - DNA, 22 bp, Artificial sequence
  SiRNA target sequence
ctgaaattagagcggtaaaaaa

SEQ ID NO: 244473 - DNA, 22 bp, Artificial sequence
  SiRNA target sequence
tgaaattagagcggtaaaaaat

SEQ ID NO: 244474 - DNA, 22 bp, Artificial sequence
  SiRNA target sequence
gaaattagagcggtaaaaaata

SEQ ID NO: 244475 - DNA, 22 bp, Artificial sequence
  SiRNA target sequence
aaattagagcggtaaaaaatat

SEQ ID NO: 244476 - DNA, 22 bp, Artificial sequence
  SiRNA target sequence
aattagagcggtaaaaaatata

SEQ ID NO: 244477 - DNA, 22 bp, Artificial sequence
  SiRNA target sequence
attagagcggtaaaaaatatag

SEQ ID NO: 244478 - DNA, 22 bp, Artificial sequence
  SiRNA target sequence
ttagagcggtaaaaaatatagc

SEQ ID NO: 244479 - DNA, 22 bp, Artificial sequence
  SiRNA target sequence
tagagcggtaaaaaatatagca

SEQ ID NO: 244480 - DNA, 22 bp, Artificial sequence
  SiRNA target sequence
agagcggtaaaaaatatagcag

SEQ ID NO: 244481 - DNA, 22 bp, Artificial sequence
  SiRNA target sequence
gagcggtaaaaaatatagcagc

SEQ ID NO: 244482 - DNA, 22 bp, Artificial sequence
  SiRNA target sequence
agcggtaaaaaatatagcagca

SEQ ID NO: 244483 - DNA, 22 bp, Artificial sequence
  SiRNA target sequence
gcggtaaaaaatatagcagcaa

SEQ ID NO: 244484 - DNA, 22 bp, Artificial sequence
  SiRNA target sequence
cggtaaaaaatatagcagcaat

SEQ ID NO: 244485 - DNA, 22 bp, Artificial sequence
  SiRNA target sequence
ggtaaaaaatatagcagcaata

SEQ ID NO: 244486 - DNA, 22 bp, Artificial sequence
  SiRNA target sequence
gtaaaaaatatagcagcaatag

SEQ ID NO: 244487 - DNA, 22 bp, Artificial sequence
  SiRNA target sequence
taaaaaatatagcagcaatagg

SEQ ID NO: 244488 - DNA, 22 bp, Artificial sequence
  SiRNA target sequence
aaaaaatatagcagcaataggg

SEQ ID NO: 244489 - DNA, 22 bp, Artificial sequence
  SiRNA target sequence
aaaaatatagcagcaatagggg

SEQ ID NO: 244490 - DNA, 22 bp, Artificial sequence
  SiRNA target sequence
aaaatatagcagcaatagggga

SEQ ID NO: 244491 - DNA, 22 bp, Artificial sequence
  SiRNA target sequence
aaatatagcagcaataggggag

SEQ ID NO: 244492 - DNA, 22 bp, Artificial sequence
  SiRNA target sequence
aatatagcagcaataggggagg

SEQ ID NO: 244493 - DNA, 22 bp, Artificial sequence
  SiRNA target sequence
atatagcagcaataggggaggc

SEQ ID NO: 244494 - DNA, 22 bp, Artificial sequence
  SiRNA target sequence
tatagcagcaataggggaggca

SEQ ID NO: 244495 - DNA, 22 bp, Artificial sequence
  SiRNA target sequence
atagcagcaataggggaggcaa

SEQ ID NO: 244496 - DNA, 22 bp, Artificial sequence
  SiRNA target sequence
tagcagcaataggggaggcaat

SEQ ID NO: 244497 - DNA, 22 bp, Artificial sequence
  SiRNA target sequence
agcagcaataggggaggcaata

SEQ ID NO: 244498 - DNA, 22 bp, Artificial sequence
  SiRNA target sequence
gcagcaataggggaggcaatag

SEQ ID NO: 244499 - DNA, 22 bp, Artificial sequence
  SiRNA target sequence
cagcaataggggaggcaataga

SEQ ID NO: 244500 - DNA, 22 bp, Artificial sequence
  SiRNA target sequence
agcaataggggaggcaatagat

SEQ ID NO: 244501 - DNA, 22 bp, Artificial sequence
  SiRNA target sequence
gcaataggggaggcaatagata

SEQ ID NO: 244502 - DNA, 22 bp, Artificial sequence
  SiRNA target sequence
caataggggaggcaatagatag

SEQ ID NO: 244503 - DNA, 22 bp, Artificial sequence
  SiRNA target sequence
aataggggaggcaatagataga

SEQ ID NO: 244504 - DNA, 22 bp, Artificial sequence
  SiRNA target sequence
ataggggaggcaatagatagat

SEQ ID NO: 244505 - DNA, 22 bp, Artificial sequence
  SiRNA target sequence
taggggaggcaatagatagata

SEQ ID NO: 244506 - DNA, 22 bp, Artificial sequence
  SiRNA target sequence
aggggaggcaatagatagataa

SEQ ID NO: 244507 - DNA, 22 bp, Artificial sequence
  SiRNA target sequence
ggggaggcaatagatagataaa

SEQ ID NO: 244508 - DNA, 22 bp, Artificial sequence
  SiRNA target sequence
gggaggcaatagatagataaaa

SEQ ID NO: 244509 - DNA, 22 bp, Artificial sequence
  SiRNA target sequence
ggaggcaatagatagataaaag

SEQ ID NO: 244510 - DNA, 22 bp, Artificial sequence
  SiRNA target sequence
gaggcaatagatagataaaaga

SEQ ID NO: 244511 - DNA, 22 bp, Artificial sequence
  SiRNA target sequence
aggcaatagatagataaaagat

SEQ ID NO: 244512 - DNA, 22 bp, Artificial sequence
  SiRNA target sequence
ggcaatagatagataaaagatc

SEQ ID NO: 244513 - DNA, 22 bp, Artificial sequence
  SiRNA target sequence
gcaatagatagataaaagatcc

SEQ ID NO: 244514 - DNA, 22 bp, Artificial sequence
  SiRNA target sequence
caatagatagataaaagatcct

SEQ ID NO: 244515 - DNA, 22 bp, Artificial sequence
  SiRNA target sequence
aatagatagataaaagatcctt

SEQ ID NO: 244516 - DNA, 22 bp, Artificial sequence
  SiRNA target sequence
atagatagataaaagatccttg

SEQ ID NO: 244517 - DNA, 22 bp, Artificial sequence
  SiRNA target sequence
tagatagataaaagatccttga

SEQ ID NO: 244518 - DNA, 22 bp, Artificial sequence
  SiRNA target sequence
agatagataaaagatccttgat

SEQ ID NO: 244519 - DNA, 22 bp, Artificial sequence
  SiRNA target sequence
gatagataaaagatccttgatg

SEQ ID NO: 244520 - DNA, 22 bp, Artificial sequence
  SiRNA target sequence
atagataaaagatccttgatgc

SEQ ID NO: 244521 - DNA, 22 bp, Artificial sequence
  SiRNA target sequence
tagataaaagatccttgatgca

SEQ ID NO: 244522 - DNA, 22 bp, Artificial sequence
  SiRNA target sequence
agataaaagatccttgatgcaa

SEQ ID NO: 244523 - DNA, 22 bp, Artificial sequence
  SiRNA target sequence
gataaaagatccttgatgcaat

SEQ ID NO: 244524 - DNA, 22 bp, Artificial sequence
  SiRNA target sequence
ataaaagatccttgatgcaatg

SEQ ID NO: 244525 - DNA, 22 bp, Artificial sequence
  SiRNA target sequence
taaaagatccttgatgcaatgc

SEQ ID NO: 244526 - DNA, 22 bp, Artificial sequence
  SiRNA target sequence
aaaagatccttgatgcaatgcg

SEQ ID NO: 244527 - DNA, 22 bp, Artificial sequence
  SiRNA target sequence
aaagatccttgatgcaatgcga

SEQ ID NO: 244528 - DNA, 22 bp, Artificial sequence
  SiRNA target sequence
aagatccttgatgcaatgcgat

SEQ ID NO: 244529 - DNA, 22 bp, Artificial sequence
  SiRNA target sequence
agatccttgatgcaatgcgatt

SEQ ID NO: 244530 - DNA, 22 bp, Artificial sequence
  SiRNA target sequence
gatccttgatgcaatgcgattt

SEQ ID NO: 244531 - DNA, 22 bp, Artificial sequence
  SiRNA target sequence
atccttgatgcaatgcgatttc

SEQ ID NO: 244532 - DNA, 22 bp, Artificial sequence
  SiRNA target sequence
tccttgatgcaatgcgatttcc

SEQ ID NO: 244533 - DNA, 22 bp, Artificial sequence
  SiRNA target sequence
ccttgatgcaatgcgatttcca

SEQ ID NO: 244534 - DNA, 22 bp, Artificial sequence
  SiRNA target sequence
cttgatgcaatgcgatttccac

SEQ ID NO: 244535 - DNA, 22 bp, Artificial sequence
  SiRNA target sequence
ttgatgcaatgcgatttccacg

SEQ ID NO: 244536 - DNA, 22 bp, Artificial sequence
  SiRNA target sequence
tgatgcaatgcgatttccacgg

SEQ ID NO: 244537 - DNA, 22 bp, Artificial sequence
  SiRNA target sequence
gatgcaatgcgatttccacgga

SEQ ID NO: 244538 - DNA, 22 bp, Artificial sequence
  SiRNA target sequence
atgcaatgcgatttccacggat

SEQ ID NO: 244539 - DNA, 22 bp, Artificial sequence
  SiRNA target sequence
tgcaatgcgatttccacggatt

SEQ ID NO: 244540 - DNA, 22 bp, Artificial sequence
  SiRNA target sequence
gcaatgcgatttccacggatta

SEQ ID NO: 244541 - DNA, 22 bp, Artificial sequence
  SiRNA target sequence
caatgcgatttccacggattac

SEQ ID NO: 244542 - DNA, 22 bp, Artificial sequence
  SiRNA target sequence
aatgcgatttccacggattaca

SEQ ID NO: 244543 - DNA, 22 bp, Artificial sequence
  SiRNA target sequence
atgcgatttccacggattacaa

SEQ ID NO: 244544 - DNA, 22 bp, Artificial sequence
  SiRNA target sequence
tgcgatttccacggattacaaa

SEQ ID NO: 244545 - DNA, 22 bp, Artificial sequence
  SiRNA target sequence
gcgatttccacggattacaaag

SEQ ID NO: 244546 - DNA, 22 bp, Artificial sequence
  SiRNA target sequence
cgatttccacggattacaaagt

SEQ ID NO: 244547 - DNA, 22 bp, Artificial sequence
  SiRNA target sequence
gatttccacggattacaaagtt

SEQ ID NO: 244548 - DNA, 22 bp, Artificial sequence
  SiRNA target sequence
atttccacggattacaaagtta

SEQ ID NO: 244549 - DNA, 22 bp, Artificial sequence
  SiRNA target sequence
tttccacggattacaaagttat

SEQ ID NO: 244550 - DNA, 22 bp, Artificial sequence
  SiRNA target sequence
ttccacggattacaaagttata

SEQ ID NO: 244551 - DNA, 22 bp, Artificial sequence
  SiRNA target sequence
tccacggattacaaagttataa

SEQ ID NO: 244552 - DNA, 22 bp, Artificial sequence
  SiRNA target sequence
ccacggattacaaagttataaa

SEQ ID NO: 244553 - DNA, 22 bp, Artificial sequence
  SiRNA target sequence
cacggattacaaagttataaaa

SEQ ID NO: 244554 - DNA, 22 bp, Artificial sequence
  SiRNA target sequence
acggattacaaagttataaaat

SEQ ID NO: 244555 - DNA, 22 bp, Artificial sequence
  SiRNA target sequence
cggattacaaagttataaaata

SEQ ID NO: 244556 - DNA, 22 bp, Artificial sequence
  SiRNA target sequence
ggattacaaagttataaaataa

SEQ ID NO: 244557 - DNA, 22 bp, Artificial sequence
  SiRNA target sequence
gattacaaagttataaaataat

SEQ ID NO: 244558 - DNA, 22 bp, Artificial sequence
  SiRNA target sequence
attacaaagttataaaataatg

SEQ ID NO: 244559 - DNA, 22 bp, Artificial sequence
  SiRNA target sequence
ttacaaagttataaaataatga

SEQ ID NO: 244560 - DNA, 22 bp, Artificial sequence
  SiRNA target sequence
tacaaagttataaaataatgat

SEQ ID NO: 244561 - DNA, 22 bp, Artificial sequence
  SiRNA target sequence
acaaagttataaaataatgata

SEQ ID NO: 244562 - DNA, 22 bp, Artificial sequence
  SiRNA target sequence
caaagttataaaataatgatac

SEQ ID NO: 244563 - DNA, 22 bp, Artificial sequence
  SiRNA target sequence
aaagttataaaataatgataca

SEQ ID NO: 244564 - DNA, 22 bp, Artificial sequence
  SiRNA target sequence
aagttataaaataatgatacag

SEQ ID NO: 244565 - DNA, 22 bp, Artificial sequence
  SiRNA target sequence
agttataaaataatgatacagc

SEQ ID NO: 244566 - DNA, 22 bp, Artificial sequence
  SiRNA target sequence
gttataaaataatgatacagca

SEQ ID NO: 244567 - DNA, 22 bp, Artificial sequence
  SiRNA target sequence
ttataaaataatgatacagcac

SEQ ID NO: 244568 - DNA, 22 bp, Artificial sequence
  SiRNA target sequence
tataaaataatgatacagcact

SEQ ID NO: 244569 - DNA, 22 bp, Artificial sequence
  SiRNA target sequence
ataaaataatgatacagcacta

SEQ ID NO: 244570 - DNA, 22 bp, Artificial sequence
  SiRNA target sequence
taaaataatgatacagcactaa

SEQ ID NO: 244571 - DNA, 22 bp, Artificial sequence
  SiRNA target sequence
aaaataatgatacagcactaat

SEQ ID NO: 244572 - DNA, 22 bp, Artificial sequence
  SiRNA target sequence
aaataatgatacagcactaatc

SEQ ID NO: 244573 - DNA, 22 bp, Artificial sequence
  SiRNA target sequence
aataatgatacagcactaatcg

SEQ ID NO: 244574 - DNA, 22 bp, Artificial sequence
  SiRNA target sequence
ataatgatacagcactaatcgt

SEQ ID NO: 244575 - DNA, 22 bp, Artificial sequence
  SiRNA target sequence
taatgatacagcactaatcgtt

SEQ ID NO: 244576 - DNA, 22 bp, Artificial sequence
  SiRNA target sequence
aatgatacagcactaatcgtta

SEQ ID NO: 244577 - DNA, 22 bp, Artificial sequence
  SiRNA target sequence
atgatacagcactaatcgttaa

SEQ ID NO: 244578 - DNA, 22 bp, Artificial sequence
  SiRNA target sequence
tgatacagcactaatcgttaag

SEQ ID NO: 244579 - DNA, 22 bp, Artificial sequence
  SiRNA target sequence
gatacagcactaatcgttaagg

SEQ ID NO: 244580 - DNA, 22 bp, Artificial sequence
  SiRNA target sequence
atacagcactaatcgttaagga

SEQ ID NO: 244581 - DNA, 22 bp, Artificial sequence
  SiRNA target sequence
tacagcactaatcgttaaggaa

SEQ ID NO: 244582 - DNA, 22 bp, Artificial sequence
  SiRNA target sequence
acagcactaatcgttaaggaag

SEQ ID NO: 244583 - DNA, 22 bp, Artificial sequence
  SiRNA target sequence
cagcactaatcgttaaggaagt

SEQ ID NO: 244584 - DNA, 22 bp, Artificial sequence
  SiRNA target sequence
agcactaatcgttaaggaagtt

SEQ ID NO: 244585 - DNA, 22 bp, Artificial sequence
  SiRNA target sequence
gcactaatcgttaaggaagttg

SEQ ID NO: 244586 - DNA, 22 bp, Artificial sequence
  SiRNA target sequence
cactaatcgttaaggaagttgt

SEQ ID NO: 244587 - DNA, 22 bp, Artificial sequence
  SiRNA target sequence
actaatcgttaaggaagttgtt

SEQ ID NO: 244588 - DNA, 22 bp, Artificial sequence
  SiRNA target sequence
ctaatcgttaaggaagttgtta

SEQ ID NO: 244589 - DNA, 22 bp, Artificial sequence
  SiRNA target sequence
taatcgttaaggaagttgttac

SEQ ID NO: 244590 - DNA, 22 bp, Artificial sequence
  SiRNA target sequence
aatcgttaaggaagttgttact

SEQ ID NO: 244591 - DNA, 22 bp, Artificial sequence
  SiRNA target sequence
atcgttaaggaagttgttacta

SEQ ID NO: 244592 - DNA, 22 bp, Artificial sequence
  SiRNA target sequence
tcgttaaggaagttgttactaa

SEQ ID NO: 244593 - DNA, 22 bp, Artificial sequence
  SiRNA target sequence
cgttaaggaagttgttactaaa

SEQ ID NO: 244594 - DNA, 22 bp, Artificial sequence
  SiRNA target sequence
gttaaggaagttgttactaaat

SEQ ID NO: 244595 - DNA, 22 bp, Artificial sequence
  SiRNA target sequence
ttaaggaagttgttactaaata

SEQ ID NO: 244596 - DNA, 22 bp, Artificial sequence
  SiRNA target sequence
taaggaagttgttactaaatat

SEQ ID NO: 244597 - DNA, 22 bp, Artificial sequence
  SiRNA target sequence
aaggaagttgttactaaatatt

SEQ ID NO: 244598 - DNA, 22 bp, Artificial sequence
  SiRNA target sequence
aggaagttgttactaaatattt

SEQ ID NO: 244599 - DNA, 22 bp, Artificial sequence
  SiRNA target sequence
ggaagttgttactaaatatttt

SEQ ID NO: 244600 - DNA, 22 bp, Artificial sequence
  SiRNA target sequence
gaagttgttactaaatattttt

SEQ ID NO: 244601 - DNA, 22 bp, Artificial sequence
  SiRNA target sequence
aagttgttactaaatatttttg

SEQ ID NO: 244602 - DNA, 22 bp, Artificial sequence
  SiRNA target sequence
agttgttactaaatatttttga

SEQ ID NO: 244603 - DNA, 22 bp, Artificial sequence
  SiRNA target sequence
gttgttactaaatatttttgag

SEQ ID NO: 244604 - DNA, 22 bp, Artificial sequence
  SiRNA target sequence
ttgttactaaatatttttgaga

SEQ ID NO: 244605 - DNA, 22 bp, Artificial sequence
  SiRNA target sequence
tgttactaaatatttttgagaa

SEQ ID NO: 244606 - DNA, 22 bp, Artificial sequence
  SiRNA target sequence
gttactaaatatttttgagaat

SEQ ID NO: 244607 - DNA, 22 bp, Artificial sequence
  SiRNA target sequence
ttactaaatatttttgagaata

SEQ ID NO: 244608 - DNA, 22 bp, Artificial sequence
  SiRNA target sequence
tactaaatatttttgagaataa

SEQ ID NO: 244609 - DNA, 22 bp, Artificial sequence
  SiRNA target sequence
actaaatatttttgagaataat

SEQ ID NO: 244610 - DNA, 22 bp, Artificial sequence
  SiRNA target sequence
ctaaatatttttgagaataatc

SEQ ID NO: 244611 - DNA, 22 bp, Artificial sequence
  SiRNA target sequence
taaatatttttgagaataatct

SEQ ID NO: 244612 - DNA, 22 bp, Artificial sequence
  SiRNA target sequence
aaatatttttgagaataatctt

SEQ ID NO: 244613 - DNA, 22 bp, Artificial sequence
  SiRNA target sequence
aatatttttgagaataatcttt

SEQ ID NO: 244614 - DNA, 22 bp, Artificial sequence
  SiRNA target sequence
atatttttgagaataatctttc

SEQ ID NO: 244615 - DNA, 22 bp, Artificial sequence
  SiRNA target sequence
tatttttgagaataatctttcg

SEQ ID NO: 244616 - DNA, 22 bp, Artificial sequence
  SiRNA target sequence
atttttgagaataatctttcgg

SEQ ID NO: 244617 - DNA, 22 bp, Artificial sequence
  SiRNA target sequence
tttttgagaataatctttcgga

SEQ ID NO: 244618 - DNA, 22 bp, Artificial sequence
  SiRNA target sequence
ttttgagaataatctttcggag

SEQ ID NO: 244619 - DNA, 22 bp, Artificial sequence
  SiRNA target sequence
tttgagaataatctttcggagg

SEQ ID NO: 244620 - DNA, 22 bp, Artificial sequence
  SiRNA target sequence
ttgagaataatctttcggaggc

SEQ ID NO: 244621 - DNA, 22 bp, Artificial sequence
  SiRNA target sequence
tgagaataatctttcggaggca

SEQ ID NO: 244622 - DNA, 22 bp, Artificial sequence
  SiRNA target sequence
gagaataatctttcggaggcat

SEQ ID NO: 244623 - DNA, 22 bp, Artificial sequence
  SiRNA target sequence
agaataatctttcggaggcata

SEQ ID NO: 244624 - DNA, 22 bp, Artificial sequence
  SiRNA target sequence
gaataatctttcggaggcatat

SEQ ID NO: 244625 - DNA, 22 bp, Artificial sequence
  SiRNA target sequence
aataatctttcggaggcatatt

SEQ ID NO: 244626 - DNA, 22 bp, Artificial sequence
  SiRNA target sequence
ataatctttcggaggcatatta

SEQ ID NO: 244627 - DNA, 22 bp, Artificial sequence
  SiRNA target sequence
taatctttcggaggcatattat

SEQ ID NO: 244628 - DNA, 22 bp, Artificial sequence
  SiRNA target sequence
aatctttcggaggcatattatt

SEQ ID NO: 244629 - DNA, 22 bp, Artificial sequence
  SiRNA target sequence
atctttcggaggcatattatta

SEQ ID NO: 244630 - DNA, 22 bp, Artificial sequence
  SiRNA target sequence
tctttcggaggcatattattaa

SEQ ID NO: 244631 - DNA, 22 bp, Artificial sequence
  SiRNA target sequence
ctttcggaggcatattattaat

SEQ ID NO: 244632 - DNA, 22 bp, Artificial sequence
  SiRNA target sequence
tttcggaggcatattattaatt

SEQ ID NO: 244633 - DNA, 22 bp, Artificial sequence
  SiRNA target sequence
ttcggaggcatattattaattc

SEQ ID NO: 244634 - DNA, 22 bp, Artificial sequence
  SiRNA target sequence
tcggaggcatattattaattct

SEQ ID NO: 244635 - DNA, 22 bp, Artificial sequence
  SiRNA target sequence
cggaggcatattattaattctg

SEQ ID NO: 244636 - DNA, 22 bp, Artificial sequence
  SiRNA target sequence
ggaggcatattattaattctgc

SEQ ID NO: 244637 - DNA, 22 bp, Artificial sequence
  SiRNA target sequence
gaggcatattattaattctgct

SEQ ID NO: 244638 - DNA, 22 bp, Artificial sequence
  SiRNA target sequence
aggcatattattaattctgctt

SEQ ID NO: 244639 - DNA, 22 bp, Artificial sequence
  SiRNA target sequence
ggcatattattaattctgcttc

SEQ ID NO: 244640 - DNA, 22 bp, Artificial sequence
  SiRNA target sequence
gcatattattaattctgcttcc

SEQ ID NO: 244641 - DNA, 22 bp, Artificial sequence
  SiRNA target sequence
catattattaattctgcttccc

SEQ ID NO: 244642 - DNA, 22 bp, Artificial sequence
  SiRNA target sequence
atattattaattctgcttcccg

SEQ ID NO: 244643 - DNA, 22 bp, Artificial sequence
  SiRNA target sequence
tattattaattctgcttcccgt

SEQ ID NO: 244644 - DNA, 22 bp, Artificial sequence
  SiRNA target sequence
attattaattctgcttcccgta

SEQ ID NO: 244645 - DNA, 22 bp, Artificial sequence
  SiRNA target sequence
ttattaattctgcttcccgtag

SEQ ID NO: 244646 - DNA, 22 bp, Artificial sequence
  SiRNA target sequence
tattaattctgcttcccgtaga

SEQ ID NO: 244647 - DNA, 22 bp, Artificial sequence
  SiRNA target sequence
attaattctgcttcccgtagat

SEQ ID NO: 244648 - DNA, 22 bp, Artificial sequence
  SiRNA target sequence
ttaattctgcttcccgtagata

SEQ ID NO: 244649 - DNA, 22 bp, Artificial sequence
  SiRNA target sequence
taattctgcttcccgtagataa

SEQ ID NO: 244650 - DNA, 22 bp, Artificial sequence
  SiRNA target sequence
aattctgcttcccgtagataaa

SEQ ID NO: 244651 - DNA, 22 bp, Artificial sequence
  SiRNA target sequence
attctgcttcccgtagataaag

SEQ ID NO: 244652 - DNA, 22 bp, Artificial sequence
  SiRNA target sequence
ttctgcttcccgtagataaaga

SEQ ID NO: 244653 - DNA, 22 bp, Artificial sequence
  SiRNA target sequence
tctgcttcccgtagataaagaa

SEQ ID NO: 244654 - DNA, 22 bp, Artificial sequence
  SiRNA target sequence
ctgcttcccgtagataaagaat

SEQ ID NO: 244655 - DNA, 22 bp, Artificial sequence
  SiRNA target sequence
tgcttcccgtagataaagaatt

SEQ ID NO: 244656 - DNA, 22 bp, Artificial sequence
  SiRNA target sequence
gcttcccgtagataaagaattt

SEQ ID NO: 244657 - DNA, 22 bp, Artificial sequence
  SiRNA target sequence
cttcccgtagataaagaatttt

SEQ ID NO: 244658 - DNA, 22 bp, Artificial sequence
  SiRNA target sequence
ttcccgtagataaagaattttt

SEQ ID NO: 244659 - DNA, 22 bp, Artificial sequence
  SiRNA target sequence
tcccgtagataaagaatttttt

SEQ ID NO: 244660 - DNA, 22 bp, Artificial sequence
  SiRNA target sequence
cccgtagataaagaatttttta

SEQ ID NO: 244661 - DNA, 22 bp, Artificial sequence
  SiRNA target sequence
ccgtagataaagaattttttaa

SEQ ID NO: 244662 - DNA, 22 bp, Artificial sequence
  SiRNA target sequence
cgtagataaagaattttttaag

SEQ ID NO: 244663 - DNA, 22 bp, Artificial sequence
  SiRNA target sequence
gtagataaagaattttttaagg

SEQ ID NO: 244664 - DNA, 22 bp, Artificial sequence
  SiRNA target sequence
tagataaagaattttttaagga

SEQ ID NO: 244665 - DNA, 22 bp, Artificial sequence
  SiRNA target sequence
agataaagaattttttaaggac

SEQ ID NO: 244666 - DNA, 22 bp, Artificial sequence
  SiRNA target sequence
gataaagaattttttaaggaca

SEQ ID NO: 244667 - DNA, 22 bp, Artificial sequence
  SiRNA target sequence
ataaagaattttttaaggacat

SEQ ID NO: 244668 - DNA, 22 bp, Artificial sequence
  SiRNA target sequence
taaagaattttttaaggacata

SEQ ID NO: 244669 - DNA, 22 bp, Artificial sequence
  SiRNA target sequence
aaagaattttttaaggacatat

SEQ ID NO: 244670 - DNA, 22 bp, Artificial sequence
  SiRNA target sequence
aagaattttttaaggacatatc

SEQ ID NO: 244671 - DNA, 22 bp, Artificial sequence
  SiRNA target sequence
agaattttttaaggacatatca

SEQ ID NO: 244672 - DNA, 22 bp, Artificial sequence
  SiRNA target sequence
gaattttttaaggacatatcaa

SEQ ID NO: 244673 - DNA, 22 bp, Artificial sequence
  SiRNA target sequence
aattttttaaggacatatcaat

SEQ ID NO: 244674 - DNA, 22 bp, Artificial sequence
  SiRNA target sequence
attttttaaggacatatcaata

SEQ ID NO: 244675 - DNA, 22 bp, Artificial sequence
  SiRNA target sequence
ttttttaaggacatatcaataa

SEQ ID NO: 244676 - DNA, 22 bp, Artificial sequence
  SiRNA target sequence
tttttaaggacatatcaataaa

SEQ ID NO: 244677 - DNA, 22 bp, Artificial sequence
  SiRNA target sequence
ttttaaggacatatcaataaat

SEQ ID NO: 244678 - DNA, 22 bp, Artificial sequence
  SiRNA target sequence
tttaaggacatatcaataaatc

SEQ ID NO: 244679 - DNA, 22 bp, Artificial sequence
  SiRNA target sequence
ttaaggacatatcaataaatcc

SEQ ID NO: 244680 - DNA, 22 bp, Artificial sequence
  SiRNA target sequence
taaggacatatcaataaatcct

SEQ ID NO: 244681 - DNA, 22 bp, Artificial sequence
  SiRNA target sequence
aaggacatatcaataaatcctg

SEQ ID NO: 244682 - DNA, 22 bp, Artificial sequence
  SiRNA target sequence
aggacatatcaataaatcctgc

SEQ ID NO: 244683 - DNA, 22 bp, Artificial sequence
  SiRNA target sequence
ggacatatcaataaatcctgca

SEQ ID NO: 244684 - DNA, 22 bp, Artificial sequence
  SiRNA target sequence
gacatatcaataaatcctgcat

SEQ ID NO: 244685 - DNA, 22 bp, Artificial sequence
  SiRNA target sequence
acatatcaataaatcctgcatt

SEQ ID NO: 244686 - DNA, 22 bp, Artificial sequence
  SiRNA target sequence
catatcaataaatcctgcatta

SEQ ID NO: 244687 - DNA, 22 bp, Artificial sequence
  SiRNA target sequence
atatcaataaatcctgcattaa

SEQ ID NO: 244688 - DNA, 22 bp, Artificial sequence
  SiRNA target sequence
tatcaataaatcctgcattaat

SEQ ID NO: 244689 - DNA, 22 bp, Artificial sequence
  SiRNA target sequence
atcaataaatcctgcattaata

SEQ ID NO: 244690 - DNA, 22 bp, Artificial sequence
  SiRNA target sequence
tcaataaatcctgcattaatag

SEQ ID NO: 244691 - DNA, 22 bp, Artificial sequence
  SiRNA target sequence
caataaatcctgcattaatagc

SEQ ID NO: 244692 - DNA, 22 bp, Artificial sequence
  SiRNA target sequence
aataaatcctgcattaatagca

SEQ ID NO: 244693 - DNA, 22 bp, Artificial sequence
  SiRNA target sequence
ataaatcctgcattaatagcat

SEQ ID NO: 244694 - DNA, 22 bp, Artificial sequence
  SiRNA target sequence
taaatcctgcattaatagcata

SEQ ID NO: 244695 - DNA, 22 bp, Artificial sequence
  SiRNA target sequence
aaatcctgcattaatagcatag

SEQ ID NO: 244696 - DNA, 22 bp, Artificial sequence
  SiRNA target sequence
aatcctgcattaatagcataga

SEQ ID NO: 244697 - DNA, 22 bp, Artificial sequence
  SiRNA target sequence
atcctgcattaatagcatagat

SEQ ID NO: 244698 - DNA, 22 bp, Artificial sequence
  SiRNA target sequence
tcctgcattaatagcatagatt

SEQ ID NO: 244699 - DNA, 22 bp, Artificial sequence
  SiRNA target sequence
cctgcattaatagcatagatta

SEQ ID NO: 244700 - DNA, 22 bp, Artificial sequence
  SiRNA target sequence
ctgcattaatagcatagattaa

SEQ ID NO: 244701 - DNA, 22 bp, Artificial sequence
  SiRNA target sequence
tgcattaatagcatagattaat

SEQ ID NO: 244702 - DNA, 22 bp, Artificial sequence
  SiRNA target sequence
gcattaatagcatagattaatg

SEQ ID NO: 244703 - DNA, 22 bp, Artificial sequence
  SiRNA target sequence
cattaatagcatagattaatgc

SEQ ID NO: 244704 - DNA, 22 bp, Artificial sequence
  SiRNA target sequence
attaatagcatagattaatgcc

SEQ ID NO: 244705 - DNA, 22 bp, Artificial sequence
  SiRNA target sequence
ttaatagcatagattaatgccg

SEQ ID NO: 244706 - DNA, 22 bp, Artificial sequence
  SiRNA target sequence
taatagcatagattaatgccgc

SEQ ID NO: 244707 - DNA, 22 bp, Artificial sequence
  SiRNA target sequence
aatagcatagattaatgccgct

SEQ ID NO: 244708 - DNA, 22 bp, Artificial sequence
  SiRNA target sequence
atagcatagattaatgccgctg

SEQ ID NO: 244709 - DNA, 22 bp, Artificial sequence
  SiRNA target sequence
tagcatagattaatgccgctgc

SEQ ID NO: 244710 - DNA, 22 bp, Artificial sequence
  SiRNA target sequence
agcatagattaatgccgctgca

SEQ ID NO: 244711 - DNA, 22 bp, Artificial sequence
  SiRNA target sequence
gcatagattaatgccgctgcac

SEQ ID NO: 244712 - DNA, 22 bp, Artificial sequence
  SiRNA target sequence
catagattaatgccgctgcaca

SEQ ID NO: 244713 - DNA, 22 bp, Artificial sequence
  SiRNA target sequence
atagattaatgccgctgcacac

SEQ ID NO: 244714 - DNA, 22 bp, Artificial sequence
  SiRNA target sequence
tagattaatgccgctgcacaca

SEQ ID NO: 244715 - DNA, 22 bp, Artificial sequence
  SiRNA target sequence
agattaatgccgctgcacacat

SEQ ID NO: 244716 - DNA, 22 bp, Artificial sequence
  SiRNA target sequence
gattaatgccgctgcacacata

SEQ ID NO: 244717 - DNA, 22 bp, Artificial sequence
  SiRNA target sequence
attaatgccgctgcacacatat

SEQ ID NO: 244718 - DNA, 22 bp, Artificial sequence
  SiRNA target sequence
ttaatgccgctgcacacatatt

SEQ ID NO: 244719 - DNA, 22 bp, Artificial sequence
  SiRNA target sequence
taatgccgctgcacacatattt

SEQ ID NO: 244720 - DNA, 22 bp, Artificial sequence
  SiRNA target sequence
aatgccgctgcacacatatttc

SEQ ID NO: 244721 - DNA, 22 bp, Artificial sequence
  SiRNA target sequence
atgccgctgcacacatatttct

SEQ ID NO: 244722 - DNA, 22 bp, Artificial sequence
  SiRNA target sequence
tgccgctgcacacatatttctt

SEQ ID NO: 244723 - DNA, 22 bp, Artificial sequence
  SiRNA target sequence
gccgctgcacacatatttctta

SEQ ID NO: 244724 - DNA, 22 bp, Artificial sequence
  SiRNA target sequence
ccgctgcacacatatttcttaa

SEQ ID NO: 244725 - DNA, 22 bp, Artificial sequence
  SiRNA target sequence
cgctgcacacatatttcttaaa

SEQ ID NO: 244726 - DNA, 22 bp, Artificial sequence
  SiRNA target sequence
gctgcacacatatttcttaaaa

SEQ ID NO: 244727 - DNA, 22 bp, Artificial sequence
  SiRNA target sequence
ctgcacacatatttcttaaaaa

SEQ ID NO: 244728 - DNA, 22 bp, Artificial sequence
  SiRNA target sequence
tgcacacatatttcttaaaaat

SEQ ID NO: 244729 - DNA, 22 bp, Artificial sequence
  SiRNA target sequence
gcacacatatttcttaaaaatt

SEQ ID NO: 244730 - DNA, 22 bp, Artificial sequence
  SiRNA target sequence
cacacatatttcttaaaaattt

SEQ ID NO: 244731 - DNA, 22 bp, Artificial sequence
  SiRNA target sequence
acacatatttcttaaaaatttg

SEQ ID NO: 244732 - DNA, 22 bp, Artificial sequence
  SiRNA target sequence
cacatatttcttaaaaatttgg

SEQ ID NO: 244733 - DNA, 22 bp, Artificial sequence
  SiRNA target sequence
acatatttcttaaaaatttgga

SEQ ID NO: 244734 - DNA, 22 bp, Artificial sequence
  SiRNA target sequence
catatttcttaaaaatttggat

SEQ ID NO: 244735 - DNA, 22 bp, Artificial sequence
  SiRNA target sequence
atatttcttaaaaatttggatt

SEQ ID NO: 244736 - DNA, 22 bp, Artificial sequence
  SiRNA target sequence
tatttcttaaaaatttggattg

SEQ ID NO: 244737 - DNA, 22 bp, Artificial sequence
  SiRNA target sequence
atttcttaaaaatttggattgt

SEQ ID NO: 244738 - DNA, 22 bp, Artificial sequence
  SiRNA target sequence
tttcttaaaaatttggattgta

SEQ ID NO: 244739 - DNA, 22 bp, Artificial sequence
  SiRNA target sequence
ttcttaaaaatttggattgtaa

SEQ ID NO: 244740 - DNA, 22 bp, Artificial sequence
  SiRNA target sequence
tcttaaaaatttggattgtaaa

SEQ ID NO: 244741 - DNA, 22 bp, Artificial sequence
  SiRNA target sequence
cttaaaaatttggattgtaaaa

SEQ ID NO: 244742 - DNA, 22 bp, Artificial sequence
  SiRNA target sequence
ttaaaaatttggattgtaaaag

SEQ ID NO: 244743 - DNA, 22 bp, Artificial sequence
  SiRNA target sequence
taaaaatttggattgtaaaaga

SEQ ID NO: 244744 - DNA, 22 bp, Artificial sequence
  SiRNA target sequence
aaaaatttggattgtaaaagat

SEQ ID NO: 244745 - DNA, 22 bp, Artificial sequence
  SiRNA target sequence
aaaatttggattgtaaaagatc

SEQ ID NO: 244746 - DNA, 22 bp, Artificial sequence
  SiRNA target sequence
aaatttggattgtaaaagatca

SEQ ID NO: 244747 - DNA, 22 bp, Artificial sequence
  SiRNA target sequence
aatttggattgtaaaagatcaa

SEQ ID NO: 244748 - DNA, 22 bp, Artificial sequence
  SiRNA target sequence
atttggattgtaaaagatcaaa

SEQ ID NO: 244749 - DNA, 22 bp, Artificial sequence
  SiRNA target sequence
tttggattgtaaaagatcaaac

SEQ ID NO: 244750 - DNA, 22 bp, Artificial sequence
  SiRNA target sequence
ttggattgtaaaagatcaaacg

SEQ ID NO: 244751 - DNA, 22 bp, Artificial sequence
  SiRNA target sequence
tggattgtaaaagatcaaacga

SEQ ID NO: 244752 - DNA, 22 bp, Artificial sequence
  SiRNA target sequence
ggattgtaaaagatcaaacgag

SEQ ID NO: 244753 - DNA, 22 bp, Artificial sequence
  SiRNA target sequence
gattgtaaaagatcaaacgagg

SEQ ID NO: 244754 - DNA, 22 bp, Artificial sequence
  SiRNA target sequence
attgtaaaagatcaaacgagga

SEQ ID NO: 244755 - DNA, 22 bp, Artificial sequence
  SiRNA target sequence
ttgtaaaagatcaaacgaggat

SEQ ID NO: 244756 - DNA, 22 bp, Artificial sequence
  SiRNA target sequence
tgtaaaagatcaaacgaggatg

SEQ ID NO: 244757 - DNA, 22 bp, Artificial sequence
  SiRNA target sequence
gtaaaagatcaaacgaggatgt

SEQ ID NO: 244758 - DNA, 22 bp, Artificial sequence
  SiRNA target sequence
taaaagatcaaacgaggatgtc

SEQ ID NO: 244759 - DNA, 22 bp, Artificial sequence
  SiRNA target sequence
aaaagatcaaacgaggatgtcg

SEQ ID NO: 244760 - DNA, 22 bp, Artificial sequence
  SiRNA target sequence
aaagatcaaacgaggatgtcgt

SEQ ID NO: 244761 - DNA, 22 bp, Artificial sequence
  SiRNA target sequence
aagatcaaacgaggatgtcgtt

SEQ ID NO: 244762 - DNA, 22 bp, Artificial sequence
  SiRNA target sequence
agatcaaacgaggatgtcgttt

SEQ ID NO: 244763 - DNA, 22 bp, Artificial sequence
  SiRNA target sequence
gatcaaacgaggatgtcgtttt

SEQ ID NO: 244764 - DNA, 22 bp, Artificial sequence
  SiRNA target sequence
atcaaacgaggatgtcgttttg

SEQ ID NO: 244765 - DNA, 22 bp, Artificial sequence
  SiRNA target sequence
tcaaacgaggatgtcgttttgt

SEQ ID NO: 244766 - DNA, 22 bp, Artificial sequence
  SiRNA target sequence
caaacgaggatgtcgttttgtc

SEQ ID NO: 244767 - DNA, 22 bp, Artificial sequence
  SiRNA target sequence
aaacgaggatgtcgttttgtct

SEQ ID NO: 244768 - DNA, 22 bp, Artificial sequence
  SiRNA target sequence
aacgaggatgtcgttttgtctt

SEQ ID NO: 244769 - DNA, 22 bp, Artificial sequence
  SiRNA target sequence
acgaggatgtcgttttgtcttc

SEQ ID NO: 244770 - DNA, 22 bp, Artificial sequence
  SiRNA target sequence
cgaggatgtcgttttgtcttct

SEQ ID NO: 244771 - DNA, 22 bp, Artificial sequence
  SiRNA target sequence
gaggatgtcgttttgtcttctt

SEQ ID NO: 244772 - DNA, 22 bp, Artificial sequence
  SiRNA target sequence
aggatgtcgttttgtcttcttc

SEQ ID NO: 244773 - DNA, 22 bp, Artificial sequence
  SiRNA target sequence
ggatgtcgttttgtcttcttct

SEQ ID NO: 244774 - DNA, 22 bp, Artificial sequence
  SiRNA target sequence
gatgtcgttttgtcttcttctt

SEQ ID NO: 244775 - DNA, 22 bp, Artificial sequence
  SiRNA target sequence
atgtcgttttgtcttcttcttt

SEQ ID NO: 244776 - DNA, 22 bp, Artificial sequence
  SiRNA target sequence
tgtcgttttgtcttcttcttta

SEQ ID NO: 244777 - DNA, 22 bp, Artificial sequence
  SiRNA target sequence
gtcgttttgtcttcttctttat

SEQ ID NO: 244778 - DNA, 22 bp, Artificial sequence
  SiRNA target sequence
tcgttttgtcttcttctttatt

SEQ ID NO: 244779 - DNA, 22 bp, Artificial sequence
  SiRNA target sequence
cgttttgtcttcttctttattt

SEQ ID NO: 244780 - DNA, 22 bp, Artificial sequence
  SiRNA target sequence
gttttgtcttcttctttattta

SEQ ID NO: 244781 - DNA, 22 bp, Artificial sequence
  SiRNA target sequence
ttttgtcttcttctttatttat

SEQ ID NO: 244782 - DNA, 22 bp, Artificial sequence
  SiRNA target sequence
tttgtcttcttctttatttata

SEQ ID NO: 244783 - DNA, 22 bp, Artificial sequence
  SiRNA target sequence
ttgtcttcttctttatttatag

SEQ ID NO: 244784 - DNA, 22 bp, Artificial sequence
  SiRNA target sequence
tgtcttcttctttatttatagt

SEQ ID NO: 244785 - DNA, 22 bp, Artificial sequence
  SiRNA target sequence
gtcttcttctttatttatagtt

SEQ ID NO: 244786 - DNA, 22 bp, Artificial sequence
  SiRNA target sequence
tcttcttctttatttatagttt

SEQ ID NO: 244787 - DNA, 22 bp, Artificial sequence
  SiRNA target sequence
cttcttctttatttatagtttc

SEQ ID NO: 244788 - DNA, 22 bp, Artificial sequence
  SiRNA target sequence
ttcttctttatttatagtttcc

SEQ ID NO: 244789 - DNA, 22 bp, Artificial sequence
  SiRNA target sequence
tcttctttatttatagtttcct

SEQ ID NO: 244790 - DNA, 22 bp, Artificial sequence
  SiRNA target sequence
cttctttatttatagtttcctt

SEQ ID NO: 244791 - DNA, 22 bp, Artificial sequence
  SiRNA target sequence
ttctttatttatagtttccttt

SEQ ID NO: 244792 - DNA, 22 bp, Artificial sequence
  SiRNA target sequence
tctttatttatagtttccttta

SEQ ID NO: 244793 - DNA, 22 bp, Artificial sequence
  SiRNA target sequence
ctttatttatagtttcctttat

SEQ ID NO: 244794 - DNA, 22 bp, Artificial sequence
  SiRNA target sequence
tttatttatagtttcctttatt

SEQ ID NO: 244795 - DNA, 22 bp, Artificial sequence
  SiRNA target sequence
ttatttatagtttcctttattt

SEQ ID NO: 244796 - DNA, 22 bp, Artificial sequence
  SiRNA target sequence
tatttatagtttcctttatttc

SEQ ID NO: 244797 - DNA, 22 bp, Artificial sequence
  SiRNA target sequence
atttatagtttcctttatttct

SEQ ID NO: 244798 - DNA, 22 bp, Artificial sequence
  SiRNA target sequence
tttatagtttcctttatttctt

SEQ ID NO: 244799 - DNA, 22 bp, Artificial sequence
  SiRNA target sequence
ttatagtttcctttatttcttt

SEQ ID NO: 244800 - DNA, 22 bp, Artificial sequence
  SiRNA target sequence
tatagtttcctttatttcttta

SEQ ID NO: 244801 - DNA, 22 bp, Artificial sequence
  SiRNA target sequence
atagtttcctttatttctttag

SEQ ID NO: 244802 - DNA, 22 bp, Artificial sequence
  SiRNA target sequence
tagtttcctttatttctttagt

SEQ ID NO: 244803 - DNA, 22 bp, Artificial sequence
  SiRNA target sequence
agtttcctttatttctttagtt

SEQ ID NO: 244804 - DNA, 22 bp, Artificial sequence
  SiRNA target sequence
gtttcctttatttctttagttt

SEQ ID NO: 244805 - DNA, 22 bp, Artificial sequence
  SiRNA target sequence
tttcctttatttctttagtttt

SEQ ID NO: 244806 - DNA, 22 bp, Artificial sequence
  SiRNA target sequence
ttcctttatttctttagtttta

SEQ ID NO: 244807 - DNA, 22 bp, Artificial sequence
  SiRNA target sequence
tcctttatttctttagttttaa

SEQ ID NO: 244808 - DNA, 22 bp, Artificial sequence
  SiRNA target sequence
cctttatttctttagttttaag

SEQ ID NO: 244809 - DNA, 22 bp, Artificial sequence
  SiRNA target sequence
ctttatttctttagttttaaga

SEQ ID NO: 244810 - DNA, 22 bp, Artificial sequence
  SiRNA target sequence
tttatttctttagttttaagag

SEQ ID NO: 244811 - DNA, 22 bp, Artificial sequence
  SiRNA target sequence
ttatttctttagttttaagagg

SEQ ID NO: 244812 - DNA, 22 bp, Artificial sequence
  SiRNA target sequence
tatttctttagttttaagagga

SEQ ID NO: 244813 - DNA, 22 bp, Artificial sequence
  SiRNA target sequence
atttctttagttttaagaggaa

SEQ ID NO: 244814 - DNA, 22 bp, Artificial sequence
  SiRNA target sequence
tttctttagttttaagaggaat

SEQ ID NO: 244815 - DNA, 22 bp, Artificial sequence
  SiRNA target sequence
ttctttagttttaagaggaata

SEQ ID NO: 244816 - DNA, 22 bp, Artificial sequence
  SiRNA target sequence
tctttagttttaagaggaatat

SEQ ID NO: 244817 - DNA, 22 bp, Artificial sequence
  SiRNA target sequence
ctttagttttaagaggaatata

SEQ ID NO: 244818 - DNA, 22 bp, Artificial sequence
  SiRNA target sequence
tttagttttaagaggaatataa

SEQ ID NO: 244819 - DNA, 22 bp, Artificial sequence
  SiRNA target sequence
ttagttttaagaggaatataac

SEQ ID NO: 244820 - DNA, 22 bp, Artificial sequence
  SiRNA target sequence
tagttttaagaggaatataact

SEQ ID NO: 244821 - DNA, 22 bp, Artificial sequence
  SiRNA target sequence
agttttaagaggaatataactt

SEQ ID NO: 244822 - DNA, 22 bp, Artificial sequence
  SiRNA target sequence
gttttaagaggaatataacttt

SEQ ID NO: 244823 - DNA, 22 bp, Artificial sequence
  SiRNA target sequence
ttttaagaggaatataactttt

SEQ ID NO: 244824 - DNA, 22 bp, Artificial sequence
  SiRNA target sequence
tttaagaggaatataacttttt

SEQ ID NO: 244825 - DNA, 22 bp, Artificial sequence
  SiRNA target sequence
ttaagaggaatataacttttta

SEQ ID NO: 244826 - DNA, 22 bp, Artificial sequence
  SiRNA target sequence
taagaggaatataactttttaa

SEQ ID NO: 244827 - DNA, 22 bp, Artificial sequence
  SiRNA target sequence
aagaggaatataactttttaaa

SEQ ID NO: 244828 - DNA, 22 bp, Artificial sequence
  SiRNA target sequence
agaggaatataactttttaaaa

SEQ ID NO: 244829 - DNA, 22 bp, Artificial sequence
  SiRNA target sequence
gaggaatataactttttaaaaa

SEQ ID NO: 244830 - DNA, 22 bp, Artificial sequence
  SiRNA target sequence
aggaatataactttttaaaaag

SEQ ID NO: 244831 - DNA, 22 bp, Artificial sequence
  SiRNA target sequence
ggaatataactttttaaaaagt

SEQ ID NO: 244832 - DNA, 22 bp, Artificial sequence
  SiRNA target sequence
gaatataactttttaaaaagta

SEQ ID NO: 244833 - DNA, 22 bp, Artificial sequence
  SiRNA target sequence
aatataactttttaaaaagtaa

SEQ ID NO: 244834 - DNA, 22 bp, Artificial sequence
  SiRNA target sequence
atataactttttaaaaagtaaa

SEQ ID NO: 244835 - DNA, 22 bp, Artificial sequence
  SiRNA target sequence
tataactttttaaaaagtaaat

SEQ ID NO: 244836 - DNA, 22 bp, Artificial sequence
  SiRNA target sequence
ataactttttaaaaagtaaatt

SEQ ID NO: 244837 - DNA, 22 bp, Artificial sequence
  SiRNA target sequence
taactttttaaaaagtaaatta

SEQ ID NO: 244838 - DNA, 22 bp, Artificial sequence
  SiRNA target sequence
aactttttaaaaagtaaattaa

SEQ ID NO: 244839 - DNA, 22 bp, Artificial sequence
  SiRNA target sequence
actttttaaaaagtaaattaat

SEQ ID NO: 244840 - DNA, 22 bp, Artificial sequence
  SiRNA target sequence
ctttttaaaaagtaaattaatg

SEQ ID NO: 244841 - DNA, 22 bp, Artificial sequence
  SiRNA target sequence
tttttaaaaagtaaattaatgt

SEQ ID NO: 244842 - DNA, 22 bp, Artificial sequence
  SiRNA target sequence
ttttaaaaagtaaattaatgta

SEQ ID NO: 244843 - DNA, 22 bp, Artificial sequence
  SiRNA target sequence
tttaaaaagtaaattaatgtag

SEQ ID NO: 244844 - DNA, 22 bp, Artificial sequence
  SiRNA target sequence
ttaaaaagtaaattaatgtagt

SEQ ID NO: 244845 - DNA, 22 bp, Artificial sequence
  SiRNA target sequence
taaaaagtaaattaatgtagtt

SEQ ID NO: 244846 - DNA, 22 bp, Artificial sequence
  SiRNA target sequence
aaaaagtaaattaatgtagtta

SEQ ID NO: 244847 - DNA, 22 bp, Artificial sequence
  SiRNA target sequence
aaaagtaaattaatgtagttac

SEQ ID NO: 244848 - DNA, 22 bp, Artificial sequence
  SiRNA target sequence
aaagtaaattaatgtagttaca

SEQ ID NO: 244849 - DNA, 22 bp, Artificial sequence
  SiRNA target sequence
aagtaaattaatgtagttacaa

SEQ ID NO: 244850 - DNA, 22 bp, Artificial sequence
  SiRNA target sequence
agtaaattaatgtagttacaaa

SEQ ID NO: 244851 - DNA, 22 bp, Artificial sequence
  SiRNA target sequence
gtaaattaatgtagttacaaaa

SEQ ID NO: 244852 - DNA, 22 bp, Artificial sequence
  SiRNA target sequence
taaattaatgtagttacaaaag

SEQ ID NO: 244853 - DNA, 22 bp, Artificial sequence
  SiRNA target sequence
aaattaatgtagttacaaaaga

SEQ ID NO: 244854 - DNA, 22 bp, Artificial sequence
  SiRNA target sequence
aattaatgtagttacaaaagac

SEQ ID NO: 244855 - DNA, 22 bp, Artificial sequence
  SiRNA target sequence
attaatgtagttacaaaagaca

SEQ ID NO: 244856 - DNA, 22 bp, Artificial sequence
  SiRNA target sequence
ttaatgtagttacaaaagacaa

SEQ ID NO: 244857 - DNA, 22 bp, Artificial sequence
  SiRNA target sequence
taatgtagttacaaaagacaag

SEQ ID NO: 244858 - DNA, 22 bp, Artificial sequence
  SiRNA target sequence
aatgtagttacaaaagacaaga

SEQ ID NO: 244859 - DNA, 22 bp, Artificial sequence
  SiRNA target sequence
atgtagttacaaaagacaagat

SEQ ID NO: 244860 - DNA, 22 bp, Artificial sequence
  SiRNA target sequence
tgtagttacaaaagacaagatc

SEQ ID NO: 244861 - DNA, 22 bp, Artificial sequence
  SiRNA target sequence
gtagttacaaaagacaagatca

SEQ ID NO: 244862 - DNA, 22 bp, Artificial sequence
  SiRNA target sequence
tagttacaaaagacaagatcaa

SEQ ID NO: 244863 - DNA, 22 bp, Artificial sequence
  SiRNA target sequence
agttacaaaagacaagatcaaa

SEQ ID NO: 244864 - DNA, 22 bp, Artificial sequence
  SiRNA target sequence
gttacaaaagacaagatcaaaa

SEQ ID NO: 244865 - DNA, 22 bp, Artificial sequence
  SiRNA target sequence
ttacaaaagacaagatcaaaaa

SEQ ID NO: 244866 - DNA, 22 bp, Artificial sequence
  SiRNA target sequence
tacaaaagacaagatcaaaaaa

SEQ ID NO: 244867 - DNA, 22 bp, Artificial sequence
  SiRNA target sequence
acaaaagacaagatcaaaaaaa

SEQ ID NO: 244868 - DNA, 22 bp, Artificial sequence
  SiRNA target sequence
caaaagacaagatcaaaaaaaa

SEQ ID NO: 244869 - DNA, 22 bp, Artificial sequence
  SiRNA target sequence
aaaagacaagatcaaaaaaaac

SEQ ID NO: 244870 - DNA, 22 bp, Artificial sequence
  SiRNA target sequence
aaagacaagatcaaaaaaaaca

SEQ ID NO: 244871 - DNA, 22 bp, Artificial sequence
  SiRNA target sequence
aagacaagatcaaaaaaaacaa

SEQ ID NO: 244872 - DNA, 22 bp, Artificial sequence
  SiRNA target sequence
agacaagatcaaaaaaaacaaa

SEQ ID NO: 244873 - DNA, 22 bp, Artificial sequence
  SiRNA target sequence
gacaagatcaaaaaaaacaaac

SEQ ID NO: 244874 - DNA, 22 bp, Artificial sequence
  SiRNA target sequence
acaagatcaaaaaaaacaaact

SEQ ID NO: 244875 - DNA, 22 bp, Artificial sequence
  SiRNA target sequence
caagatcaaaaaaaacaaacta

SEQ ID NO: 244876 - DNA, 22 bp, Artificial sequence
  SiRNA target sequence
aagatcaaaaaaaacaaactac

SEQ ID NO: 244877 - DNA, 22 bp, Artificial sequence
  SiRNA target sequence
agatcaaaaaaaacaaactact

SEQ ID NO: 244878 - DNA, 22 bp, Artificial sequence
  SiRNA target sequence
gatcaaaaaaaacaaactacta

SEQ ID NO: 244879 - DNA, 22 bp, Artificial sequence
  SiRNA target sequence
atcaaaaaaaacaaactactac

SEQ ID NO: 244880 - DNA, 22 bp, Artificial sequence
  SiRNA target sequence
tcaaaaaaaacaaactactacc

SEQ ID NO: 244881 - DNA, 22 bp, Artificial sequence
  SiRNA target sequence
caaaaaaaacaaactactaccg

SEQ ID NO: 244882 - DNA, 22 bp, Artificial sequence
  SiRNA target sequence
aaaaaaaacaaactactaccgt

SEQ ID NO: 244883 - DNA, 22 bp, Artificial sequence
  SiRNA target sequence
aaaaaaacaaactactaccgtc

SEQ ID NO: 244884 - DNA, 22 bp, Artificial sequence
  SiRNA target sequence
aaaaaacaaactactaccgtca

SEQ ID NO: 244885 - DNA, 22 bp, Artificial sequence
  SiRNA target sequence
aaaaacaaactactaccgtcaa

SEQ ID NO: 244886 - DNA, 22 bp, Artificial sequence
  SiRNA target sequence
aaaacaaactactaccgtcaat

SEQ ID NO: 244887 - DNA, 22 bp, Artificial sequence
  SiRNA target sequence
aaacaaactactaccgtcaatt

SEQ ID NO: 244888 - DNA, 22 bp, Artificial sequence
  SiRNA target sequence
aacaaactactaccgtcaattt

SEQ ID NO: 244889 - DNA, 22 bp, Artificial sequence
  SiRNA target sequence
acaaactactaccgtcaatttt

SEQ ID NO: 244890 - DNA, 22 bp, Artificial sequence
  SiRNA target sequence
caaactactaccgtcaatttta

SEQ ID NO: 244891 - DNA, 22 bp, Artificial sequence
  SiRNA target sequence
aaactactaccgtcaattttat

SEQ ID NO: 244892 - DNA, 22 bp, Artificial sequence
  SiRNA target sequence
aactactaccgtcaattttatc

SEQ ID NO: 244893 - DNA, 22 bp, Artificial sequence
  SiRNA target sequence
actactaccgtcaattttatca

SEQ ID NO: 244894 - DNA, 22 bp, Artificial sequence
  SiRNA target sequence
ctactaccgtcaattttatcat

SEQ ID NO: 244895 - DNA, 22 bp, Artificial sequence
  SiRNA target sequence
tactaccgtcaattttatcatg

SEQ ID NO: 244896 - DNA, 22 bp, Artificial sequence
  SiRNA target sequence
actaccgtcaattttatcatgc

SEQ ID NO: 244897 - DNA, 22 bp, Artificial sequence
  SiRNA target sequence
ctaccgtcaattttatcatgca

SEQ ID NO: 244898 - DNA, 22 bp, Artificial sequence
  SiRNA target sequence
taccgtcaattttatcatgcaa

SEQ ID NO: 244899 - DNA, 22 bp, Artificial sequence
  SiRNA target sequence
accgtcaattttatcatgcaaa

SEQ ID NO: 244900 - DNA, 22 bp, Artificial sequence
  SiRNA target sequence
ccgtcaattttatcatgcaaac

SEQ ID NO: 244901 - DNA, 22 bp, Artificial sequence
  SiRNA target sequence
cgtcaattttatcatgcaaacc

SEQ ID NO: 244902 - DNA, 22 bp, Artificial sequence
  SiRNA target sequence
gtcaattttatcatgcaaacct

SEQ ID NO: 244903 - DNA, 22 bp, Artificial sequence
  SiRNA target sequence
tcaattttatcatgcaaacctg

SEQ ID NO: 244904 - DNA, 22 bp, Artificial sequence
  SiRNA target sequence
caattttatcatgcaaacctgc

SEQ ID NO: 244905 - DNA, 22 bp, Artificial sequence
  SiRNA target sequence
aattttatcatgcaaacctgca

SEQ ID NO: 244906 - DNA, 22 bp, Artificial sequence
  SiRNA target sequence
attttatcatgcaaacctgcag

SEQ ID NO: 244907 - DNA, 22 bp, Artificial sequence
  SiRNA target sequence
ttttatcatgcaaacctgcagg

SEQ ID NO: 244908 - DNA, 22 bp, Artificial sequence
  SiRNA target sequence
tttatcatgcaaacctgcagga

SEQ ID NO: 244909 - DNA, 22 bp, Artificial sequence
  SiRNA target sequence
ttatcatgcaaacctgcaggaa

SEQ ID NO: 244910 - DNA, 22 bp, Artificial sequence
  SiRNA target sequence
tatcatgcaaacctgcaggaag

SEQ ID NO: 244911 - DNA, 22 bp, Artificial sequence
  SiRNA target sequence
atcatgcaaacctgcaggaagt

SEQ ID NO: 244912 - DNA, 22 bp, Artificial sequence
  SiRNA target sequence
tcatgcaaacctgcaggaagta

SEQ ID NO: 244913 - DNA, 22 bp, Artificial sequence
  SiRNA target sequence
catgcaaacctgcaggaagtat

SEQ ID NO: 244914 - DNA, 22 bp, Artificial sequence
  SiRNA target sequence
atgcaaacctgcaggaagtata

SEQ ID NO: 244915 - DNA, 22 bp, Artificial sequence
  SiRNA target sequence
tgcaaacctgcaggaagtatat

SEQ ID NO: 244916 - DNA, 22 bp, Artificial sequence
  SiRNA target sequence
gcaaacctgcaggaagtatatt

SEQ ID NO: 244917 - DNA, 22 bp, Artificial sequence
  SiRNA target sequence
caaacctgcaggaagtatattt

SEQ ID NO: 244918 - DNA, 22 bp, Artificial sequence
  SiRNA target sequence
aaacctgcaggaagtatatttg

SEQ ID NO: 244919 - DNA, 22 bp, Artificial sequence
  SiRNA target sequence
aacctgcaggaagtatatttgc

SEQ ID NO: 244920 - DNA, 22 bp, Artificial sequence
  SiRNA target sequence
acctgcaggaagtatatttgct

SEQ ID NO: 244921 - DNA, 22 bp, Artificial sequence
  SiRNA target sequence
cctgcaggaagtatatttgcta

SEQ ID NO: 244922 - DNA, 22 bp, Artificial sequence
  SiRNA target sequence
ctgcaggaagtatatttgctaa

SEQ ID NO: 244923 - DNA, 22 bp, Artificial sequence
  SiRNA target sequence
tgcaggaagtatatttgctaat

SEQ ID NO: 244924 - DNA, 22 bp, Artificial sequence
  SiRNA target sequence
gcaggaagtatatttgctaatt

SEQ ID NO: 244925 - DNA, 22 bp, Artificial sequence
  SiRNA target sequence
caggaagtatatttgctaattc

SEQ ID NO: 244926 - DNA, 22 bp, Artificial sequence
  SiRNA target sequence
aggaagtatatttgctaattca

SEQ ID NO: 244927 - DNA, 22 bp, Artificial sequence
  SiRNA target sequence
ggaagtatatttgctaattcat

SEQ ID NO: 244928 - DNA, 22 bp, Artificial sequence
  SiRNA target sequence
gaagtatatttgctaattcatc

SEQ ID NO: 244929 - DNA, 22 bp, Artificial sequence
  SiRNA target sequence
aagtatatttgctaattcatct

SEQ ID NO: 244930 - DNA, 22 bp, Artificial sequence
  SiRNA target sequence
agtatatttgctaattcatctt

SEQ ID NO: 244931 - DNA, 22 bp, Artificial sequence
  SiRNA target sequence
gtatatttgctaattcatcttt

SEQ ID NO: 244932 - DNA, 22 bp, Artificial sequence
  SiRNA target sequence
tatatttgctaattcatctttt

SEQ ID NO: 244933 - DNA, 22 bp, Artificial sequence
  SiRNA target sequence
atatttgctaattcatctttta

SEQ ID NO: 244934 - DNA, 22 bp, Artificial sequence
  SiRNA target sequence
tatttgctaattcatcttttat

SEQ ID NO: 244935 - DNA, 22 bp, Artificial sequence
  SiRNA target sequence
atttgctaattcatcttttata

SEQ ID NO: 244936 - DNA, 22 bp, Artificial sequence
  SiRNA target sequence
tttgctaattcatcttttatat

SEQ ID NO: 244937 - DNA, 22 bp, Artificial sequence
  SiRNA target sequence
ttgctaattcatcttttatata

SEQ ID NO: 244938 - DNA, 22 bp, Artificial sequence
  SiRNA target sequence
tgctaattcatcttttatataa

SEQ ID NO: 244939 - DNA, 22 bp, Artificial sequence
  SiRNA target sequence
gctaattcatcttttatataaa

SEQ ID NO: 244940 - DNA, 22 bp, Artificial sequence
  SiRNA target sequence
ctaattcatcttttatataaat

SEQ ID NO: 244941 - DNA, 22 bp, Artificial sequence
  SiRNA target sequence
taattcatcttttatataaata

SEQ ID NO: 244942 - DNA, 22 bp, Artificial sequence
  SiRNA target sequence
aattcatcttttatataaataa

SEQ ID NO: 244943 - DNA, 22 bp, Artificial sequence
  SiRNA target sequence
attcatcttttatataaataaa

SEQ ID NO: 244944 - DNA, 22 bp, Artificial sequence
  SiRNA target sequence
ttcatcttttatataaataaaa

SEQ ID NO: 244945 - DNA, 22 bp, Artificial sequence
  SiRNA target sequence
tcatcttttatataaataaaag

SEQ ID NO: 244946 - DNA, 22 bp, Artificial sequence
  SiRNA target sequence
catcttttatataaataaaagc

SEQ ID NO: 244947 - DNA, 22 bp, Artificial sequence
  SiRNA target sequence
atcttttatataaataaaagct

SEQ ID NO: 244948 - DNA, 22 bp, Artificial sequence
  SiRNA target sequence
tcttttatataaataaaagcta

SEQ ID NO: 244949 - DNA, 22 bp, Artificial sequence
  SiRNA target sequence
cttttatataaataaaagctac

SEQ ID NO: 244950 - DNA, 22 bp, Artificial sequence
  SiRNA target sequence
ttttatataaataaaagctaca

SEQ ID NO: 244951 - DNA, 22 bp, Artificial sequence
  SiRNA target sequence
tttatataaataaaagctacag

SEQ ID NO: 244952 - DNA, 22 bp, Artificial sequence
  SiRNA target sequence
ttatataaataaaagctacaga

SEQ ID NO: 244953 - DNA, 22 bp, Artificial sequence
  SiRNA target sequence
tatataaataaaagctacagaa

SEQ ID NO: 244954 - DNA, 22 bp, Artificial sequence
  SiRNA target sequence
atataaataaaagctacagaaa

SEQ ID NO: 244955 - DNA, 22 bp, Artificial sequence
  SiRNA target sequence
tataaataaaagctacagaaat

SEQ ID NO: 244956 - DNA, 22 bp, Artificial sequence
  SiRNA target sequence
ataaataaaagctacagaaata

SEQ ID NO: 244957 - DNA, 22 bp, Artificial sequence
  SiRNA target sequence
taaataaaagctacagaaataa

SEQ ID NO: 244958 - DNA, 22 bp, Artificial sequence
  SiRNA target sequence
aaataaaagctacagaaataat

SEQ ID NO: 244959 - DNA, 22 bp, Artificial sequence
  SiRNA target sequence
aataaaagctacagaaataatc

SEQ ID NO: 244960 - DNA, 22 bp, Artificial sequence
  SiRNA target sequence
ataaaagctacagaaataatca

SEQ ID NO: 244961 - DNA, 22 bp, Artificial sequence
  SiRNA target sequence
taaaagctacagaaataatcat

SEQ ID NO: 244962 - DNA, 22 bp, Artificial sequence
  SiRNA target sequence
aaaagctacagaaataatcatt

SEQ ID NO: 244963 - DNA, 22 bp, Artificial sequence
  SiRNA target sequence
aaagctacagaaataatcattg

SEQ ID NO: 244964 - DNA, 22 bp, Artificial sequence
  SiRNA target sequence
aagctacagaaataatcattga

SEQ ID NO: 244965 - DNA, 22 bp, Artificial sequence
  SiRNA target sequence
agctacagaaataatcattgaa

SEQ ID NO: 244966 - DNA, 22 bp, Artificial sequence
  SiRNA target sequence
gctacagaaataatcattgaaa

SEQ ID NO: 244967 - DNA, 22 bp, Artificial sequence
  SiRNA target sequence
ctacagaaataatcattgaaat

SEQ ID NO: 244968 - DNA, 22 bp, Artificial sequence
  SiRNA target sequence
tacagaaataatcattgaaatg

SEQ ID NO: 244969 - DNA, 22 bp, Artificial sequence
  SiRNA target sequence
acagaaataatcattgaaatgg

SEQ ID NO: 244970 - DNA, 22 bp, Artificial sequence
  SiRNA target sequence
cagaaataatcattgaaatggc

SEQ ID NO: 244971 - DNA, 22 bp, Artificial sequence
  SiRNA target sequence
agaaataatcattgaaatggcg

SEQ ID NO: 244972 - DNA, 22 bp, Artificial sequence
  SiRNA target sequence
gaaataatcattgaaatggcgg

SEQ ID NO: 244973 - DNA, 22 bp, Artificial sequence
  SiRNA target sequence
aaataatcattgaaatggcggt

SEQ ID NO: 244974 - DNA, 22 bp, Artificial sequence
  SiRNA target sequence
aataatcattgaaatggcggtg

SEQ ID NO: 244975 - DNA, 22 bp, Artificial sequence
  SiRNA target sequence
ataatcattgaaatggcggtga

SEQ ID NO: 244976 - DNA, 22 bp, Artificial sequence
  SiRNA target sequence
taatcattgaaatggcggtgat

SEQ ID NO: 244977 - DNA, 22 bp, Artificial sequence
  SiRNA target sequence
aatcattgaaatggcggtgatt

SEQ ID NO: 244978 - DNA, 22 bp, Artificial sequence
  SiRNA target sequence
atcattgaaatggcggtgattg

SEQ ID NO: 244979 - DNA, 22 bp, Artificial sequence
  SiRNA target sequence
tcattgaaatggcggtgattgt

SEQ ID NO: 244980 - DNA, 22 bp, Artificial sequence
  SiRNA target sequence
cattgaaatggcggtgattgtg

SEQ ID NO: 244981 - DNA, 22 bp, Artificial sequence
  SiRNA target sequence
attgaaatggcggtgattgtgg

SEQ ID NO: 244982 - DNA, 22 bp, Artificial sequence
  SiRNA target sequence
ttgaaatggcggtgattgtgga

SEQ ID NO: 244983 - DNA, 22 bp, Artificial sequence
  SiRNA target sequence
tgaaatggcggtgattgtggaa

SEQ ID NO: 244984 - DNA, 22 bp, Artificial sequence
  SiRNA target sequence
gaaatggcggtgattgtggaaa

SEQ ID NO: 244985 - DNA, 22 bp, Artificial sequence
  SiRNA target sequence
aaatggcggtgattgtggaaaa

SEQ ID NO: 244986 - DNA, 22 bp, Artificial sequence
  SiRNA target sequence
aatggcggtgattgtggaaaaa

SEQ ID NO: 244987 - DNA, 22 bp, Artificial sequence
  SiRNA target sequence
atggcggtgattgtggaaaaat

SEQ ID NO: 244988 - DNA, 22 bp, Artificial sequence
  SiRNA target sequence
tggcggtgattgtggaaaaatt

SEQ ID NO: 244989 - DNA, 22 bp, Artificial sequence
  SiRNA target sequence
ggcggtgattgtggaaaaatta

SEQ ID NO: 244990 - DNA, 22 bp, Artificial sequence
  SiRNA target sequence
gcggtgattgtggaaaaattag

SEQ ID NO: 244991 - DNA, 22 bp, Artificial sequence
  SiRNA target sequence
cggtgattgtggaaaaattagg

SEQ ID NO: 244992 - DNA, 22 bp, Artificial sequence
  SiRNA target sequence
ggtgattgtggaaaaattagga

SEQ ID NO: 244993 - DNA, 22 bp, Artificial sequence
  SiRNA target sequence
gtgattgtggaaaaattaggaa

SEQ ID NO: 244994 - DNA, 22 bp, Artificial sequence
  SiRNA target sequence
tgattgtggaaaaattaggaac

SEQ ID NO: 244995 - DNA, 22 bp, Artificial sequence
  SiRNA target sequence
gattgtggaaaaattaggaaca

SEQ ID NO: 244996 - DNA, 22 bp, Artificial sequence
  SiRNA target sequence
attgtggaaaaattaggaacaa

SEQ ID NO: 244997 - DNA, 22 bp, Artificial sequence
  SiRNA target sequence
ttgtggaaaaattaggaacaat

SEQ ID NO: 244998 - DNA, 22 bp, Artificial sequence
  SiRNA target sequence
tgtggaaaaattaggaacaatt

SEQ ID NO: 244999 - DNA, 22 bp, Artificial sequence
  SiRNA target sequence
gtggaaaaattaggaacaattt

SEQ ID NO: 245000 - DNA, 22 bp, Artificial sequence
  SiRNA target sequence
tggaaaaattaggaacaatttc

SEQ ID NO: 245001 - DNA, 22 bp, Artificial sequence
  SiRNA target sequence
ggaaaaattaggaacaatttct

SEQ ID NO: 245002 - DNA, 22 bp, Artificial sequence
  SiRNA target sequence
gaaaaattaggaacaatttctt

SEQ ID NO: 245003 - DNA, 22 bp, Artificial sequence
  SiRNA target sequence
aaaaattaggaacaatttcttt

SEQ ID NO: 245004 - DNA, 22 bp, Artificial sequence
  SiRNA target sequence
aaaattaggaacaatttctttc

SEQ ID NO: 245005 - DNA, 22 bp, Artificial sequence
  SiRNA target sequence
aaattaggaacaatttctttca

SEQ ID NO: 245006 - DNA, 22 bp, Artificial sequence
  SiRNA target sequence
aattaggaacaatttctttcat

SEQ ID NO: 245007 - DNA, 22 bp, Artificial sequence
  SiRNA target sequence
attaggaacaatttctttcatt

SEQ ID NO: 245008 - DNA, 22 bp, Artificial sequence
  SiRNA target sequence
ttaggaacaatttctttcattt

SEQ ID NO: 245009 - DNA, 22 bp, Artificial sequence
  SiRNA target sequence
taggaacaatttctttcatttc

SEQ ID NO: 245010 - DNA, 22 bp, Artificial sequence
  SiRNA target sequence
aggaacaatttctttcatttca

SEQ ID NO: 245011 - DNA, 22 bp, Artificial sequence
  SiRNA target sequence
ggaacaatttctttcatttcat

SEQ ID NO: 245012 - DNA, 22 bp, Artificial sequence
  SiRNA target sequence
gaacaatttctttcatttcatc

SEQ ID NO: 245013 - DNA, 22 bp, Artificial sequence
  SiRNA target sequence
aacaatttctttcatttcatct

SEQ ID NO: 245014 - DNA, 22 bp, Artificial sequence
  SiRNA target sequence
acaatttctttcatttcatctt

SEQ ID NO: 245015 - DNA, 22 bp, Artificial sequence
  SiRNA target sequence
caatttctttcatttcatcttc

SEQ ID NO: 245016 - DNA, 22 bp, Artificial sequence
  SiRNA target sequence
aatttctttcatttcatcttct

SEQ ID NO: 245017 - DNA, 22 bp, Artificial sequence
  SiRNA target sequence
atttctttcatttcatcttctg

SEQ ID NO: 245018 - DNA, 22 bp, Artificial sequence
  SiRNA target sequence
tttctttcatttcatcttctgt

SEQ ID NO: 245019 - DNA, 22 bp, Artificial sequence
  SiRNA target sequence
ttctttcatttcatcttctgta

SEQ ID NO: 245020 - DNA, 22 bp, Artificial sequence
  SiRNA target sequence
tctttcatttcatcttctgtac

SEQ ID NO: 245021 - DNA, 22 bp, Artificial sequence
  SiRNA target sequence
ctttcatttcatcttctgtaca

SEQ ID NO: 245022 - DNA, 22 bp, Artificial sequence
  SiRNA target sequence
tttcatttcatcttctgtacaa

SEQ ID NO: 245023 - DNA, 22 bp, Artificial sequence
  SiRNA target sequence
ttcatttcatcttctgtacaag

SEQ ID NO: 245024 - DNA, 22 bp, Artificial sequence
  SiRNA target sequence
tcatttcatcttctgtacaagc

SEQ ID NO: 245025 - DNA, 22 bp, Artificial sequence
  SiRNA target sequence
catttcatcttctgtacaagca

SEQ ID NO: 245026 - DNA, 22 bp, Artificial sequence
  SiRNA target sequence
atttcatcttctgtacaagcat

SEQ ID NO: 245027 - DNA, 22 bp, Artificial sequence
  SiRNA target sequence
tttcatcttctgtacaagcatg

SEQ ID NO: 245028 - DNA, 22 bp, Artificial sequence
  SiRNA target sequence
ttcatcttctgtacaagcatga

SEQ ID NO: 245029 - DNA, 22 bp, Artificial sequence
  SiRNA target sequence
tcatcttctgtacaagcatgat

SEQ ID NO: 245030 - DNA, 22 bp, Artificial sequence
  SiRNA target sequence
catcttctgtacaagcatgatt

SEQ ID NO: 245031 - DNA, 22 bp, Artificial sequence
  SiRNA target sequence
atcttctgtacaagcatgattg

SEQ ID NO: 245032 - DNA, 22 bp, Artificial sequence
  SiRNA target sequence
tcttctgtacaagcatgattgg

SEQ ID NO: 245033 - DNA, 22 bp, Artificial sequence
  SiRNA target sequence
cttctgtacaagcatgattggc

SEQ ID NO: 245034 - DNA, 22 bp, Artificial sequence
  SiRNA target sequence
ttctgtacaagcatgattggct

SEQ ID NO: 245035 - DNA, 22 bp, Artificial sequence
  SiRNA target sequence
tctgtacaagcatgattggcta

SEQ ID NO: 245036 - DNA, 22 bp, Artificial sequence
  SiRNA target sequence
ctgtacaagcatgattggctaa

SEQ ID NO: 245037 - DNA, 22 bp, Artificial sequence
  SiRNA target sequence
tgtacaagcatgattggctaac

SEQ ID NO: 245038 - DNA, 22 bp, Artificial sequence
  SiRNA target sequence
gtacaagcatgattggctaacg

SEQ ID NO: 245039 - DNA, 22 bp, Artificial sequence
  SiRNA target sequence
tacaagcatgattggctaacgc

SEQ ID NO: 245040 - DNA, 22 bp, Artificial sequence
  SiRNA target sequence
acaagcatgattggctaacgca

SEQ ID NO: 245041 - DNA, 22 bp, Artificial sequence
  SiRNA target sequence
caagcatgattggctaacgcat

SEQ ID NO: 245042 - DNA, 22 bp, Artificial sequence
  SiRNA target sequence
aagcatgattggctaacgcata

SEQ ID NO: 245043 - DNA, 22 bp, Artificial sequence
  SiRNA target sequence
agcatgattggctaacgcatat

SEQ ID NO: 245044 - DNA, 22 bp, Artificial sequence
  SiRNA target sequence
gcatgattggctaacgcatata

SEQ ID NO: 245045 - DNA, 22 bp, Artificial sequence
  SiRNA target sequence
catgattggctaacgcatataa

SEQ ID NO: 245046 - DNA, 22 bp, Artificial sequence
  SiRNA target sequence
atgattggctaacgcatataaa

SEQ ID NO: 245047 - DNA, 22 bp, Artificial sequence
  SiRNA target sequence
tgattggctaacgcatataaag

SEQ ID NO: 245048 - DNA, 22 bp, Artificial sequence
  SiRNA target sequence
gattggctaacgcatataaagc

SEQ ID NO: 245049 - DNA, 22 bp, Artificial sequence
  SiRNA target sequence
attggctaacgcatataaagca

SEQ ID NO: 245050 - DNA, 22 bp, Artificial sequence
  SiRNA target sequence
ttggctaacgcatataaagcaa

SEQ ID NO: 245051 - DNA, 22 bp, Artificial sequence
  SiRNA target sequence
tggctaacgcatataaagcaaa

SEQ ID NO: 245052 - DNA, 22 bp, Artificial sequence
  SiRNA target sequence
ggctaacgcatataaagcaaaa

SEQ ID NO: 245053 - DNA, 22 bp, Artificial sequence
  SiRNA target sequence
gctaacgcatataaagcaaaac

SEQ ID NO: 245054 - DNA, 22 bp, Artificial sequence
  SiRNA target sequence
ctaacgcatataaagcaaaacc

SEQ ID NO: 245055 - DNA, 22 bp, Artificial sequence
  SiRNA target sequence
taacgcatataaagcaaaacca

SEQ ID NO: 245056 - DNA, 22 bp, Artificial sequence
  SiRNA target sequence
aacgcatataaagcaaaaccaa

SEQ ID NO: 245057 - DNA, 22 bp, Artificial sequence
  SiRNA target sequence
acgcatataaagcaaaaccaac

SEQ ID NO: 245058 - DNA, 22 bp, Artificial sequence
  SiRNA target sequence
cgcatataaagcaaaaccaact

SEQ ID NO: 245059 - DNA, 22 bp, Artificial sequence
  SiRNA target sequence
gcatataaagcaaaaccaacta

SEQ ID NO: 245060 - DNA, 22 bp, Artificial sequence
  SiRNA target sequence
catataaagcaaaaccaactac

SEQ ID NO: 245061 - DNA, 22 bp, Artificial sequence
  SiRNA target sequence
atataaagcaaaaccaactact

SEQ ID NO: 245062 - DNA, 22 bp, Artificial sequence
  SiRNA target sequence
tataaagcaaaaccaactacta

SEQ ID NO: 245063 - DNA, 22 bp, Artificial sequence
  SiRNA target sequence
ataaagcaaaaccaactactag

SEQ ID NO: 245064 - DNA, 22 bp, Artificial sequence
  SiRNA target sequence
taaagcaaaaccaactactaga

SEQ ID NO: 245065 - DNA, 22 bp, Artificial sequence
  SiRNA target sequence
aaagcaaaaccaactactagag

SEQ ID NO: 245066 - DNA, 22 bp, Artificial sequence
  SiRNA target sequence
aagcaaaaccaactactagagt

SEQ ID NO: 245067 - DNA, 22 bp, Artificial sequence
  SiRNA target sequence
agcaaaaccaactactagagta

SEQ ID NO: 245068 - DNA, 22 bp, Artificial sequence
  SiRNA target sequence
gcaaaaccaactactagagtac

SEQ ID NO: 245069 - DNA, 22 bp, Artificial sequence
  SiRNA target sequence
caaaaccaactactagagtact

SEQ ID NO: 245070 - DNA, 22 bp, Artificial sequence
  SiRNA target sequence
aaaaccaactactagagtactc

SEQ ID NO: 245071 - DNA, 22 bp, Artificial sequence
  SiRNA target sequence
aaaccaactactagagtactcc

SEQ ID NO: 245072 - DNA, 22 bp, Artificial sequence
  SiRNA target sequence
aaccaactactagagtactcca

SEQ ID NO: 245073 - DNA, 22 bp, Artificial sequence
  SiRNA target sequence
accaactactagagtactccac

SEQ ID NO: 245074 - DNA, 22 bp, Artificial sequence
  SiRNA target sequence
ccaactactagagtactccaca

SEQ ID NO: 245075 - DNA, 22 bp, Artificial sequence
  SiRNA target sequence
caactactagagtactccacaa

SEQ ID NO: 245076 - DNA, 22 bp, Artificial sequence
  SiRNA target sequence
aactactagagtactccacaac

SEQ ID NO: 245077 - DNA, 22 bp, Artificial sequence
  SiRNA target sequence
actactagagtactccacaact

SEQ ID NO: 245078 - DNA, 22 bp, Artificial sequence
  SiRNA target sequence
ctactagagtactccacaactc

SEQ ID NO: 245079 - DNA, 22 bp, Artificial sequence
  SiRNA target sequence
tactagagtactccacaactcc

SEQ ID NO: 245080 - DNA, 22 bp, Artificial sequence
  SiRNA target sequence
actagagtactccacaactccg

SEQ ID NO: 245081 - DNA, 22 bp, Artificial sequence
  SiRNA target sequence
ctagagtactccacaactccga

SEQ ID NO: 245082 - DNA, 22 bp, Artificial sequence
  SiRNA target sequence
tagagtactccacaactccgat

SEQ ID NO: 245083 - DNA, 22 bp, Artificial sequence
  SiRNA target sequence
agagtactccacaactccgata

SEQ ID NO: 245084 - DNA, 22 bp, Artificial sequence
  SiRNA target sequence
gagtactccacaactccgataa

SEQ ID NO: 245085 - DNA, 22 bp, Artificial sequence
  SiRNA target sequence
agtactccacaactccgataag

SEQ ID NO: 245086 - DNA, 22 bp, Artificial sequence
  SiRNA target sequence
gtactccacaactccgataaga

SEQ ID NO: 245087 - DNA, 22 bp, Artificial sequence
  SiRNA target sequence
tactccacaactccgataagat

SEQ ID NO: 245088 - DNA, 22 bp, Artificial sequence
  SiRNA target sequence
actccacaactccgataagatg

SEQ ID NO: 245089 - DNA, 22 bp, Artificial sequence
  SiRNA target sequence
ctccacaactccgataagatgt

SEQ ID NO: 245090 - DNA, 22 bp, Artificial sequence
  SiRNA target sequence
tccacaactccgataagatgta

SEQ ID NO: 245091 - DNA, 22 bp, Artificial sequence
  SiRNA target sequence
ccacaactccgataagatgtaa

SEQ ID NO: 245092 - DNA, 22 bp, Artificial sequence
  SiRNA target sequence
cacaactccgataagatgtaac

SEQ ID NO: 245093 - DNA, 22 bp, Artificial sequence
  SiRNA target sequence
acaactccgataagatgtaaca

SEQ ID NO: 245094 - DNA, 22 bp, Artificial sequence
  SiRNA target sequence
caactccgataagatgtaacat

SEQ ID NO: 245095 - DNA, 22 bp, Artificial sequence
  SiRNA target sequence
aactccgataagatgtaacata

SEQ ID NO: 245096 - DNA, 22 bp, Artificial sequence
  SiRNA target sequence
actccgataagatgtaacataa

SEQ ID NO: 245097 - DNA, 22 bp, Artificial sequence
  SiRNA target sequence
ctccgataagatgtaacataaa

SEQ ID NO: 245098 - DNA, 22 bp, Artificial sequence
  SiRNA target sequence
tccgataagatgtaacataaag

SEQ ID NO: 245099 - DNA, 22 bp, Artificial sequence
  SiRNA target sequence
ccgataagatgtaacataaagt

SEQ ID NO: 245100 - DNA, 22 bp, Artificial sequence
  SiRNA target sequence
cgataagatgtaacataaagta

SEQ ID NO: 245101 - DNA, 22 bp, Artificial sequence
  SiRNA target sequence
gataagatgtaacataaagtac

SEQ ID NO: 245102 - DNA, 22 bp, Artificial sequence
  SiRNA target sequence
ataagatgtaacataaagtact

SEQ ID NO: 245103 - DNA, 22 bp, Artificial sequence
  SiRNA target sequence
taagatgtaacataaagtactt

SEQ ID NO: 245104 - DNA, 22 bp, Artificial sequence
  SiRNA target sequence
aagatgtaacataaagtactta

SEQ ID NO: 245105 - DNA, 22 bp, Artificial sequence
  SiRNA target sequence
agatgtaacataaagtacttat

SEQ ID NO: 245106 - DNA, 22 bp, Artificial sequence
  SiRNA target sequence
gatgtaacataaagtacttatc

SEQ ID NO: 245107 - DNA, 22 bp, Artificial sequence
  SiRNA target sequence
atgtaacataaagtacttatcc

SEQ ID NO: 245108 - DNA, 22 bp, Artificial sequence
  SiRNA target sequence
tgtaacataaagtacttatcca

SEQ ID NO: 245109 - DNA, 22 bp, Artificial sequence
  SiRNA target sequence
gtaacataaagtacttatccac

SEQ ID NO: 245110 - DNA, 22 bp, Artificial sequence
  SiRNA target sequence
taacataaagtacttatccact

SEQ ID NO: 245111 - DNA, 22 bp, Artificial sequence
  SiRNA target sequence
aacataaagtacttatccactc

SEQ ID NO: 245112 - DNA, 22 bp, Artificial sequence
  SiRNA target sequence
acataaagtacttatccactca

SEQ ID NO: 245113 - DNA, 22 bp, Artificial sequence
  SiRNA target sequence
cataaagtacttatccactcac

SEQ ID NO: 245114 - DNA, 22 bp, Artificial sequence
  SiRNA target sequence
ataaagtacttatccactcact

SEQ ID NO: 245115 - DNA, 22 bp, Artificial sequence
  SiRNA target sequence
taaagtacttatccactcactg

SEQ ID NO: 245116 - DNA, 22 bp, Artificial sequence
  SiRNA target sequence
aaagtacttatccactcactgt

SEQ ID NO: 245117 - DNA, 22 bp, Artificial sequence
  SiRNA target sequence
aagtacttatccactcactgta

SEQ ID NO: 245118 - DNA, 22 bp, Artificial sequence
  SiRNA target sequence
agtacttatccactcactgtac

SEQ ID NO: 245119 - DNA, 22 bp, Artificial sequence
  SiRNA target sequence
gtacttatccactcactgtaca

SEQ ID NO: 245120 - DNA, 22 bp, Artificial sequence
  SiRNA target sequence
tacttatccactcactgtacat

SEQ ID NO: 245121 - DNA, 22 bp, Artificial sequence
  SiRNA target sequence
acttatccactcactgtacata

SEQ ID NO: 245122 - DNA, 22 bp, Artificial sequence
  SiRNA target sequence
cttatccactcactgtacatat

SEQ ID NO: 245123 - DNA, 22 bp, Artificial sequence
  SiRNA target sequence
ttatccactcactgtacatata

SEQ ID NO: 245124 - DNA, 22 bp, Artificial sequence
  SiRNA target sequence
tatccactcactgtacatatat

SEQ ID NO: 245125 - DNA, 22 bp, Artificial sequence
  SiRNA target sequence
atccactcactgtacatatata

SEQ ID NO: 245126 - DNA, 22 bp, Artificial sequence
  SiRNA target sequence
tccactcactgtacatatataa

SEQ ID NO: 245127 - DNA, 22 bp, Artificial sequence
  SiRNA target sequence
ccactcactgtacatatataaa

SEQ ID NO: 245128 - DNA, 22 bp, Artificial sequence
  SiRNA target sequence
cactcactgtacatatataaaa

SEQ ID NO: 245129 - DNA, 22 bp, Artificial sequence
  SiRNA target sequence
actcactgtacatatataaaaa

SEQ ID NO: 245130 - DNA, 22 bp, Artificial sequence
  SiRNA target sequence
ctcactgtacatatataaaaaa

SEQ ID NO: 245131 - DNA, 22 bp, Artificial sequence
  SiRNA target sequence
tcactgtacatatataaaaaag

SEQ ID NO: 245132 - DNA, 22 bp, Artificial sequence
  SiRNA target sequence
cactgtacatatataaaaaagg

SEQ ID NO: 245133 - DNA, 22 bp, Artificial sequence
  SiRNA target sequence
actgtacatatataaaaaagga

SEQ ID NO: 245134 - DNA, 22 bp, Artificial sequence
  SiRNA target sequence
ctgtacatatataaaaaaggag

SEQ ID NO: 245135 - DNA, 22 bp, Artificial sequence
  SiRNA target sequence
tgtacatatataaaaaaggaga

SEQ ID NO: 245136 - DNA, 22 bp, Artificial sequence
  SiRNA target sequence
gtacatatataaaaaaggagat

SEQ ID NO: 245137 - DNA, 22 bp, Artificial sequence
  SiRNA target sequence
tacatatataaaaaaggagata

SEQ ID NO: 245138 - DNA, 22 bp, Artificial sequence
  SiRNA target sequence
acatatataaaaaaggagataa

SEQ ID NO: 245139 - DNA, 22 bp, Artificial sequence
  SiRNA target sequence
catatataaaaaaggagataag

SEQ ID NO: 245140 - DNA, 22 bp, Artificial sequence
  SiRNA target sequence
atatataaaaaaggagataagc

SEQ ID NO: 245141 - DNA, 22 bp, Artificial sequence
  SiRNA target sequence
tatataaaaaaggagataagcc

SEQ ID NO: 245142 - DNA, 22 bp, Artificial sequence
  SiRNA target sequence
atataaaaaaggagataagccc

SEQ ID NO: 245143 - DNA, 22 bp, Artificial sequence
  SiRNA target sequence
tataaaaaaggagataagccca

SEQ ID NO: 245144 - DNA, 22 bp, Artificial sequence
  SiRNA target sequence
ataaaaaaggagataagcccat

SEQ ID NO: 245145 - DNA, 22 bp, Artificial sequence
  SiRNA target sequence
taaaaaaggagataagcccatc

SEQ ID NO: 245146 - DNA, 22 bp, Artificial sequence
  SiRNA target sequence
aaaaaaggagataagcccatca

SEQ ID NO: 245147 - DNA, 22 bp, Artificial sequence
  SiRNA target sequence
aaaaaggagataagcccatcaa

SEQ ID NO: 245148 - DNA, 22 bp, Artificial sequence
  SiRNA target sequence
aaaaggagataagcccatcaag

SEQ ID NO: 245149 - DNA, 22 bp, Artificial sequence
  SiRNA target sequence
aaaggagataagcccatcaagc

SEQ ID NO: 245150 - DNA, 22 bp, Artificial sequence
  SiRNA target sequence
aaggagataagcccatcaagct

SEQ ID NO: 245151 - DNA, 22 bp, Artificial sequence
  SiRNA target sequence
aggagataagcccatcaagctt

SEQ ID NO: 245152 - DNA, 22 bp, Artificial sequence
  SiRNA target sequence
ggagataagcccatcaagcttc

SEQ ID NO: 245153 - DNA, 22 bp, Artificial sequence
  SiRNA target sequence
gagataagcccatcaagcttct

SEQ ID NO: 245154 - DNA, 22 bp, Artificial sequence
  SiRNA target sequence
agataagcccatcaagcttcta

SEQ ID NO: 245155 - DNA, 22 bp, Artificial sequence
  SiRNA target sequence
gataagcccatcaagcttctaa

SEQ ID NO: 245156 - DNA, 22 bp, Artificial sequence
  SiRNA target sequence
ataagcccatcaagcttctaac

SEQ ID NO: 245157 - DNA, 22 bp, Artificial sequence
  SiRNA target sequence
taagcccatcaagcttctaact

SEQ ID NO: 245158 - DNA, 22 bp, Artificial sequence
  SiRNA target sequence
aagcccatcaagcttctaactg

SEQ ID NO: 245159 - DNA, 22 bp, Artificial sequence
  SiRNA target sequence
agcccatcaagcttctaactga

SEQ ID NO: 245160 - DNA, 22 bp, Artificial sequence
  SiRNA target sequence
gcccatcaagcttctaactgac

SEQ ID NO: 245161 - DNA, 22 bp, Artificial sequence
  SiRNA target sequence
cccatcaagcttctaactgaca

SEQ ID NO: 245162 - DNA, 22 bp, Artificial sequence
  SiRNA target sequence
ccatcaagcttctaactgacat

SEQ ID NO: 245163 - DNA, 22 bp, Artificial sequence
  SiRNA target sequence
catcaagcttctaactgacatc

SEQ ID NO: 245164 - DNA, 22 bp, Artificial sequence
  SiRNA target sequence
atcaagcttctaactgacatct

SEQ ID NO: 245165 - DNA, 22 bp, Artificial sequence
  SiRNA target sequence
tcaagcttctaactgacatctt

SEQ ID NO: 245166 - DNA, 22 bp, Artificial sequence
  SiRNA target sequence
caagcttctaactgacatctta

SEQ ID NO: 245167 - DNA, 22 bp, Artificial sequence
  SiRNA target sequence
aagcttctaactgacatcttac

SEQ ID NO: 245168 - DNA, 22 bp, Artificial sequence
  SiRNA target sequence
agcttctaactgacatcttacc

SEQ ID NO: 245169 - DNA, 22 bp, Artificial sequence
  SiRNA target sequence
gcttctaactgacatcttacca

SEQ ID NO: 245170 - DNA, 22 bp, Artificial sequence
  SiRNA target sequence
cttctaactgacatcttaccat

SEQ ID NO: 245171 - DNA, 22 bp, Artificial sequence
  SiRNA target sequence
ttctaactgacatcttaccatc

SEQ ID NO: 245172 - DNA, 22 bp, Artificial sequence
  SiRNA target sequence
tctaactgacatcttaccatca

SEQ ID NO: 245173 - DNA, 22 bp, Artificial sequence
  SiRNA target sequence
ctaactgacatcttaccatcac

SEQ ID NO: 245174 - DNA, 22 bp, Artificial sequence
  SiRNA target sequence
taactgacatcttaccatcaca

SEQ ID NO: 245175 - DNA, 22 bp, Artificial sequence
  SiRNA target sequence
aactgacatcttaccatcacaa

SEQ ID NO: 245176 - DNA, 22 bp, Artificial sequence
  SiRNA target sequence
actgacatcttaccatcacaaa

SEQ ID NO: 245177 - DNA, 22 bp, Artificial sequence
  SiRNA target sequence
ctgacatcttaccatcacaaaa

SEQ ID NO: 245178 - DNA, 22 bp, Artificial sequence
  SiRNA target sequence
tgacatcttaccatcacaaaaa

SEQ ID NO: 245179 - DNA, 22 bp, Artificial sequence
  SiRNA target sequence
gacatcttaccatcacaaaaaa

SEQ ID NO: 245180 - DNA, 22 bp, Artificial sequence
  SiRNA target sequence
acatcttaccatcacaaaaaat

SEQ ID NO: 245181 - DNA, 22 bp, Artificial sequence
  SiRNA target sequence
catcttaccatcacaaaaaata

SEQ ID NO: 245182 - DNA, 22 bp, Artificial sequence
  SiRNA target sequence
atcttaccatcacaaaaaatat

SEQ ID NO: 245183 - DNA, 22 bp, Artificial sequence
  SiRNA target sequence
tcttaccatcacaaaaaatatc

SEQ ID NO: 245184 - DNA, 22 bp, Artificial sequence
  SiRNA target sequence
cttaccatcacaaaaaatatct

SEQ ID NO: 245185 - DNA, 22 bp, Artificial sequence
  SiRNA target sequence
ttaccatcacaaaaaatatcta

SEQ ID NO: 245186 - DNA, 22 bp, Artificial sequence
  SiRNA target sequence
taccatcacaaaaaatatctag

SEQ ID NO: 245187 - DNA, 22 bp, Artificial sequence
  SiRNA target sequence
accatcacaaaaaatatctagt

SEQ ID NO: 245188 - DNA, 22 bp, Artificial sequence
  SiRNA target sequence
ccatcacaaaaaatatctagtg

SEQ ID NO: 245189 - DNA, 22 bp, Artificial sequence
  SiRNA target sequence
catcacaaaaaatatctagtgc

SEQ ID NO: 245190 - DNA, 22 bp, Artificial sequence
  SiRNA target sequence
atcacaaaaaatatctagtgcc

SEQ ID NO: 245191 - DNA, 22 bp, Artificial sequence
  SiRNA target sequence
tcacaaaaaatatctagtgccc

SEQ ID NO: 245192 - DNA, 22 bp, Artificial sequence
  SiRNA target sequence
cacaaaaaatatctagtgccca

SEQ ID NO: 245193 - DNA, 22 bp, Artificial sequence
  SiRNA target sequence
acaaaaaatatctagtgcccat

SEQ ID NO: 245194 - DNA, 22 bp, Artificial sequence
  SiRNA target sequence
caaaaaatatctagtgcccatt

SEQ ID NO: 245195 - DNA, 22 bp, Artificial sequence
  SiRNA target sequence
aaaaaatatctagtgcccattg

SEQ ID NO: 245196 - DNA, 22 bp, Artificial sequence
  SiRNA target sequence
aaaaatatctagtgcccattgt

SEQ ID NO: 245197 - DNA, 22 bp, Artificial sequence
  SiRNA target sequence
aaaatatctagtgcccattgtg

SEQ ID NO: 245198 - DNA, 22 bp, Artificial sequence
  SiRNA target sequence
aaatatctagtgcccattgtga

SEQ ID NO: 245199 - DNA, 22 bp, Artificial sequence
  SiRNA target sequence
aatatctagtgcccattgtgat

SEQ ID NO: 245200 - DNA, 22 bp, Artificial sequence
  SiRNA target sequence
atatctagtgcccattgtgatc

SEQ ID NO: 245201 - DNA, 22 bp, Artificial sequence
  SiRNA target sequence
tatctagtgcccattgtgatcc

SEQ ID NO: 245202 - DNA, 22 bp, Artificial sequence
  SiRNA target sequence
atctagtgcccattgtgatcct

SEQ ID NO: 245203 - DNA, 22 bp, Artificial sequence
  SiRNA target sequence
tctagtgcccattgtgatcctt

SEQ ID NO: 245204 - DNA, 22 bp, Artificial sequence
  SiRNA target sequence
ctagtgcccattgtgatccttt

SEQ ID NO: 245205 - DNA, 22 bp, Artificial sequence
  SiRNA target sequence
tagtgcccattgtgatcctttt

SEQ ID NO: 245206 - DNA, 22 bp, Artificial sequence
  SiRNA target sequence
agtgcccattgtgatccttttt

SEQ ID NO: 245207 - DNA, 22 bp, Artificial sequence
  SiRNA target sequence
gtgcccattgtgatcctttttg

SEQ ID NO: 245208 - DNA, 22 bp, Artificial sequence
  SiRNA target sequence
tgcccattgtgatcctttttgg

SEQ ID NO: 245209 - DNA, 22 bp, Artificial sequence
  SiRNA target sequence
gcccattgtgatcctttttgga

SEQ ID NO: 245210 - DNA, 22 bp, Artificial sequence
  SiRNA target sequence
cccattgtgatcctttttggat

SEQ ID NO: 245211 - DNA, 22 bp, Artificial sequence
  SiRNA target sequence
ccattgtgatcctttttggatt

SEQ ID NO: 245212 - DNA, 22 bp, Artificial sequence
  SiRNA target sequence
cattgtgatcctttttggattt

SEQ ID NO: 245213 - DNA, 22 bp, Artificial sequence
  SiRNA target sequence
attgtgatcctttttggatttt

SEQ ID NO: 245214 - DNA, 22 bp, Artificial sequence
  SiRNA target sequence
ttgtgatcctttttggatttta

SEQ ID NO: 245215 - DNA, 22 bp, Artificial sequence
  SiRNA target sequence
tgtgatcctttttggattttat

SEQ ID NO: 245216 - DNA, 22 bp, Artificial sequence
  SiRNA target sequence
gtgatcctttttggattttata

SEQ ID NO: 245217 - DNA, 22 bp, Artificial sequence
  SiRNA target sequence
tgatcctttttggattttatat

SEQ ID NO: 245218 - DNA, 22 bp, Artificial sequence
  SiRNA target sequence
gatcctttttggattttatatt

SEQ ID NO: 245219 - DNA, 22 bp, Artificial sequence
  SiRNA target sequence
atcctttttggattttatattc

SEQ ID NO: 245220 - DNA, 22 bp, Artificial sequence
  SiRNA target sequence
tcctttttggattttatattca

SEQ ID NO: 245221 - DNA, 22 bp, Artificial sequence
  SiRNA target sequence
cctttttggattttatattcaa

SEQ ID NO: 245222 - DNA, 22 bp, Artificial sequence
  SiRNA target sequence
ctttttggattttatattcaaa

SEQ ID NO: 245223 - DNA, 22 bp, Artificial sequence
  SiRNA target sequence
tttttggattttatattcaaat

SEQ ID NO: 245224 - DNA, 22 bp, Artificial sequence
  SiRNA target sequence
ttttggattttatattcaaatg

SEQ ID NO: 245225 - DNA, 22 bp, Artificial sequence
  SiRNA target sequence
tttggattttatattcaaatgg

SEQ ID NO: 245226 - DNA, 22 bp, Artificial sequence
  SiRNA target sequence
ttggattttatattcaaatgga

SEQ ID NO: 245227 - DNA, 22 bp, Artificial sequence
  SiRNA target sequence
tggattttatattcaaatggaa

SEQ ID NO: 245228 - DNA, 22 bp, Artificial sequence
  SiRNA target sequence
ggattttatattcaaatggaat

SEQ ID NO: 245229 - DNA, 22 bp, Artificial sequence
  SiRNA target sequence
gattttatattcaaatggaatt

SEQ ID NO: 245230 - DNA, 22 bp, Artificial sequence
  SiRNA target sequence
attttatattcaaatggaatta

SEQ ID NO: 245231 - DNA, 22 bp, Artificial sequence
  SiRNA target sequence
ttttatattcaaatggaattaa

SEQ ID NO: 245232 - DNA, 22 bp, Artificial sequence
  SiRNA target sequence
tttatattcaaatggaattaaa

SEQ ID NO: 245233 - DNA, 22 bp, Artificial sequence
  SiRNA target sequence
ttatattcaaatggaattaaaa

SEQ ID NO: 245234 - DNA, 22 bp, Artificial sequence
  SiRNA target sequence
tatattcaaatggaattaaaag

SEQ ID NO: 245235 - DNA, 22 bp, Artificial sequence
  SiRNA target sequence
atattcaaatggaattaaaaga

SEQ ID NO: 245236 - DNA, 22 bp, Artificial sequence
  SiRNA target sequence
tattcaaatggaattaaaagag

SEQ ID NO: 245237 - DNA, 22 bp, Artificial sequence
  SiRNA target sequence
attcaaatggaattaaaagaga

SEQ ID NO: 245238 - DNA, 22 bp, Artificial sequence
  SiRNA target sequence
ttcaaatggaattaaaagagaa

SEQ ID NO: 245239 - DNA, 22 bp, Artificial sequence
  SiRNA target sequence
tcaaatggaattaaaagagaac

SEQ ID NO: 245240 - DNA, 22 bp, Artificial sequence
  SiRNA target sequence
caaatggaattaaaagagaacc

SEQ ID NO: 245241 - DNA, 22 bp, Artificial sequence
  SiRNA target sequence
aaatggaattaaaagagaacca

SEQ ID NO: 245242 - DNA, 22 bp, Artificial sequence
  SiRNA target sequence
aatggaattaaaagagaaccaa

SEQ ID NO: 245243 - DNA, 22 bp, Artificial sequence
  SiRNA target sequence
atggaattaaaagagaaccaat

SEQ ID NO: 245244 - DNA, 22 bp, Artificial sequence
  SiRNA target sequence
tggaattaaaagagaaccaatt

SEQ ID NO: 245245 - DNA, 22 bp, Artificial sequence
  SiRNA target sequence
ggaattaaaagagaaccaatta

SEQ ID NO: 245246 - DNA, 22 bp, Artificial sequence
  SiRNA target sequence
gaattaaaagagaaccaattag

SEQ ID NO: 245247 - DNA, 22 bp, Artificial sequence
  SiRNA target sequence
aattaaaagagaaccaattaga

SEQ ID NO: 245248 - DNA, 22 bp, Artificial sequence
  SiRNA target sequence
attaaaagagaaccaattagaa

SEQ ID NO: 245249 - DNA, 22 bp, Artificial sequence
  SiRNA target sequence
ttaaaagagaaccaattagaaa

SEQ ID NO: 245250 - DNA, 22 bp, Artificial sequence
  SiRNA target sequence
taaaagagaaccaattagaaaa

SEQ ID NO: 245251 - DNA, 22 bp, Artificial sequence
  SiRNA target sequence
aaaagagaaccaattagaaaaa

SEQ ID NO: 245252 - DNA, 22 bp, Artificial sequence
  SiRNA target sequence
aaagagaaccaattagaaaaaa

SEQ ID NO: 245253 - DNA, 22 bp, Artificial sequence
  SiRNA target sequence
aagagaaccaattagaaaaaaa

SEQ ID NO: 245254 - DNA, 22 bp, Artificial sequence
  SiRNA target sequence
agagaaccaattagaaaaaaaa

SEQ ID NO: 245255 - DNA, 22 bp, Artificial sequence
  SiRNA target sequence
gagaaccaattagaaaaaaaat

SEQ ID NO: 245256 - DNA, 22 bp, Artificial sequence
  SiRNA target sequence
agaaccaattagaaaaaaaatg

SEQ ID NO: 245257 - DNA, 22 bp, Artificial sequence
  SiRNA target sequence
gaaccaattagaaaaaaaatgc

SEQ ID NO: 245258 - DNA, 22 bp, Artificial sequence
  SiRNA target sequence
aaccaattagaaaaaaaatgcc

SEQ ID NO: 245259 - DNA, 22 bp, Artificial sequence
  SiRNA target sequence
accaattagaaaaaaaatgcca

SEQ ID NO: 245260 - DNA, 22 bp, Artificial sequence
  SiRNA target sequence
ccaattagaaaaaaaatgccaa

SEQ ID NO: 245261 - DNA, 22 bp, Artificial sequence
  SiRNA target sequence
caattagaaaaaaaatgccaat

SEQ ID NO: 245262 - DNA, 22 bp, Artificial sequence
  SiRNA target sequence
aattagaaaaaaaatgccaata

SEQ ID NO: 245263 - DNA, 22 bp, Artificial sequence
  SiRNA target sequence
attagaaaaaaaatgccaataa

SEQ ID NO: 245264 - DNA, 22 bp, Artificial sequence
  SiRNA target sequence
ttagaaaaaaaatgccaataaa

SEQ ID NO: 245265 - DNA, 22 bp, Artificial sequence
  SiRNA target sequence
tagaaaaaaaatgccaataaaa

SEQ ID NO: 245266 - DNA, 22 bp, Artificial sequence
  SiRNA target sequence
agaaaaaaaatgccaataaaac

SEQ ID NO: 245267 - DNA, 22 bp, Artificial sequence
  SiRNA target sequence
gaaaaaaaatgccaataaaacc

SEQ ID NO: 245268 - DNA, 22 bp, Artificial sequence
  SiRNA target sequence
aaaaaaaatgccaataaaacca

SEQ ID NO: 245269 - DNA, 22 bp, Artificial sequence
  SiRNA target sequence
aaaaaaatgccaataaaaccaa

SEQ ID NO: 245270 - DNA, 22 bp, Artificial sequence
  SiRNA target sequence
aaaaaatgccaataaaaccaaa

SEQ ID NO: 245271 - DNA, 22 bp, Artificial sequence
  SiRNA target sequence
aaaaatgccaataaaaccaaaa

SEQ ID NO: 245272 - DNA, 22 bp, Artificial sequence
  SiRNA target sequence
aaaatgccaataaaaccaaaaa

SEQ ID NO: 245273 - DNA, 22 bp, Artificial sequence
  SiRNA target sequence
aaatgccaataaaaccaaaaat

SEQ ID NO: 245274 - DNA, 22 bp, Artificial sequence
  SiRNA target sequence
aatgccaataaaaccaaaaata

SEQ ID NO: 245275 - DNA, 22 bp, Artificial sequence
  SiRNA target sequence
atgccaataaaaccaaaaataa

SEQ ID NO: 245276 - DNA, 22 bp, Artificial sequence
  SiRNA target sequence
tgccaataaaaccaaaaataat

SEQ ID NO: 245277 - DNA, 22 bp, Artificial sequence
  SiRNA target sequence
gccaataaaaccaaaaataata

SEQ ID NO: 245278 - DNA, 22 bp, Artificial sequence
  SiRNA target sequence
ccaataaaaccaaaaataataa

SEQ ID NO: 245279 - DNA, 22 bp, Artificial sequence
  SiRNA target sequence
caataaaaccaaaaataataaa

SEQ ID NO: 245280 - DNA, 22 bp, Artificial sequence
  SiRNA target sequence
aataaaaccaaaaataataaaa

SEQ ID NO: 245281 - DNA, 22 bp, Artificial sequence
  SiRNA target sequence
ataaaaccaaaaataataaaat

SEQ ID NO: 245282 - DNA, 22 bp, Artificial sequence
  SiRNA target sequence
taaaaccaaaaataataaaatt

SEQ ID NO: 245283 - DNA, 22 bp, Artificial sequence
  SiRNA target sequence
aaaaccaaaaataataaaattc

SEQ ID NO: 245284 - DNA, 22 bp, Artificial sequence
  SiRNA target sequence
aaaccaaaaataataaaattca

SEQ ID NO: 245285 - DNA, 22 bp, Artificial sequence
  SiRNA target sequence
aaccaaaaataataaaattcac

SEQ ID NO: 245286 - DNA, 22 bp, Artificial sequence
  SiRNA target sequence
accaaaaataataaaattcaca

SEQ ID NO: 245287 - DNA, 22 bp, Artificial sequence
  SiRNA target sequence
ccaaaaataataaaattcacaa

SEQ ID NO: 245288 - DNA, 22 bp, Artificial sequence
  SiRNA target sequence
caaaaataataaaattcacaat

SEQ ID NO: 245289 - DNA, 22 bp, Artificial sequence
  SiRNA target sequence
aaaaataataaaattcacaata

SEQ ID NO: 245290 - DNA, 22 bp, Artificial sequence
  SiRNA target sequence
aaaataataaaattcacaatac

SEQ ID NO: 245291 - DNA, 22 bp, Artificial sequence
  SiRNA target sequence
aaataataaaattcacaatact

SEQ ID NO: 245292 - DNA, 22 bp, Artificial sequence
  SiRNA target sequence
aataataaaattcacaatacta

SEQ ID NO: 245293 - DNA, 22 bp, Artificial sequence
  SiRNA target sequence
ataataaaattcacaatactaa

SEQ ID NO: 245294 - DNA, 22 bp, Artificial sequence
  SiRNA target sequence
taataaaattcacaatactaag

SEQ ID NO: 245295 - DNA, 22 bp, Artificial sequence
  SiRNA target sequence
aataaaattcacaatactaaga

SEQ ID NO: 245296 - DNA, 22 bp, Artificial sequence
  SiRNA target sequence
ataaaattcacaatactaagaa

SEQ ID NO: 245297 - DNA, 22 bp, Artificial sequence
  SiRNA target sequence
taaaattcacaatactaagaat

SEQ ID NO: 245298 - DNA, 22 bp, Artificial sequence
  SiRNA target sequence
aaaattcacaatactaagaata

SEQ ID NO: 245299 - DNA, 22 bp, Artificial sequence
  SiRNA target sequence
aaattcacaatactaagaatag

SEQ ID NO: 245300 - DNA, 22 bp, Artificial sequence
  SiRNA target sequence
aattcacaatactaagaataga

SEQ ID NO: 245301 - DNA, 22 bp, Artificial sequence
  SiRNA target sequence
attcacaatactaagaatagag

SEQ ID NO: 245302 - DNA, 22 bp, Artificial sequence
  SiRNA target sequence
ttcacaatactaagaatagagt

SEQ ID NO: 245303 - DNA, 22 bp, Artificial sequence
  SiRNA target sequence
tcacaatactaagaatagagta

SEQ ID NO: 245304 - DNA, 22 bp, Artificial sequence
  SiRNA target sequence
cacaatactaagaatagagtac

SEQ ID NO: 245305 - DNA, 22 bp, Artificial sequence
  SiRNA target sequence
acaatactaagaatagagtaca

SEQ ID NO: 245306 - DNA, 22 bp, Artificial sequence
  SiRNA target sequence
caatactaagaatagagtacac

SEQ ID NO: 245307 - DNA, 22 bp, Artificial sequence
  SiRNA target sequence
aatactaagaatagagtacaca

SEQ ID NO: 245308 - DNA, 22 bp, Artificial sequence
  SiRNA target sequence
atactaagaatagagtacacat

SEQ ID NO: 245309 - DNA, 22 bp, Artificial sequence
  SiRNA target sequence
tactaagaatagagtacacatt

SEQ ID NO: 245310 - DNA, 22 bp, Artificial sequence
  SiRNA target sequence
actaagaatagagtacacattt

SEQ ID NO: 245311 - DNA, 22 bp, Artificial sequence
  SiRNA target sequence
ctaagaatagagtacacattta

SEQ ID NO: 245312 - DNA, 22 bp, Artificial sequence
  SiRNA target sequence
taagaatagagtacacatttaa

SEQ ID NO: 245313 - DNA, 22 bp, Artificial sequence
  SiRNA target sequence
aagaatagagtacacatttaaa

SEQ ID NO: 245314 - DNA, 22 bp, Artificial sequence
  SiRNA target sequence
agaatagagtacacatttaaag

SEQ ID NO: 245315 - DNA, 22 bp, Artificial sequence
  SiRNA target sequence
gaatagagtacacatttaaagc

SEQ ID NO: 245316 - DNA, 22 bp, Artificial sequence
  SiRNA target sequence
aatagagtacacatttaaagcc

SEQ ID NO: 245317 - DNA, 22 bp, Artificial sequence
  SiRNA target sequence
atagagtacacatttaaagcct

SEQ ID NO: 245318 - DNA, 22 bp, Artificial sequence
  SiRNA target sequence
tagagtacacatttaaagcctt

SEQ ID NO: 245319 - DNA, 22 bp, Artificial sequence
  SiRNA target sequence
agagtacacatttaaagccttt

SEQ ID NO: 245320 - DNA, 22 bp, Artificial sequence
  SiRNA target sequence
gagtacacatttaaagcctttt

SEQ ID NO: 245321 - DNA, 22 bp, Artificial sequence
  SiRNA target sequence
agtacacatttaaagccttttg

SEQ ID NO: 245322 - DNA, 22 bp, Artificial sequence
  SiRNA target sequence
gtacacatttaaagccttttgg

SEQ ID NO: 245323 - DNA, 22 bp, Artificial sequence
  SiRNA target sequence
tacacatttaaagccttttgga

SEQ ID NO: 245324 - DNA, 22 bp, Artificial sequence
  SiRNA target sequence
acacatttaaagccttttggac

SEQ ID NO: 245325 - DNA, 22 bp, Artificial sequence
  SiRNA target sequence
cacatttaaagccttttggaca

SEQ ID NO: 245326 - DNA, 22 bp, Artificial sequence
  SiRNA target sequence
acatttaaagccttttggacat

SEQ ID NO: 245327 - DNA, 22 bp, Artificial sequence
  SiRNA target sequence
catttaaagccttttggacata

SEQ ID NO: 245328 - DNA, 22 bp, Artificial sequence
  SiRNA target sequence
atttaaagccttttggacatat

SEQ ID NO: 245329 - DNA, 22 bp, Artificial sequence
  SiRNA target sequence
tttaaagccttttggacatatg

SEQ ID NO: 245330 - DNA, 22 bp, Artificial sequence
  SiRNA target sequence
ttaaagccttttggacatatga

SEQ ID NO: 245331 - DNA, 22 bp, Artificial sequence
  SiRNA target sequence
taaagccttttggacatatgac

SEQ ID NO: 245332 - DNA, 22 bp, Artificial sequence
  SiRNA target sequence
aaagccttttggacatatgaca

SEQ ID NO: 245333 - DNA, 22 bp, Artificial sequence
  SiRNA target sequence
aagccttttggacatatgacat

SEQ ID NO: 245334 - DNA, 22 bp, Artificial sequence
  SiRNA target sequence
agccttttggacatatgacatc

SEQ ID NO: 245335 - DNA, 22 bp, Artificial sequence
  SiRNA target sequence
gccttttggacatatgacatca

SEQ ID NO: 245336 - DNA, 22 bp, Artificial sequence
  SiRNA target sequence
ccttttggacatatgacatcat

SEQ ID NO: 245337 - DNA, 22 bp, Artificial sequence
  SiRNA target sequence
cttttggacatatgacatcata

SEQ ID NO: 245338 - DNA, 22 bp, Artificial sequence
  SiRNA target sequence
ttttggacatatgacatcataa

SEQ ID NO: 245339 - DNA, 22 bp, Artificial sequence
  SiRNA target sequence
tttggacatatgacatcataag

SEQ ID NO: 245340 - DNA, 22 bp, Artificial sequence
  SiRNA target sequence
ttggacatatgacatcataaga

SEQ ID NO: 245341 - DNA, 22 bp, Artificial sequence
  SiRNA target sequence
tggacatatgacatcataagac

SEQ ID NO: 245342 - DNA, 22 bp, Artificial sequence
  SiRNA target sequence
ggacatatgacatcataagaca

SEQ ID NO: 245343 - DNA, 22 bp, Artificial sequence
  SiRNA target sequence
gacatatgacatcataagacat

SEQ ID NO: 245344 - DNA, 22 bp, Artificial sequence
  SiRNA target sequence
acatatgacatcataagacata

SEQ ID NO: 245345 - DNA, 22 bp, Artificial sequence
  SiRNA target sequence
catatgacatcataagacatat

SEQ ID NO: 245346 - DNA, 22 bp, Artificial sequence
  SiRNA target sequence
atatgacatcataagacatata

SEQ ID NO: 245347 - DNA, 22 bp, Artificial sequence
  SiRNA target sequence
tatgacatcataagacatataa

SEQ ID NO: 245348 - DNA, 22 bp, Artificial sequence
  SiRNA target sequence
atgacatcataagacatataat

SEQ ID NO: 245349 - DNA, 22 bp, Artificial sequence
  SiRNA target sequence
tgacatcataagacatataatt

SEQ ID NO: 245350 - DNA, 22 bp, Artificial sequence
  SiRNA target sequence
gacatcataagacatataattg

SEQ ID NO: 245351 - DNA, 22 bp, Artificial sequence
  SiRNA target sequence
acatcataagacatataattgg

SEQ ID NO: 245352 - DNA, 22 bp, Artificial sequence
  SiRNA target sequence
catcataagacatataattggc

SEQ ID NO: 245353 - DNA, 22 bp, Artificial sequence
  SiRNA target sequence
atcataagacatataattggca

SEQ ID NO: 245354 - DNA, 22 bp, Artificial sequence
  SiRNA target sequence
tcataagacatataattggcag

SEQ ID NO: 245355 - DNA, 22 bp, Artificial sequence
  SiRNA target sequence
cataagacatataattggcagt

SEQ ID NO: 245356 - DNA, 22 bp, Artificial sequence
  SiRNA target sequence
ataagacatataattggcagtg

SEQ ID NO: 245357 - DNA, 22 bp, Artificial sequence
  SiRNA target sequence
taagacatataattggcagtga

SEQ ID NO: 245358 - DNA, 22 bp, Artificial sequence
  SiRNA target sequence
aagacatataattggcagtgaa

SEQ ID NO: 245359 - DNA, 22 bp, Artificial sequence
  SiRNA target sequence
agacatataattggcagtgaaa

SEQ ID NO: 245360 - DNA, 22 bp, Artificial sequence
  SiRNA target sequence
gacatataattggcagtgaaaa

SEQ ID NO: 245361 - DNA, 22 bp, Artificial sequence
  SiRNA target sequence
acatataattggcagtgaaaag

SEQ ID NO: 245362 - DNA, 22 bp, Artificial sequence
  SiRNA target sequence
catataattggcagtgaaaaga

SEQ ID NO: 245363 - DNA, 22 bp, Artificial sequence
  SiRNA target sequence
atataattggcagtgaaaagaa

SEQ ID NO: 245364 - DNA, 22 bp, Artificial sequence
  SiRNA target sequence
tataattggcagtgaaaagaaa

SEQ ID NO: 245365 - DNA, 22 bp, Artificial sequence
  SiRNA target sequence
ataattggcagtgaaaagaaaa

SEQ ID NO: 245366 - DNA, 22 bp, Artificial sequence
  SiRNA target sequence
taattggcagtgaaaagaaaag

SEQ ID NO: 245367 - DNA, 22 bp, Artificial sequence
  SiRNA target sequence
aattggcagtgaaaagaaaagc

SEQ ID NO: 245368 - DNA, 22 bp, Artificial sequence
  SiRNA target sequence
attggcagtgaaaagaaaagct

SEQ ID NO: 245369 - DNA, 22 bp, Artificial sequence
  SiRNA target sequence
ttggcagtgaaaagaaaagctt

SEQ ID NO: 245370 - DNA, 22 bp, Artificial sequence
  SiRNA target sequence
tggcagtgaaaagaaaagcttt

SEQ ID NO: 245371 - DNA, 22 bp, Artificial sequence
  SiRNA target sequence
ggcagtgaaaagaaaagcttta

SEQ ID NO: 245372 - DNA, 22 bp, Artificial sequence
  SiRNA target sequence
gcagtgaaaagaaaagctttat

SEQ ID NO: 245373 - DNA, 22 bp, Artificial sequence
  SiRNA target sequence
cagtgaaaagaaaagctttatg

SEQ ID NO: 245374 - DNA, 22 bp, Artificial sequence
  SiRNA target sequence
agtgaaaagaaaagctttatgt

SEQ ID NO: 245375 - DNA, 22 bp, Artificial sequence
  SiRNA target sequence
gtgaaaagaaaagctttatgta

SEQ ID NO: 245376 - DNA, 22 bp, Artificial sequence
  SiRNA target sequence
tgaaaagaaaagctttatgtag

SEQ ID NO: 245377 - DNA, 22 bp, Artificial sequence
  SiRNA target sequence
gaaaagaaaagctttatgtagt

SEQ ID NO: 245378 - DNA, 22 bp, Artificial sequence
  SiRNA target sequence
aaaagaaaagctttatgtagta

SEQ ID NO: 245379 - DNA, 22 bp, Artificial sequence
  SiRNA target sequence
aaagaaaagctttatgtagtac

SEQ ID NO: 245380 - DNA, 22 bp, Artificial sequence
  SiRNA target sequence
aagaaaagctttatgtagtaca

SEQ ID NO: 245381 - DNA, 22 bp, Artificial sequence
  SiRNA target sequence
agaaaagctttatgtagtacag

SEQ ID NO: 245382 - DNA, 22 bp, Artificial sequence
  SiRNA target sequence
gaaaagctttatgtagtacagt

SEQ ID NO: 245383 - DNA, 22 bp, Artificial sequence
  SiRNA target sequence
aaaagctttatgtagtacagtg

SEQ ID NO: 245384 - DNA, 22 bp, Artificial sequence
  SiRNA target sequence
aaagctttatgtagtacagtga

SEQ ID NO: 245385 - DNA, 22 bp, Artificial sequence
  SiRNA target sequence
aagctttatgtagtacagtgac

SEQ ID NO: 245386 - DNA, 22 bp, Artificial sequence
  SiRNA target sequence
agctttatgtagtacagtgacg

SEQ ID NO: 245387 - DNA, 22 bp, Artificial sequence
  SiRNA target sequence
gctttatgtagtacagtgacga

SEQ ID NO: 245388 - DNA, 22 bp, Artificial sequence
  SiRNA target sequence
ctttatgtagtacagtgacgaa

SEQ ID NO: 245389 - DNA, 22 bp, Artificial sequence
  SiRNA target sequence
tttatgtagtacagtgacgaag

SEQ ID NO: 245390 - DNA, 22 bp, Artificial sequence
  SiRNA target sequence
ttatgtagtacagtgacgaagg

SEQ ID NO: 245391 - DNA, 22 bp, Artificial sequence
  SiRNA target sequence
tatgtagtacagtgacgaagga

SEQ ID NO: 245392 - DNA, 22 bp, Artificial sequence
  SiRNA target sequence
atgtagtacagtgacgaaggaa

SEQ ID NO: 245393 - DNA, 22 bp, Artificial sequence
  SiRNA target sequence
tgtagtacagtgacgaaggaat

SEQ ID NO: 245394 - DNA, 22 bp, Artificial sequence
  SiRNA target sequence
gtagtacagtgacgaaggaatt

SEQ ID NO: 245395 - DNA, 22 bp, Artificial sequence
  SiRNA target sequence
tagtacagtgacgaaggaattt

SEQ ID NO: 245396 - DNA, 22 bp, Artificial sequence
  SiRNA target sequence
agtacagtgacgaaggaatttg

SEQ ID NO: 245397 - DNA, 22 bp, Artificial sequence
  SiRNA target sequence
gtacagtgacgaaggaatttgt

SEQ ID NO: 245398 - DNA, 22 bp, Artificial sequence
  SiRNA target sequence
tacagtgacgaaggaatttgtt

SEQ ID NO: 245399 - DNA, 22 bp, Artificial sequence
  SiRNA target sequence
acagtgacgaaggaatttgttt

SEQ ID NO: 245400 - DNA, 22 bp, Artificial sequence
  SiRNA target sequence
cagtgacgaaggaatttgtttt

SEQ ID NO: 245401 - DNA, 22 bp, Artificial sequence
  SiRNA target sequence
agtgacgaaggaatttgttttg

SEQ ID NO: 245402 - DNA, 22 bp, Artificial sequence
  SiRNA target sequence
gtgacgaaggaatttgttttgt

SEQ ID NO: 245403 - DNA, 22 bp, Artificial sequence
  SiRNA target sequence
tgacgaaggaatttgttttgtc

SEQ ID NO: 245404 - DNA, 22 bp, Artificial sequence
  SiRNA target sequence
gacgaaggaatttgttttgtca

SEQ ID NO: 245405 - DNA, 22 bp, Artificial sequence
  SiRNA target sequence
acgaaggaatttgttttgtcat

SEQ ID NO: 245406 - DNA, 22 bp, Artificial sequence
  SiRNA target sequence
cgaaggaatttgttttgtcata

SEQ ID NO: 245407 - DNA, 22 bp, Artificial sequence
  SiRNA target sequence
gaaggaatttgttttgtcataa

SEQ ID NO: 245408 - DNA, 22 bp, Artificial sequence
  SiRNA target sequence
aaggaatttgttttgtcataat

SEQ ID NO: 245409 - DNA, 22 bp, Artificial sequence
  SiRNA target sequence
aggaatttgttttgtcataatc

SEQ ID NO: 245410 - DNA, 22 bp, Artificial sequence
  SiRNA target sequence
ggaatttgttttgtcataatca

SEQ ID NO: 245411 - DNA, 22 bp, Artificial sequence
  SiRNA target sequence
gaatttgttttgtcataatcac

SEQ ID NO: 245412 - DNA, 22 bp, Artificial sequence
  SiRNA target sequence
aatttgttttgtcataatcacg

SEQ ID NO: 245413 - DNA, 22 bp, Artificial sequence
  SiRNA target sequence
atttgttttgtcataatcacga

SEQ ID NO: 245414 - DNA, 22 bp, Artificial sequence
  SiRNA target sequence
tttgttttgtcataatcacgat

SEQ ID NO: 245415 - DNA, 22 bp, Artificial sequence
  SiRNA target sequence
ttgttttgtcataatcacgatt

SEQ ID NO: 245416 - DNA, 22 bp, Artificial sequence
  SiRNA target sequence
tgttttgtcataatcacgattt

SEQ ID NO: 245417 - DNA, 22 bp, Artificial sequence
  SiRNA target sequence
gttttgtcataatcacgatttc

SEQ ID NO: 245418 - DNA, 22 bp, Artificial sequence
  SiRNA target sequence
ttttgtcataatcacgatttct

SEQ ID NO: 245419 - DNA, 22 bp, Artificial sequence
  SiRNA target sequence
tttgtcataatcacgatttctc

SEQ ID NO: 245420 - DNA, 22 bp, Artificial sequence
  SiRNA target sequence
ttgtcataatcacgatttctct

SEQ ID NO: 245421 - DNA, 22 bp, Artificial sequence
  SiRNA target sequence
tgtcataatcacgatttctctg

SEQ ID NO: 245422 - DNA, 22 bp, Artificial sequence
  SiRNA target sequence
gtcataatcacgatttctctgt

SEQ ID NO: 245423 - DNA, 22 bp, Artificial sequence
  SiRNA target sequence
tcataatcacgatttctctgta

SEQ ID NO: 245424 - DNA, 22 bp, Artificial sequence
  SiRNA target sequence
cataatcacgatttctctgtaa

SEQ ID NO: 245425 - DNA, 22 bp, Artificial sequence
  SiRNA target sequence
ataatcacgatttctctgtaaa

SEQ ID NO: 245426 - DNA, 22 bp, Artificial sequence
  SiRNA target sequence
taatcacgatttctctgtaaaa

SEQ ID NO: 245427 - DNA, 22 bp, Artificial sequence
  SiRNA target sequence
aatcacgatttctctgtaaaat

SEQ ID NO: 245428 - DNA, 22 bp, Artificial sequence
  SiRNA target sequence
atcacgatttctctgtaaaatt

SEQ ID NO: 245429 - DNA, 22 bp, Artificial sequence
  SiRNA target sequence
tcacgatttctctgtaaaattc

SEQ ID NO: 245430 - DNA, 22 bp, Artificial sequence
  SiRNA target sequence
cacgatttctctgtaaaattcc

SEQ ID NO: 245431 - DNA, 22 bp, Artificial sequence
  SiRNA target sequence
acgatttctctgtaaaattcca

SEQ ID NO: 245432 - DNA, 22 bp, Artificial sequence
  SiRNA target sequence
cgatttctctgtaaaattccaa

SEQ ID NO: 245433 - DNA, 22 bp, Artificial sequence
  SiRNA target sequence
gatttctctgtaaaattccaat

SEQ ID NO: 245434 - DNA, 22 bp, Artificial sequence
  SiRNA target sequence
atttctctgtaaaattccaata

SEQ ID NO: 245435 - DNA, 22 bp, Artificial sequence
  SiRNA target sequence
tttctctgtaaaattccaataa

SEQ ID NO: 245436 - DNA, 22 bp, Artificial sequence
  SiRNA target sequence
ttctctgtaaaattccaataat

SEQ ID NO: 245437 - DNA, 22 bp, Artificial sequence
  SiRNA target sequence
tctctgtaaaattccaataatg

SEQ ID NO: 245438 - DNA, 22 bp, Artificial sequence
  SiRNA target sequence
ctctgtaaaattccaataatgt

SEQ ID NO: 245439 - DNA, 22 bp, Artificial sequence
  SiRNA target sequence
tctgtaaaattccaataatgtg

SEQ ID NO: 245440 - DNA, 22 bp, Artificial sequence
  SiRNA target sequence
ctgtaaaattccaataatgtgt

SEQ ID NO: 245441 - DNA, 22 bp, Artificial sequence
  SiRNA target sequence
tgtaaaattccaataatgtgtt

SEQ ID NO: 245442 - DNA, 22 bp, Artificial sequence
  SiRNA target sequence
gtaaaattccaataatgtgtta

SEQ ID NO: 245443 - DNA, 22 bp, Artificial sequence
  SiRNA target sequence
taaaattccaataatgtgttaa

SEQ ID NO: 245444 - DNA, 22 bp, Artificial sequence
  SiRNA target sequence
aaaattccaataatgtgttaat

SEQ ID NO: 245445 - DNA, 22 bp, Artificial sequence
  SiRNA target sequence
aaattccaataatgtgttaatc

SEQ ID NO: 245446 - DNA, 22 bp, Artificial sequence
  SiRNA target sequence
aattccaataatgtgttaatca

SEQ ID NO: 245447 - DNA, 22 bp, Artificial sequence
  SiRNA target sequence
attccaataatgtgttaatcac

SEQ ID NO: 245448 - DNA, 22 bp, Artificial sequence
  SiRNA target sequence
ttccaataatgtgttaatcaca

SEQ ID NO: 245449 - DNA, 22 bp, Artificial sequence
  SiRNA target sequence
tccaataatgtgttaatcacac

SEQ ID NO: 245450 - DNA, 22 bp, Artificial sequence
  SiRNA target sequence
ccaataatgtgttaatcacaca

SEQ ID NO: 245451 - DNA, 22 bp, Artificial sequence
  SiRNA target sequence
caataatgtgttaatcacacat

SEQ ID NO: 245452 - DNA, 22 bp, Artificial sequence
  SiRNA target sequence
aataatgtgttaatcacacatg

SEQ ID NO: 245453 - DNA, 22 bp, Artificial sequence
  SiRNA target sequence
ataatgtgttaatcacacatgc

SEQ ID NO: 245454 - DNA, 22 bp, Artificial sequence
  SiRNA target sequence
taatgtgttaatcacacatgcc

SEQ ID NO: 245455 - DNA, 22 bp, Artificial sequence
  SiRNA target sequence
aatgtgttaatcacacatgcca

SEQ ID NO: 245456 - DNA, 22 bp, Artificial sequence
  SiRNA target sequence
atgtgttaatcacacatgccat

SEQ ID NO: 245457 - DNA, 22 bp, Artificial sequence
  SiRNA target sequence
tgtgttaatcacacatgccatt

SEQ ID NO: 245458 - DNA, 22 bp, Artificial sequence
  SiRNA target sequence
gtgttaatcacacatgccatta

SEQ ID NO: 245459 - DNA, 22 bp, Artificial sequence
  SiRNA target sequence
tgttaatcacacatgccattaa

SEQ ID NO: 245460 - DNA, 22 bp, Artificial sequence
  SiRNA target sequence
gttaatcacacatgccattaaa

SEQ ID NO: 245461 - DNA, 22 bp, Artificial sequence
  SiRNA target sequence
ttaatcacacatgccattaaaa

SEQ ID NO: 245462 - DNA, 22 bp, Artificial sequence
  SiRNA target sequence
taatcacacatgccattaaaaa

SEQ ID NO: 245463 - DNA, 22 bp, Artificial sequence
  SiRNA target sequence
aatcacacatgccattaaaaat

SEQ ID NO: 245464 - DNA, 22 bp, Artificial sequence
  SiRNA target sequence
atcacacatgccattaaaaatg

SEQ ID NO: 245465 - DNA, 22 bp, Artificial sequence
  SiRNA target sequence
tcacacatgccattaaaaatgt

SEQ ID NO: 245466 - DNA, 22 bp, Artificial sequence
  SiRNA target sequence
cacacatgccattaaaaatgta

SEQ ID NO: 245467 - DNA, 22 bp, Artificial sequence
  SiRNA target sequence
acacatgccattaaaaatgtaa

SEQ ID NO: 245468 - DNA, 22 bp, Artificial sequence
  SiRNA target sequence
cacatgccattaaaaatgtaag

SEQ ID NO: 245469 - DNA, 22 bp, Artificial sequence
  SiRNA target sequence
acatgccattaaaaatgtaagt

SEQ ID NO: 245470 - DNA, 22 bp, Artificial sequence
  SiRNA target sequence
catgccattaaaaatgtaagtg

SEQ ID NO: 245471 - DNA, 22 bp, Artificial sequence
  SiRNA target sequence
atgccattaaaaatgtaagtga

SEQ ID NO: 245472 - DNA, 22 bp, Artificial sequence
  SiRNA target sequence
tgccattaaaaatgtaagtgac

SEQ ID NO: 245473 - DNA, 22 bp, Artificial sequence
  SiRNA target sequence
gccattaaaaatgtaagtgaca

SEQ ID NO: 245474 - DNA, 22 bp, Artificial sequence
  SiRNA target sequence
ccattaaaaatgtaagtgacaa

SEQ ID NO: 245475 - DNA, 22 bp, Artificial sequence
  SiRNA target sequence
cattaaaaatgtaagtgacaat

SEQ ID NO: 245476 - DNA, 22 bp, Artificial sequence
  SiRNA target sequence
attaaaaatgtaagtgacaata

SEQ ID NO: 245477 - DNA, 22 bp, Artificial sequence
  SiRNA target sequence
ttaaaaatgtaagtgacaataa

SEQ ID NO: 245478 - DNA, 22 bp, Artificial sequence
  SiRNA target sequence
taaaaatgtaagtgacaataat

SEQ ID NO: 245479 - DNA, 22 bp, Artificial sequence
  SiRNA target sequence
aaaaatgtaagtgacaataata

SEQ ID NO: 245480 - DNA, 22 bp, Artificial sequence
  SiRNA target sequence
aaaatgtaagtgacaataatat

SEQ ID NO: 245481 - DNA, 22 bp, Artificial sequence
  SiRNA target sequence
aaatgtaagtgacaataatatt

SEQ ID NO: 245482 - DNA, 22 bp, Artificial sequence
  SiRNA target sequence
aatgtaagtgacaataatattt

SEQ ID NO: 245483 - DNA, 22 bp, Artificial sequence
  SiRNA target sequence
atgtaagtgacaataatatttt

SEQ ID NO: 245484 - DNA, 22 bp, Artificial sequence
  SiRNA target sequence
tgtaagtgacaataatattttt

SEQ ID NO: 245485 - DNA, 22 bp, Artificial sequence
  SiRNA target sequence
gtaagtgacaataatattttta

SEQ ID NO: 245486 - DNA, 22 bp, Artificial sequence
  SiRNA target sequence
taagtgacaataatatttttac

SEQ ID NO: 245487 - DNA, 22 bp, Artificial sequence
  SiRNA target sequence
aagtgacaataatatttttact

SEQ ID NO: 245488 - DNA, 22 bp, Artificial sequence
  SiRNA target sequence
agtgacaataatatttttactt

SEQ ID NO: 245489 - DNA, 22 bp, Artificial sequence
  SiRNA target sequence
gtgacaataatatttttacttt

SEQ ID NO: 245490 - DNA, 22 bp, Artificial sequence
  SiRNA target sequence
tgacaataatatttttactttt

SEQ ID NO: 245491 - DNA, 22 bp, Artificial sequence
  SiRNA target sequence
gacaataatatttttacttttg

SEQ ID NO: 245492 - DNA, 22 bp, Artificial sequence
  SiRNA target sequence
acaataatatttttacttttgg

SEQ ID NO: 245493 - DNA, 22 bp, Artificial sequence
  SiRNA target sequence
caataatatttttacttttggg

SEQ ID NO: 245494 - DNA, 22 bp, Artificial sequence
  SiRNA target sequence
aataatatttttacttttggga

SEQ ID NO: 245495 - DNA, 22 bp, Artificial sequence
  SiRNA target sequence
ataatatttttacttttgggaa

SEQ ID NO: 245496 - DNA, 22 bp, Artificial sequence
  SiRNA target sequence
taatatttttacttttgggaat

SEQ ID NO: 245497 - DNA, 22 bp, Artificial sequence
  SiRNA target sequence
aatatttttacttttgggaatt

SEQ ID NO: 245498 - DNA, 22 bp, Artificial sequence
  SiRNA target sequence
atatttttacttttgggaattt

SEQ ID NO: 245499 - DNA, 22 bp, Artificial sequence
  SiRNA target sequence
tatttttacttttgggaatttt

SEQ ID NO: 245500 - DNA, 22 bp, Artificial sequence
  SiRNA target sequence
atttttacttttgggaattttt

SEQ ID NO: 245501 - DNA, 22 bp, Artificial sequence
  SiRNA target sequence
tttttacttttgggaatttttt

SEQ ID NO: 245502 - DNA, 22 bp, Artificial sequence
  SiRNA target sequence
ttttacttttgggaattttttt

SEQ ID NO: 245503 - DNA, 22 bp, Artificial sequence
  SiRNA target sequence
tttacttttgggaatttttttg

SEQ ID NO: 245504 - DNA, 22 bp, Artificial sequence
  SiRNA target sequence
ttacttttgggaatttttttgt

SEQ ID NO: 245505 - DNA, 22 bp, Artificial sequence
  SiRNA target sequence
tacttttgggaatttttttgtc

SEQ ID NO: 245506 - DNA, 22 bp, Artificial sequence
  SiRNA target sequence
acttttgggaatttttttgtct

SEQ ID NO: 245507 - DNA, 22 bp, Artificial sequence
  SiRNA target sequence
cttttgggaatttttttgtctt

SEQ ID NO: 245508 - DNA, 22 bp, Artificial sequence
  SiRNA target sequence
ttttgggaatttttttgtctta

SEQ ID NO: 245509 - DNA, 22 bp, Artificial sequence
  SiRNA target sequence
tttgggaatttttttgtcttag

SEQ ID NO: 245510 - DNA, 22 bp, Artificial sequence
  SiRNA target sequence
ttgggaatttttttgtcttagt

SEQ ID NO: 245511 - DNA, 22 bp, Artificial sequence
  SiRNA target sequence
tgggaatttttttgtcttagtc

SEQ ID NO: 245512 - DNA, 22 bp, Artificial sequence
  SiRNA target sequence
gggaatttttttgtcttagtca

SEQ ID NO: 245513 - DNA, 22 bp, Artificial sequence
  SiRNA target sequence
ggaatttttttgtcttagtcat

SEQ ID NO: 245514 - DNA, 23 bp, Artificial sequence
  SiRNA target sequence
ttaattaaaatcaacatctatct

SEQ ID NO: 245515 - DNA, 23 bp, Artificial sequence
  SiRNA target sequence
taattaaaatcaacatctatctc

SEQ ID NO: 245516 - DNA, 23 bp, Artificial sequence
  SiRNA target sequence
aattaaaatcaacatctatctca

SEQ ID NO: 245517 - DNA, 23 bp, Artificial sequence
  SiRNA target sequence
attaaaatcaacatctatctcag

SEQ ID NO: 245518 - DNA, 23 bp, Artificial sequence
  SiRNA target sequence
ttaaaatcaacatctatctcaga

SEQ ID NO: 245519 - DNA, 23 bp, Artificial sequence
  SiRNA target sequence
taaaatcaacatctatctcagaa

SEQ ID NO: 245520 - DNA, 23 bp, Artificial sequence
  SiRNA target sequence
aaaatcaacatctatctcagaat

SEQ ID NO: 245521 - DNA, 23 bp, Artificial sequence
  SiRNA target sequence
aaatcaacatctatctcagaatt

SEQ ID NO: 245522 - DNA, 23 bp, Artificial sequence
  SiRNA target sequence
aatcaacatctatctcagaattt

SEQ ID NO: 245523 - DNA, 23 bp, Artificial sequence
  SiRNA target sequence
atcaacatctatctcagaatttt

SEQ ID NO: 245524 - DNA, 23 bp, Artificial sequence
  SiRNA target sequence
tcaacatctatctcagaattttg

SEQ ID NO: 245525 - DNA, 23 bp, Artificial sequence
  SiRNA target sequence
caacatctatctcagaattttgt

SEQ ID NO: 245526 - DNA, 23 bp, Artificial sequence
  SiRNA target sequence
aacatctatctcagaattttgtt

SEQ ID NO: 245527 - DNA, 23 bp, Artificial sequence
  SiRNA target sequence
acatctatctcagaattttgttc

SEQ ID NO: 245528 - DNA, 23 bp, Artificial sequence
  SiRNA target sequence
catctatctcagaattttgttca

SEQ ID NO: 245529 - DNA, 23 bp, Artificial sequence
  SiRNA target sequence
atctatctcagaattttgttcaa

SEQ ID NO: 245530 - DNA, 23 bp, Artificial sequence
  SiRNA target sequence
tctatctcagaattttgttcaat

SEQ ID NO: 245531 - DNA, 23 bp, Artificial sequence
  SiRNA target sequence
ctatctcagaattttgttcaatt

SEQ ID NO: 245532 - DNA, 23 bp, Artificial sequence
  SiRNA target sequence
tatctcagaattttgttcaattg

SEQ ID NO: 245533 - DNA, 23 bp, Artificial sequence
  SiRNA target sequence
atctcagaattttgttcaattga

SEQ ID NO: 245534 - DNA, 23 bp, Artificial sequence
  SiRNA target sequence
tctcagaattttgttcaattgat

SEQ ID NO: 245535 - DNA, 23 bp, Artificial sequence
  SiRNA target sequence
ctcagaattttgttcaattgatt

SEQ ID NO: 245536 - DNA, 23 bp, Artificial sequence
  SiRNA target sequence
tcagaattttgttcaattgattc

SEQ ID NO: 245537 - DNA, 23 bp, Artificial sequence
  SiRNA target sequence
cagaattttgttcaattgattca

SEQ ID NO: 245538 - DNA, 23 bp, Artificial sequence
  SiRNA target sequence
agaattttgttcaattgattcat

SEQ ID NO: 245539 - DNA, 23 bp, Artificial sequence
  SiRNA target sequence
gaattttgttcaattgattcatt

SEQ ID NO: 245540 - DNA, 23 bp, Artificial sequence
  SiRNA target sequence
aattttgttcaattgattcatta

SEQ ID NO: 245541 - DNA, 23 bp, Artificial sequence
  SiRNA target sequence
attttgttcaattgattcattat

SEQ ID NO: 245542 - DNA, 23 bp, Artificial sequence
  SiRNA target sequence
ttttgttcaattgattcattata

SEQ ID NO: 245543 - DNA, 23 bp, Artificial sequence
  SiRNA target sequence
tttgttcaattgattcattatat

SEQ ID NO: 245544 - DNA, 23 bp, Artificial sequence
  SiRNA target sequence
ttgttcaattgattcattatatt

SEQ ID NO: 245545 - DNA, 23 bp, Artificial sequence
  SiRNA target sequence
tgttcaattgattcattatattt

SEQ ID NO: 245546 - DNA, 23 bp, Artificial sequence
  SiRNA target sequence
gttcaattgattcattatatttt

SEQ ID NO: 245547 - DNA, 23 bp, Artificial sequence
  SiRNA target sequence
ttcaattgattcattatattttt

SEQ ID NO: 245548 - DNA, 23 bp, Artificial sequence
  SiRNA target sequence
tcaattgattcattatatttttt

SEQ ID NO: 245549 - DNA, 23 bp, Artificial sequence
  SiRNA target sequence
caattgattcattatatttttta

SEQ ID NO: 245550 - DNA, 23 bp, Artificial sequence
  SiRNA target sequence
aattgattcattatattttttac

SEQ ID NO: 245551 - DNA, 23 bp, Artificial sequence
  SiRNA target sequence
attgattcattatattttttact

SEQ ID NO: 245552 - DNA, 23 bp, Artificial sequence
  SiRNA target sequence
ttgattcattatattttttactt

SEQ ID NO: 245553 - DNA, 23 bp, Artificial sequence
  SiRNA target sequence
tgattcattatattttttactta

SEQ ID NO: 245554 - DNA, 23 bp, Artificial sequence
  SiRNA target sequence
gattcattatattttttacttaa

SEQ ID NO: 245555 - DNA, 23 bp, Artificial sequence
  SiRNA target sequence
attcattatattttttacttaaa

SEQ ID NO: 245556 - DNA, 23 bp, Artificial sequence
  SiRNA target sequence
ttcattatattttttacttaaat

SEQ ID NO: 245557 - DNA, 23 bp, Artificial sequence
  SiRNA target sequence
tcattatattttttacttaaata

SEQ ID NO: 245558 - DNA, 23 bp, Artificial sequence
  SiRNA target sequence
cattatattttttacttaaataa

SEQ ID NO: 245559 - DNA, 23 bp, Artificial sequence
  SiRNA target sequence
attatattttttacttaaataac

SEQ ID NO: 245560 - DNA, 23 bp, Artificial sequence
  SiRNA target sequence
ttatattttttacttaaataaca

SEQ ID NO: 245561 - DNA, 23 bp, Artificial sequence
  SiRNA target sequence
tatattttttacttaaataacag

SEQ ID NO: 245562 - DNA, 23 bp, Artificial sequence
  SiRNA target sequence
atattttttacttaaataacaga

SEQ ID NO: 245563 - DNA, 23 bp, Artificial sequence
  SiRNA target sequence
tattttttacttaaataacagac

SEQ ID NO: 245564 - DNA, 23 bp, Artificial sequence
  SiRNA target sequence
attttttacttaaataacagaca

SEQ ID NO: 245565 - DNA, 23 bp, Artificial sequence
  SiRNA target sequence
ttttttacttaaataacagacac

SEQ ID NO: 245566 - DNA, 23 bp, Artificial sequence
  SiRNA target sequence
tttttacttaaataacagacact

SEQ ID NO: 245567 - DNA, 23 bp, Artificial sequence
  SiRNA target sequence
ttttacttaaataacagacactc

SEQ ID NO: 245568 - DNA, 23 bp, Artificial sequence
  SiRNA target sequence
tttacttaaataacagacactcc

SEQ ID NO: 245569 - DNA, 23 bp, Artificial sequence
  SiRNA target sequence
ttacttaaataacagacactcct

SEQ ID NO: 245570 - DNA, 23 bp, Artificial sequence
  SiRNA target sequence
tacttaaataacagacactcctg

SEQ ID NO: 245571 - DNA, 23 bp, Artificial sequence
  SiRNA target sequence
acttaaataacagacactcctga

SEQ ID NO: 245572 - DNA, 23 bp, Artificial sequence
  SiRNA target sequence
cttaaataacagacactcctgat

SEQ ID NO: 245573 - DNA, 23 bp, Artificial sequence
  SiRNA target sequence
ttaaataacagacactcctgatc

SEQ ID NO: 245574 - DNA, 23 bp, Artificial sequence
  SiRNA target sequence
taaataacagacactcctgatcc

SEQ ID NO: 245575 - DNA, 23 bp, Artificial sequence
  SiRNA target sequence
aaataacagacactcctgatcca

SEQ ID NO: 245576 - DNA, 23 bp, Artificial sequence
  SiRNA target sequence
aataacagacactcctgatccac

SEQ ID NO: 245577 - DNA, 23 bp, Artificial sequence
  SiRNA target sequence
ataacagacactcctgatccaca

SEQ ID NO: 245578 - DNA, 23 bp, Artificial sequence
  SiRNA target sequence
taacagacactcctgatccacaa

SEQ ID NO: 245579 - DNA, 23 bp, Artificial sequence
  SiRNA target sequence
aacagacactcctgatccacaaa

SEQ ID NO: 245580 - DNA, 23 bp, Artificial sequence
  SiRNA target sequence
acagacactcctgatccacaaaa

SEQ ID NO: 245581 - DNA, 23 bp, Artificial sequence
  SiRNA target sequence
cagacactcctgatccacaaaaa

SEQ ID NO: 245582 - DNA, 23 bp, Artificial sequence
  SiRNA target sequence
agacactcctgatccacaaaaaa

SEQ ID NO: 245583 - DNA, 23 bp, Artificial sequence
  SiRNA target sequence
gacactcctgatccacaaaaaat

SEQ ID NO: 245584 - DNA, 23 bp, Artificial sequence
  SiRNA target sequence
acactcctgatccacaaaaaatt

SEQ ID NO: 245585 - DNA, 23 bp, Artificial sequence
  SiRNA target sequence
cactcctgatccacaaaaaattt

SEQ ID NO: 245586 - DNA, 23 bp, Artificial sequence
  SiRNA target sequence
actcctgatccacaaaaaatttg

SEQ ID NO: 245587 - DNA, 23 bp, Artificial sequence
  SiRNA target sequence
ctcctgatccacaaaaaatttgc

SEQ ID NO: 245588 - DNA, 23 bp, Artificial sequence
  SiRNA target sequence
tcctgatccacaaaaaatttgca

SEQ ID NO: 245589 - DNA, 23 bp, Artificial sequence
  SiRNA target sequence
cctgatccacaaaaaatttgcaa

SEQ ID NO: 245590 - DNA, 23 bp, Artificial sequence
  SiRNA target sequence
ctgatccacaaaaaatttgcaaa

SEQ ID NO: 245591 - DNA, 23 bp, Artificial sequence
  SiRNA target sequence
tgatccacaaaaaatttgcaaat

SEQ ID NO: 245592 - DNA, 23 bp, Artificial sequence
  SiRNA target sequence
gatccacaaaaaatttgcaaata

SEQ ID NO: 245593 - DNA, 23 bp, Artificial sequence
  SiRNA target sequence
atccacaaaaaatttgcaaatat

SEQ ID NO: 245594 - DNA, 23 bp, Artificial sequence
  SiRNA target sequence
tccacaaaaaatttgcaaatatt

SEQ ID NO: 245595 - DNA, 23 bp, Artificial sequence
  SiRNA target sequence
ccacaaaaaatttgcaaatatta

SEQ ID NO: 245596 - DNA, 23 bp, Artificial sequence
  SiRNA target sequence
cacaaaaaatttgcaaatattaa

SEQ ID NO: 245597 - DNA, 23 bp, Artificial sequence
  SiRNA target sequence
acaaaaaatttgcaaatattaaa

SEQ ID NO: 245598 - DNA, 23 bp, Artificial sequence
  SiRNA target sequence
caaaaaatttgcaaatattaaaa

SEQ ID NO: 245599 - DNA, 23 bp, Artificial sequence
  SiRNA target sequence
aaaaaatttgcaaatattaaaaa

SEQ ID NO: 245600 - DNA, 23 bp, Artificial sequence
  SiRNA target sequence
aaaaatttgcaaatattaaaaat

SEQ ID NO: 245601 - DNA, 23 bp, Artificial sequence
  SiRNA target sequence
aaaatttgcaaatattaaaaata

SEQ ID NO: 245602 - DNA, 23 bp, Artificial sequence
  SiRNA target sequence
aaatttgcaaatattaaaaatat

SEQ ID NO: 245603 - DNA, 23 bp, Artificial sequence
  SiRNA target sequence
aatttgcaaatattaaaaatata

SEQ ID NO: 245604 - DNA, 23 bp, Artificial sequence
  SiRNA target sequence
atttgcaaatattaaaaatataa

SEQ ID NO: 245605 - DNA, 23 bp, Artificial sequence
  SiRNA target sequence
tttgcaaatattaaaaatataaa

SEQ ID NO: 245606 - DNA, 23 bp, Artificial sequence
  SiRNA target sequence
ttgcaaatattaaaaatataaaa

SEQ ID NO: 245607 - DNA, 23 bp, Artificial sequence
  SiRNA target sequence
tgcaaatattaaaaatataaaag

SEQ ID NO: 245608 - DNA, 23 bp, Artificial sequence
  SiRNA target sequence
gcaaatattaaaaatataaaaga

SEQ ID NO: 245609 - DNA, 23 bp, Artificial sequence
  SiRNA target sequence
caaatattaaaaatataaaagac

SEQ ID NO: 245610 - DNA, 23 bp, Artificial sequence
  SiRNA target sequence
aaatattaaaaatataaaagaca

SEQ ID NO: 245611 - DNA, 23 bp, Artificial sequence
  SiRNA target sequence
aatattaaaaatataaaagacac

SEQ ID NO: 245612 - DNA, 23 bp, Artificial sequence
  SiRNA target sequence
atattaaaaatataaaagacacg

SEQ ID NO: 245613 - DNA, 23 bp, Artificial sequence
  SiRNA target sequence
tattaaaaatataaaagacacgt

SEQ ID NO: 245614 - DNA, 23 bp, Artificial sequence
  SiRNA target sequence
attaaaaatataaaagacacgta

SEQ ID NO: 245615 - DNA, 23 bp, Artificial sequence
  SiRNA target sequence
ttaaaaatataaaagacacgtat

SEQ ID NO: 245616 - DNA, 23 bp, Artificial sequence
  SiRNA target sequence
taaaaatataaaagacacgtatg

SEQ ID NO: 245617 - DNA, 23 bp, Artificial sequence
  SiRNA target sequence
aaaaatataaaagacacgtatga

SEQ ID NO: 245618 - DNA, 23 bp, Artificial sequence
  SiRNA target sequence
aaaatataaaagacacgtatgat

SEQ ID NO: 245619 - DNA, 23 bp, Artificial sequence
  SiRNA target sequence
aaatataaaagacacgtatgata

SEQ ID NO: 245620 - DNA, 23 bp, Artificial sequence
  SiRNA target sequence
aatataaaagacacgtatgatac

SEQ ID NO: 245621 - DNA, 23 bp, Artificial sequence
  SiRNA target sequence
atataaaagacacgtatgatact

SEQ ID NO: 245622 - DNA, 23 bp, Artificial sequence
  SiRNA target sequence
tataaaagacacgtatgatactt

SEQ ID NO: 245623 - DNA, 23 bp, Artificial sequence
  SiRNA target sequence
ataaaagacacgtatgatacttg

SEQ ID NO: 245624 - DNA, 23 bp, Artificial sequence
  SiRNA target sequence
taaaagacacgtatgatacttgt

SEQ ID NO: 245625 - DNA, 23 bp, Artificial sequence
  SiRNA target sequence
aaaagacacgtatgatacttgtc

SEQ ID NO: 245626 - DNA, 23 bp, Artificial sequence
  SiRNA target sequence
aaagacacgtatgatacttgtct

SEQ ID NO: 245627 - DNA, 23 bp, Artificial sequence
  SiRNA target sequence
aagacacgtatgatacttgtcta

SEQ ID NO: 245628 - DNA, 23 bp, Artificial sequence
  SiRNA target sequence
agacacgtatgatacttgtctaa

SEQ ID NO: 245629 - DNA, 23 bp, Artificial sequence
  SiRNA target sequence
gacacgtatgatacttgtctaat

SEQ ID NO: 245630 - DNA, 23 bp, Artificial sequence
  SiRNA target sequence
acacgtatgatacttgtctaata

SEQ ID NO: 245631 - DNA, 23 bp, Artificial sequence
  SiRNA target sequence
cacgtatgatacttgtctaatat

SEQ ID NO: 245632 - DNA, 23 bp, Artificial sequence
  SiRNA target sequence
acgtatgatacttgtctaatatc

SEQ ID NO: 245633 - DNA, 23 bp, Artificial sequence
  SiRNA target sequence
cgtatgatacttgtctaatatct

SEQ ID NO: 245634 - DNA, 23 bp, Artificial sequence
  SiRNA target sequence
gtatgatacttgtctaatatctg

SEQ ID NO: 245635 - DNA, 23 bp, Artificial sequence
  SiRNA target sequence
tatgatacttgtctaatatctgg

SEQ ID NO: 245636 - DNA, 23 bp, Artificial sequence
  SiRNA target sequence
atgatacttgtctaatatctgga

SEQ ID NO: 245637 - DNA, 23 bp, Artificial sequence
  SiRNA target sequence
tgatacttgtctaatatctggaa

SEQ ID NO: 245638 - DNA, 23 bp, Artificial sequence
  SiRNA target sequence
gatacttgtctaatatctggaat

SEQ ID NO: 245639 - DNA, 23 bp, Artificial sequence
  SiRNA target sequence
atacttgtctaatatctggaatt

SEQ ID NO: 245640 - DNA, 23 bp, Artificial sequence
  SiRNA target sequence
tacttgtctaatatctggaattt

SEQ ID NO: 245641 - DNA, 23 bp, Artificial sequence
  SiRNA target sequence
acttgtctaatatctggaatttc

SEQ ID NO: 245642 - DNA, 23 bp, Artificial sequence
  SiRNA target sequence
cttgtctaatatctggaatttct

SEQ ID NO: 245643 - DNA, 23 bp, Artificial sequence
  SiRNA target sequence
ttgtctaatatctggaatttcta

SEQ ID NO: 245644 - DNA, 23 bp, Artificial sequence
  SiRNA target sequence
tgtctaatatctggaatttctat

SEQ ID NO: 245645 - DNA, 23 bp, Artificial sequence
  SiRNA target sequence
gtctaatatctggaatttctata

SEQ ID NO: 245646 - DNA, 23 bp, Artificial sequence
  SiRNA target sequence
tctaatatctggaatttctataa

SEQ ID NO: 245647 - DNA, 23 bp, Artificial sequence
  SiRNA target sequence
ctaatatctggaatttctataaa

SEQ ID NO: 245648 - DNA, 23 bp, Artificial sequence
  SiRNA target sequence
taatatctggaatttctataaac

SEQ ID NO: 245649 - DNA, 23 bp, Artificial sequence
  SiRNA target sequence
aatatctggaatttctataaacg

SEQ ID NO: 245650 - DNA, 23 bp, Artificial sequence
  SiRNA target sequence
atatctggaatttctataaacgt

SEQ ID NO: 245651 - DNA, 23 bp, Artificial sequence
  SiRNA target sequence
tatctggaatttctataaacgtc

SEQ ID NO: 245652 - DNA, 23 bp, Artificial sequence
  SiRNA target sequence
atctggaatttctataaacgtca

SEQ ID NO: 245653 - DNA, 23 bp, Artificial sequence
  SiRNA target sequence
tctggaatttctataaacgtcaa

SEQ ID NO: 245654 - DNA, 23 bp, Artificial sequence
  SiRNA target sequence
ctggaatttctataaacgtcaaa

SEQ ID NO: 245655 - DNA, 23 bp, Artificial sequence
  SiRNA target sequence
tggaatttctataaacgtcaaaa

SEQ ID NO: 245656 - DNA, 23 bp, Artificial sequence
  SiRNA target sequence
ggaatttctataaacgtcaaaaa

SEQ ID NO: 245657 - DNA, 23 bp, Artificial sequence
  SiRNA target sequence
gaatttctataaacgtcaaaaaa

SEQ ID NO: 245658 - DNA, 23 bp, Artificial sequence
  SiRNA target sequence
aatttctataaacgtcaaaaaag

SEQ ID NO: 245659 - DNA, 23 bp, Artificial sequence
  SiRNA target sequence
atttctataaacgtcaaaaaagt

SEQ ID NO: 245660 - DNA, 23 bp, Artificial sequence
  SiRNA target sequence
tttctataaacgtcaaaaaagtt

SEQ ID NO: 245661 - DNA, 23 bp, Artificial sequence
  SiRNA target sequence
ttctataaacgtcaaaaaagttc

SEQ ID NO: 245662 - DNA, 23 bp, Artificial sequence
  SiRNA target sequence
tctataaacgtcaaaaaagttcc

SEQ ID NO: 245663 - DNA, 23 bp, Artificial sequence
  SiRNA target sequence
ctataaacgtcaaaaaagttcca

SEQ ID NO: 245664 - DNA, 23 bp, Artificial sequence
  SiRNA target sequence
tataaacgtcaaaaaagttccat

SEQ ID NO: 245665 - DNA, 23 bp, Artificial sequence
  SiRNA target sequence
ataaacgtcaaaaaagttccata

SEQ ID NO: 245666 - DNA, 23 bp, Artificial sequence
  SiRNA target sequence
taaacgtcaaaaaagttccatat

SEQ ID NO: 245667 - DNA, 23 bp, Artificial sequence
  SiRNA target sequence
aaacgtcaaaaaagttccatata

SEQ ID NO: 245668 - DNA, 23 bp, Artificial sequence
  SiRNA target sequence
aacgtcaaaaaagttccatataa

SEQ ID NO: 245669 - DNA, 23 bp, Artificial sequence
  SiRNA target sequence
acgtcaaaaaagttccatataaa

SEQ ID NO: 245670 - DNA, 23 bp, Artificial sequence
  SiRNA target sequence
cgtcaaaaaagttccatataaag

SEQ ID NO: 245671 - DNA, 23 bp, Artificial sequence
  SiRNA target sequence
gtcaaaaaagttccatataaaga

SEQ ID NO: 245672 - DNA, 23 bp, Artificial sequence
  SiRNA target sequence
tcaaaaaagttccatataaagag

SEQ ID NO: 245673 - DNA, 23 bp, Artificial sequence
  SiRNA target sequence
caaaaaagttccatataaagaga

SEQ ID NO: 245674 - DNA, 23 bp, Artificial sequence
  SiRNA target sequence
aaaaaagttccatataaagagat

SEQ ID NO: 245675 - DNA, 23 bp, Artificial sequence
  SiRNA target sequence
aaaaagttccatataaagagata

SEQ ID NO: 245676 - DNA, 23 bp, Artificial sequence
  SiRNA target sequence
aaaagttccatataaagagataa

SEQ ID NO: 245677 - DNA, 23 bp, Artificial sequence
  SiRNA target sequence
aaagttccatataaagagataat

SEQ ID NO: 245678 - DNA, 23 bp, Artificial sequence
  SiRNA target sequence
aagttccatataaagagataata

SEQ ID NO: 245679 - DNA, 23 bp, Artificial sequence
  SiRNA target sequence
agttccatataaagagataatag

SEQ ID NO: 245680 - DNA, 23 bp, Artificial sequence
  SiRNA target sequence
gttccatataaagagataataga

SEQ ID NO: 245681 - DNA, 23 bp, Artificial sequence
  SiRNA target sequence
ttccatataaagagataatagat

SEQ ID NO: 245682 - DNA, 23 bp, Artificial sequence
  SiRNA target sequence
tccatataaagagataatagatt

SEQ ID NO: 245683 - DNA, 23 bp, Artificial sequence
  SiRNA target sequence
ccatataaagagataatagattt

SEQ ID NO: 245684 - DNA, 23 bp, Artificial sequence
  SiRNA target sequence
catataaagagataatagattta

SEQ ID NO: 245685 - DNA, 23 bp, Artificial sequence
  SiRNA target sequence
atataaagagataatagatttac

SEQ ID NO: 245686 - DNA, 23 bp, Artificial sequence
  SiRNA target sequence
tataaagagataatagatttacc

SEQ ID NO: 245687 - DNA, 23 bp, Artificial sequence
  SiRNA target sequence
ataaagagataatagatttacca

SEQ ID NO: 245688 - DNA, 23 bp, Artificial sequence
  SiRNA target sequence
taaagagataatagatttaccaa

SEQ ID NO: 245689 - DNA, 23 bp, Artificial sequence
  SiRNA target sequence
aaagagataatagatttaccaat

SEQ ID NO: 245690 - DNA, 23 bp, Artificial sequence
  SiRNA target sequence
aagagataatagatttaccaatt

SEQ ID NO: 245691 - DNA, 23 bp, Artificial sequence
  SiRNA target sequence
agagataatagatttaccaattt

SEQ ID NO: 245692 - DNA, 23 bp, Artificial sequence
  SiRNA target sequence
gagataatagatttaccaatttt

SEQ ID NO: 245693 - DNA, 23 bp, Artificial sequence
  SiRNA target sequence
agataatagatttaccaattttg

SEQ ID NO: 245694 - DNA, 23 bp, Artificial sequence
  SiRNA target sequence
gataatagatttaccaattttga

SEQ ID NO: 245695 - DNA, 23 bp, Artificial sequence
  SiRNA target sequence
ataatagatttaccaattttgat

SEQ ID NO: 245696 - DNA, 23 bp, Artificial sequence
  SiRNA target sequence
taatagatttaccaattttgata

SEQ ID NO: 245697 - DNA, 23 bp, Artificial sequence
  SiRNA target sequence
aatagatttaccaattttgatac

SEQ ID NO: 245698 - DNA, 23 bp, Artificial sequence
  SiRNA target sequence
atagatttaccaattttgataca

SEQ ID NO: 245699 - DNA, 23 bp, Artificial sequence
  SiRNA target sequence
tagatttaccaattttgatacat

SEQ ID NO: 245700 - DNA, 23 bp, Artificial sequence
  SiRNA target sequence
agatttaccaattttgatacata

SEQ ID NO: 245701 - DNA, 23 bp, Artificial sequence
  SiRNA target sequence
gatttaccaattttgatacatac

SEQ ID NO: 245702 - DNA, 23 bp, Artificial sequence
  SiRNA target sequence
atttaccaattttgatacataca

SEQ ID NO: 245703 - DNA, 23 bp, Artificial sequence
  SiRNA target sequence
tttaccaattttgatacatacac

SEQ ID NO: 245704 - DNA, 23 bp, Artificial sequence
  SiRNA target sequence
ttaccaattttgatacatacacc

SEQ ID NO: 245705 - DNA, 23 bp, Artificial sequence
  SiRNA target sequence
taccaattttgatacatacacca

SEQ ID NO: 245706 - DNA, 23 bp, Artificial sequence
  SiRNA target sequence
accaattttgatacatacaccat

SEQ ID NO: 245707 - DNA, 23 bp, Artificial sequence
  SiRNA target sequence
ccaattttgatacatacaccatc

SEQ ID NO: 245708 - DNA, 23 bp, Artificial sequence
  SiRNA target sequence
caattttgatacatacaccatca

SEQ ID NO: 245709 - DNA, 23 bp, Artificial sequence
  SiRNA target sequence
aattttgatacatacaccatcat

SEQ ID NO: 245710 - DNA, 23 bp, Artificial sequence
  SiRNA target sequence
attttgatacatacaccatcata

SEQ ID NO: 245711 - DNA, 23 bp, Artificial sequence
  SiRNA target sequence
ttttgatacatacaccatcataa

SEQ ID NO: 245712 - DNA, 23 bp, Artificial sequence
  SiRNA target sequence
tttgatacatacaccatcataaa

SEQ ID NO: 245713 - DNA, 23 bp, Artificial sequence
  SiRNA target sequence
ttgatacatacaccatcataaaa

SEQ ID NO: 245714 - DNA, 23 bp, Artificial sequence
  SiRNA target sequence
tgatacatacaccatcataaaaa

SEQ ID NO: 245715 - DNA, 23 bp, Artificial sequence
  SiRNA target sequence
gatacatacaccatcataaaaac

SEQ ID NO: 245716 - DNA, 23 bp, Artificial sequence
  SiRNA target sequence
atacatacaccatcataaaaact

SEQ ID NO: 245717 - DNA, 23 bp, Artificial sequence
  SiRNA target sequence
tacatacaccatcataaaaactt

SEQ ID NO: 245718 - DNA, 23 bp, Artificial sequence
  SiRNA target sequence
acatacaccatcataaaaacttt

SEQ ID NO: 245719 - DNA, 23 bp, Artificial sequence
  SiRNA target sequence
catacaccatcataaaaactttt

SEQ ID NO: 245720 - DNA, 23 bp, Artificial sequence
  SiRNA target sequence
atacaccatcataaaaactttta

SEQ ID NO: 245721 - DNA, 23 bp, Artificial sequence
  SiRNA target sequence
tacaccatcataaaaacttttaa

SEQ ID NO: 245722 - DNA, 23 bp, Artificial sequence
  SiRNA target sequence
acaccatcataaaaacttttaaa

SEQ ID NO: 245723 - DNA, 23 bp, Artificial sequence
  SiRNA target sequence
caccatcataaaaacttttaaat

SEQ ID NO: 245724 - DNA, 23 bp, Artificial sequence
  SiRNA target sequence
accatcataaaaacttttaaatt

SEQ ID NO: 245725 - DNA, 23 bp, Artificial sequence
  SiRNA target sequence
ccatcataaaaacttttaaattt

SEQ ID NO: 245726 - DNA, 23 bp, Artificial sequence
  SiRNA target sequence
catcataaaaacttttaaattta

SEQ ID NO: 245727 - DNA, 23 bp, Artificial sequence
  SiRNA target sequence
atcataaaaacttttaaatttat

SEQ ID NO: 245728 - DNA, 23 bp, Artificial sequence
  SiRNA target sequence
tcataaaaacttttaaatttata

SEQ ID NO: 245729 - DNA, 23 bp, Artificial sequence
  SiRNA target sequence
cataaaaacttttaaatttatac

SEQ ID NO: 245730 - DNA, 23 bp, Artificial sequence
  SiRNA target sequence
ataaaaacttttaaatttatacc

SEQ ID NO: 245731 - DNA, 23 bp, Artificial sequence
  SiRNA target sequence
taaaaacttttaaatttatacct

SEQ ID NO: 245732 - DNA, 23 bp, Artificial sequence
  SiRNA target sequence
aaaaacttttaaatttatacctg

SEQ ID NO: 245733 - DNA, 23 bp, Artificial sequence
  SiRNA target sequence
aaaacttttaaatttatacctgt

SEQ ID NO: 245734 - DNA, 23 bp, Artificial sequence
  SiRNA target sequence
aaacttttaaatttatacctgta

SEQ ID NO: 245735 - DNA, 23 bp, Artificial sequence
  SiRNA target sequence
aacttttaaatttatacctgtat

SEQ ID NO: 245736 - DNA, 23 bp, Artificial sequence
  SiRNA target sequence
acttttaaatttatacctgtatt

SEQ ID NO: 245737 - DNA, 23 bp, Artificial sequence
  SiRNA target sequence
cttttaaatttatacctgtattt

SEQ ID NO: 245738 - DNA, 23 bp, Artificial sequence
  SiRNA target sequence
ttttaaatttatacctgtattta

SEQ ID NO: 245739 - DNA, 23 bp, Artificial sequence
  SiRNA target sequence
tttaaatttatacctgtatttaa

SEQ ID NO: 245740 - DNA, 23 bp, Artificial sequence
  SiRNA target sequence
ttaaatttatacctgtatttaac

SEQ ID NO: 245741 - DNA, 23 bp, Artificial sequence
  SiRNA target sequence
taaatttatacctgtatttaaca

SEQ ID NO: 245742 - DNA, 23 bp, Artificial sequence
  SiRNA target sequence
aaatttatacctgtatttaacag

SEQ ID NO: 245743 - DNA, 23 bp, Artificial sequence
  SiRNA target sequence
aatttatacctgtatttaacagg

SEQ ID NO: 245744 - DNA, 23 bp, Artificial sequence
  SiRNA target sequence
atttatacctgtatttaacaggc

SEQ ID NO: 245745 - DNA, 23 bp, Artificial sequence
  SiRNA target sequence
tttatacctgtatttaacaggca

SEQ ID NO: 245746 - DNA, 23 bp, Artificial sequence
  SiRNA target sequence
ttatacctgtatttaacaggcac

SEQ ID NO: 245747 - DNA, 23 bp, Artificial sequence
  SiRNA target sequence
tatacctgtatttaacaggcacc

SEQ ID NO: 245748 - DNA, 23 bp, Artificial sequence
  SiRNA target sequence
atacctgtatttaacaggcaccc

SEQ ID NO: 245749 - DNA, 23 bp, Artificial sequence
  SiRNA target sequence
tacctgtatttaacaggcaccct

SEQ ID NO: 245750 - DNA, 23 bp, Artificial sequence
  SiRNA target sequence
acctgtatttaacaggcaccctc

SEQ ID NO: 245751 - DNA, 23 bp, Artificial sequence
  SiRNA target sequence
cctgtatttaacaggcaccctca

SEQ ID NO: 245752 - DNA, 23 bp, Artificial sequence
  SiRNA target sequence
ctgtatttaacaggcaccctcat

SEQ ID NO: 245753 - DNA, 23 bp, Artificial sequence
  SiRNA target sequence
tgtatttaacaggcaccctcata

SEQ ID NO: 245754 - DNA, 23 bp, Artificial sequence
  SiRNA target sequence
gtatttaacaggcaccctcatag

SEQ ID NO: 245755 - DNA, 23 bp, Artificial sequence
  SiRNA target sequence
tatttaacaggcaccctcataga

SEQ ID NO: 245756 - DNA, 23 bp, Artificial sequence
  SiRNA target sequence
atttaacaggcaccctcatagaa

SEQ ID NO: 245757 - DNA, 23 bp, Artificial sequence
  SiRNA target sequence
tttaacaggcaccctcatagaaa

SEQ ID NO: 245758 - DNA, 23 bp, Artificial sequence
  SiRNA target sequence
ttaacaggcaccctcatagaaag

SEQ ID NO: 245759 - DNA, 23 bp, Artificial sequence
  SiRNA target sequence
taacaggcaccctcatagaaagc

SEQ ID NO: 245760 - DNA, 23 bp, Artificial sequence
  SiRNA target sequence
aacaggcaccctcatagaaagca

SEQ ID NO: 245761 - DNA, 23 bp, Artificial sequence
  SiRNA target sequence
acaggcaccctcatagaaagcat

SEQ ID NO: 245762 - DNA, 23 bp, Artificial sequence
  SiRNA target sequence
caggcaccctcatagaaagcatt

SEQ ID NO: 245763 - DNA, 23 bp, Artificial sequence
  SiRNA target sequence
aggcaccctcatagaaagcattt

SEQ ID NO: 245764 - DNA, 23 bp, Artificial sequence
  SiRNA target sequence
ggcaccctcatagaaagcatttc

SEQ ID NO: 245765 - DNA, 23 bp, Artificial sequence
  SiRNA target sequence
gcaccctcatagaaagcatttct

SEQ ID NO: 245766 - DNA, 23 bp, Artificial sequence
  SiRNA target sequence
caccctcatagaaagcatttctt

SEQ ID NO: 245767 - DNA, 23 bp, Artificial sequence
  SiRNA target sequence
accctcatagaaagcatttcttt

SEQ ID NO: 245768 - DNA, 23 bp, Artificial sequence
  SiRNA target sequence
ccctcatagaaagcatttctttt

SEQ ID NO: 245769 - DNA, 23 bp, Artificial sequence
  SiRNA target sequence
cctcatagaaagcatttcttttg

SEQ ID NO: 245770 - DNA, 23 bp, Artificial sequence
  SiRNA target sequence
ctcatagaaagcatttcttttgc

SEQ ID NO: 245771 - DNA, 23 bp, Artificial sequence
  SiRNA target sequence
tcatagaaagcatttcttttgct

SEQ ID NO: 245772 - DNA, 23 bp, Artificial sequence
  SiRNA target sequence
catagaaagcatttcttttgcta

SEQ ID NO: 245773 - DNA, 23 bp, Artificial sequence
  SiRNA target sequence
atagaaagcatttcttttgctaa

SEQ ID NO: 245774 - DNA, 23 bp, Artificial sequence
  SiRNA target sequence
tagaaagcatttcttttgctaaa

SEQ ID NO: 245775 - DNA, 23 bp, Artificial sequence
  SiRNA target sequence
agaaagcatttcttttgctaaat

SEQ ID NO: 245776 - DNA, 23 bp, Artificial sequence
  SiRNA target sequence
gaaagcatttcttttgctaaatc

SEQ ID NO: 245777 - DNA, 23 bp, Artificial sequence
  SiRNA target sequence
aaagcatttcttttgctaaatca

SEQ ID NO: 245778 - DNA, 23 bp, Artificial sequence
  SiRNA target sequence
aagcatttcttttgctaaatcaa

SEQ ID NO: 245779 - DNA, 23 bp, Artificial sequence
  SiRNA target sequence
agcatttcttttgctaaatcaaa

SEQ ID NO: 245780 - DNA, 23 bp, Artificial sequence
  SiRNA target sequence
gcatttcttttgctaaatcaaat

SEQ ID NO: 245781 - DNA, 23 bp, Artificial sequence
  SiRNA target sequence
catttcttttgctaaatcaaata

SEQ ID NO: 245782 - DNA, 23 bp, Artificial sequence
  SiRNA target sequence
atttcttttgctaaatcaaataa

SEQ ID NO: 245783 - DNA, 23 bp, Artificial sequence
  SiRNA target sequence
tttcttttgctaaatcaaataaa

SEQ ID NO: 245784 - DNA, 23 bp, Artificial sequence
  SiRNA target sequence
ttcttttgctaaatcaaataaaa

SEQ ID NO: 245785 - DNA, 23 bp, Artificial sequence
  SiRNA target sequence
tcttttgctaaatcaaataaaac

SEQ ID NO: 245786 - DNA, 23 bp, Artificial sequence
  SiRNA target sequence
cttttgctaaatcaaataaaaca

SEQ ID NO: 245787 - DNA, 23 bp, Artificial sequence
  SiRNA target sequence
ttttgctaaatcaaataaaacat

SEQ ID NO: 245788 - DNA, 23 bp, Artificial sequence
  SiRNA target sequence
tttgctaaatcaaataaaacata

SEQ ID NO: 245789 - DNA, 23 bp, Artificial sequence
  SiRNA target sequence
ttgctaaatcaaataaaacatat

SEQ ID NO: 245790 - DNA, 23 bp, Artificial sequence
  SiRNA target sequence
tgctaaatcaaataaaacatatt

SEQ ID NO: 245791 - DNA, 23 bp, Artificial sequence
  SiRNA target sequence
gctaaatcaaataaaacatattt

SEQ ID NO: 245792 - DNA, 23 bp, Artificial sequence
  SiRNA target sequence
ctaaatcaaataaaacatatttg

SEQ ID NO: 245793 - DNA, 23 bp, Artificial sequence
  SiRNA target sequence
taaatcaaataaaacatatttgg

SEQ ID NO: 245794 - DNA, 23 bp, Artificial sequence
  SiRNA target sequence
aaatcaaataaaacatatttggt

SEQ ID NO: 245795 - DNA, 23 bp, Artificial sequence
  SiRNA target sequence
aatcaaataaaacatatttggta

SEQ ID NO: 245796 - DNA, 23 bp, Artificial sequence
  SiRNA target sequence
atcaaataaaacatatttggtaa

SEQ ID NO: 245797 - DNA, 23 bp, Artificial sequence
  SiRNA target sequence
tcaaataaaacatatttggtaat

SEQ ID NO: 245798 - DNA, 23 bp, Artificial sequence
  SiRNA target sequence
caaataaaacatatttggtaatt

SEQ ID NO: 245799 - DNA, 23 bp, Artificial sequence
  SiRNA target sequence
aaataaaacatatttggtaattt

SEQ ID NO: 245800 - DNA, 23 bp, Artificial sequence
  SiRNA target sequence
aataaaacatatttggtaatttt

SEQ ID NO: 245801 - DNA, 23 bp, Artificial sequence
  SiRNA target sequence
ataaaacatatttggtaatttta

SEQ ID NO: 245802 - DNA, 23 bp, Artificial sequence
  SiRNA target sequence
taaaacatatttggtaattttag

SEQ ID NO: 245803 - DNA, 23 bp, Artificial sequence
  SiRNA target sequence
aaaacatatttggtaattttaga

SEQ ID NO: 245804 - DNA, 23 bp, Artificial sequence
  SiRNA target sequence
aaacatatttggtaattttagaa

SEQ ID NO: 245805 - DNA, 23 bp, Artificial sequence
  SiRNA target sequence
aacatatttggtaattttagaaa

SEQ ID NO: 245806 - DNA, 23 bp, Artificial sequence
  SiRNA target sequence
acatatttggtaattttagaaaa

SEQ ID NO: 245807 - DNA, 23 bp, Artificial sequence
  SiRNA target sequence
catatttggtaattttagaaaat

SEQ ID NO: 245808 - DNA, 23 bp, Artificial sequence
  SiRNA target sequence
atatttggtaattttagaaaatg

SEQ ID NO: 245809 - DNA, 23 bp, Artificial sequence
  SiRNA target sequence
tatttggtaattttagaaaatgc

SEQ ID NO: 245810 - DNA, 23 bp, Artificial sequence
  SiRNA target sequence
atttggtaattttagaaaatgca

SEQ ID NO: 245811 - DNA, 23 bp, Artificial sequence
  SiRNA target sequence
tttggtaattttagaaaatgcaa

SEQ ID NO: 245812 - DNA, 23 bp, Artificial sequence
  SiRNA target sequence
ttggtaattttagaaaatgcaaa

SEQ ID NO: 245813 - DNA, 23 bp, Artificial sequence
  SiRNA target sequence
tggtaattttagaaaatgcaaat

SEQ ID NO: 245814 - DNA, 23 bp, Artificial sequence
  SiRNA target sequence
ggtaattttagaaaatgcaaatc

SEQ ID NO: 245815 - DNA, 23 bp, Artificial sequence
  SiRNA target sequence
gtaattttagaaaatgcaaatcc

SEQ ID NO: 245816 - DNA, 23 bp, Artificial sequence
  SiRNA target sequence
taattttagaaaatgcaaatcca

SEQ ID NO: 245817 - DNA, 23 bp, Artificial sequence
  SiRNA target sequence
aattttagaaaatgcaaatccaa

SEQ ID NO: 245818 - DNA, 23 bp, Artificial sequence
  SiRNA target sequence
attttagaaaatgcaaatccaat

SEQ ID NO: 245819 - DNA, 23 bp, Artificial sequence
  SiRNA target sequence
ttttagaaaatgcaaatccaatg

SEQ ID NO: 245820 - DNA, 23 bp, Artificial sequence
  SiRNA target sequence
tttagaaaatgcaaatccaatgg

SEQ ID NO: 245821 - DNA, 23 bp, Artificial sequence
  SiRNA target sequence
ttagaaaatgcaaatccaatggt

SEQ ID NO: 245822 - DNA, 23 bp, Artificial sequence
  SiRNA target sequence
tagaaaatgcaaatccaatggtt

SEQ ID NO: 245823 - DNA, 23 bp, Artificial sequence
  SiRNA target sequence
agaaaatgcaaatccaatggttg

SEQ ID NO: 245824 - DNA, 23 bp, Artificial sequence
  SiRNA target sequence
gaaaatgcaaatccaatggttgc

SEQ ID NO: 245825 - DNA, 23 bp, Artificial sequence
  SiRNA target sequence
aaaatgcaaatccaatggttgca

SEQ ID NO: 245826 - DNA, 23 bp, Artificial sequence
  SiRNA target sequence
aaatgcaaatccaatggttgcac

SEQ ID NO: 245827 - DNA, 23 bp, Artificial sequence
  SiRNA target sequence
aatgcaaatccaatggttgcaca

SEQ ID NO: 245828 - DNA, 23 bp, Artificial sequence
  SiRNA target sequence
atgcaaatccaatggttgcacac

SEQ ID NO: 245829 - DNA, 23 bp, Artificial sequence
  SiRNA target sequence
tgcaaatccaatggttgcacacc

SEQ ID NO: 245830 - DNA, 23 bp, Artificial sequence
  SiRNA target sequence
gcaaatccaatggttgcacacca

SEQ ID NO: 245831 - DNA, 23 bp, Artificial sequence
  SiRNA target sequence
caaatccaatggttgcacaccaa

SEQ ID NO: 245832 - DNA, 23 bp, Artificial sequence
  SiRNA target sequence
aaatccaatggttgcacaccaat

SEQ ID NO: 245833 - DNA, 23 bp, Artificial sequence
  SiRNA target sequence
aatccaatggttgcacaccaatt

SEQ ID NO: 245834 - DNA, 23 bp, Artificial sequence
  SiRNA target sequence
atccaatggttgcacaccaattt

SEQ ID NO: 245835 - DNA, 23 bp, Artificial sequence
  SiRNA target sequence
tccaatggttgcacaccaatttt

SEQ ID NO: 245836 - DNA, 23 bp, Artificial sequence
  SiRNA target sequence
ccaatggttgcacaccaattttc

SEQ ID NO: 245837 - DNA, 23 bp, Artificial sequence
  SiRNA target sequence
caatggttgcacaccaattttca

SEQ ID NO: 245838 - DNA, 23 bp, Artificial sequence
  SiRNA target sequence
aatggttgcacaccaattttcaa

SEQ ID NO: 245839 - DNA, 23 bp, Artificial sequence
  SiRNA target sequence
atggttgcacaccaattttcaag

SEQ ID NO: 245840 - DNA, 23 bp, Artificial sequence
  SiRNA target sequence
tggttgcacaccaattttcaaga

SEQ ID NO: 245841 - DNA, 23 bp, Artificial sequence
  SiRNA target sequence
ggttgcacaccaattttcaagat

SEQ ID NO: 245842 - DNA, 23 bp, Artificial sequence
  SiRNA target sequence
gttgcacaccaattttcaagatt

SEQ ID NO: 245843 - DNA, 23 bp, Artificial sequence
  SiRNA target sequence
ttgcacaccaattttcaagattt

SEQ ID NO: 245844 - DNA, 23 bp, Artificial sequence
  SiRNA target sequence
tgcacaccaattttcaagattta

SEQ ID NO: 245845 - DNA, 23 bp, Artificial sequence
  SiRNA target sequence
gcacaccaattttcaagatttat

SEQ ID NO: 245846 - DNA, 23 bp, Artificial sequence
  SiRNA target sequence
cacaccaattttcaagatttatt

SEQ ID NO: 245847 - DNA, 23 bp, Artificial sequence
  SiRNA target sequence
acaccaattttcaagatttattc

SEQ ID NO: 245848 - DNA, 23 bp, Artificial sequence
  SiRNA target sequence
caccaattttcaagatttattct

SEQ ID NO: 245849 - DNA, 23 bp, Artificial sequence
  SiRNA target sequence
accaattttcaagatttattctt

SEQ ID NO: 245850 - DNA, 23 bp, Artificial sequence
  SiRNA target sequence
ccaattttcaagatttattctta

SEQ ID NO: 245851 - DNA, 23 bp, Artificial sequence
  SiRNA target sequence
caattttcaagatttattcttaa

SEQ ID NO: 245852 - DNA, 23 bp, Artificial sequence
  SiRNA target sequence
aattttcaagatttattcttaag

SEQ ID NO: 245853 - DNA, 23 bp, Artificial sequence
  SiRNA target sequence
attttcaagatttattcttaaga

SEQ ID NO: 245854 - DNA, 23 bp, Artificial sequence
  SiRNA target sequence
ttttcaagatttattcttaagac

SEQ ID NO: 245855 - DNA, 23 bp, Artificial sequence
  SiRNA target sequence
tttcaagatttattcttaagacc

SEQ ID NO: 245856 - DNA, 23 bp, Artificial sequence
  SiRNA target sequence
ttcaagatttattcttaagaccg

SEQ ID NO: 245857 - DNA, 23 bp, Artificial sequence
  SiRNA target sequence
tcaagatttattcttaagaccga

SEQ ID NO: 245858 - DNA, 23 bp, Artificial sequence
  SiRNA target sequence
caagatttattcttaagaccgat

SEQ ID NO: 245859 - DNA, 23 bp, Artificial sequence
  SiRNA target sequence
aagatttattcttaagaccgatg

SEQ ID NO: 245860 - DNA, 23 bp, Artificial sequence
  SiRNA target sequence
agatttattcttaagaccgatgg

SEQ ID NO: 245861 - DNA, 23 bp, Artificial sequence
  SiRNA target sequence
gatttattcttaagaccgatgga

SEQ ID NO: 245862 - DNA, 23 bp, Artificial sequence
  SiRNA target sequence
atttattcttaagaccgatggag

SEQ ID NO: 245863 - DNA, 23 bp, Artificial sequence
  SiRNA target sequence
tttattcttaagaccgatggagc

SEQ ID NO: 245864 - DNA, 23 bp, Artificial sequence
  SiRNA target sequence
ttattcttaagaccgatggagct

SEQ ID NO: 245865 - DNA, 23 bp, Artificial sequence
  SiRNA target sequence
tattcttaagaccgatggagctg

SEQ ID NO: 245866 - DNA, 23 bp, Artificial sequence
  SiRNA target sequence
attcttaagaccgatggagctgt

SEQ ID NO: 245867 - DNA, 23 bp, Artificial sequence
  SiRNA target sequence
ttcttaagaccgatggagctgtg

SEQ ID NO: 245868 - DNA, 23 bp, Artificial sequence
  SiRNA target sequence
tcttaagaccgatggagctgtgc

SEQ ID NO: 245869 - DNA, 23 bp, Artificial sequence
  SiRNA target sequence
cttaagaccgatggagctgtgcg

SEQ ID NO: 245870 - DNA, 23 bp, Artificial sequence
  SiRNA target sequence
ttaagaccgatggagctgtgcgc

SEQ ID NO: 245871 - DNA, 23 bp, Artificial sequence
  SiRNA target sequence
taagaccgatggagctgtgcgca

SEQ ID NO: 245872 - DNA, 23 bp, Artificial sequence
  SiRNA target sequence
aagaccgatggagctgtgcgcaa

SEQ ID NO: 245873 - DNA, 23 bp, Artificial sequence
  SiRNA target sequence
agaccgatggagctgtgcgcaaa

SEQ ID NO: 245874 - DNA, 23 bp, Artificial sequence
  SiRNA target sequence
gaccgatggagctgtgcgcaaat

SEQ ID NO: 245875 - DNA, 23 bp, Artificial sequence
  SiRNA target sequence
accgatggagctgtgcgcaaatt

SEQ ID NO: 245876 - DNA, 23 bp, Artificial sequence
  SiRNA target sequence
ccgatggagctgtgcgcaaattg

SEQ ID NO: 245877 - DNA, 23 bp, Artificial sequence
  SiRNA target sequence
cgatggagctgtgcgcaaattgt

SEQ ID NO: 245878 - DNA, 23 bp, Artificial sequence
  SiRNA target sequence
gatggagctgtgcgcaaattgta

SEQ ID NO: 245879 - DNA, 23 bp, Artificial sequence
  SiRNA target sequence
atggagctgtgcgcaaattgtaa

SEQ ID NO: 245880 - DNA, 23 bp, Artificial sequence
  SiRNA target sequence
tggagctgtgcgcaaattgtaaa

SEQ ID NO: 245881 - DNA, 23 bp, Artificial sequence
  SiRNA target sequence
ggagctgtgcgcaaattgtaaaa

SEQ ID NO: 245882 - DNA, 23 bp, Artificial sequence
  SiRNA target sequence
gagctgtgcgcaaattgtaaaaa

SEQ ID NO: 245883 - DNA, 23 bp, Artificial sequence
  SiRNA target sequence
agctgtgcgcaaattgtaaaaag

SEQ ID NO: 245884 - DNA, 23 bp, Artificial sequence
  SiRNA target sequence
gctgtgcgcaaattgtaaaaaga

SEQ ID NO: 245885 - DNA, 23 bp, Artificial sequence
  SiRNA target sequence
ctgtgcgcaaattgtaaaaagaa

SEQ ID NO: 245886 - DNA, 23 bp, Artificial sequence
  SiRNA target sequence
tgtgcgcaaattgtaaaaagaaa

SEQ ID NO: 245887 - DNA, 23 bp, Artificial sequence
  SiRNA target sequence
gtgcgcaaattgtaaaaagaaag

SEQ ID NO: 245888 - DNA, 23 bp, Artificial sequence
  SiRNA target sequence
tgcgcaaattgtaaaaagaaagt

SEQ ID NO: 245889 - DNA, 23 bp, Artificial sequence
  SiRNA target sequence
gcgcaaattgtaaaaagaaagtc

SEQ ID NO: 245890 - DNA, 23 bp, Artificial sequence
  SiRNA target sequence
cgcaaattgtaaaaagaaagtcc

SEQ ID NO: 245891 - DNA, 23 bp, Artificial sequence
  SiRNA target sequence
gcaaattgtaaaaagaaagtcct

SEQ ID NO: 245892 - DNA, 23 bp, Artificial sequence
  SiRNA target sequence
caaattgtaaaaagaaagtcctg

SEQ ID NO: 245893 - DNA, 23 bp, Artificial sequence
  SiRNA target sequence
aaattgtaaaaagaaagtcctga

SEQ ID NO: 245894 - DNA, 23 bp, Artificial sequence
  SiRNA target sequence
aattgtaaaaagaaagtcctgaa

SEQ ID NO: 245895 - DNA, 23 bp, Artificial sequence
  SiRNA target sequence
attgtaaaaagaaagtcctgaaa

SEQ ID NO: 245896 - DNA, 23 bp, Artificial sequence
  SiRNA target sequence
ttgtaaaaagaaagtcctgaaat

SEQ ID NO: 245897 - DNA, 23 bp, Artificial sequence
  SiRNA target sequence
tgtaaaaagaaagtcctgaaatt

SEQ ID NO: 245898 - DNA, 23 bp, Artificial sequence
  SiRNA target sequence
gtaaaaagaaagtcctgaaatta

SEQ ID NO: 245899 - DNA, 23 bp, Artificial sequence
  SiRNA target sequence
taaaaagaaagtcctgaaattag

SEQ ID NO: 245900 - DNA, 23 bp, Artificial sequence
  SiRNA target sequence
aaaaagaaagtcctgaaattaga

SEQ ID NO: 245901 - DNA, 23 bp, Artificial sequence
  SiRNA target sequence
aaaagaaagtcctgaaattagag

SEQ ID NO: 245902 - DNA, 23 bp, Artificial sequence
  SiRNA target sequence
aaagaaagtcctgaaattagagc

SEQ ID NO: 245903 - DNA, 23 bp, Artificial sequence
  SiRNA target sequence
aagaaagtcctgaaattagagcg

SEQ ID NO: 245904 - DNA, 23 bp, Artificial sequence
  SiRNA target sequence
agaaagtcctgaaattagagcgg

SEQ ID NO: 245905 - DNA, 23 bp, Artificial sequence
  SiRNA target sequence
gaaagtcctgaaattagagcggt

SEQ ID NO: 245906 - DNA, 23 bp, Artificial sequence
  SiRNA target sequence
aaagtcctgaaattagagcggta

SEQ ID NO: 245907 - DNA, 23 bp, Artificial sequence
  SiRNA target sequence
aagtcctgaaattagagcggtaa

SEQ ID NO: 245908 - DNA, 23 bp, Artificial sequence
  SiRNA target sequence
agtcctgaaattagagcggtaaa

SEQ ID NO: 245909 - DNA, 23 bp, Artificial sequence
  SiRNA target sequence
gtcctgaaattagagcggtaaaa

SEQ ID NO: 245910 - DNA, 23 bp, Artificial sequence
  SiRNA target sequence
tcctgaaattagagcggtaaaaa

SEQ ID NO: 245911 - DNA, 23 bp, Artificial sequence
  SiRNA target sequence
cctgaaattagagcggtaaaaaa

SEQ ID NO: 245912 - DNA, 23 bp, Artificial sequence
  SiRNA target sequence
ctgaaattagagcggtaaaaaat

SEQ ID NO: 245913 - DNA, 23 bp, Artificial sequence
  SiRNA target sequence
tgaaattagagcggtaaaaaata

SEQ ID NO: 245914 - DNA, 23 bp, Artificial sequence
  SiRNA target sequence
gaaattagagcggtaaaaaatat

SEQ ID NO: 245915 - DNA, 23 bp, Artificial sequence
  SiRNA target sequence
aaattagagcggtaaaaaatata

SEQ ID NO: 245916 - DNA, 23 bp, Artificial sequence
  SiRNA target sequence
aattagagcggtaaaaaatatag

SEQ ID NO: 245917 - DNA, 23 bp, Artificial sequence
  SiRNA target sequence
attagagcggtaaaaaatatagc

SEQ ID NO: 245918 - DNA, 23 bp, Artificial sequence
  SiRNA target sequence
ttagagcggtaaaaaatatagca

SEQ ID NO: 245919 - DNA, 23 bp, Artificial sequence
  SiRNA target sequence
tagagcggtaaaaaatatagcag

SEQ ID NO: 245920 - DNA, 23 bp, Artificial sequence
  SiRNA target sequence
agagcggtaaaaaatatagcagc

SEQ ID NO: 245921 - DNA, 23 bp, Artificial sequence
  SiRNA target sequence
gagcggtaaaaaatatagcagca

SEQ ID NO: 245922 - DNA, 23 bp, Artificial sequence
  SiRNA target sequence
agcggtaaaaaatatagcagcaa

SEQ ID NO: 245923 - DNA, 23 bp, Artificial sequence
  SiRNA target sequence
gcggtaaaaaatatagcagcaat

SEQ ID NO: 245924 - DNA, 23 bp, Artificial sequence
  SiRNA target sequence
cggtaaaaaatatagcagcaata

SEQ ID NO: 245925 - DNA, 23 bp, Artificial sequence
  SiRNA target sequence
ggtaaaaaatatagcagcaatag

SEQ ID NO: 245926 - DNA, 23 bp, Artificial sequence
  SiRNA target sequence
gtaaaaaatatagcagcaatagg

SEQ ID NO: 245927 - DNA, 23 bp, Artificial sequence
  SiRNA target sequence
taaaaaatatagcagcaataggg

SEQ ID NO: 245928 - DNA, 23 bp, Artificial sequence
  SiRNA target sequence
aaaaaatatagcagcaatagggg

SEQ ID NO: 245929 - DNA, 23 bp, Artificial sequence
  SiRNA target sequence
aaaaatatagcagcaatagggga

SEQ ID NO: 245930 - DNA, 23 bp, Artificial sequence
  SiRNA target sequence
aaaatatagcagcaataggggag

SEQ ID NO: 245931 - DNA, 23 bp, Artificial sequence
  SiRNA target sequence
aaatatagcagcaataggggagg

SEQ ID NO: 245932 - DNA, 23 bp, Artificial sequence
  SiRNA target sequence
aatatagcagcaataggggaggc

SEQ ID NO: 245933 - DNA, 23 bp, Artificial sequence
  SiRNA target sequence
atatagcagcaataggggaggca

SEQ ID NO: 245934 - DNA, 23 bp, Artificial sequence
  SiRNA target sequence
tatagcagcaataggggaggcaa

SEQ ID NO: 245935 - DNA, 23 bp, Artificial sequence
  SiRNA target sequence
atagcagcaataggggaggcaat

SEQ ID NO: 245936 - DNA, 23 bp, Artificial sequence
  SiRNA target sequence
tagcagcaataggggaggcaata

SEQ ID NO: 245937 - DNA, 23 bp, Artificial sequence
  SiRNA target sequence
agcagcaataggggaggcaatag

SEQ ID NO: 245938 - DNA, 23 bp, Artificial sequence
  SiRNA target sequence
gcagcaataggggaggcaataga

SEQ ID NO: 245939 - DNA, 23 bp, Artificial sequence
  SiRNA target sequence
cagcaataggggaggcaatagat

SEQ ID NO: 245940 - DNA, 23 bp, Artificial sequence
  SiRNA target sequence
agcaataggggaggcaatagata

SEQ ID NO: 245941 - DNA, 23 bp, Artificial sequence
  SiRNA target sequence
gcaataggggaggcaatagatag

SEQ ID NO: 245942 - DNA, 23 bp, Artificial sequence
  SiRNA target sequence
caataggggaggcaatagataga

SEQ ID NO: 245943 - DNA, 23 bp, Artificial sequence
  SiRNA target sequence
aataggggaggcaatagatagat

SEQ ID NO: 245944 - DNA, 23 bp, Artificial sequence
  SiRNA target sequence
ataggggaggcaatagatagata

SEQ ID NO: 245945 - DNA, 23 bp, Artificial sequence
  SiRNA target sequence
taggggaggcaatagatagataa

SEQ ID NO: 245946 - DNA, 23 bp, Artificial sequence
  SiRNA target sequence
aggggaggcaatagatagataaa

SEQ ID NO: 245947 - DNA, 23 bp, Artificial sequence
  SiRNA target sequence
ggggaggcaatagatagataaaa

SEQ ID NO: 245948 - DNA, 23 bp, Artificial sequence
  SiRNA target sequence
gggaggcaatagatagataaaag

SEQ ID NO: 245949 - DNA, 23 bp, Artificial sequence
  SiRNA target sequence
ggaggcaatagatagataaaaga

SEQ ID NO: 245950 - DNA, 23 bp, Artificial sequence
  SiRNA target sequence
gaggcaatagatagataaaagat

SEQ ID NO: 245951 - DNA, 23 bp, Artificial sequence
  SiRNA target sequence
aggcaatagatagataaaagatc

SEQ ID NO: 245952 - DNA, 23 bp, Artificial sequence
  SiRNA target sequence
ggcaatagatagataaaagatcc

SEQ ID NO: 245953 - DNA, 23 bp, Artificial sequence
  SiRNA target sequence
gcaatagatagataaaagatcct

SEQ ID NO: 245954 - DNA, 23 bp, Artificial sequence
  SiRNA target sequence
caatagatagataaaagatcctt

SEQ ID NO: 245955 - DNA, 23 bp, Artificial sequence
  SiRNA target sequence
aatagatagataaaagatccttg

SEQ ID NO: 245956 - DNA, 23 bp, Artificial sequence
  SiRNA target sequence
atagatagataaaagatccttga

SEQ ID NO: 245957 - DNA, 23 bp, Artificial sequence
  SiRNA target sequence
tagatagataaaagatccttgat

SEQ ID NO: 245958 - DNA, 23 bp, Artificial sequence
  SiRNA target sequence
agatagataaaagatccttgatg

SEQ ID NO: 245959 - DNA, 23 bp, Artificial sequence
  SiRNA target sequence
gatagataaaagatccttgatgc

SEQ ID NO: 245960 - DNA, 23 bp, Artificial sequence
  SiRNA target sequence
atagataaaagatccttgatgca

SEQ ID NO: 245961 - DNA, 23 bp, Artificial sequence
  SiRNA target sequence
tagataaaagatccttgatgcaa

SEQ ID NO: 245962 - DNA, 23 bp, Artificial sequence
  SiRNA target sequence
agataaaagatccttgatgcaat

SEQ ID NO: 245963 - DNA, 23 bp, Artificial sequence
  SiRNA target sequence
gataaaagatccttgatgcaatg

SEQ ID NO: 245964 - DNA, 23 bp, Artificial sequence
  SiRNA target sequence
ataaaagatccttgatgcaatgc

SEQ ID NO: 245965 - DNA, 23 bp, Artificial sequence
  SiRNA target sequence
taaaagatccttgatgcaatgcg

SEQ ID NO: 245966 - DNA, 23 bp, Artificial sequence
  SiRNA target sequence
aaaagatccttgatgcaatgcga

SEQ ID NO: 245967 - DNA, 23 bp, Artificial sequence
  SiRNA target sequence
aaagatccttgatgcaatgcgat

SEQ ID NO: 245968 - DNA, 23 bp, Artificial sequence
  SiRNA target sequence
aagatccttgatgcaatgcgatt

SEQ ID NO: 245969 - DNA, 23 bp, Artificial sequence
  SiRNA target sequence
agatccttgatgcaatgcgattt

SEQ ID NO: 245970 - DNA, 23 bp, Artificial sequence
  SiRNA target sequence
gatccttgatgcaatgcgatttc

SEQ ID NO: 245971 - DNA, 23 bp, Artificial sequence
  SiRNA target sequence
atccttgatgcaatgcgatttcc

SEQ ID NO: 245972 - DNA, 23 bp, Artificial sequence
  SiRNA target sequence
tccttgatgcaatgcgatttcca

SEQ ID NO: 245973 - DNA, 23 bp, Artificial sequence
  SiRNA target sequence
ccttgatgcaatgcgatttccac

SEQ ID NO: 245974 - DNA, 23 bp, Artificial sequence
  SiRNA target sequence
cttgatgcaatgcgatttccacg

SEQ ID NO: 245975 - DNA, 23 bp, Artificial sequence
  SiRNA target sequence
ttgatgcaatgcgatttccacgg

SEQ ID NO: 245976 - DNA, 23 bp, Artificial sequence
  SiRNA target sequence
tgatgcaatgcgatttccacgga

SEQ ID NO: 245977 - DNA, 23 bp, Artificial sequence
  SiRNA target sequence
gatgcaatgcgatttccacggat

SEQ ID NO: 245978 - DNA, 23 bp, Artificial sequence
  SiRNA target sequence
atgcaatgcgatttccacggatt

SEQ ID NO: 245979 - DNA, 23 bp, Artificial sequence
  SiRNA target sequence
tgcaatgcgatttccacggatta

SEQ ID NO: 245980 - DNA, 23 bp, Artificial sequence
  SiRNA target sequence
gcaatgcgatttccacggattac

SEQ ID NO: 245981 - DNA, 23 bp, Artificial sequence
  SiRNA target sequence
caatgcgatttccacggattaca

SEQ ID NO: 245982 - DNA, 23 bp, Artificial sequence
  SiRNA target sequence
aatgcgatttccacggattacaa

SEQ ID NO: 245983 - DNA, 23 bp, Artificial sequence
  SiRNA target sequence
atgcgatttccacggattacaaa

SEQ ID NO: 245984 - DNA, 23 bp, Artificial sequence
  SiRNA target sequence
tgcgatttccacggattacaaag

SEQ ID NO: 245985 - DNA, 23 bp, Artificial sequence
  SiRNA target sequence
gcgatttccacggattacaaagt

SEQ ID NO: 245986 - DNA, 23 bp, Artificial sequence
  SiRNA target sequence
cgatttccacggattacaaagtt

SEQ ID NO: 245987 - DNA, 23 bp, Artificial sequence
  SiRNA target sequence
gatttccacggattacaaagtta

SEQ ID NO: 245988 - DNA, 23 bp, Artificial sequence
  SiRNA target sequence
atttccacggattacaaagttat

SEQ ID NO: 245989 - DNA, 23 bp, Artificial sequence
  SiRNA target sequence
tttccacggattacaaagttata

SEQ ID NO: 245990 - DNA, 23 bp, Artificial sequence
  SiRNA target sequence
ttccacggattacaaagttataa

SEQ ID NO: 245991 - DNA, 23 bp, Artificial sequence
  SiRNA target sequence
tccacggattacaaagttataaa

SEQ ID NO: 245992 - DNA, 23 bp, Artificial sequence
  SiRNA target sequence
ccacggattacaaagttataaaa

SEQ ID NO: 245993 - DNA, 23 bp, Artificial sequence
  SiRNA target sequence
cacggattacaaagttataaaat

SEQ ID NO: 245994 - DNA, 23 bp, Artificial sequence
  SiRNA target sequence
acggattacaaagttataaaata

SEQ ID NO: 245995 - DNA, 23 bp, Artificial sequence
  SiRNA target sequence
cggattacaaagttataaaataa

SEQ ID NO: 245996 - DNA, 23 bp, Artificial sequence
  SiRNA target sequence
ggattacaaagttataaaataat

SEQ ID NO: 245997 - DNA, 23 bp, Artificial sequence
  SiRNA target sequence
gattacaaagttataaaataatg

SEQ ID NO: 245998 - DNA, 23 bp, Artificial sequence
  SiRNA target sequence
attacaaagttataaaataatga

SEQ ID NO: 245999 - DNA, 23 bp, Artificial sequence
  SiRNA target sequence
ttacaaagttataaaataatgat

SEQ ID NO: 246000 - DNA, 23 bp, Artificial sequence
  SiRNA target sequence
tacaaagttataaaataatgata

SEQ ID NO: 246001 - DNA, 23 bp, Artificial sequence
  SiRNA target sequence
acaaagttataaaataatgatac

SEQ ID NO: 246002 - DNA, 23 bp, Artificial sequence
  SiRNA target sequence
caaagttataaaataatgataca

SEQ ID NO: 246003 - DNA, 23 bp, Artificial sequence
  SiRNA target sequence
aaagttataaaataatgatacag

SEQ ID NO: 246004 - DNA, 23 bp, Artificial sequence
  SiRNA target sequence
aagttataaaataatgatacagc

SEQ ID NO: 246005 - DNA, 23 bp, Artificial sequence
  SiRNA target sequence
agttataaaataatgatacagca

SEQ ID NO: 246006 - DNA, 23 bp, Artificial sequence
  SiRNA target sequence
gttataaaataatgatacagcac

SEQ ID NO: 246007 - DNA, 23 bp, Artificial sequence
  SiRNA target sequence
ttataaaataatgatacagcact

SEQ ID NO: 246008 - DNA, 23 bp, Artificial sequence
  SiRNA target sequence
tataaaataatgatacagcacta

SEQ ID NO: 246009 - DNA, 23 bp, Artificial sequence
  SiRNA target sequence
ataaaataatgatacagcactaa

SEQ ID NO: 246010 - DNA, 23 bp, Artificial sequence
  SiRNA target sequence
taaaataatgatacagcactaat

SEQ ID NO: 246011 - DNA, 23 bp, Artificial sequence
  SiRNA target sequence
aaaataatgatacagcactaatc

SEQ ID NO: 246012 - DNA, 23 bp, Artificial sequence
  SiRNA target sequence
aaataatgatacagcactaatcg

SEQ ID NO: 246013 - DNA, 23 bp, Artificial sequence
  SiRNA target sequence
aataatgatacagcactaatcgt

SEQ ID NO: 246014 - DNA, 23 bp, Artificial sequence
  SiRNA target sequence
ataatgatacagcactaatcgtt

SEQ ID NO: 246015 - DNA, 23 bp, Artificial sequence
  SiRNA target sequence
taatgatacagcactaatcgtta

SEQ ID NO: 246016 - DNA, 23 bp, Artificial sequence
  SiRNA target sequence
aatgatacagcactaatcgttaa

SEQ ID NO: 246017 - DNA, 23 bp, Artificial sequence
  SiRNA target sequence
atgatacagcactaatcgttaag

SEQ ID NO: 246018 - DNA, 23 bp, Artificial sequence
  SiRNA target sequence
tgatacagcactaatcgttaagg

SEQ ID NO: 246019 - DNA, 23 bp, Artificial sequence
  SiRNA target sequence
gatacagcactaatcgttaagga

SEQ ID NO: 246020 - DNA, 23 bp, Artificial sequence
  SiRNA target sequence
atacagcactaatcgttaaggaa

SEQ ID NO: 246021 - DNA, 23 bp, Artificial sequence
  SiRNA target sequence
tacagcactaatcgttaaggaag

SEQ ID NO: 246022 - DNA, 23 bp, Artificial sequence
  SiRNA target sequence
acagcactaatcgttaaggaagt

SEQ ID NO: 246023 - DNA, 23 bp, Artificial sequence
  SiRNA target sequence
cagcactaatcgttaaggaagtt

SEQ ID NO: 246024 - DNA, 23 bp, Artificial sequence
  SiRNA target sequence
agcactaatcgttaaggaagttg

SEQ ID NO: 246025 - DNA, 23 bp, Artificial sequence
  SiRNA target sequence
gcactaatcgttaaggaagttgt

SEQ ID NO: 246026 - DNA, 23 bp, Artificial sequence
  SiRNA target sequence
cactaatcgttaaggaagttgtt

SEQ ID NO: 246027 - DNA, 23 bp, Artificial sequence
  SiRNA target sequence
actaatcgttaaggaagttgtta

SEQ ID NO: 246028 - DNA, 23 bp, Artificial sequence
  SiRNA target sequence
ctaatcgttaaggaagttgttac

SEQ ID NO: 246029 - DNA, 23 bp, Artificial sequence
  SiRNA target sequence
taatcgttaaggaagttgttact

SEQ ID NO: 246030 - DNA, 23 bp, Artificial sequence
  SiRNA target sequence
aatcgttaaggaagttgttacta

SEQ ID NO: 246031 - DNA, 23 bp, Artificial sequence
  SiRNA target sequence
atcgttaaggaagttgttactaa

SEQ ID NO: 246032 - DNA, 23 bp, Artificial sequence
  SiRNA target sequence
tcgttaaggaagttgttactaaa

SEQ ID NO: 246033 - DNA, 23 bp, Artificial sequence
  SiRNA target sequence
cgttaaggaagttgttactaaat

SEQ ID NO: 246034 - DNA, 23 bp, Artificial sequence
  SiRNA target sequence
gttaaggaagttgttactaaata

SEQ ID NO: 246035 - DNA, 23 bp, Artificial sequence
  SiRNA target sequence
ttaaggaagttgttactaaatat

SEQ ID NO: 246036 - DNA, 23 bp, Artificial sequence
  SiRNA target sequence
taaggaagttgttactaaatatt

SEQ ID NO: 246037 - DNA, 23 bp, Artificial sequence
  SiRNA target sequence
aaggaagttgttactaaatattt

SEQ ID NO: 246038 - DNA, 23 bp, Artificial sequence
  SiRNA target sequence
aggaagttgttactaaatatttt

SEQ ID NO: 246039 - DNA, 23 bp, Artificial sequence
  SiRNA target sequence
ggaagttgttactaaatattttt

SEQ ID NO: 246040 - DNA, 23 bp, Artificial sequence
  SiRNA target sequence
gaagttgttactaaatatttttg

SEQ ID NO: 246041 - DNA, 23 bp, Artificial sequence
  SiRNA target sequence
aagttgttactaaatatttttga

SEQ ID NO: 246042 - DNA, 23 bp, Artificial sequence
  SiRNA target sequence
agttgttactaaatatttttgag

SEQ ID NO: 246043 - DNA, 23 bp, Artificial sequence
  SiRNA target sequence
gttgttactaaatatttttgaga

SEQ ID NO: 246044 - DNA, 23 bp, Artificial sequence
  SiRNA target sequence
ttgttactaaatatttttgagaa

SEQ ID NO: 246045 - DNA, 23 bp, Artificial sequence
  SiRNA target sequence
tgttactaaatatttttgagaat

SEQ ID NO: 246046 - DNA, 23 bp, Artificial sequence
  SiRNA target sequence
gttactaaatatttttgagaata

SEQ ID NO: 246047 - DNA, 23 bp, Artificial sequence
  SiRNA target sequence
ttactaaatatttttgagaataa

SEQ ID NO: 246048 - DNA, 23 bp, Artificial sequence
  SiRNA target sequence
tactaaatatttttgagaataat

SEQ ID NO: 246049 - DNA, 23 bp, Artificial sequence
  SiRNA target sequence
actaaatatttttgagaataatc

SEQ ID NO: 246050 - DNA, 23 bp, Artificial sequence
  SiRNA target sequence
ctaaatatttttgagaataatct

SEQ ID NO: 246051 - DNA, 23 bp, Artificial sequence
  SiRNA target sequence
taaatatttttgagaataatctt

SEQ ID NO: 246052 - DNA, 23 bp, Artificial sequence
  SiRNA target sequence
aaatatttttgagaataatcttt

SEQ ID NO: 246053 - DNA, 23 bp, Artificial sequence
  SiRNA target sequence
aatatttttgagaataatctttc

SEQ ID NO: 246054 - DNA, 23 bp, Artificial sequence
  SiRNA target sequence
atatttttgagaataatctttcg

SEQ ID NO: 246055 - DNA, 23 bp, Artificial sequence
  SiRNA target sequence
tatttttgagaataatctttcgg

SEQ ID NO: 246056 - DNA, 23 bp, Artificial sequence
  SiRNA target sequence
atttttgagaataatctttcgga

SEQ ID NO: 246057 - DNA, 23 bp, Artificial sequence
  SiRNA target sequence
tttttgagaataatctttcggag

SEQ ID NO: 246058 - DNA, 23 bp, Artificial sequence
  SiRNA target sequence
ttttgagaataatctttcggagg

SEQ ID NO: 246059 - DNA, 23 bp, Artificial sequence
  SiRNA target sequence
tttgagaataatctttcggaggc

SEQ ID NO: 246060 - DNA, 23 bp, Artificial sequence
  SiRNA target sequence
ttgagaataatctttcggaggca

SEQ ID NO: 246061 - DNA, 23 bp, Artificial sequence
  SiRNA target sequence
tgagaataatctttcggaggcat

SEQ ID NO: 246062 - DNA, 23 bp, Artificial sequence
  SiRNA target sequence
gagaataatctttcggaggcata

SEQ ID NO: 246063 - DNA, 23 bp, Artificial sequence
  SiRNA target sequence
agaataatctttcggaggcatat

SEQ ID NO: 246064 - DNA, 23 bp, Artificial sequence
  SiRNA target sequence
gaataatctttcggaggcatatt

SEQ ID NO: 246065 - DNA, 23 bp, Artificial sequence
  SiRNA target sequence
aataatctttcggaggcatatta

SEQ ID NO: 246066 - DNA, 23 bp, Artificial sequence
  SiRNA target sequence
ataatctttcggaggcatattat

SEQ ID NO: 246067 - DNA, 23 bp, Artificial sequence
  SiRNA target sequence
taatctttcggaggcatattatt

SEQ ID NO: 246068 - DNA, 23 bp, Artificial sequence
  SiRNA target sequence
aatctttcggaggcatattatta

SEQ ID NO: 246069 - DNA, 23 bp, Artificial sequence
  SiRNA target sequence
atctttcggaggcatattattaa

SEQ ID NO: 246070 - DNA, 23 bp, Artificial sequence
  SiRNA target sequence
tctttcggaggcatattattaat

SEQ ID NO: 246071 - DNA, 23 bp, Artificial sequence
  SiRNA target sequence
ctttcggaggcatattattaatt

SEQ ID NO: 246072 - DNA, 23 bp, Artificial sequence
  SiRNA target sequence
tttcggaggcatattattaattc

SEQ ID NO: 246073 - DNA, 23 bp, Artificial sequence
  SiRNA target sequence
ttcggaggcatattattaattct

SEQ ID NO: 246074 - DNA, 23 bp, Artificial sequence
  SiRNA target sequence
tcggaggcatattattaattctg

SEQ ID NO: 246075 - DNA, 23 bp, Artificial sequence
  SiRNA target sequence
cggaggcatattattaattctgc

SEQ ID NO: 246076 - DNA, 23 bp, Artificial sequence
  SiRNA target sequence
ggaggcatattattaattctgct

SEQ ID NO: 246077 - DNA, 23 bp, Artificial sequence
  SiRNA target sequence
gaggcatattattaattctgctt

SEQ ID NO: 246078 - DNA, 23 bp, Artificial sequence
  SiRNA target sequence
aggcatattattaattctgcttc

SEQ ID NO: 246079 - DNA, 23 bp, Artificial sequence
  SiRNA target sequence
ggcatattattaattctgcttcc

SEQ ID NO: 246080 - DNA, 23 bp, Artificial sequence
  SiRNA target sequence
gcatattattaattctgcttccc

SEQ ID NO: 246081 - DNA, 23 bp, Artificial sequence
  SiRNA target sequence
catattattaattctgcttcccg

SEQ ID NO: 246082 - DNA, 23 bp, Artificial sequence
  SiRNA target sequence
atattattaattctgcttcccgt

SEQ ID NO: 246083 - DNA, 23 bp, Artificial sequence
  SiRNA target sequence
tattattaattctgcttcccgta

SEQ ID NO: 246084 - DNA, 23 bp, Artificial sequence
  SiRNA target sequence
attattaattctgcttcccgtag

SEQ ID NO: 246085 - DNA, 23 bp, Artificial sequence
  SiRNA target sequence
ttattaattctgcttcccgtaga

SEQ ID NO: 246086 - DNA, 23 bp, Artificial sequence
  SiRNA target sequence
tattaattctgcttcccgtagat

SEQ ID NO: 246087 - DNA, 23 bp, Artificial sequence
  SiRNA target sequence
attaattctgcttcccgtagata

SEQ ID NO: 246088 - DNA, 23 bp, Artificial sequence
  SiRNA target sequence
ttaattctgcttcccgtagataa

SEQ ID NO: 246089 - DNA, 23 bp, Artificial sequence
  SiRNA target sequence
taattctgcttcccgtagataaa

SEQ ID NO: 246090 - DNA, 23 bp, Artificial sequence
  SiRNA target sequence
aattctgcttcccgtagataaag

SEQ ID NO: 246091 - DNA, 23 bp, Artificial sequence
  SiRNA target sequence
attctgcttcccgtagataaaga

SEQ ID NO: 246092 - DNA, 23 bp, Artificial sequence
  SiRNA target sequence
ttctgcttcccgtagataaagaa

SEQ ID NO: 246093 - DNA, 23 bp, Artificial sequence
  SiRNA target sequence
tctgcttcccgtagataaagaat

SEQ ID NO: 246094 - DNA, 23 bp, Artificial sequence
  SiRNA target sequence
ctgcttcccgtagataaagaatt

SEQ ID NO: 246095 - DNA, 23 bp, Artificial sequence
  SiRNA target sequence
tgcttcccgtagataaagaattt

SEQ ID NO: 246096 - DNA, 23 bp, Artificial sequence
  SiRNA target sequence
gcttcccgtagataaagaatttt

SEQ ID NO: 246097 - DNA, 23 bp, Artificial sequence
  SiRNA target sequence
cttcccgtagataaagaattttt

SEQ ID NO: 246098 - DNA, 23 bp, Artificial sequence
  SiRNA target sequence
ttcccgtagataaagaatttttt

SEQ ID NO: 246099 - DNA, 23 bp, Artificial sequence
  SiRNA target sequence
tcccgtagataaagaatttttta

SEQ ID NO: 246100 - DNA, 23 bp, Artificial sequence
  SiRNA target sequence
cccgtagataaagaattttttaa

SEQ ID NO: 246101 - DNA, 23 bp, Artificial sequence
  SiRNA target sequence
ccgtagataaagaattttttaag

SEQ ID NO: 246102 - DNA, 23 bp, Artificial sequence
  SiRNA target sequence
cgtagataaagaattttttaagg

SEQ ID NO: 246103 - DNA, 23 bp, Artificial sequence
  SiRNA target sequence
gtagataaagaattttttaagga

SEQ ID NO: 246104 - DNA, 23 bp, Artificial sequence
  SiRNA target sequence
tagataaagaattttttaaggac

SEQ ID NO: 246105 - DNA, 23 bp, Artificial sequence
  SiRNA target sequence
agataaagaattttttaaggaca

SEQ ID NO: 246106 - DNA, 23 bp, Artificial sequence
  SiRNA target sequence
gataaagaattttttaaggacat

SEQ ID NO: 246107 - DNA, 23 bp, Artificial sequence
  SiRNA target sequence
ataaagaattttttaaggacata

SEQ ID NO: 246108 - DNA, 23 bp, Artificial sequence
  SiRNA target sequence
taaagaattttttaaggacatat

SEQ ID NO: 246109 - DNA, 23 bp, Artificial sequence
  SiRNA target sequence
aaagaattttttaaggacatatc

SEQ ID NO: 246110 - DNA, 23 bp, Artificial sequence
  SiRNA target sequence
aagaattttttaaggacatatca

SEQ ID NO: 246111 - DNA, 23 bp, Artificial sequence
  SiRNA target sequence
agaattttttaaggacatatcaa

SEQ ID NO: 246112 - DNA, 23 bp, Artificial sequence
  SiRNA target sequence
gaattttttaaggacatatcaat

SEQ ID NO: 246113 - DNA, 23 bp, Artificial sequence
  SiRNA target sequence
aattttttaaggacatatcaata

SEQ ID NO: 246114 - DNA, 23 bp, Artificial sequence
  SiRNA target sequence
attttttaaggacatatcaataa

SEQ ID NO: 246115 - DNA, 23 bp, Artificial sequence
  SiRNA target sequence
ttttttaaggacatatcaataaa

SEQ ID NO: 246116 - DNA, 23 bp, Artificial sequence
  SiRNA target sequence
tttttaaggacatatcaataaat

SEQ ID NO: 246117 - DNA, 23 bp, Artificial sequence
  SiRNA target sequence
ttttaaggacatatcaataaatc

SEQ ID NO: 246118 - DNA, 23 bp, Artificial sequence
  SiRNA target sequence
tttaaggacatatcaataaatcc

SEQ ID NO: 246119 - DNA, 23 bp, Artificial sequence
  SiRNA target sequence
ttaaggacatatcaataaatcct

SEQ ID NO: 246120 - DNA, 23 bp, Artificial sequence
  SiRNA target sequence
taaggacatatcaataaatcctg

SEQ ID NO: 246121 - DNA, 23 bp, Artificial sequence
  SiRNA target sequence
aaggacatatcaataaatcctgc

SEQ ID NO: 246122 - DNA, 23 bp, Artificial sequence
  SiRNA target sequence
aggacatatcaataaatcctgca

SEQ ID NO: 246123 - DNA, 23 bp, Artificial sequence
  SiRNA target sequence
ggacatatcaataaatcctgcat

SEQ ID NO: 246124 - DNA, 23 bp, Artificial sequence
  SiRNA target sequence
gacatatcaataaatcctgcatt

SEQ ID NO: 246125 - DNA, 23 bp, Artificial sequence
  SiRNA target sequence
acatatcaataaatcctgcatta

SEQ ID NO: 246126 - DNA, 23 bp, Artificial sequence
  SiRNA target sequence
catatcaataaatcctgcattaa

SEQ ID NO: 246127 - DNA, 23 bp, Artificial sequence
  SiRNA target sequence
atatcaataaatcctgcattaat

SEQ ID NO: 246128 - DNA, 23 bp, Artificial sequence
  SiRNA target sequence
tatcaataaatcctgcattaata

SEQ ID NO: 246129 - DNA, 23 bp, Artificial sequence
  SiRNA target sequence
atcaataaatcctgcattaatag

SEQ ID NO: 246130 - DNA, 23 bp, Artificial sequence
  SiRNA target sequence
tcaataaatcctgcattaatagc

SEQ ID NO: 246131 - DNA, 23 bp, Artificial sequence
  SiRNA target sequence
caataaatcctgcattaatagca

SEQ ID NO: 246132 - DNA, 23 bp, Artificial sequence
  SiRNA target sequence
aataaatcctgcattaatagcat

SEQ ID NO: 246133 - DNA, 23 bp, Artificial sequence
  SiRNA target sequence
ataaatcctgcattaatagcata

SEQ ID NO: 246134 - DNA, 23 bp, Artificial sequence
  SiRNA target sequence
taaatcctgcattaatagcatag

SEQ ID NO: 246135 - DNA, 23 bp, Artificial sequence
  SiRNA target sequence
aaatcctgcattaatagcataga

SEQ ID NO: 246136 - DNA, 23 bp, Artificial sequence
  SiRNA target sequence
aatcctgcattaatagcatagat

SEQ ID NO: 246137 - DNA, 23 bp, Artificial sequence
  SiRNA target sequence
atcctgcattaatagcatagatt

SEQ ID NO: 246138 - DNA, 23 bp, Artificial sequence
  SiRNA target sequence
tcctgcattaatagcatagatta

SEQ ID NO: 246139 - DNA, 23 bp, Artificial sequence
  SiRNA target sequence
cctgcattaatagcatagattaa

SEQ ID NO: 246140 - DNA, 23 bp, Artificial sequence
  SiRNA target sequence
ctgcattaatagcatagattaat

SEQ ID NO: 246141 - DNA, 23 bp, Artificial sequence
  SiRNA target sequence
tgcattaatagcatagattaatg

SEQ ID NO: 246142 - DNA, 23 bp, Artificial sequence
  SiRNA target sequence
gcattaatagcatagattaatgc

SEQ ID NO: 246143 - DNA, 23 bp, Artificial sequence
  SiRNA target sequence
cattaatagcatagattaatgcc

SEQ ID NO: 246144 - DNA, 23 bp, Artificial sequence
  SiRNA target sequence
attaatagcatagattaatgccg

SEQ ID NO: 246145 - DNA, 23 bp, Artificial sequence
  SiRNA target sequence
ttaatagcatagattaatgccgc

SEQ ID NO: 246146 - DNA, 23 bp, Artificial sequence
  SiRNA target sequence
taatagcatagattaatgccgct

SEQ ID NO: 246147 - DNA, 23 bp, Artificial sequence
  SiRNA target sequence
aatagcatagattaatgccgctg

SEQ ID NO: 246148 - DNA, 23 bp, Artificial sequence
  SiRNA target sequence
atagcatagattaatgccgctgc

SEQ ID NO: 246149 - DNA, 23 bp, Artificial sequence
  SiRNA target sequence
tagcatagattaatgccgctgca

SEQ ID NO: 246150 - DNA, 23 bp, Artificial sequence
  SiRNA target sequence
agcatagattaatgccgctgcac

SEQ ID NO: 246151 - DNA, 23 bp, Artificial sequence
  SiRNA target sequence
gcatagattaatgccgctgcaca

SEQ ID NO: 246152 - DNA, 23 bp, Artificial sequence
  SiRNA target sequence
catagattaatgccgctgcacac

SEQ ID NO: 246153 - DNA, 23 bp, Artificial sequence
  SiRNA target sequence
atagattaatgccgctgcacaca

SEQ ID NO: 246154 - DNA, 23 bp, Artificial sequence
  SiRNA target sequence
tagattaatgccgctgcacacat

SEQ ID NO: 246155 - DNA, 23 bp, Artificial sequence
  SiRNA target sequence
agattaatgccgctgcacacata

SEQ ID NO: 246156 - DNA, 23 bp, Artificial sequence
  SiRNA target sequence
gattaatgccgctgcacacatat

SEQ ID NO: 246157 - DNA, 23 bp, Artificial sequence
  SiRNA target sequence
attaatgccgctgcacacatatt

SEQ ID NO: 246158 - DNA, 23 bp, Artificial sequence
  SiRNA target sequence
ttaatgccgctgcacacatattt

SEQ ID NO: 246159 - DNA, 23 bp, Artificial sequence
  SiRNA target sequence
taatgccgctgcacacatatttc

SEQ ID NO: 246160 - DNA, 23 bp, Artificial sequence
  SiRNA target sequence
aatgccgctgcacacatatttct

SEQ ID NO: 246161 - DNA, 23 bp, Artificial sequence
  SiRNA target sequence
atgccgctgcacacatatttctt

SEQ ID NO: 246162 - DNA, 23 bp, Artificial sequence
  SiRNA target sequence
tgccgctgcacacatatttctta

SEQ ID NO: 246163 - DNA, 23 bp, Artificial sequence
  SiRNA target sequence
gccgctgcacacatatttcttaa

SEQ ID NO: 246164 - DNA, 23 bp, Artificial sequence
  SiRNA target sequence
ccgctgcacacatatttcttaaa

SEQ ID NO: 246165 - DNA, 23 bp, Artificial sequence
  SiRNA target sequence
cgctgcacacatatttcttaaaa

SEQ ID NO: 246166 - DNA, 23 bp, Artificial sequence
  SiRNA target sequence
gctgcacacatatttcttaaaaa

SEQ ID NO: 246167 - DNA, 23 bp, Artificial sequence
  SiRNA target sequence
ctgcacacatatttcttaaaaat

SEQ ID NO: 246168 - DNA, 23 bp, Artificial sequence
  SiRNA target sequence
tgcacacatatttcttaaaaatt

SEQ ID NO: 246169 - DNA, 23 bp, Artificial sequence
  SiRNA target sequence
gcacacatatttcttaaaaattt

SEQ ID NO: 246170 - DNA, 23 bp, Artificial sequence
  SiRNA target sequence
cacacatatttcttaaaaatttg

SEQ ID NO: 246171 - DNA, 23 bp, Artificial sequence
  SiRNA target sequence
acacatatttcttaaaaatttgg

SEQ ID NO: 246172 - DNA, 23 bp, Artificial sequence
  SiRNA target sequence
cacatatttcttaaaaatttgga

SEQ ID NO: 246173 - DNA, 23 bp, Artificial sequence
  SiRNA target sequence
acatatttcttaaaaatttggat

SEQ ID NO: 246174 - DNA, 23 bp, Artificial sequence
  SiRNA target sequence
catatttcttaaaaatttggatt

SEQ ID NO: 246175 - DNA, 23 bp, Artificial sequence
  SiRNA target sequence
atatttcttaaaaatttggattg

SEQ ID NO: 246176 - DNA, 23 bp, Artificial sequence
  SiRNA target sequence
tatttcttaaaaatttggattgt

SEQ ID NO: 246177 - DNA, 23 bp, Artificial sequence
  SiRNA target sequence
atttcttaaaaatttggattgta

SEQ ID NO: 246178 - DNA, 23 bp, Artificial sequence
  SiRNA target sequence
tttcttaaaaatttggattgtaa

SEQ ID NO: 246179 - DNA, 23 bp, Artificial sequence
  SiRNA target sequence
ttcttaaaaatttggattgtaaa

SEQ ID NO: 246180 - DNA, 23 bp, Artificial sequence
  SiRNA target sequence
tcttaaaaatttggattgtaaaa

SEQ ID NO: 246181 - DNA, 23 bp, Artificial sequence
  SiRNA target sequence
cttaaaaatttggattgtaaaag

SEQ ID NO: 246182 - DNA, 23 bp, Artificial sequence
  SiRNA target sequence
ttaaaaatttggattgtaaaaga

SEQ ID NO: 246183 - DNA, 23 bp, Artificial sequence
  SiRNA target sequence
taaaaatttggattgtaaaagat

SEQ ID NO: 246184 - DNA, 23 bp, Artificial sequence
  SiRNA target sequence
aaaaatttggattgtaaaagatc

SEQ ID NO: 246185 - DNA, 23 bp, Artificial sequence
  SiRNA target sequence
aaaatttggattgtaaaagatca

SEQ ID NO: 246186 - DNA, 23 bp, Artificial sequence
  SiRNA target sequence
aaatttggattgtaaaagatcaa

SEQ ID NO: 246187 - DNA, 23 bp, Artificial sequence
  SiRNA target sequence
aatttggattgtaaaagatcaaa

SEQ ID NO: 246188 - DNA, 23 bp, Artificial sequence
  SiRNA target sequence
atttggattgtaaaagatcaaac

SEQ ID NO: 246189 - DNA, 23 bp, Artificial sequence
  SiRNA target sequence
tttggattgtaaaagatcaaacg

SEQ ID NO: 246190 - DNA, 23 bp, Artificial sequence
  SiRNA target sequence
ttggattgtaaaagatcaaacga

SEQ ID NO: 246191 - DNA, 23 bp, Artificial sequence
  SiRNA target sequence
tggattgtaaaagatcaaacgag

SEQ ID NO: 246192 - DNA, 23 bp, Artificial sequence
  SiRNA target sequence
ggattgtaaaagatcaaacgagg

SEQ ID NO: 246193 - DNA, 23 bp, Artificial sequence
  SiRNA target sequence
gattgtaaaagatcaaacgagga

SEQ ID NO: 246194 - DNA, 23 bp, Artificial sequence
  SiRNA target sequence
attgtaaaagatcaaacgaggat

SEQ ID NO: 246195 - DNA, 23 bp, Artificial sequence
  SiRNA target sequence
ttgtaaaagatcaaacgaggatg

SEQ ID NO: 246196 - DNA, 23 bp, Artificial sequence
  SiRNA target sequence
tgtaaaagatcaaacgaggatgt

SEQ ID NO: 246197 - DNA, 23 bp, Artificial sequence
  SiRNA target sequence
gtaaaagatcaaacgaggatgtc

SEQ ID NO: 246198 - DNA, 23 bp, Artificial sequence
  SiRNA target sequence
taaaagatcaaacgaggatgtcg

SEQ ID NO: 246199 - DNA, 23 bp, Artificial sequence
  SiRNA target sequence
aaaagatcaaacgaggatgtcgt

SEQ ID NO: 246200 - DNA, 23 bp, Artificial sequence
  SiRNA target sequence
aaagatcaaacgaggatgtcgtt

SEQ ID NO: 246201 - DNA, 23 bp, Artificial sequence
  SiRNA target sequence
aagatcaaacgaggatgtcgttt

SEQ ID NO: 246202 - DNA, 23 bp, Artificial sequence
  SiRNA target sequence
agatcaaacgaggatgtcgtttt

SEQ ID NO: 246203 - DNA, 23 bp, Artificial sequence
  SiRNA target sequence
gatcaaacgaggatgtcgttttg

SEQ ID NO: 246204 - DNA, 23 bp, Artificial sequence
  SiRNA target sequence
atcaaacgaggatgtcgttttgt

SEQ ID NO: 246205 - DNA, 23 bp, Artificial sequence
  SiRNA target sequence
tcaaacgaggatgtcgttttgtc

SEQ ID NO: 246206 - DNA, 23 bp, Artificial sequence
  SiRNA target sequence
caaacgaggatgtcgttttgtct

SEQ ID NO: 246207 - DNA, 23 bp, Artificial sequence
  SiRNA target sequence
aaacgaggatgtcgttttgtctt

SEQ ID NO: 246208 - DNA, 23 bp, Artificial sequence
  SiRNA target sequence
aacgaggatgtcgttttgtcttc

SEQ ID NO: 246209 - DNA, 23 bp, Artificial sequence
  SiRNA target sequence
acgaggatgtcgttttgtcttct

SEQ ID NO: 246210 - DNA, 23 bp, Artificial sequence
  SiRNA target sequence
cgaggatgtcgttttgtcttctt

SEQ ID NO: 246211 - DNA, 23 bp, Artificial sequence
  SiRNA target sequence
gaggatgtcgttttgtcttcttc

SEQ ID NO: 246212 - DNA, 23 bp, Artificial sequence
  SiRNA target sequence
aggatgtcgttttgtcttcttct

SEQ ID NO: 246213 - DNA, 23 bp, Artificial sequence
  SiRNA target sequence
ggatgtcgttttgtcttcttctt

SEQ ID NO: 246214 - DNA, 23 bp, Artificial sequence
  SiRNA target sequence
gatgtcgttttgtcttcttcttt

SEQ ID NO: 246215 - DNA, 23 bp, Artificial sequence
  SiRNA target sequence
atgtcgttttgtcttcttcttta

SEQ ID NO: 246216 - DNA, 23 bp, Artificial sequence
  SiRNA target sequence
tgtcgttttgtcttcttctttat

SEQ ID NO: 246217 - DNA, 23 bp, Artificial sequence
  SiRNA target sequence
gtcgttttgtcttcttctttatt

SEQ ID NO: 246218 - DNA, 23 bp, Artificial sequence
  SiRNA target sequence
tcgttttgtcttcttctttattt

SEQ ID NO: 246219 - DNA, 23 bp, Artificial sequence
  SiRNA target sequence
cgttttgtcttcttctttattta

SEQ ID NO: 246220 - DNA, 23 bp, Artificial sequence
  SiRNA target sequence
gttttgtcttcttctttatttat

SEQ ID NO: 246221 - DNA, 23 bp, Artificial sequence
  SiRNA target sequence
ttttgtcttcttctttatttata

SEQ ID NO: 246222 - DNA, 23 bp, Artificial sequence
  SiRNA target sequence
tttgtcttcttctttatttatag

SEQ ID NO: 246223 - DNA, 23 bp, Artificial sequence
  SiRNA target sequence
ttgtcttcttctttatttatagt

SEQ ID NO: 246224 - DNA, 23 bp, Artificial sequence
  SiRNA target sequence
tgtcttcttctttatttatagtt

SEQ ID NO: 246225 - DNA, 23 bp, Artificial sequence
  SiRNA target sequence
gtcttcttctttatttatagttt

SEQ ID NO: 246226 - DNA, 23 bp, Artificial sequence
  SiRNA target sequence
tcttcttctttatttatagtttc

SEQ ID NO: 246227 - DNA, 23 bp, Artificial sequence
  SiRNA target sequence
cttcttctttatttatagtttcc

SEQ ID NO: 246228 - DNA, 23 bp, Artificial sequence
  SiRNA target sequence
ttcttctttatttatagtttcct

SEQ ID NO: 246229 - DNA, 23 bp, Artificial sequence
  SiRNA target sequence
tcttctttatttatagtttcctt

SEQ ID NO: 246230 - DNA, 23 bp, Artificial sequence
  SiRNA target sequence
cttctttatttatagtttccttt

SEQ ID NO: 246231 - DNA, 23 bp, Artificial sequence
  SiRNA target sequence
ttctttatttatagtttccttta

SEQ ID NO: 246232 - DNA, 23 bp, Artificial sequence
  SiRNA target sequence
tctttatttatagtttcctttat

SEQ ID NO: 246233 - DNA, 23 bp, Artificial sequence
  SiRNA target sequence
ctttatttatagtttcctttatt

SEQ ID NO: 246234 - DNA, 23 bp, Artificial sequence
  SiRNA target sequence
tttatttatagtttcctttattt

SEQ ID NO: 246235 - DNA, 23 bp, Artificial sequence
  SiRNA target sequence
ttatttatagtttcctttatttc

SEQ ID NO: 246236 - DNA, 23 bp, Artificial sequence
  SiRNA target sequence
tatttatagtttcctttatttct

SEQ ID NO: 246237 - DNA, 23 bp, Artificial sequence
  SiRNA target sequence
atttatagtttcctttatttctt

SEQ ID NO: 246238 - DNA, 23 bp, Artificial sequence
  SiRNA target sequence
tttatagtttcctttatttcttt

SEQ ID NO: 246239 - DNA, 23 bp, Artificial sequence
  SiRNA target sequence
ttatagtttcctttatttcttta

SEQ ID NO: 246240 - DNA, 23 bp, Artificial sequence
  SiRNA target sequence
tatagtttcctttatttctttag

SEQ ID NO: 246241 - DNA, 23 bp, Artificial sequence
  SiRNA target sequence
atagtttcctttatttctttagt

SEQ ID NO: 246242 - DNA, 23 bp, Artificial sequence
  SiRNA target sequence
tagtttcctttatttctttagtt

SEQ ID NO: 246243 - DNA, 23 bp, Artificial sequence
  SiRNA target sequence
agtttcctttatttctttagttt

SEQ ID NO: 246244 - DNA, 23 bp, Artificial sequence
  SiRNA target sequence
gtttcctttatttctttagtttt

SEQ ID NO: 246245 - DNA, 23 bp, Artificial sequence
  SiRNA target sequence
tttcctttatttctttagtttta

SEQ ID NO: 246246 - DNA, 23 bp, Artificial sequence
  SiRNA target sequence
ttcctttatttctttagttttaa

SEQ ID NO: 246247 - DNA, 23 bp, Artificial sequence
  SiRNA target sequence
tcctttatttctttagttttaag

SEQ ID NO: 246248 - DNA, 23 bp, Artificial sequence
  SiRNA target sequence
cctttatttctttagttttaaga

SEQ ID NO: 246249 - DNA, 23 bp, Artificial sequence
  SiRNA target sequence
ctttatttctttagttttaagag

SEQ ID NO: 246250 - DNA, 23 bp, Artificial sequence
  SiRNA target sequence
tttatttctttagttttaagagg

SEQ ID NO: 246251 - DNA, 23 bp, Artificial sequence
  SiRNA target sequence
ttatttctttagttttaagagga

SEQ ID NO: 246252 - DNA, 23 bp, Artificial sequence
  SiRNA target sequence
tatttctttagttttaagaggaa

SEQ ID NO: 246253 - DNA, 23 bp, Artificial sequence
  SiRNA target sequence
atttctttagttttaagaggaat

SEQ ID NO: 246254 - DNA, 23 bp, Artificial sequence
  SiRNA target sequence
tttctttagttttaagaggaata

SEQ ID NO: 246255 - DNA, 23 bp, Artificial sequence
  SiRNA target sequence
ttctttagttttaagaggaatat

SEQ ID NO: 246256 - DNA, 23 bp, Artificial sequence
  SiRNA target sequence
tctttagttttaagaggaatata

SEQ ID NO: 246257 - DNA, 23 bp, Artificial sequence
  SiRNA target sequence
ctttagttttaagaggaatataa

SEQ ID NO: 246258 - DNA, 23 bp, Artificial sequence
  SiRNA target sequence
tttagttttaagaggaatataac

SEQ ID NO: 246259 - DNA, 23 bp, Artificial sequence
  SiRNA target sequence
ttagttttaagaggaatataact

SEQ ID NO: 246260 - DNA, 23 bp, Artificial sequence
  SiRNA target sequence
tagttttaagaggaatataactt

SEQ ID NO: 246261 - DNA, 23 bp, Artificial sequence
  SiRNA target sequence
agttttaagaggaatataacttt

SEQ ID NO: 246262 - DNA, 23 bp, Artificial sequence
  SiRNA target sequence
gttttaagaggaatataactttt

SEQ ID NO: 246263 - DNA, 23 bp, Artificial sequence
  SiRNA target sequence
ttttaagaggaatataacttttt

SEQ ID NO: 246264 - DNA, 23 bp, Artificial sequence
  SiRNA target sequence
tttaagaggaatataacttttta

SEQ ID NO: 246265 - DNA, 23 bp, Artificial sequence
  SiRNA target sequence
ttaagaggaatataactttttaa

SEQ ID NO: 246266 - DNA, 23 bp, Artificial sequence
  SiRNA target sequence
taagaggaatataactttttaaa

SEQ ID NO: 246267 - DNA, 23 bp, Artificial sequence
  SiRNA target sequence
aagaggaatataactttttaaaa

SEQ ID NO: 246268 - DNA, 23 bp, Artificial sequence
  SiRNA target sequence
agaggaatataactttttaaaaa

SEQ ID NO: 246269 - DNA, 23 bp, Artificial sequence
  SiRNA target sequence
gaggaatataactttttaaaaag

SEQ ID NO: 246270 - DNA, 23 bp, Artificial sequence
  SiRNA target sequence
aggaatataactttttaaaaagt

SEQ ID NO: 246271 - DNA, 23 bp, Artificial sequence
  SiRNA target sequence
ggaatataactttttaaaaagta

SEQ ID NO: 246272 - DNA, 23 bp, Artificial sequence
  SiRNA target sequence
gaatataactttttaaaaagtaa

SEQ ID NO: 246273 - DNA, 23 bp, Artificial sequence
  SiRNA target sequence
aatataactttttaaaaagtaaa

SEQ ID NO: 246274 - DNA, 23 bp, Artificial sequence
  SiRNA target sequence
atataactttttaaaaagtaaat

SEQ ID NO: 246275 - DNA, 23 bp, Artificial sequence
  SiRNA target sequence
tataactttttaaaaagtaaatt

SEQ ID NO: 246276 - DNA, 23 bp, Artificial sequence
  SiRNA target sequence
ataactttttaaaaagtaaatta

SEQ ID NO: 246277 - DNA, 23 bp, Artificial sequence
  SiRNA target sequence
taactttttaaaaagtaaattaa

SEQ ID NO: 246278 - DNA, 23 bp, Artificial sequence
  SiRNA target sequence
aactttttaaaaagtaaattaat

SEQ ID NO: 246279 - DNA, 23 bp, Artificial sequence
  SiRNA target sequence
actttttaaaaagtaaattaatg

SEQ ID NO: 246280 - DNA, 23 bp, Artificial sequence
  SiRNA target sequence
ctttttaaaaagtaaattaatgt

SEQ ID NO: 246281 - DNA, 23 bp, Artificial sequence
  SiRNA target sequence
tttttaaaaagtaaattaatgta

SEQ ID NO: 246282 - DNA, 23 bp, Artificial sequence
  SiRNA target sequence
ttttaaaaagtaaattaatgtag

SEQ ID NO: 246283 - DNA, 23 bp, Artificial sequence
  SiRNA target sequence
tttaaaaagtaaattaatgtagt

SEQ ID NO: 246284 - DNA, 23 bp, Artificial sequence
  SiRNA target sequence
ttaaaaagtaaattaatgtagtt

SEQ ID NO: 246285 - DNA, 23 bp, Artificial sequence
  SiRNA target sequence
taaaaagtaaattaatgtagtta

SEQ ID NO: 246286 - DNA, 23 bp, Artificial sequence
  SiRNA target sequence
aaaaagtaaattaatgtagttac

SEQ ID NO: 246287 - DNA, 23 bp, Artificial sequence
  SiRNA target sequence
aaaagtaaattaatgtagttaca

SEQ ID NO: 246288 - DNA, 23 bp, Artificial sequence
  SiRNA target sequence
aaagtaaattaatgtagttacaa

SEQ ID NO: 246289 - DNA, 23 bp, Artificial sequence
  SiRNA target sequence
aagtaaattaatgtagttacaaa

SEQ ID NO: 246290 - DNA, 23 bp, Artificial sequence
  SiRNA target sequence
agtaaattaatgtagttacaaaa

SEQ ID NO: 246291 - DNA, 23 bp, Artificial sequence
  SiRNA target sequence
gtaaattaatgtagttacaaaag

SEQ ID NO: 246292 - DNA, 23 bp, Artificial sequence
  SiRNA target sequence
taaattaatgtagttacaaaaga

SEQ ID NO: 246293 - DNA, 23 bp, Artificial sequence
  SiRNA target sequence
aaattaatgtagttacaaaagac

SEQ ID NO: 246294 - DNA, 23 bp, Artificial sequence
  SiRNA target sequence
aattaatgtagttacaaaagaca

SEQ ID NO: 246295 - DNA, 23 bp, Artificial sequence
  SiRNA target sequence
attaatgtagttacaaaagacaa

SEQ ID NO: 246296 - DNA, 23 bp, Artificial sequence
  SiRNA target sequence
ttaatgtagttacaaaagacaag

SEQ ID NO: 246297 - DNA, 23 bp, Artificial sequence
  SiRNA target sequence
taatgtagttacaaaagacaaga

SEQ ID NO: 246298 - DNA, 23 bp, Artificial sequence
  SiRNA target sequence
aatgtagttacaaaagacaagat

SEQ ID NO: 246299 - DNA, 23 bp, Artificial sequence
  SiRNA target sequence
atgtagttacaaaagacaagatc

SEQ ID NO: 246300 - DNA, 23 bp, Artificial sequence
  SiRNA target sequence
tgtagttacaaaagacaagatca

SEQ ID NO: 246301 - DNA, 23 bp, Artificial sequence
  SiRNA target sequence
gtagttacaaaagacaagatcaa

SEQ ID NO: 246302 - DNA, 23 bp, Artificial sequence
  SiRNA target sequence
tagttacaaaagacaagatcaaa

SEQ ID NO: 246303 - DNA, 23 bp, Artificial sequence
  SiRNA target sequence
agttacaaaagacaagatcaaaa

SEQ ID NO: 246304 - DNA, 23 bp, Artificial sequence
  SiRNA target sequence
gttacaaaagacaagatcaaaaa

SEQ ID NO: 246305 - DNA, 23 bp, Artificial sequence
  SiRNA target sequence
ttacaaaagacaagatcaaaaaa

SEQ ID NO: 246306 - DNA, 23 bp, Artificial sequence
  SiRNA target sequence
tacaaaagacaagatcaaaaaaa

SEQ ID NO: 246307 - DNA, 23 bp, Artificial sequence
  SiRNA target sequence
acaaaagacaagatcaaaaaaaa

SEQ ID NO: 246308 - DNA, 23 bp, Artificial sequence
  SiRNA target sequence
caaaagacaagatcaaaaaaaac

SEQ ID NO: 246309 - DNA, 23 bp, Artificial sequence
  SiRNA target sequence
aaaagacaagatcaaaaaaaaca

SEQ ID NO: 246310 - DNA, 23 bp, Artificial sequence
  SiRNA target sequence
aaagacaagatcaaaaaaaacaa

SEQ ID NO: 246311 - DNA, 23 bp, Artificial sequence
  SiRNA target sequence
aagacaagatcaaaaaaaacaaa

SEQ ID NO: 246312 - DNA, 23 bp, Artificial sequence
  SiRNA target sequence
agacaagatcaaaaaaaacaaac

SEQ ID NO: 246313 - DNA, 23 bp, Artificial sequence
  SiRNA target sequence
gacaagatcaaaaaaaacaaact

SEQ ID NO: 246314 - DNA, 23 bp, Artificial sequence
  SiRNA target sequence
acaagatcaaaaaaaacaaacta

SEQ ID NO: 246315 - DNA, 23 bp, Artificial sequence
  SiRNA target sequence
caagatcaaaaaaaacaaactac

SEQ ID NO: 246316 - DNA, 23 bp, Artificial sequence
  SiRNA target sequence
aagatcaaaaaaaacaaactact

SEQ ID NO: 246317 - DNA, 23 bp, Artificial sequence
  SiRNA target sequence
agatcaaaaaaaacaaactacta

SEQ ID NO: 246318 - DNA, 23 bp, Artificial sequence
  SiRNA target sequence
gatcaaaaaaaacaaactactac

SEQ ID NO: 246319 - DNA, 23 bp, Artificial sequence
  SiRNA target sequence
atcaaaaaaaacaaactactacc

SEQ ID NO: 246320 - DNA, 23 bp, Artificial sequence
  SiRNA target sequence
tcaaaaaaaacaaactactaccg

SEQ ID NO: 246321 - DNA, 23 bp, Artificial sequence
  SiRNA target sequence
caaaaaaaacaaactactaccgt

SEQ ID NO: 246322 - DNA, 23 bp, Artificial sequence
  SiRNA target sequence
aaaaaaaacaaactactaccgtc

SEQ ID NO: 246323 - DNA, 23 bp, Artificial sequence
  SiRNA target sequence
aaaaaaacaaactactaccgtca

SEQ ID NO: 246324 - DNA, 23 bp, Artificial sequence
  SiRNA target sequence
aaaaaacaaactactaccgtcaa

SEQ ID NO: 246325 - DNA, 23 bp, Artificial sequence
  SiRNA target sequence
aaaaacaaactactaccgtcaat

SEQ ID NO: 246326 - DNA, 23 bp, Artificial sequence
  SiRNA target sequence
aaaacaaactactaccgtcaatt

SEQ ID NO: 246327 - DNA, 23 bp, Artificial sequence
  SiRNA target sequence
aaacaaactactaccgtcaattt

SEQ ID NO: 246328 - DNA, 23 bp, Artificial sequence
  SiRNA target sequence
aacaaactactaccgtcaatttt

SEQ ID NO: 246329 - DNA, 23 bp, Artificial sequence
  SiRNA target sequence
acaaactactaccgtcaatttta

SEQ ID NO: 246330 - DNA, 23 bp, Artificial sequence
  SiRNA target sequence
caaactactaccgtcaattttat

SEQ ID NO: 246331 - DNA, 23 bp, Artificial sequence
  SiRNA target sequence
aaactactaccgtcaattttatc

SEQ ID NO: 246332 - DNA, 23 bp, Artificial sequence
  SiRNA target sequence
aactactaccgtcaattttatca

SEQ ID NO: 246333 - DNA, 23 bp, Artificial sequence
  SiRNA target sequence
actactaccgtcaattttatcat

SEQ ID NO: 246334 - DNA, 23 bp, Artificial sequence
  SiRNA target sequence
ctactaccgtcaattttatcatg

SEQ ID NO: 246335 - DNA, 23 bp, Artificial sequence
  SiRNA target sequence
tactaccgtcaattttatcatgc

SEQ ID NO: 246336 - DNA, 23 bp, Artificial sequence
  SiRNA target sequence
actaccgtcaattttatcatgca

SEQ ID NO: 246337 - DNA, 23 bp, Artificial sequence
  SiRNA target sequence
ctaccgtcaattttatcatgcaa

SEQ ID NO: 246338 - DNA, 23 bp, Artificial sequence
  SiRNA target sequence
taccgtcaattttatcatgcaaa

SEQ ID NO: 246339 - DNA, 23 bp, Artificial sequence
  SiRNA target sequence
accgtcaattttatcatgcaaac

SEQ ID NO: 246340 - DNA, 23 bp, Artificial sequence
  SiRNA target sequence
ccgtcaattttatcatgcaaacc

SEQ ID NO: 246341 - DNA, 23 bp, Artificial sequence
  SiRNA target sequence
cgtcaattttatcatgcaaacct

SEQ ID NO: 246342 - DNA, 23 bp, Artificial sequence
  SiRNA target sequence
gtcaattttatcatgcaaacctg

SEQ ID NO: 246343 - DNA, 23 bp, Artificial sequence
  SiRNA target sequence
tcaattttatcatgcaaacctgc

SEQ ID NO: 246344 - DNA, 23 bp, Artificial sequence
  SiRNA target sequence
caattttatcatgcaaacctgca

SEQ ID NO: 246345 - DNA, 23 bp, Artificial sequence
  SiRNA target sequence
aattttatcatgcaaacctgcag

SEQ ID NO: 246346 - DNA, 23 bp, Artificial sequence
  SiRNA target sequence
attttatcatgcaaacctgcagg

SEQ ID NO: 246347 - DNA, 23 bp, Artificial sequence
  SiRNA target sequence
ttttatcatgcaaacctgcagga

SEQ ID NO: 246348 - DNA, 23 bp, Artificial sequence
  SiRNA target sequence
tttatcatgcaaacctgcaggaa

SEQ ID NO: 246349 - DNA, 23 bp, Artificial sequence
  SiRNA target sequence
ttatcatgcaaacctgcaggaag

SEQ ID NO: 246350 - DNA, 23 bp, Artificial sequence
  SiRNA target sequence
tatcatgcaaacctgcaggaagt

SEQ ID NO: 246351 - DNA, 23 bp, Artificial sequence
  SiRNA target sequence
atcatgcaaacctgcaggaagta

SEQ ID NO: 246352 - DNA, 23 bp, Artificial sequence
  SiRNA target sequence
tcatgcaaacctgcaggaagtat

SEQ ID NO: 246353 - DNA, 23 bp, Artificial sequence
  SiRNA target sequence
catgcaaacctgcaggaagtata

SEQ ID NO: 246354 - DNA, 23 bp, Artificial sequence
  SiRNA target sequence
atgcaaacctgcaggaagtatat

SEQ ID NO: 246355 - DNA, 23 bp, Artificial sequence
  SiRNA target sequence
tgcaaacctgcaggaagtatatt

SEQ ID NO: 246356 - DNA, 23 bp, Artificial sequence
  SiRNA target sequence
gcaaacctgcaggaagtatattt

SEQ ID NO: 246357 - DNA, 23 bp, Artificial sequence
  SiRNA target sequence
caaacctgcaggaagtatatttg

SEQ ID NO: 246358 - DNA, 23 bp, Artificial sequence
  SiRNA target sequence
aaacctgcaggaagtatatttgc

SEQ ID NO: 246359 - DNA, 23 bp, Artificial sequence
  SiRNA target sequence
aacctgcaggaagtatatttgct

SEQ ID NO: 246360 - DNA, 23 bp, Artificial sequence
  SiRNA target sequence
acctgcaggaagtatatttgcta

SEQ ID NO: 246361 - DNA, 23 bp, Artificial sequence
  SiRNA target sequence
cctgcaggaagtatatttgctaa

SEQ ID NO: 246362 - DNA, 23 bp, Artificial sequence
  SiRNA target sequence
ctgcaggaagtatatttgctaat

SEQ ID NO: 246363 - DNA, 23 bp, Artificial sequence
  SiRNA target sequence
tgcaggaagtatatttgctaatt

SEQ ID NO: 246364 - DNA, 23 bp, Artificial sequence
  SiRNA target sequence
gcaggaagtatatttgctaattc

SEQ ID NO: 246365 - DNA, 23 bp, Artificial sequence
  SiRNA target sequence
caggaagtatatttgctaattca

SEQ ID NO: 246366 - DNA, 23 bp, Artificial sequence
  SiRNA target sequence
aggaagtatatttgctaattcat

SEQ ID NO: 246367 - DNA, 23 bp, Artificial sequence
  SiRNA target sequence
ggaagtatatttgctaattcatc

SEQ ID NO: 246368 - DNA, 23 bp, Artificial sequence
  SiRNA target sequence
gaagtatatttgctaattcatct

SEQ ID NO: 246369 - DNA, 23 bp, Artificial sequence
  SiRNA target sequence
aagtatatttgctaattcatctt

SEQ ID NO: 246370 - DNA, 23 bp, Artificial sequence
  SiRNA target sequence
agtatatttgctaattcatcttt

SEQ ID NO: 246371 - DNA, 23 bp, Artificial sequence
  SiRNA target sequence
gtatatttgctaattcatctttt

SEQ ID NO: 246372 - DNA, 23 bp, Artificial sequence
  SiRNA target sequence
tatatttgctaattcatctttta

SEQ ID NO: 246373 - DNA, 23 bp, Artificial sequence
  SiRNA target sequence
atatttgctaattcatcttttat

SEQ ID NO: 246374 - DNA, 23 bp, Artificial sequence
  SiRNA target sequence
tatttgctaattcatcttttata

SEQ ID NO: 246375 - DNA, 23 bp, Artificial sequence
  SiRNA target sequence
atttgctaattcatcttttatat

SEQ ID NO: 246376 - DNA, 23 bp, Artificial sequence
  SiRNA target sequence
tttgctaattcatcttttatata

SEQ ID NO: 246377 - DNA, 23 bp, Artificial sequence
  SiRNA target sequence
ttgctaattcatcttttatataa

SEQ ID NO: 246378 - DNA, 23 bp, Artificial sequence
  SiRNA target sequence
tgctaattcatcttttatataaa

SEQ ID NO: 246379 - DNA, 23 bp, Artificial sequence
  SiRNA target sequence
gctaattcatcttttatataaat

SEQ ID NO: 246380 - DNA, 23 bp, Artificial sequence
  SiRNA target sequence
ctaattcatcttttatataaata

SEQ ID NO: 246381 - DNA, 23 bp, Artificial sequence
  SiRNA target sequence
taattcatcttttatataaataa

SEQ ID NO: 246382 - DNA, 23 bp, Artificial sequence
  SiRNA target sequence
aattcatcttttatataaataaa

SEQ ID NO: 246383 - DNA, 23 bp, Artificial sequence
  SiRNA target sequence
attcatcttttatataaataaaa

SEQ ID NO: 246384 - DNA, 23 bp, Artificial sequence
  SiRNA target sequence
ttcatcttttatataaataaaag

SEQ ID NO: 246385 - DNA, 23 bp, Artificial sequence
  SiRNA target sequence
tcatcttttatataaataaaagc

SEQ ID NO: 246386 - DNA, 23 bp, Artificial sequence
  SiRNA target sequence
catcttttatataaataaaagct

SEQ ID NO: 246387 - DNA, 23 bp, Artificial sequence
  SiRNA target sequence
atcttttatataaataaaagcta

SEQ ID NO: 246388 - DNA, 23 bp, Artificial sequence
  SiRNA target sequence
tcttttatataaataaaagctac

SEQ ID NO: 246389 - DNA, 23 bp, Artificial sequence
  SiRNA target sequence
cttttatataaataaaagctaca

SEQ ID NO: 246390 - DNA, 23 bp, Artificial sequence
  SiRNA target sequence
ttttatataaataaaagctacag

SEQ ID NO: 246391 - DNA, 23 bp, Artificial sequence
  SiRNA target sequence
tttatataaataaaagctacaga

SEQ ID NO: 246392 - DNA, 23 bp, Artificial sequence
  SiRNA target sequence
ttatataaataaaagctacagaa

SEQ ID NO: 246393 - DNA, 23 bp, Artificial sequence
  SiRNA target sequence
tatataaataaaagctacagaaa

SEQ ID NO: 246394 - DNA, 23 bp, Artificial sequence
  SiRNA target sequence
atataaataaaagctacagaaat

SEQ ID NO: 246395 - DNA, 23 bp, Artificial sequence
  SiRNA target sequence
tataaataaaagctacagaaata

SEQ ID NO: 246396 - DNA, 23 bp, Artificial sequence
  SiRNA target sequence
ataaataaaagctacagaaataa

SEQ ID NO: 246397 - DNA, 23 bp, Artificial sequence
  SiRNA target sequence
taaataaaagctacagaaataat

SEQ ID NO: 246398 - DNA, 23 bp, Artificial sequence
  SiRNA target sequence
aaataaaagctacagaaataatc

SEQ ID NO: 246399 - DNA, 23 bp, Artificial sequence
  SiRNA target sequence
aataaaagctacagaaataatca

SEQ ID NO: 246400 - DNA, 23 bp, Artificial sequence
  SiRNA target sequence
ataaaagctacagaaataatcat

SEQ ID NO: 246401 - DNA, 23 bp, Artificial sequence
  SiRNA target sequence
taaaagctacagaaataatcatt

SEQ ID NO: 246402 - DNA, 23 bp, Artificial sequence
  SiRNA target sequence
aaaagctacagaaataatcattg

SEQ ID NO: 246403 - DNA, 23 bp, Artificial sequence
  SiRNA target sequence
aaagctacagaaataatcattga

SEQ ID NO: 246404 - DNA, 23 bp, Artificial sequence
  SiRNA target sequence
aagctacagaaataatcattgaa

SEQ ID NO: 246405 - DNA, 23 bp, Artificial sequence
  SiRNA target sequence
agctacagaaataatcattgaaa

SEQ ID NO: 246406 - DNA, 23 bp, Artificial sequence
  SiRNA target sequence
gctacagaaataatcattgaaat

SEQ ID NO: 246407 - DNA, 23 bp, Artificial sequence
  SiRNA target sequence
ctacagaaataatcattgaaatg

SEQ ID NO: 246408 - DNA, 23 bp, Artificial sequence
  SiRNA target sequence
tacagaaataatcattgaaatgg

SEQ ID NO: 246409 - DNA, 23 bp, Artificial sequence
  SiRNA target sequence
acagaaataatcattgaaatggc

SEQ ID NO: 246410 - DNA, 23 bp, Artificial sequence
  SiRNA target sequence
cagaaataatcattgaaatggcg

SEQ ID NO: 246411 - DNA, 23 bp, Artificial sequence
  SiRNA target sequence
agaaataatcattgaaatggcgg

SEQ ID NO: 246412 - DNA, 23 bp, Artificial sequence
  SiRNA target sequence
gaaataatcattgaaatggcggt

SEQ ID NO: 246413 - DNA, 23 bp, Artificial sequence
  SiRNA target sequence
aaataatcattgaaatggcggtg

SEQ ID NO: 246414 - DNA, 23 bp, Artificial sequence
  SiRNA target sequence
aataatcattgaaatggcggtga

SEQ ID NO: 246415 - DNA, 23 bp, Artificial sequence
  SiRNA target sequence
ataatcattgaaatggcggtgat

SEQ ID NO: 246416 - DNA, 23 bp, Artificial sequence
  SiRNA target sequence
taatcattgaaatggcggtgatt

SEQ ID NO: 246417 - DNA, 23 bp, Artificial sequence
  SiRNA target sequence
aatcattgaaatggcggtgattg

SEQ ID NO: 246418 - DNA, 23 bp, Artificial sequence
  SiRNA target sequence
atcattgaaatggcggtgattgt

SEQ ID NO: 246419 - DNA, 23 bp, Artificial sequence
  SiRNA target sequence
tcattgaaatggcggtgattgtg

SEQ ID NO: 246420 - DNA, 23 bp, Artificial sequence
  SiRNA target sequence
cattgaaatggcggtgattgtgg

SEQ ID NO: 246421 - DNA, 23 bp, Artificial sequence
  SiRNA target sequence
attgaaatggcggtgattgtgga

SEQ ID NO: 246422 - DNA, 23 bp, Artificial sequence
  SiRNA target sequence
ttgaaatggcggtgattgtggaa

SEQ ID NO: 246423 - DNA, 23 bp, Artificial sequence
  SiRNA target sequence
tgaaatggcggtgattgtggaaa

SEQ ID NO: 246424 - DNA, 23 bp, Artificial sequence
  SiRNA target sequence
gaaatggcggtgattgtggaaaa

SEQ ID NO: 246425 - DNA, 23 bp, Artificial sequence
  SiRNA target sequence
aaatggcggtgattgtggaaaaa

SEQ ID NO: 246426 - DNA, 23 bp, Artificial sequence
  SiRNA target sequence
aatggcggtgattgtggaaaaat

SEQ ID NO: 246427 - DNA, 23 bp, Artificial sequence
  SiRNA target sequence
atggcggtgattgtggaaaaatt

SEQ ID NO: 246428 - DNA, 23 bp, Artificial sequence
  SiRNA target sequence
tggcggtgattgtggaaaaatta

SEQ ID NO: 246429 - DNA, 23 bp, Artificial sequence
  SiRNA target sequence
ggcggtgattgtggaaaaattag

SEQ ID NO: 246430 - DNA, 23 bp, Artificial sequence
  SiRNA target sequence
gcggtgattgtggaaaaattagg

SEQ ID NO: 246431 - DNA, 23 bp, Artificial sequence
  SiRNA target sequence
cggtgattgtggaaaaattagga

SEQ ID NO: 246432 - DNA, 23 bp, Artificial sequence
  SiRNA target sequence
ggtgattgtggaaaaattaggaa

SEQ ID NO: 246433 - DNA, 23 bp, Artificial sequence
  SiRNA target sequence
gtgattgtggaaaaattaggaac

SEQ ID NO: 246434 - DNA, 23 bp, Artificial sequence
  SiRNA target sequence
tgattgtggaaaaattaggaaca

SEQ ID NO: 246435 - DNA, 23 bp, Artificial sequence
  SiRNA target sequence
gattgtggaaaaattaggaacaa

SEQ ID NO: 246436 - DNA, 23 bp, Artificial sequence
  SiRNA target sequence
attgtggaaaaattaggaacaat

SEQ ID NO: 246437 - DNA, 23 bp, Artificial sequence
  SiRNA target sequence
ttgtggaaaaattaggaacaatt

SEQ ID NO: 246438 - DNA, 23 bp, Artificial sequence
  SiRNA target sequence
tgtggaaaaattaggaacaattt

SEQ ID NO: 246439 - DNA, 23 bp, Artificial sequence
  SiRNA target sequence
gtggaaaaattaggaacaatttc

SEQ ID NO: 246440 - DNA, 23 bp, Artificial sequence
  SiRNA target sequence
tggaaaaattaggaacaatttct

SEQ ID NO: 246441 - DNA, 23 bp, Artificial sequence
  SiRNA target sequence
ggaaaaattaggaacaatttctt

SEQ ID NO: 246442 - DNA, 23 bp, Artificial sequence
  SiRNA target sequence
gaaaaattaggaacaatttcttt

SEQ ID NO: 246443 - DNA, 23 bp, Artificial sequence
  SiRNA target sequence
aaaaattaggaacaatttctttc

SEQ ID NO: 246444 - DNA, 23 bp, Artificial sequence
  SiRNA target sequence
aaaattaggaacaatttctttca

SEQ ID NO: 246445 - DNA, 23 bp, Artificial sequence
  SiRNA target sequence
aaattaggaacaatttctttcat

SEQ ID NO: 246446 - DNA, 23 bp, Artificial sequence
  SiRNA target sequence
aattaggaacaatttctttcatt

SEQ ID NO: 246447 - DNA, 23 bp, Artificial sequence
  SiRNA target sequence
attaggaacaatttctttcattt

SEQ ID NO: 246448 - DNA, 23 bp, Artificial sequence
  SiRNA target sequence
ttaggaacaatttctttcatttc

SEQ ID NO: 246449 - DNA, 23 bp, Artificial sequence
  SiRNA target sequence
taggaacaatttctttcatttca

SEQ ID NO: 246450 - DNA, 23 bp, Artificial sequence
  SiRNA target sequence
aggaacaatttctttcatttcat

SEQ ID NO: 246451 - DNA, 23 bp, Artificial sequence
  SiRNA target sequence
ggaacaatttctttcatttcatc

SEQ ID NO: 246452 - DNA, 23 bp, Artificial sequence
  SiRNA target sequence
gaacaatttctttcatttcatct

SEQ ID NO: 246453 - DNA, 23 bp, Artificial sequence
  SiRNA target sequence
aacaatttctttcatttcatctt

SEQ ID NO: 246454 - DNA, 23 bp, Artificial sequence
  SiRNA target sequence
acaatttctttcatttcatcttc

SEQ ID NO: 246455 - DNA, 23 bp, Artificial sequence
  SiRNA target sequence
caatttctttcatttcatcttct

SEQ ID NO: 246456 - DNA, 23 bp, Artificial sequence
  SiRNA target sequence
aatttctttcatttcatcttctg

SEQ ID NO: 246457 - DNA, 23 bp, Artificial sequence
  SiRNA target sequence
atttctttcatttcatcttctgt

SEQ ID NO: 246458 - DNA, 23 bp, Artificial sequence
  SiRNA target sequence
tttctttcatttcatcttctgta

SEQ ID NO: 246459 - DNA, 23 bp, Artificial sequence
  SiRNA target sequence
ttctttcatttcatcttctgtac

SEQ ID NO: 246460 - DNA, 23 bp, Artificial sequence
  SiRNA target sequence
tctttcatttcatcttctgtaca

SEQ ID NO: 246461 - DNA, 23 bp, Artificial sequence
  SiRNA target sequence
ctttcatttcatcttctgtacaa

SEQ ID NO: 246462 - DNA, 23 bp, Artificial sequence
  SiRNA target sequence
tttcatttcatcttctgtacaag

SEQ ID NO: 246463 - DNA, 23 bp, Artificial sequence
  SiRNA target sequence
ttcatttcatcttctgtacaagc

SEQ ID NO: 246464 - DNA, 23 bp, Artificial sequence
  SiRNA target sequence
tcatttcatcttctgtacaagca

SEQ ID NO: 246465 - DNA, 23 bp, Artificial sequence
  SiRNA target sequence
catttcatcttctgtacaagcat

SEQ ID NO: 246466 - DNA, 23 bp, Artificial sequence
  SiRNA target sequence
atttcatcttctgtacaagcatg

SEQ ID NO: 246467 - DNA, 23 bp, Artificial sequence
  SiRNA target sequence
tttcatcttctgtacaagcatga

SEQ ID NO: 246468 - DNA, 23 bp, Artificial sequence
  SiRNA target sequence
ttcatcttctgtacaagcatgat

SEQ ID NO: 246469 - DNA, 23 bp, Artificial sequence
  SiRNA target sequence
tcatcttctgtacaagcatgatt

SEQ ID NO: 246470 - DNA, 23 bp, Artificial sequence
  SiRNA target sequence
catcttctgtacaagcatgattg

SEQ ID NO: 246471 - DNA, 23 bp, Artificial sequence
  SiRNA target sequence
atcttctgtacaagcatgattgg

SEQ ID NO: 246472 - DNA, 23 bp, Artificial sequence
  SiRNA target sequence
tcttctgtacaagcatgattggc

SEQ ID NO: 246473 - DNA, 23 bp, Artificial sequence
  SiRNA target sequence
cttctgtacaagcatgattggct

SEQ ID NO: 246474 - DNA, 23 bp, Artificial sequence
  SiRNA target sequence
ttctgtacaagcatgattggcta

SEQ ID NO: 246475 - DNA, 23 bp, Artificial sequence
  SiRNA target sequence
tctgtacaagcatgattggctaa

SEQ ID NO: 246476 - DNA, 23 bp, Artificial sequence
  SiRNA target sequence
ctgtacaagcatgattggctaac

SEQ ID NO: 246477 - DNA, 23 bp, Artificial sequence
  SiRNA target sequence
tgtacaagcatgattggctaacg

SEQ ID NO: 246478 - DNA, 23 bp, Artificial sequence
  SiRNA target sequence
gtacaagcatgattggctaacgc

SEQ ID NO: 246479 - DNA, 23 bp, Artificial sequence
  SiRNA target sequence
tacaagcatgattggctaacgca

SEQ ID NO: 246480 - DNA, 23 bp, Artificial sequence
  SiRNA target sequence
acaagcatgattggctaacgcat

SEQ ID NO: 246481 - DNA, 23 bp, Artificial sequence
  SiRNA target sequence
caagcatgattggctaacgcata

SEQ ID NO: 246482 - DNA, 23 bp, Artificial sequence
  SiRNA target sequence
aagcatgattggctaacgcatat

SEQ ID NO: 246483 - DNA, 23 bp, Artificial sequence
  SiRNA target sequence
agcatgattggctaacgcatata

SEQ ID NO: 246484 - DNA, 23 bp, Artificial sequence
  SiRNA target sequence
gcatgattggctaacgcatataa

SEQ ID NO: 246485 - DNA, 23 bp, Artificial sequence
  SiRNA target sequence
catgattggctaacgcatataaa

SEQ ID NO: 246486 - DNA, 23 bp, Artificial sequence
  SiRNA target sequence
atgattggctaacgcatataaag

SEQ ID NO: 246487 - DNA, 23 bp, Artificial sequence
  SiRNA target sequence
tgattggctaacgcatataaagc

SEQ ID NO: 246488 - DNA, 23 bp, Artificial sequence
  SiRNA target sequence
gattggctaacgcatataaagca

SEQ ID NO: 246489 - DNA, 23 bp, Artificial sequence
  SiRNA target sequence
attggctaacgcatataaagcaa

SEQ ID NO: 246490 - DNA, 23 bp, Artificial sequence
  SiRNA target sequence
ttggctaacgcatataaagcaaa

SEQ ID NO: 246491 - DNA, 23 bp, Artificial sequence
  SiRNA target sequence
tggctaacgcatataaagcaaaa

SEQ ID NO: 246492 - DNA, 23 bp, Artificial sequence
  SiRNA target sequence
ggctaacgcatataaagcaaaac

SEQ ID NO: 246493 - DNA, 23 bp, Artificial sequence
  SiRNA target sequence
gctaacgcatataaagcaaaacc

SEQ ID NO: 246494 - DNA, 23 bp, Artificial sequence
  SiRNA target sequence
ctaacgcatataaagcaaaacca

SEQ ID NO: 246495 - DNA, 23 bp, Artificial sequence
  SiRNA target sequence
taacgcatataaagcaaaaccaa

SEQ ID NO: 246496 - DNA, 23 bp, Artificial sequence
  SiRNA target sequence
aacgcatataaagcaaaaccaac

SEQ ID NO: 246497 - DNA, 23 bp, Artificial sequence
  SiRNA target sequence
acgcatataaagcaaaaccaact

SEQ ID NO: 246498 - DNA, 23 bp, Artificial sequence
  SiRNA target sequence
cgcatataaagcaaaaccaacta

SEQ ID NO: 246499 - DNA, 23 bp, Artificial sequence
  SiRNA target sequence
gcatataaagcaaaaccaactac

SEQ ID NO: 246500 - DNA, 23 bp, Artificial sequence
  SiRNA target sequence
catataaagcaaaaccaactact

SEQ ID NO: 246501 - DNA, 23 bp, Artificial sequence
  SiRNA target sequence
atataaagcaaaaccaactacta

SEQ ID NO: 246502 - DNA, 23 bp, Artificial sequence
  SiRNA target sequence
tataaagcaaaaccaactactag

SEQ ID NO: 246503 - DNA, 23 bp, Artificial sequence
  SiRNA target sequence
ataaagcaaaaccaactactaga

SEQ ID NO: 246504 - DNA, 23 bp, Artificial sequence
  SiRNA target sequence
taaagcaaaaccaactactagag

SEQ ID NO: 246505 - DNA, 23 bp, Artificial sequence
  SiRNA target sequence
aaagcaaaaccaactactagagt

SEQ ID NO: 246506 - DNA, 23 bp, Artificial sequence
  SiRNA target sequence
aagcaaaaccaactactagagta

SEQ ID NO: 246507 - DNA, 23 bp, Artificial sequence
  SiRNA target sequence
agcaaaaccaactactagagtac

SEQ ID NO: 246508 - DNA, 23 bp, Artificial sequence
  SiRNA target sequence
gcaaaaccaactactagagtact

SEQ ID NO: 246509 - DNA, 23 bp, Artificial sequence
  SiRNA target sequence
caaaaccaactactagagtactc

SEQ ID NO: 246510 - DNA, 23 bp, Artificial sequence
  SiRNA target sequence
aaaaccaactactagagtactcc

SEQ ID NO: 246511 - DNA, 23 bp, Artificial sequence
  SiRNA target sequence
aaaccaactactagagtactcca

SEQ ID NO: 246512 - DNA, 23 bp, Artificial sequence
  SiRNA target sequence
aaccaactactagagtactccac

SEQ ID NO: 246513 - DNA, 23 bp, Artificial sequence
  SiRNA target sequence
accaactactagagtactccaca

SEQ ID NO: 246514 - DNA, 23 bp, Artificial sequence
  SiRNA target sequence
ccaactactagagtactccacaa

SEQ ID NO: 246515 - DNA, 23 bp, Artificial sequence
  SiRNA target sequence
caactactagagtactccacaac

SEQ ID NO: 246516 - DNA, 23 bp, Artificial sequence
  SiRNA target sequence
aactactagagtactccacaact

SEQ ID NO: 246517 - DNA, 23 bp, Artificial sequence
  SiRNA target sequence
actactagagtactccacaactc

SEQ ID NO: 246518 - DNA, 23 bp, Artificial sequence
  SiRNA target sequence
ctactagagtactccacaactcc

SEQ ID NO: 246519 - DNA, 23 bp, Artificial sequence
  SiRNA target sequence
tactagagtactccacaactccg

SEQ ID NO: 246520 - DNA, 23 bp, Artificial sequence
  SiRNA target sequence
actagagtactccacaactccga

SEQ ID NO: 246521 - DNA, 23 bp, Artificial sequence
  SiRNA target sequence
ctagagtactccacaactccgat

SEQ ID NO: 246522 - DNA, 23 bp, Artificial sequence
  SiRNA target sequence
tagagtactccacaactccgata

SEQ ID NO: 246523 - DNA, 23 bp, Artificial sequence
  SiRNA target sequence
agagtactccacaactccgataa

SEQ ID NO: 246524 - DNA, 23 bp, Artificial sequence
  SiRNA target sequence
gagtactccacaactccgataag

SEQ ID NO: 246525 - DNA, 23 bp, Artificial sequence
  SiRNA target sequence
agtactccacaactccgataaga

SEQ ID NO: 246526 - DNA, 23 bp, Artificial sequence
  SiRNA target sequence
gtactccacaactccgataagat

SEQ ID NO: 246527 - DNA, 23 bp, Artificial sequence
  SiRNA target sequence
tactccacaactccgataagatg

SEQ ID NO: 246528 - DNA, 23 bp, Artificial sequence
  SiRNA target sequence
actccacaactccgataagatgt

SEQ ID NO: 246529 - DNA, 23 bp, Artificial sequence
  SiRNA target sequence
ctccacaactccgataagatgta

SEQ ID NO: 246530 - DNA, 23 bp, Artificial sequence
  SiRNA target sequence
tccacaactccgataagatgtaa

SEQ ID NO: 246531 - DNA, 23 bp, Artificial sequence
  SiRNA target sequence
ccacaactccgataagatgtaac

SEQ ID NO: 246532 - DNA, 23 bp, Artificial sequence
  SiRNA target sequence
cacaactccgataagatgtaaca

SEQ ID NO: 246533 - DNA, 23 bp, Artificial sequence
  SiRNA target sequence
acaactccgataagatgtaacat

SEQ ID NO: 246534 - DNA, 23 bp, Artificial sequence
  SiRNA target sequence
caactccgataagatgtaacata

SEQ ID NO: 246535 - DNA, 23 bp, Artificial sequence
  SiRNA target sequence
aactccgataagatgtaacataa

SEQ ID NO: 246536 - DNA, 23 bp, Artificial sequence
  SiRNA target sequence
actccgataagatgtaacataaa

SEQ ID NO: 246537 - DNA, 23 bp, Artificial sequence
  SiRNA target sequence
ctccgataagatgtaacataaag

SEQ ID NO: 246538 - DNA, 23 bp, Artificial sequence
  SiRNA target sequence
tccgataagatgtaacataaagt

SEQ ID NO: 246539 - DNA, 23 bp, Artificial sequence
  SiRNA target sequence
ccgataagatgtaacataaagta

SEQ ID NO: 246540 - DNA, 23 bp, Artificial sequence
  SiRNA target sequence
cgataagatgtaacataaagtac

SEQ ID NO: 246541 - DNA, 23 bp, Artificial sequence
  SiRNA target sequence
gataagatgtaacataaagtact

SEQ ID NO: 246542 - DNA, 23 bp, Artificial sequence
  SiRNA target sequence
ataagatgtaacataaagtactt

SEQ ID NO: 246543 - DNA, 23 bp, Artificial sequence
  SiRNA target sequence
taagatgtaacataaagtactta

SEQ ID NO: 246544 - DNA, 23 bp, Artificial sequence
  SiRNA target sequence
aagatgtaacataaagtacttat

SEQ ID NO: 246545 - DNA, 23 bp, Artificial sequence
  SiRNA target sequence
agatgtaacataaagtacttatc

SEQ ID NO: 246546 - DNA, 23 bp, Artificial sequence
  SiRNA target sequence
gatgtaacataaagtacttatcc

SEQ ID NO: 246547 - DNA, 23 bp, Artificial sequence
  SiRNA target sequence
atgtaacataaagtacttatcca

SEQ ID NO: 246548 - DNA, 23 bp, Artificial sequence
  SiRNA target sequence
tgtaacataaagtacttatccac

SEQ ID NO: 246549 - DNA, 23 bp, Artificial sequence
  SiRNA target sequence
gtaacataaagtacttatccact

SEQ ID NO: 246550 - DNA, 23 bp, Artificial sequence
  SiRNA target sequence
taacataaagtacttatccactc

SEQ ID NO: 246551 - DNA, 23 bp, Artificial sequence
  SiRNA target sequence
aacataaagtacttatccactca

SEQ ID NO: 246552 - DNA, 23 bp, Artificial sequence
  SiRNA target sequence
acataaagtacttatccactcac

SEQ ID NO: 246553 - DNA, 23 bp, Artificial sequence
  SiRNA target sequence
cataaagtacttatccactcact

SEQ ID NO: 246554 - DNA, 23 bp, Artificial sequence
  SiRNA target sequence
ataaagtacttatccactcactg

SEQ ID NO: 246555 - DNA, 23 bp, Artificial sequence
  SiRNA target sequence
taaagtacttatccactcactgt

SEQ ID NO: 246556 - DNA, 23 bp, Artificial sequence
  SiRNA target sequence
aaagtacttatccactcactgta

SEQ ID NO: 246557 - DNA, 23 bp, Artificial sequence
  SiRNA target sequence
aagtacttatccactcactgtac

SEQ ID NO: 246558 - DNA, 23 bp, Artificial sequence
  SiRNA target sequence
agtacttatccactcactgtaca

SEQ ID NO: 246559 - DNA, 23 bp, Artificial sequence
  SiRNA target sequence
gtacttatccactcactgtacat

SEQ ID NO: 246560 - DNA, 23 bp, Artificial sequence
  SiRNA target sequence
tacttatccactcactgtacata

SEQ ID NO: 246561 - DNA, 23 bp, Artificial sequence
  SiRNA target sequence
acttatccactcactgtacatat

SEQ ID NO: 246562 - DNA, 23 bp, Artificial sequence
  SiRNA target sequence
cttatccactcactgtacatata

SEQ ID NO: 246563 - DNA, 23 bp, Artificial sequence
  SiRNA target sequence
ttatccactcactgtacatatat

SEQ ID NO: 246564 - DNA, 23 bp, Artificial sequence
  SiRNA target sequence
tatccactcactgtacatatata

SEQ ID NO: 246565 - DNA, 23 bp, Artificial sequence
  SiRNA target sequence
atccactcactgtacatatataa

SEQ ID NO: 246566 - DNA, 23 bp, Artificial sequence
  SiRNA target sequence
tccactcactgtacatatataaa

SEQ ID NO: 246567 - DNA, 23 bp, Artificial sequence
  SiRNA target sequence
ccactcactgtacatatataaaa

SEQ ID NO: 246568 - DNA, 23 bp, Artificial sequence
  SiRNA target sequence
cactcactgtacatatataaaaa

SEQ ID NO: 246569 - DNA, 23 bp, Artificial sequence
  SiRNA target sequence
actcactgtacatatataaaaaa

SEQ ID NO: 246570 - DNA, 23 bp, Artificial sequence
  SiRNA target sequence
ctcactgtacatatataaaaaag

SEQ ID NO: 246571 - DNA, 23 bp, Artificial sequence
  SiRNA target sequence
tcactgtacatatataaaaaagg

SEQ ID NO: 246572 - DNA, 23 bp, Artificial sequence
  SiRNA target sequence
cactgtacatatataaaaaagga

SEQ ID NO: 246573 - DNA, 23 bp, Artificial sequence
  SiRNA target sequence
actgtacatatataaaaaaggag

SEQ ID NO: 246574 - DNA, 23 bp, Artificial sequence
  SiRNA target sequence
ctgtacatatataaaaaaggaga

SEQ ID NO: 246575 - DNA, 23 bp, Artificial sequence
  SiRNA target sequence
tgtacatatataaaaaaggagat

SEQ ID NO: 246576 - DNA, 23 bp, Artificial sequence
  SiRNA target sequence
gtacatatataaaaaaggagata

SEQ ID NO: 246577 - DNA, 23 bp, Artificial sequence
  SiRNA target sequence
tacatatataaaaaaggagataa

SEQ ID NO: 246578 - DNA, 23 bp, Artificial sequence
  SiRNA target sequence
acatatataaaaaaggagataag

SEQ ID NO: 246579 - DNA, 23 bp, Artificial sequence
  SiRNA target sequence
catatataaaaaaggagataagc

SEQ ID NO: 246580 - DNA, 23 bp, Artificial sequence
  SiRNA target sequence
atatataaaaaaggagataagcc

SEQ ID NO: 246581 - DNA, 23 bp, Artificial sequence
  SiRNA target sequence
tatataaaaaaggagataagccc

SEQ ID NO: 246582 - DNA, 23 bp, Artificial sequence
  SiRNA target sequence
atataaaaaaggagataagccca

SEQ ID NO: 246583 - DNA, 23 bp, Artificial sequence
  SiRNA target sequence
tataaaaaaggagataagcccat

SEQ ID NO: 246584 - DNA, 23 bp, Artificial sequence
  SiRNA target sequence
ataaaaaaggagataagcccatc

SEQ ID NO: 246585 - DNA, 23 bp, Artificial sequence
  SiRNA target sequence
taaaaaaggagataagcccatca

SEQ ID NO: 246586 - DNA, 23 bp, Artificial sequence
  SiRNA target sequence
aaaaaaggagataagcccatcaa

SEQ ID NO: 246587 - DNA, 23 bp, Artificial sequence
  SiRNA target sequence
aaaaaggagataagcccatcaag

SEQ ID NO: 246588 - DNA, 23 bp, Artificial sequence
  SiRNA target sequence
aaaaggagataagcccatcaagc

SEQ ID NO: 246589 - DNA, 23 bp, Artificial sequence
  SiRNA target sequence
aaaggagataagcccatcaagct

SEQ ID NO: 246590 - DNA, 23 bp, Artificial sequence
  SiRNA target sequence
aaggagataagcccatcaagctt

SEQ ID NO: 246591 - DNA, 23 bp, Artificial sequence
  SiRNA target sequence
aggagataagcccatcaagcttc

SEQ ID NO: 246592 - DNA, 23 bp, Artificial sequence
  SiRNA target sequence
ggagataagcccatcaagcttct

SEQ ID NO: 246593 - DNA, 23 bp, Artificial sequence
  SiRNA target sequence
gagataagcccatcaagcttcta

SEQ ID NO: 246594 - DNA, 23 bp, Artificial sequence
  SiRNA target sequence
agataagcccatcaagcttctaa

SEQ ID NO: 246595 - DNA, 23 bp, Artificial sequence
  SiRNA target sequence
gataagcccatcaagcttctaac

SEQ ID NO: 246596 - DNA, 23 bp, Artificial sequence
  SiRNA target sequence
ataagcccatcaagcttctaact

SEQ ID NO: 246597 - DNA, 23 bp, Artificial sequence
  SiRNA target sequence
taagcccatcaagcttctaactg

SEQ ID NO: 246598 - DNA, 23 bp, Artificial sequence
  SiRNA target sequence
aagcccatcaagcttctaactga

SEQ ID NO: 246599 - DNA, 23 bp, Artificial sequence
  SiRNA target sequence
agcccatcaagcttctaactgac

SEQ ID NO: 246600 - DNA, 23 bp, Artificial sequence
  SiRNA target sequence
gcccatcaagcttctaactgaca

SEQ ID NO: 246601 - DNA, 23 bp, Artificial sequence
  SiRNA target sequence
cccatcaagcttctaactgacat

SEQ ID NO: 246602 - DNA, 23 bp, Artificial sequence
  SiRNA target sequence
ccatcaagcttctaactgacatc

SEQ ID NO: 246603 - DNA, 23 bp, Artificial sequence
  SiRNA target sequence
catcaagcttctaactgacatct

SEQ ID NO: 246604 - DNA, 23 bp, Artificial sequence
  SiRNA target sequence
atcaagcttctaactgacatctt

SEQ ID NO: 246605 - DNA, 23 bp, Artificial sequence
  SiRNA target sequence
tcaagcttctaactgacatctta

SEQ ID NO: 246606 - DNA, 23 bp, Artificial sequence
  SiRNA target sequence
caagcttctaactgacatcttac

SEQ ID NO: 246607 - DNA, 23 bp, Artificial sequence
  SiRNA target sequence
aagcttctaactgacatcttacc

SEQ ID NO: 246608 - DNA, 23 bp, Artificial sequence
  SiRNA target sequence
agcttctaactgacatcttacca

SEQ ID NO: 246609 - DNA, 23 bp, Artificial sequence
  SiRNA target sequence
gcttctaactgacatcttaccat

SEQ ID NO: 246610 - DNA, 23 bp, Artificial sequence
  SiRNA target sequence
cttctaactgacatcttaccatc

SEQ ID NO: 246611 - DNA, 23 bp, Artificial sequence
  SiRNA target sequence
ttctaactgacatcttaccatca

SEQ ID NO: 246612 - DNA, 23 bp, Artificial sequence
  SiRNA target sequence
tctaactgacatcttaccatcac

SEQ ID NO: 246613 - DNA, 23 bp, Artificial sequence
  SiRNA target sequence
ctaactgacatcttaccatcaca

SEQ ID NO: 246614 - DNA, 23 bp, Artificial sequence
  SiRNA target sequence
taactgacatcttaccatcacaa

SEQ ID NO: 246615 - DNA, 23 bp, Artificial sequence
  SiRNA target sequence
aactgacatcttaccatcacaaa

SEQ ID NO: 246616 - DNA, 23 bp, Artificial sequence
  SiRNA target sequence
actgacatcttaccatcacaaaa

SEQ ID NO: 246617 - DNA, 23 bp, Artificial sequence
  SiRNA target sequence
ctgacatcttaccatcacaaaaa

SEQ ID NO: 246618 - DNA, 23 bp, Artificial sequence
  SiRNA target sequence
tgacatcttaccatcacaaaaaa

SEQ ID NO: 246619 - DNA, 23 bp, Artificial sequence
  SiRNA target sequence
gacatcttaccatcacaaaaaat

SEQ ID NO: 246620 - DNA, 23 bp, Artificial sequence
  SiRNA target sequence
acatcttaccatcacaaaaaata

SEQ ID NO: 246621 - DNA, 23 bp, Artificial sequence
  SiRNA target sequence
catcttaccatcacaaaaaatat

SEQ ID NO: 246622 - DNA, 23 bp, Artificial sequence
  SiRNA target sequence
atcttaccatcacaaaaaatatc

SEQ ID NO: 246623 - DNA, 23 bp, Artificial sequence
  SiRNA target sequence
tcttaccatcacaaaaaatatct

SEQ ID NO: 246624 - DNA, 23 bp, Artificial sequence
  SiRNA target sequence
cttaccatcacaaaaaatatcta

SEQ ID NO: 246625 - DNA, 23 bp, Artificial sequence
  SiRNA target sequence
ttaccatcacaaaaaatatctag

SEQ ID NO: 246626 - DNA, 23 bp, Artificial sequence
  SiRNA target sequence
taccatcacaaaaaatatctagt

SEQ ID NO: 246627 - DNA, 23 bp, Artificial sequence
  SiRNA target sequence
accatcacaaaaaatatctagtg

SEQ ID NO: 246628 - DNA, 23 bp, Artificial sequence
  SiRNA target sequence
ccatcacaaaaaatatctagtgc

SEQ ID NO: 246629 - DNA, 23 bp, Artificial sequence
  SiRNA target sequence
catcacaaaaaatatctagtgcc

SEQ ID NO: 246630 - DNA, 23 bp, Artificial sequence
  SiRNA target sequence
atcacaaaaaatatctagtgccc

SEQ ID NO: 246631 - DNA, 23 bp, Artificial sequence
  SiRNA target sequence
tcacaaaaaatatctagtgccca

SEQ ID NO: 246632 - DNA, 23 bp, Artificial sequence
  SiRNA target sequence
cacaaaaaatatctagtgcccat

SEQ ID NO: 246633 - DNA, 23 bp, Artificial sequence
  SiRNA target sequence
acaaaaaatatctagtgcccatt

SEQ ID NO: 246634 - DNA, 23 bp, Artificial sequence
  SiRNA target sequence
caaaaaatatctagtgcccattg

SEQ ID NO: 246635 - DNA, 23 bp, Artificial sequence
  SiRNA target sequence
aaaaaatatctagtgcccattgt

SEQ ID NO: 246636 - DNA, 23 bp, Artificial sequence
  SiRNA target sequence
aaaaatatctagtgcccattgtg

SEQ ID NO: 246637 - DNA, 23 bp, Artificial sequence
  SiRNA target sequence
aaaatatctagtgcccattgtga

SEQ ID NO: 246638 - DNA, 23 bp, Artificial sequence
  SiRNA target sequence
aaatatctagtgcccattgtgat

SEQ ID NO: 246639 - DNA, 23 bp, Artificial sequence
  SiRNA target sequence
aatatctagtgcccattgtgatc

SEQ ID NO: 246640 - DNA, 23 bp, Artificial sequence
  SiRNA target sequence
atatctagtgcccattgtgatcc

SEQ ID NO: 246641 - DNA, 23 bp, Artificial sequence
  SiRNA target sequence
tatctagtgcccattgtgatcct

SEQ ID NO: 246642 - DNA, 23 bp, Artificial sequence
  SiRNA target sequence
atctagtgcccattgtgatcctt

SEQ ID NO: 246643 - DNA, 23 bp, Artificial sequence
  SiRNA target sequence
tctagtgcccattgtgatccttt

SEQ ID NO: 246644 - DNA, 23 bp, Artificial sequence
  SiRNA target sequence
ctagtgcccattgtgatcctttt

SEQ ID NO: 246645 - DNA, 23 bp, Artificial sequence
  SiRNA target sequence
tagtgcccattgtgatccttttt

SEQ ID NO: 246646 - DNA, 23 bp, Artificial sequence
  SiRNA target sequence
agtgcccattgtgatcctttttg

SEQ ID NO: 246647 - DNA, 23 bp, Artificial sequence
  SiRNA target sequence
gtgcccattgtgatcctttttgg

SEQ ID NO: 246648 - DNA, 23 bp, Artificial sequence
  SiRNA target sequence
tgcccattgtgatcctttttgga

SEQ ID NO: 246649 - DNA, 23 bp, Artificial sequence
  SiRNA target sequence
gcccattgtgatcctttttggat

SEQ ID NO: 246650 - DNA, 23 bp, Artificial sequence
  SiRNA target sequence
cccattgtgatcctttttggatt

SEQ ID NO: 246651 - DNA, 23 bp, Artificial sequence
  SiRNA target sequence
ccattgtgatcctttttggattt

SEQ ID NO: 246652 - DNA, 23 bp, Artificial sequence
  SiRNA target sequence
cattgtgatcctttttggatttt

SEQ ID NO: 246653 - DNA, 23 bp, Artificial sequence
  SiRNA target sequence
attgtgatcctttttggatttta

SEQ ID NO: 246654 - DNA, 23 bp, Artificial sequence
  SiRNA target sequence
ttgtgatcctttttggattttat

SEQ ID NO: 246655 - DNA, 23 bp, Artificial sequence
  SiRNA target sequence
tgtgatcctttttggattttata

SEQ ID NO: 246656 - DNA, 23 bp, Artificial sequence
  SiRNA target sequence
gtgatcctttttggattttatat

SEQ ID NO: 246657 - DNA, 23 bp, Artificial sequence
  SiRNA target sequence
tgatcctttttggattttatatt

SEQ ID NO: 246658 - DNA, 23 bp, Artificial sequence
  SiRNA target sequence
gatcctttttggattttatattc

SEQ ID NO: 246659 - DNA, 23 bp, Artificial sequence
  SiRNA target sequence
atcctttttggattttatattca

SEQ ID NO: 246660 - DNA, 23 bp, Artificial sequence
  SiRNA target sequence
tcctttttggattttatattcaa

SEQ ID NO: 246661 - DNA, 23 bp, Artificial sequence
  SiRNA target sequence
cctttttggattttatattcaaa

SEQ ID NO: 246662 - DNA, 23 bp, Artificial sequence
  SiRNA target sequence
ctttttggattttatattcaaat

SEQ ID NO: 246663 - DNA, 23 bp, Artificial sequence
  SiRNA target sequence
tttttggattttatattcaaatg

SEQ ID NO: 246664 - DNA, 23 bp, Artificial sequence
  SiRNA target sequence
ttttggattttatattcaaatgg

SEQ ID NO: 246665 - DNA, 23 bp, Artificial sequence
  SiRNA target sequence
tttggattttatattcaaatgga

SEQ ID NO: 246666 - DNA, 23 bp, Artificial sequence
  SiRNA target sequence
ttggattttatattcaaatggaa

SEQ ID NO: 246667 - DNA, 23 bp, Artificial sequence
  SiRNA target sequence
tggattttatattcaaatggaat

SEQ ID NO: 246668 - DNA, 23 bp, Artificial sequence
  SiRNA target sequence
ggattttatattcaaatggaatt

SEQ ID NO: 246669 - DNA, 23 bp, Artificial sequence
  SiRNA target sequence
gattttatattcaaatggaatta

SEQ ID NO: 246670 - DNA, 23 bp, Artificial sequence
  SiRNA target sequence
attttatattcaaatggaattaa

SEQ ID NO: 246671 - DNA, 23 bp, Artificial sequence
  SiRNA target sequence
ttttatattcaaatggaattaaa

SEQ ID NO: 246672 - DNA, 23 bp, Artificial sequence
  SiRNA target sequence
tttatattcaaatggaattaaaa

SEQ ID NO: 246673 - DNA, 23 bp, Artificial sequence
  SiRNA target sequence
ttatattcaaatggaattaaaag

SEQ ID NO: 246674 - DNA, 23 bp, Artificial sequence
  SiRNA target sequence
tatattcaaatggaattaaaaga

SEQ ID NO: 246675 - DNA, 23 bp, Artificial sequence
  SiRNA target sequence
atattcaaatggaattaaaagag

SEQ ID NO: 246676 - DNA, 23 bp, Artificial sequence
  SiRNA target sequence
tattcaaatggaattaaaagaga

SEQ ID NO: 246677 - DNA, 23 bp, Artificial sequence
  SiRNA target sequence
attcaaatggaattaaaagagaa

SEQ ID NO: 246678 - DNA, 23 bp, Artificial sequence
  SiRNA target sequence
ttcaaatggaattaaaagagaac

SEQ ID NO: 246679 - DNA, 23 bp, Artificial sequence
  SiRNA target sequence
tcaaatggaattaaaagagaacc

SEQ ID NO: 246680 - DNA, 23 bp, Artificial sequence
  SiRNA target sequence
caaatggaattaaaagagaacca

SEQ ID NO: 246681 - DNA, 23 bp, Artificial sequence
  SiRNA target sequence
aaatggaattaaaagagaaccaa

SEQ ID NO: 246682 - DNA, 23 bp, Artificial sequence
  SiRNA target sequence
aatggaattaaaagagaaccaat

SEQ ID NO: 246683 - DNA, 23 bp, Artificial sequence
  SiRNA target sequence
atggaattaaaagagaaccaatt

SEQ ID NO: 246684 - DNA, 23 bp, Artificial sequence
  SiRNA target sequence
tggaattaaaagagaaccaatta

SEQ ID NO: 246685 - DNA, 23 bp, Artificial sequence
  SiRNA target sequence
ggaattaaaagagaaccaattag

SEQ ID NO: 246686 - DNA, 23 bp, Artificial sequence
  SiRNA target sequence
gaattaaaagagaaccaattaga

SEQ ID NO: 246687 - DNA, 23 bp, Artificial sequence
  SiRNA target sequence
aattaaaagagaaccaattagaa

SEQ ID NO: 246688 - DNA, 23 bp, Artificial sequence
  SiRNA target sequence
attaaaagagaaccaattagaaa

SEQ ID NO: 246689 - DNA, 23 bp, Artificial sequence
  SiRNA target sequence
ttaaaagagaaccaattagaaaa

SEQ ID NO: 246690 - DNA, 23 bp, Artificial sequence
  SiRNA target sequence
taaaagagaaccaattagaaaaa

SEQ ID NO: 246691 - DNA, 23 bp, Artificial sequence
  SiRNA target sequence
aaaagagaaccaattagaaaaaa

SEQ ID NO: 246692 - DNA, 23 bp, Artificial sequence
  SiRNA target sequence
aaagagaaccaattagaaaaaaa

SEQ ID NO: 246693 - DNA, 23 bp, Artificial sequence
  SiRNA target sequence
aagagaaccaattagaaaaaaaa

SEQ ID NO: 246694 - DNA, 23 bp, Artificial sequence
  SiRNA target sequence
agagaaccaattagaaaaaaaat

SEQ ID NO: 246695 - DNA, 23 bp, Artificial sequence
  SiRNA target sequence
gagaaccaattagaaaaaaaatg

SEQ ID NO: 246696 - DNA, 23 bp, Artificial sequence
  SiRNA target sequence
agaaccaattagaaaaaaaatgc

SEQ ID NO: 246697 - DNA, 23 bp, Artificial sequence
  SiRNA target sequence
gaaccaattagaaaaaaaatgcc

SEQ ID NO: 246698 - DNA, 23 bp, Artificial sequence
  SiRNA target sequence
aaccaattagaaaaaaaatgcca

SEQ ID NO: 246699 - DNA, 23 bp, Artificial sequence
  SiRNA target sequence
accaattagaaaaaaaatgccaa

SEQ ID NO: 246700 - DNA, 23 bp, Artificial sequence
  SiRNA target sequence
ccaattagaaaaaaaatgccaat

SEQ ID NO: 246701 - DNA, 23 bp, Artificial sequence
  SiRNA target sequence
caattagaaaaaaaatgccaata

SEQ ID NO: 246702 - DNA, 23 bp, Artificial sequence
  SiRNA target sequence
aattagaaaaaaaatgccaataa

SEQ ID NO: 246703 - DNA, 23 bp, Artificial sequence
  SiRNA target sequence
attagaaaaaaaatgccaataaa

SEQ ID NO: 246704 - DNA, 23 bp, Artificial sequence
  SiRNA target sequence
ttagaaaaaaaatgccaataaaa

SEQ ID NO: 246705 - DNA, 23 bp, Artificial sequence
  SiRNA target sequence
tagaaaaaaaatgccaataaaac

SEQ ID NO: 246706 - DNA, 23 bp, Artificial sequence
  SiRNA target sequence
agaaaaaaaatgccaataaaacc

SEQ ID NO: 246707 - DNA, 23 bp, Artificial sequence
  SiRNA target sequence
gaaaaaaaatgccaataaaacca

SEQ ID NO: 246708 - DNA, 23 bp, Artificial sequence
  SiRNA target sequence
aaaaaaaatgccaataaaaccaa

SEQ ID NO: 246709 - DNA, 23 bp, Artificial sequence
  SiRNA target sequence
aaaaaaatgccaataaaaccaaa

SEQ ID NO: 246710 - DNA, 23 bp, Artificial sequence
  SiRNA target sequence
aaaaaatgccaataaaaccaaaa

SEQ ID NO: 246711 - DNA, 23 bp, Artificial sequence
  SiRNA target sequence
aaaaatgccaataaaaccaaaaa

SEQ ID NO: 246712 - DNA, 23 bp, Artificial sequence
  SiRNA target sequence
aaaatgccaataaaaccaaaaat

SEQ ID NO: 246713 - DNA, 23 bp, Artificial sequence
  SiRNA target sequence
aaatgccaataaaaccaaaaata

SEQ ID NO: 246714 - DNA, 23 bp, Artificial sequence
  SiRNA target sequence
aatgccaataaaaccaaaaataa

SEQ ID NO: 246715 - DNA, 23 bp, Artificial sequence
  SiRNA target sequence
atgccaataaaaccaaaaataat

SEQ ID NO: 246716 - DNA, 23 bp, Artificial sequence
  SiRNA target sequence
tgccaataaaaccaaaaataata

SEQ ID NO: 246717 - DNA, 23 bp, Artificial sequence
  SiRNA target sequence
gccaataaaaccaaaaataataa

SEQ ID NO: 246718 - DNA, 23 bp, Artificial sequence
  SiRNA target sequence
ccaataaaaccaaaaataataaa

SEQ ID NO: 246719 - DNA, 23 bp, Artificial sequence
  SiRNA target sequence
caataaaaccaaaaataataaaa

SEQ ID NO: 246720 - DNA, 23 bp, Artificial sequence
  SiRNA target sequence
aataaaaccaaaaataataaaat

SEQ ID NO: 246721 - DNA, 23 bp, Artificial sequence
  SiRNA target sequence
ataaaaccaaaaataataaaatt

SEQ ID NO: 246722 - DNA, 23 bp, Artificial sequence
  SiRNA target sequence
taaaaccaaaaataataaaattc

SEQ ID NO: 246723 - DNA, 23 bp, Artificial sequence
  SiRNA target sequence
aaaaccaaaaataataaaattca

SEQ ID NO: 246724 - DNA, 23 bp, Artificial sequence
  SiRNA target sequence
aaaccaaaaataataaaattcac

SEQ ID NO: 246725 - DNA, 23 bp, Artificial sequence
  SiRNA target sequence
aaccaaaaataataaaattcaca

SEQ ID NO: 246726 - DNA, 23 bp, Artificial sequence
  SiRNA target sequence
accaaaaataataaaattcacaa

SEQ ID NO: 246727 - DNA, 23 bp, Artificial sequence
  SiRNA target sequence
ccaaaaataataaaattcacaat

SEQ ID NO: 246728 - DNA, 23 bp, Artificial sequence
  SiRNA target sequence
caaaaataataaaattcacaata

SEQ ID NO: 246729 - DNA, 23 bp, Artificial sequence
  SiRNA target sequence
aaaaataataaaattcacaatac

SEQ ID NO: 246730 - DNA, 23 bp, Artificial sequence
  SiRNA target sequence
aaaataataaaattcacaatact

SEQ ID NO: 246731 - DNA, 23 bp, Artificial sequence
  SiRNA target sequence
aaataataaaattcacaatacta

SEQ ID NO: 246732 - DNA, 23 bp, Artificial sequence
  SiRNA target sequence
aataataaaattcacaatactaa

SEQ ID NO: 246733 - DNA, 23 bp, Artificial sequence
  SiRNA target sequence
ataataaaattcacaatactaag

SEQ ID NO: 246734 - DNA, 23 bp, Artificial sequence
  SiRNA target sequence
taataaaattcacaatactaaga

SEQ ID NO: 246735 - DNA, 23 bp, Artificial sequence
  SiRNA target sequence
aataaaattcacaatactaagaa

SEQ ID NO: 246736 - DNA, 23 bp, Artificial sequence
  SiRNA target sequence
ataaaattcacaatactaagaat

SEQ ID NO: 246737 - DNA, 23 bp, Artificial sequence
  SiRNA target sequence
taaaattcacaatactaagaata

SEQ ID NO: 246738 - DNA, 23 bp, Artificial sequence
  SiRNA target sequence
aaaattcacaatactaagaatag

SEQ ID NO: 246739 - DNA, 23 bp, Artificial sequence
  SiRNA target sequence
aaattcacaatactaagaataga

SEQ ID NO: 246740 - DNA, 23 bp, Artificial sequence
  SiRNA target sequence
aattcacaatactaagaatagag

SEQ ID NO: 246741 - DNA, 23 bp, Artificial sequence
  SiRNA target sequence
attcacaatactaagaatagagt

SEQ ID NO: 246742 - DNA, 23 bp, Artificial sequence
  SiRNA target sequence
ttcacaatactaagaatagagta

SEQ ID NO: 246743 - DNA, 23 bp, Artificial sequence
  SiRNA target sequence
tcacaatactaagaatagagtac

SEQ ID NO: 246744 - DNA, 23 bp, Artificial sequence
  SiRNA target sequence
cacaatactaagaatagagtaca

SEQ ID NO: 246745 - DNA, 23 bp, Artificial sequence
  SiRNA target sequence
acaatactaagaatagagtacac

SEQ ID NO: 246746 - DNA, 23 bp, Artificial sequence
  SiRNA target sequence
caatactaagaatagagtacaca

SEQ ID NO: 246747 - DNA, 23 bp, Artificial sequence
  SiRNA target sequence
aatactaagaatagagtacacat

SEQ ID NO: 246748 - DNA, 23 bp, Artificial sequence
  SiRNA target sequence
atactaagaatagagtacacatt

SEQ ID NO: 246749 - DNA, 23 bp, Artificial sequence
  SiRNA target sequence
tactaagaatagagtacacattt

SEQ ID NO: 246750 - DNA, 23 bp, Artificial sequence
  SiRNA target sequence
actaagaatagagtacacattta

SEQ ID NO: 246751 - DNA, 23 bp, Artificial sequence
  SiRNA target sequence
ctaagaatagagtacacatttaa

SEQ ID NO: 246752 - DNA, 23 bp, Artificial sequence
  SiRNA target sequence
taagaatagagtacacatttaaa

SEQ ID NO: 246753 - DNA, 23 bp, Artificial sequence
  SiRNA target sequence
aagaatagagtacacatttaaag

SEQ ID NO: 246754 - DNA, 23 bp, Artificial sequence
  SiRNA target sequence
agaatagagtacacatttaaagc

SEQ ID NO: 246755 - DNA, 23 bp, Artificial sequence
  SiRNA target sequence
gaatagagtacacatttaaagcc

SEQ ID NO: 246756 - DNA, 23 bp, Artificial sequence
  SiRNA target sequence
aatagagtacacatttaaagcct

SEQ ID NO: 246757 - DNA, 23 bp, Artificial sequence
  SiRNA target sequence
atagagtacacatttaaagcctt

SEQ ID NO: 246758 - DNA, 23 bp, Artificial sequence
  SiRNA target sequence
tagagtacacatttaaagccttt

SEQ ID NO: 246759 - DNA, 23 bp, Artificial sequence
  SiRNA target sequence
agagtacacatttaaagcctttt

SEQ ID NO: 246760 - DNA, 23 bp, Artificial sequence
  SiRNA target sequence
gagtacacatttaaagccttttg

SEQ ID NO: 246761 - DNA, 23 bp, Artificial sequence
  SiRNA target sequence
agtacacatttaaagccttttgg

SEQ ID NO: 246762 - DNA, 23 bp, Artificial sequence
  SiRNA target sequence
gtacacatttaaagccttttgga

SEQ ID NO: 246763 - DNA, 23 bp, Artificial sequence
  SiRNA target sequence
tacacatttaaagccttttggac

SEQ ID NO: 246764 - DNA, 23 bp, Artificial sequence
  SiRNA target sequence
acacatttaaagccttttggaca

SEQ ID NO: 246765 - DNA, 23 bp, Artificial sequence
  SiRNA target sequence
cacatttaaagccttttggacat

SEQ ID NO: 246766 - DNA, 23 bp, Artificial sequence
  SiRNA target sequence
acatttaaagccttttggacata

SEQ ID NO: 246767 - DNA, 23 bp, Artificial sequence
  SiRNA target sequence
catttaaagccttttggacatat

SEQ ID NO: 246768 - DNA, 23 bp, Artificial sequence
  SiRNA target sequence
atttaaagccttttggacatatg

SEQ ID NO: 246769 - DNA, 23 bp, Artificial sequence
  SiRNA target sequence
tttaaagccttttggacatatga

SEQ ID NO: 246770 - DNA, 23 bp, Artificial sequence
  SiRNA target sequence
ttaaagccttttggacatatgac

SEQ ID NO: 246771 - DNA, 23 bp, Artificial sequence
  SiRNA target sequence
taaagccttttggacatatgaca

SEQ ID NO: 246772 - DNA, 23 bp, Artificial sequence
  SiRNA target sequence
aaagccttttggacatatgacat

SEQ ID NO: 246773 - DNA, 23 bp, Artificial sequence
  SiRNA target sequence
aagccttttggacatatgacatc

SEQ ID NO: 246774 - DNA, 23 bp, Artificial sequence
  SiRNA target sequence
agccttttggacatatgacatca

SEQ ID NO: 246775 - DNA, 23 bp, Artificial sequence
  SiRNA target sequence
gccttttggacatatgacatcat

SEQ ID NO: 246776 - DNA, 23 bp, Artificial sequence
  SiRNA target sequence
ccttttggacatatgacatcata

SEQ ID NO: 246777 - DNA, 23 bp, Artificial sequence
  SiRNA target sequence
cttttggacatatgacatcataa

SEQ ID NO: 246778 - DNA, 23 bp, Artificial sequence
  SiRNA target sequence
ttttggacatatgacatcataag

SEQ ID NO: 246779 - DNA, 23 bp, Artificial sequence
  SiRNA target sequence
tttggacatatgacatcataaga

SEQ ID NO: 246780 - DNA, 23 bp, Artificial sequence
  SiRNA target sequence
ttggacatatgacatcataagac

SEQ ID NO: 246781 - DNA, 23 bp, Artificial sequence
  SiRNA target sequence
tggacatatgacatcataagaca

SEQ ID NO: 246782 - DNA, 23 bp, Artificial sequence
  SiRNA target sequence
ggacatatgacatcataagacat

SEQ ID NO: 246783 - DNA, 23 bp, Artificial sequence
  SiRNA target sequence
gacatatgacatcataagacata

SEQ ID NO: 246784 - DNA, 23 bp, Artificial sequence
  SiRNA target sequence
acatatgacatcataagacatat

SEQ ID NO: 246785 - DNA, 23 bp, Artificial sequence
  SiRNA target sequence
catatgacatcataagacatata

SEQ ID NO: 246786 - DNA, 23 bp, Artificial sequence
  SiRNA target sequence
atatgacatcataagacatataa

SEQ ID NO: 246787 - DNA, 23 bp, Artificial sequence
  SiRNA target sequence
tatgacatcataagacatataat

SEQ ID NO: 246788 - DNA, 23 bp, Artificial sequence
  SiRNA target sequence
atgacatcataagacatataatt

SEQ ID NO: 246789 - DNA, 23 bp, Artificial sequence
  SiRNA target sequence
tgacatcataagacatataattg

SEQ ID NO: 246790 - DNA, 23 bp, Artificial sequence
  SiRNA target sequence
gacatcataagacatataattgg

SEQ ID NO: 246791 - DNA, 23 bp, Artificial sequence
  SiRNA target sequence
acatcataagacatataattggc

SEQ ID NO: 246792 - DNA, 23 bp, Artificial sequence
  SiRNA target sequence
catcataagacatataattggca

SEQ ID NO: 246793 - DNA, 23 bp, Artificial sequence
  SiRNA target sequence
atcataagacatataattggcag

SEQ ID NO: 246794 - DNA, 23 bp, Artificial sequence
  SiRNA target sequence
tcataagacatataattggcagt

SEQ ID NO: 246795 - DNA, 23 bp, Artificial sequence
  SiRNA target sequence
cataagacatataattggcagtg

SEQ ID NO: 246796 - DNA, 23 bp, Artificial sequence
  SiRNA target sequence
ataagacatataattggcagtga

SEQ ID NO: 246797 - DNA, 23 bp, Artificial sequence
  SiRNA target sequence
taagacatataattggcagtgaa

SEQ ID NO: 246798 - DNA, 23 bp, Artificial sequence
  SiRNA target sequence
aagacatataattggcagtgaaa

SEQ ID NO: 246799 - DNA, 23 bp, Artificial sequence
  SiRNA target sequence
agacatataattggcagtgaaaa

SEQ ID NO: 246800 - DNA, 23 bp, Artificial sequence
  SiRNA target sequence
gacatataattggcagtgaaaag

SEQ ID NO: 246801 - DNA, 23 bp, Artificial sequence
  SiRNA target sequence
acatataattggcagtgaaaaga

SEQ ID NO: 246802 - DNA, 23 bp, Artificial sequence
  SiRNA target sequence
catataattggcagtgaaaagaa

SEQ ID NO: 246803 - DNA, 23 bp, Artificial sequence
  SiRNA target sequence
atataattggcagtgaaaagaaa

SEQ ID NO: 246804 - DNA, 23 bp, Artificial sequence
  SiRNA target sequence
tataattggcagtgaaaagaaaa

SEQ ID NO: 246805 - DNA, 23 bp, Artificial sequence
  SiRNA target sequence
ataattggcagtgaaaagaaaag

SEQ ID NO: 246806 - DNA, 23 bp, Artificial sequence
  SiRNA target sequence
taattggcagtgaaaagaaaagc

SEQ ID NO: 246807 - DNA, 23 bp, Artificial sequence
  SiRNA target sequence
aattggcagtgaaaagaaaagct

SEQ ID NO: 246808 - DNA, 23 bp, Artificial sequence
  SiRNA target sequence
attggcagtgaaaagaaaagctt

SEQ ID NO: 246809 - DNA, 23 bp, Artificial sequence
  SiRNA target sequence
ttggcagtgaaaagaaaagcttt

SEQ ID NO: 246810 - DNA, 23 bp, Artificial sequence
  SiRNA target sequence
tggcagtgaaaagaaaagcttta

SEQ ID NO: 246811 - DNA, 23 bp, Artificial sequence
  SiRNA target sequence
ggcagtgaaaagaaaagctttat

SEQ ID NO: 246812 - DNA, 23 bp, Artificial sequence
  SiRNA target sequence
gcagtgaaaagaaaagctttatg

SEQ ID NO: 246813 - DNA, 23 bp, Artificial sequence
  SiRNA target sequence
cagtgaaaagaaaagctttatgt

SEQ ID NO: 246814 - DNA, 23 bp, Artificial sequence
  SiRNA target sequence
agtgaaaagaaaagctttatgta

SEQ ID NO: 246815 - DNA, 23 bp, Artificial sequence
  SiRNA target sequence
gtgaaaagaaaagctttatgtag

SEQ ID NO: 246816 - DNA, 23 bp, Artificial sequence
  SiRNA target sequence
tgaaaagaaaagctttatgtagt

SEQ ID NO: 246817 - DNA, 23 bp, Artificial sequence
  SiRNA target sequence
gaaaagaaaagctttatgtagta

SEQ ID NO: 246818 - DNA, 23 bp, Artificial sequence
  SiRNA target sequence
aaaagaaaagctttatgtagtac

SEQ ID NO: 246819 - DNA, 23 bp, Artificial sequence
  SiRNA target sequence
aaagaaaagctttatgtagtaca

SEQ ID NO: 246820 - DNA, 23 bp, Artificial sequence
  SiRNA target sequence
aagaaaagctttatgtagtacag

SEQ ID NO: 246821 - DNA, 23 bp, Artificial sequence
  SiRNA target sequence
agaaaagctttatgtagtacagt

SEQ ID NO: 246822 - DNA, 23 bp, Artificial sequence
  SiRNA target sequence
gaaaagctttatgtagtacagtg

SEQ ID NO: 246823 - DNA, 23 bp, Artificial sequence
  SiRNA target sequence
aaaagctttatgtagtacagtga

SEQ ID NO: 246824 - DNA, 23 bp, Artificial sequence
  SiRNA target sequence
aaagctttatgtagtacagtgac

SEQ ID NO: 246825 - DNA, 23 bp, Artificial sequence
  SiRNA target sequence
aagctttatgtagtacagtgacg

SEQ ID NO: 246826 - DNA, 23 bp, Artificial sequence
  SiRNA target sequence
agctttatgtagtacagtgacga

SEQ ID NO: 246827 - DNA, 23 bp, Artificial sequence
  SiRNA target sequence
gctttatgtagtacagtgacgaa

SEQ ID NO: 246828 - DNA, 23 bp, Artificial sequence
  SiRNA target sequence
ctttatgtagtacagtgacgaag

SEQ ID NO: 246829 - DNA, 23 bp, Artificial sequence
  SiRNA target sequence
tttatgtagtacagtgacgaagg

SEQ ID NO: 246830 - DNA, 23 bp, Artificial sequence
  SiRNA target sequence
ttatgtagtacagtgacgaagga

SEQ ID NO: 246831 - DNA, 23 bp, Artificial sequence
  SiRNA target sequence
tatgtagtacagtgacgaaggaa

SEQ ID NO: 246832 - DNA, 23 bp, Artificial sequence
  SiRNA target sequence
atgtagtacagtgacgaaggaat

SEQ ID NO: 246833 - DNA, 23 bp, Artificial sequence
  SiRNA target sequence
tgtagtacagtgacgaaggaatt

SEQ ID NO: 246834 - DNA, 23 bp, Artificial sequence
  SiRNA target sequence
gtagtacagtgacgaaggaattt

SEQ ID NO: 246835 - DNA, 23 bp, Artificial sequence
  SiRNA target sequence
tagtacagtgacgaaggaatttg

SEQ ID NO: 246836 - DNA, 23 bp, Artificial sequence
  SiRNA target sequence
agtacagtgacgaaggaatttgt

SEQ ID NO: 246837 - DNA, 23 bp, Artificial sequence
  SiRNA target sequence
gtacagtgacgaaggaatttgtt

SEQ ID NO: 246838 - DNA, 23 bp, Artificial sequence
  SiRNA target sequence
tacagtgacgaaggaatttgttt

SEQ ID NO: 246839 - DNA, 23 bp, Artificial sequence
  SiRNA target sequence
acagtgacgaaggaatttgtttt

SEQ ID NO: 246840 - DNA, 23 bp, Artificial sequence
  SiRNA target sequence
cagtgacgaaggaatttgttttg

SEQ ID NO: 246841 - DNA, 23 bp, Artificial sequence
  SiRNA target sequence
agtgacgaaggaatttgttttgt

SEQ ID NO: 246842 - DNA, 23 bp, Artificial sequence
  SiRNA target sequence
gtgacgaaggaatttgttttgtc

SEQ ID NO: 246843 - DNA, 23 bp, Artificial sequence
  SiRNA target sequence
tgacgaaggaatttgttttgtca

SEQ ID NO: 246844 - DNA, 23 bp, Artificial sequence
  SiRNA target sequence
gacgaaggaatttgttttgtcat

SEQ ID NO: 246845 - DNA, 23 bp, Artificial sequence
  SiRNA target sequence
acgaaggaatttgttttgtcata

SEQ ID NO: 246846 - DNA, 23 bp, Artificial sequence
  SiRNA target sequence
cgaaggaatttgttttgtcataa

SEQ ID NO: 246847 - DNA, 23 bp, Artificial sequence
  SiRNA target sequence
gaaggaatttgttttgtcataat

SEQ ID NO: 246848 - DNA, 23 bp, Artificial sequence
  SiRNA target sequence
aaggaatttgttttgtcataatc

SEQ ID NO: 246849 - DNA, 23 bp, Artificial sequence
  SiRNA target sequence
aggaatttgttttgtcataatca

SEQ ID NO: 246850 - DNA, 23 bp, Artificial sequence
  SiRNA target sequence
ggaatttgttttgtcataatcac

SEQ ID NO: 246851 - DNA, 23 bp, Artificial sequence
  SiRNA target sequence
gaatttgttttgtcataatcacg

SEQ ID NO: 246852 - DNA, 23 bp, Artificial sequence
  SiRNA target sequence
aatttgttttgtcataatcacga

SEQ ID NO: 246853 - DNA, 23 bp, Artificial sequence
  SiRNA target sequence
atttgttttgtcataatcacgat

SEQ ID NO: 246854 - DNA, 23 bp, Artificial sequence
  SiRNA target sequence
tttgttttgtcataatcacgatt

SEQ ID NO: 246855 - DNA, 23 bp, Artificial sequence
  SiRNA target sequence
ttgttttgtcataatcacgattt

SEQ ID NO: 246856 - DNA, 23 bp, Artificial sequence
  SiRNA target sequence
tgttttgtcataatcacgatttc

SEQ ID NO: 246857 - DNA, 23 bp, Artificial sequence
  SiRNA target sequence
gttttgtcataatcacgatttct

SEQ ID NO: 246858 - DNA, 23 bp, Artificial sequence
  SiRNA target sequence
ttttgtcataatcacgatttctc

SEQ ID NO: 246859 - DNA, 23 bp, Artificial sequence
  SiRNA target sequence
tttgtcataatcacgatttctct

SEQ ID NO: 246860 - DNA, 23 bp, Artificial sequence
  SiRNA target sequence
ttgtcataatcacgatttctctg

SEQ ID NO: 246861 - DNA, 23 bp, Artificial sequence
  SiRNA target sequence
tgtcataatcacgatttctctgt

SEQ ID NO: 246862 - DNA, 23 bp, Artificial sequence
  SiRNA target sequence
gtcataatcacgatttctctgta

SEQ ID NO: 246863 - DNA, 23 bp, Artificial sequence
  SiRNA target sequence
tcataatcacgatttctctgtaa

SEQ ID NO: 246864 - DNA, 23 bp, Artificial sequence
  SiRNA target sequence
cataatcacgatttctctgtaaa

SEQ ID NO: 246865 - DNA, 23 bp, Artificial sequence
  SiRNA target sequence
ataatcacgatttctctgtaaaa

SEQ ID NO: 246866 - DNA, 23 bp, Artificial sequence
  SiRNA target sequence
taatcacgatttctctgtaaaat

SEQ ID NO: 246867 - DNA, 23 bp, Artificial sequence
  SiRNA target sequence
aatcacgatttctctgtaaaatt

SEQ ID NO: 246868 - DNA, 23 bp, Artificial sequence
  SiRNA target sequence
atcacgatttctctgtaaaattc

SEQ ID NO: 246869 - DNA, 23 bp, Artificial sequence
  SiRNA target sequence
tcacgatttctctgtaaaattcc

SEQ ID NO: 246870 - DNA, 23 bp, Artificial sequence
  SiRNA target sequence
cacgatttctctgtaaaattcca

SEQ ID NO: 246871 - DNA, 23 bp, Artificial sequence
  SiRNA target sequence
acgatttctctgtaaaattccaa

SEQ ID NO: 246872 - DNA, 23 bp, Artificial sequence
  SiRNA target sequence
cgatttctctgtaaaattccaat

SEQ ID NO: 246873 - DNA, 23 bp, Artificial sequence
  SiRNA target sequence
gatttctctgtaaaattccaata

SEQ ID NO: 246874 - DNA, 23 bp, Artificial sequence
  SiRNA target sequence
atttctctgtaaaattccaataa

SEQ ID NO: 246875 - DNA, 23 bp, Artificial sequence
  SiRNA target sequence
tttctctgtaaaattccaataat

SEQ ID NO: 246876 - DNA, 23 bp, Artificial sequence
  SiRNA target sequence
ttctctgtaaaattccaataatg

SEQ ID NO: 246877 - DNA, 23 bp, Artificial sequence
  SiRNA target sequence
tctctgtaaaattccaataatgt

SEQ ID NO: 246878 - DNA, 23 bp, Artificial sequence
  SiRNA target sequence
ctctgtaaaattccaataatgtg

SEQ ID NO: 246879 - DNA, 23 bp, Artificial sequence
  SiRNA target sequence
tctgtaaaattccaataatgtgt

SEQ ID NO: 246880 - DNA, 23 bp, Artificial sequence
  SiRNA target sequence
ctgtaaaattccaataatgtgtt

SEQ ID NO: 246881 - DNA, 23 bp, Artificial sequence
  SiRNA target sequence
tgtaaaattccaataatgtgtta

SEQ ID NO: 246882 - DNA, 23 bp, Artificial sequence
  SiRNA target sequence
gtaaaattccaataatgtgttaa

SEQ ID NO: 246883 - DNA, 23 bp, Artificial sequence
  SiRNA target sequence
taaaattccaataatgtgttaat

SEQ ID NO: 246884 - DNA, 23 bp, Artificial sequence
  SiRNA target sequence
aaaattccaataatgtgttaatc

SEQ ID NO: 246885 - DNA, 23 bp, Artificial sequence
  SiRNA target sequence
aaattccaataatgtgttaatca

SEQ ID NO: 246886 - DNA, 23 bp, Artificial sequence
  SiRNA target sequence
aattccaataatgtgttaatcac

SEQ ID NO: 246887 - DNA, 23 bp, Artificial sequence
  SiRNA target sequence
attccaataatgtgttaatcaca

SEQ ID NO: 246888 - DNA, 23 bp, Artificial sequence
  SiRNA target sequence
ttccaataatgtgttaatcacac

SEQ ID NO: 246889 - DNA, 23 bp, Artificial sequence
  SiRNA target sequence
tccaataatgtgttaatcacaca

SEQ ID NO: 246890 - DNA, 23 bp, Artificial sequence
  SiRNA target sequence
ccaataatgtgttaatcacacat

SEQ ID NO: 246891 - DNA, 23 bp, Artificial sequence
  SiRNA target sequence
caataatgtgttaatcacacatg

SEQ ID NO: 246892 - DNA, 23 bp, Artificial sequence
  SiRNA target sequence
aataatgtgttaatcacacatgc

SEQ ID NO: 246893 - DNA, 23 bp, Artificial sequence
  SiRNA target sequence
ataatgtgttaatcacacatgcc

SEQ ID NO: 246894 - DNA, 23 bp, Artificial sequence
  SiRNA target sequence
taatgtgttaatcacacatgcca

SEQ ID NO: 246895 - DNA, 23 bp, Artificial sequence
  SiRNA target sequence
aatgtgttaatcacacatgccat

SEQ ID NO: 246896 - DNA, 23 bp, Artificial sequence
  SiRNA target sequence
atgtgttaatcacacatgccatt

SEQ ID NO: 246897 - DNA, 23 bp, Artificial sequence
  SiRNA target sequence
tgtgttaatcacacatgccatta

SEQ ID NO: 246898 - DNA, 23 bp, Artificial sequence
  SiRNA target sequence
gtgttaatcacacatgccattaa

SEQ ID NO: 246899 - DNA, 23 bp, Artificial sequence
  SiRNA target sequence
tgttaatcacacatgccattaaa

SEQ ID NO: 246900 - DNA, 23 bp, Artificial sequence
  SiRNA target sequence
gttaatcacacatgccattaaaa

SEQ ID NO: 246901 - DNA, 23 bp, Artificial sequence
  SiRNA target sequence
ttaatcacacatgccattaaaaa

SEQ ID NO: 246902 - DNA, 23 bp, Artificial sequence
  SiRNA target sequence
taatcacacatgccattaaaaat

SEQ ID NO: 246903 - DNA, 23 bp, Artificial sequence
  SiRNA target sequence
aatcacacatgccattaaaaatg

SEQ ID NO: 246904 - DNA, 23 bp, Artificial sequence
  SiRNA target sequence
atcacacatgccattaaaaatgt

SEQ ID NO: 246905 - DNA, 23 bp, Artificial sequence
  SiRNA target sequence
tcacacatgccattaaaaatgta

SEQ ID NO: 246906 - DNA, 23 bp, Artificial sequence
  SiRNA target sequence
cacacatgccattaaaaatgtaa

SEQ ID NO: 246907 - DNA, 23 bp, Artificial sequence
  SiRNA target sequence
acacatgccattaaaaatgtaag

SEQ ID NO: 246908 - DNA, 23 bp, Artificial sequence
  SiRNA target sequence
cacatgccattaaaaatgtaagt

SEQ ID NO: 246909 - DNA, 23 bp, Artificial sequence
  SiRNA target sequence
acatgccattaaaaatgtaagtg

SEQ ID NO: 246910 - DNA, 23 bp, Artificial sequence
  SiRNA target sequence
catgccattaaaaatgtaagtga

SEQ ID NO: 246911 - DNA, 23 bp, Artificial sequence
  SiRNA target sequence
atgccattaaaaatgtaagtgac

SEQ ID NO: 246912 - DNA, 23 bp, Artificial sequence
  SiRNA target sequence
tgccattaaaaatgtaagtgaca

SEQ ID NO: 246913 - DNA, 23 bp, Artificial sequence
  SiRNA target sequence
gccattaaaaatgtaagtgacaa

SEQ ID NO: 246914 - DNA, 23 bp, Artificial sequence
  SiRNA target sequence
ccattaaaaatgtaagtgacaat

SEQ ID NO: 246915 - DNA, 23 bp, Artificial sequence
  SiRNA target sequence
cattaaaaatgtaagtgacaata

SEQ ID NO: 246916 - DNA, 23 bp, Artificial sequence
  SiRNA target sequence
attaaaaatgtaagtgacaataa

SEQ ID NO: 246917 - DNA, 23 bp, Artificial sequence
  SiRNA target sequence
ttaaaaatgtaagtgacaataat

SEQ ID NO: 246918 - DNA, 23 bp, Artificial sequence
  SiRNA target sequence
taaaaatgtaagtgacaataata

SEQ ID NO: 246919 - DNA, 23 bp, Artificial sequence
  SiRNA target sequence
aaaaatgtaagtgacaataatat

SEQ ID NO: 246920 - DNA, 23 bp, Artificial sequence
  SiRNA target sequence
aaaatgtaagtgacaataatatt

SEQ ID NO: 246921 - DNA, 23 bp, Artificial sequence
  SiRNA target sequence
aaatgtaagtgacaataatattt

SEQ ID NO: 246922 - DNA, 23 bp, Artificial sequence
  SiRNA target sequence
aatgtaagtgacaataatatttt

SEQ ID NO: 246923 - DNA, 23 bp, Artificial sequence
  SiRNA target sequence
atgtaagtgacaataatattttt

SEQ ID NO: 246924 - DNA, 23 bp, Artificial sequence
  SiRNA target sequence
tgtaagtgacaataatattttta

SEQ ID NO: 246925 - DNA, 23 bp, Artificial sequence
  SiRNA target sequence
gtaagtgacaataatatttttac

SEQ ID NO: 246926 - DNA, 23 bp, Artificial sequence
  SiRNA target sequence
taagtgacaataatatttttact

SEQ ID NO: 246927 - DNA, 23 bp, Artificial sequence
  SiRNA target sequence
aagtgacaataatatttttactt

SEQ ID NO: 246928 - DNA, 23 bp, Artificial sequence
  SiRNA target sequence
agtgacaataatatttttacttt

SEQ ID NO: 246929 - DNA, 23 bp, Artificial sequence
  SiRNA target sequence
gtgacaataatatttttactttt

SEQ ID NO: 246930 - DNA, 23 bp, Artificial sequence
  SiRNA target sequence
tgacaataatatttttacttttg

SEQ ID NO: 246931 - DNA, 23 bp, Artificial sequence
  SiRNA target sequence
gacaataatatttttacttttgg

SEQ ID NO: 246932 - DNA, 23 bp, Artificial sequence
  SiRNA target sequence
acaataatatttttacttttggg

SEQ ID NO: 246933 - DNA, 23 bp, Artificial sequence
  SiRNA target sequence
caataatatttttacttttggga

SEQ ID NO: 246934 - DNA, 23 bp, Artificial sequence
  SiRNA target sequence
aataatatttttacttttgggaa

SEQ ID NO: 246935 - DNA, 23 bp, Artificial sequence
  SiRNA target sequence
ataatatttttacttttgggaat

SEQ ID NO: 246936 - DNA, 23 bp, Artificial sequence
  SiRNA target sequence
taatatttttacttttgggaatt

SEQ ID NO: 246937 - DNA, 23 bp, Artificial sequence
  SiRNA target sequence
aatatttttacttttgggaattt

SEQ ID NO: 246938 - DNA, 23 bp, Artificial sequence
  SiRNA target sequence
atatttttacttttgggaatttt

SEQ ID NO: 246939 - DNA, 23 bp, Artificial sequence
  SiRNA target sequence
tatttttacttttgggaattttt

SEQ ID NO: 246940 - DNA, 23 bp, Artificial sequence
  SiRNA target sequence
atttttacttttgggaatttttt

SEQ ID NO: 246941 - DNA, 23 bp, Artificial sequence
  SiRNA target sequence
tttttacttttgggaattttttt

SEQ ID NO: 246942 - DNA, 23 bp, Artificial sequence
  SiRNA target sequence
ttttacttttgggaatttttttg

SEQ ID NO: 246943 - DNA, 23 bp, Artificial sequence
  SiRNA target sequence
tttacttttgggaatttttttgt

SEQ ID NO: 246944 - DNA, 23 bp, Artificial sequence
  SiRNA target sequence
ttacttttgggaatttttttgtc

SEQ ID NO: 246945 - DNA, 23 bp, Artificial sequence
  SiRNA target sequence
tacttttgggaatttttttgtct

SEQ ID NO: 246946 - DNA, 23 bp, Artificial sequence
  SiRNA target sequence
acttttgggaatttttttgtctt

SEQ ID NO: 246947 - DNA, 23 bp, Artificial sequence
  SiRNA target sequence
cttttgggaatttttttgtctta

SEQ ID NO: 246948 - DNA, 23 bp, Artificial sequence
  SiRNA target sequence
ttttgggaatttttttgtcttag

SEQ ID NO: 246949 - DNA, 23 bp, Artificial sequence
  SiRNA target sequence
tttgggaatttttttgtcttagt

SEQ ID NO: 246950 - DNA, 23 bp, Artificial sequence
  SiRNA target sequence
ttgggaatttttttgtcttagtc

SEQ ID NO: 246951 - DNA, 23 bp, Artificial sequence
  SiRNA target sequence
tgggaatttttttgtcttagtca

SEQ ID NO: 246952 - DNA, 23 bp, Artificial sequence
  SiRNA target sequence
gggaatttttttgtcttagtcat

SEQ ID NO: 246953 - DNA, 24 bp, Artificial sequence
  SiRNA target sequence
ttaattaaaatcaacatctatctc

SEQ ID NO: 246954 - DNA, 24 bp, Artificial sequence
  SiRNA target sequence
taattaaaatcaacatctatctca

SEQ ID NO: 246955 - DNA, 24 bp, Artificial sequence
  SiRNA target sequence
aattaaaatcaacatctatctcag

SEQ ID NO: 246956 - DNA, 24 bp, Artificial sequence
  SiRNA target sequence
attaaaatcaacatctatctcaga

SEQ ID NO: 246957 - DNA, 24 bp, Artificial sequence
  SiRNA target sequence
ttaaaatcaacatctatctcagaa

SEQ ID NO: 246958 - DNA, 24 bp, Artificial sequence
  SiRNA target sequence
taaaatcaacatctatctcagaat

SEQ ID NO: 246959 - DNA, 24 bp, Artificial sequence
  SiRNA target sequence
aaaatcaacatctatctcagaatt

SEQ ID NO: 246960 - DNA, 24 bp, Artificial sequence
  SiRNA target sequence
aaatcaacatctatctcagaattt

SEQ ID NO: 246961 - DNA, 24 bp, Artificial sequence
  SiRNA target sequence
aatcaacatctatctcagaatttt

SEQ ID NO: 246962 - DNA, 24 bp, Artificial sequence
  SiRNA target sequence
atcaacatctatctcagaattttg

SEQ ID NO: 246963 - DNA, 24 bp, Artificial sequence
  SiRNA target sequence
tcaacatctatctcagaattttgt

SEQ ID NO: 246964 - DNA, 24 bp, Artificial sequence
  SiRNA target sequence
caacatctatctcagaattttgtt

SEQ ID NO: 246965 - DNA, 24 bp, Artificial sequence
  SiRNA target sequence
aacatctatctcagaattttgttc

SEQ ID NO: 246966 - DNA, 24 bp, Artificial sequence
  SiRNA target sequence
acatctatctcagaattttgttca

SEQ ID NO: 246967 - DNA, 24 bp, Artificial sequence
  SiRNA target sequence
catctatctcagaattttgttcaa

SEQ ID NO: 246968 - DNA, 24 bp, Artificial sequence
  SiRNA target sequence
atctatctcagaattttgttcaat

SEQ ID NO: 246969 - DNA, 24 bp, Artificial sequence
  SiRNA target sequence
tctatctcagaattttgttcaatt

SEQ ID NO: 246970 - DNA, 24 bp, Artificial sequence
  SiRNA target sequence
ctatctcagaattttgttcaattg

SEQ ID NO: 246971 - DNA, 24 bp, Artificial sequence
  SiRNA target sequence
tatctcagaattttgttcaattga

SEQ ID NO: 246972 - DNA, 24 bp, Artificial sequence
  SiRNA target sequence
atctcagaattttgttcaattgat

SEQ ID NO: 246973 - DNA, 24 bp, Artificial sequence
  SiRNA target sequence
tctcagaattttgttcaattgatt

SEQ ID NO: 246974 - DNA, 24 bp, Artificial sequence
  SiRNA target sequence
ctcagaattttgttcaattgattc

SEQ ID NO: 246975 - DNA, 24 bp, Artificial sequence
  SiRNA target sequence
tcagaattttgttcaattgattca

SEQ ID NO: 246976 - DNA, 24 bp, Artificial sequence
  SiRNA target sequence
cagaattttgttcaattgattcat

SEQ ID NO: 246977 - DNA, 24 bp, Artificial sequence
  SiRNA target sequence
agaattttgttcaattgattcatt

SEQ ID NO: 246978 - DNA, 24 bp, Artificial sequence
  SiRNA target sequence
gaattttgttcaattgattcatta

SEQ ID NO: 246979 - DNA, 24 bp, Artificial sequence
  SiRNA target sequence
aattttgttcaattgattcattat

SEQ ID NO: 246980 - DNA, 24 bp, Artificial sequence
  SiRNA target sequence
attttgttcaattgattcattata

SEQ ID NO: 246981 - DNA, 24 bp, Artificial sequence
  SiRNA target sequence
ttttgttcaattgattcattatat

SEQ ID NO: 246982 - DNA, 24 bp, Artificial sequence
  SiRNA target sequence
tttgttcaattgattcattatatt

SEQ ID NO: 246983 - DNA, 24 bp, Artificial sequence
  SiRNA target sequence
ttgttcaattgattcattatattt

SEQ ID NO: 246984 - DNA, 24 bp, Artificial sequence
  SiRNA target sequence
tgttcaattgattcattatatttt

SEQ ID NO: 246985 - DNA, 24 bp, Artificial sequence
  SiRNA target sequence
gttcaattgattcattatattttt

SEQ ID NO: 246986 - DNA, 24 bp, Artificial sequence
  SiRNA target sequence
ttcaattgattcattatatttttt

SEQ ID NO: 246987 - DNA, 24 bp, Artificial sequence
  SiRNA target sequence
tcaattgattcattatatttttta

SEQ ID NO: 246988 - DNA, 24 bp, Artificial sequence
  SiRNA target sequence
caattgattcattatattttttac

SEQ ID NO: 246989 - DNA, 24 bp, Artificial sequence
  SiRNA target sequence
aattgattcattatattttttact

SEQ ID NO: 246990 - DNA, 24 bp, Artificial sequence
  SiRNA target sequence
attgattcattatattttttactt

SEQ ID NO: 246991 - DNA, 24 bp, Artificial sequence
  SiRNA target sequence
ttgattcattatattttttactta

SEQ ID NO: 246992 - DNA, 24 bp, Artificial sequence
  SiRNA target sequence
tgattcattatattttttacttaa

SEQ ID NO: 246993 - DNA, 24 bp, Artificial sequence
  SiRNA target sequence
gattcattatattttttacttaaa

SEQ ID NO: 246994 - DNA, 24 bp, Artificial sequence
  SiRNA target sequence
attcattatattttttacttaaat

SEQ ID NO: 246995 - DNA, 24 bp, Artificial sequence
  SiRNA target sequence
ttcattatattttttacttaaata

SEQ ID NO: 246996 - DNA, 24 bp, Artificial sequence
  SiRNA target sequence
tcattatattttttacttaaataa

SEQ ID NO: 246997 - DNA, 24 bp, Artificial sequence
  SiRNA target sequence
cattatattttttacttaaataac

SEQ ID NO: 246998 - DNA, 24 bp, Artificial sequence
  SiRNA target sequence
attatattttttacttaaataaca

SEQ ID NO: 246999 - DNA, 24 bp, Artificial sequence
  SiRNA target sequence
ttatattttttacttaaataacag

SEQ ID NO: 247000 - DNA, 24 bp, Artificial sequence
  SiRNA target sequence
tatattttttacttaaataacaga

SEQ ID NO: 247001 - DNA, 24 bp, Artificial sequence
  SiRNA target sequence
atattttttacttaaataacagac

SEQ ID NO: 247002 - DNA, 24 bp, Artificial sequence
  SiRNA target sequence
tattttttacttaaataacagaca

SEQ ID NO: 247003 - DNA, 24 bp, Artificial sequence
  SiRNA target sequence
attttttacttaaataacagacac

SEQ ID NO: 247004 - DNA, 24 bp, Artificial sequence
  SiRNA target sequence
ttttttacttaaataacagacact

SEQ ID NO: 247005 - DNA, 24 bp, Artificial sequence
  SiRNA target sequence
tttttacttaaataacagacactc

SEQ ID NO: 247006 - DNA, 24 bp, Artificial sequence
  SiRNA target sequence
ttttacttaaataacagacactcc

SEQ ID NO: 247007 - DNA, 24 bp, Artificial sequence
  SiRNA target sequence
tttacttaaataacagacactcct

SEQ ID NO: 247008 - DNA, 24 bp, Artificial sequence
  SiRNA target sequence
ttacttaaataacagacactcctg

SEQ ID NO: 247009 - DNA, 24 bp, Artificial sequence
  SiRNA target sequence
tacttaaataacagacactcctga

SEQ ID NO: 247010 - DNA, 24 bp, Artificial sequence
  SiRNA target sequence
acttaaataacagacactcctgat

SEQ ID NO: 247011 - DNA, 24 bp, Artificial sequence
  SiRNA target sequence
cttaaataacagacactcctgatc

SEQ ID NO: 247012 - DNA, 24 bp, Artificial sequence
  SiRNA target sequence
ttaaataacagacactcctgatcc

SEQ ID NO: 247013 - DNA, 24 bp, Artificial sequence
  SiRNA target sequence
taaataacagacactcctgatcca

SEQ ID NO: 247014 - DNA, 24 bp, Artificial sequence
  SiRNA target sequence
aaataacagacactcctgatccac

SEQ ID NO: 247015 - DNA, 24 bp, Artificial sequence
  SiRNA target sequence
aataacagacactcctgatccaca

SEQ ID NO: 247016 - DNA, 24 bp, Artificial sequence
  SiRNA target sequence
ataacagacactcctgatccacaa

SEQ ID NO: 247017 - DNA, 24 bp, Artificial sequence
  SiRNA target sequence
taacagacactcctgatccacaaa

SEQ ID NO: 247018 - DNA, 24 bp, Artificial sequence
  SiRNA target sequence
aacagacactcctgatccacaaaa

SEQ ID NO: 247019 - DNA, 24 bp, Artificial sequence
  SiRNA target sequence
acagacactcctgatccacaaaaa

SEQ ID NO: 247020 - DNA, 24 bp, Artificial sequence
  SiRNA target sequence
cagacactcctgatccacaaaaaa

SEQ ID NO: 247021 - DNA, 24 bp, Artificial sequence
  SiRNA target sequence
agacactcctgatccacaaaaaat

SEQ ID NO: 247022 - DNA, 24 bp, Artificial sequence
  SiRNA target sequence
gacactcctgatccacaaaaaatt

SEQ ID NO: 247023 - DNA, 24 bp, Artificial sequence
  SiRNA target sequence
acactcctgatccacaaaaaattt

SEQ ID NO: 247024 - DNA, 24 bp, Artificial sequence
  SiRNA target sequence
cactcctgatccacaaaaaatttg

SEQ ID NO: 247025 - DNA, 24 bp, Artificial sequence
  SiRNA target sequence
actcctgatccacaaaaaatttgc

SEQ ID NO: 247026 - DNA, 24 bp, Artificial sequence
  SiRNA target sequence
ctcctgatccacaaaaaatttgca

SEQ ID NO: 247027 - DNA, 24 bp, Artificial sequence
  SiRNA target sequence
tcctgatccacaaaaaatttgcaa

SEQ ID NO: 247028 - DNA, 24 bp, Artificial sequence
  SiRNA target sequence
cctgatccacaaaaaatttgcaaa

SEQ ID NO: 247029 - DNA, 24 bp, Artificial sequence
  SiRNA target sequence
ctgatccacaaaaaatttgcaaat

SEQ ID NO: 247030 - DNA, 24 bp, Artificial sequence
  SiRNA target sequence
tgatccacaaaaaatttgcaaata

SEQ ID NO: 247031 - DNA, 24 bp, Artificial sequence
  SiRNA target sequence
gatccacaaaaaatttgcaaatat

SEQ ID NO: 247032 - DNA, 24 bp, Artificial sequence
  SiRNA target sequence
atccacaaaaaatttgcaaatatt

SEQ ID NO: 247033 - DNA, 24 bp, Artificial sequence
  SiRNA target sequence
tccacaaaaaatttgcaaatatta

SEQ ID NO: 247034 - DNA, 24 bp, Artificial sequence
  SiRNA target sequence
ccacaaaaaatttgcaaatattaa

SEQ ID NO: 247035 - DNA, 24 bp, Artificial sequence
  SiRNA target sequence
cacaaaaaatttgcaaatattaaa

SEQ ID NO: 247036 - DNA, 24 bp, Artificial sequence
  SiRNA target sequence
acaaaaaatttgcaaatattaaaa

SEQ ID NO: 247037 - DNA, 24 bp, Artificial sequence
  SiRNA target sequence
caaaaaatttgcaaatattaaaaa

SEQ ID NO: 247038 - DNA, 24 bp, Artificial sequence
  SiRNA target sequence
aaaaaatttgcaaatattaaaaat

SEQ ID NO: 247039 - DNA, 24 bp, Artificial sequence
  SiRNA target sequence
aaaaatttgcaaatattaaaaata

SEQ ID NO: 247040 - DNA, 24 bp, Artificial sequence
  SiRNA target sequence
aaaatttgcaaatattaaaaatat

SEQ ID NO: 247041 - DNA, 24 bp, Artificial sequence
  SiRNA target sequence
aaatttgcaaatattaaaaatata

SEQ ID NO: 247042 - DNA, 24 bp, Artificial sequence
  SiRNA target sequence
aatttgcaaatattaaaaatataa

SEQ ID NO: 247043 - DNA, 24 bp, Artificial sequence
  SiRNA target sequence
atttgcaaatattaaaaatataaa

SEQ ID NO: 247044 - DNA, 24 bp, Artificial sequence
  SiRNA target sequence
tttgcaaatattaaaaatataaaa

SEQ ID NO: 247045 - DNA, 24 bp, Artificial sequence
  SiRNA target sequence
ttgcaaatattaaaaatataaaag

SEQ ID NO: 247046 - DNA, 24 bp, Artificial sequence
  SiRNA target sequence
tgcaaatattaaaaatataaaaga

SEQ ID NO: 247047 - DNA, 24 bp, Artificial sequence
  SiRNA target sequence
gcaaatattaaaaatataaaagac

SEQ ID NO: 247048 - DNA, 24 bp, Artificial sequence
  SiRNA target sequence
caaatattaaaaatataaaagaca

SEQ ID NO: 247049 - DNA, 24 bp, Artificial sequence
  SiRNA target sequence
aaatattaaaaatataaaagacac

SEQ ID NO: 247050 - DNA, 24 bp, Artificial sequence
  SiRNA target sequence
aatattaaaaatataaaagacacg

SEQ ID NO: 247051 - DNA, 24 bp, Artificial sequence
  SiRNA target sequence
atattaaaaatataaaagacacgt

SEQ ID NO: 247052 - DNA, 24 bp, Artificial sequence
  SiRNA target sequence
tattaaaaatataaaagacacgta

SEQ ID NO: 247053 - DNA, 24 bp, Artificial sequence
  SiRNA target sequence
attaaaaatataaaagacacgtat

SEQ ID NO: 247054 - DNA, 24 bp, Artificial sequence
  SiRNA target sequence
ttaaaaatataaaagacacgtatg

SEQ ID NO: 247055 - DNA, 24 bp, Artificial sequence
  SiRNA target sequence
taaaaatataaaagacacgtatga

SEQ ID NO: 247056 - DNA, 24 bp, Artificial sequence
  SiRNA target sequence
aaaaatataaaagacacgtatgat

SEQ ID NO: 247057 - DNA, 24 bp, Artificial sequence
  SiRNA target sequence
aaaatataaaagacacgtatgata

SEQ ID NO: 247058 - DNA, 24 bp, Artificial sequence
  SiRNA target sequence
aaatataaaagacacgtatgatac

SEQ ID NO: 247059 - DNA, 24 bp, Artificial sequence
  SiRNA target sequence
aatataaaagacacgtatgatact

SEQ ID NO: 247060 - DNA, 24 bp, Artificial sequence
  SiRNA target sequence
atataaaagacacgtatgatactt

SEQ ID NO: 247061 - DNA, 24 bp, Artificial sequence
  SiRNA target sequence
tataaaagacacgtatgatacttg

SEQ ID NO: 247062 - DNA, 24 bp, Artificial sequence
  SiRNA target sequence
ataaaagacacgtatgatacttgt

SEQ ID NO: 247063 - DNA, 24 bp, Artificial sequence
  SiRNA target sequence
taaaagacacgtatgatacttgtc

SEQ ID NO: 247064 - DNA, 24 bp, Artificial sequence
  SiRNA target sequence
aaaagacacgtatgatacttgtct

SEQ ID NO: 247065 - DNA, 24 bp, Artificial sequence
  SiRNA target sequence
aaagacacgtatgatacttgtcta

SEQ ID NO: 247066 - DNA, 24 bp, Artificial sequence
  SiRNA target sequence
aagacacgtatgatacttgtctaa

SEQ ID NO: 247067 - DNA, 24 bp, Artificial sequence
  SiRNA target sequence
agacacgtatgatacttgtctaat

SEQ ID NO: 247068 - DNA, 24 bp, Artificial sequence
  SiRNA target sequence
gacacgtatgatacttgtctaata

SEQ ID NO: 247069 - DNA, 24 bp, Artificial sequence
  SiRNA target sequence
acacgtatgatacttgtctaatat

SEQ ID NO: 247070 - DNA, 24 bp, Artificial sequence
  SiRNA target sequence
cacgtatgatacttgtctaatatc

SEQ ID NO: 247071 - DNA, 24 bp, Artificial sequence
  SiRNA target sequence
acgtatgatacttgtctaatatct

SEQ ID NO: 247072 - DNA, 24 bp, Artificial sequence
  SiRNA target sequence
cgtatgatacttgtctaatatctg

SEQ ID NO: 247073 - DNA, 24 bp, Artificial sequence
  SiRNA target sequence
gtatgatacttgtctaatatctgg

SEQ ID NO: 247074 - DNA, 24 bp, Artificial sequence
  SiRNA target sequence
tatgatacttgtctaatatctgga

SEQ ID NO: 247075 - DNA, 24 bp, Artificial sequence
  SiRNA target sequence
atgatacttgtctaatatctggaa

SEQ ID NO: 247076 - DNA, 24 bp, Artificial sequence
  SiRNA target sequence
tgatacttgtctaatatctggaat

SEQ ID NO: 247077 - DNA, 24 bp, Artificial sequence
  SiRNA target sequence
gatacttgtctaatatctggaatt

SEQ ID NO: 247078 - DNA, 24 bp, Artificial sequence
  SiRNA target sequence
atacttgtctaatatctggaattt

SEQ ID NO: 247079 - DNA, 24 bp, Artificial sequence
  SiRNA target sequence
tacttgtctaatatctggaatttc

SEQ ID NO: 247080 - DNA, 24 bp, Artificial sequence
  SiRNA target sequence
acttgtctaatatctggaatttct

SEQ ID NO: 247081 - DNA, 24 bp, Artificial sequence
  SiRNA target sequence
cttgtctaatatctggaatttcta

SEQ ID NO: 247082 - DNA, 24 bp, Artificial sequence
  SiRNA target sequence
ttgtctaatatctggaatttctat

SEQ ID NO: 247083 - DNA, 24 bp, Artificial sequence
  SiRNA target sequence
tgtctaatatctggaatttctata

SEQ ID NO: 247084 - DNA, 24 bp, Artificial sequence
  SiRNA target sequence
gtctaatatctggaatttctataa

SEQ ID NO: 247085 - DNA, 24 bp, Artificial sequence
  SiRNA target sequence
tctaatatctggaatttctataaa

SEQ ID NO: 247086 - DNA, 24 bp, Artificial sequence
  SiRNA target sequence
ctaatatctggaatttctataaac

SEQ ID NO: 247087 - DNA, 24 bp, Artificial sequence
  SiRNA target sequence
taatatctggaatttctataaacg

SEQ ID NO: 247088 - DNA, 24 bp, Artificial sequence
  SiRNA target sequence
aatatctggaatttctataaacgt

SEQ ID NO: 247089 - DNA, 24 bp, Artificial sequence
  SiRNA target sequence
atatctggaatttctataaacgtc

SEQ ID NO: 247090 - DNA, 24 bp, Artificial sequence
  SiRNA target sequence
tatctggaatttctataaacgtca

SEQ ID NO: 247091 - DNA, 24 bp, Artificial sequence
  SiRNA target sequence
atctggaatttctataaacgtcaa

SEQ ID NO: 247092 - DNA, 24 bp, Artificial sequence
  SiRNA target sequence
tctggaatttctataaacgtcaaa

SEQ ID NO: 247093 - DNA, 24 bp, Artificial sequence
  SiRNA target sequence
ctggaatttctataaacgtcaaaa

SEQ ID NO: 247094 - DNA, 24 bp, Artificial sequence
  SiRNA target sequence
tggaatttctataaacgtcaaaaa

SEQ ID NO: 247095 - DNA, 24 bp, Artificial sequence
  SiRNA target sequence
ggaatttctataaacgtcaaaaaa

SEQ ID NO: 247096 - DNA, 24 bp, Artificial sequence
  SiRNA target sequence
gaatttctataaacgtcaaaaaag

SEQ ID NO: 247097 - DNA, 24 bp, Artificial sequence
  SiRNA target sequence
aatttctataaacgtcaaaaaagt

SEQ ID NO: 247098 - DNA, 24 bp, Artificial sequence
  SiRNA target sequence
atttctataaacgtcaaaaaagtt

SEQ ID NO: 247099 - DNA, 24 bp, Artificial sequence
  SiRNA target sequence
tttctataaacgtcaaaaaagttc

SEQ ID NO: 247100 - DNA, 24 bp, Artificial sequence
  SiRNA target sequence
ttctataaacgtcaaaaaagttcc

SEQ ID NO: 247101 - DNA, 24 bp, Artificial sequence
  SiRNA target sequence
tctataaacgtcaaaaaagttcca

SEQ ID NO: 247102 - DNA, 24 bp, Artificial sequence
  SiRNA target sequence
ctataaacgtcaaaaaagttccat

SEQ ID NO: 247103 - DNA, 24 bp, Artificial sequence
  SiRNA target sequence
tataaacgtcaaaaaagttccata

SEQ ID NO: 247104 - DNA, 24 bp, Artificial sequence
  SiRNA target sequence
ataaacgtcaaaaaagttccatat

SEQ ID NO: 247105 - DNA, 24 bp, Artificial sequence
  SiRNA target sequence
taaacgtcaaaaaagttccatata

SEQ ID NO: 247106 - DNA, 24 bp, Artificial sequence
  SiRNA target sequence
aaacgtcaaaaaagttccatataa

SEQ ID NO: 247107 - DNA, 24 bp, Artificial sequence
  SiRNA target sequence
aacgtcaaaaaagttccatataaa

SEQ ID NO: 247108 - DNA, 24 bp, Artificial sequence
  SiRNA target sequence
acgtcaaaaaagttccatataaag

SEQ ID NO: 247109 - DNA, 24 bp, Artificial sequence
  SiRNA target sequence
cgtcaaaaaagttccatataaaga

SEQ ID NO: 247110 - DNA, 24 bp, Artificial sequence
  SiRNA target sequence
gtcaaaaaagttccatataaagag

SEQ ID NO: 247111 - DNA, 24 bp, Artificial sequence
  SiRNA target sequence
tcaaaaaagttccatataaagaga

SEQ ID NO: 247112 - DNA, 24 bp, Artificial sequence
  SiRNA target sequence
caaaaaagttccatataaagagat

SEQ ID NO: 247113 - DNA, 24 bp, Artificial sequence
  SiRNA target sequence
aaaaaagttccatataaagagata

SEQ ID NO: 247114 - DNA, 24 bp, Artificial sequence
  SiRNA target sequence
aaaaagttccatataaagagataa

SEQ ID NO: 247115 - DNA, 24 bp, Artificial sequence
  SiRNA target sequence
aaaagttccatataaagagataat

SEQ ID NO: 247116 - DNA, 24 bp, Artificial sequence
  SiRNA target sequence
aaagttccatataaagagataata

SEQ ID NO: 247117 - DNA, 24 bp, Artificial sequence
  SiRNA target sequence
aagttccatataaagagataatag

SEQ ID NO: 247118 - DNA, 24 bp, Artificial sequence
  SiRNA target sequence
agttccatataaagagataataga

SEQ ID NO: 247119 - DNA, 24 bp, Artificial sequence
  SiRNA target sequence
gttccatataaagagataatagat

SEQ ID NO: 247120 - DNA, 24 bp, Artificial sequence
  SiRNA target sequence
ttccatataaagagataatagatt

SEQ ID NO: 247121 - DNA, 24 bp, Artificial sequence
  SiRNA target sequence
tccatataaagagataatagattt

SEQ ID NO: 247122 - DNA, 24 bp, Artificial sequence
  SiRNA target sequence
ccatataaagagataatagattta

SEQ ID NO: 247123 - DNA, 24 bp, Artificial sequence
  SiRNA target sequence
catataaagagataatagatttac

SEQ ID NO: 247124 - DNA, 24 bp, Artificial sequence
  SiRNA target sequence
atataaagagataatagatttacc

SEQ ID NO: 247125 - DNA, 24 bp, Artificial sequence
  SiRNA target sequence
tataaagagataatagatttacca

SEQ ID NO: 247126 - DNA, 24 bp, Artificial sequence
  SiRNA target sequence
ataaagagataatagatttaccaa

SEQ ID NO: 247127 - DNA, 24 bp, Artificial sequence
  SiRNA target sequence
taaagagataatagatttaccaat

SEQ ID NO: 247128 - DNA, 24 bp, Artificial sequence
  SiRNA target sequence
aaagagataatagatttaccaatt

SEQ ID NO: 247129 - DNA, 24 bp, Artificial sequence
  SiRNA target sequence
aagagataatagatttaccaattt

SEQ ID NO: 247130 - DNA, 24 bp, Artificial sequence
  SiRNA target sequence
agagataatagatttaccaatttt

SEQ ID NO: 247131 - DNA, 24 bp, Artificial sequence
  SiRNA target sequence
gagataatagatttaccaattttg

SEQ ID NO: 247132 - DNA, 24 bp, Artificial sequence
  SiRNA target sequence
agataatagatttaccaattttga

SEQ ID NO: 247133 - DNA, 24 bp, Artificial sequence
  SiRNA target sequence
gataatagatttaccaattttgat

SEQ ID NO: 247134 - DNA, 24 bp, Artificial sequence
  SiRNA target sequence
ataatagatttaccaattttgata

SEQ ID NO: 247135 - DNA, 24 bp, Artificial sequence
  SiRNA target sequence
taatagatttaccaattttgatac

SEQ ID NO: 247136 - DNA, 24 bp, Artificial sequence
  SiRNA target sequence
aatagatttaccaattttgataca

SEQ ID NO: 247137 - DNA, 24 bp, Artificial sequence
  SiRNA target sequence
atagatttaccaattttgatacat

SEQ ID NO: 247138 - DNA, 24 bp, Artificial sequence
  SiRNA target sequence
tagatttaccaattttgatacata

SEQ ID NO: 247139 - DNA, 24 bp, Artificial sequence
  SiRNA target sequence
agatttaccaattttgatacatac

SEQ ID NO: 247140 - DNA, 24 bp, Artificial sequence
  SiRNA target sequence
gatttaccaattttgatacataca

SEQ ID NO: 247141 - DNA, 24 bp, Artificial sequence
  SiRNA target sequence
atttaccaattttgatacatacac

SEQ ID NO: 247142 - DNA, 24 bp, Artificial sequence
  SiRNA target sequence
tttaccaattttgatacatacacc

SEQ ID NO: 247143 - DNA, 24 bp, Artificial sequence
  SiRNA target sequence
ttaccaattttgatacatacacca

SEQ ID NO: 247144 - DNA, 24 bp, Artificial sequence
  SiRNA target sequence
taccaattttgatacatacaccat

SEQ ID NO: 247145 - DNA, 24 bp, Artificial sequence
  SiRNA target sequence
accaattttgatacatacaccatc

SEQ ID NO: 247146 - DNA, 24 bp, Artificial sequence
  SiRNA target sequence
ccaattttgatacatacaccatca

SEQ ID NO: 247147 - DNA, 24 bp, Artificial sequence
  SiRNA target sequence
caattttgatacatacaccatcat

SEQ ID NO: 247148 - DNA, 24 bp, Artificial sequence
  SiRNA target sequence
aattttgatacatacaccatcata

SEQ ID NO: 247149 - DNA, 24 bp, Artificial sequence
  SiRNA target sequence
attttgatacatacaccatcataa

SEQ ID NO: 247150 - DNA, 24 bp, Artificial sequence
  SiRNA target sequence
ttttgatacatacaccatcataaa

SEQ ID NO: 247151 - DNA, 24 bp, Artificial sequence
  SiRNA target sequence
tttgatacatacaccatcataaaa

SEQ ID NO: 247152 - DNA, 24 bp, Artificial sequence
  SiRNA target sequence
ttgatacatacaccatcataaaaa

SEQ ID NO: 247153 - DNA, 24 bp, Artificial sequence
  SiRNA target sequence
tgatacatacaccatcataaaaac

SEQ ID NO: 247154 - DNA, 24 bp, Artificial sequence
  SiRNA target sequence
gatacatacaccatcataaaaact

SEQ ID NO: 247155 - DNA, 24 bp, Artificial sequence
  SiRNA target sequence
atacatacaccatcataaaaactt

SEQ ID NO: 247156 - DNA, 24 bp, Artificial sequence
  SiRNA target sequence
tacatacaccatcataaaaacttt

SEQ ID NO: 247157 - DNA, 24 bp, Artificial sequence
  SiRNA target sequence
acatacaccatcataaaaactttt

SEQ ID NO: 247158 - DNA, 24 bp, Artificial sequence
  SiRNA target sequence
catacaccatcataaaaactttta

SEQ ID NO: 247159 - DNA, 24 bp, Artificial sequence
  SiRNA target sequence
atacaccatcataaaaacttttaa

SEQ ID NO: 247160 - DNA, 24 bp, Artificial sequence
  SiRNA target sequence
tacaccatcataaaaacttttaaa

SEQ ID NO: 247161 - DNA, 24 bp, Artificial sequence
  SiRNA target sequence
acaccatcataaaaacttttaaat

SEQ ID NO: 247162 - DNA, 24 bp, Artificial sequence
  SiRNA target sequence
caccatcataaaaacttttaaatt

SEQ ID NO: 247163 - DNA, 24 bp, Artificial sequence
  SiRNA target sequence
accatcataaaaacttttaaattt

SEQ ID NO: 247164 - DNA, 24 bp, Artificial sequence
  SiRNA target sequence
ccatcataaaaacttttaaattta

SEQ ID NO: 247165 - DNA, 24 bp, Artificial sequence
  SiRNA target sequence
catcataaaaacttttaaatttat

SEQ ID NO: 247166 - DNA, 24 bp, Artificial sequence
  SiRNA target sequence
atcataaaaacttttaaatttata

SEQ ID NO: 247167 - DNA, 24 bp, Artificial sequence
  SiRNA target sequence
tcataaaaacttttaaatttatac

SEQ ID NO: 247168 - DNA, 24 bp, Artificial sequence
  SiRNA target sequence
cataaaaacttttaaatttatacc

SEQ ID NO: 247169 - DNA, 24 bp, Artificial sequence
  SiRNA target sequence
ataaaaacttttaaatttatacct

SEQ ID NO: 247170 - DNA, 24 bp, Artificial sequence
  SiRNA target sequence
taaaaacttttaaatttatacctg

SEQ ID NO: 247171 - DNA, 24 bp, Artificial sequence
  SiRNA target sequence
aaaaacttttaaatttatacctgt

SEQ ID NO: 247172 - DNA, 24 bp, Artificial sequence
  SiRNA target sequence
aaaacttttaaatttatacctgta

SEQ ID NO: 247173 - DNA, 24 bp, Artificial sequence
  SiRNA target sequence
aaacttttaaatttatacctgtat

SEQ ID NO: 247174 - DNA, 24 bp, Artificial sequence
  SiRNA target sequence
aacttttaaatttatacctgtatt

SEQ ID NO: 247175 - DNA, 24 bp, Artificial sequence
  SiRNA target sequence
acttttaaatttatacctgtattt

SEQ ID NO: 247176 - DNA, 24 bp, Artificial sequence
  SiRNA target sequence
cttttaaatttatacctgtattta

SEQ ID NO: 247177 - DNA, 24 bp, Artificial sequence
  SiRNA target sequence
ttttaaatttatacctgtatttaa

SEQ ID NO: 247178 - DNA, 24 bp, Artificial sequence
  SiRNA target sequence
tttaaatttatacctgtatttaac

SEQ ID NO: 247179 - DNA, 24 bp, Artificial sequence
  SiRNA target sequence
ttaaatttatacctgtatttaaca

SEQ ID NO: 247180 - DNA, 24 bp, Artificial sequence
  SiRNA target sequence
taaatttatacctgtatttaacag

SEQ ID NO: 247181 - DNA, 24 bp, Artificial sequence
  SiRNA target sequence
aaatttatacctgtatttaacagg

SEQ ID NO: 247182 - DNA, 24 bp, Artificial sequence
  SiRNA target sequence
aatttatacctgtatttaacaggc

SEQ ID NO: 247183 - DNA, 24 bp, Artificial sequence
  SiRNA target sequence
atttatacctgtatttaacaggca

SEQ ID NO: 247184 - DNA, 24 bp, Artificial sequence
  SiRNA target sequence
tttatacctgtatttaacaggcac

SEQ ID NO: 247185 - DNA, 24 bp, Artificial sequence
  SiRNA target sequence
ttatacctgtatttaacaggcacc

SEQ ID NO: 247186 - DNA, 24 bp, Artificial sequence
  SiRNA target sequence
tatacctgtatttaacaggcaccc

SEQ ID NO: 247187 - DNA, 24 bp, Artificial sequence
  SiRNA target sequence
atacctgtatttaacaggcaccct

SEQ ID NO: 247188 - DNA, 24 bp, Artificial sequence
  SiRNA target sequence
tacctgtatttaacaggcaccctc

SEQ ID NO: 247189 - DNA, 24 bp, Artificial sequence
  SiRNA target sequence
acctgtatttaacaggcaccctca

SEQ ID NO: 247190 - DNA, 24 bp, Artificial sequence
  SiRNA target sequence
cctgtatttaacaggcaccctcat

SEQ ID NO: 247191 - DNA, 24 bp, Artificial sequence
  SiRNA target sequence
ctgtatttaacaggcaccctcata

SEQ ID NO: 247192 - DNA, 24 bp, Artificial sequence
  SiRNA target sequence
tgtatttaacaggcaccctcatag

SEQ ID NO: 247193 - DNA, 24 bp, Artificial sequence
  SiRNA target sequence
gtatttaacaggcaccctcataga

SEQ ID NO: 247194 - DNA, 24 bp, Artificial sequence
  SiRNA target sequence
tatttaacaggcaccctcatagaa

SEQ ID NO: 247195 - DNA, 24 bp, Artificial sequence
  SiRNA target sequence
atttaacaggcaccctcatagaaa

SEQ ID NO: 247196 - DNA, 24 bp, Artificial sequence
  SiRNA target sequence
tttaacaggcaccctcatagaaag

SEQ ID NO: 247197 - DNA, 24 bp, Artificial sequence
  SiRNA target sequence
ttaacaggcaccctcatagaaagc

SEQ ID NO: 247198 - DNA, 24 bp, Artificial sequence
  SiRNA target sequence
taacaggcaccctcatagaaagca

SEQ ID NO: 247199 - DNA, 24 bp, Artificial sequence
  SiRNA target sequence
aacaggcaccctcatagaaagcat

SEQ ID NO: 247200 - DNA, 24 bp, Artificial sequence
  SiRNA target sequence
acaggcaccctcatagaaagcatt

SEQ ID NO: 247201 - DNA, 24 bp, Artificial sequence
  SiRNA target sequence
caggcaccctcatagaaagcattt

SEQ ID NO: 247202 - DNA, 24 bp, Artificial sequence
  SiRNA target sequence
aggcaccctcatagaaagcatttc

SEQ ID NO: 247203 - DNA, 24 bp, Artificial sequence
  SiRNA target sequence
ggcaccctcatagaaagcatttct

SEQ ID NO: 247204 - DNA, 24 bp, Artificial sequence
  SiRNA target sequence
gcaccctcatagaaagcatttctt

SEQ ID NO: 247205 - DNA, 24 bp, Artificial sequence
  SiRNA target sequence
caccctcatagaaagcatttcttt

SEQ ID NO: 247206 - DNA, 24 bp, Artificial sequence
  SiRNA target sequence
accctcatagaaagcatttctttt

SEQ ID NO: 247207 - DNA, 24 bp, Artificial sequence
  SiRNA target sequence
ccctcatagaaagcatttcttttg

SEQ ID NO: 247208 - DNA, 24 bp, Artificial sequence
  SiRNA target sequence
cctcatagaaagcatttcttttgc

SEQ ID NO: 247209 - DNA, 24 bp, Artificial sequence
  SiRNA target sequence
ctcatagaaagcatttcttttgct

SEQ ID NO: 247210 - DNA, 24 bp, Artificial sequence
  SiRNA target sequence
tcatagaaagcatttcttttgcta

SEQ ID NO: 247211 - DNA, 24 bp, Artificial sequence
  SiRNA target sequence
catagaaagcatttcttttgctaa

SEQ ID NO: 247212 - DNA, 24 bp, Artificial sequence
  SiRNA target sequence
atagaaagcatttcttttgctaaa

SEQ ID NO: 247213 - DNA, 24 bp, Artificial sequence
  SiRNA target sequence
tagaaagcatttcttttgctaaat

SEQ ID NO: 247214 - DNA, 24 bp, Artificial sequence
  SiRNA target sequence
agaaagcatttcttttgctaaatc

SEQ ID NO: 247215 - DNA, 24 bp, Artificial sequence
  SiRNA target sequence
gaaagcatttcttttgctaaatca

SEQ ID NO: 247216 - DNA, 24 bp, Artificial sequence
  SiRNA target sequence
aaagcatttcttttgctaaatcaa

SEQ ID NO: 247217 - DNA, 24 bp, Artificial sequence
  SiRNA target sequence
aagcatttcttttgctaaatcaaa

SEQ ID NO: 247218 - DNA, 24 bp, Artificial sequence
  SiRNA target sequence
agcatttcttttgctaaatcaaat

SEQ ID NO: 247219 - DNA, 24 bp, Artificial sequence
  SiRNA target sequence
gcatttcttttgctaaatcaaata

SEQ ID NO: 247220 - DNA, 24 bp, Artificial sequence
  SiRNA target sequence
catttcttttgctaaatcaaataa

SEQ ID NO: 247221 - DNA, 24 bp, Artificial sequence
  SiRNA target sequence
atttcttttgctaaatcaaataaa

SEQ ID NO: 247222 - DNA, 24 bp, Artificial sequence
  SiRNA target sequence
tttcttttgctaaatcaaataaaa

SEQ ID NO: 247223 - DNA, 24 bp, Artificial sequence
  SiRNA target sequence
ttcttttgctaaatcaaataaaac

SEQ ID NO: 247224 - DNA, 24 bp, Artificial sequence
  SiRNA target sequence
tcttttgctaaatcaaataaaaca

SEQ ID NO: 247225 - DNA, 24 bp, Artificial sequence
  SiRNA target sequence
cttttgctaaatcaaataaaacat

SEQ ID NO: 247226 - DNA, 24 bp, Artificial sequence
  SiRNA target sequence
ttttgctaaatcaaataaaacata

SEQ ID NO: 247227 - DNA, 24 bp, Artificial sequence
  SiRNA target sequence
tttgctaaatcaaataaaacatat

SEQ ID NO: 247228 - DNA, 24 bp, Artificial sequence
  SiRNA target sequence
ttgctaaatcaaataaaacatatt

SEQ ID NO: 247229 - DNA, 24 bp, Artificial sequence
  SiRNA target sequence
tgctaaatcaaataaaacatattt

SEQ ID NO: 247230 - DNA, 24 bp, Artificial sequence
  SiRNA target sequence
gctaaatcaaataaaacatatttg

SEQ ID NO: 247231 - DNA, 24 bp, Artificial sequence
  SiRNA target sequence
ctaaatcaaataaaacatatttgg

SEQ ID NO: 247232 - DNA, 24 bp, Artificial sequence
  SiRNA target sequence
taaatcaaataaaacatatttggt

SEQ ID NO: 247233 - DNA, 24 bp, Artificial sequence
  SiRNA target sequence
aaatcaaataaaacatatttggta

SEQ ID NO: 247234 - DNA, 24 bp, Artificial sequence
  SiRNA target sequence
aatcaaataaaacatatttggtaa

SEQ ID NO: 247235 - DNA, 24 bp, Artificial sequence
  SiRNA target sequence
atcaaataaaacatatttggtaat

SEQ ID NO: 247236 - DNA, 24 bp, Artificial sequence
  SiRNA target sequence
tcaaataaaacatatttggtaatt

SEQ ID NO: 247237 - DNA, 24 bp, Artificial sequence
  SiRNA target sequence
caaataaaacatatttggtaattt

SEQ ID NO: 247238 - DNA, 24 bp, Artificial sequence
  SiRNA target sequence
aaataaaacatatttggtaatttt

SEQ ID NO: 247239 - DNA, 24 bp, Artificial sequence
  SiRNA target sequence
aataaaacatatttggtaatttta

SEQ ID NO: 247240 - DNA, 24 bp, Artificial sequence
  SiRNA target sequence
ataaaacatatttggtaattttag

SEQ ID NO: 247241 - DNA, 24 bp, Artificial sequence
  SiRNA target sequence
taaaacatatttggtaattttaga

SEQ ID NO: 247242 - DNA, 24 bp, Artificial sequence
  SiRNA target sequence
aaaacatatttggtaattttagaa

SEQ ID NO: 247243 - DNA, 24 bp, Artificial sequence
  SiRNA target sequence
aaacatatttggtaattttagaaa

SEQ ID NO: 247244 - DNA, 24 bp, Artificial sequence
  SiRNA target sequence
aacatatttggtaattttagaaaa

SEQ ID NO: 247245 - DNA, 24 bp, Artificial sequence
  SiRNA target sequence
acatatttggtaattttagaaaat

SEQ ID NO: 247246 - DNA, 24 bp, Artificial sequence
  SiRNA target sequence
catatttggtaattttagaaaatg

SEQ ID NO: 247247 - DNA, 24 bp, Artificial sequence
  SiRNA target sequence
atatttggtaattttagaaaatgc

SEQ ID NO: 247248 - DNA, 24 bp, Artificial sequence
  SiRNA target sequence
tatttggtaattttagaaaatgca

SEQ ID NO: 247249 - DNA, 24 bp, Artificial sequence
  SiRNA target sequence
atttggtaattttagaaaatgcaa

SEQ ID NO: 247250 - DNA, 24 bp, Artificial sequence
  SiRNA target sequence
tttggtaattttagaaaatgcaaa

SEQ ID NO: 247251 - DNA, 24 bp, Artificial sequence
  SiRNA target sequence
ttggtaattttagaaaatgcaaat

SEQ ID NO: 247252 - DNA, 24 bp, Artificial sequence
  SiRNA target sequence
tggtaattttagaaaatgcaaatc

SEQ ID NO: 247253 - DNA, 24 bp, Artificial sequence
  SiRNA target sequence
ggtaattttagaaaatgcaaatcc

SEQ ID NO: 247254 - DNA, 24 bp, Artificial sequence
  SiRNA target sequence
gtaattttagaaaatgcaaatcca

SEQ ID NO: 247255 - DNA, 24 bp, Artificial sequence
  SiRNA target sequence
taattttagaaaatgcaaatccaa

SEQ ID NO: 247256 - DNA, 24 bp, Artificial sequence
  SiRNA target sequence
aattttagaaaatgcaaatccaat

SEQ ID NO: 247257 - DNA, 24 bp, Artificial sequence
  SiRNA target sequence
attttagaaaatgcaaatccaatg

SEQ ID NO: 247258 - DNA, 24 bp, Artificial sequence
  SiRNA target sequence
ttttagaaaatgcaaatccaatgg

SEQ ID NO: 247259 - DNA, 24 bp, Artificial sequence
  SiRNA target sequence
tttagaaaatgcaaatccaatggt

SEQ ID NO: 247260 - DNA, 24 bp, Artificial sequence
  SiRNA target sequence
ttagaaaatgcaaatccaatggtt

SEQ ID NO: 247261 - DNA, 24 bp, Artificial sequence
  SiRNA target sequence
tagaaaatgcaaatccaatggttg

SEQ ID NO: 247262 - DNA, 24 bp, Artificial sequence
  SiRNA target sequence
agaaaatgcaaatccaatggttgc

SEQ ID NO: 247263 - DNA, 24 bp, Artificial sequence
  SiRNA target sequence
gaaaatgcaaatccaatggttgca

SEQ ID NO: 247264 - DNA, 24 bp, Artificial sequence
  SiRNA target sequence
aaaatgcaaatccaatggttgcac

SEQ ID NO: 247265 - DNA, 24 bp, Artificial sequence
  SiRNA target sequence
aaatgcaaatccaatggttgcaca

SEQ ID NO: 247266 - DNA, 24 bp, Artificial sequence
  SiRNA target sequence
aatgcaaatccaatggttgcacac

SEQ ID NO: 247267 - DNA, 24 bp, Artificial sequence
  SiRNA target sequence
atgcaaatccaatggttgcacacc

SEQ ID NO: 247268 - DNA, 24 bp, Artificial sequence
  SiRNA target sequence
tgcaaatccaatggttgcacacca

SEQ ID NO: 247269 - DNA, 24 bp, Artificial sequence
  SiRNA target sequence
gcaaatccaatggttgcacaccaa

SEQ ID NO: 247270 - DNA, 24 bp, Artificial sequence
  SiRNA target sequence
caaatccaatggttgcacaccaat

SEQ ID NO: 247271 - DNA, 24 bp, Artificial sequence
  SiRNA target sequence
aaatccaatggttgcacaccaatt

SEQ ID NO: 247272 - DNA, 24 bp, Artificial sequence
  SiRNA target sequence
aatccaatggttgcacaccaattt

SEQ ID NO: 247273 - DNA, 24 bp, Artificial sequence
  SiRNA target sequence
atccaatggttgcacaccaatttt

SEQ ID NO: 247274 - DNA, 24 bp, Artificial sequence
  SiRNA target sequence
tccaatggttgcacaccaattttc

SEQ ID NO: 247275 - DNA, 24 bp, Artificial sequence
  SiRNA target sequence
ccaatggttgcacaccaattttca

SEQ ID NO: 247276 - DNA, 24 bp, Artificial sequence
  SiRNA target sequence
caatggttgcacaccaattttcaa

SEQ ID NO: 247277 - DNA, 24 bp, Artificial sequence
  SiRNA target sequence
aatggttgcacaccaattttcaag

SEQ ID NO: 247278 - DNA, 24 bp, Artificial sequence
  SiRNA target sequence
atggttgcacaccaattttcaaga

SEQ ID NO: 247279 - DNA, 24 bp, Artificial sequence
  SiRNA target sequence
tggttgcacaccaattttcaagat

SEQ ID NO: 247280 - DNA, 24 bp, Artificial sequence
  SiRNA target sequence
ggttgcacaccaattttcaagatt

SEQ ID NO: 247281 - DNA, 24 bp, Artificial sequence
  SiRNA target sequence
gttgcacaccaattttcaagattt

SEQ ID NO: 247282 - DNA, 24 bp, Artificial sequence
  SiRNA target sequence
ttgcacaccaattttcaagattta

SEQ ID NO: 247283 - DNA, 24 bp, Artificial sequence
  SiRNA target sequence
tgcacaccaattttcaagatttat

SEQ ID NO: 247284 - DNA, 24 bp, Artificial sequence
  SiRNA target sequence
gcacaccaattttcaagatttatt

SEQ ID NO: 247285 - DNA, 24 bp, Artificial sequence
  SiRNA target sequence
cacaccaattttcaagatttattc

SEQ ID NO: 247286 - DNA, 24 bp, Artificial sequence
  SiRNA target sequence
acaccaattttcaagatttattct

SEQ ID NO: 247287 - DNA, 24 bp, Artificial sequence
  SiRNA target sequence
caccaattttcaagatttattctt

SEQ ID NO: 247288 - DNA, 24 bp, Artificial sequence
  SiRNA target sequence
accaattttcaagatttattctta

SEQ ID NO: 247289 - DNA, 24 bp, Artificial sequence
  SiRNA target sequence
ccaattttcaagatttattcttaa

SEQ ID NO: 247290 - DNA, 24 bp, Artificial sequence
  SiRNA target sequence
caattttcaagatttattcttaag

SEQ ID NO: 247291 - DNA, 24 bp, Artificial sequence
  SiRNA target sequence
aattttcaagatttattcttaaga

SEQ ID NO: 247292 - DNA, 24 bp, Artificial sequence
  SiRNA target sequence
attttcaagatttattcttaagac

SEQ ID NO: 247293 - DNA, 24 bp, Artificial sequence
  SiRNA target sequence
ttttcaagatttattcttaagacc

SEQ ID NO: 247294 - DNA, 24 bp, Artificial sequence
  SiRNA target sequence
tttcaagatttattcttaagaccg

SEQ ID NO: 247295 - DNA, 24 bp, Artificial sequence
  SiRNA target sequence
ttcaagatttattcttaagaccga

SEQ ID NO: 247296 - DNA, 24 bp, Artificial sequence
  SiRNA target sequence
tcaagatttattcttaagaccgat

SEQ ID NO: 247297 - DNA, 24 bp, Artificial sequence
  SiRNA target sequence
caagatttattcttaagaccgatg

SEQ ID NO: 247298 - DNA, 24 bp, Artificial sequence
  SiRNA target sequence
aagatttattcttaagaccgatgg

SEQ ID NO: 247299 - DNA, 24 bp, Artificial sequence
  SiRNA target sequence
agatttattcttaagaccgatgga

SEQ ID NO: 247300 - DNA, 24 bp, Artificial sequence
  SiRNA target sequence
gatttattcttaagaccgatggag

SEQ ID NO: 247301 - DNA, 24 bp, Artificial sequence
  SiRNA target sequence
atttattcttaagaccgatggagc

SEQ ID NO: 247302 - DNA, 24 bp, Artificial sequence
  SiRNA target sequence
tttattcttaagaccgatggagct

SEQ ID NO: 247303 - DNA, 24 bp, Artificial sequence
  SiRNA target sequence
ttattcttaagaccgatggagctg

SEQ ID NO: 247304 - DNA, 24 bp, Artificial sequence
  SiRNA target sequence
tattcttaagaccgatggagctgt

SEQ ID NO: 247305 - DNA, 24 bp, Artificial sequence
  SiRNA target sequence
attcttaagaccgatggagctgtg

SEQ ID NO: 247306 - DNA, 24 bp, Artificial sequence
  SiRNA target sequence
ttcttaagaccgatggagctgtgc

SEQ ID NO: 247307 - DNA, 24 bp, Artificial sequence
  SiRNA target sequence
tcttaagaccgatggagctgtgcg

SEQ ID NO: 247308 - DNA, 24 bp, Artificial sequence
  SiRNA target sequence
cttaagaccgatggagctgtgcgc

SEQ ID NO: 247309 - DNA, 24 bp, Artificial sequence
  SiRNA target sequence
ttaagaccgatggagctgtgcgca

SEQ ID NO: 247310 - DNA, 24 bp, Artificial sequence
  SiRNA target sequence
taagaccgatggagctgtgcgcaa

SEQ ID NO: 247311 - DNA, 24 bp, Artificial sequence
  SiRNA target sequence
aagaccgatggagctgtgcgcaaa

SEQ ID NO: 247312 - DNA, 24 bp, Artificial sequence
  SiRNA target sequence
agaccgatggagctgtgcgcaaat

SEQ ID NO: 247313 - DNA, 24 bp, Artificial sequence
  SiRNA target sequence
gaccgatggagctgtgcgcaaatt

SEQ ID NO: 247314 - DNA, 24 bp, Artificial sequence
  SiRNA target sequence
accgatggagctgtgcgcaaattg

SEQ ID NO: 247315 - DNA, 24 bp, Artificial sequence
  SiRNA target sequence
ccgatggagctgtgcgcaaattgt

SEQ ID NO: 247316 - DNA, 24 bp, Artificial sequence
  SiRNA target sequence
cgatggagctgtgcgcaaattgta

SEQ ID NO: 247317 - DNA, 24 bp, Artificial sequence
  SiRNA target sequence
gatggagctgtgcgcaaattgtaa

SEQ ID NO: 247318 - DNA, 24 bp, Artificial sequence
  SiRNA target sequence
atggagctgtgcgcaaattgtaaa

SEQ ID NO: 247319 - DNA, 24 bp, Artificial sequence
  SiRNA target sequence
tggagctgtgcgcaaattgtaaaa

SEQ ID NO: 247320 - DNA, 24 bp, Artificial sequence
  SiRNA target sequence
ggagctgtgcgcaaattgtaaaaa

SEQ ID NO: 247321 - DNA, 24 bp, Artificial sequence
  SiRNA target sequence
gagctgtgcgcaaattgtaaaaag

SEQ ID NO: 247322 - DNA, 24 bp, Artificial sequence
  SiRNA target sequence
agctgtgcgcaaattgtaaaaaga

SEQ ID NO: 247323 - DNA, 24 bp, Artificial sequence
  SiRNA target sequence
gctgtgcgcaaattgtaaaaagaa

SEQ ID NO: 247324 - DNA, 24 bp, Artificial sequence
  SiRNA target sequence
ctgtgcgcaaattgtaaaaagaaa

SEQ ID NO: 247325 - DNA, 24 bp, Artificial sequence
  SiRNA target sequence
tgtgcgcaaattgtaaaaagaaag

SEQ ID NO: 247326 - DNA, 24 bp, Artificial sequence
  SiRNA target sequence
gtgcgcaaattgtaaaaagaaagt

SEQ ID NO: 247327 - DNA, 24 bp, Artificial sequence
  SiRNA target sequence
tgcgcaaattgtaaaaagaaagtc

SEQ ID NO: 247328 - DNA, 24 bp, Artificial sequence
  SiRNA target sequence
gcgcaaattgtaaaaagaaagtcc

SEQ ID NO: 247329 - DNA, 24 bp, Artificial sequence
  SiRNA target sequence
cgcaaattgtaaaaagaaagtcct

SEQ ID NO: 247330 - DNA, 24 bp, Artificial sequence
  SiRNA target sequence
gcaaattgtaaaaagaaagtcctg

SEQ ID NO: 247331 - DNA, 24 bp, Artificial sequence
  SiRNA target sequence
caaattgtaaaaagaaagtcctga

SEQ ID NO: 247332 - DNA, 24 bp, Artificial sequence
  SiRNA target sequence
aaattgtaaaaagaaagtcctgaa

SEQ ID NO: 247333 - DNA, 24 bp, Artificial sequence
  SiRNA target sequence
aattgtaaaaagaaagtcctgaaa

SEQ ID NO: 247334 - DNA, 24 bp, Artificial sequence
  SiRNA target sequence
attgtaaaaagaaagtcctgaaat

SEQ ID NO: 247335 - DNA, 24 bp, Artificial sequence
  SiRNA target sequence
ttgtaaaaagaaagtcctgaaatt

SEQ ID NO: 247336 - DNA, 24 bp, Artificial sequence
  SiRNA target sequence
tgtaaaaagaaagtcctgaaatta

SEQ ID NO: 247337 - DNA, 24 bp, Artificial sequence
  SiRNA target sequence
gtaaaaagaaagtcctgaaattag

SEQ ID NO: 247338 - DNA, 24 bp, Artificial sequence
  SiRNA target sequence
taaaaagaaagtcctgaaattaga

SEQ ID NO: 247339 - DNA, 24 bp, Artificial sequence
  SiRNA target sequence
aaaaagaaagtcctgaaattagag

SEQ ID NO: 247340 - DNA, 24 bp, Artificial sequence
  SiRNA target sequence
aaaagaaagtcctgaaattagagc

SEQ ID NO: 247341 - DNA, 24 bp, Artificial sequence
  SiRNA target sequence
aaagaaagtcctgaaattagagcg

SEQ ID NO: 247342 - DNA, 24 bp, Artificial sequence
  SiRNA target sequence
aagaaagtcctgaaattagagcgg

SEQ ID NO: 247343 - DNA, 24 bp, Artificial sequence
  SiRNA target sequence
agaaagtcctgaaattagagcggt

SEQ ID NO: 247344 - DNA, 24 bp, Artificial sequence
  SiRNA target sequence
gaaagtcctgaaattagagcggta

SEQ ID NO: 247345 - DNA, 24 bp, Artificial sequence
  SiRNA target sequence
aaagtcctgaaattagagcggtaa

SEQ ID NO: 247346 - DNA, 24 bp, Artificial sequence
  SiRNA target sequence
aagtcctgaaattagagcggtaaa

SEQ ID NO: 247347 - DNA, 24 bp, Artificial sequence
  SiRNA target sequence
agtcctgaaattagagcggtaaaa

SEQ ID NO: 247348 - DNA, 24 bp, Artificial sequence
  SiRNA target sequence
gtcctgaaattagagcggtaaaaa

SEQ ID NO: 247349 - DNA, 24 bp, Artificial sequence
  SiRNA target sequence
tcctgaaattagagcggtaaaaaa

SEQ ID NO: 247350 - DNA, 24 bp, Artificial sequence
  SiRNA target sequence
cctgaaattagagcggtaaaaaat

SEQ ID NO: 247351 - DNA, 24 bp, Artificial sequence
  SiRNA target sequence
ctgaaattagagcggtaaaaaata

SEQ ID NO: 247352 - DNA, 24 bp, Artificial sequence
  SiRNA target sequence
tgaaattagagcggtaaaaaatat

SEQ ID NO: 247353 - DNA, 24 bp, Artificial sequence
  SiRNA target sequence
gaaattagagcggtaaaaaatata

SEQ ID NO: 247354 - DNA, 24 bp, Artificial sequence
  SiRNA target sequence
aaattagagcggtaaaaaatatag

SEQ ID NO: 247355 - DNA, 24 bp, Artificial sequence
  SiRNA target sequence
aattagagcggtaaaaaatatagc

SEQ ID NO: 247356 - DNA, 24 bp, Artificial sequence
  SiRNA target sequence
attagagcggtaaaaaatatagca

SEQ ID NO: 247357 - DNA, 24 bp, Artificial sequence
  SiRNA target sequence
ttagagcggtaaaaaatatagcag

SEQ ID NO: 247358 - DNA, 24 bp, Artificial sequence
  SiRNA target sequence
tagagcggtaaaaaatatagcagc

SEQ ID NO: 247359 - DNA, 24 bp, Artificial sequence
  SiRNA target sequence
agagcggtaaaaaatatagcagca

SEQ ID NO: 247360 - DNA, 24 bp, Artificial sequence
  SiRNA target sequence
gagcggtaaaaaatatagcagcaa

SEQ ID NO: 247361 - DNA, 24 bp, Artificial sequence
  SiRNA target sequence
agcggtaaaaaatatagcagcaat

SEQ ID NO: 247362 - DNA, 24 bp, Artificial sequence
  SiRNA target sequence
gcggtaaaaaatatagcagcaata

SEQ ID NO: 247363 - DNA, 24 bp, Artificial sequence
  SiRNA target sequence
cggtaaaaaatatagcagcaatag

SEQ ID NO: 247364 - DNA, 24 bp, Artificial sequence
  SiRNA target sequence
ggtaaaaaatatagcagcaatagg

SEQ ID NO: 247365 - DNA, 24 bp, Artificial sequence
  SiRNA target sequence
gtaaaaaatatagcagcaataggg

SEQ ID NO: 247366 - DNA, 24 bp, Artificial sequence
  SiRNA target sequence
taaaaaatatagcagcaatagggg

SEQ ID NO: 247367 - DNA, 24 bp, Artificial sequence
  SiRNA target sequence
aaaaaatatagcagcaatagggga

SEQ ID NO: 247368 - DNA, 24 bp, Artificial sequence
  SiRNA target sequence
aaaaatatagcagcaataggggag

SEQ ID NO: 247369 - DNA, 24 bp, Artificial sequence
  SiRNA target sequence
aaaatatagcagcaataggggagg

SEQ ID NO: 247370 - DNA, 24 bp, Artificial sequence
  SiRNA target sequence
aaatatagcagcaataggggaggc

SEQ ID NO: 247371 - DNA, 24 bp, Artificial sequence
  SiRNA target sequence
aatatagcagcaataggggaggca

SEQ ID NO: 247372 - DNA, 24 bp, Artificial sequence
  SiRNA target sequence
atatagcagcaataggggaggcaa

SEQ ID NO: 247373 - DNA, 24 bp, Artificial sequence
  SiRNA target sequence
tatagcagcaataggggaggcaat

SEQ ID NO: 247374 - DNA, 24 bp, Artificial sequence
  SiRNA target sequence
atagcagcaataggggaggcaata

SEQ ID NO: 247375 - DNA, 24 bp, Artificial sequence
  SiRNA target sequence
tagcagcaataggggaggcaatag

SEQ ID NO: 247376 - DNA, 24 bp, Artificial sequence
  SiRNA target sequence
agcagcaataggggaggcaataga

SEQ ID NO: 247377 - DNA, 24 bp, Artificial sequence
  SiRNA target sequence
gcagcaataggggaggcaatagat

SEQ ID NO: 247378 - DNA, 24 bp, Artificial sequence
  SiRNA target sequence
cagcaataggggaggcaatagata

SEQ ID NO: 247379 - DNA, 24 bp, Artificial sequence
  SiRNA target sequence
agcaataggggaggcaatagatag

SEQ ID NO: 247380 - DNA, 24 bp, Artificial sequence
  SiRNA target sequence
gcaataggggaggcaatagataga

SEQ ID NO: 247381 - DNA, 24 bp, Artificial sequence
  SiRNA target sequence
caataggggaggcaatagatagat

SEQ ID NO: 247382 - DNA, 24 bp, Artificial sequence
  SiRNA target sequence
aataggggaggcaatagatagata

SEQ ID NO: 247383 - DNA, 24 bp, Artificial sequence
  SiRNA target sequence
ataggggaggcaatagatagataa

SEQ ID NO: 247384 - DNA, 24 bp, Artificial sequence
  SiRNA target sequence
taggggaggcaatagatagataaa

SEQ ID NO: 247385 - DNA, 24 bp, Artificial sequence
  SiRNA target sequence
aggggaggcaatagatagataaaa

SEQ ID NO: 247386 - DNA, 24 bp, Artificial sequence
  SiRNA target sequence
ggggaggcaatagatagataaaag

SEQ ID NO: 247387 - DNA, 24 bp, Artificial sequence
  SiRNA target sequence
gggaggcaatagatagataaaaga

SEQ ID NO: 247388 - DNA, 24 bp, Artificial sequence
  SiRNA target sequence
ggaggcaatagatagataaaagat

SEQ ID NO: 247389 - DNA, 24 bp, Artificial sequence
  SiRNA target sequence
gaggcaatagatagataaaagatc

SEQ ID NO: 247390 - DNA, 24 bp, Artificial sequence
  SiRNA target sequence
aggcaatagatagataaaagatcc

SEQ ID NO: 247391 - DNA, 24 bp, Artificial sequence
  SiRNA target sequence
ggcaatagatagataaaagatcct

SEQ ID NO: 247392 - DNA, 24 bp, Artificial sequence
  SiRNA target sequence
gcaatagatagataaaagatcctt

SEQ ID NO: 247393 - DNA, 24 bp, Artificial sequence
  SiRNA target sequence
caatagatagataaaagatccttg

SEQ ID NO: 247394 - DNA, 24 bp, Artificial sequence
  SiRNA target sequence
aatagatagataaaagatccttga

SEQ ID NO: 247395 - DNA, 24 bp, Artificial sequence
  SiRNA target sequence
atagatagataaaagatccttgat

SEQ ID NO: 247396 - DNA, 24 bp, Artificial sequence
  SiRNA target sequence
tagatagataaaagatccttgatg

SEQ ID NO: 247397 - DNA, 24 bp, Artificial sequence
  SiRNA target sequence
agatagataaaagatccttgatgc

SEQ ID NO: 247398 - DNA, 24 bp, Artificial sequence
  SiRNA target sequence
gatagataaaagatccttgatgca

SEQ ID NO: 247399 - DNA, 24 bp, Artificial sequence
  SiRNA target sequence
atagataaaagatccttgatgcaa

SEQ ID NO: 247400 - DNA, 24 bp, Artificial sequence
  SiRNA target sequence
tagataaaagatccttgatgcaat

SEQ ID NO: 247401 - DNA, 24 bp, Artificial sequence
  SiRNA target sequence
agataaaagatccttgatgcaatg

SEQ ID NO: 247402 - DNA, 24 bp, Artificial sequence
  SiRNA target sequence
gataaaagatccttgatgcaatgc

SEQ ID NO: 247403 - DNA, 24 bp, Artificial sequence
  SiRNA target sequence
ataaaagatccttgatgcaatgcg

SEQ ID NO: 247404 - DNA, 24 bp, Artificial sequence
  SiRNA target sequence
taaaagatccttgatgcaatgcga

SEQ ID NO: 247405 - DNA, 24 bp, Artificial sequence
  SiRNA target sequence
aaaagatccttgatgcaatgcgat

SEQ ID NO: 247406 - DNA, 24 bp, Artificial sequence
  SiRNA target sequence
aaagatccttgatgcaatgcgatt

SEQ ID NO: 247407 - DNA, 24 bp, Artificial sequence
  SiRNA target sequence
aagatccttgatgcaatgcgattt

SEQ ID NO: 247408 - DNA, 24 bp, Artificial sequence
  SiRNA target sequence
agatccttgatgcaatgcgatttc

SEQ ID NO: 247409 - DNA, 24 bp, Artificial sequence
  SiRNA target sequence
gatccttgatgcaatgcgatttcc

SEQ ID NO: 247410 - DNA, 24 bp, Artificial sequence
  SiRNA target sequence
atccttgatgcaatgcgatttcca

SEQ ID NO: 247411 - DNA, 24 bp, Artificial sequence
  SiRNA target sequence
tccttgatgcaatgcgatttccac

SEQ ID NO: 247412 - DNA, 24 bp, Artificial sequence
  SiRNA target sequence
ccttgatgcaatgcgatttccacg

SEQ ID NO: 247413 - DNA, 24 bp, Artificial sequence
  SiRNA target sequence
cttgatgcaatgcgatttccacgg

SEQ ID NO: 247414 - DNA, 24 bp, Artificial sequence
  SiRNA target sequence
ttgatgcaatgcgatttccacgga

SEQ ID NO: 247415 - DNA, 24 bp, Artificial sequence
  SiRNA target sequence
tgatgcaatgcgatttccacggat

SEQ ID NO: 247416 - DNA, 24 bp, Artificial sequence
  SiRNA target sequence
gatgcaatgcgatttccacggatt

SEQ ID NO: 247417 - DNA, 24 bp, Artificial sequence
  SiRNA target sequence
atgcaatgcgatttccacggatta

SEQ ID NO: 247418 - DNA, 24 bp, Artificial sequence
  SiRNA target sequence
tgcaatgcgatttccacggattac

SEQ ID NO: 247419 - DNA, 24 bp, Artificial sequence
  SiRNA target sequence
gcaatgcgatttccacggattaca

SEQ ID NO: 247420 - DNA, 24 bp, Artificial sequence
  SiRNA target sequence
caatgcgatttccacggattacaa

SEQ ID NO: 247421 - DNA, 24 bp, Artificial sequence
  SiRNA target sequence
aatgcgatttccacggattacaaa

SEQ ID NO: 247422 - DNA, 24 bp, Artificial sequence
  SiRNA target sequence
atgcgatttccacggattacaaag

SEQ ID NO: 247423 - DNA, 24 bp, Artificial sequence
  SiRNA target sequence
tgcgatttccacggattacaaagt

SEQ ID NO: 247424 - DNA, 24 bp, Artificial sequence
  SiRNA target sequence
gcgatttccacggattacaaagtt

SEQ ID NO: 247425 - DNA, 24 bp, Artificial sequence
  SiRNA target sequence
cgatttccacggattacaaagtta

SEQ ID NO: 247426 - DNA, 24 bp, Artificial sequence
  SiRNA target sequence
gatttccacggattacaaagttat

SEQ ID NO: 247427 - DNA, 24 bp, Artificial sequence
  SiRNA target sequence
atttccacggattacaaagttata

SEQ ID NO: 247428 - DNA, 24 bp, Artificial sequence
  SiRNA target sequence
tttccacggattacaaagttataa

SEQ ID NO: 247429 - DNA, 24 bp, Artificial sequence
  SiRNA target sequence
ttccacggattacaaagttataaa

SEQ ID NO: 247430 - DNA, 24 bp, Artificial sequence
  SiRNA target sequence
tccacggattacaaagttataaaa

SEQ ID NO: 247431 - DNA, 24 bp, Artificial sequence
  SiRNA target sequence
ccacggattacaaagttataaaat

SEQ ID NO: 247432 - DNA, 24 bp, Artificial sequence
  SiRNA target sequence
cacggattacaaagttataaaata

SEQ ID NO: 247433 - DNA, 24 bp, Artificial sequence
  SiRNA target sequence
acggattacaaagttataaaataa

SEQ ID NO: 247434 - DNA, 24 bp, Artificial sequence
  SiRNA target sequence
cggattacaaagttataaaataat

SEQ ID NO: 247435 - DNA, 24 bp, Artificial sequence
  SiRNA target sequence
ggattacaaagttataaaataatg

SEQ ID NO: 247436 - DNA, 24 bp, Artificial sequence
  SiRNA target sequence
gattacaaagttataaaataatga

SEQ ID NO: 247437 - DNA, 24 bp, Artificial sequence
  SiRNA target sequence
attacaaagttataaaataatgat

SEQ ID NO: 247438 - DNA, 24 bp, Artificial sequence
  SiRNA target sequence
ttacaaagttataaaataatgata

SEQ ID NO: 247439 - DNA, 24 bp, Artificial sequence
  SiRNA target sequence
tacaaagttataaaataatgatac

SEQ ID NO: 247440 - DNA, 24 bp, Artificial sequence
  SiRNA target sequence
acaaagttataaaataatgataca

SEQ ID NO: 247441 - DNA, 24 bp, Artificial sequence
  SiRNA target sequence
caaagttataaaataatgatacag

SEQ ID NO: 247442 - DNA, 24 bp, Artificial sequence
  SiRNA target sequence
aaagttataaaataatgatacagc

SEQ ID NO: 247443 - DNA, 24 bp, Artificial sequence
  SiRNA target sequence
aagttataaaataatgatacagca

SEQ ID NO: 247444 - DNA, 24 bp, Artificial sequence
  SiRNA target sequence
agttataaaataatgatacagcac

SEQ ID NO: 247445 - DNA, 24 bp, Artificial sequence
  SiRNA target sequence
gttataaaataatgatacagcact

SEQ ID NO: 247446 - DNA, 24 bp, Artificial sequence
  SiRNA target sequence
ttataaaataatgatacagcacta

SEQ ID NO: 247447 - DNA, 24 bp, Artificial sequence
  SiRNA target sequence
tataaaataatgatacagcactaa

SEQ ID NO: 247448 - DNA, 24 bp, Artificial sequence
  SiRNA target sequence
ataaaataatgatacagcactaat

SEQ ID NO: 247449 - DNA, 24 bp, Artificial sequence
  SiRNA target sequence
taaaataatgatacagcactaatc

SEQ ID NO: 247450 - DNA, 24 bp, Artificial sequence
  SiRNA target sequence
aaaataatgatacagcactaatcg

SEQ ID NO: 247451 - DNA, 24 bp, Artificial sequence
  SiRNA target sequence
aaataatgatacagcactaatcgt

SEQ ID NO: 247452 - DNA, 24 bp, Artificial sequence
  SiRNA target sequence
aataatgatacagcactaatcgtt

SEQ ID NO: 247453 - DNA, 24 bp, Artificial sequence
  SiRNA target sequence
ataatgatacagcactaatcgtta

SEQ ID NO: 247454 - DNA, 24 bp, Artificial sequence
  SiRNA target sequence
taatgatacagcactaatcgttaa

SEQ ID NO: 247455 - DNA, 24 bp, Artificial sequence
  SiRNA target sequence
aatgatacagcactaatcgttaag

SEQ ID NO: 247456 - DNA, 24 bp, Artificial sequence
  SiRNA target sequence
atgatacagcactaatcgttaagg

SEQ ID NO: 247457 - DNA, 24 bp, Artificial sequence
  SiRNA target sequence
tgatacagcactaatcgttaagga

SEQ ID NO: 247458 - DNA, 24 bp, Artificial sequence
  SiRNA target sequence
gatacagcactaatcgttaaggaa

SEQ ID NO: 247459 - DNA, 24 bp, Artificial sequence
  SiRNA target sequence
atacagcactaatcgttaaggaag

SEQ ID NO: 247460 - DNA, 24 bp, Artificial sequence
  SiRNA target sequence
tacagcactaatcgttaaggaagt

SEQ ID NO: 247461 - DNA, 24 bp, Artificial sequence
  SiRNA target sequence
acagcactaatcgttaaggaagtt

SEQ ID NO: 247462 - DNA, 24 bp, Artificial sequence
  SiRNA target sequence
cagcactaatcgttaaggaagttg

SEQ ID NO: 247463 - DNA, 24 bp, Artificial sequence
  SiRNA target sequence
agcactaatcgttaaggaagttgt

SEQ ID NO: 247464 - DNA, 24 bp, Artificial sequence
  SiRNA target sequence
gcactaatcgttaaggaagttgtt

SEQ ID NO: 247465 - DNA, 24 bp, Artificial sequence
  SiRNA target sequence
cactaatcgttaaggaagttgtta

SEQ ID NO: 247466 - DNA, 24 bp, Artificial sequence
  SiRNA target sequence
actaatcgttaaggaagttgttac

SEQ ID NO: 247467 - DNA, 24 bp, Artificial sequence
  SiRNA target sequence
ctaatcgttaaggaagttgttact

SEQ ID NO: 247468 - DNA, 24 bp, Artificial sequence
  SiRNA target sequence
taatcgttaaggaagttgttacta

SEQ ID NO: 247469 - DNA, 24 bp, Artificial sequence
  SiRNA target sequence
aatcgttaaggaagttgttactaa

SEQ ID NO: 247470 - DNA, 24 bp, Artificial sequence
  SiRNA target sequence
atcgttaaggaagttgttactaaa

SEQ ID NO: 247471 - DNA, 24 bp, Artificial sequence
  SiRNA target sequence
tcgttaaggaagttgttactaaat

SEQ ID NO: 247472 - DNA, 24 bp, Artificial sequence
  SiRNA target sequence
cgttaaggaagttgttactaaata

SEQ ID NO: 247473 - DNA, 24 bp, Artificial sequence
  SiRNA target sequence
gttaaggaagttgttactaaatat

SEQ ID NO: 247474 - DNA, 24 bp, Artificial sequence
  SiRNA target sequence
ttaaggaagttgttactaaatatt

SEQ ID NO: 247475 - DNA, 24 bp, Artificial sequence
  SiRNA target sequence
taaggaagttgttactaaatattt

SEQ ID NO: 247476 - DNA, 24 bp, Artificial sequence
  SiRNA target sequence
aaggaagttgttactaaatatttt

SEQ ID NO: 247477 - DNA, 24 bp, Artificial sequence
  SiRNA target sequence
aggaagttgttactaaatattttt

SEQ ID NO: 247478 - DNA, 24 bp, Artificial sequence
  SiRNA target sequence
ggaagttgttactaaatatttttg

SEQ ID NO: 247479 - DNA, 24 bp, Artificial sequence
  SiRNA target sequence
gaagttgttactaaatatttttga

SEQ ID NO: 247480 - DNA, 24 bp, Artificial sequence
  SiRNA target sequence
aagttgttactaaatatttttgag

SEQ ID NO: 247481 - DNA, 24 bp, Artificial sequence
  SiRNA target sequence
agttgttactaaatatttttgaga

SEQ ID NO: 247482 - DNA, 24 bp, Artificial sequence
  SiRNA target sequence
gttgttactaaatatttttgagaa

SEQ ID NO: 247483 - DNA, 24 bp, Artificial sequence
  SiRNA target sequence
ttgttactaaatatttttgagaat

SEQ ID NO: 247484 - DNA, 24 bp, Artificial sequence
  SiRNA target sequence
tgttactaaatatttttgagaata

SEQ ID NO: 247485 - DNA, 24 bp, Artificial sequence
  SiRNA target sequence
gttactaaatatttttgagaataa

SEQ ID NO: 247486 - DNA, 24 bp, Artificial sequence
  SiRNA target sequence
ttactaaatatttttgagaataat

SEQ ID NO: 247487 - DNA, 24 bp, Artificial sequence
  SiRNA target sequence
tactaaatatttttgagaataatc

SEQ ID NO: 247488 - DNA, 24 bp, Artificial sequence
  SiRNA target sequence
actaaatatttttgagaataatct

SEQ ID NO: 247489 - DNA, 24 bp, Artificial sequence
  SiRNA target sequence
ctaaatatttttgagaataatctt

SEQ ID NO: 247490 - DNA, 24 bp, Artificial sequence
  SiRNA target sequence
taaatatttttgagaataatcttt

SEQ ID NO: 247491 - DNA, 24 bp, Artificial sequence
  SiRNA target sequence
aaatatttttgagaataatctttc

SEQ ID NO: 247492 - DNA, 24 bp, Artificial sequence
  SiRNA target sequence
aatatttttgagaataatctttcg

SEQ ID NO: 247493 - DNA, 24 bp, Artificial sequence
  SiRNA target sequence
atatttttgagaataatctttcgg

SEQ ID NO: 247494 - DNA, 24 bp, Artificial sequence
  SiRNA target sequence
tatttttgagaataatctttcgga

SEQ ID NO: 247495 - DNA, 24 bp, Artificial sequence
  SiRNA target sequence
atttttgagaataatctttcggag

SEQ ID NO: 247496 - DNA, 24 bp, Artificial sequence
  SiRNA target sequence
tttttgagaataatctttcggagg

SEQ ID NO: 247497 - DNA, 24 bp, Artificial sequence
  SiRNA target sequence
ttttgagaataatctttcggaggc

SEQ ID NO: 247498 - DNA, 24 bp, Artificial sequence
  SiRNA target sequence
tttgagaataatctttcggaggca

SEQ ID NO: 247499 - DNA, 24 bp, Artificial sequence
  SiRNA target sequence
ttgagaataatctttcggaggcat

SEQ ID NO: 247500 - DNA, 24 bp, Artificial sequence
  SiRNA target sequence
tgagaataatctttcggaggcata

SEQ ID NO: 247501 - DNA, 24 bp, Artificial sequence
  SiRNA target sequence
gagaataatctttcggaggcatat

SEQ ID NO: 247502 - DNA, 24 bp, Artificial sequence
  SiRNA target sequence
agaataatctttcggaggcatatt

SEQ ID NO: 247503 - DNA, 24 bp, Artificial sequence
  SiRNA target sequence
gaataatctttcggaggcatatta

SEQ ID NO: 247504 - DNA, 24 bp, Artificial sequence
  SiRNA target sequence
aataatctttcggaggcatattat

SEQ ID NO: 247505 - DNA, 24 bp, Artificial sequence
  SiRNA target sequence
ataatctttcggaggcatattatt

SEQ ID NO: 247506 - DNA, 24 bp, Artificial sequence
  SiRNA target sequence
taatctttcggaggcatattatta

SEQ ID NO: 247507 - DNA, 24 bp, Artificial sequence
  SiRNA target sequence
aatctttcggaggcatattattaa

SEQ ID NO: 247508 - DNA, 24 bp, Artificial sequence
  SiRNA target sequence
atctttcggaggcatattattaat

SEQ ID NO: 247509 - DNA, 24 bp, Artificial sequence
  SiRNA target sequence
tctttcggaggcatattattaatt

SEQ ID NO: 247510 - DNA, 24 bp, Artificial sequence
  SiRNA target sequence
ctttcggaggcatattattaattc

SEQ ID NO: 247511 - DNA, 24 bp, Artificial sequence
  SiRNA target sequence
tttcggaggcatattattaattct

SEQ ID NO: 247512 - DNA, 24 bp, Artificial sequence
  SiRNA target sequence
ttcggaggcatattattaattctg

SEQ ID NO: 247513 - DNA, 24 bp, Artificial sequence
  SiRNA target sequence
tcggaggcatattattaattctgc

SEQ ID NO: 247514 - DNA, 24 bp, Artificial sequence
  SiRNA target sequence
cggaggcatattattaattctgct

SEQ ID NO: 247515 - DNA, 24 bp, Artificial sequence
  SiRNA target sequence
ggaggcatattattaattctgctt

SEQ ID NO: 247516 - DNA, 24 bp, Artificial sequence
  SiRNA target sequence
gaggcatattattaattctgcttc

SEQ ID NO: 247517 - DNA, 24 bp, Artificial sequence
  SiRNA target sequence
aggcatattattaattctgcttcc

SEQ ID NO: 247518 - DNA, 24 bp, Artificial sequence
  SiRNA target sequence
ggcatattattaattctgcttccc

SEQ ID NO: 247519 - DNA, 24 bp, Artificial sequence
  SiRNA target sequence
gcatattattaattctgcttcccg

SEQ ID NO: 247520 - DNA, 24 bp, Artificial sequence
  SiRNA target sequence
catattattaattctgcttcccgt

SEQ ID NO: 247521 - DNA, 24 bp, Artificial sequence
  SiRNA target sequence
atattattaattctgcttcccgta

SEQ ID NO: 247522 - DNA, 24 bp, Artificial sequence
  SiRNA target sequence
tattattaattctgcttcccgtag

SEQ ID NO: 247523 - DNA, 24 bp, Artificial sequence
  SiRNA target sequence
attattaattctgcttcccgtaga

SEQ ID NO: 247524 - DNA, 24 bp, Artificial sequence
  SiRNA target sequence
ttattaattctgcttcccgtagat

SEQ ID NO: 247525 - DNA, 24 bp, Artificial sequence
  SiRNA target sequence
tattaattctgcttcccgtagata

SEQ ID NO: 247526 - DNA, 24 bp, Artificial sequence
  SiRNA target sequence
attaattctgcttcccgtagataa

SEQ ID NO: 247527 - DNA, 24 bp, Artificial sequence
  SiRNA target sequence
ttaattctgcttcccgtagataaa

SEQ ID NO: 247528 - DNA, 24 bp, Artificial sequence
  SiRNA target sequence
taattctgcttcccgtagataaag

SEQ ID NO: 247529 - DNA, 24 bp, Artificial sequence
  SiRNA target sequence
aattctgcttcccgtagataaaga

SEQ ID NO: 247530 - DNA, 24 bp, Artificial sequence
  SiRNA target sequence
attctgcttcccgtagataaagaa

SEQ ID NO: 247531 - DNA, 24 bp, Artificial sequence
  SiRNA target sequence
ttctgcttcccgtagataaagaat

SEQ ID NO: 247532 - DNA, 24 bp, Artificial sequence
  SiRNA target sequence
tctgcttcccgtagataaagaatt

SEQ ID NO: 247533 - DNA, 24 bp, Artificial sequence
  SiRNA target sequence
ctgcttcccgtagataaagaattt

SEQ ID NO: 247534 - DNA, 24 bp, Artificial sequence
  SiRNA target sequence
tgcttcccgtagataaagaatttt

SEQ ID NO: 247535 - DNA, 24 bp, Artificial sequence
  SiRNA target sequence
gcttcccgtagataaagaattttt

SEQ ID NO: 247536 - DNA, 24 bp, Artificial sequence
  SiRNA target sequence
cttcccgtagataaagaatttttt

SEQ ID NO: 247537 - DNA, 24 bp, Artificial sequence
  SiRNA target sequence
ttcccgtagataaagaatttttta

SEQ ID NO: 247538 - DNA, 24 bp, Artificial sequence
  SiRNA target sequence
tcccgtagataaagaattttttaa

SEQ ID NO: 247539 - DNA, 24 bp, Artificial sequence
  SiRNA target sequence
cccgtagataaagaattttttaag

SEQ ID NO: 247540 - DNA, 24 bp, Artificial sequence
  SiRNA target sequence
ccgtagataaagaattttttaagg

SEQ ID NO: 247541 - DNA, 24 bp, Artificial sequence
  SiRNA target sequence
cgtagataaagaattttttaagga

SEQ ID NO: 247542 - DNA, 24 bp, Artificial sequence
  SiRNA target sequence
gtagataaagaattttttaaggac

SEQ ID NO: 247543 - DNA, 24 bp, Artificial sequence
  SiRNA target sequence
tagataaagaattttttaaggaca

SEQ ID NO: 247544 - DNA, 24 bp, Artificial sequence
  SiRNA target sequence
agataaagaattttttaaggacat

SEQ ID NO: 247545 - DNA, 24 bp, Artificial sequence
  SiRNA target sequence
gataaagaattttttaaggacata

SEQ ID NO: 247546 - DNA, 24 bp, Artificial sequence
  SiRNA target sequence
ataaagaattttttaaggacatat

SEQ ID NO: 247547 - DNA, 24 bp, Artificial sequence
  SiRNA target sequence
taaagaattttttaaggacatatc

SEQ ID NO: 247548 - DNA, 24 bp, Artificial sequence
  SiRNA target sequence
aaagaattttttaaggacatatca

SEQ ID NO: 247549 - DNA, 24 bp, Artificial sequence
  SiRNA target sequence
aagaattttttaaggacatatcaa

SEQ ID NO: 247550 - DNA, 24 bp, Artificial sequence
  SiRNA target sequence
agaattttttaaggacatatcaat

SEQ ID NO: 247551 - DNA, 24 bp, Artificial sequence
  SiRNA target sequence
gaattttttaaggacatatcaata

SEQ ID NO: 247552 - DNA, 24 bp, Artificial sequence
  SiRNA target sequence
aattttttaaggacatatcaataa

SEQ ID NO: 247553 - DNA, 24 bp, Artificial sequence
  SiRNA target sequence
attttttaaggacatatcaataaa

SEQ ID NO: 247554 - DNA, 24 bp, Artificial sequence
  SiRNA target sequence
ttttttaaggacatatcaataaat

SEQ ID NO: 247555 - DNA, 24 bp, Artificial sequence
  SiRNA target sequence
tttttaaggacatatcaataaatc

SEQ ID NO: 247556 - DNA, 24 bp, Artificial sequence
  SiRNA target sequence
ttttaaggacatatcaataaatcc

SEQ ID NO: 247557 - DNA, 24 bp, Artificial sequence
  SiRNA target sequence
tttaaggacatatcaataaatcct

SEQ ID NO: 247558 - DNA, 24 bp, Artificial sequence
  SiRNA target sequence
ttaaggacatatcaataaatcctg

SEQ ID NO: 247559 - DNA, 24 bp, Artificial sequence
  SiRNA target sequence
taaggacatatcaataaatcctgc

SEQ ID NO: 247560 - DNA, 24 bp, Artificial sequence
  SiRNA target sequence
aaggacatatcaataaatcctgca

SEQ ID NO: 247561 - DNA, 24 bp, Artificial sequence
  SiRNA target sequence
aggacatatcaataaatcctgcat

SEQ ID NO: 247562 - DNA, 24 bp, Artificial sequence
  SiRNA target sequence
ggacatatcaataaatcctgcatt

SEQ ID NO: 247563 - DNA, 24 bp, Artificial sequence
  SiRNA target sequence
gacatatcaataaatcctgcatta

SEQ ID NO: 247564 - DNA, 24 bp, Artificial sequence
  SiRNA target sequence
acatatcaataaatcctgcattaa

SEQ ID NO: 247565 - DNA, 24 bp, Artificial sequence
  SiRNA target sequence
catatcaataaatcctgcattaat

SEQ ID NO: 247566 - DNA, 24 bp, Artificial sequence
  SiRNA target sequence
atatcaataaatcctgcattaata

SEQ ID NO: 247567 - DNA, 24 bp, Artificial sequence
  SiRNA target sequence
tatcaataaatcctgcattaatag

SEQ ID NO: 247568 - DNA, 24 bp, Artificial sequence
  SiRNA target sequence
atcaataaatcctgcattaatagc

SEQ ID NO: 247569 - DNA, 24 bp, Artificial sequence
  SiRNA target sequence
tcaataaatcctgcattaatagca

SEQ ID NO: 247570 - DNA, 24 bp, Artificial sequence
  SiRNA target sequence
caataaatcctgcattaatagcat

SEQ ID NO: 247571 - DNA, 24 bp, Artificial sequence
  SiRNA target sequence
aataaatcctgcattaatagcata

SEQ ID NO: 247572 - DNA, 24 bp, Artificial sequence
  SiRNA target sequence
ataaatcctgcattaatagcatag

SEQ ID NO: 247573 - DNA, 24 bp, Artificial sequence
  SiRNA target sequence
taaatcctgcattaatagcataga

SEQ ID NO: 247574 - DNA, 24 bp, Artificial sequence
  SiRNA target sequence
aaatcctgcattaatagcatagat

SEQ ID NO: 247575 - DNA, 24 bp, Artificial sequence
  SiRNA target sequence
aatcctgcattaatagcatagatt

SEQ ID NO: 247576 - DNA, 24 bp, Artificial sequence
  SiRNA target sequence
atcctgcattaatagcatagatta

SEQ ID NO: 247577 - DNA, 24 bp, Artificial sequence
  SiRNA target sequence
tcctgcattaatagcatagattaa

SEQ ID NO: 247578 - DNA, 24 bp, Artificial sequence
  SiRNA target sequence
cctgcattaatagcatagattaat

SEQ ID NO: 247579 - DNA, 24 bp, Artificial sequence
  SiRNA target sequence
ctgcattaatagcatagattaatg

SEQ ID NO: 247580 - DNA, 24 bp, Artificial sequence
  SiRNA target sequence
tgcattaatagcatagattaatgc

SEQ ID NO: 247581 - DNA, 24 bp, Artificial sequence
  SiRNA target sequence
gcattaatagcatagattaatgcc

SEQ ID NO: 247582 - DNA, 24 bp, Artificial sequence
  SiRNA target sequence
cattaatagcatagattaatgccg

SEQ ID NO: 247583 - DNA, 24 bp, Artificial sequence
  SiRNA target sequence
attaatagcatagattaatgccgc

SEQ ID NO: 247584 - DNA, 24 bp, Artificial sequence
  SiRNA target sequence
ttaatagcatagattaatgccgct

SEQ ID NO: 247585 - DNA, 24 bp, Artificial sequence
  SiRNA target sequence
taatagcatagattaatgccgctg

SEQ ID NO: 247586 - DNA, 24 bp, Artificial sequence
  SiRNA target sequence
aatagcatagattaatgccgctgc

SEQ ID NO: 247587 - DNA, 24 bp, Artificial sequence
  SiRNA target sequence
atagcatagattaatgccgctgca

SEQ ID NO: 247588 - DNA, 24 bp, Artificial sequence
  SiRNA target sequence
tagcatagattaatgccgctgcac

SEQ ID NO: 247589 - DNA, 24 bp, Artificial sequence
  SiRNA target sequence
agcatagattaatgccgctgcaca

SEQ ID NO: 247590 - DNA, 24 bp, Artificial sequence
  SiRNA target sequence
gcatagattaatgccgctgcacac

SEQ ID NO: 247591 - DNA, 24 bp, Artificial sequence
  SiRNA target sequence
catagattaatgccgctgcacaca

SEQ ID NO: 247592 - DNA, 24 bp, Artificial sequence
  SiRNA target sequence
atagattaatgccgctgcacacat

SEQ ID NO: 247593 - DNA, 24 bp, Artificial sequence
  SiRNA target sequence
tagattaatgccgctgcacacata

SEQ ID NO: 247594 - DNA, 24 bp, Artificial sequence
  SiRNA target sequence
agattaatgccgctgcacacatat

SEQ ID NO: 247595 - DNA, 24 bp, Artificial sequence
  SiRNA target sequence
gattaatgccgctgcacacatatt

SEQ ID NO: 247596 - DNA, 24 bp, Artificial sequence
  SiRNA target sequence
attaatgccgctgcacacatattt

SEQ ID NO: 247597 - DNA, 24 bp, Artificial sequence
  SiRNA target sequence
ttaatgccgctgcacacatatttc

SEQ ID NO: 247598 - DNA, 24 bp, Artificial sequence
  SiRNA target sequence
taatgccgctgcacacatatttct

SEQ ID NO: 247599 - DNA, 24 bp, Artificial sequence
  SiRNA target sequence
aatgccgctgcacacatatttctt

SEQ ID NO: 247600 - DNA, 24 bp, Artificial sequence
  SiRNA target sequence
atgccgctgcacacatatttctta

SEQ ID NO: 247601 - DNA, 24 bp, Artificial sequence
  SiRNA target sequence
tgccgctgcacacatatttcttaa

SEQ ID NO: 247602 - DNA, 24 bp, Artificial sequence
  SiRNA target sequence
gccgctgcacacatatttcttaaa

SEQ ID NO: 247603 - DNA, 24 bp, Artificial sequence
  SiRNA target sequence
ccgctgcacacatatttcttaaaa

SEQ ID NO: 247604 - DNA, 24 bp, Artificial sequence
  SiRNA target sequence
cgctgcacacatatttcttaaaaa

SEQ ID NO: 247605 - DNA, 24 bp, Artificial sequence
  SiRNA target sequence
gctgcacacatatttcttaaaaat

SEQ ID NO: 247606 - DNA, 24 bp, Artificial sequence
  SiRNA target sequence
ctgcacacatatttcttaaaaatt

SEQ ID NO: 247607 - DNA, 24 bp, Artificial sequence
  SiRNA target sequence
tgcacacatatttcttaaaaattt

SEQ ID NO: 247608 - DNA, 24 bp, Artificial sequence
  SiRNA target sequence
gcacacatatttcttaaaaatttg

SEQ ID NO: 247609 - DNA, 24 bp, Artificial sequence
  SiRNA target sequence
cacacatatttcttaaaaatttgg

SEQ ID NO: 247610 - DNA, 24 bp, Artificial sequence
  SiRNA target sequence
acacatatttcttaaaaatttgga

SEQ ID NO: 247611 - DNA, 24 bp, Artificial sequence
  SiRNA target sequence
cacatatttcttaaaaatttggat

SEQ ID NO: 247612 - DNA, 24 bp, Artificial sequence
  SiRNA target sequence
acatatttcttaaaaatttggatt

SEQ ID NO: 247613 - DNA, 24 bp, Artificial sequence
  SiRNA target sequence
catatttcttaaaaatttggattg

SEQ ID NO: 247614 - DNA, 24 bp, Artificial sequence
  SiRNA target sequence
atatttcttaaaaatttggattgt

SEQ ID NO: 247615 - DNA, 24 bp, Artificial sequence
  SiRNA target sequence
tatttcttaaaaatttggattgta

SEQ ID NO: 247616 - DNA, 24 bp, Artificial sequence
  SiRNA target sequence
atttcttaaaaatttggattgtaa

SEQ ID NO: 247617 - DNA, 24 bp, Artificial sequence
  SiRNA target sequence
tttcttaaaaatttggattgtaaa

SEQ ID NO: 247618 - DNA, 24 bp, Artificial sequence
  SiRNA target sequence
ttcttaaaaatttggattgtaaaa

SEQ ID NO: 247619 - DNA, 24 bp, Artificial sequence
  SiRNA target sequence
tcttaaaaatttggattgtaaaag

SEQ ID NO: 247620 - DNA, 24 bp, Artificial sequence
  SiRNA target sequence
cttaaaaatttggattgtaaaaga

SEQ ID NO: 247621 - DNA, 24 bp, Artificial sequence
  SiRNA target sequence
ttaaaaatttggattgtaaaagat

SEQ ID NO: 247622 - DNA, 24 bp, Artificial sequence
  SiRNA target sequence
taaaaatttggattgtaaaagatc

SEQ ID NO: 247623 - DNA, 24 bp, Artificial sequence
  SiRNA target sequence
aaaaatttggattgtaaaagatca

SEQ ID NO: 247624 - DNA, 24 bp, Artificial sequence
  SiRNA target sequence
aaaatttggattgtaaaagatcaa

SEQ ID NO: 247625 - DNA, 24 bp, Artificial sequence
  SiRNA target sequence
aaatttggattgtaaaagatcaaa

SEQ ID NO: 247626 - DNA, 24 bp, Artificial sequence
  SiRNA target sequence
aatttggattgtaaaagatcaaac

SEQ ID NO: 247627 - DNA, 24 bp, Artificial sequence
  SiRNA target sequence
atttggattgtaaaagatcaaacg

SEQ ID NO: 247628 - DNA, 24 bp, Artificial sequence
  SiRNA target sequence
tttggattgtaaaagatcaaacga

SEQ ID NO: 247629 - DNA, 24 bp, Artificial sequence
  SiRNA target sequence
ttggattgtaaaagatcaaacgag

SEQ ID NO: 247630 - DNA, 24 bp, Artificial sequence
  SiRNA target sequence
tggattgtaaaagatcaaacgagg

SEQ ID NO: 247631 - DNA, 24 bp, Artificial sequence
  SiRNA target sequence
ggattgtaaaagatcaaacgagga

SEQ ID NO: 247632 - DNA, 24 bp, Artificial sequence
  SiRNA target sequence
gattgtaaaagatcaaacgaggat

SEQ ID NO: 247633 - DNA, 24 bp, Artificial sequence
  SiRNA target sequence
attgtaaaagatcaaacgaggatg

SEQ ID NO: 247634 - DNA, 24 bp, Artificial sequence
  SiRNA target sequence
ttgtaaaagatcaaacgaggatgt

SEQ ID NO: 247635 - DNA, 24 bp, Artificial sequence
  SiRNA target sequence
tgtaaaagatcaaacgaggatgtc

SEQ ID NO: 247636 - DNA, 24 bp, Artificial sequence
  SiRNA target sequence
gtaaaagatcaaacgaggatgtcg

SEQ ID NO: 247637 - DNA, 24 bp, Artificial sequence
  SiRNA target sequence
taaaagatcaaacgaggatgtcgt

SEQ ID NO: 247638 - DNA, 24 bp, Artificial sequence
  SiRNA target sequence
aaaagatcaaacgaggatgtcgtt

SEQ ID NO: 247639 - DNA, 24 bp, Artificial sequence
  SiRNA target sequence
aaagatcaaacgaggatgtcgttt

SEQ ID NO: 247640 - DNA, 24 bp, Artificial sequence
  SiRNA target sequence
aagatcaaacgaggatgtcgtttt

SEQ ID NO: 247641 - DNA, 24 bp, Artificial sequence
  SiRNA target sequence
agatcaaacgaggatgtcgttttg

SEQ ID NO: 247642 - DNA, 24 bp, Artificial sequence
  SiRNA target sequence
gatcaaacgaggatgtcgttttgt

SEQ ID NO: 247643 - DNA, 24 bp, Artificial sequence
  SiRNA target sequence
atcaaacgaggatgtcgttttgtc

SEQ ID NO: 247644 - DNA, 24 bp, Artificial sequence
  SiRNA target sequence
tcaaacgaggatgtcgttttgtct

SEQ ID NO: 247645 - DNA, 24 bp, Artificial sequence
  SiRNA target sequence
caaacgaggatgtcgttttgtctt

SEQ ID NO: 247646 - DNA, 24 bp, Artificial sequence
  SiRNA target sequence
aaacgaggatgtcgttttgtcttc

SEQ ID NO: 247647 - DNA, 24 bp, Artificial sequence
  SiRNA target sequence
aacgaggatgtcgttttgtcttct

SEQ ID NO: 247648 - DNA, 24 bp, Artificial sequence
  SiRNA target sequence
acgaggatgtcgttttgtcttctt

SEQ ID NO: 247649 - DNA, 24 bp, Artificial sequence
  SiRNA target sequence
cgaggatgtcgttttgtcttcttc

SEQ ID NO: 247650 - DNA, 24 bp, Artificial sequence
  SiRNA target sequence
gaggatgtcgttttgtcttcttct

SEQ ID NO: 247651 - DNA, 24 bp, Artificial sequence
  SiRNA target sequence
aggatgtcgttttgtcttcttctt

SEQ ID NO: 247652 - DNA, 24 bp, Artificial sequence
  SiRNA target sequence
ggatgtcgttttgtcttcttcttt

SEQ ID NO: 247653 - DNA, 24 bp, Artificial sequence
  SiRNA target sequence
gatgtcgttttgtcttcttcttta

SEQ ID NO: 247654 - DNA, 24 bp, Artificial sequence
  SiRNA target sequence
atgtcgttttgtcttcttctttat

SEQ ID NO: 247655 - DNA, 24 bp, Artificial sequence
  SiRNA target sequence
tgtcgttttgtcttcttctttatt

SEQ ID NO: 247656 - DNA, 24 bp, Artificial sequence
  SiRNA target sequence
gtcgttttgtcttcttctttattt

SEQ ID NO: 247657 - DNA, 24 bp, Artificial sequence
  SiRNA target sequence
tcgttttgtcttcttctttattta

SEQ ID NO: 247658 - DNA, 24 bp, Artificial sequence
  SiRNA target sequence
cgttttgtcttcttctttatttat

SEQ ID NO: 247659 - DNA, 24 bp, Artificial sequence
  SiRNA target sequence
gttttgtcttcttctttatttata

SEQ ID NO: 247660 - DNA, 24 bp, Artificial sequence
  SiRNA target sequence
ttttgtcttcttctttatttatag

SEQ ID NO: 247661 - DNA, 24 bp, Artificial sequence
  SiRNA target sequence
tttgtcttcttctttatttatagt

SEQ ID NO: 247662 - DNA, 24 bp, Artificial sequence
  SiRNA target sequence
ttgtcttcttctttatttatagtt

SEQ ID NO: 247663 - DNA, 24 bp, Artificial sequence
  SiRNA target sequence
tgtcttcttctttatttatagttt

SEQ ID NO: 247664 - DNA, 24 bp, Artificial sequence
  SiRNA target sequence
gtcttcttctttatttatagtttc

SEQ ID NO: 247665 - DNA, 24 bp, Artificial sequence
  SiRNA target sequence
tcttcttctttatttatagtttcc

SEQ ID NO: 247666 - DNA, 24 bp, Artificial sequence
  SiRNA target sequence
cttcttctttatttatagtttcct

SEQ ID NO: 247667 - DNA, 24 bp, Artificial sequence
  SiRNA target sequence
ttcttctttatttatagtttcctt

SEQ ID NO: 247668 - DNA, 24 bp, Artificial sequence
  SiRNA target sequence
tcttctttatttatagtttccttt

SEQ ID NO: 247669 - DNA, 24 bp, Artificial sequence
  SiRNA target sequence
cttctttatttatagtttccttta

SEQ ID NO: 247670 - DNA, 24 bp, Artificial sequence
  SiRNA target sequence
ttctttatttatagtttcctttat

SEQ ID NO: 247671 - DNA, 24 bp, Artificial sequence
  SiRNA target sequence
tctttatttatagtttcctttatt

SEQ ID NO: 247672 - DNA, 24 bp, Artificial sequence
  SiRNA target sequence
ctttatttatagtttcctttattt

SEQ ID NO: 247673 - DNA, 24 bp, Artificial sequence
  SiRNA target sequence
tttatttatagtttcctttatttc

SEQ ID NO: 247674 - DNA, 24 bp, Artificial sequence
  SiRNA target sequence
ttatttatagtttcctttatttct

SEQ ID NO: 247675 - DNA, 24 bp, Artificial sequence
  SiRNA target sequence
tatttatagtttcctttatttctt

SEQ ID NO: 247676 - DNA, 24 bp, Artificial sequence
  SiRNA target sequence
atttatagtttcctttatttcttt

SEQ ID NO: 247677 - DNA, 24 bp, Artificial sequence
  SiRNA target sequence
tttatagtttcctttatttcttta

SEQ ID NO: 247678 - DNA, 24 bp, Artificial sequence
  SiRNA target sequence
ttatagtttcctttatttctttag

SEQ ID NO: 247679 - DNA, 24 bp, Artificial sequence
  SiRNA target sequence
tatagtttcctttatttctttagt

SEQ ID NO: 247680 - DNA, 24 bp, Artificial sequence
  SiRNA target sequence
atagtttcctttatttctttagtt

SEQ ID NO: 247681 - DNA, 24 bp, Artificial sequence
  SiRNA target sequence
tagtttcctttatttctttagttt

SEQ ID NO: 247682 - DNA, 24 bp, Artificial sequence
  SiRNA target sequence
agtttcctttatttctttagtttt

SEQ ID NO: 247683 - DNA, 24 bp, Artificial sequence
  SiRNA target sequence
gtttcctttatttctttagtttta

SEQ ID NO: 247684 - DNA, 24 bp, Artificial sequence
  SiRNA target sequence
tttcctttatttctttagttttaa

SEQ ID NO: 247685 - DNA, 24 bp, Artificial sequence
  SiRNA target sequence
ttcctttatttctttagttttaag

SEQ ID NO: 247686 - DNA, 24 bp, Artificial sequence
  SiRNA target sequence
tcctttatttctttagttttaaga

SEQ ID NO: 247687 - DNA, 24 bp, Artificial sequence
  SiRNA target sequence
cctttatttctttagttttaagag

SEQ ID NO: 247688 - DNA, 24 bp, Artificial sequence
  SiRNA target sequence
ctttatttctttagttttaagagg

SEQ ID NO: 247689 - DNA, 24 bp, Artificial sequence
  SiRNA target sequence
tttatttctttagttttaagagga

SEQ ID NO: 247690 - DNA, 24 bp, Artificial sequence
  SiRNA target sequence
ttatttctttagttttaagaggaa

SEQ ID NO: 247691 - DNA, 24 bp, Artificial sequence
  SiRNA target sequence
tatttctttagttttaagaggaat

SEQ ID NO: 247692 - DNA, 24 bp, Artificial sequence
  SiRNA target sequence
atttctttagttttaagaggaata

SEQ ID NO: 247693 - DNA, 24 bp, Artificial sequence
  SiRNA target sequence
tttctttagttttaagaggaatat

SEQ ID NO: 247694 - DNA, 24 bp, Artificial sequence
  SiRNA target sequence
ttctttagttttaagaggaatata

SEQ ID NO: 247695 - DNA, 24 bp, Artificial sequence
  SiRNA target sequence
tctttagttttaagaggaatataa

SEQ ID NO: 247696 - DNA, 24 bp, Artificial sequence
  SiRNA target sequence
ctttagttttaagaggaatataac

SEQ ID NO: 247697 - DNA, 24 bp, Artificial sequence
  SiRNA target sequence
tttagttttaagaggaatataact

SEQ ID NO: 247698 - DNA, 24 bp, Artificial sequence
  SiRNA target sequence
ttagttttaagaggaatataactt

SEQ ID NO: 247699 - DNA, 24 bp, Artificial sequence
  SiRNA target sequence
tagttttaagaggaatataacttt

SEQ ID NO: 247700 - DNA, 24 bp, Artificial sequence
  SiRNA target sequence
agttttaagaggaatataactttt

SEQ ID NO: 247701 - DNA, 24 bp, Artificial sequence
  SiRNA target sequence
gttttaagaggaatataacttttt

SEQ ID NO: 247702 - DNA, 24 bp, Artificial sequence
  SiRNA target sequence
ttttaagaggaatataacttttta

SEQ ID NO: 247703 - DNA, 24 bp, Artificial sequence
  SiRNA target sequence
tttaagaggaatataactttttaa

SEQ ID NO: 247704 - DNA, 24 bp, Artificial sequence
  SiRNA target sequence
ttaagaggaatataactttttaaa

SEQ ID NO: 247705 - DNA, 24 bp, Artificial sequence
  SiRNA target sequence
taagaggaatataactttttaaaa

SEQ ID NO: 247706 - DNA, 24 bp, Artificial sequence
  SiRNA target sequence
aagaggaatataactttttaaaaa

SEQ ID NO: 247707 - DNA, 24 bp, Artificial sequence
  SiRNA target sequence
agaggaatataactttttaaaaag

SEQ ID NO: 247708 - DNA, 24 bp, Artificial sequence
  SiRNA target sequence
gaggaatataactttttaaaaagt

SEQ ID NO: 247709 - DNA, 24 bp, Artificial sequence
  SiRNA target sequence
aggaatataactttttaaaaagta

SEQ ID NO: 247710 - DNA, 24 bp, Artificial sequence
  SiRNA target sequence
ggaatataactttttaaaaagtaa

SEQ ID NO: 247711 - DNA, 24 bp, Artificial sequence
  SiRNA target sequence
gaatataactttttaaaaagtaaa

SEQ ID NO: 247712 - DNA, 24 bp, Artificial sequence
  SiRNA target sequence
aatataactttttaaaaagtaaat

SEQ ID NO: 247713 - DNA, 24 bp, Artificial sequence
  SiRNA target sequence
atataactttttaaaaagtaaatt

SEQ ID NO: 247714 - DNA, 24 bp, Artificial sequence
  SiRNA target sequence
tataactttttaaaaagtaaatta

SEQ ID NO: 247715 - DNA, 24 bp, Artificial sequence
  SiRNA target sequence
ataactttttaaaaagtaaattaa

SEQ ID NO: 247716 - DNA, 24 bp, Artificial sequence
  SiRNA target sequence
taactttttaaaaagtaaattaat

SEQ ID NO: 247717 - DNA, 24 bp, Artificial sequence
  SiRNA target sequence
aactttttaaaaagtaaattaatg

SEQ ID NO: 247718 - DNA, 24 bp, Artificial sequence
  SiRNA target sequence
actttttaaaaagtaaattaatgt

SEQ ID NO: 247719 - DNA, 24 bp, Artificial sequence
  SiRNA target sequence
ctttttaaaaagtaaattaatgta

SEQ ID NO: 247720 - DNA, 24 bp, Artificial sequence
  SiRNA target sequence
tttttaaaaagtaaattaatgtag

SEQ ID NO: 247721 - DNA, 24 bp, Artificial sequence
  SiRNA target sequence
ttttaaaaagtaaattaatgtagt

SEQ ID NO: 247722 - DNA, 24 bp, Artificial sequence
  SiRNA target sequence
tttaaaaagtaaattaatgtagtt

SEQ ID NO: 247723 - DNA, 24 bp, Artificial sequence
  SiRNA target sequence
ttaaaaagtaaattaatgtagtta

SEQ ID NO: 247724 - DNA, 24 bp, Artificial sequence
  SiRNA target sequence
taaaaagtaaattaatgtagttac

SEQ ID NO: 247725 - DNA, 24 bp, Artificial sequence
  SiRNA target sequence
aaaaagtaaattaatgtagttaca

SEQ ID NO: 247726 - DNA, 24 bp, Artificial sequence
  SiRNA target sequence
aaaagtaaattaatgtagttacaa

SEQ ID NO: 247727 - DNA, 24 bp, Artificial sequence
  SiRNA target sequence
aaagtaaattaatgtagttacaaa

SEQ ID NO: 247728 - DNA, 24 bp, Artificial sequence
  SiRNA target sequence
aagtaaattaatgtagttacaaaa

SEQ ID NO: 247729 - DNA, 24 bp, Artificial sequence
  SiRNA target sequence
agtaaattaatgtagttacaaaag

SEQ ID NO: 247730 - DNA, 24 bp, Artificial sequence
  SiRNA target sequence
gtaaattaatgtagttacaaaaga

SEQ ID NO: 247731 - DNA, 24 bp, Artificial sequence
  SiRNA target sequence
taaattaatgtagttacaaaagac

SEQ ID NO: 247732 - DNA, 24 bp, Artificial sequence
  SiRNA target sequence
aaattaatgtagttacaaaagaca

SEQ ID NO: 247733 - DNA, 24 bp, Artificial sequence
  SiRNA target sequence
aattaatgtagttacaaaagacaa

SEQ ID NO: 247734 - DNA, 24 bp, Artificial sequence
  SiRNA target sequence
attaatgtagttacaaaagacaag

SEQ ID NO: 247735 - DNA, 24 bp, Artificial sequence
  SiRNA target sequence
ttaatgtagttacaaaagacaaga

SEQ ID NO: 247736 - DNA, 24 bp, Artificial sequence
  SiRNA target sequence
taatgtagttacaaaagacaagat

SEQ ID NO: 247737 - DNA, 24 bp, Artificial sequence
  SiRNA target sequence
aatgtagttacaaaagacaagatc

SEQ ID NO: 247738 - DNA, 24 bp, Artificial sequence
  SiRNA target sequence
atgtagttacaaaagacaagatca

SEQ ID NO: 247739 - DNA, 24 bp, Artificial sequence
  SiRNA target sequence
tgtagttacaaaagacaagatcaa

SEQ ID NO: 247740 - DNA, 24 bp, Artificial sequence
  SiRNA target sequence
gtagttacaaaagacaagatcaaa

SEQ ID NO: 247741 - DNA, 24 bp, Artificial sequence
  SiRNA target sequence
tagttacaaaagacaagatcaaaa

SEQ ID NO: 247742 - DNA, 24 bp, Artificial sequence
  SiRNA target sequence
agttacaaaagacaagatcaaaaa

SEQ ID NO: 247743 - DNA, 24 bp, Artificial sequence
  SiRNA target sequence
gttacaaaagacaagatcaaaaaa

SEQ ID NO: 247744 - DNA, 24 bp, Artificial sequence
  SiRNA target sequence
ttacaaaagacaagatcaaaaaaa

SEQ ID NO: 247745 - DNA, 24 bp, Artificial sequence
  SiRNA target sequence
tacaaaagacaagatcaaaaaaaa

SEQ ID NO: 247746 - DNA, 24 bp, Artificial sequence
  SiRNA target sequence
acaaaagacaagatcaaaaaaaac

SEQ ID NO: 247747 - DNA, 24 bp, Artificial sequence
  SiRNA target sequence
caaaagacaagatcaaaaaaaaca

SEQ ID NO: 247748 - DNA, 24 bp, Artificial sequence
  SiRNA target sequence
aaaagacaagatcaaaaaaaacaa

SEQ ID NO: 247749 - DNA, 24 bp, Artificial sequence
  SiRNA target sequence
aaagacaagatcaaaaaaaacaaa

SEQ ID NO: 247750 - DNA, 24 bp, Artificial sequence
  SiRNA target sequence
aagacaagatcaaaaaaaacaaac

SEQ ID NO: 247751 - DNA, 24 bp, Artificial sequence
  SiRNA target sequence
agacaagatcaaaaaaaacaaact

SEQ ID NO: 247752 - DNA, 24 bp, Artificial sequence
  SiRNA target sequence
gacaagatcaaaaaaaacaaacta

SEQ ID NO: 247753 - DNA, 24 bp, Artificial sequence
  SiRNA target sequence
acaagatcaaaaaaaacaaactac

SEQ ID NO: 247754 - DNA, 24 bp, Artificial sequence
  SiRNA target sequence
caagatcaaaaaaaacaaactact

SEQ ID NO: 247755 - DNA, 24 bp, Artificial sequence
  SiRNA target sequence
aagatcaaaaaaaacaaactacta

SEQ ID NO: 247756 - DNA, 24 bp, Artificial sequence
  SiRNA target sequence
agatcaaaaaaaacaaactactac

SEQ ID NO: 247757 - DNA, 24 bp, Artificial sequence
  SiRNA target sequence
gatcaaaaaaaacaaactactacc

SEQ ID NO: 247758 - DNA, 24 bp, Artificial sequence
  SiRNA target sequence
atcaaaaaaaacaaactactaccg

SEQ ID NO: 247759 - DNA, 24 bp, Artificial sequence
  SiRNA target sequence
tcaaaaaaaacaaactactaccgt

SEQ ID NO: 247760 - DNA, 24 bp, Artificial sequence
  SiRNA target sequence
caaaaaaaacaaactactaccgtc

SEQ ID NO: 247761 - DNA, 24 bp, Artificial sequence
  SiRNA target sequence
aaaaaaaacaaactactaccgtca

SEQ ID NO: 247762 - DNA, 24 bp, Artificial sequence
  SiRNA target sequence
aaaaaaacaaactactaccgtcaa

SEQ ID NO: 247763 - DNA, 24 bp, Artificial sequence
  SiRNA target sequence
aaaaaacaaactactaccgtcaat

SEQ ID NO: 247764 - DNA, 24 bp, Artificial sequence
  SiRNA target sequence
aaaaacaaactactaccgtcaatt

SEQ ID NO: 247765 - DNA, 24 bp, Artificial sequence
  SiRNA target sequence
aaaacaaactactaccgtcaattt

SEQ ID NO: 247766 - DNA, 24 bp, Artificial sequence
  SiRNA target sequence
aaacaaactactaccgtcaatttt

SEQ ID NO: 247767 - DNA, 24 bp, Artificial sequence
  SiRNA target sequence
aacaaactactaccgtcaatttta

SEQ ID NO: 247768 - DNA, 24 bp, Artificial sequence
  SiRNA target sequence
acaaactactaccgtcaattttat

SEQ ID NO: 247769 - DNA, 24 bp, Artificial sequence
  SiRNA target sequence
caaactactaccgtcaattttatc

SEQ ID NO: 247770 - DNA, 24 bp, Artificial sequence
  SiRNA target sequence
aaactactaccgtcaattttatca

SEQ ID NO: 247771 - DNA, 24 bp, Artificial sequence
  SiRNA target sequence
aactactaccgtcaattttatcat

SEQ ID NO: 247772 - DNA, 24 bp, Artificial sequence
  SiRNA target sequence
actactaccgtcaattttatcatg

SEQ ID NO: 247773 - DNA, 24 bp, Artificial sequence
  SiRNA target sequence
ctactaccgtcaattttatcatgc

SEQ ID NO: 247774 - DNA, 24 bp, Artificial sequence
  SiRNA target sequence
tactaccgtcaattttatcatgca

SEQ ID NO: 247775 - DNA, 24 bp, Artificial sequence
  SiRNA target sequence
actaccgtcaattttatcatgcaa

SEQ ID NO: 247776 - DNA, 24 bp, Artificial sequence
  SiRNA target sequence
ctaccgtcaattttatcatgcaaa

SEQ ID NO: 247777 - DNA, 24 bp, Artificial sequence
  SiRNA target sequence
taccgtcaattttatcatgcaaac

SEQ ID NO: 247778 - DNA, 24 bp, Artificial sequence
  SiRNA target sequence
accgtcaattttatcatgcaaacc

SEQ ID NO: 247779 - DNA, 24 bp, Artificial sequence
  SiRNA target sequence
ccgtcaattttatcatgcaaacct

SEQ ID NO: 247780 - DNA, 24 bp, Artificial sequence
  SiRNA target sequence
cgtcaattttatcatgcaaacctg

SEQ ID NO: 247781 - DNA, 24 bp, Artificial sequence
  SiRNA target sequence
gtcaattttatcatgcaaacctgc

SEQ ID NO: 247782 - DNA, 24 bp, Artificial sequence
  SiRNA target sequence
tcaattttatcatgcaaacctgca

SEQ ID NO: 247783 - DNA, 24 bp, Artificial sequence
  SiRNA target sequence
caattttatcatgcaaacctgcag

SEQ ID NO: 247784 - DNA, 24 bp, Artificial sequence
  SiRNA target sequence
aattttatcatgcaaacctgcagg

SEQ ID NO: 247785 - DNA, 24 bp, Artificial sequence
  SiRNA target sequence
attttatcatgcaaacctgcagga

SEQ ID NO: 247786 - DNA, 24 bp, Artificial sequence
  SiRNA target sequence
ttttatcatgcaaacctgcaggaa

SEQ ID NO: 247787 - DNA, 24 bp, Artificial sequence
  SiRNA target sequence
tttatcatgcaaacctgcaggaag

SEQ ID NO: 247788 - DNA, 24 bp, Artificial sequence
  SiRNA target sequence
ttatcatgcaaacctgcaggaagt

SEQ ID NO: 247789 - DNA, 24 bp, Artificial sequence
  SiRNA target sequence
tatcatgcaaacctgcaggaagta

SEQ ID NO: 247790 - DNA, 24 bp, Artificial sequence
  SiRNA target sequence
atcatgcaaacctgcaggaagtat

SEQ ID NO: 247791 - DNA, 24 bp, Artificial sequence
  SiRNA target sequence
tcatgcaaacctgcaggaagtata

SEQ ID NO: 247792 - DNA, 24 bp, Artificial sequence
  SiRNA target sequence
catgcaaacctgcaggaagtatat

SEQ ID NO: 247793 - DNA, 24 bp, Artificial sequence
  SiRNA target sequence
atgcaaacctgcaggaagtatatt

SEQ ID NO: 247794 - DNA, 24 bp, Artificial sequence
  SiRNA target sequence
tgcaaacctgcaggaagtatattt

SEQ ID NO: 247795 - DNA, 24 bp, Artificial sequence
  SiRNA target sequence
gcaaacctgcaggaagtatatttg

SEQ ID NO: 247796 - DNA, 24 bp, Artificial sequence
  SiRNA target sequence
caaacctgcaggaagtatatttgc

SEQ ID NO: 247797 - DNA, 24 bp, Artificial sequence
  SiRNA target sequence
aaacctgcaggaagtatatttgct

SEQ ID NO: 247798 - DNA, 24 bp, Artificial sequence
  SiRNA target sequence
aacctgcaggaagtatatttgcta

SEQ ID NO: 247799 - DNA, 24 bp, Artificial sequence
  SiRNA target sequence
acctgcaggaagtatatttgctaa

SEQ ID NO: 247800 - DNA, 24 bp, Artificial sequence
  SiRNA target sequence
cctgcaggaagtatatttgctaat

SEQ ID NO: 247801 - DNA, 24 bp, Artificial sequence
  SiRNA target sequence
ctgcaggaagtatatttgctaatt

SEQ ID NO: 247802 - DNA, 24 bp, Artificial sequence
  SiRNA target sequence
tgcaggaagtatatttgctaattc

SEQ ID NO: 247803 - DNA, 24 bp, Artificial sequence
  SiRNA target sequence
gcaggaagtatatttgctaattca

SEQ ID NO: 247804 - DNA, 24 bp, Artificial sequence
  SiRNA target sequence
caggaagtatatttgctaattcat

SEQ ID NO: 247805 - DNA, 24 bp, Artificial sequence
  SiRNA target sequence
aggaagtatatttgctaattcatc

SEQ ID NO: 247806 - DNA, 24 bp, Artificial sequence
  SiRNA target sequence
ggaagtatatttgctaattcatct

SEQ ID NO: 247807 - DNA, 24 bp, Artificial sequence
  SiRNA target sequence
gaagtatatttgctaattcatctt

SEQ ID NO: 247808 - DNA, 24 bp, Artificial sequence
  SiRNA target sequence
aagtatatttgctaattcatcttt

SEQ ID NO: 247809 - DNA, 24 bp, Artificial sequence
  SiRNA target sequence
agtatatttgctaattcatctttt

SEQ ID NO: 247810 - DNA, 24 bp, Artificial sequence
  SiRNA target sequence
gtatatttgctaattcatctttta

SEQ ID NO: 247811 - DNA, 24 bp, Artificial sequence
  SiRNA target sequence
tatatttgctaattcatcttttat

SEQ ID NO: 247812 - DNA, 24 bp, Artificial sequence
  SiRNA target sequence
atatttgctaattcatcttttata

SEQ ID NO: 247813 - DNA, 24 bp, Artificial sequence
  SiRNA target sequence
tatttgctaattcatcttttatat

SEQ ID NO: 247814 - DNA, 24 bp, Artificial sequence
  SiRNA target sequence
atttgctaattcatcttttatata

SEQ ID NO: 247815 - DNA, 24 bp, Artificial sequence
  SiRNA target sequence
tttgctaattcatcttttatataa

SEQ ID NO: 247816 - DNA, 24 bp, Artificial sequence
  SiRNA target sequence
ttgctaattcatcttttatataaa

SEQ ID NO: 247817 - DNA, 24 bp, Artificial sequence
  SiRNA target sequence
tgctaattcatcttttatataaat

SEQ ID NO: 247818 - DNA, 24 bp, Artificial sequence
  SiRNA target sequence
gctaattcatcttttatataaata

SEQ ID NO: 247819 - DNA, 24 bp, Artificial sequence
  SiRNA target sequence
ctaattcatcttttatataaataa

SEQ ID NO: 247820 - DNA, 24 bp, Artificial sequence
  SiRNA target sequence
taattcatcttttatataaataaa

SEQ ID NO: 247821 - DNA, 24 bp, Artificial sequence
  SiRNA target sequence
aattcatcttttatataaataaaa

SEQ ID NO: 247822 - DNA, 24 bp, Artificial sequence
  SiRNA target sequence
attcatcttttatataaataaaag

SEQ ID NO: 247823 - DNA, 24 bp, Artificial sequence
  SiRNA target sequence
ttcatcttttatataaataaaagc

SEQ ID NO: 247824 - DNA, 24 bp, Artificial sequence
  SiRNA target sequence
tcatcttttatataaataaaagct

SEQ ID NO: 247825 - DNA, 24 bp, Artificial sequence
  SiRNA target sequence
catcttttatataaataaaagcta

SEQ ID NO: 247826 - DNA, 24 bp, Artificial sequence
  SiRNA target sequence
atcttttatataaataaaagctac

SEQ ID NO: 247827 - DNA, 24 bp, Artificial sequence
  SiRNA target sequence
tcttttatataaataaaagctaca

SEQ ID NO: 247828 - DNA, 24 bp, Artificial sequence
  SiRNA target sequence
cttttatataaataaaagctacag

SEQ ID NO: 247829 - DNA, 24 bp, Artificial sequence
  SiRNA target sequence
ttttatataaataaaagctacaga

SEQ ID NO: 247830 - DNA, 24 bp, Artificial sequence
  SiRNA target sequence
tttatataaataaaagctacagaa

SEQ ID NO: 247831 - DNA, 24 bp, Artificial sequence
  SiRNA target sequence
ttatataaataaaagctacagaaa

SEQ ID NO: 247832 - DNA, 24 bp, Artificial sequence
  SiRNA target sequence
tatataaataaaagctacagaaat

SEQ ID NO: 247833 - DNA, 24 bp, Artificial sequence
  SiRNA target sequence
atataaataaaagctacagaaata

SEQ ID NO: 247834 - DNA, 24 bp, Artificial sequence
  SiRNA target sequence
tataaataaaagctacagaaataa

SEQ ID NO: 247835 - DNA, 24 bp, Artificial sequence
  SiRNA target sequence
ataaataaaagctacagaaataat

SEQ ID NO: 247836 - DNA, 24 bp, Artificial sequence
  SiRNA target sequence
taaataaaagctacagaaataatc

SEQ ID NO: 247837 - DNA, 24 bp, Artificial sequence
  SiRNA target sequence
aaataaaagctacagaaataatca

SEQ ID NO: 247838 - DNA, 24 bp, Artificial sequence
  SiRNA target sequence
aataaaagctacagaaataatcat

SEQ ID NO: 247839 - DNA, 24 bp, Artificial sequence
  SiRNA target sequence
ataaaagctacagaaataatcatt

SEQ ID NO: 247840 - DNA, 24 bp, Artificial sequence
  SiRNA target sequence
taaaagctacagaaataatcattg

SEQ ID NO: 247841 - DNA, 24 bp, Artificial sequence
  SiRNA target sequence
aaaagctacagaaataatcattga

SEQ ID NO: 247842 - DNA, 24 bp, Artificial sequence
  SiRNA target sequence
aaagctacagaaataatcattgaa

SEQ ID NO: 247843 - DNA, 24 bp, Artificial sequence
  SiRNA target sequence
aagctacagaaataatcattgaaa

SEQ ID NO: 247844 - DNA, 24 bp, Artificial sequence
  SiRNA target sequence
agctacagaaataatcattgaaat

SEQ ID NO: 247845 - DNA, 24 bp, Artificial sequence
  SiRNA target sequence
gctacagaaataatcattgaaatg

SEQ ID NO: 247846 - DNA, 24 bp, Artificial sequence
  SiRNA target sequence
ctacagaaataatcattgaaatgg

SEQ ID NO: 247847 - DNA, 24 bp, Artificial sequence
  SiRNA target sequence
tacagaaataatcattgaaatggc

SEQ ID NO: 247848 - DNA, 24 bp, Artificial sequence
  SiRNA target sequence
acagaaataatcattgaaatggcg

SEQ ID NO: 247849 - DNA, 24 bp, Artificial sequence
  SiRNA target sequence
cagaaataatcattgaaatggcgg

SEQ ID NO: 247850 - DNA, 24 bp, Artificial sequence
  SiRNA target sequence
agaaataatcattgaaatggcggt

SEQ ID NO: 247851 - DNA, 24 bp, Artificial sequence
  SiRNA target sequence
gaaataatcattgaaatggcggtg

SEQ ID NO: 247852 - DNA, 24 bp, Artificial sequence
  SiRNA target sequence
aaataatcattgaaatggcggtga

SEQ ID NO: 247853 - DNA, 24 bp, Artificial sequence
  SiRNA target sequence
aataatcattgaaatggcggtgat

SEQ ID NO: 247854 - DNA, 24 bp, Artificial sequence
  SiRNA target sequence
ataatcattgaaatggcggtgatt

SEQ ID NO: 247855 - DNA, 24 bp, Artificial sequence
  SiRNA target sequence
taatcattgaaatggcggtgattg

SEQ ID NO: 247856 - DNA, 24 bp, Artificial sequence
  SiRNA target sequence
aatcattgaaatggcggtgattgt

SEQ ID NO: 247857 - DNA, 24 bp, Artificial sequence
  SiRNA target sequence
atcattgaaatggcggtgattgtg

SEQ ID NO: 247858 - DNA, 24 bp, Artificial sequence
  SiRNA target sequence
tcattgaaatggcggtgattgtgg

SEQ ID NO: 247859 - DNA, 24 bp, Artificial sequence
  SiRNA target sequence
cattgaaatggcggtgattgtgga

SEQ ID NO: 247860 - DNA, 24 bp, Artificial sequence
  SiRNA target sequence
attgaaatggcggtgattgtggaa

SEQ ID NO: 247861 - DNA, 24 bp, Artificial sequence
  SiRNA target sequence
ttgaaatggcggtgattgtggaaa

SEQ ID NO: 247862 - DNA, 24 bp, Artificial sequence
  SiRNA target sequence
tgaaatggcggtgattgtggaaaa

SEQ ID NO: 247863 - DNA, 24 bp, Artificial sequence
  SiRNA target sequence
gaaatggcggtgattgtggaaaaa

SEQ ID NO: 247864 - DNA, 24 bp, Artificial sequence
  SiRNA target sequence
aaatggcggtgattgtggaaaaat

SEQ ID NO: 247865 - DNA, 24 bp, Artificial sequence
  SiRNA target sequence
aatggcggtgattgtggaaaaatt

SEQ ID NO: 247866 - DNA, 24 bp, Artificial sequence
  SiRNA target sequence
atggcggtgattgtggaaaaatta

SEQ ID NO: 247867 - DNA, 24 bp, Artificial sequence
  SiRNA target sequence
tggcggtgattgtggaaaaattag

SEQ ID NO: 247868 - DNA, 24 bp, Artificial sequence
  SiRNA target sequence
ggcggtgattgtggaaaaattagg

SEQ ID NO: 247869 - DNA, 24 bp, Artificial sequence
  SiRNA target sequence
gcggtgattgtggaaaaattagga

SEQ ID NO: 247870 - DNA, 24 bp, Artificial sequence
  SiRNA target sequence
cggtgattgtggaaaaattaggaa

SEQ ID NO: 247871 - DNA, 24 bp, Artificial sequence
  SiRNA target sequence
ggtgattgtggaaaaattaggaac

SEQ ID NO: 247872 - DNA, 24 bp, Artificial sequence
  SiRNA target sequence
gtgattgtggaaaaattaggaaca

SEQ ID NO: 247873 - DNA, 24 bp, Artificial sequence
  SiRNA target sequence
tgattgtggaaaaattaggaacaa

SEQ ID NO: 247874 - DNA, 24 bp, Artificial sequence
  SiRNA target sequence
gattgtggaaaaattaggaacaat

SEQ ID NO: 247875 - DNA, 24 bp, Artificial sequence
  SiRNA target sequence
attgtggaaaaattaggaacaatt

SEQ ID NO: 247876 - DNA, 24 bp, Artificial sequence
  SiRNA target sequence
ttgtggaaaaattaggaacaattt

SEQ ID NO: 247877 - DNA, 24 bp, Artificial sequence
  SiRNA target sequence
tgtggaaaaattaggaacaatttc

SEQ ID NO: 247878 - DNA, 24 bp, Artificial sequence
  SiRNA target sequence
gtggaaaaattaggaacaatttct

SEQ ID NO: 247879 - DNA, 24 bp, Artificial sequence
  SiRNA target sequence
tggaaaaattaggaacaatttctt

SEQ ID NO: 247880 - DNA, 24 bp, Artificial sequence
  SiRNA target sequence
ggaaaaattaggaacaatttcttt

SEQ ID NO: 247881 - DNA, 24 bp, Artificial sequence
  SiRNA target sequence
gaaaaattaggaacaatttctttc

SEQ ID NO: 247882 - DNA, 24 bp, Artificial sequence
  SiRNA target sequence
aaaaattaggaacaatttctttca

SEQ ID NO: 247883 - DNA, 24 bp, Artificial sequence
  SiRNA target sequence
aaaattaggaacaatttctttcat

SEQ ID NO: 247884 - DNA, 24 bp, Artificial sequence
  SiRNA target sequence
aaattaggaacaatttctttcatt

SEQ ID NO: 247885 - DNA, 24 bp, Artificial sequence
  SiRNA target sequence
aattaggaacaatttctttcattt

SEQ ID NO: 247886 - DNA, 24 bp, Artificial sequence
  SiRNA target sequence
attaggaacaatttctttcatttc

SEQ ID NO: 247887 - DNA, 24 bp, Artificial sequence
  SiRNA target sequence
ttaggaacaatttctttcatttca

SEQ ID NO: 247888 - DNA, 24 bp, Artificial sequence
  SiRNA target sequence
taggaacaatttctttcatttcat

SEQ ID NO: 247889 - DNA, 24 bp, Artificial sequence
  SiRNA target sequence
aggaacaatttctttcatttcatc

SEQ ID NO: 247890 - DNA, 24 bp, Artificial sequence
  SiRNA target sequence
ggaacaatttctttcatttcatct

SEQ ID NO: 247891 - DNA, 24 bp, Artificial sequence
  SiRNA target sequence
gaacaatttctttcatttcatctt

SEQ ID NO: 247892 - DNA, 24 bp, Artificial sequence
  SiRNA target sequence
aacaatttctttcatttcatcttc

SEQ ID NO: 247893 - DNA, 24 bp, Artificial sequence
  SiRNA target sequence
acaatttctttcatttcatcttct

SEQ ID NO: 247894 - DNA, 24 bp, Artificial sequence
  SiRNA target sequence
caatttctttcatttcatcttctg

SEQ ID NO: 247895 - DNA, 24 bp, Artificial sequence
  SiRNA target sequence
aatttctttcatttcatcttctgt

SEQ ID NO: 247896 - DNA, 24 bp, Artificial sequence
  SiRNA target sequence
atttctttcatttcatcttctgta

SEQ ID NO: 247897 - DNA, 24 bp, Artificial sequence
  SiRNA target sequence
tttctttcatttcatcttctgtac

SEQ ID NO: 247898 - DNA, 24 bp, Artificial sequence
  SiRNA target sequence
ttctttcatttcatcttctgtaca

SEQ ID NO: 247899 - DNA, 24 bp, Artificial sequence
  SiRNA target sequence
tctttcatttcatcttctgtacaa

SEQ ID NO: 247900 - DNA, 24 bp, Artificial sequence
  SiRNA target sequence
ctttcatttcatcttctgtacaag

SEQ ID NO: 247901 - DNA, 24 bp, Artificial sequence
  SiRNA target sequence
tttcatttcatcttctgtacaagc

SEQ ID NO: 247902 - DNA, 24 bp, Artificial sequence
  SiRNA target sequence
ttcatttcatcttctgtacaagca

SEQ ID NO: 247903 - DNA, 24 bp, Artificial sequence
  SiRNA target sequence
tcatttcatcttctgtacaagcat

SEQ ID NO: 247904 - DNA, 24 bp, Artificial sequence
  SiRNA target sequence
catttcatcttctgtacaagcatg

SEQ ID NO: 247905 - DNA, 24 bp, Artificial sequence
  SiRNA target sequence
atttcatcttctgtacaagcatga

SEQ ID NO: 247906 - DNA, 24 bp, Artificial sequence
  SiRNA target sequence
tttcatcttctgtacaagcatgat

SEQ ID NO: 247907 - DNA, 24 bp, Artificial sequence
  SiRNA target sequence
ttcatcttctgtacaagcatgatt

SEQ ID NO: 247908 - DNA, 24 bp, Artificial sequence
  SiRNA target sequence
tcatcttctgtacaagcatgattg

SEQ ID NO: 247909 - DNA, 24 bp, Artificial sequence
  SiRNA target sequence
catcttctgtacaagcatgattgg

SEQ ID NO: 247910 - DNA, 24 bp, Artificial sequence
  SiRNA target sequence
atcttctgtacaagcatgattggc

SEQ ID NO: 247911 - DNA, 24 bp, Artificial sequence
  SiRNA target sequence
tcttctgtacaagcatgattggct

SEQ ID NO: 247912 - DNA, 24 bp, Artificial sequence
  SiRNA target sequence
cttctgtacaagcatgattggcta

SEQ ID NO: 247913 - DNA, 24 bp, Artificial sequence
  SiRNA target sequence
ttctgtacaagcatgattggctaa

SEQ ID NO: 247914 - DNA, 24 bp, Artificial sequence
  SiRNA target sequence
tctgtacaagcatgattggctaac

SEQ ID NO: 247915 - DNA, 24 bp, Artificial sequence
  SiRNA target sequence
ctgtacaagcatgattggctaacg

SEQ ID NO: 247916 - DNA, 24 bp, Artificial sequence
  SiRNA target sequence
tgtacaagcatgattggctaacgc

SEQ ID NO: 247917 - DNA, 24 bp, Artificial sequence
  SiRNA target sequence
gtacaagcatgattggctaacgca

SEQ ID NO: 247918 - DNA, 24 bp, Artificial sequence
  SiRNA target sequence
tacaagcatgattggctaacgcat

SEQ ID NO: 247919 - DNA, 24 bp, Artificial sequence
  SiRNA target sequence
acaagcatgattggctaacgcata

SEQ ID NO: 247920 - DNA, 24 bp, Artificial sequence
  SiRNA target sequence
caagcatgattggctaacgcatat

SEQ ID NO: 247921 - DNA, 24 bp, Artificial sequence
  SiRNA target sequence
aagcatgattggctaacgcatata

SEQ ID NO: 247922 - DNA, 24 bp, Artificial sequence
  SiRNA target sequence
agcatgattggctaacgcatataa

SEQ ID NO: 247923 - DNA, 24 bp, Artificial sequence
  SiRNA target sequence
gcatgattggctaacgcatataaa

SEQ ID NO: 247924 - DNA, 24 bp, Artificial sequence
  SiRNA target sequence
catgattggctaacgcatataaag

SEQ ID NO: 247925 - DNA, 24 bp, Artificial sequence
  SiRNA target sequence
atgattggctaacgcatataaagc

SEQ ID NO: 247926 - DNA, 24 bp, Artificial sequence
  SiRNA target sequence
tgattggctaacgcatataaagca

SEQ ID NO: 247927 - DNA, 24 bp, Artificial sequence
  SiRNA target sequence
gattggctaacgcatataaagcaa

SEQ ID NO: 247928 - DNA, 24 bp, Artificial sequence
  SiRNA target sequence
attggctaacgcatataaagcaaa

SEQ ID NO: 247929 - DNA, 24 bp, Artificial sequence
  SiRNA target sequence
ttggctaacgcatataaagcaaaa

SEQ ID NO: 247930 - DNA, 24 bp, Artificial sequence
  SiRNA target sequence
tggctaacgcatataaagcaaaac

SEQ ID NO: 247931 - DNA, 24 bp, Artificial sequence
  SiRNA target sequence
ggctaacgcatataaagcaaaacc

SEQ ID NO: 247932 - DNA, 24 bp, Artificial sequence
  SiRNA target sequence
gctaacgcatataaagcaaaacca

SEQ ID NO: 247933 - DNA, 24 bp, Artificial sequence
  SiRNA target sequence
ctaacgcatataaagcaaaaccaa

SEQ ID NO: 247934 - DNA, 24 bp, Artificial sequence
  SiRNA target sequence
taacgcatataaagcaaaaccaac

SEQ ID NO: 247935 - DNA, 24 bp, Artificial sequence
  SiRNA target sequence
aacgcatataaagcaaaaccaact

SEQ ID NO: 247936 - DNA, 24 bp, Artificial sequence
  SiRNA target sequence
acgcatataaagcaaaaccaacta

SEQ ID NO: 247937 - DNA, 24 bp, Artificial sequence
  SiRNA target sequence
cgcatataaagcaaaaccaactac

SEQ ID NO: 247938 - DNA, 24 bp, Artificial sequence
  SiRNA target sequence
gcatataaagcaaaaccaactact

SEQ ID NO: 247939 - DNA, 24 bp, Artificial sequence
  SiRNA target sequence
catataaagcaaaaccaactacta

SEQ ID NO: 247940 - DNA, 24 bp, Artificial sequence
  SiRNA target sequence
atataaagcaaaaccaactactag

SEQ ID NO: 247941 - DNA, 24 bp, Artificial sequence
  SiRNA target sequence
tataaagcaaaaccaactactaga

SEQ ID NO: 247942 - DNA, 24 bp, Artificial sequence
  SiRNA target sequence
ataaagcaaaaccaactactagag

SEQ ID NO: 247943 - DNA, 24 bp, Artificial sequence
  SiRNA target sequence
taaagcaaaaccaactactagagt

SEQ ID NO: 247944 - DNA, 24 bp, Artificial sequence
  SiRNA target sequence
aaagcaaaaccaactactagagta

SEQ ID NO: 247945 - DNA, 24 bp, Artificial sequence
  SiRNA target sequence
aagcaaaaccaactactagagtac

SEQ ID NO: 247946 - DNA, 24 bp, Artificial sequence
  SiRNA target sequence
agcaaaaccaactactagagtact

SEQ ID NO: 247947 - DNA, 24 bp, Artificial sequence
  SiRNA target sequence
gcaaaaccaactactagagtactc

SEQ ID NO: 247948 - DNA, 24 bp, Artificial sequence
  SiRNA target sequence
caaaaccaactactagagtactcc

SEQ ID NO: 247949 - DNA, 24 bp, Artificial sequence
  SiRNA target sequence
aaaaccaactactagagtactcca

SEQ ID NO: 247950 - DNA, 24 bp, Artificial sequence
  SiRNA target sequence
aaaccaactactagagtactccac

SEQ ID NO: 247951 - DNA, 24 bp, Artificial sequence
  SiRNA target sequence
aaccaactactagagtactccaca

SEQ ID NO: 247952 - DNA, 24 bp, Artificial sequence
  SiRNA target sequence
accaactactagagtactccacaa

SEQ ID NO: 247953 - DNA, 24 bp, Artificial sequence
  SiRNA target sequence
ccaactactagagtactccacaac

SEQ ID NO: 247954 - DNA, 24 bp, Artificial sequence
  SiRNA target sequence
caactactagagtactccacaact

SEQ ID NO: 247955 - DNA, 24 bp, Artificial sequence
  SiRNA target sequence
aactactagagtactccacaactc

SEQ ID NO: 247956 - DNA, 24 bp, Artificial sequence
  SiRNA target sequence
actactagagtactccacaactcc

SEQ ID NO: 247957 - DNA, 24 bp, Artificial sequence
  SiRNA target sequence
ctactagagtactccacaactccg

SEQ ID NO: 247958 - DNA, 24 bp, Artificial sequence
  SiRNA target sequence
tactagagtactccacaactccga

SEQ ID NO: 247959 - DNA, 24 bp, Artificial sequence
  SiRNA target sequence
actagagtactccacaactccgat

SEQ ID NO: 247960 - DNA, 24 bp, Artificial sequence
  SiRNA target sequence
ctagagtactccacaactccgata

SEQ ID NO: 247961 - DNA, 24 bp, Artificial sequence
  SiRNA target sequence
tagagtactccacaactccgataa

SEQ ID NO: 247962 - DNA, 24 bp, Artificial sequence
  SiRNA target sequence
agagtactccacaactccgataag

SEQ ID NO: 247963 - DNA, 24 bp, Artificial sequence
  SiRNA target sequence
gagtactccacaactccgataaga

SEQ ID NO: 247964 - DNA, 24 bp, Artificial sequence
  SiRNA target sequence
agtactccacaactccgataagat

SEQ ID NO: 247965 - DNA, 24 bp, Artificial sequence
  SiRNA target sequence
gtactccacaactccgataagatg

SEQ ID NO: 247966 - DNA, 24 bp, Artificial sequence
  SiRNA target sequence
tactccacaactccgataagatgt

SEQ ID NO: 247967 - DNA, 24 bp, Artificial sequence
  SiRNA target sequence
actccacaactccgataagatgta

SEQ ID NO: 247968 - DNA, 24 bp, Artificial sequence
  SiRNA target sequence
ctccacaactccgataagatgtaa

SEQ ID NO: 247969 - DNA, 24 bp, Artificial sequence
  SiRNA target sequence
tccacaactccgataagatgtaac

SEQ ID NO: 247970 - DNA, 24 bp, Artificial sequence
  SiRNA target sequence
ccacaactccgataagatgtaaca

SEQ ID NO: 247971 - DNA, 24 bp, Artificial sequence
  SiRNA target sequence
cacaactccgataagatgtaacat

SEQ ID NO: 247972 - DNA, 24 bp, Artificial sequence
  SiRNA target sequence
acaactccgataagatgtaacata

SEQ ID NO: 247973 - DNA, 24 bp, Artificial sequence
  SiRNA target sequence
caactccgataagatgtaacataa

SEQ ID NO: 247974 - DNA, 24 bp, Artificial sequence
  SiRNA target sequence
aactccgataagatgtaacataaa

SEQ ID NO: 247975 - DNA, 24 bp, Artificial sequence
  SiRNA target sequence
actccgataagatgtaacataaag

SEQ ID NO: 247976 - DNA, 24 bp, Artificial sequence
  SiRNA target sequence
ctccgataagatgtaacataaagt

SEQ ID NO: 247977 - DNA, 24 bp, Artificial sequence
  SiRNA target sequence
tccgataagatgtaacataaagta

SEQ ID NO: 247978 - DNA, 24 bp, Artificial sequence
  SiRNA target sequence
ccgataagatgtaacataaagtac

SEQ ID NO: 247979 - DNA, 24 bp, Artificial sequence
  SiRNA target sequence
cgataagatgtaacataaagtact

SEQ ID NO: 247980 - DNA, 24 bp, Artificial sequence
  SiRNA target sequence
gataagatgtaacataaagtactt

SEQ ID NO: 247981 - DNA, 24 bp, Artificial sequence
  SiRNA target sequence
ataagatgtaacataaagtactta

SEQ ID NO: 247982 - DNA, 24 bp, Artificial sequence
  SiRNA target sequence
taagatgtaacataaagtacttat

SEQ ID NO: 247983 - DNA, 24 bp, Artificial sequence
  SiRNA target sequence
aagatgtaacataaagtacttatc

SEQ ID NO: 247984 - DNA, 24 bp, Artificial sequence
  SiRNA target sequence
agatgtaacataaagtacttatcc

SEQ ID NO: 247985 - DNA, 24 bp, Artificial sequence
  SiRNA target sequence
gatgtaacataaagtacttatcca

SEQ ID NO: 247986 - DNA, 24 bp, Artificial sequence
  SiRNA target sequence
atgtaacataaagtacttatccac

SEQ ID NO: 247987 - DNA, 24 bp, Artificial sequence
  SiRNA target sequence
tgtaacataaagtacttatccact

SEQ ID NO: 247988 - DNA, 24 bp, Artificial sequence
  SiRNA target sequence
gtaacataaagtacttatccactc

SEQ ID NO: 247989 - DNA, 24 bp, Artificial sequence
  SiRNA target sequence
taacataaagtacttatccactca

SEQ ID NO: 247990 - DNA, 24 bp, Artificial sequence
  SiRNA target sequence
aacataaagtacttatccactcac

SEQ ID NO: 247991 - DNA, 24 bp, Artificial sequence
  SiRNA target sequence
acataaagtacttatccactcact

SEQ ID NO: 247992 - DNA, 24 bp, Artificial sequence
  SiRNA target sequence
cataaagtacttatccactcactg

SEQ ID NO: 247993 - DNA, 24 bp, Artificial sequence
  SiRNA target sequence
ataaagtacttatccactcactgt

SEQ ID NO: 247994 - DNA, 24 bp, Artificial sequence
  SiRNA target sequence
taaagtacttatccactcactgta

SEQ ID NO: 247995 - DNA, 24 bp, Artificial sequence
  SiRNA target sequence
aaagtacttatccactcactgtac

SEQ ID NO: 247996 - DNA, 24 bp, Artificial sequence
  SiRNA target sequence
aagtacttatccactcactgtaca

SEQ ID NO: 247997 - DNA, 24 bp, Artificial sequence
  SiRNA target sequence
agtacttatccactcactgtacat

SEQ ID NO: 247998 - DNA, 24 bp, Artificial sequence
  SiRNA target sequence
gtacttatccactcactgtacata

SEQ ID NO: 247999 - DNA, 24 bp, Artificial sequence
  SiRNA target sequence
tacttatccactcactgtacatat

SEQ ID NO: 248000 - DNA, 24 bp, Artificial sequence
  SiRNA target sequence
acttatccactcactgtacatata

SEQ ID NO: 248001 - DNA, 24 bp, Artificial sequence
  SiRNA target sequence
cttatccactcactgtacatatat

SEQ ID NO: 248002 - DNA, 24 bp, Artificial sequence
  SiRNA target sequence
ttatccactcactgtacatatata

SEQ ID NO: 248003 - DNA, 24 bp, Artificial sequence
  SiRNA target sequence
tatccactcactgtacatatataa

SEQ ID NO: 248004 - DNA, 24 bp, Artificial sequence
  SiRNA target sequence
atccactcactgtacatatataaa

SEQ ID NO: 248005 - DNA, 24 bp, Artificial sequence
  SiRNA target sequence
tccactcactgtacatatataaaa

SEQ ID NO: 248006 - DNA, 24 bp, Artificial sequence
  SiRNA target sequence
ccactcactgtacatatataaaaa

SEQ ID NO: 248007 - DNA, 24 bp, Artificial sequence
  SiRNA target sequence
cactcactgtacatatataaaaaa

SEQ ID NO: 248008 - DNA, 24 bp, Artificial sequence
  SiRNA target sequence
actcactgtacatatataaaaaag

SEQ ID NO: 248009 - DNA, 24 bp, Artificial sequence
  SiRNA target sequence
ctcactgtacatatataaaaaagg

SEQ ID NO: 248010 - DNA, 24 bp, Artificial sequence
  SiRNA target sequence
tcactgtacatatataaaaaagga

SEQ ID NO: 248011 - DNA, 24 bp, Artificial sequence
  SiRNA target sequence
cactgtacatatataaaaaaggag

SEQ ID NO: 248012 - DNA, 24 bp, Artificial sequence
  SiRNA target sequence
actgtacatatataaaaaaggaga

SEQ ID NO: 248013 - DNA, 24 bp, Artificial sequence
  SiRNA target sequence
ctgtacatatataaaaaaggagat

SEQ ID NO: 248014 - DNA, 24 bp, Artificial sequence
  SiRNA target sequence
tgtacatatataaaaaaggagata

SEQ ID NO: 248015 - DNA, 24 bp, Artificial sequence
  SiRNA target sequence
gtacatatataaaaaaggagataa

SEQ ID NO: 248016 - DNA, 24 bp, Artificial sequence
  SiRNA target sequence
tacatatataaaaaaggagataag

SEQ ID NO: 248017 - DNA, 24 bp, Artificial sequence
  SiRNA target sequence
acatatataaaaaaggagataagc

SEQ ID NO: 248018 - DNA, 24 bp, Artificial sequence
  SiRNA target sequence
catatataaaaaaggagataagcc

SEQ ID NO: 248019 - DNA, 24 bp, Artificial sequence
  SiRNA target sequence
atatataaaaaaggagataagccc

SEQ ID NO: 248020 - DNA, 24 bp, Artificial sequence
  SiRNA target sequence
tatataaaaaaggagataagccca

SEQ ID NO: 248021 - DNA, 24 bp, Artificial sequence
  SiRNA target sequence
atataaaaaaggagataagcccat

SEQ ID NO: 248022 - DNA, 24 bp, Artificial sequence
  SiRNA target sequence
tataaaaaaggagataagcccatc

SEQ ID NO: 248023 - DNA, 24 bp, Artificial sequence
  SiRNA target sequence
ataaaaaaggagataagcccatca

SEQ ID NO: 248024 - DNA, 24 bp, Artificial sequence
  SiRNA target sequence
taaaaaaggagataagcccatcaa

SEQ ID NO: 248025 - DNA, 24 bp, Artificial sequence
  SiRNA target sequence
aaaaaaggagataagcccatcaag

SEQ ID NO: 248026 - DNA, 24 bp, Artificial sequence
  SiRNA target sequence
aaaaaggagataagcccatcaagc

SEQ ID NO: 248027 - DNA, 24 bp, Artificial sequence
  SiRNA target sequence
aaaaggagataagcccatcaagct

SEQ ID NO: 248028 - DNA, 24 bp, Artificial sequence
  SiRNA target sequence
aaaggagataagcccatcaagctt

SEQ ID NO: 248029 - DNA, 24 bp, Artificial sequence
  SiRNA target sequence
aaggagataagcccatcaagcttc

SEQ ID NO: 248030 - DNA, 24 bp, Artificial sequence
  SiRNA target sequence
aggagataagcccatcaagcttct

SEQ ID NO: 248031 - DNA, 24 bp, Artificial sequence
  SiRNA target sequence
ggagataagcccatcaagcttcta

SEQ ID NO: 248032 - DNA, 24 bp, Artificial sequence
  SiRNA target sequence
gagataagcccatcaagcttctaa

SEQ ID NO: 248033 - DNA, 24 bp, Artificial sequence
  SiRNA target sequence
agataagcccatcaagcttctaac

SEQ ID NO: 248034 - DNA, 24 bp, Artificial sequence
  SiRNA target sequence
gataagcccatcaagcttctaact

SEQ ID NO: 248035 - DNA, 24 bp, Artificial sequence
  SiRNA target sequence
ataagcccatcaagcttctaactg

SEQ ID NO: 248036 - DNA, 24 bp, Artificial sequence
  SiRNA target sequence
taagcccatcaagcttctaactga

SEQ ID NO: 248037 - DNA, 24 bp, Artificial sequence
  SiRNA target sequence
aagcccatcaagcttctaactgac

SEQ ID NO: 248038 - DNA, 24 bp, Artificial sequence
  SiRNA target sequence
agcccatcaagcttctaactgaca

SEQ ID NO: 248039 - DNA, 24 bp, Artificial sequence
  SiRNA target sequence
gcccatcaagcttctaactgacat

SEQ ID NO: 248040 - DNA, 24 bp, Artificial sequence
  SiRNA target sequence
cccatcaagcttctaactgacatc

SEQ ID NO: 248041 - DNA, 24 bp, Artificial sequence
  SiRNA target sequence
ccatcaagcttctaactgacatct

SEQ ID NO: 248042 - DNA, 24 bp, Artificial sequence
  SiRNA target sequence
catcaagcttctaactgacatctt

SEQ ID NO: 248043 - DNA, 24 bp, Artificial sequence
  SiRNA target sequence
atcaagcttctaactgacatctta

SEQ ID NO: 248044 - DNA, 24 bp, Artificial sequence
  SiRNA target sequence
tcaagcttctaactgacatcttac

SEQ ID NO: 248045 - DNA, 24 bp, Artificial sequence
  SiRNA target sequence
caagcttctaactgacatcttacc

SEQ ID NO: 248046 - DNA, 24 bp, Artificial sequence
  SiRNA target sequence
aagcttctaactgacatcttacca

SEQ ID NO: 248047 - DNA, 24 bp, Artificial sequence
  SiRNA target sequence
agcttctaactgacatcttaccat

SEQ ID NO: 248048 - DNA, 24 bp, Artificial sequence
  SiRNA target sequence
gcttctaactgacatcttaccatc

SEQ ID NO: 248049 - DNA, 24 bp, Artificial sequence
  SiRNA target sequence
cttctaactgacatcttaccatca

SEQ ID NO: 248050 - DNA, 24 bp, Artificial sequence
  SiRNA target sequence
ttctaactgacatcttaccatcac

SEQ ID NO: 248051 - DNA, 24 bp, Artificial sequence
  SiRNA target sequence
tctaactgacatcttaccatcaca

SEQ ID NO: 248052 - DNA, 24 bp, Artificial sequence
  SiRNA target sequence
ctaactgacatcttaccatcacaa

SEQ ID NO: 248053 - DNA, 24 bp, Artificial sequence
  SiRNA target sequence
taactgacatcttaccatcacaaa

SEQ ID NO: 248054 - DNA, 24 bp, Artificial sequence
  SiRNA target sequence
aactgacatcttaccatcacaaaa

SEQ ID NO: 248055 - DNA, 24 bp, Artificial sequence
  SiRNA target sequence
actgacatcttaccatcacaaaaa

SEQ ID NO: 248056 - DNA, 24 bp, Artificial sequence
  SiRNA target sequence
ctgacatcttaccatcacaaaaaa

SEQ ID NO: 248057 - DNA, 24 bp, Artificial sequence
  SiRNA target sequence
tgacatcttaccatcacaaaaaat

SEQ ID NO: 248058 - DNA, 24 bp, Artificial sequence
  SiRNA target sequence
gacatcttaccatcacaaaaaata

SEQ ID NO: 248059 - DNA, 24 bp, Artificial sequence
  SiRNA target sequence
acatcttaccatcacaaaaaatat

SEQ ID NO: 248060 - DNA, 24 bp, Artificial sequence
  SiRNA target sequence
catcttaccatcacaaaaaatatc

SEQ ID NO: 248061 - DNA, 24 bp, Artificial sequence
  SiRNA target sequence
atcttaccatcacaaaaaatatct

SEQ ID NO: 248062 - DNA, 24 bp, Artificial sequence
  SiRNA target sequence
tcttaccatcacaaaaaatatcta

SEQ ID NO: 248063 - DNA, 24 bp, Artificial sequence
  SiRNA target sequence
cttaccatcacaaaaaatatctag

SEQ ID NO: 248064 - DNA, 24 bp, Artificial sequence
  SiRNA target sequence
ttaccatcacaaaaaatatctagt

SEQ ID NO: 248065 - DNA, 24 bp, Artificial sequence
  SiRNA target sequence
taccatcacaaaaaatatctagtg

SEQ ID NO: 248066 - DNA, 24 bp, Artificial sequence
  SiRNA target sequence
accatcacaaaaaatatctagtgc

SEQ ID NO: 248067 - DNA, 24 bp, Artificial sequence
  SiRNA target sequence
ccatcacaaaaaatatctagtgcc

SEQ ID NO: 248068 - DNA, 24 bp, Artificial sequence
  SiRNA target sequence
catcacaaaaaatatctagtgccc

SEQ ID NO: 248069 - DNA, 24 bp, Artificial sequence
  SiRNA target sequence
atcacaaaaaatatctagtgccca

SEQ ID NO: 248070 - DNA, 24 bp, Artificial sequence
  SiRNA target sequence
tcacaaaaaatatctagtgcccat

SEQ ID NO: 248071 - DNA, 24 bp, Artificial sequence
  SiRNA target sequence
cacaaaaaatatctagtgcccatt

SEQ ID NO: 248072 - DNA, 24 bp, Artificial sequence
  SiRNA target sequence
acaaaaaatatctagtgcccattg

SEQ ID NO: 248073 - DNA, 24 bp, Artificial sequence
  SiRNA target sequence
caaaaaatatctagtgcccattgt

SEQ ID NO: 248074 - DNA, 24 bp, Artificial sequence
  SiRNA target sequence
aaaaaatatctagtgcccattgtg

SEQ ID NO: 248075 - DNA, 24 bp, Artificial sequence
  SiRNA target sequence
aaaaatatctagtgcccattgtga

SEQ ID NO: 248076 - DNA, 24 bp, Artificial sequence
  SiRNA target sequence
aaaatatctagtgcccattgtgat

SEQ ID NO: 248077 - DNA, 24 bp, Artificial sequence
  SiRNA target sequence
aaatatctagtgcccattgtgatc

SEQ ID NO: 248078 - DNA, 24 bp, Artificial sequence
  SiRNA target sequence
aatatctagtgcccattgtgatcc

SEQ ID NO: 248079 - DNA, 24 bp, Artificial sequence
  SiRNA target sequence
atatctagtgcccattgtgatcct

SEQ ID NO: 248080 - DNA, 24 bp, Artificial sequence
  SiRNA target sequence
tatctagtgcccattgtgatcctt

SEQ ID NO: 248081 - DNA, 24 bp, Artificial sequence
  SiRNA target sequence
atctagtgcccattgtgatccttt

SEQ ID NO: 248082 - DNA, 24 bp, Artificial sequence
  SiRNA target sequence
tctagtgcccattgtgatcctttt

SEQ ID NO: 248083 - DNA, 24 bp, Artificial sequence
  SiRNA target sequence
ctagtgcccattgtgatccttttt

SEQ ID NO: 248084 - DNA, 24 bp, Artificial sequence
  SiRNA target sequence
tagtgcccattgtgatcctttttg

SEQ ID NO: 248085 - DNA, 24 bp, Artificial sequence
  SiRNA target sequence
agtgcccattgtgatcctttttgg

SEQ ID NO: 248086 - DNA, 24 bp, Artificial sequence
  SiRNA target sequence
gtgcccattgtgatcctttttgga

SEQ ID NO: 248087 - DNA, 24 bp, Artificial sequence
  SiRNA target sequence
tgcccattgtgatcctttttggat

SEQ ID NO: 248088 - DNA, 24 bp, Artificial sequence
  SiRNA target sequence
gcccattgtgatcctttttggatt

SEQ ID NO: 248089 - DNA, 24 bp, Artificial sequence
  SiRNA target sequence
cccattgtgatcctttttggattt

SEQ ID NO: 248090 - DNA, 24 bp, Artificial sequence
  SiRNA target sequence
ccattgtgatcctttttggatttt

SEQ ID NO: 248091 - DNA, 24 bp, Artificial sequence
  SiRNA target sequence
cattgtgatcctttttggatttta

SEQ ID NO: 248092 - DNA, 24 bp, Artificial sequence
  SiRNA target sequence
attgtgatcctttttggattttat

SEQ ID NO: 248093 - DNA, 24 bp, Artificial sequence
  SiRNA target sequence
ttgtgatcctttttggattttata

SEQ ID NO: 248094 - DNA, 24 bp, Artificial sequence
  SiRNA target sequence
tgtgatcctttttggattttatat

SEQ ID NO: 248095 - DNA, 24 bp, Artificial sequence
  SiRNA target sequence
gtgatcctttttggattttatatt

SEQ ID NO: 248096 - DNA, 24 bp, Artificial sequence
  SiRNA target sequence
tgatcctttttggattttatattc

SEQ ID NO: 248097 - DNA, 24 bp, Artificial sequence
  SiRNA target sequence
gatcctttttggattttatattca

SEQ ID NO: 248098 - DNA, 24 bp, Artificial sequence
  SiRNA target sequence
atcctttttggattttatattcaa

SEQ ID NO: 248099 - DNA, 24 bp, Artificial sequence
  SiRNA target sequence
tcctttttggattttatattcaaa

SEQ ID NO: 248100 - DNA, 24 bp, Artificial sequence
  SiRNA target sequence
cctttttggattttatattcaaat

SEQ ID NO: 248101 - DNA, 24 bp, Artificial sequence
  SiRNA target sequence
ctttttggattttatattcaaatg

SEQ ID NO: 248102 - DNA, 24 bp, Artificial sequence
  SiRNA target sequence
tttttggattttatattcaaatgg

SEQ ID NO: 248103 - DNA, 24 bp, Artificial sequence
  SiRNA target sequence
ttttggattttatattcaaatgga

SEQ ID NO: 248104 - DNA, 24 bp, Artificial sequence
  SiRNA target sequence
tttggattttatattcaaatggaa

SEQ ID NO: 248105 - DNA, 24 bp, Artificial sequence
  SiRNA target sequence
ttggattttatattcaaatggaat

SEQ ID NO: 248106 - DNA, 24 bp, Artificial sequence
  SiRNA target sequence
tggattttatattcaaatggaatt

SEQ ID NO: 248107 - DNA, 24 bp, Artificial sequence
  SiRNA target sequence
ggattttatattcaaatggaatta

SEQ ID NO: 248108 - DNA, 24 bp, Artificial sequence
  SiRNA target sequence
gattttatattcaaatggaattaa

SEQ ID NO: 248109 - DNA, 24 bp, Artificial sequence
  SiRNA target sequence
attttatattcaaatggaattaaa

SEQ ID NO: 248110 - DNA, 24 bp, Artificial sequence
  SiRNA target sequence
ttttatattcaaatggaattaaaa

SEQ ID NO: 248111 - DNA, 24 bp, Artificial sequence
  SiRNA target sequence
tttatattcaaatggaattaaaag

SEQ ID NO: 248112 - DNA, 24 bp, Artificial sequence
  SiRNA target sequence
ttatattcaaatggaattaaaaga

SEQ ID NO: 248113 - DNA, 24 bp, Artificial sequence
  SiRNA target sequence
tatattcaaatggaattaaaagag

SEQ ID NO: 248114 - DNA, 24 bp, Artificial sequence
  SiRNA target sequence
atattcaaatggaattaaaagaga

SEQ ID NO: 248115 - DNA, 24 bp, Artificial sequence
  SiRNA target sequence
tattcaaatggaattaaaagagaa

SEQ ID NO: 248116 - DNA, 24 bp, Artificial sequence
  SiRNA target sequence
attcaaatggaattaaaagagaac

SEQ ID NO: 248117 - DNA, 24 bp, Artificial sequence
  SiRNA target sequence
ttcaaatggaattaaaagagaacc

SEQ ID NO: 248118 - DNA, 24 bp, Artificial sequence
  SiRNA target sequence
tcaaatggaattaaaagagaacca

SEQ ID NO: 248119 - DNA, 24 bp, Artificial sequence
  SiRNA target sequence
caaatggaattaaaagagaaccaa

SEQ ID NO: 248120 - DNA, 24 bp, Artificial sequence
  SiRNA target sequence
aaatggaattaaaagagaaccaat

SEQ ID NO: 248121 - DNA, 24 bp, Artificial sequence
  SiRNA target sequence
aatggaattaaaagagaaccaatt

SEQ ID NO: 248122 - DNA, 24 bp, Artificial sequence
  SiRNA target sequence
atggaattaaaagagaaccaatta

SEQ ID NO: 248123 - DNA, 24 bp, Artificial sequence
  SiRNA target sequence
tggaattaaaagagaaccaattag

SEQ ID NO: 248124 - DNA, 24 bp, Artificial sequence
  SiRNA target sequence
ggaattaaaagagaaccaattaga

SEQ ID NO: 248125 - DNA, 24 bp, Artificial sequence
  SiRNA target sequence
gaattaaaagagaaccaattagaa

SEQ ID NO: 248126 - DNA, 24 bp, Artificial sequence
  SiRNA target sequence
aattaaaagagaaccaattagaaa

SEQ ID NO: 248127 - DNA, 24 bp, Artificial sequence
  SiRNA target sequence
attaaaagagaaccaattagaaaa

SEQ ID NO: 248128 - DNA, 24 bp, Artificial sequence
  SiRNA target sequence
ttaaaagagaaccaattagaaaaa

SEQ ID NO: 248129 - DNA, 24 bp, Artificial sequence
  SiRNA target sequence
taaaagagaaccaattagaaaaaa

SEQ ID NO: 248130 - DNA, 24 bp, Artificial sequence
  SiRNA target sequence
aaaagagaaccaattagaaaaaaa

SEQ ID NO: 248131 - DNA, 24 bp, Artificial sequence
  SiRNA target sequence
aaagagaaccaattagaaaaaaaa

SEQ ID NO: 248132 - DNA, 24 bp, Artificial sequence
  SiRNA target sequence
aagagaaccaattagaaaaaaaat

SEQ ID NO: 248133 - DNA, 24 bp, Artificial sequence
  SiRNA target sequence
agagaaccaattagaaaaaaaatg

SEQ ID NO: 248134 - DNA, 24 bp, Artificial sequence
  SiRNA target sequence
gagaaccaattagaaaaaaaatgc

SEQ ID NO: 248135 - DNA, 24 bp, Artificial sequence
  SiRNA target sequence
agaaccaattagaaaaaaaatgcc

SEQ ID NO: 248136 - DNA, 24 bp, Artificial sequence
  SiRNA target sequence
gaaccaattagaaaaaaaatgcca

SEQ ID NO: 248137 - DNA, 24 bp, Artificial sequence
  SiRNA target sequence
aaccaattagaaaaaaaatgccaa

SEQ ID NO: 248138 - DNA, 24 bp, Artificial sequence
  SiRNA target sequence
accaattagaaaaaaaatgccaat

SEQ ID NO: 248139 - DNA, 24 bp, Artificial sequence
  SiRNA target sequence
ccaattagaaaaaaaatgccaata

SEQ ID NO: 248140 - DNA, 24 bp, Artificial sequence
  SiRNA target sequence
caattagaaaaaaaatgccaataa

SEQ ID NO: 248141 - DNA, 24 bp, Artificial sequence
  SiRNA target sequence
aattagaaaaaaaatgccaataaa

SEQ ID NO: 248142 - DNA, 24 bp, Artificial sequence
  SiRNA target sequence
attagaaaaaaaatgccaataaaa

SEQ ID NO: 248143 - DNA, 24 bp, Artificial sequence
  SiRNA target sequence
ttagaaaaaaaatgccaataaaac

SEQ ID NO: 248144 - DNA, 24 bp, Artificial sequence
  SiRNA target sequence
tagaaaaaaaatgccaataaaacc

SEQ ID NO: 248145 - DNA, 24 bp, Artificial sequence
  SiRNA target sequence
agaaaaaaaatgccaataaaacca

SEQ ID NO: 248146 - DNA, 24 bp, Artificial sequence
  SiRNA target sequence
gaaaaaaaatgccaataaaaccaa

SEQ ID NO: 248147 - DNA, 24 bp, Artificial sequence
  SiRNA target sequence
aaaaaaaatgccaataaaaccaaa

SEQ ID NO: 248148 - DNA, 24 bp, Artificial sequence
  SiRNA target sequence
aaaaaaatgccaataaaaccaaaa

SEQ ID NO: 248149 - DNA, 24 bp, Artificial sequence
  SiRNA target sequence
aaaaaatgccaataaaaccaaaaa

SEQ ID NO: 248150 - DNA, 24 bp, Artificial sequence
  SiRNA target sequence
aaaaatgccaataaaaccaaaaat

SEQ ID NO: 248151 - DNA, 24 bp, Artificial sequence
  SiRNA target sequence
aaaatgccaataaaaccaaaaata

SEQ ID NO: 248152 - DNA, 24 bp, Artificial sequence
  SiRNA target sequence
aaatgccaataaaaccaaaaataa

SEQ ID NO: 248153 - DNA, 24 bp, Artificial sequence
  SiRNA target sequence
aatgccaataaaaccaaaaataat

SEQ ID NO: 248154 - DNA, 24 bp, Artificial sequence
  SiRNA target sequence
atgccaataaaaccaaaaataata

SEQ ID NO: 248155 - DNA, 24 bp, Artificial sequence
  SiRNA target sequence
tgccaataaaaccaaaaataataa

SEQ ID NO: 248156 - DNA, 24 bp, Artificial sequence
  SiRNA target sequence
gccaataaaaccaaaaataataaa

SEQ ID NO: 248157 - DNA, 24 bp, Artificial sequence
  SiRNA target sequence
ccaataaaaccaaaaataataaaa

SEQ ID NO: 248158 - DNA, 24 bp, Artificial sequence
  SiRNA target sequence
caataaaaccaaaaataataaaat

SEQ ID NO: 248159 - DNA, 24 bp, Artificial sequence
  SiRNA target sequence
aataaaaccaaaaataataaaatt

SEQ ID NO: 248160 - DNA, 24 bp, Artificial sequence
  SiRNA target sequence
ataaaaccaaaaataataaaattc

SEQ ID NO: 248161 - DNA, 24 bp, Artificial sequence
  SiRNA target sequence
taaaaccaaaaataataaaattca

SEQ ID NO: 248162 - DNA, 24 bp, Artificial sequence
  SiRNA target sequence
aaaaccaaaaataataaaattcac

SEQ ID NO: 248163 - DNA, 24 bp, Artificial sequence
  SiRNA target sequence
aaaccaaaaataataaaattcaca

SEQ ID NO: 248164 - DNA, 24 bp, Artificial sequence
  SiRNA target sequence
aaccaaaaataataaaattcacaa

SEQ ID NO: 248165 - DNA, 24 bp, Artificial sequence
  SiRNA target sequence
accaaaaataataaaattcacaat

SEQ ID NO: 248166 - DNA, 24 bp, Artificial sequence
  SiRNA target sequence
ccaaaaataataaaattcacaata

SEQ ID NO: 248167 - DNA, 24 bp, Artificial sequence
  SiRNA target sequence
caaaaataataaaattcacaatac

SEQ ID NO: 248168 - DNA, 24 bp, Artificial sequence
  SiRNA target sequence
aaaaataataaaattcacaatact

SEQ ID NO: 248169 - DNA, 24 bp, Artificial sequence
  SiRNA target sequence
aaaataataaaattcacaatacta

SEQ ID NO: 248170 - DNA, 24 bp, Artificial sequence
  SiRNA target sequence
aaataataaaattcacaatactaa

SEQ ID NO: 248171 - DNA, 24 bp, Artificial sequence
  SiRNA target sequence
aataataaaattcacaatactaag

SEQ ID NO: 248172 - DNA, 24 bp, Artificial sequence
  SiRNA target sequence
ataataaaattcacaatactaaga

SEQ ID NO: 248173 - DNA, 24 bp, Artificial sequence
  SiRNA target sequence
taataaaattcacaatactaagaa

SEQ ID NO: 248174 - DNA, 24 bp, Artificial sequence
  SiRNA target sequence
aataaaattcacaatactaagaat

SEQ ID NO: 248175 - DNA, 24 bp, Artificial sequence
  SiRNA target sequence
ataaaattcacaatactaagaata

SEQ ID NO: 248176 - DNA, 24 bp, Artificial sequence
  SiRNA target sequence
taaaattcacaatactaagaatag

SEQ ID NO: 248177 - DNA, 24 bp, Artificial sequence
  SiRNA target sequence
aaaattcacaatactaagaataga

SEQ ID NO: 248178 - DNA, 24 bp, Artificial sequence
  SiRNA target sequence
aaattcacaatactaagaatagag

SEQ ID NO: 248179 - DNA, 24 bp, Artificial sequence
  SiRNA target sequence
aattcacaatactaagaatagagt

SEQ ID NO: 248180 - DNA, 24 bp, Artificial sequence
  SiRNA target sequence
attcacaatactaagaatagagta

SEQ ID NO: 248181 - DNA, 24 bp, Artificial sequence
  SiRNA target sequence
ttcacaatactaagaatagagtac

SEQ ID NO: 248182 - DNA, 24 bp, Artificial sequence
  SiRNA target sequence
tcacaatactaagaatagagtaca

SEQ ID NO: 248183 - DNA, 24 bp, Artificial sequence
  SiRNA target sequence
cacaatactaagaatagagtacac

SEQ ID NO: 248184 - DNA, 24 bp, Artificial sequence
  SiRNA target sequence
acaatactaagaatagagtacaca

SEQ ID NO: 248185 - DNA, 24 bp, Artificial sequence
  SiRNA target sequence
caatactaagaatagagtacacat

SEQ ID NO: 248186 - DNA, 24 bp, Artificial sequence
  SiRNA target sequence
aatactaagaatagagtacacatt

SEQ ID NO: 248187 - DNA, 24 bp, Artificial sequence
  SiRNA target sequence
atactaagaatagagtacacattt

SEQ ID NO: 248188 - DNA, 24 bp, Artificial sequence
  SiRNA target sequence
tactaagaatagagtacacattta

SEQ ID NO: 248189 - DNA, 24 bp, Artificial sequence
  SiRNA target sequence
actaagaatagagtacacatttaa

SEQ ID NO: 248190 - DNA, 24 bp, Artificial sequence
  SiRNA target sequence
ctaagaatagagtacacatttaaa

SEQ ID NO: 248191 - DNA, 24 bp, Artificial sequence
  SiRNA target sequence
taagaatagagtacacatttaaag

SEQ ID NO: 248192 - DNA, 24 bp, Artificial sequence
  SiRNA target sequence
aagaatagagtacacatttaaagc

SEQ ID NO: 248193 - DNA, 24 bp, Artificial sequence
  SiRNA target sequence
agaatagagtacacatttaaagcc

SEQ ID NO: 248194 - DNA, 24 bp, Artificial sequence
  SiRNA target sequence
gaatagagtacacatttaaagcct

SEQ ID NO: 248195 - DNA, 24 bp, Artificial sequence
  SiRNA target sequence
aatagagtacacatttaaagcctt

SEQ ID NO: 248196 - DNA, 24 bp, Artificial sequence
  SiRNA target sequence
atagagtacacatttaaagccttt

SEQ ID NO: 248197 - DNA, 24 bp, Artificial sequence
  SiRNA target sequence
tagagtacacatttaaagcctttt

SEQ ID NO: 248198 - DNA, 24 bp, Artificial sequence
  SiRNA target sequence
agagtacacatttaaagccttttg

SEQ ID NO: 248199 - DNA, 24 bp, Artificial sequence
  SiRNA target sequence
gagtacacatttaaagccttttgg

SEQ ID NO: 248200 - DNA, 24 bp, Artificial sequence
  SiRNA target sequence
agtacacatttaaagccttttgga

SEQ ID NO: 248201 - DNA, 24 bp, Artificial sequence
  SiRNA target sequence
gtacacatttaaagccttttggac

SEQ ID NO: 248202 - DNA, 24 bp, Artificial sequence
  SiRNA target sequence
tacacatttaaagccttttggaca

SEQ ID NO: 248203 - DNA, 24 bp, Artificial sequence
  SiRNA target sequence
acacatttaaagccttttggacat

SEQ ID NO: 248204 - DNA, 24 bp, Artificial sequence
  SiRNA target sequence
cacatttaaagccttttggacata

SEQ ID NO: 248205 - DNA, 24 bp, Artificial sequence
  SiRNA target sequence
acatttaaagccttttggacatat

SEQ ID NO: 248206 - DNA, 24 bp, Artificial sequence
  SiRNA target sequence
catttaaagccttttggacatatg

SEQ ID NO: 248207 - DNA, 24 bp, Artificial sequence
  SiRNA target sequence
atttaaagccttttggacatatga

SEQ ID NO: 248208 - DNA, 24 bp, Artificial sequence
  SiRNA target sequence
tttaaagccttttggacatatgac

SEQ ID NO: 248209 - DNA, 24 bp, Artificial sequence
  SiRNA target sequence
ttaaagccttttggacatatgaca

SEQ ID NO: 248210 - DNA, 24 bp, Artificial sequence
  SiRNA target sequence
taaagccttttggacatatgacat

SEQ ID NO: 248211 - DNA, 24 bp, Artificial sequence
  SiRNA target sequence
aaagccttttggacatatgacatc

SEQ ID NO: 248212 - DNA, 24 bp, Artificial sequence
  SiRNA target sequence
aagccttttggacatatgacatca

SEQ ID NO: 248213 - DNA, 24 bp, Artificial sequence
  SiRNA target sequence
agccttttggacatatgacatcat

SEQ ID NO: 248214 - DNA, 24 bp, Artificial sequence
  SiRNA target sequence
gccttttggacatatgacatcata

SEQ ID NO: 248215 - DNA, 24 bp, Artificial sequence
  SiRNA target sequence
ccttttggacatatgacatcataa

SEQ ID NO: 248216 - DNA, 24 bp, Artificial sequence
  SiRNA target sequence
cttttggacatatgacatcataag

SEQ ID NO: 248217 - DNA, 24 bp, Artificial sequence
  SiRNA target sequence
ttttggacatatgacatcataaga

SEQ ID NO: 248218 - DNA, 24 bp, Artificial sequence
  SiRNA target sequence
tttggacatatgacatcataagac

SEQ ID NO: 248219 - DNA, 24 bp, Artificial sequence
  SiRNA target sequence
ttggacatatgacatcataagaca

SEQ ID NO: 248220 - DNA, 24 bp, Artificial sequence
  SiRNA target sequence
tggacatatgacatcataagacat

SEQ ID NO: 248221 - DNA, 24 bp, Artificial sequence
  SiRNA target sequence
ggacatatgacatcataagacata

SEQ ID NO: 248222 - DNA, 24 bp, Artificial sequence
  SiRNA target sequence
gacatatgacatcataagacatat

SEQ ID NO: 248223 - DNA, 24 bp, Artificial sequence
  SiRNA target sequence
acatatgacatcataagacatata

SEQ ID NO: 248224 - DNA, 24 bp, Artificial sequence
  SiRNA target sequence
catatgacatcataagacatataa

SEQ ID NO: 248225 - DNA, 24 bp, Artificial sequence
  SiRNA target sequence
atatgacatcataagacatataat

SEQ ID NO: 248226 - DNA, 24 bp, Artificial sequence
  SiRNA target sequence
tatgacatcataagacatataatt

SEQ ID NO: 248227 - DNA, 24 bp, Artificial sequence
  SiRNA target sequence
atgacatcataagacatataattg

SEQ ID NO: 248228 - DNA, 24 bp, Artificial sequence
  SiRNA target sequence
tgacatcataagacatataattgg

SEQ ID NO: 248229 - DNA, 24 bp, Artificial sequence
  SiRNA target sequence
gacatcataagacatataattggc

SEQ ID NO: 248230 - DNA, 24 bp, Artificial sequence
  SiRNA target sequence
acatcataagacatataattggca

SEQ ID NO: 248231 - DNA, 24 bp, Artificial sequence
  SiRNA target sequence
catcataagacatataattggcag

SEQ ID NO: 248232 - DNA, 24 bp, Artificial sequence
  SiRNA target sequence
atcataagacatataattggcagt

SEQ ID NO: 248233 - DNA, 24 bp, Artificial sequence
  SiRNA target sequence
tcataagacatataattggcagtg

SEQ ID NO: 248234 - DNA, 24 bp, Artificial sequence
  SiRNA target sequence
cataagacatataattggcagtga

SEQ ID NO: 248235 - DNA, 24 bp, Artificial sequence
  SiRNA target sequence
ataagacatataattggcagtgaa

SEQ ID NO: 248236 - DNA, 24 bp, Artificial sequence
  SiRNA target sequence
taagacatataattggcagtgaaa

SEQ ID NO: 248237 - DNA, 24 bp, Artificial sequence
  SiRNA target sequence
aagacatataattggcagtgaaaa

SEQ ID NO: 248238 - DNA, 24 bp, Artificial sequence
  SiRNA target sequence
agacatataattggcagtgaaaag

SEQ ID NO: 248239 - DNA, 24 bp, Artificial sequence
  SiRNA target sequence
gacatataattggcagtgaaaaga

SEQ ID NO: 248240 - DNA, 24 bp, Artificial sequence
  SiRNA target sequence
acatataattggcagtgaaaagaa

SEQ ID NO: 248241 - DNA, 24 bp, Artificial sequence
  SiRNA target sequence
catataattggcagtgaaaagaaa

SEQ ID NO: 248242 - DNA, 24 bp, Artificial sequence
  SiRNA target sequence
atataattggcagtgaaaagaaaa

SEQ ID NO: 248243 - DNA, 24 bp, Artificial sequence
  SiRNA target sequence
tataattggcagtgaaaagaaaag

SEQ ID NO: 248244 - DNA, 24 bp, Artificial sequence
  SiRNA target sequence
ataattggcagtgaaaagaaaagc

SEQ ID NO: 248245 - DNA, 24 bp, Artificial sequence
  SiRNA target sequence
taattggcagtgaaaagaaaagct

SEQ ID NO: 248246 - DNA, 24 bp, Artificial sequence
  SiRNA target sequence
aattggcagtgaaaagaaaagctt

SEQ ID NO: 248247 - DNA, 24 bp, Artificial sequence
  SiRNA target sequence
attggcagtgaaaagaaaagcttt

SEQ ID NO: 248248 - DNA, 24 bp, Artificial sequence
  SiRNA target sequence
ttggcagtgaaaagaaaagcttta

SEQ ID NO: 248249 - DNA, 24 bp, Artificial sequence
  SiRNA target sequence
tggcagtgaaaagaaaagctttat

SEQ ID NO: 248250 - DNA, 24 bp, Artificial sequence
  SiRNA target sequence
ggcagtgaaaagaaaagctttatg

SEQ ID NO: 248251 - DNA, 24 bp, Artificial sequence
  SiRNA target sequence
gcagtgaaaagaaaagctttatgt

SEQ ID NO: 248252 - DNA, 24 bp, Artificial sequence
  SiRNA target sequence
cagtgaaaagaaaagctttatgta

SEQ ID NO: 248253 - DNA, 24 bp, Artificial sequence
  SiRNA target sequence
agtgaaaagaaaagctttatgtag

SEQ ID NO: 248254 - DNA, 24 bp, Artificial sequence
  SiRNA target sequence
gtgaaaagaaaagctttatgtagt

SEQ ID NO: 248255 - DNA, 24 bp, Artificial sequence
  SiRNA target sequence
tgaaaagaaaagctttatgtagta

SEQ ID NO: 248256 - DNA, 24 bp, Artificial sequence
  SiRNA target sequence
gaaaagaaaagctttatgtagtac

SEQ ID NO: 248257 - DNA, 24 bp, Artificial sequence
  SiRNA target sequence
aaaagaaaagctttatgtagtaca

SEQ ID NO: 248258 - DNA, 24 bp, Artificial sequence
  SiRNA target sequence
aaagaaaagctttatgtagtacag

SEQ ID NO: 248259 - DNA, 24 bp, Artificial sequence
  SiRNA target sequence
aagaaaagctttatgtagtacagt

SEQ ID NO: 248260 - DNA, 24 bp, Artificial sequence
  SiRNA target sequence
agaaaagctttatgtagtacagtg

SEQ ID NO: 248261 - DNA, 24 bp, Artificial sequence
  SiRNA target sequence
gaaaagctttatgtagtacagtga

SEQ ID NO: 248262 - DNA, 24 bp, Artificial sequence
  SiRNA target sequence
aaaagctttatgtagtacagtgac

SEQ ID NO: 248263 - DNA, 24 bp, Artificial sequence
  SiRNA target sequence
aaagctttatgtagtacagtgacg

SEQ ID NO: 248264 - DNA, 24 bp, Artificial sequence
  SiRNA target sequence
aagctttatgtagtacagtgacga

SEQ ID NO: 248265 - DNA, 24 bp, Artificial sequence
  SiRNA target sequence
agctttatgtagtacagtgacgaa

SEQ ID NO: 248266 - DNA, 24 bp, Artificial sequence
  SiRNA target sequence
gctttatgtagtacagtgacgaag

SEQ ID NO: 248267 - DNA, 24 bp, Artificial sequence
  SiRNA target sequence
ctttatgtagtacagtgacgaagg

SEQ ID NO: 248268 - DNA, 24 bp, Artificial sequence
  SiRNA target sequence
tttatgtagtacagtgacgaagga

SEQ ID NO: 248269 - DNA, 24 bp, Artificial sequence
  SiRNA target sequence
ttatgtagtacagtgacgaaggaa

SEQ ID NO: 248270 - DNA, 24 bp, Artificial sequence
  SiRNA target sequence
tatgtagtacagtgacgaaggaat

SEQ ID NO: 248271 - DNA, 24 bp, Artificial sequence
  SiRNA target sequence
atgtagtacagtgacgaaggaatt

SEQ ID NO: 248272 - DNA, 24 bp, Artificial sequence
  SiRNA target sequence
tgtagtacagtgacgaaggaattt

SEQ ID NO: 248273 - DNA, 24 bp, Artificial sequence
  SiRNA target sequence
gtagtacagtgacgaaggaatttg

SEQ ID NO: 248274 - DNA, 24 bp, Artificial sequence
  SiRNA target sequence
tagtacagtgacgaaggaatttgt

SEQ ID NO: 248275 - DNA, 24 bp, Artificial sequence
  SiRNA target sequence
agtacagtgacgaaggaatttgtt

SEQ ID NO: 248276 - DNA, 24 bp, Artificial sequence
  SiRNA target sequence
gtacagtgacgaaggaatttgttt

SEQ ID NO: 248277 - DNA, 24 bp, Artificial sequence
  SiRNA target sequence
tacagtgacgaaggaatttgtttt

SEQ ID NO: 248278 - DNA, 24 bp, Artificial sequence
  SiRNA target sequence
acagtgacgaaggaatttgttttg

SEQ ID NO: 248279 - DNA, 24 bp, Artificial sequence
  SiRNA target sequence
cagtgacgaaggaatttgttttgt

SEQ ID NO: 248280 - DNA, 24 bp, Artificial sequence
  SiRNA target sequence
agtgacgaaggaatttgttttgtc

SEQ ID NO: 248281 - DNA, 24 bp, Artificial sequence
  SiRNA target sequence
gtgacgaaggaatttgttttgtca

SEQ ID NO: 248282 - DNA, 24 bp, Artificial sequence
  SiRNA target sequence
tgacgaaggaatttgttttgtcat

SEQ ID NO: 248283 - DNA, 24 bp, Artificial sequence
  SiRNA target sequence
gacgaaggaatttgttttgtcata

SEQ ID NO: 248284 - DNA, 24 bp, Artificial sequence
  SiRNA target sequence
acgaaggaatttgttttgtcataa

SEQ ID NO: 248285 - DNA, 24 bp, Artificial sequence
  SiRNA target sequence
cgaaggaatttgttttgtcataat

SEQ ID NO: 248286 - DNA, 24 bp, Artificial sequence
  SiRNA target sequence
gaaggaatttgttttgtcataatc

SEQ ID NO: 248287 - DNA, 24 bp, Artificial sequence
  SiRNA target sequence
aaggaatttgttttgtcataatca

SEQ ID NO: 248288 - DNA, 24 bp, Artificial sequence
  SiRNA target sequence
aggaatttgttttgtcataatcac

SEQ ID NO: 248289 - DNA, 24 bp, Artificial sequence
  SiRNA target sequence
ggaatttgttttgtcataatcacg

SEQ ID NO: 248290 - DNA, 24 bp, Artificial sequence
  SiRNA target sequence
gaatttgttttgtcataatcacga

SEQ ID NO: 248291 - DNA, 24 bp, Artificial sequence
  SiRNA target sequence
aatttgttttgtcataatcacgat

SEQ ID NO: 248292 - DNA, 24 bp, Artificial sequence
  SiRNA target sequence
atttgttttgtcataatcacgatt

SEQ ID NO: 248293 - DNA, 24 bp, Artificial sequence
  SiRNA target sequence
tttgttttgtcataatcacgattt

SEQ ID NO: 248294 - DNA, 24 bp, Artificial sequence
  SiRNA target sequence
ttgttttgtcataatcacgatttc

SEQ ID NO: 248295 - DNA, 24 bp, Artificial sequence
  SiRNA target sequence
tgttttgtcataatcacgatttct

SEQ ID NO: 248296 - DNA, 24 bp, Artificial sequence
  SiRNA target sequence
gttttgtcataatcacgatttctc

SEQ ID NO: 248297 - DNA, 24 bp, Artificial sequence
  SiRNA target sequence
ttttgtcataatcacgatttctct

SEQ ID NO: 248298 - DNA, 24 bp, Artificial sequence
  SiRNA target sequence
tttgtcataatcacgatttctctg

SEQ ID NO: 248299 - DNA, 24 bp, Artificial sequence
  SiRNA target sequence
ttgtcataatcacgatttctctgt

SEQ ID NO: 248300 - DNA, 24 bp, Artificial sequence
  SiRNA target sequence
tgtcataatcacgatttctctgta

SEQ ID NO: 248301 - DNA, 24 bp, Artificial sequence
  SiRNA target sequence
gtcataatcacgatttctctgtaa

SEQ ID NO: 248302 - DNA, 24 bp, Artificial sequence
  SiRNA target sequence
tcataatcacgatttctctgtaaa

SEQ ID NO: 248303 - DNA, 24 bp, Artificial sequence
  SiRNA target sequence
cataatcacgatttctctgtaaaa

SEQ ID NO: 248304 - DNA, 24 bp, Artificial sequence
  SiRNA target sequence
ataatcacgatttctctgtaaaat

SEQ ID NO: 248305 - DNA, 24 bp, Artificial sequence
  SiRNA target sequence
taatcacgatttctctgtaaaatt

SEQ ID NO: 248306 - DNA, 24 bp, Artificial sequence
  SiRNA target sequence
aatcacgatttctctgtaaaattc

SEQ ID NO: 248307 - DNA, 24 bp, Artificial sequence
  SiRNA target sequence
atcacgatttctctgtaaaattcc

SEQ ID NO: 248308 - DNA, 24 bp, Artificial sequence
  SiRNA target sequence
tcacgatttctctgtaaaattcca

SEQ ID NO: 248309 - DNA, 24 bp, Artificial sequence
  SiRNA target sequence
cacgatttctctgtaaaattccaa

SEQ ID NO: 248310 - DNA, 24 bp, Artificial sequence
  SiRNA target sequence
acgatttctctgtaaaattccaat

SEQ ID NO: 248311 - DNA, 24 bp, Artificial sequence
  SiRNA target sequence
cgatttctctgtaaaattccaata

SEQ ID NO: 248312 - DNA, 24 bp, Artificial sequence
  SiRNA target sequence
gatttctctgtaaaattccaataa

SEQ ID NO: 248313 - DNA, 24 bp, Artificial sequence
  SiRNA target sequence
atttctctgtaaaattccaataat

SEQ ID NO: 248314 - DNA, 24 bp, Artificial sequence
  SiRNA target sequence
tttctctgtaaaattccaataatg

SEQ ID NO: 248315 - DNA, 24 bp, Artificial sequence
  SiRNA target sequence
ttctctgtaaaattccaataatgt

SEQ ID NO: 248316 - DNA, 24 bp, Artificial sequence
  SiRNA target sequence
tctctgtaaaattccaataatgtg

SEQ ID NO: 248317 - DNA, 24 bp, Artificial sequence
  SiRNA target sequence
ctctgtaaaattccaataatgtgt

SEQ ID NO: 248318 - DNA, 24 bp, Artificial sequence
  SiRNA target sequence
tctgtaaaattccaataatgtgtt

SEQ ID NO: 248319 - DNA, 24 bp, Artificial sequence
  SiRNA target sequence
ctgtaaaattccaataatgtgtta

SEQ ID NO: 248320 - DNA, 24 bp, Artificial sequence
  SiRNA target sequence
tgtaaaattccaataatgtgttaa

SEQ ID NO: 248321 - DNA, 24 bp, Artificial sequence
  SiRNA target sequence
gtaaaattccaataatgtgttaat

SEQ ID NO: 248322 - DNA, 24 bp, Artificial sequence
  SiRNA target sequence
taaaattccaataatgtgttaatc

SEQ ID NO: 248323 - DNA, 24 bp, Artificial sequence
  SiRNA target sequence
aaaattccaataatgtgttaatca

SEQ ID NO: 248324 - DNA, 24 bp, Artificial sequence
  SiRNA target sequence
aaattccaataatgtgttaatcac

SEQ ID NO: 248325 - DNA, 24 bp, Artificial sequence
  SiRNA target sequence
aattccaataatgtgttaatcaca

SEQ ID NO: 248326 - DNA, 24 bp, Artificial sequence
  SiRNA target sequence
attccaataatgtgttaatcacac

SEQ ID NO: 248327 - DNA, 24 bp, Artificial sequence
  SiRNA target sequence
ttccaataatgtgttaatcacaca

SEQ ID NO: 248328 - DNA, 24 bp, Artificial sequence
  SiRNA target sequence
tccaataatgtgttaatcacacat

SEQ ID NO: 248329 - DNA, 24 bp, Artificial sequence
  SiRNA target sequence
ccaataatgtgttaatcacacatg

SEQ ID NO: 248330 - DNA, 24 bp, Artificial sequence
  SiRNA target sequence
caataatgtgttaatcacacatgc

SEQ ID NO: 248331 - DNA, 24 bp, Artificial sequence
  SiRNA target sequence
aataatgtgttaatcacacatgcc

SEQ ID NO: 248332 - DNA, 24 bp, Artificial sequence
  SiRNA target sequence
ataatgtgttaatcacacatgcca

SEQ ID NO: 248333 - DNA, 24 bp, Artificial sequence
  SiRNA target sequence
taatgtgttaatcacacatgccat

SEQ ID NO: 248334 - DNA, 24 bp, Artificial sequence
  SiRNA target sequence
aatgtgttaatcacacatgccatt

SEQ ID NO: 248335 - DNA, 24 bp, Artificial sequence
  SiRNA target sequence
atgtgttaatcacacatgccatta

SEQ ID NO: 248336 - DNA, 24 bp, Artificial sequence
  SiRNA target sequence
tgtgttaatcacacatgccattaa

SEQ ID NO: 248337 - DNA, 24 bp, Artificial sequence
  SiRNA target sequence
gtgttaatcacacatgccattaaa

SEQ ID NO: 248338 - DNA, 24 bp, Artificial sequence
  SiRNA target sequence
tgttaatcacacatgccattaaaa

SEQ ID NO: 248339 - DNA, 24 bp, Artificial sequence
  SiRNA target sequence
gttaatcacacatgccattaaaaa

SEQ ID NO: 248340 - DNA, 24 bp, Artificial sequence
  SiRNA target sequence
ttaatcacacatgccattaaaaat

SEQ ID NO: 248341 - DNA, 24 bp, Artificial sequence
  SiRNA target sequence
taatcacacatgccattaaaaatg

SEQ ID NO: 248342 - DNA, 24 bp, Artificial sequence
  SiRNA target sequence
aatcacacatgccattaaaaatgt

SEQ ID NO: 248343 - DNA, 24 bp, Artificial sequence
  SiRNA target sequence
atcacacatgccattaaaaatgta

SEQ ID NO: 248344 - DNA, 24 bp, Artificial sequence
  SiRNA target sequence
tcacacatgccattaaaaatgtaa

SEQ ID NO: 248345 - DNA, 24 bp, Artificial sequence
  SiRNA target sequence
cacacatgccattaaaaatgtaag

SEQ ID NO: 248346 - DNA, 24 bp, Artificial sequence
  SiRNA target sequence
acacatgccattaaaaatgtaagt

SEQ ID NO: 248347 - DNA, 24 bp, Artificial sequence
  SiRNA target sequence
cacatgccattaaaaatgtaagtg

SEQ ID NO: 248348 - DNA, 24 bp, Artificial sequence
  SiRNA target sequence
acatgccattaaaaatgtaagtga

SEQ ID NO: 248349 - DNA, 24 bp, Artificial sequence
  SiRNA target sequence
catgccattaaaaatgtaagtgac

SEQ ID NO: 248350 - DNA, 24 bp, Artificial sequence
  SiRNA target sequence
atgccattaaaaatgtaagtgaca

SEQ ID NO: 248351 - DNA, 24 bp, Artificial sequence
  SiRNA target sequence
tgccattaaaaatgtaagtgacaa

SEQ ID NO: 248352 - DNA, 24 bp, Artificial sequence
  SiRNA target sequence
gccattaaaaatgtaagtgacaat

SEQ ID NO: 248353 - DNA, 24 bp, Artificial sequence
  SiRNA target sequence
ccattaaaaatgtaagtgacaata

SEQ ID NO: 248354 - DNA, 24 bp, Artificial sequence
  SiRNA target sequence
cattaaaaatgtaagtgacaataa

SEQ ID NO: 248355 - DNA, 24 bp, Artificial sequence
  SiRNA target sequence
attaaaaatgtaagtgacaataat

SEQ ID NO: 248356 - DNA, 24 bp, Artificial sequence
  SiRNA target sequence
ttaaaaatgtaagtgacaataata

SEQ ID NO: 248357 - DNA, 24 bp, Artificial sequence
  SiRNA target sequence
taaaaatgtaagtgacaataatat

SEQ ID NO: 248358 - DNA, 24 bp, Artificial sequence
  SiRNA target sequence
aaaaatgtaagtgacaataatatt

SEQ ID NO: 248359 - DNA, 24 bp, Artificial sequence
  SiRNA target sequence
aaaatgtaagtgacaataatattt

SEQ ID NO: 248360 - DNA, 24 bp, Artificial sequence
  SiRNA target sequence
aaatgtaagtgacaataatatttt

SEQ ID NO: 248361 - DNA, 24 bp, Artificial sequence
  SiRNA target sequence
aatgtaagtgacaataatattttt

SEQ ID NO: 248362 - DNA, 24 bp, Artificial sequence
  SiRNA target sequence
atgtaagtgacaataatattttta

SEQ ID NO: 248363 - DNA, 24 bp, Artificial sequence
  SiRNA target sequence
tgtaagtgacaataatatttttac

SEQ ID NO: 248364 - DNA, 24 bp, Artificial sequence
  SiRNA target sequence
gtaagtgacaataatatttttact

SEQ ID NO: 248365 - DNA, 24 bp, Artificial sequence
  SiRNA target sequence
taagtgacaataatatttttactt

SEQ ID NO: 248366 - DNA, 24 bp, Artificial sequence
  SiRNA target sequence
aagtgacaataatatttttacttt

SEQ ID NO: 248367 - DNA, 24 bp, Artificial sequence
  SiRNA target sequence
agtgacaataatatttttactttt

SEQ ID NO: 248368 - DNA, 24 bp, Artificial sequence
  SiRNA target sequence
gtgacaataatatttttacttttg

SEQ ID NO: 248369 - DNA, 24 bp, Artificial sequence
  SiRNA target sequence
tgacaataatatttttacttttgg

SEQ ID NO: 248370 - DNA, 24 bp, Artificial sequence
  SiRNA target sequence
gacaataatatttttacttttggg

SEQ ID NO: 248371 - DNA, 24 bp, Artificial sequence
  SiRNA target sequence
acaataatatttttacttttggga

SEQ ID NO: 248372 - DNA, 24 bp, Artificial sequence
  SiRNA target sequence
caataatatttttacttttgggaa

SEQ ID NO: 248373 - DNA, 24 bp, Artificial sequence
  SiRNA target sequence
aataatatttttacttttgggaat

SEQ ID NO: 248374 - DNA, 24 bp, Artificial sequence
  SiRNA target sequence
ataatatttttacttttgggaatt

SEQ ID NO: 248375 - DNA, 24 bp, Artificial sequence
  SiRNA target sequence
taatatttttacttttgggaattt

SEQ ID NO: 248376 - DNA, 24 bp, Artificial sequence
  SiRNA target sequence
aatatttttacttttgggaatttt

SEQ ID NO: 248377 - DNA, 24 bp, Artificial sequence
  SiRNA target sequence
atatttttacttttgggaattttt

SEQ ID NO: 248378 - DNA, 24 bp, Artificial sequence
  SiRNA target sequence
tatttttacttttgggaatttttt

SEQ ID NO: 248379 - DNA, 24 bp, Artificial sequence
  SiRNA target sequence
atttttacttttgggaattttttt

SEQ ID NO: 248380 - DNA, 24 bp, Artificial sequence
  SiRNA target sequence
tttttacttttgggaatttttttg

SEQ ID NO: 248381 - DNA, 24 bp, Artificial sequence
  SiRNA target sequence
ttttacttttgggaatttttttgt

SEQ ID NO: 248382 - DNA, 24 bp, Artificial sequence
  SiRNA target sequence
tttacttttgggaatttttttgtc

SEQ ID NO: 248383 - DNA, 24 bp, Artificial sequence
  SiRNA target sequence
ttacttttgggaatttttttgtct

SEQ ID NO: 248384 - DNA, 24 bp, Artificial sequence
  SiRNA target sequence
tacttttgggaatttttttgtctt

SEQ ID NO: 248385 - DNA, 24 bp, Artificial sequence
  SiRNA target sequence
acttttgggaatttttttgtctta

SEQ ID NO: 248386 - DNA, 24 bp, Artificial sequence
  SiRNA target sequence
cttttgggaatttttttgtcttag

SEQ ID NO: 248387 - DNA, 24 bp, Artificial sequence
  SiRNA target sequence
ttttgggaatttttttgtcttagt

SEQ ID NO: 248388 - DNA, 24 bp, Artificial sequence
  SiRNA target sequence
tttgggaatttttttgtcttagtc

SEQ ID NO: 248389 - DNA, 24 bp, Artificial sequence
  SiRNA target sequence
ttgggaatttttttgtcttagtca

SEQ ID NO: 248390 - DNA, 24 bp, Artificial sequence
  SiRNA target sequence
tgggaatttttttgtcttagtcat

SEQ ID NO: 248391 - DNA, 25 bp, Artificial sequence
  SiRNA target sequence
ttaattaaaatcaacatctatctca

SEQ ID NO: 248392 - DNA, 25 bp, Artificial sequence
  SiRNA target sequence
taattaaaatcaacatctatctcag

SEQ ID NO: 248393 - DNA, 25 bp, Artificial sequence
  SiRNA target sequence
aattaaaatcaacatctatctcaga

SEQ ID NO: 248394 - DNA, 25 bp, Artificial sequence
  SiRNA target sequence
attaaaatcaacatctatctcagaa

SEQ ID NO: 248395 - DNA, 25 bp, Artificial sequence
  SiRNA target sequence
ttaaaatcaacatctatctcagaat

SEQ ID NO: 248396 - DNA, 25 bp, Artificial sequence
  SiRNA target sequence
taaaatcaacatctatctcagaatt

SEQ ID NO: 248397 - DNA, 25 bp, Artificial sequence
  SiRNA target sequence
aaaatcaacatctatctcagaattt

SEQ ID NO: 248398 - DNA, 25 bp, Artificial sequence
  SiRNA target sequence
aaatcaacatctatctcagaatttt

SEQ ID NO: 248399 - DNA, 25 bp, Artificial sequence
  SiRNA target sequence
aatcaacatctatctcagaattttg

SEQ ID NO: 248400 - DNA, 25 bp, Artificial sequence
  SiRNA target sequence
atcaacatctatctcagaattttgt

SEQ ID NO: 248401 - DNA, 25 bp, Artificial sequence
  SiRNA target sequence
tcaacatctatctcagaattttgtt

SEQ ID NO: 248402 - DNA, 25 bp, Artificial sequence
  SiRNA target sequence
caacatctatctcagaattttgttc

SEQ ID NO: 248403 - DNA, 25 bp, Artificial sequence
  SiRNA target sequence
aacatctatctcagaattttgttca

SEQ ID NO: 248404 - DNA, 25 bp, Artificial sequence
  SiRNA target sequence
acatctatctcagaattttgttcaa

SEQ ID NO: 248405 - DNA, 25 bp, Artificial sequence
  SiRNA target sequence
catctatctcagaattttgttcaat

SEQ ID NO: 248406 - DNA, 25 bp, Artificial sequence
  SiRNA target sequence
atctatctcagaattttgttcaatt

SEQ ID NO: 248407 - DNA, 25 bp, Artificial sequence
  SiRNA target sequence
tctatctcagaattttgttcaattg

SEQ ID NO: 248408 - DNA, 25 bp, Artificial sequence
  SiRNA target sequence
ctatctcagaattttgttcaattga

SEQ ID NO: 248409 - DNA, 25 bp, Artificial sequence
  SiRNA target sequence
tatctcagaattttgttcaattgat

SEQ ID NO: 248410 - DNA, 25 bp, Artificial sequence
  SiRNA target sequence
atctcagaattttgttcaattgatt

SEQ ID NO: 248411 - DNA, 25 bp, Artificial sequence
  SiRNA target sequence
tctcagaattttgttcaattgattc

SEQ ID NO: 248412 - DNA, 25 bp, Artificial sequence
  SiRNA target sequence
ctcagaattttgttcaattgattca

SEQ ID NO: 248413 - DNA, 25 bp, Artificial sequence
  SiRNA target sequence
tcagaattttgttcaattgattcat

SEQ ID NO: 248414 - DNA, 25 bp, Artificial sequence
  SiRNA target sequence
cagaattttgttcaattgattcatt

SEQ ID NO: 248415 - DNA, 25 bp, Artificial sequence
  SiRNA target sequence
agaattttgttcaattgattcatta

SEQ ID NO: 248416 - DNA, 25 bp, Artificial sequence
  SiRNA target sequence
gaattttgttcaattgattcattat

SEQ ID NO: 248417 - DNA, 25 bp, Artificial sequence
  SiRNA target sequence
aattttgttcaattgattcattata

SEQ ID NO: 248418 - DNA, 25 bp, Artificial sequence
  SiRNA target sequence
attttgttcaattgattcattatat

SEQ ID NO: 248419 - DNA, 25 bp, Artificial sequence
  SiRNA target sequence
ttttgttcaattgattcattatatt

SEQ ID NO: 248420 - DNA, 25 bp, Artificial sequence
  SiRNA target sequence
tttgttcaattgattcattatattt

SEQ ID NO: 248421 - DNA, 25 bp, Artificial sequence
  SiRNA target sequence
ttgttcaattgattcattatatttt

SEQ ID NO: 248422 - DNA, 25 bp, Artificial sequence
  SiRNA target sequence
tgttcaattgattcattatattttt

SEQ ID NO: 248423 - DNA, 25 bp, Artificial sequence
  SiRNA target sequence
gttcaattgattcattatatttttt

SEQ ID NO: 248424 - DNA, 25 bp, Artificial sequence
  SiRNA target sequence
ttcaattgattcattatatttttta

SEQ ID NO: 248425 - DNA, 25 bp, Artificial sequence
  SiRNA target sequence
tcaattgattcattatattttttac

SEQ ID NO: 248426 - DNA, 25 bp, Artificial sequence
  SiRNA target sequence
caattgattcattatattttttact

SEQ ID NO: 248427 - DNA, 25 bp, Artificial sequence
  SiRNA target sequence
aattgattcattatattttttactt

SEQ ID NO: 248428 - DNA, 25 bp, Artificial sequence
  SiRNA target sequence
attgattcattatattttttactta

SEQ ID NO: 248429 - DNA, 25 bp, Artificial sequence
  SiRNA target sequence
ttgattcattatattttttacttaa

SEQ ID NO: 248430 - DNA, 25 bp, Artificial sequence
  SiRNA target sequence
tgattcattatattttttacttaaa

SEQ ID NO: 248431 - DNA, 25 bp, Artificial sequence
  SiRNA target sequence
gattcattatattttttacttaaat

SEQ ID NO: 248432 - DNA, 25 bp, Artificial sequence
  SiRNA target sequence
attcattatattttttacttaaata

SEQ ID NO: 248433 - DNA, 25 bp, Artificial sequence
  SiRNA target sequence
ttcattatattttttacttaaataa

SEQ ID NO: 248434 - DNA, 25 bp, Artificial sequence
  SiRNA target sequence
tcattatattttttacttaaataac

SEQ ID NO: 248435 - DNA, 25 bp, Artificial sequence
  SiRNA target sequence
cattatattttttacttaaataaca

SEQ ID NO: 248436 - DNA, 25 bp, Artificial sequence
  SiRNA target sequence
attatattttttacttaaataacag

SEQ ID NO: 248437 - DNA, 25 bp, Artificial sequence
  SiRNA target sequence
ttatattttttacttaaataacaga

SEQ ID NO: 248438 - DNA, 25 bp, Artificial sequence
  SiRNA target sequence
tatattttttacttaaataacagac

SEQ ID NO: 248439 - DNA, 25 bp, Artificial sequence
  SiRNA target sequence
atattttttacttaaataacagaca

SEQ ID NO: 248440 - DNA, 25 bp, Artificial sequence
  SiRNA target sequence
tattttttacttaaataacagacac

SEQ ID NO: 248441 - DNA, 25 bp, Artificial sequence
  SiRNA target sequence
attttttacttaaataacagacact

SEQ ID NO: 248442 - DNA, 25 bp, Artificial sequence
  SiRNA target sequence
ttttttacttaaataacagacactc

SEQ ID NO: 248443 - DNA, 25 bp, Artificial sequence
  SiRNA target sequence
tttttacttaaataacagacactcc

SEQ ID NO: 248444 - DNA, 25 bp, Artificial sequence
  SiRNA target sequence
ttttacttaaataacagacactcct

SEQ ID NO: 248445 - DNA, 25 bp, Artificial sequence
  SiRNA target sequence
tttacttaaataacagacactcctg

SEQ ID NO: 248446 - DNA, 25 bp, Artificial sequence
  SiRNA target sequence
ttacttaaataacagacactcctga

SEQ ID NO: 248447 - DNA, 25 bp, Artificial sequence
  SiRNA target sequence
tacttaaataacagacactcctgat

SEQ ID NO: 248448 - DNA, 25 bp, Artificial sequence
  SiRNA target sequence
acttaaataacagacactcctgatc

SEQ ID NO: 248449 - DNA, 25 bp, Artificial sequence
  SiRNA target sequence
cttaaataacagacactcctgatcc

SEQ ID NO: 248450 - DNA, 25 bp, Artificial sequence
  SiRNA target sequence
ttaaataacagacactcctgatcca

SEQ ID NO: 248451 - DNA, 25 bp, Artificial sequence
  SiRNA target sequence
taaataacagacactcctgatccac

SEQ ID NO: 248452 - DNA, 25 bp, Artificial sequence
  SiRNA target sequence
aaataacagacactcctgatccaca

SEQ ID NO: 248453 - DNA, 25 bp, Artificial sequence
  SiRNA target sequence
aataacagacactcctgatccacaa

SEQ ID NO: 248454 - DNA, 25 bp, Artificial sequence
  SiRNA target sequence
ataacagacactcctgatccacaaa

SEQ ID NO: 248455 - DNA, 25 bp, Artificial sequence
  SiRNA target sequence
taacagacactcctgatccacaaaa

SEQ ID NO: 248456 - DNA, 25 bp, Artificial sequence
  SiRNA target sequence
aacagacactcctgatccacaaaaa

SEQ ID NO: 248457 - DNA, 25 bp, Artificial sequence
  SiRNA target sequence
acagacactcctgatccacaaaaaa

SEQ ID NO: 248458 - DNA, 25 bp, Artificial sequence
  SiRNA target sequence
cagacactcctgatccacaaaaaat

SEQ ID NO: 248459 - DNA, 25 bp, Artificial sequence
  SiRNA target sequence
agacactcctgatccacaaaaaatt

SEQ ID NO: 248460 - DNA, 25 bp, Artificial sequence
  SiRNA target sequence
gacactcctgatccacaaaaaattt

SEQ ID NO: 248461 - DNA, 25 bp, Artificial sequence
  SiRNA target sequence
acactcctgatccacaaaaaatttg

SEQ ID NO: 248462 - DNA, 25 bp, Artificial sequence
  SiRNA target sequence
cactcctgatccacaaaaaatttgc

SEQ ID NO: 248463 - DNA, 25 bp, Artificial sequence
  SiRNA target sequence
actcctgatccacaaaaaatttgca

SEQ ID NO: 248464 - DNA, 25 bp, Artificial sequence
  SiRNA target sequence
ctcctgatccacaaaaaatttgcaa

SEQ ID NO: 248465 - DNA, 25 bp, Artificial sequence
  SiRNA target sequence
tcctgatccacaaaaaatttgcaaa

SEQ ID NO: 248466 - DNA, 25 bp, Artificial sequence
  SiRNA target sequence
cctgatccacaaaaaatttgcaaat

SEQ ID NO: 248467 - DNA, 25 bp, Artificial sequence
  SiRNA target sequence
ctgatccacaaaaaatttgcaaata

SEQ ID NO: 248468 - DNA, 25 bp, Artificial sequence
  SiRNA target sequence
tgatccacaaaaaatttgcaaatat

SEQ ID NO: 248469 - DNA, 25 bp, Artificial sequence
  SiRNA target sequence
gatccacaaaaaatttgcaaatatt

SEQ ID NO: 248470 - DNA, 25 bp, Artificial sequence
  SiRNA target sequence
atccacaaaaaatttgcaaatatta

SEQ ID NO: 248471 - DNA, 25 bp, Artificial sequence
  SiRNA target sequence
tccacaaaaaatttgcaaatattaa

SEQ ID NO: 248472 - DNA, 25 bp, Artificial sequence
  SiRNA target sequence
ccacaaaaaatttgcaaatattaaa

SEQ ID NO: 248473 - DNA, 25 bp, Artificial sequence
  SiRNA target sequence
cacaaaaaatttgcaaatattaaaa

SEQ ID NO: 248474 - DNA, 25 bp, Artificial sequence
  SiRNA target sequence
acaaaaaatttgcaaatattaaaaa

SEQ ID NO: 248475 - DNA, 25 bp, Artificial sequence
  SiRNA target sequence
caaaaaatttgcaaatattaaaaat

SEQ ID NO: 248476 - DNA, 25 bp, Artificial sequence
  SiRNA target sequence
aaaaaatttgcaaatattaaaaata

SEQ ID NO: 248477 - DNA, 25 bp, Artificial sequence
  SiRNA target sequence
aaaaatttgcaaatattaaaaatat

SEQ ID NO: 248478 - DNA, 25 bp, Artificial sequence
  SiRNA target sequence
aaaatttgcaaatattaaaaatata

SEQ ID NO: 248479 - DNA, 25 bp, Artificial sequence
  SiRNA target sequence
aaatttgcaaatattaaaaatataa

SEQ ID NO: 248480 - DNA, 25 bp, Artificial sequence
  SiRNA target sequence
aatttgcaaatattaaaaatataaa

SEQ ID NO: 248481 - DNA, 25 bp, Artificial sequence
  SiRNA target sequence
atttgcaaatattaaaaatataaaa

SEQ ID NO: 248482 - DNA, 25 bp, Artificial sequence
  SiRNA target sequence
tttgcaaatattaaaaatataaaag

SEQ ID NO: 248483 - DNA, 25 bp, Artificial sequence
  SiRNA target sequence
ttgcaaatattaaaaatataaaaga

SEQ ID NO: 248484 - DNA, 25 bp, Artificial sequence
  SiRNA target sequence
tgcaaatattaaaaatataaaagac

SEQ ID NO: 248485 - DNA, 25 bp, Artificial sequence
  SiRNA target sequence
gcaaatattaaaaatataaaagaca

SEQ ID NO: 248486 - DNA, 25 bp, Artificial sequence
  SiRNA target sequence
caaatattaaaaatataaaagacac

SEQ ID NO: 248487 - DNA, 25 bp, Artificial sequence
  SiRNA target sequence
aaatattaaaaatataaaagacacg

SEQ ID NO: 248488 - DNA, 25 bp, Artificial sequence
  SiRNA target sequence
aatattaaaaatataaaagacacgt

SEQ ID NO: 248489 - DNA, 25 bp, Artificial sequence
  SiRNA target sequence
atattaaaaatataaaagacacgta

SEQ ID NO: 248490 - DNA, 25 bp, Artificial sequence
  SiRNA target sequence
tattaaaaatataaaagacacgtat

SEQ ID NO: 248491 - DNA, 25 bp, Artificial sequence
  SiRNA target sequence
attaaaaatataaaagacacgtatg

SEQ ID NO: 248492 - DNA, 25 bp, Artificial sequence
  SiRNA target sequence
ttaaaaatataaaagacacgtatga

SEQ ID NO: 248493 - DNA, 25 bp, Artificial sequence
  SiRNA target sequence
taaaaatataaaagacacgtatgat

SEQ ID NO: 248494 - DNA, 25 bp, Artificial sequence
  SiRNA target sequence
aaaaatataaaagacacgtatgata

SEQ ID NO: 248495 - DNA, 25 bp, Artificial sequence
  SiRNA target sequence
aaaatataaaagacacgtatgatac

SEQ ID NO: 248496 - DNA, 25 bp, Artificial sequence
  SiRNA target sequence
aaatataaaagacacgtatgatact

SEQ ID NO: 248497 - DNA, 25 bp, Artificial sequence
  SiRNA target sequence
aatataaaagacacgtatgatactt

SEQ ID NO: 248498 - DNA, 25 bp, Artificial sequence
  SiRNA target sequence
atataaaagacacgtatgatacttg

SEQ ID NO: 248499 - DNA, 25 bp, Artificial sequence
  SiRNA target sequence
tataaaagacacgtatgatacttgt

SEQ ID NO: 248500 - DNA, 25 bp, Artificial sequence
  SiRNA target sequence
ataaaagacacgtatgatacttgtc

SEQ ID NO: 248501 - DNA, 25 bp, Artificial sequence
  SiRNA target sequence
taaaagacacgtatgatacttgtct

SEQ ID NO: 248502 - DNA, 25 bp, Artificial sequence
  SiRNA target sequence
aaaagacacgtatgatacttgtcta

SEQ ID NO: 248503 - DNA, 25 bp, Artificial sequence
  SiRNA target sequence
aaagacacgtatgatacttgtctaa

SEQ ID NO: 248504 - DNA, 25 bp, Artificial sequence
  SiRNA target sequence
aagacacgtatgatacttgtctaat

SEQ ID NO: 248505 - DNA, 25 bp, Artificial sequence
  SiRNA target sequence
agacacgtatgatacttgtctaata

SEQ ID NO: 248506 - DNA, 25 bp, Artificial sequence
  SiRNA target sequence
gacacgtatgatacttgtctaatat

SEQ ID NO: 248507 - DNA, 25 bp, Artificial sequence
  SiRNA target sequence
acacgtatgatacttgtctaatatc

SEQ ID NO: 248508 - DNA, 25 bp, Artificial sequence
  SiRNA target sequence
cacgtatgatacttgtctaatatct

SEQ ID NO: 248509 - DNA, 25 bp, Artificial sequence
  SiRNA target sequence
acgtatgatacttgtctaatatctg

SEQ ID NO: 248510 - DNA, 25 bp, Artificial sequence
  SiRNA target sequence
cgtatgatacttgtctaatatctgg

SEQ ID NO: 248511 - DNA, 25 bp, Artificial sequence
  SiRNA target sequence
gtatgatacttgtctaatatctgga

SEQ ID NO: 248512 - DNA, 25 bp, Artificial sequence
  SiRNA target sequence
tatgatacttgtctaatatctggaa

SEQ ID NO: 248513 - DNA, 25 bp, Artificial sequence
  SiRNA target sequence
atgatacttgtctaatatctggaat

SEQ ID NO: 248514 - DNA, 25 bp, Artificial sequence
  SiRNA target sequence
tgatacttgtctaatatctggaatt

SEQ ID NO: 248515 - DNA, 25 bp, Artificial sequence
  SiRNA target sequence
gatacttgtctaatatctggaattt

SEQ ID NO: 248516 - DNA, 25 bp, Artificial sequence
  SiRNA target sequence
atacttgtctaatatctggaatttc

SEQ ID NO: 248517 - DNA, 25 bp, Artificial sequence
  SiRNA target sequence
tacttgtctaatatctggaatttct

SEQ ID NO: 248518 - DNA, 25 bp, Artificial sequence
  SiRNA target sequence
acttgtctaatatctggaatttcta

SEQ ID NO: 248519 - DNA, 25 bp, Artificial sequence
  SiRNA target sequence
cttgtctaatatctggaatttctat

SEQ ID NO: 248520 - DNA, 25 bp, Artificial sequence
  SiRNA target sequence
ttgtctaatatctggaatttctata

SEQ ID NO: 248521 - DNA, 25 bp, Artificial sequence
  SiRNA target sequence
tgtctaatatctggaatttctataa

SEQ ID NO: 248522 - DNA, 25 bp, Artificial sequence
  SiRNA target sequence
gtctaatatctggaatttctataaa

SEQ ID NO: 248523 - DNA, 25 bp, Artificial sequence
  SiRNA target sequence
tctaatatctggaatttctataaac

SEQ ID NO: 248524 - DNA, 25 bp, Artificial sequence
  SiRNA target sequence
ctaatatctggaatttctataaacg

SEQ ID NO: 248525 - DNA, 25 bp, Artificial sequence
  SiRNA target sequence
taatatctggaatttctataaacgt

SEQ ID NO: 248526 - DNA, 25 bp, Artificial sequence
  SiRNA target sequence
aatatctggaatttctataaacgtc

SEQ ID NO: 248527 - DNA, 25 bp, Artificial sequence
  SiRNA target sequence
atatctggaatttctataaacgtca

SEQ ID NO: 248528 - DNA, 25 bp, Artificial sequence
  SiRNA target sequence
tatctggaatttctataaacgtcaa

SEQ ID NO: 248529 - DNA, 25 bp, Artificial sequence
  SiRNA target sequence
atctggaatttctataaacgtcaaa

SEQ ID NO: 248530 - DNA, 25 bp, Artificial sequence
  SiRNA target sequence
tctggaatttctataaacgtcaaaa

SEQ ID NO: 248531 - DNA, 25 bp, Artificial sequence
  SiRNA target sequence
ctggaatttctataaacgtcaaaaa

SEQ ID NO: 248532 - DNA, 25 bp, Artificial sequence
  SiRNA target sequence
tggaatttctataaacgtcaaaaaa

SEQ ID NO: 248533 - DNA, 25 bp, Artificial sequence
  SiRNA target sequence
ggaatttctataaacgtcaaaaaag

SEQ ID NO: 248534 - DNA, 25 bp, Artificial sequence
  SiRNA target sequence
gaatttctataaacgtcaaaaaagt

SEQ ID NO: 248535 - DNA, 25 bp, Artificial sequence
  SiRNA target sequence
aatttctataaacgtcaaaaaagtt

SEQ ID NO: 248536 - DNA, 25 bp, Artificial sequence
  SiRNA target sequence
atttctataaacgtcaaaaaagttc

SEQ ID NO: 248537 - DNA, 25 bp, Artificial sequence
  SiRNA target sequence
tttctataaacgtcaaaaaagttcc

SEQ ID NO: 248538 - DNA, 25 bp, Artificial sequence
  SiRNA target sequence
ttctataaacgtcaaaaaagttcca

SEQ ID NO: 248539 - DNA, 25 bp, Artificial sequence
  SiRNA target sequence
tctataaacgtcaaaaaagttccat

SEQ ID NO: 248540 - DNA, 25 bp, Artificial sequence
  SiRNA target sequence
ctataaacgtcaaaaaagttccata

SEQ ID NO: 248541 - DNA, 25 bp, Artificial sequence
  SiRNA target sequence
tataaacgtcaaaaaagttccatat

SEQ ID NO: 248542 - DNA, 25 bp, Artificial sequence
  SiRNA target sequence
ataaacgtcaaaaaagttccatata

SEQ ID NO: 248543 - DNA, 25 bp, Artificial sequence
  SiRNA target sequence
taaacgtcaaaaaagttccatataa

SEQ ID NO: 248544 - DNA, 25 bp, Artificial sequence
  SiRNA target sequence
aaacgtcaaaaaagttccatataaa

SEQ ID NO: 248545 - DNA, 25 bp, Artificial sequence
  SiRNA target sequence
aacgtcaaaaaagttccatataaag

SEQ ID NO: 248546 - DNA, 25 bp, Artificial sequence
  SiRNA target sequence
acgtcaaaaaagttccatataaaga

SEQ ID NO: 248547 - DNA, 25 bp, Artificial sequence
  SiRNA target sequence
cgtcaaaaaagttccatataaagag

SEQ ID NO: 248548 - DNA, 25 bp, Artificial sequence
  SiRNA target sequence
gtcaaaaaagttccatataaagaga

SEQ ID NO: 248549 - DNA, 25 bp, Artificial sequence
  SiRNA target sequence
tcaaaaaagttccatataaagagat

SEQ ID NO: 248550 - DNA, 25 bp, Artificial sequence
  SiRNA target sequence
caaaaaagttccatataaagagata

SEQ ID NO: 248551 - DNA, 25 bp, Artificial sequence
  SiRNA target sequence
aaaaaagttccatataaagagataa

SEQ ID NO: 248552 - DNA, 25 bp, Artificial sequence
  SiRNA target sequence
aaaaagttccatataaagagataat

SEQ ID NO: 248553 - DNA, 25 bp, Artificial sequence
  SiRNA target sequence
aaaagttccatataaagagataata

SEQ ID NO: 248554 - DNA, 25 bp, Artificial sequence
  SiRNA target sequence
aaagttccatataaagagataatag

SEQ ID NO: 248555 - DNA, 25 bp, Artificial sequence
  SiRNA target sequence
aagttccatataaagagataataga

SEQ ID NO: 248556 - DNA, 25 bp, Artificial sequence
  SiRNA target sequence
agttccatataaagagataatagat

SEQ ID NO: 248557 - DNA, 25 bp, Artificial sequence
  SiRNA target sequence
gttccatataaagagataatagatt

SEQ ID NO: 248558 - DNA, 25 bp, Artificial sequence
  SiRNA target sequence
ttccatataaagagataatagattt

SEQ ID NO: 248559 - DNA, 25 bp, Artificial sequence
  SiRNA target sequence
tccatataaagagataatagattta

SEQ ID NO: 248560 - DNA, 25 bp, Artificial sequence
  SiRNA target sequence
ccatataaagagataatagatttac

SEQ ID NO: 248561 - DNA, 25 bp, Artificial sequence
  SiRNA target sequence
catataaagagataatagatttacc

SEQ ID NO: 248562 - DNA, 25 bp, Artificial sequence
  SiRNA target sequence
atataaagagataatagatttacca

SEQ ID NO: 248563 - DNA, 25 bp, Artificial sequence
  SiRNA target sequence
tataaagagataatagatttaccaa

SEQ ID NO: 248564 - DNA, 25 bp, Artificial sequence
  SiRNA target sequence
ataaagagataatagatttaccaat

SEQ ID NO: 248565 - DNA, 25 bp, Artificial sequence
  SiRNA target sequence
taaagagataatagatttaccaatt

SEQ ID NO: 248566 - DNA, 25 bp, Artificial sequence
  SiRNA target sequence
aaagagataatagatttaccaattt

SEQ ID NO: 248567 - DNA, 25 bp, Artificial sequence
  SiRNA target sequence
aagagataatagatttaccaatttt

SEQ ID NO: 248568 - DNA, 25 bp, Artificial sequence
  SiRNA target sequence
agagataatagatttaccaattttg

SEQ ID NO: 248569 - DNA, 25 bp, Artificial sequence
  SiRNA target sequence
gagataatagatttaccaattttga

SEQ ID NO: 248570 - DNA, 25 bp, Artificial sequence
  SiRNA target sequence
agataatagatttaccaattttgat

SEQ ID NO: 248571 - DNA, 25 bp, Artificial sequence
  SiRNA target sequence
gataatagatttaccaattttgata

SEQ ID NO: 248572 - DNA, 25 bp, Artificial sequence
  SiRNA target sequence
ataatagatttaccaattttgatac

SEQ ID NO: 248573 - DNA, 25 bp, Artificial sequence
  SiRNA target sequence
taatagatttaccaattttgataca

SEQ ID NO: 248574 - DNA, 25 bp, Artificial sequence
  SiRNA target sequence
aatagatttaccaattttgatacat

SEQ ID NO: 248575 - DNA, 25 bp, Artificial sequence
  SiRNA target sequence
atagatttaccaattttgatacata

SEQ ID NO: 248576 - DNA, 25 bp, Artificial sequence
  SiRNA target sequence
tagatttaccaattttgatacatac

SEQ ID NO: 248577 - DNA, 25 bp, Artificial sequence
  SiRNA target sequence
agatttaccaattttgatacataca

SEQ ID NO: 248578 - DNA, 25 bp, Artificial sequence
  SiRNA target sequence
gatttaccaattttgatacatacac

SEQ ID NO: 248579 - DNA, 25 bp, Artificial sequence
  SiRNA target sequence
atttaccaattttgatacatacacc

SEQ ID NO: 248580 - DNA, 25 bp, Artificial sequence
  SiRNA target sequence
tttaccaattttgatacatacacca

SEQ ID NO: 248581 - DNA, 25 bp, Artificial sequence
  SiRNA target sequence
ttaccaattttgatacatacaccat

SEQ ID NO: 248582 - DNA, 25 bp, Artificial sequence
  SiRNA target sequence
taccaattttgatacatacaccatc

SEQ ID NO: 248583 - DNA, 25 bp, Artificial sequence
  SiRNA target sequence
accaattttgatacatacaccatca

SEQ ID NO: 248584 - DNA, 25 bp, Artificial sequence
  SiRNA target sequence
ccaattttgatacatacaccatcat

SEQ ID NO: 248585 - DNA, 25 bp, Artificial sequence
  SiRNA target sequence
caattttgatacatacaccatcata

SEQ ID NO: 248586 - DNA, 25 bp, Artificial sequence
  SiRNA target sequence
aattttgatacatacaccatcataa

SEQ ID NO: 248587 - DNA, 25 bp, Artificial sequence
  SiRNA target sequence
attttgatacatacaccatcataaa

SEQ ID NO: 248588 - DNA, 25 bp, Artificial sequence
  SiRNA target sequence
ttttgatacatacaccatcataaaa

SEQ ID NO: 248589 - DNA, 25 bp, Artificial sequence
  SiRNA target sequence
tttgatacatacaccatcataaaaa

SEQ ID NO: 248590 - DNA, 25 bp, Artificial sequence
  SiRNA target sequence
ttgatacatacaccatcataaaaac

SEQ ID NO: 248591 - DNA, 25 bp, Artificial sequence
  SiRNA target sequence
tgatacatacaccatcataaaaact

SEQ ID NO: 248592 - DNA, 25 bp, Artificial sequence
  SiRNA target sequence
gatacatacaccatcataaaaactt

SEQ ID NO: 248593 - DNA, 25 bp, Artificial sequence
  SiRNA target sequence
atacatacaccatcataaaaacttt

SEQ ID NO: 248594 - DNA, 25 bp, Artificial sequence
  SiRNA target sequence
tacatacaccatcataaaaactttt

SEQ ID NO: 248595 - DNA, 25 bp, Artificial sequence
  SiRNA target sequence
acatacaccatcataaaaactttta

SEQ ID NO: 248596 - DNA, 25 bp, Artificial sequence
  SiRNA target sequence
catacaccatcataaaaacttttaa

SEQ ID NO: 248597 - DNA, 25 bp, Artificial sequence
  SiRNA target sequence
atacaccatcataaaaacttttaaa

SEQ ID NO: 248598 - DNA, 25 bp, Artificial sequence
  SiRNA target sequence
tacaccatcataaaaacttttaaat

SEQ ID NO: 248599 - DNA, 25 bp, Artificial sequence
  SiRNA target sequence
acaccatcataaaaacttttaaatt

SEQ ID NO: 248600 - DNA, 25 bp, Artificial sequence
  SiRNA target sequence
caccatcataaaaacttttaaattt

SEQ ID NO: 248601 - DNA, 25 bp, Artificial sequence
  SiRNA target sequence
accatcataaaaacttttaaattta

SEQ ID NO: 248602 - DNA, 25 bp, Artificial sequence
  SiRNA target sequence
ccatcataaaaacttttaaatttat

SEQ ID NO: 248603 - DNA, 25 bp, Artificial sequence
  SiRNA target sequence
catcataaaaacttttaaatttata

SEQ ID NO: 248604 - DNA, 25 bp, Artificial sequence
  SiRNA target sequence
atcataaaaacttttaaatttatac

SEQ ID NO: 248605 - DNA, 25 bp, Artificial sequence
  SiRNA target sequence
tcataaaaacttttaaatttatacc

SEQ ID NO: 248606 - DNA, 25 bp, Artificial sequence
  SiRNA target sequence
cataaaaacttttaaatttatacct

SEQ ID NO: 248607 - DNA, 25 bp, Artificial sequence
  SiRNA target sequence
ataaaaacttttaaatttatacctg

SEQ ID NO: 248608 - DNA, 25 bp, Artificial sequence
  SiRNA target sequence
taaaaacttttaaatttatacctgt

SEQ ID NO: 248609 - DNA, 25 bp, Artificial sequence
  SiRNA target sequence
aaaaacttttaaatttatacctgta

SEQ ID NO: 248610 - DNA, 25 bp, Artificial sequence
  SiRNA target sequence
aaaacttttaaatttatacctgtat

SEQ ID NO: 248611 - DNA, 25 bp, Artificial sequence
  SiRNA target sequence
aaacttttaaatttatacctgtatt

SEQ ID NO: 248612 - DNA, 25 bp, Artificial sequence
  SiRNA target sequence
aacttttaaatttatacctgtattt

SEQ ID NO: 248613 - DNA, 25 bp, Artificial sequence
  SiRNA target sequence
acttttaaatttatacctgtattta

SEQ ID NO: 248614 - DNA, 25 bp, Artificial sequence
  SiRNA target sequence
cttttaaatttatacctgtatttaa

SEQ ID NO: 248615 - DNA, 25 bp, Artificial sequence
  SiRNA target sequence
ttttaaatttatacctgtatttaac

SEQ ID NO: 248616 - DNA, 25 bp, Artificial sequence
  SiRNA target sequence
tttaaatttatacctgtatttaaca

SEQ ID NO: 248617 - DNA, 25 bp, Artificial sequence
  SiRNA target sequence
ttaaatttatacctgtatttaacag

SEQ ID NO: 248618 - DNA, 25 bp, Artificial sequence
  SiRNA target sequence
taaatttatacctgtatttaacagg

SEQ ID NO: 248619 - DNA, 25 bp, Artificial sequence
  SiRNA target sequence
aaatttatacctgtatttaacaggc

SEQ ID NO: 248620 - DNA, 25 bp, Artificial sequence
  SiRNA target sequence
aatttatacctgtatttaacaggca

SEQ ID NO: 248621 - DNA, 25 bp, Artificial sequence
  SiRNA target sequence
atttatacctgtatttaacaggcac

SEQ ID NO: 248622 - DNA, 25 bp, Artificial sequence
  SiRNA target sequence
tttatacctgtatttaacaggcacc

SEQ ID NO: 248623 - DNA, 25 bp, Artificial sequence
  SiRNA target sequence
ttatacctgtatttaacaggcaccc

SEQ ID NO: 248624 - DNA, 25 bp, Artificial sequence
  SiRNA target sequence
tatacctgtatttaacaggcaccct

SEQ ID NO: 248625 - DNA, 25 bp, Artificial sequence
  SiRNA target sequence
atacctgtatttaacaggcaccctc

SEQ ID NO: 248626 - DNA, 25 bp, Artificial sequence
  SiRNA target sequence
tacctgtatttaacaggcaccctca

SEQ ID NO: 248627 - DNA, 25 bp, Artificial sequence
  SiRNA target sequence
acctgtatttaacaggcaccctcat

SEQ ID NO: 248628 - DNA, 25 bp, Artificial sequence
  SiRNA target sequence
cctgtatttaacaggcaccctcata

SEQ ID NO: 248629 - DNA, 25 bp, Artificial sequence
  SiRNA target sequence
ctgtatttaacaggcaccctcatag

SEQ ID NO: 248630 - DNA, 25 bp, Artificial sequence
  SiRNA target sequence
tgtatttaacaggcaccctcataga

SEQ ID NO: 248631 - DNA, 25 bp, Artificial sequence
  SiRNA target sequence
gtatttaacaggcaccctcatagaa

SEQ ID NO: 248632 - DNA, 25 bp, Artificial sequence
  SiRNA target sequence
tatttaacaggcaccctcatagaaa

SEQ ID NO: 248633 - DNA, 25 bp, Artificial sequence
  SiRNA target sequence
atttaacaggcaccctcatagaaag

SEQ ID NO: 248634 - DNA, 25 bp, Artificial sequence
  SiRNA target sequence
tttaacaggcaccctcatagaaagc

SEQ ID NO: 248635 - DNA, 25 bp, Artificial sequence
  SiRNA target sequence
ttaacaggcaccctcatagaaagca

SEQ ID NO: 248636 - DNA, 25 bp, Artificial sequence
  SiRNA target sequence
taacaggcaccctcatagaaagcat

SEQ ID NO: 248637 - DNA, 25 bp, Artificial sequence
  SiRNA target sequence
aacaggcaccctcatagaaagcatt

SEQ ID NO: 248638 - DNA, 25 bp, Artificial sequence
  SiRNA target sequence
acaggcaccctcatagaaagcattt

SEQ ID NO: 248639 - DNA, 25 bp, Artificial sequence
  SiRNA target sequence
caggcaccctcatagaaagcatttc

SEQ ID NO: 248640 - DNA, 25 bp, Artificial sequence
  SiRNA target sequence
aggcaccctcatagaaagcatttct

SEQ ID NO: 248641 - DNA, 25 bp, Artificial sequence
  SiRNA target sequence
ggcaccctcatagaaagcatttctt

SEQ ID NO: 248642 - DNA, 25 bp, Artificial sequence
  SiRNA target sequence
gcaccctcatagaaagcatttcttt

SEQ ID NO: 248643 - DNA, 25 bp, Artificial sequence
  SiRNA target sequence
caccctcatagaaagcatttctttt

SEQ ID NO: 248644 - DNA, 25 bp, Artificial sequence
  SiRNA target sequence
accctcatagaaagcatttcttttg

SEQ ID NO: 248645 - DNA, 25 bp, Artificial sequence
  SiRNA target sequence
ccctcatagaaagcatttcttttgc

SEQ ID NO: 248646 - DNA, 25 bp, Artificial sequence
  SiRNA target sequence
cctcatagaaagcatttcttttgct

SEQ ID NO: 248647 - DNA, 25 bp, Artificial sequence
  SiRNA target sequence
ctcatagaaagcatttcttttgcta

SEQ ID NO: 248648 - DNA, 25 bp, Artificial sequence
  SiRNA target sequence
tcatagaaagcatttcttttgctaa

SEQ ID NO: 248649 - DNA, 25 bp, Artificial sequence
  SiRNA target sequence
catagaaagcatttcttttgctaaa

SEQ ID NO: 248650 - DNA, 25 bp, Artificial sequence
  SiRNA target sequence
atagaaagcatttcttttgctaaat

SEQ ID NO: 248651 - DNA, 25 bp, Artificial sequence
  SiRNA target sequence
tagaaagcatttcttttgctaaatc

SEQ ID NO: 248652 - DNA, 25 bp, Artificial sequence
  SiRNA target sequence
agaaagcatttcttttgctaaatca

SEQ ID NO: 248653 - DNA, 25 bp, Artificial sequence
  SiRNA target sequence
gaaagcatttcttttgctaaatcaa

SEQ ID NO: 248654 - DNA, 25 bp, Artificial sequence
  SiRNA target sequence
aaagcatttcttttgctaaatcaaa

SEQ ID NO: 248655 - DNA, 25 bp, Artificial sequence
  SiRNA target sequence
aagcatttcttttgctaaatcaaat

SEQ ID NO: 248656 - DNA, 25 bp, Artificial sequence
  SiRNA target sequence
agcatttcttttgctaaatcaaata

SEQ ID NO: 248657 - DNA, 25 bp, Artificial sequence
  SiRNA target sequence
gcatttcttttgctaaatcaaataa

SEQ ID NO: 248658 - DNA, 25 bp, Artificial sequence
  SiRNA target sequence
catttcttttgctaaatcaaataaa

SEQ ID NO: 248659 - DNA, 25 bp, Artificial sequence
  SiRNA target sequence
atttcttttgctaaatcaaataaaa

SEQ ID NO: 248660 - DNA, 25 bp, Artificial sequence
  SiRNA target sequence
tttcttttgctaaatcaaataaaac

SEQ ID NO: 248661 - DNA, 25 bp, Artificial sequence
  SiRNA target sequence
ttcttttgctaaatcaaataaaaca

SEQ ID NO: 248662 - DNA, 25 bp, Artificial sequence
  SiRNA target sequence
tcttttgctaaatcaaataaaacat

SEQ ID NO: 248663 - DNA, 25 bp, Artificial sequence
  SiRNA target sequence
cttttgctaaatcaaataaaacata

SEQ ID NO: 248664 - DNA, 25 bp, Artificial sequence
  SiRNA target sequence
ttttgctaaatcaaataaaacatat

SEQ ID NO: 248665 - DNA, 25 bp, Artificial sequence
  SiRNA target sequence
tttgctaaatcaaataaaacatatt

SEQ ID NO: 248666 - DNA, 25 bp, Artificial sequence
  SiRNA target sequence
ttgctaaatcaaataaaacatattt

SEQ ID NO: 248667 - DNA, 25 bp, Artificial sequence
  SiRNA target sequence
tgctaaatcaaataaaacatatttg

SEQ ID NO: 248668 - DNA, 25 bp, Artificial sequence
  SiRNA target sequence
gctaaatcaaataaaacatatttgg

SEQ ID NO: 248669 - DNA, 25 bp, Artificial sequence
  SiRNA target sequence
ctaaatcaaataaaacatatttggt

SEQ ID NO: 248670 - DNA, 25 bp, Artificial sequence
  SiRNA target sequence
taaatcaaataaaacatatttggta

SEQ ID NO: 248671 - DNA, 25 bp, Artificial sequence
  SiRNA target sequence
aaatcaaataaaacatatttggtaa

SEQ ID NO: 248672 - DNA, 25 bp, Artificial sequence
  SiRNA target sequence
aatcaaataaaacatatttggtaat

SEQ ID NO: 248673 - DNA, 25 bp, Artificial sequence
  SiRNA target sequence
atcaaataaaacatatttggtaatt

SEQ ID NO: 248674 - DNA, 25 bp, Artificial sequence
  SiRNA target sequence
tcaaataaaacatatttggtaattt

SEQ ID NO: 248675 - DNA, 25 bp, Artificial sequence
  SiRNA target sequence
caaataaaacatatttggtaatttt

SEQ ID NO: 248676 - DNA, 25 bp, Artificial sequence
  SiRNA target sequence
aaataaaacatatttggtaatttta

SEQ ID NO: 248677 - DNA, 25 bp, Artificial sequence
  SiRNA target sequence
aataaaacatatttggtaattttag

SEQ ID NO: 248678 - DNA, 25 bp, Artificial sequence
  SiRNA target sequence
ataaaacatatttggtaattttaga

SEQ ID NO: 248679 - DNA, 25 bp, Artificial sequence
  SiRNA target sequence
taaaacatatttggtaattttagaa

SEQ ID NO: 248680 - DNA, 25 bp, Artificial sequence
  SiRNA target sequence
aaaacatatttggtaattttagaaa

SEQ ID NO: 248681 - DNA, 25 bp, Artificial sequence
  SiRNA target sequence
aaacatatttggtaattttagaaaa

SEQ ID NO: 248682 - DNA, 25 bp, Artificial sequence
  SiRNA target sequence
aacatatttggtaattttagaaaat

SEQ ID NO: 248683 - DNA, 25 bp, Artificial sequence
  SiRNA target sequence
acatatttggtaattttagaaaatg

SEQ ID NO: 248684 - DNA, 25 bp, Artificial sequence
  SiRNA target sequence
catatttggtaattttagaaaatgc

SEQ ID NO: 248685 - DNA, 25 bp, Artificial sequence
  SiRNA target sequence
atatttggtaattttagaaaatgca

SEQ ID NO: 248686 - DNA, 25 bp, Artificial sequence
  SiRNA target sequence
tatttggtaattttagaaaatgcaa

SEQ ID NO: 248687 - DNA, 25 bp, Artificial sequence
  SiRNA target sequence
atttggtaattttagaaaatgcaaa

SEQ ID NO: 248688 - DNA, 25 bp, Artificial sequence
  SiRNA target sequence
tttggtaattttagaaaatgcaaat

SEQ ID NO: 248689 - DNA, 25 bp, Artificial sequence
  SiRNA target sequence
ttggtaattttagaaaatgcaaatc

SEQ ID NO: 248690 - DNA, 25 bp, Artificial sequence
  SiRNA target sequence
tggtaattttagaaaatgcaaatcc

SEQ ID NO: 248691 - DNA, 25 bp, Artificial sequence
  SiRNA target sequence
ggtaattttagaaaatgcaaatcca

SEQ ID NO: 248692 - DNA, 25 bp, Artificial sequence
  SiRNA target sequence
gtaattttagaaaatgcaaatccaa

SEQ ID NO: 248693 - DNA, 25 bp, Artificial sequence
  SiRNA target sequence
taattttagaaaatgcaaatccaat

SEQ ID NO: 248694 - DNA, 25 bp, Artificial sequence
  SiRNA target sequence
aattttagaaaatgcaaatccaatg

SEQ ID NO: 248695 - DNA, 25 bp, Artificial sequence
  SiRNA target sequence
attttagaaaatgcaaatccaatgg

SEQ ID NO: 248696 - DNA, 25 bp, Artificial sequence
  SiRNA target sequence
ttttagaaaatgcaaatccaatggt

SEQ ID NO: 248697 - DNA, 25 bp, Artificial sequence
  SiRNA target sequence
tttagaaaatgcaaatccaatggtt

SEQ ID NO: 248698 - DNA, 25 bp, Artificial sequence
  SiRNA target sequence
ttagaaaatgcaaatccaatggttg

SEQ ID NO: 248699 - DNA, 25 bp, Artificial sequence
  SiRNA target sequence
tagaaaatgcaaatccaatggttgc

SEQ ID NO: 248700 - DNA, 25 bp, Artificial sequence
  SiRNA target sequence
agaaaatgcaaatccaatggttgca

SEQ ID NO: 248701 - DNA, 25 bp, Artificial sequence
  SiRNA target sequence
gaaaatgcaaatccaatggttgcac

SEQ ID NO: 248702 - DNA, 25 bp, Artificial sequence
  SiRNA target sequence
aaaatgcaaatccaatggttgcaca

SEQ ID NO: 248703 - DNA, 25 bp, Artificial sequence
  SiRNA target sequence
aaatgcaaatccaatggttgcacac

SEQ ID NO: 248704 - DNA, 25 bp, Artificial sequence
  SiRNA target sequence
aatgcaaatccaatggttgcacacc

SEQ ID NO: 248705 - DNA, 25 bp, Artificial sequence
  SiRNA target sequence
atgcaaatccaatggttgcacacca

SEQ ID NO: 248706 - DNA, 25 bp, Artificial sequence
  SiRNA target sequence
tgcaaatccaatggttgcacaccaa

SEQ ID NO: 248707 - DNA, 25 bp, Artificial sequence
  SiRNA target sequence
gcaaatccaatggttgcacaccaat

SEQ ID NO: 248708 - DNA, 25 bp, Artificial sequence
  SiRNA target sequence
caaatccaatggttgcacaccaatt

SEQ ID NO: 248709 - DNA, 25 bp, Artificial sequence
  SiRNA target sequence
aaatccaatggttgcacaccaattt

SEQ ID NO: 248710 - DNA, 25 bp, Artificial sequence
  SiRNA target sequence
aatccaatggttgcacaccaatttt

SEQ ID NO: 248711 - DNA, 25 bp, Artificial sequence
  SiRNA target sequence
atccaatggttgcacaccaattttc

SEQ ID NO: 248712 - DNA, 25 bp, Artificial sequence
  SiRNA target sequence
tccaatggttgcacaccaattttca

SEQ ID NO: 248713 - DNA, 25 bp, Artificial sequence
  SiRNA target sequence
ccaatggttgcacaccaattttcaa

SEQ ID NO: 248714 - DNA, 25 bp, Artificial sequence
  SiRNA target sequence
caatggttgcacaccaattttcaag

SEQ ID NO: 248715 - DNA, 25 bp, Artificial sequence
  SiRNA target sequence
aatggttgcacaccaattttcaaga

SEQ ID NO: 248716 - DNA, 25 bp, Artificial sequence
  SiRNA target sequence
atggttgcacaccaattttcaagat

SEQ ID NO: 248717 - DNA, 25 bp, Artificial sequence
  SiRNA target sequence
tggttgcacaccaattttcaagatt

SEQ ID NO: 248718 - DNA, 25 bp, Artificial sequence
  SiRNA target sequence
ggttgcacaccaattttcaagattt

SEQ ID NO: 248719 - DNA, 25 bp, Artificial sequence
  SiRNA target sequence
gttgcacaccaattttcaagattta

SEQ ID NO: 248720 - DNA, 25 bp, Artificial sequence
  SiRNA target sequence
ttgcacaccaattttcaagatttat

SEQ ID NO: 248721 - DNA, 25 bp, Artificial sequence
  SiRNA target sequence
tgcacaccaattttcaagatttatt

SEQ ID NO: 248722 - DNA, 25 bp, Artificial sequence
  SiRNA target sequence
gcacaccaattttcaagatttattc

SEQ ID NO: 248723 - DNA, 25 bp, Artificial sequence
  SiRNA target sequence
cacaccaattttcaagatttattct

SEQ ID NO: 248724 - DNA, 25 bp, Artificial sequence
  SiRNA target sequence
acaccaattttcaagatttattctt

SEQ ID NO: 248725 - DNA, 25 bp, Artificial sequence
  SiRNA target sequence
caccaattttcaagatttattctta

SEQ ID NO: 248726 - DNA, 25 bp, Artificial sequence
  SiRNA target sequence
accaattttcaagatttattcttaa

SEQ ID NO: 248727 - DNA, 25 bp, Artificial sequence
  SiRNA target sequence
ccaattttcaagatttattcttaag

SEQ ID NO: 248728 - DNA, 25 bp, Artificial sequence
  SiRNA target sequence
caattttcaagatttattcttaaga

SEQ ID NO: 248729 - DNA, 25 bp, Artificial sequence
  SiRNA target sequence
aattttcaagatttattcttaagac

SEQ ID NO: 248730 - DNA, 25 bp, Artificial sequence
  SiRNA target sequence
attttcaagatttattcttaagacc

SEQ ID NO: 248731 - DNA, 25 bp, Artificial sequence
  SiRNA target sequence
ttttcaagatttattcttaagaccg

SEQ ID NO: 248732 - DNA, 25 bp, Artificial sequence
  SiRNA target sequence
tttcaagatttattcttaagaccga

SEQ ID NO: 248733 - DNA, 25 bp, Artificial sequence
  SiRNA target sequence
ttcaagatttattcttaagaccgat

SEQ ID NO: 248734 - DNA, 25 bp, Artificial sequence
  SiRNA target sequence
tcaagatttattcttaagaccgatg

SEQ ID NO: 248735 - DNA, 25 bp, Artificial sequence
  SiRNA target sequence
caagatttattcttaagaccgatgg

SEQ ID NO: 248736 - DNA, 25 bp, Artificial sequence
  SiRNA target sequence
aagatttattcttaagaccgatgga

SEQ ID NO: 248737 - DNA, 25 bp, Artificial sequence
  SiRNA target sequence
agatttattcttaagaccgatggag

SEQ ID NO: 248738 - DNA, 25 bp, Artificial sequence
  SiRNA target sequence
gatttattcttaagaccgatggagc

SEQ ID NO: 248739 - DNA, 25 bp, Artificial sequence
  SiRNA target sequence
atttattcttaagaccgatggagct

SEQ ID NO: 248740 - DNA, 25 bp, Artificial sequence
  SiRNA target sequence
tttattcttaagaccgatggagctg

SEQ ID NO: 248741 - DNA, 25 bp, Artificial sequence
  SiRNA target sequence
ttattcttaagaccgatggagctgt

SEQ ID NO: 248742 - DNA, 25 bp, Artificial sequence
  SiRNA target sequence
tattcttaagaccgatggagctgtg

SEQ ID NO: 248743 - DNA, 25 bp, Artificial sequence
  SiRNA target sequence
attcttaagaccgatggagctgtgc

SEQ ID NO: 248744 - DNA, 25 bp, Artificial sequence
  SiRNA target sequence
ttcttaagaccgatggagctgtgcg

SEQ ID NO: 248745 - DNA, 25 bp, Artificial sequence
  SiRNA target sequence
tcttaagaccgatggagctgtgcgc

SEQ ID NO: 248746 - DNA, 25 bp, Artificial sequence
  SiRNA target sequence
cttaagaccgatggagctgtgcgca

SEQ ID NO: 248747 - DNA, 25 bp, Artificial sequence
  SiRNA target sequence
ttaagaccgatggagctgtgcgcaa

SEQ ID NO: 248748 - DNA, 25 bp, Artificial sequence
  SiRNA target sequence
taagaccgatggagctgtgcgcaaa

SEQ ID NO: 248749 - DNA, 25 bp, Artificial sequence
  SiRNA target sequence
aagaccgatggagctgtgcgcaaat

SEQ ID NO: 248750 - DNA, 25 bp, Artificial sequence
  SiRNA target sequence
agaccgatggagctgtgcgcaaatt

SEQ ID NO: 248751 - DNA, 25 bp, Artificial sequence
  SiRNA target sequence
gaccgatggagctgtgcgcaaattg

SEQ ID NO: 248752 - DNA, 25 bp, Artificial sequence
  SiRNA target sequence
accgatggagctgtgcgcaaattgt

SEQ ID NO: 248753 - DNA, 25 bp, Artificial sequence
  SiRNA target sequence
ccgatggagctgtgcgcaaattgta

SEQ ID NO: 248754 - DNA, 25 bp, Artificial sequence
  SiRNA target sequence
cgatggagctgtgcgcaaattgtaa

SEQ ID NO: 248755 - DNA, 25 bp, Artificial sequence
  SiRNA target sequence
gatggagctgtgcgcaaattgtaaa

SEQ ID NO: 248756 - DNA, 25 bp, Artificial sequence
  SiRNA target sequence
atggagctgtgcgcaaattgtaaaa

SEQ ID NO: 248757 - DNA, 25 bp, Artificial sequence
  SiRNA target sequence
tggagctgtgcgcaaattgtaaaaa

SEQ ID NO: 248758 - DNA, 25 bp, Artificial sequence
  SiRNA target sequence
ggagctgtgcgcaaattgtaaaaag

SEQ ID NO: 248759 - DNA, 25 bp, Artificial sequence
  SiRNA target sequence
gagctgtgcgcaaattgtaaaaaga

SEQ ID NO: 248760 - DNA, 25 bp, Artificial sequence
  SiRNA target sequence
agctgtgcgcaaattgtaaaaagaa

SEQ ID NO: 248761 - DNA, 25 bp, Artificial sequence
  SiRNA target sequence
gctgtgcgcaaattgtaaaaagaaa

SEQ ID NO: 248762 - DNA, 25 bp, Artificial sequence
  SiRNA target sequence
ctgtgcgcaaattgtaaaaagaaag

SEQ ID NO: 248763 - DNA, 25 bp, Artificial sequence
  SiRNA target sequence
tgtgcgcaaattgtaaaaagaaagt

SEQ ID NO: 248764 - DNA, 25 bp, Artificial sequence
  SiRNA target sequence
gtgcgcaaattgtaaaaagaaagtc

SEQ ID NO: 248765 - DNA, 25 bp, Artificial sequence
  SiRNA target sequence
tgcgcaaattgtaaaaagaaagtcc

SEQ ID NO: 248766 - DNA, 25 bp, Artificial sequence
  SiRNA target sequence
gcgcaaattgtaaaaagaaagtcct

SEQ ID NO: 248767 - DNA, 25 bp, Artificial sequence
  SiRNA target sequence
cgcaaattgtaaaaagaaagtcctg

SEQ ID NO: 248768 - DNA, 25 bp, Artificial sequence
  SiRNA target sequence
gcaaattgtaaaaagaaagtcctga

SEQ ID NO: 248769 - DNA, 25 bp, Artificial sequence
  SiRNA target sequence
caaattgtaaaaagaaagtcctgaa

SEQ ID NO: 248770 - DNA, 25 bp, Artificial sequence
  SiRNA target sequence
aaattgtaaaaagaaagtcctgaaa

SEQ ID NO: 248771 - DNA, 25 bp, Artificial sequence
  SiRNA target sequence
aattgtaaaaagaaagtcctgaaat

SEQ ID NO: 248772 - DNA, 25 bp, Artificial sequence
  SiRNA target sequence
attgtaaaaagaaagtcctgaaatt

SEQ ID NO: 248773 - DNA, 25 bp, Artificial sequence
  SiRNA target sequence
ttgtaaaaagaaagtcctgaaatta

SEQ ID NO: 248774 - DNA, 25 bp, Artificial sequence
  SiRNA target sequence
tgtaaaaagaaagtcctgaaattag

SEQ ID NO: 248775 - DNA, 25 bp, Artificial sequence
  SiRNA target sequence
gtaaaaagaaagtcctgaaattaga

SEQ ID NO: 248776 - DNA, 25 bp, Artificial sequence
  SiRNA target sequence
taaaaagaaagtcctgaaattagag

SEQ ID NO: 248777 - DNA, 25 bp, Artificial sequence
  SiRNA target sequence
aaaaagaaagtcctgaaattagagc

SEQ ID NO: 248778 - DNA, 25 bp, Artificial sequence
  SiRNA target sequence
aaaagaaagtcctgaaattagagcg

SEQ ID NO: 248779 - DNA, 25 bp, Artificial sequence
  SiRNA target sequence
aaagaaagtcctgaaattagagcgg

SEQ ID NO: 248780 - DNA, 25 bp, Artificial sequence
  SiRNA target sequence
aagaaagtcctgaaattagagcggt

SEQ ID NO: 248781 - DNA, 25 bp, Artificial sequence
  SiRNA target sequence
agaaagtcctgaaattagagcggta

SEQ ID NO: 248782 - DNA, 25 bp, Artificial sequence
  SiRNA target sequence
gaaagtcctgaaattagagcggtaa

SEQ ID NO: 248783 - DNA, 25 bp, Artificial sequence
  SiRNA target sequence
aaagtcctgaaattagagcggtaaa

SEQ ID NO: 248784 - DNA, 25 bp, Artificial sequence
  SiRNA target sequence
aagtcctgaaattagagcggtaaaa

SEQ ID NO: 248785 - DNA, 25 bp, Artificial sequence
  SiRNA target sequence
agtcctgaaattagagcggtaaaaa

SEQ ID NO: 248786 - DNA, 25 bp, Artificial sequence
  SiRNA target sequence
gtcctgaaattagagcggtaaaaaa

SEQ ID NO: 248787 - DNA, 25 bp, Artificial sequence
  SiRNA target sequence
tcctgaaattagagcggtaaaaaat

SEQ ID NO: 248788 - DNA, 25 bp, Artificial sequence
  SiRNA target sequence
cctgaaattagagcggtaaaaaata

SEQ ID NO: 248789 - DNA, 25 bp, Artificial sequence
  SiRNA target sequence
ctgaaattagagcggtaaaaaatat

SEQ ID NO: 248790 - DNA, 25 bp, Artificial sequence
  SiRNA target sequence
tgaaattagagcggtaaaaaatata

SEQ ID NO: 248791 - DNA, 25 bp, Artificial sequence
  SiRNA target sequence
gaaattagagcggtaaaaaatatag

SEQ ID NO: 248792 - DNA, 25 bp, Artificial sequence
  SiRNA target sequence
aaattagagcggtaaaaaatatagc

SEQ ID NO: 248793 - DNA, 25 bp, Artificial sequence
  SiRNA target sequence
aattagagcggtaaaaaatatagca

SEQ ID NO: 248794 - DNA, 25 bp, Artificial sequence
  SiRNA target sequence
attagagcggtaaaaaatatagcag

SEQ ID NO: 248795 - DNA, 25 bp, Artificial sequence
  SiRNA target sequence
ttagagcggtaaaaaatatagcagc

SEQ ID NO: 248796 - DNA, 25 bp, Artificial sequence
  SiRNA target sequence
tagagcggtaaaaaatatagcagca

SEQ ID NO: 248797 - DNA, 25 bp, Artificial sequence
  SiRNA target sequence
agagcggtaaaaaatatagcagcaa

SEQ ID NO: 248798 - DNA, 25 bp, Artificial sequence
  SiRNA target sequence
gagcggtaaaaaatatagcagcaat

SEQ ID NO: 248799 - DNA, 25 bp, Artificial sequence
  SiRNA target sequence
agcggtaaaaaatatagcagcaata

SEQ ID NO: 248800 - DNA, 25 bp, Artificial sequence
  SiRNA target sequence
gcggtaaaaaatatagcagcaatag

SEQ ID NO: 248801 - DNA, 25 bp, Artificial sequence
  SiRNA target sequence
cggtaaaaaatatagcagcaatagg

SEQ ID NO: 248802 - DNA, 25 bp, Artificial sequence
  SiRNA target sequence
ggtaaaaaatatagcagcaataggg

SEQ ID NO: 248803 - DNA, 25 bp, Artificial sequence
  SiRNA target sequence
gtaaaaaatatagcagcaatagggg

SEQ ID NO: 248804 - DNA, 25 bp, Artificial sequence
  SiRNA target sequence
taaaaaatatagcagcaatagggga

SEQ ID NO: 248805 - DNA, 25 bp, Artificial sequence
  SiRNA target sequence
aaaaaatatagcagcaataggggag

SEQ ID NO: 248806 - DNA, 25 bp, Artificial sequence
  SiRNA target sequence
aaaaatatagcagcaataggggagg

SEQ ID NO: 248807 - DNA, 25 bp, Artificial sequence
  SiRNA target sequence
aaaatatagcagcaataggggaggc

SEQ ID NO: 248808 - DNA, 25 bp, Artificial sequence
  SiRNA target sequence
aaatatagcagcaataggggaggca

SEQ ID NO: 248809 - DNA, 25 bp, Artificial sequence
  SiRNA target sequence
aatatagcagcaataggggaggcaa

SEQ ID NO: 248810 - DNA, 25 bp, Artificial sequence
  SiRNA target sequence
atatagcagcaataggggaggcaat

SEQ ID NO: 248811 - DNA, 25 bp, Artificial sequence
  SiRNA target sequence
tatagcagcaataggggaggcaata

SEQ ID NO: 248812 - DNA, 25 bp, Artificial sequence
  SiRNA target sequence
atagcagcaataggggaggcaatag

SEQ ID NO: 248813 - DNA, 25 bp, Artificial sequence
  SiRNA target sequence
tagcagcaataggggaggcaataga

SEQ ID NO: 248814 - DNA, 25 bp, Artificial sequence
  SiRNA target sequence
agcagcaataggggaggcaatagat

SEQ ID NO: 248815 - DNA, 25 bp, Artificial sequence
  SiRNA target sequence
gcagcaataggggaggcaatagata

SEQ ID NO: 248816 - DNA, 25 bp, Artificial sequence
  SiRNA target sequence
cagcaataggggaggcaatagatag

SEQ ID NO: 248817 - DNA, 25 bp, Artificial sequence
  SiRNA target sequence
agcaataggggaggcaatagataga

SEQ ID NO: 248818 - DNA, 25 bp, Artificial sequence
  SiRNA target sequence
gcaataggggaggcaatagatagat

SEQ ID NO: 248819 - DNA, 25 bp, Artificial sequence
  SiRNA target sequence
caataggggaggcaatagatagata

SEQ ID NO: 248820 - DNA, 25 bp, Artificial sequence
  SiRNA target sequence
aataggggaggcaatagatagataa

SEQ ID NO: 248821 - DNA, 25 bp, Artificial sequence
  SiRNA target sequence
ataggggaggcaatagatagataaa

SEQ ID NO: 248822 - DNA, 25 bp, Artificial sequence
  SiRNA target sequence
taggggaggcaatagatagataaaa

SEQ ID NO: 248823 - DNA, 25 bp, Artificial sequence
  SiRNA target sequence
aggggaggcaatagatagataaaag

SEQ ID NO: 248824 - DNA, 25 bp, Artificial sequence
  SiRNA target sequence
ggggaggcaatagatagataaaaga

SEQ ID NO: 248825 - DNA, 25 bp, Artificial sequence
  SiRNA target sequence
gggaggcaatagatagataaaagat

SEQ ID NO: 248826 - DNA, 25 bp, Artificial sequence
  SiRNA target sequence
ggaggcaatagatagataaaagatc

SEQ ID NO: 248827 - DNA, 25 bp, Artificial sequence
  SiRNA target sequence
gaggcaatagatagataaaagatcc

SEQ ID NO: 248828 - DNA, 25 bp, Artificial sequence
  SiRNA target sequence
aggcaatagatagataaaagatcct

SEQ ID NO: 248829 - DNA, 25 bp, Artificial sequence
  SiRNA target sequence
ggcaatagatagataaaagatcctt

SEQ ID NO: 248830 - DNA, 25 bp, Artificial sequence
  SiRNA target sequence
gcaatagatagataaaagatccttg

SEQ ID NO: 248831 - DNA, 25 bp, Artificial sequence
  SiRNA target sequence
caatagatagataaaagatccttga

SEQ ID NO: 248832 - DNA, 25 bp, Artificial sequence
  SiRNA target sequence
aatagatagataaaagatccttgat

SEQ ID NO: 248833 - DNA, 25 bp, Artificial sequence
  SiRNA target sequence
atagatagataaaagatccttgatg

SEQ ID NO: 248834 - DNA, 25 bp, Artificial sequence
  SiRNA target sequence
tagatagataaaagatccttgatgc

SEQ ID NO: 248835 - DNA, 25 bp, Artificial sequence
  SiRNA target sequence
agatagataaaagatccttgatgca

SEQ ID NO: 248836 - DNA, 25 bp, Artificial sequence
  SiRNA target sequence
gatagataaaagatccttgatgcaa

SEQ ID NO: 248837 - DNA, 25 bp, Artificial sequence
  SiRNA target sequence
atagataaaagatccttgatgcaat

SEQ ID NO: 248838 - DNA, 25 bp, Artificial sequence
  SiRNA target sequence
tagataaaagatccttgatgcaatg

SEQ ID NO: 248839 - DNA, 25 bp, Artificial sequence
  SiRNA target sequence
agataaaagatccttgatgcaatgc

SEQ ID NO: 248840 - DNA, 25 bp, Artificial sequence
  SiRNA target sequence
gataaaagatccttgatgcaatgcg

SEQ ID NO: 248841 - DNA, 25 bp, Artificial sequence
  SiRNA target sequence
ataaaagatccttgatgcaatgcga

SEQ ID NO: 248842 - DNA, 25 bp, Artificial sequence
  SiRNA target sequence
taaaagatccttgatgcaatgcgat

SEQ ID NO: 248843 - DNA, 25 bp, Artificial sequence
  SiRNA target sequence
aaaagatccttgatgcaatgcgatt

SEQ ID NO: 248844 - DNA, 25 bp, Artificial sequence
  SiRNA target sequence
aaagatccttgatgcaatgcgattt

SEQ ID NO: 248845 - DNA, 25 bp, Artificial sequence
  SiRNA target sequence
aagatccttgatgcaatgcgatttc

SEQ ID NO: 248846 - DNA, 25 bp, Artificial sequence
  SiRNA target sequence
agatccttgatgcaatgcgatttcc

SEQ ID NO: 248847 - DNA, 25 bp, Artificial sequence
  SiRNA target sequence
gatccttgatgcaatgcgatttcca

SEQ ID NO: 248848 - DNA, 25 bp, Artificial sequence
  SiRNA target sequence
atccttgatgcaatgcgatttccac

SEQ ID NO: 248849 - DNA, 25 bp, Artificial sequence
  SiRNA target sequence
tccttgatgcaatgcgatttccacg

SEQ ID NO: 248850 - DNA, 25 bp, Artificial sequence
  SiRNA target sequence
ccttgatgcaatgcgatttccacgg

SEQ ID NO: 248851 - DNA, 25 bp, Artificial sequence
  SiRNA target sequence
cttgatgcaatgcgatttccacgga

SEQ ID NO: 248852 - DNA, 25 bp, Artificial sequence
  SiRNA target sequence
ttgatgcaatgcgatttccacggat

SEQ ID NO: 248853 - DNA, 25 bp, Artificial sequence
  SiRNA target sequence
tgatgcaatgcgatttccacggatt

SEQ ID NO: 248854 - DNA, 25 bp, Artificial sequence
  SiRNA target sequence
gatgcaatgcgatttccacggatta

SEQ ID NO: 248855 - DNA, 25 bp, Artificial sequence
  SiRNA target sequence
atgcaatgcgatttccacggattac

SEQ ID NO: 248856 - DNA, 25 bp, Artificial sequence
  SiRNA target sequence
tgcaatgcgatttccacggattaca

SEQ ID NO: 248857 - DNA, 25 bp, Artificial sequence
  SiRNA target sequence
gcaatgcgatttccacggattacaa

SEQ ID NO: 248858 - DNA, 25 bp, Artificial sequence
  SiRNA target sequence
caatgcgatttccacggattacaaa

SEQ ID NO: 248859 - DNA, 25 bp, Artificial sequence
  SiRNA target sequence
aatgcgatttccacggattacaaag

SEQ ID NO: 248860 - DNA, 25 bp, Artificial sequence
  SiRNA target sequence
atgcgatttccacggattacaaagt

SEQ ID NO: 248861 - DNA, 25 bp, Artificial sequence
  SiRNA target sequence
tgcgatttccacggattacaaagtt

SEQ ID NO: 248862 - DNA, 25 bp, Artificial sequence
  SiRNA target sequence
gcgatttccacggattacaaagtta

SEQ ID NO: 248863 - DNA, 25 bp, Artificial sequence
  SiRNA target sequence
cgatttccacggattacaaagttat

SEQ ID NO: 248864 - DNA, 25 bp, Artificial sequence
  SiRNA target sequence
gatttccacggattacaaagttata

SEQ ID NO: 248865 - DNA, 25 bp, Artificial sequence
  SiRNA target sequence
atttccacggattacaaagttataa

SEQ ID NO: 248866 - DNA, 25 bp, Artificial sequence
  SiRNA target sequence
tttccacggattacaaagttataaa

SEQ ID NO: 248867 - DNA, 25 bp, Artificial sequence
  SiRNA target sequence
ttccacggattacaaagttataaaa

SEQ ID NO: 248868 - DNA, 25 bp, Artificial sequence
  SiRNA target sequence
tccacggattacaaagttataaaat

SEQ ID NO: 248869 - DNA, 25 bp, Artificial sequence
  SiRNA target sequence
ccacggattacaaagttataaaata

SEQ ID NO: 248870 - DNA, 25 bp, Artificial sequence
  SiRNA target sequence
cacggattacaaagttataaaataa

SEQ ID NO: 248871 - DNA, 25 bp, Artificial sequence
  SiRNA target sequence
acggattacaaagttataaaataat

SEQ ID NO: 248872 - DNA, 25 bp, Artificial sequence
  SiRNA target sequence
cggattacaaagttataaaataatg

SEQ ID NO: 248873 - DNA, 25 bp, Artificial sequence
  SiRNA target sequence
ggattacaaagttataaaataatga

SEQ ID NO: 248874 - DNA, 25 bp, Artificial sequence
  SiRNA target sequence
gattacaaagttataaaataatgat

SEQ ID NO: 248875 - DNA, 25 bp, Artificial sequence
  SiRNA target sequence
attacaaagttataaaataatgata

SEQ ID NO: 248876 - DNA, 25 bp, Artificial sequence
  SiRNA target sequence
ttacaaagttataaaataatgatac

SEQ ID NO: 248877 - DNA, 25 bp, Artificial sequence
  SiRNA target sequence
tacaaagttataaaataatgataca

SEQ ID NO: 248878 - DNA, 25 bp, Artificial sequence
  SiRNA target sequence
acaaagttataaaataatgatacag

SEQ ID NO: 248879 - DNA, 25 bp, Artificial sequence
  SiRNA target sequence
caaagttataaaataatgatacagc

SEQ ID NO: 248880 - DNA, 25 bp, Artificial sequence
  SiRNA target sequence
aaagttataaaataatgatacagca

SEQ ID NO: 248881 - DNA, 25 bp, Artificial sequence
  SiRNA target sequence
aagttataaaataatgatacagcac

SEQ ID NO: 248882 - DNA, 25 bp, Artificial sequence
  SiRNA target sequence
agttataaaataatgatacagcact

SEQ ID NO: 248883 - DNA, 25 bp, Artificial sequence
  SiRNA target sequence
gttataaaataatgatacagcacta

SEQ ID NO: 248884 - DNA, 25 bp, Artificial sequence
  SiRNA target sequence
ttataaaataatgatacagcactaa

SEQ ID NO: 248885 - DNA, 25 bp, Artificial sequence
  SiRNA target sequence
tataaaataatgatacagcactaat

SEQ ID NO: 248886 - DNA, 25 bp, Artificial sequence
  SiRNA target sequence
ataaaataatgatacagcactaatc

SEQ ID NO: 248887 - DNA, 25 bp, Artificial sequence
  SiRNA target sequence
taaaataatgatacagcactaatcg

SEQ ID NO: 248888 - DNA, 25 bp, Artificial sequence
  SiRNA target sequence
aaaataatgatacagcactaatcgt

SEQ ID NO: 248889 - DNA, 25 bp, Artificial sequence
  SiRNA target sequence
aaataatgatacagcactaatcgtt

SEQ ID NO: 248890 - DNA, 25 bp, Artificial sequence
  SiRNA target sequence
aataatgatacagcactaatcgtta

SEQ ID NO: 248891 - DNA, 25 bp, Artificial sequence
  SiRNA target sequence
ataatgatacagcactaatcgttaa

SEQ ID NO: 248892 - DNA, 25 bp, Artificial sequence
  SiRNA target sequence
taatgatacagcactaatcgttaag

SEQ ID NO: 248893 - DNA, 25 bp, Artificial sequence
  SiRNA target sequence
aatgatacagcactaatcgttaagg

SEQ ID NO: 248894 - DNA, 25 bp, Artificial sequence
  SiRNA target sequence
atgatacagcactaatcgttaagga

SEQ ID NO: 248895 - DNA, 25 bp, Artificial sequence
  SiRNA target sequence
tgatacagcactaatcgttaaggaa

SEQ ID NO: 248896 - DNA, 25 bp, Artificial sequence
  SiRNA target sequence
gatacagcactaatcgttaaggaag

SEQ ID NO: 248897 - DNA, 25 bp, Artificial sequence
  SiRNA target sequence
atacagcactaatcgttaaggaagt

SEQ ID NO: 248898 - DNA, 25 bp, Artificial sequence
  SiRNA target sequence
tacagcactaatcgttaaggaagtt

SEQ ID NO: 248899 - DNA, 25 bp, Artificial sequence
  SiRNA target sequence
acagcactaatcgttaaggaagttg

SEQ ID NO: 248900 - DNA, 25 bp, Artificial sequence
  SiRNA target sequence
cagcactaatcgttaaggaagttgt

SEQ ID NO: 248901 - DNA, 25 bp, Artificial sequence
  SiRNA target sequence
agcactaatcgttaaggaagttgtt

SEQ ID NO: 248902 - DNA, 25 bp, Artificial sequence
  SiRNA target sequence
gcactaatcgttaaggaagttgtta

SEQ ID NO: 248903 - DNA, 25 bp, Artificial sequence
  SiRNA target sequence
cactaatcgttaaggaagttgttac

SEQ ID NO: 248904 - DNA, 25 bp, Artificial sequence
  SiRNA target sequence
actaatcgttaaggaagttgttact

SEQ ID NO: 248905 - DNA, 25 bp, Artificial sequence
  SiRNA target sequence
ctaatcgttaaggaagttgttacta

SEQ ID NO: 248906 - DNA, 25 bp, Artificial sequence
  SiRNA target sequence
taatcgttaaggaagttgttactaa

SEQ ID NO: 248907 - DNA, 25 bp, Artificial sequence
  SiRNA target sequence
aatcgttaaggaagttgttactaaa

SEQ ID NO: 248908 - DNA, 25 bp, Artificial sequence
  SiRNA target sequence
atcgttaaggaagttgttactaaat

SEQ ID NO: 248909 - DNA, 25 bp, Artificial sequence
  SiRNA target sequence
tcgttaaggaagttgttactaaata

SEQ ID NO: 248910 - DNA, 25 bp, Artificial sequence
  SiRNA target sequence
cgttaaggaagttgttactaaatat

SEQ ID NO: 248911 - DNA, 25 bp, Artificial sequence
  SiRNA target sequence
gttaaggaagttgttactaaatatt

SEQ ID NO: 248912 - DNA, 25 bp, Artificial sequence
  SiRNA target sequence
ttaaggaagttgttactaaatattt

SEQ ID NO: 248913 - DNA, 25 bp, Artificial sequence
  SiRNA target sequence
taaggaagttgttactaaatatttt

SEQ ID NO: 248914 - DNA, 25 bp, Artificial sequence
  SiRNA target sequence
aaggaagttgttactaaatattttt

SEQ ID NO: 248915 - DNA, 25 bp, Artificial sequence
  SiRNA target sequence
aggaagttgttactaaatatttttg

SEQ ID NO: 248916 - DNA, 25 bp, Artificial sequence
  SiRNA target sequence
ggaagttgttactaaatatttttga

SEQ ID NO: 248917 - DNA, 25 bp, Artificial sequence
  SiRNA target sequence
gaagttgttactaaatatttttgag

SEQ ID NO: 248918 - DNA, 25 bp, Artificial sequence
  SiRNA target sequence
aagttgttactaaatatttttgaga

SEQ ID NO: 248919 - DNA, 25 bp, Artificial sequence
  SiRNA target sequence
agttgttactaaatatttttgagaa

SEQ ID NO: 248920 - DNA, 25 bp, Artificial sequence
  SiRNA target sequence
gttgttactaaatatttttgagaat

SEQ ID NO: 248921 - DNA, 25 bp, Artificial sequence
  SiRNA target sequence
ttgttactaaatatttttgagaata

SEQ ID NO: 248922 - DNA, 25 bp, Artificial sequence
  SiRNA target sequence
tgttactaaatatttttgagaataa

SEQ ID NO: 248923 - DNA, 25 bp, Artificial sequence
  SiRNA target sequence
gttactaaatatttttgagaataat

SEQ ID NO: 248924 - DNA, 25 bp, Artificial sequence
  SiRNA target sequence
ttactaaatatttttgagaataatc

SEQ ID NO: 248925 - DNA, 25 bp, Artificial sequence
  SiRNA target sequence
tactaaatatttttgagaataatct

SEQ ID NO: 248926 - DNA, 25 bp, Artificial sequence
  SiRNA target sequence
actaaatatttttgagaataatctt

SEQ ID NO: 248927 - DNA, 25 bp, Artificial sequence
  SiRNA target sequence
ctaaatatttttgagaataatcttt

SEQ ID NO: 248928 - DNA, 25 bp, Artificial sequence
  SiRNA target sequence
taaatatttttgagaataatctttc

SEQ ID NO: 248929 - DNA, 25 bp, Artificial sequence
  SiRNA target sequence
aaatatttttgagaataatctttcg

SEQ ID NO: 248930 - DNA, 25 bp, Artificial sequence
  SiRNA target sequence
aatatttttgagaataatctttcgg

SEQ ID NO: 248931 - DNA, 25 bp, Artificial sequence
  SiRNA target sequence
atatttttgagaataatctttcgga

SEQ ID NO: 248932 - DNA, 25 bp, Artificial sequence
  SiRNA target sequence
tatttttgagaataatctttcggag

SEQ ID NO: 248933 - DNA, 25 bp, Artificial sequence
  SiRNA target sequence
atttttgagaataatctttcggagg

SEQ ID NO: 248934 - DNA, 25 bp, Artificial sequence
  SiRNA target sequence
tttttgagaataatctttcggaggc

SEQ ID NO: 248935 - DNA, 25 bp, Artificial sequence
  SiRNA target sequence
ttttgagaataatctttcggaggca

SEQ ID NO: 248936 - DNA, 25 bp, Artificial sequence
  SiRNA target sequence
tttgagaataatctttcggaggcat

SEQ ID NO: 248937 - DNA, 25 bp, Artificial sequence
  SiRNA target sequence
ttgagaataatctttcggaggcata

SEQ ID NO: 248938 - DNA, 25 bp, Artificial sequence
  SiRNA target sequence
tgagaataatctttcggaggcatat

SEQ ID NO: 248939 - DNA, 25 bp, Artificial sequence
  SiRNA target sequence
gagaataatctttcggaggcatatt

SEQ ID NO: 248940 - DNA, 25 bp, Artificial sequence
  SiRNA target sequence
agaataatctttcggaggcatatta

SEQ ID NO: 248941 - DNA, 25 bp, Artificial sequence
  SiRNA target sequence
gaataatctttcggaggcatattat

SEQ ID NO: 248942 - DNA, 25 bp, Artificial sequence
  SiRNA target sequence
aataatctttcggaggcatattatt

SEQ ID NO: 248943 - DNA, 25 bp, Artificial sequence
  SiRNA target sequence
ataatctttcggaggcatattatta

SEQ ID NO: 248944 - DNA, 25 bp, Artificial sequence
  SiRNA target sequence
taatctttcggaggcatattattaa

SEQ ID NO: 248945 - DNA, 25 bp, Artificial sequence
  SiRNA target sequence
aatctttcggaggcatattattaat

SEQ ID NO: 248946 - DNA, 25 bp, Artificial sequence
  SiRNA target sequence
atctttcggaggcatattattaatt

SEQ ID NO: 248947 - DNA, 25 bp, Artificial sequence
  SiRNA target sequence
tctttcggaggcatattattaattc

SEQ ID NO: 248948 - DNA, 25 bp, Artificial sequence
  SiRNA target sequence
ctttcggaggcatattattaattct

SEQ ID NO: 248949 - DNA, 25 bp, Artificial sequence
  SiRNA target sequence
tttcggaggcatattattaattctg

SEQ ID NO: 248950 - DNA, 25 bp, Artificial sequence
  SiRNA target sequence
ttcggaggcatattattaattctgc

SEQ ID NO: 248951 - DNA, 25 bp, Artificial sequence
  SiRNA target sequence
tcggaggcatattattaattctgct

SEQ ID NO: 248952 - DNA, 25 bp, Artificial sequence
  SiRNA target sequence
cggaggcatattattaattctgctt

SEQ ID NO: 248953 - DNA, 25 bp, Artificial sequence
  SiRNA target sequence
ggaggcatattattaattctgcttc

SEQ ID NO: 248954 - DNA, 25 bp, Artificial sequence
  SiRNA target sequence
gaggcatattattaattctgcttcc

SEQ ID NO: 248955 - DNA, 25 bp, Artificial sequence
  SiRNA target sequence
aggcatattattaattctgcttccc

SEQ ID NO: 248956 - DNA, 25 bp, Artificial sequence
  SiRNA target sequence
ggcatattattaattctgcttcccg

SEQ ID NO: 248957 - DNA, 25 bp, Artificial sequence
  SiRNA target sequence
gcatattattaattctgcttcccgt

SEQ ID NO: 248958 - DNA, 25 bp, Artificial sequence
  SiRNA target sequence
catattattaattctgcttcccgta

SEQ ID NO: 248959 - DNA, 25 bp, Artificial sequence
  SiRNA target sequence
atattattaattctgcttcccgtag

SEQ ID NO: 248960 - DNA, 25 bp, Artificial sequence
  SiRNA target sequence
tattattaattctgcttcccgtaga

SEQ ID NO: 248961 - DNA, 25 bp, Artificial sequence
  SiRNA target sequence
attattaattctgcttcccgtagat

SEQ ID NO: 248962 - DNA, 25 bp, Artificial sequence
  SiRNA target sequence
ttattaattctgcttcccgtagata

SEQ ID NO: 248963 - DNA, 25 bp, Artificial sequence
  SiRNA target sequence
tattaattctgcttcccgtagataa

SEQ ID NO: 248964 - DNA, 25 bp, Artificial sequence
  SiRNA target sequence
attaattctgcttcccgtagataaa

SEQ ID NO: 248965 - DNA, 25 bp, Artificial sequence
  SiRNA target sequence
ttaattctgcttcccgtagataaag

SEQ ID NO: 248966 - DNA, 25 bp, Artificial sequence
  SiRNA target sequence
taattctgcttcccgtagataaaga

SEQ ID NO: 248967 - DNA, 25 bp, Artificial sequence
  SiRNA target sequence
aattctgcttcccgtagataaagaa

SEQ ID NO: 248968 - DNA, 25 bp, Artificial sequence
  SiRNA target sequence
attctgcttcccgtagataaagaat

SEQ ID NO: 248969 - DNA, 25 bp, Artificial sequence
  SiRNA target sequence
ttctgcttcccgtagataaagaatt

SEQ ID NO: 248970 - DNA, 25 bp, Artificial sequence
  SiRNA target sequence
tctgcttcccgtagataaagaattt

SEQ ID NO: 248971 - DNA, 25 bp, Artificial sequence
  SiRNA target sequence
ctgcttcccgtagataaagaatttt

SEQ ID NO: 248972 - DNA, 25 bp, Artificial sequence
  SiRNA target sequence
tgcttcccgtagataaagaattttt

SEQ ID NO: 248973 - DNA, 25 bp, Artificial sequence
  SiRNA target sequence
gcttcccgtagataaagaatttttt

SEQ ID NO: 248974 - DNA, 25 bp, Artificial sequence
  SiRNA target sequence
cttcccgtagataaagaatttttta

SEQ ID NO: 248975 - DNA, 25 bp, Artificial sequence
  SiRNA target sequence
ttcccgtagataaagaattttttaa

SEQ ID NO: 248976 - DNA, 25 bp, Artificial sequence
  SiRNA target sequence
tcccgtagataaagaattttttaag

SEQ ID NO: 248977 - DNA, 25 bp, Artificial sequence
  SiRNA target sequence
cccgtagataaagaattttttaagg

SEQ ID NO: 248978 - DNA, 25 bp, Artificial sequence
  SiRNA target sequence
ccgtagataaagaattttttaagga

SEQ ID NO: 248979 - DNA, 25 bp, Artificial sequence
  SiRNA target sequence
cgtagataaagaattttttaaggac

SEQ ID NO: 248980 - DNA, 25 bp, Artificial sequence
  SiRNA target sequence
gtagataaagaattttttaaggaca

SEQ ID NO: 248981 - DNA, 25 bp, Artificial sequence
  SiRNA target sequence
tagataaagaattttttaaggacat

SEQ ID NO: 248982 - DNA, 25 bp, Artificial sequence
  SiRNA target sequence
agataaagaattttttaaggacata

SEQ ID NO: 248983 - DNA, 25 bp, Artificial sequence
  SiRNA target sequence
gataaagaattttttaaggacatat

SEQ ID NO: 248984 - DNA, 25 bp, Artificial sequence
  SiRNA target sequence
ataaagaattttttaaggacatatc

SEQ ID NO: 248985 - DNA, 25 bp, Artificial sequence
  SiRNA target sequence
taaagaattttttaaggacatatca

SEQ ID NO: 248986 - DNA, 25 bp, Artificial sequence
  SiRNA target sequence
aaagaattttttaaggacatatcaa

SEQ ID NO: 248987 - DNA, 25 bp, Artificial sequence
  SiRNA target sequence
aagaattttttaaggacatatcaat

SEQ ID NO: 248988 - DNA, 25 bp, Artificial sequence
  SiRNA target sequence
agaattttttaaggacatatcaata

SEQ ID NO: 248989 - DNA, 25 bp, Artificial sequence
  SiRNA target sequence
gaattttttaaggacatatcaataa

SEQ ID NO: 248990 - DNA, 25 bp, Artificial sequence
  SiRNA target sequence
aattttttaaggacatatcaataaa

SEQ ID NO: 248991 - DNA, 25 bp, Artificial sequence
  SiRNA target sequence
attttttaaggacatatcaataaat

SEQ ID NO: 248992 - DNA, 25 bp, Artificial sequence
  SiRNA target sequence
ttttttaaggacatatcaataaatc

SEQ ID NO: 248993 - DNA, 25 bp, Artificial sequence
  SiRNA target sequence
tttttaaggacatatcaataaatcc

SEQ ID NO: 248994 - DNA, 25 bp, Artificial sequence
  SiRNA target sequence
ttttaaggacatatcaataaatcct

SEQ ID NO: 248995 - DNA, 25 bp, Artificial sequence
  SiRNA target sequence
tttaaggacatatcaataaatcctg

SEQ ID NO: 248996 - DNA, 25 bp, Artificial sequence
  SiRNA target sequence
ttaaggacatatcaataaatcctgc

SEQ ID NO: 248997 - DNA, 25 bp, Artificial sequence
  SiRNA target sequence
taaggacatatcaataaatcctgca

SEQ ID NO: 248998 - DNA, 25 bp, Artificial sequence
  SiRNA target sequence
aaggacatatcaataaatcctgcat

SEQ ID NO: 248999 - DNA, 25 bp, Artificial sequence
  SiRNA target sequence
aggacatatcaataaatcctgcatt

SEQ ID NO: 249000 - DNA, 25 bp, Artificial sequence
  SiRNA target sequence
ggacatatcaataaatcctgcatta

SEQ ID NO: 249001 - DNA, 25 bp, Artificial sequence
  SiRNA target sequence
gacatatcaataaatcctgcattaa

SEQ ID NO: 249002 - DNA, 25 bp, Artificial sequence
  SiRNA target sequence
acatatcaataaatcctgcattaat

SEQ ID NO: 249003 - DNA, 25 bp, Artificial sequence
  SiRNA target sequence
catatcaataaatcctgcattaata

SEQ ID NO: 249004 - DNA, 25 bp, Artificial sequence
  SiRNA target sequence
atatcaataaatcctgcattaatag

SEQ ID NO: 249005 - DNA, 25 bp, Artificial sequence
  SiRNA target sequence
tatcaataaatcctgcattaatagc

SEQ ID NO: 249006 - DNA, 25 bp, Artificial sequence
  SiRNA target sequence
atcaataaatcctgcattaatagca

SEQ ID NO: 249007 - DNA, 25 bp, Artificial sequence
  SiRNA target sequence
tcaataaatcctgcattaatagcat

SEQ ID NO: 249008 - DNA, 25 bp, Artificial sequence
  SiRNA target sequence
caataaatcctgcattaatagcata

SEQ ID NO: 249009 - DNA, 25 bp, Artificial sequence
  SiRNA target sequence
aataaatcctgcattaatagcatag

SEQ ID NO: 249010 - DNA, 25 bp, Artificial sequence
  SiRNA target sequence
ataaatcctgcattaatagcataga

SEQ ID NO: 249011 - DNA, 25 bp, Artificial sequence
  SiRNA target sequence
taaatcctgcattaatagcatagat

SEQ ID NO: 249012 - DNA, 25 bp, Artificial sequence
  SiRNA target sequence
aaatcctgcattaatagcatagatt

SEQ ID NO: 249013 - DNA, 25 bp, Artificial sequence
  SiRNA target sequence
aatcctgcattaatagcatagatta

SEQ ID NO: 249014 - DNA, 25 bp, Artificial sequence
  SiRNA target sequence
atcctgcattaatagcatagattaa

SEQ ID NO: 249015 - DNA, 25 bp, Artificial sequence
  SiRNA target sequence
tcctgcattaatagcatagattaat

SEQ ID NO: 249016 - DNA, 25 bp, Artificial sequence
  SiRNA target sequence
cctgcattaatagcatagattaatg

SEQ ID NO: 249017 - DNA, 25 bp, Artificial sequence
  SiRNA target sequence
ctgcattaatagcatagattaatgc

SEQ ID NO: 249018 - DNA, 25 bp, Artificial sequence
  SiRNA target sequence
tgcattaatagcatagattaatgcc

SEQ ID NO: 249019 - DNA, 25 bp, Artificial sequence
  SiRNA target sequence
gcattaatagcatagattaatgccg

SEQ ID NO: 249020 - DNA, 25 bp, Artificial sequence
  SiRNA target sequence
cattaatagcatagattaatgccgc

SEQ ID NO: 249021 - DNA, 25 bp, Artificial sequence
  SiRNA target sequence
attaatagcatagattaatgccgct

SEQ ID NO: 249022 - DNA, 25 bp, Artificial sequence
  SiRNA target sequence
ttaatagcatagattaatgccgctg

SEQ ID NO: 249023 - DNA, 25 bp, Artificial sequence
  SiRNA target sequence
taatagcatagattaatgccgctgc

SEQ ID NO: 249024 - DNA, 25 bp, Artificial sequence
  SiRNA target sequence
aatagcatagattaatgccgctgca

SEQ ID NO: 249025 - DNA, 25 bp, Artificial sequence
  SiRNA target sequence
atagcatagattaatgccgctgcac

SEQ ID NO: 249026 - DNA, 25 bp, Artificial sequence
  SiRNA target sequence
tagcatagattaatgccgctgcaca

SEQ ID NO: 249027 - DNA, 25 bp, Artificial sequence
  SiRNA target sequence
agcatagattaatgccgctgcacac

SEQ ID NO: 249028 - DNA, 25 bp, Artificial sequence
  SiRNA target sequence
gcatagattaatgccgctgcacaca

SEQ ID NO: 249029 - DNA, 25 bp, Artificial sequence
  SiRNA target sequence
catagattaatgccgctgcacacat

SEQ ID NO: 249030 - DNA, 25 bp, Artificial sequence
  SiRNA target sequence
atagattaatgccgctgcacacata

SEQ ID NO: 249031 - DNA, 25 bp, Artificial sequence
  SiRNA target sequence
tagattaatgccgctgcacacatat

SEQ ID NO: 249032 - DNA, 25 bp, Artificial sequence
  SiRNA target sequence
agattaatgccgctgcacacatatt

SEQ ID NO: 249033 - DNA, 25 bp, Artificial sequence
  SiRNA target sequence
gattaatgccgctgcacacatattt

SEQ ID NO: 249034 - DNA, 25 bp, Artificial sequence
  SiRNA target sequence
attaatgccgctgcacacatatttc

SEQ ID NO: 249035 - DNA, 25 bp, Artificial sequence
  SiRNA target sequence
ttaatgccgctgcacacatatttct

SEQ ID NO: 249036 - DNA, 25 bp, Artificial sequence
  SiRNA target sequence
taatgccgctgcacacatatttctt

SEQ ID NO: 249037 - DNA, 25 bp, Artificial sequence
  SiRNA target sequence
aatgccgctgcacacatatttctta

SEQ ID NO: 249038 - DNA, 25 bp, Artificial sequence
  SiRNA target sequence
atgccgctgcacacatatttcttaa

SEQ ID NO: 249039 - DNA, 25 bp, Artificial sequence
  SiRNA target sequence
tgccgctgcacacatatttcttaaa

SEQ ID NO: 249040 - DNA, 25 bp, Artificial sequence
  SiRNA target sequence
gccgctgcacacatatttcttaaaa

SEQ ID NO: 249041 - DNA, 25 bp, Artificial sequence
  SiRNA target sequence
ccgctgcacacatatttcttaaaaa

SEQ ID NO: 249042 - DNA, 25 bp, Artificial sequence
  SiRNA target sequence
cgctgcacacatatttcttaaaaat

SEQ ID NO: 249043 - DNA, 25 bp, Artificial sequence
  SiRNA target sequence
gctgcacacatatttcttaaaaatt

SEQ ID NO: 249044 - DNA, 25 bp, Artificial sequence
  SiRNA target sequence
ctgcacacatatttcttaaaaattt

SEQ ID NO: 249045 - DNA, 25 bp, Artificial sequence
  SiRNA target sequence
tgcacacatatttcttaaaaatttg

SEQ ID NO: 249046 - DNA, 25 bp, Artificial sequence
  SiRNA target sequence
gcacacatatttcttaaaaatttgg

SEQ ID NO: 249047 - DNA, 25 bp, Artificial sequence
  SiRNA target sequence
cacacatatttcttaaaaatttgga

SEQ ID NO: 249048 - DNA, 25 bp, Artificial sequence
  SiRNA target sequence
acacatatttcttaaaaatttggat

SEQ ID NO: 249049 - DNA, 25 bp, Artificial sequence
  SiRNA target sequence
cacatatttcttaaaaatttggatt

SEQ ID NO: 249050 - DNA, 25 bp, Artificial sequence
  SiRNA target sequence
acatatttcttaaaaatttggattg

SEQ ID NO: 249051 - DNA, 25 bp, Artificial sequence
  SiRNA target sequence
catatttcttaaaaatttggattgt

SEQ ID NO: 249052 - DNA, 25 bp, Artificial sequence
  SiRNA target sequence
atatttcttaaaaatttggattgta

SEQ ID NO: 249053 - DNA, 25 bp, Artificial sequence
  SiRNA target sequence
tatttcttaaaaatttggattgtaa

SEQ ID NO: 249054 - DNA, 25 bp, Artificial sequence
  SiRNA target sequence
atttcttaaaaatttggattgtaaa

SEQ ID NO: 249055 - DNA, 25 bp, Artificial sequence
  SiRNA target sequence
tttcttaaaaatttggattgtaaaa

SEQ ID NO: 249056 - DNA, 25 bp, Artificial sequence
  SiRNA target sequence
ttcttaaaaatttggattgtaaaag

SEQ ID NO: 249057 - DNA, 25 bp, Artificial sequence
  SiRNA target sequence
tcttaaaaatttggattgtaaaaga

SEQ ID NO: 249058 - DNA, 25 bp, Artificial sequence
  SiRNA target sequence
cttaaaaatttggattgtaaaagat

SEQ ID NO: 249059 - DNA, 25 bp, Artificial sequence
  SiRNA target sequence
ttaaaaatttggattgtaaaagatc

SEQ ID NO: 249060 - DNA, 25 bp, Artificial sequence
  SiRNA target sequence
taaaaatttggattgtaaaagatca

SEQ ID NO: 249061 - DNA, 25 bp, Artificial sequence
  SiRNA target sequence
aaaaatttggattgtaaaagatcaa

SEQ ID NO: 249062 - DNA, 25 bp, Artificial sequence
  SiRNA target sequence
aaaatttggattgtaaaagatcaaa

SEQ ID NO: 249063 - DNA, 25 bp, Artificial sequence
  SiRNA target sequence
aaatttggattgtaaaagatcaaac

SEQ ID NO: 249064 - DNA, 25 bp, Artificial sequence
  SiRNA target sequence
aatttggattgtaaaagatcaaacg

SEQ ID NO: 249065 - DNA, 25 bp, Artificial sequence
  SiRNA target sequence
atttggattgtaaaagatcaaacga

SEQ ID NO: 249066 - DNA, 25 bp, Artificial sequence
  SiRNA target sequence
tttggattgtaaaagatcaaacgag

SEQ ID NO: 249067 - DNA, 25 bp, Artificial sequence
  SiRNA target sequence
ttggattgtaaaagatcaaacgagg

SEQ ID NO: 249068 - DNA, 25 bp, Artificial sequence
  SiRNA target sequence
tggattgtaaaagatcaaacgagga

SEQ ID NO: 249069 - DNA, 25 bp, Artificial sequence
  SiRNA target sequence
ggattgtaaaagatcaaacgaggat

SEQ ID NO: 249070 - DNA, 25 bp, Artificial sequence
  SiRNA target sequence
gattgtaaaagatcaaacgaggatg

SEQ ID NO: 249071 - DNA, 25 bp, Artificial sequence
  SiRNA target sequence
attgtaaaagatcaaacgaggatgt

SEQ ID NO: 249072 - DNA, 25 bp, Artificial sequence
  SiRNA target sequence
ttgtaaaagatcaaacgaggatgtc

SEQ ID NO: 249073 - DNA, 25 bp, Artificial sequence
  SiRNA target sequence
tgtaaaagatcaaacgaggatgtcg

SEQ ID NO: 249074 - DNA, 25 bp, Artificial sequence
  SiRNA target sequence
gtaaaagatcaaacgaggatgtcgt

SEQ ID NO: 249075 - DNA, 25 bp, Artificial sequence
  SiRNA target sequence
taaaagatcaaacgaggatgtcgtt

SEQ ID NO: 249076 - DNA, 25 bp, Artificial sequence
  SiRNA target sequence
aaaagatcaaacgaggatgtcgttt

SEQ ID NO: 249077 - DNA, 25 bp, Artificial sequence
  SiRNA target sequence
aaagatcaaacgaggatgtcgtttt

SEQ ID NO: 249078 - DNA, 25 bp, Artificial sequence
  SiRNA target sequence
aagatcaaacgaggatgtcgttttg

SEQ ID NO: 249079 - DNA, 25 bp, Artificial sequence
  SiRNA target sequence
agatcaaacgaggatgtcgttttgt

SEQ ID NO: 249080 - DNA, 25 bp, Artificial sequence
  SiRNA target sequence
gatcaaacgaggatgtcgttttgtc

SEQ ID NO: 249081 - DNA, 25 bp, Artificial sequence
  SiRNA target sequence
atcaaacgaggatgtcgttttgtct

SEQ ID NO: 249082 - DNA, 25 bp, Artificial sequence
  SiRNA target sequence
tcaaacgaggatgtcgttttgtctt

SEQ ID NO: 249083 - DNA, 25 bp, Artificial sequence
  SiRNA target sequence
caaacgaggatgtcgttttgtcttc

SEQ ID NO: 249084 - DNA, 25 bp, Artificial sequence
  SiRNA target sequence
aaacgaggatgtcgttttgtcttct

SEQ ID NO: 249085 - DNA, 25 bp, Artificial sequence
  SiRNA target sequence
aacgaggatgtcgttttgtcttctt

SEQ ID NO: 249086 - DNA, 25 bp, Artificial sequence
  SiRNA target sequence
acgaggatgtcgttttgtcttcttc

SEQ ID NO: 249087 - DNA, 25 bp, Artificial sequence
  SiRNA target sequence
cgaggatgtcgttttgtcttcttct

SEQ ID NO: 249088 - DNA, 25 bp, Artificial sequence
  SiRNA target sequence
gaggatgtcgttttgtcttcttctt

SEQ ID NO: 249089 - DNA, 25 bp, Artificial sequence
  SiRNA target sequence
aggatgtcgttttgtcttcttcttt

SEQ ID NO: 249090 - DNA, 25 bp, Artificial sequence
  SiRNA target sequence
ggatgtcgttttgtcttcttcttta

SEQ ID NO: 249091 - DNA, 25 bp, Artificial sequence
  SiRNA target sequence
gatgtcgttttgtcttcttctttat

SEQ ID NO: 249092 - DNA, 25 bp, Artificial sequence
  SiRNA target sequence
atgtcgttttgtcttcttctttatt

SEQ ID NO: 249093 - DNA, 25 bp, Artificial sequence
  SiRNA target sequence
tgtcgttttgtcttcttctttattt

SEQ ID NO: 249094 - DNA, 25 bp, Artificial sequence
  SiRNA target sequence
gtcgttttgtcttcttctttattta

SEQ ID NO: 249095 - DNA, 25 bp, Artificial sequence
  SiRNA target sequence
tcgttttgtcttcttctttatttat

SEQ ID NO: 249096 - DNA, 25 bp, Artificial sequence
  SiRNA target sequence
cgttttgtcttcttctttatttata

SEQ ID NO: 249097 - DNA, 25 bp, Artificial sequence
  SiRNA target sequence
gttttgtcttcttctttatttatag

SEQ ID NO: 249098 - DNA, 25 bp, Artificial sequence
  SiRNA target sequence
ttttgtcttcttctttatttatagt

SEQ ID NO: 249099 - DNA, 25 bp, Artificial sequence
  SiRNA target sequence
tttgtcttcttctttatttatagtt

SEQ ID NO: 249100 - DNA, 25 bp, Artificial sequence
  SiRNA target sequence
ttgtcttcttctttatttatagttt

SEQ ID NO: 249101 - DNA, 25 bp, Artificial sequence
  SiRNA target sequence
tgtcttcttctttatttatagtttc

SEQ ID NO: 249102 - DNA, 25 bp, Artificial sequence
  SiRNA target sequence
gtcttcttctttatttatagtttcc

SEQ ID NO: 249103 - DNA, 25 bp, Artificial sequence
  SiRNA target sequence
tcttcttctttatttatagtttcct

SEQ ID NO: 249104 - DNA, 25 bp, Artificial sequence
  SiRNA target sequence
cttcttctttatttatagtttcctt

SEQ ID NO: 249105 - DNA, 25 bp, Artificial sequence
  SiRNA target sequence
ttcttctttatttatagtttccttt

SEQ ID NO: 249106 - DNA, 25 bp, Artificial sequence
  SiRNA target sequence
tcttctttatttatagtttccttta

SEQ ID NO: 249107 - DNA, 25 bp, Artificial sequence
  SiRNA target sequence
cttctttatttatagtttcctttat

SEQ ID NO: 249108 - DNA, 25 bp, Artificial sequence
  SiRNA target sequence
ttctttatttatagtttcctttatt

SEQ ID NO: 249109 - DNA, 25 bp, Artificial sequence
  SiRNA target sequence
tctttatttatagtttcctttattt

SEQ ID NO: 249110 - DNA, 25 bp, Artificial sequence
  SiRNA target sequence
ctttatttatagtttcctttatttc

SEQ ID NO: 249111 - DNA, 25 bp, Artificial sequence
  SiRNA target sequence
tttatttatagtttcctttatttct

SEQ ID NO: 249112 - DNA, 25 bp, Artificial sequence
  SiRNA target sequence
ttatttatagtttcctttatttctt

SEQ ID NO: 249113 - DNA, 25 bp, Artificial sequence
  SiRNA target sequence
tatttatagtttcctttatttcttt

SEQ ID NO: 249114 - DNA, 25 bp, Artificial sequence
  SiRNA target sequence
atttatagtttcctttatttcttta

SEQ ID NO: 249115 - DNA, 25 bp, Artificial sequence
  SiRNA target sequence
tttatagtttcctttatttctttag

SEQ ID NO: 249116 - DNA, 25 bp, Artificial sequence
  SiRNA target sequence
ttatagtttcctttatttctttagt

SEQ ID NO: 249117 - DNA, 25 bp, Artificial sequence
  SiRNA target sequence
tatagtttcctttatttctttagtt

SEQ ID NO: 249118 - DNA, 25 bp, Artificial sequence
  SiRNA target sequence
atagtttcctttatttctttagttt

SEQ ID NO: 249119 - DNA, 25 bp, Artificial sequence
  SiRNA target sequence
tagtttcctttatttctttagtttt

SEQ ID NO: 249120 - DNA, 25 bp, Artificial sequence
  SiRNA target sequence
agtttcctttatttctttagtttta

SEQ ID NO: 249121 - DNA, 25 bp, Artificial sequence
  SiRNA target sequence
gtttcctttatttctttagttttaa

SEQ ID NO: 249122 - DNA, 25 bp, Artificial sequence
  SiRNA target sequence
tttcctttatttctttagttttaag

SEQ ID NO: 249123 - DNA, 25 bp, Artificial sequence
  SiRNA target sequence
ttcctttatttctttagttttaaga

SEQ ID NO: 249124 - DNA, 25 bp, Artificial sequence
  SiRNA target sequence
tcctttatttctttagttttaagag

SEQ ID NO: 249125 - DNA, 25 bp, Artificial sequence
  SiRNA target sequence
cctttatttctttagttttaagagg

SEQ ID NO: 249126 - DNA, 25 bp, Artificial sequence
  SiRNA target sequence
ctttatttctttagttttaagagga

SEQ ID NO: 249127 - DNA, 25 bp, Artificial sequence
  SiRNA target sequence
tttatttctttagttttaagaggaa

SEQ ID NO: 249128 - DNA, 25 bp, Artificial sequence
  SiRNA target sequence
ttatttctttagttttaagaggaat

SEQ ID NO: 249129 - DNA, 25 bp, Artificial sequence
  SiRNA target sequence
tatttctttagttttaagaggaata

SEQ ID NO: 249130 - DNA, 25 bp, Artificial sequence
  SiRNA target sequence
atttctttagttttaagaggaatat

SEQ ID NO: 249131 - DNA, 25 bp, Artificial sequence
  SiRNA target sequence
tttctttagttttaagaggaatata

SEQ ID NO: 249132 - DNA, 25 bp, Artificial sequence
  SiRNA target sequence
ttctttagttttaagaggaatataa

SEQ ID NO: 249133 - DNA, 25 bp, Artificial sequence
  SiRNA target sequence
tctttagttttaagaggaatataac

SEQ ID NO: 249134 - DNA, 25 bp, Artificial sequence
  SiRNA target sequence
ctttagttttaagaggaatataact

SEQ ID NO: 249135 - DNA, 25 bp, Artificial sequence
  SiRNA target sequence
tttagttttaagaggaatataactt

SEQ ID NO: 249136 - DNA, 25 bp, Artificial sequence
  SiRNA target sequence
ttagttttaagaggaatataacttt

SEQ ID NO: 249137 - DNA, 25 bp, Artificial sequence
  SiRNA target sequence
tagttttaagaggaatataactttt

SEQ ID NO: 249138 - DNA, 25 bp, Artificial sequence
  SiRNA target sequence
agttttaagaggaatataacttttt

SEQ ID NO: 249139 - DNA, 25 bp, Artificial sequence
  SiRNA target sequence
gttttaagaggaatataacttttta

SEQ ID NO: 249140 - DNA, 25 bp, Artificial sequence
  SiRNA target sequence
ttttaagaggaatataactttttaa

SEQ ID NO: 249141 - DNA, 25 bp, Artificial sequence
  SiRNA target sequence
tttaagaggaatataactttttaaa

SEQ ID NO: 249142 - DNA, 25 bp, Artificial sequence
  SiRNA target sequence
ttaagaggaatataactttttaaaa

SEQ ID NO: 249143 - DNA, 25 bp, Artificial sequence
  SiRNA target sequence
taagaggaatataactttttaaaaa

SEQ ID NO: 249144 - DNA, 25 bp, Artificial sequence
  SiRNA target sequence
aagaggaatataactttttaaaaag

SEQ ID NO: 249145 - DNA, 25 bp, Artificial sequence
  SiRNA target sequence
agaggaatataactttttaaaaagt

SEQ ID NO: 249146 - DNA, 25 bp, Artificial sequence
  SiRNA target sequence
gaggaatataactttttaaaaagta

SEQ ID NO: 249147 - DNA, 25 bp, Artificial sequence
  SiRNA target sequence
aggaatataactttttaaaaagtaa

SEQ ID NO: 249148 - DNA, 25 bp, Artificial sequence
  SiRNA target sequence
ggaatataactttttaaaaagtaaa

SEQ ID NO: 249149 - DNA, 25 bp, Artificial sequence
  SiRNA target sequence
gaatataactttttaaaaagtaaat

SEQ ID NO: 249150 - DNA, 25 bp, Artificial sequence
  SiRNA target sequence
aatataactttttaaaaagtaaatt

SEQ ID NO: 249151 - DNA, 25 bp, Artificial sequence
  SiRNA target sequence
atataactttttaaaaagtaaatta

SEQ ID NO: 249152 - DNA, 25 bp, Artificial sequence
  SiRNA target sequence
tataactttttaaaaagtaaattaa

SEQ ID NO: 249153 - DNA, 25 bp, Artificial sequence
  SiRNA target sequence
ataactttttaaaaagtaaattaat

SEQ ID NO: 249154 - DNA, 25 bp, Artificial sequence
  SiRNA target sequence
taactttttaaaaagtaaattaatg

SEQ ID NO: 249155 - DNA, 25 bp, Artificial sequence
  SiRNA target sequence
aactttttaaaaagtaaattaatgt

SEQ ID NO: 249156 - DNA, 25 bp, Artificial sequence
  SiRNA target sequence
actttttaaaaagtaaattaatgta

SEQ ID NO: 249157 - DNA, 25 bp, Artificial sequence
  SiRNA target sequence
ctttttaaaaagtaaattaatgtag

SEQ ID NO: 249158 - DNA, 25 bp, Artificial sequence
  SiRNA target sequence
tttttaaaaagtaaattaatgtagt

SEQ ID NO: 249159 - DNA, 25 bp, Artificial sequence
  SiRNA target sequence
ttttaaaaagtaaattaatgtagtt

SEQ ID NO: 249160 - DNA, 25 bp, Artificial sequence
  SiRNA target sequence
tttaaaaagtaaattaatgtagtta

SEQ ID NO: 249161 - DNA, 25 bp, Artificial sequence
  SiRNA target sequence
ttaaaaagtaaattaatgtagttac

SEQ ID NO: 249162 - DNA, 25 bp, Artificial sequence
  SiRNA target sequence
taaaaagtaaattaatgtagttaca

SEQ ID NO: 249163 - DNA, 25 bp, Artificial sequence
  SiRNA target sequence
aaaaagtaaattaatgtagttacaa

SEQ ID NO: 249164 - DNA, 25 bp, Artificial sequence
  SiRNA target sequence
aaaagtaaattaatgtagttacaaa

SEQ ID NO: 249165 - DNA, 25 bp, Artificial sequence
  SiRNA target sequence
aaagtaaattaatgtagttacaaaa

SEQ ID NO: 249166 - DNA, 25 bp, Artificial sequence
  SiRNA target sequence
aagtaaattaatgtagttacaaaag

SEQ ID NO: 249167 - DNA, 25 bp, Artificial sequence
  SiRNA target sequence
agtaaattaatgtagttacaaaaga

SEQ ID NO: 249168 - DNA, 25 bp, Artificial sequence
  SiRNA target sequence
gtaaattaatgtagttacaaaagac

SEQ ID NO: 249169 - DNA, 25 bp, Artificial sequence
  SiRNA target sequence
taaattaatgtagttacaaaagaca

SEQ ID NO: 249170 - DNA, 25 bp, Artificial sequence
  SiRNA target sequence
aaattaatgtagttacaaaagacaa

SEQ ID NO: 249171 - DNA, 25 bp, Artificial sequence
  SiRNA target sequence
aattaatgtagttacaaaagacaag

SEQ ID NO: 249172 - DNA, 25 bp, Artificial sequence
  SiRNA target sequence
attaatgtagttacaaaagacaaga

SEQ ID NO: 249173 - DNA, 25 bp, Artificial sequence
  SiRNA target sequence
ttaatgtagttacaaaagacaagat

SEQ ID NO: 249174 - DNA, 25 bp, Artificial sequence
  SiRNA target sequence
taatgtagttacaaaagacaagatc

SEQ ID NO: 249175 - DNA, 25 bp, Artificial sequence
  SiRNA target sequence
aatgtagttacaaaagacaagatca

SEQ ID NO: 249176 - DNA, 25 bp, Artificial sequence
  SiRNA target sequence
atgtagttacaaaagacaagatcaa

SEQ ID NO: 249177 - DNA, 25 bp, Artificial sequence
  SiRNA target sequence
tgtagttacaaaagacaagatcaaa

SEQ ID NO: 249178 - DNA, 25 bp, Artificial sequence
  SiRNA target sequence
gtagttacaaaagacaagatcaaaa

SEQ ID NO: 249179 - DNA, 25 bp, Artificial sequence
  SiRNA target sequence
tagttacaaaagacaagatcaaaaa

SEQ ID NO: 249180 - DNA, 25 bp, Artificial sequence
  SiRNA target sequence
agttacaaaagacaagatcaaaaaa

SEQ ID NO: 249181 - DNA, 25 bp, Artificial sequence
  SiRNA target sequence
gttacaaaagacaagatcaaaaaaa

SEQ ID NO: 249182 - DNA, 25 bp, Artificial sequence
  SiRNA target sequence
ttacaaaagacaagatcaaaaaaaa

SEQ ID NO: 249183 - DNA, 25 bp, Artificial sequence
  SiRNA target sequence
tacaaaagacaagatcaaaaaaaac

SEQ ID NO: 249184 - DNA, 25 bp, Artificial sequence
  SiRNA target sequence
acaaaagacaagatcaaaaaaaaca

SEQ ID NO: 249185 - DNA, 25 bp, Artificial sequence
  SiRNA target sequence
caaaagacaagatcaaaaaaaacaa

SEQ ID NO: 249186 - DNA, 25 bp, Artificial sequence
  SiRNA target sequence
aaaagacaagatcaaaaaaaacaaa

SEQ ID NO: 249187 - DNA, 25 bp, Artificial sequence
  SiRNA target sequence
aaagacaagatcaaaaaaaacaaac

SEQ ID NO: 249188 - DNA, 25 bp, Artificial sequence
  SiRNA target sequence
aagacaagatcaaaaaaaacaaact

SEQ ID NO: 249189 - DNA, 25 bp, Artificial sequence
  SiRNA target sequence
agacaagatcaaaaaaaacaaacta

SEQ ID NO: 249190 - DNA, 25 bp, Artificial sequence
  SiRNA target sequence
gacaagatcaaaaaaaacaaactac

SEQ ID NO: 249191 - DNA, 25 bp, Artificial sequence
  SiRNA target sequence
acaagatcaaaaaaaacaaactact

SEQ ID NO: 249192 - DNA, 25 bp, Artificial sequence
  SiRNA target sequence
caagatcaaaaaaaacaaactacta

SEQ ID NO: 249193 - DNA, 25 bp, Artificial sequence
  SiRNA target sequence
aagatcaaaaaaaacaaactactac

SEQ ID NO: 249194 - DNA, 25 bp, Artificial sequence
  SiRNA target sequence
agatcaaaaaaaacaaactactacc

SEQ ID NO: 249195 - DNA, 25 bp, Artificial sequence
  SiRNA target sequence
gatcaaaaaaaacaaactactaccg

SEQ ID NO: 249196 - DNA, 25 bp, Artificial sequence
  SiRNA target sequence
atcaaaaaaaacaaactactaccgt

SEQ ID NO: 249197 - DNA, 25 bp, Artificial sequence
  SiRNA target sequence
tcaaaaaaaacaaactactaccgtc

SEQ ID NO: 249198 - DNA, 25 bp, Artificial sequence
  SiRNA target sequence
caaaaaaaacaaactactaccgtca

SEQ ID NO: 249199 - DNA, 25 bp, Artificial sequence
  SiRNA target sequence
aaaaaaaacaaactactaccgtcaa

SEQ ID NO: 249200 - DNA, 25 bp, Artificial sequence
  SiRNA target sequence
aaaaaaacaaactactaccgtcaat

SEQ ID NO: 249201 - DNA, 25 bp, Artificial sequence
  SiRNA target sequence
aaaaaacaaactactaccgtcaatt

SEQ ID NO: 249202 - DNA, 25 bp, Artificial sequence
  SiRNA target sequence
aaaaacaaactactaccgtcaattt

SEQ ID NO: 249203 - DNA, 25 bp, Artificial sequence
  SiRNA target sequence
aaaacaaactactaccgtcaatttt

SEQ ID NO: 249204 - DNA, 25 bp, Artificial sequence
  SiRNA target sequence
aaacaaactactaccgtcaatttta

SEQ ID NO: 249205 - DNA, 25 bp, Artificial sequence
  SiRNA target sequence
aacaaactactaccgtcaattttat

SEQ ID NO: 249206 - DNA, 25 bp, Artificial sequence
  SiRNA target sequence
acaaactactaccgtcaattttatc

SEQ ID NO: 249207 - DNA, 25 bp, Artificial sequence
  SiRNA target sequence
caaactactaccgtcaattttatca

SEQ ID NO: 249208 - DNA, 25 bp, Artificial sequence
  SiRNA target sequence
aaactactaccgtcaattttatcat

SEQ ID NO: 249209 - DNA, 25 bp, Artificial sequence
  SiRNA target sequence
aactactaccgtcaattttatcatg

SEQ ID NO: 249210 - DNA, 25 bp, Artificial sequence
  SiRNA target sequence
actactaccgtcaattttatcatgc

SEQ ID NO: 249211 - DNA, 25 bp, Artificial sequence
  SiRNA target sequence
ctactaccgtcaattttatcatgca

SEQ ID NO: 249212 - DNA, 25 bp, Artificial sequence
  SiRNA target sequence
tactaccgtcaattttatcatgcaa

SEQ ID NO: 249213 - DNA, 25 bp, Artificial sequence
  SiRNA target sequence
actaccgtcaattttatcatgcaaa

SEQ ID NO: 249214 - DNA, 25 bp, Artificial sequence
  SiRNA target sequence
ctaccgtcaattttatcatgcaaac

SEQ ID NO: 249215 - DNA, 25 bp, Artificial sequence
  SiRNA target sequence
taccgtcaattttatcatgcaaacc

SEQ ID NO: 249216 - DNA, 25 bp, Artificial sequence
  SiRNA target sequence
accgtcaattttatcatgcaaacct

SEQ ID NO: 249217 - DNA, 25 bp, Artificial sequence
  SiRNA target sequence
ccgtcaattttatcatgcaaacctg

SEQ ID NO: 249218 - DNA, 25 bp, Artificial sequence
  SiRNA target sequence
cgtcaattttatcatgcaaacctgc

SEQ ID NO: 249219 - DNA, 25 bp, Artificial sequence
  SiRNA target sequence
gtcaattttatcatgcaaacctgca

SEQ ID NO: 249220 - DNA, 25 bp, Artificial sequence
  SiRNA target sequence
tcaattttatcatgcaaacctgcag

SEQ ID NO: 249221 - DNA, 25 bp, Artificial sequence
  SiRNA target sequence
caattttatcatgcaaacctgcagg

SEQ ID NO: 249222 - DNA, 25 bp, Artificial sequence
  SiRNA target sequence
aattttatcatgcaaacctgcagga

SEQ ID NO: 249223 - DNA, 25 bp, Artificial sequence
  SiRNA target sequence
attttatcatgcaaacctgcaggaa

SEQ ID NO: 249224 - DNA, 25 bp, Artificial sequence
  SiRNA target sequence
ttttatcatgcaaacctgcaggaag

SEQ ID NO: 249225 - DNA, 25 bp, Artificial sequence
  SiRNA target sequence
tttatcatgcaaacctgcaggaagt

SEQ ID NO: 249226 - DNA, 25 bp, Artificial sequence
  SiRNA target sequence
ttatcatgcaaacctgcaggaagta

SEQ ID NO: 249227 - DNA, 25 bp, Artificial sequence
  SiRNA target sequence
tatcatgcaaacctgcaggaagtat

SEQ ID NO: 249228 - DNA, 25 bp, Artificial sequence
  SiRNA target sequence
atcatgcaaacctgcaggaagtata

SEQ ID NO: 249229 - DNA, 25 bp, Artificial sequence
  SiRNA target sequence
tcatgcaaacctgcaggaagtatat

SEQ ID NO: 249230 - DNA, 25 bp, Artificial sequence
  SiRNA target sequence
catgcaaacctgcaggaagtatatt

SEQ ID NO: 249231 - DNA, 25 bp, Artificial sequence
  SiRNA target sequence
atgcaaacctgcaggaagtatattt

SEQ ID NO: 249232 - DNA, 25 bp, Artificial sequence
  SiRNA target sequence
tgcaaacctgcaggaagtatatttg

SEQ ID NO: 249233 - DNA, 25 bp, Artificial sequence
  SiRNA target sequence
gcaaacctgcaggaagtatatttgc

SEQ ID NO: 249234 - DNA, 25 bp, Artificial sequence
  SiRNA target sequence
caaacctgcaggaagtatatttgct

SEQ ID NO: 249235 - DNA, 25 bp, Artificial sequence
  SiRNA target sequence
aaacctgcaggaagtatatttgcta

SEQ ID NO: 249236 - DNA, 25 bp, Artificial sequence
  SiRNA target sequence
aacctgcaggaagtatatttgctaa

SEQ ID NO: 249237 - DNA, 25 bp, Artificial sequence
  SiRNA target sequence
acctgcaggaagtatatttgctaat

SEQ ID NO: 249238 - DNA, 25 bp, Artificial sequence
  SiRNA target sequence
cctgcaggaagtatatttgctaatt

SEQ ID NO: 249239 - DNA, 25 bp, Artificial sequence
  SiRNA target sequence
ctgcaggaagtatatttgctaattc

SEQ ID NO: 249240 - DNA, 25 bp, Artificial sequence
  SiRNA target sequence
tgcaggaagtatatttgctaattca

SEQ ID NO: 249241 - DNA, 25 bp, Artificial sequence
  SiRNA target sequence
gcaggaagtatatttgctaattcat

SEQ ID NO: 249242 - DNA, 25 bp, Artificial sequence
  SiRNA target sequence
caggaagtatatttgctaattcatc

SEQ ID NO: 249243 - DNA, 25 bp, Artificial sequence
  SiRNA target sequence
aggaagtatatttgctaattcatct

SEQ ID NO: 249244 - DNA, 25 bp, Artificial sequence
  SiRNA target sequence
ggaagtatatttgctaattcatctt

SEQ ID NO: 249245 - DNA, 25 bp, Artificial sequence
  SiRNA target sequence
gaagtatatttgctaattcatcttt

SEQ ID NO: 249246 - DNA, 25 bp, Artificial sequence
  SiRNA target sequence
aagtatatttgctaattcatctttt

SEQ ID NO: 249247 - DNA, 25 bp, Artificial sequence
  SiRNA target sequence
agtatatttgctaattcatctttta

SEQ ID NO: 249248 - DNA, 25 bp, Artificial sequence
  SiRNA target sequence
gtatatttgctaattcatcttttat

SEQ ID NO: 249249 - DNA, 25 bp, Artificial sequence
  SiRNA target sequence
tatatttgctaattcatcttttata

SEQ ID NO: 249250 - DNA, 25 bp, Artificial sequence
  SiRNA target sequence
atatttgctaattcatcttttatat

SEQ ID NO: 249251 - DNA, 25 bp, Artificial sequence
  SiRNA target sequence
tatttgctaattcatcttttatata

SEQ ID NO: 249252 - DNA, 25 bp, Artificial sequence
  SiRNA target sequence
atttgctaattcatcttttatataa

SEQ ID NO: 249253 - DNA, 25 bp, Artificial sequence
  SiRNA target sequence
tttgctaattcatcttttatataaa

SEQ ID NO: 249254 - DNA, 25 bp, Artificial sequence
  SiRNA target sequence
ttgctaattcatcttttatataaat

SEQ ID NO: 249255 - DNA, 25 bp, Artificial sequence
  SiRNA target sequence
tgctaattcatcttttatataaata

SEQ ID NO: 249256 - DNA, 25 bp, Artificial sequence
  SiRNA target sequence
gctaattcatcttttatataaataa

SEQ ID NO: 249257 - DNA, 25 bp, Artificial sequence
  SiRNA target sequence
ctaattcatcttttatataaataaa

SEQ ID NO: 249258 - DNA, 25 bp, Artificial sequence
  SiRNA target sequence
taattcatcttttatataaataaaa

SEQ ID NO: 249259 - DNA, 25 bp, Artificial sequence
  SiRNA target sequence
aattcatcttttatataaataaaag

SEQ ID NO: 249260 - DNA, 25 bp, Artificial sequence
  SiRNA target sequence
attcatcttttatataaataaaagc

SEQ ID NO: 249261 - DNA, 25 bp, Artificial sequence
  SiRNA target sequence
ttcatcttttatataaataaaagct

SEQ ID NO: 249262 - DNA, 25 bp, Artificial sequence
  SiRNA target sequence
tcatcttttatataaataaaagcta

SEQ ID NO: 249263 - DNA, 25 bp, Artificial sequence
  SiRNA target sequence
catcttttatataaataaaagctac

SEQ ID NO: 249264 - DNA, 25 bp, Artificial sequence
  SiRNA target sequence
atcttttatataaataaaagctaca

SEQ ID NO: 249265 - DNA, 25 bp, Artificial sequence
  SiRNA target sequence
tcttttatataaataaaagctacag

SEQ ID NO: 249266 - DNA, 25 bp, Artificial sequence
  SiRNA target sequence
cttttatataaataaaagctacaga

SEQ ID NO: 249267 - DNA, 25 bp, Artificial sequence
  SiRNA target sequence
ttttatataaataaaagctacagaa

SEQ ID NO: 249268 - DNA, 25 bp, Artificial sequence
  SiRNA target sequence
tttatataaataaaagctacagaaa

SEQ ID NO: 249269 - DNA, 25 bp, Artificial sequence
  SiRNA target sequence
ttatataaataaaagctacagaaat

SEQ ID NO: 249270 - DNA, 25 bp, Artificial sequence
  SiRNA target sequence
tatataaataaaagctacagaaata

SEQ ID NO: 249271 - DNA, 25 bp, Artificial sequence
  SiRNA target sequence
atataaataaaagctacagaaataa

SEQ ID NO: 249272 - DNA, 25 bp, Artificial sequence
  SiRNA target sequence
tataaataaaagctacagaaataat

SEQ ID NO: 249273 - DNA, 25 bp, Artificial sequence
  SiRNA target sequence
ataaataaaagctacagaaataatc

SEQ ID NO: 249274 - DNA, 25 bp, Artificial sequence
  SiRNA target sequence
taaataaaagctacagaaataatca

SEQ ID NO: 249275 - DNA, 25 bp, Artificial sequence
  SiRNA target sequence
aaataaaagctacagaaataatcat

SEQ ID NO: 249276 - DNA, 25 bp, Artificial sequence
  SiRNA target sequence
aataaaagctacagaaataatcatt

SEQ ID NO: 249277 - DNA, 25 bp, Artificial sequence
  SiRNA target sequence
ataaaagctacagaaataatcattg

SEQ ID NO: 249278 - DNA, 25 bp, Artificial sequence
  SiRNA target sequence
taaaagctacagaaataatcattga

SEQ ID NO: 249279 - DNA, 25 bp, Artificial sequence
  SiRNA target sequence
aaaagctacagaaataatcattgaa

SEQ ID NO: 249280 - DNA, 25 bp, Artificial sequence
  SiRNA target sequence
aaagctacagaaataatcattgaaa

SEQ ID NO: 249281 - DNA, 25 bp, Artificial sequence
  SiRNA target sequence
aagctacagaaataatcattgaaat

SEQ ID NO: 249282 - DNA, 25 bp, Artificial sequence
  SiRNA target sequence
agctacagaaataatcattgaaatg

SEQ ID NO: 249283 - DNA, 25 bp, Artificial sequence
  SiRNA target sequence
gctacagaaataatcattgaaatgg

SEQ ID NO: 249284 - DNA, 25 bp, Artificial sequence
  SiRNA target sequence
ctacagaaataatcattgaaatggc

SEQ ID NO: 249285 - DNA, 25 bp, Artificial sequence
  SiRNA target sequence
tacagaaataatcattgaaatggcg

SEQ ID NO: 249286 - DNA, 25 bp, Artificial sequence
  SiRNA target sequence
acagaaataatcattgaaatggcgg

SEQ ID NO: 249287 - DNA, 25 bp, Artificial sequence
  SiRNA target sequence
cagaaataatcattgaaatggcggt

SEQ ID NO: 249288 - DNA, 25 bp, Artificial sequence
  SiRNA target sequence
agaaataatcattgaaatggcggtg

SEQ ID NO: 249289 - DNA, 25 bp, Artificial sequence
  SiRNA target sequence
gaaataatcattgaaatggcggtga

SEQ ID NO: 249290 - DNA, 25 bp, Artificial sequence
  SiRNA target sequence
aaataatcattgaaatggcggtgat

SEQ ID NO: 249291 - DNA, 25 bp, Artificial sequence
  SiRNA target sequence
aataatcattgaaatggcggtgatt

SEQ ID NO: 249292 - DNA, 25 bp, Artificial sequence
  SiRNA target sequence
ataatcattgaaatggcggtgattg

SEQ ID NO: 249293 - DNA, 25 bp, Artificial sequence
  SiRNA target sequence
taatcattgaaatggcggtgattgt

SEQ ID NO: 249294 - DNA, 25 bp, Artificial sequence
  SiRNA target sequence
aatcattgaaatggcggtgattgtg

SEQ ID NO: 249295 - DNA, 25 bp, Artificial sequence
  SiRNA target sequence
atcattgaaatggcggtgattgtgg

SEQ ID NO: 249296 - DNA, 25 bp, Artificial sequence
  SiRNA target sequence
tcattgaaatggcggtgattgtgga

SEQ ID NO: 249297 - DNA, 25 bp, Artificial sequence
  SiRNA target sequence
cattgaaatggcggtgattgtggaa

SEQ ID NO: 249298 - DNA, 25 bp, Artificial sequence
  SiRNA target sequence
attgaaatggcggtgattgtggaaa

SEQ ID NO: 249299 - DNA, 25 bp, Artificial sequence
  SiRNA target sequence
ttgaaatggcggtgattgtggaaaa

SEQ ID NO: 249300 - DNA, 25 bp, Artificial sequence
  SiRNA target sequence
tgaaatggcggtgattgtggaaaaa

SEQ ID NO: 249301 - DNA, 25 bp, Artificial sequence
  SiRNA target sequence
gaaatggcggtgattgtggaaaaat

SEQ ID NO: 249302 - DNA, 25 bp, Artificial sequence
  SiRNA target sequence
aaatggcggtgattgtggaaaaatt

SEQ ID NO: 249303 - DNA, 25 bp, Artificial sequence
  SiRNA target sequence
aatggcggtgattgtggaaaaatta

SEQ ID NO: 249304 - DNA, 25 bp, Artificial sequence
  SiRNA target sequence
atggcggtgattgtggaaaaattag

SEQ ID NO: 249305 - DNA, 25 bp, Artificial sequence
  SiRNA target sequence
tggcggtgattgtggaaaaattagg

SEQ ID NO: 249306 - DNA, 25 bp, Artificial sequence
  SiRNA target sequence
ggcggtgattgtggaaaaattagga

SEQ ID NO: 249307 - DNA, 25 bp, Artificial sequence
  SiRNA target sequence
gcggtgattgtggaaaaattaggaa

SEQ ID NO: 249308 - DNA, 25 bp, Artificial sequence
  SiRNA target sequence
cggtgattgtggaaaaattaggaac

SEQ ID NO: 249309 - DNA, 25 bp, Artificial sequence
  SiRNA target sequence
ggtgattgtggaaaaattaggaaca

SEQ ID NO: 249310 - DNA, 25 bp, Artificial sequence
  SiRNA target sequence
gtgattgtggaaaaattaggaacaa

SEQ ID NO: 249311 - DNA, 25 bp, Artificial sequence
  SiRNA target sequence
tgattgtggaaaaattaggaacaat

SEQ ID NO: 249312 - DNA, 25 bp, Artificial sequence
  SiRNA target sequence
gattgtggaaaaattaggaacaatt

SEQ ID NO: 249313 - DNA, 25 bp, Artificial sequence
  SiRNA target sequence
attgtggaaaaattaggaacaattt

SEQ ID NO: 249314 - DNA, 25 bp, Artificial sequence
  SiRNA target sequence
ttgtggaaaaattaggaacaatttc

SEQ ID NO: 249315 - DNA, 25 bp, Artificial sequence
  SiRNA target sequence
tgtggaaaaattaggaacaatttct

SEQ ID NO: 249316 - DNA, 25 bp, Artificial sequence
  SiRNA target sequence
gtggaaaaattaggaacaatttctt

SEQ ID NO: 249317 - DNA, 25 bp, Artificial sequence
  SiRNA target sequence
tggaaaaattaggaacaatttcttt

SEQ ID NO: 249318 - DNA, 25 bp, Artificial sequence
  SiRNA target sequence
ggaaaaattaggaacaatttctttc

SEQ ID NO: 249319 - DNA, 25 bp, Artificial sequence
  SiRNA target sequence
gaaaaattaggaacaatttctttca

SEQ ID NO: 249320 - DNA, 25 bp, Artificial sequence
  SiRNA target sequence
aaaaattaggaacaatttctttcat

SEQ ID NO: 249321 - DNA, 25 bp, Artificial sequence
  SiRNA target sequence
aaaattaggaacaatttctttcatt

SEQ ID NO: 249322 - DNA, 25 bp, Artificial sequence
  SiRNA target sequence
aaattaggaacaatttctttcattt

SEQ ID NO: 249323 - DNA, 25 bp, Artificial sequence
  SiRNA target sequence
aattaggaacaatttctttcatttc

SEQ ID NO: 249324 - DNA, 25 bp, Artificial sequence
  SiRNA target sequence
attaggaacaatttctttcatttca

SEQ ID NO: 249325 - DNA, 25 bp, Artificial sequence
  SiRNA target sequence
ttaggaacaatttctttcatttcat

SEQ ID NO: 249326 - DNA, 25 bp, Artificial sequence
  SiRNA target sequence
taggaacaatttctttcatttcatc

SEQ ID NO: 249327 - DNA, 25 bp, Artificial sequence
  SiRNA target sequence
aggaacaatttctttcatttcatct

SEQ ID NO: 249328 - DNA, 25 bp, Artificial sequence
  SiRNA target sequence
ggaacaatttctttcatttcatctt

SEQ ID NO: 249329 - DNA, 25 bp, Artificial sequence
  SiRNA target sequence
gaacaatttctttcatttcatcttc

SEQ ID NO: 249330 - DNA, 25 bp, Artificial sequence
  SiRNA target sequence
aacaatttctttcatttcatcttct

SEQ ID NO: 249331 - DNA, 25 bp, Artificial sequence
  SiRNA target sequence
acaatttctttcatttcatcttctg

SEQ ID NO: 249332 - DNA, 25 bp, Artificial sequence
  SiRNA target sequence
caatttctttcatttcatcttctgt

SEQ ID NO: 249333 - DNA, 25 bp, Artificial sequence
  SiRNA target sequence
aatttctttcatttcatcttctgta

SEQ ID NO: 249334 - DNA, 25 bp, Artificial sequence
  SiRNA target sequence
atttctttcatttcatcttctgtac

SEQ ID NO: 249335 - DNA, 25 bp, Artificial sequence
  SiRNA target sequence
tttctttcatttcatcttctgtaca

SEQ ID NO: 249336 - DNA, 25 bp, Artificial sequence
  SiRNA target sequence
ttctttcatttcatcttctgtacaa

SEQ ID NO: 249337 - DNA, 25 bp, Artificial sequence
  SiRNA target sequence
tctttcatttcatcttctgtacaag

SEQ ID NO: 249338 - DNA, 25 bp, Artificial sequence
  SiRNA target sequence
ctttcatttcatcttctgtacaagc

SEQ ID NO: 249339 - DNA, 25 bp, Artificial sequence
  SiRNA target sequence
tttcatttcatcttctgtacaagca

SEQ ID NO: 249340 - DNA, 25 bp, Artificial sequence
  SiRNA target sequence
ttcatttcatcttctgtacaagcat

SEQ ID NO: 249341 - DNA, 25 bp, Artificial sequence
  SiRNA target sequence
tcatttcatcttctgtacaagcatg

SEQ ID NO: 249342 - DNA, 25 bp, Artificial sequence
  SiRNA target sequence
catttcatcttctgtacaagcatga

SEQ ID NO: 249343 - DNA, 25 bp, Artificial sequence
  SiRNA target sequence
atttcatcttctgtacaagcatgat

SEQ ID NO: 249344 - DNA, 25 bp, Artificial sequence
  SiRNA target sequence
tttcatcttctgtacaagcatgatt

SEQ ID NO: 249345 - DNA, 25 bp, Artificial sequence
  SiRNA target sequence
ttcatcttctgtacaagcatgattg

SEQ ID NO: 249346 - DNA, 25 bp, Artificial sequence
  SiRNA target sequence
tcatcttctgtacaagcatgattgg

SEQ ID NO: 249347 - DNA, 25 bp, Artificial sequence
  SiRNA target sequence
catcttctgtacaagcatgattggc

SEQ ID NO: 249348 - DNA, 25 bp, Artificial sequence
  SiRNA target sequence
atcttctgtacaagcatgattggct

SEQ ID NO: 249349 - DNA, 25 bp, Artificial sequence
  SiRNA target sequence
tcttctgtacaagcatgattggcta

SEQ ID NO: 249350 - DNA, 25 bp, Artificial sequence
  SiRNA target sequence
cttctgtacaagcatgattggctaa

SEQ ID NO: 249351 - DNA, 25 bp, Artificial sequence
  SiRNA target sequence
ttctgtacaagcatgattggctaac

SEQ ID NO: 249352 - DNA, 25 bp, Artificial sequence
  SiRNA target sequence
tctgtacaagcatgattggctaacg

SEQ ID NO: 249353 - DNA, 25 bp, Artificial sequence
  SiRNA target sequence
ctgtacaagcatgattggctaacgc

SEQ ID NO: 249354 - DNA, 25 bp, Artificial sequence
  SiRNA target sequence
tgtacaagcatgattggctaacgca

SEQ ID NO: 249355 - DNA, 25 bp, Artificial sequence
  SiRNA target sequence
gtacaagcatgattggctaacgcat

SEQ ID NO: 249356 - DNA, 25 bp, Artificial sequence
  SiRNA target sequence
tacaagcatgattggctaacgcata

SEQ ID NO: 249357 - DNA, 25 bp, Artificial sequence
  SiRNA target sequence
acaagcatgattggctaacgcatat

SEQ ID NO: 249358 - DNA, 25 bp, Artificial sequence
  SiRNA target sequence
caagcatgattggctaacgcatata

SEQ ID NO: 249359 - DNA, 25 bp, Artificial sequence
  SiRNA target sequence
aagcatgattggctaacgcatataa

SEQ ID NO: 249360 - DNA, 25 bp, Artificial sequence
  SiRNA target sequence
agcatgattggctaacgcatataaa

SEQ ID NO: 249361 - DNA, 25 bp, Artificial sequence
  SiRNA target sequence
gcatgattggctaacgcatataaag

SEQ ID NO: 249362 - DNA, 25 bp, Artificial sequence
  SiRNA target sequence
catgattggctaacgcatataaagc

SEQ ID NO: 249363 - DNA, 25 bp, Artificial sequence
  SiRNA target sequence
atgattggctaacgcatataaagca

SEQ ID NO: 249364 - DNA, 25 bp, Artificial sequence
  SiRNA target sequence
tgattggctaacgcatataaagcaa

SEQ ID NO: 249365 - DNA, 25 bp, Artificial sequence
  SiRNA target sequence
gattggctaacgcatataaagcaaa

SEQ ID NO: 249366 - DNA, 25 bp, Artificial sequence
  SiRNA target sequence
attggctaacgcatataaagcaaaa

SEQ ID NO: 249367 - DNA, 25 bp, Artificial sequence
  SiRNA target sequence
ttggctaacgcatataaagcaaaac

SEQ ID NO: 249368 - DNA, 25 bp, Artificial sequence
  SiRNA target sequence
tggctaacgcatataaagcaaaacc

SEQ ID NO: 249369 - DNA, 25 bp, Artificial sequence
  SiRNA target sequence
ggctaacgcatataaagcaaaacca

SEQ ID NO: 249370 - DNA, 25 bp, Artificial sequence
  SiRNA target sequence
gctaacgcatataaagcaaaaccaa

SEQ ID NO: 249371 - DNA, 25 bp, Artificial sequence
  SiRNA target sequence
ctaacgcatataaagcaaaaccaac

SEQ ID NO: 249372 - DNA, 25 bp, Artificial sequence
  SiRNA target sequence
taacgcatataaagcaaaaccaact

SEQ ID NO: 249373 - DNA, 25 bp, Artificial sequence
  SiRNA target sequence
aacgcatataaagcaaaaccaacta

SEQ ID NO: 249374 - DNA, 25 bp, Artificial sequence
  SiRNA target sequence
acgcatataaagcaaaaccaactac

SEQ ID NO: 249375 - DNA, 25 bp, Artificial sequence
  SiRNA target sequence
cgcatataaagcaaaaccaactact

SEQ ID NO: 249376 - DNA, 25 bp, Artificial sequence
  SiRNA target sequence
gcatataaagcaaaaccaactacta

SEQ ID NO: 249377 - DNA, 25 bp, Artificial sequence
  SiRNA target sequence
catataaagcaaaaccaactactag

SEQ ID NO: 249378 - DNA, 25 bp, Artificial sequence
  SiRNA target sequence
atataaagcaaaaccaactactaga

SEQ ID NO: 249379 - DNA, 25 bp, Artificial sequence
  SiRNA target sequence
tataaagcaaaaccaactactagag

SEQ ID NO: 249380 - DNA, 25 bp, Artificial sequence
  SiRNA target sequence
ataaagcaaaaccaactactagagt

SEQ ID NO: 249381 - DNA, 25 bp, Artificial sequence
  SiRNA target sequence
taaagcaaaaccaactactagagta

SEQ ID NO: 249382 - DNA, 25 bp, Artificial sequence
  SiRNA target sequence
aaagcaaaaccaactactagagtac

SEQ ID NO: 249383 - DNA, 25 bp, Artificial sequence
  SiRNA target sequence
aagcaaaaccaactactagagtact

SEQ ID NO: 249384 - DNA, 25 bp, Artificial sequence
  SiRNA target sequence
agcaaaaccaactactagagtactc

SEQ ID NO: 249385 - DNA, 25 bp, Artificial sequence
  SiRNA target sequence
gcaaaaccaactactagagtactcc

SEQ ID NO: 249386 - DNA, 25 bp, Artificial sequence
  SiRNA target sequence
caaaaccaactactagagtactcca

SEQ ID NO: 249387 - DNA, 25 bp, Artificial sequence
  SiRNA target sequence
aaaaccaactactagagtactccac

SEQ ID NO: 249388 - DNA, 25 bp, Artificial sequence
  SiRNA target sequence
aaaccaactactagagtactccaca

SEQ ID NO: 249389 - DNA, 25 bp, Artificial sequence
  SiRNA target sequence
aaccaactactagagtactccacaa

SEQ ID NO: 249390 - DNA, 25 bp, Artificial sequence
  SiRNA target sequence
accaactactagagtactccacaac

SEQ ID NO: 249391 - DNA, 25 bp, Artificial sequence
  SiRNA target sequence
ccaactactagagtactccacaact

SEQ ID NO: 249392 - DNA, 25 bp, Artificial sequence
  SiRNA target sequence
caactactagagtactccacaactc

SEQ ID NO: 249393 - DNA, 25 bp, Artificial sequence
  SiRNA target sequence
aactactagagtactccacaactcc

SEQ ID NO: 249394 - DNA, 25 bp, Artificial sequence
  SiRNA target sequence
actactagagtactccacaactccg

SEQ ID NO: 249395 - DNA, 25 bp, Artificial sequence
  SiRNA target sequence
ctactagagtactccacaactccga

SEQ ID NO: 249396 - DNA, 25 bp, Artificial sequence
  SiRNA target sequence
tactagagtactccacaactccgat

SEQ ID NO: 249397 - DNA, 25 bp, Artificial sequence
  SiRNA target sequence
actagagtactccacaactccgata

SEQ ID NO: 249398 - DNA, 25 bp, Artificial sequence
  SiRNA target sequence
ctagagtactccacaactccgataa

SEQ ID NO: 249399 - DNA, 25 bp, Artificial sequence
  SiRNA target sequence
tagagtactccacaactccgataag

SEQ ID NO: 249400 - DNA, 25 bp, Artificial sequence
  SiRNA target sequence
agagtactccacaactccgataaga

SEQ ID NO: 249401 - DNA, 25 bp, Artificial sequence
  SiRNA target sequence
gagtactccacaactccgataagat

SEQ ID NO: 249402 - DNA, 25 bp, Artificial sequence
  SiRNA target sequence
agtactccacaactccgataagatg

SEQ ID NO: 249403 - DNA, 25 bp, Artificial sequence
  SiRNA target sequence
gtactccacaactccgataagatgt

SEQ ID NO: 249404 - DNA, 25 bp, Artificial sequence
  SiRNA target sequence
tactccacaactccgataagatgta

SEQ ID NO: 249405 - DNA, 25 bp, Artificial sequence
  SiRNA target sequence
actccacaactccgataagatgtaa

SEQ ID NO: 249406 - DNA, 25 bp, Artificial sequence
  SiRNA target sequence
ctccacaactccgataagatgtaac

SEQ ID NO: 249407 - DNA, 25 bp, Artificial sequence
  SiRNA target sequence
tccacaactccgataagatgtaaca

SEQ ID NO: 249408 - DNA, 25 bp, Artificial sequence
  SiRNA target sequence
ccacaactccgataagatgtaacat

SEQ ID NO: 249409 - DNA, 25 bp, Artificial sequence
  SiRNA target sequence
cacaactccgataagatgtaacata

SEQ ID NO: 249410 - DNA, 25 bp, Artificial sequence
  SiRNA target sequence
acaactccgataagatgtaacataa

SEQ ID NO: 249411 - DNA, 25 bp, Artificial sequence
  SiRNA target sequence
caactccgataagatgtaacataaa

SEQ ID NO: 249412 - DNA, 25 bp, Artificial sequence
  SiRNA target sequence
aactccgataagatgtaacataaag

SEQ ID NO: 249413 - DNA, 25 bp, Artificial sequence
  SiRNA target sequence
actccgataagatgtaacataaagt

SEQ ID NO: 249414 - DNA, 25 bp, Artificial sequence
  SiRNA target sequence
ctccgataagatgtaacataaagta

SEQ ID NO: 249415 - DNA, 25 bp, Artificial sequence
  SiRNA target sequence
tccgataagatgtaacataaagtac

SEQ ID NO: 249416 - DNA, 25 bp, Artificial sequence
  SiRNA target sequence
ccgataagatgtaacataaagtact

SEQ ID NO: 249417 - DNA, 25 bp, Artificial sequence
  SiRNA target sequence
cgataagatgtaacataaagtactt

SEQ ID NO: 249418 - DNA, 25 bp, Artificial sequence
  SiRNA target sequence
gataagatgtaacataaagtactta

SEQ ID NO: 249419 - DNA, 25 bp, Artificial sequence
  SiRNA target sequence
ataagatgtaacataaagtacttat

SEQ ID NO: 249420 - DNA, 25 bp, Artificial sequence
  SiRNA target sequence
taagatgtaacataaagtacttatc

SEQ ID NO: 249421 - DNA, 25 bp, Artificial sequence
  SiRNA target sequence
aagatgtaacataaagtacttatcc

SEQ ID NO: 249422 - DNA, 25 bp, Artificial sequence
  SiRNA target sequence
agatgtaacataaagtacttatcca

SEQ ID NO: 249423 - DNA, 25 bp, Artificial sequence
  SiRNA target sequence
gatgtaacataaagtacttatccac

SEQ ID NO: 249424 - DNA, 25 bp, Artificial sequence
  SiRNA target sequence
atgtaacataaagtacttatccact

SEQ ID NO: 249425 - DNA, 25 bp, Artificial sequence
  SiRNA target sequence
tgtaacataaagtacttatccactc

SEQ ID NO: 249426 - DNA, 25 bp, Artificial sequence
  SiRNA target sequence
gtaacataaagtacttatccactca

SEQ ID NO: 249427 - DNA, 25 bp, Artificial sequence
  SiRNA target sequence
taacataaagtacttatccactcac

SEQ ID NO: 249428 - DNA, 25 bp, Artificial sequence
  SiRNA target sequence
aacataaagtacttatccactcact

SEQ ID NO: 249429 - DNA, 25 bp, Artificial sequence
  SiRNA target sequence
acataaagtacttatccactcactg

SEQ ID NO: 249430 - DNA, 25 bp, Artificial sequence
  SiRNA target sequence
cataaagtacttatccactcactgt

SEQ ID NO: 249431 - DNA, 25 bp, Artificial sequence
  SiRNA target sequence
ataaagtacttatccactcactgta

SEQ ID NO: 249432 - DNA, 25 bp, Artificial sequence
  SiRNA target sequence
taaagtacttatccactcactgtac

SEQ ID NO: 249433 - DNA, 25 bp, Artificial sequence
  SiRNA target sequence
aaagtacttatccactcactgtaca

SEQ ID NO: 249434 - DNA, 25 bp, Artificial sequence
  SiRNA target sequence
aagtacttatccactcactgtacat

SEQ ID NO: 249435 - DNA, 25 bp, Artificial sequence
  SiRNA target sequence
agtacttatccactcactgtacata

SEQ ID NO: 249436 - DNA, 25 bp, Artificial sequence
  SiRNA target sequence
gtacttatccactcactgtacatat

SEQ ID NO: 249437 - DNA, 25 bp, Artificial sequence
  SiRNA target sequence
tacttatccactcactgtacatata

SEQ ID NO: 249438 - DNA, 25 bp, Artificial sequence
  SiRNA target sequence
acttatccactcactgtacatatat

SEQ ID NO: 249439 - DNA, 25 bp, Artificial sequence
  SiRNA target sequence
cttatccactcactgtacatatata

SEQ ID NO: 249440 - DNA, 25 bp, Artificial sequence
  SiRNA target sequence
ttatccactcactgtacatatataa

SEQ ID NO: 249441 - DNA, 25 bp, Artificial sequence
  SiRNA target sequence
tatccactcactgtacatatataaa

SEQ ID NO: 249442 - DNA, 25 bp, Artificial sequence
  SiRNA target sequence
atccactcactgtacatatataaaa

SEQ ID NO: 249443 - DNA, 25 bp, Artificial sequence
  SiRNA target sequence
tccactcactgtacatatataaaaa

SEQ ID NO: 249444 - DNA, 25 bp, Artificial sequence
  SiRNA target sequence
ccactcactgtacatatataaaaaa

SEQ ID NO: 249445 - DNA, 25 bp, Artificial sequence
  SiRNA target sequence
cactcactgtacatatataaaaaag

SEQ ID NO: 249446 - DNA, 25 bp, Artificial sequence
  SiRNA target sequence
actcactgtacatatataaaaaagg

SEQ ID NO: 249447 - DNA, 25 bp, Artificial sequence
  SiRNA target sequence
ctcactgtacatatataaaaaagga

SEQ ID NO: 249448 - DNA, 25 bp, Artificial sequence
  SiRNA target sequence
tcactgtacatatataaaaaaggag

SEQ ID NO: 249449 - DNA, 25 bp, Artificial sequence
  SiRNA target sequence
cactgtacatatataaaaaaggaga

SEQ ID NO: 249450 - DNA, 25 bp, Artificial sequence
  SiRNA target sequence
actgtacatatataaaaaaggagat

SEQ ID NO: 249451 - DNA, 25 bp, Artificial sequence
  SiRNA target sequence
ctgtacatatataaaaaaggagata

SEQ ID NO: 249452 - DNA, 25 bp, Artificial sequence
  SiRNA target sequence
tgtacatatataaaaaaggagataa

SEQ ID NO: 249453 - DNA, 25 bp, Artificial sequence
  SiRNA target sequence
gtacatatataaaaaaggagataag

SEQ ID NO: 249454 - DNA, 25 bp, Artificial sequence
  SiRNA target sequence
tacatatataaaaaaggagataagc

SEQ ID NO: 249455 - DNA, 25 bp, Artificial sequence
  SiRNA target sequence
acatatataaaaaaggagataagcc

SEQ ID NO: 249456 - DNA, 25 bp, Artificial sequence
  SiRNA target sequence
catatataaaaaaggagataagccc

SEQ ID NO: 249457 - DNA, 25 bp, Artificial sequence
  SiRNA target sequence
atatataaaaaaggagataagccca

SEQ ID NO: 249458 - DNA, 25 bp, Artificial sequence
  SiRNA target sequence
tatataaaaaaggagataagcccat

SEQ ID NO: 249459 - DNA, 25 bp, Artificial sequence
  SiRNA target sequence
atataaaaaaggagataagcccatc

SEQ ID NO: 249460 - DNA, 25 bp, Artificial sequence
  SiRNA target sequence
tataaaaaaggagataagcccatca

SEQ ID NO: 249461 - DNA, 25 bp, Artificial sequence
  SiRNA target sequence
ataaaaaaggagataagcccatcaa

SEQ ID NO: 249462 - DNA, 25 bp, Artificial sequence
  SiRNA target sequence
taaaaaaggagataagcccatcaag

SEQ ID NO: 249463 - DNA, 25 bp, Artificial sequence
  SiRNA target sequence
aaaaaaggagataagcccatcaagc

SEQ ID NO: 249464 - DNA, 25 bp, Artificial sequence
  SiRNA target sequence
aaaaaggagataagcccatcaagct

SEQ ID NO: 249465 - DNA, 25 bp, Artificial sequence
  SiRNA target sequence
aaaaggagataagcccatcaagctt

SEQ ID NO: 249466 - DNA, 25 bp, Artificial sequence
  SiRNA target sequence
aaaggagataagcccatcaagcttc

SEQ ID NO: 249467 - DNA, 25 bp, Artificial sequence
  SiRNA target sequence
aaggagataagcccatcaagcttct

SEQ ID NO: 249468 - DNA, 25 bp, Artificial sequence
  SiRNA target sequence
aggagataagcccatcaagcttcta

SEQ ID NO: 249469 - DNA, 25 bp, Artificial sequence
  SiRNA target sequence
ggagataagcccatcaagcttctaa

SEQ ID NO: 249470 - DNA, 25 bp, Artificial sequence
  SiRNA target sequence
gagataagcccatcaagcttctaac

SEQ ID NO: 249471 - DNA, 25 bp, Artificial sequence
  SiRNA target sequence
agataagcccatcaagcttctaact

SEQ ID NO: 249472 - DNA, 25 bp, Artificial sequence
  SiRNA target sequence
gataagcccatcaagcttctaactg

SEQ ID NO: 249473 - DNA, 25 bp, Artificial sequence
  SiRNA target sequence
ataagcccatcaagcttctaactga

SEQ ID NO: 249474 - DNA, 25 bp, Artificial sequence
  SiRNA target sequence
taagcccatcaagcttctaactgac

SEQ ID NO: 249475 - DNA, 25 bp, Artificial sequence
  SiRNA target sequence
aagcccatcaagcttctaactgaca

SEQ ID NO: 249476 - DNA, 25 bp, Artificial sequence
  SiRNA target sequence
agcccatcaagcttctaactgacat

SEQ ID NO: 249477 - DNA, 25 bp, Artificial sequence
  SiRNA target sequence
gcccatcaagcttctaactgacatc

SEQ ID NO: 249478 - DNA, 25 bp, Artificial sequence
  SiRNA target sequence
cccatcaagcttctaactgacatct

SEQ ID NO: 249479 - DNA, 25 bp, Artificial sequence
  SiRNA target sequence
ccatcaagcttctaactgacatctt

SEQ ID NO: 249480 - DNA, 25 bp, Artificial sequence
  SiRNA target sequence
catcaagcttctaactgacatctta

SEQ ID NO: 249481 - DNA, 25 bp, Artificial sequence
  SiRNA target sequence
atcaagcttctaactgacatcttac

SEQ ID NO: 249482 - DNA, 25 bp, Artificial sequence
  SiRNA target sequence
tcaagcttctaactgacatcttacc

SEQ ID NO: 249483 - DNA, 25 bp, Artificial sequence
  SiRNA target sequence
caagcttctaactgacatcttacca

SEQ ID NO: 249484 - DNA, 25 bp, Artificial sequence
  SiRNA target sequence
aagcttctaactgacatcttaccat

SEQ ID NO: 249485 - DNA, 25 bp, Artificial sequence
  SiRNA target sequence
agcttctaactgacatcttaccatc

SEQ ID NO: 249486 - DNA, 25 bp, Artificial sequence
  SiRNA target sequence
gcttctaactgacatcttaccatca

SEQ ID NO: 249487 - DNA, 25 bp, Artificial sequence
  SiRNA target sequence
cttctaactgacatcttaccatcac

SEQ ID NO: 249488 - DNA, 25 bp, Artificial sequence
  SiRNA target sequence
ttctaactgacatcttaccatcaca

SEQ ID NO: 249489 - DNA, 25 bp, Artificial sequence
  SiRNA target sequence
tctaactgacatcttaccatcacaa

SEQ ID NO: 249490 - DNA, 25 bp, Artificial sequence
  SiRNA target sequence
ctaactgacatcttaccatcacaaa

SEQ ID NO: 249491 - DNA, 25 bp, Artificial sequence
  SiRNA target sequence
taactgacatcttaccatcacaaaa

SEQ ID NO: 249492 - DNA, 25 bp, Artificial sequence
  SiRNA target sequence
aactgacatcttaccatcacaaaaa

SEQ ID NO: 249493 - DNA, 25 bp, Artificial sequence
  SiRNA target sequence
actgacatcttaccatcacaaaaaa

SEQ ID NO: 249494 - DNA, 25 bp, Artificial sequence
  SiRNA target sequence
ctgacatcttaccatcacaaaaaat

SEQ ID NO: 249495 - DNA, 25 bp, Artificial sequence
  SiRNA target sequence
tgacatcttaccatcacaaaaaata

SEQ ID NO: 249496 - DNA, 25 bp, Artificial sequence
  SiRNA target sequence
gacatcttaccatcacaaaaaatat

SEQ ID NO: 249497 - DNA, 25 bp, Artificial sequence
  SiRNA target sequence
acatcttaccatcacaaaaaatatc

SEQ ID NO: 249498 - DNA, 25 bp, Artificial sequence
  SiRNA target sequence
catcttaccatcacaaaaaatatct

SEQ ID NO: 249499 - DNA, 25 bp, Artificial sequence
  SiRNA target sequence
atcttaccatcacaaaaaatatcta

SEQ ID NO: 249500 - DNA, 25 bp, Artificial sequence
  SiRNA target sequence
tcttaccatcacaaaaaatatctag

SEQ ID NO: 249501 - DNA, 25 bp, Artificial sequence
  SiRNA target sequence
cttaccatcacaaaaaatatctagt

SEQ ID NO: 249502 - DNA, 25 bp, Artificial sequence
  SiRNA target sequence
ttaccatcacaaaaaatatctagtg

SEQ ID NO: 249503 - DNA, 25 bp, Artificial sequence
  SiRNA target sequence
taccatcacaaaaaatatctagtgc

SEQ ID NO: 249504 - DNA, 25 bp, Artificial sequence
  SiRNA target sequence
accatcacaaaaaatatctagtgcc

SEQ ID NO: 249505 - DNA, 25 bp, Artificial sequence
  SiRNA target sequence
ccatcacaaaaaatatctagtgccc

SEQ ID NO: 249506 - DNA, 25 bp, Artificial sequence
  SiRNA target sequence
catcacaaaaaatatctagtgccca

SEQ ID NO: 249507 - DNA, 25 bp, Artificial sequence
  SiRNA target sequence
atcacaaaaaatatctagtgcccat

SEQ ID NO: 249508 - DNA, 25 bp, Artificial sequence
  SiRNA target sequence
tcacaaaaaatatctagtgcccatt

SEQ ID NO: 249509 - DNA, 25 bp, Artificial sequence
  SiRNA target sequence
cacaaaaaatatctagtgcccattg

SEQ ID NO: 249510 - DNA, 25 bp, Artificial sequence
  SiRNA target sequence
acaaaaaatatctagtgcccattgt

SEQ ID NO: 249511 - DNA, 25 bp, Artificial sequence
  SiRNA target sequence
caaaaaatatctagtgcccattgtg

SEQ ID NO: 249512 - DNA, 25 bp, Artificial sequence
  SiRNA target sequence
aaaaaatatctagtgcccattgtga

SEQ ID NO: 249513 - DNA, 25 bp, Artificial sequence
  SiRNA target sequence
aaaaatatctagtgcccattgtgat

SEQ ID NO: 249514 - DNA, 25 bp, Artificial sequence
  SiRNA target sequence
aaaatatctagtgcccattgtgatc

SEQ ID NO: 249515 - DNA, 25 bp, Artificial sequence
  SiRNA target sequence
aaatatctagtgcccattgtgatcc

SEQ ID NO: 249516 - DNA, 25 bp, Artificial sequence
  SiRNA target sequence
aatatctagtgcccattgtgatcct

SEQ ID NO: 249517 - DNA, 25 bp, Artificial sequence
  SiRNA target sequence
atatctagtgcccattgtgatcctt

SEQ ID NO: 249518 - DNA, 25 bp, Artificial sequence
  SiRNA target sequence
tatctagtgcccattgtgatccttt

SEQ ID NO: 249519 - DNA, 25 bp, Artificial sequence
  SiRNA target sequence
atctagtgcccattgtgatcctttt

SEQ ID NO: 249520 - DNA, 25 bp, Artificial sequence
  SiRNA target sequence
tctagtgcccattgtgatccttttt

SEQ ID NO: 249521 - DNA, 25 bp, Artificial sequence
  SiRNA target sequence
ctagtgcccattgtgatcctttttg

SEQ ID NO: 249522 - DNA, 25 bp, Artificial sequence
  SiRNA target sequence
tagtgcccattgtgatcctttttgg

SEQ ID NO: 249523 - DNA, 25 bp, Artificial sequence
  SiRNA target sequence
agtgcccattgtgatcctttttgga

SEQ ID NO: 249524 - DNA, 25 bp, Artificial sequence
  SiRNA target sequence
gtgcccattgtgatcctttttggat

SEQ ID NO: 249525 - DNA, 25 bp, Artificial sequence
  SiRNA target sequence
tgcccattgtgatcctttttggatt

SEQ ID NO: 249526 - DNA, 25 bp, Artificial sequence
  SiRNA target sequence
gcccattgtgatcctttttggattt

SEQ ID NO: 249527 - DNA, 25 bp, Artificial sequence
  SiRNA target sequence
cccattgtgatcctttttggatttt

SEQ ID NO: 249528 - DNA, 25 bp, Artificial sequence
  SiRNA target sequence
ccattgtgatcctttttggatttta

SEQ ID NO: 249529 - DNA, 25 bp, Artificial sequence
  SiRNA target sequence
cattgtgatcctttttggattttat

SEQ ID NO: 249530 - DNA, 25 bp, Artificial sequence
  SiRNA target sequence
attgtgatcctttttggattttata

SEQ ID NO: 249531 - DNA, 25 bp, Artificial sequence
  SiRNA target sequence
ttgtgatcctttttggattttatat

SEQ ID NO: 249532 - DNA, 25 bp, Artificial sequence
  SiRNA target sequence
tgtgatcctttttggattttatatt

SEQ ID NO: 249533 - DNA, 25 bp, Artificial sequence
  SiRNA target sequence
gtgatcctttttggattttatattc

SEQ ID NO: 249534 - DNA, 25 bp, Artificial sequence
  SiRNA target sequence
tgatcctttttggattttatattca

SEQ ID NO: 249535 - DNA, 25 bp, Artificial sequence
  SiRNA target sequence
gatcctttttggattttatattcaa

SEQ ID NO: 249536 - DNA, 25 bp, Artificial sequence
  SiRNA target sequence
atcctttttggattttatattcaaa

SEQ ID NO: 249537 - DNA, 25 bp, Artificial sequence
  SiRNA target sequence
tcctttttggattttatattcaaat

SEQ ID NO: 249538 - DNA, 25 bp, Artificial sequence
  SiRNA target sequence
cctttttggattttatattcaaatg

SEQ ID NO: 249539 - DNA, 25 bp, Artificial sequence
  SiRNA target sequence
ctttttggattttatattcaaatgg

SEQ ID NO: 249540 - DNA, 25 bp, Artificial sequence
  SiRNA target sequence
tttttggattttatattcaaatgga

SEQ ID NO: 249541 - DNA, 25 bp, Artificial sequence
  SiRNA target sequence
ttttggattttatattcaaatggaa

SEQ ID NO: 249542 - DNA, 25 bp, Artificial sequence
  SiRNA target sequence
tttggattttatattcaaatggaat

SEQ ID NO: 249543 - DNA, 25 bp, Artificial sequence
  SiRNA target sequence
ttggattttatattcaaatggaatt

SEQ ID NO: 249544 - DNA, 25 bp, Artificial sequence
  SiRNA target sequence
tggattttatattcaaatggaatta

SEQ ID NO: 249545 - DNA, 25 bp, Artificial sequence
  SiRNA target sequence
ggattttatattcaaatggaattaa

SEQ ID NO: 249546 - DNA, 25 bp, Artificial sequence
  SiRNA target sequence
gattttatattcaaatggaattaaa

SEQ ID NO: 249547 - DNA, 25 bp, Artificial sequence
  SiRNA target sequence
attttatattcaaatggaattaaaa

SEQ ID NO: 249548 - DNA, 25 bp, Artificial sequence
  SiRNA target sequence
ttttatattcaaatggaattaaaag

SEQ ID NO: 249549 - DNA, 25 bp, Artificial sequence
  SiRNA target sequence
tttatattcaaatggaattaaaaga

SEQ ID NO: 249550 - DNA, 25 bp, Artificial sequence
  SiRNA target sequence
ttatattcaaatggaattaaaagag

SEQ ID NO: 249551 - DNA, 25 bp, Artificial sequence
  SiRNA target sequence
tatattcaaatggaattaaaagaga

SEQ ID NO: 249552 - DNA, 25 bp, Artificial sequence
  SiRNA target sequence
atattcaaatggaattaaaagagaa

SEQ ID NO: 249553 - DNA, 25 bp, Artificial sequence
  SiRNA target sequence
tattcaaatggaattaaaagagaac

SEQ ID NO: 249554 - DNA, 25 bp, Artificial sequence
  SiRNA target sequence
attcaaatggaattaaaagagaacc

SEQ ID NO: 249555 - DNA, 25 bp, Artificial sequence
  SiRNA target sequence
ttcaaatggaattaaaagagaacca

SEQ ID NO: 249556 - DNA, 25 bp, Artificial sequence
  SiRNA target sequence
tcaaatggaattaaaagagaaccaa

SEQ ID NO: 249557 - DNA, 25 bp, Artificial sequence
  SiRNA target sequence
caaatggaattaaaagagaaccaat

SEQ ID NO: 249558 - DNA, 25 bp, Artificial sequence
  SiRNA target sequence
aaatggaattaaaagagaaccaatt

SEQ ID NO: 249559 - DNA, 25 bp, Artificial sequence
  SiRNA target sequence
aatggaattaaaagagaaccaatta

SEQ ID NO: 249560 - DNA, 25 bp, Artificial sequence
  SiRNA target sequence
atggaattaaaagagaaccaattag

SEQ ID NO: 249561 - DNA, 25 bp, Artificial sequence
  SiRNA target sequence
tggaattaaaagagaaccaattaga

SEQ ID NO: 249562 - DNA, 25 bp, Artificial sequence
  SiRNA target sequence
ggaattaaaagagaaccaattagaa

SEQ ID NO: 249563 - DNA, 25 bp, Artificial sequence
  SiRNA target sequence
gaattaaaagagaaccaattagaaa

SEQ ID NO: 249564 - DNA, 25 bp, Artificial sequence
  SiRNA target sequence
aattaaaagagaaccaattagaaaa

SEQ ID NO: 249565 - DNA, 25 bp, Artificial sequence
  SiRNA target sequence
attaaaagagaaccaattagaaaaa

SEQ ID NO: 249566 - DNA, 25 bp, Artificial sequence
  SiRNA target sequence
ttaaaagagaaccaattagaaaaaa

SEQ ID NO: 249567 - DNA, 25 bp, Artificial sequence
  SiRNA target sequence
taaaagagaaccaattagaaaaaaa

SEQ ID NO: 249568 - DNA, 25 bp, Artificial sequence
  SiRNA target sequence
aaaagagaaccaattagaaaaaaaa

SEQ ID NO: 249569 - DNA, 25 bp, Artificial sequence
  SiRNA target sequence
aaagagaaccaattagaaaaaaaat

SEQ ID NO: 249570 - DNA, 25 bp, Artificial sequence
  SiRNA target sequence
aagagaaccaattagaaaaaaaatg

SEQ ID NO: 249571 - DNA, 25 bp, Artificial sequence
  SiRNA target sequence
agagaaccaattagaaaaaaaatgc

SEQ ID NO: 249572 - DNA, 25 bp, Artificial sequence
  SiRNA target sequence
gagaaccaattagaaaaaaaatgcc

SEQ ID NO: 249573 - DNA, 25 bp, Artificial sequence
  SiRNA target sequence
agaaccaattagaaaaaaaatgcca

SEQ ID NO: 249574 - DNA, 25 bp, Artificial sequence
  SiRNA target sequence
gaaccaattagaaaaaaaatgccaa

SEQ ID NO: 249575 - DNA, 25 bp, Artificial sequence
  SiRNA target sequence
aaccaattagaaaaaaaatgccaat

SEQ ID NO: 249576 - DNA, 25 bp, Artificial sequence
  SiRNA target sequence
accaattagaaaaaaaatgccaata

SEQ ID NO: 249577 - DNA, 25 bp, Artificial sequence
  SiRNA target sequence
ccaattagaaaaaaaatgccaataa

SEQ ID NO: 249578 - DNA, 25 bp, Artificial sequence
  SiRNA target sequence
caattagaaaaaaaatgccaataaa

SEQ ID NO: 249579 - DNA, 25 bp, Artificial sequence
  SiRNA target sequence
aattagaaaaaaaatgccaataaaa

SEQ ID NO: 249580 - DNA, 25 bp, Artificial sequence
  SiRNA target sequence
attagaaaaaaaatgccaataaaac

SEQ ID NO: 249581 - DNA, 25 bp, Artificial sequence
  SiRNA target sequence
ttagaaaaaaaatgccaataaaacc

SEQ ID NO: 249582 - DNA, 25 bp, Artificial sequence
  SiRNA target sequence
tagaaaaaaaatgccaataaaacca

SEQ ID NO: 249583 - DNA, 25 bp, Artificial sequence
  SiRNA target sequence
agaaaaaaaatgccaataaaaccaa

SEQ ID NO: 249584 - DNA, 25 bp, Artificial sequence
  SiRNA target sequence
gaaaaaaaatgccaataaaaccaaa

SEQ ID NO: 249585 - DNA, 25 bp, Artificial sequence
  SiRNA target sequence
aaaaaaaatgccaataaaaccaaaa

SEQ ID NO: 249586 - DNA, 25 bp, Artificial sequence
  SiRNA target sequence
aaaaaaatgccaataaaaccaaaaa

SEQ ID NO: 249587 - DNA, 25 bp, Artificial sequence
  SiRNA target sequence
aaaaaatgccaataaaaccaaaaat

SEQ ID NO: 249588 - DNA, 25 bp, Artificial sequence
  SiRNA target sequence
aaaaatgccaataaaaccaaaaata

SEQ ID NO: 249589 - DNA, 25 bp, Artificial sequence
  SiRNA target sequence
aaaatgccaataaaaccaaaaataa

SEQ ID NO: 249590 - DNA, 25 bp, Artificial sequence
  SiRNA target sequence
aaatgccaataaaaccaaaaataat

SEQ ID NO: 249591 - DNA, 25 bp, Artificial sequence
  SiRNA target sequence
aatgccaataaaaccaaaaataata

SEQ ID NO: 249592 - DNA, 25 bp, Artificial sequence
  SiRNA target sequence
atgccaataaaaccaaaaataataa

SEQ ID NO: 249593 - DNA, 25 bp, Artificial sequence
  SiRNA target sequence
tgccaataaaaccaaaaataataaa

SEQ ID NO: 249594 - DNA, 25 bp, Artificial sequence
  SiRNA target sequence
gccaataaaaccaaaaataataaaa

SEQ ID NO: 249595 - DNA, 25 bp, Artificial sequence
  SiRNA target sequence
ccaataaaaccaaaaataataaaat

SEQ ID NO: 249596 - DNA, 25 bp, Artificial sequence
  SiRNA target sequence
caataaaaccaaaaataataaaatt

SEQ ID NO: 249597 - DNA, 25 bp, Artificial sequence
  SiRNA target sequence
aataaaaccaaaaataataaaattc

SEQ ID NO: 249598 - DNA, 25 bp, Artificial sequence
  SiRNA target sequence
ataaaaccaaaaataataaaattca

SEQ ID NO: 249599 - DNA, 25 bp, Artificial sequence
  SiRNA target sequence
taaaaccaaaaataataaaattcac

SEQ ID NO: 249600 - DNA, 25 bp, Artificial sequence
  SiRNA target sequence
aaaaccaaaaataataaaattcaca

SEQ ID NO: 249601 - DNA, 25 bp, Artificial sequence
  SiRNA target sequence
aaaccaaaaataataaaattcacaa

SEQ ID NO: 249602 - DNA, 25 bp, Artificial sequence
  SiRNA target sequence
aaccaaaaataataaaattcacaat

SEQ ID NO: 249603 - DNA, 25 bp, Artificial sequence
  SiRNA target sequence
accaaaaataataaaattcacaata

SEQ ID NO: 249604 - DNA, 25 bp, Artificial sequence
  SiRNA target sequence
ccaaaaataataaaattcacaatac

SEQ ID NO: 249605 - DNA, 25 bp, Artificial sequence
  SiRNA target sequence
caaaaataataaaattcacaatact

SEQ ID NO: 249606 - DNA, 25 bp, Artificial sequence
  SiRNA target sequence
aaaaataataaaattcacaatacta

SEQ ID NO: 249607 - DNA, 25 bp, Artificial sequence
  SiRNA target sequence
aaaataataaaattcacaatactaa

SEQ ID NO: 249608 - DNA, 25 bp, Artificial sequence
  SiRNA target sequence
aaataataaaattcacaatactaag

SEQ ID NO: 249609 - DNA, 25 bp, Artificial sequence
  SiRNA target sequence
aataataaaattcacaatactaaga

SEQ ID NO: 249610 - DNA, 25 bp, Artificial sequence
  SiRNA target sequence
ataataaaattcacaatactaagaa

SEQ ID NO: 249611 - DNA, 25 bp, Artificial sequence
  SiRNA target sequence
taataaaattcacaatactaagaat

SEQ ID NO: 249612 - DNA, 25 bp, Artificial sequence
  SiRNA target sequence
aataaaattcacaatactaagaata

SEQ ID NO: 249613 - DNA, 25 bp, Artificial sequence
  SiRNA target sequence
ataaaattcacaatactaagaatag

SEQ ID NO: 249614 - DNA, 25 bp, Artificial sequence
  SiRNA target sequence
taaaattcacaatactaagaataga

SEQ ID NO: 249615 - DNA, 25 bp, Artificial sequence
  SiRNA target sequence
aaaattcacaatactaagaatagag

SEQ ID NO: 249616 - DNA, 25 bp, Artificial sequence
  SiRNA target sequence
aaattcacaatactaagaatagagt

SEQ ID NO: 249617 - DNA, 25 bp, Artificial sequence
  SiRNA target sequence
aattcacaatactaagaatagagta

SEQ ID NO: 249618 - DNA, 25 bp, Artificial sequence
  SiRNA target sequence
attcacaatactaagaatagagtac

SEQ ID NO: 249619 - DNA, 25 bp, Artificial sequence
  SiRNA target sequence
ttcacaatactaagaatagagtaca

SEQ ID NO: 249620 - DNA, 25 bp, Artificial sequence
  SiRNA target sequence
tcacaatactaagaatagagtacac

SEQ ID NO: 249621 - DNA, 25 bp, Artificial sequence
  SiRNA target sequence
cacaatactaagaatagagtacaca

SEQ ID NO: 249622 - DNA, 25 bp, Artificial sequence
  SiRNA target sequence
acaatactaagaatagagtacacat

SEQ ID NO: 249623 - DNA, 25 bp, Artificial sequence
  SiRNA target sequence
caatactaagaatagagtacacatt

SEQ ID NO: 249624 - DNA, 25 bp, Artificial sequence
  SiRNA target sequence
aatactaagaatagagtacacattt

SEQ ID NO: 249625 - DNA, 25 bp, Artificial sequence
  SiRNA target sequence
atactaagaatagagtacacattta

SEQ ID NO: 249626 - DNA, 25 bp, Artificial sequence
  SiRNA target sequence
tactaagaatagagtacacatttaa

SEQ ID NO: 249627 - DNA, 25 bp, Artificial sequence
  SiRNA target sequence
actaagaatagagtacacatttaaa

SEQ ID NO: 249628 - DNA, 25 bp, Artificial sequence
  SiRNA target sequence
ctaagaatagagtacacatttaaag

SEQ ID NO: 249629 - DNA, 25 bp, Artificial sequence
  SiRNA target sequence
taagaatagagtacacatttaaagc

SEQ ID NO: 249630 - DNA, 25 bp, Artificial sequence
  SiRNA target sequence
aagaatagagtacacatttaaagcc

SEQ ID NO: 249631 - DNA, 25 bp, Artificial sequence
  SiRNA target sequence
agaatagagtacacatttaaagcct

SEQ ID NO: 249632 - DNA, 25 bp, Artificial sequence
  SiRNA target sequence
gaatagagtacacatttaaagcctt

SEQ ID NO: 249633 - DNA, 25 bp, Artificial sequence
  SiRNA target sequence
aatagagtacacatttaaagccttt

SEQ ID NO: 249634 - DNA, 25 bp, Artificial sequence
  SiRNA target sequence
atagagtacacatttaaagcctttt

SEQ ID NO: 249635 - DNA, 25 bp, Artificial sequence
  SiRNA target sequence
tagagtacacatttaaagccttttg

SEQ ID NO: 249636 - DNA, 25 bp, Artificial sequence
  SiRNA target sequence
agagtacacatttaaagccttttgg

SEQ ID NO: 249637 - DNA, 25 bp, Artificial sequence
  SiRNA target sequence
gagtacacatttaaagccttttgga

SEQ ID NO: 249638 - DNA, 25 bp, Artificial sequence
  SiRNA target sequence
agtacacatttaaagccttttggac

SEQ ID NO: 249639 - DNA, 25 bp, Artificial sequence
  SiRNA target sequence
gtacacatttaaagccttttggaca

SEQ ID NO: 249640 - DNA, 25 bp, Artificial sequence
  SiRNA target sequence
tacacatttaaagccttttggacat

SEQ ID NO: 249641 - DNA, 25 bp, Artificial sequence
  SiRNA target sequence
acacatttaaagccttttggacata

SEQ ID NO: 249642 - DNA, 25 bp, Artificial sequence
  SiRNA target sequence
cacatttaaagccttttggacatat

SEQ ID NO: 249643 - DNA, 25 bp, Artificial sequence
  SiRNA target sequence
acatttaaagccttttggacatatg

SEQ ID NO: 249644 - DNA, 25 bp, Artificial sequence
  SiRNA target sequence
catttaaagccttttggacatatga

SEQ ID NO: 249645 - DNA, 25 bp, Artificial sequence
  SiRNA target sequence
atttaaagccttttggacatatgac

SEQ ID NO: 249646 - DNA, 25 bp, Artificial sequence
  SiRNA target sequence
tttaaagccttttggacatatgaca

SEQ ID NO: 249647 - DNA, 25 bp, Artificial sequence
  SiRNA target sequence
ttaaagccttttggacatatgacat

SEQ ID NO: 249648 - DNA, 25 bp, Artificial sequence
  SiRNA target sequence
taaagccttttggacatatgacatc

SEQ ID NO: 249649 - DNA, 25 bp, Artificial sequence
  SiRNA target sequence
aaagccttttggacatatgacatca

SEQ ID NO: 249650 - DNA, 25 bp, Artificial sequence
  SiRNA target sequence
aagccttttggacatatgacatcat

SEQ ID NO: 249651 - DNA, 25 bp, Artificial sequence
  SiRNA target sequence
agccttttggacatatgacatcata

SEQ ID NO: 249652 - DNA, 25 bp, Artificial sequence
  SiRNA target sequence
gccttttggacatatgacatcataa

SEQ ID NO: 249653 - DNA, 25 bp, Artificial sequence
  SiRNA target sequence
ccttttggacatatgacatcataag

SEQ ID NO: 249654 - DNA, 25 bp, Artificial sequence
  SiRNA target sequence
cttttggacatatgacatcataaga

SEQ ID NO: 249655 - DNA, 25 bp, Artificial sequence
  SiRNA target sequence
ttttggacatatgacatcataagac

SEQ ID NO: 249656 - DNA, 25 bp, Artificial sequence
  SiRNA target sequence
tttggacatatgacatcataagaca

SEQ ID NO: 249657 - DNA, 25 bp, Artificial sequence
  SiRNA target sequence
ttggacatatgacatcataagacat

SEQ ID NO: 249658 - DNA, 25 bp, Artificial sequence
  SiRNA target sequence
tggacatatgacatcataagacata

SEQ ID NO: 249659 - DNA, 25 bp, Artificial sequence
  SiRNA target sequence
ggacatatgacatcataagacatat

SEQ ID NO: 249660 - DNA, 25 bp, Artificial sequence
  SiRNA target sequence
gacatatgacatcataagacatata

SEQ ID NO: 249661 - DNA, 25 bp, Artificial sequence
  SiRNA target sequence
acatatgacatcataagacatataa

SEQ ID NO: 249662 - DNA, 25 bp, Artificial sequence
  SiRNA target sequence
catatgacatcataagacatataat

SEQ ID NO: 249663 - DNA, 25 bp, Artificial sequence
  SiRNA target sequence
atatgacatcataagacatataatt

SEQ ID NO: 249664 - DNA, 25 bp, Artificial sequence
  SiRNA target sequence
tatgacatcataagacatataattg

SEQ ID NO: 249665 - DNA, 25 bp, Artificial sequence
  SiRNA target sequence
atgacatcataagacatataattgg

SEQ ID NO: 249666 - DNA, 25 bp, Artificial sequence
  SiRNA target sequence
tgacatcataagacatataattggc

SEQ ID NO: 249667 - DNA, 25 bp, Artificial sequence
  SiRNA target sequence
gacatcataagacatataattggca

SEQ ID NO: 249668 - DNA, 25 bp, Artificial sequence
  SiRNA target sequence
acatcataagacatataattggcag

SEQ ID NO: 249669 - DNA, 25 bp, Artificial sequence
  SiRNA target sequence
catcataagacatataattggcagt

SEQ ID NO: 249670 - DNA, 25 bp, Artificial sequence
  SiRNA target sequence
atcataagacatataattggcagtg

SEQ ID NO: 249671 - DNA, 25 bp, Artificial sequence
  SiRNA target sequence
tcataagacatataattggcagtga

SEQ ID NO: 249672 - DNA, 25 bp, Artificial sequence
  SiRNA target sequence
cataagacatataattggcagtgaa

SEQ ID NO: 249673 - DNA, 25 bp, Artificial sequence
  SiRNA target sequence
ataagacatataattggcagtgaaa

SEQ ID NO: 249674 - DNA, 25 bp, Artificial sequence
  SiRNA target sequence
taagacatataattggcagtgaaaa

SEQ ID NO: 249675 - DNA, 25 bp, Artificial sequence
  SiRNA target sequence
aagacatataattggcagtgaaaag

SEQ ID NO: 249676 - DNA, 25 bp, Artificial sequence
  SiRNA target sequence
agacatataattggcagtgaaaaga

SEQ ID NO: 249677 - DNA, 25 bp, Artificial sequence
  SiRNA target sequence
gacatataattggcagtgaaaagaa

SEQ ID NO: 249678 - DNA, 25 bp, Artificial sequence
  SiRNA target sequence
acatataattggcagtgaaaagaaa

SEQ ID NO: 249679 - DNA, 25 bp, Artificial sequence
  SiRNA target sequence
catataattggcagtgaaaagaaaa

SEQ ID NO: 249680 - DNA, 25 bp, Artificial sequence
  SiRNA target sequence
atataattggcagtgaaaagaaaag

SEQ ID NO: 249681 - DNA, 25 bp, Artificial sequence
  SiRNA target sequence
tataattggcagtgaaaagaaaagc

SEQ ID NO: 249682 - DNA, 25 bp, Artificial sequence
  SiRNA target sequence
ataattggcagtgaaaagaaaagct

SEQ ID NO: 249683 - DNA, 25 bp, Artificial sequence
  SiRNA target sequence
taattggcagtgaaaagaaaagctt

SEQ ID NO: 249684 - DNA, 25 bp, Artificial sequence
  SiRNA target sequence
aattggcagtgaaaagaaaagcttt

SEQ ID NO: 249685 - DNA, 25 bp, Artificial sequence
  SiRNA target sequence
attggcagtgaaaagaaaagcttta

SEQ ID NO: 249686 - DNA, 25 bp, Artificial sequence
  SiRNA target sequence
ttggcagtgaaaagaaaagctttat

SEQ ID NO: 249687 - DNA, 25 bp, Artificial sequence
  SiRNA target sequence
tggcagtgaaaagaaaagctttatg

SEQ ID NO: 249688 - DNA, 25 bp, Artificial sequence
  SiRNA target sequence
ggcagtgaaaagaaaagctttatgt

SEQ ID NO: 249689 - DNA, 25 bp, Artificial sequence
  SiRNA target sequence
gcagtgaaaagaaaagctttatgta

SEQ ID NO: 249690 - DNA, 25 bp, Artificial sequence
  SiRNA target sequence
cagtgaaaagaaaagctttatgtag

SEQ ID NO: 249691 - DNA, 25 bp, Artificial sequence
  SiRNA target sequence
agtgaaaagaaaagctttatgtagt

SEQ ID NO: 249692 - DNA, 25 bp, Artificial sequence
  SiRNA target sequence
gtgaaaagaaaagctttatgtagta

SEQ ID NO: 249693 - DNA, 25 bp, Artificial sequence
  SiRNA target sequence
tgaaaagaaaagctttatgtagtac

SEQ ID NO: 249694 - DNA, 25 bp, Artificial sequence
  SiRNA target sequence
gaaaagaaaagctttatgtagtaca

SEQ ID NO: 249695 - DNA, 25 bp, Artificial sequence
  SiRNA target sequence
aaaagaaaagctttatgtagtacag

SEQ ID NO: 249696 - DNA, 25 bp, Artificial sequence
  SiRNA target sequence
aaagaaaagctttatgtagtacagt

SEQ ID NO: 249697 - DNA, 25 bp, Artificial sequence
  SiRNA target sequence
aagaaaagctttatgtagtacagtg

SEQ ID NO: 249698 - DNA, 25 bp, Artificial sequence
  SiRNA target sequence
agaaaagctttatgtagtacagtga

SEQ ID NO: 249699 - DNA, 25 bp, Artificial sequence
  SiRNA target sequence
gaaaagctttatgtagtacagtgac

SEQ ID NO: 249700 - DNA, 25 bp, Artificial sequence
  SiRNA target sequence
aaaagctttatgtagtacagtgacg

SEQ ID NO: 249701 - DNA, 25 bp, Artificial sequence
  SiRNA target sequence
aaagctttatgtagtacagtgacga

SEQ ID NO: 249702 - DNA, 25 bp, Artificial sequence
  SiRNA target sequence
aagctttatgtagtacagtgacgaa

SEQ ID NO: 249703 - DNA, 25 bp, Artificial sequence
  SiRNA target sequence
agctttatgtagtacagtgacgaag

SEQ ID NO: 249704 - DNA, 25 bp, Artificial sequence
  SiRNA target sequence
gctttatgtagtacagtgacgaagg

SEQ ID NO: 249705 - DNA, 25 bp, Artificial sequence
  SiRNA target sequence
ctttatgtagtacagtgacgaagga

SEQ ID NO: 249706 - DNA, 25 bp, Artificial sequence
  SiRNA target sequence
tttatgtagtacagtgacgaaggaa

SEQ ID NO: 249707 - DNA, 25 bp, Artificial sequence
  SiRNA target sequence
ttatgtagtacagtgacgaaggaat

SEQ ID NO: 249708 - DNA, 25 bp, Artificial sequence
  SiRNA target sequence
tatgtagtacagtgacgaaggaatt

SEQ ID NO: 249709 - DNA, 25 bp, Artificial sequence
  SiRNA target sequence
atgtagtacagtgacgaaggaattt

SEQ ID NO: 249710 - DNA, 25 bp, Artificial sequence
  SiRNA target sequence
tgtagtacagtgacgaaggaatttg

SEQ ID NO: 249711 - DNA, 25 bp, Artificial sequence
  SiRNA target sequence
gtagtacagtgacgaaggaatttgt

SEQ ID NO: 249712 - DNA, 25 bp, Artificial sequence
  SiRNA target sequence
tagtacagtgacgaaggaatttgtt

SEQ ID NO: 249713 - DNA, 25 bp, Artificial sequence
  SiRNA target sequence
agtacagtgacgaaggaatttgttt

SEQ ID NO: 249714 - DNA, 25 bp, Artificial sequence
  SiRNA target sequence
gtacagtgacgaaggaatttgtttt

SEQ ID NO: 249715 - DNA, 25 bp, Artificial sequence
  SiRNA target sequence
tacagtgacgaaggaatttgttttg

SEQ ID NO: 249716 - DNA, 25 bp, Artificial sequence
  SiRNA target sequence
acagtgacgaaggaatttgttttgt

SEQ ID NO: 249717 - DNA, 25 bp, Artificial sequence
  SiRNA target sequence
cagtgacgaaggaatttgttttgtc

SEQ ID NO: 249718 - DNA, 25 bp, Artificial sequence
  SiRNA target sequence
agtgacgaaggaatttgttttgtca

SEQ ID NO: 249719 - DNA, 25 bp, Artificial sequence
  SiRNA target sequence
gtgacgaaggaatttgttttgtcat

SEQ ID NO: 249720 - DNA, 25 bp, Artificial sequence
  SiRNA target sequence
tgacgaaggaatttgttttgtcata

SEQ ID NO: 249721 - DNA, 25 bp, Artificial sequence
  SiRNA target sequence
gacgaaggaatttgttttgtcataa

SEQ ID NO: 249722 - DNA, 25 bp, Artificial sequence
  SiRNA target sequence
acgaaggaatttgttttgtcataat

SEQ ID NO: 249723 - DNA, 25 bp, Artificial sequence
  SiRNA target sequence
cgaaggaatttgttttgtcataatc

SEQ ID NO: 249724 - DNA, 25 bp, Artificial sequence
  SiRNA target sequence
gaaggaatttgttttgtcataatca

SEQ ID NO: 249725 - DNA, 25 bp, Artificial sequence
  SiRNA target sequence
aaggaatttgttttgtcataatcac

SEQ ID NO: 249726 - DNA, 25 bp, Artificial sequence
  SiRNA target sequence
aggaatttgttttgtcataatcacg

SEQ ID NO: 249727 - DNA, 25 bp, Artificial sequence
  SiRNA target sequence
ggaatttgttttgtcataatcacga

SEQ ID NO: 249728 - DNA, 25 bp, Artificial sequence
  SiRNA target sequence
gaatttgttttgtcataatcacgat

SEQ ID NO: 249729 - DNA, 25 bp, Artificial sequence
  SiRNA target sequence
aatttgttttgtcataatcacgatt

SEQ ID NO: 249730 - DNA, 25 bp, Artificial sequence
  SiRNA target sequence
atttgttttgtcataatcacgattt

SEQ ID NO: 249731 - DNA, 25 bp, Artificial sequence
  SiRNA target sequence
tttgttttgtcataatcacgatttc

SEQ ID NO: 249732 - DNA, 25 bp, Artificial sequence
  SiRNA target sequence
ttgttttgtcataatcacgatttct

SEQ ID NO: 249733 - DNA, 25 bp, Artificial sequence
  SiRNA target sequence
tgttttgtcataatcacgatttctc

SEQ ID NO: 249734 - DNA, 25 bp, Artificial sequence
  SiRNA target sequence
gttttgtcataatcacgatttctct

SEQ ID NO: 249735 - DNA, 25 bp, Artificial sequence
  SiRNA target sequence
ttttgtcataatcacgatttctctg

SEQ ID NO: 249736 - DNA, 25 bp, Artificial sequence
  SiRNA target sequence
tttgtcataatcacgatttctctgt

SEQ ID NO: 249737 - DNA, 25 bp, Artificial sequence
  SiRNA target sequence
ttgtcataatcacgatttctctgta

SEQ ID NO: 249738 - DNA, 25 bp, Artificial sequence
  SiRNA target sequence
tgtcataatcacgatttctctgtaa

SEQ ID NO: 249739 - DNA, 25 bp, Artificial sequence
  SiRNA target sequence
gtcataatcacgatttctctgtaaa

SEQ ID NO: 249740 - DNA, 25 bp, Artificial sequence
  SiRNA target sequence
tcataatcacgatttctctgtaaaa

SEQ ID NO: 249741 - DNA, 25 bp, Artificial sequence
  SiRNA target sequence
cataatcacgatttctctgtaaaat

SEQ ID NO: 249742 - DNA, 25 bp, Artificial sequence
  SiRNA target sequence
ataatcacgatttctctgtaaaatt

SEQ ID NO: 249743 - DNA, 25 bp, Artificial sequence
  SiRNA target sequence
taatcacgatttctctgtaaaattc

SEQ ID NO: 249744 - DNA, 25 bp, Artificial sequence
  SiRNA target sequence
aatcacgatttctctgtaaaattcc

SEQ ID NO: 249745 - DNA, 25 bp, Artificial sequence
  SiRNA target sequence
atcacgatttctctgtaaaattcca

SEQ ID NO: 249746 - DNA, 25 bp, Artificial sequence
  SiRNA target sequence
tcacgatttctctgtaaaattccaa

SEQ ID NO: 249747 - DNA, 25 bp, Artificial sequence
  SiRNA target sequence
cacgatttctctgtaaaattccaat

SEQ ID NO: 249748 - DNA, 25 bp, Artificial sequence
  SiRNA target sequence
acgatttctctgtaaaattccaata

SEQ ID NO: 249749 - DNA, 25 bp, Artificial sequence
  SiRNA target sequence
cgatttctctgtaaaattccaataa

SEQ ID NO: 249750 - DNA, 25 bp, Artificial sequence
  SiRNA target sequence
gatttctctgtaaaattccaataat

SEQ ID NO: 249751 - DNA, 25 bp, Artificial sequence
  SiRNA target sequence
atttctctgtaaaattccaataatg

SEQ ID NO: 249752 - DNA, 25 bp, Artificial sequence
  SiRNA target sequence
tttctctgtaaaattccaataatgt

SEQ ID NO: 249753 - DNA, 25 bp, Artificial sequence
  SiRNA target sequence
ttctctgtaaaattccaataatgtg

SEQ ID NO: 249754 - DNA, 25 bp, Artificial sequence
  SiRNA target sequence
tctctgtaaaattccaataatgtgt

SEQ ID NO: 249755 - DNA, 25 bp, Artificial sequence
  SiRNA target sequence
ctctgtaaaattccaataatgtgtt

SEQ ID NO: 249756 - DNA, 25 bp, Artificial sequence
  SiRNA target sequence
tctgtaaaattccaataatgtgtta

SEQ ID NO: 249757 - DNA, 25 bp, Artificial sequence
  SiRNA target sequence
ctgtaaaattccaataatgtgttaa

SEQ ID NO: 249758 - DNA, 25 bp, Artificial sequence
  SiRNA target sequence
tgtaaaattccaataatgtgttaat

SEQ ID NO: 249759 - DNA, 25 bp, Artificial sequence
  SiRNA target sequence
gtaaaattccaataatgtgttaatc

SEQ ID NO: 249760 - DNA, 25 bp, Artificial sequence
  SiRNA target sequence
taaaattccaataatgtgttaatca

SEQ ID NO: 249761 - DNA, 25 bp, Artificial sequence
  SiRNA target sequence
aaaattccaataatgtgttaatcac

SEQ ID NO: 249762 - DNA, 25 bp, Artificial sequence
  SiRNA target sequence
aaattccaataatgtgttaatcaca

SEQ ID NO: 249763 - DNA, 25 bp, Artificial sequence
  SiRNA target sequence
aattccaataatgtgttaatcacac

SEQ ID NO: 249764 - DNA, 25 bp, Artificial sequence
  SiRNA target sequence
attccaataatgtgttaatcacaca

SEQ ID NO: 249765 - DNA, 25 bp, Artificial sequence
  SiRNA target sequence
ttccaataatgtgttaatcacacat

SEQ ID NO: 249766 - DNA, 25 bp, Artificial sequence
  SiRNA target sequence
tccaataatgtgttaatcacacatg

SEQ ID NO: 249767 - DNA, 25 bp, Artificial sequence
  SiRNA target sequence
ccaataatgtgttaatcacacatgc

SEQ ID NO: 249768 - DNA, 25 bp, Artificial sequence
  SiRNA target sequence
caataatgtgttaatcacacatgcc

SEQ ID NO: 249769 - DNA, 25 bp, Artificial sequence
  SiRNA target sequence
aataatgtgttaatcacacatgcca

SEQ ID NO: 249770 - DNA, 25 bp, Artificial sequence
  SiRNA target sequence
ataatgtgttaatcacacatgccat

SEQ ID NO: 249771 - DNA, 25 bp, Artificial sequence
  SiRNA target sequence
taatgtgttaatcacacatgccatt

SEQ ID NO: 249772 - DNA, 25 bp, Artificial sequence
  SiRNA target sequence
aatgtgttaatcacacatgccatta

SEQ ID NO: 249773 - DNA, 25 bp, Artificial sequence
  SiRNA target sequence
atgtgttaatcacacatgccattaa

SEQ ID NO: 249774 - DNA, 25 bp, Artificial sequence
  SiRNA target sequence
tgtgttaatcacacatgccattaaa

SEQ ID NO: 249775 - DNA, 25 bp, Artificial sequence
  SiRNA target sequence
gtgttaatcacacatgccattaaaa

SEQ ID NO: 249776 - DNA, 25 bp, Artificial sequence
  SiRNA target sequence
tgttaatcacacatgccattaaaaa

SEQ ID NO: 249777 - DNA, 25 bp, Artificial sequence
  SiRNA target sequence
gttaatcacacatgccattaaaaat

SEQ ID NO: 249778 - DNA, 25 bp, Artificial sequence
  SiRNA target sequence
ttaatcacacatgccattaaaaatg

SEQ ID NO: 249779 - DNA, 25 bp, Artificial sequence
  SiRNA target sequence
taatcacacatgccattaaaaatgt

SEQ ID NO: 249780 - DNA, 25 bp, Artificial sequence
  SiRNA target sequence
aatcacacatgccattaaaaatgta

SEQ ID NO: 249781 - DNA, 25 bp, Artificial sequence
  SiRNA target sequence
atcacacatgccattaaaaatgtaa

SEQ ID NO: 249782 - DNA, 25 bp, Artificial sequence
  SiRNA target sequence
tcacacatgccattaaaaatgtaag

SEQ ID NO: 249783 - DNA, 25 bp, Artificial sequence
  SiRNA target sequence
cacacatgccattaaaaatgtaagt

SEQ ID NO: 249784 - DNA, 25 bp, Artificial sequence
  SiRNA target sequence
acacatgccattaaaaatgtaagtg

SEQ ID NO: 249785 - DNA, 25 bp, Artificial sequence
  SiRNA target sequence
cacatgccattaaaaatgtaagtga

SEQ ID NO: 249786 - DNA, 25 bp, Artificial sequence
  SiRNA target sequence
acatgccattaaaaatgtaagtgac

SEQ ID NO: 249787 - DNA, 25 bp, Artificial sequence
  SiRNA target sequence
catgccattaaaaatgtaagtgaca

SEQ ID NO: 249788 - DNA, 25 bp, Artificial sequence
  SiRNA target sequence
atgccattaaaaatgtaagtgacaa

SEQ ID NO: 249789 - DNA, 25 bp, Artificial sequence
  SiRNA target sequence
tgccattaaaaatgtaagtgacaat

SEQ ID NO: 249790 - DNA, 25 bp, Artificial sequence
  SiRNA target sequence
gccattaaaaatgtaagtgacaata

SEQ ID NO: 249791 - DNA, 25 bp, Artificial sequence
  SiRNA target sequence
ccattaaaaatgtaagtgacaataa

SEQ ID NO: 249792 - DNA, 25 bp, Artificial sequence
  SiRNA target sequence
cattaaaaatgtaagtgacaataat

SEQ ID NO: 249793 - DNA, 25 bp, Artificial sequence
  SiRNA target sequence
attaaaaatgtaagtgacaataata

SEQ ID NO: 249794 - DNA, 25 bp, Artificial sequence
  SiRNA target sequence
ttaaaaatgtaagtgacaataatat

SEQ ID NO: 249795 - DNA, 25 bp, Artificial sequence
  SiRNA target sequence
taaaaatgtaagtgacaataatatt

SEQ ID NO: 249796 - DNA, 25 bp, Artificial sequence
  SiRNA target sequence
aaaaatgtaagtgacaataatattt

SEQ ID NO: 249797 - DNA, 25 bp, Artificial sequence
  SiRNA target sequence
aaaatgtaagtgacaataatatttt

SEQ ID NO: 249798 - DNA, 25 bp, Artificial sequence
  SiRNA target sequence
aaatgtaagtgacaataatattttt

SEQ ID NO: 249799 - DNA, 25 bp, Artificial sequence
  SiRNA target sequence
aatgtaagtgacaataatattttta

SEQ ID NO: 249800 - DNA, 25 bp, Artificial sequence
  SiRNA target sequence
atgtaagtgacaataatatttttac

SEQ ID NO: 249801 - DNA, 25 bp, Artificial sequence
  SiRNA target sequence
tgtaagtgacaataatatttttact

SEQ ID NO: 249802 - DNA, 25 bp, Artificial sequence
  SiRNA target sequence
gtaagtgacaataatatttttactt

SEQ ID NO: 249803 - DNA, 25 bp, Artificial sequence
  SiRNA target sequence
taagtgacaataatatttttacttt

SEQ ID NO: 249804 - DNA, 25 bp, Artificial sequence
  SiRNA target sequence
aagtgacaataatatttttactttt

SEQ ID NO: 249805 - DNA, 25 bp, Artificial sequence
  SiRNA target sequence
agtgacaataatatttttacttttg

SEQ ID NO: 249806 - DNA, 25 bp, Artificial sequence
  SiRNA target sequence
gtgacaataatatttttacttttgg

SEQ ID NO: 249807 - DNA, 25 bp, Artificial sequence
  SiRNA target sequence
tgacaataatatttttacttttggg

SEQ ID NO: 249808 - DNA, 25 bp, Artificial sequence
  SiRNA target sequence
gacaataatatttttacttttggga

SEQ ID NO: 249809 - DNA, 25 bp, Artificial sequence
  SiRNA target sequence
acaataatatttttacttttgggaa

SEQ ID NO: 249810 - DNA, 25 bp, Artificial sequence
  SiRNA target sequence
caataatatttttacttttgggaat

SEQ ID NO: 249811 - DNA, 25 bp, Artificial sequence
  SiRNA target sequence
aataatatttttacttttgggaatt

SEQ ID NO: 249812 - DNA, 25 bp, Artificial sequence
  SiRNA target sequence
ataatatttttacttttgggaattt

SEQ ID NO: 249813 - DNA, 25 bp, Artificial sequence
  SiRNA target sequence
taatatttttacttttgggaatttt

SEQ ID NO: 249814 - DNA, 25 bp, Artificial sequence
  SiRNA target sequence
aatatttttacttttgggaattttt

SEQ ID NO: 249815 - DNA, 25 bp, Artificial sequence
  SiRNA target sequence
atatttttacttttgggaatttttt

SEQ ID NO: 249816 - DNA, 25 bp, Artificial sequence
  SiRNA target sequence
tatttttacttttgggaattttttt

SEQ ID NO: 249817 - DNA, 25 bp, Artificial sequence
  SiRNA target sequence
atttttacttttgggaatttttttg

SEQ ID NO: 249818 - DNA, 25 bp, Artificial sequence
  SiRNA target sequence
tttttacttttgggaatttttttgt

SEQ ID NO: 249819 - DNA, 25 bp, Artificial sequence
  SiRNA target sequence
ttttacttttgggaatttttttgtc

SEQ ID NO: 249820 - DNA, 25 bp, Artificial sequence
  SiRNA target sequence
tttacttttgggaatttttttgtct

SEQ ID NO: 249821 - DNA, 25 bp, Artificial sequence
  SiRNA target sequence
ttacttttgggaatttttttgtctt

SEQ ID NO: 249822 - DNA, 25 bp, Artificial sequence
  SiRNA target sequence
tacttttgggaatttttttgtctta

SEQ ID NO: 249823 - DNA, 25 bp, Artificial sequence
  SiRNA target sequence
acttttgggaatttttttgtcttag

SEQ ID NO: 249824 - DNA, 25 bp, Artificial sequence
  SiRNA target sequence
cttttgggaatttttttgtcttagt

SEQ ID NO: 249825 - DNA, 25 bp, Artificial sequence
  SiRNA target sequence
ttttgggaatttttttgtcttagtc

SEQ ID NO: 249826 - DNA, 25 bp, Artificial sequence
  SiRNA target sequence
tttgggaatttttttgtcttagtca

SEQ ID NO: 249827 - DNA, 25 bp, Artificial sequence
  SiRNA target sequence
ttgggaatttttttgtcttagtcat

SEQ ID NO: 249828 - DNA, 26 bp, Artificial sequence
  SiRNA target sequence
ttaattaaaatcaacatctatctcag

SEQ ID NO: 249829 - DNA, 26 bp, Artificial sequence
  SiRNA target sequence
taattaaaatcaacatctatctcaga

SEQ ID NO: 249830 - DNA, 26 bp, Artificial sequence
  SiRNA target sequence
aattaaaatcaacatctatctcagaa

SEQ ID NO: 249831 - DNA, 26 bp, Artificial sequence
  SiRNA target sequence
attaaaatcaacatctatctcagaat

SEQ ID NO: 249832 - DNA, 26 bp, Artificial sequence
  SiRNA target sequence
ttaaaatcaacatctatctcagaatt

SEQ ID NO: 249833 - DNA, 26 bp, Artificial sequence
  SiRNA target sequence
taaaatcaacatctatctcagaattt

SEQ ID NO: 249834 - DNA, 26 bp, Artificial sequence
  SiRNA target sequence
aaaatcaacatctatctcagaatttt

SEQ ID NO: 249835 - DNA, 26 bp, Artificial sequence
  SiRNA target sequence
aaatcaacatctatctcagaattttg

SEQ ID NO: 249836 - DNA, 26 bp, Artificial sequence
  SiRNA target sequence
aatcaacatctatctcagaattttgt

SEQ ID NO: 249837 - DNA, 26 bp, Artificial sequence
  SiRNA target sequence
atcaacatctatctcagaattttgtt

SEQ ID NO: 249838 - DNA, 26 bp, Artificial sequence
  SiRNA target sequence
tcaacatctatctcagaattttgttc

SEQ ID NO: 249839 - DNA, 26 bp, Artificial sequence
  SiRNA target sequence
caacatctatctcagaattttgttca

SEQ ID NO: 249840 - DNA, 26 bp, Artificial sequence
  SiRNA target sequence
aacatctatctcagaattttgttcaa

SEQ ID NO: 249841 - DNA, 26 bp, Artificial sequence
  SiRNA target sequence
acatctatctcagaattttgttcaat

SEQ ID NO: 249842 - DNA, 26 bp, Artificial sequence
  SiRNA target sequence
catctatctcagaattttgttcaatt

SEQ ID NO: 249843 - DNA, 26 bp, Artificial sequence
  SiRNA target sequence
atctatctcagaattttgttcaattg

SEQ ID NO: 249844 - DNA, 26 bp, Artificial sequence
  SiRNA target sequence
tctatctcagaattttgttcaattga

SEQ ID NO: 249845 - DNA, 26 bp, Artificial sequence
  SiRNA target sequence
ctatctcagaattttgttcaattgat

SEQ ID NO: 249846 - DNA, 26 bp, Artificial sequence
  SiRNA target sequence
tatctcagaattttgttcaattgatt

SEQ ID NO: 249847 - DNA, 26 bp, Artificial sequence
  SiRNA target sequence
atctcagaattttgttcaattgattc

SEQ ID NO: 249848 - DNA, 26 bp, Artificial sequence
  SiRNA target sequence
tctcagaattttgttcaattgattca

SEQ ID NO: 249849 - DNA, 26 bp, Artificial sequence
  SiRNA target sequence
ctcagaattttgttcaattgattcat

SEQ ID NO: 249850 - DNA, 26 bp, Artificial sequence
  SiRNA target sequence
tcagaattttgttcaattgattcatt

SEQ ID NO: 249851 - DNA, 26 bp, Artificial sequence
  SiRNA target sequence
cagaattttgttcaattgattcatta

SEQ ID NO: 249852 - DNA, 26 bp, Artificial sequence
  SiRNA target sequence
agaattttgttcaattgattcattat

SEQ ID NO: 249853 - DNA, 26 bp, Artificial sequence
  SiRNA target sequence
gaattttgttcaattgattcattata

SEQ ID NO: 249854 - DNA, 26 bp, Artificial sequence
  SiRNA target sequence
aattttgttcaattgattcattatat

SEQ ID NO: 249855 - DNA, 26 bp, Artificial sequence
  SiRNA target sequence
attttgttcaattgattcattatatt

SEQ ID NO: 249856 - DNA, 26 bp, Artificial sequence
  SiRNA target sequence
ttttgttcaattgattcattatattt

SEQ ID NO: 249857 - DNA, 26 bp, Artificial sequence
  SiRNA target sequence
tttgttcaattgattcattatatttt

SEQ ID NO: 249858 - DNA, 26 bp, Artificial sequence
  SiRNA target sequence
ttgttcaattgattcattatattttt

SEQ ID NO: 249859 - DNA, 26 bp, Artificial sequence
  SiRNA target sequence
tgttcaattgattcattatatttttt

SEQ ID NO: 249860 - DNA, 26 bp, Artificial sequence
  SiRNA target sequence
gttcaattgattcattatatttttta

SEQ ID NO: 249861 - DNA, 26 bp, Artificial sequence
  SiRNA target sequence
ttcaattgattcattatattttttac

SEQ ID NO: 249862 - DNA, 26 bp, Artificial sequence
  SiRNA target sequence
tcaattgattcattatattttttact

SEQ ID NO: 249863 - DNA, 26 bp, Artificial sequence
  SiRNA target sequence
caattgattcattatattttttactt

SEQ ID NO: 249864 - DNA, 26 bp, Artificial sequence
  SiRNA target sequence
aattgattcattatattttttactta

SEQ ID NO: 249865 - DNA, 26 bp, Artificial sequence
  SiRNA target sequence
attgattcattatattttttacttaa

SEQ ID NO: 249866 - DNA, 26 bp, Artificial sequence
  SiRNA target sequence
ttgattcattatattttttacttaaa

SEQ ID NO: 249867 - DNA, 26 bp, Artificial sequence
  SiRNA target sequence
tgattcattatattttttacttaaat

SEQ ID NO: 249868 - DNA, 26 bp, Artificial sequence
  SiRNA target sequence
gattcattatattttttacttaaata

SEQ ID NO: 249869 - DNA, 26 bp, Artificial sequence
  SiRNA target sequence
attcattatattttttacttaaataa

SEQ ID NO: 249870 - DNA, 26 bp, Artificial sequence
  SiRNA target sequence
ttcattatattttttacttaaataac

SEQ ID NO: 249871 - DNA, 26 bp, Artificial sequence
  SiRNA target sequence
tcattatattttttacttaaataaca

SEQ ID NO: 249872 - DNA, 26 bp, Artificial sequence
  SiRNA target sequence
cattatattttttacttaaataacag

SEQ ID NO: 249873 - DNA, 26 bp, Artificial sequence
  SiRNA target sequence
attatattttttacttaaataacaga

SEQ ID NO: 249874 - DNA, 26 bp, Artificial sequence
  SiRNA target sequence
ttatattttttacttaaataacagac

SEQ ID NO: 249875 - DNA, 26 bp, Artificial sequence
  SiRNA target sequence
tatattttttacttaaataacagaca

SEQ ID NO: 249876 - DNA, 26 bp, Artificial sequence
  SiRNA target sequence
atattttttacttaaataacagacac

SEQ ID NO: 249877 - DNA, 26 bp, Artificial sequence
  SiRNA target sequence
tattttttacttaaataacagacact

SEQ ID NO: 249878 - DNA, 26 bp, Artificial sequence
  SiRNA target sequence
attttttacttaaataacagacactc

SEQ ID NO: 249879 - DNA, 26 bp, Artificial sequence
  SiRNA target sequence
ttttttacttaaataacagacactcc

SEQ ID NO: 249880 - DNA, 26 bp, Artificial sequence
  SiRNA target sequence
tttttacttaaataacagacactcct

SEQ ID NO: 249881 - DNA, 26 bp, Artificial sequence
  SiRNA target sequence
ttttacttaaataacagacactcctg

SEQ ID NO: 249882 - DNA, 26 bp, Artificial sequence
  SiRNA target sequence
tttacttaaataacagacactcctga

SEQ ID NO: 249883 - DNA, 26 bp, Artificial sequence
  SiRNA target sequence
ttacttaaataacagacactcctgat

SEQ ID NO: 249884 - DNA, 26 bp, Artificial sequence
  SiRNA target sequence
tacttaaataacagacactcctgatc

SEQ ID NO: 249885 - DNA, 26 bp, Artificial sequence
  SiRNA target sequence
acttaaataacagacactcctgatcc

SEQ ID NO: 249886 - DNA, 26 bp, Artificial sequence
  SiRNA target sequence
cttaaataacagacactcctgatcca

SEQ ID NO: 249887 - DNA, 26 bp, Artificial sequence
  SiRNA target sequence
ttaaataacagacactcctgatccac

SEQ ID NO: 249888 - DNA, 26 bp, Artificial sequence
  SiRNA target sequence
taaataacagacactcctgatccaca

SEQ ID NO: 249889 - DNA, 26 bp, Artificial sequence
  SiRNA target sequence
aaataacagacactcctgatccacaa

SEQ ID NO: 249890 - DNA, 26 bp, Artificial sequence
  SiRNA target sequence
aataacagacactcctgatccacaaa

SEQ ID NO: 249891 - DNA, 26 bp, Artificial sequence
  SiRNA target sequence
ataacagacactcctgatccacaaaa

SEQ ID NO: 249892 - DNA, 26 bp, Artificial sequence
  SiRNA target sequence
taacagacactcctgatccacaaaaa

SEQ ID NO: 249893 - DNA, 26 bp, Artificial sequence
  SiRNA target sequence
aacagacactcctgatccacaaaaaa

SEQ ID NO: 249894 - DNA, 26 bp, Artificial sequence
  SiRNA target sequence
acagacactcctgatccacaaaaaat

SEQ ID NO: 249895 - DNA, 26 bp, Artificial sequence
  SiRNA target sequence
cagacactcctgatccacaaaaaatt

SEQ ID NO: 249896 - DNA, 26 bp, Artificial sequence
  SiRNA target sequence
agacactcctgatccacaaaaaattt

SEQ ID NO: 249897 - DNA, 26 bp, Artificial sequence
  SiRNA target sequence
gacactcctgatccacaaaaaatttg

SEQ ID NO: 249898 - DNA, 26 bp, Artificial sequence
  SiRNA target sequence
acactcctgatccacaaaaaatttgc

SEQ ID NO: 249899 - DNA, 26 bp, Artificial sequence
  SiRNA target sequence
cactcctgatccacaaaaaatttgca

SEQ ID NO: 249900 - DNA, 26 bp, Artificial sequence
  SiRNA target sequence
actcctgatccacaaaaaatttgcaa

SEQ ID NO: 249901 - DNA, 26 bp, Artificial sequence
  SiRNA target sequence
ctcctgatccacaaaaaatttgcaaa

SEQ ID NO: 249902 - DNA, 26 bp, Artificial sequence
  SiRNA target sequence
tcctgatccacaaaaaatttgcaaat

SEQ ID NO: 249903 - DNA, 26 bp, Artificial sequence
  SiRNA target sequence
cctgatccacaaaaaatttgcaaata

SEQ ID NO: 249904 - DNA, 26 bp, Artificial sequence
  SiRNA target sequence
ctgatccacaaaaaatttgcaaatat

SEQ ID NO: 249905 - DNA, 26 bp, Artificial sequence
  SiRNA target sequence
tgatccacaaaaaatttgcaaatatt

SEQ ID NO: 249906 - DNA, 26 bp, Artificial sequence
  SiRNA target sequence
gatccacaaaaaatttgcaaatatta

SEQ ID NO: 249907 - DNA, 26 bp, Artificial sequence
  SiRNA target sequence
atccacaaaaaatttgcaaatattaa

SEQ ID NO: 249908 - DNA, 26 bp, Artificial sequence
  SiRNA target sequence
tccacaaaaaatttgcaaatattaaa

SEQ ID NO: 249909 - DNA, 26 bp, Artificial sequence
  SiRNA target sequence
ccacaaaaaatttgcaaatattaaaa

SEQ ID NO: 249910 - DNA, 26 bp, Artificial sequence
  SiRNA target sequence
cacaaaaaatttgcaaatattaaaaa

SEQ ID NO: 249911 - DNA, 26 bp, Artificial sequence
  SiRNA target sequence
acaaaaaatttgcaaatattaaaaat

SEQ ID NO: 249912 - DNA, 26 bp, Artificial sequence
  SiRNA target sequence
caaaaaatttgcaaatattaaaaata

SEQ ID NO: 249913 - DNA, 26 bp, Artificial sequence
  SiRNA target sequence
aaaaaatttgcaaatattaaaaatat

SEQ ID NO: 249914 - DNA, 26 bp, Artificial sequence
  SiRNA target sequence
aaaaatttgcaaatattaaaaatata

SEQ ID NO: 249915 - DNA, 26 bp, Artificial sequence
  SiRNA target sequence
aaaatttgcaaatattaaaaatataa

SEQ ID NO: 249916 - DNA, 26 bp, Artificial sequence
  SiRNA target sequence
aaatttgcaaatattaaaaatataaa

SEQ ID NO: 249917 - DNA, 26 bp, Artificial sequence
  SiRNA target sequence
aatttgcaaatattaaaaatataaaa

SEQ ID NO: 249918 - DNA, 26 bp, Artificial sequence
  SiRNA target sequence
atttgcaaatattaaaaatataaaag

SEQ ID NO: 249919 - DNA, 26 bp, Artificial sequence
  SiRNA target sequence
tttgcaaatattaaaaatataaaaga

SEQ ID NO: 249920 - DNA, 26 bp, Artificial sequence
  SiRNA target sequence
ttgcaaatattaaaaatataaaagac

SEQ ID NO: 249921 - DNA, 26 bp, Artificial sequence
  SiRNA target sequence
tgcaaatattaaaaatataaaagaca

SEQ ID NO: 249922 - DNA, 26 bp, Artificial sequence
  SiRNA target sequence
gcaaatattaaaaatataaaagacac

SEQ ID NO: 249923 - DNA, 26 bp, Artificial sequence
  SiRNA target sequence
caaatattaaaaatataaaagacacg

SEQ ID NO: 249924 - DNA, 26 bp, Artificial sequence
  SiRNA target sequence
aaatattaaaaatataaaagacacgt

SEQ ID NO: 249925 - DNA, 26 bp, Artificial sequence
  SiRNA target sequence
aatattaaaaatataaaagacacgta

SEQ ID NO: 249926 - DNA, 26 bp, Artificial sequence
  SiRNA target sequence
atattaaaaatataaaagacacgtat

SEQ ID NO: 249927 - DNA, 26 bp, Artificial sequence
  SiRNA target sequence
tattaaaaatataaaagacacgtatg

SEQ ID NO: 249928 - DNA, 26 bp, Artificial sequence
  SiRNA target sequence
attaaaaatataaaagacacgtatga

SEQ ID NO: 249929 - DNA, 26 bp, Artificial sequence
  SiRNA target sequence
ttaaaaatataaaagacacgtatgat

SEQ ID NO: 249930 - DNA, 26 bp, Artificial sequence
  SiRNA target sequence
taaaaatataaaagacacgtatgata

SEQ ID NO: 249931 - DNA, 26 bp, Artificial sequence
  SiRNA target sequence
aaaaatataaaagacacgtatgatac

SEQ ID NO: 249932 - DNA, 26 bp, Artificial sequence
  SiRNA target sequence
aaaatataaaagacacgtatgatact

SEQ ID NO: 249933 - DNA, 26 bp, Artificial sequence
  SiRNA target sequence
aaatataaaagacacgtatgatactt

SEQ ID NO: 249934 - DNA, 26 bp, Artificial sequence
  SiRNA target sequence
aatataaaagacacgtatgatacttg

SEQ ID NO: 249935 - DNA, 26 bp, Artificial sequence
  SiRNA target sequence
atataaaagacacgtatgatacttgt

SEQ ID NO: 249936 - DNA, 26 bp, Artificial sequence
  SiRNA target sequence
tataaaagacacgtatgatacttgtc

SEQ ID NO: 249937 - DNA, 26 bp, Artificial sequence
  SiRNA target sequence
ataaaagacacgtatgatacttgtct

SEQ ID NO: 249938 - DNA, 26 bp, Artificial sequence
  SiRNA target sequence
taaaagacacgtatgatacttgtcta

SEQ ID NO: 249939 - DNA, 26 bp, Artificial sequence
  SiRNA target sequence
aaaagacacgtatgatacttgtctaa

SEQ ID NO: 249940 - DNA, 26 bp, Artificial sequence
  SiRNA target sequence
aaagacacgtatgatacttgtctaat

SEQ ID NO: 249941 - DNA, 26 bp, Artificial sequence
  SiRNA target sequence
aagacacgtatgatacttgtctaata

SEQ ID NO: 249942 - DNA, 26 bp, Artificial sequence
  SiRNA target sequence
agacacgtatgatacttgtctaatat

SEQ ID NO: 249943 - DNA, 26 bp, Artificial sequence
  SiRNA target sequence
gacacgtatgatacttgtctaatatc

SEQ ID NO: 249944 - DNA, 26 bp, Artificial sequence
  SiRNA target sequence
acacgtatgatacttgtctaatatct

SEQ ID NO: 249945 - DNA, 26 bp, Artificial sequence
  SiRNA target sequence
cacgtatgatacttgtctaatatctg

SEQ ID NO: 249946 - DNA, 26 bp, Artificial sequence
  SiRNA target sequence
acgtatgatacttgtctaatatctgg

SEQ ID NO: 249947 - DNA, 26 bp, Artificial sequence
  SiRNA target sequence
cgtatgatacttgtctaatatctgga

SEQ ID NO: 249948 - DNA, 26 bp, Artificial sequence
  SiRNA target sequence
gtatgatacttgtctaatatctggaa

SEQ ID NO: 249949 - DNA, 26 bp, Artificial sequence
  SiRNA target sequence
tatgatacttgtctaatatctggaat

SEQ ID NO: 249950 - DNA, 26 bp, Artificial sequence
  SiRNA target sequence
atgatacttgtctaatatctggaatt

SEQ ID NO: 249951 - DNA, 26 bp, Artificial sequence
  SiRNA target sequence
tgatacttgtctaatatctggaattt

SEQ ID NO: 249952 - DNA, 26 bp, Artificial sequence
  SiRNA target sequence
gatacttgtctaatatctggaatttc

SEQ ID NO: 249953 - DNA, 26 bp, Artificial sequence
  SiRNA target sequence
atacttgtctaatatctggaatttct

SEQ ID NO: 249954 - DNA, 26 bp, Artificial sequence
  SiRNA target sequence
tacttgtctaatatctggaatttcta

SEQ ID NO: 249955 - DNA, 26 bp, Artificial sequence
  SiRNA target sequence
acttgtctaatatctggaatttctat

SEQ ID NO: 249956 - DNA, 26 bp, Artificial sequence
  SiRNA target sequence
cttgtctaatatctggaatttctata

SEQ ID NO: 249957 - DNA, 26 bp, Artificial sequence
  SiRNA target sequence
ttgtctaatatctggaatttctataa

SEQ ID NO: 249958 - DNA, 26 bp, Artificial sequence
  SiRNA target sequence
tgtctaatatctggaatttctataaa

SEQ ID NO: 249959 - DNA, 26 bp, Artificial sequence
  SiRNA target sequence
gtctaatatctggaatttctataaac

SEQ ID NO: 249960 - DNA, 26 bp, Artificial sequence
  SiRNA target sequence
tctaatatctggaatttctataaacg

SEQ ID NO: 249961 - DNA, 26 bp, Artificial sequence
  SiRNA target sequence
ctaatatctggaatttctataaacgt

SEQ ID NO: 249962 - DNA, 26 bp, Artificial sequence
  SiRNA target sequence
taatatctggaatttctataaacgtc

SEQ ID NO: 249963 - DNA, 26 bp, Artificial sequence
  SiRNA target sequence
aatatctggaatttctataaacgtca

SEQ ID NO: 249964 - DNA, 26 bp, Artificial sequence
  SiRNA target sequence
atatctggaatttctataaacgtcaa

SEQ ID NO: 249965 - DNA, 26 bp, Artificial sequence
  SiRNA target sequence
tatctggaatttctataaacgtcaaa

SEQ ID NO: 249966 - DNA, 26 bp, Artificial sequence
  SiRNA target sequence
atctggaatttctataaacgtcaaaa

SEQ ID NO: 249967 - DNA, 26 bp, Artificial sequence
  SiRNA target sequence
tctggaatttctataaacgtcaaaaa

SEQ ID NO: 249968 - DNA, 26 bp, Artificial sequence
  SiRNA target sequence
ctggaatttctataaacgtcaaaaaa

SEQ ID NO: 249969 - DNA, 26 bp, Artificial sequence
  SiRNA target sequence
tggaatttctataaacgtcaaaaaag

SEQ ID NO: 249970 - DNA, 26 bp, Artificial sequence
  SiRNA target sequence
ggaatttctataaacgtcaaaaaagt

SEQ ID NO: 249971 - DNA, 26 bp, Artificial sequence
  SiRNA target sequence
gaatttctataaacgtcaaaaaagtt

SEQ ID NO: 249972 - DNA, 26 bp, Artificial sequence
  SiRNA target sequence
aatttctataaacgtcaaaaaagttc

SEQ ID NO: 249973 - DNA, 26 bp, Artificial sequence
  SiRNA target sequence
atttctataaacgtcaaaaaagttcc

SEQ ID NO: 249974 - DNA, 26 bp, Artificial sequence
  SiRNA target sequence
tttctataaacgtcaaaaaagttcca

SEQ ID NO: 249975 - DNA, 26 bp, Artificial sequence
  SiRNA target sequence
ttctataaacgtcaaaaaagttccat

SEQ ID NO: 249976 - DNA, 26 bp, Artificial sequence
  SiRNA target sequence
tctataaacgtcaaaaaagttccata

SEQ ID NO: 249977 - DNA, 26 bp, Artificial sequence
  SiRNA target sequence
ctataaacgtcaaaaaagttccatat

SEQ ID NO: 249978 - DNA, 26 bp, Artificial sequence
  SiRNA target sequence
tataaacgtcaaaaaagttccatata

SEQ ID NO: 249979 - DNA, 26 bp, Artificial sequence
  SiRNA target sequence
ataaacgtcaaaaaagttccatataa

SEQ ID NO: 249980 - DNA, 26 bp, Artificial sequence
  SiRNA target sequence
taaacgtcaaaaaagttccatataaa

SEQ ID NO: 249981 - DNA, 26 bp, Artificial sequence
  SiRNA target sequence
aaacgtcaaaaaagttccatataaag

SEQ ID NO: 249982 - DNA, 26 bp, Artificial sequence
  SiRNA target sequence
aacgtcaaaaaagttccatataaaga

SEQ ID NO: 249983 - DNA, 26 bp, Artificial sequence
  SiRNA target sequence
acgtcaaaaaagttccatataaagag

SEQ ID NO: 249984 - DNA, 26 bp, Artificial sequence
  SiRNA target sequence
cgtcaaaaaagttccatataaagaga

SEQ ID NO: 249985 - DNA, 26 bp, Artificial sequence
  SiRNA target sequence
gtcaaaaaagttccatataaagagat

SEQ ID NO: 249986 - DNA, 26 bp, Artificial sequence
  SiRNA target sequence
tcaaaaaagttccatataaagagata

SEQ ID NO: 249987 - DNA, 26 bp, Artificial sequence
  SiRNA target sequence
caaaaaagttccatataaagagataa

SEQ ID NO: 249988 - DNA, 26 bp, Artificial sequence
  SiRNA target sequence
aaaaaagttccatataaagagataat

SEQ ID NO: 249989 - DNA, 26 bp, Artificial sequence
  SiRNA target sequence
aaaaagttccatataaagagataata

SEQ ID NO: 249990 - DNA, 26 bp, Artificial sequence
  SiRNA target sequence
aaaagttccatataaagagataatag

SEQ ID NO: 249991 - DNA, 26 bp, Artificial sequence
  SiRNA target sequence
aaagttccatataaagagataataga

SEQ ID NO: 249992 - DNA, 26 bp, Artificial sequence
  SiRNA target sequence
aagttccatataaagagataatagat

SEQ ID NO: 249993 - DNA, 26 bp, Artificial sequence
  SiRNA target sequence
agttccatataaagagataatagatt

SEQ ID NO: 249994 - DNA, 26 bp, Artificial sequence
  SiRNA target sequence
gttccatataaagagataatagattt

SEQ ID NO: 249995 - DNA, 26 bp, Artificial sequence
  SiRNA target sequence
ttccatataaagagataatagattta

SEQ ID NO: 249996 - DNA, 26 bp, Artificial sequence
  SiRNA target sequence
tccatataaagagataatagatttac

SEQ ID NO: 249997 - DNA, 26 bp, Artificial sequence
  SiRNA target sequence
ccatataaagagataatagatttacc

SEQ ID NO: 249998 - DNA, 26 bp, Artificial sequence
  SiRNA target sequence
catataaagagataatagatttacca

SEQ ID NO: 249999 - DNA, 26 bp, Artificial sequence
  SiRNA target sequence
atataaagagataatagatttaccaa

SEQ ID NO: 250000 - DNA, 26 bp, Artificial sequence
  SiRNA target sequence
tataaagagataatagatttaccaat

SEQ ID NO: 250001 - DNA, 26 bp, Artificial sequence
  SiRNA target sequence
ataaagagataatagatttaccaatt

SEQ ID NO: 250002 - DNA, 26 bp, Artificial sequence
  SiRNA target sequence
taaagagataatagatttaccaattt

SEQ ID NO: 250003 - DNA, 26 bp, Artificial sequence
  SiRNA target sequence
aaagagataatagatttaccaatttt

SEQ ID NO: 250004 - DNA, 26 bp, Artificial sequence
  SiRNA target sequence
aagagataatagatttaccaattttg

SEQ ID NO: 250005 - DNA, 26 bp, Artificial sequence
  SiRNA target sequence
agagataatagatttaccaattttga

SEQ ID NO: 250006 - DNA, 26 bp, Artificial sequence
  SiRNA target sequence
gagataatagatttaccaattttgat

SEQ ID NO: 250007 - DNA, 26 bp, Artificial sequence
  SiRNA target sequence
agataatagatttaccaattttgata

SEQ ID NO: 250008 - DNA, 26 bp, Artificial sequence
  SiRNA target sequence
gataatagatttaccaattttgatac

SEQ ID NO: 250009 - DNA, 26 bp, Artificial sequence
  SiRNA target sequence
ataatagatttaccaattttgataca

SEQ ID NO: 250010 - DNA, 26 bp, Artificial sequence
  SiRNA target sequence
taatagatttaccaattttgatacat

SEQ ID NO: 250011 - DNA, 26 bp, Artificial sequence
  SiRNA target sequence
aatagatttaccaattttgatacata

SEQ ID NO: 250012 - DNA, 26 bp, Artificial sequence
  SiRNA target sequence
atagatttaccaattttgatacatac

SEQ ID NO: 250013 - DNA, 26 bp, Artificial sequence
  SiRNA target sequence
tagatttaccaattttgatacataca

SEQ ID NO: 250014 - DNA, 26 bp, Artificial sequence
  SiRNA target sequence
agatttaccaattttgatacatacac

SEQ ID NO: 250015 - DNA, 26 bp, Artificial sequence
  SiRNA target sequence
gatttaccaattttgatacatacacc

SEQ ID NO: 250016 - DNA, 26 bp, Artificial sequence
  SiRNA target sequence
atttaccaattttgatacatacacca

SEQ ID NO: 250017 - DNA, 26 bp, Artificial sequence
  SiRNA target sequence
tttaccaattttgatacatacaccat

SEQ ID NO: 250018 - DNA, 26 bp, Artificial sequence
  SiRNA target sequence
ttaccaattttgatacatacaccatc

SEQ ID NO: 250019 - DNA, 26 bp, Artificial sequence
  SiRNA target sequence
taccaattttgatacatacaccatca

SEQ ID NO: 250020 - DNA, 26 bp, Artificial sequence
  SiRNA target sequence
accaattttgatacatacaccatcat

SEQ ID NO: 250021 - DNA, 26 bp, Artificial sequence
  SiRNA target sequence
ccaattttgatacatacaccatcata

SEQ ID NO: 250022 - DNA, 26 bp, Artificial sequence
  SiRNA target sequence
caattttgatacatacaccatcataa

SEQ ID NO: 250023 - DNA, 26 bp, Artificial sequence
  SiRNA target sequence
aattttgatacatacaccatcataaa

SEQ ID NO: 250024 - DNA, 26 bp, Artificial sequence
  SiRNA target sequence
attttgatacatacaccatcataaaa

SEQ ID NO: 250025 - DNA, 26 bp, Artificial sequence
  SiRNA target sequence
ttttgatacatacaccatcataaaaa

SEQ ID NO: 250026 - DNA, 26 bp, Artificial sequence
  SiRNA target sequence
tttgatacatacaccatcataaaaac

SEQ ID NO: 250027 - DNA, 26 bp, Artificial sequence
  SiRNA target sequence
ttgatacatacaccatcataaaaact

SEQ ID NO: 250028 - DNA, 26 bp, Artificial sequence
  SiRNA target sequence
tgatacatacaccatcataaaaactt

SEQ ID NO: 250029 - DNA, 26 bp, Artificial sequence
  SiRNA target sequence
gatacatacaccatcataaaaacttt

SEQ ID NO: 250030 - DNA, 26 bp, Artificial sequence
  SiRNA target sequence
atacatacaccatcataaaaactttt

SEQ ID NO: 250031 - DNA, 26 bp, Artificial sequence
  SiRNA target sequence
tacatacaccatcataaaaactttta

SEQ ID NO: 250032 - DNA, 26 bp, Artificial sequence
  SiRNA target sequence
acatacaccatcataaaaacttttaa

SEQ ID NO: 250033 - DNA, 26 bp, Artificial sequence
  SiRNA target sequence
catacaccatcataaaaacttttaaa

SEQ ID NO: 250034 - DNA, 26 bp, Artificial sequence
  SiRNA target sequence
atacaccatcataaaaacttttaaat

SEQ ID NO: 250035 - DNA, 26 bp, Artificial sequence
  SiRNA target sequence
tacaccatcataaaaacttttaaatt

SEQ ID NO: 250036 - DNA, 26 bp, Artificial sequence
  SiRNA target sequence
acaccatcataaaaacttttaaattt

SEQ ID NO: 250037 - DNA, 26 bp, Artificial sequence
  SiRNA target sequence
caccatcataaaaacttttaaattta

SEQ ID NO: 250038 - DNA, 26 bp, Artificial sequence
  SiRNA target sequence
accatcataaaaacttttaaatttat

SEQ ID NO: 250039 - DNA, 26 bp, Artificial sequence
  SiRNA target sequence
ccatcataaaaacttttaaatttata

SEQ ID NO: 250040 - DNA, 26 bp, Artificial sequence
  SiRNA target sequence
catcataaaaacttttaaatttatac

SEQ ID NO: 250041 - DNA, 26 bp, Artificial sequence
  SiRNA target sequence
atcataaaaacttttaaatttatacc

SEQ ID NO: 250042 - DNA, 26 bp, Artificial sequence
  SiRNA target sequence
tcataaaaacttttaaatttatacct

SEQ ID NO: 250043 - DNA, 26 bp, Artificial sequence
  SiRNA target sequence
cataaaaacttttaaatttatacctg

SEQ ID NO: 250044 - DNA, 26 bp, Artificial sequence
  SiRNA target sequence
ataaaaacttttaaatttatacctgt

SEQ ID NO: 250045 - DNA, 26 bp, Artificial sequence
  SiRNA target sequence
taaaaacttttaaatttatacctgta

SEQ ID NO: 250046 - DNA, 26 bp, Artificial sequence
  SiRNA target sequence
aaaaacttttaaatttatacctgtat

SEQ ID NO: 250047 - DNA, 26 bp, Artificial sequence
  SiRNA target sequence
aaaacttttaaatttatacctgtatt

SEQ ID NO: 250048 - DNA, 26 bp, Artificial sequence
  SiRNA target sequence
aaacttttaaatttatacctgtattt

SEQ ID NO: 250049 - DNA, 26 bp, Artificial sequence
  SiRNA target sequence
aacttttaaatttatacctgtattta

SEQ ID NO: 250050 - DNA, 26 bp, Artificial sequence
  SiRNA target sequence
acttttaaatttatacctgtatttaa

SEQ ID NO: 250051 - DNA, 26 bp, Artificial sequence
  SiRNA target sequence
cttttaaatttatacctgtatttaac

SEQ ID NO: 250052 - DNA, 26 bp, Artificial sequence
  SiRNA target sequence
ttttaaatttatacctgtatttaaca

SEQ ID NO: 250053 - DNA, 26 bp, Artificial sequence
  SiRNA target sequence
tttaaatttatacctgtatttaacag

SEQ ID NO: 250054 - DNA, 26 bp, Artificial sequence
  SiRNA target sequence
ttaaatttatacctgtatttaacagg

SEQ ID NO: 250055 - DNA, 26 bp, Artificial sequence
  SiRNA target sequence
taaatttatacctgtatttaacaggc

SEQ ID NO: 250056 - DNA, 26 bp, Artificial sequence
  SiRNA target sequence
aaatttatacctgtatttaacaggca

SEQ ID NO: 250057 - DNA, 26 bp, Artificial sequence
  SiRNA target sequence
aatttatacctgtatttaacaggcac

SEQ ID NO: 250058 - DNA, 26 bp, Artificial sequence
  SiRNA target sequence
atttatacctgtatttaacaggcacc

SEQ ID NO: 250059 - DNA, 26 bp, Artificial sequence
  SiRNA target sequence
tttatacctgtatttaacaggcaccc

SEQ ID NO: 250060 - DNA, 26 bp, Artificial sequence
  SiRNA target sequence
ttatacctgtatttaacaggcaccct

SEQ ID NO: 250061 - DNA, 26 bp, Artificial sequence
  SiRNA target sequence
tatacctgtatttaacaggcaccctc

SEQ ID NO: 250062 - DNA, 26 bp, Artificial sequence
  SiRNA target sequence
atacctgtatttaacaggcaccctca

SEQ ID NO: 250063 - DNA, 26 bp, Artificial sequence
  SiRNA target sequence
tacctgtatttaacaggcaccctcat

SEQ ID NO: 250064 - DNA, 26 bp, Artificial sequence
  SiRNA target sequence
acctgtatttaacaggcaccctcata

SEQ ID NO: 250065 - DNA, 26 bp, Artificial sequence
  SiRNA target sequence
cctgtatttaacaggcaccctcatag

SEQ ID NO: 250066 - DNA, 26 bp, Artificial sequence
  SiRNA target sequence
ctgtatttaacaggcaccctcataga

SEQ ID NO: 250067 - DNA, 26 bp, Artificial sequence
  SiRNA target sequence
tgtatttaacaggcaccctcatagaa

SEQ ID NO: 250068 - DNA, 26 bp, Artificial sequence
  SiRNA target sequence
gtatttaacaggcaccctcatagaaa

SEQ ID NO: 250069 - DNA, 26 bp, Artificial sequence
  SiRNA target sequence
tatttaacaggcaccctcatagaaag

SEQ ID NO: 250070 - DNA, 26 bp, Artificial sequence
  SiRNA target sequence
atttaacaggcaccctcatagaaagc

SEQ ID NO: 250071 - DNA, 26 bp, Artificial sequence
  SiRNA target sequence
tttaacaggcaccctcatagaaagca

SEQ ID NO: 250072 - DNA, 26 bp, Artificial sequence
  SiRNA target sequence
ttaacaggcaccctcatagaaagcat

SEQ ID NO: 250073 - DNA, 26 bp, Artificial sequence
  SiRNA target sequence
taacaggcaccctcatagaaagcatt

SEQ ID NO: 250074 - DNA, 26 bp, Artificial sequence
  SiRNA target sequence
aacaggcaccctcatagaaagcattt

SEQ ID NO: 250075 - DNA, 26 bp, Artificial sequence
  SiRNA target sequence
acaggcaccctcatagaaagcatttc

SEQ ID NO: 250076 - DNA, 26 bp, Artificial sequence
  SiRNA target sequence
caggcaccctcatagaaagcatttct

SEQ ID NO: 250077 - DNA, 26 bp, Artificial sequence
  SiRNA target sequence
aggcaccctcatagaaagcatttctt

SEQ ID NO: 250078 - DNA, 26 bp, Artificial sequence
  SiRNA target sequence
ggcaccctcatagaaagcatttcttt

SEQ ID NO: 250079 - DNA, 26 bp, Artificial sequence
  SiRNA target sequence
gcaccctcatagaaagcatttctttt

SEQ ID NO: 250080 - DNA, 26 bp, Artificial sequence
  SiRNA target sequence
caccctcatagaaagcatttcttttg

SEQ ID NO: 250081 - DNA, 26 bp, Artificial sequence
  SiRNA target sequence
accctcatagaaagcatttcttttgc

SEQ ID NO: 250082 - DNA, 26 bp, Artificial sequence
  SiRNA target sequence
ccctcatagaaagcatttcttttgct

SEQ ID NO: 250083 - DNA, 26 bp, Artificial sequence
  SiRNA target sequence
cctcatagaaagcatttcttttgcta

SEQ ID NO: 250084 - DNA, 26 bp, Artificial sequence
  SiRNA target sequence
ctcatagaaagcatttcttttgctaa

SEQ ID NO: 250085 - DNA, 26 bp, Artificial sequence
  SiRNA target sequence
tcatagaaagcatttcttttgctaaa

SEQ ID NO: 250086 - DNA, 26 bp, Artificial sequence
  SiRNA target sequence
catagaaagcatttcttttgctaaat

SEQ ID NO: 250087 - DNA, 26 bp, Artificial sequence
  SiRNA target sequence
atagaaagcatttcttttgctaaatc

SEQ ID NO: 250088 - DNA, 26 bp, Artificial sequence
  SiRNA target sequence
tagaaagcatttcttttgctaaatca

SEQ ID NO: 250089 - DNA, 26 bp, Artificial sequence
  SiRNA target sequence
agaaagcatttcttttgctaaatcaa

SEQ ID NO: 250090 - DNA, 26 bp, Artificial sequence
  SiRNA target sequence
gaaagcatttcttttgctaaatcaaa

SEQ ID NO: 250091 - DNA, 26 bp, Artificial sequence
  SiRNA target sequence
aaagcatttcttttgctaaatcaaat

SEQ ID NO: 250092 - DNA, 26 bp, Artificial sequence
  SiRNA target sequence
aagcatttcttttgctaaatcaaata

SEQ ID NO: 250093 - DNA, 26 bp, Artificial sequence
  SiRNA target sequence
agcatttcttttgctaaatcaaataa

SEQ ID NO: 250094 - DNA, 26 bp, Artificial sequence
  SiRNA target sequence
gcatttcttttgctaaatcaaataaa

SEQ ID NO: 250095 - DNA, 26 bp, Artificial sequence
  SiRNA target sequence
catttcttttgctaaatcaaataaaa

SEQ ID NO: 250096 - DNA, 26 bp, Artificial sequence
  SiRNA target sequence
atttcttttgctaaatcaaataaaac

SEQ ID NO: 250097 - DNA, 26 bp, Artificial sequence
  SiRNA target sequence
tttcttttgctaaatcaaataaaaca

SEQ ID NO: 250098 - DNA, 26 bp, Artificial sequence
  SiRNA target sequence
ttcttttgctaaatcaaataaaacat

SEQ ID NO: 250099 - DNA, 26 bp, Artificial sequence
  SiRNA target sequence
tcttttgctaaatcaaataaaacata

SEQ ID NO: 250100 - DNA, 26 bp, Artificial sequence
  SiRNA target sequence
cttttgctaaatcaaataaaacatat

SEQ ID NO: 250101 - DNA, 26 bp, Artificial sequence
  SiRNA target sequence
ttttgctaaatcaaataaaacatatt

SEQ ID NO: 250102 - DNA, 26 bp, Artificial sequence
  SiRNA target sequence
tttgctaaatcaaataaaacatattt

SEQ ID NO: 250103 - DNA, 26 bp, Artificial sequence
  SiRNA target sequence
ttgctaaatcaaataaaacatatttg

SEQ ID NO: 250104 - DNA, 26 bp, Artificial sequence
  SiRNA target sequence
tgctaaatcaaataaaacatatttgg

SEQ ID NO: 250105 - DNA, 26 bp, Artificial sequence
  SiRNA target sequence
gctaaatcaaataaaacatatttggt

SEQ ID NO: 250106 - DNA, 26 bp, Artificial sequence
  SiRNA target sequence
ctaaatcaaataaaacatatttggta

SEQ ID NO: 250107 - DNA, 26 bp, Artificial sequence
  SiRNA target sequence
taaatcaaataaaacatatttggtaa

SEQ ID NO: 250108 - DNA, 26 bp, Artificial sequence
  SiRNA target sequence
aaatcaaataaaacatatttggtaat

SEQ ID NO: 250109 - DNA, 26 bp, Artificial sequence
  SiRNA target sequence
aatcaaataaaacatatttggtaatt

SEQ ID NO: 250110 - DNA, 26 bp, Artificial sequence
  SiRNA target sequence
atcaaataaaacatatttggtaattt

SEQ ID NO: 250111 - DNA, 26 bp, Artificial sequence
  SiRNA target sequence
tcaaataaaacatatttggtaatttt

SEQ ID NO: 250112 - DNA, 26 bp, Artificial sequence
  SiRNA target sequence
caaataaaacatatttggtaatttta

SEQ ID NO: 250113 - DNA, 26 bp, Artificial sequence
  SiRNA target sequence
aaataaaacatatttggtaattttag

SEQ ID NO: 250114 - DNA, 26 bp, Artificial sequence
  SiRNA target sequence
aataaaacatatttggtaattttaga

SEQ ID NO: 250115 - DNA, 26 bp, Artificial sequence
  SiRNA target sequence
ataaaacatatttggtaattttagaa

SEQ ID NO: 250116 - DNA, 26 bp, Artificial sequence
  SiRNA target sequence
taaaacatatttggtaattttagaaa

SEQ ID NO: 250117 - DNA, 26 bp, Artificial sequence
  SiRNA target sequence
aaaacatatttggtaattttagaaaa

SEQ ID NO: 250118 - DNA, 26 bp, Artificial sequence
  SiRNA target sequence
aaacatatttggtaattttagaaaat

SEQ ID NO: 250119 - DNA, 26 bp, Artificial sequence
  SiRNA target sequence
aacatatttggtaattttagaaaatg

SEQ ID NO: 250120 - DNA, 26 bp, Artificial sequence
  SiRNA target sequence
acatatttggtaattttagaaaatgc

SEQ ID NO: 250121 - DNA, 26 bp, Artificial sequence
  SiRNA target sequence
catatttggtaattttagaaaatgca

SEQ ID NO: 250122 - DNA, 26 bp, Artificial sequence
  SiRNA target sequence
atatttggtaattttagaaaatgcaa

SEQ ID NO: 250123 - DNA, 26 bp, Artificial sequence
  SiRNA target sequence
tatttggtaattttagaaaatgcaaa

SEQ ID NO: 250124 - DNA, 26 bp, Artificial sequence
  SiRNA target sequence
atttggtaattttagaaaatgcaaat

SEQ ID NO: 250125 - DNA, 26 bp, Artificial sequence
  SiRNA target sequence
tttggtaattttagaaaatgcaaatc

SEQ ID NO: 250126 - DNA, 26 bp, Artificial sequence
  SiRNA target sequence
ttggtaattttagaaaatgcaaatcc

SEQ ID NO: 250127 - DNA, 26 bp, Artificial sequence
  SiRNA target sequence
tggtaattttagaaaatgcaaatcca

SEQ ID NO: 250128 - DNA, 26 bp, Artificial sequence
  SiRNA target sequence
ggtaattttagaaaatgcaaatccaa

SEQ ID NO: 250129 - DNA, 26 bp, Artificial sequence
  SiRNA target sequence
gtaattttagaaaatgcaaatccaat

SEQ ID NO: 250130 - DNA, 26 bp, Artificial sequence
  SiRNA target sequence
taattttagaaaatgcaaatccaatg

SEQ ID NO: 250131 - DNA, 26 bp, Artificial sequence
  SiRNA target sequence
aattttagaaaatgcaaatccaatgg

SEQ ID NO: 250132 - DNA, 26 bp, Artificial sequence
  SiRNA target sequence
attttagaaaatgcaaatccaatggt

SEQ ID NO: 250133 - DNA, 26 bp, Artificial sequence
  SiRNA target sequence
ttttagaaaatgcaaatccaatggtt

SEQ ID NO: 250134 - DNA, 26 bp, Artificial sequence
  SiRNA target sequence
tttagaaaatgcaaatccaatggttg

SEQ ID NO: 250135 - DNA, 26 bp, Artificial sequence
  SiRNA target sequence
ttagaaaatgcaaatccaatggttgc

SEQ ID NO: 250136 - DNA, 26 bp, Artificial sequence
  SiRNA target sequence
tagaaaatgcaaatccaatggttgca

SEQ ID NO: 250137 - DNA, 26 bp, Artificial sequence
  SiRNA target sequence
agaaaatgcaaatccaatggttgcac

SEQ ID NO: 250138 - DNA, 26 bp, Artificial sequence
  SiRNA target sequence
gaaaatgcaaatccaatggttgcaca

SEQ ID NO: 250139 - DNA, 26 bp, Artificial sequence
  SiRNA target sequence
aaaatgcaaatccaatggttgcacac

SEQ ID NO: 250140 - DNA, 26 bp, Artificial sequence
  SiRNA target sequence
aaatgcaaatccaatggttgcacacc

SEQ ID NO: 250141 - DNA, 26 bp, Artificial sequence
  SiRNA target sequence
aatgcaaatccaatggttgcacacca

SEQ ID NO: 250142 - DNA, 26 bp, Artificial sequence
  SiRNA target sequence
atgcaaatccaatggttgcacaccaa

SEQ ID NO: 250143 - DNA, 26 bp, Artificial sequence
  SiRNA target sequence
tgcaaatccaatggttgcacaccaat

SEQ ID NO: 250144 - DNA, 26 bp, Artificial sequence
  SiRNA target sequence
gcaaatccaatggttgcacaccaatt

SEQ ID NO: 250145 - DNA, 26 bp, Artificial sequence
  SiRNA target sequence
caaatccaatggttgcacaccaattt

SEQ ID NO: 250146 - DNA, 26 bp, Artificial sequence
  SiRNA target sequence
aaatccaatggttgcacaccaatttt

SEQ ID NO: 250147 - DNA, 26 bp, Artificial sequence
  SiRNA target sequence
aatccaatggttgcacaccaattttc

SEQ ID NO: 250148 - DNA, 26 bp, Artificial sequence
  SiRNA target sequence
atccaatggttgcacaccaattttca

SEQ ID NO: 250149 - DNA, 26 bp, Artificial sequence
  SiRNA target sequence
tccaatggttgcacaccaattttcaa

SEQ ID NO: 250150 - DNA, 26 bp, Artificial sequence
  SiRNA target sequence
ccaatggttgcacaccaattttcaag

SEQ ID NO: 250151 - DNA, 26 bp, Artificial sequence
  SiRNA target sequence
caatggttgcacaccaattttcaaga

SEQ ID NO: 250152 - DNA, 26 bp, Artificial sequence
  SiRNA target sequence
aatggttgcacaccaattttcaagat

SEQ ID NO: 250153 - DNA, 26 bp, Artificial sequence
  SiRNA target sequence
atggttgcacaccaattttcaagatt

SEQ ID NO: 250154 - DNA, 26 bp, Artificial sequence
  SiRNA target sequence
tggttgcacaccaattttcaagattt

SEQ ID NO: 250155 - DNA, 26 bp, Artificial sequence
  SiRNA target sequence
ggttgcacaccaattttcaagattta

SEQ ID NO: 250156 - DNA, 26 bp, Artificial sequence
  SiRNA target sequence
gttgcacaccaattttcaagatttat

SEQ ID NO: 250157 - DNA, 26 bp, Artificial sequence
  SiRNA target sequence
ttgcacaccaattttcaagatttatt

SEQ ID NO: 250158 - DNA, 26 bp, Artificial sequence
  SiRNA target sequence
tgcacaccaattttcaagatttattc

SEQ ID NO: 250159 - DNA, 26 bp, Artificial sequence
  SiRNA target sequence
gcacaccaattttcaagatttattct

SEQ ID NO: 250160 - DNA, 26 bp, Artificial sequence
  SiRNA target sequence
cacaccaattttcaagatttattctt

SEQ ID NO: 250161 - DNA, 26 bp, Artificial sequence
  SiRNA target sequence
acaccaattttcaagatttattctta

SEQ ID NO: 250162 - DNA, 26 bp, Artificial sequence
  SiRNA target sequence
caccaattttcaagatttattcttaa

SEQ ID NO: 250163 - DNA, 26 bp, Artificial sequence
  SiRNA target sequence
accaattttcaagatttattcttaag

SEQ ID NO: 250164 - DNA, 26 bp, Artificial sequence
  SiRNA target sequence
ccaattttcaagatttattcttaaga

SEQ ID NO: 250165 - DNA, 26 bp, Artificial sequence
  SiRNA target sequence
caattttcaagatttattcttaagac

SEQ ID NO: 250166 - DNA, 26 bp, Artificial sequence
  SiRNA target sequence
aattttcaagatttattcttaagacc

SEQ ID NO: 250167 - DNA, 26 bp, Artificial sequence
  SiRNA target sequence
attttcaagatttattcttaagaccg

SEQ ID NO: 250168 - DNA, 26 bp, Artificial sequence
  SiRNA target sequence
ttttcaagatttattcttaagaccga

SEQ ID NO: 250169 - DNA, 26 bp, Artificial sequence
  SiRNA target sequence
tttcaagatttattcttaagaccgat

SEQ ID NO: 250170 - DNA, 26 bp, Artificial sequence
  SiRNA target sequence
ttcaagatttattcttaagaccgatg

SEQ ID NO: 250171 - DNA, 26 bp, Artificial sequence
  SiRNA target sequence
tcaagatttattcttaagaccgatgg

SEQ ID NO: 250172 - DNA, 26 bp, Artificial sequence
  SiRNA target sequence
caagatttattcttaagaccgatgga

SEQ ID NO: 250173 - DNA, 26 bp, Artificial sequence
  SiRNA target sequence
aagatttattcttaagaccgatggag

SEQ ID NO: 250174 - DNA, 26 bp, Artificial sequence
  SiRNA target sequence
agatttattcttaagaccgatggagc

SEQ ID NO: 250175 - DNA, 26 bp, Artificial sequence
  SiRNA target sequence
gatttattcttaagaccgatggagct

SEQ ID NO: 250176 - DNA, 26 bp, Artificial sequence
  SiRNA target sequence
atttattcttaagaccgatggagctg

SEQ ID NO: 250177 - DNA, 26 bp, Artificial sequence
  SiRNA target sequence
tttattcttaagaccgatggagctgt

SEQ ID NO: 250178 - DNA, 26 bp, Artificial sequence
  SiRNA target sequence
ttattcttaagaccgatggagctgtg

SEQ ID NO: 250179 - DNA, 26 bp, Artificial sequence
  SiRNA target sequence
tattcttaagaccgatggagctgtgc

SEQ ID NO: 250180 - DNA, 26 bp, Artificial sequence
  SiRNA target sequence
attcttaagaccgatggagctgtgcg

SEQ ID NO: 250181 - DNA, 26 bp, Artificial sequence
  SiRNA target sequence
ttcttaagaccgatggagctgtgcgc

SEQ ID NO: 250182 - DNA, 26 bp, Artificial sequence
  SiRNA target sequence
tcttaagaccgatggagctgtgcgca

SEQ ID NO: 250183 - DNA, 26 bp, Artificial sequence
  SiRNA target sequence
cttaagaccgatggagctgtgcgcaa

SEQ ID NO: 250184 - DNA, 26 bp, Artificial sequence
  SiRNA target sequence
ttaagaccgatggagctgtgcgcaaa

SEQ ID NO: 250185 - DNA, 26 bp, Artificial sequence
  SiRNA target sequence
taagaccgatggagctgtgcgcaaat

SEQ ID NO: 250186 - DNA, 26 bp, Artificial sequence
  SiRNA target sequence
aagaccgatggagctgtgcgcaaatt

SEQ ID NO: 250187 - DNA, 26 bp, Artificial sequence
  SiRNA target sequence
agaccgatggagctgtgcgcaaattg

SEQ ID NO: 250188 - DNA, 26 bp, Artificial sequence
  SiRNA target sequence
gaccgatggagctgtgcgcaaattgt

SEQ ID NO: 250189 - DNA, 26 bp, Artificial sequence
  SiRNA target sequence
accgatggagctgtgcgcaaattgta

SEQ ID NO: 250190 - DNA, 26 bp, Artificial sequence
  SiRNA target sequence
ccgatggagctgtgcgcaaattgtaa

SEQ ID NO: 250191 - DNA, 26 bp, Artificial sequence
  SiRNA target sequence
cgatggagctgtgcgcaaattgtaaa

SEQ ID NO: 250192 - DNA, 26 bp, Artificial sequence
  SiRNA target sequence
gatggagctgtgcgcaaattgtaaaa

SEQ ID NO: 250193 - DNA, 26 bp, Artificial sequence
  SiRNA target sequence
atggagctgtgcgcaaattgtaaaaa

SEQ ID NO: 250194 - DNA, 26 bp, Artificial sequence
  SiRNA target sequence
tggagctgtgcgcaaattgtaaaaag

SEQ ID NO: 250195 - DNA, 26 bp, Artificial sequence
  SiRNA target sequence
ggagctgtgcgcaaattgtaaaaaga

SEQ ID NO: 250196 - DNA, 26 bp, Artificial sequence
  SiRNA target sequence
gagctgtgcgcaaattgtaaaaagaa

SEQ ID NO: 250197 - DNA, 26 bp, Artificial sequence
  SiRNA target sequence
agctgtgcgcaaattgtaaaaagaaa

SEQ ID NO: 250198 - DNA, 26 bp, Artificial sequence
  SiRNA target sequence
gctgtgcgcaaattgtaaaaagaaag

SEQ ID NO: 250199 - DNA, 26 bp, Artificial sequence
  SiRNA target sequence
ctgtgcgcaaattgtaaaaagaaagt

SEQ ID NO: 250200 - DNA, 26 bp, Artificial sequence
  SiRNA target sequence
tgtgcgcaaattgtaaaaagaaagtc

SEQ ID NO: 250201 - DNA, 26 bp, Artificial sequence
  SiRNA target sequence
gtgcgcaaattgtaaaaagaaagtcc

SEQ ID NO: 250202 - DNA, 26 bp, Artificial sequence
  SiRNA target sequence
tgcgcaaattgtaaaaagaaagtcct

SEQ ID NO: 250203 - DNA, 26 bp, Artificial sequence
  SiRNA target sequence
gcgcaaattgtaaaaagaaagtcctg

SEQ ID NO: 250204 - DNA, 26 bp, Artificial sequence
  SiRNA target sequence
cgcaaattgtaaaaagaaagtcctga

SEQ ID NO: 250205 - DNA, 26 bp, Artificial sequence
  SiRNA target sequence
gcaaattgtaaaaagaaagtcctgaa

SEQ ID NO: 250206 - DNA, 26 bp, Artificial sequence
  SiRNA target sequence
caaattgtaaaaagaaagtcctgaaa

SEQ ID NO: 250207 - DNA, 26 bp, Artificial sequence
  SiRNA target sequence
aaattgtaaaaagaaagtcctgaaat

SEQ ID NO: 250208 - DNA, 26 bp, Artificial sequence
  SiRNA target sequence
aattgtaaaaagaaagtcctgaaatt

SEQ ID NO: 250209 - DNA, 26 bp, Artificial sequence
  SiRNA target sequence
attgtaaaaagaaagtcctgaaatta

SEQ ID NO: 250210 - DNA, 26 bp, Artificial sequence
  SiRNA target sequence
ttgtaaaaagaaagtcctgaaattag

SEQ ID NO: 250211 - DNA, 26 bp, Artificial sequence
  SiRNA target sequence
tgtaaaaagaaagtcctgaaattaga

SEQ ID NO: 250212 - DNA, 26 bp, Artificial sequence
  SiRNA target sequence
gtaaaaagaaagtcctgaaattagag

SEQ ID NO: 250213 - DNA, 26 bp, Artificial sequence
  SiRNA target sequence
taaaaagaaagtcctgaaattagagc

SEQ ID NO: 250214 - DNA, 26 bp, Artificial sequence
  SiRNA target sequence
aaaaagaaagtcctgaaattagagcg

SEQ ID NO: 250215 - DNA, 26 bp, Artificial sequence
  SiRNA target sequence
aaaagaaagtcctgaaattagagcgg

SEQ ID NO: 250216 - DNA, 26 bp, Artificial sequence
  SiRNA target sequence
aaagaaagtcctgaaattagagcggt

SEQ ID NO: 250217 - DNA, 26 bp, Artificial sequence
  SiRNA target sequence
aagaaagtcctgaaattagagcggta

SEQ ID NO: 250218 - DNA, 26 bp, Artificial sequence
  SiRNA target sequence
agaaagtcctgaaattagagcggtaa

SEQ ID NO: 250219 - DNA, 26 bp, Artificial sequence
  SiRNA target sequence
gaaagtcctgaaattagagcggtaaa

SEQ ID NO: 250220 - DNA, 26 bp, Artificial sequence
  SiRNA target sequence
aaagtcctgaaattagagcggtaaaa

SEQ ID NO: 250221 - DNA, 26 bp, Artificial sequence
  SiRNA target sequence
aagtcctgaaattagagcggtaaaaa

SEQ ID NO: 250222 - DNA, 26 bp, Artificial sequence
  SiRNA target sequence
agtcctgaaattagagcggtaaaaaa

SEQ ID NO: 250223 - DNA, 26 bp, Artificial sequence
  SiRNA target sequence
gtcctgaaattagagcggtaaaaaat

SEQ ID NO: 250224 - DNA, 26 bp, Artificial sequence
  SiRNA target sequence
tcctgaaattagagcggtaaaaaata

SEQ ID NO: 250225 - DNA, 26 bp, Artificial sequence
  SiRNA target sequence
cctgaaattagagcggtaaaaaatat

SEQ ID NO: 250226 - DNA, 26 bp, Artificial sequence
  SiRNA target sequence
ctgaaattagagcggtaaaaaatata

SEQ ID NO: 250227 - DNA, 26 bp, Artificial sequence
  SiRNA target sequence
tgaaattagagcggtaaaaaatatag

SEQ ID NO: 250228 - DNA, 26 bp, Artificial sequence
  SiRNA target sequence
gaaattagagcggtaaaaaatatagc

SEQ ID NO: 250229 - DNA, 26 bp, Artificial sequence
  SiRNA target sequence
aaattagagcggtaaaaaatatagca

SEQ ID NO: 250230 - DNA, 26 bp, Artificial sequence
  SiRNA target sequence
aattagagcggtaaaaaatatagcag

SEQ ID NO: 250231 - DNA, 26 bp, Artificial sequence
  SiRNA target sequence
attagagcggtaaaaaatatagcagc

SEQ ID NO: 250232 - DNA, 26 bp, Artificial sequence
  SiRNA target sequence
ttagagcggtaaaaaatatagcagca

SEQ ID NO: 250233 - DNA, 26 bp, Artificial sequence
  SiRNA target sequence
tagagcggtaaaaaatatagcagcaa

SEQ ID NO: 250234 - DNA, 26 bp, Artificial sequence
  SiRNA target sequence
agagcggtaaaaaatatagcagcaat

SEQ ID NO: 250235 - DNA, 26 bp, Artificial sequence
  SiRNA target sequence
gagcggtaaaaaatatagcagcaata

SEQ ID NO: 250236 - DNA, 26 bp, Artificial sequence
  SiRNA target sequence
agcggtaaaaaatatagcagcaatag

SEQ ID NO: 250237 - DNA, 26 bp, Artificial sequence
  SiRNA target sequence
gcggtaaaaaatatagcagcaatagg

SEQ ID NO: 250238 - DNA, 26 bp, Artificial sequence
  SiRNA target sequence
cggtaaaaaatatagcagcaataggg

SEQ ID NO: 250239 - DNA, 26 bp, Artificial sequence
  SiRNA target sequence
ggtaaaaaatatagcagcaatagggg

SEQ ID NO: 250240 - DNA, 26 bp, Artificial sequence
  SiRNA target sequence
gtaaaaaatatagcagcaatagggga

SEQ ID NO: 250241 - DNA, 26 bp, Artificial sequence
  SiRNA target sequence
taaaaaatatagcagcaataggggag

SEQ ID NO: 250242 - DNA, 26 bp, Artificial sequence
  SiRNA target sequence
aaaaaatatagcagcaataggggagg

SEQ ID NO: 250243 - DNA, 26 bp, Artificial sequence
  SiRNA target sequence
aaaaatatagcagcaataggggaggc

SEQ ID NO: 250244 - DNA, 26 bp, Artificial sequence
  SiRNA target sequence
aaaatatagcagcaataggggaggca

SEQ ID NO: 250245 - DNA, 26 bp, Artificial sequence
  SiRNA target sequence
aaatatagcagcaataggggaggcaa

SEQ ID NO: 250246 - DNA, 26 bp, Artificial sequence
  SiRNA target sequence
aatatagcagcaataggggaggcaat

SEQ ID NO: 250247 - DNA, 26 bp, Artificial sequence
  SiRNA target sequence
atatagcagcaataggggaggcaata

SEQ ID NO: 250248 - DNA, 26 bp, Artificial sequence
  SiRNA target sequence
tatagcagcaataggggaggcaatag

SEQ ID NO: 250249 - DNA, 26 bp, Artificial sequence
  SiRNA target sequence
atagcagcaataggggaggcaataga

SEQ ID NO: 250250 - DNA, 26 bp, Artificial sequence
  SiRNA target sequence
tagcagcaataggggaggcaatagat

SEQ ID NO: 250251 - DNA, 26 bp, Artificial sequence
  SiRNA target sequence
agcagcaataggggaggcaatagata

SEQ ID NO: 250252 - DNA, 26 bp, Artificial sequence
  SiRNA target sequence
gcagcaataggggaggcaatagatag

SEQ ID NO: 250253 - DNA, 26 bp, Artificial sequence
  SiRNA target sequence
cagcaataggggaggcaatagataga

SEQ ID NO: 250254 - DNA, 26 bp, Artificial sequence
  SiRNA target sequence
agcaataggggaggcaatagatagat

SEQ ID NO: 250255 - DNA, 26 bp, Artificial sequence
  SiRNA target sequence
gcaataggggaggcaatagatagata

SEQ ID NO: 250256 - DNA, 26 bp, Artificial sequence
  SiRNA target sequence
caataggggaggcaatagatagataa

SEQ ID NO: 250257 - DNA, 26 bp, Artificial sequence
  SiRNA target sequence
aataggggaggcaatagatagataaa

SEQ ID NO: 250258 - DNA, 26 bp, Artificial sequence
  SiRNA target sequence
ataggggaggcaatagatagataaaa

SEQ ID NO: 250259 - DNA, 26 bp, Artificial sequence
  SiRNA target sequence
taggggaggcaatagatagataaaag

SEQ ID NO: 250260 - DNA, 26 bp, Artificial sequence
  SiRNA target sequence
aggggaggcaatagatagataaaaga

SEQ ID NO: 250261 - DNA, 26 bp, Artificial sequence
  SiRNA target sequence
ggggaggcaatagatagataaaagat

SEQ ID NO: 250262 - DNA, 26 bp, Artificial sequence
  SiRNA target sequence
gggaggcaatagatagataaaagatc

SEQ ID NO: 250263 - DNA, 26 bp, Artificial sequence
  SiRNA target sequence
ggaggcaatagatagataaaagatcc

SEQ ID NO: 250264 - DNA, 26 bp, Artificial sequence
  SiRNA target sequence
gaggcaatagatagataaaagatcct

SEQ ID NO: 250265 - DNA, 26 bp, Artificial sequence
  SiRNA target sequence
aggcaatagatagataaaagatcctt

SEQ ID NO: 250266 - DNA, 26 bp, Artificial sequence
  SiRNA target sequence
ggcaatagatagataaaagatccttg

SEQ ID NO: 250267 - DNA, 26 bp, Artificial sequence
  SiRNA target sequence
gcaatagatagataaaagatccttga

SEQ ID NO: 250268 - DNA, 26 bp, Artificial sequence
  SiRNA target sequence
caatagatagataaaagatccttgat

SEQ ID NO: 250269 - DNA, 26 bp, Artificial sequence
  SiRNA target sequence
aatagatagataaaagatccttgatg

SEQ ID NO: 250270 - DNA, 26 bp, Artificial sequence
  SiRNA target sequence
atagatagataaaagatccttgatgc

SEQ ID NO: 250271 - DNA, 26 bp, Artificial sequence
  SiRNA target sequence
tagatagataaaagatccttgatgca

SEQ ID NO: 250272 - DNA, 26 bp, Artificial sequence
  SiRNA target sequence
agatagataaaagatccttgatgcaa

SEQ ID NO: 250273 - DNA, 26 bp, Artificial sequence
  SiRNA target sequence
gatagataaaagatccttgatgcaat

SEQ ID NO: 250274 - DNA, 26 bp, Artificial sequence
  SiRNA target sequence
atagataaaagatccttgatgcaatg

SEQ ID NO: 250275 - DNA, 26 bp, Artificial sequence
  SiRNA target sequence
tagataaaagatccttgatgcaatgc

SEQ ID NO: 250276 - DNA, 26 bp, Artificial sequence
  SiRNA target sequence
agataaaagatccttgatgcaatgcg

SEQ ID NO: 250277 - DNA, 26 bp, Artificial sequence
  SiRNA target sequence
gataaaagatccttgatgcaatgcga

SEQ ID NO: 250278 - DNA, 26 bp, Artificial sequence
  SiRNA target sequence
ataaaagatccttgatgcaatgcgat

SEQ ID NO: 250279 - DNA, 26 bp, Artificial sequence
  SiRNA target sequence
taaaagatccttgatgcaatgcgatt

SEQ ID NO: 250280 - DNA, 26 bp, Artificial sequence
  SiRNA target sequence
aaaagatccttgatgcaatgcgattt

SEQ ID NO: 250281 - DNA, 26 bp, Artificial sequence
  SiRNA target sequence
aaagatccttgatgcaatgcgatttc

SEQ ID NO: 250282 - DNA, 26 bp, Artificial sequence
  SiRNA target sequence
aagatccttgatgcaatgcgatttcc

SEQ ID NO: 250283 - DNA, 26 bp, Artificial sequence
  SiRNA target sequence
agatccttgatgcaatgcgatttcca

SEQ ID NO: 250284 - DNA, 26 bp, Artificial sequence
  SiRNA target sequence
gatccttgatgcaatgcgatttccac

SEQ ID NO: 250285 - DNA, 26 bp, Artificial sequence
  SiRNA target sequence
atccttgatgcaatgcgatttccacg

SEQ ID NO: 250286 - DNA, 26 bp, Artificial sequence
  SiRNA target sequence
tccttgatgcaatgcgatttccacgg

SEQ ID NO: 250287 - DNA, 26 bp, Artificial sequence
  SiRNA target sequence
ccttgatgcaatgcgatttccacgga

SEQ ID NO: 250288 - DNA, 26 bp, Artificial sequence
  SiRNA target sequence
cttgatgcaatgcgatttccacggat

SEQ ID NO: 250289 - DNA, 26 bp, Artificial sequence
  SiRNA target sequence
ttgatgcaatgcgatttccacggatt

SEQ ID NO: 250290 - DNA, 26 bp, Artificial sequence
  SiRNA target sequence
tgatgcaatgcgatttccacggatta

SEQ ID NO: 250291 - DNA, 26 bp, Artificial sequence
  SiRNA target sequence
gatgcaatgcgatttccacggattac

SEQ ID NO: 250292 - DNA, 26 bp, Artificial sequence
  SiRNA target sequence
atgcaatgcgatttccacggattaca

SEQ ID NO: 250293 - DNA, 26 bp, Artificial sequence
  SiRNA target sequence
tgcaatgcgatttccacggattacaa

SEQ ID NO: 250294 - DNA, 26 bp, Artificial sequence
  SiRNA target sequence
gcaatgcgatttccacggattacaaa

SEQ ID NO: 250295 - DNA, 26 bp, Artificial sequence
  SiRNA target sequence
caatgcgatttccacggattacaaag

SEQ ID NO: 250296 - DNA, 26 bp, Artificial sequence
  SiRNA target sequence
aatgcgatttccacggattacaaagt

SEQ ID NO: 250297 - DNA, 26 bp, Artificial sequence
  SiRNA target sequence
atgcgatttccacggattacaaagtt

SEQ ID NO: 250298 - DNA, 26 bp, Artificial sequence
  SiRNA target sequence
tgcgatttccacggattacaaagtta

SEQ ID NO: 250299 - DNA, 26 bp, Artificial sequence
  SiRNA target sequence
gcgatttccacggattacaaagttat

SEQ ID NO: 250300 - DNA, 26 bp, Artificial sequence
  SiRNA target sequence
cgatttccacggattacaaagttata

SEQ ID NO: 250301 - DNA, 26 bp, Artificial sequence
  SiRNA target sequence
gatttccacggattacaaagttataa

SEQ ID NO: 250302 - DNA, 26 bp, Artificial sequence
  SiRNA target sequence
atttccacggattacaaagttataaa

SEQ ID NO: 250303 - DNA, 26 bp, Artificial sequence
  SiRNA target sequence
tttccacggattacaaagttataaaa

SEQ ID NO: 250304 - DNA, 26 bp, Artificial sequence
  SiRNA target sequence
ttccacggattacaaagttataaaat

SEQ ID NO: 250305 - DNA, 26 bp, Artificial sequence
  SiRNA target sequence
tccacggattacaaagttataaaata

SEQ ID NO: 250306 - DNA, 26 bp, Artificial sequence
  SiRNA target sequence
ccacggattacaaagttataaaataa

SEQ ID NO: 250307 - DNA, 26 bp, Artificial sequence
  SiRNA target sequence
cacggattacaaagttataaaataat

SEQ ID NO: 250308 - DNA, 26 bp, Artificial sequence
  SiRNA target sequence
acggattacaaagttataaaataatg

SEQ ID NO: 250309 - DNA, 26 bp, Artificial sequence
  SiRNA target sequence
cggattacaaagttataaaataatga

SEQ ID NO: 250310 - DNA, 26 bp, Artificial sequence
  SiRNA target sequence
ggattacaaagttataaaataatgat

SEQ ID NO: 250311 - DNA, 26 bp, Artificial sequence
  SiRNA target sequence
gattacaaagttataaaataatgata

SEQ ID NO: 250312 - DNA, 26 bp, Artificial sequence
  SiRNA target sequence
attacaaagttataaaataatgatac

SEQ ID NO: 250313 - DNA, 26 bp, Artificial sequence
  SiRNA target sequence
ttacaaagttataaaataatgataca

SEQ ID NO: 250314 - DNA, 26 bp, Artificial sequence
  SiRNA target sequence
tacaaagttataaaataatgatacag

SEQ ID NO: 250315 - DNA, 26 bp, Artificial sequence
  SiRNA target sequence
acaaagttataaaataatgatacagc

SEQ ID NO: 250316 - DNA, 26 bp, Artificial sequence
  SiRNA target sequence
caaagttataaaataatgatacagca

SEQ ID NO: 250317 - DNA, 26 bp, Artificial sequence
  SiRNA target sequence
aaagttataaaataatgatacagcac

SEQ ID NO: 250318 - DNA, 26 bp, Artificial sequence
  SiRNA target sequence
aagttataaaataatgatacagcact

SEQ ID NO: 250319 - DNA, 26 bp, Artificial sequence
  SiRNA target sequence
agttataaaataatgatacagcacta

SEQ ID NO: 250320 - DNA, 26 bp, Artificial sequence
  SiRNA target sequence
gttataaaataatgatacagcactaa

SEQ ID NO: 250321 - DNA, 26 bp, Artificial sequence
  SiRNA target sequence
ttataaaataatgatacagcactaat

SEQ ID NO: 250322 - DNA, 26 bp, Artificial sequence
  SiRNA target sequence
tataaaataatgatacagcactaatc

SEQ ID NO: 250323 - DNA, 26 bp, Artificial sequence
  SiRNA target sequence
ataaaataatgatacagcactaatcg

SEQ ID NO: 250324 - DNA, 26 bp, Artificial sequence
  SiRNA target sequence
taaaataatgatacagcactaatcgt

SEQ ID NO: 250325 - DNA, 26 bp, Artificial sequence
  SiRNA target sequence
aaaataatgatacagcactaatcgtt

SEQ ID NO: 250326 - DNA, 26 bp, Artificial sequence
  SiRNA target sequence
aaataatgatacagcactaatcgtta

SEQ ID NO: 250327 - DNA, 26 bp, Artificial sequence
  SiRNA target sequence
aataatgatacagcactaatcgttaa

SEQ ID NO: 250328 - DNA, 26 bp, Artificial sequence
  SiRNA target sequence
ataatgatacagcactaatcgttaag

SEQ ID NO: 250329 - DNA, 26 bp, Artificial sequence
  SiRNA target sequence
taatgatacagcactaatcgttaagg

SEQ ID NO: 250330 - DNA, 26 bp, Artificial sequence
  SiRNA target sequence
aatgatacagcactaatcgttaagga

SEQ ID NO: 250331 - DNA, 26 bp, Artificial sequence
  SiRNA target sequence
atgatacagcactaatcgttaaggaa

SEQ ID NO: 250332 - DNA, 26 bp, Artificial sequence
  SiRNA target sequence
tgatacagcactaatcgttaaggaag

SEQ ID NO: 250333 - DNA, 26 bp, Artificial sequence
  SiRNA target sequence
gatacagcactaatcgttaaggaagt

SEQ ID NO: 250334 - DNA, 26 bp, Artificial sequence
  SiRNA target sequence
atacagcactaatcgttaaggaagtt

SEQ ID NO: 250335 - DNA, 26 bp, Artificial sequence
  SiRNA target sequence
tacagcactaatcgttaaggaagttg

SEQ ID NO: 250336 - DNA, 26 bp, Artificial sequence
  SiRNA target sequence
acagcactaatcgttaaggaagttgt

SEQ ID NO: 250337 - DNA, 26 bp, Artificial sequence
  SiRNA target sequence
cagcactaatcgttaaggaagttgtt

SEQ ID NO: 250338 - DNA, 26 bp, Artificial sequence
  SiRNA target sequence
agcactaatcgttaaggaagttgtta

SEQ ID NO: 250339 - DNA, 26 bp, Artificial sequence
  SiRNA target sequence
gcactaatcgttaaggaagttgttac

SEQ ID NO: 250340 - DNA, 26 bp, Artificial sequence
  SiRNA target sequence
cactaatcgttaaggaagttgttact

SEQ ID NO: 250341 - DNA, 26 bp, Artificial sequence
  SiRNA target sequence
actaatcgttaaggaagttgttacta

SEQ ID NO: 250342 - DNA, 26 bp, Artificial sequence
  SiRNA target sequence
ctaatcgttaaggaagttgttactaa

SEQ ID NO: 250343 - DNA, 26 bp, Artificial sequence
  SiRNA target sequence
taatcgttaaggaagttgttactaaa

SEQ ID NO: 250344 - DNA, 26 bp, Artificial sequence
  SiRNA target sequence
aatcgttaaggaagttgttactaaat

SEQ ID NO: 250345 - DNA, 26 bp, Artificial sequence
  SiRNA target sequence
atcgttaaggaagttgttactaaata

SEQ ID NO: 250346 - DNA, 26 bp, Artificial sequence
  SiRNA target sequence
tcgttaaggaagttgttactaaatat

SEQ ID NO: 250347 - DNA, 26 bp, Artificial sequence
  SiRNA target sequence
cgttaaggaagttgttactaaatatt

SEQ ID NO: 250348 - DNA, 26 bp, Artificial sequence
  SiRNA target sequence
gttaaggaagttgttactaaatattt

SEQ ID NO: 250349 - DNA, 26 bp, Artificial sequence
  SiRNA target sequence
ttaaggaagttgttactaaatatttt

SEQ ID NO: 250350 - DNA, 26 bp, Artificial sequence
  SiRNA target sequence
taaggaagttgttactaaatattttt

SEQ ID NO: 250351 - DNA, 26 bp, Artificial sequence
  SiRNA target sequence
aaggaagttgttactaaatatttttg

SEQ ID NO: 250352 - DNA, 26 bp, Artificial sequence
  SiRNA target sequence
aggaagttgttactaaatatttttga

SEQ ID NO: 250353 - DNA, 26 bp, Artificial sequence
  SiRNA target sequence
ggaagttgttactaaatatttttgag

SEQ ID NO: 250354 - DNA, 26 bp, Artificial sequence
  SiRNA target sequence
gaagttgttactaaatatttttgaga

SEQ ID NO: 250355 - DNA, 26 bp, Artificial sequence
  SiRNA target sequence
aagttgttactaaatatttttgagaa

SEQ ID NO: 250356 - DNA, 26 bp, Artificial sequence
  SiRNA target sequence
agttgttactaaatatttttgagaat

SEQ ID NO: 250357 - DNA, 26 bp, Artificial sequence
  SiRNA target sequence
gttgttactaaatatttttgagaata

SEQ ID NO: 250358 - DNA, 26 bp, Artificial sequence
  SiRNA target sequence
ttgttactaaatatttttgagaataa

SEQ ID NO: 250359 - DNA, 26 bp, Artificial sequence
  SiRNA target sequence
tgttactaaatatttttgagaataat

SEQ ID NO: 250360 - DNA, 26 bp, Artificial sequence
  SiRNA target sequence
gttactaaatatttttgagaataatc

SEQ ID NO: 250361 - DNA, 26 bp, Artificial sequence
  SiRNA target sequence
ttactaaatatttttgagaataatct

SEQ ID NO: 250362 - DNA, 26 bp, Artificial sequence
  SiRNA target sequence
tactaaatatttttgagaataatctt

SEQ ID NO: 250363 - DNA, 26 bp, Artificial sequence
  SiRNA target sequence
actaaatatttttgagaataatcttt

SEQ ID NO: 250364 - DNA, 26 bp, Artificial sequence
  SiRNA target sequence
ctaaatatttttgagaataatctttc

SEQ ID NO: 250365 - DNA, 26 bp, Artificial sequence
  SiRNA target sequence
taaatatttttgagaataatctttcg

SEQ ID NO: 250366 - DNA, 26 bp, Artificial sequence
  SiRNA target sequence
aaatatttttgagaataatctttcgg

SEQ ID NO: 250367 - DNA, 26 bp, Artificial sequence
  SiRNA target sequence
aatatttttgagaataatctttcgga

SEQ ID NO: 250368 - DNA, 26 bp, Artificial sequence
  SiRNA target sequence
atatttttgagaataatctttcggag

SEQ ID NO: 250369 - DNA, 26 bp, Artificial sequence
  SiRNA target sequence
tatttttgagaataatctttcggagg

SEQ ID NO: 250370 - DNA, 26 bp, Artificial sequence
  SiRNA target sequence
atttttgagaataatctttcggaggc

SEQ ID NO: 250371 - DNA, 26 bp, Artificial sequence
  SiRNA target sequence
tttttgagaataatctttcggaggca

SEQ ID NO: 250372 - DNA, 26 bp, Artificial sequence
  SiRNA target sequence
ttttgagaataatctttcggaggcat

SEQ ID NO: 250373 - DNA, 26 bp, Artificial sequence
  SiRNA target sequence
tttgagaataatctttcggaggcata

SEQ ID NO: 250374 - DNA, 26 bp, Artificial sequence
  SiRNA target sequence
ttgagaataatctttcggaggcatat

SEQ ID NO: 250375 - DNA, 26 bp, Artificial sequence
  SiRNA target sequence
tgagaataatctttcggaggcatatt

SEQ ID NO: 250376 - DNA, 26 bp, Artificial sequence
  SiRNA target sequence
gagaataatctttcggaggcatatta

SEQ ID NO: 250377 - DNA, 26 bp, Artificial sequence
  SiRNA target sequence
agaataatctttcggaggcatattat

SEQ ID NO: 250378 - DNA, 26 bp, Artificial sequence
  SiRNA target sequence
gaataatctttcggaggcatattatt

SEQ ID NO: 250379 - DNA, 26 bp, Artificial sequence
  SiRNA target sequence
aataatctttcggaggcatattatta

SEQ ID NO: 250380 - DNA, 26 bp, Artificial sequence
  SiRNA target sequence
ataatctttcggaggcatattattaa

SEQ ID NO: 250381 - DNA, 26 bp, Artificial sequence
  SiRNA target sequence
taatctttcggaggcatattattaat

SEQ ID NO: 250382 - DNA, 26 bp, Artificial sequence
  SiRNA target sequence
aatctttcggaggcatattattaatt

SEQ ID NO: 250383 - DNA, 26 bp, Artificial sequence
  SiRNA target sequence
atctttcggaggcatattattaattc

SEQ ID NO: 250384 - DNA, 26 bp, Artificial sequence
  SiRNA target sequence
tctttcggaggcatattattaattct

SEQ ID NO: 250385 - DNA, 26 bp, Artificial sequence
  SiRNA target sequence
ctttcggaggcatattattaattctg

SEQ ID NO: 250386 - DNA, 26 bp, Artificial sequence
  SiRNA target sequence
tttcggaggcatattattaattctgc

SEQ ID NO: 250387 - DNA, 26 bp, Artificial sequence
  SiRNA target sequence
ttcggaggcatattattaattctgct

SEQ ID NO: 250388 - DNA, 26 bp, Artificial sequence
  SiRNA target sequence
tcggaggcatattattaattctgctt

SEQ ID NO: 250389 - DNA, 26 bp, Artificial sequence
  SiRNA target sequence
cggaggcatattattaattctgcttc

SEQ ID NO: 250390 - DNA, 26 bp, Artificial sequence
  SiRNA target sequence
ggaggcatattattaattctgcttcc

SEQ ID NO: 250391 - DNA, 26 bp, Artificial sequence
  SiRNA target sequence
gaggcatattattaattctgcttccc

SEQ ID NO: 250392 - DNA, 26 bp, Artificial sequence
  SiRNA target sequence
aggcatattattaattctgcttcccg

SEQ ID NO: 250393 - DNA, 26 bp, Artificial sequence
  SiRNA target sequence
ggcatattattaattctgcttcccgt

SEQ ID NO: 250394 - DNA, 26 bp, Artificial sequence
  SiRNA target sequence
gcatattattaattctgcttcccgta

SEQ ID NO: 250395 - DNA, 26 bp, Artificial sequence
  SiRNA target sequence
catattattaattctgcttcccgtag

SEQ ID NO: 250396 - DNA, 26 bp, Artificial sequence
  SiRNA target sequence
atattattaattctgcttcccgtaga

SEQ ID NO: 250397 - DNA, 26 bp, Artificial sequence
  SiRNA target sequence
tattattaattctgcttcccgtagat

SEQ ID NO: 250398 - DNA, 26 bp, Artificial sequence
  SiRNA target sequence
attattaattctgcttcccgtagata

SEQ ID NO: 250399 - DNA, 26 bp, Artificial sequence
  SiRNA target sequence
ttattaattctgcttcccgtagataa

SEQ ID NO: 250400 - DNA, 26 bp, Artificial sequence
  SiRNA target sequence
tattaattctgcttcccgtagataaa

SEQ ID NO: 250401 - DNA, 26 bp, Artificial sequence
  SiRNA target sequence
attaattctgcttcccgtagataaag

SEQ ID NO: 250402 - DNA, 26 bp, Artificial sequence
  SiRNA target sequence
ttaattctgcttcccgtagataaaga

SEQ ID NO: 250403 - DNA, 26 bp, Artificial sequence
  SiRNA target sequence
taattctgcttcccgtagataaagaa

SEQ ID NO: 250404 - DNA, 26 bp, Artificial sequence
  SiRNA target sequence
aattctgcttcccgtagataaagaat

SEQ ID NO: 250405 - DNA, 26 bp, Artificial sequence
  SiRNA target sequence
attctgcttcccgtagataaagaatt

SEQ ID NO: 250406 - DNA, 26 bp, Artificial sequence
  SiRNA target sequence
ttctgcttcccgtagataaagaattt

SEQ ID NO: 250407 - DNA, 26 bp, Artificial sequence
  SiRNA target sequence
tctgcttcccgtagataaagaatttt

SEQ ID NO: 250408 - DNA, 26 bp, Artificial sequence
  SiRNA target sequence
ctgcttcccgtagataaagaattttt

SEQ ID NO: 250409 - DNA, 26 bp, Artificial sequence
  SiRNA target sequence
tgcttcccgtagataaagaatttttt

SEQ ID NO: 250410 - DNA, 26 bp, Artificial sequence
  SiRNA target sequence
gcttcccgtagataaagaatttttta

SEQ ID NO: 250411 - DNA, 26 bp, Artificial sequence
  SiRNA target sequence
cttcccgtagataaagaattttttaa

SEQ ID NO: 250412 - DNA, 26 bp, Artificial sequence
  SiRNA target sequence
ttcccgtagataaagaattttttaag

SEQ ID NO: 250413 - DNA, 26 bp, Artificial sequence
  SiRNA target sequence
tcccgtagataaagaattttttaagg

SEQ ID NO: 250414 - DNA, 26 bp, Artificial sequence
  SiRNA target sequence
cccgtagataaagaattttttaagga

SEQ ID NO: 250415 - DNA, 26 bp, Artificial sequence
  SiRNA target sequence
ccgtagataaagaattttttaaggac

SEQ ID NO: 250416 - DNA, 26 bp, Artificial sequence
  SiRNA target sequence
cgtagataaagaattttttaaggaca

SEQ ID NO: 250417 - DNA, 26 bp, Artificial sequence
  SiRNA target sequence
gtagataaagaattttttaaggacat

SEQ ID NO: 250418 - DNA, 26 bp, Artificial sequence
  SiRNA target sequence
tagataaagaattttttaaggacata

SEQ ID NO: 250419 - DNA, 26 bp, Artificial sequence
  SiRNA target sequence
agataaagaattttttaaggacatat

SEQ ID NO: 250420 - DNA, 26 bp, Artificial sequence
  SiRNA target sequence
gataaagaattttttaaggacatatc

SEQ ID NO: 250421 - DNA, 26 bp, Artificial sequence
  SiRNA target sequence
ataaagaattttttaaggacatatca

SEQ ID NO: 250422 - DNA, 26 bp, Artificial sequence
  SiRNA target sequence
taaagaattttttaaggacatatcaa

SEQ ID NO: 250423 - DNA, 26 bp, Artificial sequence
  SiRNA target sequence
aaagaattttttaaggacatatcaat

SEQ ID NO: 250424 - DNA, 26 bp, Artificial sequence
  SiRNA target sequence
aagaattttttaaggacatatcaata

SEQ ID NO: 250425 - DNA, 26 bp, Artificial sequence
  SiRNA target sequence
agaattttttaaggacatatcaataa

SEQ ID NO: 250426 - DNA, 26 bp, Artificial sequence
  SiRNA target sequence
gaattttttaaggacatatcaataaa

SEQ ID NO: 250427 - DNA, 26 bp, Artificial sequence
  SiRNA target sequence
aattttttaaggacatatcaataaat

SEQ ID NO: 250428 - DNA, 26 bp, Artificial sequence
  SiRNA target sequence
attttttaaggacatatcaataaatc

SEQ ID NO: 250429 - DNA, 26 bp, Artificial sequence
  SiRNA target sequence
ttttttaaggacatatcaataaatcc

SEQ ID NO: 250430 - DNA, 26 bp, Artificial sequence
  SiRNA target sequence
tttttaaggacatatcaataaatcct

SEQ ID NO: 250431 - DNA, 26 bp, Artificial sequence
  SiRNA target sequence
ttttaaggacatatcaataaatcctg

SEQ ID NO: 250432 - DNA, 26 bp, Artificial sequence
  SiRNA target sequence
tttaaggacatatcaataaatcctgc

SEQ ID NO: 250433 - DNA, 26 bp, Artificial sequence
  SiRNA target sequence
ttaaggacatatcaataaatcctgca

SEQ ID NO: 250434 - DNA, 26 bp, Artificial sequence
  SiRNA target sequence
taaggacatatcaataaatcctgcat

SEQ ID NO: 250435 - DNA, 26 bp, Artificial sequence
  SiRNA target sequence
aaggacatatcaataaatcctgcatt

SEQ ID NO: 250436 - DNA, 26 bp, Artificial sequence
  SiRNA target sequence
aggacatatcaataaatcctgcatta

SEQ ID NO: 250437 - DNA, 26 bp, Artificial sequence
  SiRNA target sequence
ggacatatcaataaatcctgcattaa

SEQ ID NO: 250438 - DNA, 26 bp, Artificial sequence
  SiRNA target sequence
gacatatcaataaatcctgcattaat

SEQ ID NO: 250439 - DNA, 26 bp, Artificial sequence
  SiRNA target sequence
acatatcaataaatcctgcattaata

SEQ ID NO: 250440 - DNA, 26 bp, Artificial sequence
  SiRNA target sequence
catatcaataaatcctgcattaatag

SEQ ID NO: 250441 - DNA, 26 bp, Artificial sequence
  SiRNA target sequence
atatcaataaatcctgcattaatagc

SEQ ID NO: 250442 - DNA, 26 bp, Artificial sequence
  SiRNA target sequence
tatcaataaatcctgcattaatagca

SEQ ID NO: 250443 - DNA, 26 bp, Artificial sequence
  SiRNA target sequence
atcaataaatcctgcattaatagcat

SEQ ID NO: 250444 - DNA, 26 bp, Artificial sequence
  SiRNA target sequence
tcaataaatcctgcattaatagcata

SEQ ID NO: 250445 - DNA, 26 bp, Artificial sequence
  SiRNA target sequence
caataaatcctgcattaatagcatag

SEQ ID NO: 250446 - DNA, 26 bp, Artificial sequence
  SiRNA target sequence
aataaatcctgcattaatagcataga

SEQ ID NO: 250447 - DNA, 26 bp, Artificial sequence
  SiRNA target sequence
ataaatcctgcattaatagcatagat

SEQ ID NO: 250448 - DNA, 26 bp, Artificial sequence
  SiRNA target sequence
taaatcctgcattaatagcatagatt

SEQ ID NO: 250449 - DNA, 26 bp, Artificial sequence
  SiRNA target sequence
aaatcctgcattaatagcatagatta

SEQ ID NO: 250450 - DNA, 26 bp, Artificial sequence
  SiRNA target sequence
aatcctgcattaatagcatagattaa

SEQ ID NO: 250451 - DNA, 26 bp, Artificial sequence
  SiRNA target sequence
atcctgcattaatagcatagattaat

SEQ ID NO: 250452 - DNA, 26 bp, Artificial sequence
  SiRNA target sequence
tcctgcattaatagcatagattaatg

SEQ ID NO: 250453 - DNA, 26 bp, Artificial sequence
  SiRNA target sequence
cctgcattaatagcatagattaatgc

SEQ ID NO: 250454 - DNA, 26 bp, Artificial sequence
  SiRNA target sequence
ctgcattaatagcatagattaatgcc

SEQ ID NO: 250455 - DNA, 26 bp, Artificial sequence
  SiRNA target sequence
tgcattaatagcatagattaatgccg

SEQ ID NO: 250456 - DNA, 26 bp, Artificial sequence
  SiRNA target sequence
gcattaatagcatagattaatgccgc

SEQ ID NO: 250457 - DNA, 26 bp, Artificial sequence
  SiRNA target sequence
cattaatagcatagattaatgccgct

SEQ ID NO: 250458 - DNA, 26 bp, Artificial sequence
  SiRNA target sequence
attaatagcatagattaatgccgctg

SEQ ID NO: 250459 - DNA, 26 bp, Artificial sequence
  SiRNA target sequence
ttaatagcatagattaatgccgctgc

SEQ ID NO: 250460 - DNA, 26 bp, Artificial sequence
  SiRNA target sequence
taatagcatagattaatgccgctgca

SEQ ID NO: 250461 - DNA, 26 bp, Artificial sequence
  SiRNA target sequence
aatagcatagattaatgccgctgcac

SEQ ID NO: 250462 - DNA, 26 bp, Artificial sequence
  SiRNA target sequence
atagcatagattaatgccgctgcaca

SEQ ID NO: 250463 - DNA, 26 bp, Artificial sequence
  SiRNA target sequence
tagcatagattaatgccgctgcacac

SEQ ID NO: 250464 - DNA, 26 bp, Artificial sequence
  SiRNA target sequence
agcatagattaatgccgctgcacaca

SEQ ID NO: 250465 - DNA, 26 bp, Artificial sequence
  SiRNA target sequence
gcatagattaatgccgctgcacacat

SEQ ID NO: 250466 - DNA, 26 bp, Artificial sequence
  SiRNA target sequence
catagattaatgccgctgcacacata

SEQ ID NO: 250467 - DNA, 26 bp, Artificial sequence
  SiRNA target sequence
atagattaatgccgctgcacacatat

SEQ ID NO: 250468 - DNA, 26 bp, Artificial sequence
  SiRNA target sequence
tagattaatgccgctgcacacatatt

SEQ ID NO: 250469 - DNA, 26 bp, Artificial sequence
  SiRNA target sequence
agattaatgccgctgcacacatattt

SEQ ID NO: 250470 - DNA, 26 bp, Artificial sequence
  SiRNA target sequence
gattaatgccgctgcacacatatttc

SEQ ID NO: 250471 - DNA, 26 bp, Artificial sequence
  SiRNA target sequence
attaatgccgctgcacacatatttct

SEQ ID NO: 250472 - DNA, 26 bp, Artificial sequence
  SiRNA target sequence
ttaatgccgctgcacacatatttctt

SEQ ID NO: 250473 - DNA, 26 bp, Artificial sequence
  SiRNA target sequence
taatgccgctgcacacatatttctta

SEQ ID NO: 250474 - DNA, 26 bp, Artificial sequence
  SiRNA target sequence
aatgccgctgcacacatatttcttaa

SEQ ID NO: 250475 - DNA, 26 bp, Artificial sequence
  SiRNA target sequence
atgccgctgcacacatatttcttaaa

SEQ ID NO: 250476 - DNA, 26 bp, Artificial sequence
  SiRNA target sequence
tgccgctgcacacatatttcttaaaa

SEQ ID NO: 250477 - DNA, 26 bp, Artificial sequence
  SiRNA target sequence
gccgctgcacacatatttcttaaaaa

SEQ ID NO: 250478 - DNA, 26 bp, Artificial sequence
  SiRNA target sequence
ccgctgcacacatatttcttaaaaat

SEQ ID NO: 250479 - DNA, 26 bp, Artificial sequence
  SiRNA target sequence
cgctgcacacatatttcttaaaaatt

SEQ ID NO: 250480 - DNA, 26 bp, Artificial sequence
  SiRNA target sequence
gctgcacacatatttcttaaaaattt

SEQ ID NO: 250481 - DNA, 26 bp, Artificial sequence
  SiRNA target sequence
ctgcacacatatttcttaaaaatttg

SEQ ID NO: 250482 - DNA, 26 bp, Artificial sequence
  SiRNA target sequence
tgcacacatatttcttaaaaatttgg

SEQ ID NO: 250483 - DNA, 26 bp, Artificial sequence
  SiRNA target sequence
gcacacatatttcttaaaaatttgga

SEQ ID NO: 250484 - DNA, 26 bp, Artificial sequence
  SiRNA target sequence
cacacatatttcttaaaaatttggat

SEQ ID NO: 250485 - DNA, 26 bp, Artificial sequence
  SiRNA target sequence
acacatatttcttaaaaatttggatt

SEQ ID NO: 250486 - DNA, 26 bp, Artificial sequence
  SiRNA target sequence
cacatatttcttaaaaatttggattg

SEQ ID NO: 250487 - DNA, 26 bp, Artificial sequence
  SiRNA target sequence
acatatttcttaaaaatttggattgt

SEQ ID NO: 250488 - DNA, 26 bp, Artificial sequence
  SiRNA target sequence
catatttcttaaaaatttggattgta

SEQ ID NO: 250489 - DNA, 26 bp, Artificial sequence
  SiRNA target sequence
atatttcttaaaaatttggattgtaa

SEQ ID NO: 250490 - DNA, 26 bp, Artificial sequence
  SiRNA target sequence
tatttcttaaaaatttggattgtaaa

SEQ ID NO: 250491 - DNA, 26 bp, Artificial sequence
  SiRNA target sequence
atttcttaaaaatttggattgtaaaa

SEQ ID NO: 250492 - DNA, 26 bp, Artificial sequence
  SiRNA target sequence
tttcttaaaaatttggattgtaaaag

SEQ ID NO: 250493 - DNA, 26 bp, Artificial sequence
  SiRNA target sequence
ttcttaaaaatttggattgtaaaaga

SEQ ID NO: 250494 - DNA, 26 bp, Artificial sequence
  SiRNA target sequence
tcttaaaaatttggattgtaaaagat

SEQ ID NO: 250495 - DNA, 26 bp, Artificial sequence
  SiRNA target sequence
cttaaaaatttggattgtaaaagatc

SEQ ID NO: 250496 - DNA, 26 bp, Artificial sequence
  SiRNA target sequence
ttaaaaatttggattgtaaaagatca

SEQ ID NO: 250497 - DNA, 26 bp, Artificial sequence
  SiRNA target sequence
taaaaatttggattgtaaaagatcaa

SEQ ID NO: 250498 - DNA, 26 bp, Artificial sequence
  SiRNA target sequence
aaaaatttggattgtaaaagatcaaa

SEQ ID NO: 250499 - DNA, 26 bp, Artificial sequence
  SiRNA target sequence
aaaatttggattgtaaaagatcaaac

SEQ ID NO: 250500 - DNA, 26 bp, Artificial sequence
  SiRNA target sequence
aaatttggattgtaaaagatcaaacg

SEQ ID NO: 250501 - DNA, 26 bp, Artificial sequence
  SiRNA target sequence
aatttggattgtaaaagatcaaacga

SEQ ID NO: 250502 - DNA, 26 bp, Artificial sequence
  SiRNA target sequence
atttggattgtaaaagatcaaacgag

SEQ ID NO: 250503 - DNA, 26 bp, Artificial sequence
  SiRNA target sequence
tttggattgtaaaagatcaaacgagg

SEQ ID NO: 250504 - DNA, 26 bp, Artificial sequence
  SiRNA target sequence
ttggattgtaaaagatcaaacgagga

SEQ ID NO: 250505 - DNA, 26 bp, Artificial sequence
  SiRNA target sequence
tggattgtaaaagatcaaacgaggat

SEQ ID NO: 250506 - DNA, 26 bp, Artificial sequence
  SiRNA target sequence
ggattgtaaaagatcaaacgaggatg

SEQ ID NO: 250507 - DNA, 26 bp, Artificial sequence
  SiRNA target sequence
gattgtaaaagatcaaacgaggatgt

SEQ ID NO: 250508 - DNA, 26 bp, Artificial sequence
  SiRNA target sequence
attgtaaaagatcaaacgaggatgtc

SEQ ID NO: 250509 - DNA, 26 bp, Artificial sequence
  SiRNA target sequence
ttgtaaaagatcaaacgaggatgtcg

SEQ ID NO: 250510 - DNA, 26 bp, Artificial sequence
  SiRNA target sequence
tgtaaaagatcaaacgaggatgtcgt

SEQ ID NO: 250511 - DNA, 26 bp, Artificial sequence
  SiRNA target sequence
gtaaaagatcaaacgaggatgtcgtt

SEQ ID NO: 250512 - DNA, 26 bp, Artificial sequence
  SiRNA target sequence
taaaagatcaaacgaggatgtcgttt

SEQ ID NO: 250513 - DNA, 26 bp, Artificial sequence
  SiRNA target sequence
aaaagatcaaacgaggatgtcgtttt

SEQ ID NO: 250514 - DNA, 26 bp, Artificial sequence
  SiRNA target sequence
aaagatcaaacgaggatgtcgttttg

SEQ ID NO: 250515 - DNA, 26 bp, Artificial sequence
  SiRNA target sequence
aagatcaaacgaggatgtcgttttgt

SEQ ID NO: 250516 - DNA, 26 bp, Artificial sequence
  SiRNA target sequence
agatcaaacgaggatgtcgttttgtc

SEQ ID NO: 250517 - DNA, 26 bp, Artificial sequence
  SiRNA target sequence
gatcaaacgaggatgtcgttttgtct

SEQ ID NO: 250518 - DNA, 26 bp, Artificial sequence
  SiRNA target sequence
atcaaacgaggatgtcgttttgtctt

SEQ ID NO: 250519 - DNA, 26 bp, Artificial sequence
  SiRNA target sequence
tcaaacgaggatgtcgttttgtcttc

SEQ ID NO: 250520 - DNA, 26 bp, Artificial sequence
  SiRNA target sequence
caaacgaggatgtcgttttgtcttct

SEQ ID NO: 250521 - DNA, 26 bp, Artificial sequence
  SiRNA target sequence
aaacgaggatgtcgttttgtcttctt

SEQ ID NO: 250522 - DNA, 26 bp, Artificial sequence
  SiRNA target sequence
aacgaggatgtcgttttgtcttcttc

SEQ ID NO: 250523 - DNA, 26 bp, Artificial sequence
  SiRNA target sequence
acgaggatgtcgttttgtcttcttct

SEQ ID NO: 250524 - DNA, 26 bp, Artificial sequence
  SiRNA target sequence
cgaggatgtcgttttgtcttcttctt

SEQ ID NO: 250525 - DNA, 26 bp, Artificial sequence
  SiRNA target sequence
gaggatgtcgttttgtcttcttcttt

SEQ ID NO: 250526 - DNA, 26 bp, Artificial sequence
  SiRNA target sequence
aggatgtcgttttgtcttcttcttta

SEQ ID NO: 250527 - DNA, 26 bp, Artificial sequence
  SiRNA target sequence
ggatgtcgttttgtcttcttctttat

SEQ ID NO: 250528 - DNA, 26 bp, Artificial sequence
  SiRNA target sequence
gatgtcgttttgtcttcttctttatt

SEQ ID NO: 250529 - DNA, 26 bp, Artificial sequence
  SiRNA target sequence
atgtcgttttgtcttcttctttattt

SEQ ID NO: 250530 - DNA, 26 bp, Artificial sequence
  SiRNA target sequence
tgtcgttttgtcttcttctttattta

SEQ ID NO: 250531 - DNA, 26 bp, Artificial sequence
  SiRNA target sequence
gtcgttttgtcttcttctttatttat

SEQ ID NO: 250532 - DNA, 26 bp, Artificial sequence
  SiRNA target sequence
tcgttttgtcttcttctttatttata

SEQ ID NO: 250533 - DNA, 26 bp, Artificial sequence
  SiRNA target sequence
cgttttgtcttcttctttatttatag

SEQ ID NO: 250534 - DNA, 26 bp, Artificial sequence
  SiRNA target sequence
gttttgtcttcttctttatttatagt

SEQ ID NO: 250535 - DNA, 26 bp, Artificial sequence
  SiRNA target sequence
ttttgtcttcttctttatttatagtt

SEQ ID NO: 250536 - DNA, 26 bp, Artificial sequence
  SiRNA target sequence
tttgtcttcttctttatttatagttt

SEQ ID NO: 250537 - DNA, 26 bp, Artificial sequence
  SiRNA target sequence
ttgtcttcttctttatttatagtttc

SEQ ID NO: 250538 - DNA, 26 bp, Artificial sequence
  SiRNA target sequence
tgtcttcttctttatttatagtttcc

SEQ ID NO: 250539 - DNA, 26 bp, Artificial sequence
  SiRNA target sequence
gtcttcttctttatttatagtttcct

SEQ ID NO: 250540 - DNA, 26 bp, Artificial sequence
  SiRNA target sequence
tcttcttctttatttatagtttcctt

SEQ ID NO: 250541 - DNA, 26 bp, Artificial sequence
  SiRNA target sequence
cttcttctttatttatagtttccttt

SEQ ID NO: 250542 - DNA, 26 bp, Artificial sequence
  SiRNA target sequence
ttcttctttatttatagtttccttta

SEQ ID NO: 250543 - DNA, 26 bp, Artificial sequence
  SiRNA target sequence
tcttctttatttatagtttcctttat

SEQ ID NO: 250544 - DNA, 26 bp, Artificial sequence
  SiRNA target sequence
cttctttatttatagtttcctttatt

SEQ ID NO: 250545 - DNA, 26 bp, Artificial sequence
  SiRNA target sequence
ttctttatttatagtttcctttattt

SEQ ID NO: 250546 - DNA, 26 bp, Artificial sequence
  SiRNA target sequence
tctttatttatagtttcctttatttc

SEQ ID NO: 250547 - DNA, 26 bp, Artificial sequence
  SiRNA target sequence
ctttatttatagtttcctttatttct

SEQ ID NO: 250548 - DNA, 26 bp, Artificial sequence
  SiRNA target sequence
tttatttatagtttcctttatttctt

SEQ ID NO: 250549 - DNA, 26 bp, Artificial sequence
  SiRNA target sequence
ttatttatagtttcctttatttcttt

SEQ ID NO: 250550 - DNA, 26 bp, Artificial sequence
  SiRNA target sequence
tatttatagtttcctttatttcttta

SEQ ID NO: 250551 - DNA, 26 bp, Artificial sequence
  SiRNA target sequence
atttatagtttcctttatttctttag

SEQ ID NO: 250552 - DNA, 26 bp, Artificial sequence
  SiRNA target sequence
tttatagtttcctttatttctttagt

SEQ ID NO: 250553 - DNA, 26 bp, Artificial sequence
  SiRNA target sequence
ttatagtttcctttatttctttagtt

SEQ ID NO: 250554 - DNA, 26 bp, Artificial sequence
  SiRNA target sequence
tatagtttcctttatttctttagttt

SEQ ID NO: 250555 - DNA, 26 bp, Artificial sequence
  SiRNA target sequence
atagtttcctttatttctttagtttt

SEQ ID NO: 250556 - DNA, 26 bp, Artificial sequence
  SiRNA target sequence
tagtttcctttatttctttagtttta

SEQ ID NO: 250557 - DNA, 26 bp, Artificial sequence
  SiRNA target sequence
agtttcctttatttctttagttttaa

SEQ ID NO: 250558 - DNA, 26 bp, Artificial sequence
  SiRNA target sequence
gtttcctttatttctttagttttaag

SEQ ID NO: 250559 - DNA, 26 bp, Artificial sequence
  SiRNA target sequence
tttcctttatttctttagttttaaga

SEQ ID NO: 250560 - DNA, 26 bp, Artificial sequence
  SiRNA target sequence
ttcctttatttctttagttttaagag

SEQ ID NO: 250561 - DNA, 26 bp, Artificial sequence
  SiRNA target sequence
tcctttatttctttagttttaagagg

SEQ ID NO: 250562 - DNA, 26 bp, Artificial sequence
  SiRNA target sequence
cctttatttctttagttttaagagga

SEQ ID NO: 250563 - DNA, 26 bp, Artificial sequence
  SiRNA target sequence
ctttatttctttagttttaagaggaa

SEQ ID NO: 250564 - DNA, 26 bp, Artificial sequence
  SiRNA target sequence
tttatttctttagttttaagaggaat

SEQ ID NO: 250565 - DNA, 26 bp, Artificial sequence
  SiRNA target sequence
ttatttctttagttttaagaggaata

SEQ ID NO: 250566 - DNA, 26 bp, Artificial sequence
  SiRNA target sequence
tatttctttagttttaagaggaatat

SEQ ID NO: 250567 - DNA, 26 bp, Artificial sequence
  SiRNA target sequence
atttctttagttttaagaggaatata

SEQ ID NO: 250568 - DNA, 26 bp, Artificial sequence
  SiRNA target sequence
tttctttagttttaagaggaatataa

SEQ ID NO: 250569 - DNA, 26 bp, Artificial sequence
  SiRNA target sequence
ttctttagttttaagaggaatataac

SEQ ID NO: 250570 - DNA, 26 bp, Artificial sequence
  SiRNA target sequence
tctttagttttaagaggaatataact

SEQ ID NO: 250571 - DNA, 26 bp, Artificial sequence
  SiRNA target sequence
ctttagttttaagaggaatataactt

SEQ ID NO: 250572 - DNA, 26 bp, Artificial sequence
  SiRNA target sequence
tttagttttaagaggaatataacttt

SEQ ID NO: 250573 - DNA, 26 bp, Artificial sequence
  SiRNA target sequence
ttagttttaagaggaatataactttt

SEQ ID NO: 250574 - DNA, 26 bp, Artificial sequence
  SiRNA target sequence
tagttttaagaggaatataacttttt

SEQ ID NO: 250575 - DNA, 26 bp, Artificial sequence
  SiRNA target sequence
agttttaagaggaatataacttttta

SEQ ID NO: 250576 - DNA, 26 bp, Artificial sequence
  SiRNA target sequence
gttttaagaggaatataactttttaa

SEQ ID NO: 250577 - DNA, 26 bp, Artificial sequence
  SiRNA target sequence
ttttaagaggaatataactttttaaa

SEQ ID NO: 250578 - DNA, 26 bp, Artificial sequence
  SiRNA target sequence
tttaagaggaatataactttttaaaa

SEQ ID NO: 250579 - DNA, 26 bp, Artificial sequence
  SiRNA target sequence
ttaagaggaatataactttttaaaaa

SEQ ID NO: 250580 - DNA, 26 bp, Artificial sequence
  SiRNA target sequence
taagaggaatataactttttaaaaag

SEQ ID NO: 250581 - DNA, 26 bp, Artificial sequence
  SiRNA target sequence
aagaggaatataactttttaaaaagt

SEQ ID NO: 250582 - DNA, 26 bp, Artificial sequence
  SiRNA target sequence
agaggaatataactttttaaaaagta

SEQ ID NO: 250583 - DNA, 26 bp, Artificial sequence
  SiRNA target sequence
gaggaatataactttttaaaaagtaa

SEQ ID NO: 250584 - DNA, 26 bp, Artificial sequence
  SiRNA target sequence
aggaatataactttttaaaaagtaaa

SEQ ID NO: 250585 - DNA, 26 bp, Artificial sequence
  SiRNA target sequence
ggaatataactttttaaaaagtaaat

SEQ ID NO: 250586 - DNA, 26 bp, Artificial sequence
  SiRNA target sequence
gaatataactttttaaaaagtaaatt

SEQ ID NO: 250587 - DNA, 26 bp, Artificial sequence
  SiRNA target sequence
aatataactttttaaaaagtaaatta

SEQ ID NO: 250588 - DNA, 26 bp, Artificial sequence
  SiRNA target sequence
atataactttttaaaaagtaaattaa

SEQ ID NO: 250589 - DNA, 26 bp, Artificial sequence
  SiRNA target sequence
tataactttttaaaaagtaaattaat

SEQ ID NO: 250590 - DNA, 26 bp, Artificial sequence
  SiRNA target sequence
ataactttttaaaaagtaaattaatg

SEQ ID NO: 250591 - DNA, 26 bp, Artificial sequence
  SiRNA target sequence
taactttttaaaaagtaaattaatgt

SEQ ID NO: 250592 - DNA, 26 bp, Artificial sequence
  SiRNA target sequence
aactttttaaaaagtaaattaatgta

SEQ ID NO: 250593 - DNA, 26 bp, Artificial sequence
  SiRNA target sequence
actttttaaaaagtaaattaatgtag

SEQ ID NO: 250594 - DNA, 26 bp, Artificial sequence
  SiRNA target sequence
ctttttaaaaagtaaattaatgtagt

SEQ ID NO: 250595 - DNA, 26 bp, Artificial sequence
  SiRNA target sequence
tttttaaaaagtaaattaatgtagtt

SEQ ID NO: 250596 - DNA, 26 bp, Artificial sequence
  SiRNA target sequence
ttttaaaaagtaaattaatgtagtta

SEQ ID NO: 250597 - DNA, 26 bp, Artificial sequence
  SiRNA target sequence
tttaaaaagtaaattaatgtagttac

SEQ ID NO: 250598 - DNA, 26 bp, Artificial sequence
  SiRNA target sequence
ttaaaaagtaaattaatgtagttaca

SEQ ID NO: 250599 - DNA, 26 bp, Artificial sequence
  SiRNA target sequence
taaaaagtaaattaatgtagttacaa

SEQ ID NO: 250600 - DNA, 26 bp, Artificial sequence
  SiRNA target sequence
aaaaagtaaattaatgtagttacaaa

SEQ ID NO: 250601 - DNA, 26 bp, Artificial sequence
  SiRNA target sequence
aaaagtaaattaatgtagttacaaaa

SEQ ID NO: 250602 - DNA, 26 bp, Artificial sequence
  SiRNA target sequence
aaagtaaattaatgtagttacaaaag

SEQ ID NO: 250603 - DNA, 26 bp, Artificial sequence
  SiRNA target sequence
aagtaaattaatgtagttacaaaaga

SEQ ID NO: 250604 - DNA, 26 bp, Artificial sequence
  SiRNA target sequence
agtaaattaatgtagttacaaaagac

SEQ ID NO: 250605 - DNA, 26 bp, Artificial sequence
  SiRNA target sequence
gtaaattaatgtagttacaaaagaca

SEQ ID NO: 250606 - DNA, 26 bp, Artificial sequence
  SiRNA target sequence
taaattaatgtagttacaaaagacaa

SEQ ID NO: 250607 - DNA, 26 bp, Artificial sequence
  SiRNA target sequence
aaattaatgtagttacaaaagacaag

SEQ ID NO: 250608 - DNA, 26 bp, Artificial sequence
  SiRNA target sequence
aattaatgtagttacaaaagacaaga

SEQ ID NO: 250609 - DNA, 26 bp, Artificial sequence
  SiRNA target sequence
attaatgtagttacaaaagacaagat

SEQ ID NO: 250610 - DNA, 26 bp, Artificial sequence
  SiRNA target sequence
ttaatgtagttacaaaagacaagatc

SEQ ID NO: 250611 - DNA, 26 bp, Artificial sequence
  SiRNA target sequence
taatgtagttacaaaagacaagatca

SEQ ID NO: 250612 - DNA, 26 bp, Artificial sequence
  SiRNA target sequence
aatgtagttacaaaagacaagatcaa

SEQ ID NO: 250613 - DNA, 26 bp, Artificial sequence
  SiRNA target sequence
atgtagttacaaaagacaagatcaaa

SEQ ID NO: 250614 - DNA, 26 bp, Artificial sequence
  SiRNA target sequence
tgtagttacaaaagacaagatcaaaa

SEQ ID NO: 250615 - DNA, 26 bp, Artificial sequence
  SiRNA target sequence
gtagttacaaaagacaagatcaaaaa

SEQ ID NO: 250616 - DNA, 26 bp, Artificial sequence
  SiRNA target sequence
tagttacaaaagacaagatcaaaaaa

SEQ ID NO: 250617 - DNA, 26 bp, Artificial sequence
  SiRNA target sequence
agttacaaaagacaagatcaaaaaaa

SEQ ID NO: 250618 - DNA, 26 bp, Artificial sequence
  SiRNA target sequence
gttacaaaagacaagatcaaaaaaaa

SEQ ID NO: 250619 - DNA, 26 bp, Artificial sequence
  SiRNA target sequence
ttacaaaagacaagatcaaaaaaaac

SEQ ID NO: 250620 - DNA, 26 bp, Artificial sequence
  SiRNA target sequence
tacaaaagacaagatcaaaaaaaaca

SEQ ID NO: 250621 - DNA, 26 bp, Artificial sequence
  SiRNA target sequence
acaaaagacaagatcaaaaaaaacaa

SEQ ID NO: 250622 - DNA, 26 bp, Artificial sequence
  SiRNA target sequence
caaaagacaagatcaaaaaaaacaaa

SEQ ID NO: 250623 - DNA, 26 bp, Artificial sequence
  SiRNA target sequence
aaaagacaagatcaaaaaaaacaaac

SEQ ID NO: 250624 - DNA, 26 bp, Artificial sequence
  SiRNA target sequence
aaagacaagatcaaaaaaaacaaact

SEQ ID NO: 250625 - DNA, 26 bp, Artificial sequence
  SiRNA target sequence
aagacaagatcaaaaaaaacaaacta

SEQ ID NO: 250626 - DNA, 26 bp, Artificial sequence
  SiRNA target sequence
agacaagatcaaaaaaaacaaactac

SEQ ID NO: 250627 - DNA, 26 bp, Artificial sequence
  SiRNA target sequence
gacaagatcaaaaaaaacaaactact

SEQ ID NO: 250628 - DNA, 26 bp, Artificial sequence
  SiRNA target sequence
acaagatcaaaaaaaacaaactacta

SEQ ID NO: 250629 - DNA, 26 bp, Artificial sequence
  SiRNA target sequence
caagatcaaaaaaaacaaactactac

SEQ ID NO: 250630 - DNA, 26 bp, Artificial sequence
  SiRNA target sequence
aagatcaaaaaaaacaaactactacc

SEQ ID NO: 250631 - DNA, 26 bp, Artificial sequence
  SiRNA target sequence
agatcaaaaaaaacaaactactaccg

SEQ ID NO: 250632 - DNA, 26 bp, Artificial sequence
  SiRNA target sequence
gatcaaaaaaaacaaactactaccgt

SEQ ID NO: 250633 - DNA, 26 bp, Artificial sequence
  SiRNA target sequence
atcaaaaaaaacaaactactaccgtc

SEQ ID NO: 250634 - DNA, 26 bp, Artificial sequence
  SiRNA target sequence
tcaaaaaaaacaaactactaccgtca

SEQ ID NO: 250635 - DNA, 26 bp, Artificial sequence
  SiRNA target sequence
caaaaaaaacaaactactaccgtcaa

SEQ ID NO: 250636 - DNA, 26 bp, Artificial sequence
  SiRNA target sequence
aaaaaaaacaaactactaccgtcaat

SEQ ID NO: 250637 - DNA, 26 bp, Artificial sequence
  SiRNA target sequence
aaaaaaacaaactactaccgtcaatt

SEQ ID NO: 250638 - DNA, 26 bp, Artificial sequence
  SiRNA target sequence
aaaaaacaaactactaccgtcaattt

SEQ ID NO: 250639 - DNA, 26 bp, Artificial sequence
  SiRNA target sequence
aaaaacaaactactaccgtcaatttt

SEQ ID NO: 250640 - DNA, 26 bp, Artificial sequence
  SiRNA target sequence
aaaacaaactactaccgtcaatttta

SEQ ID NO: 250641 - DNA, 26 bp, Artificial sequence
  SiRNA target sequence
aaacaaactactaccgtcaattttat

SEQ ID NO: 250642 - DNA, 26 bp, Artificial sequence
  SiRNA target sequence
aacaaactactaccgtcaattttatc

SEQ ID NO: 250643 - DNA, 26 bp, Artificial sequence
  SiRNA target sequence
acaaactactaccgtcaattttatca

SEQ ID NO: 250644 - DNA, 26 bp, Artificial sequence
  SiRNA target sequence
caaactactaccgtcaattttatcat

SEQ ID NO: 250645 - DNA, 26 bp, Artificial sequence
  SiRNA target sequence
aaactactaccgtcaattttatcatg

SEQ ID NO: 250646 - DNA, 26 bp, Artificial sequence
  SiRNA target sequence
aactactaccgtcaattttatcatgc

SEQ ID NO: 250647 - DNA, 26 bp, Artificial sequence
  SiRNA target sequence
actactaccgtcaattttatcatgca

SEQ ID NO: 250648 - DNA, 26 bp, Artificial sequence
  SiRNA target sequence
ctactaccgtcaattttatcatgcaa

SEQ ID NO: 250649 - DNA, 26 bp, Artificial sequence
  SiRNA target sequence
tactaccgtcaattttatcatgcaaa

SEQ ID NO: 250650 - DNA, 26 bp, Artificial sequence
  SiRNA target sequence
actaccgtcaattttatcatgcaaac

SEQ ID NO: 250651 - DNA, 26 bp, Artificial sequence
  SiRNA target sequence
ctaccgtcaattttatcatgcaaacc

SEQ ID NO: 250652 - DNA, 26 bp, Artificial sequence
  SiRNA target sequence
taccgtcaattttatcatgcaaacct

SEQ ID NO: 250653 - DNA, 26 bp, Artificial sequence
  SiRNA target sequence
accgtcaattttatcatgcaaacctg

SEQ ID NO: 250654 - DNA, 26 bp, Artificial sequence
  SiRNA target sequence
ccgtcaattttatcatgcaaacctgc

SEQ ID NO: 250655 - DNA, 26 bp, Artificial sequence
  SiRNA target sequence
cgtcaattttatcatgcaaacctgca

SEQ ID NO: 250656 - DNA, 26 bp, Artificial sequence
  SiRNA target sequence
gtcaattttatcatgcaaacctgcag

SEQ ID NO: 250657 - DNA, 26 bp, Artificial sequence
  SiRNA target sequence
tcaattttatcatgcaaacctgcagg

SEQ ID NO: 250658 - DNA, 26 bp, Artificial sequence
  SiRNA target sequence
caattttatcatgcaaacctgcagga

SEQ ID NO: 250659 - DNA, 26 bp, Artificial sequence
  SiRNA target sequence
aattttatcatgcaaacctgcaggaa

SEQ ID NO: 250660 - DNA, 26 bp, Artificial sequence
  SiRNA target sequence
attttatcatgcaaacctgcaggaag

SEQ ID NO: 250661 - DNA, 26 bp, Artificial sequence
  SiRNA target sequence
ttttatcatgcaaacctgcaggaagt

SEQ ID NO: 250662 - DNA, 26 bp, Artificial sequence
  SiRNA target sequence
tttatcatgcaaacctgcaggaagta

SEQ ID NO: 250663 - DNA, 26 bp, Artificial sequence
  SiRNA target sequence
ttatcatgcaaacctgcaggaagtat

SEQ ID NO: 250664 - DNA, 26 bp, Artificial sequence
  SiRNA target sequence
tatcatgcaaacctgcaggaagtata

SEQ ID NO: 250665 - DNA, 26 bp, Artificial sequence
  SiRNA target sequence
atcatgcaaacctgcaggaagtatat

SEQ ID NO: 250666 - DNA, 26 bp, Artificial sequence
  SiRNA target sequence
tcatgcaaacctgcaggaagtatatt

SEQ ID NO: 250667 - DNA, 26 bp, Artificial sequence
  SiRNA target sequence
catgcaaacctgcaggaagtatattt

SEQ ID NO: 250668 - DNA, 26 bp, Artificial sequence
  SiRNA target sequence
atgcaaacctgcaggaagtatatttg

SEQ ID NO: 250669 - DNA, 26 bp, Artificial sequence
  SiRNA target sequence
tgcaaacctgcaggaagtatatttgc

SEQ ID NO: 250670 - DNA, 26 bp, Artificial sequence
  SiRNA target sequence
gcaaacctgcaggaagtatatttgct

SEQ ID NO: 250671 - DNA, 26 bp, Artificial sequence
  SiRNA target sequence
caaacctgcaggaagtatatttgcta

SEQ ID NO: 250672 - DNA, 26 bp, Artificial sequence
  SiRNA target sequence
aaacctgcaggaagtatatttgctaa

SEQ ID NO: 250673 - DNA, 26 bp, Artificial sequence
  SiRNA target sequence
aacctgcaggaagtatatttgctaat

SEQ ID NO: 250674 - DNA, 26 bp, Artificial sequence
  SiRNA target sequence
acctgcaggaagtatatttgctaatt

SEQ ID NO: 250675 - DNA, 26 bp, Artificial sequence
  SiRNA target sequence
cctgcaggaagtatatttgctaattc

SEQ ID NO: 250676 - DNA, 26 bp, Artificial sequence
  SiRNA target sequence
ctgcaggaagtatatttgctaattca

SEQ ID NO: 250677 - DNA, 26 bp, Artificial sequence
  SiRNA target sequence
tgcaggaagtatatttgctaattcat

SEQ ID NO: 250678 - DNA, 26 bp, Artificial sequence
  SiRNA target sequence
gcaggaagtatatttgctaattcatc

SEQ ID NO: 250679 - DNA, 26 bp, Artificial sequence
  SiRNA target sequence
caggaagtatatttgctaattcatct

SEQ ID NO: 250680 - DNA, 26 bp, Artificial sequence
  SiRNA target sequence
aggaagtatatttgctaattcatctt

SEQ ID NO: 250681 - DNA, 26 bp, Artificial sequence
  SiRNA target sequence
ggaagtatatttgctaattcatcttt

SEQ ID NO: 250682 - DNA, 26 bp, Artificial sequence
  SiRNA target sequence
gaagtatatttgctaattcatctttt

SEQ ID NO: 250683 - DNA, 26 bp, Artificial sequence
  SiRNA target sequence
aagtatatttgctaattcatctttta

SEQ ID NO: 250684 - DNA, 26 bp, Artificial sequence
  SiRNA target sequence
agtatatttgctaattcatcttttat

SEQ ID NO: 250685 - DNA, 26 bp, Artificial sequence
  SiRNA target sequence
gtatatttgctaattcatcttttata

SEQ ID NO: 250686 - DNA, 26 bp, Artificial sequence
  SiRNA target sequence
tatatttgctaattcatcttttatat

SEQ ID NO: 250687 - DNA, 26 bp, Artificial sequence
  SiRNA target sequence
atatttgctaattcatcttttatata

SEQ ID NO: 250688 - DNA, 26 bp, Artificial sequence
  SiRNA target sequence
tatttgctaattcatcttttatataa

SEQ ID NO: 250689 - DNA, 26 bp, Artificial sequence
  SiRNA target sequence
atttgctaattcatcttttatataaa

SEQ ID NO: 250690 - DNA, 26 bp, Artificial sequence
  SiRNA target sequence
tttgctaattcatcttttatataaat

SEQ ID NO: 250691 - DNA, 26 bp, Artificial sequence
  SiRNA target sequence
ttgctaattcatcttttatataaata

SEQ ID NO: 250692 - DNA, 26 bp, Artificial sequence
  SiRNA target sequence
tgctaattcatcttttatataaataa

SEQ ID NO: 250693 - DNA, 26 bp, Artificial sequence
  SiRNA target sequence
gctaattcatcttttatataaataaa

SEQ ID NO: 250694 - DNA, 26 bp, Artificial sequence
  SiRNA target sequence
ctaattcatcttttatataaataaaa

SEQ ID NO: 250695 - DNA, 26 bp, Artificial sequence
  SiRNA target sequence
taattcatcttttatataaataaaag

SEQ ID NO: 250696 - DNA, 26 bp, Artificial sequence
  SiRNA target sequence
aattcatcttttatataaataaaagc

SEQ ID NO: 250697 - DNA, 26 bp, Artificial sequence
  SiRNA target sequence
attcatcttttatataaataaaagct

SEQ ID NO: 250698 - DNA, 26 bp, Artificial sequence
  SiRNA target sequence
ttcatcttttatataaataaaagcta

SEQ ID NO: 250699 - DNA, 26 bp, Artificial sequence
  SiRNA target sequence
tcatcttttatataaataaaagctac

SEQ ID NO: 250700 - DNA, 26 bp, Artificial sequence
  SiRNA target sequence
catcttttatataaataaaagctaca

SEQ ID NO: 250701 - DNA, 26 bp, Artificial sequence
  SiRNA target sequence
atcttttatataaataaaagctacag

SEQ ID NO: 250702 - DNA, 26 bp, Artificial sequence
  SiRNA target sequence
tcttttatataaataaaagctacaga

SEQ ID NO: 250703 - DNA, 26 bp, Artificial sequence
  SiRNA target sequence
cttttatataaataaaagctacagaa

SEQ ID NO: 250704 - DNA, 26 bp, Artificial sequence
  SiRNA target sequence
ttttatataaataaaagctacagaaa

SEQ ID NO: 250705 - DNA, 26 bp, Artificial sequence
  SiRNA target sequence
tttatataaataaaagctacagaaat

SEQ ID NO: 250706 - DNA, 26 bp, Artificial sequence
  SiRNA target sequence
ttatataaataaaagctacagaaata

SEQ ID NO: 250707 - DNA, 26 bp, Artificial sequence
  SiRNA target sequence
tatataaataaaagctacagaaataa

SEQ ID NO: 250708 - DNA, 26 bp, Artificial sequence
  SiRNA target sequence
atataaataaaagctacagaaataat

SEQ ID NO: 250709 - DNA, 26 bp, Artificial sequence
  SiRNA target sequence
tataaataaaagctacagaaataatc

SEQ ID NO: 250710 - DNA, 26 bp, Artificial sequence
  SiRNA target sequence
ataaataaaagctacagaaataatca

SEQ ID NO: 250711 - DNA, 26 bp, Artificial sequence
  SiRNA target sequence
taaataaaagctacagaaataatcat

SEQ ID NO: 250712 - DNA, 26 bp, Artificial sequence
  SiRNA target sequence
aaataaaagctacagaaataatcatt

SEQ ID NO: 250713 - DNA, 26 bp, Artificial sequence
  SiRNA target sequence
aataaaagctacagaaataatcattg

SEQ ID NO: 250714 - DNA, 26 bp, Artificial sequence
  SiRNA target sequence
ataaaagctacagaaataatcattga

SEQ ID NO: 250715 - DNA, 26 bp, Artificial sequence
  SiRNA target sequence
taaaagctacagaaataatcattgaa

SEQ ID NO: 250716 - DNA, 26 bp, Artificial sequence
  SiRNA target sequence
aaaagctacagaaataatcattgaaa

SEQ ID NO: 250717 - DNA, 26 bp, Artificial sequence
  SiRNA target sequence
aaagctacagaaataatcattgaaat

SEQ ID NO: 250718 - DNA, 26 bp, Artificial sequence
  SiRNA target sequence
aagctacagaaataatcattgaaatg

SEQ ID NO: 250719 - DNA, 26 bp, Artificial sequence
  SiRNA target sequence
agctacagaaataatcattgaaatgg

SEQ ID NO: 250720 - DNA, 26 bp, Artificial sequence
  SiRNA target sequence
gctacagaaataatcattgaaatggc

SEQ ID NO: 250721 - DNA, 26 bp, Artificial sequence
  SiRNA target sequence
ctacagaaataatcattgaaatggcg

SEQ ID NO: 250722 - DNA, 26 bp, Artificial sequence
  SiRNA target sequence
tacagaaataatcattgaaatggcgg

SEQ ID NO: 250723 - DNA, 26 bp, Artificial sequence
  SiRNA target sequence
acagaaataatcattgaaatggcggt

SEQ ID NO: 250724 - DNA, 26 bp, Artificial sequence
  SiRNA target sequence
cagaaataatcattgaaatggcggtg

SEQ ID NO: 250725 - DNA, 26 bp, Artificial sequence
  SiRNA target sequence
agaaataatcattgaaatggcggtga

SEQ ID NO: 250726 - DNA, 26 bp, Artificial sequence
  SiRNA target sequence
gaaataatcattgaaatggcggtgat

SEQ ID NO: 250727 - DNA, 26 bp, Artificial sequence
  SiRNA target sequence
aaataatcattgaaatggcggtgatt

SEQ ID NO: 250728 - DNA, 26 bp, Artificial sequence
  SiRNA target sequence
aataatcattgaaatggcggtgattg

SEQ ID NO: 250729 - DNA, 26 bp, Artificial sequence
  SiRNA target sequence
ataatcattgaaatggcggtgattgt

SEQ ID NO: 250730 - DNA, 26 bp, Artificial sequence
  SiRNA target sequence
taatcattgaaatggcggtgattgtg

SEQ ID NO: 250731 - DNA, 26 bp, Artificial sequence
  SiRNA target sequence
aatcattgaaatggcggtgattgtgg

SEQ ID NO: 250732 - DNA, 26 bp, Artificial sequence
  SiRNA target sequence
atcattgaaatggcggtgattgtgga

SEQ ID NO: 250733 - DNA, 26 bp, Artificial sequence
  SiRNA target sequence
tcattgaaatggcggtgattgtggaa

SEQ ID NO: 250734 - DNA, 26 bp, Artificial sequence
  SiRNA target sequence
cattgaaatggcggtgattgtggaaa

SEQ ID NO: 250735 - DNA, 26 bp, Artificial sequence
  SiRNA target sequence
attgaaatggcggtgattgtggaaaa

SEQ ID NO: 250736 - DNA, 26 bp, Artificial sequence
  SiRNA target sequence
ttgaaatggcggtgattgtggaaaaa

SEQ ID NO: 250737 - DNA, 26 bp, Artificial sequence
  SiRNA target sequence
tgaaatggcggtgattgtggaaaaat

SEQ ID NO: 250738 - DNA, 26 bp, Artificial sequence
  SiRNA target sequence
gaaatggcggtgattgtggaaaaatt

SEQ ID NO: 250739 - DNA, 26 bp, Artificial sequence
  SiRNA target sequence
aaatggcggtgattgtggaaaaatta

SEQ ID NO: 250740 - DNA, 26 bp, Artificial sequence
  SiRNA target sequence
aatggcggtgattgtggaaaaattag

SEQ ID NO: 250741 - DNA, 26 bp, Artificial sequence
  SiRNA target sequence
atggcggtgattgtggaaaaattagg

SEQ ID NO: 250742 - DNA, 26 bp, Artificial sequence
  SiRNA target sequence
tggcggtgattgtggaaaaattagga

SEQ ID NO: 250743 - DNA, 26 bp, Artificial sequence
  SiRNA target sequence
ggcggtgattgtggaaaaattaggaa

SEQ ID NO: 250744 - DNA, 26 bp, Artificial sequence
  SiRNA target sequence
gcggtgattgtggaaaaattaggaac

SEQ ID NO: 250745 - DNA, 26 bp, Artificial sequence
  SiRNA target sequence
cggtgattgtggaaaaattaggaaca

SEQ ID NO: 250746 - DNA, 26 bp, Artificial sequence
  SiRNA target sequence
ggtgattgtggaaaaattaggaacaa

SEQ ID NO: 250747 - DNA, 26 bp, Artificial sequence
  SiRNA target sequence
gtgattgtggaaaaattaggaacaat

SEQ ID NO: 250748 - DNA, 26 bp, Artificial sequence
  SiRNA target sequence
tgattgtggaaaaattaggaacaatt

SEQ ID NO: 250749 - DNA, 26 bp, Artificial sequence
  SiRNA target sequence
gattgtggaaaaattaggaacaattt

SEQ ID NO: 250750 - DNA, 26 bp, Artificial sequence
  SiRNA target sequence
attgtggaaaaattaggaacaatttc

SEQ ID NO: 250751 - DNA, 26 bp, Artificial sequence
  SiRNA target sequence
ttgtggaaaaattaggaacaatttct

SEQ ID NO: 250752 - DNA, 26 bp, Artificial sequence
  SiRNA target sequence
tgtggaaaaattaggaacaatttctt

SEQ ID NO: 250753 - DNA, 26 bp, Artificial sequence
  SiRNA target sequence
gtggaaaaattaggaacaatttcttt

SEQ ID NO: 250754 - DNA, 26 bp, Artificial sequence
  SiRNA target sequence
tggaaaaattaggaacaatttctttc

SEQ ID NO: 250755 - DNA, 26 bp, Artificial sequence
  SiRNA target sequence
ggaaaaattaggaacaatttctttca

SEQ ID NO: 250756 - DNA, 26 bp, Artificial sequence
  SiRNA target sequence
gaaaaattaggaacaatttctttcat

SEQ ID NO: 250757 - DNA, 26 bp, Artificial sequence
  SiRNA target sequence
aaaaattaggaacaatttctttcatt

SEQ ID NO: 250758 - DNA, 26 bp, Artificial sequence
  SiRNA target sequence
aaaattaggaacaatttctttcattt

SEQ ID NO: 250759 - DNA, 26 bp, Artificial sequence
  SiRNA target sequence
aaattaggaacaatttctttcatttc

SEQ ID NO: 250760 - DNA, 26 bp, Artificial sequence
  SiRNA target sequence
aattaggaacaatttctttcatttca

SEQ ID NO: 250761 - DNA, 26 bp, Artificial sequence
  SiRNA target sequence
attaggaacaatttctttcatttcat

SEQ ID NO: 250762 - DNA, 26 bp, Artificial sequence
  SiRNA target sequence
ttaggaacaatttctttcatttcatc

SEQ ID NO: 250763 - DNA, 26 bp, Artificial sequence
  SiRNA target sequence
taggaacaatttctttcatttcatct

SEQ ID NO: 250764 - DNA, 26 bp, Artificial sequence
  SiRNA target sequence
aggaacaatttctttcatttcatctt

SEQ ID NO: 250765 - DNA, 26 bp, Artificial sequence
  SiRNA target sequence
ggaacaatttctttcatttcatcttc

SEQ ID NO: 250766 - DNA, 26 bp, Artificial sequence
  SiRNA target sequence
gaacaatttctttcatttcatcttct

SEQ ID NO: 250767 - DNA, 26 bp, Artificial sequence
  SiRNA target sequence
aacaatttctttcatttcatcttctg

SEQ ID NO: 250768 - DNA, 26 bp, Artificial sequence
  SiRNA target sequence
acaatttctttcatttcatcttctgt

SEQ ID NO: 250769 - DNA, 26 bp, Artificial sequence
  SiRNA target sequence
caatttctttcatttcatcttctgta

SEQ ID NO: 250770 - DNA, 26 bp, Artificial sequence
  SiRNA target sequence
aatttctttcatttcatcttctgtac

SEQ ID NO: 250771 - DNA, 26 bp, Artificial sequence
  SiRNA target sequence
atttctttcatttcatcttctgtaca

SEQ ID NO: 250772 - DNA, 26 bp, Artificial sequence
  SiRNA target sequence
tttctttcatttcatcttctgtacaa

SEQ ID NO: 250773 - DNA, 26 bp, Artificial sequence
  SiRNA target sequence
ttctttcatttcatcttctgtacaag

SEQ ID NO: 250774 - DNA, 26 bp, Artificial sequence
  SiRNA target sequence
tctttcatttcatcttctgtacaagc

SEQ ID NO: 250775 - DNA, 26 bp, Artificial sequence
  SiRNA target sequence
ctttcatttcatcttctgtacaagca

SEQ ID NO: 250776 - DNA, 26 bp, Artificial sequence
  SiRNA target sequence
tttcatttcatcttctgtacaagcat

SEQ ID NO: 250777 - DNA, 26 bp, Artificial sequence
  SiRNA target sequence
ttcatttcatcttctgtacaagcatg

SEQ ID NO: 250778 - DNA, 26 bp, Artificial sequence
  SiRNA target sequence
tcatttcatcttctgtacaagcatga

SEQ ID NO: 250779 - DNA, 26 bp, Artificial sequence
  SiRNA target sequence
catttcatcttctgtacaagcatgat

SEQ ID NO: 250780 - DNA, 26 bp, Artificial sequence
  SiRNA target sequence
atttcatcttctgtacaagcatgatt

SEQ ID NO: 250781 - DNA, 26 bp, Artificial sequence
  SiRNA target sequence
tttcatcttctgtacaagcatgattg

SEQ ID NO: 250782 - DNA, 26 bp, Artificial sequence
  SiRNA target sequence
ttcatcttctgtacaagcatgattgg

SEQ ID NO: 250783 - DNA, 26 bp, Artificial sequence
  SiRNA target sequence
tcatcttctgtacaagcatgattggc

SEQ ID NO: 250784 - DNA, 26 bp, Artificial sequence
  SiRNA target sequence
catcttctgtacaagcatgattggct

SEQ ID NO: 250785 - DNA, 26 bp, Artificial sequence
  SiRNA target sequence
atcttctgtacaagcatgattggcta

SEQ ID NO: 250786 - DNA, 26 bp, Artificial sequence
  SiRNA target sequence
tcttctgtacaagcatgattggctaa

SEQ ID NO: 250787 - DNA, 26 bp, Artificial sequence
  SiRNA target sequence
cttctgtacaagcatgattggctaac

SEQ ID NO: 250788 - DNA, 26 bp, Artificial sequence
  SiRNA target sequence
ttctgtacaagcatgattggctaacg

SEQ ID NO: 250789 - DNA, 26 bp, Artificial sequence
  SiRNA target sequence
tctgtacaagcatgattggctaacgc

SEQ ID NO: 250790 - DNA, 26 bp, Artificial sequence
  SiRNA target sequence
ctgtacaagcatgattggctaacgca

SEQ ID NO: 250791 - DNA, 26 bp, Artificial sequence
  SiRNA target sequence
tgtacaagcatgattggctaacgcat

SEQ ID NO: 250792 - DNA, 26 bp, Artificial sequence
  SiRNA target sequence
gtacaagcatgattggctaacgcata

SEQ ID NO: 250793 - DNA, 26 bp, Artificial sequence
  SiRNA target sequence
tacaagcatgattggctaacgcatat

SEQ ID NO: 250794 - DNA, 26 bp, Artificial sequence
  SiRNA target sequence
acaagcatgattggctaacgcatata

SEQ ID NO: 250795 - DNA, 26 bp, Artificial sequence
  SiRNA target sequence
caagcatgattggctaacgcatataa

SEQ ID NO: 250796 - DNA, 26 bp, Artificial sequence
  SiRNA target sequence
aagcatgattggctaacgcatataaa

SEQ ID NO: 250797 - DNA, 26 bp, Artificial sequence
  SiRNA target sequence
agcatgattggctaacgcatataaag

SEQ ID NO: 250798 - DNA, 26 bp, Artificial sequence
  SiRNA target sequence
gcatgattggctaacgcatataaagc

SEQ ID NO: 250799 - DNA, 26 bp, Artificial sequence
  SiRNA target sequence
catgattggctaacgcatataaagca

SEQ ID NO: 250800 - DNA, 26 bp, Artificial sequence
  SiRNA target sequence
atgattggctaacgcatataaagcaa

SEQ ID NO: 250801 - DNA, 26 bp, Artificial sequence
  SiRNA target sequence
tgattggctaacgcatataaagcaaa

SEQ ID NO: 250802 - DNA, 26 bp, Artificial sequence
  SiRNA target sequence
gattggctaacgcatataaagcaaaa

SEQ ID NO: 250803 - DNA, 26 bp, Artificial sequence
  SiRNA target sequence
attggctaacgcatataaagcaaaac

SEQ ID NO: 250804 - DNA, 26 bp, Artificial sequence
  SiRNA target sequence
ttggctaacgcatataaagcaaaacc

SEQ ID NO: 250805 - DNA, 26 bp, Artificial sequence
  SiRNA target sequence
tggctaacgcatataaagcaaaacca

SEQ ID NO: 250806 - DNA, 26 bp, Artificial sequence
  SiRNA target sequence
ggctaacgcatataaagcaaaaccaa

SEQ ID NO: 250807 - DNA, 26 bp, Artificial sequence
  SiRNA target sequence
gctaacgcatataaagcaaaaccaac

SEQ ID NO: 250808 - DNA, 26 bp, Artificial sequence
  SiRNA target sequence
ctaacgcatataaagcaaaaccaact

SEQ ID NO: 250809 - DNA, 26 bp, Artificial sequence
  SiRNA target sequence
taacgcatataaagcaaaaccaacta

SEQ ID NO: 250810 - DNA, 26 bp, Artificial sequence
  SiRNA target sequence
aacgcatataaagcaaaaccaactac

SEQ ID NO: 250811 - DNA, 26 bp, Artificial sequence
  SiRNA target sequence
acgcatataaagcaaaaccaactact

SEQ ID NO: 250812 - DNA, 26 bp, Artificial sequence
  SiRNA target sequence
cgcatataaagcaaaaccaactacta

SEQ ID NO: 250813 - DNA, 26 bp, Artificial sequence
  SiRNA target sequence
gcatataaagcaaaaccaactactag

SEQ ID NO: 250814 - DNA, 26 bp, Artificial sequence
  SiRNA target sequence
catataaagcaaaaccaactactaga

SEQ ID NO: 250815 - DNA, 26 bp, Artificial sequence
  SiRNA target sequence
atataaagcaaaaccaactactagag

SEQ ID NO: 250816 - DNA, 26 bp, Artificial sequence
  SiRNA target sequence
tataaagcaaaaccaactactagagt

SEQ ID NO: 250817 - DNA, 26 bp, Artificial sequence
  SiRNA target sequence
ataaagcaaaaccaactactagagta

SEQ ID NO: 250818 - DNA, 26 bp, Artificial sequence
  SiRNA target sequence
taaagcaaaaccaactactagagtac

SEQ ID NO: 250819 - DNA, 26 bp, Artificial sequence
  SiRNA target sequence
aaagcaaaaccaactactagagtact

SEQ ID NO: 250820 - DNA, 26 bp, Artificial sequence
  SiRNA target sequence
aagcaaaaccaactactagagtactc

SEQ ID NO: 250821 - DNA, 26 bp, Artificial sequence
  SiRNA target sequence
agcaaaaccaactactagagtactcc

SEQ ID NO: 250822 - DNA, 26 bp, Artificial sequence
  SiRNA target sequence
gcaaaaccaactactagagtactcca

SEQ ID NO: 250823 - DNA, 26 bp, Artificial sequence
  SiRNA target sequence
caaaaccaactactagagtactccac

SEQ ID NO: 250824 - DNA, 26 bp, Artificial sequence
  SiRNA target sequence
aaaaccaactactagagtactccaca

SEQ ID NO: 250825 - DNA, 26 bp, Artificial sequence
  SiRNA target sequence
aaaccaactactagagtactccacaa

SEQ ID NO: 250826 - DNA, 26 bp, Artificial sequence
  SiRNA target sequence
aaccaactactagagtactccacaac

SEQ ID NO: 250827 - DNA, 26 bp, Artificial sequence
  SiRNA target sequence
accaactactagagtactccacaact

SEQ ID NO: 250828 - DNA, 26 bp, Artificial sequence
  SiRNA target sequence
ccaactactagagtactccacaactc

SEQ ID NO: 250829 - DNA, 26 bp, Artificial sequence
  SiRNA target sequence
caactactagagtactccacaactcc

SEQ ID NO: 250830 - DNA, 26 bp, Artificial sequence
  SiRNA target sequence
aactactagagtactccacaactccg

SEQ ID NO: 250831 - DNA, 26 bp, Artificial sequence
  SiRNA target sequence
actactagagtactccacaactccga

SEQ ID NO: 250832 - DNA, 26 bp, Artificial sequence
  SiRNA target sequence
ctactagagtactccacaactccgat

SEQ ID NO: 250833 - DNA, 26 bp, Artificial sequence
  SiRNA target sequence
tactagagtactccacaactccgata

SEQ ID NO: 250834 - DNA, 26 bp, Artificial sequence
  SiRNA target sequence
actagagtactccacaactccgataa

SEQ ID NO: 250835 - DNA, 26 bp, Artificial sequence
  SiRNA target sequence
ctagagtactccacaactccgataag

SEQ ID NO: 250836 - DNA, 26 bp, Artificial sequence
  SiRNA target sequence
tagagtactccacaactccgataaga

SEQ ID NO: 250837 - DNA, 26 bp, Artificial sequence
  SiRNA target sequence
agagtactccacaactccgataagat

SEQ ID NO: 250838 - DNA, 26 bp, Artificial sequence
  SiRNA target sequence
gagtactccacaactccgataagatg

SEQ ID NO: 250839 - DNA, 26 bp, Artificial sequence
  SiRNA target sequence
agtactccacaactccgataagatgt

SEQ ID NO: 250840 - DNA, 26 bp, Artificial sequence
  SiRNA target sequence
gtactccacaactccgataagatgta

SEQ ID NO: 250841 - DNA, 26 bp, Artificial sequence
  SiRNA target sequence
tactccacaactccgataagatgtaa

SEQ ID NO: 250842 - DNA, 26 bp, Artificial sequence
  SiRNA target sequence
actccacaactccgataagatgtaac

SEQ ID NO: 250843 - DNA, 26 bp, Artificial sequence
  SiRNA target sequence
ctccacaactccgataagatgtaaca

SEQ ID NO: 250844 - DNA, 26 bp, Artificial sequence
  SiRNA target sequence
tccacaactccgataagatgtaacat

SEQ ID NO: 250845 - DNA, 26 bp, Artificial sequence
  SiRNA target sequence
ccacaactccgataagatgtaacata

SEQ ID NO: 250846 - DNA, 26 bp, Artificial sequence
  SiRNA target sequence
cacaactccgataagatgtaacataa

SEQ ID NO: 250847 - DNA, 26 bp, Artificial sequence
  SiRNA target sequence
acaactccgataagatgtaacataaa

SEQ ID NO: 250848 - DNA, 26 bp, Artificial sequence
  SiRNA target sequence
caactccgataagatgtaacataaag

SEQ ID NO: 250849 - DNA, 26 bp, Artificial sequence
  SiRNA target sequence
aactccgataagatgtaacataaagt

SEQ ID NO: 250850 - DNA, 26 bp, Artificial sequence
  SiRNA target sequence
actccgataagatgtaacataaagta

SEQ ID NO: 250851 - DNA, 26 bp, Artificial sequence
  SiRNA target sequence
ctccgataagatgtaacataaagtac

SEQ ID NO: 250852 - DNA, 26 bp, Artificial sequence
  SiRNA target sequence
tccgataagatgtaacataaagtact

SEQ ID NO: 250853 - DNA, 26 bp, Artificial sequence
  SiRNA target sequence
ccgataagatgtaacataaagtactt

SEQ ID NO: 250854 - DNA, 26 bp, Artificial sequence
  SiRNA target sequence
cgataagatgtaacataaagtactta

SEQ ID NO: 250855 - DNA, 26 bp, Artificial sequence
  SiRNA target sequence
gataagatgtaacataaagtacttat

SEQ ID NO: 250856 - DNA, 26 bp, Artificial sequence
  SiRNA target sequence
ataagatgtaacataaagtacttatc

SEQ ID NO: 250857 - DNA, 26 bp, Artificial sequence
  SiRNA target sequence
taagatgtaacataaagtacttatcc

SEQ ID NO: 250858 - DNA, 26 bp, Artificial sequence
  SiRNA target sequence
aagatgtaacataaagtacttatcca

SEQ ID NO: 250859 - DNA, 26 bp, Artificial sequence
  SiRNA target sequence
agatgtaacataaagtacttatccac

SEQ ID NO: 250860 - DNA, 26 bp, Artificial sequence
  SiRNA target sequence
gatgtaacataaagtacttatccact

SEQ ID NO: 250861 - DNA, 26 bp, Artificial sequence
  SiRNA target sequence
atgtaacataaagtacttatccactc

SEQ ID NO: 250862 - DNA, 26 bp, Artificial sequence
  SiRNA target sequence
tgtaacataaagtacttatccactca

SEQ ID NO: 250863 - DNA, 26 bp, Artificial sequence
  SiRNA target sequence
gtaacataaagtacttatccactcac

SEQ ID NO: 250864 - DNA, 26 bp, Artificial sequence
  SiRNA target sequence
taacataaagtacttatccactcact

SEQ ID NO: 250865 - DNA, 26 bp, Artificial sequence
  SiRNA target sequence
aacataaagtacttatccactcactg

SEQ ID NO: 250866 - DNA, 26 bp, Artificial sequence
  SiRNA target sequence
acataaagtacttatccactcactgt

SEQ ID NO: 250867 - DNA, 26 bp, Artificial sequence
  SiRNA target sequence
cataaagtacttatccactcactgta

SEQ ID NO: 250868 - DNA, 26 bp, Artificial sequence
  SiRNA target sequence
ataaagtacttatccactcactgtac

SEQ ID NO: 250869 - DNA, 26 bp, Artificial sequence
  SiRNA target sequence
taaagtacttatccactcactgtaca

SEQ ID NO: 250870 - DNA, 26 bp, Artificial sequence
  SiRNA target sequence
aaagtacttatccactcactgtacat

SEQ ID NO: 250871 - DNA, 26 bp, Artificial sequence
  SiRNA target sequence
aagtacttatccactcactgtacata

SEQ ID NO: 250872 - DNA, 26 bp, Artificial sequence
  SiRNA target sequence
agtacttatccactcactgtacatat

SEQ ID NO: 250873 - DNA, 26 bp, Artificial sequence
  SiRNA target sequence
gtacttatccactcactgtacatata

SEQ ID NO: 250874 - DNA, 26 bp, Artificial sequence
  SiRNA target sequence
tacttatccactcactgtacatatat

SEQ ID NO: 250875 - DNA, 26 bp, Artificial sequence
  SiRNA target sequence
acttatccactcactgtacatatata

SEQ ID NO: 250876 - DNA, 26 bp, Artificial sequence
  SiRNA target sequence
cttatccactcactgtacatatataa

SEQ ID NO: 250877 - DNA, 26 bp, Artificial sequence
  SiRNA target sequence
ttatccactcactgtacatatataaa

SEQ ID NO: 250878 - DNA, 26 bp, Artificial sequence
  SiRNA target sequence
tatccactcactgtacatatataaaa

SEQ ID NO: 250879 - DNA, 26 bp, Artificial sequence
  SiRNA target sequence
atccactcactgtacatatataaaaa

SEQ ID NO: 250880 - DNA, 26 bp, Artificial sequence
  SiRNA target sequence
tccactcactgtacatatataaaaaa

SEQ ID NO: 250881 - DNA, 26 bp, Artificial sequence
  SiRNA target sequence
ccactcactgtacatatataaaaaag

SEQ ID NO: 250882 - DNA, 26 bp, Artificial sequence
  SiRNA target sequence
cactcactgtacatatataaaaaagg

SEQ ID NO: 250883 - DNA, 26 bp, Artificial sequence
  SiRNA target sequence
actcactgtacatatataaaaaagga

SEQ ID NO: 250884 - DNA, 26 bp, Artificial sequence
  SiRNA target sequence
ctcactgtacatatataaaaaaggag

SEQ ID NO: 250885 - DNA, 26 bp, Artificial sequence
  SiRNA target sequence
tcactgtacatatataaaaaaggaga

SEQ ID NO: 250886 - DNA, 26 bp, Artificial sequence
  SiRNA target sequence
cactgtacatatataaaaaaggagat

SEQ ID NO: 250887 - DNA, 26 bp, Artificial sequence
  SiRNA target sequence
actgtacatatataaaaaaggagata

SEQ ID NO: 250888 - DNA, 26 bp, Artificial sequence
  SiRNA target sequence
ctgtacatatataaaaaaggagataa

SEQ ID NO: 250889 - DNA, 26 bp, Artificial sequence
  SiRNA target sequence
tgtacatatataaaaaaggagataag

SEQ ID NO: 250890 - DNA, 26 bp, Artificial sequence
  SiRNA target sequence
gtacatatataaaaaaggagataagc

SEQ ID NO: 250891 - DNA, 26 bp, Artificial sequence
  SiRNA target sequence
tacatatataaaaaaggagataagcc

SEQ ID NO: 250892 - DNA, 26 bp, Artificial sequence
  SiRNA target sequence
acatatataaaaaaggagataagccc

SEQ ID NO: 250893 - DNA, 26 bp, Artificial sequence
  SiRNA target sequence
catatataaaaaaggagataagccca

SEQ ID NO: 250894 - DNA, 26 bp, Artificial sequence
  SiRNA target sequence
atatataaaaaaggagataagcccat

SEQ ID NO: 250895 - DNA, 26 bp, Artificial sequence
  SiRNA target sequence
tatataaaaaaggagataagcccatc

SEQ ID NO: 250896 - DNA, 26 bp, Artificial sequence
  SiRNA target sequence
atataaaaaaggagataagcccatca

SEQ ID NO: 250897 - DNA, 26 bp, Artificial sequence
  SiRNA target sequence
tataaaaaaggagataagcccatcaa

SEQ ID NO: 250898 - DNA, 26 bp, Artificial sequence
  SiRNA target sequence
ataaaaaaggagataagcccatcaag

SEQ ID NO: 250899 - DNA, 26 bp, Artificial sequence
  SiRNA target sequence
taaaaaaggagataagcccatcaagc

SEQ ID NO: 250900 - DNA, 26 bp, Artificial sequence
  SiRNA target sequence
aaaaaaggagataagcccatcaagct

SEQ ID NO: 250901 - DNA, 26 bp, Artificial sequence
  SiRNA target sequence
aaaaaggagataagcccatcaagctt

SEQ ID NO: 250902 - DNA, 26 bp, Artificial sequence
  SiRNA target sequence
aaaaggagataagcccatcaagcttc

SEQ ID NO: 250903 - DNA, 26 bp, Artificial sequence
  SiRNA target sequence
aaaggagataagcccatcaagcttct

SEQ ID NO: 250904 - DNA, 26 bp, Artificial sequence
  SiRNA target sequence
aaggagataagcccatcaagcttcta

SEQ ID NO: 250905 - DNA, 26 bp, Artificial sequence
  SiRNA target sequence
aggagataagcccatcaagcttctaa

SEQ ID NO: 250906 - DNA, 26 bp, Artificial sequence
  SiRNA target sequence
ggagataagcccatcaagcttctaac

SEQ ID NO: 250907 - DNA, 26 bp, Artificial sequence
  SiRNA target sequence
gagataagcccatcaagcttctaact

SEQ ID NO: 250908 - DNA, 26 bp, Artificial sequence
  SiRNA target sequence
agataagcccatcaagcttctaactg

SEQ ID NO: 250909 - DNA, 26 bp, Artificial sequence
  SiRNA target sequence
gataagcccatcaagcttctaactga

SEQ ID NO: 250910 - DNA, 26 bp, Artificial sequence
  SiRNA target sequence
ataagcccatcaagcttctaactgac

SEQ ID NO: 250911 - DNA, 26 bp, Artificial sequence
  SiRNA target sequence
taagcccatcaagcttctaactgaca

SEQ ID NO: 250912 - DNA, 26 bp, Artificial sequence
  SiRNA target sequence
aagcccatcaagcttctaactgacat

SEQ ID NO: 250913 - DNA, 26 bp, Artificial sequence
  SiRNA target sequence
agcccatcaagcttctaactgacatc

SEQ ID NO: 250914 - DNA, 26 bp, Artificial sequence
  SiRNA target sequence
gcccatcaagcttctaactgacatct

SEQ ID NO: 250915 - DNA, 26 bp, Artificial sequence
  SiRNA target sequence
cccatcaagcttctaactgacatctt

SEQ ID NO: 250916 - DNA, 26 bp, Artificial sequence
  SiRNA target sequence
ccatcaagcttctaactgacatctta

SEQ ID NO: 250917 - DNA, 26 bp, Artificial sequence
  SiRNA target sequence
catcaagcttctaactgacatcttac

SEQ ID NO: 250918 - DNA, 26 bp, Artificial sequence
  SiRNA target sequence
atcaagcttctaactgacatcttacc

SEQ ID NO: 250919 - DNA, 26 bp, Artificial sequence
  SiRNA target sequence
tcaagcttctaactgacatcttacca

SEQ ID NO: 250920 - DNA, 26 bp, Artificial sequence
  SiRNA target sequence
caagcttctaactgacatcttaccat

SEQ ID NO: 250921 - DNA, 26 bp, Artificial sequence
  SiRNA target sequence
aagcttctaactgacatcttaccatc

SEQ ID NO: 250922 - DNA, 26 bp, Artificial sequence
  SiRNA target sequence
agcttctaactgacatcttaccatca

SEQ ID NO: 250923 - DNA, 26 bp, Artificial sequence
  SiRNA target sequence
gcttctaactgacatcttaccatcac

SEQ ID NO: 250924 - DNA, 26 bp, Artificial sequence
  SiRNA target sequence
cttctaactgacatcttaccatcaca

SEQ ID NO: 250925 - DNA, 26 bp, Artificial sequence
  SiRNA target sequence
ttctaactgacatcttaccatcacaa

SEQ ID NO: 250926 - DNA, 26 bp, Artificial sequence
  SiRNA target sequence
tctaactgacatcttaccatcacaaa

SEQ ID NO: 250927 - DNA, 26 bp, Artificial sequence
  SiRNA target sequence
ctaactgacatcttaccatcacaaaa

SEQ ID NO: 250928 - DNA, 26 bp, Artificial sequence
  SiRNA target sequence
taactgacatcttaccatcacaaaaa

SEQ ID NO: 250929 - DNA, 26 bp, Artificial sequence
  SiRNA target sequence
aactgacatcttaccatcacaaaaaa

SEQ ID NO: 250930 - DNA, 26 bp, Artificial sequence
  SiRNA target sequence
actgacatcttaccatcacaaaaaat

SEQ ID NO: 250931 - DNA, 26 bp, Artificial sequence
  SiRNA target sequence
ctgacatcttaccatcacaaaaaata

SEQ ID NO: 250932 - DNA, 26 bp, Artificial sequence
  SiRNA target sequence
tgacatcttaccatcacaaaaaatat

SEQ ID NO: 250933 - DNA, 26 bp, Artificial sequence
  SiRNA target sequence
gacatcttaccatcacaaaaaatatc

SEQ ID NO: 250934 - DNA, 26 bp, Artificial sequence
  SiRNA target sequence
acatcttaccatcacaaaaaatatct

SEQ ID NO: 250935 - DNA, 26 bp, Artificial sequence
  SiRNA target sequence
catcttaccatcacaaaaaatatcta

SEQ ID NO: 250936 - DNA, 26 bp, Artificial sequence
  SiRNA target sequence
atcttaccatcacaaaaaatatctag

SEQ ID NO: 250937 - DNA, 26 bp, Artificial sequence
  SiRNA target sequence
tcttaccatcacaaaaaatatctagt

SEQ ID NO: 250938 - DNA, 26 bp, Artificial sequence
  SiRNA target sequence
cttaccatcacaaaaaatatctagtg

SEQ ID NO: 250939 - DNA, 26 bp, Artificial sequence
  SiRNA target sequence
ttaccatcacaaaaaatatctagtgc

SEQ ID NO: 250940 - DNA, 26 bp, Artificial sequence
  SiRNA target sequence
taccatcacaaaaaatatctagtgcc

SEQ ID NO: 250941 - DNA, 26 bp, Artificial sequence
  SiRNA target sequence
accatcacaaaaaatatctagtgccc

SEQ ID NO: 250942 - DNA, 26 bp, Artificial sequence
  SiRNA target sequence
ccatcacaaaaaatatctagtgccca

SEQ ID NO: 250943 - DNA, 26 bp, Artificial sequence
  SiRNA target sequence
catcacaaaaaatatctagtgcccat

SEQ ID NO: 250944 - DNA, 26 bp, Artificial sequence
  SiRNA target sequence
atcacaaaaaatatctagtgcccatt

SEQ ID NO: 250945 - DNA, 26 bp, Artificial sequence
  SiRNA target sequence
tcacaaaaaatatctagtgcccattg

SEQ ID NO: 250946 - DNA, 26 bp, Artificial sequence
  SiRNA target sequence
cacaaaaaatatctagtgcccattgt

SEQ ID NO: 250947 - DNA, 26 bp, Artificial sequence
  SiRNA target sequence
acaaaaaatatctagtgcccattgtg

SEQ ID NO: 250948 - DNA, 26 bp, Artificial sequence
  SiRNA target sequence
caaaaaatatctagtgcccattgtga

SEQ ID NO: 250949 - DNA, 26 bp, Artificial sequence
  SiRNA target sequence
aaaaaatatctagtgcccattgtgat

SEQ ID NO: 250950 - DNA, 26 bp, Artificial sequence
  SiRNA target sequence
aaaaatatctagtgcccattgtgatc

SEQ ID NO: 250951 - DNA, 26 bp, Artificial sequence
  SiRNA target sequence
aaaatatctagtgcccattgtgatcc

SEQ ID NO: 250952 - DNA, 26 bp, Artificial sequence
  SiRNA target sequence
aaatatctagtgcccattgtgatcct

SEQ ID NO: 250953 - DNA, 26 bp, Artificial sequence
  SiRNA target sequence
aatatctagtgcccattgtgatcctt

SEQ ID NO: 250954 - DNA, 26 bp, Artificial sequence
  SiRNA target sequence
atatctagtgcccattgtgatccttt

SEQ ID NO: 250955 - DNA, 26 bp, Artificial sequence
  SiRNA target sequence
tatctagtgcccattgtgatcctttt

SEQ ID NO: 250956 - DNA, 26 bp, Artificial sequence
  SiRNA target sequence
atctagtgcccattgtgatccttttt

SEQ ID NO: 250957 - DNA, 26 bp, Artificial sequence
  SiRNA target sequence
tctagtgcccattgtgatcctttttg

SEQ ID NO: 250958 - DNA, 26 bp, Artificial sequence
  SiRNA target sequence
ctagtgcccattgtgatcctttttgg

SEQ ID NO: 250959 - DNA, 26 bp, Artificial sequence
  SiRNA target sequence
tagtgcccattgtgatcctttttgga

SEQ ID NO: 250960 - DNA, 26 bp, Artificial sequence
  SiRNA target sequence
agtgcccattgtgatcctttttggat

SEQ ID NO: 250961 - DNA, 26 bp, Artificial sequence
  SiRNA target sequence
gtgcccattgtgatcctttttggatt

SEQ ID NO: 250962 - DNA, 26 bp, Artificial sequence
  SiRNA target sequence
tgcccattgtgatcctttttggattt

SEQ ID NO: 250963 - DNA, 26 bp, Artificial sequence
  SiRNA target sequence
gcccattgtgatcctttttggatttt

SEQ ID NO: 250964 - DNA, 26 bp, Artificial sequence
  SiRNA target sequence
cccattgtgatcctttttggatttta

SEQ ID NO: 250965 - DNA, 26 bp, Artificial sequence
  SiRNA target sequence
ccattgtgatcctttttggattttat

SEQ ID NO: 250966 - DNA, 26 bp, Artificial sequence
  SiRNA target sequence
cattgtgatcctttttggattttata

SEQ ID NO: 250967 - DNA, 26 bp, Artificial sequence
  SiRNA target sequence
attgtgatcctttttggattttatat

SEQ ID NO: 250968 - DNA, 26 bp, Artificial sequence
  SiRNA target sequence
ttgtgatcctttttggattttatatt

SEQ ID NO: 250969 - DNA, 26 bp, Artificial sequence
  SiRNA target sequence
tgtgatcctttttggattttatattc

SEQ ID NO: 250970 - DNA, 26 bp, Artificial sequence
  SiRNA target sequence
gtgatcctttttggattttatattca

SEQ ID NO: 250971 - DNA, 26 bp, Artificial sequence
  SiRNA target sequence
tgatcctttttggattttatattcaa

SEQ ID NO: 250972 - DNA, 26 bp, Artificial sequence
  SiRNA target sequence
gatcctttttggattttatattcaaa

SEQ ID NO: 250973 - DNA, 26 bp, Artificial sequence
  SiRNA target sequence
atcctttttggattttatattcaaat

SEQ ID NO: 250974 - DNA, 26 bp, Artificial sequence
  SiRNA target sequence
tcctttttggattttatattcaaatg

SEQ ID NO: 250975 - DNA, 26 bp, Artificial sequence
  SiRNA target sequence
cctttttggattttatattcaaatgg

SEQ ID NO: 250976 - DNA, 26 bp, Artificial sequence
  SiRNA target sequence
ctttttggattttatattcaaatgga

SEQ ID NO: 250977 - DNA, 26 bp, Artificial sequence
  SiRNA target sequence
tttttggattttatattcaaatggaa

SEQ ID NO: 250978 - DNA, 26 bp, Artificial sequence
  SiRNA target sequence
ttttggattttatattcaaatggaat

SEQ ID NO: 250979 - DNA, 26 bp, Artificial sequence
  SiRNA target sequence
tttggattttatattcaaatggaatt

SEQ ID NO: 250980 - DNA, 26 bp, Artificial sequence
  SiRNA target sequence
ttggattttatattcaaatggaatta

SEQ ID NO: 250981 - DNA, 26 bp, Artificial sequence
  SiRNA target sequence
tggattttatattcaaatggaattaa

SEQ ID NO: 250982 - DNA, 26 bp, Artificial sequence
  SiRNA target sequence
ggattttatattcaaatggaattaaa

SEQ ID NO: 250983 - DNA, 26 bp, Artificial sequence
  SiRNA target sequence
gattttatattcaaatggaattaaaa

SEQ ID NO: 250984 - DNA, 26 bp, Artificial sequence
  SiRNA target sequence
attttatattcaaatggaattaaaag

SEQ ID NO: 250985 - DNA, 26 bp, Artificial sequence
  SiRNA target sequence
ttttatattcaaatggaattaaaaga

SEQ ID NO: 250986 - DNA, 26 bp, Artificial sequence
  SiRNA target sequence
tttatattcaaatggaattaaaagag

SEQ ID NO: 250987 - DNA, 26 bp, Artificial sequence
  SiRNA target sequence
ttatattcaaatggaattaaaagaga

SEQ ID NO: 250988 - DNA, 26 bp, Artificial sequence
  SiRNA target sequence
tatattcaaatggaattaaaagagaa

SEQ ID NO: 250989 - DNA, 26 bp, Artificial sequence
  SiRNA target sequence
atattcaaatggaattaaaagagaac

SEQ ID NO: 250990 - DNA, 26 bp, Artificial sequence
  SiRNA target sequence
tattcaaatggaattaaaagagaacc

SEQ ID NO: 250991 - DNA, 26 bp, Artificial sequence
  SiRNA target sequence
attcaaatggaattaaaagagaacca

SEQ ID NO: 250992 - DNA, 26 bp, Artificial sequence
  SiRNA target sequence
ttcaaatggaattaaaagagaaccaa

SEQ ID NO: 250993 - DNA, 26 bp, Artificial sequence
  SiRNA target sequence
tcaaatggaattaaaagagaaccaat

SEQ ID NO: 250994 - DNA, 26 bp, Artificial sequence
  SiRNA target sequence
caaatggaattaaaagagaaccaatt

SEQ ID NO: 250995 - DNA, 26 bp, Artificial sequence
  SiRNA target sequence
aaatggaattaaaagagaaccaatta

SEQ ID NO: 250996 - DNA, 26 bp, Artificial sequence
  SiRNA target sequence
aatggaattaaaagagaaccaattag

SEQ ID NO: 250997 - DNA, 26 bp, Artificial sequence
  SiRNA target sequence
atggaattaaaagagaaccaattaga

SEQ ID NO: 250998 - DNA, 26 bp, Artificial sequence
  SiRNA target sequence
tggaattaaaagagaaccaattagaa

SEQ ID NO: 250999 - DNA, 26 bp, Artificial sequence
  SiRNA target sequence
ggaattaaaagagaaccaattagaaa

SEQ ID NO: 251000 - DNA, 26 bp, Artificial sequence
  SiRNA target sequence
gaattaaaagagaaccaattagaaaa

SEQ ID NO: 251001 - DNA, 26 bp, Artificial sequence
  SiRNA target sequence
aattaaaagagaaccaattagaaaaa

SEQ ID NO: 251002 - DNA, 26 bp, Artificial sequence
  SiRNA target sequence
attaaaagagaaccaattagaaaaaa

SEQ ID NO: 251003 - DNA, 26 bp, Artificial sequence
  SiRNA target sequence
ttaaaagagaaccaattagaaaaaaa

SEQ ID NO: 251004 - DNA, 26 bp, Artificial sequence
  SiRNA target sequence
taaaagagaaccaattagaaaaaaaa

SEQ ID NO: 251005 - DNA, 26 bp, Artificial sequence
  SiRNA target sequence
aaaagagaaccaattagaaaaaaaat

SEQ ID NO: 251006 - DNA, 26 bp, Artificial sequence
  SiRNA target sequence
aaagagaaccaattagaaaaaaaatg

SEQ ID NO: 251007 - DNA, 26 bp, Artificial sequence
  SiRNA target sequence
aagagaaccaattagaaaaaaaatgc

SEQ ID NO: 251008 - DNA, 26 bp, Artificial sequence
  SiRNA target sequence
agagaaccaattagaaaaaaaatgcc

SEQ ID NO: 251009 - DNA, 26 bp, Artificial sequence
  SiRNA target sequence
gagaaccaattagaaaaaaaatgcca

SEQ ID NO: 251010 - DNA, 26 bp, Artificial sequence
  SiRNA target sequence
agaaccaattagaaaaaaaatgccaa

SEQ ID NO: 251011 - DNA, 26 bp, Artificial sequence
  SiRNA target sequence
gaaccaattagaaaaaaaatgccaat

SEQ ID NO: 251012 - DNA, 26 bp, Artificial sequence
  SiRNA target sequence
aaccaattagaaaaaaaatgccaata

SEQ ID NO: 251013 - DNA, 26 bp, Artificial sequence
  SiRNA target sequence
accaattagaaaaaaaatgccaataa

SEQ ID NO: 251014 - DNA, 26 bp, Artificial sequence
  SiRNA target sequence
ccaattagaaaaaaaatgccaataaa

SEQ ID NO: 251015 - DNA, 26 bp, Artificial sequence
  SiRNA target sequence
caattagaaaaaaaatgccaataaaa

SEQ ID NO: 251016 - DNA, 26 bp, Artificial sequence
  SiRNA target sequence
aattagaaaaaaaatgccaataaaac

SEQ ID NO: 251017 - DNA, 26 bp, Artificial sequence
  SiRNA target sequence
attagaaaaaaaatgccaataaaacc

SEQ ID NO: 251018 - DNA, 26 bp, Artificial sequence
  SiRNA target sequence
ttagaaaaaaaatgccaataaaacca

SEQ ID NO: 251019 - DNA, 26 bp, Artificial sequence
  SiRNA target sequence
tagaaaaaaaatgccaataaaaccaa

SEQ ID NO: 251020 - DNA, 26 bp, Artificial sequence
  SiRNA target sequence
agaaaaaaaatgccaataaaaccaaa

SEQ ID NO: 251021 - DNA, 26 bp, Artificial sequence
  SiRNA target sequence
gaaaaaaaatgccaataaaaccaaaa

SEQ ID NO: 251022 - DNA, 26 bp, Artificial sequence
  SiRNA target sequence
aaaaaaaatgccaataaaaccaaaaa

SEQ ID NO: 251023 - DNA, 26 bp, Artificial sequence
  SiRNA target sequence
aaaaaaatgccaataaaaccaaaaat

SEQ ID NO: 251024 - DNA, 26 bp, Artificial sequence
  SiRNA target sequence
aaaaaatgccaataaaaccaaaaata

SEQ ID NO: 251025 - DNA, 26 bp, Artificial sequence
  SiRNA target sequence
aaaaatgccaataaaaccaaaaataa

SEQ ID NO: 251026 - DNA, 26 bp, Artificial sequence
  SiRNA target sequence
aaaatgccaataaaaccaaaaataat

SEQ ID NO: 251027 - DNA, 26 bp, Artificial sequence
  SiRNA target sequence
aaatgccaataaaaccaaaaataata

SEQ ID NO: 251028 - DNA, 26 bp, Artificial sequence
  SiRNA target sequence
aatgccaataaaaccaaaaataataa

SEQ ID NO: 251029 - DNA, 26 bp, Artificial sequence
  SiRNA target sequence
atgccaataaaaccaaaaataataaa

SEQ ID NO: 251030 - DNA, 26 bp, Artificial sequence
  SiRNA target sequence
tgccaataaaaccaaaaataataaaa

SEQ ID NO: 251031 - DNA, 26 bp, Artificial sequence
  SiRNA target sequence
gccaataaaaccaaaaataataaaat

SEQ ID NO: 251032 - DNA, 26 bp, Artificial sequence
  SiRNA target sequence
ccaataaaaccaaaaataataaaatt

SEQ ID NO: 251033 - DNA, 26 bp, Artificial sequence
  SiRNA target sequence
caataaaaccaaaaataataaaattc

SEQ ID NO: 251034 - DNA, 26 bp, Artificial sequence
  SiRNA target sequence
aataaaaccaaaaataataaaattca

SEQ ID NO: 251035 - DNA, 26 bp, Artificial sequence
  SiRNA target sequence
ataaaaccaaaaataataaaattcac

SEQ ID NO: 251036 - DNA, 26 bp, Artificial sequence
  SiRNA target sequence
taaaaccaaaaataataaaattcaca

SEQ ID NO: 251037 - DNA, 26 bp, Artificial sequence
  SiRNA target sequence
aaaaccaaaaataataaaattcacaa

SEQ ID NO: 251038 - DNA, 26 bp, Artificial sequence
  SiRNA target sequence
aaaccaaaaataataaaattcacaat

SEQ ID NO: 251039 - DNA, 26 bp, Artificial sequence
  SiRNA target sequence
aaccaaaaataataaaattcacaata

SEQ ID NO: 251040 - DNA, 26 bp, Artificial sequence
  SiRNA target sequence
accaaaaataataaaattcacaatac

SEQ ID NO: 251041 - DNA, 26 bp, Artificial sequence
  SiRNA target sequence
ccaaaaataataaaattcacaatact

SEQ ID NO: 251042 - DNA, 26 bp, Artificial sequence
  SiRNA target sequence
caaaaataataaaattcacaatacta

SEQ ID NO: 251043 - DNA, 26 bp, Artificial sequence
  SiRNA target sequence
aaaaataataaaattcacaatactaa

SEQ ID NO: 251044 - DNA, 26 bp, Artificial sequence
  SiRNA target sequence
aaaataataaaattcacaatactaag

SEQ ID NO: 251045 - DNA, 26 bp, Artificial sequence
  SiRNA target sequence
aaataataaaattcacaatactaaga

SEQ ID NO: 251046 - DNA, 26 bp, Artificial sequence
  SiRNA target sequence
aataataaaattcacaatactaagaa

SEQ ID NO: 251047 - DNA, 26 bp, Artificial sequence
  SiRNA target sequence
ataataaaattcacaatactaagaat

SEQ ID NO: 251048 - DNA, 26 bp, Artificial sequence
  SiRNA target sequence
taataaaattcacaatactaagaata

SEQ ID NO: 251049 - DNA, 26 bp, Artificial sequence
  SiRNA target sequence
aataaaattcacaatactaagaatag

SEQ ID NO: 251050 - DNA, 26 bp, Artificial sequence
  SiRNA target sequence
ataaaattcacaatactaagaataga

SEQ ID NO: 251051 - DNA, 26 bp, Artificial sequence
  SiRNA target sequence
taaaattcacaatactaagaatagag

SEQ ID NO: 251052 - DNA, 26 bp, Artificial sequence
  SiRNA target sequence
aaaattcacaatactaagaatagagt

SEQ ID NO: 251053 - DNA, 26 bp, Artificial sequence
  SiRNA target sequence
aaattcacaatactaagaatagagta

SEQ ID NO: 251054 - DNA, 26 bp, Artificial sequence
  SiRNA target sequence
aattcacaatactaagaatagagtac

SEQ ID NO: 251055 - DNA, 26 bp, Artificial sequence
  SiRNA target sequence
attcacaatactaagaatagagtaca

SEQ ID NO: 251056 - DNA, 26 bp, Artificial sequence
  SiRNA target sequence
ttcacaatactaagaatagagtacac

SEQ ID NO: 251057 - DNA, 26 bp, Artificial sequence
  SiRNA target sequence
tcacaatactaagaatagagtacaca

SEQ ID NO: 251058 - DNA, 26 bp, Artificial sequence
  SiRNA target sequence
cacaatactaagaatagagtacacat

SEQ ID NO: 251059 - DNA, 26 bp, Artificial sequence
  SiRNA target sequence
acaatactaagaatagagtacacatt

SEQ ID NO: 251060 - DNA, 26 bp, Artificial sequence
  SiRNA target sequence
caatactaagaatagagtacacattt

SEQ ID NO: 251061 - DNA, 26 bp, Artificial sequence
  SiRNA target sequence
aatactaagaatagagtacacattta

SEQ ID NO: 251062 - DNA, 26 bp, Artificial sequence
  SiRNA target sequence
atactaagaatagagtacacatttaa

SEQ ID NO: 251063 - DNA, 26 bp, Artificial sequence
  SiRNA target sequence
tactaagaatagagtacacatttaaa

SEQ ID NO: 251064 - DNA, 26 bp, Artificial sequence
  SiRNA target sequence
actaagaatagagtacacatttaaag

SEQ ID NO: 251065 - DNA, 26 bp, Artificial sequence
  SiRNA target sequence
ctaagaatagagtacacatttaaagc

SEQ ID NO: 251066 - DNA, 26 bp, Artificial sequence
  SiRNA target sequence
taagaatagagtacacatttaaagcc

SEQ ID NO: 251067 - DNA, 26 bp, Artificial sequence
  SiRNA target sequence
aagaatagagtacacatttaaagcct

SEQ ID NO: 251068 - DNA, 26 bp, Artificial sequence
  SiRNA target sequence
agaatagagtacacatttaaagcctt

SEQ ID NO: 251069 - DNA, 26 bp, Artificial sequence
  SiRNA target sequence
gaatagagtacacatttaaagccttt

SEQ ID NO: 251070 - DNA, 26 bp, Artificial sequence
  SiRNA target sequence
aatagagtacacatttaaagcctttt

SEQ ID NO: 251071 - DNA, 26 bp, Artificial sequence
  SiRNA target sequence
atagagtacacatttaaagccttttg

SEQ ID NO: 251072 - DNA, 26 bp, Artificial sequence
  SiRNA target sequence
tagagtacacatttaaagccttttgg

SEQ ID NO: 251073 - DNA, 26 bp, Artificial sequence
  SiRNA target sequence
agagtacacatttaaagccttttgga

SEQ ID NO: 251074 - DNA, 26 bp, Artificial sequence
  SiRNA target sequence
gagtacacatttaaagccttttggac

SEQ ID NO: 251075 - DNA, 26 bp, Artificial sequence
  SiRNA target sequence
agtacacatttaaagccttttggaca

SEQ ID NO: 251076 - DNA, 26 bp, Artificial sequence
  SiRNA target sequence
gtacacatttaaagccttttggacat

SEQ ID NO: 251077 - DNA, 26 bp, Artificial sequence
  SiRNA target sequence
tacacatttaaagccttttggacata

SEQ ID NO: 251078 - DNA, 26 bp, Artificial sequence
  SiRNA target sequence
acacatttaaagccttttggacatat

SEQ ID NO: 251079 - DNA, 26 bp, Artificial sequence
  SiRNA target sequence
cacatttaaagccttttggacatatg

SEQ ID NO: 251080 - DNA, 26 bp, Artificial sequence
  SiRNA target sequence
acatttaaagccttttggacatatga

SEQ ID NO: 251081 - DNA, 26 bp, Artificial sequence
  SiRNA target sequence
catttaaagccttttggacatatgac

SEQ ID NO: 251082 - DNA, 26 bp, Artificial sequence
  SiRNA target sequence
atttaaagccttttggacatatgaca

SEQ ID NO: 251083 - DNA, 26 bp, Artificial sequence
  SiRNA target sequence
tttaaagccttttggacatatgacat

SEQ ID NO: 251084 - DNA, 26 bp, Artificial sequence
  SiRNA target sequence
ttaaagccttttggacatatgacatc

SEQ ID NO: 251085 - DNA, 26 bp, Artificial sequence
  SiRNA target sequence
taaagccttttggacatatgacatca

SEQ ID NO: 251086 - DNA, 26 bp, Artificial sequence
  SiRNA target sequence
aaagccttttggacatatgacatcat

SEQ ID NO: 251087 - DNA, 26 bp, Artificial sequence
  SiRNA target sequence
aagccttttggacatatgacatcata

SEQ ID NO: 251088 - DNA, 26 bp, Artificial sequence
  SiRNA target sequence
agccttttggacatatgacatcataa

SEQ ID NO: 251089 - DNA, 26 bp, Artificial sequence
  SiRNA target sequence
gccttttggacatatgacatcataag

SEQ ID NO: 251090 - DNA, 26 bp, Artificial sequence
  SiRNA target sequence
ccttttggacatatgacatcataaga

SEQ ID NO: 251091 - DNA, 26 bp, Artificial sequence
  SiRNA target sequence
cttttggacatatgacatcataagac

SEQ ID NO: 251092 - DNA, 26 bp, Artificial sequence
  SiRNA target sequence
ttttggacatatgacatcataagaca

SEQ ID NO: 251093 - DNA, 26 bp, Artificial sequence
  SiRNA target sequence
tttggacatatgacatcataagacat

SEQ ID NO: 251094 - DNA, 26 bp, Artificial sequence
  SiRNA target sequence
ttggacatatgacatcataagacata

SEQ ID NO: 251095 - DNA, 26 bp, Artificial sequence
  SiRNA target sequence
tggacatatgacatcataagacatat

SEQ ID NO: 251096 - DNA, 26 bp, Artificial sequence
  SiRNA target sequence
ggacatatgacatcataagacatata

SEQ ID NO: 251097 - DNA, 26 bp, Artificial sequence
  SiRNA target sequence
gacatatgacatcataagacatataa

SEQ ID NO: 251098 - DNA, 26 bp, Artificial sequence
  SiRNA target sequence
acatatgacatcataagacatataat

SEQ ID NO: 251099 - DNA, 26 bp, Artificial sequence
  SiRNA target sequence
catatgacatcataagacatataatt

SEQ ID NO: 251100 - DNA, 26 bp, Artificial sequence
  SiRNA target sequence
atatgacatcataagacatataattg

SEQ ID NO: 251101 - DNA, 26 bp, Artificial sequence
  SiRNA target sequence
tatgacatcataagacatataattgg

SEQ ID NO: 251102 - DNA, 26 bp, Artificial sequence
  SiRNA target sequence
atgacatcataagacatataattggc

SEQ ID NO: 251103 - DNA, 26 bp, Artificial sequence
  SiRNA target sequence
tgacatcataagacatataattggca

SEQ ID NO: 251104 - DNA, 26 bp, Artificial sequence
  SiRNA target sequence
gacatcataagacatataattggcag

SEQ ID NO: 251105 - DNA, 26 bp, Artificial sequence
  SiRNA target sequence
acatcataagacatataattggcagt

SEQ ID NO: 251106 - DNA, 26 bp, Artificial sequence
  SiRNA target sequence
catcataagacatataattggcagtg

SEQ ID NO: 251107 - DNA, 26 bp, Artificial sequence
  SiRNA target sequence
atcataagacatataattggcagtga

SEQ ID NO: 251108 - DNA, 26 bp, Artificial sequence
  SiRNA target sequence
tcataagacatataattggcagtgaa

SEQ ID NO: 251109 - DNA, 26 bp, Artificial sequence
  SiRNA target sequence
cataagacatataattggcagtgaaa

SEQ ID NO: 251110 - DNA, 26 bp, Artificial sequence
  SiRNA target sequence
ataagacatataattggcagtgaaaa

SEQ ID NO: 251111 - DNA, 26 bp, Artificial sequence
  SiRNA target sequence
taagacatataattggcagtgaaaag

SEQ ID NO: 251112 - DNA, 26 bp, Artificial sequence
  SiRNA target sequence
aagacatataattggcagtgaaaaga

SEQ ID NO: 251113 - DNA, 26 bp, Artificial sequence
  SiRNA target sequence
agacatataattggcagtgaaaagaa

SEQ ID NO: 251114 - DNA, 26 bp, Artificial sequence
  SiRNA target sequence
gacatataattggcagtgaaaagaaa

SEQ ID NO: 251115 - DNA, 26 bp, Artificial sequence
  SiRNA target sequence
acatataattggcagtgaaaagaaaa

SEQ ID NO: 251116 - DNA, 26 bp, Artificial sequence
  SiRNA target sequence
catataattggcagtgaaaagaaaag

SEQ ID NO: 251117 - DNA, 26 bp, Artificial sequence
  SiRNA target sequence
atataattggcagtgaaaagaaaagc

SEQ ID NO: 251118 - DNA, 26 bp, Artificial sequence
  SiRNA target sequence
tataattggcagtgaaaagaaaagct

SEQ ID NO: 251119 - DNA, 26 bp, Artificial sequence
  SiRNA target sequence
ataattggcagtgaaaagaaaagctt

SEQ ID NO: 251120 - DNA, 26 bp, Artificial sequence
  SiRNA target sequence
taattggcagtgaaaagaaaagcttt

SEQ ID NO: 251121 - DNA, 26 bp, Artificial sequence
  SiRNA target sequence
aattggcagtgaaaagaaaagcttta

SEQ ID NO: 251122 - DNA, 26 bp, Artificial sequence
  SiRNA target sequence
attggcagtgaaaagaaaagctttat

SEQ ID NO: 251123 - DNA, 26 bp, Artificial sequence
  SiRNA target sequence
ttggcagtgaaaagaaaagctttatg

SEQ ID NO: 251124 - DNA, 26 bp, Artificial sequence
  SiRNA target sequence
tggcagtgaaaagaaaagctttatgt

SEQ ID NO: 251125 - DNA, 26 bp, Artificial sequence
  SiRNA target sequence
ggcagtgaaaagaaaagctttatgta

SEQ ID NO: 251126 - DNA, 26 bp, Artificial sequence
  SiRNA target sequence
gcagtgaaaagaaaagctttatgtag

SEQ ID NO: 251127 - DNA, 26 bp, Artificial sequence
  SiRNA target sequence
cagtgaaaagaaaagctttatgtagt

SEQ ID NO: 251128 - DNA, 26 bp, Artificial sequence
  SiRNA target sequence
agtgaaaagaaaagctttatgtagta

SEQ ID NO: 251129 - DNA, 26 bp, Artificial sequence
  SiRNA target sequence
gtgaaaagaaaagctttatgtagtac

SEQ ID NO: 251130 - DNA, 26 bp, Artificial sequence
  SiRNA target sequence
tgaaaagaaaagctttatgtagtaca

SEQ ID NO: 251131 - DNA, 26 bp, Artificial sequence
  SiRNA target sequence
gaaaagaaaagctttatgtagtacag

SEQ ID NO: 251132 - DNA, 26 bp, Artificial sequence
  SiRNA target sequence
aaaagaaaagctttatgtagtacagt

SEQ ID NO: 251133 - DNA, 26 bp, Artificial sequence
  SiRNA target sequence
aaagaaaagctttatgtagtacagtg

SEQ ID NO: 251134 - DNA, 26 bp, Artificial sequence
  SiRNA target sequence
aagaaaagctttatgtagtacagtga

SEQ ID NO: 251135 - DNA, 26 bp, Artificial sequence
  SiRNA target sequence
agaaaagctttatgtagtacagtgac

SEQ ID NO: 251136 - DNA, 26 bp, Artificial sequence
  SiRNA target sequence
gaaaagctttatgtagtacagtgacg

SEQ ID NO: 251137 - DNA, 26 bp, Artificial sequence
  SiRNA target sequence
aaaagctttatgtagtacagtgacga

SEQ ID NO: 251138 - DNA, 26 bp, Artificial sequence
  SiRNA target sequence
aaagctttatgtagtacagtgacgaa

SEQ ID NO: 251139 - DNA, 26 bp, Artificial sequence
  SiRNA target sequence
aagctttatgtagtacagtgacgaag

SEQ ID NO: 251140 - DNA, 26 bp, Artificial sequence
  SiRNA target sequence
agctttatgtagtacagtgacgaagg

SEQ ID NO: 251141 - DNA, 26 bp, Artificial sequence
  SiRNA target sequence
gctttatgtagtacagtgacgaagga

SEQ ID NO: 251142 - DNA, 26 bp, Artificial sequence
  SiRNA target sequence
ctttatgtagtacagtgacgaaggaa

SEQ ID NO: 251143 - DNA, 26 bp, Artificial sequence
  SiRNA target sequence
tttatgtagtacagtgacgaaggaat

SEQ ID NO: 251144 - DNA, 26 bp, Artificial sequence
  SiRNA target sequence
ttatgtagtacagtgacgaaggaatt

SEQ ID NO: 251145 - DNA, 26 bp, Artificial sequence
  SiRNA target sequence
tatgtagtacagtgacgaaggaattt

SEQ ID NO: 251146 - DNA, 26 bp, Artificial sequence
  SiRNA target sequence
atgtagtacagtgacgaaggaatttg

SEQ ID NO: 251147 - DNA, 26 bp, Artificial sequence
  SiRNA target sequence
tgtagtacagtgacgaaggaatttgt

SEQ ID NO: 251148 - DNA, 26 bp, Artificial sequence
  SiRNA target sequence
gtagtacagtgacgaaggaatttgtt

SEQ ID NO: 251149 - DNA, 26 bp, Artificial sequence
  SiRNA target sequence
tagtacagtgacgaaggaatttgttt

SEQ ID NO: 251150 - DNA, 26 bp, Artificial sequence
  SiRNA target sequence
agtacagtgacgaaggaatttgtttt

SEQ ID NO: 251151 - DNA, 26 bp, Artificial sequence
  SiRNA target sequence
gtacagtgacgaaggaatttgttttg

SEQ ID NO: 251152 - DNA, 26 bp, Artificial sequence
  SiRNA target sequence
tacagtgacgaaggaatttgttttgt

SEQ ID NO: 251153 - DNA, 26 bp, Artificial sequence
  SiRNA target sequence
acagtgacgaaggaatttgttttgtc

SEQ ID NO: 251154 - DNA, 26 bp, Artificial sequence
  SiRNA target sequence
cagtgacgaaggaatttgttttgtca

SEQ ID NO: 251155 - DNA, 26 bp, Artificial sequence
  SiRNA target sequence
agtgacgaaggaatttgttttgtcat

SEQ ID NO: 251156 - DNA, 26 bp, Artificial sequence
  SiRNA target sequence
gtgacgaaggaatttgttttgtcata

SEQ ID NO: 251157 - DNA, 26 bp, Artificial sequence
  SiRNA target sequence
tgacgaaggaatttgttttgtcataa

SEQ ID NO: 251158 - DNA, 26 bp, Artificial sequence
  SiRNA target sequence
gacgaaggaatttgttttgtcataat

SEQ ID NO: 251159 - DNA, 26 bp, Artificial sequence
  SiRNA target sequence
acgaaggaatttgttttgtcataatc

SEQ ID NO: 251160 - DNA, 26 bp, Artificial sequence
  SiRNA target sequence
cgaaggaatttgttttgtcataatca

SEQ ID NO: 251161 - DNA, 26 bp, Artificial sequence
  SiRNA target sequence
gaaggaatttgttttgtcataatcac

SEQ ID NO: 251162 - DNA, 26 bp, Artificial sequence
  SiRNA target sequence
aaggaatttgttttgtcataatcacg

SEQ ID NO: 251163 - DNA, 26 bp, Artificial sequence
  SiRNA target sequence
aggaatttgttttgtcataatcacga

SEQ ID NO: 251164 - DNA, 26 bp, Artificial sequence
  SiRNA target sequence
ggaatttgttttgtcataatcacgat

SEQ ID NO: 251165 - DNA, 26 bp, Artificial sequence
  SiRNA target sequence
gaatttgttttgtcataatcacgatt

SEQ ID NO: 251166 - DNA, 26 bp, Artificial sequence
  SiRNA target sequence
aatttgttttgtcataatcacgattt

SEQ ID NO: 251167 - DNA, 26 bp, Artificial sequence
  SiRNA target sequence
atttgttttgtcataatcacgatttc

SEQ ID NO: 251168 - DNA, 26 bp, Artificial sequence
  SiRNA target sequence
tttgttttgtcataatcacgatttct

SEQ ID NO: 251169 - DNA, 26 bp, Artificial sequence
  SiRNA target sequence
ttgttttgtcataatcacgatttctc

SEQ ID NO: 251170 - DNA, 26 bp, Artificial sequence
  SiRNA target sequence
tgttttgtcataatcacgatttctct

SEQ ID NO: 251171 - DNA, 26 bp, Artificial sequence
  SiRNA target sequence
gttttgtcataatcacgatttctctg

SEQ ID NO: 251172 - DNA, 26 bp, Artificial sequence
  SiRNA target sequence
ttttgtcataatcacgatttctctgt

SEQ ID NO: 251173 - DNA, 26 bp, Artificial sequence
  SiRNA target sequence
tttgtcataatcacgatttctctgta

SEQ ID NO: 251174 - DNA, 26 bp, Artificial sequence
  SiRNA target sequence
ttgtcataatcacgatttctctgtaa

SEQ ID NO: 251175 - DNA, 26 bp, Artificial sequence
  SiRNA target sequence
tgtcataatcacgatttctctgtaaa

SEQ ID NO: 251176 - DNA, 26 bp, Artificial sequence
  SiRNA target sequence
gtcataatcacgatttctctgtaaaa

SEQ ID NO: 251177 - DNA, 26 bp, Artificial sequence
  SiRNA target sequence
tcataatcacgatttctctgtaaaat

SEQ ID NO: 251178 - DNA, 26 bp, Artificial sequence
  SiRNA target sequence
cataatcacgatttctctgtaaaatt

SEQ ID NO: 251179 - DNA, 26 bp, Artificial sequence
  SiRNA target sequence
ataatcacgatttctctgtaaaattc

SEQ ID NO: 251180 - DNA, 26 bp, Artificial sequence
  SiRNA target sequence
taatcacgatttctctgtaaaattcc

SEQ ID NO: 251181 - DNA, 26 bp, Artificial sequence
  SiRNA target sequence
aatcacgatttctctgtaaaattcca

SEQ ID NO: 251182 - DNA, 26 bp, Artificial sequence
  SiRNA target sequence
atcacgatttctctgtaaaattccaa

SEQ ID NO: 251183 - DNA, 26 bp, Artificial sequence
  SiRNA target sequence
tcacgatttctctgtaaaattccaat

SEQ ID NO: 251184 - DNA, 26 bp, Artificial sequence
  SiRNA target sequence
cacgatttctctgtaaaattccaata

SEQ ID NO: 251185 - DNA, 26 bp, Artificial sequence
  SiRNA target sequence
acgatttctctgtaaaattccaataa

SEQ ID NO: 251186 - DNA, 26 bp, Artificial sequence
  SiRNA target sequence
cgatttctctgtaaaattccaataat

SEQ ID NO: 251187 - DNA, 26 bp, Artificial sequence
  SiRNA target sequence
gatttctctgtaaaattccaataatg

SEQ ID NO: 251188 - DNA, 26 bp, Artificial sequence
  SiRNA target sequence
atttctctgtaaaattccaataatgt

SEQ ID NO: 251189 - DNA, 26 bp, Artificial sequence
  SiRNA target sequence
tttctctgtaaaattccaataatgtg

SEQ ID NO: 251190 - DNA, 26 bp, Artificial sequence
  SiRNA target sequence
ttctctgtaaaattccaataatgtgt

SEQ ID NO: 251191 - DNA, 26 bp, Artificial sequence
  SiRNA target sequence
tctctgtaaaattccaataatgtgtt

SEQ ID NO: 251192 - DNA, 26 bp, Artificial sequence
  SiRNA target sequence
ctctgtaaaattccaataatgtgtta

SEQ ID NO: 251193 - DNA, 26 bp, Artificial sequence
  SiRNA target sequence
tctgtaaaattccaataatgtgttaa

SEQ ID NO: 251194 - DNA, 26 bp, Artificial sequence
  SiRNA target sequence
ctgtaaaattccaataatgtgttaat

SEQ ID NO: 251195 - DNA, 26 bp, Artificial sequence
  SiRNA target sequence
tgtaaaattccaataatgtgttaatc

SEQ ID NO: 251196 - DNA, 26 bp, Artificial sequence
  SiRNA target sequence
gtaaaattccaataatgtgttaatca

SEQ ID NO: 251197 - DNA, 26 bp, Artificial sequence
  SiRNA target sequence
taaaattccaataatgtgttaatcac

SEQ ID NO: 251198 - DNA, 26 bp, Artificial sequence
  SiRNA target sequence
aaaattccaataatgtgttaatcaca

SEQ ID NO: 251199 - DNA, 26 bp, Artificial sequence
  SiRNA target sequence
aaattccaataatgtgttaatcacac

SEQ ID NO: 251200 - DNA, 26 bp, Artificial sequence
  SiRNA target sequence
aattccaataatgtgttaatcacaca

SEQ ID NO: 251201 - DNA, 26 bp, Artificial sequence
  SiRNA target sequence
attccaataatgtgttaatcacacat

SEQ ID NO: 251202 - DNA, 26 bp, Artificial sequence
  SiRNA target sequence
ttccaataatgtgttaatcacacatg

SEQ ID NO: 251203 - DNA, 26 bp, Artificial sequence
  SiRNA target sequence
tccaataatgtgttaatcacacatgc

SEQ ID NO: 251204 - DNA, 26 bp, Artificial sequence
  SiRNA target sequence
ccaataatgtgttaatcacacatgcc

SEQ ID NO: 251205 - DNA, 26 bp, Artificial sequence
  SiRNA target sequence
caataatgtgttaatcacacatgcca

SEQ ID NO: 251206 - DNA, 26 bp, Artificial sequence
  SiRNA target sequence
aataatgtgttaatcacacatgccat

SEQ ID NO: 251207 - DNA, 26 bp, Artificial sequence
  SiRNA target sequence
ataatgtgttaatcacacatgccatt

SEQ ID NO: 251208 - DNA, 26 bp, Artificial sequence
  SiRNA target sequence
taatgtgttaatcacacatgccatta

SEQ ID NO: 251209 - DNA, 26 bp, Artificial sequence
  SiRNA target sequence
aatgtgttaatcacacatgccattaa

SEQ ID NO: 251210 - DNA, 26 bp, Artificial sequence
  SiRNA target sequence
atgtgttaatcacacatgccattaaa

SEQ ID NO: 251211 - DNA, 26 bp, Artificial sequence
  SiRNA target sequence
tgtgttaatcacacatgccattaaaa

SEQ ID NO: 251212 - DNA, 26 bp, Artificial sequence
  SiRNA target sequence
gtgttaatcacacatgccattaaaaa

SEQ ID NO: 251213 - DNA, 26 bp, Artificial sequence
  SiRNA target sequence
tgttaatcacacatgccattaaaaat

SEQ ID NO: 251214 - DNA, 26 bp, Artificial sequence
  SiRNA target sequence
gttaatcacacatgccattaaaaatg

SEQ ID NO: 251215 - DNA, 26 bp, Artificial sequence
  SiRNA target sequence
ttaatcacacatgccattaaaaatgt

SEQ ID NO: 251216 - DNA, 26 bp, Artificial sequence
  SiRNA target sequence
taatcacacatgccattaaaaatgta

SEQ ID NO: 251217 - DNA, 26 bp, Artificial sequence
  SiRNA target sequence
aatcacacatgccattaaaaatgtaa

SEQ ID NO: 251218 - DNA, 26 bp, Artificial sequence
  SiRNA target sequence
atcacacatgccattaaaaatgtaag

SEQ ID NO: 251219 - DNA, 26 bp, Artificial sequence
  SiRNA target sequence
tcacacatgccattaaaaatgtaagt

SEQ ID NO: 251220 - DNA, 26 bp, Artificial sequence
  SiRNA target sequence
cacacatgccattaaaaatgtaagtg

SEQ ID NO: 251221 - DNA, 26 bp, Artificial sequence
  SiRNA target sequence
acacatgccattaaaaatgtaagtga

SEQ ID NO: 251222 - DNA, 26 bp, Artificial sequence
  SiRNA target sequence
cacatgccattaaaaatgtaagtgac

SEQ ID NO: 251223 - DNA, 26 bp, Artificial sequence
  SiRNA target sequence
acatgccattaaaaatgtaagtgaca

SEQ ID NO: 251224 - DNA, 26 bp, Artificial sequence
  SiRNA target sequence
catgccattaaaaatgtaagtgacaa

SEQ ID NO: 251225 - DNA, 26 bp, Artificial sequence
  SiRNA target sequence
atgccattaaaaatgtaagtgacaat

SEQ ID NO: 251226 - DNA, 26 bp, Artificial sequence
  SiRNA target sequence
tgccattaaaaatgtaagtgacaata

SEQ ID NO: 251227 - DNA, 26 bp, Artificial sequence
  SiRNA target sequence
gccattaaaaatgtaagtgacaataa

SEQ ID NO: 251228 - DNA, 26 bp, Artificial sequence
  SiRNA target sequence
ccattaaaaatgtaagtgacaataat

SEQ ID NO: 251229 - DNA, 26 bp, Artificial sequence
  SiRNA target sequence
cattaaaaatgtaagtgacaataata

SEQ ID NO: 251230 - DNA, 26 bp, Artificial sequence
  SiRNA target sequence
attaaaaatgtaagtgacaataatat

SEQ ID NO: 251231 - DNA, 26 bp, Artificial sequence
  SiRNA target sequence
ttaaaaatgtaagtgacaataatatt

SEQ ID NO: 251232 - DNA, 26 bp, Artificial sequence
  SiRNA target sequence
taaaaatgtaagtgacaataatattt

SEQ ID NO: 251233 - DNA, 26 bp, Artificial sequence
  SiRNA target sequence
aaaaatgtaagtgacaataatatttt

SEQ ID NO: 251234 - DNA, 26 bp, Artificial sequence
  SiRNA target sequence
aaaatgtaagtgacaataatattttt

SEQ ID NO: 251235 - DNA, 26 bp, Artificial sequence
  SiRNA target sequence
aaatgtaagtgacaataatattttta

SEQ ID NO: 251236 - DNA, 26 bp, Artificial sequence
  SiRNA target sequence
aatgtaagtgacaataatatttttac

SEQ ID NO: 251237 - DNA, 26 bp, Artificial sequence
  SiRNA target sequence
atgtaagtgacaataatatttttact

SEQ ID NO: 251238 - DNA, 26 bp, Artificial sequence
  SiRNA target sequence
tgtaagtgacaataatatttttactt

SEQ ID NO: 251239 - DNA, 26 bp, Artificial sequence
  SiRNA target sequence
gtaagtgacaataatatttttacttt

SEQ ID NO: 251240 - DNA, 26 bp, Artificial sequence
  SiRNA target sequence
taagtgacaataatatttttactttt

SEQ ID NO: 251241 - DNA, 26 bp, Artificial sequence
  SiRNA target sequence
aagtgacaataatatttttacttttg

SEQ ID NO: 251242 - DNA, 26 bp, Artificial sequence
  SiRNA target sequence
agtgacaataatatttttacttttgg

SEQ ID NO: 251243 - DNA, 26 bp, Artificial sequence
  SiRNA target sequence
gtgacaataatatttttacttttggg

SEQ ID NO: 251244 - DNA, 26 bp, Artificial sequence
  SiRNA target sequence
tgacaataatatttttacttttggga

SEQ ID NO: 251245 - DNA, 26 bp, Artificial sequence
  SiRNA target sequence
gacaataatatttttacttttgggaa

SEQ ID NO: 251246 - DNA, 26 bp, Artificial sequence
  SiRNA target sequence
acaataatatttttacttttgggaat

SEQ ID NO: 251247 - DNA, 26 bp, Artificial sequence
  SiRNA target sequence
caataatatttttacttttgggaatt

SEQ ID NO: 251248 - DNA, 26 bp, Artificial sequence
  SiRNA target sequence
aataatatttttacttttgggaattt

SEQ ID NO: 251249 - DNA, 26 bp, Artificial sequence
  SiRNA target sequence
ataatatttttacttttgggaatttt

SEQ ID NO: 251250 - DNA, 26 bp, Artificial sequence
  SiRNA target sequence
taatatttttacttttgggaattttt

SEQ ID NO: 251251 - DNA, 26 bp, Artificial sequence
  SiRNA target sequence
aatatttttacttttgggaatttttt

SEQ ID NO: 251252 - DNA, 26 bp, Artificial sequence
  SiRNA target sequence
atatttttacttttgggaattttttt

SEQ ID NO: 251253 - DNA, 26 bp, Artificial sequence
  SiRNA target sequence
tatttttacttttgggaatttttttg

SEQ ID NO: 251254 - DNA, 26 bp, Artificial sequence
  SiRNA target sequence
atttttacttttgggaatttttttgt

SEQ ID NO: 251255 - DNA, 26 bp, Artificial sequence
  SiRNA target sequence
tttttacttttgggaatttttttgtc

SEQ ID NO: 251256 - DNA, 26 bp, Artificial sequence
  SiRNA target sequence
ttttacttttgggaatttttttgtct

SEQ ID NO: 251257 - DNA, 26 bp, Artificial sequence
  SiRNA target sequence
tttacttttgggaatttttttgtctt

SEQ ID NO: 251258 - DNA, 26 bp, Artificial sequence
  SiRNA target sequence
ttacttttgggaatttttttgtctta

SEQ ID NO: 251259 - DNA, 26 bp, Artificial sequence
  SiRNA target sequence
tacttttgggaatttttttgtcttag

SEQ ID NO: 251260 - DNA, 26 bp, Artificial sequence
  SiRNA target sequence
acttttgggaatttttttgtcttagt

SEQ ID NO: 251261 - DNA, 26 bp, Artificial sequence
  SiRNA target sequence
cttttgggaatttttttgtcttagtc

SEQ ID NO: 251262 - DNA, 26 bp, Artificial sequence
  SiRNA target sequence
ttttgggaatttttttgtcttagtca

SEQ ID NO: 251263 - DNA, 26 bp, Artificial sequence
  SiRNA target sequence
tttgggaatttttttgtcttagtcat

SEQ ID NO: 251264 - DNA, 27 bp, Artificial sequence
  SiRNA target sequence
ttaattaaaatcaacatctatctcaga

SEQ ID NO: 251265 - DNA, 27 bp, Artificial sequence
  SiRNA target sequence
taattaaaatcaacatctatctcagaa

SEQ ID NO: 251266 - DNA, 27 bp, Artificial sequence
  SiRNA target sequence
aattaaaatcaacatctatctcagaat

SEQ ID NO: 251267 - DNA, 27 bp, Artificial sequence
  SiRNA target sequence
attaaaatcaacatctatctcagaatt

SEQ ID NO: 251268 - DNA, 27 bp, Artificial sequence
  SiRNA target sequence
ttaaaatcaacatctatctcagaattt

SEQ ID NO: 251269 - DNA, 27 bp, Artificial sequence
  SiRNA target sequence
taaaatcaacatctatctcagaatttt

SEQ ID NO: 251270 - DNA, 27 bp, Artificial sequence
  SiRNA target sequence
aaaatcaacatctatctcagaattttg

SEQ ID NO: 251271 - DNA, 27 bp, Artificial sequence
  SiRNA target sequence
aaatcaacatctatctcagaattttgt

SEQ ID NO: 251272 - DNA, 27 bp, Artificial sequence
  SiRNA target sequence
aatcaacatctatctcagaattttgtt

SEQ ID NO: 251273 - DNA, 27 bp, Artificial sequence
  SiRNA target sequence
atcaacatctatctcagaattttgttc

SEQ ID NO: 251274 - DNA, 27 bp, Artificial sequence
  SiRNA target sequence
tcaacatctatctcagaattttgttca

SEQ ID NO: 251275 - DNA, 27 bp, Artificial sequence
  SiRNA target sequence
caacatctatctcagaattttgttcaa

SEQ ID NO: 251276 - DNA, 27 bp, Artificial sequence
  SiRNA target sequence
aacatctatctcagaattttgttcaat

SEQ ID NO: 251277 - DNA, 27 bp, Artificial sequence
  SiRNA target sequence
acatctatctcagaattttgttcaatt

SEQ ID NO: 251278 - DNA, 27 bp, Artificial sequence
  SiRNA target sequence
catctatctcagaattttgttcaattg

SEQ ID NO: 251279 - DNA, 27 bp, Artificial sequence
  SiRNA target sequence
atctatctcagaattttgttcaattga

SEQ ID NO: 251280 - DNA, 27 bp, Artificial sequence
  SiRNA target sequence
tctatctcagaattttgttcaattgat

SEQ ID NO: 251281 - DNA, 27 bp, Artificial sequence
  SiRNA target sequence
ctatctcagaattttgttcaattgatt

SEQ ID NO: 251282 - DNA, 27 bp, Artificial sequence
  SiRNA target sequence
tatctcagaattttgttcaattgattc

SEQ ID NO: 251283 - DNA, 27 bp, Artificial sequence
  SiRNA target sequence
atctcagaattttgttcaattgattca

SEQ ID NO: 251284 - DNA, 27 bp, Artificial sequence
  SiRNA target sequence
tctcagaattttgttcaattgattcat

SEQ ID NO: 251285 - DNA, 27 bp, Artificial sequence
  SiRNA target sequence
ctcagaattttgttcaattgattcatt

SEQ ID NO: 251286 - DNA, 27 bp, Artificial sequence
  SiRNA target sequence
tcagaattttgttcaattgattcatta

SEQ ID NO: 251287 - DNA, 27 bp, Artificial sequence
  SiRNA target sequence
cagaattttgttcaattgattcattat

SEQ ID NO: 251288 - DNA, 27 bp, Artificial sequence
  SiRNA target sequence
agaattttgttcaattgattcattata

SEQ ID NO: 251289 - DNA, 27 bp, Artificial sequence
  SiRNA target sequence
gaattttgttcaattgattcattatat

SEQ ID NO: 251290 - DNA, 27 bp, Artificial sequence
  SiRNA target sequence
aattttgttcaattgattcattatatt

SEQ ID NO: 251291 - DNA, 27 bp, Artificial sequence
  SiRNA target sequence
attttgttcaattgattcattatattt

SEQ ID NO: 251292 - DNA, 27 bp, Artificial sequence
  SiRNA target sequence
ttttgttcaattgattcattatatttt

SEQ ID NO: 251293 - DNA, 27 bp, Artificial sequence
  SiRNA target sequence
tttgttcaattgattcattatattttt

SEQ ID NO: 251294 - DNA, 27 bp, Artificial sequence
  SiRNA target sequence
ttgttcaattgattcattatatttttt

SEQ ID NO: 251295 - DNA, 27 bp, Artificial sequence
  SiRNA target sequence
tgttcaattgattcattatatttttta

SEQ ID NO: 251296 - DNA, 27 bp, Artificial sequence
  SiRNA target sequence
gttcaattgattcattatattttttac

SEQ ID NO: 251297 - DNA, 27 bp, Artificial sequence
  SiRNA target sequence
ttcaattgattcattatattttttact

SEQ ID NO: 251298 - DNA, 27 bp, Artificial sequence
  SiRNA target sequence
tcaattgattcattatattttttactt

SEQ ID NO: 251299 - DNA, 27 bp, Artificial sequence
  SiRNA target sequence
caattgattcattatattttttactta

SEQ ID NO: 251300 - DNA, 27 bp, Artificial sequence
  SiRNA target sequence
aattgattcattatattttttacttaa

SEQ ID NO: 251301 - DNA, 27 bp, Artificial sequence
  SiRNA target sequence
attgattcattatattttttacttaaa

SEQ ID NO: 251302 - DNA, 27 bp, Artificial sequence
  SiRNA target sequence
ttgattcattatattttttacttaaat

SEQ ID NO: 251303 - DNA, 27 bp, Artificial sequence
  SiRNA target sequence
tgattcattatattttttacttaaata

SEQ ID NO: 251304 - DNA, 27 bp, Artificial sequence
  SiRNA target sequence
gattcattatattttttacttaaataa

SEQ ID NO: 251305 - DNA, 27 bp, Artificial sequence
  SiRNA target sequence
attcattatattttttacttaaataac

SEQ ID NO: 251306 - DNA, 27 bp, Artificial sequence
  SiRNA target sequence
ttcattatattttttacttaaataaca

SEQ ID NO: 251307 - DNA, 27 bp, Artificial sequence
  SiRNA target sequence
tcattatattttttacttaaataacag

SEQ ID NO: 251308 - DNA, 27 bp, Artificial sequence
  SiRNA target sequence
cattatattttttacttaaataacaga

SEQ ID NO: 251309 - DNA, 27 bp, Artificial sequence
  SiRNA target sequence
attatattttttacttaaataacagac

SEQ ID NO: 251310 - DNA, 27 bp, Artificial sequence
  SiRNA target sequence
ttatattttttacttaaataacagaca

SEQ ID NO: 251311 - DNA, 27 bp, Artificial sequence
  SiRNA target sequence
tatattttttacttaaataacagacac

SEQ ID NO: 251312 - DNA, 27 bp, Artificial sequence
  SiRNA target sequence
atattttttacttaaataacagacact

SEQ ID NO: 251313 - DNA, 27 bp, Artificial sequence
  SiRNA target sequence
tattttttacttaaataacagacactc

SEQ ID NO: 251314 - DNA, 27 bp, Artificial sequence
  SiRNA target sequence
attttttacttaaataacagacactcc

SEQ ID NO: 251315 - DNA, 27 bp, Artificial sequence
  SiRNA target sequence
ttttttacttaaataacagacactcct

SEQ ID NO: 251316 - DNA, 27 bp, Artificial sequence
  SiRNA target sequence
tttttacttaaataacagacactcctg

SEQ ID NO: 251317 - DNA, 27 bp, Artificial sequence
  SiRNA target sequence
ttttacttaaataacagacactcctga

SEQ ID NO: 251318 - DNA, 27 bp, Artificial sequence
  SiRNA target sequence
tttacttaaataacagacactcctgat

SEQ ID NO: 251319 - DNA, 27 bp, Artificial sequence
  SiRNA target sequence
ttacttaaataacagacactcctgatc

SEQ ID NO: 251320 - DNA, 27 bp, Artificial sequence
  SiRNA target sequence
tacttaaataacagacactcctgatcc

SEQ ID NO: 251321 - DNA, 27 bp, Artificial sequence
  SiRNA target sequence
acttaaataacagacactcctgatcca

SEQ ID NO: 251322 - DNA, 27 bp, Artificial sequence
  SiRNA target sequence
cttaaataacagacactcctgatccac

SEQ ID NO: 251323 - DNA, 27 bp, Artificial sequence
  SiRNA target sequence
ttaaataacagacactcctgatccaca

SEQ ID NO: 251324 - DNA, 27 bp, Artificial sequence
  SiRNA target sequence
taaataacagacactcctgatccacaa

SEQ ID NO: 251325 - DNA, 27 bp, Artificial sequence
  SiRNA target sequence
aaataacagacactcctgatccacaaa

SEQ ID NO: 251326 - DNA, 27 bp, Artificial sequence
  SiRNA target sequence
aataacagacactcctgatccacaaaa

SEQ ID NO: 251327 - DNA, 27 bp, Artificial sequence
  SiRNA target sequence
ataacagacactcctgatccacaaaaa

SEQ ID NO: 251328 - DNA, 27 bp, Artificial sequence
  SiRNA target sequence
taacagacactcctgatccacaaaaaa

SEQ ID NO: 251329 - DNA, 27 bp, Artificial sequence
  SiRNA target sequence
aacagacactcctgatccacaaaaaat

SEQ ID NO: 251330 - DNA, 27 bp, Artificial sequence
  SiRNA target sequence
acagacactcctgatccacaaaaaatt

SEQ ID NO: 251331 - DNA, 27 bp, Artificial sequence
  SiRNA target sequence
cagacactcctgatccacaaaaaattt

SEQ ID NO: 251332 - DNA, 27 bp, Artificial sequence
  SiRNA target sequence
agacactcctgatccacaaaaaatttg

SEQ ID NO: 251333 - DNA, 27 bp, Artificial sequence
  SiRNA target sequence
gacactcctgatccacaaaaaatttgc

SEQ ID NO: 251334 - DNA, 27 bp, Artificial sequence
  SiRNA target sequence
acactcctgatccacaaaaaatttgca

SEQ ID NO: 251335 - DNA, 27 bp, Artificial sequence
  SiRNA target sequence
cactcctgatccacaaaaaatttgcaa

SEQ ID NO: 251336 - DNA, 27 bp, Artificial sequence
  SiRNA target sequence
actcctgatccacaaaaaatttgcaaa

SEQ ID NO: 251337 - DNA, 27 bp, Artificial sequence
  SiRNA target sequence
ctcctgatccacaaaaaatttgcaaat

SEQ ID NO: 251338 - DNA, 27 bp, Artificial sequence
  SiRNA target sequence
tcctgatccacaaaaaatttgcaaata

SEQ ID NO: 251339 - DNA, 27 bp, Artificial sequence
  SiRNA target sequence
cctgatccacaaaaaatttgcaaatat

SEQ ID NO: 251340 - DNA, 27 bp, Artificial sequence
  SiRNA target sequence
ctgatccacaaaaaatttgcaaatatt

SEQ ID NO: 251341 - DNA, 27 bp, Artificial sequence
  SiRNA target sequence
tgatccacaaaaaatttgcaaatatta

SEQ ID NO: 251342 - DNA, 27 bp, Artificial sequence
  SiRNA target sequence
gatccacaaaaaatttgcaaatattaa

SEQ ID NO: 251343 - DNA, 27 bp, Artificial sequence
  SiRNA target sequence
atccacaaaaaatttgcaaatattaaa

SEQ ID NO: 251344 - DNA, 27 bp, Artificial sequence
  SiRNA target sequence
tccacaaaaaatttgcaaatattaaaa

SEQ ID NO: 251345 - DNA, 27 bp, Artificial sequence
  SiRNA target sequence
ccacaaaaaatttgcaaatattaaaaa

SEQ ID NO: 251346 - DNA, 27 bp, Artificial sequence
  SiRNA target sequence
cacaaaaaatttgcaaatattaaaaat

SEQ ID NO: 251347 - DNA, 27 bp, Artificial sequence
  SiRNA target sequence
acaaaaaatttgcaaatattaaaaata

SEQ ID NO: 251348 - DNA, 27 bp, Artificial sequence
  SiRNA target sequence
caaaaaatttgcaaatattaaaaatat

SEQ ID NO: 251349 - DNA, 27 bp, Artificial sequence
  SiRNA target sequence
aaaaaatttgcaaatattaaaaatata

SEQ ID NO: 251350 - DNA, 27 bp, Artificial sequence
  SiRNA target sequence
aaaaatttgcaaatattaaaaatataa

SEQ ID NO: 251351 - DNA, 27 bp, Artificial sequence
  SiRNA target sequence
aaaatttgcaaatattaaaaatataaa

SEQ ID NO: 251352 - DNA, 27 bp, Artificial sequence
  SiRNA target sequence
aaatttgcaaatattaaaaatataaaa

SEQ ID NO: 251353 - DNA, 27 bp, Artificial sequence
  SiRNA target sequence
aatttgcaaatattaaaaatataaaag

SEQ ID NO: 251354 - DNA, 27 bp, Artificial sequence
  SiRNA target sequence
atttgcaaatattaaaaatataaaaga

SEQ ID NO: 251355 - DNA, 27 bp, Artificial sequence
  SiRNA target sequence
tttgcaaatattaaaaatataaaagac

SEQ ID NO: 251356 - DNA, 27 bp, Artificial sequence
  SiRNA target sequence
ttgcaaatattaaaaatataaaagaca

SEQ ID NO: 251357 - DNA, 27 bp, Artificial sequence
  SiRNA target sequence
tgcaaatattaaaaatataaaagacac

SEQ ID NO: 251358 - DNA, 27 bp, Artificial sequence
  SiRNA target sequence
gcaaatattaaaaatataaaagacacg

SEQ ID NO: 251359 - DNA, 27 bp, Artificial sequence
  SiRNA target sequence
caaatattaaaaatataaaagacacgt

SEQ ID NO: 251360 - DNA, 27 bp, Artificial sequence
  SiRNA target sequence
aaatattaaaaatataaaagacacgta

SEQ ID NO: 251361 - DNA, 27 bp, Artificial sequence
  SiRNA target sequence
aatattaaaaatataaaagacacgtat

SEQ ID NO: 251362 - DNA, 27 bp, Artificial sequence
  SiRNA target sequence
atattaaaaatataaaagacacgtatg

SEQ ID NO: 251363 - DNA, 27 bp, Artificial sequence
  SiRNA target sequence
tattaaaaatataaaagacacgtatga

SEQ ID NO: 251364 - DNA, 27 bp, Artificial sequence
  SiRNA target sequence
attaaaaatataaaagacacgtatgat

SEQ ID NO: 251365 - DNA, 27 bp, Artificial sequence
  SiRNA target sequence
ttaaaaatataaaagacacgtatgata

SEQ ID NO: 251366 - DNA, 27 bp, Artificial sequence
  SiRNA target sequence
taaaaatataaaagacacgtatgatac

SEQ ID NO: 251367 - DNA, 27 bp, Artificial sequence
  SiRNA target sequence
aaaaatataaaagacacgtatgatact

SEQ ID NO: 251368 - DNA, 27 bp, Artificial sequence
  SiRNA target sequence
aaaatataaaagacacgtatgatactt

SEQ ID NO: 251369 - DNA, 27 bp, Artificial sequence
  SiRNA target sequence
aaatataaaagacacgtatgatacttg

SEQ ID NO: 251370 - DNA, 27 bp, Artificial sequence
  SiRNA target sequence
aatataaaagacacgtatgatacttgt

SEQ ID NO: 251371 - DNA, 27 bp, Artificial sequence
  SiRNA target sequence
atataaaagacacgtatgatacttgtc

SEQ ID NO: 251372 - DNA, 27 bp, Artificial sequence
  SiRNA target sequence
tataaaagacacgtatgatacttgtct

SEQ ID NO: 251373 - DNA, 27 bp, Artificial sequence
  SiRNA target sequence
ataaaagacacgtatgatacttgtcta

SEQ ID NO: 251374 - DNA, 27 bp, Artificial sequence
  SiRNA target sequence
taaaagacacgtatgatacttgtctaa

SEQ ID NO: 251375 - DNA, 27 bp, Artificial sequence
  SiRNA target sequence
aaaagacacgtatgatacttgtctaat

SEQ ID NO: 251376 - DNA, 27 bp, Artificial sequence
  SiRNA target sequence
aaagacacgtatgatacttgtctaata

SEQ ID NO: 251377 - DNA, 27 bp, Artificial sequence
  SiRNA target sequence
aagacacgtatgatacttgtctaatat

SEQ ID NO: 251378 - DNA, 27 bp, Artificial sequence
  SiRNA target sequence
agacacgtatgatacttgtctaatatc

SEQ ID NO: 251379 - DNA, 27 bp, Artificial sequence
  SiRNA target sequence
gacacgtatgatacttgtctaatatct

SEQ ID NO: 251380 - DNA, 27 bp, Artificial sequence
  SiRNA target sequence
acacgtatgatacttgtctaatatctg

SEQ ID NO: 251381 - DNA, 27 bp, Artificial sequence
  SiRNA target sequence
cacgtatgatacttgtctaatatctgg

SEQ ID NO: 251382 - DNA, 27 bp, Artificial sequence
  SiRNA target sequence
acgtatgatacttgtctaatatctgga

SEQ ID NO: 251383 - DNA, 27 bp, Artificial sequence
  SiRNA target sequence
cgtatgatacttgtctaatatctggaa

SEQ ID NO: 251384 - DNA, 27 bp, Artificial sequence
  SiRNA target sequence
gtatgatacttgtctaatatctggaat

SEQ ID NO: 251385 - DNA, 27 bp, Artificial sequence
  SiRNA target sequence
tatgatacttgtctaatatctggaatt

SEQ ID NO: 251386 - DNA, 27 bp, Artificial sequence
  SiRNA target sequence
atgatacttgtctaatatctggaattt

SEQ ID NO: 251387 - DNA, 27 bp, Artificial sequence
  SiRNA target sequence
tgatacttgtctaatatctggaatttc

SEQ ID NO: 251388 - DNA, 27 bp, Artificial sequence
  SiRNA target sequence
gatacttgtctaatatctggaatttct

SEQ ID NO: 251389 - DNA, 27 bp, Artificial sequence
  SiRNA target sequence
atacttgtctaatatctggaatttcta

SEQ ID NO: 251390 - DNA, 27 bp, Artificial sequence
  SiRNA target sequence
tacttgtctaatatctggaatttctat

SEQ ID NO: 251391 - DNA, 27 bp, Artificial sequence
  SiRNA target sequence
acttgtctaatatctggaatttctata

SEQ ID NO: 251392 - DNA, 27 bp, Artificial sequence
  SiRNA target sequence
cttgtctaatatctggaatttctataa

SEQ ID NO: 251393 - DNA, 27 bp, Artificial sequence
  SiRNA target sequence
ttgtctaatatctggaatttctataaa

SEQ ID NO: 251394 - DNA, 27 bp, Artificial sequence
  SiRNA target sequence
tgtctaatatctggaatttctataaac

SEQ ID NO: 251395 - DNA, 27 bp, Artificial sequence
  SiRNA target sequence
gtctaatatctggaatttctataaacg

SEQ ID NO: 251396 - DNA, 27 bp, Artificial sequence
  SiRNA target sequence
tctaatatctggaatttctataaacgt

SEQ ID NO: 251397 - DNA, 27 bp, Artificial sequence
  SiRNA target sequence
ctaatatctggaatttctataaacgtc

SEQ ID NO: 251398 - DNA, 27 bp, Artificial sequence
  SiRNA target sequence
taatatctggaatttctataaacgtca

SEQ ID NO: 251399 - DNA, 27 bp, Artificial sequence
  SiRNA target sequence
aatatctggaatttctataaacgtcaa

SEQ ID NO: 251400 - DNA, 27 bp, Artificial sequence
  SiRNA target sequence
atatctggaatttctataaacgtcaaa

SEQ ID NO: 251401 - DNA, 27 bp, Artificial sequence
  SiRNA target sequence
tatctggaatttctataaacgtcaaaa

SEQ ID NO: 251402 - DNA, 27 bp, Artificial sequence
  SiRNA target sequence
atctggaatttctataaacgtcaaaaa

SEQ ID NO: 251403 - DNA, 27 bp, Artificial sequence
  SiRNA target sequence
tctggaatttctataaacgtcaaaaaa

SEQ ID NO: 251404 - DNA, 27 bp, Artificial sequence
  SiRNA target sequence
ctggaatttctataaacgtcaaaaaag

SEQ ID NO: 251405 - DNA, 27 bp, Artificial sequence
  SiRNA target sequence
tggaatttctataaacgtcaaaaaagt

SEQ ID NO: 251406 - DNA, 27 bp, Artificial sequence
  SiRNA target sequence
ggaatttctataaacgtcaaaaaagtt

SEQ ID NO: 251407 - DNA, 27 bp, Artificial sequence
  SiRNA target sequence
gaatttctataaacgtcaaaaaagttc

SEQ ID NO: 251408 - DNA, 27 bp, Artificial sequence
  SiRNA target sequence
aatttctataaacgtcaaaaaagttcc

SEQ ID NO: 251409 - DNA, 27 bp, Artificial sequence
  SiRNA target sequence
atttctataaacgtcaaaaaagttcca

SEQ ID NO: 251410 - DNA, 27 bp, Artificial sequence
  SiRNA target sequence
tttctataaacgtcaaaaaagttccat

SEQ ID NO: 251411 - DNA, 27 bp, Artificial sequence
  SiRNA target sequence
ttctataaacgtcaaaaaagttccata

SEQ ID NO: 251412 - DNA, 27 bp, Artificial sequence
  SiRNA target sequence
tctataaacgtcaaaaaagttccatat

SEQ ID NO: 251413 - DNA, 27 bp, Artificial sequence
  SiRNA target sequence
ctataaacgtcaaaaaagttccatata

SEQ ID NO: 251414 - DNA, 27 bp, Artificial sequence
  SiRNA target sequence
tataaacgtcaaaaaagttccatataa

SEQ ID NO: 251415 - DNA, 27 bp, Artificial sequence
  SiRNA target sequence
ataaacgtcaaaaaagttccatataaa

SEQ ID NO: 251416 - DNA, 27 bp, Artificial sequence
  SiRNA target sequence
taaacgtcaaaaaagttccatataaag

SEQ ID NO: 251417 - DNA, 27 bp, Artificial sequence
  SiRNA target sequence
aaacgtcaaaaaagttccatataaaga

SEQ ID NO: 251418 - DNA, 27 bp, Artificial sequence
  SiRNA target sequence
aacgtcaaaaaagttccatataaagag

SEQ ID NO: 251419 - DNA, 27 bp, Artificial sequence
  SiRNA target sequence
acgtcaaaaaagttccatataaagaga

SEQ ID NO: 251420 - DNA, 27 bp, Artificial sequence
  SiRNA target sequence
cgtcaaaaaagttccatataaagagat

SEQ ID NO: 251421 - DNA, 27 bp, Artificial sequence
  SiRNA target sequence
gtcaaaaaagttccatataaagagata

SEQ ID NO: 251422 - DNA, 27 bp, Artificial sequence
  SiRNA target sequence
tcaaaaaagttccatataaagagataa

SEQ ID NO: 251423 - DNA, 27 bp, Artificial sequence
  SiRNA target sequence
caaaaaagttccatataaagagataat

SEQ ID NO: 251424 - DNA, 27 bp, Artificial sequence
  SiRNA target sequence
aaaaaagttccatataaagagataata

SEQ ID NO: 251425 - DNA, 27 bp, Artificial sequence
  SiRNA target sequence
aaaaagttccatataaagagataatag

SEQ ID NO: 251426 - DNA, 27 bp, Artificial sequence
  SiRNA target sequence
aaaagttccatataaagagataataga

SEQ ID NO: 251427 - DNA, 27 bp, Artificial sequence
  SiRNA target sequence
aaagttccatataaagagataatagat

SEQ ID NO: 251428 - DNA, 27 bp, Artificial sequence
  SiRNA target sequence
aagttccatataaagagataatagatt

SEQ ID NO: 251429 - DNA, 27 bp, Artificial sequence
  SiRNA target sequence
agttccatataaagagataatagattt

SEQ ID NO: 251430 - DNA, 27 bp, Artificial sequence
  SiRNA target sequence
gttccatataaagagataatagattta

SEQ ID NO: 251431 - DNA, 27 bp, Artificial sequence
  SiRNA target sequence
ttccatataaagagataatagatttac

SEQ ID NO: 251432 - DNA, 27 bp, Artificial sequence
  SiRNA target sequence
tccatataaagagataatagatttacc

SEQ ID NO: 251433 - DNA, 27 bp, Artificial sequence
  SiRNA target sequence
ccatataaagagataatagatttacca

SEQ ID NO: 251434 - DNA, 27 bp, Artificial sequence
  SiRNA target sequence
catataaagagataatagatttaccaa

SEQ ID NO: 251435 - DNA, 27 bp, Artificial sequence
  SiRNA target sequence
atataaagagataatagatttaccaat

SEQ ID NO: 251436 - DNA, 27 bp, Artificial sequence
  SiRNA target sequence
tataaagagataatagatttaccaatt

SEQ ID NO: 251437 - DNA, 27 bp, Artificial sequence
  SiRNA target sequence
ataaagagataatagatttaccaattt

SEQ ID NO: 251438 - DNA, 27 bp, Artificial sequence
  SiRNA target sequence
taaagagataatagatttaccaatttt

SEQ ID NO: 251439 - DNA, 27 bp, Artificial sequence
  SiRNA target sequence
aaagagataatagatttaccaattttg

SEQ ID NO: 251440 - DNA, 27 bp, Artificial sequence
  SiRNA target sequence
aagagataatagatttaccaattttga

SEQ ID NO: 251441 - DNA, 27 bp, Artificial sequence
  SiRNA target sequence
agagataatagatttaccaattttgat

SEQ ID NO: 251442 - DNA, 27 bp, Artificial sequence
  SiRNA target sequence
gagataatagatttaccaattttgata

SEQ ID NO: 251443 - DNA, 27 bp, Artificial sequence
  SiRNA target sequence
agataatagatttaccaattttgatac

SEQ ID NO: 251444 - DNA, 27 bp, Artificial sequence
  SiRNA target sequence
gataatagatttaccaattttgataca

SEQ ID NO: 251445 - DNA, 27 bp, Artificial sequence
  SiRNA target sequence
ataatagatttaccaattttgatacat

SEQ ID NO: 251446 - DNA, 27 bp, Artificial sequence
  SiRNA target sequence
taatagatttaccaattttgatacata

SEQ ID NO: 251447 - DNA, 27 bp, Artificial sequence
  SiRNA target sequence
aatagatttaccaattttgatacatac

SEQ ID NO: 251448 - DNA, 27 bp, Artificial sequence
  SiRNA target sequence
atagatttaccaattttgatacataca

SEQ ID NO: 251449 - DNA, 27 bp, Artificial sequence
  SiRNA target sequence
tagatttaccaattttgatacatacac

SEQ ID NO: 251450 - DNA, 27 bp, Artificial sequence
  SiRNA target sequence
agatttaccaattttgatacatacacc

SEQ ID NO: 251451 - DNA, 27 bp, Artificial sequence
  SiRNA target sequence
gatttaccaattttgatacatacacca

SEQ ID NO: 251452 - DNA, 27 bp, Artificial sequence
  SiRNA target sequence
atttaccaattttgatacatacaccat

SEQ ID NO: 251453 - DNA, 27 bp, Artificial sequence
  SiRNA target sequence
tttaccaattttgatacatacaccatc

SEQ ID NO: 251454 - DNA, 27 bp, Artificial sequence
  SiRNA target sequence
ttaccaattttgatacatacaccatca

SEQ ID NO: 251455 - DNA, 27 bp, Artificial sequence
  SiRNA target sequence
taccaattttgatacatacaccatcat

SEQ ID NO: 251456 - DNA, 27 bp, Artificial sequence
  SiRNA target sequence
accaattttgatacatacaccatcata

SEQ ID NO: 251457 - DNA, 27 bp, Artificial sequence
  SiRNA target sequence
ccaattttgatacatacaccatcataa

SEQ ID NO: 251458 - DNA, 27 bp, Artificial sequence
  SiRNA target sequence
caattttgatacatacaccatcataaa

SEQ ID NO: 251459 - DNA, 27 bp, Artificial sequence
  SiRNA target sequence
aattttgatacatacaccatcataaaa

SEQ ID NO: 251460 - DNA, 27 bp, Artificial sequence
  SiRNA target sequence
attttgatacatacaccatcataaaaa

SEQ ID NO: 251461 - DNA, 27 bp, Artificial sequence
  SiRNA target sequence
ttttgatacatacaccatcataaaaac

SEQ ID NO: 251462 - DNA, 27 bp, Artificial sequence
  SiRNA target sequence
tttgatacatacaccatcataaaaact

SEQ ID NO: 251463 - DNA, 27 bp, Artificial sequence
  SiRNA target sequence
ttgatacatacaccatcataaaaactt

SEQ ID NO: 251464 - DNA, 27 bp, Artificial sequence
  SiRNA target sequence
tgatacatacaccatcataaaaacttt

SEQ ID NO: 251465 - DNA, 27 bp, Artificial sequence
  SiRNA target sequence
gatacatacaccatcataaaaactttt

SEQ ID NO: 251466 - DNA, 27 bp, Artificial sequence
  SiRNA target sequence
atacatacaccatcataaaaactttta

SEQ ID NO: 251467 - DNA, 27 bp, Artificial sequence
  SiRNA target sequence
tacatacaccatcataaaaacttttaa

SEQ ID NO: 251468 - DNA, 27 bp, Artificial sequence
  SiRNA target sequence
acatacaccatcataaaaacttttaaa

SEQ ID NO: 251469 - DNA, 27 bp, Artificial sequence
  SiRNA target sequence
catacaccatcataaaaacttttaaat

SEQ ID NO: 251470 - DNA, 27 bp, Artificial sequence
  SiRNA target sequence
atacaccatcataaaaacttttaaatt

SEQ ID NO: 251471 - DNA, 27 bp, Artificial sequence
  SiRNA target sequence
tacaccatcataaaaacttttaaattt

SEQ ID NO: 251472 - DNA, 27 bp, Artificial sequence
  SiRNA target sequence
acaccatcataaaaacttttaaattta

SEQ ID NO: 251473 - DNA, 27 bp, Artificial sequence
  SiRNA target sequence
caccatcataaaaacttttaaatttat

SEQ ID NO: 251474 - DNA, 27 bp, Artificial sequence
  SiRNA target sequence
accatcataaaaacttttaaatttata

SEQ ID NO: 251475 - DNA, 27 bp, Artificial sequence
  SiRNA target sequence
ccatcataaaaacttttaaatttatac

SEQ ID NO: 251476 - DNA, 27 bp, Artificial sequence
  SiRNA target sequence
catcataaaaacttttaaatttatacc

SEQ ID NO: 251477 - DNA, 27 bp, Artificial sequence
  SiRNA target sequence
atcataaaaacttttaaatttatacct

SEQ ID NO: 251478 - DNA, 27 bp, Artificial sequence
  SiRNA target sequence
tcataaaaacttttaaatttatacctg

SEQ ID NO: 251479 - DNA, 27 bp, Artificial sequence
  SiRNA target sequence
cataaaaacttttaaatttatacctgt

SEQ ID NO: 251480 - DNA, 27 bp, Artificial sequence
  SiRNA target sequence
ataaaaacttttaaatttatacctgta

SEQ ID NO: 251481 - DNA, 27 bp, Artificial sequence
  SiRNA target sequence
taaaaacttttaaatttatacctgtat

SEQ ID NO: 251482 - DNA, 27 bp, Artificial sequence
  SiRNA target sequence
aaaaacttttaaatttatacctgtatt

SEQ ID NO: 251483 - DNA, 27 bp, Artificial sequence
  SiRNA target sequence
aaaacttttaaatttatacctgtattt

SEQ ID NO: 251484 - DNA, 27 bp, Artificial sequence
  SiRNA target sequence
aaacttttaaatttatacctgtattta

SEQ ID NO: 251485 - DNA, 27 bp, Artificial sequence
  SiRNA target sequence
aacttttaaatttatacctgtatttaa

SEQ ID NO: 251486 - DNA, 27 bp, Artificial sequence
  SiRNA target sequence
acttttaaatttatacctgtatttaac

SEQ ID NO: 251487 - DNA, 27 bp, Artificial sequence
  SiRNA target sequence
cttttaaatttatacctgtatttaaca

SEQ ID NO: 251488 - DNA, 27 bp, Artificial sequence
  SiRNA target sequence
ttttaaatttatacctgtatttaacag

SEQ ID NO: 251489 - DNA, 27 bp, Artificial sequence
  SiRNA target sequence
tttaaatttatacctgtatttaacagg

SEQ ID NO: 251490 - DNA, 27 bp, Artificial sequence
  SiRNA target sequence
ttaaatttatacctgtatttaacaggc

SEQ ID NO: 251491 - DNA, 27 bp, Artificial sequence
  SiRNA target sequence
taaatttatacctgtatttaacaggca

SEQ ID NO: 251492 - DNA, 27 bp, Artificial sequence
  SiRNA target sequence
aaatttatacctgtatttaacaggcac

SEQ ID NO: 251493 - DNA, 27 bp, Artificial sequence
  SiRNA target sequence
aatttatacctgtatttaacaggcacc

SEQ ID NO: 251494 - DNA, 27 bp, Artificial sequence
  SiRNA target sequence
atttatacctgtatttaacaggcaccc

SEQ ID NO: 251495 - DNA, 27 bp, Artificial sequence
  SiRNA target sequence
tttatacctgtatttaacaggcaccct

SEQ ID NO: 251496 - DNA, 27 bp, Artificial sequence
  SiRNA target sequence
ttatacctgtatttaacaggcaccctc

SEQ ID NO: 251497 - DNA, 27 bp, Artificial sequence
  SiRNA target sequence
tatacctgtatttaacaggcaccctca

SEQ ID NO: 251498 - DNA, 27 bp, Artificial sequence
  SiRNA target sequence
atacctgtatttaacaggcaccctcat

SEQ ID NO: 251499 - DNA, 27 bp, Artificial sequence
  SiRNA target sequence
tacctgtatttaacaggcaccctcata

SEQ ID NO: 251500 - DNA, 27 bp, Artificial sequence
  SiRNA target sequence
acctgtatttaacaggcaccctcatag

SEQ ID NO: 251501 - DNA, 27 bp, Artificial sequence
  SiRNA target sequence
cctgtatttaacaggcaccctcataga

SEQ ID NO: 251502 - DNA, 27 bp, Artificial sequence
  SiRNA target sequence
ctgtatttaacaggcaccctcatagaa

SEQ ID NO: 251503 - DNA, 27 bp, Artificial sequence
  SiRNA target sequence
tgtatttaacaggcaccctcatagaaa

SEQ ID NO: 251504 - DNA, 27 bp, Artificial sequence
  SiRNA target sequence
gtatttaacaggcaccctcatagaaag

SEQ ID NO: 251505 - DNA, 27 bp, Artificial sequence
  SiRNA target sequence
tatttaacaggcaccctcatagaaagc

SEQ ID NO: 251506 - DNA, 27 bp, Artificial sequence
  SiRNA target sequence
atttaacaggcaccctcatagaaagca

SEQ ID NO: 251507 - DNA, 27 bp, Artificial sequence
  SiRNA target sequence
tttaacaggcaccctcatagaaagcat

SEQ ID NO: 251508 - DNA, 27 bp, Artificial sequence
  SiRNA target sequence
ttaacaggcaccctcatagaaagcatt

SEQ ID NO: 251509 - DNA, 27 bp, Artificial sequence
  SiRNA target sequence
taacaggcaccctcatagaaagcattt

SEQ ID NO: 251510 - DNA, 27 bp, Artificial sequence
  SiRNA target sequence
aacaggcaccctcatagaaagcatttc

SEQ ID NO: 251511 - DNA, 27 bp, Artificial sequence
  SiRNA target sequence
acaggcaccctcatagaaagcatttct

SEQ ID NO: 251512 - DNA, 27 bp, Artificial sequence
  SiRNA target sequence
caggcaccctcatagaaagcatttctt

SEQ ID NO: 251513 - DNA, 27 bp, Artificial sequence
  SiRNA target sequence
aggcaccctcatagaaagcatttcttt

SEQ ID NO: 251514 - DNA, 27 bp, Artificial sequence
  SiRNA target sequence
ggcaccctcatagaaagcatttctttt

SEQ ID NO: 251515 - DNA, 27 bp, Artificial sequence
  SiRNA target sequence
gcaccctcatagaaagcatttcttttg

SEQ ID NO: 251516 - DNA, 27 bp, Artificial sequence
  SiRNA target sequence
caccctcatagaaagcatttcttttgc

SEQ ID NO: 251517 - DNA, 27 bp, Artificial sequence
  SiRNA target sequence
accctcatagaaagcatttcttttgct

SEQ ID NO: 251518 - DNA, 27 bp, Artificial sequence
  SiRNA target sequence
ccctcatagaaagcatttcttttgcta

SEQ ID NO: 251519 - DNA, 27 bp, Artificial sequence
  SiRNA target sequence
cctcatagaaagcatttcttttgctaa

SEQ ID NO: 251520 - DNA, 27 bp, Artificial sequence
  SiRNA target sequence
ctcatagaaagcatttcttttgctaaa

SEQ ID NO: 251521 - DNA, 27 bp, Artificial sequence
  SiRNA target sequence
tcatagaaagcatttcttttgctaaat

SEQ ID NO: 251522 - DNA, 27 bp, Artificial sequence
  SiRNA target sequence
catagaaagcatttcttttgctaaatc

SEQ ID NO: 251523 - DNA, 27 bp, Artificial sequence
  SiRNA target sequence
atagaaagcatttcttttgctaaatca

SEQ ID NO: 251524 - DNA, 27 bp, Artificial sequence
  SiRNA target sequence
tagaaagcatttcttttgctaaatcaa

SEQ ID NO: 251525 - DNA, 27 bp, Artificial sequence
  SiRNA target sequence
agaaagcatttcttttgctaaatcaaa

SEQ ID NO: 251526 - DNA, 27 bp, Artificial sequence
  SiRNA target sequence
gaaagcatttcttttgctaaatcaaat

SEQ ID NO: 251527 - DNA, 27 bp, Artificial sequence
  SiRNA target sequence
aaagcatttcttttgctaaatcaaata

SEQ ID NO: 251528 - DNA, 27 bp, Artificial sequence
  SiRNA target sequence
aagcatttcttttgctaaatcaaataa

SEQ ID NO: 251529 - DNA, 27 bp, Artificial sequence
  SiRNA target sequence
agcatttcttttgctaaatcaaataaa

SEQ ID NO: 251530 - DNA, 27 bp, Artificial sequence
  SiRNA target sequence
gcatttcttttgctaaatcaaataaaa

SEQ ID NO: 251531 - DNA, 27 bp, Artificial sequence
  SiRNA target sequence
catttcttttgctaaatcaaataaaac

SEQ ID NO: 251532 - DNA, 27 bp, Artificial sequence
  SiRNA target sequence
atttcttttgctaaatcaaataaaaca

SEQ ID NO: 251533 - DNA, 27 bp, Artificial sequence
  SiRNA target sequence
tttcttttgctaaatcaaataaaacat

SEQ ID NO: 251534 - DNA, 27 bp, Artificial sequence
  SiRNA target sequence
ttcttttgctaaatcaaataaaacata

SEQ ID NO: 251535 - DNA, 27 bp, Artificial sequence
  SiRNA target sequence
tcttttgctaaatcaaataaaacatat

SEQ ID NO: 251536 - DNA, 27 bp, Artificial sequence
  SiRNA target sequence
cttttgctaaatcaaataaaacatatt

SEQ ID NO: 251537 - DNA, 27 bp, Artificial sequence
  SiRNA target sequence
ttttgctaaatcaaataaaacatattt

SEQ ID NO: 251538 - DNA, 27 bp, Artificial sequence
  SiRNA target sequence
tttgctaaatcaaataaaacatatttg

SEQ ID NO: 251539 - DNA, 27 bp, Artificial sequence
  SiRNA target sequence
ttgctaaatcaaataaaacatatttgg

SEQ ID NO: 251540 - DNA, 27 bp, Artificial sequence
  SiRNA target sequence
tgctaaatcaaataaaacatatttggt

SEQ ID NO: 251541 - DNA, 27 bp, Artificial sequence
  SiRNA target sequence
gctaaatcaaataaaacatatttggta

SEQ ID NO: 251542 - DNA, 27 bp, Artificial sequence
  SiRNA target sequence
ctaaatcaaataaaacatatttggtaa

SEQ ID NO: 251543 - DNA, 27 bp, Artificial sequence
  SiRNA target sequence
taaatcaaataaaacatatttggtaat

SEQ ID NO: 251544 - DNA, 27 bp, Artificial sequence
  SiRNA target sequence
aaatcaaataaaacatatttggtaatt

SEQ ID NO: 251545 - DNA, 27 bp, Artificial sequence
  SiRNA target sequence
aatcaaataaaacatatttggtaattt

SEQ ID NO: 251546 - DNA, 27 bp, Artificial sequence
  SiRNA target sequence
atcaaataaaacatatttggtaatttt

SEQ ID NO: 251547 - DNA, 27 bp, Artificial sequence
  SiRNA target sequence
tcaaataaaacatatttggtaatttta

SEQ ID NO: 251548 - DNA, 27 bp, Artificial sequence
  SiRNA target sequence
caaataaaacatatttggtaattttag

SEQ ID NO: 251549 - DNA, 27 bp, Artificial sequence
  SiRNA target sequence
aaataaaacatatttggtaattttaga

SEQ ID NO: 251550 - DNA, 27 bp, Artificial sequence
  SiRNA target sequence
aataaaacatatttggtaattttagaa

SEQ ID NO: 251551 - DNA, 27 bp, Artificial sequence
  SiRNA target sequence
ataaaacatatttggtaattttagaaa

SEQ ID NO: 251552 - DNA, 27 bp, Artificial sequence
  SiRNA target sequence
taaaacatatttggtaattttagaaaa

SEQ ID NO: 251553 - DNA, 27 bp, Artificial sequence
  SiRNA target sequence
aaaacatatttggtaattttagaaaat

SEQ ID NO: 251554 - DNA, 27 bp, Artificial sequence
  SiRNA target sequence
aaacatatttggtaattttagaaaatg

SEQ ID NO: 251555 - DNA, 27 bp, Artificial sequence
  SiRNA target sequence
aacatatttggtaattttagaaaatgc

SEQ ID NO: 251556 - DNA, 27 bp, Artificial sequence
  SiRNA target sequence
acatatttggtaattttagaaaatgca

SEQ ID NO: 251557 - DNA, 27 bp, Artificial sequence
  SiRNA target sequence
catatttggtaattttagaaaatgcaa

SEQ ID NO: 251558 - DNA, 27 bp, Artificial sequence
  SiRNA target sequence
atatttggtaattttagaaaatgcaaa

SEQ ID NO: 251559 - DNA, 27 bp, Artificial sequence
  SiRNA target sequence
tatttggtaattttagaaaatgcaaat

SEQ ID NO: 251560 - DNA, 27 bp, Artificial sequence
  SiRNA target sequence
atttggtaattttagaaaatgcaaatc

SEQ ID NO: 251561 - DNA, 27 bp, Artificial sequence
  SiRNA target sequence
tttggtaattttagaaaatgcaaatcc

SEQ ID NO: 251562 - DNA, 27 bp, Artificial sequence
  SiRNA target sequence
ttggtaattttagaaaatgcaaatcca

SEQ ID NO: 251563 - DNA, 27 bp, Artificial sequence
  SiRNA target sequence
tggtaattttagaaaatgcaaatccaa

SEQ ID NO: 251564 - DNA, 27 bp, Artificial sequence
  SiRNA target sequence
ggtaattttagaaaatgcaaatccaat

SEQ ID NO: 251565 - DNA, 27 bp, Artificial sequence
  SiRNA target sequence
gtaattttagaaaatgcaaatccaatg

SEQ ID NO: 251566 - DNA, 27 bp, Artificial sequence
  SiRNA target sequence
taattttagaaaatgcaaatccaatgg

SEQ ID NO: 251567 - DNA, 27 bp, Artificial sequence
  SiRNA target sequence
aattttagaaaatgcaaatccaatggt

SEQ ID NO: 251568 - DNA, 27 bp, Artificial sequence
  SiRNA target sequence
attttagaaaatgcaaatccaatggtt

SEQ ID NO: 251569 - DNA, 27 bp, Artificial sequence
  SiRNA target sequence
ttttagaaaatgcaaatccaatggttg

SEQ ID NO: 251570 - DNA, 27 bp, Artificial sequence
  SiRNA target sequence
tttagaaaatgcaaatccaatggttgc

SEQ ID NO: 251571 - DNA, 27 bp, Artificial sequence
  SiRNA target sequence
ttagaaaatgcaaatccaatggttgca

SEQ ID NO: 251572 - DNA, 27 bp, Artificial sequence
  SiRNA target sequence
tagaaaatgcaaatccaatggttgcac

SEQ ID NO: 251573 - DNA, 27 bp, Artificial sequence
  SiRNA target sequence
agaaaatgcaaatccaatggttgcaca

SEQ ID NO: 251574 - DNA, 27 bp, Artificial sequence
  SiRNA target sequence
gaaaatgcaaatccaatggttgcacac

SEQ ID NO: 251575 - DNA, 27 bp, Artificial sequence
  SiRNA target sequence
aaaatgcaaatccaatggttgcacacc

SEQ ID NO: 251576 - DNA, 27 bp, Artificial sequence
  SiRNA target sequence
aaatgcaaatccaatggttgcacacca

SEQ ID NO: 251577 - DNA, 27 bp, Artificial sequence
  SiRNA target sequence
aatgcaaatccaatggttgcacaccaa

SEQ ID NO: 251578 - DNA, 27 bp, Artificial sequence
  SiRNA target sequence
atgcaaatccaatggttgcacaccaat

SEQ ID NO: 251579 - DNA, 27 bp, Artificial sequence
  SiRNA target sequence
tgcaaatccaatggttgcacaccaatt

SEQ ID NO: 251580 - DNA, 27 bp, Artificial sequence
  SiRNA target sequence
gcaaatccaatggttgcacaccaattt

SEQ ID NO: 251581 - DNA, 27 bp, Artificial sequence
  SiRNA target sequence
caaatccaatggttgcacaccaatttt

SEQ ID NO: 251582 - DNA, 27 bp, Artificial sequence
  SiRNA target sequence
aaatccaatggttgcacaccaattttc

SEQ ID NO: 251583 - DNA, 27 bp, Artificial sequence
  SiRNA target sequence
aatccaatggttgcacaccaattttca

SEQ ID NO: 251584 - DNA, 27 bp, Artificial sequence
  SiRNA target sequence
atccaatggttgcacaccaattttcaa

SEQ ID NO: 251585 - DNA, 27 bp, Artificial sequence
  SiRNA target sequence
tccaatggttgcacaccaattttcaag

SEQ ID NO: 251586 - DNA, 27 bp, Artificial sequence
  SiRNA target sequence
ccaatggttgcacaccaattttcaaga

SEQ ID NO: 251587 - DNA, 27 bp, Artificial sequence
  SiRNA target sequence
caatggttgcacaccaattttcaagat

SEQ ID NO: 251588 - DNA, 27 bp, Artificial sequence
  SiRNA target sequence
aatggttgcacaccaattttcaagatt

SEQ ID NO: 251589 - DNA, 27 bp, Artificial sequence
  SiRNA target sequence
atggttgcacaccaattttcaagattt

SEQ ID NO: 251590 - DNA, 27 bp, Artificial sequence
  SiRNA target sequence
tggttgcacaccaattttcaagattta

SEQ ID NO: 251591 - DNA, 27 bp, Artificial sequence
  SiRNA target sequence
ggttgcacaccaattttcaagatttat

SEQ ID NO: 251592 - DNA, 27 bp, Artificial sequence
  SiRNA target sequence
gttgcacaccaattttcaagatttatt

SEQ ID NO: 251593 - DNA, 27 bp, Artificial sequence
  SiRNA target sequence
ttgcacaccaattttcaagatttattc

SEQ ID NO: 251594 - DNA, 27 bp, Artificial sequence
  SiRNA target sequence
tgcacaccaattttcaagatttattct

SEQ ID NO: 251595 - DNA, 27 bp, Artificial sequence
  SiRNA target sequence
gcacaccaattttcaagatttattctt

SEQ ID NO: 251596 - DNA, 27 bp, Artificial sequence
  SiRNA target sequence
cacaccaattttcaagatttattctta

SEQ ID NO: 251597 - DNA, 27 bp, Artificial sequence
  SiRNA target sequence
acaccaattttcaagatttattcttaa

SEQ ID NO: 251598 - DNA, 27 bp, Artificial sequence
  SiRNA target sequence
caccaattttcaagatttattcttaag

SEQ ID NO: 251599 - DNA, 27 bp, Artificial sequence
  SiRNA target sequence
accaattttcaagatttattcttaaga

SEQ ID NO: 251600 - DNA, 27 bp, Artificial sequence
  SiRNA target sequence
ccaattttcaagatttattcttaagac

SEQ ID NO: 251601 - DNA, 27 bp, Artificial sequence
  SiRNA target sequence
caattttcaagatttattcttaagacc

SEQ ID NO: 251602 - DNA, 27 bp, Artificial sequence
  SiRNA target sequence
aattttcaagatttattcttaagaccg

SEQ ID NO: 251603 - DNA, 27 bp, Artificial sequence
  SiRNA target sequence
attttcaagatttattcttaagaccga

SEQ ID NO: 251604 - DNA, 27 bp, Artificial sequence
  SiRNA target sequence
ttttcaagatttattcttaagaccgat

SEQ ID NO: 251605 - DNA, 27 bp, Artificial sequence
  SiRNA target sequence
tttcaagatttattcttaagaccgatg

SEQ ID NO: 251606 - DNA, 27 bp, Artificial sequence
  SiRNA target sequence
ttcaagatttattcttaagaccgatgg

SEQ ID NO: 251607 - DNA, 27 bp, Artificial sequence
  SiRNA target sequence
tcaagatttattcttaagaccgatgga

SEQ ID NO: 251608 - DNA, 27 bp, Artificial sequence
  SiRNA target sequence
caagatttattcttaagaccgatggag

SEQ ID NO: 251609 - DNA, 27 bp, Artificial sequence
  SiRNA target sequence
aagatttattcttaagaccgatggagc

SEQ ID NO: 251610 - DNA, 27 bp, Artificial sequence
  SiRNA target sequence
agatttattcttaagaccgatggagct

SEQ ID NO: 251611 - DNA, 27 bp, Artificial sequence
  SiRNA target sequence
gatttattcttaagaccgatggagctg

SEQ ID NO: 251612 - DNA, 27 bp, Artificial sequence
  SiRNA target sequence
atttattcttaagaccgatggagctgt

SEQ ID NO: 251613 - DNA, 27 bp, Artificial sequence
  SiRNA target sequence
tttattcttaagaccgatggagctgtg

SEQ ID NO: 251614 - DNA, 27 bp, Artificial sequence
  SiRNA target sequence
ttattcttaagaccgatggagctgtgc

SEQ ID NO: 251615 - DNA, 27 bp, Artificial sequence
  SiRNA target sequence
tattcttaagaccgatggagctgtgcg

SEQ ID NO: 251616 - DNA, 27 bp, Artificial sequence
  SiRNA target sequence
attcttaagaccgatggagctgtgcgc

SEQ ID NO: 251617 - DNA, 27 bp, Artificial sequence
  SiRNA target sequence
ttcttaagaccgatggagctgtgcgca

SEQ ID NO: 251618 - DNA, 27 bp, Artificial sequence
  SiRNA target sequence
tcttaagaccgatggagctgtgcgcaa

SEQ ID NO: 251619 - DNA, 27 bp, Artificial sequence
  SiRNA target sequence
cttaagaccgatggagctgtgcgcaaa

SEQ ID NO: 251620 - DNA, 27 bp, Artificial sequence
  SiRNA target sequence
ttaagaccgatggagctgtgcgcaaat

SEQ ID NO: 251621 - DNA, 27 bp, Artificial sequence
  SiRNA target sequence
taagaccgatggagctgtgcgcaaatt

SEQ ID NO: 251622 - DNA, 27 bp, Artificial sequence
  SiRNA target sequence
aagaccgatggagctgtgcgcaaattg

SEQ ID NO: 251623 - DNA, 27 bp, Artificial sequence
  SiRNA target sequence
agaccgatggagctgtgcgcaaattgt

SEQ ID NO: 251624 - DNA, 27 bp, Artificial sequence
  SiRNA target sequence
gaccgatggagctgtgcgcaaattgta

SEQ ID NO: 251625 - DNA, 27 bp, Artificial sequence
  SiRNA target sequence
accgatggagctgtgcgcaaattgtaa

SEQ ID NO: 251626 - DNA, 27 bp, Artificial sequence
  SiRNA target sequence
ccgatggagctgtgcgcaaattgtaaa

SEQ ID NO: 251627 - DNA, 27 bp, Artificial sequence
  SiRNA target sequence
cgatggagctgtgcgcaaattgtaaaa

SEQ ID NO: 251628 - DNA, 27 bp, Artificial sequence
  SiRNA target sequence
gatggagctgtgcgcaaattgtaaaaa

SEQ ID NO: 251629 - DNA, 27 bp, Artificial sequence
  SiRNA target sequence
atggagctgtgcgcaaattgtaaaaag

SEQ ID NO: 251630 - DNA, 27 bp, Artificial sequence
  SiRNA target sequence
tggagctgtgcgcaaattgtaaaaaga

SEQ ID NO: 251631 - DNA, 27 bp, Artificial sequence
  SiRNA target sequence
ggagctgtgcgcaaattgtaaaaagaa

SEQ ID NO: 251632 - DNA, 27 bp, Artificial sequence
  SiRNA target sequence
gagctgtgcgcaaattgtaaaaagaaa

SEQ ID NO: 251633 - DNA, 27 bp, Artificial sequence
  SiRNA target sequence
agctgtgcgcaaattgtaaaaagaaag

SEQ ID NO: 251634 - DNA, 27 bp, Artificial sequence
  SiRNA target sequence
gctgtgcgcaaattgtaaaaagaaagt

SEQ ID NO: 251635 - DNA, 27 bp, Artificial sequence
  SiRNA target sequence
ctgtgcgcaaattgtaaaaagaaagtc

SEQ ID NO: 251636 - DNA, 27 bp, Artificial sequence
  SiRNA target sequence
tgtgcgcaaattgtaaaaagaaagtcc

SEQ ID NO: 251637 - DNA, 27 bp, Artificial sequence
  SiRNA target sequence
gtgcgcaaattgtaaaaagaaagtcct

SEQ ID NO: 251638 - DNA, 27 bp, Artificial sequence
  SiRNA target sequence
tgcgcaaattgtaaaaagaaagtcctg

SEQ ID NO: 251639 - DNA, 27 bp, Artificial sequence
  SiRNA target sequence
gcgcaaattgtaaaaagaaagtcctga

SEQ ID NO: 251640 - DNA, 27 bp, Artificial sequence
  SiRNA target sequence
cgcaaattgtaaaaagaaagtcctgaa

SEQ ID NO: 251641 - DNA, 27 bp, Artificial sequence
  SiRNA target sequence
gcaaattgtaaaaagaaagtcctgaaa

SEQ ID NO: 251642 - DNA, 27 bp, Artificial sequence
  SiRNA target sequence
caaattgtaaaaagaaagtcctgaaat

SEQ ID NO: 251643 - DNA, 27 bp, Artificial sequence
  SiRNA target sequence
aaattgtaaaaagaaagtcctgaaatt

SEQ ID NO: 251644 - DNA, 27 bp, Artificial sequence
  SiRNA target sequence
aattgtaaaaagaaagtcctgaaatta

SEQ ID NO: 251645 - DNA, 27 bp, Artificial sequence
  SiRNA target sequence
attgtaaaaagaaagtcctgaaattag

SEQ ID NO: 251646 - DNA, 27 bp, Artificial sequence
  SiRNA target sequence
ttgtaaaaagaaagtcctgaaattaga

SEQ ID NO: 251647 - DNA, 27 bp, Artificial sequence
  SiRNA target sequence
tgtaaaaagaaagtcctgaaattagag

SEQ ID NO: 251648 - DNA, 27 bp, Artificial sequence
  SiRNA target sequence
gtaaaaagaaagtcctgaaattagagc

SEQ ID NO: 251649 - DNA, 27 bp, Artificial sequence
  SiRNA target sequence
taaaaagaaagtcctgaaattagagcg

SEQ ID NO: 251650 - DNA, 27 bp, Artificial sequence
  SiRNA target sequence
aaaaagaaagtcctgaaattagagcgg

SEQ ID NO: 251651 - DNA, 27 bp, Artificial sequence
  SiRNA target sequence
aaaagaaagtcctgaaattagagcggt

SEQ ID NO: 251652 - DNA, 27 bp, Artificial sequence
  SiRNA target sequence
aaagaaagtcctgaaattagagcggta

SEQ ID NO: 251653 - DNA, 27 bp, Artificial sequence
  SiRNA target sequence
aagaaagtcctgaaattagagcggtaa

SEQ ID NO: 251654 - DNA, 27 bp, Artificial sequence
  SiRNA target sequence
agaaagtcctgaaattagagcggtaaa

SEQ ID NO: 251655 - DNA, 27 bp, Artificial sequence
  SiRNA target sequence
gaaagtcctgaaattagagcggtaaaa

SEQ ID NO: 251656 - DNA, 27 bp, Artificial sequence
  SiRNA target sequence
aaagtcctgaaattagagcggtaaaaa

SEQ ID NO: 251657 - DNA, 27 bp, Artificial sequence
  SiRNA target sequence
aagtcctgaaattagagcggtaaaaaa

SEQ ID NO: 251658 - DNA, 27 bp, Artificial sequence
  SiRNA target sequence
agtcctgaaattagagcggtaaaaaat

SEQ ID NO: 251659 - DNA, 27 bp, Artificial sequence
  SiRNA target sequence
gtcctgaaattagagcggtaaaaaata

SEQ ID NO: 251660 - DNA, 27 bp, Artificial sequence
  SiRNA target sequence
tcctgaaattagagcggtaaaaaatat

SEQ ID NO: 251661 - DNA, 27 bp, Artificial sequence
  SiRNA target sequence
cctgaaattagagcggtaaaaaatata

SEQ ID NO: 251662 - DNA, 27 bp, Artificial sequence
  SiRNA target sequence
ctgaaattagagcggtaaaaaatatag

SEQ ID NO: 251663 - DNA, 27 bp, Artificial sequence
  SiRNA target sequence
tgaaattagagcggtaaaaaatatagc

SEQ ID NO: 251664 - DNA, 27 bp, Artificial sequence
  SiRNA target sequence
gaaattagagcggtaaaaaatatagca

SEQ ID NO: 251665 - DNA, 27 bp, Artificial sequence
  SiRNA target sequence
aaattagagcggtaaaaaatatagcag

SEQ ID NO: 251666 - DNA, 27 bp, Artificial sequence
  SiRNA target sequence
aattagagcggtaaaaaatatagcagc

SEQ ID NO: 251667 - DNA, 27 bp, Artificial sequence
  SiRNA target sequence
attagagcggtaaaaaatatagcagca

SEQ ID NO: 251668 - DNA, 27 bp, Artificial sequence
  SiRNA target sequence
ttagagcggtaaaaaatatagcagcaa

SEQ ID NO: 251669 - DNA, 27 bp, Artificial sequence
  SiRNA target sequence
tagagcggtaaaaaatatagcagcaat

SEQ ID NO: 251670 - DNA, 27 bp, Artificial sequence
  SiRNA target sequence
agagcggtaaaaaatatagcagcaata

SEQ ID NO: 251671 - DNA, 27 bp, Artificial sequence
  SiRNA target sequence
gagcggtaaaaaatatagcagcaatag

SEQ ID NO: 251672 - DNA, 27 bp, Artificial sequence
  SiRNA target sequence
agcggtaaaaaatatagcagcaatagg

SEQ ID NO: 251673 - DNA, 27 bp, Artificial sequence
  SiRNA target sequence
gcggtaaaaaatatagcagcaataggg

SEQ ID NO: 251674 - DNA, 27 bp, Artificial sequence
  SiRNA target sequence
cggtaaaaaatatagcagcaatagggg

SEQ ID NO: 251675 - DNA, 27 bp, Artificial sequence
  SiRNA target sequence
ggtaaaaaatatagcagcaatagggga

SEQ ID NO: 251676 - DNA, 27 bp, Artificial sequence
  SiRNA target sequence
gtaaaaaatatagcagcaataggggag

SEQ ID NO: 251677 - DNA, 27 bp, Artificial sequence
  SiRNA target sequence
taaaaaatatagcagcaataggggagg

SEQ ID NO: 251678 - DNA, 27 bp, Artificial sequence
  SiRNA target sequence
aaaaaatatagcagcaataggggaggc

SEQ ID NO: 251679 - DNA, 27 bp, Artificial sequence
  SiRNA target sequence
aaaaatatagcagcaataggggaggca

SEQ ID NO: 251680 - DNA, 27 bp, Artificial sequence
  SiRNA target sequence
aaaatatagcagcaataggggaggcaa

SEQ ID NO: 251681 - DNA, 27 bp, Artificial sequence
  SiRNA target sequence
aaatatagcagcaataggggaggcaat

SEQ ID NO: 251682 - DNA, 27 bp, Artificial sequence
  SiRNA target sequence
aatatagcagcaataggggaggcaata

SEQ ID NO: 251683 - DNA, 27 bp, Artificial sequence
  SiRNA target sequence
atatagcagcaataggggaggcaatag

SEQ ID NO: 251684 - DNA, 27 bp, Artificial sequence
  SiRNA target sequence
tatagcagcaataggggaggcaataga

SEQ ID NO: 251685 - DNA, 27 bp, Artificial sequence
  SiRNA target sequence
atagcagcaataggggaggcaatagat

SEQ ID NO: 251686 - DNA, 27 bp, Artificial sequence
  SiRNA target sequence
tagcagcaataggggaggcaatagata

SEQ ID NO: 251687 - DNA, 27 bp, Artificial sequence
  SiRNA target sequence
agcagcaataggggaggcaatagatag

SEQ ID NO: 251688 - DNA, 27 bp, Artificial sequence
  SiRNA target sequence
gcagcaataggggaggcaatagataga

SEQ ID NO: 251689 - DNA, 27 bp, Artificial sequence
  SiRNA target sequence
cagcaataggggaggcaatagatagat

SEQ ID NO: 251690 - DNA, 27 bp, Artificial sequence
  SiRNA target sequence
agcaataggggaggcaatagatagata

SEQ ID NO: 251691 - DNA, 27 bp, Artificial sequence
  SiRNA target sequence
gcaataggggaggcaatagatagataa

SEQ ID NO: 251692 - DNA, 27 bp, Artificial sequence
  SiRNA target sequence
caataggggaggcaatagatagataaa

SEQ ID NO: 251693 - DNA, 27 bp, Artificial sequence
  SiRNA target sequence
aataggggaggcaatagatagataaaa

SEQ ID NO: 251694 - DNA, 27 bp, Artificial sequence
  SiRNA target sequence
ataggggaggcaatagatagataaaag

SEQ ID NO: 251695 - DNA, 27 bp, Artificial sequence
  SiRNA target sequence
taggggaggcaatagatagataaaaga

SEQ ID NO: 251696 - DNA, 27 bp, Artificial sequence
  SiRNA target sequence
aggggaggcaatagatagataaaagat

SEQ ID NO: 251697 - DNA, 27 bp, Artificial sequence
  SiRNA target sequence
ggggaggcaatagatagataaaagatc

SEQ ID NO: 251698 - DNA, 27 bp, Artificial sequence
  SiRNA target sequence
gggaggcaatagatagataaaagatcc

SEQ ID NO: 251699 - DNA, 27 bp, Artificial sequence
  SiRNA target sequence
ggaggcaatagatagataaaagatcct

SEQ ID NO: 251700 - DNA, 27 bp, Artificial sequence
  SiRNA target sequence
gaggcaatagatagataaaagatcctt

SEQ ID NO: 251701 - DNA, 27 bp, Artificial sequence
  SiRNA target sequence
aggcaatagatagataaaagatccttg

SEQ ID NO: 251702 - DNA, 27 bp, Artificial sequence
  SiRNA target sequence
ggcaatagatagataaaagatccttga

SEQ ID NO: 251703 - DNA, 27 bp, Artificial sequence
  SiRNA target sequence
gcaatagatagataaaagatccttgat

SEQ ID NO: 251704 - DNA, 27 bp, Artificial sequence
  SiRNA target sequence
caatagatagataaaagatccttgatg

SEQ ID NO: 251705 - DNA, 27 bp, Artificial sequence
  SiRNA target sequence
aatagatagataaaagatccttgatgc

SEQ ID NO: 251706 - DNA, 27 bp, Artificial sequence
  SiRNA target sequence
atagatagataaaagatccttgatgca

SEQ ID NO: 251707 - DNA, 27 bp, Artificial sequence
  SiRNA target sequence
tagatagataaaagatccttgatgcaa

SEQ ID NO: 251708 - DNA, 27 bp, Artificial sequence
  SiRNA target sequence
agatagataaaagatccttgatgcaat

SEQ ID NO: 251709 - DNA, 27 bp, Artificial sequence
  SiRNA target sequence
gatagataaaagatccttgatgcaatg

SEQ ID NO: 251710 - DNA, 27 bp, Artificial sequence
  SiRNA target sequence
atagataaaagatccttgatgcaatgc

SEQ ID NO: 251711 - DNA, 27 bp, Artificial sequence
  SiRNA target sequence
tagataaaagatccttgatgcaatgcg

SEQ ID NO: 251712 - DNA, 27 bp, Artificial sequence
  SiRNA target sequence
agataaaagatccttgatgcaatgcga

SEQ ID NO: 251713 - DNA, 27 bp, Artificial sequence
  SiRNA target sequence
gataaaagatccttgatgcaatgcgat

SEQ ID NO: 251714 - DNA, 27 bp, Artificial sequence
  SiRNA target sequence
ataaaagatccttgatgcaatgcgatt

SEQ ID NO: 251715 - DNA, 27 bp, Artificial sequence
  SiRNA target sequence
taaaagatccttgatgcaatgcgattt

SEQ ID NO: 251716 - DNA, 27 bp, Artificial sequence
  SiRNA target sequence
aaaagatccttgatgcaatgcgatttc

SEQ ID NO: 251717 - DNA, 27 bp, Artificial sequence
  SiRNA target sequence
aaagatccttgatgcaatgcgatttcc

SEQ ID NO: 251718 - DNA, 27 bp, Artificial sequence
  SiRNA target sequence
aagatccttgatgcaatgcgatttcca

SEQ ID NO: 251719 - DNA, 27 bp, Artificial sequence
  SiRNA target sequence
agatccttgatgcaatgcgatttccac

SEQ ID NO: 251720 - DNA, 27 bp, Artificial sequence
  SiRNA target sequence
gatccttgatgcaatgcgatttccacg

SEQ ID NO: 251721 - DNA, 27 bp, Artificial sequence
  SiRNA target sequence
atccttgatgcaatgcgatttccacgg

SEQ ID NO: 251722 - DNA, 27 bp, Artificial sequence
  SiRNA target sequence
tccttgatgcaatgcgatttccacgga

SEQ ID NO: 251723 - DNA, 27 bp, Artificial sequence
  SiRNA target sequence
ccttgatgcaatgcgatttccacggat

SEQ ID NO: 251724 - DNA, 27 bp, Artificial sequence
  SiRNA target sequence
cttgatgcaatgcgatttccacggatt

SEQ ID NO: 251725 - DNA, 27 bp, Artificial sequence
  SiRNA target sequence
ttgatgcaatgcgatttccacggatta

SEQ ID NO: 251726 - DNA, 27 bp, Artificial sequence
  SiRNA target sequence
tgatgcaatgcgatttccacggattac

SEQ ID NO: 251727 - DNA, 27 bp, Artificial sequence
  SiRNA target sequence
gatgcaatgcgatttccacggattaca

SEQ ID NO: 251728 - DNA, 27 bp, Artificial sequence
  SiRNA target sequence
atgcaatgcgatttccacggattacaa

SEQ ID NO: 251729 - DNA, 27 bp, Artificial sequence
  SiRNA target sequence
tgcaatgcgatttccacggattacaaa

SEQ ID NO: 251730 - DNA, 27 bp, Artificial sequence
  SiRNA target sequence
gcaatgcgatttccacggattacaaag

SEQ ID NO: 251731 - DNA, 27 bp, Artificial sequence
  SiRNA target sequence
caatgcgatttccacggattacaaagt

SEQ ID NO: 251732 - DNA, 27 bp, Artificial sequence
  SiRNA target sequence
aatgcgatttccacggattacaaagtt

SEQ ID NO: 251733 - DNA, 27 bp, Artificial sequence
  SiRNA target sequence
atgcgatttccacggattacaaagtta

SEQ ID NO: 251734 - DNA, 27 bp, Artificial sequence
  SiRNA target sequence
tgcgatttccacggattacaaagttat

SEQ ID NO: 251735 - DNA, 27 bp, Artificial sequence
  SiRNA target sequence
gcgatttccacggattacaaagttata

SEQ ID NO: 251736 - DNA, 27 bp, Artificial sequence
  SiRNA target sequence
cgatttccacggattacaaagttataa

SEQ ID NO: 251737 - DNA, 27 bp, Artificial sequence
  SiRNA target sequence
gatttccacggattacaaagttataaa

SEQ ID NO: 251738 - DNA, 27 bp, Artificial sequence
  SiRNA target sequence
atttccacggattacaaagttataaaa

SEQ ID NO: 251739 - DNA, 27 bp, Artificial sequence
  SiRNA target sequence
tttccacggattacaaagttataaaat

SEQ ID NO: 251740 - DNA, 27 bp, Artificial sequence
  SiRNA target sequence
ttccacggattacaaagttataaaata

SEQ ID NO: 251741 - DNA, 27 bp, Artificial sequence
  SiRNA target sequence
tccacggattacaaagttataaaataa

SEQ ID NO: 251742 - DNA, 27 bp, Artificial sequence
  SiRNA target sequence
ccacggattacaaagttataaaataat

SEQ ID NO: 251743 - DNA, 27 bp, Artificial sequence
  SiRNA target sequence
cacggattacaaagttataaaataatg

SEQ ID NO: 251744 - DNA, 27 bp, Artificial sequence
  SiRNA target sequence
acggattacaaagttataaaataatga

SEQ ID NO: 251745 - DNA, 27 bp, Artificial sequence
  SiRNA target sequence
cggattacaaagttataaaataatgat

SEQ ID NO: 251746 - DNA, 27 bp, Artificial sequence
  SiRNA target sequence
ggattacaaagttataaaataatgata

SEQ ID NO: 251747 - DNA, 27 bp, Artificial sequence
  SiRNA target sequence
gattacaaagttataaaataatgatac

SEQ ID NO: 251748 - DNA, 27 bp, Artificial sequence
  SiRNA target sequence
attacaaagttataaaataatgataca

SEQ ID NO: 251749 - DNA, 27 bp, Artificial sequence
  SiRNA target sequence
ttacaaagttataaaataatgatacag

SEQ ID NO: 251750 - DNA, 27 bp, Artificial sequence
  SiRNA target sequence
tacaaagttataaaataatgatacagc

SEQ ID NO: 251751 - DNA, 27 bp, Artificial sequence
  SiRNA target sequence
acaaagttataaaataatgatacagca

SEQ ID NO: 251752 - DNA, 27 bp, Artificial sequence
  SiRNA target sequence
caaagttataaaataatgatacagcac

SEQ ID NO: 251753 - DNA, 27 bp, Artificial sequence
  SiRNA target sequence
aaagttataaaataatgatacagcact

SEQ ID NO: 251754 - DNA, 27 bp, Artificial sequence
  SiRNA target sequence
aagttataaaataatgatacagcacta

SEQ ID NO: 251755 - DNA, 27 bp, Artificial sequence
  SiRNA target sequence
agttataaaataatgatacagcactaa

SEQ ID NO: 251756 - DNA, 27 bp, Artificial sequence
  SiRNA target sequence
gttataaaataatgatacagcactaat

SEQ ID NO: 251757 - DNA, 27 bp, Artificial sequence
  SiRNA target sequence
ttataaaataatgatacagcactaatc

SEQ ID NO: 251758 - DNA, 27 bp, Artificial sequence
  SiRNA target sequence
tataaaataatgatacagcactaatcg

SEQ ID NO: 251759 - DNA, 27 bp, Artificial sequence
  SiRNA target sequence
ataaaataatgatacagcactaatcgt

SEQ ID NO: 251760 - DNA, 27 bp, Artificial sequence
  SiRNA target sequence
taaaataatgatacagcactaatcgtt

SEQ ID NO: 251761 - DNA, 27 bp, Artificial sequence
  SiRNA target sequence
aaaataatgatacagcactaatcgtta

SEQ ID NO: 251762 - DNA, 27 bp, Artificial sequence
  SiRNA target sequence
aaataatgatacagcactaatcgttaa

SEQ ID NO: 251763 - DNA, 27 bp, Artificial sequence
  SiRNA target sequence
aataatgatacagcactaatcgttaag

SEQ ID NO: 251764 - DNA, 27 bp, Artificial sequence
  SiRNA target sequence
ataatgatacagcactaatcgttaagg

SEQ ID NO: 251765 - DNA, 27 bp, Artificial sequence
  SiRNA target sequence
taatgatacagcactaatcgttaagga

SEQ ID NO: 251766 - DNA, 27 bp, Artificial sequence
  SiRNA target sequence
aatgatacagcactaatcgttaaggaa

SEQ ID NO: 251767 - DNA, 27 bp, Artificial sequence
  SiRNA target sequence
atgatacagcactaatcgttaaggaag

SEQ ID NO: 251768 - DNA, 27 bp, Artificial sequence
  SiRNA target sequence
tgatacagcactaatcgttaaggaagt

SEQ ID NO: 251769 - DNA, 27 bp, Artificial sequence
  SiRNA target sequence
gatacagcactaatcgttaaggaagtt

SEQ ID NO: 251770 - DNA, 27 bp, Artificial sequence
  SiRNA target sequence
atacagcactaatcgttaaggaagttg

SEQ ID NO: 251771 - DNA, 27 bp, Artificial sequence
  SiRNA target sequence
tacagcactaatcgttaaggaagttgt

SEQ ID NO: 251772 - DNA, 27 bp, Artificial sequence
  SiRNA target sequence
acagcactaatcgttaaggaagttgtt

SEQ ID NO: 251773 - DNA, 27 bp, Artificial sequence
  SiRNA target sequence
cagcactaatcgttaaggaagttgtta

SEQ ID NO: 251774 - DNA, 27 bp, Artificial sequence
  SiRNA target sequence
agcactaatcgttaaggaagttgttac

SEQ ID NO: 251775 - DNA, 27 bp, Artificial sequence
  SiRNA target sequence
gcactaatcgttaaggaagttgttact

SEQ ID NO: 251776 - DNA, 27 bp, Artificial sequence
  SiRNA target sequence
cactaatcgttaaggaagttgttacta

SEQ ID NO: 251777 - DNA, 27 bp, Artificial sequence
  SiRNA target sequence
actaatcgttaaggaagttgttactaa

SEQ ID NO: 251778 - DNA, 27 bp, Artificial sequence
  SiRNA target sequence
ctaatcgttaaggaagttgttactaaa

SEQ ID NO: 251779 - DNA, 27 bp, Artificial sequence
  SiRNA target sequence
taatcgttaaggaagttgttactaaat

SEQ ID NO: 251780 - DNA, 27 bp, Artificial sequence
  SiRNA target sequence
aatcgttaaggaagttgttactaaata

SEQ ID NO: 251781 - DNA, 27 bp, Artificial sequence
  SiRNA target sequence
atcgttaaggaagttgttactaaatat

SEQ ID NO: 251782 - DNA, 27 bp, Artificial sequence
  SiRNA target sequence
tcgttaaggaagttgttactaaatatt

SEQ ID NO: 251783 - DNA, 27 bp, Artificial sequence
  SiRNA target sequence
cgttaaggaagttgttactaaatattt

SEQ ID NO: 251784 - DNA, 27 bp, Artificial sequence
  SiRNA target sequence
gttaaggaagttgttactaaatatttt

SEQ ID NO: 251785 - DNA, 27 bp, Artificial sequence
  SiRNA target sequence
ttaaggaagttgttactaaatattttt

SEQ ID NO: 251786 - DNA, 27 bp, Artificial sequence
  SiRNA target sequence
taaggaagttgttactaaatatttttg

SEQ ID NO: 251787 - DNA, 27 bp, Artificial sequence
  SiRNA target sequence
aaggaagttgttactaaatatttttga

SEQ ID NO: 251788 - DNA, 27 bp, Artificial sequence
  SiRNA target sequence
aggaagttgttactaaatatttttgag

SEQ ID NO: 251789 - DNA, 27 bp, Artificial sequence
  SiRNA target sequence
ggaagttgttactaaatatttttgaga

SEQ ID NO: 251790 - DNA, 27 bp, Artificial sequence
  SiRNA target sequence
gaagttgttactaaatatttttgagaa

SEQ ID NO: 251791 - DNA, 27 bp, Artificial sequence
  SiRNA target sequence
aagttgttactaaatatttttgagaat

SEQ ID NO: 251792 - DNA, 27 bp, Artificial sequence
  SiRNA target sequence
agttgttactaaatatttttgagaata

SEQ ID NO: 251793 - DNA, 27 bp, Artificial sequence
  SiRNA target sequence
gttgttactaaatatttttgagaataa

SEQ ID NO: 251794 - DNA, 27 bp, Artificial sequence
  SiRNA target sequence
ttgttactaaatatttttgagaataat

SEQ ID NO: 251795 - DNA, 27 bp, Artificial sequence
  SiRNA target sequence
tgttactaaatatttttgagaataatc

SEQ ID NO: 251796 - DNA, 27 bp, Artificial sequence
  SiRNA target sequence
gttactaaatatttttgagaataatct

SEQ ID NO: 251797 - DNA, 27 bp, Artificial sequence
  SiRNA target sequence
ttactaaatatttttgagaataatctt

SEQ ID NO: 251798 - DNA, 27 bp, Artificial sequence
  SiRNA target sequence
tactaaatatttttgagaataatcttt

SEQ ID NO: 251799 - DNA, 27 bp, Artificial sequence
  SiRNA target sequence
actaaatatttttgagaataatctttc

SEQ ID NO: 251800 - DNA, 27 bp, Artificial sequence
  SiRNA target sequence
ctaaatatttttgagaataatctttcg

SEQ ID NO: 251801 - DNA, 27 bp, Artificial sequence
  SiRNA target sequence
taaatatttttgagaataatctttcgg

SEQ ID NO: 251802 - DNA, 27 bp, Artificial sequence
  SiRNA target sequence
aaatatttttgagaataatctttcgga

SEQ ID NO: 251803 - DNA, 27 bp, Artificial sequence
  SiRNA target sequence
aatatttttgagaataatctttcggag

SEQ ID NO: 251804 - DNA, 27 bp, Artificial sequence
  SiRNA target sequence
atatttttgagaataatctttcggagg

SEQ ID NO: 251805 - DNA, 27 bp, Artificial sequence
  SiRNA target sequence
tatttttgagaataatctttcggaggc

SEQ ID NO: 251806 - DNA, 27 bp, Artificial sequence
  SiRNA target sequence
atttttgagaataatctttcggaggca

SEQ ID NO: 251807 - DNA, 27 bp, Artificial sequence
  SiRNA target sequence
tttttgagaataatctttcggaggcat

SEQ ID NO: 251808 - DNA, 27 bp, Artificial sequence
  SiRNA target sequence
ttttgagaataatctttcggaggcata

SEQ ID NO: 251809 - DNA, 27 bp, Artificial sequence
  SiRNA target sequence
tttgagaataatctttcggaggcatat

SEQ ID NO: 251810 - DNA, 27 bp, Artificial sequence
  SiRNA target sequence
ttgagaataatctttcggaggcatatt

SEQ ID NO: 251811 - DNA, 27 bp, Artificial sequence
  SiRNA target sequence
tgagaataatctttcggaggcatatta

SEQ ID NO: 251812 - DNA, 27 bp, Artificial sequence
  SiRNA target sequence
gagaataatctttcggaggcatattat

SEQ ID NO: 251813 - DNA, 27 bp, Artificial sequence
  SiRNA target sequence
agaataatctttcggaggcatattatt

SEQ ID NO: 251814 - DNA, 27 bp, Artificial sequence
  SiRNA target sequence
gaataatctttcggaggcatattatta

SEQ ID NO: 251815 - DNA, 27 bp, Artificial sequence
  SiRNA target sequence
aataatctttcggaggcatattattaa

SEQ ID NO: 251816 - DNA, 27 bp, Artificial sequence
  SiRNA target sequence
ataatctttcggaggcatattattaat

SEQ ID NO: 251817 - DNA, 27 bp, Artificial sequence
  SiRNA target sequence
taatctttcggaggcatattattaatt

SEQ ID NO: 251818 - DNA, 27 bp, Artificial sequence
  SiRNA target sequence
aatctttcggaggcatattattaattc

SEQ ID NO: 251819 - DNA, 27 bp, Artificial sequence
  SiRNA target sequence
atctttcggaggcatattattaattct

SEQ ID NO: 251820 - DNA, 27 bp, Artificial sequence
  SiRNA target sequence
tctttcggaggcatattattaattctg

SEQ ID NO: 251821 - DNA, 27 bp, Artificial sequence
  SiRNA target sequence
ctttcggaggcatattattaattctgc

SEQ ID NO: 251822 - DNA, 27 bp, Artificial sequence
  SiRNA target sequence
tttcggaggcatattattaattctgct

SEQ ID NO: 251823 - DNA, 27 bp, Artificial sequence
  SiRNA target sequence
ttcggaggcatattattaattctgctt

SEQ ID NO: 251824 - DNA, 27 bp, Artificial sequence
  SiRNA target sequence
tcggaggcatattattaattctgcttc

SEQ ID NO: 251825 - DNA, 27 bp, Artificial sequence
  SiRNA target sequence
cggaggcatattattaattctgcttcc

SEQ ID NO: 251826 - DNA, 27 bp, Artificial sequence
  SiRNA target sequence
ggaggcatattattaattctgcttccc

SEQ ID NO: 251827 - DNA, 27 bp, Artificial sequence
  SiRNA target sequence
gaggcatattattaattctgcttcccg

SEQ ID NO: 251828 - DNA, 27 bp, Artificial sequence
  SiRNA target sequence
aggcatattattaattctgcttcccgt

SEQ ID NO: 251829 - DNA, 27 bp, Artificial sequence
  SiRNA target sequence
ggcatattattaattctgcttcccgta

SEQ ID NO: 251830 - DNA, 27 bp, Artificial sequence
  SiRNA target sequence
gcatattattaattctgcttcccgtag

SEQ ID NO: 251831 - DNA, 27 bp, Artificial sequence
  SiRNA target sequence
catattattaattctgcttcccgtaga

SEQ ID NO: 251832 - DNA, 27 bp, Artificial sequence
  SiRNA target sequence
atattattaattctgcttcccgtagat

SEQ ID NO: 251833 - DNA, 27 bp, Artificial sequence
  SiRNA target sequence
tattattaattctgcttcccgtagata

SEQ ID NO: 251834 - DNA, 27 bp, Artificial sequence
  SiRNA target sequence
attattaattctgcttcccgtagataa

SEQ ID NO: 251835 - DNA, 27 bp, Artificial sequence
  SiRNA target sequence
ttattaattctgcttcccgtagataaa

SEQ ID NO: 251836 - DNA, 27 bp, Artificial sequence
  SiRNA target sequence
tattaattctgcttcccgtagataaag

SEQ ID NO: 251837 - DNA, 27 bp, Artificial sequence
  SiRNA target sequence
attaattctgcttcccgtagataaaga

SEQ ID NO: 251838 - DNA, 27 bp, Artificial sequence
  SiRNA target sequence
ttaattctgcttcccgtagataaagaa

SEQ ID NO: 251839 - DNA, 27 bp, Artificial sequence
  SiRNA target sequence
taattctgcttcccgtagataaagaat

SEQ ID NO: 251840 - DNA, 27 bp, Artificial sequence
  SiRNA target sequence
aattctgcttcccgtagataaagaatt

SEQ ID NO: 251841 - DNA, 27 bp, Artificial sequence
  SiRNA target sequence
attctgcttcccgtagataaagaattt

SEQ ID NO: 251842 - DNA, 27 bp, Artificial sequence
  SiRNA target sequence
ttctgcttcccgtagataaagaatttt

SEQ ID NO: 251843 - DNA, 27 bp, Artificial sequence
  SiRNA target sequence
tctgcttcccgtagataaagaattttt

SEQ ID NO: 251844 - DNA, 27 bp, Artificial sequence
  SiRNA target sequence
ctgcttcccgtagataaagaatttttt

SEQ ID NO: 251845 - DNA, 27 bp, Artificial sequence
  SiRNA target sequence
tgcttcccgtagataaagaatttttta

SEQ ID NO: 251846 - DNA, 27 bp, Artificial sequence
  SiRNA target sequence
gcttcccgtagataaagaattttttaa

SEQ ID NO: 251847 - DNA, 27 bp, Artificial sequence
  SiRNA target sequence
cttcccgtagataaagaattttttaag

SEQ ID NO: 251848 - DNA, 27 bp, Artificial sequence
  SiRNA target sequence
ttcccgtagataaagaattttttaagg

SEQ ID NO: 251849 - DNA, 27 bp, Artificial sequence
  SiRNA target sequence
tcccgtagataaagaattttttaagga

SEQ ID NO: 251850 - DNA, 27 bp, Artificial sequence
  SiRNA target sequence
cccgtagataaagaattttttaaggac

SEQ ID NO: 251851 - DNA, 27 bp, Artificial sequence
  SiRNA target sequence
ccgtagataaagaattttttaaggaca

SEQ ID NO: 251852 - DNA, 27 bp, Artificial sequence
  SiRNA target sequence
cgtagataaagaattttttaaggacat

SEQ ID NO: 251853 - DNA, 27 bp, Artificial sequence
  SiRNA target sequence
gtagataaagaattttttaaggacata

SEQ ID NO: 251854 - DNA, 27 bp, Artificial sequence
  SiRNA target sequence
tagataaagaattttttaaggacatat

SEQ ID NO: 251855 - DNA, 27 bp, Artificial sequence
  SiRNA target sequence
agataaagaattttttaaggacatatc

SEQ ID NO: 251856 - DNA, 27 bp, Artificial sequence
  SiRNA target sequence
gataaagaattttttaaggacatatca

SEQ ID NO: 251857 - DNA, 27 bp, Artificial sequence
  SiRNA target sequence
ataaagaattttttaaggacatatcaa

SEQ ID NO: 251858 - DNA, 27 bp, Artificial sequence
  SiRNA target sequence
taaagaattttttaaggacatatcaat

SEQ ID NO: 251859 - DNA, 27 bp, Artificial sequence
  SiRNA target sequence
aaagaattttttaaggacatatcaata

SEQ ID NO: 251860 - DNA, 27 bp, Artificial sequence
  SiRNA target sequence
aagaattttttaaggacatatcaataa

SEQ ID NO: 251861 - DNA, 27 bp, Artificial sequence
  SiRNA target sequence
agaattttttaaggacatatcaataaa

SEQ ID NO: 251862 - DNA, 27 bp, Artificial sequence
  SiRNA target sequence
gaattttttaaggacatatcaataaat

SEQ ID NO: 251863 - DNA, 27 bp, Artificial sequence
  SiRNA target sequence
aattttttaaggacatatcaataaatc

SEQ ID NO: 251864 - DNA, 27 bp, Artificial sequence
  SiRNA target sequence
attttttaaggacatatcaataaatcc

SEQ ID NO: 251865 - DNA, 27 bp, Artificial sequence
  SiRNA target sequence
ttttttaaggacatatcaataaatcct

SEQ ID NO: 251866 - DNA, 27 bp, Artificial sequence
  SiRNA target sequence
tttttaaggacatatcaataaatcctg

SEQ ID NO: 251867 - DNA, 27 bp, Artificial sequence
  SiRNA target sequence
ttttaaggacatatcaataaatcctgc

SEQ ID NO: 251868 - DNA, 27 bp, Artificial sequence
  SiRNA target sequence
tttaaggacatatcaataaatcctgca

SEQ ID NO: 251869 - DNA, 27 bp, Artificial sequence
  SiRNA target sequence
ttaaggacatatcaataaatcctgcat

SEQ ID NO: 251870 - DNA, 27 bp, Artificial sequence
  SiRNA target sequence
taaggacatatcaataaatcctgcatt

SEQ ID NO: 251871 - DNA, 27 bp, Artificial sequence
  SiRNA target sequence
aaggacatatcaataaatcctgcatta

SEQ ID NO: 251872 - DNA, 27 bp, Artificial sequence
  SiRNA target sequence
aggacatatcaataaatcctgcattaa

SEQ ID NO: 251873 - DNA, 27 bp, Artificial sequence
  SiRNA target sequence
ggacatatcaataaatcctgcattaat

SEQ ID NO: 251874 - DNA, 27 bp, Artificial sequence
  SiRNA target sequence
gacatatcaataaatcctgcattaata

SEQ ID NO: 251875 - DNA, 27 bp, Artificial sequence
  SiRNA target sequence
acatatcaataaatcctgcattaatag

SEQ ID NO: 251876 - DNA, 27 bp, Artificial sequence
  SiRNA target sequence
catatcaataaatcctgcattaatagc

SEQ ID NO: 251877 - DNA, 27 bp, Artificial sequence
  SiRNA target sequence
atatcaataaatcctgcattaatagca

SEQ ID NO: 251878 - DNA, 27 bp, Artificial sequence
  SiRNA target sequence
tatcaataaatcctgcattaatagcat

SEQ ID NO: 251879 - DNA, 27 bp, Artificial sequence
  SiRNA target sequence
atcaataaatcctgcattaatagcata

SEQ ID NO: 251880 - DNA, 27 bp, Artificial sequence
  SiRNA target sequence
tcaataaatcctgcattaatagcatag

SEQ ID NO: 251881 - DNA, 27 bp, Artificial sequence
  SiRNA target sequence
caataaatcctgcattaatagcataga

SEQ ID NO: 251882 - DNA, 27 bp, Artificial sequence
  SiRNA target sequence
aataaatcctgcattaatagcatagat

SEQ ID NO: 251883 - DNA, 27 bp, Artificial sequence
  SiRNA target sequence
ataaatcctgcattaatagcatagatt

SEQ ID NO: 251884 - DNA, 27 bp, Artificial sequence
  SiRNA target sequence
taaatcctgcattaatagcatagatta

SEQ ID NO: 251885 - DNA, 27 bp, Artificial sequence
  SiRNA target sequence
aaatcctgcattaatagcatagattaa

SEQ ID NO: 251886 - DNA, 27 bp, Artificial sequence
  SiRNA target sequence
aatcctgcattaatagcatagattaat

SEQ ID NO: 251887 - DNA, 27 bp, Artificial sequence
  SiRNA target sequence
atcctgcattaatagcatagattaatg

SEQ ID NO: 251888 - DNA, 27 bp, Artificial sequence
  SiRNA target sequence
tcctgcattaatagcatagattaatgc

SEQ ID NO: 251889 - DNA, 27 bp, Artificial sequence
  SiRNA target sequence
cctgcattaatagcatagattaatgcc

SEQ ID NO: 251890 - DNA, 27 bp, Artificial sequence
  SiRNA target sequence
ctgcattaatagcatagattaatgccg

SEQ ID NO: 251891 - DNA, 27 bp, Artificial sequence
  SiRNA target sequence
tgcattaatagcatagattaatgccgc

SEQ ID NO: 251892 - DNA, 27 bp, Artificial sequence
  SiRNA target sequence
gcattaatagcatagattaatgccgct

SEQ ID NO: 251893 - DNA, 27 bp, Artificial sequence
  SiRNA target sequence
cattaatagcatagattaatgccgctg

SEQ ID NO: 251894 - DNA, 27 bp, Artificial sequence
  SiRNA target sequence
attaatagcatagattaatgccgctgc

SEQ ID NO: 251895 - DNA, 27 bp, Artificial sequence
  SiRNA target sequence
ttaatagcatagattaatgccgctgca

SEQ ID NO: 251896 - DNA, 27 bp, Artificial sequence
  SiRNA target sequence
taatagcatagattaatgccgctgcac

SEQ ID NO: 251897 - DNA, 27 bp, Artificial sequence
  SiRNA target sequence
aatagcatagattaatgccgctgcaca

SEQ ID NO: 251898 - DNA, 27 bp, Artificial sequence
  SiRNA target sequence
atagcatagattaatgccgctgcacac

SEQ ID NO: 251899 - DNA, 27 bp, Artificial sequence
  SiRNA target sequence
tagcatagattaatgccgctgcacaca

SEQ ID NO: 251900 - DNA, 27 bp, Artificial sequence
  SiRNA target sequence
agcatagattaatgccgctgcacacat

SEQ ID NO: 251901 - DNA, 27 bp, Artificial sequence
  SiRNA target sequence
gcatagattaatgccgctgcacacata

SEQ ID NO: 251902 - DNA, 27 bp, Artificial sequence
  SiRNA target sequence
catagattaatgccgctgcacacatat

SEQ ID NO: 251903 - DNA, 27 bp, Artificial sequence
  SiRNA target sequence
atagattaatgccgctgcacacatatt

SEQ ID NO: 251904 - DNA, 27 bp, Artificial sequence
  SiRNA target sequence
tagattaatgccgctgcacacatattt

SEQ ID NO: 251905 - DNA, 27 bp, Artificial sequence
  SiRNA target sequence
agattaatgccgctgcacacatatttc

SEQ ID NO: 251906 - DNA, 27 bp, Artificial sequence
  SiRNA target sequence
gattaatgccgctgcacacatatttct

SEQ ID NO: 251907 - DNA, 27 bp, Artificial sequence
  SiRNA target sequence
attaatgccgctgcacacatatttctt

SEQ ID NO: 251908 - DNA, 27 bp, Artificial sequence
  SiRNA target sequence
ttaatgccgctgcacacatatttctta

SEQ ID NO: 251909 - DNA, 27 bp, Artificial sequence
  SiRNA target sequence
taatgccgctgcacacatatttcttaa

SEQ ID NO: 251910 - DNA, 27 bp, Artificial sequence
  SiRNA target sequence
aatgccgctgcacacatatttcttaaa

SEQ ID NO: 251911 - DNA, 27 bp, Artificial sequence
  SiRNA target sequence
atgccgctgcacacatatttcttaaaa

SEQ ID NO: 251912 - DNA, 27 bp, Artificial sequence
  SiRNA target sequence
tgccgctgcacacatatttcttaaaaa

SEQ ID NO: 251913 - DNA, 27 bp, Artificial sequence
  SiRNA target sequence
gccgctgcacacatatttcttaaaaat

SEQ ID NO: 251914 - DNA, 27 bp, Artificial sequence
  SiRNA target sequence
ccgctgcacacatatttcttaaaaatt

SEQ ID NO: 251915 - DNA, 27 bp, Artificial sequence
  SiRNA target sequence
cgctgcacacatatttcttaaaaattt

SEQ ID NO: 251916 - DNA, 27 bp, Artificial sequence
  SiRNA target sequence
gctgcacacatatttcttaaaaatttg

SEQ ID NO: 251917 - DNA, 27 bp, Artificial sequence
  SiRNA target sequence
ctgcacacatatttcttaaaaatttgg

SEQ ID NO: 251918 - DNA, 27 bp, Artificial sequence
  SiRNA target sequence
tgcacacatatttcttaaaaatttgga

SEQ ID NO: 251919 - DNA, 27 bp, Artificial sequence
  SiRNA target sequence
gcacacatatttcttaaaaatttggat

SEQ ID NO: 251920 - DNA, 27 bp, Artificial sequence
  SiRNA target sequence
cacacatatttcttaaaaatttggatt

SEQ ID NO: 251921 - DNA, 27 bp, Artificial sequence
  SiRNA target sequence
acacatatttcttaaaaatttggattg

SEQ ID NO: 251922 - DNA, 27 bp, Artificial sequence
  SiRNA target sequence
cacatatttcttaaaaatttggattgt

SEQ ID NO: 251923 - DNA, 27 bp, Artificial sequence
  SiRNA target sequence
acatatttcttaaaaatttggattgta

SEQ ID NO: 251924 - DNA, 27 bp, Artificial sequence
  SiRNA target sequence
catatttcttaaaaatttggattgtaa

SEQ ID NO: 251925 - DNA, 27 bp, Artificial sequence
  SiRNA target sequence
atatttcttaaaaatttggattgtaaa

SEQ ID NO: 251926 - DNA, 27 bp, Artificial sequence
  SiRNA target sequence
tatttcttaaaaatttggattgtaaaa

SEQ ID NO: 251927 - DNA, 27 bp, Artificial sequence
  SiRNA target sequence
atttcttaaaaatttggattgtaaaag

SEQ ID NO: 251928 - DNA, 27 bp, Artificial sequence
  SiRNA target sequence
tttcttaaaaatttggattgtaaaaga

SEQ ID NO: 251929 - DNA, 27 bp, Artificial sequence
  SiRNA target sequence
ttcttaaaaatttggattgtaaaagat

SEQ ID NO: 251930 - DNA, 27 bp, Artificial sequence
  SiRNA target sequence
tcttaaaaatttggattgtaaaagatc

SEQ ID NO: 251931 - DNA, 27 bp, Artificial sequence
  SiRNA target sequence
cttaaaaatttggattgtaaaagatca

SEQ ID NO: 251932 - DNA, 27 bp, Artificial sequence
  SiRNA target sequence
ttaaaaatttggattgtaaaagatcaa

SEQ ID NO: 251933 - DNA, 27 bp, Artificial sequence
  SiRNA target sequence
taaaaatttggattgtaaaagatcaaa

SEQ ID NO: 251934 - DNA, 27 bp, Artificial sequence
  SiRNA target sequence
aaaaatttggattgtaaaagatcaaac

SEQ ID NO: 251935 - DNA, 27 bp, Artificial sequence
  SiRNA target sequence
aaaatttggattgtaaaagatcaaacg

SEQ ID NO: 251936 - DNA, 27 bp, Artificial sequence
  SiRNA target sequence
aaatttggattgtaaaagatcaaacga

SEQ ID NO: 251937 - DNA, 27 bp, Artificial sequence
  SiRNA target sequence
aatttggattgtaaaagatcaaacgag

SEQ ID NO: 251938 - DNA, 27 bp, Artificial sequence
  SiRNA target sequence
atttggattgtaaaagatcaaacgagg

SEQ ID NO: 251939 - DNA, 27 bp, Artificial sequence
  SiRNA target sequence
tttggattgtaaaagatcaaacgagga

SEQ ID NO: 251940 - DNA, 27 bp, Artificial sequence
  SiRNA target sequence
ttggattgtaaaagatcaaacgaggat

SEQ ID NO: 251941 - DNA, 27 bp, Artificial sequence
  SiRNA target sequence
tggattgtaaaagatcaaacgaggatg

SEQ ID NO: 251942 - DNA, 27 bp, Artificial sequence
  SiRNA target sequence
ggattgtaaaagatcaaacgaggatgt

SEQ ID NO: 251943 - DNA, 27 bp, Artificial sequence
  SiRNA target sequence
gattgtaaaagatcaaacgaggatgtc

SEQ ID NO: 251944 - DNA, 27 bp, Artificial sequence
  SiRNA target sequence
attgtaaaagatcaaacgaggatgtcg

SEQ ID NO: 251945 - DNA, 27 bp, Artificial sequence
  SiRNA target sequence
ttgtaaaagatcaaacgaggatgtcgt

SEQ ID NO: 251946 - DNA, 27 bp, Artificial sequence
  SiRNA target sequence
tgtaaaagatcaaacgaggatgtcgtt

SEQ ID NO: 251947 - DNA, 27 bp, Artificial sequence
  SiRNA target sequence
gtaaaagatcaaacgaggatgtcgttt

SEQ ID NO: 251948 - DNA, 27 bp, Artificial sequence
  SiRNA target sequence
taaaagatcaaacgaggatgtcgtttt

SEQ ID NO: 251949 - DNA, 27 bp, Artificial sequence
  SiRNA target sequence
aaaagatcaaacgaggatgtcgttttg

SEQ ID NO: 251950 - DNA, 27 bp, Artificial sequence
  SiRNA target sequence
aaagatcaaacgaggatgtcgttttgt

SEQ ID NO: 251951 - DNA, 27 bp, Artificial sequence
  SiRNA target sequence
aagatcaaacgaggatgtcgttttgtc

SEQ ID NO: 251952 - DNA, 27 bp, Artificial sequence
  SiRNA target sequence
agatcaaacgaggatgtcgttttgtct

SEQ ID NO: 251953 - DNA, 27 bp, Artificial sequence
  SiRNA target sequence
gatcaaacgaggatgtcgttttgtctt

SEQ ID NO: 251954 - DNA, 27 bp, Artificial sequence
  SiRNA target sequence
atcaaacgaggatgtcgttttgtcttc

SEQ ID NO: 251955 - DNA, 27 bp, Artificial sequence
  SiRNA target sequence
tcaaacgaggatgtcgttttgtcttct

SEQ ID NO: 251956 - DNA, 27 bp, Artificial sequence
  SiRNA target sequence
caaacgaggatgtcgttttgtcttctt

SEQ ID NO: 251957 - DNA, 27 bp, Artificial sequence
  SiRNA target sequence
aaacgaggatgtcgttttgtcttcttc

SEQ ID NO: 251958 - DNA, 27 bp, Artificial sequence
  SiRNA target sequence
aacgaggatgtcgttttgtcttcttct

SEQ ID NO: 251959 - DNA, 27 bp, Artificial sequence
  SiRNA target sequence
acgaggatgtcgttttgtcttcttctt

SEQ ID NO: 251960 - DNA, 27 bp, Artificial sequence
  SiRNA target sequence
cgaggatgtcgttttgtcttcttcttt

SEQ ID NO: 251961 - DNA, 27 bp, Artificial sequence
  SiRNA target sequence
gaggatgtcgttttgtcttcttcttta

SEQ ID NO: 251962 - DNA, 27 bp, Artificial sequence
  SiRNA target sequence
aggatgtcgttttgtcttcttctttat

SEQ ID NO: 251963 - DNA, 27 bp, Artificial sequence
  SiRNA target sequence
ggatgtcgttttgtcttcttctttatt

SEQ ID NO: 251964 - DNA, 27 bp, Artificial sequence
  SiRNA target sequence
gatgtcgttttgtcttcttctttattt

SEQ ID NO: 251965 - DNA, 27 bp, Artificial sequence
  SiRNA target sequence
atgtcgttttgtcttcttctttattta

SEQ ID NO: 251966 - DNA, 27 bp, Artificial sequence
  SiRNA target sequence
tgtcgttttgtcttcttctttatttat

SEQ ID NO: 251967 - DNA, 27 bp, Artificial sequence
  SiRNA target sequence
gtcgttttgtcttcttctttatttata

SEQ ID NO: 251968 - DNA, 27 bp, Artificial sequence
  SiRNA target sequence
tcgttttgtcttcttctttatttatag

SEQ ID NO: 251969 - DNA, 27 bp, Artificial sequence
  SiRNA target sequence
cgttttgtcttcttctttatttatagt

SEQ ID NO: 251970 - DNA, 27 bp, Artificial sequence
  SiRNA target sequence
gttttgtcttcttctttatttatagtt

SEQ ID NO: 251971 - DNA, 27 bp, Artificial sequence
  SiRNA target sequence
ttttgtcttcttctttatttatagttt

SEQ ID NO: 251972 - DNA, 27 bp, Artificial sequence
  SiRNA target sequence
tttgtcttcttctttatttatagtttc

SEQ ID NO: 251973 - DNA, 27 bp, Artificial sequence
  SiRNA target sequence
ttgtcttcttctttatttatagtttcc

SEQ ID NO: 251974 - DNA, 27 bp, Artificial sequence
  SiRNA target sequence
tgtcttcttctttatttatagtttcct

SEQ ID NO: 251975 - DNA, 27 bp, Artificial sequence
  SiRNA target sequence
gtcttcttctttatttatagtttcctt

SEQ ID NO: 251976 - DNA, 27 bp, Artificial sequence
  SiRNA target sequence
tcttcttctttatttatagtttccttt

SEQ ID NO: 251977 - DNA, 27 bp, Artificial sequence
  SiRNA target sequence
cttcttctttatttatagtttccttta

SEQ ID NO: 251978 - DNA, 27 bp, Artificial sequence
  SiRNA target sequence
ttcttctttatttatagtttcctttat

SEQ ID NO: 251979 - DNA, 27 bp, Artificial sequence
  SiRNA target sequence
tcttctttatttatagtttcctttatt

SEQ ID NO: 251980 - DNA, 27 bp, Artificial sequence
  SiRNA target sequence
cttctttatttatagtttcctttattt

SEQ ID NO: 251981 - DNA, 27 bp, Artificial sequence
  SiRNA target sequence
ttctttatttatagtttcctttatttc

SEQ ID NO: 251982 - DNA, 27 bp, Artificial sequence
  SiRNA target sequence
tctttatttatagtttcctttatttct

SEQ ID NO: 251983 - DNA, 27 bp, Artificial sequence
  SiRNA target sequence
ctttatttatagtttcctttatttctt

SEQ ID NO: 251984 - DNA, 27 bp, Artificial sequence
  SiRNA target sequence
tttatttatagtttcctttatttcttt

SEQ ID NO: 251985 - DNA, 27 bp, Artificial sequence
  SiRNA target sequence
ttatttatagtttcctttatttcttta

SEQ ID NO: 251986 - DNA, 27 bp, Artificial sequence
  SiRNA target sequence
tatttatagtttcctttatttctttag

SEQ ID NO: 251987 - DNA, 27 bp, Artificial sequence
  SiRNA target sequence
atttatagtttcctttatttctttagt

SEQ ID NO: 251988 - DNA, 27 bp, Artificial sequence
  SiRNA target sequence
tttatagtttcctttatttctttagtt

SEQ ID NO: 251989 - DNA, 27 bp, Artificial sequence
  SiRNA target sequence
ttatagtttcctttatttctttagttt

SEQ ID NO: 251990 - DNA, 27 bp, Artificial sequence
  SiRNA target sequence
tatagtttcctttatttctttagtttt

SEQ ID NO: 251991 - DNA, 27 bp, Artificial sequence
  SiRNA target sequence
atagtttcctttatttctttagtttta

SEQ ID NO: 251992 - DNA, 27 bp, Artificial sequence
  SiRNA target sequence
tagtttcctttatttctttagttttaa

SEQ ID NO: 251993 - DNA, 27 bp, Artificial sequence
  SiRNA target sequence
agtttcctttatttctttagttttaag

SEQ ID NO: 251994 - DNA, 27 bp, Artificial sequence
  SiRNA target sequence
gtttcctttatttctttagttttaaga

SEQ ID NO: 251995 - DNA, 27 bp, Artificial sequence
  SiRNA target sequence
tttcctttatttctttagttttaagag

SEQ ID NO: 251996 - DNA, 27 bp, Artificial sequence
  SiRNA target sequence
ttcctttatttctttagttttaagagg

SEQ ID NO: 251997 - DNA, 27 bp, Artificial sequence
  SiRNA target sequence
tcctttatttctttagttttaagagga

SEQ ID NO: 251998 - DNA, 27 bp, Artificial sequence
  SiRNA target sequence
cctttatttctttagttttaagaggaa

SEQ ID NO: 251999 - DNA, 27 bp, Artificial sequence
  SiRNA target sequence
ctttatttctttagttttaagaggaat

SEQ ID NO: 252000 - DNA, 27 bp, Artificial sequence
  SiRNA target sequence
tttatttctttagttttaagaggaata

SEQ ID NO: 252001 - DNA, 27 bp, Artificial sequence
  SiRNA target sequence
ttatttctttagttttaagaggaatat

SEQ ID NO: 252002 - DNA, 27 bp, Artificial sequence
  SiRNA target sequence
tatttctttagttttaagaggaatata

SEQ ID NO: 252003 - DNA, 27 bp, Artificial sequence
  SiRNA target sequence
atttctttagttttaagaggaatataa

SEQ ID NO: 252004 - DNA, 27 bp, Artificial sequence
  SiRNA target sequence
tttctttagttttaagaggaatataac

SEQ ID NO: 252005 - DNA, 27 bp, Artificial sequence
  SiRNA target sequence
ttctttagttttaagaggaatataact

SEQ ID NO: 252006 - DNA, 27 bp, Artificial sequence
  SiRNA target sequence
tctttagttttaagaggaatataactt

SEQ ID NO: 252007 - DNA, 27 bp, Artificial sequence
  SiRNA target sequence
ctttagttttaagaggaatataacttt

SEQ ID NO: 252008 - DNA, 27 bp, Artificial sequence
  SiRNA target sequence
tttagttttaagaggaatataactttt

SEQ ID NO: 252009 - DNA, 27 bp, Artificial sequence
  SiRNA target sequence
ttagttttaagaggaatataacttttt

SEQ ID NO: 252010 - DNA, 27 bp, Artificial sequence
  SiRNA target sequence
tagttttaagaggaatataacttttta

SEQ ID NO: 252011 - DNA, 27 bp, Artificial sequence
  SiRNA target sequence
agttttaagaggaatataactttttaa

SEQ ID NO: 252012 - DNA, 27 bp, Artificial sequence
  SiRNA target sequence
gttttaagaggaatataactttttaaa

SEQ ID NO: 252013 - DNA, 27 bp, Artificial sequence
  SiRNA target sequence
ttttaagaggaatataactttttaaaa

SEQ ID NO: 252014 - DNA, 27 bp, Artificial sequence
  SiRNA target sequence
tttaagaggaatataactttttaaaaa

SEQ ID NO: 252015 - DNA, 27 bp, Artificial sequence
  SiRNA target sequence
ttaagaggaatataactttttaaaaag

SEQ ID NO: 252016 - DNA, 27 bp, Artificial sequence
  SiRNA target sequence
taagaggaatataactttttaaaaagt

SEQ ID NO: 252017 - DNA, 27 bp, Artificial sequence
  SiRNA target sequence
aagaggaatataactttttaaaaagta

SEQ ID NO: 252018 - DNA, 27 bp, Artificial sequence
  SiRNA target sequence
agaggaatataactttttaaaaagtaa

SEQ ID NO: 252019 - DNA, 27 bp, Artificial sequence
  SiRNA target sequence
gaggaatataactttttaaaaagtaaa

SEQ ID NO: 252020 - DNA, 27 bp, Artificial sequence
  SiRNA target sequence
aggaatataactttttaaaaagtaaat

SEQ ID NO: 252021 - DNA, 27 bp, Artificial sequence
  SiRNA target sequence
ggaatataactttttaaaaagtaaatt

SEQ ID NO: 252022 - DNA, 27 bp, Artificial sequence
  SiRNA target sequence
gaatataactttttaaaaagtaaatta

SEQ ID NO: 252023 - DNA, 27 bp, Artificial sequence
  SiRNA target sequence
aatataactttttaaaaagtaaattaa

SEQ ID NO: 252024 - DNA, 27 bp, Artificial sequence
  SiRNA target sequence
atataactttttaaaaagtaaattaat

SEQ ID NO: 252025 - DNA, 27 bp, Artificial sequence
  SiRNA target sequence
tataactttttaaaaagtaaattaatg

SEQ ID NO: 252026 - DNA, 27 bp, Artificial sequence
  SiRNA target sequence
ataactttttaaaaagtaaattaatgt

SEQ ID NO: 252027 - DNA, 27 bp, Artificial sequence
  SiRNA target sequence
taactttttaaaaagtaaattaatgta

SEQ ID NO: 252028 - DNA, 27 bp, Artificial sequence
  SiRNA target sequence
aactttttaaaaagtaaattaatgtag

SEQ ID NO: 252029 - DNA, 27 bp, Artificial sequence
  SiRNA target sequence
actttttaaaaagtaaattaatgtagt

SEQ ID NO: 252030 - DNA, 27 bp, Artificial sequence
  SiRNA target sequence
ctttttaaaaagtaaattaatgtagtt

SEQ ID NO: 252031 - DNA, 27 bp, Artificial sequence
  SiRNA target sequence
tttttaaaaagtaaattaatgtagtta

SEQ ID NO: 252032 - DNA, 27 bp, Artificial sequence
  SiRNA target sequence
ttttaaaaagtaaattaatgtagttac

SEQ ID NO: 252033 - DNA, 27 bp, Artificial sequence
  SiRNA target sequence
tttaaaaagtaaattaatgtagttaca

SEQ ID NO: 252034 - DNA, 27 bp, Artificial sequence
  SiRNA target sequence
ttaaaaagtaaattaatgtagttacaa

SEQ ID NO: 252035 - DNA, 27 bp, Artificial sequence
  SiRNA target sequence
taaaaagtaaattaatgtagttacaaa

SEQ ID NO: 252036 - DNA, 27 bp, Artificial sequence
  SiRNA target sequence
aaaaagtaaattaatgtagttacaaaa

SEQ ID NO: 252037 - DNA, 27 bp, Artificial sequence
  SiRNA target sequence
aaaagtaaattaatgtagttacaaaag

SEQ ID NO: 252038 - DNA, 27 bp, Artificial sequence
  SiRNA target sequence
aaagtaaattaatgtagttacaaaaga

SEQ ID NO: 252039 - DNA, 27 bp, Artificial sequence
  SiRNA target sequence
aagtaaattaatgtagttacaaaagac

SEQ ID NO: 252040 - DNA, 27 bp, Artificial sequence
  SiRNA target sequence
agtaaattaatgtagttacaaaagaca

SEQ ID NO: 252041 - DNA, 27 bp, Artificial sequence
  SiRNA target sequence
gtaaattaatgtagttacaaaagacaa

SEQ ID NO: 252042 - DNA, 27 bp, Artificial sequence
  SiRNA target sequence
taaattaatgtagttacaaaagacaag

SEQ ID NO: 252043 - DNA, 27 bp, Artificial sequence
  SiRNA target sequence
aaattaatgtagttacaaaagacaaga

SEQ ID NO: 252044 - DNA, 27 bp, Artificial sequence
  SiRNA target sequence
aattaatgtagttacaaaagacaagat

SEQ ID NO: 252045 - DNA, 27 bp, Artificial sequence
  SiRNA target sequence
attaatgtagttacaaaagacaagatc

SEQ ID NO: 252046 - DNA, 27 bp, Artificial sequence
  SiRNA target sequence
ttaatgtagttacaaaagacaagatca

SEQ ID NO: 252047 - DNA, 27 bp, Artificial sequence
  SiRNA target sequence
taatgtagttacaaaagacaagatcaa

SEQ ID NO: 252048 - DNA, 27 bp, Artificial sequence
  SiRNA target sequence
aatgtagttacaaaagacaagatcaaa

SEQ ID NO: 252049 - DNA, 27 bp, Artificial sequence
  SiRNA target sequence
atgtagttacaaaagacaagatcaaaa

SEQ ID NO: 252050 - DNA, 27 bp, Artificial sequence
  SiRNA target sequence
tgtagttacaaaagacaagatcaaaaa

SEQ ID NO: 252051 - DNA, 27 bp, Artificial sequence
  SiRNA target sequence
gtagttacaaaagacaagatcaaaaaa

SEQ ID NO: 252052 - DNA, 27 bp, Artificial sequence
  SiRNA target sequence
tagttacaaaagacaagatcaaaaaaa

SEQ ID NO: 252053 - DNA, 27 bp, Artificial sequence
  SiRNA target sequence
agttacaaaagacaagatcaaaaaaaa

SEQ ID NO: 252054 - DNA, 27 bp, Artificial sequence
  SiRNA target sequence
gttacaaaagacaagatcaaaaaaaac

SEQ ID NO: 252055 - DNA, 27 bp, Artificial sequence
  SiRNA target sequence
ttacaaaagacaagatcaaaaaaaaca

SEQ ID NO: 252056 - DNA, 27 bp, Artificial sequence
  SiRNA target sequence
tacaaaagacaagatcaaaaaaaacaa

SEQ ID NO: 252057 - DNA, 27 bp, Artificial sequence
  SiRNA target sequence
acaaaagacaagatcaaaaaaaacaaa

SEQ ID NO: 252058 - DNA, 27 bp, Artificial sequence
  SiRNA target sequence
caaaagacaagatcaaaaaaaacaaac

SEQ ID NO: 252059 - DNA, 27 bp, Artificial sequence
  SiRNA target sequence
aaaagacaagatcaaaaaaaacaaact

SEQ ID NO: 252060 - DNA, 27 bp, Artificial sequence
  SiRNA target sequence
aaagacaagatcaaaaaaaacaaacta

SEQ ID NO: 252061 - DNA, 27 bp, Artificial sequence
  SiRNA target sequence
aagacaagatcaaaaaaaacaaactac

SEQ ID NO: 252062 - DNA, 27 bp, Artificial sequence
  SiRNA target sequence
agacaagatcaaaaaaaacaaactact

SEQ ID NO: 252063 - DNA, 27 bp, Artificial sequence
  SiRNA target sequence
gacaagatcaaaaaaaacaaactacta

SEQ ID NO: 252064 - DNA, 27 bp, Artificial sequence
  SiRNA target sequence
acaagatcaaaaaaaacaaactactac

SEQ ID NO: 252065 - DNA, 27 bp, Artificial sequence
  SiRNA target sequence
caagatcaaaaaaaacaaactactacc

SEQ ID NO: 252066 - DNA, 27 bp, Artificial sequence
  SiRNA target sequence
aagatcaaaaaaaacaaactactaccg

SEQ ID NO: 252067 - DNA, 27 bp, Artificial sequence
  SiRNA target sequence
agatcaaaaaaaacaaactactaccgt

SEQ ID NO: 252068 - DNA, 27 bp, Artificial sequence
  SiRNA target sequence
gatcaaaaaaaacaaactactaccgtc

SEQ ID NO: 252069 - DNA, 27 bp, Artificial sequence
  SiRNA target sequence
atcaaaaaaaacaaactactaccgtca

SEQ ID NO: 252070 - DNA, 27 bp, Artificial sequence
  SiRNA target sequence
tcaaaaaaaacaaactactaccgtcaa

SEQ ID NO: 252071 - DNA, 27 bp, Artificial sequence
  SiRNA target sequence
caaaaaaaacaaactactaccgtcaat

SEQ ID NO: 252072 - DNA, 27 bp, Artificial sequence
  SiRNA target sequence
aaaaaaaacaaactactaccgtcaatt

SEQ ID NO: 252073 - DNA, 27 bp, Artificial sequence
  SiRNA target sequence
aaaaaaacaaactactaccgtcaattt

SEQ ID NO: 252074 - DNA, 27 bp, Artificial sequence
  SiRNA target sequence
aaaaaacaaactactaccgtcaatttt

SEQ ID NO: 252075 - DNA, 27 bp, Artificial sequence
  SiRNA target sequence
aaaaacaaactactaccgtcaatttta

SEQ ID NO: 252076 - DNA, 27 bp, Artificial sequence
  SiRNA target sequence
aaaacaaactactaccgtcaattttat

SEQ ID NO: 252077 - DNA, 27 bp, Artificial sequence
  SiRNA target sequence
aaacaaactactaccgtcaattttatc

SEQ ID NO: 252078 - DNA, 27 bp, Artificial sequence
  SiRNA target sequence
aacaaactactaccgtcaattttatca

SEQ ID NO: 252079 - DNA, 27 bp, Artificial sequence
  SiRNA target sequence
acaaactactaccgtcaattttatcat

SEQ ID NO: 252080 - DNA, 27 bp, Artificial sequence
  SiRNA target sequence
caaactactaccgtcaattttatcatg

SEQ ID NO: 252081 - DNA, 27 bp, Artificial sequence
  SiRNA target sequence
aaactactaccgtcaattttatcatgc

SEQ ID NO: 252082 - DNA, 27 bp, Artificial sequence
  SiRNA target sequence
aactactaccgtcaattttatcatgca

SEQ ID NO: 252083 - DNA, 27 bp, Artificial sequence
  SiRNA target sequence
actactaccgtcaattttatcatgcaa

SEQ ID NO: 252084 - DNA, 27 bp, Artificial sequence
  SiRNA target sequence
ctactaccgtcaattttatcatgcaaa

SEQ ID NO: 252085 - DNA, 27 bp, Artificial sequence
  SiRNA target sequence
tactaccgtcaattttatcatgcaaac

SEQ ID NO: 252086 - DNA, 27 bp, Artificial sequence
  SiRNA target sequence
actaccgtcaattttatcatgcaaacc

SEQ ID NO: 252087 - DNA, 27 bp, Artificial sequence
  SiRNA target sequence
ctaccgtcaattttatcatgcaaacct

SEQ ID NO: 252088 - DNA, 27 bp, Artificial sequence
  SiRNA target sequence
taccgtcaattttatcatgcaaacctg

SEQ ID NO: 252089 - DNA, 27 bp, Artificial sequence
  SiRNA target sequence
accgtcaattttatcatgcaaacctgc

SEQ ID NO: 252090 - DNA, 27 bp, Artificial sequence
  SiRNA target sequence
ccgtcaattttatcatgcaaacctgca

SEQ ID NO: 252091 - DNA, 27 bp, Artificial sequence
  SiRNA target sequence
cgtcaattttatcatgcaaacctgcag

SEQ ID NO: 252092 - DNA, 27 bp, Artificial sequence
  SiRNA target sequence
gtcaattttatcatgcaaacctgcagg

SEQ ID NO: 252093 - DNA, 27 bp, Artificial sequence
  SiRNA target sequence
tcaattttatcatgcaaacctgcagga

SEQ ID NO: 252094 - DNA, 27 bp, Artificial sequence
  SiRNA target sequence
caattttatcatgcaaacctgcaggaa

SEQ ID NO: 252095 - DNA, 27 bp, Artificial sequence
  SiRNA target sequence
aattttatcatgcaaacctgcaggaag

SEQ ID NO: 252096 - DNA, 27 bp, Artificial sequence
  SiRNA target sequence
attttatcatgcaaacctgcaggaagt

SEQ ID NO: 252097 - DNA, 27 bp, Artificial sequence
  SiRNA target sequence
ttttatcatgcaaacctgcaggaagta

SEQ ID NO: 252098 - DNA, 27 bp, Artificial sequence
  SiRNA target sequence
tttatcatgcaaacctgcaggaagtat

SEQ ID NO: 252099 - DNA, 27 bp, Artificial sequence
  SiRNA target sequence
ttatcatgcaaacctgcaggaagtata

SEQ ID NO: 252100 - DNA, 27 bp, Artificial sequence
  SiRNA target sequence
tatcatgcaaacctgcaggaagtatat

SEQ ID NO: 252101 - DNA, 27 bp, Artificial sequence
  SiRNA target sequence
atcatgcaaacctgcaggaagtatatt

SEQ ID NO: 252102 - DNA, 27 bp, Artificial sequence
  SiRNA target sequence
tcatgcaaacctgcaggaagtatattt

SEQ ID NO: 252103 - DNA, 27 bp, Artificial sequence
  SiRNA target sequence
catgcaaacctgcaggaagtatatttg

SEQ ID NO: 252104 - DNA, 27 bp, Artificial sequence
  SiRNA target sequence
atgcaaacctgcaggaagtatatttgc

SEQ ID NO: 252105 - DNA, 27 bp, Artificial sequence
  SiRNA target sequence
tgcaaacctgcaggaagtatatttgct

SEQ ID NO: 252106 - DNA, 27 bp, Artificial sequence
  SiRNA target sequence
gcaaacctgcaggaagtatatttgcta

SEQ ID NO: 252107 - DNA, 27 bp, Artificial sequence
  SiRNA target sequence
caaacctgcaggaagtatatttgctaa

SEQ ID NO: 252108 - DNA, 27 bp, Artificial sequence
  SiRNA target sequence
aaacctgcaggaagtatatttgctaat

SEQ ID NO: 252109 - DNA, 27 bp, Artificial sequence
  SiRNA target sequence
aacctgcaggaagtatatttgctaatt

SEQ ID NO: 252110 - DNA, 27 bp, Artificial sequence
  SiRNA target sequence
acctgcaggaagtatatttgctaattc

SEQ ID NO: 252111 - DNA, 27 bp, Artificial sequence
  SiRNA target sequence
cctgcaggaagtatatttgctaattca

SEQ ID NO: 252112 - DNA, 27 bp, Artificial sequence
  SiRNA target sequence
ctgcaggaagtatatttgctaattcat

SEQ ID NO: 252113 - DNA, 27 bp, Artificial sequence
  SiRNA target sequence
tgcaggaagtatatttgctaattcatc

SEQ ID NO: 252114 - DNA, 27 bp, Artificial sequence
  SiRNA target sequence
gcaggaagtatatttgctaattcatct

SEQ ID NO: 252115 - DNA, 27 bp, Artificial sequence
  SiRNA target sequence
caggaagtatatttgctaattcatctt

SEQ ID NO: 252116 - DNA, 27 bp, Artificial sequence
  SiRNA target sequence
aggaagtatatttgctaattcatcttt

SEQ ID NO: 252117 - DNA, 27 bp, Artificial sequence
  SiRNA target sequence
ggaagtatatttgctaattcatctttt

SEQ ID NO: 252118 - DNA, 27 bp, Artificial sequence
  SiRNA target sequence
gaagtatatttgctaattcatctttta

SEQ ID NO: 252119 - DNA, 27 bp, Artificial sequence
  SiRNA target sequence
aagtatatttgctaattcatcttttat

SEQ ID NO: 252120 - DNA, 27 bp, Artificial sequence
  SiRNA target sequence
agtatatttgctaattcatcttttata

SEQ ID NO: 252121 - DNA, 27 bp, Artificial sequence
  SiRNA target sequence
gtatatttgctaattcatcttttatat

SEQ ID NO: 252122 - DNA, 27 bp, Artificial sequence
  SiRNA target sequence
tatatttgctaattcatcttttatata

SEQ ID NO: 252123 - DNA, 27 bp, Artificial sequence
  SiRNA target sequence
atatttgctaattcatcttttatataa

SEQ ID NO: 252124 - DNA, 27 bp, Artificial sequence
  SiRNA target sequence
tatttgctaattcatcttttatataaa

SEQ ID NO: 252125 - DNA, 27 bp, Artificial sequence
  SiRNA target sequence
atttgctaattcatcttttatataaat

SEQ ID NO: 252126 - DNA, 27 bp, Artificial sequence
  SiRNA target sequence
tttgctaattcatcttttatataaata

SEQ ID NO: 252127 - DNA, 27 bp, Artificial sequence
  SiRNA target sequence
ttgctaattcatcttttatataaataa

SEQ ID NO: 252128 - DNA, 27 bp, Artificial sequence
  SiRNA target sequence
tgctaattcatcttttatataaataaa

SEQ ID NO: 252129 - DNA, 27 bp, Artificial sequence
  SiRNA target sequence
gctaattcatcttttatataaataaaa

SEQ ID NO: 252130 - DNA, 27 bp, Artificial sequence
  SiRNA target sequence
ctaattcatcttttatataaataaaag

SEQ ID NO: 252131 - DNA, 27 bp, Artificial sequence
  SiRNA target sequence
taattcatcttttatataaataaaagc

SEQ ID NO: 252132 - DNA, 27 bp, Artificial sequence
  SiRNA target sequence
aattcatcttttatataaataaaagct

SEQ ID NO: 252133 - DNA, 27 bp, Artificial sequence
  SiRNA target sequence
attcatcttttatataaataaaagcta

SEQ ID NO: 252134 - DNA, 27 bp, Artificial sequence
  SiRNA target sequence
ttcatcttttatataaataaaagctac

SEQ ID NO: 252135 - DNA, 27 bp, Artificial sequence
  SiRNA target sequence
tcatcttttatataaataaaagctaca

SEQ ID NO: 252136 - DNA, 27 bp, Artificial sequence
  SiRNA target sequence
catcttttatataaataaaagctacag

SEQ ID NO: 252137 - DNA, 27 bp, Artificial sequence
  SiRNA target sequence
atcttttatataaataaaagctacaga

SEQ ID NO: 252138 - DNA, 27 bp, Artificial sequence
  SiRNA target sequence
tcttttatataaataaaagctacagaa

SEQ ID NO: 252139 - DNA, 27 bp, Artificial sequence
  SiRNA target sequence
cttttatataaataaaagctacagaaa

SEQ ID NO: 252140 - DNA, 27 bp, Artificial sequence
  SiRNA target sequence
ttttatataaataaaagctacagaaat

SEQ ID NO: 252141 - DNA, 27 bp, Artificial sequence
  SiRNA target sequence
tttatataaataaaagctacagaaata

SEQ ID NO: 252142 - DNA, 27 bp, Artificial sequence
  SiRNA target sequence
ttatataaataaaagctacagaaataa

SEQ ID NO: 252143 - DNA, 27 bp, Artificial sequence
  SiRNA target sequence
tatataaataaaagctacagaaataat

SEQ ID NO: 252144 - DNA, 27 bp, Artificial sequence
  SiRNA target sequence
atataaataaaagctacagaaataatc

SEQ ID NO: 252145 - DNA, 27 bp, Artificial sequence
  SiRNA target sequence
tataaataaaagctacagaaataatca

SEQ ID NO: 252146 - DNA, 27 bp, Artificial sequence
  SiRNA target sequence
ataaataaaagctacagaaataatcat

SEQ ID NO: 252147 - DNA, 27 bp, Artificial sequence
  SiRNA target sequence
taaataaaagctacagaaataatcatt

SEQ ID NO: 252148 - DNA, 27 bp, Artificial sequence
  SiRNA target sequence
aaataaaagctacagaaataatcattg

SEQ ID NO: 252149 - DNA, 27 bp, Artificial sequence
  SiRNA target sequence
aataaaagctacagaaataatcattga

SEQ ID NO: 252150 - DNA, 27 bp, Artificial sequence
  SiRNA target sequence
ataaaagctacagaaataatcattgaa

SEQ ID NO: 252151 - DNA, 27 bp, Artificial sequence
  SiRNA target sequence
taaaagctacagaaataatcattgaaa

SEQ ID NO: 252152 - DNA, 27 bp, Artificial sequence
  SiRNA target sequence
aaaagctacagaaataatcattgaaat

SEQ ID NO: 252153 - DNA, 27 bp, Artificial sequence
  SiRNA target sequence
aaagctacagaaataatcattgaaatg

SEQ ID NO: 252154 - DNA, 27 bp, Artificial sequence
  SiRNA target sequence
aagctacagaaataatcattgaaatgg

SEQ ID NO: 252155 - DNA, 27 bp, Artificial sequence
  SiRNA target sequence
agctacagaaataatcattgaaatggc

SEQ ID NO: 252156 - DNA, 27 bp, Artificial sequence
  SiRNA target sequence
gctacagaaataatcattgaaatggcg

SEQ ID NO: 252157 - DNA, 27 bp, Artificial sequence
  SiRNA target sequence
ctacagaaataatcattgaaatggcgg

SEQ ID NO: 252158 - DNA, 27 bp, Artificial sequence
  SiRNA target sequence
tacagaaataatcattgaaatggcggt

SEQ ID NO: 252159 - DNA, 27 bp, Artificial sequence
  SiRNA target sequence
acagaaataatcattgaaatggcggtg

SEQ ID NO: 252160 - DNA, 27 bp, Artificial sequence
  SiRNA target sequence
cagaaataatcattgaaatggcggtga

SEQ ID NO: 252161 - DNA, 27 bp, Artificial sequence
  SiRNA target sequence
agaaataatcattgaaatggcggtgat

SEQ ID NO: 252162 - DNA, 27 bp, Artificial sequence
  SiRNA target sequence
gaaataatcattgaaatggcggtgatt

SEQ ID NO: 252163 - DNA, 27 bp, Artificial sequence
  SiRNA target sequence
aaataatcattgaaatggcggtgattg

SEQ ID NO: 252164 - DNA, 27 bp, Artificial sequence
  SiRNA target sequence
aataatcattgaaatggcggtgattgt

SEQ ID NO: 252165 - DNA, 27 bp, Artificial sequence
  SiRNA target sequence
ataatcattgaaatggcggtgattgtg

SEQ ID NO: 252166 - DNA, 27 bp, Artificial sequence
  SiRNA target sequence
taatcattgaaatggcggtgattgtgg

SEQ ID NO: 252167 - DNA, 27 bp, Artificial sequence
  SiRNA target sequence
aatcattgaaatggcggtgattgtgga

SEQ ID NO: 252168 - DNA, 27 bp, Artificial sequence
  SiRNA target sequence
atcattgaaatggcggtgattgtggaa

SEQ ID NO: 252169 - DNA, 27 bp, Artificial sequence
  SiRNA target sequence
tcattgaaatggcggtgattgtggaaa

SEQ ID NO: 252170 - DNA, 27 bp, Artificial sequence
  SiRNA target sequence
cattgaaatggcggtgattgtggaaaa

SEQ ID NO: 252171 - DNA, 27 bp, Artificial sequence
  SiRNA target sequence
attgaaatggcggtgattgtggaaaaa

SEQ ID NO: 252172 - DNA, 27 bp, Artificial sequence
  SiRNA target sequence
ttgaaatggcggtgattgtggaaaaat

SEQ ID NO: 252173 - DNA, 27 bp, Artificial sequence
  SiRNA target sequence
tgaaatggcggtgattgtggaaaaatt

SEQ ID NO: 252174 - DNA, 27 bp, Artificial sequence
  SiRNA target sequence
gaaatggcggtgattgtggaaaaatta

SEQ ID NO: 252175 - DNA, 27 bp, Artificial sequence
  SiRNA target sequence
aaatggcggtgattgtggaaaaattag

SEQ ID NO: 252176 - DNA, 27 bp, Artificial sequence
  SiRNA target sequence
aatggcggtgattgtggaaaaattagg

SEQ ID NO: 252177 - DNA, 27 bp, Artificial sequence
  SiRNA target sequence
atggcggtgattgtggaaaaattagga

SEQ ID NO: 252178 - DNA, 27 bp, Artificial sequence
  SiRNA target sequence
tggcggtgattgtggaaaaattaggaa

SEQ ID NO: 252179 - DNA, 27 bp, Artificial sequence
  SiRNA target sequence
ggcggtgattgtggaaaaattaggaac

SEQ ID NO: 252180 - DNA, 27 bp, Artificial sequence
  SiRNA target sequence
gcggtgattgtggaaaaattaggaaca

SEQ ID NO: 252181 - DNA, 27 bp, Artificial sequence
  SiRNA target sequence
cggtgattgtggaaaaattaggaacaa

SEQ ID NO: 252182 - DNA, 27 bp, Artificial sequence
  SiRNA target sequence
ggtgattgtggaaaaattaggaacaat

SEQ ID NO: 252183 - DNA, 27 bp, Artificial sequence
  SiRNA target sequence
gtgattgtggaaaaattaggaacaatt

SEQ ID NO: 252184 - DNA, 27 bp, Artificial sequence
  SiRNA target sequence
tgattgtggaaaaattaggaacaattt

SEQ ID NO: 252185 - DNA, 27 bp, Artificial sequence
  SiRNA target sequence
gattgtggaaaaattaggaacaatttc

SEQ ID NO: 252186 - DNA, 27 bp, Artificial sequence
  SiRNA target sequence
attgtggaaaaattaggaacaatttct

SEQ ID NO: 252187 - DNA, 27 bp, Artificial sequence
  SiRNA target sequence
ttgtggaaaaattaggaacaatttctt

SEQ ID NO: 252188 - DNA, 27 bp, Artificial sequence
  SiRNA target sequence
tgtggaaaaattaggaacaatttcttt

SEQ ID NO: 252189 - DNA, 27 bp, Artificial sequence
  SiRNA target sequence
gtggaaaaattaggaacaatttctttc

SEQ ID NO: 252190 - DNA, 27 bp, Artificial sequence
  SiRNA target sequence
tggaaaaattaggaacaatttctttca

SEQ ID NO: 252191 - DNA, 27 bp, Artificial sequence
  SiRNA target sequence
ggaaaaattaggaacaatttctttcat

SEQ ID NO: 252192 - DNA, 27 bp, Artificial sequence
  SiRNA target sequence
gaaaaattaggaacaatttctttcatt

SEQ ID NO: 252193 - DNA, 27 bp, Artificial sequence
  SiRNA target sequence
aaaaattaggaacaatttctttcattt

SEQ ID NO: 252194 - DNA, 27 bp, Artificial sequence
  SiRNA target sequence
aaaattaggaacaatttctttcatttc

SEQ ID NO: 252195 - DNA, 27 bp, Artificial sequence
  SiRNA target sequence
aaattaggaacaatttctttcatttca

SEQ ID NO: 252196 - DNA, 27 bp, Artificial sequence
  SiRNA target sequence
aattaggaacaatttctttcatttcat

SEQ ID NO: 252197 - DNA, 27 bp, Artificial sequence
  SiRNA target sequence
attaggaacaatttctttcatttcatc

SEQ ID NO: 252198 - DNA, 27 bp, Artificial sequence
  SiRNA target sequence
ttaggaacaatttctttcatttcatct

SEQ ID NO: 252199 - DNA, 27 bp, Artificial sequence
  SiRNA target sequence
taggaacaatttctttcatttcatctt

SEQ ID NO: 252200 - DNA, 27 bp, Artificial sequence
  SiRNA target sequence
aggaacaatttctttcatttcatcttc

SEQ ID NO: 252201 - DNA, 27 bp, Artificial sequence
  SiRNA target sequence
ggaacaatttctttcatttcatcttct

SEQ ID NO: 252202 - DNA, 27 bp, Artificial sequence
  SiRNA target sequence
gaacaatttctttcatttcatcttctg

SEQ ID NO: 252203 - DNA, 27 bp, Artificial sequence
  SiRNA target sequence
aacaatttctttcatttcatcttctgt

SEQ ID NO: 252204 - DNA, 27 bp, Artificial sequence
  SiRNA target sequence
acaatttctttcatttcatcttctgta

SEQ ID NO: 252205 - DNA, 27 bp, Artificial sequence
  SiRNA target sequence
caatttctttcatttcatcttctgtac

SEQ ID NO: 252206 - DNA, 27 bp, Artificial sequence
  SiRNA target sequence
aatttctttcatttcatcttctgtaca

SEQ ID NO: 252207 - DNA, 27 bp, Artificial sequence
  SiRNA target sequence
atttctttcatttcatcttctgtacaa

SEQ ID NO: 252208 - DNA, 27 bp, Artificial sequence
  SiRNA target sequence
tttctttcatttcatcttctgtacaag

SEQ ID NO: 252209 - DNA, 27 bp, Artificial sequence
  SiRNA target sequence
ttctttcatttcatcttctgtacaagc

SEQ ID NO: 252210 - DNA, 27 bp, Artificial sequence
  SiRNA target sequence
tctttcatttcatcttctgtacaagca

SEQ ID NO: 252211 - DNA, 27 bp, Artificial sequence
  SiRNA target sequence
ctttcatttcatcttctgtacaagcat

SEQ ID NO: 252212 - DNA, 27 bp, Artificial sequence
  SiRNA target sequence
tttcatttcatcttctgtacaagcatg

SEQ ID NO: 252213 - DNA, 27 bp, Artificial sequence
  SiRNA target sequence
ttcatttcatcttctgtacaagcatga

SEQ ID NO: 252214 - DNA, 27 bp, Artificial sequence
  SiRNA target sequence
tcatttcatcttctgtacaagcatgat

SEQ ID NO: 252215 - DNA, 27 bp, Artificial sequence
  SiRNA target sequence
catttcatcttctgtacaagcatgatt

SEQ ID NO: 252216 - DNA, 27 bp, Artificial sequence
  SiRNA target sequence
atttcatcttctgtacaagcatgattg

SEQ ID NO: 252217 - DNA, 27 bp, Artificial sequence
  SiRNA target sequence
tttcatcttctgtacaagcatgattgg

SEQ ID NO: 252218 - DNA, 27 bp, Artificial sequence
  SiRNA target sequence
ttcatcttctgtacaagcatgattggc

SEQ ID NO: 252219 - DNA, 27 bp, Artificial sequence
  SiRNA target sequence
tcatcttctgtacaagcatgattggct

SEQ ID NO: 252220 - DNA, 27 bp, Artificial sequence
  SiRNA target sequence
catcttctgtacaagcatgattggcta

SEQ ID NO: 252221 - DNA, 27 bp, Artificial sequence
  SiRNA target sequence
atcttctgtacaagcatgattggctaa

SEQ ID NO: 252222 - DNA, 27 bp, Artificial sequence
  SiRNA target sequence
tcttctgtacaagcatgattggctaac

SEQ ID NO: 252223 - DNA, 27 bp, Artificial sequence
  SiRNA target sequence
cttctgtacaagcatgattggctaacg

SEQ ID NO: 252224 - DNA, 27 bp, Artificial sequence
  SiRNA target sequence
ttctgtacaagcatgattggctaacgc

SEQ ID NO: 252225 - DNA, 27 bp, Artificial sequence
  SiRNA target sequence
tctgtacaagcatgattggctaacgca

SEQ ID NO: 252226 - DNA, 27 bp, Artificial sequence
  SiRNA target sequence
ctgtacaagcatgattggctaacgcat

SEQ ID NO: 252227 - DNA, 27 bp, Artificial sequence
  SiRNA target sequence
tgtacaagcatgattggctaacgcata

SEQ ID NO: 252228 - DNA, 27 bp, Artificial sequence
  SiRNA target sequence
gtacaagcatgattggctaacgcatat

SEQ ID NO: 252229 - DNA, 27 bp, Artificial sequence
  SiRNA target sequence
tacaagcatgattggctaacgcatata

SEQ ID NO: 252230 - DNA, 27 bp, Artificial sequence
  SiRNA target sequence
acaagcatgattggctaacgcatataa

SEQ ID NO: 252231 - DNA, 27 bp, Artificial sequence
  SiRNA target sequence
caagcatgattggctaacgcatataaa

SEQ ID NO: 252232 - DNA, 27 bp, Artificial sequence
  SiRNA target sequence
aagcatgattggctaacgcatataaag

SEQ ID NO: 252233 - DNA, 27 bp, Artificial sequence
  SiRNA target sequence
agcatgattggctaacgcatataaagc

SEQ ID NO: 252234 - DNA, 27 bp, Artificial sequence
  SiRNA target sequence
gcatgattggctaacgcatataaagca

SEQ ID NO: 252235 - DNA, 27 bp, Artificial sequence
  SiRNA target sequence
catgattggctaacgcatataaagcaa

SEQ ID NO: 252236 - DNA, 27 bp, Artificial sequence
  SiRNA target sequence
atgattggctaacgcatataaagcaaa

SEQ ID NO: 252237 - DNA, 27 bp, Artificial sequence
  SiRNA target sequence
tgattggctaacgcatataaagcaaaa

SEQ ID NO: 252238 - DNA, 27 bp, Artificial sequence
  SiRNA target sequence
gattggctaacgcatataaagcaaaac

SEQ ID NO: 252239 - DNA, 27 bp, Artificial sequence
  SiRNA target sequence
attggctaacgcatataaagcaaaacc

SEQ ID NO: 252240 - DNA, 27 bp, Artificial sequence
  SiRNA target sequence
ttggctaacgcatataaagcaaaacca

SEQ ID NO: 252241 - DNA, 27 bp, Artificial sequence
  SiRNA target sequence
tggctaacgcatataaagcaaaaccaa

SEQ ID NO: 252242 - DNA, 27 bp, Artificial sequence
  SiRNA target sequence
ggctaacgcatataaagcaaaaccaac

SEQ ID NO: 252243 - DNA, 27 bp, Artificial sequence
  SiRNA target sequence
gctaacgcatataaagcaaaaccaact

SEQ ID NO: 252244 - DNA, 27 bp, Artificial sequence
  SiRNA target sequence
ctaacgcatataaagcaaaaccaacta

SEQ ID NO: 252245 - DNA, 27 bp, Artificial sequence
  SiRNA target sequence
taacgcatataaagcaaaaccaactac

SEQ ID NO: 252246 - DNA, 27 bp, Artificial sequence
  SiRNA target sequence
aacgcatataaagcaaaaccaactact

SEQ ID NO: 252247 - DNA, 27 bp, Artificial sequence
  SiRNA target sequence
acgcatataaagcaaaaccaactacta

SEQ ID NO: 252248 - DNA, 27 bp, Artificial sequence
  SiRNA target sequence
cgcatataaagcaaaaccaactactag

SEQ ID NO: 252249 - DNA, 27 bp, Artificial sequence
  SiRNA target sequence
gcatataaagcaaaaccaactactaga

SEQ ID NO: 252250 - DNA, 27 bp, Artificial sequence
  SiRNA target sequence
catataaagcaaaaccaactactagag

SEQ ID NO: 252251 - DNA, 27 bp, Artificial sequence
  SiRNA target sequence
atataaagcaaaaccaactactagagt

SEQ ID NO: 252252 - DNA, 27 bp, Artificial sequence
  SiRNA target sequence
tataaagcaaaaccaactactagagta

SEQ ID NO: 252253 - DNA, 27 bp, Artificial sequence
  SiRNA target sequence
ataaagcaaaaccaactactagagtac

SEQ ID NO: 252254 - DNA, 27 bp, Artificial sequence
  SiRNA target sequence
taaagcaaaaccaactactagagtact

SEQ ID NO: 252255 - DNA, 27 bp, Artificial sequence
  SiRNA target sequence
aaagcaaaaccaactactagagtactc

SEQ ID NO: 252256 - DNA, 27 bp, Artificial sequence
  SiRNA target sequence
aagcaaaaccaactactagagtactcc

SEQ ID NO: 252257 - DNA, 27 bp, Artificial sequence
  SiRNA target sequence
agcaaaaccaactactagagtactcca

SEQ ID NO: 252258 - DNA, 27 bp, Artificial sequence
  SiRNA target sequence
gcaaaaccaactactagagtactccac

SEQ ID NO: 252259 - DNA, 27 bp, Artificial sequence
  SiRNA target sequence
caaaaccaactactagagtactccaca

SEQ ID NO: 252260 - DNA, 27 bp, Artificial sequence
  SiRNA target sequence
aaaaccaactactagagtactccacaa

SEQ ID NO: 252261 - DNA, 27 bp, Artificial sequence
  SiRNA target sequence
aaaccaactactagagtactccacaac

SEQ ID NO: 252262 - DNA, 27 bp, Artificial sequence
  SiRNA target sequence
aaccaactactagagtactccacaact

SEQ ID NO: 252263 - DNA, 27 bp, Artificial sequence
  SiRNA target sequence
accaactactagagtactccacaactc

SEQ ID NO: 252264 - DNA, 27 bp, Artificial sequence
  SiRNA target sequence
ccaactactagagtactccacaactcc

SEQ ID NO: 252265 - DNA, 27 bp, Artificial sequence
  SiRNA target sequence
caactactagagtactccacaactccg

SEQ ID NO: 252266 - DNA, 27 bp, Artificial sequence
  SiRNA target sequence
aactactagagtactccacaactccga

SEQ ID NO: 252267 - DNA, 27 bp, Artificial sequence
  SiRNA target sequence
actactagagtactccacaactccgat

SEQ ID NO: 252268 - DNA, 27 bp, Artificial sequence
  SiRNA target sequence
ctactagagtactccacaactccgata

SEQ ID NO: 252269 - DNA, 27 bp, Artificial sequence
  SiRNA target sequence
tactagagtactccacaactccgataa

SEQ ID NO: 252270 - DNA, 27 bp, Artificial sequence
  SiRNA target sequence
actagagtactccacaactccgataag

SEQ ID NO: 252271 - DNA, 27 bp, Artificial sequence
  SiRNA target sequence
ctagagtactccacaactccgataaga

SEQ ID NO: 252272 - DNA, 27 bp, Artificial sequence
  SiRNA target sequence
tagagtactccacaactccgataagat

SEQ ID NO: 252273 - DNA, 27 bp, Artificial sequence
  SiRNA target sequence
agagtactccacaactccgataagatg

SEQ ID NO: 252274 - DNA, 27 bp, Artificial sequence
  SiRNA target sequence
gagtactccacaactccgataagatgt

SEQ ID NO: 252275 - DNA, 27 bp, Artificial sequence
  SiRNA target sequence
agtactccacaactccgataagatgta

SEQ ID NO: 252276 - DNA, 27 bp, Artificial sequence
  SiRNA target sequence
gtactccacaactccgataagatgtaa

SEQ ID NO: 252277 - DNA, 27 bp, Artificial sequence
  SiRNA target sequence
tactccacaactccgataagatgtaac

SEQ ID NO: 252278 - DNA, 27 bp, Artificial sequence
  SiRNA target sequence
actccacaactccgataagatgtaaca

SEQ ID NO: 252279 - DNA, 27 bp, Artificial sequence
  SiRNA target sequence
ctccacaactccgataagatgtaacat

SEQ ID NO: 252280 - DNA, 27 bp, Artificial sequence
  SiRNA target sequence
tccacaactccgataagatgtaacata

SEQ ID NO: 252281 - DNA, 27 bp, Artificial sequence
  SiRNA target sequence
ccacaactccgataagatgtaacataa

SEQ ID NO: 252282 - DNA, 27 bp, Artificial sequence
  SiRNA target sequence
cacaactccgataagatgtaacataaa

SEQ ID NO: 252283 - DNA, 27 bp, Artificial sequence
  SiRNA target sequence
acaactccgataagatgtaacataaag

SEQ ID NO: 252284 - DNA, 27 bp, Artificial sequence
  SiRNA target sequence
caactccgataagatgtaacataaagt

SEQ ID NO: 252285 - DNA, 27 bp, Artificial sequence
  SiRNA target sequence
aactccgataagatgtaacataaagta

SEQ ID NO: 252286 - DNA, 27 bp, Artificial sequence
  SiRNA target sequence
actccgataagatgtaacataaagtac

SEQ ID NO: 252287 - DNA, 27 bp, Artificial sequence
  SiRNA target sequence
ctccgataagatgtaacataaagtact

SEQ ID NO: 252288 - DNA, 27 bp, Artificial sequence
  SiRNA target sequence
tccgataagatgtaacataaagtactt

SEQ ID NO: 252289 - DNA, 27 bp, Artificial sequence
  SiRNA target sequence
ccgataagatgtaacataaagtactta

SEQ ID NO: 252290 - DNA, 27 bp, Artificial sequence
  SiRNA target sequence
cgataagatgtaacataaagtacttat

SEQ ID NO: 252291 - DNA, 27 bp, Artificial sequence
  SiRNA target sequence
gataagatgtaacataaagtacttatc

SEQ ID NO: 252292 - DNA, 27 bp, Artificial sequence
  SiRNA target sequence
ataagatgtaacataaagtacttatcc

SEQ ID NO: 252293 - DNA, 27 bp, Artificial sequence
  SiRNA target sequence
taagatgtaacataaagtacttatcca

SEQ ID NO: 252294 - DNA, 27 bp, Artificial sequence
  SiRNA target sequence
aagatgtaacataaagtacttatccac

SEQ ID NO: 252295 - DNA, 27 bp, Artificial sequence
  SiRNA target sequence
agatgtaacataaagtacttatccact

SEQ ID NO: 252296 - DNA, 27 bp, Artificial sequence
  SiRNA target sequence
gatgtaacataaagtacttatccactc

SEQ ID NO: 252297 - DNA, 27 bp, Artificial sequence
  SiRNA target sequence
atgtaacataaagtacttatccactca

SEQ ID NO: 252298 - DNA, 27 bp, Artificial sequence
  SiRNA target sequence
tgtaacataaagtacttatccactcac

SEQ ID NO: 252299 - DNA, 27 bp, Artificial sequence
  SiRNA target sequence
gtaacataaagtacttatccactcact

SEQ ID NO: 252300 - DNA, 27 bp, Artificial sequence
  SiRNA target sequence
taacataaagtacttatccactcactg

SEQ ID NO: 252301 - DNA, 27 bp, Artificial sequence
  SiRNA target sequence
aacataaagtacttatccactcactgt

SEQ ID NO: 252302 - DNA, 27 bp, Artificial sequence
  SiRNA target sequence
acataaagtacttatccactcactgta

SEQ ID NO: 252303 - DNA, 27 bp, Artificial sequence
  SiRNA target sequence
cataaagtacttatccactcactgtac

SEQ ID NO: 252304 - DNA, 27 bp, Artificial sequence
  SiRNA target sequence
ataaagtacttatccactcactgtaca

SEQ ID NO: 252305 - DNA, 27 bp, Artificial sequence
  SiRNA target sequence
taaagtacttatccactcactgtacat

SEQ ID NO: 252306 - DNA, 27 bp, Artificial sequence
  SiRNA target sequence
aaagtacttatccactcactgtacata

SEQ ID NO: 252307 - DNA, 27 bp, Artificial sequence
  SiRNA target sequence
aagtacttatccactcactgtacatat

SEQ ID NO: 252308 - DNA, 27 bp, Artificial sequence
  SiRNA target sequence
agtacttatccactcactgtacatata

SEQ ID NO: 252309 - DNA, 27 bp, Artificial sequence
  SiRNA target sequence
gtacttatccactcactgtacatatat

SEQ ID NO: 252310 - DNA, 27 bp, Artificial sequence
  SiRNA target sequence
tacttatccactcactgtacatatata

SEQ ID NO: 252311 - DNA, 27 bp, Artificial sequence
  SiRNA target sequence
acttatccactcactgtacatatataa

SEQ ID NO: 252312 - DNA, 27 bp, Artificial sequence
  SiRNA target sequence
cttatccactcactgtacatatataaa

SEQ ID NO: 252313 - DNA, 27 bp, Artificial sequence
  SiRNA target sequence
ttatccactcactgtacatatataaaa

SEQ ID NO: 252314 - DNA, 27 bp, Artificial sequence
  SiRNA target sequence
tatccactcactgtacatatataaaaa

SEQ ID NO: 252315 - DNA, 27 bp, Artificial sequence
  SiRNA target sequence
atccactcactgtacatatataaaaaa

SEQ ID NO: 252316 - DNA, 27 bp, Artificial sequence
  SiRNA target sequence
tccactcactgtacatatataaaaaag

SEQ ID NO: 252317 - DNA, 27 bp, Artificial sequence
  SiRNA target sequence
ccactcactgtacatatataaaaaagg

SEQ ID NO: 252318 - DNA, 27 bp, Artificial sequence
  SiRNA target sequence
cactcactgtacatatataaaaaagga

SEQ ID NO: 252319 - DNA, 27 bp, Artificial sequence
  SiRNA target sequence
actcactgtacatatataaaaaaggag

SEQ ID NO: 252320 - DNA, 27 bp, Artificial sequence
  SiRNA target sequence
ctcactgtacatatataaaaaaggaga

SEQ ID NO: 252321 - DNA, 27 bp, Artificial sequence
  SiRNA target sequence
tcactgtacatatataaaaaaggagat

SEQ ID NO: 252322 - DNA, 27 bp, Artificial sequence
  SiRNA target sequence
cactgtacatatataaaaaaggagata

SEQ ID NO: 252323 - DNA, 27 bp, Artificial sequence
  SiRNA target sequence
actgtacatatataaaaaaggagataa

SEQ ID NO: 252324 - DNA, 27 bp, Artificial sequence
  SiRNA target sequence
ctgtacatatataaaaaaggagataag

SEQ ID NO: 252325 - DNA, 27 bp, Artificial sequence
  SiRNA target sequence
tgtacatatataaaaaaggagataagc

SEQ ID NO: 252326 - DNA, 27 bp, Artificial sequence
  SiRNA target sequence
gtacatatataaaaaaggagataagcc

SEQ ID NO: 252327 - DNA, 27 bp, Artificial sequence
  SiRNA target sequence
tacatatataaaaaaggagataagccc

SEQ ID NO: 252328 - DNA, 27 bp, Artificial sequence
  SiRNA target sequence
acatatataaaaaaggagataagccca

SEQ ID NO: 252329 - DNA, 27 bp, Artificial sequence
  SiRNA target sequence
catatataaaaaaggagataagcccat

SEQ ID NO: 252330 - DNA, 27 bp, Artificial sequence
  SiRNA target sequence
atatataaaaaaggagataagcccatc

SEQ ID NO: 252331 - DNA, 27 bp, Artificial sequence
  SiRNA target sequence
tatataaaaaaggagataagcccatca

SEQ ID NO: 252332 - DNA, 27 bp, Artificial sequence
  SiRNA target sequence
atataaaaaaggagataagcccatcaa

SEQ ID NO: 252333 - DNA, 27 bp, Artificial sequence
  SiRNA target sequence
tataaaaaaggagataagcccatcaag

SEQ ID NO: 252334 - DNA, 27 bp, Artificial sequence
  SiRNA target sequence
ataaaaaaggagataagcccatcaagc

SEQ ID NO: 252335 - DNA, 27 bp, Artificial sequence
  SiRNA target sequence
taaaaaaggagataagcccatcaagct

SEQ ID NO: 252336 - DNA, 27 bp, Artificial sequence
  SiRNA target sequence
aaaaaaggagataagcccatcaagctt

SEQ ID NO: 252337 - DNA, 27 bp, Artificial sequence
  SiRNA target sequence
aaaaaggagataagcccatcaagcttc

SEQ ID NO: 252338 - DNA, 27 bp, Artificial sequence
  SiRNA target sequence
aaaaggagataagcccatcaagcttct

SEQ ID NO: 252339 - DNA, 27 bp, Artificial sequence
  SiRNA target sequence
aaaggagataagcccatcaagcttcta

SEQ ID NO: 252340 - DNA, 27 bp, Artificial sequence
  SiRNA target sequence
aaggagataagcccatcaagcttctaa

SEQ ID NO: 252341 - DNA, 27 bp, Artificial sequence
  SiRNA target sequence
aggagataagcccatcaagcttctaac

SEQ ID NO: 252342 - DNA, 27 bp, Artificial sequence
  SiRNA target sequence
ggagataagcccatcaagcttctaact

SEQ ID NO: 252343 - DNA, 27 bp, Artificial sequence
  SiRNA target sequence
gagataagcccatcaagcttctaactg

SEQ ID NO: 252344 - DNA, 27 bp, Artificial sequence
  SiRNA target sequence
agataagcccatcaagcttctaactga

SEQ ID NO: 252345 - DNA, 27 bp, Artificial sequence
  SiRNA target sequence
gataagcccatcaagcttctaactgac

SEQ ID NO: 252346 - DNA, 27 bp, Artificial sequence
  SiRNA target sequence
ataagcccatcaagcttctaactgaca

SEQ ID NO: 252347 - DNA, 27 bp, Artificial sequence
  SiRNA target sequence
taagcccatcaagcttctaactgacat

SEQ ID NO: 252348 - DNA, 27 bp, Artificial sequence
  SiRNA target sequence
aagcccatcaagcttctaactgacatc

SEQ ID NO: 252349 - DNA, 27 bp, Artificial sequence
  SiRNA target sequence
agcccatcaagcttctaactgacatct

SEQ ID NO: 252350 - DNA, 27 bp, Artificial sequence
  SiRNA target sequence
gcccatcaagcttctaactgacatctt

SEQ ID NO: 252351 - DNA, 27 bp, Artificial sequence
  SiRNA target sequence
cccatcaagcttctaactgacatctta

SEQ ID NO: 252352 - DNA, 27 bp, Artificial sequence
  SiRNA target sequence
ccatcaagcttctaactgacatcttac

SEQ ID NO: 252353 - DNA, 27 bp, Artificial sequence
  SiRNA target sequence
catcaagcttctaactgacatcttacc

SEQ ID NO: 252354 - DNA, 27 bp, Artificial sequence
  SiRNA target sequence
atcaagcttctaactgacatcttacca

SEQ ID NO: 252355 - DNA, 27 bp, Artificial sequence
  SiRNA target sequence
tcaagcttctaactgacatcttaccat

SEQ ID NO: 252356 - DNA, 27 bp, Artificial sequence
  SiRNA target sequence
caagcttctaactgacatcttaccatc

SEQ ID NO: 252357 - DNA, 27 bp, Artificial sequence
  SiRNA target sequence
aagcttctaactgacatcttaccatca

SEQ ID NO: 252358 - DNA, 27 bp, Artificial sequence
  SiRNA target sequence
agcttctaactgacatcttaccatcac

SEQ ID NO: 252359 - DNA, 27 bp, Artificial sequence
  SiRNA target sequence
gcttctaactgacatcttaccatcaca

SEQ ID NO: 252360 - DNA, 27 bp, Artificial sequence
  SiRNA target sequence
cttctaactgacatcttaccatcacaa

SEQ ID NO: 252361 - DNA, 27 bp, Artificial sequence
  SiRNA target sequence
ttctaactgacatcttaccatcacaaa

SEQ ID NO: 252362 - DNA, 27 bp, Artificial sequence
  SiRNA target sequence
tctaactgacatcttaccatcacaaaa

SEQ ID NO: 252363 - DNA, 27 bp, Artificial sequence
  SiRNA target sequence
ctaactgacatcttaccatcacaaaaa

SEQ ID NO: 252364 - DNA, 27 bp, Artificial sequence
  SiRNA target sequence
taactgacatcttaccatcacaaaaaa

SEQ ID NO: 252365 - DNA, 27 bp, Artificial sequence
  SiRNA target sequence
aactgacatcttaccatcacaaaaaat

SEQ ID NO: 252366 - DNA, 27 bp, Artificial sequence
  SiRNA target sequence
actgacatcttaccatcacaaaaaata

SEQ ID NO: 252367 - DNA, 27 bp, Artificial sequence
  SiRNA target sequence
ctgacatcttaccatcacaaaaaatat

SEQ ID NO: 252368 - DNA, 27 bp, Artificial sequence
  SiRNA target sequence
tgacatcttaccatcacaaaaaatatc

SEQ ID NO: 252369 - DNA, 27 bp, Artificial sequence
  SiRNA target sequence
gacatcttaccatcacaaaaaatatct

SEQ ID NO: 252370 - DNA, 27 bp, Artificial sequence
  SiRNA target sequence
acatcttaccatcacaaaaaatatcta

SEQ ID NO: 252371 - DNA, 27 bp, Artificial sequence
  SiRNA target sequence
catcttaccatcacaaaaaatatctag

SEQ ID NO: 252372 - DNA, 27 bp, Artificial sequence
  SiRNA target sequence
atcttaccatcacaaaaaatatctagt

SEQ ID NO: 252373 - DNA, 27 bp, Artificial sequence
  SiRNA target sequence
tcttaccatcacaaaaaatatctagtg

SEQ ID NO: 252374 - DNA, 27 bp, Artificial sequence
  SiRNA target sequence
cttaccatcacaaaaaatatctagtgc

SEQ ID NO: 252375 - DNA, 27 bp, Artificial sequence
  SiRNA target sequence
ttaccatcacaaaaaatatctagtgcc

SEQ ID NO: 252376 - DNA, 27 bp, Artificial sequence
  SiRNA target sequence
taccatcacaaaaaatatctagtgccc

SEQ ID NO: 252377 - DNA, 27 bp, Artificial sequence
  SiRNA target sequence
accatcacaaaaaatatctagtgccca

SEQ ID NO: 252378 - DNA, 27 bp, Artificial sequence
  SiRNA target sequence
ccatcacaaaaaatatctagtgcccat

SEQ ID NO: 252379 - DNA, 27 bp, Artificial sequence
  SiRNA target sequence
catcacaaaaaatatctagtgcccatt

SEQ ID NO: 252380 - DNA, 27 bp, Artificial sequence
  SiRNA target sequence
atcacaaaaaatatctagtgcccattg

SEQ ID NO: 252381 - DNA, 27 bp, Artificial sequence
  SiRNA target sequence
tcacaaaaaatatctagtgcccattgt

SEQ ID NO: 252382 - DNA, 27 bp, Artificial sequence
  SiRNA target sequence
cacaaaaaatatctagtgcccattgtg

SEQ ID NO: 252383 - DNA, 27 bp, Artificial sequence
  SiRNA target sequence
acaaaaaatatctagtgcccattgtga

SEQ ID NO: 252384 - DNA, 27 bp, Artificial sequence
  SiRNA target sequence
caaaaaatatctagtgcccattgtgat

SEQ ID NO: 252385 - DNA, 27 bp, Artificial sequence
  SiRNA target sequence
aaaaaatatctagtgcccattgtgatc

SEQ ID NO: 252386 - DNA, 27 bp, Artificial sequence
  SiRNA target sequence
aaaaatatctagtgcccattgtgatcc

SEQ ID NO: 252387 - DNA, 27 bp, Artificial sequence
  SiRNA target sequence
aaaatatctagtgcccattgtgatcct

SEQ ID NO: 252388 - DNA, 27 bp, Artificial sequence
  SiRNA target sequence
aaatatctagtgcccattgtgatcctt

SEQ ID NO: 252389 - DNA, 27 bp, Artificial sequence
  SiRNA target sequence
aatatctagtgcccattgtgatccttt

SEQ ID NO: 252390 - DNA, 27 bp, Artificial sequence
  SiRNA target sequence
atatctagtgcccattgtgatcctttt

SEQ ID NO: 252391 - DNA, 27 bp, Artificial sequence
  SiRNA target sequence
tatctagtgcccattgtgatccttttt

SEQ ID NO: 252392 - DNA, 27 bp, Artificial sequence
  SiRNA target sequence
atctagtgcccattgtgatcctttttg

SEQ ID NO: 252393 - DNA, 27 bp, Artificial sequence
  SiRNA target sequence
tctagtgcccattgtgatcctttttgg

SEQ ID NO: 252394 - DNA, 27 bp, Artificial sequence
  SiRNA target sequence
ctagtgcccattgtgatcctttttgga

SEQ ID NO: 252395 - DNA, 27 bp, Artificial sequence
  SiRNA target sequence
tagtgcccattgtgatcctttttggat

SEQ ID NO: 252396 - DNA, 27 bp, Artificial sequence
  SiRNA target sequence
agtgcccattgtgatcctttttggatt

SEQ ID NO: 252397 - DNA, 27 bp, Artificial sequence
  SiRNA target sequence
gtgcccattgtgatcctttttggattt

SEQ ID NO: 252398 - DNA, 27 bp, Artificial sequence
  SiRNA target sequence
tgcccattgtgatcctttttggatttt

SEQ ID NO: 252399 - DNA, 27 bp, Artificial sequence
  SiRNA target sequence
gcccattgtgatcctttttggatttta

SEQ ID NO: 252400 - DNA, 27 bp, Artificial sequence
  SiRNA target sequence
cccattgtgatcctttttggattttat

SEQ ID NO: 252401 - DNA, 27 bp, Artificial sequence
  SiRNA target sequence
ccattgtgatcctttttggattttata

SEQ ID NO: 252402 - DNA, 27 bp, Artificial sequence
  SiRNA target sequence
cattgtgatcctttttggattttatat

SEQ ID NO: 252403 - DNA, 27 bp, Artificial sequence
  SiRNA target sequence
attgtgatcctttttggattttatatt

SEQ ID NO: 252404 - DNA, 27 bp, Artificial sequence
  SiRNA target sequence
ttgtgatcctttttggattttatattc

SEQ ID NO: 252405 - DNA, 27 bp, Artificial sequence
  SiRNA target sequence
tgtgatcctttttggattttatattca

SEQ ID NO: 252406 - DNA, 27 bp, Artificial sequence
  SiRNA target sequence
gtgatcctttttggattttatattcaa

SEQ ID NO: 252407 - DNA, 27 bp, Artificial sequence
  SiRNA target sequence
tgatcctttttggattttatattcaaa

SEQ ID NO: 252408 - DNA, 27 bp, Artificial sequence
  SiRNA target sequence
gatcctttttggattttatattcaaat

SEQ ID NO: 252409 - DNA, 27 bp, Artificial sequence
  SiRNA target sequence
atcctttttggattttatattcaaatg

SEQ ID NO: 252410 - DNA, 27 bp, Artificial sequence
  SiRNA target sequence
tcctttttggattttatattcaaatgg

SEQ ID NO: 252411 - DNA, 27 bp, Artificial sequence
  SiRNA target sequence
cctttttggattttatattcaaatgga

SEQ ID NO: 252412 - DNA, 27 bp, Artificial sequence
  SiRNA target sequence
ctttttggattttatattcaaatggaa

SEQ ID NO: 252413 - DNA, 27 bp, Artificial sequence
  SiRNA target sequence
tttttggattttatattcaaatggaat

SEQ ID NO: 252414 - DNA, 27 bp, Artificial sequence
  SiRNA target sequence
ttttggattttatattcaaatggaatt

SEQ ID NO: 252415 - DNA, 27 bp, Artificial sequence
  SiRNA target sequence
tttggattttatattcaaatggaatta

SEQ ID NO: 252416 - DNA, 27 bp, Artificial sequence
  SiRNA target sequence
ttggattttatattcaaatggaattaa

SEQ ID NO: 252417 - DNA, 27 bp, Artificial sequence
  SiRNA target sequence
tggattttatattcaaatggaattaaa

SEQ ID NO: 252418 - DNA, 27 bp, Artificial sequence
  SiRNA target sequence
ggattttatattcaaatggaattaaaa

SEQ ID NO: 252419 - DNA, 27 bp, Artificial sequence
  SiRNA target sequence
gattttatattcaaatggaattaaaag

SEQ ID NO: 252420 - DNA, 27 bp, Artificial sequence
  SiRNA target sequence
attttatattcaaatggaattaaaaga

SEQ ID NO: 252421 - DNA, 27 bp, Artificial sequence
  SiRNA target sequence
ttttatattcaaatggaattaaaagag

SEQ ID NO: 252422 - DNA, 27 bp, Artificial sequence
  SiRNA target sequence
tttatattcaaatggaattaaaagaga

SEQ ID NO: 252423 - DNA, 27 bp, Artificial sequence
  SiRNA target sequence
ttatattcaaatggaattaaaagagaa

SEQ ID NO: 252424 - DNA, 27 bp, Artificial sequence
  SiRNA target sequence
tatattcaaatggaattaaaagagaac

SEQ ID NO: 252425 - DNA, 27 bp, Artificial sequence
  SiRNA target sequence
atattcaaatggaattaaaagagaacc

SEQ ID NO: 252426 - DNA, 27 bp, Artificial sequence
  SiRNA target sequence
tattcaaatggaattaaaagagaacca

SEQ ID NO: 252427 - DNA, 27 bp, Artificial sequence
  SiRNA target sequence
attcaaatggaattaaaagagaaccaa

SEQ ID NO: 252428 - DNA, 27 bp, Artificial sequence
  SiRNA target sequence
ttcaaatggaattaaaagagaaccaat

SEQ ID NO: 252429 - DNA, 27 bp, Artificial sequence
  SiRNA target sequence
tcaaatggaattaaaagagaaccaatt

SEQ ID NO: 252430 - DNA, 27 bp, Artificial sequence
  SiRNA target sequence
caaatggaattaaaagagaaccaatta

SEQ ID NO: 252431 - DNA, 27 bp, Artificial sequence
  SiRNA target sequence
aaatggaattaaaagagaaccaattag

SEQ ID NO: 252432 - DNA, 27 bp, Artificial sequence
  SiRNA target sequence
aatggaattaaaagagaaccaattaga

SEQ ID NO: 252433 - DNA, 27 bp, Artificial sequence
  SiRNA target sequence
atggaattaaaagagaaccaattagaa

SEQ ID NO: 252434 - DNA, 27 bp, Artificial sequence
  SiRNA target sequence
tggaattaaaagagaaccaattagaaa

SEQ ID NO: 252435 - DNA, 27 bp, Artificial sequence
  SiRNA target sequence
ggaattaaaagagaaccaattagaaaa

SEQ ID NO: 252436 - DNA, 27 bp, Artificial sequence
  SiRNA target sequence
gaattaaaagagaaccaattagaaaaa

SEQ ID NO: 252437 - DNA, 27 bp, Artificial sequence
  SiRNA target sequence
aattaaaagagaaccaattagaaaaaa

SEQ ID NO: 252438 - DNA, 27 bp, Artificial sequence
  SiRNA target sequence
attaaaagagaaccaattagaaaaaaa

SEQ ID NO: 252439 - DNA, 27 bp, Artificial sequence
  SiRNA target sequence
ttaaaagagaaccaattagaaaaaaaa

SEQ ID NO: 252440 - DNA, 27 bp, Artificial sequence
  SiRNA target sequence
taaaagagaaccaattagaaaaaaaat

SEQ ID NO: 252441 - DNA, 27 bp, Artificial sequence
  SiRNA target sequence
aaaagagaaccaattagaaaaaaaatg

SEQ ID NO: 252442 - DNA, 27 bp, Artificial sequence
  SiRNA target sequence
aaagagaaccaattagaaaaaaaatgc

SEQ ID NO: 252443 - DNA, 27 bp, Artificial sequence
  SiRNA target sequence
aagagaaccaattagaaaaaaaatgcc

SEQ ID NO: 252444 - DNA, 27 bp, Artificial sequence
  SiRNA target sequence
agagaaccaattagaaaaaaaatgcca

SEQ ID NO: 252445 - DNA, 27 bp, Artificial sequence
  SiRNA target sequence
gagaaccaattagaaaaaaaatgccaa

SEQ ID NO: 252446 - DNA, 27 bp, Artificial sequence
  SiRNA target sequence
agaaccaattagaaaaaaaatgccaat

SEQ ID NO: 252447 - DNA, 27 bp, Artificial sequence
  SiRNA target sequence
gaaccaattagaaaaaaaatgccaata

SEQ ID NO: 252448 - DNA, 27 bp, Artificial sequence
  SiRNA target sequence
aaccaattagaaaaaaaatgccaataa

SEQ ID NO: 252449 - DNA, 27 bp, Artificial sequence
  SiRNA target sequence
accaattagaaaaaaaatgccaataaa

SEQ ID NO: 252450 - DNA, 27 bp, Artificial sequence
  SiRNA target sequence
ccaattagaaaaaaaatgccaataaaa

SEQ ID NO: 252451 - DNA, 27 bp, Artificial sequence
  SiRNA target sequence
caattagaaaaaaaatgccaataaaac

SEQ ID NO: 252452 - DNA, 27 bp, Artificial sequence
  SiRNA target sequence
aattagaaaaaaaatgccaataaaacc

SEQ ID NO: 252453 - DNA, 27 bp, Artificial sequence
  SiRNA target sequence
attagaaaaaaaatgccaataaaacca

SEQ ID NO: 252454 - DNA, 27 bp, Artificial sequence
  SiRNA target sequence
ttagaaaaaaaatgccaataaaaccaa

SEQ ID NO: 252455 - DNA, 27 bp, Artificial sequence
  SiRNA target sequence
tagaaaaaaaatgccaataaaaccaaa

SEQ ID NO: 252456 - DNA, 27 bp, Artificial sequence
  SiRNA target sequence
agaaaaaaaatgccaataaaaccaaaa

SEQ ID NO: 252457 - DNA, 27 bp, Artificial sequence
  SiRNA target sequence
gaaaaaaaatgccaataaaaccaaaaa

SEQ ID NO: 252458 - DNA, 27 bp, Artificial sequence
  SiRNA target sequence
aaaaaaaatgccaataaaaccaaaaat

SEQ ID NO: 252459 - DNA, 27 bp, Artificial sequence
  SiRNA target sequence
aaaaaaatgccaataaaaccaaaaata

SEQ ID NO: 252460 - DNA, 27 bp, Artificial sequence
  SiRNA target sequence
aaaaaatgccaataaaaccaaaaataa

SEQ ID NO: 252461 - DNA, 27 bp, Artificial sequence
  SiRNA target sequence
aaaaatgccaataaaaccaaaaataat

SEQ ID NO: 252462 - DNA, 27 bp, Artificial sequence
  SiRNA target sequence
aaaatgccaataaaaccaaaaataata

SEQ ID NO: 252463 - DNA, 27 bp, Artificial sequence
  SiRNA target sequence
aaatgccaataaaaccaaaaataataa

SEQ ID NO: 252464 - DNA, 27 bp, Artificial sequence
  SiRNA target sequence
aatgccaataaaaccaaaaataataaa

SEQ ID NO: 252465 - DNA, 27 bp, Artificial sequence
  SiRNA target sequence
atgccaataaaaccaaaaataataaaa

SEQ ID NO: 252466 - DNA, 27 bp, Artificial sequence
  SiRNA target sequence
tgccaataaaaccaaaaataataaaat

SEQ ID NO: 252467 - DNA, 27 bp, Artificial sequence
  SiRNA target sequence
gccaataaaaccaaaaataataaaatt

SEQ ID NO: 252468 - DNA, 27 bp, Artificial sequence
  SiRNA target sequence
ccaataaaaccaaaaataataaaattc

SEQ ID NO: 252469 - DNA, 27 bp, Artificial sequence
  SiRNA target sequence
caataaaaccaaaaataataaaattca

SEQ ID NO: 252470 - DNA, 27 bp, Artificial sequence
  SiRNA target sequence
aataaaaccaaaaataataaaattcac

SEQ ID NO: 252471 - DNA, 27 bp, Artificial sequence
  SiRNA target sequence
ataaaaccaaaaataataaaattcaca

SEQ ID NO: 252472 - DNA, 27 bp, Artificial sequence
  SiRNA target sequence
taaaaccaaaaataataaaattcacaa

SEQ ID NO: 252473 - DNA, 27 bp, Artificial sequence
  SiRNA target sequence
aaaaccaaaaataataaaattcacaat

SEQ ID NO: 252474 - DNA, 27 bp, Artificial sequence
  SiRNA target sequence
aaaccaaaaataataaaattcacaata

SEQ ID NO: 252475 - DNA, 27 bp, Artificial sequence
  SiRNA target sequence
aaccaaaaataataaaattcacaatac

SEQ ID NO: 252476 - DNA, 27 bp, Artificial sequence
  SiRNA target sequence
accaaaaataataaaattcacaatact

SEQ ID NO: 252477 - DNA, 27 bp, Artificial sequence
  SiRNA target sequence
ccaaaaataataaaattcacaatacta

SEQ ID NO: 252478 - DNA, 27 bp, Artificial sequence
  SiRNA target sequence
caaaaataataaaattcacaatactaa

SEQ ID NO: 252479 - DNA, 27 bp, Artificial sequence
  SiRNA target sequence
aaaaataataaaattcacaatactaag

SEQ ID NO: 252480 - DNA, 27 bp, Artificial sequence
  SiRNA target sequence
aaaataataaaattcacaatactaaga

SEQ ID NO: 252481 - DNA, 27 bp, Artificial sequence
  SiRNA target sequence
aaataataaaattcacaatactaagaa

SEQ ID NO: 252482 - DNA, 27 bp, Artificial sequence
  SiRNA target sequence
aataataaaattcacaatactaagaat

SEQ ID NO: 252483 - DNA, 27 bp, Artificial sequence
  SiRNA target sequence
ataataaaattcacaatactaagaata

SEQ ID NO: 252484 - DNA, 27 bp, Artificial sequence
  SiRNA target sequence
taataaaattcacaatactaagaatag

SEQ ID NO: 252485 - DNA, 27 bp, Artificial sequence
  SiRNA target sequence
aataaaattcacaatactaagaataga

SEQ ID NO: 252486 - DNA, 27 bp, Artificial sequence
  SiRNA target sequence
ataaaattcacaatactaagaatagag

SEQ ID NO: 252487 - DNA, 27 bp, Artificial sequence
  SiRNA target sequence
taaaattcacaatactaagaatagagt

SEQ ID NO: 252488 - DNA, 27 bp, Artificial sequence
  SiRNA target sequence
aaaattcacaatactaagaatagagta

SEQ ID NO: 252489 - DNA, 27 bp, Artificial sequence
  SiRNA target sequence
aaattcacaatactaagaatagagtac

SEQ ID NO: 252490 - DNA, 27 bp, Artificial sequence
  SiRNA target sequence
aattcacaatactaagaatagagtaca

SEQ ID NO: 252491 - DNA, 27 bp, Artificial sequence
  SiRNA target sequence
attcacaatactaagaatagagtacac

SEQ ID NO: 252492 - DNA, 27 bp, Artificial sequence
  SiRNA target sequence
ttcacaatactaagaatagagtacaca

SEQ ID NO: 252493 - DNA, 27 bp, Artificial sequence
  SiRNA target sequence
tcacaatactaagaatagagtacacat

SEQ ID NO: 252494 - DNA, 27 bp, Artificial sequence
  SiRNA target sequence
cacaatactaagaatagagtacacatt

SEQ ID NO: 252495 - DNA, 27 bp, Artificial sequence
  SiRNA target sequence
acaatactaagaatagagtacacattt

SEQ ID NO: 252496 - DNA, 27 bp, Artificial sequence
  SiRNA target sequence
caatactaagaatagagtacacattta

SEQ ID NO: 252497 - DNA, 27 bp, Artificial sequence
  SiRNA target sequence
aatactaagaatagagtacacatttaa

SEQ ID NO: 252498 - DNA, 27 bp, Artificial sequence
  SiRNA target sequence
atactaagaatagagtacacatttaaa

SEQ ID NO: 252499 - DNA, 27 bp, Artificial sequence
  SiRNA target sequence
tactaagaatagagtacacatttaaag

SEQ ID NO: 252500 - DNA, 27 bp, Artificial sequence
  SiRNA target sequence
actaagaatagagtacacatttaaagc

SEQ ID NO: 252501 - DNA, 27 bp, Artificial sequence
  SiRNA target sequence
ctaagaatagagtacacatttaaagcc

SEQ ID NO: 252502 - DNA, 27 bp, Artificial sequence
  SiRNA target sequence
taagaatagagtacacatttaaagcct

SEQ ID NO: 252503 - DNA, 27 bp, Artificial sequence
  SiRNA target sequence
aagaatagagtacacatttaaagcctt

SEQ ID NO: 252504 - DNA, 27 bp, Artificial sequence
  SiRNA target sequence
agaatagagtacacatttaaagccttt

SEQ ID NO: 252505 - DNA, 27 bp, Artificial sequence
  SiRNA target sequence
gaatagagtacacatttaaagcctttt

SEQ ID NO: 252506 - DNA, 27 bp, Artificial sequence
  SiRNA target sequence
aatagagtacacatttaaagccttttg

SEQ ID NO: 252507 - DNA, 27 bp, Artificial sequence
  SiRNA target sequence
atagagtacacatttaaagccttttgg

SEQ ID NO: 252508 - DNA, 27 bp, Artificial sequence
  SiRNA target sequence
tagagtacacatttaaagccttttgga

SEQ ID NO: 252509 - DNA, 27 bp, Artificial sequence
  SiRNA target sequence
agagtacacatttaaagccttttggac

SEQ ID NO: 252510 - DNA, 27 bp, Artificial sequence
  SiRNA target sequence
gagtacacatttaaagccttttggaca

SEQ ID NO: 252511 - DNA, 27 bp, Artificial sequence
  SiRNA target sequence
agtacacatttaaagccttttggacat

SEQ ID NO: 252512 - DNA, 27 bp, Artificial sequence
  SiRNA target sequence
gtacacatttaaagccttttggacata

SEQ ID NO: 252513 - DNA, 27 bp, Artificial sequence
  SiRNA target sequence
tacacatttaaagccttttggacatat

SEQ ID NO: 252514 - DNA, 27 bp, Artificial sequence
  SiRNA target sequence
acacatttaaagccttttggacatatg

SEQ ID NO: 252515 - DNA, 27 bp, Artificial sequence
  SiRNA target sequence
cacatttaaagccttttggacatatga

SEQ ID NO: 252516 - DNA, 27 bp, Artificial sequence
  SiRNA target sequence
acatttaaagccttttggacatatgac

SEQ ID NO: 252517 - DNA, 27 bp, Artificial sequence
  SiRNA target sequence
catttaaagccttttggacatatgaca

SEQ ID NO: 252518 - DNA, 27 bp, Artificial sequence
  SiRNA target sequence
atttaaagccttttggacatatgacat

SEQ ID NO: 252519 - DNA, 27 bp, Artificial sequence
  SiRNA target sequence
tttaaagccttttggacatatgacatc

SEQ ID NO: 252520 - DNA, 27 bp, Artificial sequence
  SiRNA target sequence
ttaaagccttttggacatatgacatca

SEQ ID NO: 252521 - DNA, 27 bp, Artificial sequence
  SiRNA target sequence
taaagccttttggacatatgacatcat

SEQ ID NO: 252522 - DNA, 27 bp, Artificial sequence
  SiRNA target sequence
aaagccttttggacatatgacatcata

SEQ ID NO: 252523 - DNA, 27 bp, Artificial sequence
  SiRNA target sequence
aagccttttggacatatgacatcataa

SEQ ID NO: 252524 - DNA, 27 bp, Artificial sequence
  SiRNA target sequence
agccttttggacatatgacatcataag

SEQ ID NO: 252525 - DNA, 27 bp, Artificial sequence
  SiRNA target sequence
gccttttggacatatgacatcataaga

SEQ ID NO: 252526 - DNA, 27 bp, Artificial sequence
  SiRNA target sequence
ccttttggacatatgacatcataagac

SEQ ID NO: 252527 - DNA, 27 bp, Artificial sequence
  SiRNA target sequence
cttttggacatatgacatcataagaca

SEQ ID NO: 252528 - DNA, 27 bp, Artificial sequence
  SiRNA target sequence
ttttggacatatgacatcataagacat

SEQ ID NO: 252529 - DNA, 27 bp, Artificial sequence
  SiRNA target sequence
tttggacatatgacatcataagacata

SEQ ID NO: 252530 - DNA, 27 bp, Artificial sequence
  SiRNA target sequence
ttggacatatgacatcataagacatat

SEQ ID NO: 252531 - DNA, 27 bp, Artificial sequence
  SiRNA target sequence
tggacatatgacatcataagacatata

SEQ ID NO: 252532 - DNA, 27 bp, Artificial sequence
  SiRNA target sequence
ggacatatgacatcataagacatataa

SEQ ID NO: 252533 - DNA, 27 bp, Artificial sequence
  SiRNA target sequence
gacatatgacatcataagacatataat

SEQ ID NO: 252534 - DNA, 27 bp, Artificial sequence
  SiRNA target sequence
acatatgacatcataagacatataatt

SEQ ID NO: 252535 - DNA, 27 bp, Artificial sequence
  SiRNA target sequence
catatgacatcataagacatataattg

SEQ ID NO: 252536 - DNA, 27 bp, Artificial sequence
  SiRNA target sequence
atatgacatcataagacatataattgg

SEQ ID NO: 252537 - DNA, 27 bp, Artificial sequence
  SiRNA target sequence
tatgacatcataagacatataattggc

SEQ ID NO: 252538 - DNA, 27 bp, Artificial sequence
  SiRNA target sequence
atgacatcataagacatataattggca

SEQ ID NO: 252539 - DNA, 27 bp, Artificial sequence
  SiRNA target sequence
tgacatcataagacatataattggcag

SEQ ID NO: 252540 - DNA, 27 bp, Artificial sequence
  SiRNA target sequence
gacatcataagacatataattggcagt

SEQ ID NO: 252541 - DNA, 27 bp, Artificial sequence
  SiRNA target sequence
acatcataagacatataattggcagtg

SEQ ID NO: 252542 - DNA, 27 bp, Artificial sequence
  SiRNA target sequence
catcataagacatataattggcagtga

SEQ ID NO: 252543 - DNA, 27 bp, Artificial sequence
  SiRNA target sequence
atcataagacatataattggcagtgaa

SEQ ID NO: 252544 - DNA, 27 bp, Artificial sequence
  SiRNA target sequence
tcataagacatataattggcagtgaaa

SEQ ID NO: 252545 - DNA, 27 bp, Artificial sequence
  SiRNA target sequence
cataagacatataattggcagtgaaaa

SEQ ID NO: 252546 - DNA, 27 bp, Artificial sequence
  SiRNA target sequence
ataagacatataattggcagtgaaaag

SEQ ID NO: 252547 - DNA, 27 bp, Artificial sequence
  SiRNA target sequence
taagacatataattggcagtgaaaaga

SEQ ID NO: 252548 - DNA, 27 bp, Artificial sequence
  SiRNA target sequence
aagacatataattggcagtgaaaagaa

SEQ ID NO: 252549 - DNA, 27 bp, Artificial sequence
  SiRNA target sequence
agacatataattggcagtgaaaagaaa

SEQ ID NO: 252550 - DNA, 27 bp, Artificial sequence
  SiRNA target sequence
gacatataattggcagtgaaaagaaaa

SEQ ID NO: 252551 - DNA, 27 bp, Artificial sequence
  SiRNA target sequence
acatataattggcagtgaaaagaaaag

SEQ ID NO: 252552 - DNA, 27 bp, Artificial sequence
  SiRNA target sequence
catataattggcagtgaaaagaaaagc

SEQ ID NO: 252553 - DNA, 27 bp, Artificial sequence
  SiRNA target sequence
atataattggcagtgaaaagaaaagct

SEQ ID NO: 252554 - DNA, 27 bp, Artificial sequence
  SiRNA target sequence
tataattggcagtgaaaagaaaagctt

SEQ ID NO: 252555 - DNA, 27 bp, Artificial sequence
  SiRNA target sequence
ataattggcagtgaaaagaaaagcttt

SEQ ID NO: 252556 - DNA, 27 bp, Artificial sequence
  SiRNA target sequence
taattggcagtgaaaagaaaagcttta

SEQ ID NO: 252557 - DNA, 27 bp, Artificial sequence
  SiRNA target sequence
aattggcagtgaaaagaaaagctttat

SEQ ID NO: 252558 - DNA, 27 bp, Artificial sequence
  SiRNA target sequence
attggcagtgaaaagaaaagctttatg

SEQ ID NO: 252559 - DNA, 27 bp, Artificial sequence
  SiRNA target sequence
ttggcagtgaaaagaaaagctttatgt

SEQ ID NO: 252560 - DNA, 27 bp, Artificial sequence
  SiRNA target sequence
tggcagtgaaaagaaaagctttatgta

SEQ ID NO: 252561 - DNA, 27 bp, Artificial sequence
  SiRNA target sequence
ggcagtgaaaagaaaagctttatgtag

SEQ ID NO: 252562 - DNA, 27 bp, Artificial sequence
  SiRNA target sequence
gcagtgaaaagaaaagctttatgtagt

SEQ ID NO: 252563 - DNA, 27 bp, Artificial sequence
  SiRNA target sequence
cagtgaaaagaaaagctttatgtagta

SEQ ID NO: 252564 - DNA, 27 bp, Artificial sequence
  SiRNA target sequence
agtgaaaagaaaagctttatgtagtac

SEQ ID NO: 252565 - DNA, 27 bp, Artificial sequence
  SiRNA target sequence
gtgaaaagaaaagctttatgtagtaca

SEQ ID NO: 252566 - DNA, 27 bp, Artificial sequence
  SiRNA target sequence
tgaaaagaaaagctttatgtagtacag

SEQ ID NO: 252567 - DNA, 27 bp, Artificial sequence
  SiRNA target sequence
gaaaagaaaagctttatgtagtacagt

SEQ ID NO: 252568 - DNA, 27 bp, Artificial sequence
  SiRNA target sequence
aaaagaaaagctttatgtagtacagtg

SEQ ID NO: 252569 - DNA, 27 bp, Artificial sequence
  SiRNA target sequence
aaagaaaagctttatgtagtacagtga

SEQ ID NO: 252570 - DNA, 27 bp, Artificial sequence
  SiRNA target sequence
aagaaaagctttatgtagtacagtgac

SEQ ID NO: 252571 - DNA, 27 bp, Artificial sequence
  SiRNA target sequence
agaaaagctttatgtagtacagtgacg

SEQ ID NO: 252572 - DNA, 27 bp, Artificial sequence
  SiRNA target sequence
gaaaagctttatgtagtacagtgacga

SEQ ID NO: 252573 - DNA, 27 bp, Artificial sequence
  SiRNA target sequence
aaaagctttatgtagtacagtgacgaa

SEQ ID NO: 252574 - DNA, 27 bp, Artificial sequence
  SiRNA target sequence
aaagctttatgtagtacagtgacgaag

SEQ ID NO: 252575 - DNA, 27 bp, Artificial sequence
  SiRNA target sequence
aagctttatgtagtacagtgacgaagg

SEQ ID NO: 252576 - DNA, 27 bp, Artificial sequence
  SiRNA target sequence
agctttatgtagtacagtgacgaagga

SEQ ID NO: 252577 - DNA, 27 bp, Artificial sequence
  SiRNA target sequence
gctttatgtagtacagtgacgaaggaa

SEQ ID NO: 252578 - DNA, 27 bp, Artificial sequence
  SiRNA target sequence
ctttatgtagtacagtgacgaaggaat

SEQ ID NO: 252579 - DNA, 27 bp, Artificial sequence
  SiRNA target sequence
tttatgtagtacagtgacgaaggaatt

SEQ ID NO: 252580 - DNA, 27 bp, Artificial sequence
  SiRNA target sequence
ttatgtagtacagtgacgaaggaattt

SEQ ID NO: 252581 - DNA, 27 bp, Artificial sequence
  SiRNA target sequence
tatgtagtacagtgacgaaggaatttg

SEQ ID NO: 252582 - DNA, 27 bp, Artificial sequence
  SiRNA target sequence
atgtagtacagtgacgaaggaatttgt

SEQ ID NO: 252583 - DNA, 27 bp, Artificial sequence
  SiRNA target sequence
tgtagtacagtgacgaaggaatttgtt

SEQ ID NO: 252584 - DNA, 27 bp, Artificial sequence
  SiRNA target sequence
gtagtacagtgacgaaggaatttgttt

SEQ ID NO: 252585 - DNA, 27 bp, Artificial sequence
  SiRNA target sequence
tagtacagtgacgaaggaatttgtttt

SEQ ID NO: 252586 - DNA, 27 bp, Artificial sequence
  SiRNA target sequence
agtacagtgacgaaggaatttgttttg

SEQ ID NO: 252587 - DNA, 27 bp, Artificial sequence
  SiRNA target sequence
gtacagtgacgaaggaatttgttttgt

SEQ ID NO: 252588 - DNA, 27 bp, Artificial sequence
  SiRNA target sequence
tacagtgacgaaggaatttgttttgtc

SEQ ID NO: 252589 - DNA, 27 bp, Artificial sequence
  SiRNA target sequence
acagtgacgaaggaatttgttttgtca

SEQ ID NO: 252590 - DNA, 27 bp, Artificial sequence
  SiRNA target sequence
cagtgacgaaggaatttgttttgtcat

SEQ ID NO: 252591 - DNA, 27 bp, Artificial sequence
  SiRNA target sequence
agtgacgaaggaatttgttttgtcata

SEQ ID NO: 252592 - DNA, 27 bp, Artificial sequence
  SiRNA target sequence
gtgacgaaggaatttgttttgtcataa

SEQ ID NO: 252593 - DNA, 27 bp, Artificial sequence
  SiRNA target sequence
tgacgaaggaatttgttttgtcataat

SEQ ID NO: 252594 - DNA, 27 bp, Artificial sequence
  SiRNA target sequence
gacgaaggaatttgttttgtcataatc

SEQ ID NO: 252595 - DNA, 27 bp, Artificial sequence
  SiRNA target sequence
acgaaggaatttgttttgtcataatca

SEQ ID NO: 252596 - DNA, 27 bp, Artificial sequence
  SiRNA target sequence
cgaaggaatttgttttgtcataatcac

SEQ ID NO: 252597 - DNA, 27 bp, Artificial sequence
  SiRNA target sequence
gaaggaatttgttttgtcataatcacg

SEQ ID NO: 252598 - DNA, 27 bp, Artificial sequence
  SiRNA target sequence
aaggaatttgttttgtcataatcacga

SEQ ID NO: 252599 - DNA, 27 bp, Artificial sequence
  SiRNA target sequence
aggaatttgttttgtcataatcacgat

SEQ ID NO: 252600 - DNA, 27 bp, Artificial sequence
  SiRNA target sequence
ggaatttgttttgtcataatcacgatt

SEQ ID NO: 252601 - DNA, 27 bp, Artificial sequence
  SiRNA target sequence
gaatttgttttgtcataatcacgattt

SEQ ID NO: 252602 - DNA, 27 bp, Artificial sequence
  SiRNA target sequence
aatttgttttgtcataatcacgatttc

SEQ ID NO: 252603 - DNA, 27 bp, Artificial sequence
  SiRNA target sequence
atttgttttgtcataatcacgatttct

SEQ ID NO: 252604 - DNA, 27 bp, Artificial sequence
  SiRNA target sequence
tttgttttgtcataatcacgatttctc

SEQ ID NO: 252605 - DNA, 27 bp, Artificial sequence
  SiRNA target sequence
ttgttttgtcataatcacgatttctct

SEQ ID NO: 252606 - DNA, 27 bp, Artificial sequence
  SiRNA target sequence
tgttttgtcataatcacgatttctctg

SEQ ID NO: 252607 - DNA, 27 bp, Artificial sequence
  SiRNA target sequence
gttttgtcataatcacgatttctctgt

SEQ ID NO: 252608 - DNA, 27 bp, Artificial sequence
  SiRNA target sequence
ttttgtcataatcacgatttctctgta

SEQ ID NO: 252609 - DNA, 27 bp, Artificial sequence
  SiRNA target sequence
tttgtcataatcacgatttctctgtaa

SEQ ID NO: 252610 - DNA, 27 bp, Artificial sequence
  SiRNA target sequence
ttgtcataatcacgatttctctgtaaa

SEQ ID NO: 252611 - DNA, 27 bp, Artificial sequence
  SiRNA target sequence
tgtcataatcacgatttctctgtaaaa

SEQ ID NO: 252612 - DNA, 27 bp, Artificial sequence
  SiRNA target sequence
gtcataatcacgatttctctgtaaaat

SEQ ID NO: 252613 - DNA, 27 bp, Artificial sequence
  SiRNA target sequence
tcataatcacgatttctctgtaaaatt

SEQ ID NO: 252614 - DNA, 27 bp, Artificial sequence
  SiRNA target sequence
cataatcacgatttctctgtaaaattc

SEQ ID NO: 252615 - DNA, 27 bp, Artificial sequence
  SiRNA target sequence
ataatcacgatttctctgtaaaattcc

SEQ ID NO: 252616 - DNA, 27 bp, Artificial sequence
  SiRNA target sequence
taatcacgatttctctgtaaaattcca

SEQ ID NO: 252617 - DNA, 27 bp, Artificial sequence
  SiRNA target sequence
aatcacgatttctctgtaaaattccaa

SEQ ID NO: 252618 - DNA, 27 bp, Artificial sequence
  SiRNA target sequence
atcacgatttctctgtaaaattccaat

SEQ ID NO: 252619 - DNA, 27 bp, Artificial sequence
  SiRNA target sequence
tcacgatttctctgtaaaattccaata

SEQ ID NO: 252620 - DNA, 27 bp, Artificial sequence
  SiRNA target sequence
cacgatttctctgtaaaattccaataa

SEQ ID NO: 252621 - DNA, 27 bp, Artificial sequence
  SiRNA target sequence
acgatttctctgtaaaattccaataat

SEQ ID NO: 252622 - DNA, 27 bp, Artificial sequence
  SiRNA target sequence
cgatttctctgtaaaattccaataatg

SEQ ID NO: 252623 - DNA, 27 bp, Artificial sequence
  SiRNA target sequence
gatttctctgtaaaattccaataatgt

SEQ ID NO: 252624 - DNA, 27 bp, Artificial sequence
  SiRNA target sequence
atttctctgtaaaattccaataatgtg

SEQ ID NO: 252625 - DNA, 27 bp, Artificial sequence
  SiRNA target sequence
tttctctgtaaaattccaataatgtgt

SEQ ID NO: 252626 - DNA, 27 bp, Artificial sequence
  SiRNA target sequence
ttctctgtaaaattccaataatgtgtt

SEQ ID NO: 252627 - DNA, 27 bp, Artificial sequence
  SiRNA target sequence
tctctgtaaaattccaataatgtgtta

SEQ ID NO: 252628 - DNA, 27 bp, Artificial sequence
  SiRNA target sequence
ctctgtaaaattccaataatgtgttaa

SEQ ID NO: 252629 - DNA, 27 bp, Artificial sequence
  SiRNA target sequence
tctgtaaaattccaataatgtgttaat

SEQ ID NO: 252630 - DNA, 27 bp, Artificial sequence
  SiRNA target sequence
ctgtaaaattccaataatgtgttaatc

SEQ ID NO: 252631 - DNA, 27 bp, Artificial sequence
  SiRNA target sequence
tgtaaaattccaataatgtgttaatca

SEQ ID NO: 252632 - DNA, 27 bp, Artificial sequence
  SiRNA target sequence
gtaaaattccaataatgtgttaatcac

SEQ ID NO: 252633 - DNA, 27 bp, Artificial sequence
  SiRNA target sequence
taaaattccaataatgtgttaatcaca

SEQ ID NO: 252634 - DNA, 27 bp, Artificial sequence
  SiRNA target sequence
aaaattccaataatgtgttaatcacac

SEQ ID NO: 252635 - DNA, 27 bp, Artificial sequence
  SiRNA target sequence
aaattccaataatgtgttaatcacaca

SEQ ID NO: 252636 - DNA, 27 bp, Artificial sequence
  SiRNA target sequence
aattccaataatgtgttaatcacacat

SEQ ID NO: 252637 - DNA, 27 bp, Artificial sequence
  SiRNA target sequence
attccaataatgtgttaatcacacatg

SEQ ID NO: 252638 - DNA, 27 bp, Artificial sequence
  SiRNA target sequence
ttccaataatgtgttaatcacacatgc

SEQ ID NO: 252639 - DNA, 27 bp, Artificial sequence
  SiRNA target sequence
tccaataatgtgttaatcacacatgcc

SEQ ID NO: 252640 - DNA, 27 bp, Artificial sequence
  SiRNA target sequence
ccaataatgtgttaatcacacatgcca

SEQ ID NO: 252641 - DNA, 27 bp, Artificial sequence
  SiRNA target sequence
caataatgtgttaatcacacatgccat

SEQ ID NO: 252642 - DNA, 27 bp, Artificial sequence
  SiRNA target sequence
aataatgtgttaatcacacatgccatt

SEQ ID NO: 252643 - DNA, 27 bp, Artificial sequence
  SiRNA target sequence
ataatgtgttaatcacacatgccatta

SEQ ID NO: 252644 - DNA, 27 bp, Artificial sequence
  SiRNA target sequence
taatgtgttaatcacacatgccattaa

SEQ ID NO: 252645 - DNA, 27 bp, Artificial sequence
  SiRNA target sequence
aatgtgttaatcacacatgccattaaa

SEQ ID NO: 252646 - DNA, 27 bp, Artificial sequence
  SiRNA target sequence
atgtgttaatcacacatgccattaaaa

SEQ ID NO: 252647 - DNA, 27 bp, Artificial sequence
  SiRNA target sequence
tgtgttaatcacacatgccattaaaaa

SEQ ID NO: 252648 - DNA, 27 bp, Artificial sequence
  SiRNA target sequence
gtgttaatcacacatgccattaaaaat

SEQ ID NO: 252649 - DNA, 27 bp, Artificial sequence
  SiRNA target sequence
tgttaatcacacatgccattaaaaatg

SEQ ID NO: 252650 - DNA, 27 bp, Artificial sequence
  SiRNA target sequence
gttaatcacacatgccattaaaaatgt

SEQ ID NO: 252651 - DNA, 27 bp, Artificial sequence
  SiRNA target sequence
ttaatcacacatgccattaaaaatgta

SEQ ID NO: 252652 - DNA, 27 bp, Artificial sequence
  SiRNA target sequence
taatcacacatgccattaaaaatgtaa

SEQ ID NO: 252653 - DNA, 27 bp, Artificial sequence
  SiRNA target sequence
aatcacacatgccattaaaaatgtaag

SEQ ID NO: 252654 - DNA, 27 bp, Artificial sequence
  SiRNA target sequence
atcacacatgccattaaaaatgtaagt

SEQ ID NO: 252655 - DNA, 27 bp, Artificial sequence
  SiRNA target sequence
tcacacatgccattaaaaatgtaagtg

SEQ ID NO: 252656 - DNA, 27 bp, Artificial sequence
  SiRNA target sequence
cacacatgccattaaaaatgtaagtga

SEQ ID NO: 252657 - DNA, 27 bp, Artificial sequence
  SiRNA target sequence
acacatgccattaaaaatgtaagtgac

SEQ ID NO: 252658 - DNA, 27 bp, Artificial sequence
  SiRNA target sequence
cacatgccattaaaaatgtaagtgaca

SEQ ID NO: 252659 - DNA, 27 bp, Artificial sequence
  SiRNA target sequence
acatgccattaaaaatgtaagtgacaa

SEQ ID NO: 252660 - DNA, 27 bp, Artificial sequence
  SiRNA target sequence
catgccattaaaaatgtaagtgacaat

SEQ ID NO: 252661 - DNA, 27 bp, Artificial sequence
  SiRNA target sequence
atgccattaaaaatgtaagtgacaata

SEQ ID NO: 252662 - DNA, 27 bp, Artificial sequence
  SiRNA target sequence
tgccattaaaaatgtaagtgacaataa

SEQ ID NO: 252663 - DNA, 27 bp, Artificial sequence
  SiRNA target sequence
gccattaaaaatgtaagtgacaataat

SEQ ID NO: 252664 - DNA, 27 bp, Artificial sequence
  SiRNA target sequence
ccattaaaaatgtaagtgacaataata

SEQ ID NO: 252665 - DNA, 27 bp, Artificial sequence
  SiRNA target sequence
cattaaaaatgtaagtgacaataatat

SEQ ID NO: 252666 - DNA, 27 bp, Artificial sequence
  SiRNA target sequence
attaaaaatgtaagtgacaataatatt

SEQ ID NO: 252667 - DNA, 27 bp, Artificial sequence
  SiRNA target sequence
ttaaaaatgtaagtgacaataatattt

SEQ ID NO: 252668 - DNA, 27 bp, Artificial sequence
  SiRNA target sequence
taaaaatgtaagtgacaataatatttt

SEQ ID NO: 252669 - DNA, 27 bp, Artificial sequence
  SiRNA target sequence
aaaaatgtaagtgacaataatattttt

SEQ ID NO: 252670 - DNA, 27 bp, Artificial sequence
  SiRNA target sequence
aaaatgtaagtgacaataatattttta

SEQ ID NO: 252671 - DNA, 27 bp, Artificial sequence
  SiRNA target sequence
aaatgtaagtgacaataatatttttac

SEQ ID NO: 252672 - DNA, 27 bp, Artificial sequence
  SiRNA target sequence
aatgtaagtgacaataatatttttact

SEQ ID NO: 252673 - DNA, 27 bp, Artificial sequence
  SiRNA target sequence
atgtaagtgacaataatatttttactt

SEQ ID NO: 252674 - DNA, 27 bp, Artificial sequence
  SiRNA target sequence
tgtaagtgacaataatatttttacttt

SEQ ID NO: 252675 - DNA, 27 bp, Artificial sequence
  SiRNA target sequence
gtaagtgacaataatatttttactttt

SEQ ID NO: 252676 - DNA, 27 bp, Artificial sequence
  SiRNA target sequence
taagtgacaataatatttttacttttg

SEQ ID NO: 252677 - DNA, 27 bp, Artificial sequence
  SiRNA target sequence
aagtgacaataatatttttacttttgg

SEQ ID NO: 252678 - DNA, 27 bp, Artificial sequence
  SiRNA target sequence
agtgacaataatatttttacttttggg

SEQ ID NO: 252679 - DNA, 27 bp, Artificial sequence
  SiRNA target sequence
gtgacaataatatttttacttttggga

SEQ ID NO: 252680 - DNA, 27 bp, Artificial sequence
  SiRNA target sequence
tgacaataatatttttacttttgggaa

SEQ ID NO: 252681 - DNA, 27 bp, Artificial sequence
  SiRNA target sequence
gacaataatatttttacttttgggaat

SEQ ID NO: 252682 - DNA, 27 bp, Artificial sequence
  SiRNA target sequence
acaataatatttttacttttgggaatt

SEQ ID NO: 252683 - DNA, 27 bp, Artificial sequence
  SiRNA target sequence
caataatatttttacttttgggaattt

SEQ ID NO: 252684 - DNA, 27 bp, Artificial sequence
  SiRNA target sequence
aataatatttttacttttgggaatttt

SEQ ID NO: 252685 - DNA, 27 bp, Artificial sequence
  SiRNA target sequence
ataatatttttacttttgggaattttt

SEQ ID NO: 252686 - DNA, 27 bp, Artificial sequence
  SiRNA target sequence
taatatttttacttttgggaatttttt

SEQ ID NO: 252687 - DNA, 27 bp, Artificial sequence
  SiRNA target sequence
aatatttttacttttgggaattttttt

SEQ ID NO: 252688 - DNA, 27 bp, Artificial sequence
  SiRNA target sequence
atatttttacttttgggaatttttttg

SEQ ID NO: 252689 - DNA, 27 bp, Artificial sequence
  SiRNA target sequence
tatttttacttttgggaatttttttgt

SEQ ID NO: 252690 - DNA, 27 bp, Artificial sequence
  SiRNA target sequence
atttttacttttgggaatttttttgtc

SEQ ID NO: 252691 - DNA, 27 bp, Artificial sequence
  SiRNA target sequence
tttttacttttgggaatttttttgtct

SEQ ID NO: 252692 - DNA, 27 bp, Artificial sequence
  SiRNA target sequence
ttttacttttgggaatttttttgtctt

SEQ ID NO: 252693 - DNA, 27 bp, Artificial sequence
  SiRNA target sequence
tttacttttgggaatttttttgtctta

SEQ ID NO: 252694 - DNA, 27 bp, Artificial sequence
  SiRNA target sequence
ttacttttgggaatttttttgtcttag

SEQ ID NO: 252695 - DNA, 27 bp, Artificial sequence
  SiRNA target sequence
tacttttgggaatttttttgtcttagt

SEQ ID NO: 252696 - DNA, 27 bp, Artificial sequence
  SiRNA target sequence
acttttgggaatttttttgtcttagtc

SEQ ID NO: 252697 - DNA, 27 bp, Artificial sequence
  SiRNA target sequence
cttttgggaatttttttgtcttagtca

SEQ ID NO: 252698 - DNA, 27 bp, Artificial sequence
  SiRNA target sequence
ttttgggaatttttttgtcttagtcat

SEQ ID NO: 252699 - DNA, 19 bp, Artificial sequence
  SiRNA target sequence
attttattcaattaaagta

SEQ ID NO: 252700 - DNA, 19 bp, Artificial sequence
  SiRNA target sequence
ttttattcaattaaagtat

SEQ ID NO: 252701 - DNA, 19 bp, Artificial sequence
  SiRNA target sequence
tttattcaattaaagtatt

SEQ ID NO: 252702 - DNA, 19 bp, Artificial sequence
  SiRNA target sequence
ttattcaattaaagtattt

SEQ ID NO: 252703 - DNA, 19 bp, Artificial sequence
  SiRNA target sequence
tattcaattaaagtattta

SEQ ID NO: 252704 - DNA, 19 bp, Artificial sequence
  SiRNA target sequence
attcaattaaagtatttac

SEQ ID NO: 252705 - DNA, 19 bp, Artificial sequence
  SiRNA target sequence
ttcaattaaagtatttacc

SEQ ID NO: 252706 - DNA, 19 bp, Artificial sequence
  SiRNA target sequence
tcaattaaagtatttacca

SEQ ID NO: 252707 - DNA, 19 bp, Artificial sequence
  SiRNA target sequence
caattaaagtatttaccaa

SEQ ID NO: 252708 - DNA, 19 bp, Artificial sequence
  SiRNA target sequence
aattaaagtatttaccaat

SEQ ID NO: 252709 - DNA, 19 bp, Artificial sequence
  SiRNA target sequence
attaaagtatttaccaatt

SEQ ID NO: 252710 - DNA, 19 bp, Artificial sequence
  SiRNA target sequence
ttaaagtatttaccaattg

SEQ ID NO: 252711 - DNA, 19 bp, Artificial sequence
  SiRNA target sequence
taaagtatttaccaattgg

SEQ ID NO: 252712 - DNA, 19 bp, Artificial sequence
  SiRNA target sequence
aaagtatttaccaattgga

SEQ ID NO: 252713 - DNA, 19 bp, Artificial sequence
  SiRNA target sequence
aagtatttaccaattggaa

SEQ ID NO: 252714 - DNA, 19 bp, Artificial sequence
  SiRNA target sequence
agtatttaccaattggaat

SEQ ID NO: 252715 - DNA, 19 bp, Artificial sequence
  SiRNA target sequence
gtatttaccaattggaata

SEQ ID NO: 252716 - DNA, 19 bp, Artificial sequence
  SiRNA target sequence
tatttaccaattggaataa

SEQ ID NO: 252717 - DNA, 19 bp, Artificial sequence
  SiRNA target sequence
atttaccaattggaataaa

SEQ ID NO: 252718 - DNA, 19 bp, Artificial sequence
  SiRNA target sequence
tttaccaattggaataaag

SEQ ID NO: 252719 - DNA, 19 bp, Artificial sequence
  SiRNA target sequence
ttaccaattggaataaaga

SEQ ID NO: 252720 - DNA, 19 bp, Artificial sequence
  SiRNA target sequence
taccaattggaataaagat

SEQ ID NO: 252721 - DNA, 19 bp, Artificial sequence
  SiRNA target sequence
accaattggaataaagata

SEQ ID NO: 252722 - DNA, 19 bp, Artificial sequence
  SiRNA target sequence
ccaattggaataaagatag

SEQ ID NO: 252723 - DNA, 19 bp, Artificial sequence
  SiRNA target sequence
caattggaataaagatagg

SEQ ID NO: 252724 - DNA, 19 bp, Artificial sequence
  SiRNA target sequence
aattggaataaagatagga

SEQ ID NO: 252725 - DNA, 19 bp, Artificial sequence
  SiRNA target sequence
attggaataaagataggat

SEQ ID NO: 252726 - DNA, 19 bp, Artificial sequence
  SiRNA target sequence
ttggaataaagataggatt

SEQ ID NO: 252727 - DNA, 19 bp, Artificial sequence
  SiRNA target sequence
tggaataaagataggatta

SEQ ID NO: 252728 - DNA, 19 bp, Artificial sequence
  SiRNA target sequence
ggaataaagataggattaa

SEQ ID NO: 252729 - DNA, 19 bp, Artificial sequence
  SiRNA target sequence
gaataaagataggattaat

SEQ ID NO: 252730 - DNA, 19 bp, Artificial sequence
  SiRNA target sequence
aataaagataggattaatg

SEQ ID NO: 252731 - DNA, 19 bp, Artificial sequence
  SiRNA target sequence
ataaagataggattaatga

SEQ ID NO: 252732 - DNA, 19 bp, Artificial sequence
  SiRNA target sequence
taaagataggattaatgat

SEQ ID NO: 252733 - DNA, 19 bp, Artificial sequence
  SiRNA target sequence
aaagataggattaatgata

SEQ ID NO: 252734 - DNA, 19 bp, Artificial sequence
  SiRNA target sequence
aagataggattaatgataa

SEQ ID NO: 252735 - DNA, 19 bp, Artificial sequence
  SiRNA target sequence
agataggattaatgataat

SEQ ID NO: 252736 - DNA, 19 bp, Artificial sequence
  SiRNA target sequence
gataggattaatgataatt

SEQ ID NO: 252737 - DNA, 19 bp, Artificial sequence
  SiRNA target sequence
ataggattaatgataattt

SEQ ID NO: 252738 - DNA, 19 bp, Artificial sequence
  SiRNA target sequence
taggattaatgataatttt

SEQ ID NO: 252739 - DNA, 19 bp, Artificial sequence
  SiRNA target sequence
aggattaatgataattttt

SEQ ID NO: 252740 - DNA, 19 bp, Artificial sequence
  SiRNA target sequence
ggattaatgataatttttt

SEQ ID NO: 252741 - DNA, 19 bp, Artificial sequence
  SiRNA target sequence
gattaatgataattttttt

SEQ ID NO: 252742 - DNA, 19 bp, Artificial sequence
  SiRNA target sequence
attaatgataattttttta

SEQ ID NO: 252743 - DNA, 19 bp, Artificial sequence
  SiRNA target sequence
ttaatgataatttttttaa

SEQ ID NO: 252744 - DNA, 19 bp, Artificial sequence
  SiRNA target sequence
taatgataatttttttaag

SEQ ID NO: 252745 - DNA, 19 bp, Artificial sequence
  SiRNA target sequence
aatgataatttttttaagt

SEQ ID NO: 252746 - DNA, 19 bp, Artificial sequence
  SiRNA target sequence
atgataatttttttaagtt

SEQ ID NO: 252747 - DNA, 19 bp, Artificial sequence
  SiRNA target sequence
tgataatttttttaagttt

SEQ ID NO: 252748 - DNA, 19 bp, Artificial sequence
  SiRNA target sequence
gataatttttttaagttta

SEQ ID NO: 252749 - DNA, 19 bp, Artificial sequence
  SiRNA target sequence
ataatttttttaagtttaa

SEQ ID NO: 252750 - DNA, 19 bp, Artificial sequence
  SiRNA target sequence
taatttttttaagtttaag

SEQ ID NO: 252751 - DNA, 19 bp, Artificial sequence
  SiRNA target sequence
aatttttttaagtttaagt

SEQ ID NO: 252752 - DNA, 19 bp, Artificial sequence
  SiRNA target sequence
atttttttaagtttaagtg

SEQ ID NO: 252753 - DNA, 19 bp, Artificial sequence
  SiRNA target sequence
tttttttaagtttaagtgg

SEQ ID NO: 252754 - DNA, 19 bp, Artificial sequence
  SiRNA target sequence
ttttttaagtttaagtgga

SEQ ID NO: 252755 - DNA, 19 bp, Artificial sequence
  SiRNA target sequence
tttttaagtttaagtggaa

SEQ ID NO: 252756 - DNA, 19 bp, Artificial sequence
  SiRNA target sequence
ttttaagtttaagtggaat

SEQ ID NO: 252757 - DNA, 19 bp, Artificial sequence
  SiRNA target sequence
tttaagtttaagtggaata

SEQ ID NO: 252758 - DNA, 19 bp, Artificial sequence
  SiRNA target sequence
ttaagtttaagtggaatac

SEQ ID NO: 252759 - DNA, 19 bp, Artificial sequence
  SiRNA target sequence
taagtttaagtggaatacc

SEQ ID NO: 252760 - DNA, 19 bp, Artificial sequence
  SiRNA target sequence
aagtttaagtggaatacct

SEQ ID NO: 252761 - DNA, 19 bp, Artificial sequence
  SiRNA target sequence
agtttaagtggaatacctc

SEQ ID NO: 252762 - DNA, 19 bp, Artificial sequence
  SiRNA target sequence
gtttaagtggaatacctcc

SEQ ID NO: 252763 - DNA, 19 bp, Artificial sequence
  SiRNA target sequence
tttaagtggaatacctccc

SEQ ID NO: 252764 - DNA, 19 bp, Artificial sequence
  SiRNA target sequence
ttaagtggaatacctccct

SEQ ID NO: 252765 - DNA, 19 bp, Artificial sequence
  SiRNA target sequence
taagtggaatacctccctt

SEQ ID NO: 252766 - DNA, 19 bp, Artificial sequence
  SiRNA target sequence
aagtggaatacctcccttt

SEQ ID NO: 252767 - DNA, 19 bp, Artificial sequence
  SiRNA target sequence
agtggaatacctcccttta

SEQ ID NO: 252768 - DNA, 19 bp, Artificial sequence
  SiRNA target sequence
gtggaatacctccctttat

SEQ ID NO: 252769 - DNA, 19 bp, Artificial sequence
  SiRNA target sequence
tggaatacctccctttata

SEQ ID NO: 252770 - DNA, 19 bp, Artificial sequence
  SiRNA target sequence
ggaatacctccctttatag

SEQ ID NO: 252771 - DNA, 19 bp, Artificial sequence
  SiRNA target sequence
gaatacctccctttatagg

SEQ ID NO: 252772 - DNA, 19 bp, Artificial sequence
  SiRNA target sequence
aatacctccctttatagga

SEQ ID NO: 252773 - DNA, 19 bp, Artificial sequence
  SiRNA target sequence
atacctccctttataggat

SEQ ID NO: 252774 - DNA, 19 bp, Artificial sequence
  SiRNA target sequence
tacctccctttataggatt

SEQ ID NO: 252775 - DNA, 19 bp, Artificial sequence
  SiRNA target sequence
acctccctttataggattt

SEQ ID NO: 252776 - DNA, 19 bp, Artificial sequence
  SiRNA target sequence
cctccctttataggattta

SEQ ID NO: 252777 - DNA, 19 bp, Artificial sequence
  SiRNA target sequence
ctccctttataggatttat

SEQ ID NO: 252778 - DNA, 19 bp, Artificial sequence
  SiRNA target sequence
tccctttataggatttatt

SEQ ID NO: 252779 - DNA, 19 bp, Artificial sequence
  SiRNA target sequence
ccctttataggatttattt

SEQ ID NO: 252780 - DNA, 19 bp, Artificial sequence
  SiRNA target sequence
cctttataggatttatttc

SEQ ID NO: 252781 - DNA, 19 bp, Artificial sequence
  SiRNA target sequence
ctttataggatttatttct

SEQ ID NO: 252782 - DNA, 19 bp, Artificial sequence
  SiRNA target sequence
tttataggatttatttcta

SEQ ID NO: 252783 - DNA, 19 bp, Artificial sequence
  SiRNA target sequence
ttataggatttatttctaa

SEQ ID NO: 252784 - DNA, 19 bp, Artificial sequence
  SiRNA target sequence
tataggatttatttctaag

SEQ ID NO: 252785 - DNA, 19 bp, Artificial sequence
  SiRNA target sequence
ataggatttatttctaaga

SEQ ID NO: 252786 - DNA, 19 bp, Artificial sequence
  SiRNA target sequence
taggatttatttctaagat

SEQ ID NO: 252787 - DNA, 19 bp, Artificial sequence
  SiRNA target sequence
aggatttatttctaagata

SEQ ID NO: 252788 - DNA, 19 bp, Artificial sequence
  SiRNA target sequence
ggatttatttctaagataa

SEQ ID NO: 252789 - DNA, 19 bp, Artificial sequence
  SiRNA target sequence
gatttatttctaagataac

SEQ ID NO: 252790 - DNA, 19 bp, Artificial sequence
  SiRNA target sequence
atttatttctaagataact

SEQ ID NO: 252791 - DNA, 19 bp, Artificial sequence
  SiRNA target sequence
tttatttctaagataactg

SEQ ID NO: 252792 - DNA, 19 bp, Artificial sequence
  SiRNA target sequence
ttatttctaagataactgt

SEQ ID NO: 252793 - DNA, 19 bp, Artificial sequence
  SiRNA target sequence
tatttctaagataactgtt

SEQ ID NO: 252794 - DNA, 19 bp, Artificial sequence
  SiRNA target sequence
atttctaagataactgttt

SEQ ID NO: 252795 - DNA, 19 bp, Artificial sequence
  SiRNA target sequence
tttctaagataactgtttt

SEQ ID NO: 252796 - DNA, 19 bp, Artificial sequence
  SiRNA target sequence
ttctaagataactgttttg

SEQ ID NO: 252797 - DNA, 19 bp, Artificial sequence
  SiRNA target sequence
tctaagataactgttttgt

SEQ ID NO: 252798 - DNA, 19 bp, Artificial sequence
  SiRNA target sequence
ctaagataactgttttgtt

SEQ ID NO: 252799 - DNA, 19 bp, Artificial sequence
  SiRNA target sequence
taagataactgttttgttg

SEQ ID NO: 252800 - DNA, 19 bp, Artificial sequence
  SiRNA target sequence
aagataactgttttgttga

SEQ ID NO: 252801 - DNA, 19 bp, Artificial sequence
  SiRNA target sequence
agataactgttttgttgat

SEQ ID NO: 252802 - DNA, 19 bp, Artificial sequence
  SiRNA target sequence
gataactgttttgttgatg

SEQ ID NO: 252803 - DNA, 19 bp, Artificial sequence
  SiRNA target sequence
ataactgttttgttgatgt

SEQ ID NO: 252804 - DNA, 19 bp, Artificial sequence
  SiRNA target sequence
taactgttttgttgatgta

SEQ ID NO: 252805 - DNA, 19 bp, Artificial sequence
  SiRNA target sequence
aactgttttgttgatgtat

SEQ ID NO: 252806 - DNA, 19 bp, Artificial sequence
  SiRNA target sequence
actgttttgttgatgtatt

SEQ ID NO: 252807 - DNA, 19 bp, Artificial sequence
  SiRNA target sequence
ctgttttgttgatgtattt

SEQ ID NO: 252808 - DNA, 19 bp, Artificial sequence
  SiRNA target sequence
tgttttgttgatgtatttt

SEQ ID NO: 252809 - DNA, 19 bp, Artificial sequence
  SiRNA target sequence
gttttgttgatgtattttg

SEQ ID NO: 252810 - DNA, 19 bp, Artificial sequence
  SiRNA target sequence
ttttgttgatgtattttga

SEQ ID NO: 252811 - DNA, 19 bp, Artificial sequence
  SiRNA target sequence
tttgttgatgtattttgag

SEQ ID NO: 252812 - DNA, 19 bp, Artificial sequence
  SiRNA target sequence
ttgttgatgtattttgaga

SEQ ID NO: 252813 - DNA, 19 bp, Artificial sequence
  SiRNA target sequence
tgttgatgtattttgagaa

SEQ ID NO: 252814 - DNA, 19 bp, Artificial sequence
  SiRNA target sequence
gttgatgtattttgagaat

SEQ ID NO: 252815 - DNA, 19 bp, Artificial sequence
  SiRNA target sequence
ttgatgtattttgagaatc

SEQ ID NO: 252816 - DNA, 19 bp, Artificial sequence
  SiRNA target sequence
tgatgtattttgagaatca

SEQ ID NO: 252817 - DNA, 19 bp, Artificial sequence
  SiRNA target sequence
gatgtattttgagaatcaa

SEQ ID NO: 252818 - DNA, 19 bp, Artificial sequence
  SiRNA target sequence
atgtattttgagaatcaaa

SEQ ID NO: 252819 - DNA, 19 bp, Artificial sequence
  SiRNA target sequence
tgtattttgagaatcaaaa

SEQ ID NO: 252820 - DNA, 19 bp, Artificial sequence
  SiRNA target sequence
gtattttgagaatcaaaaa

SEQ ID NO: 252821 - DNA, 19 bp, Artificial sequence
  SiRNA target sequence
tattttgagaatcaaaaaa

SEQ ID NO: 252822 - DNA, 19 bp, Artificial sequence
  SiRNA target sequence
attttgagaatcaaaaaat

SEQ ID NO: 252823 - DNA, 19 bp, Artificial sequence
  SiRNA target sequence
ttttgagaatcaaaaaata

SEQ ID NO: 252824 - DNA, 19 bp, Artificial sequence
  SiRNA target sequence
tttgagaatcaaaaaataa

SEQ ID NO: 252825 - DNA, 19 bp, Artificial sequence
  SiRNA target sequence
ttgagaatcaaaaaataat

SEQ ID NO: 252826 - DNA, 19 bp, Artificial sequence
  SiRNA target sequence
tgagaatcaaaaaataatt

SEQ ID NO: 252827 - DNA, 19 bp, Artificial sequence
  SiRNA target sequence
gagaatcaaaaaataattt

SEQ ID NO: 252828 - DNA, 19 bp, Artificial sequence
  SiRNA target sequence
agaatcaaaaaataatttt

SEQ ID NO: 252829 - DNA, 19 bp, Artificial sequence
  SiRNA target sequence
gaatcaaaaaataattttt

SEQ ID NO: 252830 - DNA, 19 bp, Artificial sequence
  SiRNA target sequence
aatcaaaaaataatttttt

SEQ ID NO: 252831 - DNA, 19 bp, Artificial sequence
  SiRNA target sequence
atcaaaaaataattttttt

SEQ ID NO: 252832 - DNA, 19 bp, Artificial sequence
  SiRNA target sequence
tcaaaaaataattttttta

SEQ ID NO: 252833 - DNA, 19 bp, Artificial sequence
  SiRNA target sequence
caaaaaataatttttttaa

SEQ ID NO: 252834 - DNA, 19 bp, Artificial sequence
  SiRNA target sequence
aaaaaataatttttttaat

SEQ ID NO: 252835 - DNA, 19 bp, Artificial sequence
  SiRNA target sequence
aaaaataatttttttaatt

SEQ ID NO: 252836 - DNA, 19 bp, Artificial sequence
  SiRNA target sequence
aaaataatttttttaatta

SEQ ID NO: 252837 - DNA, 19 bp, Artificial sequence
  SiRNA target sequence
aaataatttttttaattat

SEQ ID NO: 252838 - DNA, 19 bp, Artificial sequence
  SiRNA target sequence
aataatttttttaattata

SEQ ID NO: 252839 - DNA, 19 bp, Artificial sequence
  SiRNA target sequence
ataatttttttaattatat

SEQ ID NO: 252840 - DNA, 19 bp, Artificial sequence
  SiRNA target sequence
taatttttttaattatatt

SEQ ID NO: 252841 - DNA, 19 bp, Artificial sequence
  SiRNA target sequence
aatttttttaattatatta

SEQ ID NO: 252842 - DNA, 19 bp, Artificial sequence
  SiRNA target sequence
atttttttaattatattat

SEQ ID NO: 252843 - DNA, 19 bp, Artificial sequence
  SiRNA target sequence
tttttttaattatattatt

SEQ ID NO: 252844 - DNA, 19 bp, Artificial sequence
  SiRNA target sequence
ttttttaattatattatta

SEQ ID NO: 252845 - DNA, 19 bp, Artificial sequence
  SiRNA target sequence
tttttaattatattattag

SEQ ID NO: 252846 - DNA, 19 bp, Artificial sequence
  SiRNA target sequence
ttttaattatattattagt

SEQ ID NO: 252847 - DNA, 19 bp, Artificial sequence
  SiRNA target sequence
tttaattatattattagta

SEQ ID NO: 252848 - DNA, 19 bp, Artificial sequence
  SiRNA target sequence
ttaattatattattagtat

SEQ ID NO: 252849 - DNA, 19 bp, Artificial sequence
  SiRNA target sequence
taattatattattagtatc

SEQ ID NO: 252850 - DNA, 19 bp, Artificial sequence
  SiRNA target sequence
aattatattattagtatct

SEQ ID NO: 252851 - DNA, 19 bp, Artificial sequence
  SiRNA target sequence
attatattattagtatctg

SEQ ID NO: 252852 - DNA, 19 bp, Artificial sequence
  SiRNA target sequence
ttatattattagtatctgt

SEQ ID NO: 252853 - DNA, 19 bp, Artificial sequence
  SiRNA target sequence
tatattattagtatctgta

SEQ ID NO: 252854 - DNA, 19 bp, Artificial sequence
  SiRNA target sequence
atattattagtatctgtaa

SEQ ID NO: 252855 - DNA, 19 bp, Artificial sequence
  SiRNA target sequence
tattattagtatctgtaat

SEQ ID NO: 252856 - DNA, 19 bp, Artificial sequence
  SiRNA target sequence
attattagtatctgtaata

SEQ ID NO: 252857 - DNA, 19 bp, Artificial sequence
  SiRNA target sequence
ttattagtatctgtaataa

SEQ ID NO: 252858 - DNA, 19 bp, Artificial sequence
  SiRNA target sequence
tattagtatctgtaataag

SEQ ID NO: 252859 - DNA, 19 bp, Artificial sequence
  SiRNA target sequence
attagtatctgtaataaga

SEQ ID NO: 252860 - DNA, 19 bp, Artificial sequence
  SiRNA target sequence
ttagtatctgtaataagaa

SEQ ID NO: 252861 - DNA, 19 bp, Artificial sequence
  SiRNA target sequence
tagtatctgtaataagaat

SEQ ID NO: 252862 - DNA, 19 bp, Artificial sequence
  SiRNA target sequence
agtatctgtaataagaata

SEQ ID NO: 252863 - DNA, 19 bp, Artificial sequence
  SiRNA target sequence
gtatctgtaataagaatat

SEQ ID NO: 252864 - DNA, 19 bp, Artificial sequence
  SiRNA target sequence
tatctgtaataagaatata

SEQ ID NO: 252865 - DNA, 19 bp, Artificial sequence
  SiRNA target sequence
atctgtaataagaatatat

SEQ ID NO: 252866 - DNA, 19 bp, Artificial sequence
  SiRNA target sequence
tctgtaataagaatatata

SEQ ID NO: 252867 - DNA, 19 bp, Artificial sequence
  SiRNA target sequence
ctgtaataagaatatatat

SEQ ID NO: 252868 - DNA, 19 bp, Artificial sequence
  SiRNA target sequence
tgtaataagaatatatatt

SEQ ID NO: 252869 - DNA, 19 bp, Artificial sequence
  SiRNA target sequence
gtaataagaatatatattt

SEQ ID NO: 252870 - DNA, 19 bp, Artificial sequence
  SiRNA target sequence
taataagaatatatattta

SEQ ID NO: 252871 - DNA, 19 bp, Artificial sequence
  SiRNA target sequence
aataagaatatatatttat

SEQ ID NO: 252872 - DNA, 19 bp, Artificial sequence
  SiRNA target sequence
ataagaatatatatttata

SEQ ID NO: 252873 - DNA, 19 bp, Artificial sequence
  SiRNA target sequence
taagaatatatatttatat

SEQ ID NO: 252874 - DNA, 19 bp, Artificial sequence
  SiRNA target sequence
aagaatatatatttatata

SEQ ID NO: 252875 - DNA, 19 bp, Artificial sequence
  SiRNA target sequence
agaatatatatttatataa

SEQ ID NO: 252876 - DNA, 19 bp, Artificial sequence
  SiRNA target sequence
gaatatatatttatataaa

SEQ ID NO: 252877 - DNA, 19 bp, Artificial sequence
  SiRNA target sequence
aatatatatttatataaat

SEQ ID NO: 252878 - DNA, 19 bp, Artificial sequence
  SiRNA target sequence
atatatatttatataaatt

SEQ ID NO: 252879 - DNA, 19 bp, Artificial sequence
  SiRNA target sequence
tatatatttatataaatta

SEQ ID NO: 252880 - DNA, 19 bp, Artificial sequence
  SiRNA target sequence
atatatttatataaattat

SEQ ID NO: 252881 - DNA, 19 bp, Artificial sequence
  SiRNA target sequence
tatatttatataaattatt

SEQ ID NO: 252882 - DNA, 19 bp, Artificial sequence
  SiRNA target sequence
atatttatataaattattt

SEQ ID NO: 252883 - DNA, 19 bp, Artificial sequence
  SiRNA target sequence
tatttatataaattatttt

SEQ ID NO: 252884 - DNA, 19 bp, Artificial sequence
  SiRNA target sequence
atttatataaattatttta

SEQ ID NO: 252885 - DNA, 19 bp, Artificial sequence
  SiRNA target sequence
tttatataaattattttat

SEQ ID NO: 252886 - DNA, 19 bp, Artificial sequence
  SiRNA target sequence
ttatataaattattttatg

SEQ ID NO: 252887 - DNA, 19 bp, Artificial sequence
  SiRNA target sequence
tatataaattattttatga

SEQ ID NO: 252888 - DNA, 19 bp, Artificial sequence
  SiRNA target sequence
atataaattattttatgaa

SEQ ID NO: 252889 - DNA, 19 bp, Artificial sequence
  SiRNA target sequence
tataaattattttatgaag

SEQ ID NO: 252890 - DNA, 19 bp, Artificial sequence
  SiRNA target sequence
ataaattattttatgaaga

SEQ ID NO: 252891 - DNA, 19 bp, Artificial sequence
  SiRNA target sequence
taaattattttatgaagag

SEQ ID NO: 252892 - DNA, 19 bp, Artificial sequence
  SiRNA target sequence
aaattattttatgaagagt

SEQ ID NO: 252893 - DNA, 19 bp, Artificial sequence
  SiRNA target sequence
aattattttatgaagagtt

SEQ ID NO: 252894 - DNA, 19 bp, Artificial sequence
  SiRNA target sequence
attattttatgaagagttt

SEQ ID NO: 252895 - DNA, 19 bp, Artificial sequence
  SiRNA target sequence
ttattttatgaagagttta

SEQ ID NO: 252896 - DNA, 19 bp, Artificial sequence
  SiRNA target sequence
tattttatgaagagtttat

SEQ ID NO: 252897 - DNA, 19 bp, Artificial sequence
  SiRNA target sequence
attttatgaagagtttatt

SEQ ID NO: 252898 - DNA, 19 bp, Artificial sequence
  SiRNA target sequence
ttttatgaagagtttattt

SEQ ID NO: 252899 - DNA, 19 bp, Artificial sequence
  SiRNA target sequence
tttatgaagagtttatttt

SEQ ID NO: 252900 - DNA, 19 bp, Artificial sequence
  SiRNA target sequence
ttatgaagagtttattttt

SEQ ID NO: 252901 - DNA, 19 bp, Artificial sequence
  SiRNA target sequence
tatgaagagtttatttttt

SEQ ID NO: 252902 - DNA, 19 bp, Artificial sequence
  SiRNA target sequence
atgaagagtttatttttta

SEQ ID NO: 252903 - DNA, 19 bp, Artificial sequence
  SiRNA target sequence
tgaagagtttattttttat

SEQ ID NO: 252904 - DNA, 19 bp, Artificial sequence
  SiRNA target sequence
gaagagtttattttttata

SEQ ID NO: 252905 - DNA, 19 bp, Artificial sequence
  SiRNA target sequence
aagagtttattttttataa

SEQ ID NO: 252906 - DNA, 19 bp, Artificial sequence
  SiRNA target sequence
agagtttattttttataag

SEQ ID NO: 252907 - DNA, 19 bp, Artificial sequence
  SiRNA target sequence
gagtttattttttataaga

SEQ ID NO: 252908 - DNA, 19 bp, Artificial sequence
  SiRNA target sequence
agtttattttttataagat

SEQ ID NO: 252909 - DNA, 19 bp, Artificial sequence
  SiRNA target sequence
gtttattttttataagatt

SEQ ID NO: 252910 - DNA, 19 bp, Artificial sequence
  SiRNA target sequence
tttattttttataagatta

SEQ ID NO: 252911 - DNA, 19 bp, Artificial sequence
  SiRNA target sequence
ttattttttataagattag

SEQ ID NO: 252912 - DNA, 19 bp, Artificial sequence
  SiRNA target sequence
tattttttataagattagg

SEQ ID NO: 252913 - DNA, 19 bp, Artificial sequence
  SiRNA target sequence
attttttataagattaggt

SEQ ID NO: 252914 - DNA, 19 bp, Artificial sequence
  SiRNA target sequence
ttttttataagattaggtt

SEQ ID NO: 252915 - DNA, 19 bp, Artificial sequence
  SiRNA target sequence
tttttataagattaggtta

SEQ ID NO: 252916 - DNA, 19 bp, Artificial sequence
  SiRNA target sequence
ttttataagattaggttat

SEQ ID NO: 252917 - DNA, 19 bp, Artificial sequence
  SiRNA target sequence
tttataagattaggttata

SEQ ID NO: 252918 - DNA, 19 bp, Artificial sequence
  SiRNA target sequence
ttataagattaggttataa

SEQ ID NO: 252919 - DNA, 19 bp, Artificial sequence
  SiRNA target sequence
tataagattaggttataat

SEQ ID NO: 252920 - DNA, 19 bp, Artificial sequence
  SiRNA target sequence
ataagattaggttataata

SEQ ID NO: 252921 - DNA, 19 bp, Artificial sequence
  SiRNA target sequence
taagattaggttataataa

SEQ ID NO: 252922 - DNA, 19 bp, Artificial sequence
  SiRNA target sequence
aagattaggttataataaa

SEQ ID NO: 252923 - DNA, 19 bp, Artificial sequence
  SiRNA target sequence
agattaggttataataaaa

SEQ ID NO: 252924 - DNA, 19 bp, Artificial sequence
  SiRNA target sequence
gattaggttataataaaaa

SEQ ID NO: 252925 - DNA, 19 bp, Artificial sequence
  SiRNA target sequence
attaggttataataaaaat

SEQ ID NO: 252926 - DNA, 19 bp, Artificial sequence
  SiRNA target sequence
ttaggttataataaaaata

SEQ ID NO: 252927 - DNA, 19 bp, Artificial sequence
  SiRNA target sequence
taggttataataaaaataa

SEQ ID NO: 252928 - DNA, 19 bp, Artificial sequence
  SiRNA target sequence
aggttataataaaaataaa

SEQ ID NO: 252929 - DNA, 19 bp, Artificial sequence
  SiRNA target sequence
ggttataataaaaataaaa

SEQ ID NO: 252930 - DNA, 19 bp, Artificial sequence
  SiRNA target sequence
gttataataaaaataaaaa

SEQ ID NO: 252931 - DNA, 19 bp, Artificial sequence
  SiRNA target sequence
ttataataaaaataaaaat

SEQ ID NO: 252932 - DNA, 19 bp, Artificial sequence
  SiRNA target sequence
tataataaaaataaaaata

SEQ ID NO: 252933 - DNA, 19 bp, Artificial sequence
  SiRNA target sequence
ataataaaaataaaaatat

SEQ ID NO: 252934 - DNA, 19 bp, Artificial sequence
  SiRNA target sequence
taataaaaataaaaatata

SEQ ID NO: 252935 - DNA, 19 bp, Artificial sequence
  SiRNA target sequence
aataaaaataaaaatatag

SEQ ID NO: 252936 - DNA, 19 bp, Artificial sequence
  SiRNA target sequence
ataaaaataaaaatatagg

SEQ ID NO: 252937 - DNA, 19 bp, Artificial sequence
  SiRNA target sequence
taaaaataaaaatatagga

SEQ ID NO: 252938 - DNA, 19 bp, Artificial sequence
  SiRNA target sequence
aaaaataaaaatataggaa

SEQ ID NO: 252939 - DNA, 19 bp, Artificial sequence
  SiRNA target sequence
aaaataaaaatataggaat

SEQ ID NO: 252940 - DNA, 19 bp, Artificial sequence
  SiRNA target sequence
aaataaaaatataggaata

SEQ ID NO: 252941 - DNA, 19 bp, Artificial sequence
  SiRNA target sequence
aataaaaatataggaataa

SEQ ID NO: 252942 - DNA, 19 bp, Artificial sequence
  SiRNA target sequence
ataaaaatataggaataag

SEQ ID NO: 252943 - DNA, 19 bp, Artificial sequence
  SiRNA target sequence
taaaaatataggaataaga

SEQ ID NO: 252944 - DNA, 19 bp, Artificial sequence
  SiRNA target sequence
aaaaatataggaataagaa

SEQ ID NO: 252945 - DNA, 19 bp, Artificial sequence
  SiRNA target sequence
aaaatataggaataagaag

SEQ ID NO: 252946 - DNA, 19 bp, Artificial sequence
  SiRNA target sequence
aaatataggaataagaaga

SEQ ID NO: 252947 - DNA, 20 bp, Artificial sequence
  SiRNA target sequence
attttattcaattaaagtat

SEQ ID NO: 252948 - DNA, 20 bp, Artificial sequence
  SiRNA target sequence
ttttattcaattaaagtatt

SEQ ID NO: 252949 - DNA, 20 bp, Artificial sequence
  SiRNA target sequence
tttattcaattaaagtattt

SEQ ID NO: 252950 - DNA, 20 bp, Artificial sequence
  SiRNA target sequence
ttattcaattaaagtattta

SEQ ID NO: 252951 - DNA, 20 bp, Artificial sequence
  SiRNA target sequence
tattcaattaaagtatttac

SEQ ID NO: 252952 - DNA, 20 bp, Artificial sequence
  SiRNA target sequence
attcaattaaagtatttacc

SEQ ID NO: 252953 - DNA, 20 bp, Artificial sequence
  SiRNA target sequence
ttcaattaaagtatttacca

SEQ ID NO: 252954 - DNA, 20 bp, Artificial sequence
  SiRNA target sequence
tcaattaaagtatttaccaa

SEQ ID NO: 252955 - DNA, 20 bp, Artificial sequence
  SiRNA target sequence
caattaaagtatttaccaat

SEQ ID NO: 252956 - DNA, 20 bp, Artificial sequence
  SiRNA target sequence
aattaaagtatttaccaatt

SEQ ID NO: 252957 - DNA, 20 bp, Artificial sequence
  SiRNA target sequence
attaaagtatttaccaattg

SEQ ID NO: 252958 - DNA, 20 bp, Artificial sequence
  SiRNA target sequence
ttaaagtatttaccaattgg

SEQ ID NO: 252959 - DNA, 20 bp, Artificial sequence
  SiRNA target sequence
taaagtatttaccaattgga

SEQ ID NO: 252960 - DNA, 20 bp, Artificial sequence
  SiRNA target sequence
aaagtatttaccaattggaa

SEQ ID NO: 252961 - DNA, 20 bp, Artificial sequence
  SiRNA target sequence
aagtatttaccaattggaat

SEQ ID NO: 252962 - DNA, 20 bp, Artificial sequence
  SiRNA target sequence
agtatttaccaattggaata

SEQ ID NO: 252963 - DNA, 20 bp, Artificial sequence
  SiRNA target sequence
gtatttaccaattggaataa

SEQ ID NO: 252964 - DNA, 20 bp, Artificial sequence
  SiRNA target sequence
tatttaccaattggaataaa

SEQ ID NO: 252965 - DNA, 20 bp, Artificial sequence
  SiRNA target sequence
atttaccaattggaataaag

SEQ ID NO: 252966 - DNA, 20 bp, Artificial sequence
  SiRNA target sequence
tttaccaattggaataaaga

SEQ ID NO: 252967 - DNA, 20 bp, Artificial sequence
  SiRNA target sequence
ttaccaattggaataaagat

SEQ ID NO: 252968 - DNA, 20 bp, Artificial sequence
  SiRNA target sequence
taccaattggaataaagata

SEQ ID NO: 252969 - DNA, 20 bp, Artificial sequence
  SiRNA target sequence
accaattggaataaagatag

SEQ ID NO: 252970 - DNA, 20 bp, Artificial sequence
  SiRNA target sequence
ccaattggaataaagatagg

SEQ ID NO: 252971 - DNA, 20 bp, Artificial sequence
  SiRNA target sequence
caattggaataaagatagga

SEQ ID NO: 252972 - DNA, 20 bp, Artificial sequence
  SiRNA target sequence
aattggaataaagataggat

SEQ ID NO: 252973 - DNA, 20 bp, Artificial sequence
  SiRNA target sequence
attggaataaagataggatt

SEQ ID NO: 252974 - DNA, 20 bp, Artificial sequence
  SiRNA target sequence
ttggaataaagataggatta

SEQ ID NO: 252975 - DNA, 20 bp, Artificial sequence
  SiRNA target sequence
tggaataaagataggattaa

SEQ ID NO: 252976 - DNA, 20 bp, Artificial sequence
  SiRNA target sequence
ggaataaagataggattaat

SEQ ID NO: 252977 - DNA, 20 bp, Artificial sequence
  SiRNA target sequence
gaataaagataggattaatg

SEQ ID NO: 252978 - DNA, 20 bp, Artificial sequence
  SiRNA target sequence
aataaagataggattaatga

SEQ ID NO: 252979 - DNA, 20 bp, Artificial sequence
  SiRNA target sequence
ataaagataggattaatgat

SEQ ID NO: 252980 - DNA, 20 bp, Artificial sequence
  SiRNA target sequence
taaagataggattaatgata

SEQ ID NO: 252981 - DNA, 20 bp, Artificial sequence
  SiRNA target sequence
aaagataggattaatgataa

SEQ ID NO: 252982 - DNA, 20 bp, Artificial sequence
  SiRNA target sequence
aagataggattaatgataat

SEQ ID NO: 252983 - DNA, 20 bp, Artificial sequence
  SiRNA target sequence
agataggattaatgataatt

SEQ ID NO: 252984 - DNA, 20 bp, Artificial sequence
  SiRNA target sequence
gataggattaatgataattt

SEQ ID NO: 252985 - DNA, 20 bp, Artificial sequence
  SiRNA target sequence
ataggattaatgataatttt

SEQ ID NO: 252986 - DNA, 20 bp, Artificial sequence
  SiRNA target sequence
taggattaatgataattttt

SEQ ID NO: 252987 - DNA, 20 bp, Artificial sequence
  SiRNA target sequence
aggattaatgataatttttt

SEQ ID NO: 252988 - DNA, 20 bp, Artificial sequence
  SiRNA target sequence
ggattaatgataattttttt

SEQ ID NO: 252989 - DNA, 20 bp, Artificial sequence
  SiRNA target sequence
gattaatgataattttttta

SEQ ID NO: 252990 - DNA, 20 bp, Artificial sequence
  SiRNA target sequence
attaatgataatttttttaa

SEQ ID NO: 252991 - DNA, 20 bp, Artificial sequence
  SiRNA target sequence
ttaatgataatttttttaag

SEQ ID NO: 252992 - DNA, 20 bp, Artificial sequence
  SiRNA target sequence
taatgataatttttttaagt

SEQ ID NO: 252993 - DNA, 20 bp, Artificial sequence
  SiRNA target sequence
aatgataatttttttaagtt

SEQ ID NO: 252994 - DNA, 20 bp, Artificial sequence
  SiRNA target sequence
atgataatttttttaagttt

SEQ ID NO: 252995 - DNA, 20 bp, Artificial sequence
  SiRNA target sequence
tgataatttttttaagttta

SEQ ID NO: 252996 - DNA, 20 bp, Artificial sequence
  SiRNA target sequence
gataatttttttaagtttaa

SEQ ID NO: 252997 - DNA, 20 bp, Artificial sequence
  SiRNA target sequence
ataatttttttaagtttaag

SEQ ID NO: 252998 - DNA, 20 bp, Artificial sequence
  SiRNA target sequence
taatttttttaagtttaagt

SEQ ID NO: 252999 - DNA, 20 bp, Artificial sequence
  SiRNA target sequence
aatttttttaagtttaagtg

SEQ ID NO: 253000 - DNA, 20 bp, Artificial sequence
  SiRNA target sequence
atttttttaagtttaagtgg

SEQ ID NO: 253001 - DNA, 20 bp, Artificial sequence
  SiRNA target sequence
tttttttaagtttaagtgga

SEQ ID NO: 253002 - DNA, 20 bp, Artificial sequence
  SiRNA target sequence
ttttttaagtttaagtggaa

SEQ ID NO: 253003 - DNA, 20 bp, Artificial sequence
  SiRNA target sequence
tttttaagtttaagtggaat

SEQ ID NO: 253004 - DNA, 20 bp, Artificial sequence
  SiRNA target sequence
ttttaagtttaagtggaata

SEQ ID NO: 253005 - DNA, 20 bp, Artificial sequence
  SiRNA target sequence
tttaagtttaagtggaatac

SEQ ID NO: 253006 - DNA, 20 bp, Artificial sequence
  SiRNA target sequence
ttaagtttaagtggaatacc

SEQ ID NO: 253007 - DNA, 20 bp, Artificial sequence
  SiRNA target sequence
taagtttaagtggaatacct

SEQ ID NO: 253008 - DNA, 20 bp, Artificial sequence
  SiRNA target sequence
aagtttaagtggaatacctc

SEQ ID NO: 253009 - DNA, 20 bp, Artificial sequence
  SiRNA target sequence
agtttaagtggaatacctcc

SEQ ID NO: 253010 - DNA, 20 bp, Artificial sequence
  SiRNA target sequence
gtttaagtggaatacctccc

SEQ ID NO: 253011 - DNA, 20 bp, Artificial sequence
  SiRNA target sequence
tttaagtggaatacctccct

SEQ ID NO: 253012 - DNA, 20 bp, Artificial sequence
  SiRNA target sequence
ttaagtggaatacctccctt

SEQ ID NO: 253013 - DNA, 20 bp, Artificial sequence
  SiRNA target sequence
taagtggaatacctcccttt

SEQ ID NO: 253014 - DNA, 20 bp, Artificial sequence
  SiRNA target sequence
aagtggaatacctcccttta

SEQ ID NO: 253015 - DNA, 20 bp, Artificial sequence
  SiRNA target sequence
agtggaatacctccctttat

SEQ ID NO: 253016 - DNA, 20 bp, Artificial sequence
  SiRNA target sequence
gtggaatacctccctttata

SEQ ID NO: 253017 - DNA, 20 bp, Artificial sequence
  SiRNA target sequence
tggaatacctccctttatag

SEQ ID NO: 253018 - DNA, 20 bp, Artificial sequence
  SiRNA target sequence
ggaatacctccctttatagg

SEQ ID NO: 253019 - DNA, 20 bp, Artificial sequence
  SiRNA target sequence
gaatacctccctttatagga

SEQ ID NO: 253020 - DNA, 20 bp, Artificial sequence
  SiRNA target sequence
aatacctccctttataggat

SEQ ID NO: 253021 - DNA, 20 bp, Artificial sequence
  SiRNA target sequence
atacctccctttataggatt

SEQ ID NO: 253022 - DNA, 20 bp, Artificial sequence
  SiRNA target sequence
tacctccctttataggattt

SEQ ID NO: 253023 - DNA, 20 bp, Artificial sequence
  SiRNA target sequence
acctccctttataggattta

SEQ ID NO: 253024 - DNA, 20 bp, Artificial sequence
  SiRNA target sequence
cctccctttataggatttat

SEQ ID NO: 253025 - DNA, 20 bp, Artificial sequence
  SiRNA target sequence
ctccctttataggatttatt

SEQ ID NO: 253026 - DNA, 20 bp, Artificial sequence
  SiRNA target sequence
tccctttataggatttattt

SEQ ID NO: 253027 - DNA, 20 bp, Artificial sequence
  SiRNA target sequence
ccctttataggatttatttc

SEQ ID NO: 253028 - DNA, 20 bp, Artificial sequence
  SiRNA target sequence
cctttataggatttatttct

SEQ ID NO: 253029 - DNA, 20 bp, Artificial sequence
  SiRNA target sequence
ctttataggatttatttcta

SEQ ID NO: 253030 - DNA, 20 bp, Artificial sequence
  SiRNA target sequence
tttataggatttatttctaa

SEQ ID NO: 253031 - DNA, 20 bp, Artificial sequence
  SiRNA target sequence
ttataggatttatttctaag

SEQ ID NO: 253032 - DNA, 20 bp, Artificial sequence
  SiRNA target sequence
tataggatttatttctaaga

SEQ ID NO: 253033 - DNA, 20 bp, Artificial sequence
  SiRNA target sequence
ataggatttatttctaagat

SEQ ID NO: 253034 - DNA, 20 bp, Artificial sequence
  SiRNA target sequence
taggatttatttctaagata

SEQ ID NO: 253035 - DNA, 20 bp, Artificial sequence
  SiRNA target sequence
aggatttatttctaagataa

SEQ ID NO: 253036 - DNA, 20 bp, Artificial sequence
  SiRNA target sequence
ggatttatttctaagataac

SEQ ID NO: 253037 - DNA, 20 bp, Artificial sequence
  SiRNA target sequence
gatttatttctaagataact

SEQ ID NO: 253038 - DNA, 20 bp, Artificial sequence
  SiRNA target sequence
atttatttctaagataactg

SEQ ID NO: 253039 - DNA, 20 bp, Artificial sequence
  SiRNA target sequence
tttatttctaagataactgt

SEQ ID NO: 253040 - DNA, 20 bp, Artificial sequence
  SiRNA target sequence
ttatttctaagataactgtt

SEQ ID NO: 253041 - DNA, 20 bp, Artificial sequence
  SiRNA target sequence
tatttctaagataactgttt

SEQ ID NO: 253042 - DNA, 20 bp, Artificial sequence
  SiRNA target sequence
atttctaagataactgtttt

SEQ ID NO: 253043 - DNA, 20 bp, Artificial sequence
  SiRNA target sequence
tttctaagataactgttttg

SEQ ID NO: 253044 - DNA, 20 bp, Artificial sequence
  SiRNA target sequence
ttctaagataactgttttgt

SEQ ID NO: 253045 - DNA, 20 bp, Artificial sequence
  SiRNA target sequence
tctaagataactgttttgtt

SEQ ID NO: 253046 - DNA, 20 bp, Artificial sequence
  SiRNA target sequence
ctaagataactgttttgttg

SEQ ID NO: 253047 - DNA, 20 bp, Artificial sequence
  SiRNA target sequence
taagataactgttttgttga

SEQ ID NO: 253048 - DNA, 20 bp, Artificial sequence
  SiRNA target sequence
aagataactgttttgttgat

SEQ ID NO: 253049 - DNA, 20 bp, Artificial sequence
  SiRNA target sequence
agataactgttttgttgatg

SEQ ID NO: 253050 - DNA, 20 bp, Artificial sequence
  SiRNA target sequence
gataactgttttgttgatgt

SEQ ID NO: 253051 - DNA, 20 bp, Artificial sequence
  SiRNA target sequence
ataactgttttgttgatgta

SEQ ID NO: 253052 - DNA, 20 bp, Artificial sequence
  SiRNA target sequence
taactgttttgttgatgtat

SEQ ID NO: 253053 - DNA, 20 bp, Artificial sequence
  SiRNA target sequence
aactgttttgttgatgtatt

SEQ ID NO: 253054 - DNA, 20 bp, Artificial sequence
  SiRNA target sequence
actgttttgttgatgtattt

SEQ ID NO: 253055 - DNA, 20 bp, Artificial sequence
  SiRNA target sequence
ctgttttgttgatgtatttt

SEQ ID NO: 253056 - DNA, 20 bp, Artificial sequence
  SiRNA target sequence
tgttttgttgatgtattttg

SEQ ID NO: 253057 - DNA, 20 bp, Artificial sequence
  SiRNA target sequence
gttttgttgatgtattttga

SEQ ID NO: 253058 - DNA, 20 bp, Artificial sequence
  SiRNA target sequence
ttttgttgatgtattttgag

SEQ ID NO: 253059 - DNA, 20 bp, Artificial sequence
  SiRNA target sequence
tttgttgatgtattttgaga

SEQ ID NO: 253060 - DNA, 20 bp, Artificial sequence
  SiRNA target sequence
ttgttgatgtattttgagaa

SEQ ID NO: 253061 - DNA, 20 bp, Artificial sequence
  SiRNA target sequence
tgttgatgtattttgagaat

SEQ ID NO: 253062 - DNA, 20 bp, Artificial sequence
  SiRNA target sequence
gttgatgtattttgagaatc

SEQ ID NO: 253063 - DNA, 20 bp, Artificial sequence
  SiRNA target sequence
ttgatgtattttgagaatca

SEQ ID NO: 253064 - DNA, 20 bp, Artificial sequence
  SiRNA target sequence
tgatgtattttgagaatcaa

SEQ ID NO: 253065 - DNA, 20 bp, Artificial sequence
  SiRNA target sequence
gatgtattttgagaatcaaa

SEQ ID NO: 253066 - DNA, 20 bp, Artificial sequence
  SiRNA target sequence
atgtattttgagaatcaaaa

SEQ ID NO: 253067 - DNA, 20 bp, Artificial sequence
  SiRNA target sequence
tgtattttgagaatcaaaaa

SEQ ID NO: 253068 - DNA, 20 bp, Artificial sequence
  SiRNA target sequence
gtattttgagaatcaaaaaa

SEQ ID NO: 253069 - DNA, 20 bp, Artificial sequence
  SiRNA target sequence
tattttgagaatcaaaaaat

SEQ ID NO: 253070 - DNA, 20 bp, Artificial sequence
  SiRNA target sequence
attttgagaatcaaaaaata

SEQ ID NO: 253071 - DNA, 20 bp, Artificial sequence
  SiRNA target sequence
ttttgagaatcaaaaaataa

SEQ ID NO: 253072 - DNA, 20 bp, Artificial sequence
  SiRNA target sequence
tttgagaatcaaaaaataat

SEQ ID NO: 253073 - DNA, 20 bp, Artificial sequence
  SiRNA target sequence
ttgagaatcaaaaaataatt

SEQ ID NO: 253074 - DNA, 20 bp, Artificial sequence
  SiRNA target sequence
tgagaatcaaaaaataattt

SEQ ID NO: 253075 - DNA, 20 bp, Artificial sequence
  SiRNA target sequence
gagaatcaaaaaataatttt

SEQ ID NO: 253076 - DNA, 20 bp, Artificial sequence
  SiRNA target sequence
agaatcaaaaaataattttt

SEQ ID NO: 253077 - DNA, 20 bp, Artificial sequence
  SiRNA target sequence
gaatcaaaaaataatttttt

SEQ ID NO: 253078 - DNA, 20 bp, Artificial sequence
  SiRNA target sequence
aatcaaaaaataattttttt

SEQ ID NO: 253079 - DNA, 20 bp, Artificial sequence
  SiRNA target sequence
atcaaaaaataattttttta

SEQ ID NO: 253080 - DNA, 20 bp, Artificial sequence
  SiRNA target sequence
tcaaaaaataatttttttaa

SEQ ID NO: 253081 - DNA, 20 bp, Artificial sequence
  SiRNA target sequence
caaaaaataatttttttaat

SEQ ID NO: 253082 - DNA, 20 bp, Artificial sequence
  SiRNA target sequence
aaaaaataatttttttaatt

SEQ ID NO: 253083 - DNA, 20 bp, Artificial sequence
  SiRNA target sequence
aaaaataatttttttaatta

SEQ ID NO: 253084 - DNA, 20 bp, Artificial sequence
  SiRNA target sequence
aaaataatttttttaattat

SEQ ID NO: 253085 - DNA, 20 bp, Artificial sequence
  SiRNA target sequence
aaataatttttttaattata

SEQ ID NO: 253086 - DNA, 20 bp, Artificial sequence
  SiRNA target sequence
aataatttttttaattatat

SEQ ID NO: 253087 - DNA, 20 bp, Artificial sequence
  SiRNA target sequence
ataatttttttaattatatt

SEQ ID NO: 253088 - DNA, 20 bp, Artificial sequence
  SiRNA target sequence
taatttttttaattatatta

SEQ ID NO: 253089 - DNA, 20 bp, Artificial sequence
  SiRNA target sequence
aatttttttaattatattat

SEQ ID NO: 253090 - DNA, 20 bp, Artificial sequence
  SiRNA target sequence
atttttttaattatattatt

SEQ ID NO: 253091 - DNA, 20 bp, Artificial sequence
  SiRNA target sequence
tttttttaattatattatta

SEQ ID NO: 253092 - DNA, 20 bp, Artificial sequence
  SiRNA target sequence
ttttttaattatattattag

SEQ ID NO: 253093 - DNA, 20 bp, Artificial sequence
  SiRNA target sequence
tttttaattatattattagt

SEQ ID NO: 253094 - DNA, 20 bp, Artificial sequence
  SiRNA target sequence
ttttaattatattattagta

SEQ ID NO: 253095 - DNA, 20 bp, Artificial sequence
  SiRNA target sequence
tttaattatattattagtat

SEQ ID NO: 253096 - DNA, 20 bp, Artificial sequence
  SiRNA target sequence
ttaattatattattagtatc

SEQ ID NO: 253097 - DNA, 20 bp, Artificial sequence
  SiRNA target sequence
taattatattattagtatct

SEQ ID NO: 253098 - DNA, 20 bp, Artificial sequence
  SiRNA target sequence
aattatattattagtatctg

SEQ ID NO: 253099 - DNA, 20 bp, Artificial sequence
  SiRNA target sequence
attatattattagtatctgt

SEQ ID NO: 253100 - DNA, 20 bp, Artificial sequence
  SiRNA target sequence
ttatattattagtatctgta

SEQ ID NO: 253101 - DNA, 20 bp, Artificial sequence
  SiRNA target sequence
tatattattagtatctgtaa

SEQ ID NO: 253102 - DNA, 20 bp, Artificial sequence
  SiRNA target sequence
atattattagtatctgtaat

SEQ ID NO: 253103 - DNA, 20 bp, Artificial sequence
  SiRNA target sequence
tattattagtatctgtaata

SEQ ID NO: 253104 - DNA, 20 bp, Artificial sequence
  SiRNA target sequence
attattagtatctgtaataa

SEQ ID NO: 253105 - DNA, 20 bp, Artificial sequence
  SiRNA target sequence
ttattagtatctgtaataag

SEQ ID NO: 253106 - DNA, 20 bp, Artificial sequence
  SiRNA target sequence
tattagtatctgtaataaga

SEQ ID NO: 253107 - DNA, 20 bp, Artificial sequence
  SiRNA target sequence
attagtatctgtaataagaa

SEQ ID NO: 253108 - DNA, 20 bp, Artificial sequence
  SiRNA target sequence
ttagtatctgtaataagaat

SEQ ID NO: 253109 - DNA, 20 bp, Artificial sequence
  SiRNA target sequence
tagtatctgtaataagaata

SEQ ID NO: 253110 - DNA, 20 bp, Artificial sequence
  SiRNA target sequence
agtatctgtaataagaatat

SEQ ID NO: 253111 - DNA, 20 bp, Artificial sequence
  SiRNA target sequence
gtatctgtaataagaatata

SEQ ID NO: 253112 - DNA, 20 bp, Artificial sequence
  SiRNA target sequence
tatctgtaataagaatatat

SEQ ID NO: 253113 - DNA, 20 bp, Artificial sequence
  SiRNA target sequence
atctgtaataagaatatata

SEQ ID NO: 253114 - DNA, 20 bp, Artificial sequence
  SiRNA target sequence
tctgtaataagaatatatat

SEQ ID NO: 253115 - DNA, 20 bp, Artificial sequence
  SiRNA target sequence
ctgtaataagaatatatatt

SEQ ID NO: 253116 - DNA, 20 bp, Artificial sequence
  SiRNA target sequence
tgtaataagaatatatattt

SEQ ID NO: 253117 - DNA, 20 bp, Artificial sequence
  SiRNA target sequence
gtaataagaatatatattta

SEQ ID NO: 253118 - DNA, 20 bp, Artificial sequence
  SiRNA target sequence
taataagaatatatatttat

SEQ ID NO: 253119 - DNA, 20 bp, Artificial sequence
  SiRNA target sequence
aataagaatatatatttata

SEQ ID NO: 253120 - DNA, 20 bp, Artificial sequence
  SiRNA target sequence
ataagaatatatatttatat

SEQ ID NO: 253121 - DNA, 20 bp, Artificial sequence
  SiRNA target sequence
taagaatatatatttatata

SEQ ID NO: 253122 - DNA, 20 bp, Artificial sequence
  SiRNA target sequence
aagaatatatatttatataa

SEQ ID NO: 253123 - DNA, 20 bp, Artificial sequence
  SiRNA target sequence
agaatatatatttatataaa

SEQ ID NO: 253124 - DNA, 20 bp, Artificial sequence
  SiRNA target sequence
gaatatatatttatataaat

SEQ ID NO: 253125 - DNA, 20 bp, Artificial sequence
  SiRNA target sequence
aatatatatttatataaatt

SEQ ID NO: 253126 - DNA, 20 bp, Artificial sequence
  SiRNA target sequence
atatatatttatataaatta

SEQ ID NO: 253127 - DNA, 20 bp, Artificial sequence
  SiRNA target sequence
tatatatttatataaattat

SEQ ID NO: 253128 - DNA, 20 bp, Artificial sequence
  SiRNA target sequence
atatatttatataaattatt

SEQ ID NO: 253129 - DNA, 20 bp, Artificial sequence
  SiRNA target sequence
tatatttatataaattattt

SEQ ID NO: 253130 - DNA, 20 bp, Artificial sequence
  SiRNA target sequence
atatttatataaattatttt

SEQ ID NO: 253131 - DNA, 20 bp, Artificial sequence
  SiRNA target sequence
tatttatataaattatttta

SEQ ID NO: 253132 - DNA, 20 bp, Artificial sequence
  SiRNA target sequence
atttatataaattattttat

SEQ ID NO: 253133 - DNA, 20 bp, Artificial sequence
  SiRNA target sequence
tttatataaattattttatg

SEQ ID NO: 253134 - DNA, 20 bp, Artificial sequence
  SiRNA target sequence
ttatataaattattttatga

SEQ ID NO: 253135 - DNA, 20 bp, Artificial sequence
  SiRNA target sequence
tatataaattattttatgaa

SEQ ID NO: 253136 - DNA, 20 bp, Artificial sequence
  SiRNA target sequence
atataaattattttatgaag

SEQ ID NO: 253137 - DNA, 20 bp, Artificial sequence
  SiRNA target sequence
tataaattattttatgaaga

SEQ ID NO: 253138 - DNA, 20 bp, Artificial sequence
  SiRNA target sequence
ataaattattttatgaagag

SEQ ID NO: 253139 - DNA, 20 bp, Artificial sequence
  SiRNA target sequence
taaattattttatgaagagt

SEQ ID NO: 253140 - DNA, 20 bp, Artificial sequence
  SiRNA target sequence
aaattattttatgaagagtt

SEQ ID NO: 253141 - DNA, 20 bp, Artificial sequence
  SiRNA target sequence
aattattttatgaagagttt

SEQ ID NO: 253142 - DNA, 20 bp, Artificial sequence
  SiRNA target sequence
attattttatgaagagttta

SEQ ID NO: 253143 - DNA, 20 bp, Artificial sequence
  SiRNA target sequence
ttattttatgaagagtttat

SEQ ID NO: 253144 - DNA, 20 bp, Artificial sequence
  SiRNA target sequence
tattttatgaagagtttatt

SEQ ID NO: 253145 - DNA, 20 bp, Artificial sequence
  SiRNA target sequence
attttatgaagagtttattt

SEQ ID NO: 253146 - DNA, 20 bp, Artificial sequence
  SiRNA target sequence
ttttatgaagagtttatttt

SEQ ID NO: 253147 - DNA, 20 bp, Artificial sequence
  SiRNA target sequence
tttatgaagagtttattttt

SEQ ID NO: 253148 - DNA, 20 bp, Artificial sequence
  SiRNA target sequence
ttatgaagagtttatttttt

SEQ ID NO: 253149 - DNA, 20 bp, Artificial sequence
  SiRNA target sequence
tatgaagagtttatttttta

SEQ ID NO: 253150 - DNA, 20 bp, Artificial sequence
  SiRNA target sequence
atgaagagtttattttttat

SEQ ID NO: 253151 - DNA, 20 bp, Artificial sequence
  SiRNA target sequence
tgaagagtttattttttata

SEQ ID NO: 253152 - DNA, 20 bp, Artificial sequence
  SiRNA target sequence
gaagagtttattttttataa

SEQ ID NO: 253153 - DNA, 20 bp, Artificial sequence
  SiRNA target sequence
aagagtttattttttataag

SEQ ID NO: 253154 - DNA, 20 bp, Artificial sequence
  SiRNA target sequence
agagtttattttttataaga

SEQ ID NO: 253155 - DNA, 20 bp, Artificial sequence
  SiRNA target sequence
gagtttattttttataagat

SEQ ID NO: 253156 - DNA, 20 bp, Artificial sequence
  SiRNA target sequence
agtttattttttataagatt

SEQ ID NO: 253157 - DNA, 20 bp, Artificial sequence
  SiRNA target sequence
gtttattttttataagatta

SEQ ID NO: 253158 - DNA, 20 bp, Artificial sequence
  SiRNA target sequence
tttattttttataagattag

SEQ ID NO: 253159 - DNA, 20 bp, Artificial sequence
  SiRNA target sequence
ttattttttataagattagg

SEQ ID NO: 253160 - DNA, 20 bp, Artificial sequence
  SiRNA target sequence
tattttttataagattaggt

SEQ ID NO: 253161 - DNA, 20 bp, Artificial sequence
  SiRNA target sequence
attttttataagattaggtt

SEQ ID NO: 253162 - DNA, 20 bp, Artificial sequence
  SiRNA target sequence
ttttttataagattaggtta

SEQ ID NO: 253163 - DNA, 20 bp, Artificial sequence
  SiRNA target sequence
tttttataagattaggttat

SEQ ID NO: 253164 - DNA, 20 bp, Artificial sequence
  SiRNA target sequence
ttttataagattaggttata

SEQ ID NO: 253165 - DNA, 20 bp, Artificial sequence
  SiRNA target sequence
tttataagattaggttataa

SEQ ID NO: 253166 - DNA, 20 bp, Artificial sequence
  SiRNA target sequence
ttataagattaggttataat

SEQ ID NO: 253167 - DNA, 20 bp, Artificial sequence
  SiRNA target sequence
tataagattaggttataata

SEQ ID NO: 253168 - DNA, 20 bp, Artificial sequence
  SiRNA target sequence
ataagattaggttataataa

SEQ ID NO: 253169 - DNA, 20 bp, Artificial sequence
  SiRNA target sequence
taagattaggttataataaa

SEQ ID NO: 253170 - DNA, 20 bp, Artificial sequence
  SiRNA target sequence
aagattaggttataataaaa

SEQ ID NO: 253171 - DNA, 20 bp, Artificial sequence
  SiRNA target sequence
agattaggttataataaaaa

SEQ ID NO: 253172 - DNA, 20 bp, Artificial sequence
  SiRNA target sequence
gattaggttataataaaaat

SEQ ID NO: 253173 - DNA, 20 bp, Artificial sequence
  SiRNA target sequence
attaggttataataaaaata

SEQ ID NO: 253174 - DNA, 20 bp, Artificial sequence
  SiRNA target sequence
ttaggttataataaaaataa

SEQ ID NO: 253175 - DNA, 20 bp, Artificial sequence
  SiRNA target sequence
taggttataataaaaataaa

SEQ ID NO: 253176 - DNA, 20 bp, Artificial sequence
  SiRNA target sequence
aggttataataaaaataaaa

SEQ ID NO: 253177 - DNA, 20 bp, Artificial sequence
  SiRNA target sequence
ggttataataaaaataaaaa

SEQ ID NO: 253178 - DNA, 20 bp, Artificial sequence
  SiRNA target sequence
gttataataaaaataaaaat

SEQ ID NO: 253179 - DNA, 20 bp, Artificial sequence
  SiRNA target sequence
ttataataaaaataaaaata

SEQ ID NO: 253180 - DNA, 20 bp, Artificial sequence
  SiRNA target sequence
tataataaaaataaaaatat

SEQ ID NO: 253181 - DNA, 20 bp, Artificial sequence
  SiRNA target sequence
ataataaaaataaaaatata

SEQ ID NO: 253182 - DNA, 20 bp, Artificial sequence
  SiRNA target sequence
taataaaaataaaaatatag

SEQ ID NO: 253183 - DNA, 20 bp, Artificial sequence
  SiRNA target sequence
aataaaaataaaaatatagg

SEQ ID NO: 253184 - DNA, 20 bp, Artificial sequence
  SiRNA target sequence
ataaaaataaaaatatagga

SEQ ID NO: 253185 - DNA, 20 bp, Artificial sequence
  SiRNA target sequence
taaaaataaaaatataggaa

SEQ ID NO: 253186 - DNA, 20 bp, Artificial sequence
  SiRNA target sequence
aaaaataaaaatataggaat

SEQ ID NO: 253187 - DNA, 20 bp, Artificial sequence
  SiRNA target sequence
aaaataaaaatataggaata

SEQ ID NO: 253188 - DNA, 20 bp, Artificial sequence
  SiRNA target sequence
aaataaaaatataggaataa

SEQ ID NO: 253189 - DNA, 20 bp, Artificial sequence
  SiRNA target sequence
aataaaaatataggaataag

SEQ ID NO: 253190 - DNA, 20 bp, Artificial sequence
  SiRNA target sequence
ataaaaatataggaataaga

SEQ ID NO: 253191 - DNA, 20 bp, Artificial sequence
  SiRNA target sequence
taaaaatataggaataagaa

SEQ ID NO: 253192 - DNA, 20 bp, Artificial sequence
  SiRNA target sequence
aaaaatataggaataagaag

SEQ ID NO: 253193 - DNA, 20 bp, Artificial sequence
  SiRNA target sequence
aaaatataggaataagaaga

SEQ ID NO: 253194 - DNA, 21 bp, Artificial sequence
  SiRNA target sequence
attttattcaattaaagtatt

SEQ ID NO: 253195 - DNA, 21 bp, Artificial sequence
  SiRNA target sequence
ttttattcaattaaagtattt

SEQ ID NO: 253196 - DNA, 21 bp, Artificial sequence
  SiRNA target sequence
tttattcaattaaagtattta

SEQ ID NO: 253197 - DNA, 21 bp, Artificial sequence
  SiRNA target sequence
ttattcaattaaagtatttac

SEQ ID NO: 253198 - DNA, 21 bp, Artificial sequence
  SiRNA target sequence
tattcaattaaagtatttacc

SEQ ID NO: 253199 - DNA, 21 bp, Artificial sequence
  SiRNA target sequence
attcaattaaagtatttacca

SEQ ID NO: 253200 - DNA, 21 bp, Artificial sequence
  SiRNA target sequence
ttcaattaaagtatttaccaa

SEQ ID NO: 253201 - DNA, 21 bp, Artificial sequence
  SiRNA target sequence
tcaattaaagtatttaccaat

SEQ ID NO: 253202 - DNA, 21 bp, Artificial sequence
  SiRNA target sequence
caattaaagtatttaccaatt

SEQ ID NO: 253203 - DNA, 21 bp, Artificial sequence
  SiRNA target sequence
aattaaagtatttaccaattg

SEQ ID NO: 253204 - DNA, 21 bp, Artificial sequence
  SiRNA target sequence
attaaagtatttaccaattgg

SEQ ID NO: 253205 - DNA, 21 bp, Artificial sequence
  SiRNA target sequence
ttaaagtatttaccaattgga

SEQ ID NO: 253206 - DNA, 21 bp, Artificial sequence
  SiRNA target sequence
taaagtatttaccaattggaa

SEQ ID NO: 253207 - DNA, 21 bp, Artificial sequence
  SiRNA target sequence
aaagtatttaccaattggaat

SEQ ID NO: 253208 - DNA, 21 bp, Artificial sequence
  SiRNA target sequence
aagtatttaccaattggaata

SEQ ID NO: 253209 - DNA, 21 bp, Artificial sequence
  SiRNA target sequence
agtatttaccaattggaataa

SEQ ID NO: 253210 - DNA, 21 bp, Artificial sequence
  SiRNA target sequence
gtatttaccaattggaataaa

SEQ ID NO: 253211 - DNA, 21 bp, Artificial sequence
  SiRNA target sequence
tatttaccaattggaataaag

SEQ ID NO: 253212 - DNA, 21 bp, Artificial sequence
  SiRNA target sequence
atttaccaattggaataaaga

SEQ ID NO: 253213 - DNA, 21 bp, Artificial sequence
  SiRNA target sequence
tttaccaattggaataaagat

SEQ ID NO: 253214 - DNA, 21 bp, Artificial sequence
  SiRNA target sequence
ttaccaattggaataaagata

SEQ ID NO: 253215 - DNA, 21 bp, Artificial sequence
  SiRNA target sequence
taccaattggaataaagatag

SEQ ID NO: 253216 - DNA, 21 bp, Artificial sequence
  SiRNA target sequence
accaattggaataaagatagg

SEQ ID NO: 253217 - DNA, 21 bp, Artificial sequence
  SiRNA target sequence
ccaattggaataaagatagga

SEQ ID NO: 253218 - DNA, 21 bp, Artificial sequence
  SiRNA target sequence
caattggaataaagataggat

SEQ ID NO: 253219 - DNA, 21 bp, Artificial sequence
  SiRNA target sequence
aattggaataaagataggatt

SEQ ID NO: 253220 - DNA, 21 bp, Artificial sequence
  SiRNA target sequence
attggaataaagataggatta

SEQ ID NO: 253221 - DNA, 21 bp, Artificial sequence
  SiRNA target sequence
ttggaataaagataggattaa

SEQ ID NO: 253222 - DNA, 21 bp, Artificial sequence
  SiRNA target sequence
tggaataaagataggattaat

SEQ ID NO: 253223 - DNA, 21 bp, Artificial sequence
  SiRNA target sequence
ggaataaagataggattaatg

SEQ ID NO: 253224 - DNA, 21 bp, Artificial sequence
  SiRNA target sequence
gaataaagataggattaatga

SEQ ID NO: 253225 - DNA, 21 bp, Artificial sequence
  SiRNA target sequence
aataaagataggattaatgat

SEQ ID NO: 253226 - DNA, 21 bp, Artificial sequence
  SiRNA target sequence
ataaagataggattaatgata

SEQ ID NO: 253227 - DNA, 21 bp, Artificial sequence
  SiRNA target sequence
taaagataggattaatgataa

SEQ ID NO: 253228 - DNA, 21 bp, Artificial sequence
  SiRNA target sequence
aaagataggattaatgataat

SEQ ID NO: 253229 - DNA, 21 bp, Artificial sequence
  SiRNA target sequence
aagataggattaatgataatt

SEQ ID NO: 253230 - DNA, 21 bp, Artificial sequence
  SiRNA target sequence
agataggattaatgataattt

SEQ ID NO: 253231 - DNA, 21 bp, Artificial sequence
  SiRNA target sequence
gataggattaatgataatttt

SEQ ID NO: 253232 - DNA, 21 bp, Artificial sequence
  SiRNA target sequence
ataggattaatgataattttt

SEQ ID NO: 253233 - DNA, 21 bp, Artificial sequence
  SiRNA target sequence
taggattaatgataatttttt

SEQ ID NO: 253234 - DNA, 21 bp, Artificial sequence
  SiRNA target sequence
aggattaatgataattttttt

SEQ ID NO: 253235 - DNA, 21 bp, Artificial sequence
  SiRNA target sequence
ggattaatgataattttttta

SEQ ID NO: 253236 - DNA, 21 bp, Artificial sequence
  SiRNA target sequence
gattaatgataatttttttaa

SEQ ID NO: 253237 - DNA, 21 bp, Artificial sequence
  SiRNA target sequence
attaatgataatttttttaag

SEQ ID NO: 253238 - DNA, 21 bp, Artificial sequence
  SiRNA target sequence
ttaatgataatttttttaagt

SEQ ID NO: 253239 - DNA, 21 bp, Artificial sequence
  SiRNA target sequence
taatgataatttttttaagtt

SEQ ID NO: 253240 - DNA, 21 bp, Artificial sequence
  SiRNA target sequence
aatgataatttttttaagttt

SEQ ID NO: 253241 - DNA, 21 bp, Artificial sequence
  SiRNA target sequence
atgataatttttttaagttta

SEQ ID NO: 253242 - DNA, 21 bp, Artificial sequence
  SiRNA target sequence
tgataatttttttaagtttaa

SEQ ID NO: 253243 - DNA, 21 bp, Artificial sequence
  SiRNA target sequence
gataatttttttaagtttaag

SEQ ID NO: 253244 - DNA, 21 bp, Artificial sequence
  SiRNA target sequence
ataatttttttaagtttaagt

SEQ ID NO: 253245 - DNA, 21 bp, Artificial sequence
  SiRNA target sequence
taatttttttaagtttaagtg

SEQ ID NO: 253246 - DNA, 21 bp, Artificial sequence
  SiRNA target sequence
aatttttttaagtttaagtgg

SEQ ID NO: 253247 - DNA, 21 bp, Artificial sequence
  SiRNA target sequence
atttttttaagtttaagtgga

SEQ ID NO: 253248 - DNA, 21 bp, Artificial sequence
  SiRNA target sequence
tttttttaagtttaagtggaa

SEQ ID NO: 253249 - DNA, 21 bp, Artificial sequence
  SiRNA target sequence
ttttttaagtttaagtggaat

SEQ ID NO: 253250 - DNA, 21 bp, Artificial sequence
  SiRNA target sequence
tttttaagtttaagtggaata

SEQ ID NO: 253251 - DNA, 21 bp, Artificial sequence
  SiRNA target sequence
ttttaagtttaagtggaatac

SEQ ID NO: 253252 - DNA, 21 bp, Artificial sequence
  SiRNA target sequence
tttaagtttaagtggaatacc

SEQ ID NO: 253253 - DNA, 21 bp, Artificial sequence
  SiRNA target sequence
ttaagtttaagtggaatacct

SEQ ID NO: 253254 - DNA, 21 bp, Artificial sequence
  SiRNA target sequence
taagtttaagtggaatacctc

SEQ ID NO: 253255 - DNA, 21 bp, Artificial sequence
  SiRNA target sequence
aagtttaagtggaatacctcc

SEQ ID NO: 253256 - DNA, 21 bp, Artificial sequence
  SiRNA target sequence
agtttaagtggaatacctccc

SEQ ID NO: 253257 - DNA, 21 bp, Artificial sequence
  SiRNA target sequence
gtttaagtggaatacctccct

SEQ ID NO: 253258 - DNA, 21 bp, Artificial sequence
  SiRNA target sequence
tttaagtggaatacctccctt

SEQ ID NO: 253259 - DNA, 21 bp, Artificial sequence
  SiRNA target sequence
ttaagtggaatacctcccttt

SEQ ID NO: 253260 - DNA, 21 bp, Artificial sequence
  SiRNA target sequence
taagtggaatacctcccttta

SEQ ID NO: 253261 - DNA, 21 bp, Artificial sequence
  SiRNA target sequence
aagtggaatacctccctttat

SEQ ID NO: 253262 - DNA, 21 bp, Artificial sequence
  SiRNA target sequence
agtggaatacctccctttata

SEQ ID NO: 253263 - DNA, 21 bp, Artificial sequence
  SiRNA target sequence
gtggaatacctccctttatag

SEQ ID NO: 253264 - DNA, 21 bp, Artificial sequence
  SiRNA target sequence
tggaatacctccctttatagg

SEQ ID NO: 253265 - DNA, 21 bp, Artificial sequence
  SiRNA target sequence
ggaatacctccctttatagga

SEQ ID NO: 253266 - DNA, 21 bp, Artificial sequence
  SiRNA target sequence
gaatacctccctttataggat

SEQ ID NO: 253267 - DNA, 21 bp, Artificial sequence
  SiRNA target sequence
aatacctccctttataggatt

SEQ ID NO: 253268 - DNA, 21 bp, Artificial sequence
  SiRNA target sequence
atacctccctttataggattt

SEQ ID NO: 253269 - DNA, 21 bp, Artificial sequence
  SiRNA target sequence
tacctccctttataggattta

SEQ ID NO: 253270 - DNA, 21 bp, Artificial sequence
  SiRNA target sequence
acctccctttataggatttat

SEQ ID NO: 253271 - DNA, 21 bp, Artificial sequence
  SiRNA target sequence
cctccctttataggatttatt

SEQ ID NO: 253272 - DNA, 21 bp, Artificial sequence
  SiRNA target sequence
ctccctttataggatttattt

SEQ ID NO: 253273 - DNA, 21 bp, Artificial sequence
  SiRNA target sequence
tccctttataggatttatttc

SEQ ID NO: 253274 - DNA, 21 bp, Artificial sequence
  SiRNA target sequence
ccctttataggatttatttct

SEQ ID NO: 253275 - DNA, 21 bp, Artificial sequence
  SiRNA target sequence
cctttataggatttatttcta

SEQ ID NO: 253276 - DNA, 21 bp, Artificial sequence
  SiRNA target sequence
ctttataggatttatttctaa

SEQ ID NO: 253277 - DNA, 21 bp, Artificial sequence
  SiRNA target sequence
tttataggatttatttctaag

SEQ ID NO: 253278 - DNA, 21 bp, Artificial sequence
  SiRNA target sequence
ttataggatttatttctaaga

SEQ ID NO: 253279 - DNA, 21 bp, Artificial sequence
  SiRNA target sequence
tataggatttatttctaagat

SEQ ID NO: 253280 - DNA, 21 bp, Artificial sequence
  SiRNA target sequence
ataggatttatttctaagata

SEQ ID NO: 253281 - DNA, 21 bp, Artificial sequence
  SiRNA target sequence
taggatttatttctaagataa

SEQ ID NO: 253282 - DNA, 21 bp, Artificial sequence
  SiRNA target sequence
aggatttatttctaagataac

SEQ ID NO: 253283 - DNA, 21 bp, Artificial sequence
  SiRNA target sequence
ggatttatttctaagataact

SEQ ID NO: 253284 - DNA, 21 bp, Artificial sequence
  SiRNA target sequence
gatttatttctaagataactg

SEQ ID NO: 253285 - DNA, 21 bp, Artificial sequence
  SiRNA target sequence
atttatttctaagataactgt

SEQ ID NO: 253286 - DNA, 21 bp, Artificial sequence
  SiRNA target sequence
tttatttctaagataactgtt

SEQ ID NO: 253287 - DNA, 21 bp, Artificial sequence
  SiRNA target sequence
ttatttctaagataactgttt

SEQ ID NO: 253288 - DNA, 21 bp, Artificial sequence
  SiRNA target sequence
tatttctaagataactgtttt

SEQ ID NO: 253289 - DNA, 21 bp, Artificial sequence
  SiRNA target sequence
atttctaagataactgttttg

SEQ ID NO: 253290 - DNA, 21 bp, Artificial sequence
  SiRNA target sequence
tttctaagataactgttttgt

SEQ ID NO: 253291 - DNA, 21 bp, Artificial sequence
  SiRNA target sequence
ttctaagataactgttttgtt

SEQ ID NO: 253292 - DNA, 21 bp, Artificial sequence
  SiRNA target sequence
tctaagataactgttttgttg

SEQ ID NO: 253293 - DNA, 21 bp, Artificial sequence
  SiRNA target sequence
ctaagataactgttttgttga

SEQ ID NO: 253294 - DNA, 21 bp, Artificial sequence
  SiRNA target sequence
taagataactgttttgttgat

SEQ ID NO: 253295 - DNA, 21 bp, Artificial sequence
  SiRNA target sequence
aagataactgttttgttgatg

SEQ ID NO: 253296 - DNA, 21 bp, Artificial sequence
  SiRNA target sequence
agataactgttttgttgatgt

SEQ ID NO: 253297 - DNA, 21 bp, Artificial sequence
  SiRNA target sequence
gataactgttttgttgatgta

SEQ ID NO: 253298 - DNA, 21 bp, Artificial sequence
  SiRNA target sequence
ataactgttttgttgatgtat

SEQ ID NO: 253299 - DNA, 21 bp, Artificial sequence
  SiRNA target sequence
taactgttttgttgatgtatt

SEQ ID NO: 253300 - DNA, 21 bp, Artificial sequence
  SiRNA target sequence
aactgttttgttgatgtattt

SEQ ID NO: 253301 - DNA, 21 bp, Artificial sequence
  SiRNA target sequence
actgttttgttgatgtatttt

SEQ ID NO: 253302 - DNA, 21 bp, Artificial sequence
  SiRNA target sequence
ctgttttgttgatgtattttg

SEQ ID NO: 253303 - DNA, 21 bp, Artificial sequence
  SiRNA target sequence
tgttttgttgatgtattttga

SEQ ID NO: 253304 - DNA, 21 bp, Artificial sequence
  SiRNA target sequence
gttttgttgatgtattttgag

SEQ ID NO: 253305 - DNA, 21 bp, Artificial sequence
  SiRNA target sequence
ttttgttgatgtattttgaga

SEQ ID NO: 253306 - DNA, 21 bp, Artificial sequence
  SiRNA target sequence
tttgttgatgtattttgagaa

SEQ ID NO: 253307 - DNA, 21 bp, Artificial sequence
  SiRNA target sequence
ttgttgatgtattttgagaat

SEQ ID NO: 253308 - DNA, 21 bp, Artificial sequence
  SiRNA target sequence
tgttgatgtattttgagaatc

SEQ ID NO: 253309 - DNA, 21 bp, Artificial sequence
  SiRNA target sequence
gttgatgtattttgagaatca

SEQ ID NO: 253310 - DNA, 21 bp, Artificial sequence
  SiRNA target sequence
ttgatgtattttgagaatcaa

SEQ ID NO: 253311 - DNA, 21 bp, Artificial sequence
  SiRNA target sequence
tgatgtattttgagaatcaaa

SEQ ID NO: 253312 - DNA, 21 bp, Artificial sequence
  SiRNA target sequence
gatgtattttgagaatcaaaa

SEQ ID NO: 253313 - DNA, 21 bp, Artificial sequence
  SiRNA target sequence
atgtattttgagaatcaaaaa

SEQ ID NO: 253314 - DNA, 21 bp, Artificial sequence
  SiRNA target sequence
tgtattttgagaatcaaaaaa

SEQ ID NO: 253315 - DNA, 21 bp, Artificial sequence
  SiRNA target sequence
gtattttgagaatcaaaaaat

SEQ ID NO: 253316 - DNA, 21 bp, Artificial sequence
  SiRNA target sequence
tattttgagaatcaaaaaata

SEQ ID NO: 253317 - DNA, 21 bp, Artificial sequence
  SiRNA target sequence
attttgagaatcaaaaaataa

SEQ ID NO: 253318 - DNA, 21 bp, Artificial sequence
  SiRNA target sequence
ttttgagaatcaaaaaataat

SEQ ID NO: 253319 - DNA, 21 bp, Artificial sequence
  SiRNA target sequence
tttgagaatcaaaaaataatt

SEQ ID NO: 253320 - DNA, 21 bp, Artificial sequence
  SiRNA target sequence
ttgagaatcaaaaaataattt

SEQ ID NO: 253321 - DNA, 21 bp, Artificial sequence
  SiRNA target sequence
tgagaatcaaaaaataatttt

SEQ ID NO: 253322 - DNA, 21 bp, Artificial sequence
  SiRNA target sequence
gagaatcaaaaaataattttt

SEQ ID NO: 253323 - DNA, 21 bp, Artificial sequence
  SiRNA target sequence
agaatcaaaaaataatttttt

SEQ ID NO: 253324 - DNA, 21 bp, Artificial sequence
  SiRNA target sequence
gaatcaaaaaataattttttt

SEQ ID NO: 253325 - DNA, 21 bp, Artificial sequence
  SiRNA target sequence
aatcaaaaaataattttttta

SEQ ID NO: 253326 - DNA, 21 bp, Artificial sequence
  SiRNA target sequence
atcaaaaaataatttttttaa

SEQ ID NO: 253327 - DNA, 21 bp, Artificial sequence
  SiRNA target sequence
tcaaaaaataatttttttaat

SEQ ID NO: 253328 - DNA, 21 bp, Artificial sequence
  SiRNA target sequence
caaaaaataatttttttaatt

SEQ ID NO: 253329 - DNA, 21 bp, Artificial sequence
  SiRNA target sequence
aaaaaataatttttttaatta

SEQ ID NO: 253330 - DNA, 21 bp, Artificial sequence
  SiRNA target sequence
aaaaataatttttttaattat

SEQ ID NO: 253331 - DNA, 21 bp, Artificial sequence
  SiRNA target sequence
aaaataatttttttaattata

SEQ ID NO: 253332 - DNA, 21 bp, Artificial sequence
  SiRNA target sequence
aaataatttttttaattatat

SEQ ID NO: 253333 - DNA, 21 bp, Artificial sequence
  SiRNA target sequence
aataatttttttaattatatt

SEQ ID NO: 253334 - DNA, 21 bp, Artificial sequence
  SiRNA target sequence
ataatttttttaattatatta

SEQ ID NO: 253335 - DNA, 21 bp, Artificial sequence
  SiRNA target sequence
taatttttttaattatattat

SEQ ID NO: 253336 - DNA, 21 bp, Artificial sequence
  SiRNA target sequence
aatttttttaattatattatt

SEQ ID NO: 253337 - DNA, 21 bp, Artificial sequence
  SiRNA target sequence
atttttttaattatattatta

SEQ ID NO: 253338 - DNA, 21 bp, Artificial sequence
  SiRNA target sequence
tttttttaattatattattag

SEQ ID NO: 253339 - DNA, 21 bp, Artificial sequence
  SiRNA target sequence
ttttttaattatattattagt

SEQ ID NO: 253340 - DNA, 21 bp, Artificial sequence
  SiRNA target sequence
tttttaattatattattagta

SEQ ID NO: 253341 - DNA, 21 bp, Artificial sequence
  SiRNA target sequence
ttttaattatattattagtat

SEQ ID NO: 253342 - DNA, 21 bp, Artificial sequence
  SiRNA target sequence
tttaattatattattagtatc

SEQ ID NO: 253343 - DNA, 21 bp, Artificial sequence
  SiRNA target sequence
ttaattatattattagtatct

SEQ ID NO: 253344 - DNA, 21 bp, Artificial sequence
  SiRNA target sequence
taattatattattagtatctg

SEQ ID NO: 253345 - DNA, 21 bp, Artificial sequence
  SiRNA target sequence
aattatattattagtatctgt

SEQ ID NO: 253346 - DNA, 21 bp, Artificial sequence
  SiRNA target sequence
attatattattagtatctgta

SEQ ID NO: 253347 - DNA, 21 bp, Artificial sequence
  SiRNA target sequence
ttatattattagtatctgtaa

SEQ ID NO: 253348 - DNA, 21 bp, Artificial sequence
  SiRNA target sequence
tatattattagtatctgtaat

SEQ ID NO: 253349 - DNA, 21 bp, Artificial sequence
  SiRNA target sequence
atattattagtatctgtaata

SEQ ID NO: 253350 - DNA, 21 bp, Artificial sequence
  SiRNA target sequence
tattattagtatctgtaataa

SEQ ID NO: 253351 - DNA, 21 bp, Artificial sequence
  SiRNA target sequence
attattagtatctgtaataag

SEQ ID NO: 253352 - DNA, 21 bp, Artificial sequence
  SiRNA target sequence
ttattagtatctgtaataaga

SEQ ID NO: 253353 - DNA, 21 bp, Artificial sequence
  SiRNA target sequence
tattagtatctgtaataagaa

SEQ ID NO: 253354 - DNA, 21 bp, Artificial sequence
  SiRNA target sequence
attagtatctgtaataagaat

SEQ ID NO: 253355 - DNA, 21 bp, Artificial sequence
  SiRNA target sequence
ttagtatctgtaataagaata

SEQ ID NO: 253356 - DNA, 21 bp, Artificial sequence
  SiRNA target sequence
tagtatctgtaataagaatat

SEQ ID NO: 253357 - DNA, 21 bp, Artificial sequence
  SiRNA target sequence
agtatctgtaataagaatata

SEQ ID NO: 253358 - DNA, 21 bp, Artificial sequence
  SiRNA target sequence
gtatctgtaataagaatatat

SEQ ID NO: 253359 - DNA, 21 bp, Artificial sequence
  SiRNA target sequence
tatctgtaataagaatatata

SEQ ID NO: 253360 - DNA, 21 bp, Artificial sequence
  SiRNA target sequence
atctgtaataagaatatatat

SEQ ID NO: 253361 - DNA, 21 bp, Artificial sequence
  SiRNA target sequence
tctgtaataagaatatatatt

SEQ ID NO: 253362 - DNA, 21 bp, Artificial sequence
  SiRNA target sequence
ctgtaataagaatatatattt

SEQ ID NO: 253363 - DNA, 21 bp, Artificial sequence
  SiRNA target sequence
tgtaataagaatatatattta

SEQ ID NO: 253364 - DNA, 21 bp, Artificial sequence
  SiRNA target sequence
gtaataagaatatatatttat

SEQ ID NO: 253365 - DNA, 21 bp, Artificial sequence
  SiRNA target sequence
taataagaatatatatttata

SEQ ID NO: 253366 - DNA, 21 bp, Artificial sequence
  SiRNA target sequence
aataagaatatatatttatat

SEQ ID NO: 253367 - DNA, 21 bp, Artificial sequence
  SiRNA target sequence
ataagaatatatatttatata

SEQ ID NO: 253368 - DNA, 21 bp, Artificial sequence
  SiRNA target sequence
taagaatatatatttatataa

SEQ ID NO: 253369 - DNA, 21 bp, Artificial sequence
  SiRNA target sequence
aagaatatatatttatataaa

SEQ ID NO: 253370 - DNA, 21 bp, Artificial sequence
  SiRNA target sequence
agaatatatatttatataaat

SEQ ID NO: 253371 - DNA, 21 bp, Artificial sequence
  SiRNA target sequence
gaatatatatttatataaatt

SEQ ID NO: 253372 - DNA, 21 bp, Artificial sequence
  SiRNA target sequence
aatatatatttatataaatta

SEQ ID NO: 253373 - DNA, 21 bp, Artificial sequence
  SiRNA target sequence
atatatatttatataaattat

SEQ ID NO: 253374 - DNA, 21 bp, Artificial sequence
  SiRNA target sequence
tatatatttatataaattatt

SEQ ID NO: 253375 - DNA, 21 bp, Artificial sequence
  SiRNA target sequence
atatatttatataaattattt

SEQ ID NO: 253376 - DNA, 21 bp, Artificial sequence
  SiRNA target sequence
tatatttatataaattatttt

SEQ ID NO: 253377 - DNA, 21 bp, Artificial sequence
  SiRNA target sequence
atatttatataaattatttta

SEQ ID NO: 253378 - DNA, 21 bp, Artificial sequence
  SiRNA target sequence
tatttatataaattattttat

SEQ ID NO: 253379 - DNA, 21 bp, Artificial sequence
  SiRNA target sequence
atttatataaattattttatg

SEQ ID NO: 253380 - DNA, 21 bp, Artificial sequence
  SiRNA target sequence
tttatataaattattttatga

SEQ ID NO: 253381 - DNA, 21 bp, Artificial sequence
  SiRNA target sequence
ttatataaattattttatgaa

SEQ ID NO: 253382 - DNA, 21 bp, Artificial sequence
  SiRNA target sequence
tatataaattattttatgaag

SEQ ID NO: 253383 - DNA, 21 bp, Artificial sequence
  SiRNA target sequence
atataaattattttatgaaga

SEQ ID NO: 253384 - DNA, 21 bp, Artificial sequence
  SiRNA target sequence
tataaattattttatgaagag

SEQ ID NO: 253385 - DNA, 21 bp, Artificial sequence
  SiRNA target sequence
ataaattattttatgaagagt

SEQ ID NO: 253386 - DNA, 21 bp, Artificial sequence
  SiRNA target sequence
taaattattttatgaagagtt

SEQ ID NO: 253387 - DNA, 21 bp, Artificial sequence
  SiRNA target sequence
aaattattttatgaagagttt

SEQ ID NO: 253388 - DNA, 21 bp, Artificial sequence
  SiRNA target sequence
aattattttatgaagagttta

SEQ ID NO: 253389 - DNA, 21 bp, Artificial sequence
  SiRNA target sequence
attattttatgaagagtttat

SEQ ID NO: 253390 - DNA, 21 bp, Artificial sequence
  SiRNA target sequence
ttattttatgaagagtttatt

SEQ ID NO: 253391 - DNA, 21 bp, Artificial sequence
  SiRNA target sequence
tattttatgaagagtttattt

SEQ ID NO: 253392 - DNA, 21 bp, Artificial sequence
  SiRNA target sequence
attttatgaagagtttatttt

SEQ ID NO: 253393 - DNA, 21 bp, Artificial sequence
  SiRNA target sequence
ttttatgaagagtttattttt

SEQ ID NO: 253394 - DNA, 21 bp, Artificial sequence
  SiRNA target sequence
tttatgaagagtttatttttt

SEQ ID NO: 253395 - DNA, 21 bp, Artificial sequence
  SiRNA target sequence
ttatgaagagtttatttttta

SEQ ID NO: 253396 - DNA, 21 bp, Artificial sequence
  SiRNA target sequence
tatgaagagtttattttttat

SEQ ID NO: 253397 - DNA, 21 bp, Artificial sequence
  SiRNA target sequence
atgaagagtttattttttata

SEQ ID NO: 253398 - DNA, 21 bp, Artificial sequence
  SiRNA target sequence
tgaagagtttattttttataa

SEQ ID NO: 253399 - DNA, 21 bp, Artificial sequence
  SiRNA target sequence
gaagagtttattttttataag

SEQ ID NO: 253400 - DNA, 21 bp, Artificial sequence
  SiRNA target sequence
aagagtttattttttataaga

SEQ ID NO: 253401 - DNA, 21 bp, Artificial sequence
  SiRNA target sequence
agagtttattttttataagat

SEQ ID NO: 253402 - DNA, 21 bp, Artificial sequence
  SiRNA target sequence
gagtttattttttataagatt

SEQ ID NO: 253403 - DNA, 21 bp, Artificial sequence
  SiRNA target sequence
agtttattttttataagatta

SEQ ID NO: 253404 - DNA, 21 bp, Artificial sequence
  SiRNA target sequence
gtttattttttataagattag

SEQ ID NO: 253405 - DNA, 21 bp, Artificial sequence
  SiRNA target sequence
tttattttttataagattagg

SEQ ID NO: 253406 - DNA, 21 bp, Artificial sequence
  SiRNA target sequence
ttattttttataagattaggt

SEQ ID NO: 253407 - DNA, 21 bp, Artificial sequence
  SiRNA target sequence
tattttttataagattaggtt

SEQ ID NO: 253408 - DNA, 21 bp, Artificial sequence
  SiRNA target sequence
attttttataagattaggtta

SEQ ID NO: 253409 - DNA, 21 bp, Artificial sequence
  SiRNA target sequence
ttttttataagattaggttat

SEQ ID NO: 253410 - DNA, 21 bp, Artificial sequence
  SiRNA target sequence
tttttataagattaggttata

SEQ ID NO: 253411 - DNA, 21 bp, Artificial sequence
  SiRNA target sequence
ttttataagattaggttataa

SEQ ID NO: 253412 - DNA, 21 bp, Artificial sequence
  SiRNA target sequence
tttataagattaggttataat

SEQ ID NO: 253413 - DNA, 21 bp, Artificial sequence
  SiRNA target sequence
ttataagattaggttataata

SEQ ID NO: 253414 - DNA, 21 bp, Artificial sequence
  SiRNA target sequence
tataagattaggttataataa

SEQ ID NO: 253415 - DNA, 21 bp, Artificial sequence
  SiRNA target sequence
ataagattaggttataataaa

SEQ ID NO: 253416 - DNA, 21 bp, Artificial sequence
  SiRNA target sequence
taagattaggttataataaaa

SEQ ID NO: 253417 - DNA, 21 bp, Artificial sequence
  SiRNA target sequence
aagattaggttataataaaaa

SEQ ID NO: 253418 - DNA, 21 bp, Artificial sequence
  SiRNA target sequence
agattaggttataataaaaat

SEQ ID NO: 253419 - DNA, 21 bp, Artificial sequence
  SiRNA target sequence
gattaggttataataaaaata

SEQ ID NO: 253420 - DNA, 21 bp, Artificial sequence
  SiRNA target sequence
attaggttataataaaaataa

SEQ ID NO: 253421 - DNA, 21 bp, Artificial sequence
  SiRNA target sequence
ttaggttataataaaaataaa

SEQ ID NO: 253422 - DNA, 21 bp, Artificial sequence
  SiRNA target sequence
taggttataataaaaataaaa

SEQ ID NO: 253423 - DNA, 21 bp, Artificial sequence
  SiRNA target sequence
aggttataataaaaataaaaa

SEQ ID NO: 253424 - DNA, 21 bp, Artificial sequence
  SiRNA target sequence
ggttataataaaaataaaaat

SEQ ID NO: 253425 - DNA, 21 bp, Artificial sequence
  SiRNA target sequence
gttataataaaaataaaaata

SEQ ID NO: 253426 - DNA, 21 bp, Artificial sequence
  SiRNA target sequence
ttataataaaaataaaaatat

SEQ ID NO: 253427 - DNA, 21 bp, Artificial sequence
  SiRNA target sequence
tataataaaaataaaaatata

SEQ ID NO: 253428 - DNA, 21 bp, Artificial sequence
  SiRNA target sequence
ataataaaaataaaaatatag

SEQ ID NO: 253429 - DNA, 21 bp, Artificial sequence
  SiRNA target sequence
taataaaaataaaaatatagg

SEQ ID NO: 253430 - DNA, 21 bp, Artificial sequence
  SiRNA target sequence
aataaaaataaaaatatagga

SEQ ID NO: 253431 - DNA, 21 bp, Artificial sequence
  SiRNA target sequence
ataaaaataaaaatataggaa

SEQ ID NO: 253432 - DNA, 21 bp, Artificial sequence
  SiRNA target sequence
taaaaataaaaatataggaat

SEQ ID NO: 253433 - DNA, 21 bp, Artificial sequence
  SiRNA target sequence
aaaaataaaaatataggaata

SEQ ID NO: 253434 - DNA, 21 bp, Artificial sequence
  SiRNA target sequence
aaaataaaaatataggaataa

SEQ ID NO: 253435 - DNA, 21 bp, Artificial sequence
  SiRNA target sequence
aaataaaaatataggaataag

SEQ ID NO: 253436 - DNA, 21 bp, Artificial sequence
  SiRNA target sequence
aataaaaatataggaataaga

SEQ ID NO: 253437 - DNA, 21 bp, Artificial sequence
  SiRNA target sequence
ataaaaatataggaataagaa

SEQ ID NO: 253438 - DNA, 21 bp, Artificial sequence
  SiRNA target sequence
taaaaatataggaataagaag

SEQ ID NO: 253439 - DNA, 21 bp, Artificial sequence
  SiRNA target sequence
aaaaatataggaataagaaga

SEQ ID NO: 253440 - DNA, 22 bp, Artificial sequence
  SiRNA target sequence
attttattcaattaaagtattt

SEQ ID NO: 253441 - DNA, 22 bp, Artificial sequence
  SiRNA target sequence
ttttattcaattaaagtattta

SEQ ID NO: 253442 - DNA, 22 bp, Artificial sequence
  SiRNA target sequence
tttattcaattaaagtatttac

SEQ ID NO: 253443 - DNA, 22 bp, Artificial sequence
  SiRNA target sequence
ttattcaattaaagtatttacc

SEQ ID NO: 253444 - DNA, 22 bp, Artificial sequence
  SiRNA target sequence
tattcaattaaagtatttacca

SEQ ID NO: 253445 - DNA, 22 bp, Artificial sequence
  SiRNA target sequence
attcaattaaagtatttaccaa

SEQ ID NO: 253446 - DNA, 22 bp, Artificial sequence
  SiRNA target sequence
ttcaattaaagtatttaccaat

SEQ ID NO: 253447 - DNA, 22 bp, Artificial sequence
  SiRNA target sequence
tcaattaaagtatttaccaatt

SEQ ID NO: 253448 - DNA, 22 bp, Artificial sequence
  SiRNA target sequence
caattaaagtatttaccaattg

SEQ ID NO: 253449 - DNA, 22 bp, Artificial sequence
  SiRNA target sequence
aattaaagtatttaccaattgg

SEQ ID NO: 253450 - DNA, 22 bp, Artificial sequence
  SiRNA target sequence
attaaagtatttaccaattgga

SEQ ID NO: 253451 - DNA, 22 bp, Artificial sequence
  SiRNA target sequence
ttaaagtatttaccaattggaa

SEQ ID NO: 253452 - DNA, 22 bp, Artificial sequence
  SiRNA target sequence
taaagtatttaccaattggaat

SEQ ID NO: 253453 - DNA, 22 bp, Artificial sequence
  SiRNA target sequence
aaagtatttaccaattggaata

SEQ ID NO: 253454 - DNA, 22 bp, Artificial sequence
  SiRNA target sequence
aagtatttaccaattggaataa

SEQ ID NO: 253455 - DNA, 22 bp, Artificial sequence
  SiRNA target sequence
agtatttaccaattggaataaa

SEQ ID NO: 253456 - DNA, 22 bp, Artificial sequence
  SiRNA target sequence
gtatttaccaattggaataaag

SEQ ID NO: 253457 - DNA, 22 bp, Artificial sequence
  SiRNA target sequence
tatttaccaattggaataaaga

SEQ ID NO: 253458 - DNA, 22 bp, Artificial sequence
  SiRNA target sequence
atttaccaattggaataaagat

SEQ ID NO: 253459 - DNA, 22 bp, Artificial sequence
  SiRNA target sequence
tttaccaattggaataaagata

SEQ ID NO: 253460 - DNA, 22 bp, Artificial sequence
  SiRNA target sequence
ttaccaattggaataaagatag

SEQ ID NO: 253461 - DNA, 22 bp, Artificial sequence
  SiRNA target sequence
taccaattggaataaagatagg

SEQ ID NO: 253462 - DNA, 22 bp, Artificial sequence
  SiRNA target sequence
accaattggaataaagatagga

SEQ ID NO: 253463 - DNA, 22 bp, Artificial sequence
  SiRNA target sequence
ccaattggaataaagataggat

SEQ ID NO: 253464 - DNA, 22 bp, Artificial sequence
  SiRNA target sequence
caattggaataaagataggatt

SEQ ID NO: 253465 - DNA, 22 bp, Artificial sequence
  SiRNA target sequence
aattggaataaagataggatta

SEQ ID NO: 253466 - DNA, 22 bp, Artificial sequence
  SiRNA target sequence
attggaataaagataggattaa

SEQ ID NO: 253467 - DNA, 22 bp, Artificial sequence
  SiRNA target sequence
ttggaataaagataggattaat

SEQ ID NO: 253468 - DNA, 22 bp, Artificial sequence
  SiRNA target sequence
tggaataaagataggattaatg

SEQ ID NO: 253469 - DNA, 22 bp, Artificial sequence
  SiRNA target sequence
ggaataaagataggattaatga

SEQ ID NO: 253470 - DNA, 22 bp, Artificial sequence
  SiRNA target sequence
gaataaagataggattaatgat

SEQ ID NO: 253471 - DNA, 22 bp, Artificial sequence
  SiRNA target sequence
aataaagataggattaatgata

SEQ ID NO: 253472 - DNA, 22 bp, Artificial sequence
  SiRNA target sequence
ataaagataggattaatgataa

SEQ ID NO: 253473 - DNA, 22 bp, Artificial sequence
  SiRNA target sequence
taaagataggattaatgataat

SEQ ID NO: 253474 - DNA, 22 bp, Artificial sequence
  SiRNA target sequence
aaagataggattaatgataatt

SEQ ID NO: 253475 - DNA, 22 bp, Artificial sequence
  SiRNA target sequence
aagataggattaatgataattt

SEQ ID NO: 253476 - DNA, 22 bp, Artificial sequence
  SiRNA target sequence
agataggattaatgataatttt

SEQ ID NO: 253477 - DNA, 22 bp, Artificial sequence
  SiRNA target sequence
gataggattaatgataattttt

SEQ ID NO: 253478 - DNA, 22 bp, Artificial sequence
  SiRNA target sequence
ataggattaatgataatttttt

SEQ ID NO: 253479 - DNA, 22 bp, Artificial sequence
  SiRNA target sequence
taggattaatgataattttttt

SEQ ID NO: 253480 - DNA, 22 bp, Artificial sequence
  SiRNA target sequence
aggattaatgataattttttta

SEQ ID NO: 253481 - DNA, 22 bp, Artificial sequence
  SiRNA target sequence
ggattaatgataatttttttaa

SEQ ID NO: 253482 - DNA, 22 bp, Artificial sequence
  SiRNA target sequence
gattaatgataatttttttaag

SEQ ID NO: 253483 - DNA, 22 bp, Artificial sequence
  SiRNA target sequence
attaatgataatttttttaagt

SEQ ID NO: 253484 - DNA, 22 bp, Artificial sequence
  SiRNA target sequence
ttaatgataatttttttaagtt

SEQ ID NO: 253485 - DNA, 22 bp, Artificial sequence
  SiRNA target sequence
taatgataatttttttaagttt

SEQ ID NO: 253486 - DNA, 22 bp, Artificial sequence
  SiRNA target sequence
aatgataatttttttaagttta

SEQ ID NO: 253487 - DNA, 22 bp, Artificial sequence
  SiRNA target sequence
atgataatttttttaagtttaa

SEQ ID NO: 253488 - DNA, 22 bp, Artificial sequence
  SiRNA target sequence
tgataatttttttaagtttaag

SEQ ID NO: 253489 - DNA, 22 bp, Artificial sequence
  SiRNA target sequence
gataatttttttaagtttaagt

SEQ ID NO: 253490 - DNA, 22 bp, Artificial sequence
  SiRNA target sequence
ataatttttttaagtttaagtg

SEQ ID NO: 253491 - DNA, 22 bp, Artificial sequence
  SiRNA target sequence
taatttttttaagtttaagtgg

SEQ ID NO: 253492 - DNA, 22 bp, Artificial sequence
  SiRNA target sequence
aatttttttaagtttaagtgga

SEQ ID NO: 253493 - DNA, 22 bp, Artificial sequence
  SiRNA target sequence
atttttttaagtttaagtggaa

SEQ ID NO: 253494 - DNA, 22 bp, Artificial sequence
  SiRNA target sequence
tttttttaagtttaagtggaat

SEQ ID NO: 253495 - DNA, 22 bp, Artificial sequence
  SiRNA target sequence
ttttttaagtttaagtggaata

SEQ ID NO: 253496 - DNA, 22 bp, Artificial sequence
  SiRNA target sequence
tttttaagtttaagtggaatac

SEQ ID NO: 253497 - DNA, 22 bp, Artificial sequence
  SiRNA target sequence
ttttaagtttaagtggaatacc

SEQ ID NO: 253498 - DNA, 22 bp, Artificial sequence
  SiRNA target sequence
tttaagtttaagtggaatacct

SEQ ID NO: 253499 - DNA, 22 bp, Artificial sequence
  SiRNA target sequence
ttaagtttaagtggaatacctc

SEQ ID NO: 253500 - DNA, 22 bp, Artificial sequence
  SiRNA target sequence
taagtttaagtggaatacctcc

SEQ ID NO: 253501 - DNA, 22 bp, Artificial sequence
  SiRNA target sequence
aagtttaagtggaatacctccc

SEQ ID NO: 253502 - DNA, 22 bp, Artificial sequence
  SiRNA target sequence
agtttaagtggaatacctccct

SEQ ID NO: 253503 - DNA, 22 bp, Artificial sequence
  SiRNA target sequence
gtttaagtggaatacctccctt

SEQ ID NO: 253504 - DNA, 22 bp, Artificial sequence
  SiRNA target sequence
tttaagtggaatacctcccttt

SEQ ID NO: 253505 - DNA, 22 bp, Artificial sequence
  SiRNA target sequence
ttaagtggaatacctcccttta

SEQ ID NO: 253506 - DNA, 22 bp, Artificial sequence
  SiRNA target sequence
taagtggaatacctccctttat

SEQ ID NO: 253507 - DNA, 22 bp, Artificial sequence
  SiRNA target sequence
aagtggaatacctccctttata

SEQ ID NO: 253508 - DNA, 22 bp, Artificial sequence
  SiRNA target sequence
agtggaatacctccctttatag

SEQ ID NO: 253509 - DNA, 22 bp, Artificial sequence
  SiRNA target sequence
gtggaatacctccctttatagg

SEQ ID NO: 253510 - DNA, 22 bp, Artificial sequence
  SiRNA target sequence
tggaatacctccctttatagga

SEQ ID NO: 253511 - DNA, 22 bp, Artificial sequence
  SiRNA target sequence
ggaatacctccctttataggat

SEQ ID NO: 253512 - DNA, 22 bp, Artificial sequence
  SiRNA target sequence
gaatacctccctttataggatt

SEQ ID NO: 253513 - DNA, 22 bp, Artificial sequence
  SiRNA target sequence
aatacctccctttataggattt

SEQ ID NO: 253514 - DNA, 22 bp, Artificial sequence
  SiRNA target sequence
atacctccctttataggattta

SEQ ID NO: 253515 - DNA, 22 bp, Artificial sequence
  SiRNA target sequence
tacctccctttataggatttat

SEQ ID NO: 253516 - DNA, 22 bp, Artificial sequence
  SiRNA target sequence
acctccctttataggatttatt

SEQ ID NO: 253517 - DNA, 22 bp, Artificial sequence
  SiRNA target sequence
cctccctttataggatttattt

SEQ ID NO: 253518 - DNA, 22 bp, Artificial sequence
  SiRNA target sequence
ctccctttataggatttatttc

SEQ ID NO: 253519 - DNA, 22 bp, Artificial sequence
  SiRNA target sequence
tccctttataggatttatttct

SEQ ID NO: 253520 - DNA, 22 bp, Artificial sequence
  SiRNA target sequence
ccctttataggatttatttcta

SEQ ID NO: 253521 - DNA, 22 bp, Artificial sequence
  SiRNA target sequence
cctttataggatttatttctaa

SEQ ID NO: 253522 - DNA, 22 bp, Artificial sequence
  SiRNA target sequence
ctttataggatttatttctaag

SEQ ID NO: 253523 - DNA, 22 bp, Artificial sequence
  SiRNA target sequence
tttataggatttatttctaaga

SEQ ID NO: 253524 - DNA, 22 bp, Artificial sequence
  SiRNA target sequence
ttataggatttatttctaagat

SEQ ID NO: 253525 - DNA, 22 bp, Artificial sequence
  SiRNA target sequence
tataggatttatttctaagata

SEQ ID NO: 253526 - DNA, 22 bp, Artificial sequence
  SiRNA target sequence
ataggatttatttctaagataa

SEQ ID NO: 253527 - DNA, 22 bp, Artificial sequence
  SiRNA target sequence
taggatttatttctaagataac

SEQ ID NO: 253528 - DNA, 22 bp, Artificial sequence
  SiRNA target sequence
aggatttatttctaagataact

SEQ ID NO: 253529 - DNA, 22 bp, Artificial sequence
  SiRNA target sequence
ggatttatttctaagataactg

SEQ ID NO: 253530 - DNA, 22 bp, Artificial sequence
  SiRNA target sequence
gatttatttctaagataactgt

SEQ ID NO: 253531 - DNA, 22 bp, Artificial sequence
  SiRNA target sequence
atttatttctaagataactgtt

SEQ ID NO: 253532 - DNA, 22 bp, Artificial sequence
  SiRNA target sequence
tttatttctaagataactgttt

SEQ ID NO: 253533 - DNA, 22 bp, Artificial sequence
  SiRNA target sequence
ttatttctaagataactgtttt

SEQ ID NO: 253534 - DNA, 22 bp, Artificial sequence
  SiRNA target sequence
tatttctaagataactgttttg

SEQ ID NO: 253535 - DNA, 22 bp, Artificial sequence
  SiRNA target sequence
atttctaagataactgttttgt

SEQ ID NO: 253536 - DNA, 22 bp, Artificial sequence
  SiRNA target sequence
tttctaagataactgttttgtt

SEQ ID NO: 253537 - DNA, 22 bp, Artificial sequence
  SiRNA target sequence
ttctaagataactgttttgttg

SEQ ID NO: 253538 - DNA, 22 bp, Artificial sequence
  SiRNA target sequence
tctaagataactgttttgttga

SEQ ID NO: 253539 - DNA, 22 bp, Artificial sequence
  SiRNA target sequence
ctaagataactgttttgttgat

SEQ ID NO: 253540 - DNA, 22 bp, Artificial sequence
  SiRNA target sequence
taagataactgttttgttgatg

SEQ ID NO: 253541 - DNA, 22 bp, Artificial sequence
  SiRNA target sequence
aagataactgttttgttgatgt

SEQ ID NO: 253542 - DNA, 22 bp, Artificial sequence
  SiRNA target sequence
agataactgttttgttgatgta

SEQ ID NO: 253543 - DNA, 22 bp, Artificial sequence
  SiRNA target sequence
gataactgttttgttgatgtat

SEQ ID NO: 253544 - DNA, 22 bp, Artificial sequence
  SiRNA target sequence
ataactgttttgttgatgtatt

SEQ ID NO: 253545 - DNA, 22 bp, Artificial sequence
  SiRNA target sequence
taactgttttgttgatgtattt

SEQ ID NO: 253546 - DNA, 22 bp, Artificial sequence
  SiRNA target sequence
aactgttttgttgatgtatttt

SEQ ID NO: 253547 - DNA, 22 bp, Artificial sequence
  SiRNA target sequence
actgttttgttgatgtattttg

SEQ ID NO: 253548 - DNA, 22 bp, Artificial sequence
  SiRNA target sequence
ctgttttgttgatgtattttga

SEQ ID NO: 253549 - DNA, 22 bp, Artificial sequence
  SiRNA target sequence
tgttttgttgatgtattttgag

SEQ ID NO: 253550 - DNA, 22 bp, Artificial sequence
  SiRNA target sequence
gttttgttgatgtattttgaga

SEQ ID NO: 253551 - DNA, 22 bp, Artificial sequence
  SiRNA target sequence
ttttgttgatgtattttgagaa

SEQ ID NO: 253552 - DNA, 22 bp, Artificial sequence
  SiRNA target sequence
tttgttgatgtattttgagaat

SEQ ID NO: 253553 - DNA, 22 bp, Artificial sequence
  SiRNA target sequence
ttgttgatgtattttgagaatc

SEQ ID NO: 253554 - DNA, 22 bp, Artificial sequence
  SiRNA target sequence
tgttgatgtattttgagaatca

SEQ ID NO: 253555 - DNA, 22 bp, Artificial sequence
  SiRNA target sequence
gttgatgtattttgagaatcaa

SEQ ID NO: 253556 - DNA, 22 bp, Artificial sequence
  SiRNA target sequence
ttgatgtattttgagaatcaaa

SEQ ID NO: 253557 - DNA, 22 bp, Artificial sequence
  SiRNA target sequence
tgatgtattttgagaatcaaaa

SEQ ID NO: 253558 - DNA, 22 bp, Artificial sequence
  SiRNA target sequence
gatgtattttgagaatcaaaaa

SEQ ID NO: 253559 - DNA, 22 bp, Artificial sequence
  SiRNA target sequence
atgtattttgagaatcaaaaaa

SEQ ID NO: 253560 - DNA, 22 bp, Artificial sequence
  SiRNA target sequence
tgtattttgagaatcaaaaaat

SEQ ID NO: 253561 - DNA, 22 bp, Artificial sequence
  SiRNA target sequence
gtattttgagaatcaaaaaata

SEQ ID NO: 253562 - DNA, 22 bp, Artificial sequence
  SiRNA target sequence
tattttgagaatcaaaaaataa

SEQ ID NO: 253563 - DNA, 22 bp, Artificial sequence
  SiRNA target sequence
attttgagaatcaaaaaataat

SEQ ID NO: 253564 - DNA, 22 bp, Artificial sequence
  SiRNA target sequence
ttttgagaatcaaaaaataatt

SEQ ID NO: 253565 - DNA, 22 bp, Artificial sequence
  SiRNA target sequence
tttgagaatcaaaaaataattt

SEQ ID NO: 253566 - DNA, 22 bp, Artificial sequence
  SiRNA target sequence
ttgagaatcaaaaaataatttt

SEQ ID NO: 253567 - DNA, 22 bp, Artificial sequence
  SiRNA target sequence
tgagaatcaaaaaataattttt

SEQ ID NO: 253568 - DNA, 22 bp, Artificial sequence
  SiRNA target sequence
gagaatcaaaaaataatttttt

SEQ ID NO: 253569 - DNA, 22 bp, Artificial sequence
  SiRNA target sequence
agaatcaaaaaataattttttt

SEQ ID NO: 253570 - DNA, 22 bp, Artificial sequence
  SiRNA target sequence
gaatcaaaaaataattttttta

SEQ ID NO: 253571 - DNA, 22 bp, Artificial sequence
  SiRNA target sequence
aatcaaaaaataatttttttaa

SEQ ID NO: 253572 - DNA, 22 bp, Artificial sequence
  SiRNA target sequence
atcaaaaaataatttttttaat

SEQ ID NO: 253573 - DNA, 22 bp, Artificial sequence
  SiRNA target sequence
tcaaaaaataatttttttaatt

SEQ ID NO: 253574 - DNA, 22 bp, Artificial sequence
  SiRNA target sequence
caaaaaataatttttttaatta

SEQ ID NO: 253575 - DNA, 22 bp, Artificial sequence
  SiRNA target sequence
aaaaaataatttttttaattat

SEQ ID NO: 253576 - DNA, 22 bp, Artificial sequence
  SiRNA target sequence
aaaaataatttttttaattata

SEQ ID NO: 253577 - DNA, 22 bp, Artificial sequence
  SiRNA target sequence
aaaataatttttttaattatat

SEQ ID NO: 253578 - DNA, 22 bp, Artificial sequence
  SiRNA target sequence
aaataatttttttaattatatt

SEQ ID NO: 253579 - DNA, 22 bp, Artificial sequence
  SiRNA target sequence
aataatttttttaattatatta

SEQ ID NO: 253580 - DNA, 22 bp, Artificial sequence
  SiRNA target sequence
ataatttttttaattatattat

SEQ ID NO: 253581 - DNA, 22 bp, Artificial sequence
  SiRNA target sequence
taatttttttaattatattatt

SEQ ID NO: 253582 - DNA, 22 bp, Artificial sequence
  SiRNA target sequence
aatttttttaattatattatta

SEQ ID NO: 253583 - DNA, 22 bp, Artificial sequence
  SiRNA target sequence
atttttttaattatattattag

SEQ ID NO: 253584 - DNA, 22 bp, Artificial sequence
  SiRNA target sequence
tttttttaattatattattagt

SEQ ID NO: 253585 - DNA, 22 bp, Artificial sequence
  SiRNA target sequence
ttttttaattatattattagta

SEQ ID NO: 253586 - DNA, 22 bp, Artificial sequence
  SiRNA target sequence
tttttaattatattattagtat

SEQ ID NO: 253587 - DNA, 22 bp, Artificial sequence
  SiRNA target sequence
ttttaattatattattagtatc

SEQ ID NO: 253588 - DNA, 22 bp, Artificial sequence
  SiRNA target sequence
tttaattatattattagtatct

SEQ ID NO: 253589 - DNA, 22 bp, Artificial sequence
  SiRNA target sequence
ttaattatattattagtatctg

SEQ ID NO: 253590 - DNA, 22 bp, Artificial sequence
  SiRNA target sequence
taattatattattagtatctgt

SEQ ID NO: 253591 - DNA, 22 bp, Artificial sequence
  SiRNA target sequence
aattatattattagtatctgta

SEQ ID NO: 253592 - DNA, 22 bp, Artificial sequence
  SiRNA target sequence
attatattattagtatctgtaa

SEQ ID NO: 253593 - DNA, 22 bp, Artificial sequence
  SiRNA target sequence
ttatattattagtatctgtaat

SEQ ID NO: 253594 - DNA, 22 bp, Artificial sequence
  SiRNA target sequence
tatattattagtatctgtaata

SEQ ID NO: 253595 - DNA, 22 bp, Artificial sequence
  SiRNA target sequence
atattattagtatctgtaataa

SEQ ID NO: 253596 - DNA, 22 bp, Artificial sequence
  SiRNA target sequence
tattattagtatctgtaataag

SEQ ID NO: 253597 - DNA, 22 bp, Artificial sequence
  SiRNA target sequence
attattagtatctgtaataaga

SEQ ID NO: 253598 - DNA, 22 bp, Artificial sequence
  SiRNA target sequence
ttattagtatctgtaataagaa

SEQ ID NO: 253599 - DNA, 22 bp, Artificial sequence
  SiRNA target sequence
tattagtatctgtaataagaat

SEQ ID NO: 253600 - DNA, 22 bp, Artificial sequence
  SiRNA target sequence
attagtatctgtaataagaata

SEQ ID NO: 253601 - DNA, 22 bp, Artificial sequence
  SiRNA target sequence
ttagtatctgtaataagaatat

SEQ ID NO: 253602 - DNA, 22 bp, Artificial sequence
  SiRNA target sequence
tagtatctgtaataagaatata

SEQ ID NO: 253603 - DNA, 22 bp, Artificial sequence
  SiRNA target sequence
agtatctgtaataagaatatat

SEQ ID NO: 253604 - DNA, 22 bp, Artificial sequence
  SiRNA target sequence
gtatctgtaataagaatatata

SEQ ID NO: 253605 - DNA, 22 bp, Artificial sequence
  SiRNA target sequence
tatctgtaataagaatatatat

SEQ ID NO: 253606 - DNA, 22 bp, Artificial sequence
  SiRNA target sequence
atctgtaataagaatatatatt

SEQ ID NO: 253607 - DNA, 22 bp, Artificial sequence
  SiRNA target sequence
tctgtaataagaatatatattt

SEQ ID NO: 253608 - DNA, 22 bp, Artificial sequence
  SiRNA target sequence
ctgtaataagaatatatattta

SEQ ID NO: 253609 - DNA, 22 bp, Artificial sequence
  SiRNA target sequence
tgtaataagaatatatatttat

SEQ ID NO: 253610 - DNA, 22 bp, Artificial sequence
  SiRNA target sequence
gtaataagaatatatatttata

SEQ ID NO: 253611 - DNA, 22 bp, Artificial sequence
  SiRNA target sequence
taataagaatatatatttatat

SEQ ID NO: 253612 - DNA, 22 bp, Artificial sequence
  SiRNA target sequence
aataagaatatatatttatata

SEQ ID NO: 253613 - DNA, 22 bp, Artificial sequence
  SiRNA target sequence
ataagaatatatatttatataa

SEQ ID NO: 253614 - DNA, 22 bp, Artificial sequence
  SiRNA target sequence
taagaatatatatttatataaa

SEQ ID NO: 253615 - DNA, 22 bp, Artificial sequence
  SiRNA target sequence
aagaatatatatttatataaat

SEQ ID NO: 253616 - DNA, 22 bp, Artificial sequence
  SiRNA target sequence
agaatatatatttatataaatt

SEQ ID NO: 253617 - DNA, 22 bp, Artificial sequence
  SiRNA target sequence
gaatatatatttatataaatta

SEQ ID NO: 253618 - DNA, 22 bp, Artificial sequence
  SiRNA target sequence
aatatatatttatataaattat

SEQ ID NO: 253619 - DNA, 22 bp, Artificial sequence
  SiRNA target sequence
atatatatttatataaattatt

SEQ ID NO: 253620 - DNA, 22 bp, Artificial sequence
  SiRNA target sequence
tatatatttatataaattattt

SEQ ID NO: 253621 - DNA, 22 bp, Artificial sequence
  SiRNA target sequence
atatatttatataaattatttt

SEQ ID NO: 253622 - DNA, 22 bp, Artificial sequence
  SiRNA target sequence
tatatttatataaattatttta

SEQ ID NO: 253623 - DNA, 22 bp, Artificial sequence
  SiRNA target sequence
atatttatataaattattttat

SEQ ID NO: 253624 - DNA, 22 bp, Artificial sequence
  SiRNA target sequence
tatttatataaattattttatg

SEQ ID NO: 253625 - DNA, 22 bp, Artificial sequence
  SiRNA target sequence
atttatataaattattttatga

SEQ ID NO: 253626 - DNA, 22 bp, Artificial sequence
  SiRNA target sequence
tttatataaattattttatgaa

SEQ ID NO: 253627 - DNA, 22 bp, Artificial sequence
  SiRNA target sequence
ttatataaattattttatgaag

SEQ ID NO: 253628 - DNA, 22 bp, Artificial sequence
  SiRNA target sequence
tatataaattattttatgaaga

SEQ ID NO: 253629 - DNA, 22 bp, Artificial sequence
  SiRNA target sequence
atataaattattttatgaagag

SEQ ID NO: 253630 - DNA, 22 bp, Artificial sequence
  SiRNA target sequence
tataaattattttatgaagagt

SEQ ID NO: 253631 - DNA, 22 bp, Artificial sequence
  SiRNA target sequence
ataaattattttatgaagagtt

SEQ ID NO: 253632 - DNA, 22 bp, Artificial sequence
  SiRNA target sequence
taaattattttatgaagagttt

SEQ ID NO: 253633 - DNA, 22 bp, Artificial sequence
  SiRNA target sequence
aaattattttatgaagagttta

SEQ ID NO: 253634 - DNA, 22 bp, Artificial sequence
  SiRNA target sequence
aattattttatgaagagtttat

SEQ ID NO: 253635 - DNA, 22 bp, Artificial sequence
  SiRNA target sequence
attattttatgaagagtttatt

SEQ ID NO: 253636 - DNA, 22 bp, Artificial sequence
  SiRNA target sequence
ttattttatgaagagtttattt

SEQ ID NO: 253637 - DNA, 22 bp, Artificial sequence
  SiRNA target sequence
tattttatgaagagtttatttt

SEQ ID NO: 253638 - DNA, 22 bp, Artificial sequence
  SiRNA target sequence
attttatgaagagtttattttt

SEQ ID NO: 253639 - DNA, 22 bp, Artificial sequence
  SiRNA target sequence
ttttatgaagagtttatttttt

SEQ ID NO: 253640 - DNA, 22 bp, Artificial sequence
  SiRNA target sequence
tttatgaagagtttatttttta

SEQ ID NO: 253641 - DNA, 22 bp, Artificial sequence
  SiRNA target sequence
ttatgaagagtttattttttat

SEQ ID NO: 253642 - DNA, 22 bp, Artificial sequence
  SiRNA target sequence
tatgaagagtttattttttata

SEQ ID NO: 253643 - DNA, 22 bp, Artificial sequence
  SiRNA target sequence
atgaagagtttattttttataa

SEQ ID NO: 253644 - DNA, 22 bp, Artificial sequence
  SiRNA target sequence
tgaagagtttattttttataag

SEQ ID NO: 253645 - DNA, 22 bp, Artificial sequence
  SiRNA target sequence
gaagagtttattttttataaga

SEQ ID NO: 253646 - DNA, 22 bp, Artificial sequence
  SiRNA target sequence
aagagtttattttttataagat

SEQ ID NO: 253647 - DNA, 22 bp, Artificial sequence
  SiRNA target sequence
agagtttattttttataagatt

SEQ ID NO: 253648 - DNA, 22 bp, Artificial sequence
  SiRNA target sequence
gagtttattttttataagatta

SEQ ID NO: 253649 - DNA, 22 bp, Artificial sequence
  SiRNA target sequence
agtttattttttataagattag

SEQ ID NO: 253650 - DNA, 22 bp, Artificial sequence
  SiRNA target sequence
gtttattttttataagattagg

SEQ ID NO: 253651 - DNA, 22 bp, Artificial sequence
  SiRNA target sequence
tttattttttataagattaggt

SEQ ID NO: 253652 - DNA, 22 bp, Artificial sequence
  SiRNA target sequence
ttattttttataagattaggtt

SEQ ID NO: 253653 - DNA, 22 bp, Artificial sequence
  SiRNA target sequence
tattttttataagattaggtta

SEQ ID NO: 253654 - DNA, 22 bp, Artificial sequence
  SiRNA target sequence
attttttataagattaggttat

SEQ ID NO: 253655 - DNA, 22 bp, Artificial sequence
  SiRNA target sequence
ttttttataagattaggttata

SEQ ID NO: 253656 - DNA, 22 bp, Artificial sequence
  SiRNA target sequence
tttttataagattaggttataa

SEQ ID NO: 253657 - DNA, 22 bp, Artificial sequence
  SiRNA target sequence
ttttataagattaggttataat

SEQ ID NO: 253658 - DNA, 22 bp, Artificial sequence
  SiRNA target sequence
tttataagattaggttataata

SEQ ID NO: 253659 - DNA, 22 bp, Artificial sequence
  SiRNA target sequence
ttataagattaggttataataa

SEQ ID NO: 253660 - DNA, 22 bp, Artificial sequence
  SiRNA target sequence
tataagattaggttataataaa

SEQ ID NO: 253661 - DNA, 22 bp, Artificial sequence
  SiRNA target sequence
ataagattaggttataataaaa

SEQ ID NO: 253662 - DNA, 22 bp, Artificial sequence
  SiRNA target sequence
taagattaggttataataaaaa

SEQ ID NO: 253663 - DNA, 22 bp, Artificial sequence
  SiRNA target sequence
aagattaggttataataaaaat

SEQ ID NO: 253664 - DNA, 22 bp, Artificial sequence
  SiRNA target sequence
agattaggttataataaaaata

SEQ ID NO: 253665 - DNA, 22 bp, Artificial sequence
  SiRNA target sequence
gattaggttataataaaaataa

SEQ ID NO: 253666 - DNA, 22 bp, Artificial sequence
  SiRNA target sequence
attaggttataataaaaataaa

SEQ ID NO: 253667 - DNA, 22 bp, Artificial sequence
  SiRNA target sequence
ttaggttataataaaaataaaa

SEQ ID NO: 253668 - DNA, 22 bp, Artificial sequence
  SiRNA target sequence
taggttataataaaaataaaaa

SEQ ID NO: 253669 - DNA, 22 bp, Artificial sequence
  SiRNA target sequence
aggttataataaaaataaaaat

SEQ ID NO: 253670 - DNA, 22 bp, Artificial sequence
  SiRNA target sequence
ggttataataaaaataaaaata

SEQ ID NO: 253671 - DNA, 22 bp, Artificial sequence
  SiRNA target sequence
gttataataaaaataaaaatat

SEQ ID NO: 253672 - DNA, 22 bp, Artificial sequence
  SiRNA target sequence
ttataataaaaataaaaatata

SEQ ID NO: 253673 - DNA, 22 bp, Artificial sequence
  SiRNA target sequence
tataataaaaataaaaatatag

SEQ ID NO: 253674 - DNA, 22 bp, Artificial sequence
  SiRNA target sequence
ataataaaaataaaaatatagg

SEQ ID NO: 253675 - DNA, 22 bp, Artificial sequence
  SiRNA target sequence
taataaaaataaaaatatagga

SEQ ID NO: 253676 - DNA, 22 bp, Artificial sequence
  SiRNA target sequence
aataaaaataaaaatataggaa

SEQ ID NO: 253677 - DNA, 22 bp, Artificial sequence
  SiRNA target sequence
ataaaaataaaaatataggaat

SEQ ID NO: 253678 - DNA, 22 bp, Artificial sequence
  SiRNA target sequence
taaaaataaaaatataggaata

SEQ ID NO: 253679 - DNA, 22 bp, Artificial sequence
  SiRNA target sequence
aaaaataaaaatataggaataa

SEQ ID NO: 253680 - DNA, 22 bp, Artificial sequence
  SiRNA target sequence
aaaataaaaatataggaataag

SEQ ID NO: 253681 - DNA, 22 bp, Artificial sequence
  SiRNA target sequence
aaataaaaatataggaataaga

SEQ ID NO: 253682 - DNA, 22 bp, Artificial sequence
  SiRNA target sequence
aataaaaatataggaataagaa

SEQ ID NO: 253683 - DNA, 22 bp, Artificial sequence
  SiRNA target sequence
ataaaaatataggaataagaag

SEQ ID NO: 253684 - DNA, 22 bp, Artificial sequence
  SiRNA target sequence
taaaaatataggaataagaaga

SEQ ID NO: 253685 - DNA, 23 bp, Artificial sequence
  SiRNA target sequence
attttattcaattaaagtattta

SEQ ID NO: 253686 - DNA, 23 bp, Artificial sequence
  SiRNA target sequence
ttttattcaattaaagtatttac

SEQ ID NO: 253687 - DNA, 23 bp, Artificial sequence
  SiRNA target sequence
tttattcaattaaagtatttacc

SEQ ID NO: 253688 - DNA, 23 bp, Artificial sequence
  SiRNA target sequence
ttattcaattaaagtatttacca

SEQ ID NO: 253689 - DNA, 23 bp, Artificial sequence
  SiRNA target sequence
tattcaattaaagtatttaccaa

SEQ ID NO: 253690 - DNA, 23 bp, Artificial sequence
  SiRNA target sequence
attcaattaaagtatttaccaat

SEQ ID NO: 253691 - DNA, 23 bp, Artificial sequence
  SiRNA target sequence
ttcaattaaagtatttaccaatt

SEQ ID NO: 253692 - DNA, 23 bp, Artificial sequence
  SiRNA target sequence
tcaattaaagtatttaccaattg

SEQ ID NO: 253693 - DNA, 23 bp, Artificial sequence
  SiRNA target sequence
caattaaagtatttaccaattgg

SEQ ID NO: 253694 - DNA, 23 bp, Artificial sequence
  SiRNA target sequence
aattaaagtatttaccaattgga

SEQ ID NO: 253695 - DNA, 23 bp, Artificial sequence
  SiRNA target sequence
attaaagtatttaccaattggaa

SEQ ID NO: 253696 - DNA, 23 bp, Artificial sequence
  SiRNA target sequence
ttaaagtatttaccaattggaat

SEQ ID NO: 253697 - DNA, 23 bp, Artificial sequence
  SiRNA target sequence
taaagtatttaccaattggaata

SEQ ID NO: 253698 - DNA, 23 bp, Artificial sequence
  SiRNA target sequence
aaagtatttaccaattggaataa

SEQ ID NO: 253699 - DNA, 23 bp, Artificial sequence
  SiRNA target sequence
aagtatttaccaattggaataaa

SEQ ID NO: 253700 - DNA, 23 bp, Artificial sequence
  SiRNA target sequence
agtatttaccaattggaataaag

SEQ ID NO: 253701 - DNA, 23 bp, Artificial sequence
  SiRNA target sequence
gtatttaccaattggaataaaga

SEQ ID NO: 253702 - DNA, 23 bp, Artificial sequence
  SiRNA target sequence
tatttaccaattggaataaagat

SEQ ID NO: 253703 - DNA, 23 bp, Artificial sequence
  SiRNA target sequence
atttaccaattggaataaagata

SEQ ID NO: 253704 - DNA, 23 bp, Artificial sequence
  SiRNA target sequence
tttaccaattggaataaagatag

SEQ ID NO: 253705 - DNA, 23 bp, Artificial sequence
  SiRNA target sequence
ttaccaattggaataaagatagg

SEQ ID NO: 253706 - DNA, 23 bp, Artificial sequence
  SiRNA target sequence
taccaattggaataaagatagga

SEQ ID NO: 253707 - DNA, 23 bp, Artificial sequence
  SiRNA target sequence
accaattggaataaagataggat

SEQ ID NO: 253708 - DNA, 23 bp, Artificial sequence
  SiRNA target sequence
ccaattggaataaagataggatt

SEQ ID NO: 253709 - DNA, 23 bp, Artificial sequence
  SiRNA target sequence
caattggaataaagataggatta

SEQ ID NO: 253710 - DNA, 23 bp, Artificial sequence
  SiRNA target sequence
aattggaataaagataggattaa

SEQ ID NO: 253711 - DNA, 23 bp, Artificial sequence
  SiRNA target sequence
attggaataaagataggattaat

SEQ ID NO: 253712 - DNA, 23 bp, Artificial sequence
  SiRNA target sequence
ttggaataaagataggattaatg

SEQ ID NO: 253713 - DNA, 23 bp, Artificial sequence
  SiRNA target sequence
tggaataaagataggattaatga

SEQ ID NO: 253714 - DNA, 23 bp, Artificial sequence
  SiRNA target sequence
ggaataaagataggattaatgat

SEQ ID NO: 253715 - DNA, 23 bp, Artificial sequence
  SiRNA target sequence
gaataaagataggattaatgata

SEQ ID NO: 253716 - DNA, 23 bp, Artificial sequence
  SiRNA target sequence
aataaagataggattaatgataa

SEQ ID NO: 253717 - DNA, 23 bp, Artificial sequence
  SiRNA target sequence
ataaagataggattaatgataat

SEQ ID NO: 253718 - DNA, 23 bp, Artificial sequence
  SiRNA target sequence
taaagataggattaatgataatt

SEQ ID NO: 253719 - DNA, 23 bp, Artificial sequence
  SiRNA target sequence
aaagataggattaatgataattt

SEQ ID NO: 253720 - DNA, 23 bp, Artificial sequence
  SiRNA target sequence
aagataggattaatgataatttt

SEQ ID NO: 253721 - DNA, 23 bp, Artificial sequence
  SiRNA target sequence
agataggattaatgataattttt

SEQ ID NO: 253722 - DNA, 23 bp, Artificial sequence
  SiRNA target sequence
gataggattaatgataatttttt

SEQ ID NO: 253723 - DNA, 23 bp, Artificial sequence
  SiRNA target sequence
ataggattaatgataattttttt

SEQ ID NO: 253724 - DNA, 23 bp, Artificial sequence
  SiRNA target sequence
taggattaatgataattttttta

SEQ ID NO: 253725 - DNA, 23 bp, Artificial sequence
  SiRNA target sequence
aggattaatgataatttttttaa

SEQ ID NO: 253726 - DNA, 23 bp, Artificial sequence
  SiRNA target sequence
ggattaatgataatttttttaag

SEQ ID NO: 253727 - DNA, 23 bp, Artificial sequence
  SiRNA target sequence
gattaatgataatttttttaagt

SEQ ID NO: 253728 - DNA, 23 bp, Artificial sequence
  SiRNA target sequence
attaatgataatttttttaagtt

SEQ ID NO: 253729 - DNA, 23 bp, Artificial sequence
  SiRNA target sequence
ttaatgataatttttttaagttt

SEQ ID NO: 253730 - DNA, 23 bp, Artificial sequence
  SiRNA target sequence
taatgataatttttttaagttta

SEQ ID NO: 253731 - DNA, 23 bp, Artificial sequence
  SiRNA target sequence
aatgataatttttttaagtttaa

SEQ ID NO: 253732 - DNA, 23 bp, Artificial sequence
  SiRNA target sequence
atgataatttttttaagtttaag

SEQ ID NO: 253733 - DNA, 23 bp, Artificial sequence
  SiRNA target sequence
tgataatttttttaagtttaagt

SEQ ID NO: 253734 - DNA, 23 bp, Artificial sequence
  SiRNA target sequence
gataatttttttaagtttaagtg

SEQ ID NO: 253735 - DNA, 23 bp, Artificial sequence
  SiRNA target sequence
ataatttttttaagtttaagtgg

SEQ ID NO: 253736 - DNA, 23 bp, Artificial sequence
  SiRNA target sequence
taatttttttaagtttaagtgga

SEQ ID NO: 253737 - DNA, 23 bp, Artificial sequence
  SiRNA target sequence
aatttttttaagtttaagtggaa

SEQ ID NO: 253738 - DNA, 23 bp, Artificial sequence
  SiRNA target sequence
atttttttaagtttaagtggaat

SEQ ID NO: 253739 - DNA, 23 bp, Artificial sequence
  SiRNA target sequence
tttttttaagtttaagtggaata

SEQ ID NO: 253740 - DNA, 23 bp, Artificial sequence
  SiRNA target sequence
ttttttaagtttaagtggaatac

SEQ ID NO: 253741 - DNA, 23 bp, Artificial sequence
  SiRNA target sequence
tttttaagtttaagtggaatacc

SEQ ID NO: 253742 - DNA, 23 bp, Artificial sequence
  SiRNA target sequence
ttttaagtttaagtggaatacct

SEQ ID NO: 253743 - DNA, 23 bp, Artificial sequence
  SiRNA target sequence
tttaagtttaagtggaatacctc

SEQ ID NO: 253744 - DNA, 23 bp, Artificial sequence
  SiRNA target sequence
ttaagtttaagtggaatacctcc

SEQ ID NO: 253745 - DNA, 23 bp, Artificial sequence
  SiRNA target sequence
taagtttaagtggaatacctccc

SEQ ID NO: 253746 - DNA, 23 bp, Artificial sequence
  SiRNA target sequence
aagtttaagtggaatacctccct

SEQ ID NO: 253747 - DNA, 23 bp, Artificial sequence
  SiRNA target sequence
agtttaagtggaatacctccctt

SEQ ID NO: 253748 - DNA, 23 bp, Artificial sequence
  SiRNA target sequence
gtttaagtggaatacctcccttt

SEQ ID NO: 253749 - DNA, 23 bp, Artificial sequence
  SiRNA target sequence
tttaagtggaatacctcccttta

SEQ ID NO: 253750 - DNA, 23 bp, Artificial sequence
  SiRNA target sequence
ttaagtggaatacctccctttat

SEQ ID NO: 253751 - DNA, 23 bp, Artificial sequence
  SiRNA target sequence
taagtggaatacctccctttata

SEQ ID NO: 253752 - DNA, 23 bp, Artificial sequence
  SiRNA target sequence
aagtggaatacctccctttatag

SEQ ID NO: 253753 - DNA, 23 bp, Artificial sequence
  SiRNA target sequence
agtggaatacctccctttatagg

SEQ ID NO: 253754 - DNA, 23 bp, Artificial sequence
  SiRNA target sequence
gtggaatacctccctttatagga

SEQ ID NO: 253755 - DNA, 23 bp, Artificial sequence
  SiRNA target sequence
tggaatacctccctttataggat

SEQ ID NO: 253756 - DNA, 23 bp, Artificial sequence
  SiRNA target sequence
ggaatacctccctttataggatt

SEQ ID NO: 253757 - DNA, 23 bp, Artificial sequence
  SiRNA target sequence
gaatacctccctttataggattt

SEQ ID NO: 253758 - DNA, 23 bp, Artificial sequence
  SiRNA target sequence
aatacctccctttataggattta

SEQ ID NO: 253759 - DNA, 23 bp, Artificial sequence
  SiRNA target sequence
atacctccctttataggatttat

SEQ ID NO: 253760 - DNA, 23 bp, Artificial sequence
  SiRNA target sequence
tacctccctttataggatttatt

SEQ ID NO: 253761 - DNA, 23 bp, Artificial sequence
  SiRNA target sequence
acctccctttataggatttattt

SEQ ID NO: 253762 - DNA, 23 bp, Artificial sequence
  SiRNA target sequence
cctccctttataggatttatttc

SEQ ID NO: 253763 - DNA, 23 bp, Artificial sequence
  SiRNA target sequence
ctccctttataggatttatttct

SEQ ID NO: 253764 - DNA, 23 bp, Artificial sequence
  SiRNA target sequence
tccctttataggatttatttcta

SEQ ID NO: 253765 - DNA, 23 bp, Artificial sequence
  SiRNA target sequence
ccctttataggatttatttctaa

SEQ ID NO: 253766 - DNA, 23 bp, Artificial sequence
  SiRNA target sequence
cctttataggatttatttctaag

SEQ ID NO: 253767 - DNA, 23 bp, Artificial sequence
  SiRNA target sequence
ctttataggatttatttctaaga

SEQ ID NO: 253768 - DNA, 23 bp, Artificial sequence
  SiRNA target sequence
tttataggatttatttctaagat

SEQ ID NO: 253769 - DNA, 23 bp, Artificial sequence
  SiRNA target sequence
ttataggatttatttctaagata

SEQ ID NO: 253770 - DNA, 23 bp, Artificial sequence
  SiRNA target sequence
tataggatttatttctaagataa

SEQ ID NO: 253771 - DNA, 23 bp, Artificial sequence
  SiRNA target sequence
ataggatttatttctaagataac

SEQ ID NO: 253772 - DNA, 23 bp, Artificial sequence
  SiRNA target sequence
taggatttatttctaagataact

SEQ ID NO: 253773 - DNA, 23 bp, Artificial sequence
  SiRNA target sequence
aggatttatttctaagataactg

SEQ ID NO: 253774 - DNA, 23 bp, Artificial sequence
  SiRNA target sequence
ggatttatttctaagataactgt

SEQ ID NO: 253775 - DNA, 23 bp, Artificial sequence
  SiRNA target sequence
gatttatttctaagataactgtt

SEQ ID NO: 253776 - DNA, 23 bp, Artificial sequence
  SiRNA target sequence
atttatttctaagataactgttt

SEQ ID NO: 253777 - DNA, 23 bp, Artificial sequence
  SiRNA target sequence
tttatttctaagataactgtttt

SEQ ID NO: 253778 - DNA, 23 bp, Artificial sequence
  SiRNA target sequence
ttatttctaagataactgttttg

SEQ ID NO: 253779 - DNA, 23 bp, Artificial sequence
  SiRNA target sequence
tatttctaagataactgttttgt

SEQ ID NO: 253780 - DNA, 23 bp, Artificial sequence
  SiRNA target sequence
atttctaagataactgttttgtt

SEQ ID NO: 253781 - DNA, 23 bp, Artificial sequence
  SiRNA target sequence
tttctaagataactgttttgttg

SEQ ID NO: 253782 - DNA, 23 bp, Artificial sequence
  SiRNA target sequence
ttctaagataactgttttgttga

SEQ ID NO: 253783 - DNA, 23 bp, Artificial sequence
  SiRNA target sequence
tctaagataactgttttgttgat

SEQ ID NO: 253784 - DNA, 23 bp, Artificial sequence
  SiRNA target sequence
ctaagataactgttttgttgatg

SEQ ID NO: 253785 - DNA, 23 bp, Artificial sequence
  SiRNA target sequence
taagataactgttttgttgatgt

SEQ ID NO: 253786 - DNA, 23 bp, Artificial sequence
  SiRNA target sequence
aagataactgttttgttgatgta

SEQ ID NO: 253787 - DNA, 23 bp, Artificial sequence
  SiRNA target sequence
agataactgttttgttgatgtat

SEQ ID NO: 253788 - DNA, 23 bp, Artificial sequence
  SiRNA target sequence
gataactgttttgttgatgtatt

SEQ ID NO: 253789 - DNA, 23 bp, Artificial sequence
  SiRNA target sequence
ataactgttttgttgatgtattt

SEQ ID NO: 253790 - DNA, 23 bp, Artificial sequence
  SiRNA target sequence
taactgttttgttgatgtatttt

SEQ ID NO: 253791 - DNA, 23 bp, Artificial sequence
  SiRNA target sequence
aactgttttgttgatgtattttg

SEQ ID NO: 253792 - DNA, 23 bp, Artificial sequence
  SiRNA target sequence
actgttttgttgatgtattttga

SEQ ID NO: 253793 - DNA, 23 bp, Artificial sequence
  SiRNA target sequence
ctgttttgttgatgtattttgag

SEQ ID NO: 253794 - DNA, 23 bp, Artificial sequence
  SiRNA target sequence
tgttttgttgatgtattttgaga

SEQ ID NO: 253795 - DNA, 23 bp, Artificial sequence
  SiRNA target sequence
gttttgttgatgtattttgagaa

SEQ ID NO: 253796 - DNA, 23 bp, Artificial sequence
  SiRNA target sequence
ttttgttgatgtattttgagaat

SEQ ID NO: 253797 - DNA, 23 bp, Artificial sequence
  SiRNA target sequence
tttgttgatgtattttgagaatc

SEQ ID NO: 253798 - DNA, 23 bp, Artificial sequence
  SiRNA target sequence
ttgttgatgtattttgagaatca

SEQ ID NO: 253799 - DNA, 23 bp, Artificial sequence
  SiRNA target sequence
tgttgatgtattttgagaatcaa

SEQ ID NO: 253800 - DNA, 23 bp, Artificial sequence
  SiRNA target sequence
gttgatgtattttgagaatcaaa

SEQ ID NO: 253801 - DNA, 23 bp, Artificial sequence
  SiRNA target sequence
ttgatgtattttgagaatcaaaa

SEQ ID NO: 253802 - DNA, 23 bp, Artificial sequence
  SiRNA target sequence
tgatgtattttgagaatcaaaaa

SEQ ID NO: 253803 - DNA, 23 bp, Artificial sequence
  SiRNA target sequence
gatgtattttgagaatcaaaaaa

SEQ ID NO: 253804 - DNA, 23 bp, Artificial sequence
  SiRNA target sequence
atgtattttgagaatcaaaaaat

SEQ ID NO: 253805 - DNA, 23 bp, Artificial sequence
  SiRNA target sequence
tgtattttgagaatcaaaaaata

SEQ ID NO: 253806 - DNA, 23 bp, Artificial sequence
  SiRNA target sequence
gtattttgagaatcaaaaaataa

SEQ ID NO: 253807 - DNA, 23 bp, Artificial sequence
  SiRNA target sequence
tattttgagaatcaaaaaataat

SEQ ID NO: 253808 - DNA, 23 bp, Artificial sequence
  SiRNA target sequence
attttgagaatcaaaaaataatt

SEQ ID NO: 253809 - DNA, 23 bp, Artificial sequence
  SiRNA target sequence
ttttgagaatcaaaaaataattt

SEQ ID NO: 253810 - DNA, 23 bp, Artificial sequence
  SiRNA target sequence
tttgagaatcaaaaaataatttt

SEQ ID NO: 253811 - DNA, 23 bp, Artificial sequence
  SiRNA target sequence
ttgagaatcaaaaaataattttt

SEQ ID NO: 253812 - DNA, 23 bp, Artificial sequence
  SiRNA target sequence
tgagaatcaaaaaataatttttt

SEQ ID NO: 253813 - DNA, 23 bp, Artificial sequence
  SiRNA target sequence
gagaatcaaaaaataattttttt

SEQ ID NO: 253814 - DNA, 23 bp, Artificial sequence
  SiRNA target sequence
agaatcaaaaaataattttttta

SEQ ID NO: 253815 - DNA, 23 bp, Artificial sequence
  SiRNA target sequence
gaatcaaaaaataatttttttaa

SEQ ID NO: 253816 - DNA, 23 bp, Artificial sequence
  SiRNA target sequence
aatcaaaaaataatttttttaat

SEQ ID NO: 253817 - DNA, 23 bp, Artificial sequence
  SiRNA target sequence
atcaaaaaataatttttttaatt

SEQ ID NO: 253818 - DNA, 23 bp, Artificial sequence
  SiRNA target sequence
tcaaaaaataatttttttaatta

SEQ ID NO: 253819 - DNA, 23 bp, Artificial sequence
  SiRNA target sequence
caaaaaataatttttttaattat

SEQ ID NO: 253820 - DNA, 23 bp, Artificial sequence
  SiRNA target sequence
aaaaaataatttttttaattata

SEQ ID NO: 253821 - DNA, 23 bp, Artificial sequence
  SiRNA target sequence
aaaaataatttttttaattatat

SEQ ID NO: 253822 - DNA, 23 bp, Artificial sequence
  SiRNA target sequence
aaaataatttttttaattatatt

SEQ ID NO: 253823 - DNA, 23 bp, Artificial sequence
  SiRNA target sequence
aaataatttttttaattatatta

SEQ ID NO: 253824 - DNA, 23 bp, Artificial sequence
  SiRNA target sequence
aataatttttttaattatattat

SEQ ID NO: 253825 - DNA, 23 bp, Artificial sequence
  SiRNA target sequence
ataatttttttaattatattatt

SEQ ID NO: 253826 - DNA, 23 bp, Artificial sequence
  SiRNA target sequence
taatttttttaattatattatta

SEQ ID NO: 253827 - DNA, 23 bp, Artificial sequence
  SiRNA target sequence
aatttttttaattatattattag

SEQ ID NO: 253828 - DNA, 23 bp, Artificial sequence
  SiRNA target sequence
atttttttaattatattattagt

SEQ ID NO: 253829 - DNA, 23 bp, Artificial sequence
  SiRNA target sequence
tttttttaattatattattagta

SEQ ID NO: 253830 - DNA, 23 bp, Artificial sequence
  SiRNA target sequence
ttttttaattatattattagtat

SEQ ID NO: 253831 - DNA, 23 bp, Artificial sequence
  SiRNA target sequence
tttttaattatattattagtatc

SEQ ID NO: 253832 - DNA, 23 bp, Artificial sequence
  SiRNA target sequence
ttttaattatattattagtatct

SEQ ID NO: 253833 - DNA, 23 bp, Artificial sequence
  SiRNA target sequence
tttaattatattattagtatctg

SEQ ID NO: 253834 - DNA, 23 bp, Artificial sequence
  SiRNA target sequence
ttaattatattattagtatctgt

SEQ ID NO: 253835 - DNA, 23 bp, Artificial sequence
  SiRNA target sequence
taattatattattagtatctgta

SEQ ID NO: 253836 - DNA, 23 bp, Artificial sequence
  SiRNA target sequence
aattatattattagtatctgtaa

SEQ ID NO: 253837 - DNA, 23 bp, Artificial sequence
  SiRNA target sequence
attatattattagtatctgtaat

SEQ ID NO: 253838 - DNA, 23 bp, Artificial sequence
  SiRNA target sequence
ttatattattagtatctgtaata

SEQ ID NO: 253839 - DNA, 23 bp, Artificial sequence
  SiRNA target sequence
tatattattagtatctgtaataa

SEQ ID NO: 253840 - DNA, 23 bp, Artificial sequence
  SiRNA target sequence
atattattagtatctgtaataag

SEQ ID NO: 253841 - DNA, 23 bp, Artificial sequence
  SiRNA target sequence
tattattagtatctgtaataaga

SEQ ID NO: 253842 - DNA, 23 bp, Artificial sequence
  SiRNA target sequence
attattagtatctgtaataagaa

SEQ ID NO: 253843 - DNA, 23 bp, Artificial sequence
  SiRNA target sequence
ttattagtatctgtaataagaat

SEQ ID NO: 253844 - DNA, 23 bp, Artificial sequence
  SiRNA target sequence
tattagtatctgtaataagaata

SEQ ID NO: 253845 - DNA, 23 bp, Artificial sequence
  SiRNA target sequence
attagtatctgtaataagaatat

SEQ ID NO: 253846 - DNA, 23 bp, Artificial sequence
  SiRNA target sequence
ttagtatctgtaataagaatata

SEQ ID NO: 253847 - DNA, 23 bp, Artificial sequence
  SiRNA target sequence
tagtatctgtaataagaatatat

SEQ ID NO: 253848 - DNA, 23 bp, Artificial sequence
  SiRNA target sequence
agtatctgtaataagaatatata

SEQ ID NO: 253849 - DNA, 23 bp, Artificial sequence
  SiRNA target sequence
gtatctgtaataagaatatatat

SEQ ID NO: 253850 - DNA, 23 bp, Artificial sequence
  SiRNA target sequence
tatctgtaataagaatatatatt

SEQ ID NO: 253851 - DNA, 23 bp, Artificial sequence
  SiRNA target sequence
atctgtaataagaatatatattt

SEQ ID NO: 253852 - DNA, 23 bp, Artificial sequence
  SiRNA target sequence
tctgtaataagaatatatattta

SEQ ID NO: 253853 - DNA, 23 bp, Artificial sequence
  SiRNA target sequence
ctgtaataagaatatatatttat

SEQ ID NO: 253854 - DNA, 23 bp, Artificial sequence
  SiRNA target sequence
tgtaataagaatatatatttata

SEQ ID NO: 253855 - DNA, 23 bp, Artificial sequence
  SiRNA target sequence
gtaataagaatatatatttatat

SEQ ID NO: 253856 - DNA, 23 bp, Artificial sequence
  SiRNA target sequence
taataagaatatatatttatata

SEQ ID NO: 253857 - DNA, 23 bp, Artificial sequence
  SiRNA target sequence
aataagaatatatatttatataa

SEQ ID NO: 253858 - DNA, 23 bp, Artificial sequence
  SiRNA target sequence
ataagaatatatatttatataaa

SEQ ID NO: 253859 - DNA, 23 bp, Artificial sequence
  SiRNA target sequence
taagaatatatatttatataaat

SEQ ID NO: 253860 - DNA, 23 bp, Artificial sequence
  SiRNA target sequence
aagaatatatatttatataaatt

SEQ ID NO: 253861 - DNA, 23 bp, Artificial sequence
  SiRNA target sequence
agaatatatatttatataaatta

SEQ ID NO: 253862 - DNA, 23 bp, Artificial sequence
  SiRNA target sequence
gaatatatatttatataaattat

SEQ ID NO: 253863 - DNA, 23 bp, Artificial sequence
  SiRNA target sequence
aatatatatttatataaattatt

SEQ ID NO: 253864 - DNA, 23 bp, Artificial sequence
  SiRNA target sequence
atatatatttatataaattattt

SEQ ID NO: 253865 - DNA, 23 bp, Artificial sequence
  SiRNA target sequence
tatatatttatataaattatttt

SEQ ID NO: 253866 - DNA, 23 bp, Artificial sequence
  SiRNA target sequence
atatatttatataaattatttta

SEQ ID NO: 253867 - DNA, 23 bp, Artificial sequence
  SiRNA target sequence
tatatttatataaattattttat

SEQ ID NO: 253868 - DNA, 23 bp, Artificial sequence
  SiRNA target sequence
atatttatataaattattttatg

SEQ ID NO: 253869 - DNA, 23 bp, Artificial sequence
  SiRNA target sequence
tatttatataaattattttatga

SEQ ID NO: 253870 - DNA, 23 bp, Artificial sequence
  SiRNA target sequence
atttatataaattattttatgaa

SEQ ID NO: 253871 - DNA, 23 bp, Artificial sequence
  SiRNA target sequence
tttatataaattattttatgaag

SEQ ID NO: 253872 - DNA, 23 bp, Artificial sequence
  SiRNA target sequence
ttatataaattattttatgaaga

SEQ ID NO: 253873 - DNA, 23 bp, Artificial sequence
  SiRNA target sequence
tatataaattattttatgaagag

SEQ ID NO: 253874 - DNA, 23 bp, Artificial sequence
  SiRNA target sequence
atataaattattttatgaagagt

SEQ ID NO: 253875 - DNA, 23 bp, Artificial sequence
  SiRNA target sequence
tataaattattttatgaagagtt

SEQ ID NO: 253876 - DNA, 23 bp, Artificial sequence
  SiRNA target sequence
ataaattattttatgaagagttt

SEQ ID NO: 253877 - DNA, 23 bp, Artificial sequence
  SiRNA target sequence
taaattattttatgaagagttta

SEQ ID NO: 253878 - DNA, 23 bp, Artificial sequence
  SiRNA target sequence
aaattattttatgaagagtttat

SEQ ID NO: 253879 - DNA, 23 bp, Artificial sequence
  SiRNA target sequence
aattattttatgaagagtttatt

SEQ ID NO: 253880 - DNA, 23 bp, Artificial sequence
  SiRNA target sequence
attattttatgaagagtttattt

SEQ ID NO: 253881 - DNA, 23 bp, Artificial sequence
  SiRNA target sequence
ttattttatgaagagtttatttt

SEQ ID NO: 253882 - DNA, 23 bp, Artificial sequence
  SiRNA target sequence
tattttatgaagagtttattttt

SEQ ID NO: 253883 - DNA, 23 bp, Artificial sequence
  SiRNA target sequence
attttatgaagagtttatttttt

SEQ ID NO: 253884 - DNA, 23 bp, Artificial sequence
  SiRNA target sequence
ttttatgaagagtttatttttta

SEQ ID NO: 253885 - DNA, 23 bp, Artificial sequence
  SiRNA target sequence
tttatgaagagtttattttttat

SEQ ID NO: 253886 - DNA, 23 bp, Artificial sequence
  SiRNA target sequence
ttatgaagagtttattttttata

SEQ ID NO: 253887 - DNA, 23 bp, Artificial sequence
  SiRNA target sequence
tatgaagagtttattttttataa

SEQ ID NO: 253888 - DNA, 23 bp, Artificial sequence
  SiRNA target sequence
atgaagagtttattttttataag

SEQ ID NO: 253889 - DNA, 23 bp, Artificial sequence
  SiRNA target sequence
tgaagagtttattttttataaga

SEQ ID NO: 253890 - DNA, 23 bp, Artificial sequence
  SiRNA target sequence
gaagagtttattttttataagat

SEQ ID NO: 253891 - DNA, 23 bp, Artificial sequence
  SiRNA target sequence
aagagtttattttttataagatt

SEQ ID NO: 253892 - DNA, 23 bp, Artificial sequence
  SiRNA target sequence
agagtttattttttataagatta

SEQ ID NO: 253893 - DNA, 23 bp, Artificial sequence
  SiRNA target sequence
gagtttattttttataagattag

SEQ ID NO: 253894 - DNA, 23 bp, Artificial sequence
  SiRNA target sequence
agtttattttttataagattagg

SEQ ID NO: 253895 - DNA, 23 bp, Artificial sequence
  SiRNA target sequence
gtttattttttataagattaggt

SEQ ID NO: 253896 - DNA, 23 bp, Artificial sequence
  SiRNA target sequence
tttattttttataagattaggtt

SEQ ID NO: 253897 - DNA, 23 bp, Artificial sequence
  SiRNA target sequence
ttattttttataagattaggtta

SEQ ID NO: 253898 - DNA, 23 bp, Artificial sequence
  SiRNA target sequence
tattttttataagattaggttat

SEQ ID NO: 253899 - DNA, 23 bp, Artificial sequence
  SiRNA target sequence
attttttataagattaggttata

SEQ ID NO: 253900 - DNA, 23 bp, Artificial sequence
  SiRNA target sequence
ttttttataagattaggttataa

SEQ ID NO: 253901 - DNA, 23 bp, Artificial sequence
  SiRNA target sequence
tttttataagattaggttataat

SEQ ID NO: 253902 - DNA, 23 bp, Artificial sequence
  SiRNA target sequence
ttttataagattaggttataata

SEQ ID NO: 253903 - DNA, 23 bp, Artificial sequence
  SiRNA target sequence
tttataagattaggttataataa

SEQ ID NO: 253904 - DNA, 23 bp, Artificial sequence
  SiRNA target sequence
ttataagattaggttataataaa

SEQ ID NO: 253905 - DNA, 23 bp, Artificial sequence
  SiRNA target sequence
tataagattaggttataataaaa

SEQ ID NO: 253906 - DNA, 23 bp, Artificial sequence
  SiRNA target sequence
ataagattaggttataataaaaa

SEQ ID NO: 253907 - DNA, 23 bp, Artificial sequence
  SiRNA target sequence
taagattaggttataataaaaat

SEQ ID NO: 253908 - DNA, 23 bp, Artificial sequence
  SiRNA target sequence
aagattaggttataataaaaata

SEQ ID NO: 253909 - DNA, 23 bp, Artificial sequence
  SiRNA target sequence
agattaggttataataaaaataa

SEQ ID NO: 253910 - DNA, 23 bp, Artificial sequence
  SiRNA target sequence
gattaggttataataaaaataaa

SEQ ID NO: 253911 - DNA, 23 bp, Artificial sequence
  SiRNA target sequence
attaggttataataaaaataaaa

SEQ ID NO: 253912 - DNA, 23 bp, Artificial sequence
  SiRNA target sequence
ttaggttataataaaaataaaaa

SEQ ID NO: 253913 - DNA, 23 bp, Artificial sequence
  SiRNA target sequence
taggttataataaaaataaaaat

SEQ ID NO: 253914 - DNA, 23 bp, Artificial sequence
  SiRNA target sequence
aggttataataaaaataaaaata

SEQ ID NO: 253915 - DNA, 23 bp, Artificial sequence
  SiRNA target sequence
ggttataataaaaataaaaatat

SEQ ID NO: 253916 - DNA, 23 bp, Artificial sequence
  SiRNA target sequence
gttataataaaaataaaaatata

SEQ ID NO: 253917 - DNA, 23 bp, Artificial sequence
  SiRNA target sequence
ttataataaaaataaaaatatag

SEQ ID NO: 253918 - DNA, 23 bp, Artificial sequence
  SiRNA target sequence
tataataaaaataaaaatatagg

SEQ ID NO: 253919 - DNA, 23 bp, Artificial sequence
  SiRNA target sequence
ataataaaaataaaaatatagga

SEQ ID NO: 253920 - DNA, 23 bp, Artificial sequence
  SiRNA target sequence
taataaaaataaaaatataggaa

SEQ ID NO: 253921 - DNA, 23 bp, Artificial sequence
  SiRNA target sequence
aataaaaataaaaatataggaat

SEQ ID NO: 253922 - DNA, 23 bp, Artificial sequence
  SiRNA target sequence
ataaaaataaaaatataggaata

SEQ ID NO: 253923 - DNA, 23 bp, Artificial sequence
  SiRNA target sequence
taaaaataaaaatataggaataa

SEQ ID NO: 253924 - DNA, 23 bp, Artificial sequence
  SiRNA target sequence
aaaaataaaaatataggaataag

SEQ ID NO: 253925 - DNA, 23 bp, Artificial sequence
  SiRNA target sequence
aaaataaaaatataggaataaga

SEQ ID NO: 253926 - DNA, 23 bp, Artificial sequence
  SiRNA target sequence
aaataaaaatataggaataagaa

SEQ ID NO: 253927 - DNA, 23 bp, Artificial sequence
  SiRNA target sequence
aataaaaatataggaataagaag

SEQ ID NO: 253928 - DNA, 23 bp, Artificial sequence
  SiRNA target sequence
ataaaaatataggaataagaaga

SEQ ID NO: 253929 - DNA, 19 bp, Artificial sequence
  SiRNA target sequence
atacctcaaatgtatcctt

SEQ ID NO: 253930 - DNA, 19 bp, Artificial sequence
  SiRNA target sequence
tacctcaaatgtatccttc

SEQ ID NO: 253931 - DNA, 19 bp, Artificial sequence
  SiRNA target sequence
acctcaaatgtatccttca

SEQ ID NO: 253932 - DNA, 19 bp, Artificial sequence
  SiRNA target sequence
cctcaaatgtatccttcat

SEQ ID NO: 253933 - DNA, 19 bp, Artificial sequence
  SiRNA target sequence
ctcaaatgtatccttcata

SEQ ID NO: 253934 - DNA, 19 bp, Artificial sequence
  SiRNA target sequence
tcaaatgtatccttcatat

SEQ ID NO: 253935 - DNA, 19 bp, Artificial sequence
  SiRNA target sequence
caaatgtatccttcatatt

SEQ ID NO: 253936 - DNA, 19 bp, Artificial sequence
  SiRNA target sequence
aaatgtatccttcatattg

SEQ ID NO: 253937 - DNA, 19 bp, Artificial sequence
  SiRNA target sequence
aatgtatccttcatattga

SEQ ID NO: 253938 - DNA, 19 bp, Artificial sequence
  SiRNA target sequence
atgtatccttcatattgag

SEQ ID NO: 253939 - DNA, 19 bp, Artificial sequence
  SiRNA target sequence
tgtatccttcatattgagt

SEQ ID NO: 253940 - DNA, 19 bp, Artificial sequence
  SiRNA target sequence
gtatccttcatattgagta

SEQ ID NO: 253941 - DNA, 19 bp, Artificial sequence
  SiRNA target sequence
tatccttcatattgagtat

SEQ ID NO: 253942 - DNA, 19 bp, Artificial sequence
  SiRNA target sequence
atccttcatattgagtatt

SEQ ID NO: 253943 - DNA, 19 bp, Artificial sequence
  SiRNA target sequence
tccttcatattgagtatta

SEQ ID NO: 253944 - DNA, 19 bp, Artificial sequence
  SiRNA target sequence
ccttcatattgagtattaa

SEQ ID NO: 253945 - DNA, 19 bp, Artificial sequence
  SiRNA target sequence
cttcatattgagtattaat

SEQ ID NO: 253946 - DNA, 19 bp, Artificial sequence
  SiRNA target sequence
ttcatattgagtattaatt

SEQ ID NO: 253947 - DNA, 19 bp, Artificial sequence
  SiRNA target sequence
tcatattgagtattaattc

SEQ ID NO: 253948 - DNA, 19 bp, Artificial sequence
  SiRNA target sequence
catattgagtattaattca

SEQ ID NO: 253949 - DNA, 19 bp, Artificial sequence
  SiRNA target sequence
atattgagtattaattcat

SEQ ID NO: 253950 - DNA, 19 bp, Artificial sequence
  SiRNA target sequence
tattgagtattaattcata

SEQ ID NO: 253951 - DNA, 19 bp, Artificial sequence
  SiRNA target sequence
attgagtattaattcatat

SEQ ID NO: 253952 - DNA, 19 bp, Artificial sequence
  SiRNA target sequence
ttgagtattaattcatata

SEQ ID NO: 253953 - DNA, 19 bp, Artificial sequence
  SiRNA target sequence
tgagtattaattcatatag

SEQ ID NO: 253954 - DNA, 19 bp, Artificial sequence
  SiRNA target sequence
gagtattaattcatatagt

SEQ ID NO: 253955 - DNA, 19 bp, Artificial sequence
  SiRNA target sequence
agtattaattcatatagta

SEQ ID NO: 253956 - DNA, 19 bp, Artificial sequence
  SiRNA target sequence
gtattaattcatatagtat

SEQ ID NO: 253957 - DNA, 19 bp, Artificial sequence
  SiRNA target sequence
tattaattcatatagtatt

SEQ ID NO: 253958 - DNA, 19 bp, Artificial sequence
  SiRNA target sequence
attaattcatatagtattt

SEQ ID NO: 253959 - DNA, 19 bp, Artificial sequence
  SiRNA target sequence
ttaattcatatagtattta

SEQ ID NO: 253960 - DNA, 19 bp, Artificial sequence
  SiRNA target sequence
taattcatatagtatttat

SEQ ID NO: 253961 - DNA, 19 bp, Artificial sequence
  SiRNA target sequence
aattcatatagtatttata

SEQ ID NO: 253962 - DNA, 19 bp, Artificial sequence
  SiRNA target sequence
attcatatagtatttatat

SEQ ID NO: 253963 - DNA, 19 bp, Artificial sequence
  SiRNA target sequence
ttcatatagtatttatatt

SEQ ID NO: 253964 - DNA, 19 bp, Artificial sequence
  SiRNA target sequence
tcatatagtatttatattg

SEQ ID NO: 253965 - DNA, 19 bp, Artificial sequence
  SiRNA target sequence
catatagtatttatattga

SEQ ID NO: 253966 - DNA, 19 bp, Artificial sequence
  SiRNA target sequence
atatagtatttatattgaa

SEQ ID NO: 253967 - DNA, 19 bp, Artificial sequence
  SiRNA target sequence
tatagtatttatattgaat

SEQ ID NO: 253968 - DNA, 19 bp, Artificial sequence
  SiRNA target sequence
atagtatttatattgaatt

SEQ ID NO: 253969 - DNA, 19 bp, Artificial sequence
  SiRNA target sequence
tagtatttatattgaatta

SEQ ID NO: 253970 - DNA, 19 bp, Artificial sequence
  SiRNA target sequence
agtatttatattgaattat

SEQ ID NO: 253971 - DNA, 19 bp, Artificial sequence
  SiRNA target sequence
gtatttatattgaattatt

SEQ ID NO: 253972 - DNA, 19 bp, Artificial sequence
  SiRNA target sequence
tatttatattgaattatta

SEQ ID NO: 253973 - DNA, 19 bp, Artificial sequence
  SiRNA target sequence
atttatattgaattattat

SEQ ID NO: 253974 - DNA, 19 bp, Artificial sequence
  SiRNA target sequence
tttatattgaattattata

SEQ ID NO: 253975 - DNA, 19 bp, Artificial sequence
  SiRNA target sequence
ttatattgaattattatat

SEQ ID NO: 253976 - DNA, 19 bp, Artificial sequence
  SiRNA target sequence
tatattgaattattatata

SEQ ID NO: 253977 - DNA, 19 bp, Artificial sequence
  SiRNA target sequence
atattgaattattatataa

SEQ ID NO: 253978 - DNA, 19 bp, Artificial sequence
  SiRNA target sequence
tattgaattattatataat

SEQ ID NO: 253979 - DNA, 19 bp, Artificial sequence
  SiRNA target sequence
attgaattattatataata

SEQ ID NO: 253980 - DNA, 19 bp, Artificial sequence
  SiRNA target sequence
ttgaattattatataataa

SEQ ID NO: 253981 - DNA, 19 bp, Artificial sequence
  SiRNA target sequence
tgaattattatataataat

SEQ ID NO: 253982 - DNA, 19 bp, Artificial sequence
  SiRNA target sequence
gaattattatataataata

SEQ ID NO: 253983 - DNA, 19 bp, Artificial sequence
  SiRNA target sequence
aattattatataataataa

SEQ ID NO: 253984 - DNA, 19 bp, Artificial sequence
  SiRNA target sequence
attattatataataataat

SEQ ID NO: 253985 - DNA, 19 bp, Artificial sequence
  SiRNA target sequence
ttattatataataataatt

SEQ ID NO: 253986 - DNA, 19 bp, Artificial sequence
  SiRNA target sequence
tattatataataataattt

SEQ ID NO: 253987 - DNA, 19 bp, Artificial sequence
  SiRNA target sequence
attatataataataattta

SEQ ID NO: 253988 - DNA, 19 bp, Artificial sequence
  SiRNA target sequence
ttatataataataatttat

SEQ ID NO: 253989 - DNA, 19 bp, Artificial sequence
  SiRNA target sequence
tatataataataatttatt

SEQ ID NO: 253990 - DNA, 19 bp, Artificial sequence
  SiRNA target sequence
atataataataatttatta

SEQ ID NO: 253991 - DNA, 19 bp, Artificial sequence
  SiRNA target sequence
tataataataatttattat

SEQ ID NO: 253992 - DNA, 19 bp, Artificial sequence
  SiRNA target sequence
ataataataatttattatt

SEQ ID NO: 253993 - DNA, 19 bp, Artificial sequence
  SiRNA target sequence
taataataatttattatta

SEQ ID NO: 253994 - DNA, 19 bp, Artificial sequence
  SiRNA target sequence
aataataatttattattat

SEQ ID NO: 253995 - DNA, 19 bp, Artificial sequence
  SiRNA target sequence
ataataatttattattatt

SEQ ID NO: 253996 - DNA, 19 bp, Artificial sequence
  SiRNA target sequence
taataatttattattattt

SEQ ID NO: 253997 - DNA, 19 bp, Artificial sequence
  SiRNA target sequence
aataatttattattatttt

SEQ ID NO: 253998 - DNA, 19 bp, Artificial sequence
  SiRNA target sequence
ataatttattattatttta

SEQ ID NO: 253999 - DNA, 19 bp, Artificial sequence
  SiRNA target sequence
taatttattattattttat

SEQ ID NO: 254000 - DNA, 19 bp, Artificial sequence
  SiRNA target sequence
aatttattattattttata

SEQ ID NO: 254001 - DNA, 19 bp, Artificial sequence
  SiRNA target sequence
atttattattattttatat

SEQ ID NO: 254002 - DNA, 19 bp, Artificial sequence
  SiRNA target sequence
tttattattattttatatt

SEQ ID NO: 254003 - DNA, 19 bp, Artificial sequence
  SiRNA target sequence
ttattattattttatattt

SEQ ID NO: 254004 - DNA, 19 bp, Artificial sequence
  SiRNA target sequence
tattattattttatattta

SEQ ID NO: 254005 - DNA, 19 bp, Artificial sequence
  SiRNA target sequence
attattattttatatttaa

SEQ ID NO: 254006 - DNA, 19 bp, Artificial sequence
  SiRNA target sequence
ttattattttatatttaag

SEQ ID NO: 254007 - DNA, 19 bp, Artificial sequence
  SiRNA target sequence
tattattttatatttaagt

SEQ ID NO: 254008 - DNA, 19 bp, Artificial sequence
  SiRNA target sequence
attattttatatttaagta

SEQ ID NO: 254009 - DNA, 19 bp, Artificial sequence
  SiRNA target sequence
ttattttatatttaagtaa

SEQ ID NO: 254010 - DNA, 20 bp, Artificial sequence
  SiRNA target sequence
atacctcaaatgtatccttc

SEQ ID NO: 254011 - DNA, 20 bp, Artificial sequence
  SiRNA target sequence
tacctcaaatgtatccttca

SEQ ID NO: 254012 - DNA, 20 bp, Artificial sequence
  SiRNA target sequence
acctcaaatgtatccttcat

SEQ ID NO: 254013 - DNA, 20 bp, Artificial sequence
  SiRNA target sequence
cctcaaatgtatccttcata

SEQ ID NO: 254014 - DNA, 20 bp, Artificial sequence
  SiRNA target sequence
ctcaaatgtatccttcatat

SEQ ID NO: 254015 - DNA, 20 bp, Artificial sequence
  SiRNA target sequence
tcaaatgtatccttcatatt

SEQ ID NO: 254016 - DNA, 20 bp, Artificial sequence
  SiRNA target sequence
caaatgtatccttcatattg

SEQ ID NO: 254017 - DNA, 20 bp, Artificial sequence
  SiRNA target sequence
aaatgtatccttcatattga

SEQ ID NO: 254018 - DNA, 20 bp, Artificial sequence
  SiRNA target sequence
aatgtatccttcatattgag

SEQ ID NO: 254019 - DNA, 20 bp, Artificial sequence
  SiRNA target sequence
atgtatccttcatattgagt

SEQ ID NO: 254020 - DNA, 20 bp, Artificial sequence
  SiRNA target sequence
tgtatccttcatattgagta

SEQ ID NO: 254021 - DNA, 20 bp, Artificial sequence
  SiRNA target sequence
gtatccttcatattgagtat

SEQ ID NO: 254022 - DNA, 20 bp, Artificial sequence
  SiRNA target sequence
tatccttcatattgagtatt

SEQ ID NO: 254023 - DNA, 20 bp, Artificial sequence
  SiRNA target sequence
atccttcatattgagtatta

SEQ ID NO: 254024 - DNA, 20 bp, Artificial sequence
  SiRNA target sequence
tccttcatattgagtattaa

SEQ ID NO: 254025 - DNA, 20 bp, Artificial sequence
  SiRNA target sequence
ccttcatattgagtattaat

SEQ ID NO: 254026 - DNA, 20 bp, Artificial sequence
  SiRNA target sequence
cttcatattgagtattaatt

SEQ ID NO: 254027 - DNA, 20 bp, Artificial sequence
  SiRNA target sequence
ttcatattgagtattaattc

SEQ ID NO: 254028 - DNA, 20 bp, Artificial sequence
  SiRNA target sequence
tcatattgagtattaattca

SEQ ID NO: 254029 - DNA, 20 bp, Artificial sequence
  SiRNA target sequence
catattgagtattaattcat

SEQ ID NO: 254030 - DNA, 20 bp, Artificial sequence
  SiRNA target sequence
atattgagtattaattcata

SEQ ID NO: 254031 - DNA, 20 bp, Artificial sequence
  SiRNA target sequence
tattgagtattaattcatat

SEQ ID NO: 254032 - DNA, 20 bp, Artificial sequence
  SiRNA target sequence
attgagtattaattcatata

SEQ ID NO: 254033 - DNA, 20 bp, Artificial sequence
  SiRNA target sequence
ttgagtattaattcatatag

SEQ ID NO: 254034 - DNA, 20 bp, Artificial sequence
  SiRNA target sequence
tgagtattaattcatatagt

SEQ ID NO: 254035 - DNA, 20 bp, Artificial sequence
  SiRNA target sequence
gagtattaattcatatagta

SEQ ID NO: 254036 - DNA, 20 bp, Artificial sequence
  SiRNA target sequence
agtattaattcatatagtat

SEQ ID NO: 254037 - DNA, 20 bp, Artificial sequence
  SiRNA target sequence
gtattaattcatatagtatt

SEQ ID NO: 254038 - DNA, 20 bp, Artificial sequence
  SiRNA target sequence
tattaattcatatagtattt

SEQ ID NO: 254039 - DNA, 20 bp, Artificial sequence
  SiRNA target sequence
attaattcatatagtattta

SEQ ID NO: 254040 - DNA, 20 bp, Artificial sequence
  SiRNA target sequence
ttaattcatatagtatttat

SEQ ID NO: 254041 - DNA, 20 bp, Artificial sequence
  SiRNA target sequence
taattcatatagtatttata

SEQ ID NO: 254042 - DNA, 20 bp, Artificial sequence
  SiRNA target sequence
aattcatatagtatttatat

SEQ ID NO: 254043 - DNA, 20 bp, Artificial sequence
  SiRNA target sequence
attcatatagtatttatatt

SEQ ID NO: 254044 - DNA, 20 bp, Artificial sequence
  SiRNA target sequence
ttcatatagtatttatattg

SEQ ID NO: 254045 - DNA, 20 bp, Artificial sequence
  SiRNA target sequence
tcatatagtatttatattga

SEQ ID NO: 254046 - DNA, 20 bp, Artificial sequence
  SiRNA target sequence
catatagtatttatattgaa

SEQ ID NO: 254047 - DNA, 20 bp, Artificial sequence
  SiRNA target sequence
atatagtatttatattgaat

SEQ ID NO: 254048 - DNA, 20 bp, Artificial sequence
  SiRNA target sequence
tatagtatttatattgaatt

SEQ ID NO: 254049 - DNA, 20 bp, Artificial sequence
  SiRNA target sequence
atagtatttatattgaatta

SEQ ID NO: 254050 - DNA, 20 bp, Artificial sequence
  SiRNA target sequence
tagtatttatattgaattat

SEQ ID NO: 254051 - DNA, 20 bp, Artificial sequence
  SiRNA target sequence
agtatttatattgaattatt

SEQ ID NO: 254052 - DNA, 20 bp, Artificial sequence
  SiRNA target sequence
gtatttatattgaattatta

SEQ ID NO: 254053 - DNA, 20 bp, Artificial sequence
  SiRNA target sequence
tatttatattgaattattat

SEQ ID NO: 254054 - DNA, 20 bp, Artificial sequence
  SiRNA target sequence
atttatattgaattattata

SEQ ID NO: 254055 - DNA, 20 bp, Artificial sequence
  SiRNA target sequence
tttatattgaattattatat

SEQ ID NO: 254056 - DNA, 20 bp, Artificial sequence
  SiRNA target sequence
ttatattgaattattatata

SEQ ID NO: 254057 - DNA, 20 bp, Artificial sequence
  SiRNA target sequence
tatattgaattattatataa

SEQ ID NO: 254058 - DNA, 20 bp, Artificial sequence
  SiRNA target sequence
atattgaattattatataat

SEQ ID NO: 254059 - DNA, 20 bp, Artificial sequence
  SiRNA target sequence
tattgaattattatataata

SEQ ID NO: 254060 - DNA, 20 bp, Artificial sequence
  SiRNA target sequence
attgaattattatataataa

SEQ ID NO: 254061 - DNA, 20 bp, Artificial sequence
  SiRNA target sequence
ttgaattattatataataat

SEQ ID NO: 254062 - DNA, 20 bp, Artificial sequence
  SiRNA target sequence
tgaattattatataataata

SEQ ID NO: 254063 - DNA, 20 bp, Artificial sequence
  SiRNA target sequence
gaattattatataataataa

SEQ ID NO: 254064 - DNA, 20 bp, Artificial sequence
  SiRNA target sequence
aattattatataataataat

SEQ ID NO: 254065 - DNA, 20 bp, Artificial sequence
  SiRNA target sequence
attattatataataataatt

SEQ ID NO: 254066 - DNA, 20 bp, Artificial sequence
  SiRNA target sequence
ttattatataataataattt

SEQ ID NO: 254067 - DNA, 20 bp, Artificial sequence
  SiRNA target sequence
tattatataataataattta

SEQ ID NO: 254068 - DNA, 20 bp, Artificial sequence
  SiRNA target sequence
attatataataataatttat

SEQ ID NO: 254069 - DNA, 20 bp, Artificial sequence
  SiRNA target sequence
ttatataataataatttatt

SEQ ID NO: 254070 - DNA, 20 bp, Artificial sequence
  SiRNA target sequence
tatataataataatttatta

SEQ ID NO: 254071 - DNA, 20 bp, Artificial sequence
  SiRNA target sequence
atataataataatttattat

SEQ ID NO: 254072 - DNA, 20 bp, Artificial sequence
  SiRNA target sequence
tataataataatttattatt

SEQ ID NO: 254073 - DNA, 20 bp, Artificial sequence
  SiRNA target sequence
ataataataatttattatta

SEQ ID NO: 254074 - DNA, 20 bp, Artificial sequence
  SiRNA target sequence
taataataatttattattat

SEQ ID NO: 254075 - DNA, 20 bp, Artificial sequence
  SiRNA target sequence
aataataatttattattatt

SEQ ID NO: 254076 - DNA, 20 bp, Artificial sequence
  SiRNA target sequence
ataataatttattattattt

SEQ ID NO: 254077 - DNA, 20 bp, Artificial sequence
  SiRNA target sequence
taataatttattattatttt

SEQ ID NO: 254078 - DNA, 20 bp, Artificial sequence
  SiRNA target sequence
aataatttattattatttta

SEQ ID NO: 254079 - DNA, 20 bp, Artificial sequence
  SiRNA target sequence
ataatttattattattttat

SEQ ID NO: 254080 - DNA, 20 bp, Artificial sequence
  SiRNA target sequence
taatttattattattttata

SEQ ID NO: 254081 - DNA, 20 bp, Artificial sequence
  SiRNA target sequence
aatttattattattttatat

SEQ ID NO: 254082 - DNA, 20 bp, Artificial sequence
  SiRNA target sequence
atttattattattttatatt

SEQ ID NO: 254083 - DNA, 20 bp, Artificial sequence
  SiRNA target sequence
tttattattattttatattt

SEQ ID NO: 254084 - DNA, 20 bp, Artificial sequence
  SiRNA target sequence
ttattattattttatattta

SEQ ID NO: 254085 - DNA, 20 bp, Artificial sequence
  SiRNA target sequence
tattattattttatatttaa

SEQ ID NO: 254086 - DNA, 20 bp, Artificial sequence
  SiRNA target sequence
attattattttatatttaag

SEQ ID NO: 254087 - DNA, 20 bp, Artificial sequence
  SiRNA target sequence
ttattattttatatttaagt

SEQ ID NO: 254088 - DNA, 20 bp, Artificial sequence
  SiRNA target sequence
tattattttatatttaagta

SEQ ID NO: 254089 - DNA, 20 bp, Artificial sequence
  SiRNA target sequence
attattttatatttaagtaa

SEQ ID NO: 254090 - DNA, 21 bp, Artificial sequence
  SiRNA target sequence
atacctcaaatgtatccttca

SEQ ID NO: 254091 - DNA, 21 bp, Artificial sequence
  SiRNA target sequence
tacctcaaatgtatccttcat

SEQ ID NO: 254092 - DNA, 21 bp, Artificial sequence
  SiRNA target sequence
acctcaaatgtatccttcata

SEQ ID NO: 254093 - DNA, 21 bp, Artificial sequence
  SiRNA target sequence
cctcaaatgtatccttcatat

SEQ ID NO: 254094 - DNA, 21 bp, Artificial sequence
  SiRNA target sequence
ctcaaatgtatccttcatatt

SEQ ID NO: 254095 - DNA, 21 bp, Artificial sequence
  SiRNA target sequence
tcaaatgtatccttcatattg

SEQ ID NO: 254096 - DNA, 21 bp, Artificial sequence
  SiRNA target sequence
caaatgtatccttcatattga

SEQ ID NO: 254097 - DNA, 21 bp, Artificial sequence
  SiRNA target sequence
aaatgtatccttcatattgag

SEQ ID NO: 254098 - DNA, 21 bp, Artificial sequence
  SiRNA target sequence
aatgtatccttcatattgagt

SEQ ID NO: 254099 - DNA, 21 bp, Artificial sequence
  SiRNA target sequence
atgtatccttcatattgagta

SEQ ID NO: 254100 - DNA, 21 bp, Artificial sequence
  SiRNA target sequence
tgtatccttcatattgagtat

SEQ ID NO: 254101 - DNA, 21 bp, Artificial sequence
  SiRNA target sequence
gtatccttcatattgagtatt

SEQ ID NO: 254102 - DNA, 21 bp, Artificial sequence
  SiRNA target sequence
tatccttcatattgagtatta

SEQ ID NO: 254103 - DNA, 21 bp, Artificial sequence
  SiRNA target sequence
atccttcatattgagtattaa

SEQ ID NO: 254104 - DNA, 21 bp, Artificial sequence
  SiRNA target sequence
tccttcatattgagtattaat

SEQ ID NO: 254105 - DNA, 21 bp, Artificial sequence
  SiRNA target sequence
ccttcatattgagtattaatt

SEQ ID NO: 254106 - DNA, 21 bp, Artificial sequence
  SiRNA target sequence
cttcatattgagtattaattc

SEQ ID NO: 254107 - DNA, 21 bp, Artificial sequence
  SiRNA target sequence
ttcatattgagtattaattca

SEQ ID NO: 254108 - DNA, 21 bp, Artificial sequence
  SiRNA target sequence
tcatattgagtattaattcat

SEQ ID NO: 254109 - DNA, 21 bp, Artificial sequence
  SiRNA target sequence
catattgagtattaattcata

SEQ ID NO: 254110 - DNA, 21 bp, Artificial sequence
  SiRNA target sequence
atattgagtattaattcatat

SEQ ID NO: 254111 - DNA, 21 bp, Artificial sequence
  SiRNA target sequence
tattgagtattaattcatata

SEQ ID NO: 254112 - DNA, 21 bp, Artificial sequence
  SiRNA target sequence
attgagtattaattcatatag

SEQ ID NO: 254113 - DNA, 21 bp, Artificial sequence
  SiRNA target sequence
ttgagtattaattcatatagt

SEQ ID NO: 254114 - DNA, 21 bp, Artificial sequence
  SiRNA target sequence
tgagtattaattcatatagta

SEQ ID NO: 254115 - DNA, 21 bp, Artificial sequence
  SiRNA target sequence
gagtattaattcatatagtat

SEQ ID NO: 254116 - DNA, 21 bp, Artificial sequence
  SiRNA target sequence
agtattaattcatatagtatt

SEQ ID NO: 254117 - DNA, 21 bp, Artificial sequence
  SiRNA target sequence
gtattaattcatatagtattt

SEQ ID NO: 254118 - DNA, 21 bp, Artificial sequence
  SiRNA target sequence
tattaattcatatagtattta

SEQ ID NO: 254119 - DNA, 21 bp, Artificial sequence
  SiRNA target sequence
attaattcatatagtatttat

SEQ ID NO: 254120 - DNA, 21 bp, Artificial sequence
  SiRNA target sequence
ttaattcatatagtatttata

SEQ ID NO: 254121 - DNA, 21 bp, Artificial sequence
  SiRNA target sequence
taattcatatagtatttatat

SEQ ID NO: 254122 - DNA, 21 bp, Artificial sequence
  SiRNA target sequence
aattcatatagtatttatatt

SEQ ID NO: 254123 - DNA, 21 bp, Artificial sequence
  SiRNA target sequence
attcatatagtatttatattg

SEQ ID NO: 254124 - DNA, 21 bp, Artificial sequence
  SiRNA target sequence
ttcatatagtatttatattga

SEQ ID NO: 254125 - DNA, 21 bp, Artificial sequence
  SiRNA target sequence
tcatatagtatttatattgaa

SEQ ID NO: 254126 - DNA, 21 bp, Artificial sequence
  SiRNA target sequence
catatagtatttatattgaat

SEQ ID NO: 254127 - DNA, 21 bp, Artificial sequence
  SiRNA target sequence
atatagtatttatattgaatt

SEQ ID NO: 254128 - DNA, 21 bp, Artificial sequence
  SiRNA target sequence
tatagtatttatattgaatta

SEQ ID NO: 254129 - DNA, 21 bp, Artificial sequence
  SiRNA target sequence
atagtatttatattgaattat

SEQ ID NO: 254130 - DNA, 21 bp, Artificial sequence
  SiRNA target sequence
tagtatttatattgaattatt

SEQ ID NO: 254131 - DNA, 21 bp, Artificial sequence
  SiRNA target sequence
agtatttatattgaattatta

SEQ ID NO: 254132 - DNA, 21 bp, Artificial sequence
  SiRNA target sequence
gtatttatattgaattattat

SEQ ID NO: 254133 - DNA, 21 bp, Artificial sequence
  SiRNA target sequence
tatttatattgaattattata

SEQ ID NO: 254134 - DNA, 21 bp, Artificial sequence
  SiRNA target sequence
atttatattgaattattatat

SEQ ID NO: 254135 - DNA, 21 bp, Artificial sequence
  SiRNA target sequence
tttatattgaattattatata

SEQ ID NO: 254136 - DNA, 21 bp, Artificial sequence
  SiRNA target sequence
ttatattgaattattatataa

SEQ ID NO: 254137 - DNA, 21 bp, Artificial sequence
  SiRNA target sequence
tatattgaattattatataat

SEQ ID NO: 254138 - DNA, 21 bp, Artificial sequence
  SiRNA target sequence
atattgaattattatataata

SEQ ID NO: 254139 - DNA, 21 bp, Artificial sequence
  SiRNA target sequence
tattgaattattatataataa

SEQ ID NO: 254140 - DNA, 21 bp, Artificial sequence
  SiRNA target sequence
attgaattattatataataat

SEQ ID NO: 254141 - DNA, 21 bp, Artificial sequence
  SiRNA target sequence
ttgaattattatataataata

SEQ ID NO: 254142 - DNA, 21 bp, Artificial sequence
  SiRNA target sequence
tgaattattatataataataa

SEQ ID NO: 254143 - DNA, 21 bp, Artificial sequence
  SiRNA target sequence
gaattattatataataataat

SEQ ID NO: 254144 - DNA, 21 bp, Artificial sequence
  SiRNA target sequence
aattattatataataataatt

SEQ ID NO: 254145 - DNA, 21 bp, Artificial sequence
  SiRNA target sequence
attattatataataataattt

SEQ ID NO: 254146 - DNA, 21 bp, Artificial sequence
  SiRNA target sequence
ttattatataataataattta

SEQ ID NO: 254147 - DNA, 21 bp, Artificial sequence
  SiRNA target sequence
tattatataataataatttat

SEQ ID NO: 254148 - DNA, 21 bp, Artificial sequence
  SiRNA target sequence
attatataataataatttatt

SEQ ID NO: 254149 - DNA, 21 bp, Artificial sequence
  SiRNA target sequence
ttatataataataatttatta

SEQ ID NO: 254150 - DNA, 21 bp, Artificial sequence
  SiRNA target sequence
tatataataataatttattat

SEQ ID NO: 254151 - DNA, 21 bp, Artificial sequence
  SiRNA target sequence
atataataataatttattatt

SEQ ID NO: 254152 - DNA, 21 bp, Artificial sequence
  SiRNA target sequence
tataataataatttattatta

SEQ ID NO: 254153 - DNA, 21 bp, Artificial sequence
  SiRNA target sequence
ataataataatttattattat

SEQ ID NO: 254154 - DNA, 21 bp, Artificial sequence
  SiRNA target sequence
taataataatttattattatt

SEQ ID NO: 254155 - DNA, 21 bp, Artificial sequence
  SiRNA target sequence
aataataatttattattattt

SEQ ID NO: 254156 - DNA, 21 bp, Artificial sequence
  SiRNA target sequence
ataataatttattattatttt

SEQ ID NO: 254157 - DNA, 21 bp, Artificial sequence
  SiRNA target sequence
taataatttattattatttta

SEQ ID NO: 254158 - DNA, 21 bp, Artificial sequence
  SiRNA target sequence
aataatttattattattttat

SEQ ID NO: 254159 - DNA, 21 bp, Artificial sequence
  SiRNA target sequence
ataatttattattattttata

SEQ ID NO: 254160 - DNA, 21 bp, Artificial sequence
  SiRNA target sequence
taatttattattattttatat

SEQ ID NO: 254161 - DNA, 21 bp, Artificial sequence
  SiRNA target sequence
aatttattattattttatatt

SEQ ID NO: 254162 - DNA, 21 bp, Artificial sequence
  SiRNA target sequence
atttattattattttatattt

SEQ ID NO: 254163 - DNA, 21 bp, Artificial sequence
  SiRNA target sequence
tttattattattttatattta

SEQ ID NO: 254164 - DNA, 21 bp, Artificial sequence
  SiRNA target sequence
ttattattattttatatttaa

SEQ ID NO: 254165 - DNA, 21 bp, Artificial sequence
  SiRNA target sequence
tattattattttatatttaag

SEQ ID NO: 254166 - DNA, 21 bp, Artificial sequence
  SiRNA target sequence
attattattttatatttaagt

SEQ ID NO: 254167 - DNA, 21 bp, Artificial sequence
  SiRNA target sequence
ttattattttatatttaagta

SEQ ID NO: 254168 - DNA, 21 bp, Artificial sequence
  SiRNA target sequence
tattattttatatttaagtaa

SEQ ID NO: 254169 - DNA, 22 bp, Artificial sequence
  SiRNA target sequence
atacctcaaatgtatccttcat

SEQ ID NO: 254170 - DNA, 22 bp, Artificial sequence
  SiRNA target sequence
tacctcaaatgtatccttcata

SEQ ID NO: 254171 - DNA, 22 bp, Artificial sequence
  SiRNA target sequence
acctcaaatgtatccttcatat

SEQ ID NO: 254172 - DNA, 22 bp, Artificial sequence
  SiRNA target sequence
cctcaaatgtatccttcatatt

SEQ ID NO: 254173 - DNA, 22 bp, Artificial sequence
  SiRNA target sequence
ctcaaatgtatccttcatattg

SEQ ID NO: 254174 - DNA, 22 bp, Artificial sequence
  SiRNA target sequence
tcaaatgtatccttcatattga

SEQ ID NO: 254175 - DNA, 22 bp, Artificial sequence
  SiRNA target sequence
caaatgtatccttcatattgag

SEQ ID NO: 254176 - DNA, 22 bp, Artificial sequence
  SiRNA target sequence
aaatgtatccttcatattgagt

SEQ ID NO: 254177 - DNA, 22 bp, Artificial sequence
  SiRNA target sequence
aatgtatccttcatattgagta

SEQ ID NO: 254178 - DNA, 22 bp, Artificial sequence
  SiRNA target sequence
atgtatccttcatattgagtat

SEQ ID NO: 254179 - DNA, 22 bp, Artificial sequence
  SiRNA target sequence
tgtatccttcatattgagtatt

SEQ ID NO: 254180 - DNA, 22 bp, Artificial sequence
  SiRNA target sequence
gtatccttcatattgagtatta

SEQ ID NO: 254181 - DNA, 22 bp, Artificial sequence
  SiRNA target sequence
tatccttcatattgagtattaa

SEQ ID NO: 254182 - DNA, 22 bp, Artificial sequence
  SiRNA target sequence
atccttcatattgagtattaat

SEQ ID NO: 254183 - DNA, 22 bp, Artificial sequence
  SiRNA target sequence
tccttcatattgagtattaatt

SEQ ID NO: 254184 - DNA, 22 bp, Artificial sequence
  SiRNA target sequence
ccttcatattgagtattaattc

SEQ ID NO: 254185 - DNA, 22 bp, Artificial sequence
  SiRNA target sequence
cttcatattgagtattaattca

SEQ ID NO: 254186 - DNA, 22 bp, Artificial sequence
  SiRNA target sequence
ttcatattgagtattaattcat

SEQ ID NO: 254187 - DNA, 22 bp, Artificial sequence
  SiRNA target sequence
tcatattgagtattaattcata

SEQ ID NO: 254188 - DNA, 22 bp, Artificial sequence
  SiRNA target sequence
catattgagtattaattcatat

SEQ ID NO: 254189 - DNA, 22 bp, Artificial sequence
  SiRNA target sequence
atattgagtattaattcatata

SEQ ID NO: 254190 - DNA, 22 bp, Artificial sequence
  SiRNA target sequence
tattgagtattaattcatatag

SEQ ID NO: 254191 - DNA, 22 bp, Artificial sequence
  SiRNA target sequence
attgagtattaattcatatagt

SEQ ID NO: 254192 - DNA, 22 bp, Artificial sequence
  SiRNA target sequence
ttgagtattaattcatatagta

SEQ ID NO: 254193 - DNA, 22 bp, Artificial sequence
  SiRNA target sequence
tgagtattaattcatatagtat

SEQ ID NO: 254194 - DNA, 22 bp, Artificial sequence
  SiRNA target sequence
gagtattaattcatatagtatt

SEQ ID NO: 254195 - DNA, 22 bp, Artificial sequence
  SiRNA target sequence
agtattaattcatatagtattt

SEQ ID NO: 254196 - DNA, 22 bp, Artificial sequence
  SiRNA target sequence
gtattaattcatatagtattta

SEQ ID NO: 254197 - DNA, 22 bp, Artificial sequence
  SiRNA target sequence
tattaattcatatagtatttat

SEQ ID NO: 254198 - DNA, 22 bp, Artificial sequence
  SiRNA target sequence
attaattcatatagtatttata

SEQ ID NO: 254199 - DNA, 22 bp, Artificial sequence
  SiRNA target sequence
ttaattcatatagtatttatat

SEQ ID NO: 254200 - DNA, 22 bp, Artificial sequence
  SiRNA target sequence
taattcatatagtatttatatt

SEQ ID NO: 254201 - DNA, 22 bp, Artificial sequence
  SiRNA target sequence
aattcatatagtatttatattg

SEQ ID NO: 254202 - DNA, 22 bp, Artificial sequence
  SiRNA target sequence
attcatatagtatttatattga

SEQ ID NO: 254203 - DNA, 22 bp, Artificial sequence
  SiRNA target sequence
ttcatatagtatttatattgaa

SEQ ID NO: 254204 - DNA, 22 bp, Artificial sequence
  SiRNA target sequence
tcatatagtatttatattgaat

SEQ ID NO: 254205 - DNA, 22 bp, Artificial sequence
  SiRNA target sequence
catatagtatttatattgaatt

SEQ ID NO: 254206 - DNA, 22 bp, Artificial sequence
  SiRNA target sequence
atatagtatttatattgaatta

SEQ ID NO: 254207 - DNA, 22 bp, Artificial sequence
  SiRNA target sequence
tatagtatttatattgaattat

SEQ ID NO: 254208 - DNA, 22 bp, Artificial sequence
  SiRNA target sequence
atagtatttatattgaattatt

SEQ ID NO: 254209 - DNA, 22 bp, Artificial sequence
  SiRNA target sequence
tagtatttatattgaattatta

SEQ ID NO: 254210 - DNA, 22 bp, Artificial sequence
  SiRNA target sequence
agtatttatattgaattattat

SEQ ID NO: 254211 - DNA, 22 bp, Artificial sequence
  SiRNA target sequence
gtatttatattgaattattata

SEQ ID NO: 254212 - DNA, 22 bp, Artificial sequence
  SiRNA target sequence
tatttatattgaattattatat

SEQ ID NO: 254213 - DNA, 22 bp, Artificial sequence
  SiRNA target sequence
atttatattgaattattatata

SEQ ID NO: 254214 - DNA, 22 bp, Artificial sequence
  SiRNA target sequence
tttatattgaattattatataa

SEQ ID NO: 254215 - DNA, 22 bp, Artificial sequence
  SiRNA target sequence
ttatattgaattattatataat

SEQ ID NO: 254216 - DNA, 22 bp, Artificial sequence
  SiRNA target sequence
tatattgaattattatataata

SEQ ID NO: 254217 - DNA, 22 bp, Artificial sequence
  SiRNA target sequence
atattgaattattatataataa

SEQ ID NO: 254218 - DNA, 22 bp, Artificial sequence
  SiRNA target sequence
tattgaattattatataataat

SEQ ID NO: 254219 - DNA, 22 bp, Artificial sequence
  SiRNA target sequence
attgaattattatataataata

SEQ ID NO: 254220 - DNA, 22 bp, Artificial sequence
  SiRNA target sequence
ttgaattattatataataataa

SEQ ID NO: 254221 - DNA, 22 bp, Artificial sequence
  SiRNA target sequence
tgaattattatataataataat

SEQ ID NO: 254222 - DNA, 22 bp, Artificial sequence
  SiRNA target sequence
gaattattatataataataatt

SEQ ID NO: 254223 - DNA, 22 bp, Artificial sequence
  SiRNA target sequence
aattattatataataataattt

SEQ ID NO: 254224 - DNA, 22 bp, Artificial sequence
  SiRNA target sequence
attattatataataataattta

SEQ ID NO: 254225 - DNA, 22 bp, Artificial sequence
  SiRNA target sequence
ttattatataataataatttat

SEQ ID NO: 254226 - DNA, 22 bp, Artificial sequence
  SiRNA target sequence
tattatataataataatttatt

SEQ ID NO: 254227 - DNA, 22 bp, Artificial sequence
  SiRNA target sequence
attatataataataatttatta

SEQ ID NO: 254228 - DNA, 22 bp, Artificial sequence
  SiRNA target sequence
ttatataataataatttattat

SEQ ID NO: 254229 - DNA, 22 bp, Artificial sequence
  SiRNA target sequence
tatataataataatttattatt

SEQ ID NO: 254230 - DNA, 22 bp, Artificial sequence
  SiRNA target sequence
atataataataatttattatta

SEQ ID NO: 254231 - DNA, 22 bp, Artificial sequence
  SiRNA target sequence
tataataataatttattattat

SEQ ID NO: 254232 - DNA, 22 bp, Artificial sequence
  SiRNA target sequence
ataataataatttattattatt

SEQ ID NO: 254233 - DNA, 22 bp, Artificial sequence
  SiRNA target sequence
taataataatttattattattt

SEQ ID NO: 254234 - DNA, 22 bp, Artificial sequence
  SiRNA target sequence
aataataatttattattatttt

SEQ ID NO: 254235 - DNA, 22 bp, Artificial sequence
  SiRNA target sequence
ataataatttattattatttta

SEQ ID NO: 254236 - DNA, 22 bp, Artificial sequence
  SiRNA target sequence
taataatttattattattttat

SEQ ID NO: 254237 - DNA, 22 bp, Artificial sequence
  SiRNA target sequence
aataatttattattattttata

SEQ ID NO: 254238 - DNA, 22 bp, Artificial sequence
  SiRNA target sequence
ataatttattattattttatat

SEQ ID NO: 254239 - DNA, 22 bp, Artificial sequence
  SiRNA target sequence
taatttattattattttatatt

SEQ ID NO: 254240 - DNA, 22 bp, Artificial sequence
  SiRNA target sequence
aatttattattattttatattt

SEQ ID NO: 254241 - DNA, 22 bp, Artificial sequence
  SiRNA target sequence
atttattattattttatattta

SEQ ID NO: 254242 - DNA, 22 bp, Artificial sequence
  SiRNA target sequence
tttattattattttatatttaa

SEQ ID NO: 254243 - DNA, 22 bp, Artificial sequence
  SiRNA target sequence
ttattattattttatatttaag

SEQ ID NO: 254244 - DNA, 22 bp, Artificial sequence
  SiRNA target sequence
tattattattttatatttaagt

SEQ ID NO: 254245 - DNA, 22 bp, Artificial sequence
  SiRNA target sequence
attattattttatatttaagta

SEQ ID NO: 254246 - DNA, 22 bp, Artificial sequence
  SiRNA target sequence
ttattattttatatttaagtaa

SEQ ID NO: 254247 - DNA, 23 bp, Artificial sequence
  SiRNA target sequence
atacctcaaatgtatccttcata

SEQ ID NO: 254248 - DNA, 23 bp, Artificial sequence
  SiRNA target sequence
tacctcaaatgtatccttcatat

SEQ ID NO: 254249 - DNA, 23 bp, Artificial sequence
  SiRNA target sequence
acctcaaatgtatccttcatatt

SEQ ID NO: 254250 - DNA, 23 bp, Artificial sequence
  SiRNA target sequence
cctcaaatgtatccttcatattg

SEQ ID NO: 254251 - DNA, 23 bp, Artificial sequence
  SiRNA target sequence
ctcaaatgtatccttcatattga

SEQ ID NO: 254252 - DNA, 23 bp, Artificial sequence
  SiRNA target sequence
tcaaatgtatccttcatattgag

SEQ ID NO: 254253 - DNA, 23 bp, Artificial sequence
  SiRNA target sequence
caaatgtatccttcatattgagt

SEQ ID NO: 254254 - DNA, 23 bp, Artificial sequence
  SiRNA target sequence
aaatgtatccttcatattgagta

SEQ ID NO: 254255 - DNA, 23 bp, Artificial sequence
  SiRNA target sequence
aatgtatccttcatattgagtat

SEQ ID NO: 254256 - DNA, 23 bp, Artificial sequence
  SiRNA target sequence
atgtatccttcatattgagtatt

SEQ ID NO: 254257 - DNA, 23 bp, Artificial sequence
  SiRNA target sequence
tgtatccttcatattgagtatta

SEQ ID NO: 254258 - DNA, 23 bp, Artificial sequence
  SiRNA target sequence
gtatccttcatattgagtattaa

SEQ ID NO: 254259 - DNA, 23 bp, Artificial sequence
  SiRNA target sequence
tatccttcatattgagtattaat

SEQ ID NO: 254260 - DNA, 23 bp, Artificial sequence
  SiRNA target sequence
atccttcatattgagtattaatt

SEQ ID NO: 254261 - DNA, 23 bp, Artificial sequence
  SiRNA target sequence
tccttcatattgagtattaattc

SEQ ID NO: 254262 - DNA, 23 bp, Artificial sequence
  SiRNA target sequence
ccttcatattgagtattaattca

SEQ ID NO: 254263 - DNA, 23 bp, Artificial sequence
  SiRNA target sequence
cttcatattgagtattaattcat

SEQ ID NO: 254264 - DNA, 23 bp, Artificial sequence
  SiRNA target sequence
ttcatattgagtattaattcata

SEQ ID NO: 254265 - DNA, 23 bp, Artificial sequence
  SiRNA target sequence
tcatattgagtattaattcatat

SEQ ID NO: 254266 - DNA, 23 bp, Artificial sequence
  SiRNA target sequence
catattgagtattaattcatata

SEQ ID NO: 254267 - DNA, 23 bp, Artificial sequence
  SiRNA target sequence
atattgagtattaattcatatag

SEQ ID NO: 254268 - DNA, 23 bp, Artificial sequence
  SiRNA target sequence
tattgagtattaattcatatagt

SEQ ID NO: 254269 - DNA, 23 bp, Artificial sequence
  SiRNA target sequence
attgagtattaattcatatagta

SEQ ID NO: 254270 - DNA, 23 bp, Artificial sequence
  SiRNA target sequence
ttgagtattaattcatatagtat

SEQ ID NO: 254271 - DNA, 23 bp, Artificial sequence
  SiRNA target sequence
tgagtattaattcatatagtatt

SEQ ID NO: 254272 - DNA, 23 bp, Artificial sequence
  SiRNA target sequence
gagtattaattcatatagtattt

SEQ ID NO: 254273 - DNA, 23 bp, Artificial sequence
  SiRNA target sequence
agtattaattcatatagtattta

SEQ ID NO: 254274 - DNA, 23 bp, Artificial sequence
  SiRNA target sequence
gtattaattcatatagtatttat

SEQ ID NO: 254275 - DNA, 23 bp, Artificial sequence
  SiRNA target sequence
tattaattcatatagtatttata

SEQ ID NO: 254276 - DNA, 23 bp, Artificial sequence
  SiRNA target sequence
attaattcatatagtatttatat

SEQ ID NO: 254277 - DNA, 23 bp, Artificial sequence
  SiRNA target sequence
ttaattcatatagtatttatatt

SEQ ID NO: 254278 - DNA, 23 bp, Artificial sequence
  SiRNA target sequence
taattcatatagtatttatattg

SEQ ID NO: 254279 - DNA, 23 bp, Artificial sequence
  SiRNA target sequence
aattcatatagtatttatattga

SEQ ID NO: 254280 - DNA, 23 bp, Artificial sequence
  SiRNA target sequence
attcatatagtatttatattgaa

SEQ ID NO: 254281 - DNA, 23 bp, Artificial sequence
  SiRNA target sequence
ttcatatagtatttatattgaat

SEQ ID NO: 254282 - DNA, 23 bp, Artificial sequence
  SiRNA target sequence
tcatatagtatttatattgaatt

SEQ ID NO: 254283 - DNA, 23 bp, Artificial sequence
  SiRNA target sequence
catatagtatttatattgaatta

SEQ ID NO: 254284 - DNA, 23 bp, Artificial sequence
  SiRNA target sequence
atatagtatttatattgaattat

SEQ ID NO: 254285 - DNA, 23 bp, Artificial sequence
  SiRNA target sequence
tatagtatttatattgaattatt

SEQ ID NO: 254286 - DNA, 23 bp, Artificial sequence
  SiRNA target sequence
atagtatttatattgaattatta

SEQ ID NO: 254287 - DNA, 23 bp, Artificial sequence
  SiRNA target sequence
tagtatttatattgaattattat

SEQ ID NO: 254288 - DNA, 23 bp, Artificial sequence
  SiRNA target sequence
agtatttatattgaattattata

SEQ ID NO: 254289 - DNA, 23 bp, Artificial sequence
  SiRNA target sequence
gtatttatattgaattattatat

SEQ ID NO: 254290 - DNA, 23 bp, Artificial sequence
  SiRNA target sequence
tatttatattgaattattatata

SEQ ID NO: 254291 - DNA, 23 bp, Artificial sequence
  SiRNA target sequence
atttatattgaattattatataa

SEQ ID NO: 254292 - DNA, 23 bp, Artificial sequence
  SiRNA target sequence
tttatattgaattattatataat

SEQ ID NO: 254293 - DNA, 23 bp, Artificial sequence
  SiRNA target sequence
ttatattgaattattatataata

SEQ ID NO: 254294 - DNA, 23 bp, Artificial sequence
  SiRNA target sequence
tatattgaattattatataataa

SEQ ID NO: 254295 - DNA, 23 bp, Artificial sequence
  SiRNA target sequence
atattgaattattatataataat

SEQ ID NO: 254296 - DNA, 23 bp, Artificial sequence
  SiRNA target sequence
tattgaattattatataataata

SEQ ID NO: 254297 - DNA, 23 bp, Artificial sequence
  SiRNA target sequence
attgaattattatataataataa

SEQ ID NO: 254298 - DNA, 23 bp, Artificial sequence
  SiRNA target sequence
ttgaattattatataataataat

SEQ ID NO: 254299 - DNA, 23 bp, Artificial sequence
  SiRNA target sequence
tgaattattatataataataatt

SEQ ID NO: 254300 - DNA, 23 bp, Artificial sequence
  SiRNA target sequence
gaattattatataataataattt

SEQ ID NO: 254301 - DNA, 23 bp, Artificial sequence
  SiRNA target sequence
aattattatataataataattta

SEQ ID NO: 254302 - DNA, 23 bp, Artificial sequence
  SiRNA target sequence
attattatataataataatttat

SEQ ID NO: 254303 - DNA, 23 bp, Artificial sequence
  SiRNA target sequence
ttattatataataataatttatt

SEQ ID NO: 254304 - DNA, 23 bp, Artificial sequence
  SiRNA target sequence
tattatataataataatttatta

SEQ ID NO: 254305 - DNA, 23 bp, Artificial sequence
  SiRNA target sequence
attatataataataatttattat

SEQ ID NO: 254306 - DNA, 23 bp, Artificial sequence
  SiRNA target sequence
ttatataataataatttattatt

SEQ ID NO: 254307 - DNA, 23 bp, Artificial sequence
  SiRNA target sequence
tatataataataatttattatta

SEQ ID NO: 254308 - DNA, 23 bp, Artificial sequence
  SiRNA target sequence
atataataataatttattattat

SEQ ID NO: 254309 - DNA, 23 bp, Artificial sequence
  SiRNA target sequence
tataataataatttattattatt

SEQ ID NO: 254310 - DNA, 23 bp, Artificial sequence
  SiRNA target sequence
ataataataatttattattattt

SEQ ID NO: 254311 - DNA, 23 bp, Artificial sequence
  SiRNA target sequence
taataataatttattattatttt

SEQ ID NO: 254312 - DNA, 23 bp, Artificial sequence
  SiRNA target sequence
aataataatttattattatttta

SEQ ID NO: 254313 - DNA, 23 bp, Artificial sequence
  SiRNA target sequence
ataataatttattattattttat

SEQ ID NO: 254314 - DNA, 23 bp, Artificial sequence
  SiRNA target sequence
taataatttattattattttata

SEQ ID NO: 254315 - DNA, 23 bp, Artificial sequence
  SiRNA target sequence
aataatttattattattttatat

SEQ ID NO: 254316 - DNA, 23 bp, Artificial sequence
  SiRNA target sequence
ataatttattattattttatatt

SEQ ID NO: 254317 - DNA, 23 bp, Artificial sequence
  SiRNA target sequence
taatttattattattttatattt

SEQ ID NO: 254318 - DNA, 23 bp, Artificial sequence
  SiRNA target sequence
aatttattattattttatattta

SEQ ID NO: 254319 - DNA, 23 bp, Artificial sequence
  SiRNA target sequence
atttattattattttatatttaa

SEQ ID NO: 254320 - DNA, 23 bp, Artificial sequence
  SiRNA target sequence
tttattattattttatatttaag

SEQ ID NO: 254321 - DNA, 23 bp, Artificial sequence
  SiRNA target sequence
ttattattattttatatttaagt

SEQ ID NO: 254322 - DNA, 23 bp, Artificial sequence
  SiRNA target sequence
tattattattttatatttaagta

SEQ ID NO: 254323 - DNA, 23 bp, Artificial sequence
  SiRNA target sequence
attattattttatatttaagtaa

SEQ ID NO: 254324 - DNA, 19 bp, Artificial sequence
  SiRNA target sequence
ggccaatcccgattccggc

SEQ ID NO: 254325 - DNA, 19 bp, Artificial sequence
  SiRNA target sequence
gccaatcccgattccggcg

SEQ ID NO: 254326 - DNA, 19 bp, Artificial sequence
  SiRNA target sequence
ccaatcccgattccggcga

SEQ ID NO: 254327 - DNA, 19 bp, Artificial sequence
  SiRNA target sequence
caatcccgattccggcgac

SEQ ID NO: 254328 - DNA, 19 bp, Artificial sequence
  SiRNA target sequence
aatcccgattccggcgaca

SEQ ID NO: 254329 - DNA, 19 bp, Artificial sequence
  SiRNA target sequence
atcccgattccggcgacac

SEQ ID NO: 254330 - DNA, 19 bp, Artificial sequence
  SiRNA target sequence
tcccgattccggcgacaca

SEQ ID NO: 254331 - DNA, 19 bp, Artificial sequence
  SiRNA target sequence
cccgattccggcgacacaa

SEQ ID NO: 254332 - DNA, 19 bp, Artificial sequence
  SiRNA target sequence
ccgattccggcgacacaaa

SEQ ID NO: 254333 - DNA, 19 bp, Artificial sequence
  SiRNA target sequence
cgattccggcgacacaaag

SEQ ID NO: 254334 - DNA, 19 bp, Artificial sequence
  SiRNA target sequence
gattccggcgacacaaaga

SEQ ID NO: 254335 - DNA, 19 bp, Artificial sequence
  SiRNA target sequence
attccggcgacacaaagaa

SEQ ID NO: 254336 - DNA, 19 bp, Artificial sequence
  SiRNA target sequence
ttccggcgacacaaagaaa

SEQ ID NO: 254337 - DNA, 19 bp, Artificial sequence
  SiRNA target sequence
tccggcgacacaaagaaat

SEQ ID NO: 254338 - DNA, 19 bp, Artificial sequence
  SiRNA target sequence
ccggcgacacaaagaaatt

SEQ ID NO: 254339 - DNA, 19 bp, Artificial sequence
  SiRNA target sequence
cggcgacacaaagaaatta

SEQ ID NO: 254340 - DNA, 19 bp, Artificial sequence
  SiRNA target sequence
ggcgacacaaagaaattac

SEQ ID NO: 254341 - DNA, 19 bp, Artificial sequence
  SiRNA target sequence
gcgacacaaagaaattaca

SEQ ID NO: 254342 - DNA, 19 bp, Artificial sequence
  SiRNA target sequence
cgacacaaagaaattacaa

SEQ ID NO: 254343 - DNA, 19 bp, Artificial sequence
  SiRNA target sequence
gacacaaagaaattacaag

SEQ ID NO: 254344 - DNA, 19 bp, Artificial sequence
  SiRNA target sequence
acacaaagaaattacaaga

SEQ ID NO: 254345 - DNA, 19 bp, Artificial sequence
  SiRNA target sequence
cacaaagaaattacaagaa

SEQ ID NO: 254346 - DNA, 19 bp, Artificial sequence
  SiRNA target sequence
acaaagaaattacaagaag

SEQ ID NO: 254347 - DNA, 19 bp, Artificial sequence
  SiRNA target sequence
caaagaaattacaagaagc

SEQ ID NO: 254348 - DNA, 19 bp, Artificial sequence
  SiRNA target sequence
aaagaaattacaagaagct

SEQ ID NO: 254349 - DNA, 19 bp, Artificial sequence
  SiRNA target sequence
aagaaattacaagaagcta

SEQ ID NO: 254350 - DNA, 19 bp, Artificial sequence
  SiRNA target sequence
agaaattacaagaagctat

SEQ ID NO: 254351 - DNA, 19 bp, Artificial sequence
  SiRNA target sequence
gaaattacaagaagctata

SEQ ID NO: 254352 - DNA, 19 bp, Artificial sequence
  SiRNA target sequence
aaattacaagaagctatag

SEQ ID NO: 254353 - DNA, 19 bp, Artificial sequence
  SiRNA target sequence
aattacaagaagctataga

SEQ ID NO: 254354 - DNA, 19 bp, Artificial sequence
  SiRNA target sequence
attacaagaagctatagac

SEQ ID NO: 254355 - DNA, 19 bp, Artificial sequence
  SiRNA target sequence
ttacaagaagctatagacc

SEQ ID NO: 254356 - DNA, 19 bp, Artificial sequence
  SiRNA target sequence
tacaagaagctatagaccg

SEQ ID NO: 254357 - DNA, 19 bp, Artificial sequence
  SiRNA target sequence
acaagaagctatagaccgt

SEQ ID NO: 254358 - DNA, 19 bp, Artificial sequence
  SiRNA target sequence
caagaagctatagaccgtt

SEQ ID NO: 254359 - DNA, 19 bp, Artificial sequence
  SiRNA target sequence
aagaagctatagaccgttt

SEQ ID NO: 254360 - DNA, 19 bp, Artificial sequence
  SiRNA target sequence
agaagctatagaccgtttt

SEQ ID NO: 254361 - DNA, 19 bp, Artificial sequence
  SiRNA target sequence
gaagctatagaccgttttc

SEQ ID NO: 254362 - DNA, 19 bp, Artificial sequence
  SiRNA target sequence
aagctatagaccgttttca

SEQ ID NO: 254363 - DNA, 19 bp, Artificial sequence
  SiRNA target sequence
agctatagaccgttttcat

SEQ ID NO: 254364 - DNA, 19 bp, Artificial sequence
  SiRNA target sequence
gctatagaccgttttcatc

SEQ ID NO: 254365 - DNA, 19 bp, Artificial sequence
  SiRNA target sequence
ctatagaccgttttcatcg

SEQ ID NO: 254366 - DNA, 19 bp, Artificial sequence
  SiRNA target sequence
tatagaccgttttcatcga

SEQ ID NO: 254367 - DNA, 19 bp, Artificial sequence
  SiRNA target sequence
atagaccgttttcatcgag

SEQ ID NO: 254368 - DNA, 19 bp, Artificial sequence
  SiRNA target sequence
tagaccgttttcatcgagc

SEQ ID NO: 254369 - DNA, 19 bp, Artificial sequence
  SiRNA target sequence
agaccgttttcatcgagcc

SEQ ID NO: 254370 - DNA, 19 bp, Artificial sequence
  SiRNA target sequence
gaccgttttcatcgagccg

SEQ ID NO: 254371 - DNA, 19 bp, Artificial sequence
  SiRNA target sequence
accgttttcatcgagccgg

SEQ ID NO: 254372 - DNA, 19 bp, Artificial sequence
  SiRNA target sequence
ccgttttcatcgagccgga

SEQ ID NO: 254373 - DNA, 19 bp, Artificial sequence
  SiRNA target sequence
cgttttcatcgagccggaa

SEQ ID NO: 254374 - DNA, 19 bp, Artificial sequence
  SiRNA target sequence
gttttcatcgagccggaag

SEQ ID NO: 254375 - DNA, 19 bp, Artificial sequence
  SiRNA target sequence
ttttcatcgagccggaaga

SEQ ID NO: 254376 - DNA, 19 bp, Artificial sequence
  SiRNA target sequence
tttcatcgagccggaagat

SEQ ID NO: 254377 - DNA, 19 bp, Artificial sequence
  SiRNA target sequence
ttcatcgagccggaagatg

SEQ ID NO: 254378 - DNA, 19 bp, Artificial sequence
  SiRNA target sequence
tcatcgagccggaagatgg

SEQ ID NO: 254379 - DNA, 19 bp, Artificial sequence
  SiRNA target sequence
catcgagccggaagatgga

SEQ ID NO: 254380 - DNA, 19 bp, Artificial sequence
  SiRNA target sequence
atcgagccggaagatggat

SEQ ID NO: 254381 - DNA, 19 bp, Artificial sequence
  SiRNA target sequence
tcgagccggaagatggatt

SEQ ID NO: 254382 - DNA, 19 bp, Artificial sequence
  SiRNA target sequence
cgagccggaagatggatta

SEQ ID NO: 254383 - DNA, 19 bp, Artificial sequence
  SiRNA target sequence
gagccggaagatggattaa

SEQ ID NO: 254384 - DNA, 19 bp, Artificial sequence
  SiRNA target sequence
agccggaagatggattaag

SEQ ID NO: 254385 - DNA, 19 bp, Artificial sequence
  SiRNA target sequence
gccggaagatggattaaga

SEQ ID NO: 254386 - DNA, 19 bp, Artificial sequence
  SiRNA target sequence
ccggaagatggattaagaa

SEQ ID NO: 254387 - DNA, 19 bp, Artificial sequence
  SiRNA target sequence
cggaagatggattaagaaa

SEQ ID NO: 254388 - DNA, 19 bp, Artificial sequence
  SiRNA target sequence
ggaagatggattaagaaaa

SEQ ID NO: 254389 - DNA, 19 bp, Artificial sequence
  SiRNA target sequence
gaagatggattaagaaaaa

SEQ ID NO: 254390 - DNA, 19 bp, Artificial sequence
  SiRNA target sequence
aagatggattaagaaaaaa

SEQ ID NO: 254391 - DNA, 19 bp, Artificial sequence
  SiRNA target sequence
agatggattaagaaaaaat

SEQ ID NO: 254392 - DNA, 19 bp, Artificial sequence
  SiRNA target sequence
gatggattaagaaaaaatt

SEQ ID NO: 254393 - DNA, 19 bp, Artificial sequence
  SiRNA target sequence
atggattaagaaaaaattt

SEQ ID NO: 254394 - DNA, 19 bp, Artificial sequence
  SiRNA target sequence
tggattaagaaaaaatttc

SEQ ID NO: 254395 - DNA, 19 bp, Artificial sequence
  SiRNA target sequence
ggattaagaaaaaatttcg

SEQ ID NO: 254396 - DNA, 19 bp, Artificial sequence
  SiRNA target sequence
gattaagaaaaaatttcga

SEQ ID NO: 254397 - DNA, 19 bp, Artificial sequence
  SiRNA target sequence
attaagaaaaaatttcgag

SEQ ID NO: 254398 - DNA, 19 bp, Artificial sequence
  SiRNA target sequence
ttaagaaaaaatttcgaga

SEQ ID NO: 254399 - DNA, 19 bp, Artificial sequence
  SiRNA target sequence
taagaaaaaatttcgagat

SEQ ID NO: 254400 - DNA, 19 bp, Artificial sequence
  SiRNA target sequence
aagaaaaaatttcgagatc

SEQ ID NO: 254401 - DNA, 19 bp, Artificial sequence
  SiRNA target sequence
agaaaaaatttcgagatct

SEQ ID NO: 254402 - DNA, 19 bp, Artificial sequence
  SiRNA target sequence
gaaaaaatttcgagatcta

SEQ ID NO: 254403 - DNA, 19 bp, Artificial sequence
  SiRNA target sequence
aaaaaatttcgagatctat

SEQ ID NO: 254404 - DNA, 19 bp, Artificial sequence
  SiRNA target sequence
aaaaatttcgagatctatt

SEQ ID NO: 254405 - DNA, 19 bp, Artificial sequence
  SiRNA target sequence
aaaatttcgagatctattc

SEQ ID NO: 254406 - DNA, 19 bp, Artificial sequence
  SiRNA target sequence
aaatttcgagatctattca

SEQ ID NO: 254407 - DNA, 19 bp, Artificial sequence
  SiRNA target sequence
aatttcgagatctattcat

SEQ ID NO: 254408 - DNA, 19 bp, Artificial sequence
  SiRNA target sequence
atttcgagatctattcatg

SEQ ID NO: 254409 - DNA, 19 bp, Artificial sequence
  SiRNA target sequence
tttcgagatctattcatgc

SEQ ID NO: 254410 - DNA, 19 bp, Artificial sequence
  SiRNA target sequence
ttcgagatctattcatgct

SEQ ID NO: 254411 - DNA, 19 bp, Artificial sequence
  SiRNA target sequence
tcgagatctattcatgcta

SEQ ID NO: 254412 - DNA, 19 bp, Artificial sequence
  SiRNA target sequence
cgagatctattcatgctat

SEQ ID NO: 254413 - DNA, 19 bp, Artificial sequence
  SiRNA target sequence
gagatctattcatgctatg

SEQ ID NO: 254414 - DNA, 19 bp, Artificial sequence
  SiRNA target sequence
agatctattcatgctatgt

SEQ ID NO: 254415 - DNA, 19 bp, Artificial sequence
  SiRNA target sequence
gatctattcatgctatgtt

SEQ ID NO: 254416 - DNA, 19 bp, Artificial sequence
  SiRNA target sequence
atctattcatgctatgttc

SEQ ID NO: 254417 - DNA, 19 bp, Artificial sequence
  SiRNA target sequence
tctattcatgctatgttcg

SEQ ID NO: 254418 - DNA, 19 bp, Artificial sequence
  SiRNA target sequence
ctattcatgctatgttcgg

SEQ ID NO: 254419 - DNA, 19 bp, Artificial sequence
  SiRNA target sequence
tattcatgctatgttcggg

SEQ ID NO: 254420 - DNA, 19 bp, Artificial sequence
  SiRNA target sequence
attcatgctatgttcgggt

SEQ ID NO: 254421 - DNA, 19 bp, Artificial sequence
  SiRNA target sequence
ttcatgctatgttcgggta

SEQ ID NO: 254422 - DNA, 19 bp, Artificial sequence
  SiRNA target sequence
tcatgctatgttcgggtaa

SEQ ID NO: 254423 - DNA, 19 bp, Artificial sequence
  SiRNA target sequence
catgctatgttcgggtaaa

SEQ ID NO: 254424 - DNA, 19 bp, Artificial sequence
  SiRNA target sequence
atgctatgttcgggtaaac

SEQ ID NO: 254425 - DNA, 19 bp, Artificial sequence
  SiRNA target sequence
tgctatgttcgggtaaaca

SEQ ID NO: 254426 - DNA, 19 bp, Artificial sequence
  SiRNA target sequence
gctatgttcgggtaaacag

SEQ ID NO: 254427 - DNA, 19 bp, Artificial sequence
  SiRNA target sequence
ctatgttcgggtaaacagc

SEQ ID NO: 254428 - DNA, 19 bp, Artificial sequence
  SiRNA target sequence
tatgttcgggtaaacagcg

SEQ ID NO: 254429 - DNA, 19 bp, Artificial sequence
  SiRNA target sequence
atgttcgggtaaacagcgc

SEQ ID NO: 254430 - DNA, 19 bp, Artificial sequence
  SiRNA target sequence
tgttcgggtaaacagcgca

SEQ ID NO: 254431 - DNA, 19 bp, Artificial sequence
  SiRNA target sequence
gttcgggtaaacagcgcaa

SEQ ID NO: 254432 - DNA, 19 bp, Artificial sequence
  SiRNA target sequence
ttcgggtaaacagcgcaac

SEQ ID NO: 254433 - DNA, 19 bp, Artificial sequence
  SiRNA target sequence
tcgggtaaacagcgcaacc

SEQ ID NO: 254434 - DNA, 19 bp, Artificial sequence
  SiRNA target sequence
cgggtaaacagcgcaacca

SEQ ID NO: 254435 - DNA, 19 bp, Artificial sequence
  SiRNA target sequence
gggtaaacagcgcaaccag

SEQ ID NO: 254436 - DNA, 19 bp, Artificial sequence
  SiRNA target sequence
ggtaaacagcgcaaccaga

SEQ ID NO: 254437 - DNA, 19 bp, Artificial sequence
  SiRNA target sequence
gtaaacagcgcaaccagat

SEQ ID NO: 254438 - DNA, 19 bp, Artificial sequence
  SiRNA target sequence
taaacagcgcaaccagatc

SEQ ID NO: 254439 - DNA, 19 bp, Artificial sequence
  SiRNA target sequence
aaacagcgcaaccagatct

SEQ ID NO: 254440 - DNA, 19 bp, Artificial sequence
  SiRNA target sequence
aacagcgcaaccagatctc

SEQ ID NO: 254441 - DNA, 19 bp, Artificial sequence
  SiRNA target sequence
acagcgcaaccagatctcg

SEQ ID NO: 254442 - DNA, 19 bp, Artificial sequence
  SiRNA target sequence
cagcgcaaccagatctcgg

SEQ ID NO: 254443 - DNA, 19 bp, Artificial sequence
  SiRNA target sequence
agcgcaaccagatctcgga

SEQ ID NO: 254444 - DNA, 19 bp, Artificial sequence
  SiRNA target sequence
gcgcaaccagatctcggat

SEQ ID NO: 254445 - DNA, 19 bp, Artificial sequence
  SiRNA target sequence
cgcaaccagatctcggatc

SEQ ID NO: 254446 - DNA, 19 bp, Artificial sequence
  SiRNA target sequence
gcaaccagatctcggatca

SEQ ID NO: 254447 - DNA, 19 bp, Artificial sequence
  SiRNA target sequence
caaccagatctcggatcaa

SEQ ID NO: 254448 - DNA, 19 bp, Artificial sequence
  SiRNA target sequence
aaccagatctcggatcaaa

SEQ ID NO: 254449 - DNA, 19 bp, Artificial sequence
  SiRNA target sequence
accagatctcggatcaaac

SEQ ID NO: 254450 - DNA, 19 bp, Artificial sequence
  SiRNA target sequence
ccagatctcggatcaaacc

SEQ ID NO: 254451 - DNA, 19 bp, Artificial sequence
  SiRNA target sequence
cagatctcggatcaaacct

SEQ ID NO: 254452 - DNA, 19 bp, Artificial sequence
  SiRNA target sequence
agatctcggatcaaaccta

SEQ ID NO: 254453 - DNA, 19 bp, Artificial sequence
  SiRNA target sequence
gatctcggatcaaacctac

SEQ ID NO: 254454 - DNA, 19 bp, Artificial sequence
  SiRNA target sequence
atctcggatcaaacctacg

SEQ ID NO: 254455 - DNA, 19 bp, Artificial sequence
  SiRNA target sequence
tctcggatcaaacctacgc

SEQ ID NO: 254456 - DNA, 19 bp, Artificial sequence
  SiRNA target sequence
ctcggatcaaacctacgcc

SEQ ID NO: 254457 - DNA, 19 bp, Artificial sequence
  SiRNA target sequence
tcggatcaaacctacgccg

SEQ ID NO: 254458 - DNA, 19 bp, Artificial sequence
  SiRNA target sequence
cggatcaaacctacgccga

SEQ ID NO: 254459 - DNA, 19 bp, Artificial sequence
  SiRNA target sequence
ggatcaaacctacgccgaa

SEQ ID NO: 254460 - DNA, 19 bp, Artificial sequence
  SiRNA target sequence
gatcaaacctacgccgaag

SEQ ID NO: 254461 - DNA, 19 bp, Artificial sequence
  SiRNA target sequence
atcaaacctacgccgaaga

SEQ ID NO: 254462 - DNA, 19 bp, Artificial sequence
  SiRNA target sequence
tcaaacctacgccgaagac

SEQ ID NO: 254463 - DNA, 19 bp, Artificial sequence
  SiRNA target sequence
caaacctacgccgaagacc

SEQ ID NO: 254464 - DNA, 19 bp, Artificial sequence
  SiRNA target sequence
aaacctacgccgaagacct

SEQ ID NO: 254465 - DNA, 19 bp, Artificial sequence
  SiRNA target sequence
aacctacgccgaagacctg

SEQ ID NO: 254466 - DNA, 19 bp, Artificial sequence
  SiRNA target sequence
acctacgccgaagacctgg

SEQ ID NO: 254467 - DNA, 19 bp, Artificial sequence
  SiRNA target sequence
cctacgccgaagacctgga

SEQ ID NO: 254468 - DNA, 19 bp, Artificial sequence
  SiRNA target sequence
ctacgccgaagacctggac

SEQ ID NO: 254469 - DNA, 19 bp, Artificial sequence
  SiRNA target sequence
tacgccgaagacctggacc

SEQ ID NO: 254470 - DNA, 19 bp, Artificial sequence
  SiRNA target sequence
acgccgaagacctggacct

SEQ ID NO: 254471 - DNA, 19 bp, Artificial sequence
  SiRNA target sequence
cgccgaagacctggacctc

SEQ ID NO: 254472 - DNA, 19 bp, Artificial sequence
  SiRNA target sequence
gccgaagacctggacctcg

SEQ ID NO: 254473 - DNA, 19 bp, Artificial sequence
  SiRNA target sequence
ccgaagacctggacctcga

SEQ ID NO: 254474 - DNA, 19 bp, Artificial sequence
  SiRNA target sequence
cgaagacctggacctcgac

SEQ ID NO: 254475 - DNA, 19 bp, Artificial sequence
  SiRNA target sequence
gaagacctggacctcgaca

SEQ ID NO: 254476 - DNA, 19 bp, Artificial sequence
  SiRNA target sequence
aagacctggacctcgacac

SEQ ID NO: 254477 - DNA, 19 bp, Artificial sequence
  SiRNA target sequence
agacctggacctcgacaca

SEQ ID NO: 254478 - DNA, 19 bp, Artificial sequence
  SiRNA target sequence
gacctggacctcgacacag

SEQ ID NO: 254479 - DNA, 19 bp, Artificial sequence
  SiRNA target sequence
acctggacctcgacacagg

SEQ ID NO: 254480 - DNA, 19 bp, Artificial sequence
  SiRNA target sequence
cctggacctcgacacaggg

SEQ ID NO: 254481 - DNA, 19 bp, Artificial sequence
  SiRNA target sequence
ctggacctcgacacagggg

SEQ ID NO: 254482 - DNA, 19 bp, Artificial sequence
  SiRNA target sequence
tggacctcgacacaggggt

SEQ ID NO: 254483 - DNA, 19 bp, Artificial sequence
  SiRNA target sequence
ggacctcgacacaggggtc

SEQ ID NO: 254484 - DNA, 19 bp, Artificial sequence
  SiRNA target sequence
gacctcgacacaggggtca

SEQ ID NO: 254485 - DNA, 19 bp, Artificial sequence
  SiRNA target sequence
acctcgacacaggggtcat

SEQ ID NO: 254486 - DNA, 19 bp, Artificial sequence
  SiRNA target sequence
cctcgacacaggggtcatt

SEQ ID NO: 254487 - DNA, 19 bp, Artificial sequence
  SiRNA target sequence
ctcgacacaggggtcatta

SEQ ID NO: 254488 - DNA, 19 bp, Artificial sequence
  SiRNA target sequence
tcgacacaggggtcattat

SEQ ID NO: 254489 - DNA, 19 bp, Artificial sequence
  SiRNA target sequence
cgacacaggggtcattatt

SEQ ID NO: 254490 - DNA, 19 bp, Artificial sequence
  SiRNA target sequence
gacacaggggtcattatta

SEQ ID NO: 254491 - DNA, 19 bp, Artificial sequence
  SiRNA target sequence
acacaggggtcattattat

SEQ ID NO: 254492 - DNA, 19 bp, Artificial sequence
  SiRNA target sequence
cacaggggtcattattatg

SEQ ID NO: 254493 - DNA, 19 bp, Artificial sequence
  SiRNA target sequence
acaggggtcattattatgg

SEQ ID NO: 254494 - DNA, 19 bp, Artificial sequence
  SiRNA target sequence
caggggtcattattatgga

SEQ ID NO: 254495 - DNA, 19 bp, Artificial sequence
  SiRNA target sequence
aggggtcattattatggat

SEQ ID NO: 254496 - DNA, 19 bp, Artificial sequence
  SiRNA target sequence
ggggtcattattatggatg

SEQ ID NO: 254497 - DNA, 19 bp, Artificial sequence
  SiRNA target sequence
gggtcattattatggatgg

SEQ ID NO: 254498 - DNA, 19 bp, Artificial sequence
  SiRNA target sequence
ggtcattattatggatgga

SEQ ID NO: 254499 - DNA, 19 bp, Artificial sequence
  SiRNA target sequence
gtcattattatggatggac

SEQ ID NO: 254500 - DNA, 19 bp, Artificial sequence
  SiRNA target sequence
tcattattatggatggaca

SEQ ID NO: 254501 - DNA, 19 bp, Artificial sequence
  SiRNA target sequence
cattattatggatggacag

SEQ ID NO: 254502 - DNA, 19 bp, Artificial sequence
  SiRNA target sequence
attattatggatggacagg

SEQ ID NO: 254503 - DNA, 19 bp, Artificial sequence
  SiRNA target sequence
ttattatggatggacaggt

SEQ ID NO: 254504 - DNA, 19 bp, Artificial sequence
  SiRNA target sequence
tattatggatggacaggtt

SEQ ID NO: 254505 - DNA, 19 bp, Artificial sequence
  SiRNA target sequence
attatggatggacaggtta

SEQ ID NO: 254506 - DNA, 19 bp, Artificial sequence
  SiRNA target sequence
ttatggatggacaggttat

SEQ ID NO: 254507 - DNA, 19 bp, Artificial sequence
  SiRNA target sequence
tatggatggacaggttatt

SEQ ID NO: 254508 - DNA, 19 bp, Artificial sequence
  SiRNA target sequence
atggatggacaggttatta

SEQ ID NO: 254509 - DNA, 19 bp, Artificial sequence
  SiRNA target sequence
tggatggacaggttattaa

SEQ ID NO: 254510 - DNA, 19 bp, Artificial sequence
  SiRNA target sequence
ggatggacaggttattaag

SEQ ID NO: 254511 - DNA, 19 bp, Artificial sequence
  SiRNA target sequence
gatggacaggttattaaga

SEQ ID NO: 254512 - DNA, 19 bp, Artificial sequence
  SiRNA target sequence
atggacaggttattaagaa

SEQ ID NO: 254513 - DNA, 19 bp, Artificial sequence
  SiRNA target sequence
tggacaggttattaagaag

SEQ ID NO: 254514 - DNA, 19 bp, Artificial sequence
  SiRNA target sequence
ggacaggttattaagaagg

SEQ ID NO: 254515 - DNA, 19 bp, Artificial sequence
  SiRNA target sequence
gacaggttattaagaagga

SEQ ID NO: 254516 - DNA, 19 bp, Artificial sequence
  SiRNA target sequence
acaggttattaagaaggat

SEQ ID NO: 254517 - DNA, 19 bp, Artificial sequence
  SiRNA target sequence
caggttattaagaaggata

SEQ ID NO: 254518 - DNA, 19 bp, Artificial sequence
  SiRNA target sequence
aggttattaagaaggatag

SEQ ID NO: 254519 - DNA, 19 bp, Artificial sequence
  SiRNA target sequence
ggttattaagaaggatagc

SEQ ID NO: 254520 - DNA, 19 bp, Artificial sequence
  SiRNA target sequence
gttattaagaaggatagcc

SEQ ID NO: 254521 - DNA, 19 bp, Artificial sequence
  SiRNA target sequence
ttattaagaaggatagccc

SEQ ID NO: 254522 - DNA, 19 bp, Artificial sequence
  SiRNA target sequence
tattaagaaggatagcccc

SEQ ID NO: 254523 - DNA, 19 bp, Artificial sequence
  SiRNA target sequence
attaagaaggatagcccca

SEQ ID NO: 254524 - DNA, 19 bp, Artificial sequence
  SiRNA target sequence
ttaagaaggatagccccac

SEQ ID NO: 254525 - DNA, 19 bp, Artificial sequence
  SiRNA target sequence
taagaaggatagccccacg

SEQ ID NO: 254526 - DNA, 19 bp, Artificial sequence
  SiRNA target sequence
aagaaggatagccccacgc

SEQ ID NO: 254527 - DNA, 19 bp, Artificial sequence
  SiRNA target sequence
agaaggatagccccacgcc

SEQ ID NO: 254528 - DNA, 19 bp, Artificial sequence
  SiRNA target sequence
gaaggatagccccacgccc

SEQ ID NO: 254529 - DNA, 19 bp, Artificial sequence
  SiRNA target sequence
aaggatagccccacgcccg

SEQ ID NO: 254530 - DNA, 19 bp, Artificial sequence
  SiRNA target sequence
aggatagccccacgcccga

SEQ ID NO: 254531 - DNA, 19 bp, Artificial sequence
  SiRNA target sequence
ggatagccccacgcccgaa

SEQ ID NO: 254532 - DNA, 19 bp, Artificial sequence
  SiRNA target sequence
gatagccccacgcccgaac

SEQ ID NO: 254533 - DNA, 19 bp, Artificial sequence
  SiRNA target sequence
atagccccacgcccgaact

SEQ ID NO: 254534 - DNA, 19 bp, Artificial sequence
  SiRNA target sequence
tagccccacgcccgaactc

SEQ ID NO: 254535 - DNA, 19 bp, Artificial sequence
  SiRNA target sequence
agccccacgcccgaactca

SEQ ID NO: 254536 - DNA, 19 bp, Artificial sequence
  SiRNA target sequence
gccccacgcccgaactcat

SEQ ID NO: 254537 - DNA, 19 bp, Artificial sequence
  SiRNA target sequence
ccccacgcccgaactcatc

SEQ ID NO: 254538 - DNA, 19 bp, Artificial sequence
  SiRNA target sequence
cccacgcccgaactcatcg

SEQ ID NO: 254539 - DNA, 19 bp, Artificial sequence
  SiRNA target sequence
ccacgcccgaactcatcga

SEQ ID NO: 254540 - DNA, 19 bp, Artificial sequence
  SiRNA target sequence
cacgcccgaactcatcgat

SEQ ID NO: 254541 - DNA, 19 bp, Artificial sequence
  SiRNA target sequence
acgcccgaactcatcgatg

SEQ ID NO: 254542 - DNA, 19 bp, Artificial sequence
  SiRNA target sequence
cgcccgaactcatcgatgg

SEQ ID NO: 254543 - DNA, 19 bp, Artificial sequence
  SiRNA target sequence
gcccgaactcatcgatggg

SEQ ID NO: 254544 - DNA, 19 bp, Artificial sequence
  SiRNA target sequence
cccgaactcatcgatgggt

SEQ ID NO: 254545 - DNA, 19 bp, Artificial sequence
  SiRNA target sequence
ccgaactcatcgatgggtt

SEQ ID NO: 254546 - DNA, 19 bp, Artificial sequence
  SiRNA target sequence
cgaactcatcgatgggttg

SEQ ID NO: 254547 - DNA, 19 bp, Artificial sequence
  SiRNA target sequence
gaactcatcgatgggttgg

SEQ ID NO: 254548 - DNA, 19 bp, Artificial sequence
  SiRNA target sequence
aactcatcgatgggttgga

SEQ ID NO: 254549 - DNA, 19 bp, Artificial sequence
  SiRNA target sequence
actcatcgatgggttggat

SEQ ID NO: 254550 - DNA, 19 bp, Artificial sequence
  SiRNA target sequence
ctcatcgatgggttggatg

SEQ ID NO: 254551 - DNA, 19 bp, Artificial sequence
  SiRNA target sequence
tcatcgatgggttggatgt

SEQ ID NO: 254552 - DNA, 19 bp, Artificial sequence
  SiRNA target sequence
catcgatgggttggatgtt

SEQ ID NO: 254553 - DNA, 19 bp, Artificial sequence
  SiRNA target sequence
atcgatgggttggatgttg

SEQ ID NO: 254554 - DNA, 19 bp, Artificial sequence
  SiRNA target sequence
tcgatgggttggatgttgg

SEQ ID NO: 254555 - DNA, 19 bp, Artificial sequence
  SiRNA target sequence
cgatgggttggatgttggt

SEQ ID NO: 254556 - DNA, 19 bp, Artificial sequence
  SiRNA target sequence
gatgggttggatgttggtt

SEQ ID NO: 254557 - DNA, 19 bp, Artificial sequence
  SiRNA target sequence
atgggttggatgttggttt

SEQ ID NO: 254558 - DNA, 19 bp, Artificial sequence
  SiRNA target sequence
tgggttggatgttggtttt

SEQ ID NO: 254559 - DNA, 19 bp, Artificial sequence
  SiRNA target sequence
gggttggatgttggttttc

SEQ ID NO: 254560 - DNA, 19 bp, Artificial sequence
  SiRNA target sequence
ggttggatgttggttttca

SEQ ID NO: 254561 - DNA, 19 bp, Artificial sequence
  SiRNA target sequence
gttggatgttggttttcaa

SEQ ID NO: 254562 - DNA, 19 bp, Artificial sequence
  SiRNA target sequence
ttggatgttggttttcaag

SEQ ID NO: 254563 - DNA, 19 bp, Artificial sequence
  SiRNA target sequence
tggatgttggttttcaagc

SEQ ID NO: 254564 - DNA, 19 bp, Artificial sequence
  SiRNA target sequence
ggatgttggttttcaagct

SEQ ID NO: 254565 - DNA, 19 bp, Artificial sequence
  SiRNA target sequence
gatgttggttttcaagctg

SEQ ID NO: 254566 - DNA, 19 bp, Artificial sequence
  SiRNA target sequence
atgttggttttcaagctga

SEQ ID NO: 254567 - DNA, 19 bp, Artificial sequence
  SiRNA target sequence
tgttggttttcaagctgat

SEQ ID NO: 254568 - DNA, 19 bp, Artificial sequence
  SiRNA target sequence
gttggttttcaagctgata

SEQ ID NO: 254569 - DNA, 19 bp, Artificial sequence
  SiRNA target sequence
ttggttttcaagctgataa

SEQ ID NO: 254570 - DNA, 19 bp, Artificial sequence
  SiRNA target sequence
tggttttcaagctgataag

SEQ ID NO: 254571 - DNA, 19 bp, Artificial sequence
  SiRNA target sequence
ggttttcaagctgataagc

SEQ ID NO: 254572 - DNA, 19 bp, Artificial sequence
  SiRNA target sequence
gttttcaagctgataagca

SEQ ID NO: 254573 - DNA, 19 bp, Artificial sequence
  SiRNA target sequence
ttttcaagctgataagcaa

SEQ ID NO: 254574 - DNA, 19 bp, Artificial sequence
  SiRNA target sequence
tttcaagctgataagcaac

SEQ ID NO: 254575 - DNA, 19 bp, Artificial sequence
  SiRNA target sequence
ttcaagctgataagcaaca

SEQ ID NO: 254576 - DNA, 19 bp, Artificial sequence
  SiRNA target sequence
tcaagctgataagcaacag

SEQ ID NO: 254577 - DNA, 19 bp, Artificial sequence
  SiRNA target sequence
caagctgataagcaacagg

SEQ ID NO: 254578 - DNA, 19 bp, Artificial sequence
  SiRNA target sequence
aagctgataagcaacaggc

SEQ ID NO: 254579 - DNA, 19 bp, Artificial sequence
  SiRNA target sequence
agctgataagcaacaggcg

SEQ ID NO: 254580 - DNA, 19 bp, Artificial sequence
  SiRNA target sequence
gctgataagcaacaggcgc

SEQ ID NO: 254581 - DNA, 19 bp, Artificial sequence
  SiRNA target sequence
ctgataagcaacaggcgca

SEQ ID NO: 254582 - DNA, 19 bp, Artificial sequence
  SiRNA target sequence
tgataagcaacaggcgcag

SEQ ID NO: 254583 - DNA, 19 bp, Artificial sequence
  SiRNA target sequence
gataagcaacaggcgcagg

SEQ ID NO: 254584 - DNA, 19 bp, Artificial sequence
  SiRNA target sequence
ataagcaacaggcgcaggt

SEQ ID NO: 254585 - DNA, 19 bp, Artificial sequence
  SiRNA target sequence
taagcaacaggcgcaggtg

SEQ ID NO: 254586 - DNA, 19 bp, Artificial sequence
  SiRNA target sequence
aagcaacaggcgcaggtga

SEQ ID NO: 254587 - DNA, 19 bp, Artificial sequence
  SiRNA target sequence
agcaacaggcgcaggtgat

SEQ ID NO: 254588 - DNA, 19 bp, Artificial sequence
  SiRNA target sequence
gcaacaggcgcaggtgatt

SEQ ID NO: 254589 - DNA, 19 bp, Artificial sequence
  SiRNA target sequence
caacaggcgcaggtgattg

SEQ ID NO: 254590 - DNA, 19 bp, Artificial sequence
  SiRNA target sequence
aacaggcgcaggtgattgt

SEQ ID NO: 254591 - DNA, 19 bp, Artificial sequence
  SiRNA target sequence
acaggcgcaggtgattgta

SEQ ID NO: 254592 - DNA, 19 bp, Artificial sequence
  SiRNA target sequence
caggcgcaggtgattgtaa

SEQ ID NO: 254593 - DNA, 19 bp, Artificial sequence
  SiRNA target sequence
aggcgcaggtgattgtaat

SEQ ID NO: 254594 - DNA, 19 bp, Artificial sequence
  SiRNA target sequence
ggcgcaggtgattgtaatg

SEQ ID NO: 254595 - DNA, 19 bp, Artificial sequence
  SiRNA target sequence
gcgcaggtgattgtaatgc

SEQ ID NO: 254596 - DNA, 19 bp, Artificial sequence
  SiRNA target sequence
cgcaggtgattgtaatgca

SEQ ID NO: 254597 - DNA, 19 bp, Artificial sequence
  SiRNA target sequence
gcaggtgattgtaatgcaa

SEQ ID NO: 254598 - DNA, 19 bp, Artificial sequence
  SiRNA target sequence
caggtgattgtaatgcaaa

SEQ ID NO: 254599 - DNA, 19 bp, Artificial sequence
  SiRNA target sequence
aggtgattgtaatgcaaaa

SEQ ID NO: 254600 - DNA, 19 bp, Artificial sequence
  SiRNA target sequence
ggtgattgtaatgcaaaag

SEQ ID NO: 254601 - DNA, 19 bp, Artificial sequence
  SiRNA target sequence
gtgattgtaatgcaaaagc

SEQ ID NO: 254602 - DNA, 19 bp, Artificial sequence
  SiRNA target sequence
tgattgtaatgcaaaagct

SEQ ID NO: 254603 - DNA, 19 bp, Artificial sequence
  SiRNA target sequence
gattgtaatgcaaaagctt

SEQ ID NO: 254604 - DNA, 19 bp, Artificial sequence
  SiRNA target sequence
attgtaatgcaaaagctta

SEQ ID NO: 254605 - DNA, 19 bp, Artificial sequence
  SiRNA target sequence
ttgtaatgcaaaagcttaa

SEQ ID NO: 254606 - DNA, 19 bp, Artificial sequence
  SiRNA target sequence
tgtaatgcaaaagcttaaa

SEQ ID NO: 254607 - DNA, 19 bp, Artificial sequence
  SiRNA target sequence
gtaatgcaaaagcttaaaa

SEQ ID NO: 254608 - DNA, 19 bp, Artificial sequence
  SiRNA target sequence
taatgcaaaagcttaaaaa

SEQ ID NO: 254609 - DNA, 19 bp, Artificial sequence
  SiRNA target sequence
aatgcaaaagcttaaaaac

SEQ ID NO: 254610 - DNA, 19 bp, Artificial sequence
  SiRNA target sequence
atgcaaaagcttaaaaaca

SEQ ID NO: 254611 - DNA, 19 bp, Artificial sequence
  SiRNA target sequence
tgcaaaagcttaaaaacaa

SEQ ID NO: 254612 - DNA, 19 bp, Artificial sequence
  SiRNA target sequence
gcaaaagcttaaaaacaat

SEQ ID NO: 254613 - DNA, 19 bp, Artificial sequence
  SiRNA target sequence
caaaagcttaaaaacaatt

SEQ ID NO: 254614 - DNA, 19 bp, Artificial sequence
  SiRNA target sequence
aaaagcttaaaaacaattc

SEQ ID NO: 254615 - DNA, 19 bp, Artificial sequence
  SiRNA target sequence
aaagcttaaaaacaattcc

SEQ ID NO: 254616 - DNA, 19 bp, Artificial sequence
  SiRNA target sequence
aagcttaaaaacaattccc

SEQ ID NO: 254617 - DNA, 19 bp, Artificial sequence
  SiRNA target sequence
agcttaaaaacaattcccg

SEQ ID NO: 254618 - DNA, 19 bp, Artificial sequence
  SiRNA target sequence
gcttaaaaacaattcccga

SEQ ID NO: 254619 - DNA, 19 bp, Artificial sequence
  SiRNA target sequence
cttaaaaacaattcccgac

SEQ ID NO: 254620 - DNA, 19 bp, Artificial sequence
  SiRNA target sequence
ttaaaaacaattcccgacc

SEQ ID NO: 254621 - DNA, 19 bp, Artificial sequence
  SiRNA target sequence
taaaaacaattcccgacct

SEQ ID NO: 254622 - DNA, 19 bp, Artificial sequence
  SiRNA target sequence
aaaaacaattcccgaccta

SEQ ID NO: 254623 - DNA, 19 bp, Artificial sequence
  SiRNA target sequence
aaaacaattcccgacctat

SEQ ID NO: 254624 - DNA, 19 bp, Artificial sequence
  SiRNA target sequence
aaacaattcccgacctatc

SEQ ID NO: 254625 - DNA, 19 bp, Artificial sequence
  SiRNA target sequence
aacaattcccgacctatca

SEQ ID NO: 254626 - DNA, 19 bp, Artificial sequence
  SiRNA target sequence
acaattcccgacctatcat

SEQ ID NO: 254627 - DNA, 19 bp, Artificial sequence
  SiRNA target sequence
caattcccgacctatcatt

SEQ ID NO: 254628 - DNA, 19 bp, Artificial sequence
  SiRNA target sequence
aattcccgacctatcattg

SEQ ID NO: 254629 - DNA, 19 bp, Artificial sequence
  SiRNA target sequence
attcccgacctatcattgg

SEQ ID NO: 254630 - DNA, 19 bp, Artificial sequence
  SiRNA target sequence
ttcccgacctatcattggc

SEQ ID NO: 254631 - DNA, 19 bp, Artificial sequence
  SiRNA target sequence
tcccgacctatcattggcg

SEQ ID NO: 254632 - DNA, 19 bp, Artificial sequence
  SiRNA target sequence
cccgacctatcattggcga

SEQ ID NO: 254633 - DNA, 19 bp, Artificial sequence
  SiRNA target sequence
ccgacctatcattggcgac

SEQ ID NO: 254634 - DNA, 19 bp, Artificial sequence
  SiRNA target sequence
cgacctatcattggcgact

SEQ ID NO: 254635 - DNA, 19 bp, Artificial sequence
  SiRNA target sequence
gacctatcattggcgactc

SEQ ID NO: 254636 - DNA, 19 bp, Artificial sequence
  SiRNA target sequence
acctatcattggcgactca

SEQ ID NO: 254637 - DNA, 19 bp, Artificial sequence
  SiRNA target sequence
cctatcattggcgactcaa

SEQ ID NO: 254638 - DNA, 19 bp, Artificial sequence
  SiRNA target sequence
ctatcattggcgactcaaa

SEQ ID NO: 254639 - DNA, 19 bp, Artificial sequence
  SiRNA target sequence
tatcattggcgactcaaag

SEQ ID NO: 254640 - DNA, 19 bp, Artificial sequence
  SiRNA target sequence
atcattggcgactcaaagg

SEQ ID NO: 254641 - DNA, 19 bp, Artificial sequence
  SiRNA target sequence
tcattggcgactcaaagga

SEQ ID NO: 254642 - DNA, 19 bp, Artificial sequence
  SiRNA target sequence
cattggcgactcaaaggaa

SEQ ID NO: 254643 - DNA, 19 bp, Artificial sequence
  SiRNA target sequence
attggcgactcaaaggaat

SEQ ID NO: 254644 - DNA, 19 bp, Artificial sequence
  SiRNA target sequence
ttggcgactcaaaggaatt

SEQ ID NO: 254645 - DNA, 19 bp, Artificial sequence
  SiRNA target sequence
tggcgactcaaaggaattt

SEQ ID NO: 254646 - DNA, 19 bp, Artificial sequence
  SiRNA target sequence
ggcgactcaaaggaattta

SEQ ID NO: 254647 - DNA, 19 bp, Artificial sequence
  SiRNA target sequence
gcgactcaaaggaatttag

SEQ ID NO: 254648 - DNA, 19 bp, Artificial sequence
  SiRNA target sequence
cgactcaaaggaatttagc

SEQ ID NO: 254649 - DNA, 19 bp, Artificial sequence
  SiRNA target sequence
gactcaaaggaatttagca

SEQ ID NO: 254650 - DNA, 19 bp, Artificial sequence
  SiRNA target sequence
actcaaaggaatttagcaa

SEQ ID NO: 254651 - DNA, 19 bp, Artificial sequence
  SiRNA target sequence
ctcaaaggaatttagcaac

SEQ ID NO: 254652 - DNA, 19 bp, Artificial sequence
  SiRNA target sequence
tcaaaggaatttagcaaca

SEQ ID NO: 254653 - DNA, 19 bp, Artificial sequence
  SiRNA target sequence
caaaggaatttagcaacaa

SEQ ID NO: 254654 - DNA, 19 bp, Artificial sequence
  SiRNA target sequence
aaaggaatttagcaacaaa

SEQ ID NO: 254655 - DNA, 19 bp, Artificial sequence
  SiRNA target sequence
aaggaatttagcaacaaag

SEQ ID NO: 254656 - DNA, 19 bp, Artificial sequence
  SiRNA target sequence
aggaatttagcaacaaagt

SEQ ID NO: 254657 - DNA, 19 bp, Artificial sequence
  SiRNA target sequence
ggaatttagcaacaaagtt

SEQ ID NO: 254658 - DNA, 19 bp, Artificial sequence
  SiRNA target sequence
gaatttagcaacaaagttc

SEQ ID NO: 254659 - DNA, 19 bp, Artificial sequence
  SiRNA target sequence
aatttagcaacaaagttca

SEQ ID NO: 254660 - DNA, 19 bp, Artificial sequence
  SiRNA target sequence
atttagcaacaaagttcat

SEQ ID NO: 254661 - DNA, 19 bp, Artificial sequence
  SiRNA target sequence
tttagcaacaaagttcatc

SEQ ID NO: 254662 - DNA, 19 bp, Artificial sequence
  SiRNA target sequence
ttagcaacaaagttcatcc

SEQ ID NO: 254663 - DNA, 19 bp, Artificial sequence
  SiRNA target sequence
tagcaacaaagttcatcca

SEQ ID NO: 254664 - DNA, 19 bp, Artificial sequence
  SiRNA target sequence
agcaacaaagttcatccag

SEQ ID NO: 254665 - DNA, 19 bp, Artificial sequence
  SiRNA target sequence
gcaacaaagttcatccagg

SEQ ID NO: 254666 - DNA, 19 bp, Artificial sequence
  SiRNA target sequence
caacaaagttcatccaggc

SEQ ID NO: 254667 - DNA, 19 bp, Artificial sequence
  SiRNA target sequence
aacaaagttcatccaggcc

SEQ ID NO: 254668 - DNA, 19 bp, Artificial sequence
  SiRNA target sequence
acaaagttcatccaggccc

SEQ ID NO: 254669 - DNA, 19 bp, Artificial sequence
  SiRNA target sequence
caaagttcatccaggcccc

SEQ ID NO: 254670 - DNA, 19 bp, Artificial sequence
  SiRNA target sequence
aaagttcatccaggccccg

SEQ ID NO: 254671 - DNA, 19 bp, Artificial sequence
  SiRNA target sequence
aagttcatccaggccccga

SEQ ID NO: 254672 - DNA, 19 bp, Artificial sequence
  SiRNA target sequence
agttcatccaggccccgac

SEQ ID NO: 254673 - DNA, 19 bp, Artificial sequence
  SiRNA target sequence
gttcatccaggccccgact

SEQ ID NO: 254674 - DNA, 19 bp, Artificial sequence
  SiRNA target sequence
ttcatccaggccccgactt

SEQ ID NO: 254675 - DNA, 19 bp, Artificial sequence
  SiRNA target sequence
tcatccaggccccgacttt

SEQ ID NO: 254676 - DNA, 19 bp, Artificial sequence
  SiRNA target sequence
catccaggccccgactttt

SEQ ID NO: 254677 - DNA, 19 bp, Artificial sequence
  SiRNA target sequence
atccaggccccgacttttg

SEQ ID NO: 254678 - DNA, 19 bp, Artificial sequence
  SiRNA target sequence
tccaggccccgacttttgc

SEQ ID NO: 254679 - DNA, 19 bp, Artificial sequence
  SiRNA target sequence
ccaggccccgacttttgcc

SEQ ID NO: 254680 - DNA, 19 bp, Artificial sequence
  SiRNA target sequence
caggccccgacttttgcct

SEQ ID NO: 254681 - DNA, 19 bp, Artificial sequence
  SiRNA target sequence
aggccccgacttttgcctg

SEQ ID NO: 254682 - DNA, 19 bp, Artificial sequence
  SiRNA target sequence
ggccccgacttttgcctgg

SEQ ID NO: 254683 - DNA, 19 bp, Artificial sequence
  SiRNA target sequence
gccccgacttttgcctggt

SEQ ID NO: 254684 - DNA, 19 bp, Artificial sequence
  SiRNA target sequence
ccccgacttttgcctggta

SEQ ID NO: 254685 - DNA, 19 bp, Artificial sequence
  SiRNA target sequence
cccgacttttgcctggtaa

SEQ ID NO: 254686 - DNA, 19 bp, Artificial sequence
  SiRNA target sequence
ccgacttttgcctggtaaa

SEQ ID NO: 254687 - DNA, 19 bp, Artificial sequence
  SiRNA target sequence
cgacttttgcctggtaaag

SEQ ID NO: 254688 - DNA, 19 bp, Artificial sequence
  SiRNA target sequence
gacttttgcctggtaaagc

SEQ ID NO: 254689 - DNA, 19 bp, Artificial sequence
  SiRNA target sequence
acttttgcctggtaaagcc

SEQ ID NO: 254690 - DNA, 19 bp, Artificial sequence
  SiRNA target sequence
cttttgcctggtaaagccg

SEQ ID NO: 254691 - DNA, 19 bp, Artificial sequence
  SiRNA target sequence
ttttgcctggtaaagccga

SEQ ID NO: 254692 - DNA, 19 bp, Artificial sequence
  SiRNA target sequence
tttgcctggtaaagccgaa

SEQ ID NO: 254693 - DNA, 19 bp, Artificial sequence
  SiRNA target sequence
ttgcctggtaaagccgaac

SEQ ID NO: 254694 - DNA, 19 bp, Artificial sequence
  SiRNA target sequence
tgcctggtaaagccgaacg

SEQ ID NO: 254695 - DNA, 19 bp, Artificial sequence
  SiRNA target sequence
gcctggtaaagccgaacga

SEQ ID NO: 254696 - DNA, 19 bp, Artificial sequence
  SiRNA target sequence
cctggtaaagccgaacgac

SEQ ID NO: 254697 - DNA, 19 bp, Artificial sequence
  SiRNA target sequence
ctggtaaagccgaacgaca

SEQ ID NO: 254698 - DNA, 19 bp, Artificial sequence
  SiRNA target sequence
tggtaaagccgaacgacaa

SEQ ID NO: 254699 - DNA, 19 bp, Artificial sequence
  SiRNA target sequence
ggtaaagccgaacgacaac

SEQ ID NO: 254700 - DNA, 19 bp, Artificial sequence
  SiRNA target sequence
gtaaagccgaacgacaacg

SEQ ID NO: 254701 - DNA, 19 bp, Artificial sequence
  SiRNA target sequence
taaagccgaacgacaacgg

SEQ ID NO: 254702 - DNA, 19 bp, Artificial sequence
  SiRNA target sequence
aaagccgaacgacaacggc

SEQ ID NO: 254703 - DNA, 19 bp, Artificial sequence
  SiRNA target sequence
aagccgaacgacaacggcg

SEQ ID NO: 254704 - DNA, 19 bp, Artificial sequence
  SiRNA target sequence
agccgaacgacaacggcga

SEQ ID NO: 254705 - DNA, 19 bp, Artificial sequence
  SiRNA target sequence
gccgaacgacaacggcgaa

SEQ ID NO: 254706 - DNA, 19 bp, Artificial sequence
  SiRNA target sequence
ccgaacgacaacggcgaag

SEQ ID NO: 254707 - DNA, 19 bp, Artificial sequence
  SiRNA target sequence
cgaacgacaacggcgaagg

SEQ ID NO: 254708 - DNA, 19 bp, Artificial sequence
  SiRNA target sequence
gaacgacaacggcgaaggc

SEQ ID NO: 254709 - DNA, 19 bp, Artificial sequence
  SiRNA target sequence
aacgacaacggcgaaggcc

SEQ ID NO: 254710 - DNA, 19 bp, Artificial sequence
  SiRNA target sequence
acgacaacggcgaaggcct

SEQ ID NO: 254711 - DNA, 19 bp, Artificial sequence
  SiRNA target sequence
cgacaacggcgaaggcctc

SEQ ID NO: 254712 - DNA, 19 bp, Artificial sequence
  SiRNA target sequence
gacaacggcgaaggcctcg

SEQ ID NO: 254713 - DNA, 19 bp, Artificial sequence
  SiRNA target sequence
acaacggcgaaggcctcgt

SEQ ID NO: 254714 - DNA, 19 bp, Artificial sequence
  SiRNA target sequence
caacggcgaaggcctcgtg

SEQ ID NO: 254715 - DNA, 19 bp, Artificial sequence
  SiRNA target sequence
aacggcgaaggcctcgtgc

SEQ ID NO: 254716 - DNA, 19 bp, Artificial sequence
  SiRNA target sequence
acggcgaaggcctcgtgca

SEQ ID NO: 254717 - DNA, 19 bp, Artificial sequence
  SiRNA target sequence
cggcgaaggcctcgtgcaa

SEQ ID NO: 254718 - DNA, 19 bp, Artificial sequence
  SiRNA target sequence
ggcgaaggcctcgtgcaag

SEQ ID NO: 254719 - DNA, 19 bp, Artificial sequence
  SiRNA target sequence
gcgaaggcctcgtgcaaga

SEQ ID NO: 254720 - DNA, 19 bp, Artificial sequence
  SiRNA target sequence
cgaaggcctcgtgcaagac

SEQ ID NO: 254721 - DNA, 19 bp, Artificial sequence
  SiRNA target sequence
gaaggcctcgtgcaagaca

SEQ ID NO: 254722 - DNA, 19 bp, Artificial sequence
  SiRNA target sequence
aaggcctcgtgcaagacac

SEQ ID NO: 254723 - DNA, 19 bp, Artificial sequence
  SiRNA target sequence
aggcctcgtgcaagacacc

SEQ ID NO: 254724 - DNA, 19 bp, Artificial sequence
  SiRNA target sequence
ggcctcgtgcaagacaccg

SEQ ID NO: 254725 - DNA, 19 bp, Artificial sequence
  SiRNA target sequence
gcctcgtgcaagacaccga

SEQ ID NO: 254726 - DNA, 19 bp, Artificial sequence
  SiRNA target sequence
cctcgtgcaagacaccgag

SEQ ID NO: 254727 - DNA, 19 bp, Artificial sequence
  SiRNA target sequence
ctcgtgcaagacaccgagc

SEQ ID NO: 254728 - DNA, 19 bp, Artificial sequence
  SiRNA target sequence
tcgtgcaagacaccgagct

SEQ ID NO: 254729 - DNA, 19 bp, Artificial sequence
  SiRNA target sequence
cgtgcaagacaccgagctt

SEQ ID NO: 254730 - DNA, 19 bp, Artificial sequence
  SiRNA target sequence
gtgcaagacaccgagcttg

SEQ ID NO: 254731 - DNA, 19 bp, Artificial sequence
  SiRNA target sequence
tgcaagacaccgagcttgg

SEQ ID NO: 254732 - DNA, 19 bp, Artificial sequence
  SiRNA target sequence
gcaagacaccgagcttggg

SEQ ID NO: 254733 - DNA, 19 bp, Artificial sequence
  SiRNA target sequence
caagacaccgagcttgggg

SEQ ID NO: 254734 - DNA, 19 bp, Artificial sequence
  SiRNA target sequence
aagacaccgagcttggggc

SEQ ID NO: 254735 - DNA, 19 bp, Artificial sequence
  SiRNA target sequence
agacaccgagcttggggcc

SEQ ID NO: 254736 - DNA, 19 bp, Artificial sequence
  SiRNA target sequence
gacaccgagcttggggcct

SEQ ID NO: 254737 - DNA, 19 bp, Artificial sequence
  SiRNA target sequence
acaccgagcttggggcctc

SEQ ID NO: 254738 - DNA, 19 bp, Artificial sequence
  SiRNA target sequence
caccgagcttggggcctcc

SEQ ID NO: 254739 - DNA, 19 bp, Artificial sequence
  SiRNA target sequence
accgagcttggggcctcca

SEQ ID NO: 254740 - DNA, 19 bp, Artificial sequence
  SiRNA target sequence
ccgagcttggggcctccac

SEQ ID NO: 254741 - DNA, 19 bp, Artificial sequence
  SiRNA target sequence
cgagcttggggcctccacg

SEQ ID NO: 254742 - DNA, 19 bp, Artificial sequence
  SiRNA target sequence
gagcttggggcctccacgc

SEQ ID NO: 254743 - DNA, 19 bp, Artificial sequence
  SiRNA target sequence
agcttggggcctccacgcc

SEQ ID NO: 254744 - DNA, 19 bp, Artificial sequence
  SiRNA target sequence
gcttggggcctccacgccg

SEQ ID NO: 254745 - DNA, 19 bp, Artificial sequence
  SiRNA target sequence
cttggggcctccacgccgc

SEQ ID NO: 254746 - DNA, 19 bp, Artificial sequence
  SiRNA target sequence
ttggggcctccacgccgct

SEQ ID NO: 254747 - DNA, 19 bp, Artificial sequence
  SiRNA target sequence
tggggcctccacgccgctc

SEQ ID NO: 254748 - DNA, 19 bp, Artificial sequence
  SiRNA target sequence
ggggcctccacgccgctca

SEQ ID NO: 254749 - DNA, 19 bp, Artificial sequence
  SiRNA target sequence
gggcctccacgccgctcag

SEQ ID NO: 254750 - DNA, 19 bp, Artificial sequence
  SiRNA target sequence
ggcctccacgccgctcagc

SEQ ID NO: 254751 - DNA, 19 bp, Artificial sequence
  SiRNA target sequence
gcctccacgccgctcagct

SEQ ID NO: 254752 - DNA, 19 bp, Artificial sequence
  SiRNA target sequence
cctccacgccgctcagctc

SEQ ID NO: 254753 - DNA, 19 bp, Artificial sequence
  SiRNA target sequence
ctccacgccgctcagctcg

SEQ ID NO: 254754 - DNA, 19 bp, Artificial sequence
  SiRNA target sequence
tccacgccgctcagctcgc

SEQ ID NO: 254755 - DNA, 19 bp, Artificial sequence
  SiRNA target sequence
ccacgccgctcagctcgcc

SEQ ID NO: 254756 - DNA, 19 bp, Artificial sequence
  SiRNA target sequence
cacgccgctcagctcgcct

SEQ ID NO: 254757 - DNA, 19 bp, Artificial sequence
  SiRNA target sequence
acgccgctcagctcgcctt

SEQ ID NO: 254758 - DNA, 19 bp, Artificial sequence
  SiRNA target sequence
cgccgctcagctcgccttc

SEQ ID NO: 254759 - DNA, 19 bp, Artificial sequence
  SiRNA target sequence
gccgctcagctcgccttcc

SEQ ID NO: 254760 - DNA, 19 bp, Artificial sequence
  SiRNA target sequence
ccgctcagctcgccttcct

SEQ ID NO: 254761 - DNA, 19 bp, Artificial sequence
  SiRNA target sequence
cgctcagctcgccttcctg

SEQ ID NO: 254762 - DNA, 19 bp, Artificial sequence
  SiRNA target sequence
gctcagctcgccttcctgt

SEQ ID NO: 254763 - DNA, 19 bp, Artificial sequence
  SiRNA target sequence
ctcagctcgccttcctgta

SEQ ID NO: 254764 - DNA, 19 bp, Artificial sequence
  SiRNA target sequence
tcagctcgccttcctgtat

SEQ ID NO: 254765 - DNA, 19 bp, Artificial sequence
  SiRNA target sequence
cagctcgccttcctgtata

SEQ ID NO: 254766 - DNA, 19 bp, Artificial sequence
  SiRNA target sequence
agctcgccttcctgtatag

SEQ ID NO: 254767 - DNA, 19 bp, Artificial sequence
  SiRNA target sequence
gctcgccttcctgtatagt

SEQ ID NO: 254768 - DNA, 19 bp, Artificial sequence
  SiRNA target sequence
ctcgccttcctgtatagtt

SEQ ID NO: 254769 - DNA, 19 bp, Artificial sequence
  SiRNA target sequence
tcgccttcctgtatagttg

SEQ ID NO: 254770 - DNA, 19 bp, Artificial sequence
  SiRNA target sequence
cgccttcctgtatagttga

SEQ ID NO: 254771 - DNA, 19 bp, Artificial sequence
  SiRNA target sequence
gccttcctgtatagttgaa

SEQ ID NO: 254772 - DNA, 19 bp, Artificial sequence
  SiRNA target sequence
ccttcctgtatagttgaac

SEQ ID NO: 254773 - DNA, 19 bp, Artificial sequence
  SiRNA target sequence
cttcctgtatagttgaaca

SEQ ID NO: 254774 - DNA, 19 bp, Artificial sequence
  SiRNA target sequence
ttcctgtatagttgaacag

SEQ ID NO: 254775 - DNA, 19 bp, Artificial sequence
  SiRNA target sequence
tcctgtatagttgaacagc

SEQ ID NO: 254776 - DNA, 19 bp, Artificial sequence
  SiRNA target sequence
cctgtatagttgaacagcc

SEQ ID NO: 254777 - DNA, 19 bp, Artificial sequence
  SiRNA target sequence
ctgtatagttgaacagcct

SEQ ID NO: 254778 - DNA, 19 bp, Artificial sequence
  SiRNA target sequence
tgtatagttgaacagcctc

SEQ ID NO: 254779 - DNA, 19 bp, Artificial sequence
  SiRNA target sequence
gtatagttgaacagcctct

SEQ ID NO: 254780 - DNA, 19 bp, Artificial sequence
  SiRNA target sequence
tatagttgaacagcctctg

SEQ ID NO: 254781 - DNA, 19 bp, Artificial sequence
  SiRNA target sequence
atagttgaacagcctctgt

SEQ ID NO: 254782 - DNA, 19 bp, Artificial sequence
  SiRNA target sequence
tagttgaacagcctctgtc

SEQ ID NO: 254783 - DNA, 19 bp, Artificial sequence
  SiRNA target sequence
agttgaacagcctctgtct

SEQ ID NO: 254784 - DNA, 19 bp, Artificial sequence
  SiRNA target sequence
gttgaacagcctctgtctc

SEQ ID NO: 254785 - DNA, 19 bp, Artificial sequence
  SiRNA target sequence
ttgaacagcctctgtctca

SEQ ID NO: 254786 - DNA, 19 bp, Artificial sequence
  SiRNA target sequence
tgaacagcctctgtctcac

SEQ ID NO: 254787 - DNA, 19 bp, Artificial sequence
  SiRNA target sequence
gaacagcctctgtctcacg

SEQ ID NO: 254788 - DNA, 19 bp, Artificial sequence
  SiRNA target sequence
aacagcctctgtctcacga

SEQ ID NO: 254789 - DNA, 19 bp, Artificial sequence
  SiRNA target sequence
acagcctctgtctcacgac

SEQ ID NO: 254790 - DNA, 19 bp, Artificial sequence
  SiRNA target sequence
cagcctctgtctcacgaca

SEQ ID NO: 254791 - DNA, 19 bp, Artificial sequence
  SiRNA target sequence
agcctctgtctcacgacag

SEQ ID NO: 254792 - DNA, 19 bp, Artificial sequence
  SiRNA target sequence
gcctctgtctcacgacagt

SEQ ID NO: 254793 - DNA, 19 bp, Artificial sequence
  SiRNA target sequence
cctctgtctcacgacagtg

SEQ ID NO: 254794 - DNA, 19 bp, Artificial sequence
  SiRNA target sequence
ctctgtctcacgacagtgt

SEQ ID NO: 254795 - DNA, 19 bp, Artificial sequence
  SiRNA target sequence
tctgtctcacgacagtgtg

SEQ ID NO: 254796 - DNA, 19 bp, Artificial sequence
  SiRNA target sequence
ctgtctcacgacagtgtgg

SEQ ID NO: 254797 - DNA, 19 bp, Artificial sequence
  SiRNA target sequence
tgtctcacgacagtgtggg

SEQ ID NO: 254798 - DNA, 19 bp, Artificial sequence
  SiRNA target sequence
gtctcacgacagtgtgggc

SEQ ID NO: 254799 - DNA, 19 bp, Artificial sequence
  SiRNA target sequence
tctcacgacagtgtgggcc

SEQ ID NO: 254800 - DNA, 19 bp, Artificial sequence
  SiRNA target sequence
ctcacgacagtgtgggcct

SEQ ID NO: 254801 - DNA, 19 bp, Artificial sequence
  SiRNA target sequence
tcacgacagtgtgggcctg

SEQ ID NO: 254802 - DNA, 19 bp, Artificial sequence
  SiRNA target sequence
cacgacagtgtgggcctgc

SEQ ID NO: 254803 - DNA, 19 bp, Artificial sequence
  SiRNA target sequence
acgacagtgtgggcctgcc

SEQ ID NO: 254804 - DNA, 19 bp, Artificial sequence
  SiRNA target sequence
cgacagtgtgggcctgcca

SEQ ID NO: 254805 - DNA, 19 bp, Artificial sequence
  SiRNA target sequence
gacagtgtgggcctgccac

SEQ ID NO: 254806 - DNA, 19 bp, Artificial sequence
  SiRNA target sequence
acagtgtgggcctgccacc

SEQ ID NO: 254807 - DNA, 20 bp, Artificial sequence
  SiRNA target sequence
ggccaatcccgattccggcg

SEQ ID NO: 254808 - DNA, 20 bp, Artificial sequence
  SiRNA target sequence
gccaatcccgattccggcga

SEQ ID NO: 254809 - DNA, 20 bp, Artificial sequence
  SiRNA target sequence
ccaatcccgattccggcgac

SEQ ID NO: 254810 - DNA, 20 bp, Artificial sequence
  SiRNA target sequence
caatcccgattccggcgaca

SEQ ID NO: 254811 - DNA, 20 bp, Artificial sequence
  SiRNA target sequence
aatcccgattccggcgacac

SEQ ID NO: 254812 - DNA, 20 bp, Artificial sequence
  SiRNA target sequence
atcccgattccggcgacaca

SEQ ID NO: 254813 - DNA, 20 bp, Artificial sequence
  SiRNA target sequence
tcccgattccggcgacacaa

SEQ ID NO: 254814 - DNA, 20 bp, Artificial sequence
  SiRNA target sequence
cccgattccggcgacacaaa

SEQ ID NO: 254815 - DNA, 20 bp, Artificial sequence
  SiRNA target sequence
ccgattccggcgacacaaag

SEQ ID NO: 254816 - DNA, 20 bp, Artificial sequence
  SiRNA target sequence
cgattccggcgacacaaaga

SEQ ID NO: 254817 - DNA, 20 bp, Artificial sequence
  SiRNA target sequence
gattccggcgacacaaagaa

SEQ ID NO: 254818 - DNA, 20 bp, Artificial sequence
  SiRNA target sequence
attccggcgacacaaagaaa

SEQ ID NO: 254819 - DNA, 20 bp, Artificial sequence
  SiRNA target sequence
ttccggcgacacaaagaaat

SEQ ID NO: 254820 - DNA, 20 bp, Artificial sequence
  SiRNA target sequence
tccggcgacacaaagaaatt

SEQ ID NO: 254821 - DNA, 20 bp, Artificial sequence
  SiRNA target sequence
ccggcgacacaaagaaatta

SEQ ID NO: 254822 - DNA, 20 bp, Artificial sequence
  SiRNA target sequence
cggcgacacaaagaaattac

SEQ ID NO: 254823 - DNA, 20 bp, Artificial sequence
  SiRNA target sequence
ggcgacacaaagaaattaca

SEQ ID NO: 254824 - DNA, 20 bp, Artificial sequence
  SiRNA target sequence
gcgacacaaagaaattacaa

SEQ ID NO: 254825 - DNA, 20 bp, Artificial sequence
  SiRNA target sequence
cgacacaaagaaattacaag

SEQ ID NO: 254826 - DNA, 20 bp, Artificial sequence
  SiRNA target sequence
gacacaaagaaattacaaga

SEQ ID NO: 254827 - DNA, 20 bp, Artificial sequence
  SiRNA target sequence
acacaaagaaattacaagaa

SEQ ID NO: 254828 - DNA, 20 bp, Artificial sequence
  SiRNA target sequence
cacaaagaaattacaagaag

SEQ ID NO: 254829 - DNA, 20 bp, Artificial sequence
  SiRNA target sequence
acaaagaaattacaagaagc

SEQ ID NO: 254830 - DNA, 20 bp, Artificial sequence
  SiRNA target sequence
caaagaaattacaagaagct

SEQ ID NO: 254831 - DNA, 20 bp, Artificial sequence
  SiRNA target sequence
aaagaaattacaagaagcta

SEQ ID NO: 254832 - DNA, 20 bp, Artificial sequence
  SiRNA target sequence
aagaaattacaagaagctat

SEQ ID NO: 254833 - DNA, 20 bp, Artificial sequence
  SiRNA target sequence
agaaattacaagaagctata

SEQ ID NO: 254834 - DNA, 20 bp, Artificial sequence
  SiRNA target sequence
gaaattacaagaagctatag

SEQ ID NO: 254835 - DNA, 20 bp, Artificial sequence
  SiRNA target sequence
aaattacaagaagctataga

SEQ ID NO: 254836 - DNA, 20 bp, Artificial sequence
  SiRNA target sequence
aattacaagaagctatagac

SEQ ID NO: 254837 - DNA, 20 bp, Artificial sequence
  SiRNA target sequence
attacaagaagctatagacc

SEQ ID NO: 254838 - DNA, 20 bp, Artificial sequence
  SiRNA target sequence
ttacaagaagctatagaccg

SEQ ID NO: 254839 - DNA, 20 bp, Artificial sequence
  SiRNA target sequence
tacaagaagctatagaccgt

SEQ ID NO: 254840 - DNA, 20 bp, Artificial sequence
  SiRNA target sequence
acaagaagctatagaccgtt

SEQ ID NO: 254841 - DNA, 20 bp, Artificial sequence
  SiRNA target sequence
caagaagctatagaccgttt

SEQ ID NO: 254842 - DNA, 20 bp, Artificial sequence
  SiRNA target sequence
aagaagctatagaccgtttt

SEQ ID NO: 254843 - DNA, 20 bp, Artificial sequence
  SiRNA target sequence
agaagctatagaccgttttc

SEQ ID NO: 254844 - DNA, 20 bp, Artificial sequence
  SiRNA target sequence
gaagctatagaccgttttca

SEQ ID NO: 254845 - DNA, 20 bp, Artificial sequence
  SiRNA target sequence
aagctatagaccgttttcat

SEQ ID NO: 254846 - DNA, 20 bp, Artificial sequence
  SiRNA target sequence
agctatagaccgttttcatc

SEQ ID NO: 254847 - DNA, 20 bp, Artificial sequence
  SiRNA target sequence
gctatagaccgttttcatcg

SEQ ID NO: 254848 - DNA, 20 bp, Artificial sequence
  SiRNA target sequence
ctatagaccgttttcatcga

SEQ ID NO: 254849 - DNA, 20 bp, Artificial sequence
  SiRNA target sequence
tatagaccgttttcatcgag

SEQ ID NO: 254850 - DNA, 20 bp, Artificial sequence
  SiRNA target sequence
atagaccgttttcatcgagc

SEQ ID NO: 254851 - DNA, 20 bp, Artificial sequence
  SiRNA target sequence
tagaccgttttcatcgagcc

SEQ ID NO: 254852 - DNA, 20 bp, Artificial sequence
  SiRNA target sequence
agaccgttttcatcgagccg

SEQ ID NO: 254853 - DNA, 20 bp, Artificial sequence
  SiRNA target sequence
gaccgttttcatcgagccgg

SEQ ID NO: 254854 - DNA, 20 bp, Artificial sequence
  SiRNA target sequence
accgttttcatcgagccgga

SEQ ID NO: 254855 - DNA, 20 bp, Artificial sequence
  SiRNA target sequence
ccgttttcatcgagccggaa

SEQ ID NO: 254856 - DNA, 20 bp, Artificial sequence
  SiRNA target sequence
cgttttcatcgagccggaag

SEQ ID NO: 254857 - DNA, 20 bp, Artificial sequence
  SiRNA target sequence
gttttcatcgagccggaaga

SEQ ID NO: 254858 - DNA, 20 bp, Artificial sequence
  SiRNA target sequence
ttttcatcgagccggaagat

SEQ ID NO: 254859 - DNA, 20 bp, Artificial sequence
  SiRNA target sequence
tttcatcgagccggaagatg

SEQ ID NO: 254860 - DNA, 20 bp, Artificial sequence
  SiRNA target sequence
ttcatcgagccggaagatgg

SEQ ID NO: 254861 - DNA, 20 bp, Artificial sequence
  SiRNA target sequence
tcatcgagccggaagatgga

SEQ ID NO: 254862 - DNA, 20 bp, Artificial sequence
  SiRNA target sequence
catcgagccggaagatggat

SEQ ID NO: 254863 - DNA, 20 bp, Artificial sequence
  SiRNA target sequence
atcgagccggaagatggatt

SEQ ID NO: 254864 - DNA, 20 bp, Artificial sequence
  SiRNA target sequence
tcgagccggaagatggatta

SEQ ID NO: 254865 - DNA, 20 bp, Artificial sequence
  SiRNA target sequence
cgagccggaagatggattaa

SEQ ID NO: 254866 - DNA, 20 bp, Artificial sequence
  SiRNA target sequence
gagccggaagatggattaag

SEQ ID NO: 254867 - DNA, 20 bp, Artificial sequence
  SiRNA target sequence
agccggaagatggattaaga

SEQ ID NO: 254868 - DNA, 20 bp, Artificial sequence
  SiRNA target sequence
gccggaagatggattaagaa

SEQ ID NO: 254869 - DNA, 20 bp, Artificial sequence
  SiRNA target sequence
ccggaagatggattaagaaa

SEQ ID NO: 254870 - DNA, 20 bp, Artificial sequence
  SiRNA target sequence
cggaagatggattaagaaaa

SEQ ID NO: 254871 - DNA, 20 bp, Artificial sequence
  SiRNA target sequence
ggaagatggattaagaaaaa

SEQ ID NO: 254872 - DNA, 20 bp, Artificial sequence
  SiRNA target sequence
gaagatggattaagaaaaaa

SEQ ID NO: 254873 - DNA, 20 bp, Artificial sequence
  SiRNA target sequence
aagatggattaagaaaaaat

SEQ ID NO: 254874 - DNA, 20 bp, Artificial sequence
  SiRNA target sequence
agatggattaagaaaaaatt

SEQ ID NO: 254875 - DNA, 20 bp, Artificial sequence
  SiRNA target sequence
gatggattaagaaaaaattt

SEQ ID NO: 254876 - DNA, 20 bp, Artificial sequence
  SiRNA target sequence
atggattaagaaaaaatttc

SEQ ID NO: 254877 - DNA, 20 bp, Artificial sequence
  SiRNA target sequence
tggattaagaaaaaatttcg

SEQ ID NO: 254878 - DNA, 20 bp, Artificial sequence
  SiRNA target sequence
ggattaagaaaaaatttcga

SEQ ID NO: 254879 - DNA, 20 bp, Artificial sequence
  SiRNA target sequence
gattaagaaaaaatttcgag

SEQ ID NO: 254880 - DNA, 20 bp, Artificial sequence
  SiRNA target sequence
attaagaaaaaatttcgaga

SEQ ID NO: 254881 - DNA, 20 bp, Artificial sequence
  SiRNA target sequence
ttaagaaaaaatttcgagat

SEQ ID NO: 254882 - DNA, 20 bp, Artificial sequence
  SiRNA target sequence
taagaaaaaatttcgagatc

SEQ ID NO: 254883 - DNA, 20 bp, Artificial sequence
  SiRNA target sequence
aagaaaaaatttcgagatct

SEQ ID NO: 254884 - DNA, 20 bp, Artificial sequence
  SiRNA target sequence
agaaaaaatttcgagatcta

SEQ ID NO: 254885 - DNA, 20 bp, Artificial sequence
  SiRNA target sequence
gaaaaaatttcgagatctat

SEQ ID NO: 254886 - DNA, 20 bp, Artificial sequence
  SiRNA target sequence
aaaaaatttcgagatctatt

SEQ ID NO: 254887 - DNA, 20 bp, Artificial sequence
  SiRNA target sequence
aaaaatttcgagatctattc

SEQ ID NO: 254888 - DNA, 20 bp, Artificial sequence
  SiRNA target sequence
aaaatttcgagatctattca

SEQ ID NO: 254889 - DNA, 20 bp, Artificial sequence
  SiRNA target sequence
aaatttcgagatctattcat

SEQ ID NO: 254890 - DNA, 20 bp, Artificial sequence
  SiRNA target sequence
aatttcgagatctattcatg

SEQ ID NO: 254891 - DNA, 20 bp, Artificial sequence
  SiRNA target sequence
atttcgagatctattcatgc

SEQ ID NO: 254892 - DNA, 20 bp, Artificial sequence
  SiRNA target sequence
tttcgagatctattcatgct

SEQ ID NO: 254893 - DNA, 20 bp, Artificial sequence
  SiRNA target sequence
ttcgagatctattcatgcta

SEQ ID NO: 254894 - DNA, 20 bp, Artificial sequence
  SiRNA target sequence
tcgagatctattcatgctat

SEQ ID NO: 254895 - DNA, 20 bp, Artificial sequence
  SiRNA target sequence
cgagatctattcatgctatg

SEQ ID NO: 254896 - DNA, 20 bp, Artificial sequence
  SiRNA target sequence
gagatctattcatgctatgt

SEQ ID NO: 254897 - DNA, 20 bp, Artificial sequence
  SiRNA target sequence
agatctattcatgctatgtt

SEQ ID NO: 254898 - DNA, 20 bp, Artificial sequence
  SiRNA target sequence
gatctattcatgctatgttc

SEQ ID NO: 254899 - DNA, 20 bp, Artificial sequence
  SiRNA target sequence
atctattcatgctatgttcg

SEQ ID NO: 254900 - DNA, 20 bp, Artificial sequence
  SiRNA target sequence
tctattcatgctatgttcgg

SEQ ID NO: 254901 - DNA, 20 bp, Artificial sequence
  SiRNA target sequence
ctattcatgctatgttcggg

SEQ ID NO: 254902 - DNA, 20 bp, Artificial sequence
  SiRNA target sequence
tattcatgctatgttcgggt

SEQ ID NO: 254903 - DNA, 20 bp, Artificial sequence
  SiRNA target sequence
attcatgctatgttcgggta

SEQ ID NO: 254904 - DNA, 20 bp, Artificial sequence
  SiRNA target sequence
ttcatgctatgttcgggtaa

SEQ ID NO: 254905 - DNA, 20 bp, Artificial sequence
  SiRNA target sequence
tcatgctatgttcgggtaaa

SEQ ID NO: 254906 - DNA, 20 bp, Artificial sequence
  SiRNA target sequence
catgctatgttcgggtaaac

SEQ ID NO: 254907 - DNA, 20 bp, Artificial sequence
  SiRNA target sequence
atgctatgttcgggtaaaca

SEQ ID NO: 254908 - DNA, 20 bp, Artificial sequence
  SiRNA target sequence
tgctatgttcgggtaaacag

SEQ ID NO: 254909 - DNA, 20 bp, Artificial sequence
  SiRNA target sequence
gctatgttcgggtaaacagc

SEQ ID NO: 254910 - DNA, 20 bp, Artificial sequence
  SiRNA target sequence
ctatgttcgggtaaacagcg

SEQ ID NO: 254911 - DNA, 20 bp, Artificial sequence
  SiRNA target sequence
tatgttcgggtaaacagcgc

SEQ ID NO: 254912 - DNA, 20 bp, Artificial sequence
  SiRNA target sequence
atgttcgggtaaacagcgca

SEQ ID NO: 254913 - DNA, 20 bp, Artificial sequence
  SiRNA target sequence
tgttcgggtaaacagcgcaa

SEQ ID NO: 254914 - DNA, 20 bp, Artificial sequence
  SiRNA target sequence
gttcgggtaaacagcgcaac

SEQ ID NO: 254915 - DNA, 20 bp, Artificial sequence
  SiRNA target sequence
ttcgggtaaacagcgcaacc

SEQ ID NO: 254916 - DNA, 20 bp, Artificial sequence
  SiRNA target sequence
tcgggtaaacagcgcaacca

SEQ ID NO: 254917 - DNA, 20 bp, Artificial sequence
  SiRNA target sequence
cgggtaaacagcgcaaccag

SEQ ID NO: 254918 - DNA, 20 bp, Artificial sequence
  SiRNA target sequence
gggtaaacagcgcaaccaga

SEQ ID NO: 254919 - DNA, 20 bp, Artificial sequence
  SiRNA target sequence
ggtaaacagcgcaaccagat

SEQ ID NO: 254920 - DNA, 20 bp, Artificial sequence
  SiRNA target sequence
gtaaacagcgcaaccagatc

SEQ ID NO: 254921 - DNA, 20 bp, Artificial sequence
  SiRNA target sequence
taaacagcgcaaccagatct

SEQ ID NO: 254922 - DNA, 20 bp, Artificial sequence
  SiRNA target sequence
aaacagcgcaaccagatctc

SEQ ID NO: 254923 - DNA, 20 bp, Artificial sequence
  SiRNA target sequence
aacagcgcaaccagatctcg

SEQ ID NO: 254924 - DNA, 20 bp, Artificial sequence
  SiRNA target sequence
acagcgcaaccagatctcgg

SEQ ID NO: 254925 - DNA, 20 bp, Artificial sequence
  SiRNA target sequence
cagcgcaaccagatctcgga

SEQ ID NO: 254926 - DNA, 20 bp, Artificial sequence
  SiRNA target sequence
agcgcaaccagatctcggat

SEQ ID NO: 254927 - DNA, 20 bp, Artificial sequence
  SiRNA target sequence
gcgcaaccagatctcggatc

SEQ ID NO: 254928 - DNA, 20 bp, Artificial sequence
  SiRNA target sequence
cgcaaccagatctcggatca

SEQ ID NO: 254929 - DNA, 20 bp, Artificial sequence
  SiRNA target sequence
gcaaccagatctcggatcaa

SEQ ID NO: 254930 - DNA, 20 bp, Artificial sequence
  SiRNA target sequence
caaccagatctcggatcaaa

SEQ ID NO: 254931 - DNA, 20 bp, Artificial sequence
  SiRNA target sequence
aaccagatctcggatcaaac

SEQ ID NO: 254932 - DNA, 20 bp, Artificial sequence
  SiRNA target sequence
accagatctcggatcaaacc

SEQ ID NO: 254933 - DNA, 20 bp, Artificial sequence
  SiRNA target sequence
ccagatctcggatcaaacct

SEQ ID NO: 254934 - DNA, 20 bp, Artificial sequence
  SiRNA target sequence
cagatctcggatcaaaccta

SEQ ID NO: 254935 - DNA, 20 bp, Artificial sequence
  SiRNA target sequence
agatctcggatcaaacctac

SEQ ID NO: 254936 - DNA, 20 bp, Artificial sequence
  SiRNA target sequence
gatctcggatcaaacctacg

SEQ ID NO: 254937 - DNA, 20 bp, Artificial sequence
  SiRNA target sequence
atctcggatcaaacctacgc

SEQ ID NO: 254938 - DNA, 20 bp, Artificial sequence
  SiRNA target sequence
tctcggatcaaacctacgcc

SEQ ID NO: 254939 - DNA, 20 bp, Artificial sequence
  SiRNA target sequence
ctcggatcaaacctacgccg

SEQ ID NO: 254940 - DNA, 20 bp, Artificial sequence
  SiRNA target sequence
tcggatcaaacctacgccga

SEQ ID NO: 254941 - DNA, 20 bp, Artificial sequence
  SiRNA target sequence
cggatcaaacctacgccgaa

SEQ ID NO: 254942 - DNA, 20 bp, Artificial sequence
  SiRNA target sequence
ggatcaaacctacgccgaag

SEQ ID NO: 254943 - DNA, 20 bp, Artificial sequence
  SiRNA target sequence
gatcaaacctacgccgaaga

SEQ ID NO: 254944 - DNA, 20 bp, Artificial sequence
  SiRNA target sequence
atcaaacctacgccgaagac

SEQ ID NO: 254945 - DNA, 20 bp, Artificial sequence
  SiRNA target sequence
tcaaacctacgccgaagacc

SEQ ID NO: 254946 - DNA, 20 bp, Artificial sequence
  SiRNA target sequence
caaacctacgccgaagacct

SEQ ID NO: 254947 - DNA, 20 bp, Artificial sequence
  SiRNA target sequence
aaacctacgccgaagacctg

SEQ ID NO: 254948 - DNA, 20 bp, Artificial sequence
  SiRNA target sequence
aacctacgccgaagacctgg

SEQ ID NO: 254949 - DNA, 20 bp, Artificial sequence
  SiRNA target sequence
acctacgccgaagacctgga

SEQ ID NO: 254950 - DNA, 20 bp, Artificial sequence
  SiRNA target sequence
cctacgccgaagacctggac

SEQ ID NO: 254951 - DNA, 20 bp, Artificial sequence
  SiRNA target sequence
ctacgccgaagacctggacc

SEQ ID NO: 254952 - DNA, 20 bp, Artificial sequence
  SiRNA target sequence
tacgccgaagacctggacct

SEQ ID NO: 254953 - DNA, 20 bp, Artificial sequence
  SiRNA target sequence
acgccgaagacctggacctc

SEQ ID NO: 254954 - DNA, 20 bp, Artificial sequence
  SiRNA target sequence
cgccgaagacctggacctcg

SEQ ID NO: 254955 - DNA, 20 bp, Artificial sequence
  SiRNA target sequence
gccgaagacctggacctcga

SEQ ID NO: 254956 - DNA, 20 bp, Artificial sequence
  SiRNA target sequence
ccgaagacctggacctcgac

SEQ ID NO: 254957 - DNA, 20 bp, Artificial sequence
  SiRNA target sequence
cgaagacctggacctcgaca

SEQ ID NO: 254958 - DNA, 20 bp, Artificial sequence
  SiRNA target sequence
gaagacctggacctcgacac

SEQ ID NO: 254959 - DNA, 20 bp, Artificial sequence
  SiRNA target sequence
aagacctggacctcgacaca

SEQ ID NO: 254960 - DNA, 20 bp, Artificial sequence
  SiRNA target sequence
agacctggacctcgacacag

SEQ ID NO: 254961 - DNA, 20 bp, Artificial sequence
  SiRNA target sequence
gacctggacctcgacacagg

SEQ ID NO: 254962 - DNA, 20 bp, Artificial sequence
  SiRNA target sequence
acctggacctcgacacaggg

SEQ ID NO: 254963 - DNA, 20 bp, Artificial sequence
  SiRNA target sequence
cctggacctcgacacagggg

SEQ ID NO: 254964 - DNA, 20 bp, Artificial sequence
  SiRNA target sequence
ctggacctcgacacaggggt

SEQ ID NO: 254965 - DNA, 20 bp, Artificial sequence
  SiRNA target sequence
tggacctcgacacaggggtc

SEQ ID NO: 254966 - DNA, 20 bp, Artificial sequence
  SiRNA target sequence
ggacctcgacacaggggtca

SEQ ID NO: 254967 - DNA, 20 bp, Artificial sequence
  SiRNA target sequence
gacctcgacacaggggtcat

SEQ ID NO: 254968 - DNA, 20 bp, Artificial sequence
  SiRNA target sequence
acctcgacacaggggtcatt

SEQ ID NO: 254969 - DNA, 20 bp, Artificial sequence
  SiRNA target sequence
cctcgacacaggggtcatta

SEQ ID NO: 254970 - DNA, 20 bp, Artificial sequence
  SiRNA target sequence
ctcgacacaggggtcattat

SEQ ID NO: 254971 - DNA, 20 bp, Artificial sequence
  SiRNA target sequence
tcgacacaggggtcattatt

SEQ ID NO: 254972 - DNA, 20 bp, Artificial sequence
  SiRNA target sequence
cgacacaggggtcattatta

SEQ ID NO: 254973 - DNA, 20 bp, Artificial sequence
  SiRNA target sequence
gacacaggggtcattattat

SEQ ID NO: 254974 - DNA, 20 bp, Artificial sequence
  SiRNA target sequence
acacaggggtcattattatg

SEQ ID NO: 254975 - DNA, 20 bp, Artificial sequence
  SiRNA target sequence
cacaggggtcattattatgg

SEQ ID NO: 254976 - DNA, 20 bp, Artificial sequence
  SiRNA target sequence
acaggggtcattattatgga

SEQ ID NO: 254977 - DNA, 20 bp, Artificial sequence
  SiRNA target sequence
caggggtcattattatggat

SEQ ID NO: 254978 - DNA, 20 bp, Artificial sequence
  SiRNA target sequence
aggggtcattattatggatg

SEQ ID NO: 254979 - DNA, 20 bp, Artificial sequence
  SiRNA target sequence
ggggtcattattatggatgg

SEQ ID NO: 254980 - DNA, 20 bp, Artificial sequence
  SiRNA target sequence
gggtcattattatggatgga

SEQ ID NO: 254981 - DNA, 20 bp, Artificial sequence
  SiRNA target sequence
ggtcattattatggatggac

SEQ ID NO: 254982 - DNA, 20 bp, Artificial sequence
  SiRNA target sequence
gtcattattatggatggaca

SEQ ID NO: 254983 - DNA, 20 bp, Artificial sequence
  SiRNA target sequence
tcattattatggatggacag

SEQ ID NO: 254984 - DNA, 20 bp, Artificial sequence
  SiRNA target sequence
cattattatggatggacagg

SEQ ID NO: 254985 - DNA, 20 bp, Artificial sequence
  SiRNA target sequence
attattatggatggacaggt

SEQ ID NO: 254986 - DNA, 20 bp, Artificial sequence
  SiRNA target sequence
ttattatggatggacaggtt

SEQ ID NO: 254987 - DNA, 20 bp, Artificial sequence
  SiRNA target sequence
tattatggatggacaggtta

SEQ ID NO: 254988 - DNA, 20 bp, Artificial sequence
  SiRNA target sequence
attatggatggacaggttat

SEQ ID NO: 254989 - DNA, 20 bp, Artificial sequence
  SiRNA target sequence
ttatggatggacaggttatt

SEQ ID NO: 254990 - DNA, 20 bp, Artificial sequence
  SiRNA target sequence
tatggatggacaggttatta

SEQ ID NO: 254991 - DNA, 20 bp, Artificial sequence
  SiRNA target sequence
atggatggacaggttattaa

SEQ ID NO: 254992 - DNA, 20 bp, Artificial sequence
  SiRNA target sequence
tggatggacaggttattaag

SEQ ID NO: 254993 - DNA, 20 bp, Artificial sequence
  SiRNA target sequence
ggatggacaggttattaaga

SEQ ID NO: 254994 - DNA, 20 bp, Artificial sequence
  SiRNA target sequence
gatggacaggttattaagaa

SEQ ID NO: 254995 - DNA, 20 bp, Artificial sequence
  SiRNA target sequence
atggacaggttattaagaag

SEQ ID NO: 254996 - DNA, 20 bp, Artificial sequence
  SiRNA target sequence
tggacaggttattaagaagg

SEQ ID NO: 254997 - DNA, 20 bp, Artificial sequence
  SiRNA target sequence
ggacaggttattaagaagga

SEQ ID NO: 254998 - DNA, 20 bp, Artificial sequence
  SiRNA target sequence
gacaggttattaagaaggat

SEQ ID NO: 254999 - DNA, 20 bp, Artificial sequence
  SiRNA target sequence
acaggttattaagaaggata

SEQ ID NO: 255000 - DNA, 20 bp, Artificial sequence
  SiRNA target sequence
caggttattaagaaggatag

SEQ ID NO: 255001 - DNA, 20 bp, Artificial sequence
  SiRNA target sequence
aggttattaagaaggatagc

SEQ ID NO: 255002 - DNA, 20 bp, Artificial sequence
  SiRNA target sequence
ggttattaagaaggatagcc

SEQ ID NO: 255003 - DNA, 20 bp, Artificial sequence
  SiRNA target sequence
gttattaagaaggatagccc

SEQ ID NO: 255004 - DNA, 20 bp, Artificial sequence
  SiRNA target sequence
ttattaagaaggatagcccc

SEQ ID NO: 255005 - DNA, 20 bp, Artificial sequence
  SiRNA target sequence
tattaagaaggatagcccca

SEQ ID NO: 255006 - DNA, 20 bp, Artificial sequence
  SiRNA target sequence
attaagaaggatagccccac

SEQ ID NO: 255007 - DNA, 20 bp, Artificial sequence
  SiRNA target sequence
ttaagaaggatagccccacg

SEQ ID NO: 255008 - DNA, 20 bp, Artificial sequence
  SiRNA target sequence
taagaaggatagccccacgc

SEQ ID NO: 255009 - DNA, 20 bp, Artificial sequence
  SiRNA target sequence
aagaaggatagccccacgcc

SEQ ID NO: 255010 - DNA, 20 bp, Artificial sequence
  SiRNA target sequence
agaaggatagccccacgccc

SEQ ID NO: 255011 - DNA, 20 bp, Artificial sequence
  SiRNA target sequence
gaaggatagccccacgcccg

SEQ ID NO: 255012 - DNA, 20 bp, Artificial sequence
  SiRNA target sequence
aaggatagccccacgcccga

SEQ ID NO: 255013 - DNA, 20 bp, Artificial sequence
  SiRNA target sequence
aggatagccccacgcccgaa

SEQ ID NO: 255014 - DNA, 20 bp, Artificial sequence
  SiRNA target sequence
ggatagccccacgcccgaac

SEQ ID NO: 255015 - DNA, 20 bp, Artificial sequence
  SiRNA target sequence
gatagccccacgcccgaact

SEQ ID NO: 255016 - DNA, 20 bp, Artificial sequence
  SiRNA target sequence
atagccccacgcccgaactc

SEQ ID NO: 255017 - DNA, 20 bp, Artificial sequence
  SiRNA target sequence
tagccccacgcccgaactca

SEQ ID NO: 255018 - DNA, 20 bp, Artificial sequence
  SiRNA target sequence
agccccacgcccgaactcat

SEQ ID NO: 255019 - DNA, 20 bp, Artificial sequence
  SiRNA target sequence
gccccacgcccgaactcatc

SEQ ID NO: 255020 - DNA, 20 bp, Artificial sequence
  SiRNA target sequence
ccccacgcccgaactcatcg

SEQ ID NO: 255021 - DNA, 20 bp, Artificial sequence
  SiRNA target sequence
cccacgcccgaactcatcga

SEQ ID NO: 255022 - DNA, 20 bp, Artificial sequence
  SiRNA target sequence
ccacgcccgaactcatcgat

SEQ ID NO: 255023 - DNA, 20 bp, Artificial sequence
  SiRNA target sequence
cacgcccgaactcatcgatg

SEQ ID NO: 255024 - DNA, 20 bp, Artificial sequence
  SiRNA target sequence
acgcccgaactcatcgatgg

SEQ ID NO: 255025 - DNA, 20 bp, Artificial sequence
  SiRNA target sequence
cgcccgaactcatcgatggg

SEQ ID NO: 255026 - DNA, 20 bp, Artificial sequence
  SiRNA target sequence
gcccgaactcatcgatgggt

SEQ ID NO: 255027 - DNA, 20 bp, Artificial sequence
  SiRNA target sequence
cccgaactcatcgatgggtt

SEQ ID NO: 255028 - DNA, 20 bp, Artificial sequence
  SiRNA target sequence
ccgaactcatcgatgggttg

SEQ ID NO: 255029 - DNA, 20 bp, Artificial sequence
  SiRNA target sequence
cgaactcatcgatgggttgg

SEQ ID NO: 255030 - DNA, 20 bp, Artificial sequence
  SiRNA target sequence
gaactcatcgatgggttgga

SEQ ID NO: 255031 - DNA, 20 bp, Artificial sequence
  SiRNA target sequence
aactcatcgatgggttggat

SEQ ID NO: 255032 - DNA, 20 bp, Artificial sequence
  SiRNA target sequence
actcatcgatgggttggatg

SEQ ID NO: 255033 - DNA, 20 bp, Artificial sequence
  SiRNA target sequence
ctcatcgatgggttggatgt

SEQ ID NO: 255034 - DNA, 20 bp, Artificial sequence
  SiRNA target sequence
tcatcgatgggttggatgtt

SEQ ID NO: 255035 - DNA, 20 bp, Artificial sequence
  SiRNA target sequence
catcgatgggttggatgttg

SEQ ID NO: 255036 - DNA, 20 bp, Artificial sequence
  SiRNA target sequence
atcgatgggttggatgttgg

SEQ ID NO: 255037 - DNA, 20 bp, Artificial sequence
  SiRNA target sequence
tcgatgggttggatgttggt

SEQ ID NO: 255038 - DNA, 20 bp, Artificial sequence
  SiRNA target sequence
cgatgggttggatgttggtt

SEQ ID NO: 255039 - DNA, 20 bp, Artificial sequence
  SiRNA target sequence
gatgggttggatgttggttt

SEQ ID NO: 255040 - DNA, 20 bp, Artificial sequence
  SiRNA target sequence
atgggttggatgttggtttt

SEQ ID NO: 255041 - DNA, 20 bp, Artificial sequence
  SiRNA target sequence
tgggttggatgttggttttc

SEQ ID NO: 255042 - DNA, 20 bp, Artificial sequence
  SiRNA target sequence
gggttggatgttggttttca

SEQ ID NO: 255043 - DNA, 20 bp, Artificial sequence
  SiRNA target sequence
ggttggatgttggttttcaa

SEQ ID NO: 255044 - DNA, 20 bp, Artificial sequence
  SiRNA target sequence
gttggatgttggttttcaag

SEQ ID NO: 255045 - DNA, 20 bp, Artificial sequence
  SiRNA target sequence
ttggatgttggttttcaagc

SEQ ID NO: 255046 - DNA, 20 bp, Artificial sequence
  SiRNA target sequence
tggatgttggttttcaagct

SEQ ID NO: 255047 - DNA, 20 bp, Artificial sequence
  SiRNA target sequence
ggatgttggttttcaagctg

SEQ ID NO: 255048 - DNA, 20 bp, Artificial sequence
  SiRNA target sequence
gatgttggttttcaagctga

SEQ ID NO: 255049 - DNA, 20 bp, Artificial sequence
  SiRNA target sequence
atgttggttttcaagctgat

SEQ ID NO: 255050 - DNA, 20 bp, Artificial sequence
  SiRNA target sequence
tgttggttttcaagctgata

SEQ ID NO: 255051 - DNA, 20 bp, Artificial sequence
  SiRNA target sequence
gttggttttcaagctgataa

SEQ ID NO: 255052 - DNA, 20 bp, Artificial sequence
  SiRNA target sequence
ttggttttcaagctgataag

SEQ ID NO: 255053 - DNA, 20 bp, Artificial sequence
  SiRNA target sequence
tggttttcaagctgataagc

SEQ ID NO: 255054 - DNA, 20 bp, Artificial sequence
  SiRNA target sequence
ggttttcaagctgataagca

SEQ ID NO: 255055 - DNA, 20 bp, Artificial sequence
  SiRNA target sequence
gttttcaagctgataagcaa

SEQ ID NO: 255056 - DNA, 20 bp, Artificial sequence
  SiRNA target sequence
ttttcaagctgataagcaac

SEQ ID NO: 255057 - DNA, 20 bp, Artificial sequence
  SiRNA target sequence
tttcaagctgataagcaaca

SEQ ID NO: 255058 - DNA, 20 bp, Artificial sequence
  SiRNA target sequence
ttcaagctgataagcaacag

SEQ ID NO: 255059 - DNA, 20 bp, Artificial sequence
  SiRNA target sequence
tcaagctgataagcaacagg

SEQ ID NO: 255060 - DNA, 20 bp, Artificial sequence
  SiRNA target sequence
caagctgataagcaacaggc

SEQ ID NO: 255061 - DNA, 20 bp, Artificial sequence
  SiRNA target sequence
aagctgataagcaacaggcg

SEQ ID NO: 255062 - DNA, 20 bp, Artificial sequence
  SiRNA target sequence
agctgataagcaacaggcgc

SEQ ID NO: 255063 - DNA, 20 bp, Artificial sequence
  SiRNA target sequence
gctgataagcaacaggcgca

SEQ ID NO: 255064 - DNA, 20 bp, Artificial sequence
  SiRNA target sequence
ctgataagcaacaggcgcag

SEQ ID NO: 255065 - DNA, 20 bp, Artificial sequence
  SiRNA target sequence
tgataagcaacaggcgcagg

SEQ ID NO: 255066 - DNA, 20 bp, Artificial sequence
  SiRNA target sequence
gataagcaacaggcgcaggt

SEQ ID NO: 255067 - DNA, 20 bp, Artificial sequence
  SiRNA target sequence
ataagcaacaggcgcaggtg

SEQ ID NO: 255068 - DNA, 20 bp, Artificial sequence
  SiRNA target sequence
taagcaacaggcgcaggtga

SEQ ID NO: 255069 - DNA, 20 bp, Artificial sequence
  SiRNA target sequence
aagcaacaggcgcaggtgat

SEQ ID NO: 255070 - DNA, 20 bp, Artificial sequence
  SiRNA target sequence
agcaacaggcgcaggtgatt

SEQ ID NO: 255071 - DNA, 20 bp, Artificial sequence
  SiRNA target sequence
gcaacaggcgcaggtgattg

SEQ ID NO: 255072 - DNA, 20 bp, Artificial sequence
  SiRNA target sequence
caacaggcgcaggtgattgt

SEQ ID NO: 255073 - DNA, 20 bp, Artificial sequence
  SiRNA target sequence
aacaggcgcaggtgattgta

SEQ ID NO: 255074 - DNA, 20 bp, Artificial sequence
  SiRNA target sequence
acaggcgcaggtgattgtaa

SEQ ID NO: 255075 - DNA, 20 bp, Artificial sequence
  SiRNA target sequence
caggcgcaggtgattgtaat

SEQ ID NO: 255076 - DNA, 20 bp, Artificial sequence
  SiRNA target sequence
aggcgcaggtgattgtaatg

SEQ ID NO: 255077 - DNA, 20 bp, Artificial sequence
  SiRNA target sequence
ggcgcaggtgattgtaatgc

SEQ ID NO: 255078 - DNA, 20 bp, Artificial sequence
  SiRNA target sequence
gcgcaggtgattgtaatgca

SEQ ID NO: 255079 - DNA, 20 bp, Artificial sequence
  SiRNA target sequence
cgcaggtgattgtaatgcaa

SEQ ID NO: 255080 - DNA, 20 bp, Artificial sequence
  SiRNA target sequence
gcaggtgattgtaatgcaaa

SEQ ID NO: 255081 - DNA, 20 bp, Artificial sequence
  SiRNA target sequence
caggtgattgtaatgcaaaa

SEQ ID NO: 255082 - DNA, 20 bp, Artificial sequence
  SiRNA target sequence
aggtgattgtaatgcaaaag

SEQ ID NO: 255083 - DNA, 20 bp, Artificial sequence
  SiRNA target sequence
ggtgattgtaatgcaaaagc

SEQ ID NO: 255084 - DNA, 20 bp, Artificial sequence
  SiRNA target sequence
gtgattgtaatgcaaaagct

SEQ ID NO: 255085 - DNA, 20 bp, Artificial sequence
  SiRNA target sequence
tgattgtaatgcaaaagctt

SEQ ID NO: 255086 - DNA, 20 bp, Artificial sequence
  SiRNA target sequence
gattgtaatgcaaaagctta

SEQ ID NO: 255087 - DNA, 20 bp, Artificial sequence
  SiRNA target sequence
attgtaatgcaaaagcttaa

SEQ ID NO: 255088 - DNA, 20 bp, Artificial sequence
  SiRNA target sequence
ttgtaatgcaaaagcttaaa

SEQ ID NO: 255089 - DNA, 20 bp, Artificial sequence
  SiRNA target sequence
tgtaatgcaaaagcttaaaa

SEQ ID NO: 255090 - DNA, 20 bp, Artificial sequence
  SiRNA target sequence
gtaatgcaaaagcttaaaaa

SEQ ID NO: 255091 - DNA, 20 bp, Artificial sequence
  SiRNA target sequence
taatgcaaaagcttaaaaac

SEQ ID NO: 255092 - DNA, 20 bp, Artificial sequence
  SiRNA target sequence
aatgcaaaagcttaaaaaca

SEQ ID NO: 255093 - DNA, 20 bp, Artificial sequence
  SiRNA target sequence
atgcaaaagcttaaaaacaa

SEQ ID NO: 255094 - DNA, 20 bp, Artificial sequence
  SiRNA target sequence
tgcaaaagcttaaaaacaat

SEQ ID NO: 255095 - DNA, 20 bp, Artificial sequence
  SiRNA target sequence
gcaaaagcttaaaaacaatt

SEQ ID NO: 255096 - DNA, 20 bp, Artificial sequence
  SiRNA target sequence
caaaagcttaaaaacaattc

SEQ ID NO: 255097 - DNA, 20 bp, Artificial sequence
  SiRNA target sequence
aaaagcttaaaaacaattcc

SEQ ID NO: 255098 - DNA, 20 bp, Artificial sequence
  SiRNA target sequence
aaagcttaaaaacaattccc

SEQ ID NO: 255099 - DNA, 20 bp, Artificial sequence
  SiRNA target sequence
aagcttaaaaacaattcccg

SEQ ID NO: 255100 - DNA, 20 bp, Artificial sequence
  SiRNA target sequence
agcttaaaaacaattcccga

SEQ ID NO: 255101 - DNA, 20 bp, Artificial sequence
  SiRNA target sequence
gcttaaaaacaattcccgac

SEQ ID NO: 255102 - DNA, 20 bp, Artificial sequence
  SiRNA target sequence
cttaaaaacaattcccgacc

SEQ ID NO: 255103 - DNA, 20 bp, Artificial sequence
  SiRNA target sequence
ttaaaaacaattcccgacct

SEQ ID NO: 255104 - DNA, 20 bp, Artificial sequence
  SiRNA target sequence
taaaaacaattcccgaccta

SEQ ID NO: 255105 - DNA, 20 bp, Artificial sequence
  SiRNA target sequence
aaaaacaattcccgacctat

SEQ ID NO: 255106 - DNA, 20 bp, Artificial sequence
  SiRNA target sequence
aaaacaattcccgacctatc

SEQ ID NO: 255107 - DNA, 20 bp, Artificial sequence
  SiRNA target sequence
aaacaattcccgacctatca

SEQ ID NO: 255108 - DNA, 20 bp, Artificial sequence
  SiRNA target sequence
aacaattcccgacctatcat

SEQ ID NO: 255109 - DNA, 20 bp, Artificial sequence
  SiRNA target sequence
acaattcccgacctatcatt

SEQ ID NO: 255110 - DNA, 20 bp, Artificial sequence
  SiRNA target sequence
caattcccgacctatcattg

SEQ ID NO: 255111 - DNA, 20 bp, Artificial sequence
  SiRNA target sequence
aattcccgacctatcattgg

SEQ ID NO: 255112 - DNA, 20 bp, Artificial sequence
  SiRNA target sequence
attcccgacctatcattggc

SEQ ID NO: 255113 - DNA, 20 bp, Artificial sequence
  SiRNA target sequence
ttcccgacctatcattggcg

SEQ ID NO: 255114 - DNA, 20 bp, Artificial sequence
  SiRNA target sequence
tcccgacctatcattggcga

SEQ ID NO: 255115 - DNA, 20 bp, Artificial sequence
  SiRNA target sequence
cccgacctatcattggcgac

SEQ ID NO: 255116 - DNA, 20 bp, Artificial sequence
  SiRNA target sequence
ccgacctatcattggcgact

SEQ ID NO: 255117 - DNA, 20 bp, Artificial sequence
  SiRNA target sequence
cgacctatcattggcgactc

SEQ ID NO: 255118 - DNA, 20 bp, Artificial sequence
  SiRNA target sequence
gacctatcattggcgactca

SEQ ID NO: 255119 - DNA, 20 bp, Artificial sequence
  SiRNA target sequence
acctatcattggcgactcaa

SEQ ID NO: 255120 - DNA, 20 bp, Artificial sequence
  SiRNA target sequence
cctatcattggcgactcaaa

SEQ ID NO: 255121 - DNA, 20 bp, Artificial sequence
  SiRNA target sequence
ctatcattggcgactcaaag

SEQ ID NO: 255122 - DNA, 20 bp, Artificial sequence
  SiRNA target sequence
tatcattggcgactcaaagg

SEQ ID NO: 255123 - DNA, 20 bp, Artificial sequence
  SiRNA target sequence
atcattggcgactcaaagga

SEQ ID NO: 255124 - DNA, 20 bp, Artificial sequence
  SiRNA target sequence
tcattggcgactcaaaggaa

SEQ ID NO: 255125 - DNA, 20 bp, Artificial sequence
  SiRNA target sequence
cattggcgactcaaaggaat

SEQ ID NO: 255126 - DNA, 20 bp, Artificial sequence
  SiRNA target sequence
attggcgactcaaaggaatt

SEQ ID NO: 255127 - DNA, 20 bp, Artificial sequence
  SiRNA target sequence
ttggcgactcaaaggaattt

SEQ ID NO: 255128 - DNA, 20 bp, Artificial sequence
  SiRNA target sequence
tggcgactcaaaggaattta

SEQ ID NO: 255129 - DNA, 20 bp, Artificial sequence
  SiRNA target sequence
ggcgactcaaaggaatttag

SEQ ID NO: 255130 - DNA, 20 bp, Artificial sequence
  SiRNA target sequence
gcgactcaaaggaatttagc

SEQ ID NO: 255131 - DNA, 20 bp, Artificial sequence
  SiRNA target sequence
cgactcaaaggaatttagca

SEQ ID NO: 255132 - DNA, 20 bp, Artificial sequence
  SiRNA target sequence
gactcaaaggaatttagcaa

SEQ ID NO: 255133 - DNA, 20 bp, Artificial sequence
  SiRNA target sequence
actcaaaggaatttagcaac

SEQ ID NO: 255134 - DNA, 20 bp, Artificial sequence
  SiRNA target sequence
ctcaaaggaatttagcaaca

SEQ ID NO: 255135 - DNA, 20 bp, Artificial sequence
  SiRNA target sequence
tcaaaggaatttagcaacaa

SEQ ID NO: 255136 - DNA, 20 bp, Artificial sequence
  SiRNA target sequence
caaaggaatttagcaacaaa

SEQ ID NO: 255137 - DNA, 20 bp, Artificial sequence
  SiRNA target sequence
aaaggaatttagcaacaaag

SEQ ID NO: 255138 - DNA, 20 bp, Artificial sequence
  SiRNA target sequence
aaggaatttagcaacaaagt

SEQ ID NO: 255139 - DNA, 20 bp, Artificial sequence
  SiRNA target sequence
aggaatttagcaacaaagtt

SEQ ID NO: 255140 - DNA, 20 bp, Artificial sequence
  SiRNA target sequence
ggaatttagcaacaaagttc

SEQ ID NO: 255141 - DNA, 20 bp, Artificial sequence
  SiRNA target sequence
gaatttagcaacaaagttca

SEQ ID NO: 255142 - DNA, 20 bp, Artificial sequence
  SiRNA target sequence
aatttagcaacaaagttcat

SEQ ID NO: 255143 - DNA, 20 bp, Artificial sequence
  SiRNA target sequence
atttagcaacaaagttcatc

SEQ ID NO: 255144 - DNA, 20 bp, Artificial sequence
  SiRNA target sequence
tttagcaacaaagttcatcc

SEQ ID NO: 255145 - DNA, 20 bp, Artificial sequence
  SiRNA target sequence
ttagcaacaaagttcatcca

SEQ ID NO: 255146 - DNA, 20 bp, Artificial sequence
  SiRNA target sequence
tagcaacaaagttcatccag

SEQ ID NO: 255147 - DNA, 20 bp, Artificial sequence
  SiRNA target sequence
agcaacaaagttcatccagg

SEQ ID NO: 255148 - DNA, 20 bp, Artificial sequence
  SiRNA target sequence
gcaacaaagttcatccaggc

SEQ ID NO: 255149 - DNA, 20 bp, Artificial sequence
  SiRNA target sequence
caacaaagttcatccaggcc

SEQ ID NO: 255150 - DNA, 20 bp, Artificial sequence
  SiRNA target sequence
aacaaagttcatccaggccc

SEQ ID NO: 255151 - DNA, 20 bp, Artificial sequence
  SiRNA target sequence
acaaagttcatccaggcccc

SEQ ID NO: 255152 - DNA, 20 bp, Artificial sequence
  SiRNA target sequence
caaagttcatccaggccccg

SEQ ID NO: 255153 - DNA, 20 bp, Artificial sequence
  SiRNA target sequence
aaagttcatccaggccccga

SEQ ID NO: 255154 - DNA, 20 bp, Artificial sequence
  SiRNA target sequence
aagttcatccaggccccgac

SEQ ID NO: 255155 - DNA, 20 bp, Artificial sequence
  SiRNA target sequence
agttcatccaggccccgact

SEQ ID NO: 255156 - DNA, 20 bp, Artificial sequence
  SiRNA target sequence
gttcatccaggccccgactt

SEQ ID NO: 255157 - DNA, 20 bp, Artificial sequence
  SiRNA target sequence
ttcatccaggccccgacttt

SEQ ID NO: 255158 - DNA, 20 bp, Artificial sequence
  SiRNA target sequence
tcatccaggccccgactttt

SEQ ID NO: 255159 - DNA, 20 bp, Artificial sequence
  SiRNA target sequence
catccaggccccgacttttg

SEQ ID NO: 255160 - DNA, 20 bp, Artificial sequence
  SiRNA target sequence
atccaggccccgacttttgc

SEQ ID NO: 255161 - DNA, 20 bp, Artificial sequence
  SiRNA target sequence
tccaggccccgacttttgcc

SEQ ID NO: 255162 - DNA, 20 bp, Artificial sequence
  SiRNA target sequence
ccaggccccgacttttgcct

SEQ ID NO: 255163 - DNA, 20 bp, Artificial sequence
  SiRNA target sequence
caggccccgacttttgcctg

SEQ ID NO: 255164 - DNA, 20 bp, Artificial sequence
  SiRNA target sequence
aggccccgacttttgcctgg

SEQ ID NO: 255165 - DNA, 20 bp, Artificial sequence
  SiRNA target sequence
ggccccgacttttgcctggt

SEQ ID NO: 255166 - DNA, 20 bp, Artificial sequence
  SiRNA target sequence
gccccgacttttgcctggta

SEQ ID NO: 255167 - DNA, 20 bp, Artificial sequence
  SiRNA target sequence
ccccgacttttgcctggtaa

SEQ ID NO: 255168 - DNA, 20 bp, Artificial sequence
  SiRNA target sequence
cccgacttttgcctggtaaa

SEQ ID NO: 255169 - DNA, 20 bp, Artificial sequence
  SiRNA target sequence
ccgacttttgcctggtaaag

SEQ ID NO: 255170 - DNA, 20 bp, Artificial sequence
  SiRNA target sequence
cgacttttgcctggtaaagc

SEQ ID NO: 255171 - DNA, 20 bp, Artificial sequence
  SiRNA target sequence
gacttttgcctggtaaagcc

SEQ ID NO: 255172 - DNA, 20 bp, Artificial sequence
  SiRNA target sequence
acttttgcctggtaaagccg

SEQ ID NO: 255173 - DNA, 20 bp, Artificial sequence
  SiRNA target sequence
cttttgcctggtaaagccga

SEQ ID NO: 255174 - DNA, 20 bp, Artificial sequence
  SiRNA target sequence
ttttgcctggtaaagccgaa

SEQ ID NO: 255175 - DNA, 20 bp, Artificial sequence
  SiRNA target sequence
tttgcctggtaaagccgaac

SEQ ID NO: 255176 - DNA, 20 bp, Artificial sequence
  SiRNA target sequence
ttgcctggtaaagccgaacg

SEQ ID NO: 255177 - DNA, 20 bp, Artificial sequence
  SiRNA target sequence
tgcctggtaaagccgaacga

SEQ ID NO: 255178 - DNA, 20 bp, Artificial sequence
  SiRNA target sequence
gcctggtaaagccgaacgac

SEQ ID NO: 255179 - DNA, 20 bp, Artificial sequence
  SiRNA target sequence
cctggtaaagccgaacgaca

SEQ ID NO: 255180 - DNA, 20 bp, Artificial sequence
  SiRNA target sequence
ctggtaaagccgaacgacaa

SEQ ID NO: 255181 - DNA, 20 bp, Artificial sequence
  SiRNA target sequence
tggtaaagccgaacgacaac

SEQ ID NO: 255182 - DNA, 20 bp, Artificial sequence
  SiRNA target sequence
ggtaaagccgaacgacaacg

SEQ ID NO: 255183 - DNA, 20 bp, Artificial sequence
  SiRNA target sequence
gtaaagccgaacgacaacgg

SEQ ID NO: 255184 - DNA, 20 bp, Artificial sequence
  SiRNA target sequence
taaagccgaacgacaacggc

SEQ ID NO: 255185 - DNA, 20 bp, Artificial sequence
  SiRNA target sequence
aaagccgaacgacaacggcg

SEQ ID NO: 255186 - DNA, 20 bp, Artificial sequence
  SiRNA target sequence
aagccgaacgacaacggcga

SEQ ID NO: 255187 - DNA, 20 bp, Artificial sequence
  SiRNA target sequence
agccgaacgacaacggcgaa

SEQ ID NO: 255188 - DNA, 20 bp, Artificial sequence
  SiRNA target sequence
gccgaacgacaacggcgaag

SEQ ID NO: 255189 - DNA, 20 bp, Artificial sequence
  SiRNA target sequence
ccgaacgacaacggcgaagg

SEQ ID NO: 255190 - DNA, 20 bp, Artificial sequence
  SiRNA target sequence
cgaacgacaacggcgaaggc

SEQ ID NO: 255191 - DNA, 20 bp, Artificial sequence
  SiRNA target sequence
gaacgacaacggcgaaggcc

SEQ ID NO: 255192 - DNA, 20 bp, Artificial sequence
  SiRNA target sequence
aacgacaacggcgaaggcct

SEQ ID NO: 255193 - DNA, 20 bp, Artificial sequence
  SiRNA target sequence
acgacaacggcgaaggcctc

SEQ ID NO: 255194 - DNA, 20 bp, Artificial sequence
  SiRNA target sequence
cgacaacggcgaaggcctcg

SEQ ID NO: 255195 - DNA, 20 bp, Artificial sequence
  SiRNA target sequence
gacaacggcgaaggcctcgt

SEQ ID NO: 255196 - DNA, 20 bp, Artificial sequence
  SiRNA target sequence
acaacggcgaaggcctcgtg

SEQ ID NO: 255197 - DNA, 20 bp, Artificial sequence
  SiRNA target sequence
caacggcgaaggcctcgtgc

SEQ ID NO: 255198 - DNA, 20 bp, Artificial sequence
  SiRNA target sequence
aacggcgaaggcctcgtgca

SEQ ID NO: 255199 - DNA, 20 bp, Artificial sequence
  SiRNA target sequence
acggcgaaggcctcgtgcaa

SEQ ID NO: 255200 - DNA, 20 bp, Artificial sequence
  SiRNA target sequence
cggcgaaggcctcgtgcaag

SEQ ID NO: 255201 - DNA, 20 bp, Artificial sequence
  SiRNA target sequence
ggcgaaggcctcgtgcaaga

SEQ ID NO: 255202 - DNA, 20 bp, Artificial sequence
  SiRNA target sequence
gcgaaggcctcgtgcaagac

SEQ ID NO: 255203 - DNA, 20 bp, Artificial sequence
  SiRNA target sequence
cgaaggcctcgtgcaagaca

SEQ ID NO: 255204 - DNA, 20 bp, Artificial sequence
  SiRNA target sequence
gaaggcctcgtgcaagacac

SEQ ID NO: 255205 - DNA, 20 bp, Artificial sequence
  SiRNA target sequence
aaggcctcgtgcaagacacc

SEQ ID NO: 255206 - DNA, 20 bp, Artificial sequence
  SiRNA target sequence
aggcctcgtgcaagacaccg

SEQ ID NO: 255207 - DNA, 20 bp, Artificial sequence
  SiRNA target sequence
ggcctcgtgcaagacaccga

SEQ ID NO: 255208 - DNA, 20 bp, Artificial sequence
  SiRNA target sequence
gcctcgtgcaagacaccgag

SEQ ID NO: 255209 - DNA, 20 bp, Artificial sequence
  SiRNA target sequence
cctcgtgcaagacaccgagc

SEQ ID NO: 255210 - DNA, 20 bp, Artificial sequence
  SiRNA target sequence
ctcgtgcaagacaccgagct

SEQ ID NO: 255211 - DNA, 20 bp, Artificial sequence
  SiRNA target sequence
tcgtgcaagacaccgagctt

SEQ ID NO: 255212 - DNA, 20 bp, Artificial sequence
  SiRNA target sequence
cgtgcaagacaccgagcttg

SEQ ID NO: 255213 - DNA, 20 bp, Artificial sequence
  SiRNA target sequence
gtgcaagacaccgagcttgg

SEQ ID NO: 255214 - DNA, 20 bp, Artificial sequence
  SiRNA target sequence
tgcaagacaccgagcttggg

SEQ ID NO: 255215 - DNA, 20 bp, Artificial sequence
  SiRNA target sequence
gcaagacaccgagcttgggg

SEQ ID NO: 255216 - DNA, 20 bp, Artificial sequence
  SiRNA target sequence
caagacaccgagcttggggc

SEQ ID NO: 255217 - DNA, 20 bp, Artificial sequence
  SiRNA target sequence
aagacaccgagcttggggcc

SEQ ID NO: 255218 - DNA, 20 bp, Artificial sequence
  SiRNA target sequence
agacaccgagcttggggcct

SEQ ID NO: 255219 - DNA, 20 bp, Artificial sequence
  SiRNA target sequence
gacaccgagcttggggcctc

SEQ ID NO: 255220 - DNA, 20 bp, Artificial sequence
  SiRNA target sequence
acaccgagcttggggcctcc

SEQ ID NO: 255221 - DNA, 20 bp, Artificial sequence
  SiRNA target sequence
caccgagcttggggcctcca

SEQ ID NO: 255222 - DNA, 20 bp, Artificial sequence
  SiRNA target sequence
accgagcttggggcctccac

SEQ ID NO: 255223 - DNA, 20 bp, Artificial sequence
  SiRNA target sequence
ccgagcttggggcctccacg

SEQ ID NO: 255224 - DNA, 20 bp, Artificial sequence
  SiRNA target sequence
cgagcttggggcctccacgc

SEQ ID NO: 255225 - DNA, 20 bp, Artificial sequence
  SiRNA target sequence
gagcttggggcctccacgcc

SEQ ID NO: 255226 - DNA, 20 bp, Artificial sequence
  SiRNA target sequence
agcttggggcctccacgccg

SEQ ID NO: 255227 - DNA, 20 bp, Artificial sequence
  SiRNA target sequence
gcttggggcctccacgccgc

SEQ ID NO: 255228 - DNA, 20 bp, Artificial sequence
  SiRNA target sequence
cttggggcctccacgccgct

SEQ ID NO: 255229 - DNA, 20 bp, Artificial sequence
  SiRNA target sequence
ttggggcctccacgccgctc

SEQ ID NO: 255230 - DNA, 20 bp, Artificial sequence
  SiRNA target sequence
tggggcctccacgccgctca

SEQ ID NO: 255231 - DNA, 20 bp, Artificial sequence
  SiRNA target sequence
ggggcctccacgccgctcag

SEQ ID NO: 255232 - DNA, 20 bp, Artificial sequence
  SiRNA target sequence
gggcctccacgccgctcagc

SEQ ID NO: 255233 - DNA, 20 bp, Artificial sequence
  SiRNA target sequence
ggcctccacgccgctcagct

SEQ ID NO: 255234 - DNA, 20 bp, Artificial sequence
  SiRNA target sequence
gcctccacgccgctcagctc

SEQ ID NO: 255235 - DNA, 20 bp, Artificial sequence
  SiRNA target sequence
cctccacgccgctcagctcg

SEQ ID NO: 255236 - DNA, 20 bp, Artificial sequence
  SiRNA target sequence
ctccacgccgctcagctcgc

SEQ ID NO: 255237 - DNA, 20 bp, Artificial sequence
  SiRNA target sequence
tccacgccgctcagctcgcc

SEQ ID NO: 255238 - DNA, 20 bp, Artificial sequence
  SiRNA target sequence
ccacgccgctcagctcgcct

SEQ ID NO: 255239 - DNA, 20 bp, Artificial sequence
  SiRNA target sequence
cacgccgctcagctcgcctt

SEQ ID NO: 255240 - DNA, 20 bp, Artificial sequence
  SiRNA target sequence
acgccgctcagctcgccttc

SEQ ID NO: 255241 - DNA, 20 bp, Artificial sequence
  SiRNA target sequence
cgccgctcagctcgccttcc

SEQ ID NO: 255242 - DNA, 20 bp, Artificial sequence
  SiRNA target sequence
gccgctcagctcgccttcct

SEQ ID NO: 255243 - DNA, 20 bp, Artificial sequence
  SiRNA target sequence
ccgctcagctcgccttcctg

SEQ ID NO: 255244 - DNA, 20 bp, Artificial sequence
  SiRNA target sequence
cgctcagctcgccttcctgt

SEQ ID NO: 255245 - DNA, 20 bp, Artificial sequence
  SiRNA target sequence
gctcagctcgccttcctgta

SEQ ID NO: 255246 - DNA, 20 bp, Artificial sequence
  SiRNA target sequence
ctcagctcgccttcctgtat

SEQ ID NO: 255247 - DNA, 20 bp, Artificial sequence
  SiRNA target sequence
tcagctcgccttcctgtata

SEQ ID NO: 255248 - DNA, 20 bp, Artificial sequence
  SiRNA target sequence
cagctcgccttcctgtatag

SEQ ID NO: 255249 - DNA, 20 bp, Artificial sequence
  SiRNA target sequence
agctcgccttcctgtatagt

SEQ ID NO: 255250 - DNA, 20 bp, Artificial sequence
  SiRNA target sequence
gctcgccttcctgtatagtt

SEQ ID NO: 255251 - DNA, 20 bp, Artificial sequence
  SiRNA target sequence
ctcgccttcctgtatagttg

SEQ ID NO: 255252 - DNA, 20 bp, Artificial sequence
  SiRNA target sequence
tcgccttcctgtatagttga

SEQ ID NO: 255253 - DNA, 20 bp, Artificial sequence
  SiRNA target sequence
cgccttcctgtatagttgaa

SEQ ID NO: 255254 - DNA, 20 bp, Artificial sequence
  SiRNA target sequence
gccttcctgtatagttgaac

SEQ ID NO: 255255 - DNA, 20 bp, Artificial sequence
  SiRNA target sequence
ccttcctgtatagttgaaca

SEQ ID NO: 255256 - DNA, 20 bp, Artificial sequence
  SiRNA target sequence
cttcctgtatagttgaacag

SEQ ID NO: 255257 - DNA, 20 bp, Artificial sequence
  SiRNA target sequence
ttcctgtatagttgaacagc

SEQ ID NO: 255258 - DNA, 20 bp, Artificial sequence
  SiRNA target sequence
tcctgtatagttgaacagcc

SEQ ID NO: 255259 - DNA, 20 bp, Artificial sequence
  SiRNA target sequence
cctgtatagttgaacagcct

SEQ ID NO: 255260 - DNA, 20 bp, Artificial sequence
  SiRNA target sequence
ctgtatagttgaacagcctc

SEQ ID NO: 255261 - DNA, 20 bp, Artificial sequence
  SiRNA target sequence
tgtatagttgaacagcctct

SEQ ID NO: 255262 - DNA, 20 bp, Artificial sequence
  SiRNA target sequence
gtatagttgaacagcctctg

SEQ ID NO: 255263 - DNA, 20 bp, Artificial sequence
  SiRNA target sequence
tatagttgaacagcctctgt

SEQ ID NO: 255264 - DNA, 20 bp, Artificial sequence
  SiRNA target sequence
atagttgaacagcctctgtc

SEQ ID NO: 255265 - DNA, 20 bp, Artificial sequence
  SiRNA target sequence
tagttgaacagcctctgtct

SEQ ID NO: 255266 - DNA, 20 bp, Artificial sequence
  SiRNA target sequence
agttgaacagcctctgtctc

SEQ ID NO: 255267 - DNA, 20 bp, Artificial sequence
  SiRNA target sequence
gttgaacagcctctgtctca

SEQ ID NO: 255268 - DNA, 20 bp, Artificial sequence
  SiRNA target sequence
ttgaacagcctctgtctcac

SEQ ID NO: 255269 - DNA, 20 bp, Artificial sequence
  SiRNA target sequence
tgaacagcctctgtctcacg

SEQ ID NO: 255270 - DNA, 20 bp, Artificial sequence
  SiRNA target sequence
gaacagcctctgtctcacga

SEQ ID NO: 255271 - DNA, 20 bp, Artificial sequence
  SiRNA target sequence
aacagcctctgtctcacgac

SEQ ID NO: 255272 - DNA, 20 bp, Artificial sequence
  SiRNA target sequence
acagcctctgtctcacgaca

SEQ ID NO: 255273 - DNA, 20 bp, Artificial sequence
  SiRNA target sequence
cagcctctgtctcacgacag

SEQ ID NO: 255274 - DNA, 20 bp, Artificial sequence
  SiRNA target sequence
agcctctgtctcacgacagt

SEQ ID NO: 255275 - DNA, 20 bp, Artificial sequence
  SiRNA target sequence
gcctctgtctcacgacagtg

SEQ ID NO: 255276 - DNA, 20 bp, Artificial sequence
  SiRNA target sequence
cctctgtctcacgacagtgt

SEQ ID NO: 255277 - DNA, 20 bp, Artificial sequence
  SiRNA target sequence
ctctgtctcacgacagtgtg

SEQ ID NO: 255278 - DNA, 20 bp, Artificial sequence
  SiRNA target sequence
tctgtctcacgacagtgtgg

SEQ ID NO: 255279 - DNA, 20 bp, Artificial sequence
  SiRNA target sequence
ctgtctcacgacagtgtggg

SEQ ID NO: 255280 - DNA, 20 bp, Artificial sequence
  SiRNA target sequence
tgtctcacgacagtgtgggc

SEQ ID NO: 255281 - DNA, 20 bp, Artificial sequence
  SiRNA target sequence
gtctcacgacagtgtgggcc

SEQ ID NO: 255282 - DNA, 20 bp, Artificial sequence
  SiRNA target sequence
tctcacgacagtgtgggcct

SEQ ID NO: 255283 - DNA, 20 bp, Artificial sequence
  SiRNA target sequence
ctcacgacagtgtgggcctg

SEQ ID NO: 255284 - DNA, 20 bp, Artificial sequence
  SiRNA target sequence
tcacgacagtgtgggcctgc

SEQ ID NO: 255285 - DNA, 20 bp, Artificial sequence
  SiRNA target sequence
cacgacagtgtgggcctgcc

SEQ ID NO: 255286 - DNA, 20 bp, Artificial sequence
  SiRNA target sequence
acgacagtgtgggcctgcca

SEQ ID NO: 255287 - DNA, 20 bp, Artificial sequence
  SiRNA target sequence
cgacagtgtgggcctgccac

SEQ ID NO: 255288 - DNA, 20 bp, Artificial sequence
  SiRNA target sequence
gacagtgtgggcctgccacc

SEQ ID NO: 255289 - DNA, 21 bp, Artificial sequence
  SiRNA target sequence
ggccaatcccgattccggcga

SEQ ID NO: 255290 - DNA, 21 bp, Artificial sequence
  SiRNA target sequence
gccaatcccgattccggcgac

SEQ ID NO: 255291 - DNA, 21 bp, Artificial sequence
  SiRNA target sequence
ccaatcccgattccggcgaca

SEQ ID NO: 255292 - DNA, 21 bp, Artificial sequence
  SiRNA target sequence
caatcccgattccggcgacac

SEQ ID NO: 255293 - DNA, 21 bp, Artificial sequence
  SiRNA target sequence
aatcccgattccggcgacaca

SEQ ID NO: 255294 - DNA, 21 bp, Artificial sequence
  SiRNA target sequence
atcccgattccggcgacacaa

SEQ ID NO: 255295 - DNA, 21 bp, Artificial sequence
  SiRNA target sequence
tcccgattccggcgacacaaa

SEQ ID NO: 255296 - DNA, 21 bp, Artificial sequence
  SiRNA target sequence
cccgattccggcgacacaaag

SEQ ID NO: 255297 - DNA, 21 bp, Artificial sequence
  SiRNA target sequence
ccgattccggcgacacaaaga

SEQ ID NO: 255298 - DNA, 21 bp, Artificial sequence
  SiRNA target sequence
cgattccggcgacacaaagaa

SEQ ID NO: 255299 - DNA, 21 bp, Artificial sequence
  SiRNA target sequence
gattccggcgacacaaagaaa

SEQ ID NO: 255300 - DNA, 21 bp, Artificial sequence
  SiRNA target sequence
attccggcgacacaaagaaat

SEQ ID NO: 255301 - DNA, 21 bp, Artificial sequence
  SiRNA target sequence
ttccggcgacacaaagaaatt

SEQ ID NO: 255302 - DNA, 21 bp, Artificial sequence
  SiRNA target sequence
tccggcgacacaaagaaatta

SEQ ID NO: 255303 - DNA, 21 bp, Artificial sequence
  SiRNA target sequence
ccggcgacacaaagaaattac

SEQ ID NO: 255304 - DNA, 21 bp, Artificial sequence
  SiRNA target sequence
cggcgacacaaagaaattaca

SEQ ID NO: 255305 - DNA, 21 bp, Artificial sequence
  SiRNA target sequence
ggcgacacaaagaaattacaa

SEQ ID NO: 255306 - DNA, 21 bp, Artificial sequence
  SiRNA target sequence
gcgacacaaagaaattacaag

SEQ ID NO: 255307 - DNA, 21 bp, Artificial sequence
  SiRNA target sequence
cgacacaaagaaattacaaga

SEQ ID NO: 255308 - DNA, 21 bp, Artificial sequence
  SiRNA target sequence
gacacaaagaaattacaagaa

SEQ ID NO: 255309 - DNA, 21 bp, Artificial sequence
  SiRNA target sequence
acacaaagaaattacaagaag

SEQ ID NO: 255310 - DNA, 21 bp, Artificial sequence
  SiRNA target sequence
cacaaagaaattacaagaagc

SEQ ID NO: 255311 - DNA, 21 bp, Artificial sequence
  SiRNA target sequence
acaaagaaattacaagaagct

SEQ ID NO: 255312 - DNA, 21 bp, Artificial sequence
  SiRNA target sequence
caaagaaattacaagaagcta

SEQ ID NO: 255313 - DNA, 21 bp, Artificial sequence
  SiRNA target sequence
aaagaaattacaagaagctat

SEQ ID NO: 255314 - DNA, 21 bp, Artificial sequence
  SiRNA target sequence
aagaaattacaagaagctata

SEQ ID NO: 255315 - DNA, 21 bp, Artificial sequence
  SiRNA target sequence
agaaattacaagaagctatag

SEQ ID NO: 255316 - DNA, 21 bp, Artificial sequence
  SiRNA target sequence
gaaattacaagaagctataga

SEQ ID NO: 255317 - DNA, 21 bp, Artificial sequence
  SiRNA target sequence
aaattacaagaagctatagac

SEQ ID NO: 255318 - DNA, 21 bp, Artificial sequence
  SiRNA target sequence
aattacaagaagctatagacc

SEQ ID NO: 255319 - DNA, 21 bp, Artificial sequence
  SiRNA target sequence
attacaagaagctatagaccg

SEQ ID NO: 255320 - DNA, 21 bp, Artificial sequence
  SiRNA target sequence
ttacaagaagctatagaccgt

SEQ ID NO: 255321 - DNA, 21 bp, Artificial sequence
  SiRNA target sequence
tacaagaagctatagaccgtt

SEQ ID NO: 255322 - DNA, 21 bp, Artificial sequence
  SiRNA target sequence
acaagaagctatagaccgttt

SEQ ID NO: 255323 - DNA, 21 bp, Artificial sequence
  SiRNA target sequence
caagaagctatagaccgtttt

SEQ ID NO: 255324 - DNA, 21 bp, Artificial sequence
  SiRNA target sequence
aagaagctatagaccgttttc

SEQ ID NO: 255325 - DNA, 21 bp, Artificial sequence
  SiRNA target sequence
agaagctatagaccgttttca

SEQ ID NO: 255326 - DNA, 21 bp, Artificial sequence
  SiRNA target sequence
gaagctatagaccgttttcat

SEQ ID NO: 255327 - DNA, 21 bp, Artificial sequence
  SiRNA target sequence
aagctatagaccgttttcatc

SEQ ID NO: 255328 - DNA, 21 bp, Artificial sequence
  SiRNA target sequence
agctatagaccgttttcatcg

SEQ ID NO: 255329 - DNA, 21 bp, Artificial sequence
  SiRNA target sequence
gctatagaccgttttcatcga

SEQ ID NO: 255330 - DNA, 21 bp, Artificial sequence
  SiRNA target sequence
ctatagaccgttttcatcgag

SEQ ID NO: 255331 - DNA, 21 bp, Artificial sequence
  SiRNA target sequence
tatagaccgttttcatcgagc

SEQ ID NO: 255332 - DNA, 21 bp, Artificial sequence
  SiRNA target sequence
atagaccgttttcatcgagcc

SEQ ID NO: 255333 - DNA, 21 bp, Artificial sequence
  SiRNA target sequence
tagaccgttttcatcgagccg

SEQ ID NO: 255334 - DNA, 21 bp, Artificial sequence
  SiRNA target sequence
agaccgttttcatcgagccgg

SEQ ID NO: 255335 - DNA, 21 bp, Artificial sequence
  SiRNA target sequence
gaccgttttcatcgagccgga

SEQ ID NO: 255336 - DNA, 21 bp, Artificial sequence
  SiRNA target sequence
accgttttcatcgagccggaa

SEQ ID NO: 255337 - DNA, 21 bp, Artificial sequence
  SiRNA target sequence
ccgttttcatcgagccggaag

SEQ ID NO: 255338 - DNA, 21 bp, Artificial sequence
  SiRNA target sequence
cgttttcatcgagccggaaga

SEQ ID NO: 255339 - DNA, 21 bp, Artificial sequence
  SiRNA target sequence
gttttcatcgagccggaagat

SEQ ID NO: 255340 - DNA, 21 bp, Artificial sequence
  SiRNA target sequence
ttttcatcgagccggaagatg

SEQ ID NO: 255341 - DNA, 21 bp, Artificial sequence
  SiRNA target sequence
tttcatcgagccggaagatgg

SEQ ID NO: 255342 - DNA, 21 bp, Artificial sequence
  SiRNA target sequence
ttcatcgagccggaagatgga

SEQ ID NO: 255343 - DNA, 21 bp, Artificial sequence
  SiRNA target sequence
tcatcgagccggaagatggat

SEQ ID NO: 255344 - DNA, 21 bp, Artificial sequence
  SiRNA target sequence
catcgagccggaagatggatt

SEQ ID NO: 255345 - DNA, 21 bp, Artificial sequence
  SiRNA target sequence
atcgagccggaagatggatta

SEQ ID NO: 255346 - DNA, 21 bp, Artificial sequence
  SiRNA target sequence
tcgagccggaagatggattaa

SEQ ID NO: 255347 - DNA, 21 bp, Artificial sequence
  SiRNA target sequence
cgagccggaagatggattaag

SEQ ID NO: 255348 - DNA, 21 bp, Artificial sequence
  SiRNA target sequence
gagccggaagatggattaaga

SEQ ID NO: 255349 - DNA, 21 bp, Artificial sequence
  SiRNA target sequence
agccggaagatggattaagaa

SEQ ID NO: 255350 - DNA, 21 bp, Artificial sequence
  SiRNA target sequence
gccggaagatggattaagaaa

SEQ ID NO: 255351 - DNA, 21 bp, Artificial sequence
  SiRNA target sequence
ccggaagatggattaagaaaa

SEQ ID NO: 255352 - DNA, 21 bp, Artificial sequence
  SiRNA target sequence
cggaagatggattaagaaaaa

SEQ ID NO: 255353 - DNA, 21 bp, Artificial sequence
  SiRNA target sequence
ggaagatggattaagaaaaaa

SEQ ID NO: 255354 - DNA, 21 bp, Artificial sequence
  SiRNA target sequence
gaagatggattaagaaaaaat

SEQ ID NO: 255355 - DNA, 21 bp, Artificial sequence
  SiRNA target sequence
aagatggattaagaaaaaatt

SEQ ID NO: 255356 - DNA, 21 bp, Artificial sequence
  SiRNA target sequence
agatggattaagaaaaaattt

SEQ ID NO: 255357 - DNA, 21 bp, Artificial sequence
  SiRNA target sequence
gatggattaagaaaaaatttc

SEQ ID NO: 255358 - DNA, 21 bp, Artificial sequence
  SiRNA target sequence
atggattaagaaaaaatttcg

SEQ ID NO: 255359 - DNA, 21 bp, Artificial sequence
  SiRNA target sequence
tggattaagaaaaaatttcga

SEQ ID NO: 255360 - DNA, 21 bp, Artificial sequence
  SiRNA target sequence
ggattaagaaaaaatttcgag

SEQ ID NO: 255361 - DNA, 21 bp, Artificial sequence
  SiRNA target sequence
gattaagaaaaaatttcgaga

SEQ ID NO: 255362 - DNA, 21 bp, Artificial sequence
  SiRNA target sequence
attaagaaaaaatttcgagat

SEQ ID NO: 255363 - DNA, 21 bp, Artificial sequence
  SiRNA target sequence
ttaagaaaaaatttcgagatc

SEQ ID NO: 255364 - DNA, 21 bp, Artificial sequence
  SiRNA target sequence
taagaaaaaatttcgagatct

SEQ ID NO: 255365 - DNA, 21 bp, Artificial sequence
  SiRNA target sequence
aagaaaaaatttcgagatcta

SEQ ID NO: 255366 - DNA, 21 bp, Artificial sequence
  SiRNA target sequence
agaaaaaatttcgagatctat

SEQ ID NO: 255367 - DNA, 21 bp, Artificial sequence
  SiRNA target sequence
gaaaaaatttcgagatctatt

SEQ ID NO: 255368 - DNA, 21 bp, Artificial sequence
  SiRNA target sequence
aaaaaatttcgagatctattc

SEQ ID NO: 255369 - DNA, 21 bp, Artificial sequence
  SiRNA target sequence
aaaaatttcgagatctattca

SEQ ID NO: 255370 - DNA, 21 bp, Artificial sequence
  SiRNA target sequence
aaaatttcgagatctattcat

SEQ ID NO: 255371 - DNA, 21 bp, Artificial sequence
  SiRNA target sequence
aaatttcgagatctattcatg

SEQ ID NO: 255372 - DNA, 21 bp, Artificial sequence
  SiRNA target sequence
aatttcgagatctattcatgc

SEQ ID NO: 255373 - DNA, 21 bp, Artificial sequence
  SiRNA target sequence
atttcgagatctattcatgct

SEQ ID NO: 255374 - DNA, 21 bp, Artificial sequence
  SiRNA target sequence
tttcgagatctattcatgcta

SEQ ID NO: 255375 - DNA, 21 bp, Artificial sequence
  SiRNA target sequence
ttcgagatctattcatgctat

SEQ ID NO: 255376 - DNA, 21 bp, Artificial sequence
  SiRNA target sequence
tcgagatctattcatgctatg

SEQ ID NO: 255377 - DNA, 21 bp, Artificial sequence
  SiRNA target sequence
cgagatctattcatgctatgt

SEQ ID NO: 255378 - DNA, 21 bp, Artificial sequence
  SiRNA target sequence
gagatctattcatgctatgtt

SEQ ID NO: 255379 - DNA, 21 bp, Artificial sequence
  SiRNA target sequence
agatctattcatgctatgttc

SEQ ID NO: 255380 - DNA, 21 bp, Artificial sequence
  SiRNA target sequence
gatctattcatgctatgttcg

SEQ ID NO: 255381 - DNA, 21 bp, Artificial sequence
  SiRNA target sequence
atctattcatgctatgttcgg

SEQ ID NO: 255382 - DNA, 21 bp, Artificial sequence
  SiRNA target sequence
tctattcatgctatgttcggg

SEQ ID NO: 255383 - DNA, 21 bp, Artificial sequence
  SiRNA target sequence
ctattcatgctatgttcgggt

SEQ ID NO: 255384 - DNA, 21 bp, Artificial sequence
  SiRNA target sequence
tattcatgctatgttcgggta

SEQ ID NO: 255385 - DNA, 21 bp, Artificial sequence
  SiRNA target sequence
attcatgctatgttcgggtaa

SEQ ID NO: 255386 - DNA, 21 bp, Artificial sequence
  SiRNA target sequence
ttcatgctatgttcgggtaaa

SEQ ID NO: 255387 - DNA, 21 bp, Artificial sequence
  SiRNA target sequence
tcatgctatgttcgggtaaac

SEQ ID NO: 255388 - DNA, 21 bp, Artificial sequence
  SiRNA target sequence
catgctatgttcgggtaaaca

SEQ ID NO: 255389 - DNA, 21 bp, Artificial sequence
  SiRNA target sequence
atgctatgttcgggtaaacag

SEQ ID NO: 255390 - DNA, 21 bp, Artificial sequence
  SiRNA target sequence
tgctatgttcgggtaaacagc

SEQ ID NO: 255391 - DNA, 21 bp, Artificial sequence
  SiRNA target sequence
gctatgttcgggtaaacagcg

SEQ ID NO: 255392 - DNA, 21 bp, Artificial sequence
  SiRNA target sequence
ctatgttcgggtaaacagcgc

SEQ ID NO: 255393 - DNA, 21 bp, Artificial sequence
  SiRNA target sequence
tatgttcgggtaaacagcgca

SEQ ID NO: 255394 - DNA, 21 bp, Artificial sequence
  SiRNA target sequence
atgttcgggtaaacagcgcaa

SEQ ID NO: 255395 - DNA, 21 bp, Artificial sequence
  SiRNA target sequence
tgttcgggtaaacagcgcaac

SEQ ID NO: 255396 - DNA, 21 bp, Artificial sequence
  SiRNA target sequence
gttcgggtaaacagcgcaacc

SEQ ID NO: 255397 - DNA, 21 bp, Artificial sequence
  SiRNA target sequence
ttcgggtaaacagcgcaacca

SEQ ID NO: 255398 - DNA, 21 bp, Artificial sequence
  SiRNA target sequence
tcgggtaaacagcgcaaccag

SEQ ID NO: 255399 - DNA, 21 bp, Artificial sequence
  SiRNA target sequence
cgggtaaacagcgcaaccaga

SEQ ID NO: 255400 - DNA, 21 bp, Artificial sequence
  SiRNA target sequence
gggtaaacagcgcaaccagat

SEQ ID NO: 255401 - DNA, 21 bp, Artificial sequence
  SiRNA target sequence
ggtaaacagcgcaaccagatc

SEQ ID NO: 255402 - DNA, 21 bp, Artificial sequence
  SiRNA target sequence
gtaaacagcgcaaccagatct

SEQ ID NO: 255403 - DNA, 21 bp, Artificial sequence
  SiRNA target sequence
taaacagcgcaaccagatctc

SEQ ID NO: 255404 - DNA, 21 bp, Artificial sequence
  SiRNA target sequence
aaacagcgcaaccagatctcg

SEQ ID NO: 255405 - DNA, 21 bp, Artificial sequence
  SiRNA target sequence
aacagcgcaaccagatctcgg

SEQ ID NO: 255406 - DNA, 21 bp, Artificial sequence
  SiRNA target sequence
acagcgcaaccagatctcgga

SEQ ID NO: 255407 - DNA, 21 bp, Artificial sequence
  SiRNA target sequence
cagcgcaaccagatctcggat

SEQ ID NO: 255408 - DNA, 21 bp, Artificial sequence
  SiRNA target sequence
agcgcaaccagatctcggatc

SEQ ID NO: 255409 - DNA, 21 bp, Artificial sequence
  SiRNA target sequence
gcgcaaccagatctcggatca

SEQ ID NO: 255410 - DNA, 21 bp, Artificial sequence
  SiRNA target sequence
cgcaaccagatctcggatcaa

SEQ ID NO: 255411 - DNA, 21 bp, Artificial sequence
  SiRNA target sequence
gcaaccagatctcggatcaaa

SEQ ID NO: 255412 - DNA, 21 bp, Artificial sequence
  SiRNA target sequence
caaccagatctcggatcaaac

SEQ ID NO: 255413 - DNA, 21 bp, Artificial sequence
  SiRNA target sequence
aaccagatctcggatcaaacc

SEQ ID NO: 255414 - DNA, 21 bp, Artificial sequence
  SiRNA target sequence
accagatctcggatcaaacct

SEQ ID NO: 255415 - DNA, 21 bp, Artificial sequence
  SiRNA target sequence
ccagatctcggatcaaaccta

SEQ ID NO: 255416 - DNA, 21 bp, Artificial sequence
  SiRNA target sequence
cagatctcggatcaaacctac

SEQ ID NO: 255417 - DNA, 21 bp, Artificial sequence
  SiRNA target sequence
agatctcggatcaaacctacg

SEQ ID NO: 255418 - DNA, 21 bp, Artificial sequence
  SiRNA target sequence
gatctcggatcaaacctacgc

SEQ ID NO: 255419 - DNA, 21 bp, Artificial sequence
  SiRNA target sequence
atctcggatcaaacctacgcc

SEQ ID NO: 255420 - DNA, 21 bp, Artificial sequence
  SiRNA target sequence
tctcggatcaaacctacgccg

SEQ ID NO: 255421 - DNA, 21 bp, Artificial sequence
  SiRNA target sequence
ctcggatcaaacctacgccga

SEQ ID NO: 255422 - DNA, 21 bp, Artificial sequence
  SiRNA target sequence
tcggatcaaacctacgccgaa

SEQ ID NO: 255423 - DNA, 21 bp, Artificial sequence
  SiRNA target sequence
cggatcaaacctacgccgaag

SEQ ID NO: 255424 - DNA, 21 bp, Artificial sequence
  SiRNA target sequence
ggatcaaacctacgccgaaga

SEQ ID NO: 255425 - DNA, 21 bp, Artificial sequence
  SiRNA target sequence
gatcaaacctacgccgaagac

SEQ ID NO: 255426 - DNA, 21 bp, Artificial sequence
  SiRNA target sequence
atcaaacctacgccgaagacc

SEQ ID NO: 255427 - DNA, 21 bp, Artificial sequence
  SiRNA target sequence
tcaaacctacgccgaagacct

SEQ ID NO: 255428 - DNA, 21 bp, Artificial sequence
  SiRNA target sequence
caaacctacgccgaagacctg

SEQ ID NO: 255429 - DNA, 21 bp, Artificial sequence
  SiRNA target sequence
aaacctacgccgaagacctgg

SEQ ID NO: 255430 - DNA, 21 bp, Artificial sequence
  SiRNA target sequence
aacctacgccgaagacctgga

SEQ ID NO: 255431 - DNA, 21 bp, Artificial sequence
  SiRNA target sequence
acctacgccgaagacctggac

SEQ ID NO: 255432 - DNA, 21 bp, Artificial sequence
  SiRNA target sequence
cctacgccgaagacctggacc

SEQ ID NO: 255433 - DNA, 21 bp, Artificial sequence
  SiRNA target sequence
ctacgccgaagacctggacct

SEQ ID NO: 255434 - DNA, 21 bp, Artificial sequence
  SiRNA target sequence
tacgccgaagacctggacctc

SEQ ID NO: 255435 - DNA, 21 bp, Artificial sequence
  SiRNA target sequence
acgccgaagacctggacctcg

SEQ ID NO: 255436 - DNA, 21 bp, Artificial sequence
  SiRNA target sequence
cgccgaagacctggacctcga

SEQ ID NO: 255437 - DNA, 21 bp, Artificial sequence
  SiRNA target sequence
gccgaagacctggacctcgac

SEQ ID NO: 255438 - DNA, 21 bp, Artificial sequence
  SiRNA target sequence
ccgaagacctggacctcgaca

SEQ ID NO: 255439 - DNA, 21 bp, Artificial sequence
  SiRNA target sequence
cgaagacctggacctcgacac

SEQ ID NO: 255440 - DNA, 21 bp, Artificial sequence
  SiRNA target sequence
gaagacctggacctcgacaca

SEQ ID NO: 255441 - DNA, 21 bp, Artificial sequence
  SiRNA target sequence
aagacctggacctcgacacag

SEQ ID NO: 255442 - DNA, 21 bp, Artificial sequence
  SiRNA target sequence
agacctggacctcgacacagg

SEQ ID NO: 255443 - DNA, 21 bp, Artificial sequence
  SiRNA target sequence
gacctggacctcgacacaggg

SEQ ID NO: 255444 - DNA, 21 bp, Artificial sequence
  SiRNA target sequence
acctggacctcgacacagggg

SEQ ID NO: 255445 - DNA, 21 bp, Artificial sequence
  SiRNA target sequence
cctggacctcgacacaggggt

SEQ ID NO: 255446 - DNA, 21 bp, Artificial sequence
  SiRNA target sequence
ctggacctcgacacaggggtc

SEQ ID NO: 255447 - DNA, 21 bp, Artificial sequence
  SiRNA target sequence
tggacctcgacacaggggtca

SEQ ID NO: 255448 - DNA, 21 bp, Artificial sequence
  SiRNA target sequence
ggacctcgacacaggggtcat

SEQ ID NO: 255449 - DNA, 21 bp, Artificial sequence
  SiRNA target sequence
gacctcgacacaggggtcatt

SEQ ID NO: 255450 - DNA, 21 bp, Artificial sequence
  SiRNA target sequence
acctcgacacaggggtcatta

SEQ ID NO: 255451 - DNA, 21 bp, Artificial sequence
  SiRNA target sequence
cctcgacacaggggtcattat

SEQ ID NO: 255452 - DNA, 21 bp, Artificial sequence
  SiRNA target sequence
ctcgacacaggggtcattatt

SEQ ID NO: 255453 - DNA, 21 bp, Artificial sequence
  SiRNA target sequence
tcgacacaggggtcattatta

SEQ ID NO: 255454 - DNA, 21 bp, Artificial sequence
  SiRNA target sequence
cgacacaggggtcattattat

SEQ ID NO: 255455 - DNA, 21 bp, Artificial sequence
  SiRNA target sequence
gacacaggggtcattattatg

SEQ ID NO: 255456 - DNA, 21 bp, Artificial sequence
  SiRNA target sequence
acacaggggtcattattatgg

SEQ ID NO: 255457 - DNA, 21 bp, Artificial sequence
  SiRNA target sequence
cacaggggtcattattatgga

SEQ ID NO: 255458 - DNA, 21 bp, Artificial sequence
  SiRNA target sequence
acaggggtcattattatggat

SEQ ID NO: 255459 - DNA, 21 bp, Artificial sequence
  SiRNA target sequence
caggggtcattattatggatg

SEQ ID NO: 255460 - DNA, 21 bp, Artificial sequence
  SiRNA target sequence
aggggtcattattatggatgg

SEQ ID NO: 255461 - DNA, 21 bp, Artificial sequence
  SiRNA target sequence
ggggtcattattatggatgga

SEQ ID NO: 255462 - DNA, 21 bp, Artificial sequence
  SiRNA target sequence
gggtcattattatggatggac

SEQ ID NO: 255463 - DNA, 21 bp, Artificial sequence
  SiRNA target sequence
ggtcattattatggatggaca

SEQ ID NO: 255464 - DNA, 21 bp, Artificial sequence
  SiRNA target sequence
gtcattattatggatggacag

SEQ ID NO: 255465 - DNA, 21 bp, Artificial sequence
  SiRNA target sequence
tcattattatggatggacagg

SEQ ID NO: 255466 - DNA, 21 bp, Artificial sequence
  SiRNA target sequence
cattattatggatggacaggt

SEQ ID NO: 255467 - DNA, 21 bp, Artificial sequence
  SiRNA target sequence
attattatggatggacaggtt

SEQ ID NO: 255468 - DNA, 21 bp, Artificial sequence
  SiRNA target sequence
ttattatggatggacaggtta

SEQ ID NO: 255469 - DNA, 21 bp, Artificial sequence
  SiRNA target sequence
tattatggatggacaggttat

SEQ ID NO: 255470 - DNA, 21 bp, Artificial sequence
  SiRNA target sequence
attatggatggacaggttatt

SEQ ID NO: 255471 - DNA, 21 bp, Artificial sequence
  SiRNA target sequence
ttatggatggacaggttatta

SEQ ID NO: 255472 - DNA, 21 bp, Artificial sequence
  SiRNA target sequence
tatggatggacaggttattaa

SEQ ID NO: 255473 - DNA, 21 bp, Artificial sequence
  SiRNA target sequence
atggatggacaggttattaag

SEQ ID NO: 255474 - DNA, 21 bp, Artificial sequence
  SiRNA target sequence
tggatggacaggttattaaga

SEQ ID NO: 255475 - DNA, 21 bp, Artificial sequence
  SiRNA target sequence
ggatggacaggttattaagaa

SEQ ID NO: 255476 - DNA, 21 bp, Artificial sequence
  SiRNA target sequence
gatggacaggttattaagaag

SEQ ID NO: 255477 - DNA, 21 bp, Artificial sequence
  SiRNA target sequence
atggacaggttattaagaagg

SEQ ID NO: 255478 - DNA, 21 bp, Artificial sequence
  SiRNA target sequence
tggacaggttattaagaagga

SEQ ID NO: 255479 - DNA, 21 bp, Artificial sequence
  SiRNA target sequence
ggacaggttattaagaaggat

SEQ ID NO: 255480 - DNA, 21 bp, Artificial sequence
  SiRNA target sequence
gacaggttattaagaaggata

SEQ ID NO: 255481 - DNA, 21 bp, Artificial sequence
  SiRNA target sequence
acaggttattaagaaggatag

SEQ ID NO: 255482 - DNA, 21 bp, Artificial sequence
  SiRNA target sequence
caggttattaagaaggatagc

SEQ ID NO: 255483 - DNA, 21 bp, Artificial sequence
  SiRNA target sequence
aggttattaagaaggatagcc

SEQ ID NO: 255484 - DNA, 21 bp, Artificial sequence
  SiRNA target sequence
ggttattaagaaggatagccc

SEQ ID NO: 255485 - DNA, 21 bp, Artificial sequence
  SiRNA target sequence
gttattaagaaggatagcccc

SEQ ID NO: 255486 - DNA, 21 bp, Artificial sequence
  SiRNA target sequence
ttattaagaaggatagcccca

SEQ ID NO: 255487 - DNA, 21 bp, Artificial sequence
  SiRNA target sequence
tattaagaaggatagccccac

SEQ ID NO: 255488 - DNA, 21 bp, Artificial sequence
  SiRNA target sequence
attaagaaggatagccccacg

SEQ ID NO: 255489 - DNA, 21 bp, Artificial sequence
  SiRNA target sequence
ttaagaaggatagccccacgc

SEQ ID NO: 255490 - DNA, 21 bp, Artificial sequence
  SiRNA target sequence
taagaaggatagccccacgcc

SEQ ID NO: 255491 - DNA, 21 bp, Artificial sequence
  SiRNA target sequence
aagaaggatagccccacgccc

SEQ ID NO: 255492 - DNA, 21 bp, Artificial sequence
  SiRNA target sequence
agaaggatagccccacgcccg

SEQ ID NO: 255493 - DNA, 21 bp, Artificial sequence
  SiRNA target sequence
gaaggatagccccacgcccga

SEQ ID NO: 255494 - DNA, 21 bp, Artificial sequence
  SiRNA target sequence
aaggatagccccacgcccgaa

SEQ ID NO: 255495 - DNA, 21 bp, Artificial sequence
  SiRNA target sequence
aggatagccccacgcccgaac

SEQ ID NO: 255496 - DNA, 21 bp, Artificial sequence
  SiRNA target sequence
ggatagccccacgcccgaact

SEQ ID NO: 255497 - DNA, 21 bp, Artificial sequence
  SiRNA target sequence
gatagccccacgcccgaactc

SEQ ID NO: 255498 - DNA, 21 bp, Artificial sequence
  SiRNA target sequence
atagccccacgcccgaactca

SEQ ID NO: 255499 - DNA, 21 bp, Artificial sequence
  SiRNA target sequence
tagccccacgcccgaactcat

SEQ ID NO: 255500 - DNA, 21 bp, Artificial sequence
  SiRNA target sequence
agccccacgcccgaactcatc

SEQ ID NO: 255501 - DNA, 21 bp, Artificial sequence
  SiRNA target sequence
gccccacgcccgaactcatcg

SEQ ID NO: 255502 - DNA, 21 bp, Artificial sequence
  SiRNA target sequence
ccccacgcccgaactcatcga

SEQ ID NO: 255503 - DNA, 21 bp, Artificial sequence
  SiRNA target sequence
cccacgcccgaactcatcgat

SEQ ID NO: 255504 - DNA, 21 bp, Artificial sequence
  SiRNA target sequence
ccacgcccgaactcatcgatg

SEQ ID NO: 255505 - DNA, 21 bp, Artificial sequence
  SiRNA target sequence
cacgcccgaactcatcgatgg

SEQ ID NO: 255506 - DNA, 21 bp, Artificial sequence
  SiRNA target sequence
acgcccgaactcatcgatggg

SEQ ID NO: 255507 - DNA, 21 bp, Artificial sequence
  SiRNA target sequence
cgcccgaactcatcgatgggt

SEQ ID NO: 255508 - DNA, 21 bp, Artificial sequence
  SiRNA target sequence
gcccgaactcatcgatgggtt

SEQ ID NO: 255509 - DNA, 21 bp, Artificial sequence
  SiRNA target sequence
cccgaactcatcgatgggttg

SEQ ID NO: 255510 - DNA, 21 bp, Artificial sequence
  SiRNA target sequence
ccgaactcatcgatgggttgg

SEQ ID NO: 255511 - DNA, 21 bp, Artificial sequence
  SiRNA target sequence
cgaactcatcgatgggttgga

SEQ ID NO: 255512 - DNA, 21 bp, Artificial sequence
  SiRNA target sequence
gaactcatcgatgggttggat

SEQ ID NO: 255513 - DNA, 21 bp, Artificial sequence
  SiRNA target sequence
aactcatcgatgggttggatg

SEQ ID NO: 255514 - DNA, 21 bp, Artificial sequence
  SiRNA target sequence
actcatcgatgggttggatgt

SEQ ID NO: 255515 - DNA, 21 bp, Artificial sequence
  SiRNA target sequence
ctcatcgatgggttggatgtt

SEQ ID NO: 255516 - DNA, 21 bp, Artificial sequence
  SiRNA target sequence
tcatcgatgggttggatgttg

SEQ ID NO: 255517 - DNA, 21 bp, Artificial sequence
  SiRNA target sequence
catcgatgggttggatgttgg

SEQ ID NO: 255518 - DNA, 21 bp, Artificial sequence
  SiRNA target sequence
atcgatgggttggatgttggt

SEQ ID NO: 255519 - DNA, 21 bp, Artificial sequence
  SiRNA target sequence
tcgatgggttggatgttggtt

SEQ ID NO: 255520 - DNA, 21 bp, Artificial sequence
  SiRNA target sequence
cgatgggttggatgttggttt

SEQ ID NO: 255521 - DNA, 21 bp, Artificial sequence
  SiRNA target sequence
gatgggttggatgttggtttt

SEQ ID NO: 255522 - DNA, 21 bp, Artificial sequence
  SiRNA target sequence
atgggttggatgttggttttc

SEQ ID NO: 255523 - DNA, 21 bp, Artificial sequence
  SiRNA target sequence
tgggttggatgttggttttca

SEQ ID NO: 255524 - DNA, 21 bp, Artificial sequence
  SiRNA target sequence
gggttggatgttggttttcaa

SEQ ID NO: 255525 - DNA, 21 bp, Artificial sequence
  SiRNA target sequence
ggttggatgttggttttcaag

SEQ ID NO: 255526 - DNA, 21 bp, Artificial sequence
  SiRNA target sequence
gttggatgttggttttcaagc

SEQ ID NO: 255527 - DNA, 21 bp, Artificial sequence
  SiRNA target sequence
ttggatgttggttttcaagct

SEQ ID NO: 255528 - DNA, 21 bp, Artificial sequence
  SiRNA target sequence
tggatgttggttttcaagctg

SEQ ID NO: 255529 - DNA, 21 bp, Artificial sequence
  SiRNA target sequence
ggatgttggttttcaagctga

SEQ ID NO: 255530 - DNA, 21 bp, Artificial sequence
  SiRNA target sequence
gatgttggttttcaagctgat

SEQ ID NO: 255531 - DNA, 21 bp, Artificial sequence
  SiRNA target sequence
atgttggttttcaagctgata

SEQ ID NO: 255532 - DNA, 21 bp, Artificial sequence
  SiRNA target sequence
tgttggttttcaagctgataa

SEQ ID NO: 255533 - DNA, 21 bp, Artificial sequence
  SiRNA target sequence
gttggttttcaagctgataag

SEQ ID NO: 255534 - DNA, 21 bp, Artificial sequence
  SiRNA target sequence
ttggttttcaagctgataagc

SEQ ID NO: 255535 - DNA, 21 bp, Artificial sequence
  SiRNA target sequence
tggttttcaagctgataagca

SEQ ID NO: 255536 - DNA, 21 bp, Artificial sequence
  SiRNA target sequence
ggttttcaagctgataagcaa

SEQ ID NO: 255537 - DNA, 21 bp, Artificial sequence
  SiRNA target sequence
gttttcaagctgataagcaac

SEQ ID NO: 255538 - DNA, 21 bp, Artificial sequence
  SiRNA target sequence
ttttcaagctgataagcaaca

SEQ ID NO: 255539 - DNA, 21 bp, Artificial sequence
  SiRNA target sequence
tttcaagctgataagcaacag

SEQ ID NO: 255540 - DNA, 21 bp, Artificial sequence
  SiRNA target sequence
ttcaagctgataagcaacagg

SEQ ID NO: 255541 - DNA, 21 bp, Artificial sequence
  SiRNA target sequence
tcaagctgataagcaacaggc

SEQ ID NO: 255542 - DNA, 21 bp, Artificial sequence
  SiRNA target sequence
caagctgataagcaacaggcg

SEQ ID NO: 255543 - DNA, 21 bp, Artificial sequence
  SiRNA target sequence
aagctgataagcaacaggcgc

SEQ ID NO: 255544 - DNA, 21 bp, Artificial sequence
  SiRNA target sequence
agctgataagcaacaggcgca

SEQ ID NO: 255545 - DNA, 21 bp, Artificial sequence
  SiRNA target sequence
gctgataagcaacaggcgcag

SEQ ID NO: 255546 - DNA, 21 bp, Artificial sequence
  SiRNA target sequence
ctgataagcaacaggcgcagg

SEQ ID NO: 255547 - DNA, 21 bp, Artificial sequence
  SiRNA target sequence
tgataagcaacaggcgcaggt

SEQ ID NO: 255548 - DNA, 21 bp, Artificial sequence
  SiRNA target sequence
gataagcaacaggcgcaggtg

SEQ ID NO: 255549 - DNA, 21 bp, Artificial sequence
  SiRNA target sequence
ataagcaacaggcgcaggtga

SEQ ID NO: 255550 - DNA, 21 bp, Artificial sequence
  SiRNA target sequence
taagcaacaggcgcaggtgat

SEQ ID NO: 255551 - DNA, 21 bp, Artificial sequence
  SiRNA target sequence
aagcaacaggcgcaggtgatt

SEQ ID NO: 255552 - DNA, 21 bp, Artificial sequence
  SiRNA target sequence
agcaacaggcgcaggtgattg

SEQ ID NO: 255553 - DNA, 21 bp, Artificial sequence
  SiRNA target sequence
gcaacaggcgcaggtgattgt

SEQ ID NO: 255554 - DNA, 21 bp, Artificial sequence
  SiRNA target sequence
caacaggcgcaggtgattgta

SEQ ID NO: 255555 - DNA, 21 bp, Artificial sequence
  SiRNA target sequence
aacaggcgcaggtgattgtaa

SEQ ID NO: 255556 - DNA, 21 bp, Artificial sequence
  SiRNA target sequence
acaggcgcaggtgattgtaat

SEQ ID NO: 255557 - DNA, 21 bp, Artificial sequence
  SiRNA target sequence
caggcgcaggtgattgtaatg

SEQ ID NO: 255558 - DNA, 21 bp, Artificial sequence
  SiRNA target sequence
aggcgcaggtgattgtaatgc

SEQ ID NO: 255559 - DNA, 21 bp, Artificial sequence
  SiRNA target sequence
ggcgcaggtgattgtaatgca

SEQ ID NO: 255560 - DNA, 21 bp, Artificial sequence
  SiRNA target sequence
gcgcaggtgattgtaatgcaa

SEQ ID NO: 255561 - DNA, 21 bp, Artificial sequence
  SiRNA target sequence
cgcaggtgattgtaatgcaaa

SEQ ID NO: 255562 - DNA, 21 bp, Artificial sequence
  SiRNA target sequence
gcaggtgattgtaatgcaaaa

SEQ ID NO: 255563 - DNA, 21 bp, Artificial sequence
  SiRNA target sequence
caggtgattgtaatgcaaaag

SEQ ID NO: 255564 - DNA, 21 bp, Artificial sequence
  SiRNA target sequence
aggtgattgtaatgcaaaagc

SEQ ID NO: 255565 - DNA, 21 bp, Artificial sequence
  SiRNA target sequence
ggtgattgtaatgcaaaagct

SEQ ID NO: 255566 - DNA, 21 bp, Artificial sequence
  SiRNA target sequence
gtgattgtaatgcaaaagctt

SEQ ID NO: 255567 - DNA, 21 bp, Artificial sequence
  SiRNA target sequence
tgattgtaatgcaaaagctta

SEQ ID NO: 255568 - DNA, 21 bp, Artificial sequence
  SiRNA target sequence
gattgtaatgcaaaagcttaa

SEQ ID NO: 255569 - DNA, 21 bp, Artificial sequence
  SiRNA target sequence
attgtaatgcaaaagcttaaa

SEQ ID NO: 255570 - DNA, 21 bp, Artificial sequence
  SiRNA target sequence
ttgtaatgcaaaagcttaaaa

SEQ ID NO: 255571 - DNA, 21 bp, Artificial sequence
  SiRNA target sequence
tgtaatgcaaaagcttaaaaa

SEQ ID NO: 255572 - DNA, 21 bp, Artificial sequence
  SiRNA target sequence
gtaatgcaaaagcttaaaaac

SEQ ID NO: 255573 - DNA, 21 bp, Artificial sequence
  SiRNA target sequence
taatgcaaaagcttaaaaaca

SEQ ID NO: 255574 - DNA, 21 bp, Artificial sequence
  SiRNA target sequence
aatgcaaaagcttaaaaacaa

SEQ ID NO: 255575 - DNA, 21 bp, Artificial sequence
  SiRNA target sequence
atgcaaaagcttaaaaacaat

SEQ ID NO: 255576 - DNA, 21 bp, Artificial sequence
  SiRNA target sequence
tgcaaaagcttaaaaacaatt

SEQ ID NO: 255577 - DNA, 21 bp, Artificial sequence
  SiRNA target sequence
gcaaaagcttaaaaacaattc

SEQ ID NO: 255578 - DNA, 21 bp, Artificial sequence
  SiRNA target sequence
caaaagcttaaaaacaattcc

SEQ ID NO: 255579 - DNA, 21 bp, Artificial sequence
  SiRNA target sequence
aaaagcttaaaaacaattccc

SEQ ID NO: 255580 - DNA, 21 bp, Artificial sequence
  SiRNA target sequence
aaagcttaaaaacaattcccg

SEQ ID NO: 255581 - DNA, 21 bp, Artificial sequence
  SiRNA target sequence
aagcttaaaaacaattcccga

SEQ ID NO: 255582 - DNA, 21 bp, Artificial sequence
  SiRNA target sequence
agcttaaaaacaattcccgac

SEQ ID NO: 255583 - DNA, 21 bp, Artificial sequence
  SiRNA target sequence
gcttaaaaacaattcccgacc

SEQ ID NO: 255584 - DNA, 21 bp, Artificial sequence
  SiRNA target sequence
cttaaaaacaattcccgacct

SEQ ID NO: 255585 - DNA, 21 bp, Artificial sequence
  SiRNA target sequence
ttaaaaacaattcccgaccta

SEQ ID NO: 255586 - DNA, 21 bp, Artificial sequence
  SiRNA target sequence
taaaaacaattcccgacctat

SEQ ID NO: 255587 - DNA, 21 bp, Artificial sequence
  SiRNA target sequence
aaaaacaattcccgacctatc

SEQ ID NO: 255588 - DNA, 21 bp, Artificial sequence
  SiRNA target sequence
aaaacaattcccgacctatca

SEQ ID NO: 255589 - DNA, 21 bp, Artificial sequence
  SiRNA target sequence
aaacaattcccgacctatcat

SEQ ID NO: 255590 - DNA, 21 bp, Artificial sequence
  SiRNA target sequence
aacaattcccgacctatcatt

SEQ ID NO: 255591 - DNA, 21 bp, Artificial sequence
  SiRNA target sequence
acaattcccgacctatcattg

SEQ ID NO: 255592 - DNA, 21 bp, Artificial sequence
  SiRNA target sequence
caattcccgacctatcattgg

SEQ ID NO: 255593 - DNA, 21 bp, Artificial sequence
  SiRNA target sequence
aattcccgacctatcattggc

SEQ ID NO: 255594 - DNA, 21 bp, Artificial sequence
  SiRNA target sequence
attcccgacctatcattggcg

SEQ ID NO: 255595 - DNA, 21 bp, Artificial sequence
  SiRNA target sequence
ttcccgacctatcattggcga

SEQ ID NO: 255596 - DNA, 21 bp, Artificial sequence
  SiRNA target sequence
tcccgacctatcattggcgac

SEQ ID NO: 255597 - DNA, 21 bp, Artificial sequence
  SiRNA target sequence
cccgacctatcattggcgact

SEQ ID NO: 255598 - DNA, 21 bp, Artificial sequence
  SiRNA target sequence
ccgacctatcattggcgactc

SEQ ID NO: 255599 - DNA, 21 bp, Artificial sequence
  SiRNA target sequence
cgacctatcattggcgactca

SEQ ID NO: 255600 - DNA, 21 bp, Artificial sequence
  SiRNA target sequence
gacctatcattggcgactcaa

SEQ ID NO: 255601 - DNA, 21 bp, Artificial sequence
  SiRNA target sequence
acctatcattggcgactcaaa

SEQ ID NO: 255602 - DNA, 21 bp, Artificial sequence
  SiRNA target sequence
cctatcattggcgactcaaag

SEQ ID NO: 255603 - DNA, 21 bp, Artificial sequence
  SiRNA target sequence
ctatcattggcgactcaaagg

SEQ ID NO: 255604 - DNA, 21 bp, Artificial sequence
  SiRNA target sequence
tatcattggcgactcaaagga

SEQ ID NO: 255605 - DNA, 21 bp, Artificial sequence
  SiRNA target sequence
atcattggcgactcaaaggaa

SEQ ID NO: 255606 - DNA, 21 bp, Artificial sequence
  SiRNA target sequence
tcattggcgactcaaaggaat

SEQ ID NO: 255607 - DNA, 21 bp, Artificial sequence
  SiRNA target sequence
cattggcgactcaaaggaatt

SEQ ID NO: 255608 - DNA, 21 bp, Artificial sequence
  SiRNA target sequence
attggcgactcaaaggaattt

SEQ ID NO: 255609 - DNA, 21 bp, Artificial sequence
  SiRNA target sequence
ttggcgactcaaaggaattta

SEQ ID NO: 255610 - DNA, 21 bp, Artificial sequence
  SiRNA target sequence
tggcgactcaaaggaatttag

SEQ ID NO: 255611 - DNA, 21 bp, Artificial sequence
  SiRNA target sequence
ggcgactcaaaggaatttagc

SEQ ID NO: 255612 - DNA, 21 bp, Artificial sequence
  SiRNA target sequence
gcgactcaaaggaatttagca

SEQ ID NO: 255613 - DNA, 21 bp, Artificial sequence
  SiRNA target sequence
cgactcaaaggaatttagcaa

SEQ ID NO: 255614 - DNA, 21 bp, Artificial sequence
  SiRNA target sequence
gactcaaaggaatttagcaac

SEQ ID NO: 255615 - DNA, 21 bp, Artificial sequence
  SiRNA target sequence
actcaaaggaatttagcaaca

SEQ ID NO: 255616 - DNA, 21 bp, Artificial sequence
  SiRNA target sequence
ctcaaaggaatttagcaacaa

SEQ ID NO: 255617 - DNA, 21 bp, Artificial sequence
  SiRNA target sequence
tcaaaggaatttagcaacaaa

SEQ ID NO: 255618 - DNA, 21 bp, Artificial sequence
  SiRNA target sequence
caaaggaatttagcaacaaag

SEQ ID NO: 255619 - DNA, 21 bp, Artificial sequence
  SiRNA target sequence
aaaggaatttagcaacaaagt

SEQ ID NO: 255620 - DNA, 21 bp, Artificial sequence
  SiRNA target sequence
aaggaatttagcaacaaagtt

SEQ ID NO: 255621 - DNA, 21 bp, Artificial sequence
  SiRNA target sequence
aggaatttagcaacaaagttc

SEQ ID NO: 255622 - DNA, 21 bp, Artificial sequence
  SiRNA target sequence
ggaatttagcaacaaagttca

SEQ ID NO: 255623 - DNA, 21 bp, Artificial sequence
  SiRNA target sequence
gaatttagcaacaaagttcat

SEQ ID NO: 255624 - DNA, 21 bp, Artificial sequence
  SiRNA target sequence
aatttagcaacaaagttcatc

SEQ ID NO: 255625 - DNA, 21 bp, Artificial sequence
  SiRNA target sequence
atttagcaacaaagttcatcc

SEQ ID NO: 255626 - DNA, 21 bp, Artificial sequence
  SiRNA target sequence
tttagcaacaaagttcatcca

SEQ ID NO: 255627 - DNA, 21 bp, Artificial sequence
  SiRNA target sequence
ttagcaacaaagttcatccag

SEQ ID NO: 255628 - DNA, 21 bp, Artificial sequence
  SiRNA target sequence
tagcaacaaagttcatccagg

SEQ ID NO: 255629 - DNA, 21 bp, Artificial sequence
  SiRNA target sequence
agcaacaaagttcatccaggc

SEQ ID NO: 255630 - DNA, 21 bp, Artificial sequence
  SiRNA target sequence
gcaacaaagttcatccaggcc

SEQ ID NO: 255631 - DNA, 21 bp, Artificial sequence
  SiRNA target sequence
caacaaagttcatccaggccc

SEQ ID NO: 255632 - DNA, 21 bp, Artificial sequence
  SiRNA target sequence
aacaaagttcatccaggcccc

SEQ ID NO: 255633 - DNA, 21 bp, Artificial sequence
  SiRNA target sequence
acaaagttcatccaggccccg

SEQ ID NO: 255634 - DNA, 21 bp, Artificial sequence
  SiRNA target sequence
caaagttcatccaggccccga

SEQ ID NO: 255635 - DNA, 21 bp, Artificial sequence
  SiRNA target sequence
aaagttcatccaggccccgac

SEQ ID NO: 255636 - DNA, 21 bp, Artificial sequence
  SiRNA target sequence
aagttcatccaggccccgact

SEQ ID NO: 255637 - DNA, 21 bp, Artificial sequence
  SiRNA target sequence
agttcatccaggccccgactt

SEQ ID NO: 255638 - DNA, 21 bp, Artificial sequence
  SiRNA target sequence
gttcatccaggccccgacttt

SEQ ID NO: 255639 - DNA, 21 bp, Artificial sequence
  SiRNA target sequence
ttcatccaggccccgactttt

SEQ ID NO: 255640 - DNA, 21 bp, Artificial sequence
  SiRNA target sequence
tcatccaggccccgacttttg

SEQ ID NO: 255641 - DNA, 21 bp, Artificial sequence
  SiRNA target sequence
catccaggccccgacttttgc

SEQ ID NO: 255642 - DNA, 21 bp, Artificial sequence
  SiRNA target sequence
atccaggccccgacttttgcc

SEQ ID NO: 255643 - DNA, 21 bp, Artificial sequence
  SiRNA target sequence
tccaggccccgacttttgcct

SEQ ID NO: 255644 - DNA, 21 bp, Artificial sequence
  SiRNA target sequence
ccaggccccgacttttgcctg

SEQ ID NO: 255645 - DNA, 21 bp, Artificial sequence
  SiRNA target sequence
caggccccgacttttgcctgg

SEQ ID NO: 255646 - DNA, 21 bp, Artificial sequence
  SiRNA target sequence
aggccccgacttttgcctggt

SEQ ID NO: 255647 - DNA, 21 bp, Artificial sequence
  SiRNA target sequence
ggccccgacttttgcctggta

SEQ ID NO: 255648 - DNA, 21 bp, Artificial sequence
  SiRNA target sequence
gccccgacttttgcctggtaa

SEQ ID NO: 255649 - DNA, 21 bp, Artificial sequence
  SiRNA target sequence
ccccgacttttgcctggtaaa

SEQ ID NO: 255650 - DNA, 21 bp, Artificial sequence
  SiRNA target sequence
cccgacttttgcctggtaaag

SEQ ID NO: 255651 - DNA, 21 bp, Artificial sequence
  SiRNA target sequence
ccgacttttgcctggtaaagc

SEQ ID NO: 255652 - DNA, 21 bp, Artificial sequence
  SiRNA target sequence
cgacttttgcctggtaaagcc

SEQ ID NO: 255653 - DNA, 21 bp, Artificial sequence
  SiRNA target sequence
gacttttgcctggtaaagccg

SEQ ID NO: 255654 - DNA, 21 bp, Artificial sequence
  SiRNA target sequence
acttttgcctggtaaagccga

SEQ ID NO: 255655 - DNA, 21 bp, Artificial sequence
  SiRNA target sequence
cttttgcctggtaaagccgaa

SEQ ID NO: 255656 - DNA, 21 bp, Artificial sequence
  SiRNA target sequence
ttttgcctggtaaagccgaac

SEQ ID NO: 255657 - DNA, 21 bp, Artificial sequence
  SiRNA target sequence
tttgcctggtaaagccgaacg

SEQ ID NO: 255658 - DNA, 21 bp, Artificial sequence
  SiRNA target sequence
ttgcctggtaaagccgaacga

SEQ ID NO: 255659 - DNA, 21 bp, Artificial sequence
  SiRNA target sequence
tgcctggtaaagccgaacgac

SEQ ID NO: 255660 - DNA, 21 bp, Artificial sequence
  SiRNA target sequence
gcctggtaaagccgaacgaca

SEQ ID NO: 255661 - DNA, 21 bp, Artificial sequence
  SiRNA target sequence
cctggtaaagccgaacgacaa

SEQ ID NO: 255662 - DNA, 21 bp, Artificial sequence
  SiRNA target sequence
ctggtaaagccgaacgacaac

SEQ ID NO: 255663 - DNA, 21 bp, Artificial sequence
  SiRNA target sequence
tggtaaagccgaacgacaacg

SEQ ID NO: 255664 - DNA, 21 bp, Artificial sequence
  SiRNA target sequence
ggtaaagccgaacgacaacgg

SEQ ID NO: 255665 - DNA, 21 bp, Artificial sequence
  SiRNA target sequence
gtaaagccgaacgacaacggc

SEQ ID NO: 255666 - DNA, 21 bp, Artificial sequence
  SiRNA target sequence
taaagccgaacgacaacggcg

SEQ ID NO: 255667 - DNA, 21 bp, Artificial sequence
  SiRNA target sequence
aaagccgaacgacaacggcga

SEQ ID NO: 255668 - DNA, 21 bp, Artificial sequence
  SiRNA target sequence
aagccgaacgacaacggcgaa

SEQ ID NO: 255669 - DNA, 21 bp, Artificial sequence
  SiRNA target sequence
agccgaacgacaacggcgaag

SEQ ID NO: 255670 - DNA, 21 bp, Artificial sequence
  SiRNA target sequence
gccgaacgacaacggcgaagg

SEQ ID NO: 255671 - DNA, 21 bp, Artificial sequence
  SiRNA target sequence
ccgaacgacaacggcgaaggc

SEQ ID NO: 255672 - DNA, 21 bp, Artificial sequence
  SiRNA target sequence
cgaacgacaacggcgaaggcc

SEQ ID NO: 255673 - DNA, 21 bp, Artificial sequence
  SiRNA target sequence
gaacgacaacggcgaaggcct

SEQ ID NO: 255674 - DNA, 21 bp, Artificial sequence
  SiRNA target sequence
aacgacaacggcgaaggcctc

SEQ ID NO: 255675 - DNA, 21 bp, Artificial sequence
  SiRNA target sequence
acgacaacggcgaaggcctcg

SEQ ID NO: 255676 - DNA, 21 bp, Artificial sequence
  SiRNA target sequence
cgacaacggcgaaggcctcgt

SEQ ID NO: 255677 - DNA, 21 bp, Artificial sequence
  SiRNA target sequence
gacaacggcgaaggcctcgtg

SEQ ID NO: 255678 - DNA, 21 bp, Artificial sequence
  SiRNA target sequence
acaacggcgaaggcctcgtgc

SEQ ID NO: 255679 - DNA, 21 bp, Artificial sequence
  SiRNA target sequence
caacggcgaaggcctcgtgca

SEQ ID NO: 255680 - DNA, 21 bp, Artificial sequence
  SiRNA target sequence
aacggcgaaggcctcgtgcaa

SEQ ID NO: 255681 - DNA, 21 bp, Artificial sequence
  SiRNA target sequence
acggcgaaggcctcgtgcaag

SEQ ID NO: 255682 - DNA, 21 bp, Artificial sequence
  SiRNA target sequence
cggcgaaggcctcgtgcaaga

SEQ ID NO: 255683 - DNA, 21 bp, Artificial sequence
  SiRNA target sequence
ggcgaaggcctcgtgcaagac

SEQ ID NO: 255684 - DNA, 21 bp, Artificial sequence
  SiRNA target sequence
gcgaaggcctcgtgcaagaca

SEQ ID NO: 255685 - DNA, 21 bp, Artificial sequence
  SiRNA target sequence
cgaaggcctcgtgcaagacac

SEQ ID NO: 255686 - DNA, 21 bp, Artificial sequence
  SiRNA target sequence
gaaggcctcgtgcaagacacc

SEQ ID NO: 255687 - DNA, 21 bp, Artificial sequence
  SiRNA target sequence
aaggcctcgtgcaagacaccg

SEQ ID NO: 255688 - DNA, 21 bp, Artificial sequence
  SiRNA target sequence
aggcctcgtgcaagacaccga

SEQ ID NO: 255689 - DNA, 21 bp, Artificial sequence
  SiRNA target sequence
ggcctcgtgcaagacaccgag

SEQ ID NO: 255690 - DNA, 21 bp, Artificial sequence
  SiRNA target sequence
gcctcgtgcaagacaccgagc

SEQ ID NO: 255691 - DNA, 21 bp, Artificial sequence
  SiRNA target sequence
cctcgtgcaagacaccgagct

SEQ ID NO: 255692 - DNA, 21 bp, Artificial sequence
  SiRNA target sequence
ctcgtgcaagacaccgagctt

SEQ ID NO: 255693 - DNA, 21 bp, Artificial sequence
  SiRNA target sequence
tcgtgcaagacaccgagcttg

SEQ ID NO: 255694 - DNA, 21 bp, Artificial sequence
  SiRNA target sequence
cgtgcaagacaccgagcttgg

SEQ ID NO: 255695 - DNA, 21 bp, Artificial sequence
  SiRNA target sequence
gtgcaagacaccgagcttggg

SEQ ID NO: 255696 - DNA, 21 bp, Artificial sequence
  SiRNA target sequence
tgcaagacaccgagcttgggg

SEQ ID NO: 255697 - DNA, 21 bp, Artificial sequence
  SiRNA target sequence
gcaagacaccgagcttggggc

SEQ ID NO: 255698 - DNA, 21 bp, Artificial sequence
  SiRNA target sequence
caagacaccgagcttggggcc

SEQ ID NO: 255699 - DNA, 21 bp, Artificial sequence
  SiRNA target sequence
aagacaccgagcttggggcct

SEQ ID NO: 255700 - DNA, 21 bp, Artificial sequence
  SiRNA target sequence
agacaccgagcttggggcctc

SEQ ID NO: 255701 - DNA, 21 bp, Artificial sequence
  SiRNA target sequence
gacaccgagcttggggcctcc

SEQ ID NO: 255702 - DNA, 21 bp, Artificial sequence
  SiRNA target sequence
acaccgagcttggggcctcca

SEQ ID NO: 255703 - DNA, 21 bp, Artificial sequence
  SiRNA target sequence
caccgagcttggggcctccac

SEQ ID NO: 255704 - DNA, 21 bp, Artificial sequence
  SiRNA target sequence
accgagcttggggcctccacg

SEQ ID NO: 255705 - DNA, 21 bp, Artificial sequence
  SiRNA target sequence
ccgagcttggggcctccacgc

SEQ ID NO: 255706 - DNA, 21 bp, Artificial sequence
  SiRNA target sequence
cgagcttggggcctccacgcc

SEQ ID NO: 255707 - DNA, 21 bp, Artificial sequence
  SiRNA target sequence
gagcttggggcctccacgccg

SEQ ID NO: 255708 - DNA, 21 bp, Artificial sequence
  SiRNA target sequence
agcttggggcctccacgccgc

SEQ ID NO: 255709 - DNA, 21 bp, Artificial sequence
  SiRNA target sequence
gcttggggcctccacgccgct

SEQ ID NO: 255710 - DNA, 21 bp, Artificial sequence
  SiRNA target sequence
cttggggcctccacgccgctc

SEQ ID NO: 255711 - DNA, 21 bp, Artificial sequence
  SiRNA target sequence
ttggggcctccacgccgctca

SEQ ID NO: 255712 - DNA, 21 bp, Artificial sequence
  SiRNA target sequence
tggggcctccacgccgctcag

SEQ ID NO: 255713 - DNA, 21 bp, Artificial sequence
  SiRNA target sequence
ggggcctccacgccgctcagc

SEQ ID NO: 255714 - DNA, 21 bp, Artificial sequence
  SiRNA target sequence
gggcctccacgccgctcagct

SEQ ID NO: 255715 - DNA, 21 bp, Artificial sequence
  SiRNA target sequence
ggcctccacgccgctcagctc

SEQ ID NO: 255716 - DNA, 21 bp, Artificial sequence
  SiRNA target sequence
gcctccacgccgctcagctcg

SEQ ID NO: 255717 - DNA, 21 bp, Artificial sequence
  SiRNA target sequence
cctccacgccgctcagctcgc

SEQ ID NO: 255718 - DNA, 21 bp, Artificial sequence
  SiRNA target sequence
ctccacgccgctcagctcgcc

SEQ ID NO: 255719 - DNA, 21 bp, Artificial sequence
  SiRNA target sequence
tccacgccgctcagctcgcct

SEQ ID NO: 255720 - DNA, 21 bp, Artificial sequence
  SiRNA target sequence
ccacgccgctcagctcgcctt

SEQ ID NO: 255721 - DNA, 21 bp, Artificial sequence
  SiRNA target sequence
cacgccgctcagctcgccttc

SEQ ID NO: 255722 - DNA, 21 bp, Artificial sequence
  SiRNA target sequence
acgccgctcagctcgccttcc

SEQ ID NO: 255723 - DNA, 21 bp, Artificial sequence
  SiRNA target sequence
cgccgctcagctcgccttcct

SEQ ID NO: 255724 - DNA, 21 bp, Artificial sequence
  SiRNA target sequence
gccgctcagctcgccttcctg

SEQ ID NO: 255725 - DNA, 21 bp, Artificial sequence
  SiRNA target sequence
ccgctcagctcgccttcctgt

SEQ ID NO: 255726 - DNA, 21 bp, Artificial sequence
  SiRNA target sequence
cgctcagctcgccttcctgta

SEQ ID NO: 255727 - DNA, 21 bp, Artificial sequence
  SiRNA target sequence
gctcagctcgccttcctgtat

SEQ ID NO: 255728 - DNA, 21 bp, Artificial sequence
  SiRNA target sequence
ctcagctcgccttcctgtata

SEQ ID NO: 255729 - DNA, 21 bp, Artificial sequence
  SiRNA target sequence
tcagctcgccttcctgtatag

SEQ ID NO: 255730 - DNA, 21 bp, Artificial sequence
  SiRNA target sequence
cagctcgccttcctgtatagt

SEQ ID NO: 255731 - DNA, 21 bp, Artificial sequence
  SiRNA target sequence
agctcgccttcctgtatagtt

SEQ ID NO: 255732 - DNA, 21 bp, Artificial sequence
  SiRNA target sequence
gctcgccttcctgtatagttg

SEQ ID NO: 255733 - DNA, 21 bp, Artificial sequence
  SiRNA target sequence
ctcgccttcctgtatagttga

SEQ ID NO: 255734 - DNA, 21 bp, Artificial sequence
  SiRNA target sequence
tcgccttcctgtatagttgaa

SEQ ID NO: 255735 - DNA, 21 bp, Artificial sequence
  SiRNA target sequence
cgccttcctgtatagttgaac

SEQ ID NO: 255736 - DNA, 21 bp, Artificial sequence
  SiRNA target sequence
gccttcctgtatagttgaaca

SEQ ID NO: 255737 - DNA, 21 bp, Artificial sequence
  SiRNA target sequence
ccttcctgtatagttgaacag

SEQ ID NO: 255738 - DNA, 21 bp, Artificial sequence
  SiRNA target sequence
cttcctgtatagttgaacagc

SEQ ID NO: 255739 - DNA, 21 bp, Artificial sequence
  SiRNA target sequence
ttcctgtatagttgaacagcc

SEQ ID NO: 255740 - DNA, 21 bp, Artificial sequence
  SiRNA target sequence
tcctgtatagttgaacagcct

SEQ ID NO: 255741 - DNA, 21 bp, Artificial sequence
  SiRNA target sequence
cctgtatagttgaacagcctc

SEQ ID NO: 255742 - DNA, 21 bp, Artificial sequence
  SiRNA target sequence
ctgtatagttgaacagcctct

SEQ ID NO: 255743 - DNA, 21 bp, Artificial sequence
  SiRNA target sequence
tgtatagttgaacagcctctg

SEQ ID NO: 255744 - DNA, 21 bp, Artificial sequence
  SiRNA target sequence
gtatagttgaacagcctctgt

SEQ ID NO: 255745 - DNA, 21 bp, Artificial sequence
  SiRNA target sequence
tatagttgaacagcctctgtc

SEQ ID NO: 255746 - DNA, 21 bp, Artificial sequence
  SiRNA target sequence
atagttgaacagcctctgtct

SEQ ID NO: 255747 - DNA, 21 bp, Artificial sequence
  SiRNA target sequence
tagttgaacagcctctgtctc

SEQ ID NO: 255748 - DNA, 21 bp, Artificial sequence
  SiRNA target sequence
agttgaacagcctctgtctca

SEQ ID NO: 255749 - DNA, 21 bp, Artificial sequence
  SiRNA target sequence
gttgaacagcctctgtctcac

SEQ ID NO: 255750 - DNA, 21 bp, Artificial sequence
  SiRNA target sequence
ttgaacagcctctgtctcacg

SEQ ID NO: 255751 - DNA, 21 bp, Artificial sequence
  SiRNA target sequence
tgaacagcctctgtctcacga

SEQ ID NO: 255752 - DNA, 21 bp, Artificial sequence
  SiRNA target sequence
gaacagcctctgtctcacgac

SEQ ID NO: 255753 - DNA, 21 bp, Artificial sequence
  SiRNA target sequence
aacagcctctgtctcacgaca

SEQ ID NO: 255754 - DNA, 21 bp, Artificial sequence
  SiRNA target sequence
acagcctctgtctcacgacag

SEQ ID NO: 255755 - DNA, 21 bp, Artificial sequence
  SiRNA target sequence
cagcctctgtctcacgacagt

SEQ ID NO: 255756 - DNA, 21 bp, Artificial sequence
  SiRNA target sequence
agcctctgtctcacgacagtg

SEQ ID NO: 255757 - DNA, 21 bp, Artificial sequence
  SiRNA target sequence
gcctctgtctcacgacagtgt

SEQ ID NO: 255758 - DNA, 21 bp, Artificial sequence
  SiRNA target sequence
cctctgtctcacgacagtgtg

SEQ ID NO: 255759 - DNA, 21 bp, Artificial sequence
  SiRNA target sequence
ctctgtctcacgacagtgtgg

SEQ ID NO: 255760 - DNA, 21 bp, Artificial sequence
  SiRNA target sequence
tctgtctcacgacagtgtggg

SEQ ID NO: 255761 - DNA, 21 bp, Artificial sequence
  SiRNA target sequence
ctgtctcacgacagtgtgggc

SEQ ID NO: 255762 - DNA, 21 bp, Artificial sequence
  SiRNA target sequence
tgtctcacgacagtgtgggcc

SEQ ID NO: 255763 - DNA, 21 bp, Artificial sequence
  SiRNA target sequence
gtctcacgacagtgtgggcct

SEQ ID NO: 255764 - DNA, 21 bp, Artificial sequence
  SiRNA target sequence
tctcacgacagtgtgggcctg

SEQ ID NO: 255765 - DNA, 21 bp, Artificial sequence
  SiRNA target sequence
ctcacgacagtgtgggcctgc

SEQ ID NO: 255766 - DNA, 21 bp, Artificial sequence
  SiRNA target sequence
tcacgacagtgtgggcctgcc

SEQ ID NO: 255767 - DNA, 21 bp, Artificial sequence
  SiRNA target sequence
cacgacagtgtgggcctgcca

SEQ ID NO: 255768 - DNA, 21 bp, Artificial sequence
  SiRNA target sequence
acgacagtgtgggcctgccac

SEQ ID NO: 255769 - DNA, 21 bp, Artificial sequence
  SiRNA target sequence
cgacagtgtgggcctgccacc

SEQ ID NO: 255770 - DNA, 22 bp, Artificial sequence
  SiRNA target sequence
ggccaatcccgattccggcgac

SEQ ID NO: 255771 - DNA, 22 bp, Artificial sequence
  SiRNA target sequence
gccaatcccgattccggcgaca

SEQ ID NO: 255772 - DNA, 22 bp, Artificial sequence
  SiRNA target sequence
ccaatcccgattccggcgacac

SEQ ID NO: 255773 - DNA, 22 bp, Artificial sequence
  SiRNA target sequence
caatcccgattccggcgacaca

SEQ ID NO: 255774 - DNA, 22 bp, Artificial sequence
  SiRNA target sequence
aatcccgattccggcgacacaa

SEQ ID NO: 255775 - DNA, 22 bp, Artificial sequence
  SiRNA target sequence
atcccgattccggcgacacaaa

SEQ ID NO: 255776 - DNA, 22 bp, Artificial sequence
  SiRNA target sequence
tcccgattccggcgacacaaag

SEQ ID NO: 255777 - DNA, 22 bp, Artificial sequence
  SiRNA target sequence
cccgattccggcgacacaaaga

SEQ ID NO: 255778 - DNA, 22 bp, Artificial sequence
  SiRNA target sequence
ccgattccggcgacacaaagaa

SEQ ID NO: 255779 - DNA, 22 bp, Artificial sequence
  SiRNA target sequence
cgattccggcgacacaaagaaa

SEQ ID NO: 255780 - DNA, 22 bp, Artificial sequence
  SiRNA target sequence
gattccggcgacacaaagaaat

SEQ ID NO: 255781 - DNA, 22 bp, Artificial sequence
  SiRNA target sequence
attccggcgacacaaagaaatt

SEQ ID NO: 255782 - DNA, 22 bp, Artificial sequence
  SiRNA target sequence
ttccggcgacacaaagaaatta

SEQ ID NO: 255783 - DNA, 22 bp, Artificial sequence
  SiRNA target sequence
tccggcgacacaaagaaattac

SEQ ID NO: 255784 - DNA, 22 bp, Artificial sequence
  SiRNA target sequence
ccggcgacacaaagaaattaca

SEQ ID NO: 255785 - DNA, 22 bp, Artificial sequence
  SiRNA target sequence
cggcgacacaaagaaattacaa

SEQ ID NO: 255786 - DNA, 22 bp, Artificial sequence
  SiRNA target sequence
ggcgacacaaagaaattacaag

SEQ ID NO: 255787 - DNA, 22 bp, Artificial sequence
  SiRNA target sequence
gcgacacaaagaaattacaaga

SEQ ID NO: 255788 - DNA, 22 bp, Artificial sequence
  SiRNA target sequence
cgacacaaagaaattacaagaa

SEQ ID NO: 255789 - DNA, 22 bp, Artificial sequence
  SiRNA target sequence
gacacaaagaaattacaagaag

SEQ ID NO: 255790 - DNA, 22 bp, Artificial sequence
  SiRNA target sequence
acacaaagaaattacaagaagc

SEQ ID NO: 255791 - DNA, 22 bp, Artificial sequence
  SiRNA target sequence
cacaaagaaattacaagaagct

SEQ ID NO: 255792 - DNA, 22 bp, Artificial sequence
  SiRNA target sequence
acaaagaaattacaagaagcta

SEQ ID NO: 255793 - DNA, 22 bp, Artificial sequence
  SiRNA target sequence
caaagaaattacaagaagctat

SEQ ID NO: 255794 - DNA, 22 bp, Artificial sequence
  SiRNA target sequence
aaagaaattacaagaagctata

SEQ ID NO: 255795 - DNA, 22 bp, Artificial sequence
  SiRNA target sequence
aagaaattacaagaagctatag

SEQ ID NO: 255796 - DNA, 22 bp, Artificial sequence
  SiRNA target sequence
agaaattacaagaagctataga

SEQ ID NO: 255797 - DNA, 22 bp, Artificial sequence
  SiRNA target sequence
gaaattacaagaagctatagac

SEQ ID NO: 255798 - DNA, 22 bp, Artificial sequence
  SiRNA target sequence
aaattacaagaagctatagacc

SEQ ID NO: 255799 - DNA, 22 bp, Artificial sequence
  SiRNA target sequence
aattacaagaagctatagaccg

SEQ ID NO: 255800 - DNA, 22 bp, Artificial sequence
  SiRNA target sequence
attacaagaagctatagaccgt

SEQ ID NO: 255801 - DNA, 22 bp, Artificial sequence
  SiRNA target sequence
ttacaagaagctatagaccgtt

SEQ ID NO: 255802 - DNA, 22 bp, Artificial sequence
  SiRNA target sequence
tacaagaagctatagaccgttt

SEQ ID NO: 255803 - DNA, 22 bp, Artificial sequence
  SiRNA target sequence
acaagaagctatagaccgtttt

SEQ ID NO: 255804 - DNA, 22 bp, Artificial sequence
  SiRNA target sequence
caagaagctatagaccgttttc

SEQ ID NO: 255805 - DNA, 22 bp, Artificial sequence
  SiRNA target sequence
aagaagctatagaccgttttca

SEQ ID NO: 255806 - DNA, 22 bp, Artificial sequence
  SiRNA target sequence
agaagctatagaccgttttcat

SEQ ID NO: 255807 - DNA, 22 bp, Artificial sequence
  SiRNA target sequence
gaagctatagaccgttttcatc

SEQ ID NO: 255808 - DNA, 22 bp, Artificial sequence
  SiRNA target sequence
aagctatagaccgttttcatcg

SEQ ID NO: 255809 - DNA, 22 bp, Artificial sequence
  SiRNA target sequence
agctatagaccgttttcatcga

SEQ ID NO: 255810 - DNA, 22 bp, Artificial sequence
  SiRNA target sequence
gctatagaccgttttcatcgag

SEQ ID NO: 255811 - DNA, 22 bp, Artificial sequence
  SiRNA target sequence
ctatagaccgttttcatcgagc

SEQ ID NO: 255812 - DNA, 22 bp, Artificial sequence
  SiRNA target sequence
tatagaccgttttcatcgagcc

SEQ ID NO: 255813 - DNA, 22 bp, Artificial sequence
  SiRNA target sequence
atagaccgttttcatcgagccg

SEQ ID NO: 255814 - DNA, 22 bp, Artificial sequence
  SiRNA target sequence
tagaccgttttcatcgagccgg

SEQ ID NO: 255815 - DNA, 22 bp, Artificial sequence
  SiRNA target sequence
agaccgttttcatcgagccgga

SEQ ID NO: 255816 - DNA, 22 bp, Artificial sequence
  SiRNA target sequence
gaccgttttcatcgagccggaa

SEQ ID NO: 255817 - DNA, 22 bp, Artificial sequence
  SiRNA target sequence
accgttttcatcgagccggaag

SEQ ID NO: 255818 - DNA, 22 bp, Artificial sequence
  SiRNA target sequence
ccgttttcatcgagccggaaga

SEQ ID NO: 255819 - DNA, 22 bp, Artificial sequence
  SiRNA target sequence
cgttttcatcgagccggaagat

SEQ ID NO: 255820 - DNA, 22 bp, Artificial sequence
  SiRNA target sequence
gttttcatcgagccggaagatg

SEQ ID NO: 255821 - DNA, 22 bp, Artificial sequence
  SiRNA target sequence
ttttcatcgagccggaagatgg

SEQ ID NO: 255822 - DNA, 22 bp, Artificial sequence
  SiRNA target sequence
tttcatcgagccggaagatgga

SEQ ID NO: 255823 - DNA, 22 bp, Artificial sequence
  SiRNA target sequence
ttcatcgagccggaagatggat

SEQ ID NO: 255824 - DNA, 22 bp, Artificial sequence
  SiRNA target sequence
tcatcgagccggaagatggatt

SEQ ID NO: 255825 - DNA, 22 bp, Artificial sequence
  SiRNA target sequence
catcgagccggaagatggatta

SEQ ID NO: 255826 - DNA, 22 bp, Artificial sequence
  SiRNA target sequence
atcgagccggaagatggattaa

SEQ ID NO: 255827 - DNA, 22 bp, Artificial sequence
  SiRNA target sequence
tcgagccggaagatggattaag

SEQ ID NO: 255828 - DNA, 22 bp, Artificial sequence
  SiRNA target sequence
cgagccggaagatggattaaga

SEQ ID NO: 255829 - DNA, 22 bp, Artificial sequence
  SiRNA target sequence
gagccggaagatggattaagaa

SEQ ID NO: 255830 - DNA, 22 bp, Artificial sequence
  SiRNA target sequence
agccggaagatggattaagaaa

SEQ ID NO: 255831 - DNA, 22 bp, Artificial sequence
  SiRNA target sequence
gccggaagatggattaagaaaa

SEQ ID NO: 255832 - DNA, 22 bp, Artificial sequence
  SiRNA target sequence
ccggaagatggattaagaaaaa

SEQ ID NO: 255833 - DNA, 22 bp, Artificial sequence
  SiRNA target sequence
cggaagatggattaagaaaaaa

SEQ ID NO: 255834 - DNA, 22 bp, Artificial sequence
  SiRNA target sequence
ggaagatggattaagaaaaaat

SEQ ID NO: 255835 - DNA, 22 bp, Artificial sequence
  SiRNA target sequence
gaagatggattaagaaaaaatt

SEQ ID NO: 255836 - DNA, 22 bp, Artificial sequence
  SiRNA target sequence
aagatggattaagaaaaaattt

SEQ ID NO: 255837 - DNA, 22 bp, Artificial sequence
  SiRNA target sequence
agatggattaagaaaaaatttc

SEQ ID NO: 255838 - DNA, 22 bp, Artificial sequence
  SiRNA target sequence
gatggattaagaaaaaatttcg

SEQ ID NO: 255839 - DNA, 22 bp, Artificial sequence
  SiRNA target sequence
atggattaagaaaaaatttcga

SEQ ID NO: 255840 - DNA, 22 bp, Artificial sequence
  SiRNA target sequence
tggattaagaaaaaatttcgag

SEQ ID NO: 255841 - DNA, 22 bp, Artificial sequence
  SiRNA target sequence
ggattaagaaaaaatttcgaga

SEQ ID NO: 255842 - DNA, 22 bp, Artificial sequence
  SiRNA target sequence
gattaagaaaaaatttcgagat

SEQ ID NO: 255843 - DNA, 22 bp, Artificial sequence
  SiRNA target sequence
attaagaaaaaatttcgagatc

SEQ ID NO: 255844 - DNA, 22 bp, Artificial sequence
  SiRNA target sequence
ttaagaaaaaatttcgagatct

SEQ ID NO: 255845 - DNA, 22 bp, Artificial sequence
  SiRNA target sequence
taagaaaaaatttcgagatcta

SEQ ID NO: 255846 - DNA, 22 bp, Artificial sequence
  SiRNA target sequence
aagaaaaaatttcgagatctat

SEQ ID NO: 255847 - DNA, 22 bp, Artificial sequence
  SiRNA target sequence
agaaaaaatttcgagatctatt

SEQ ID NO: 255848 - DNA, 22 bp, Artificial sequence
  SiRNA target sequence
gaaaaaatttcgagatctattc

SEQ ID NO: 255849 - DNA, 22 bp, Artificial sequence
  SiRNA target sequence
aaaaaatttcgagatctattca

SEQ ID NO: 255850 - DNA, 22 bp, Artificial sequence
  SiRNA target sequence
aaaaatttcgagatctattcat

SEQ ID NO: 255851 - DNA, 22 bp, Artificial sequence
  SiRNA target sequence
aaaatttcgagatctattcatg

SEQ ID NO: 255852 - DNA, 22 bp, Artificial sequence
  SiRNA target sequence
aaatttcgagatctattcatgc

SEQ ID NO: 255853 - DNA, 22 bp, Artificial sequence
  SiRNA target sequence
aatttcgagatctattcatgct

SEQ ID NO: 255854 - DNA, 22 bp, Artificial sequence
  SiRNA target sequence
atttcgagatctattcatgcta

SEQ ID NO: 255855 - DNA, 22 bp, Artificial sequence
  SiRNA target sequence
tttcgagatctattcatgctat

SEQ ID NO: 255856 - DNA, 22 bp, Artificial sequence
  SiRNA target sequence
ttcgagatctattcatgctatg

SEQ ID NO: 255857 - DNA, 22 bp, Artificial sequence
  SiRNA target sequence
tcgagatctattcatgctatgt

SEQ ID NO: 255858 - DNA, 22 bp, Artificial sequence
  SiRNA target sequence
cgagatctattcatgctatgtt

SEQ ID NO: 255859 - DNA, 22 bp, Artificial sequence
  SiRNA target sequence
gagatctattcatgctatgttc

SEQ ID NO: 255860 - DNA, 22 bp, Artificial sequence
  SiRNA target sequence
agatctattcatgctatgttcg

SEQ ID NO: 255861 - DNA, 22 bp, Artificial sequence
  SiRNA target sequence
gatctattcatgctatgttcgg

SEQ ID NO: 255862 - DNA, 22 bp, Artificial sequence
  SiRNA target sequence
atctattcatgctatgttcggg

SEQ ID NO: 255863 - DNA, 22 bp, Artificial sequence
  SiRNA target sequence
tctattcatgctatgttcgggt

SEQ ID NO: 255864 - DNA, 22 bp, Artificial sequence
  SiRNA target sequence
ctattcatgctatgttcgggta

SEQ ID NO: 255865 - DNA, 22 bp, Artificial sequence
  SiRNA target sequence
tattcatgctatgttcgggtaa

SEQ ID NO: 255866 - DNA, 22 bp, Artificial sequence
  SiRNA target sequence
attcatgctatgttcgggtaaa

SEQ ID NO: 255867 - DNA, 22 bp, Artificial sequence
  SiRNA target sequence
ttcatgctatgttcgggtaaac

SEQ ID NO: 255868 - DNA, 22 bp, Artificial sequence
  SiRNA target sequence
tcatgctatgttcgggtaaaca

SEQ ID NO: 255869 - DNA, 22 bp, Artificial sequence
  SiRNA target sequence
catgctatgttcgggtaaacag

SEQ ID NO: 255870 - DNA, 22 bp, Artificial sequence
  SiRNA target sequence
atgctatgttcgggtaaacagc

SEQ ID NO: 255871 - DNA, 22 bp, Artificial sequence
  SiRNA target sequence
tgctatgttcgggtaaacagcg

SEQ ID NO: 255872 - DNA, 22 bp, Artificial sequence
  SiRNA target sequence
gctatgttcgggtaaacagcgc

SEQ ID NO: 255873 - DNA, 22 bp, Artificial sequence
  SiRNA target sequence
ctatgttcgggtaaacagcgca

SEQ ID NO: 255874 - DNA, 22 bp, Artificial sequence
  SiRNA target sequence
tatgttcgggtaaacagcgcaa

SEQ ID NO: 255875 - DNA, 22 bp, Artificial sequence
  SiRNA target sequence
atgttcgggtaaacagcgcaac

SEQ ID NO: 255876 - DNA, 22 bp, Artificial sequence
  SiRNA target sequence
tgttcgggtaaacagcgcaacc

SEQ ID NO: 255877 - DNA, 22 bp, Artificial sequence
  SiRNA target sequence
gttcgggtaaacagcgcaacca

SEQ ID NO: 255878 - DNA, 22 bp, Artificial sequence
  SiRNA target sequence
ttcgggtaaacagcgcaaccag

SEQ ID NO: 255879 - DNA, 22 bp, Artificial sequence
  SiRNA target sequence
tcgggtaaacagcgcaaccaga

SEQ ID NO: 255880 - DNA, 22 bp, Artificial sequence
  SiRNA target sequence
cgggtaaacagcgcaaccagat

SEQ ID NO: 255881 - DNA, 22 bp, Artificial sequence
  SiRNA target sequence
gggtaaacagcgcaaccagatc

SEQ ID NO: 255882 - DNA, 22 bp, Artificial sequence
  SiRNA target sequence
ggtaaacagcgcaaccagatct

SEQ ID NO: 255883 - DNA, 22 bp, Artificial sequence
  SiRNA target sequence
gtaaacagcgcaaccagatctc

SEQ ID NO: 255884 - DNA, 22 bp, Artificial sequence
  SiRNA target sequence
taaacagcgcaaccagatctcg

SEQ ID NO: 255885 - DNA, 22 bp, Artificial sequence
  SiRNA target sequence
aaacagcgcaaccagatctcgg

SEQ ID NO: 255886 - DNA, 22 bp, Artificial sequence
  SiRNA target sequence
aacagcgcaaccagatctcgga

SEQ ID NO: 255887 - DNA, 22 bp, Artificial sequence
  SiRNA target sequence
acagcgcaaccagatctcggat

SEQ ID NO: 255888 - DNA, 22 bp, Artificial sequence
  SiRNA target sequence
cagcgcaaccagatctcggatc

SEQ ID NO: 255889 - DNA, 22 bp, Artificial sequence
  SiRNA target sequence
agcgcaaccagatctcggatca

SEQ ID NO: 255890 - DNA, 22 bp, Artificial sequence
  SiRNA target sequence
gcgcaaccagatctcggatcaa

SEQ ID NO: 255891 - DNA, 22 bp, Artificial sequence
  SiRNA target sequence
cgcaaccagatctcggatcaaa

SEQ ID NO: 255892 - DNA, 22 bp, Artificial sequence
  SiRNA target sequence
gcaaccagatctcggatcaaac

SEQ ID NO: 255893 - DNA, 22 bp, Artificial sequence
  SiRNA target sequence
caaccagatctcggatcaaacc

SEQ ID NO: 255894 - DNA, 22 bp, Artificial sequence
  SiRNA target sequence
aaccagatctcggatcaaacct

SEQ ID NO: 255895 - DNA, 22 bp, Artificial sequence
  SiRNA target sequence
accagatctcggatcaaaccta

SEQ ID NO: 255896 - DNA, 22 bp, Artificial sequence
  SiRNA target sequence
ccagatctcggatcaaacctac

SEQ ID NO: 255897 - DNA, 22 bp, Artificial sequence
  SiRNA target sequence
cagatctcggatcaaacctacg

SEQ ID NO: 255898 - DNA, 22 bp, Artificial sequence
  SiRNA target sequence
agatctcggatcaaacctacgc

SEQ ID NO: 255899 - DNA, 22 bp, Artificial sequence
  SiRNA target sequence
gatctcggatcaaacctacgcc

SEQ ID NO: 255900 - DNA, 22 bp, Artificial sequence
  SiRNA target sequence
atctcggatcaaacctacgccg

SEQ ID NO: 255901 - DNA, 22 bp, Artificial sequence
  SiRNA target sequence
tctcggatcaaacctacgccga

SEQ ID NO: 255902 - DNA, 22 bp, Artificial sequence
  SiRNA target sequence
ctcggatcaaacctacgccgaa

SEQ ID NO: 255903 - DNA, 22 bp, Artificial sequence
  SiRNA target sequence
tcggatcaaacctacgccgaag

SEQ ID NO: 255904 - DNA, 22 bp, Artificial sequence
  SiRNA target sequence
cggatcaaacctacgccgaaga

SEQ ID NO: 255905 - DNA, 22 bp, Artificial sequence
  SiRNA target sequence
ggatcaaacctacgccgaagac

SEQ ID NO: 255906 - DNA, 22 bp, Artificial sequence
  SiRNA target sequence
gatcaaacctacgccgaagacc

SEQ ID NO: 255907 - DNA, 22 bp, Artificial sequence
  SiRNA target sequence
atcaaacctacgccgaagacct

SEQ ID NO: 255908 - DNA, 22 bp, Artificial sequence
  SiRNA target sequence
tcaaacctacgccgaagacctg

SEQ ID NO: 255909 - DNA, 22 bp, Artificial sequence
  SiRNA target sequence
caaacctacgccgaagacctgg

SEQ ID NO: 255910 - DNA, 22 bp, Artificial sequence
  SiRNA target sequence
aaacctacgccgaagacctgga

SEQ ID NO: 255911 - DNA, 22 bp, Artificial sequence
  SiRNA target sequence
aacctacgccgaagacctggac

SEQ ID NO: 255912 - DNA, 22 bp, Artificial sequence
  SiRNA target sequence
acctacgccgaagacctggacc

SEQ ID NO: 255913 - DNA, 22 bp, Artificial sequence
  SiRNA target sequence
cctacgccgaagacctggacct

SEQ ID NO: 255914 - DNA, 22 bp, Artificial sequence
  SiRNA target sequence
ctacgccgaagacctggacctc

SEQ ID NO: 255915 - DNA, 22 bp, Artificial sequence
  SiRNA target sequence
tacgccgaagacctggacctcg

SEQ ID NO: 255916 - DNA, 22 bp, Artificial sequence
  SiRNA target sequence
acgccgaagacctggacctcga

SEQ ID NO: 255917 - DNA, 22 bp, Artificial sequence
  SiRNA target sequence
cgccgaagacctggacctcgac

SEQ ID NO: 255918 - DNA, 22 bp, Artificial sequence
  SiRNA target sequence
gccgaagacctggacctcgaca

SEQ ID NO: 255919 - DNA, 22 bp, Artificial sequence
  SiRNA target sequence
ccgaagacctggacctcgacac

SEQ ID NO: 255920 - DNA, 22 bp, Artificial sequence
  SiRNA target sequence
cgaagacctggacctcgacaca

SEQ ID NO: 255921 - DNA, 22 bp, Artificial sequence
  SiRNA target sequence
gaagacctggacctcgacacag

SEQ ID NO: 255922 - DNA, 22 bp, Artificial sequence
  SiRNA target sequence
aagacctggacctcgacacagg

SEQ ID NO: 255923 - DNA, 22 bp, Artificial sequence
  SiRNA target sequence
agacctggacctcgacacaggg

SEQ ID NO: 255924 - DNA, 22 bp, Artificial sequence
  SiRNA target sequence
gacctggacctcgacacagggg

SEQ ID NO: 255925 - DNA, 22 bp, Artificial sequence
  SiRNA target sequence
acctggacctcgacacaggggt

SEQ ID NO: 255926 - DNA, 22 bp, Artificial sequence
  SiRNA target sequence
cctggacctcgacacaggggtc

SEQ ID NO: 255927 - DNA, 22 bp, Artificial sequence
  SiRNA target sequence
ctggacctcgacacaggggtca

SEQ ID NO: 255928 - DNA, 22 bp, Artificial sequence
  SiRNA target sequence
tggacctcgacacaggggtcat

SEQ ID NO: 255929 - DNA, 22 bp, Artificial sequence
  SiRNA target sequence
ggacctcgacacaggggtcatt

SEQ ID NO: 255930 - DNA, 22 bp, Artificial sequence
  SiRNA target sequence
gacctcgacacaggggtcatta

SEQ ID NO: 255931 - DNA, 22 bp, Artificial sequence
  SiRNA target sequence
acctcgacacaggggtcattat

SEQ ID NO: 255932 - DNA, 22 bp, Artificial sequence
  SiRNA target sequence
cctcgacacaggggtcattatt

SEQ ID NO: 255933 - DNA, 22 bp, Artificial sequence
  SiRNA target sequence
ctcgacacaggggtcattatta

SEQ ID NO: 255934 - DNA, 22 bp, Artificial sequence
  SiRNA target sequence
tcgacacaggggtcattattat

SEQ ID NO: 255935 - DNA, 22 bp, Artificial sequence
  SiRNA target sequence
cgacacaggggtcattattatg

SEQ ID NO: 255936 - DNA, 22 bp, Artificial sequence
  SiRNA target sequence
gacacaggggtcattattatgg

SEQ ID NO: 255937 - DNA, 22 bp, Artificial sequence
  SiRNA target sequence
acacaggggtcattattatgga

SEQ ID NO: 255938 - DNA, 22 bp, Artificial sequence
  SiRNA target sequence
cacaggggtcattattatggat

SEQ ID NO: 255939 - DNA, 22 bp, Artificial sequence
  SiRNA target sequence
acaggggtcattattatggatg

SEQ ID NO: 255940 - DNA, 22 bp, Artificial sequence
  SiRNA target sequence
caggggtcattattatggatgg

SEQ ID NO: 255941 - DNA, 22 bp, Artificial sequence
  SiRNA target sequence
aggggtcattattatggatgga

SEQ ID NO: 255942 - DNA, 22 bp, Artificial sequence
  SiRNA target sequence
ggggtcattattatggatggac

SEQ ID NO: 255943 - DNA, 22 bp, Artificial sequence
  SiRNA target sequence
gggtcattattatggatggaca

SEQ ID NO: 255944 - DNA, 22 bp, Artificial sequence
  SiRNA target sequence
ggtcattattatggatggacag

SEQ ID NO: 255945 - DNA, 22 bp, Artificial sequence
  SiRNA target sequence
gtcattattatggatggacagg

SEQ ID NO: 255946 - DNA, 22 bp, Artificial sequence
  SiRNA target sequence
tcattattatggatggacaggt

SEQ ID NO: 255947 - DNA, 22 bp, Artificial sequence
  SiRNA target sequence
cattattatggatggacaggtt

SEQ ID NO: 255948 - DNA, 22 bp, Artificial sequence
  SiRNA target sequence
attattatggatggacaggtta

SEQ ID NO: 255949 - DNA, 22 bp, Artificial sequence
  SiRNA target sequence
ttattatggatggacaggttat

SEQ ID NO: 255950 - DNA, 22 bp, Artificial sequence
  SiRNA target sequence
tattatggatggacaggttatt

SEQ ID NO: 255951 - DNA, 22 bp, Artificial sequence
  SiRNA target sequence
attatggatggacaggttatta

SEQ ID NO: 255952 - DNA, 22 bp, Artificial sequence
  SiRNA target sequence
ttatggatggacaggttattaa

SEQ ID NO: 255953 - DNA, 22 bp, Artificial sequence
  SiRNA target sequence
tatggatggacaggttattaag

SEQ ID NO: 255954 - DNA, 22 bp, Artificial sequence
  SiRNA target sequence
atggatggacaggttattaaga

SEQ ID NO: 255955 - DNA, 22 bp, Artificial sequence
  SiRNA target sequence
tggatggacaggttattaagaa

SEQ ID NO: 255956 - DNA, 22 bp, Artificial sequence
  SiRNA target sequence
ggatggacaggttattaagaag

SEQ ID NO: 255957 - DNA, 22 bp, Artificial sequence
  SiRNA target sequence
gatggacaggttattaagaagg

SEQ ID NO: 255958 - DNA, 22 bp, Artificial sequence
  SiRNA target sequence
atggacaggttattaagaagga

SEQ ID NO: 255959 - DNA, 22 bp, Artificial sequence
  SiRNA target sequence
tggacaggttattaagaaggat

SEQ ID NO: 255960 - DNA, 22 bp, Artificial sequence
  SiRNA target sequence
ggacaggttattaagaaggata

SEQ ID NO: 255961 - DNA, 22 bp, Artificial sequence
  SiRNA target sequence
gacaggttattaagaaggatag

SEQ ID NO: 255962 - DNA, 22 bp, Artificial sequence
  SiRNA target sequence
acaggttattaagaaggatagc

SEQ ID NO: 255963 - DNA, 22 bp, Artificial sequence
  SiRNA target sequence
caggttattaagaaggatagcc

SEQ ID NO: 255964 - DNA, 22 bp, Artificial sequence
  SiRNA target sequence
aggttattaagaaggatagccc

SEQ ID NO: 255965 - DNA, 22 bp, Artificial sequence
  SiRNA target sequence
ggttattaagaaggatagcccc

SEQ ID NO: 255966 - DNA, 22 bp, Artificial sequence
  SiRNA target sequence
gttattaagaaggatagcccca

SEQ ID NO: 255967 - DNA, 22 bp, Artificial sequence
  SiRNA target sequence
ttattaagaaggatagccccac

SEQ ID NO: 255968 - DNA, 22 bp, Artificial sequence
  SiRNA target sequence
tattaagaaggatagccccacg

SEQ ID NO: 255969 - DNA, 22 bp, Artificial sequence
  SiRNA target sequence
attaagaaggatagccccacgc

SEQ ID NO: 255970 - DNA, 22 bp, Artificial sequence
  SiRNA target sequence
ttaagaaggatagccccacgcc

SEQ ID NO: 255971 - DNA, 22 bp, Artificial sequence
  SiRNA target sequence
taagaaggatagccccacgccc

SEQ ID NO: 255972 - DNA, 22 bp, Artificial sequence
  SiRNA target sequence
aagaaggatagccccacgcccg

SEQ ID NO: 255973 - DNA, 22 bp, Artificial sequence
  SiRNA target sequence
agaaggatagccccacgcccga

SEQ ID NO: 255974 - DNA, 22 bp, Artificial sequence
  SiRNA target sequence
gaaggatagccccacgcccgaa

SEQ ID NO: 255975 - DNA, 22 bp, Artificial sequence
  SiRNA target sequence
aaggatagccccacgcccgaac

SEQ ID NO: 255976 - DNA, 22 bp, Artificial sequence
  SiRNA target sequence
aggatagccccacgcccgaact

SEQ ID NO: 255977 - DNA, 22 bp, Artificial sequence
  SiRNA target sequence
ggatagccccacgcccgaactc

SEQ ID NO: 255978 - DNA, 22 bp, Artificial sequence
  SiRNA target sequence
gatagccccacgcccgaactca

SEQ ID NO: 255979 - DNA, 22 bp, Artificial sequence
  SiRNA target sequence
atagccccacgcccgaactcat

SEQ ID NO: 255980 - DNA, 22 bp, Artificial sequence
  SiRNA target sequence
tagccccacgcccgaactcatc

SEQ ID NO: 255981 - DNA, 22 bp, Artificial sequence
  SiRNA target sequence
agccccacgcccgaactcatcg

SEQ ID NO: 255982 - DNA, 22 bp, Artificial sequence
  SiRNA target sequence
gccccacgcccgaactcatcga

SEQ ID NO: 255983 - DNA, 22 bp, Artificial sequence
  SiRNA target sequence
ccccacgcccgaactcatcgat

SEQ ID NO: 255984 - DNA, 22 bp, Artificial sequence
  SiRNA target sequence
cccacgcccgaactcatcgatg

SEQ ID NO: 255985 - DNA, 22 bp, Artificial sequence
  SiRNA target sequence
ccacgcccgaactcatcgatgg

SEQ ID NO: 255986 - DNA, 22 bp, Artificial sequence
  SiRNA target sequence
cacgcccgaactcatcgatggg

SEQ ID NO: 255987 - DNA, 22 bp, Artificial sequence
  SiRNA target sequence
acgcccgaactcatcgatgggt

SEQ ID NO: 255988 - DNA, 22 bp, Artificial sequence
  SiRNA target sequence
cgcccgaactcatcgatgggtt

SEQ ID NO: 255989 - DNA, 22 bp, Artificial sequence
  SiRNA target sequence
gcccgaactcatcgatgggttg

SEQ ID NO: 255990 - DNA, 22 bp, Artificial sequence
  SiRNA target sequence
cccgaactcatcgatgggttgg

SEQ ID NO: 255991 - DNA, 22 bp, Artificial sequence
  SiRNA target sequence
ccgaactcatcgatgggttgga

SEQ ID NO: 255992 - DNA, 22 bp, Artificial sequence
  SiRNA target sequence
cgaactcatcgatgggttggat

SEQ ID NO: 255993 - DNA, 22 bp, Artificial sequence
  SiRNA target sequence
gaactcatcgatgggttggatg

SEQ ID NO: 255994 - DNA, 22 bp, Artificial sequence
  SiRNA target sequence
aactcatcgatgggttggatgt

SEQ ID NO: 255995 - DNA, 22 bp, Artificial sequence
  SiRNA target sequence
actcatcgatgggttggatgtt

SEQ ID NO: 255996 - DNA, 22 bp, Artificial sequence
  SiRNA target sequence
ctcatcgatgggttggatgttg

SEQ ID NO: 255997 - DNA, 22 bp, Artificial sequence
  SiRNA target sequence
tcatcgatgggttggatgttgg

SEQ ID NO: 255998 - DNA, 22 bp, Artificial sequence
  SiRNA target sequence
catcgatgggttggatgttggt

SEQ ID NO: 255999 - DNA, 22 bp, Artificial sequence
  SiRNA target sequence
atcgatgggttggatgttggtt

SEQ ID NO: 256000 - DNA, 22 bp, Artificial sequence
  SiRNA target sequence
tcgatgggttggatgttggttt

SEQ ID NO: 256001 - DNA, 22 bp, Artificial sequence
  SiRNA target sequence
cgatgggttggatgttggtttt

SEQ ID NO: 256002 - DNA, 22 bp, Artificial sequence
  SiRNA target sequence
gatgggttggatgttggttttc

SEQ ID NO: 256003 - DNA, 22 bp, Artificial sequence
  SiRNA target sequence
atgggttggatgttggttttca

SEQ ID NO: 256004 - DNA, 22 bp, Artificial sequence
  SiRNA target sequence
tgggttggatgttggttttcaa

SEQ ID NO: 256005 - DNA, 22 bp, Artificial sequence
  SiRNA target sequence
gggttggatgttggttttcaag

SEQ ID NO: 256006 - DNA, 22 bp, Artificial sequence
  SiRNA target sequence
ggttggatgttggttttcaagc

SEQ ID NO: 256007 - DNA, 22 bp, Artificial sequence
  SiRNA target sequence
gttggatgttggttttcaagct

SEQ ID NO: 256008 - DNA, 22 bp, Artificial sequence
  SiRNA target sequence
ttggatgttggttttcaagctg

SEQ ID NO: 256009 - DNA, 22 bp, Artificial sequence
  SiRNA target sequence
tggatgttggttttcaagctga

SEQ ID NO: 256010 - DNA, 22 bp, Artificial sequence
  SiRNA target sequence
ggatgttggttttcaagctgat

SEQ ID NO: 256011 - DNA, 22 bp, Artificial sequence
  SiRNA target sequence
gatgttggttttcaagctgata

SEQ ID NO: 256012 - DNA, 22 bp, Artificial sequence
  SiRNA target sequence
atgttggttttcaagctgataa

SEQ ID NO: 256013 - DNA, 22 bp, Artificial sequence
  SiRNA target sequence
tgttggttttcaagctgataag

SEQ ID NO: 256014 - DNA, 22 bp, Artificial sequence
  SiRNA target sequence
gttggttttcaagctgataagc

SEQ ID NO: 256015 - DNA, 22 bp, Artificial sequence
  SiRNA target sequence
ttggttttcaagctgataagca

SEQ ID NO: 256016 - DNA, 22 bp, Artificial sequence
  SiRNA target sequence
tggttttcaagctgataagcaa

SEQ ID NO: 256017 - DNA, 22 bp, Artificial sequence
  SiRNA target sequence
ggttttcaagctgataagcaac

SEQ ID NO: 256018 - DNA, 22 bp, Artificial sequence
  SiRNA target sequence
gttttcaagctgataagcaaca

SEQ ID NO: 256019 - DNA, 22 bp, Artificial sequence
  SiRNA target sequence
ttttcaagctgataagcaacag

SEQ ID NO: 256020 - DNA, 22 bp, Artificial sequence
  SiRNA target sequence
tttcaagctgataagcaacagg

SEQ ID NO: 256021 - DNA, 22 bp, Artificial sequence
  SiRNA target sequence
ttcaagctgataagcaacaggc

SEQ ID NO: 256022 - DNA, 22 bp, Artificial sequence
  SiRNA target sequence
tcaagctgataagcaacaggcg

SEQ ID NO: 256023 - DNA, 22 bp, Artificial sequence
  SiRNA target sequence
caagctgataagcaacaggcgc

SEQ ID NO: 256024 - DNA, 22 bp, Artificial sequence
  SiRNA target sequence
aagctgataagcaacaggcgca

SEQ ID NO: 256025 - DNA, 22 bp, Artificial sequence
  SiRNA target sequence
agctgataagcaacaggcgcag

SEQ ID NO: 256026 - DNA, 22 bp, Artificial sequence
  SiRNA target sequence
gctgataagcaacaggcgcagg

SEQ ID NO: 256027 - DNA, 22 bp, Artificial sequence
  SiRNA target sequence
ctgataagcaacaggcgcaggt

SEQ ID NO: 256028 - DNA, 22 bp, Artificial sequence
  SiRNA target sequence
tgataagcaacaggcgcaggtg

SEQ ID NO: 256029 - DNA, 22 bp, Artificial sequence
  SiRNA target sequence
gataagcaacaggcgcaggtga

SEQ ID NO: 256030 - DNA, 22 bp, Artificial sequence
  SiRNA target sequence
ataagcaacaggcgcaggtgat

SEQ ID NO: 256031 - DNA, 22 bp, Artificial sequence
  SiRNA target sequence
taagcaacaggcgcaggtgatt

SEQ ID NO: 256032 - DNA, 22 bp, Artificial sequence
  SiRNA target sequence
aagcaacaggcgcaggtgattg

SEQ ID NO: 256033 - DNA, 22 bp, Artificial sequence
  SiRNA target sequence
agcaacaggcgcaggtgattgt

SEQ ID NO: 256034 - DNA, 22 bp, Artificial sequence
  SiRNA target sequence
gcaacaggcgcaggtgattgta

SEQ ID NO: 256035 - DNA, 22 bp, Artificial sequence
  SiRNA target sequence
caacaggcgcaggtgattgtaa

SEQ ID NO: 256036 - DNA, 22 bp, Artificial sequence
  SiRNA target sequence
aacaggcgcaggtgattgtaat

SEQ ID NO: 256037 - DNA, 22 bp, Artificial sequence
  SiRNA target sequence
acaggcgcaggtgattgtaatg

SEQ ID NO: 256038 - DNA, 22 bp, Artificial sequence
  SiRNA target sequence
caggcgcaggtgattgtaatgc

SEQ ID NO: 256039 - DNA, 22 bp, Artificial sequence
  SiRNA target sequence
aggcgcaggtgattgtaatgca

SEQ ID NO: 256040 - DNA, 22 bp, Artificial sequence
  SiRNA target sequence
ggcgcaggtgattgtaatgcaa

SEQ ID NO: 256041 - DNA, 22 bp, Artificial sequence
  SiRNA target sequence
gcgcaggtgattgtaatgcaaa

SEQ ID NO: 256042 - DNA, 22 bp, Artificial sequence
  SiRNA target sequence
cgcaggtgattgtaatgcaaaa

SEQ ID NO: 256043 - DNA, 22 bp, Artificial sequence
  SiRNA target sequence
gcaggtgattgtaatgcaaaag

SEQ ID NO: 256044 - DNA, 22 bp, Artificial sequence
  SiRNA target sequence
caggtgattgtaatgcaaaagc

SEQ ID NO: 256045 - DNA, 22 bp, Artificial sequence
  SiRNA target sequence
aggtgattgtaatgcaaaagct

SEQ ID NO: 256046 - DNA, 22 bp, Artificial sequence
  SiRNA target sequence
ggtgattgtaatgcaaaagctt

SEQ ID NO: 256047 - DNA, 22 bp, Artificial sequence
  SiRNA target sequence
gtgattgtaatgcaaaagctta

SEQ ID NO: 256048 - DNA, 22 bp, Artificial sequence
  SiRNA target sequence
tgattgtaatgcaaaagcttaa

SEQ ID NO: 256049 - DNA, 22 bp, Artificial sequence
  SiRNA target sequence
gattgtaatgcaaaagcttaaa

SEQ ID NO: 256050 - DNA, 22 bp, Artificial sequence
  SiRNA target sequence
attgtaatgcaaaagcttaaaa

SEQ ID NO: 256051 - DNA, 22 bp, Artificial sequence
  SiRNA target sequence
ttgtaatgcaaaagcttaaaaa

SEQ ID NO: 256052 - DNA, 22 bp, Artificial sequence
  SiRNA target sequence
tgtaatgcaaaagcttaaaaac

SEQ ID NO: 256053 - DNA, 22 bp, Artificial sequence
  SiRNA target sequence
gtaatgcaaaagcttaaaaaca

SEQ ID NO: 256054 - DNA, 22 bp, Artificial sequence
  SiRNA target sequence
taatgcaaaagcttaaaaacaa

SEQ ID NO: 256055 - DNA, 22 bp, Artificial sequence
  SiRNA target sequence
aatgcaaaagcttaaaaacaat

SEQ ID NO: 256056 - DNA, 22 bp, Artificial sequence
  SiRNA target sequence
atgcaaaagcttaaaaacaatt

SEQ ID NO: 256057 - DNA, 22 bp, Artificial sequence
  SiRNA target sequence
tgcaaaagcttaaaaacaattc

SEQ ID NO: 256058 - DNA, 22 bp, Artificial sequence
  SiRNA target sequence
gcaaaagcttaaaaacaattcc

SEQ ID NO: 256059 - DNA, 22 bp, Artificial sequence
  SiRNA target sequence
caaaagcttaaaaacaattccc

SEQ ID NO: 256060 - DNA, 22 bp, Artificial sequence
  SiRNA target sequence
aaaagcttaaaaacaattcccg

SEQ ID NO: 256061 - DNA, 22 bp, Artificial sequence
  SiRNA target sequence
aaagcttaaaaacaattcccga

SEQ ID NO: 256062 - DNA, 22 bp, Artificial sequence
  SiRNA target sequence
aagcttaaaaacaattcccgac

SEQ ID NO: 256063 - DNA, 22 bp, Artificial sequence
  SiRNA target sequence
agcttaaaaacaattcccgacc

SEQ ID NO: 256064 - DNA, 22 bp, Artificial sequence
  SiRNA target sequence
gcttaaaaacaattcccgacct

SEQ ID NO: 256065 - DNA, 22 bp, Artificial sequence
  SiRNA target sequence
cttaaaaacaattcccgaccta

SEQ ID NO: 256066 - DNA, 22 bp, Artificial sequence
  SiRNA target sequence
ttaaaaacaattcccgacctat

SEQ ID NO: 256067 - DNA, 22 bp, Artificial sequence
  SiRNA target sequence
taaaaacaattcccgacctatc

SEQ ID NO: 256068 - DNA, 22 bp, Artificial sequence
  SiRNA target sequence
aaaaacaattcccgacctatca

SEQ ID NO: 256069 - DNA, 22 bp, Artificial sequence
  SiRNA target sequence
aaaacaattcccgacctatcat

SEQ ID NO: 256070 - DNA, 22 bp, Artificial sequence
  SiRNA target sequence
aaacaattcccgacctatcatt

SEQ ID NO: 256071 - DNA, 22 bp, Artificial sequence
  SiRNA target sequence
aacaattcccgacctatcattg

SEQ ID NO: 256072 - DNA, 22 bp, Artificial sequence
  SiRNA target sequence
acaattcccgacctatcattgg

SEQ ID NO: 256073 - DNA, 22 bp, Artificial sequence
  SiRNA target sequence
caattcccgacctatcattggc

SEQ ID NO: 256074 - DNA, 22 bp, Artificial sequence
  SiRNA target sequence
aattcccgacctatcattggcg

SEQ ID NO: 256075 - DNA, 22 bp, Artificial sequence
  SiRNA target sequence
attcccgacctatcattggcga

SEQ ID NO: 256076 - DNA, 22 bp, Artificial sequence
  SiRNA target sequence
ttcccgacctatcattggcgac

SEQ ID NO: 256077 - DNA, 22 bp, Artificial sequence
  SiRNA target sequence
tcccgacctatcattggcgact

SEQ ID NO: 256078 - DNA, 22 bp, Artificial sequence
  SiRNA target sequence
cccgacctatcattggcgactc

SEQ ID NO: 256079 - DNA, 22 bp, Artificial sequence
  SiRNA target sequence
ccgacctatcattggcgactca

SEQ ID NO: 256080 - DNA, 22 bp, Artificial sequence
  SiRNA target sequence
cgacctatcattggcgactcaa

SEQ ID NO: 256081 - DNA, 22 bp, Artificial sequence
  SiRNA target sequence
gacctatcattggcgactcaaa

SEQ ID NO: 256082 - DNA, 22 bp, Artificial sequence
  SiRNA target sequence
acctatcattggcgactcaaag

SEQ ID NO: 256083 - DNA, 22 bp, Artificial sequence
  SiRNA target sequence
cctatcattggcgactcaaagg

SEQ ID NO: 256084 - DNA, 22 bp, Artificial sequence
  SiRNA target sequence
ctatcattggcgactcaaagga

SEQ ID NO: 256085 - DNA, 22 bp, Artificial sequence
  SiRNA target sequence
tatcattggcgactcaaaggaa

SEQ ID NO: 256086 - DNA, 22 bp, Artificial sequence
  SiRNA target sequence
atcattggcgactcaaaggaat

SEQ ID NO: 256087 - DNA, 22 bp, Artificial sequence
  SiRNA target sequence
tcattggcgactcaaaggaatt

SEQ ID NO: 256088 - DNA, 22 bp, Artificial sequence
  SiRNA target sequence
cattggcgactcaaaggaattt

SEQ ID NO: 256089 - DNA, 22 bp, Artificial sequence
  SiRNA target sequence
attggcgactcaaaggaattta

SEQ ID NO: 256090 - DNA, 22 bp, Artificial sequence
  SiRNA target sequence
ttggcgactcaaaggaatttag

SEQ ID NO: 256091 - DNA, 22 bp, Artificial sequence
  SiRNA target sequence
tggcgactcaaaggaatttagc

SEQ ID NO: 256092 - DNA, 22 bp, Artificial sequence
  SiRNA target sequence
ggcgactcaaaggaatttagca

SEQ ID NO: 256093 - DNA, 22 bp, Artificial sequence
  SiRNA target sequence
gcgactcaaaggaatttagcaa

SEQ ID NO: 256094 - DNA, 22 bp, Artificial sequence
  SiRNA target sequence
cgactcaaaggaatttagcaac

SEQ ID NO: 256095 - DNA, 22 bp, Artificial sequence
  SiRNA target sequence
gactcaaaggaatttagcaaca

SEQ ID NO: 256096 - DNA, 22 bp, Artificial sequence
  SiRNA target sequence
actcaaaggaatttagcaacaa

SEQ ID NO: 256097 - DNA, 22 bp, Artificial sequence
  SiRNA target sequence
ctcaaaggaatttagcaacaaa

SEQ ID NO: 256098 - DNA, 22 bp, Artificial sequence
  SiRNA target sequence
tcaaaggaatttagcaacaaag

SEQ ID NO: 256099 - DNA, 22 bp, Artificial sequence
  SiRNA target sequence
caaaggaatttagcaacaaagt

SEQ ID NO: 256100 - DNA, 22 bp, Artificial sequence
  SiRNA target sequence
aaaggaatttagcaacaaagtt

SEQ ID NO: 256101 - DNA, 22 bp, Artificial sequence
  SiRNA target sequence
aaggaatttagcaacaaagttc

SEQ ID NO: 256102 - DNA, 22 bp, Artificial sequence
  SiRNA target sequence
aggaatttagcaacaaagttca

SEQ ID NO: 256103 - DNA, 22 bp, Artificial sequence
  SiRNA target sequence
ggaatttagcaacaaagttcat

SEQ ID NO: 256104 - DNA, 22 bp, Artificial sequence
  SiRNA target sequence
gaatttagcaacaaagttcatc

SEQ ID NO: 256105 - DNA, 22 bp, Artificial sequence
  SiRNA target sequence
aatttagcaacaaagttcatcc

SEQ ID NO: 256106 - DNA, 22 bp, Artificial sequence
  SiRNA target sequence
atttagcaacaaagttcatcca

SEQ ID NO: 256107 - DNA, 22 bp, Artificial sequence
  SiRNA target sequence
tttagcaacaaagttcatccag

SEQ ID NO: 256108 - DNA, 22 bp, Artificial sequence
  SiRNA target sequence
ttagcaacaaagttcatccagg

SEQ ID NO: 256109 - DNA, 22 bp, Artificial sequence
  SiRNA target sequence
tagcaacaaagttcatccaggc

SEQ ID NO: 256110 - DNA, 22 bp, Artificial sequence
  SiRNA target sequence
agcaacaaagttcatccaggcc

SEQ ID NO: 256111 - DNA, 22 bp, Artificial sequence
  SiRNA target sequence
gcaacaaagttcatccaggccc

SEQ ID NO: 256112 - DNA, 22 bp, Artificial sequence
  SiRNA target sequence
caacaaagttcatccaggcccc

SEQ ID NO: 256113 - DNA, 22 bp, Artificial sequence
  SiRNA target sequence
aacaaagttcatccaggccccg

SEQ ID NO: 256114 - DNA, 22 bp, Artificial sequence
  SiRNA target sequence
acaaagttcatccaggccccga

SEQ ID NO: 256115 - DNA, 22 bp, Artificial sequence
  SiRNA target sequence
caaagttcatccaggccccgac

SEQ ID NO: 256116 - DNA, 22 bp, Artificial sequence
  SiRNA target sequence
aaagttcatccaggccccgact

SEQ ID NO: 256117 - DNA, 22 bp, Artificial sequence
  SiRNA target sequence
aagttcatccaggccccgactt

SEQ ID NO: 256118 - DNA, 22 bp, Artificial sequence
  SiRNA target sequence
agttcatccaggccccgacttt

SEQ ID NO: 256119 - DNA, 22 bp, Artificial sequence
  SiRNA target sequence
gttcatccaggccccgactttt

SEQ ID NO: 256120 - DNA, 22 bp, Artificial sequence
  SiRNA target sequence
ttcatccaggccccgacttttg

SEQ ID NO: 256121 - DNA, 22 bp, Artificial sequence
  SiRNA target sequence
tcatccaggccccgacttttgc

SEQ ID NO: 256122 - DNA, 22 bp, Artificial sequence
  SiRNA target sequence
catccaggccccgacttttgcc

SEQ ID NO: 256123 - DNA, 22 bp, Artificial sequence
  SiRNA target sequence
atccaggccccgacttttgcct

SEQ ID NO: 256124 - DNA, 22 bp, Artificial sequence
  SiRNA target sequence
tccaggccccgacttttgcctg

SEQ ID NO: 256125 - DNA, 22 bp, Artificial sequence
  SiRNA target sequence
ccaggccccgacttttgcctgg

SEQ ID NO: 256126 - DNA, 22 bp, Artificial sequence
  SiRNA target sequence
caggccccgacttttgcctggt

SEQ ID NO: 256127 - DNA, 22 bp, Artificial sequence
  SiRNA target sequence
aggccccgacttttgcctggta

SEQ ID NO: 256128 - DNA, 22 bp, Artificial sequence
  SiRNA target sequence
ggccccgacttttgcctggtaa

SEQ ID NO: 256129 - DNA, 22 bp, Artificial sequence
  SiRNA target sequence
gccccgacttttgcctggtaaa

SEQ ID NO: 256130 - DNA, 22 bp, Artificial sequence
  SiRNA target sequence
ccccgacttttgcctggtaaag

SEQ ID NO: 256131 - DNA, 22 bp, Artificial sequence
  SiRNA target sequence
cccgacttttgcctggtaaagc

SEQ ID NO: 256132 - DNA, 22 bp, Artificial sequence
  SiRNA target sequence
ccgacttttgcctggtaaagcc

SEQ ID NO: 256133 - DNA, 22 bp, Artificial sequence
  SiRNA target sequence
cgacttttgcctggtaaagccg

SEQ ID NO: 256134 - DNA, 22 bp, Artificial sequence
  SiRNA target sequence
gacttttgcctggtaaagccga

SEQ ID NO: 256135 - DNA, 22 bp, Artificial sequence
  SiRNA target sequence
acttttgcctggtaaagccgaa

SEQ ID NO: 256136 - DNA, 22 bp, Artificial sequence
  SiRNA target sequence
cttttgcctggtaaagccgaac

SEQ ID NO: 256137 - DNA, 22 bp, Artificial sequence
  SiRNA target sequence
ttttgcctggtaaagccgaacg

SEQ ID NO: 256138 - DNA, 22 bp, Artificial sequence
  SiRNA target sequence
tttgcctggtaaagccgaacga

SEQ ID NO: 256139 - DNA, 22 bp, Artificial sequence
  SiRNA target sequence
ttgcctggtaaagccgaacgac

SEQ ID NO: 256140 - DNA, 22 bp, Artificial sequence
  SiRNA target sequence
tgcctggtaaagccgaacgaca

SEQ ID NO: 256141 - DNA, 22 bp, Artificial sequence
  SiRNA target sequence
gcctggtaaagccgaacgacaa

SEQ ID NO: 256142 - DNA, 22 bp, Artificial sequence
  SiRNA target sequence
cctggtaaagccgaacgacaac

SEQ ID NO: 256143 - DNA, 22 bp, Artificial sequence
  SiRNA target sequence
ctggtaaagccgaacgacaacg

SEQ ID NO: 256144 - DNA, 22 bp, Artificial sequence
  SiRNA target sequence
tggtaaagccgaacgacaacgg

SEQ ID NO: 256145 - DNA, 22 bp, Artificial sequence
  SiRNA target sequence
ggtaaagccgaacgacaacggc

SEQ ID NO: 256146 - DNA, 22 bp, Artificial sequence
  SiRNA target sequence
gtaaagccgaacgacaacggcg

SEQ ID NO: 256147 - DNA, 22 bp, Artificial sequence
  SiRNA target sequence
taaagccgaacgacaacggcga

SEQ ID NO: 256148 - DNA, 22 bp, Artificial sequence
  SiRNA target sequence
aaagccgaacgacaacggcgaa

SEQ ID NO: 256149 - DNA, 22 bp, Artificial sequence
  SiRNA target sequence
aagccgaacgacaacggcgaag

SEQ ID NO: 256150 - DNA, 22 bp, Artificial sequence
  SiRNA target sequence
agccgaacgacaacggcgaagg

SEQ ID NO: 256151 - DNA, 22 bp, Artificial sequence
  SiRNA target sequence
gccgaacgacaacggcgaaggc

SEQ ID NO: 256152 - DNA, 22 bp, Artificial sequence
  SiRNA target sequence
ccgaacgacaacggcgaaggcc

SEQ ID NO: 256153 - DNA, 22 bp, Artificial sequence
  SiRNA target sequence
cgaacgacaacggcgaaggcct

SEQ ID NO: 256154 - DNA, 22 bp, Artificial sequence
  SiRNA target sequence
gaacgacaacggcgaaggcctc

SEQ ID NO: 256155 - DNA, 22 bp, Artificial sequence
  SiRNA target sequence
aacgacaacggcgaaggcctcg

SEQ ID NO: 256156 - DNA, 22 bp, Artificial sequence
  SiRNA target sequence
acgacaacggcgaaggcctcgt

SEQ ID NO: 256157 - DNA, 22 bp, Artificial sequence
  SiRNA target sequence
cgacaacggcgaaggcctcgtg

SEQ ID NO: 256158 - DNA, 22 bp, Artificial sequence
  SiRNA target sequence
gacaacggcgaaggcctcgtgc

SEQ ID NO: 256159 - DNA, 22 bp, Artificial sequence
  SiRNA target sequence
acaacggcgaaggcctcgtgca

SEQ ID NO: 256160 - DNA, 22 bp, Artificial sequence
  SiRNA target sequence
caacggcgaaggcctcgtgcaa

SEQ ID NO: 256161 - DNA, 22 bp, Artificial sequence
  SiRNA target sequence
aacggcgaaggcctcgtgcaag

SEQ ID NO: 256162 - DNA, 22 bp, Artificial sequence
  SiRNA target sequence
acggcgaaggcctcgtgcaaga

SEQ ID NO: 256163 - DNA, 22 bp, Artificial sequence
  SiRNA target sequence
cggcgaaggcctcgtgcaagac

SEQ ID NO: 256164 - DNA, 22 bp, Artificial sequence
  SiRNA target sequence
ggcgaaggcctcgtgcaagaca

SEQ ID NO: 256165 - DNA, 22 bp, Artificial sequence
  SiRNA target sequence
gcgaaggcctcgtgcaagacac

SEQ ID NO: 256166 - DNA, 22 bp, Artificial sequence
  SiRNA target sequence
cgaaggcctcgtgcaagacacc

SEQ ID NO: 256167 - DNA, 22 bp, Artificial sequence
  SiRNA target sequence
gaaggcctcgtgcaagacaccg

SEQ ID NO: 256168 - DNA, 22 bp, Artificial sequence
  SiRNA target sequence
aaggcctcgtgcaagacaccga

SEQ ID NO: 256169 - DNA, 22 bp, Artificial sequence
  SiRNA target sequence
aggcctcgtgcaagacaccgag

SEQ ID NO: 256170 - DNA, 22 bp, Artificial sequence
  SiRNA target sequence
ggcctcgtgcaagacaccgagc

SEQ ID NO: 256171 - DNA, 22 bp, Artificial sequence
  SiRNA target sequence
gcctcgtgcaagacaccgagct

SEQ ID NO: 256172 - DNA, 22 bp, Artificial sequence
  SiRNA target sequence
cctcgtgcaagacaccgagctt

SEQ ID NO: 256173 - DNA, 22 bp, Artificial sequence
  SiRNA target sequence
ctcgtgcaagacaccgagcttg

SEQ ID NO: 256174 - DNA, 22 bp, Artificial sequence
  SiRNA target sequence
tcgtgcaagacaccgagcttgg

SEQ ID NO: 256175 - DNA, 22 bp, Artificial sequence
  SiRNA target sequence
cgtgcaagacaccgagcttggg

SEQ ID NO: 256176 - DNA, 22 bp, Artificial sequence
  SiRNA target sequence
gtgcaagacaccgagcttgggg

SEQ ID NO: 256177 - DNA, 22 bp, Artificial sequence
  SiRNA target sequence
tgcaagacaccgagcttggggc

SEQ ID NO: 256178 - DNA, 22 bp, Artificial sequence
  SiRNA target sequence
gcaagacaccgagcttggggcc

SEQ ID NO: 256179 - DNA, 22 bp, Artificial sequence
  SiRNA target sequence
caagacaccgagcttggggcct

SEQ ID NO: 256180 - DNA, 22 bp, Artificial sequence
  SiRNA target sequence
aagacaccgagcttggggcctc

SEQ ID NO: 256181 - DNA, 22 bp, Artificial sequence
  SiRNA target sequence
agacaccgagcttggggcctcc

SEQ ID NO: 256182 - DNA, 22 bp, Artificial sequence
  SiRNA target sequence
gacaccgagcttggggcctcca

SEQ ID NO: 256183 - DNA, 22 bp, Artificial sequence
  SiRNA target sequence
acaccgagcttggggcctccac

SEQ ID NO: 256184 - DNA, 22 bp, Artificial sequence
  SiRNA target sequence
caccgagcttggggcctccacg

SEQ ID NO: 256185 - DNA, 22 bp, Artificial sequence
  SiRNA target sequence
accgagcttggggcctccacgc

SEQ ID NO: 256186 - DNA, 22 bp, Artificial sequence
  SiRNA target sequence
ccgagcttggggcctccacgcc

SEQ ID NO: 256187 - DNA, 22 bp, Artificial sequence
  SiRNA target sequence
cgagcttggggcctccacgccg

SEQ ID NO: 256188 - DNA, 22 bp, Artificial sequence
  SiRNA target sequence
gagcttggggcctccacgccgc

SEQ ID NO: 256189 - DNA, 22 bp, Artificial sequence
  SiRNA target sequence
agcttggggcctccacgccgct

SEQ ID NO: 256190 - DNA, 22 bp, Artificial sequence
  SiRNA target sequence
gcttggggcctccacgccgctc

SEQ ID NO: 256191 - DNA, 22 bp, Artificial sequence
  SiRNA target sequence
cttggggcctccacgccgctca

SEQ ID NO: 256192 - DNA, 22 bp, Artificial sequence
  SiRNA target sequence
ttggggcctccacgccgctcag

SEQ ID NO: 256193 - DNA, 22 bp, Artificial sequence
  SiRNA target sequence
tggggcctccacgccgctcagc

SEQ ID NO: 256194 - DNA, 22 bp, Artificial sequence
  SiRNA target sequence
ggggcctccacgccgctcagct

SEQ ID NO: 256195 - DNA, 22 bp, Artificial sequence
  SiRNA target sequence
gggcctccacgccgctcagctc

SEQ ID NO: 256196 - DNA, 22 bp, Artificial sequence
  SiRNA target sequence
ggcctccacgccgctcagctcg

SEQ ID NO: 256197 - DNA, 22 bp, Artificial sequence
  SiRNA target sequence
gcctccacgccgctcagctcgc

SEQ ID NO: 256198 - DNA, 22 bp, Artificial sequence
  SiRNA target sequence
cctccacgccgctcagctcgcc

SEQ ID NO: 256199 - DNA, 22 bp, Artificial sequence
  SiRNA target sequence
ctccacgccgctcagctcgcct

SEQ ID NO: 256200 - DNA, 22 bp, Artificial sequence
  SiRNA target sequence
tccacgccgctcagctcgcctt

SEQ ID NO: 256201 - DNA, 22 bp, Artificial sequence
  SiRNA target sequence
ccacgccgctcagctcgccttc

SEQ ID NO: 256202 - DNA, 22 bp, Artificial sequence
  SiRNA target sequence
cacgccgctcagctcgccttcc

SEQ ID NO: 256203 - DNA, 22 bp, Artificial sequence
  SiRNA target sequence
acgccgctcagctcgccttcct

SEQ ID NO: 256204 - DNA, 22 bp, Artificial sequence
  SiRNA target sequence
cgccgctcagctcgccttcctg

SEQ ID NO: 256205 - DNA, 22 bp, Artificial sequence
  SiRNA target sequence
gccgctcagctcgccttcctgt

SEQ ID NO: 256206 - DNA, 22 bp, Artificial sequence
  SiRNA target sequence
ccgctcagctcgccttcctgta

SEQ ID NO: 256207 - DNA, 22 bp, Artificial sequence
  SiRNA target sequence
cgctcagctcgccttcctgtat

SEQ ID NO: 256208 - DNA, 22 bp, Artificial sequence
  SiRNA target sequence
gctcagctcgccttcctgtata

SEQ ID NO: 256209 - DNA, 22 bp, Artificial sequence
  SiRNA target sequence
ctcagctcgccttcctgtatag

SEQ ID NO: 256210 - DNA, 22 bp, Artificial sequence
  SiRNA target sequence
tcagctcgccttcctgtatagt

SEQ ID NO: 256211 - DNA, 22 bp, Artificial sequence
  SiRNA target sequence
cagctcgccttcctgtatagtt

SEQ ID NO: 256212 - DNA, 22 bp, Artificial sequence
  SiRNA target sequence
agctcgccttcctgtatagttg

SEQ ID NO: 256213 - DNA, 22 bp, Artificial sequence
  SiRNA target sequence
gctcgccttcctgtatagttga

SEQ ID NO: 256214 - DNA, 22 bp, Artificial sequence
  SiRNA target sequence
ctcgccttcctgtatagttgaa

SEQ ID NO: 256215 - DNA, 22 bp, Artificial sequence
  SiRNA target sequence
tcgccttcctgtatagttgaac

SEQ ID NO: 256216 - DNA, 22 bp, Artificial sequence
  SiRNA target sequence
cgccttcctgtatagttgaaca

SEQ ID NO: 256217 - DNA, 22 bp, Artificial sequence
  SiRNA target sequence
gccttcctgtatagttgaacag

SEQ ID NO: 256218 - DNA, 22 bp, Artificial sequence
  SiRNA target sequence
ccttcctgtatagttgaacagc

SEQ ID NO: 256219 - DNA, 22 bp, Artificial sequence
  SiRNA target sequence
cttcctgtatagttgaacagcc

SEQ ID NO: 256220 - DNA, 22 bp, Artificial sequence
  SiRNA target sequence
ttcctgtatagttgaacagcct

SEQ ID NO: 256221 - DNA, 22 bp, Artificial sequence
  SiRNA target sequence
tcctgtatagttgaacagcctc

SEQ ID NO: 256222 - DNA, 22 bp, Artificial sequence
  SiRNA target sequence
cctgtatagttgaacagcctct

SEQ ID NO: 256223 - DNA, 22 bp, Artificial sequence
  SiRNA target sequence
ctgtatagttgaacagcctctg

SEQ ID NO: 256224 - DNA, 22 bp, Artificial sequence
  SiRNA target sequence
tgtatagttgaacagcctctgt

SEQ ID NO: 256225 - DNA, 22 bp, Artificial sequence
  SiRNA target sequence
gtatagttgaacagcctctgtc

SEQ ID NO: 256226 - DNA, 22 bp, Artificial sequence
  SiRNA target sequence
tatagttgaacagcctctgtct

SEQ ID NO: 256227 - DNA, 22 bp, Artificial sequence
  SiRNA target sequence
atagttgaacagcctctgtctc

SEQ ID NO: 256228 - DNA, 22 bp, Artificial sequence
  SiRNA target sequence
tagttgaacagcctctgtctca

SEQ ID NO: 256229 - DNA, 22 bp, Artificial sequence
  SiRNA target sequence
agttgaacagcctctgtctcac

SEQ ID NO: 256230 - DNA, 22 bp, Artificial sequence
  SiRNA target sequence
gttgaacagcctctgtctcacg

SEQ ID NO: 256231 - DNA, 22 bp, Artificial sequence
  SiRNA target sequence
ttgaacagcctctgtctcacga

SEQ ID NO: 256232 - DNA, 22 bp, Artificial sequence
  SiRNA target sequence
tgaacagcctctgtctcacgac

SEQ ID NO: 256233 - DNA, 22 bp, Artificial sequence
  SiRNA target sequence
gaacagcctctgtctcacgaca

SEQ ID NO: 256234 - DNA, 22 bp, Artificial sequence
  SiRNA target sequence
aacagcctctgtctcacgacag

SEQ ID NO: 256235 - DNA, 22 bp, Artificial sequence
  SiRNA target sequence
acagcctctgtctcacgacagt

SEQ ID NO: 256236 - DNA, 22 bp, Artificial sequence
  SiRNA target sequence
cagcctctgtctcacgacagtg

SEQ ID NO: 256237 - DNA, 22 bp, Artificial sequence
  SiRNA target sequence
agcctctgtctcacgacagtgt

SEQ ID NO: 256238 - DNA, 22 bp, Artificial sequence
  SiRNA target sequence
gcctctgtctcacgacagtgtg

SEQ ID NO: 256239 - DNA, 22 bp, Artificial sequence
  SiRNA target sequence
cctctgtctcacgacagtgtgg

SEQ ID NO: 256240 - DNA, 22 bp, Artificial sequence
  SiRNA target sequence
ctctgtctcacgacagtgtggg

SEQ ID NO: 256241 - DNA, 22 bp, Artificial sequence
  SiRNA target sequence
tctgtctcacgacagtgtgggc

SEQ ID NO: 256242 - DNA, 22 bp, Artificial sequence
  SiRNA target sequence
ctgtctcacgacagtgtgggcc

SEQ ID NO: 256243 - DNA, 22 bp, Artificial sequence
  SiRNA target sequence
tgtctcacgacagtgtgggcct

SEQ ID NO: 256244 - DNA, 22 bp, Artificial sequence
  SiRNA target sequence
gtctcacgacagtgtgggcctg

SEQ ID NO: 256245 - DNA, 22 bp, Artificial sequence
  SiRNA target sequence
tctcacgacagtgtgggcctgc

SEQ ID NO: 256246 - DNA, 22 bp, Artificial sequence
  SiRNA target sequence
ctcacgacagtgtgggcctgcc

SEQ ID NO: 256247 - DNA, 22 bp, Artificial sequence
  SiRNA target sequence
tcacgacagtgtgggcctgcca

SEQ ID NO: 256248 - DNA, 22 bp, Artificial sequence
  SiRNA target sequence
cacgacagtgtgggcctgccac

SEQ ID NO: 256249 - DNA, 22 bp, Artificial sequence
  SiRNA target sequence
acgacagtgtgggcctgccacc

SEQ ID NO: 256250 - DNA, 23 bp, Artificial sequence
  SiRNA target sequence
ggccaatcccgattccggcgaca

SEQ ID NO: 256251 - DNA, 23 bp, Artificial sequence
  SiRNA target sequence
gccaatcccgattccggcgacac

SEQ ID NO: 256252 - DNA, 23 bp, Artificial sequence
  SiRNA target sequence
ccaatcccgattccggcgacaca

SEQ ID NO: 256253 - DNA, 23 bp, Artificial sequence
  SiRNA target sequence
caatcccgattccggcgacacaa

SEQ ID NO: 256254 - DNA, 23 bp, Artificial sequence
  SiRNA target sequence
aatcccgattccggcgacacaaa

SEQ ID NO: 256255 - DNA, 23 bp, Artificial sequence
  SiRNA target sequence
atcccgattccggcgacacaaag

SEQ ID NO: 256256 - DNA, 23 bp, Artificial sequence
  SiRNA target sequence
tcccgattccggcgacacaaaga

SEQ ID NO: 256257 - DNA, 23 bp, Artificial sequence
  SiRNA target sequence
cccgattccggcgacacaaagaa

SEQ ID NO: 256258 - DNA, 23 bp, Artificial sequence
  SiRNA target sequence
ccgattccggcgacacaaagaaa

SEQ ID NO: 256259 - DNA, 23 bp, Artificial sequence
  SiRNA target sequence
cgattccggcgacacaaagaaat

SEQ ID NO: 256260 - DNA, 23 bp, Artificial sequence
  SiRNA target sequence
gattccggcgacacaaagaaatt

SEQ ID NO: 256261 - DNA, 23 bp, Artificial sequence
  SiRNA target sequence
attccggcgacacaaagaaatta

SEQ ID NO: 256262 - DNA, 23 bp, Artificial sequence
  SiRNA target sequence
ttccggcgacacaaagaaattac

SEQ ID NO: 256263 - DNA, 23 bp, Artificial sequence
  SiRNA target sequence
tccggcgacacaaagaaattaca

SEQ ID NO: 256264 - DNA, 23 bp, Artificial sequence
  SiRNA target sequence
ccggcgacacaaagaaattacaa

SEQ ID NO: 256265 - DNA, 23 bp, Artificial sequence
  SiRNA target sequence
cggcgacacaaagaaattacaag

SEQ ID NO: 256266 - DNA, 23 bp, Artificial sequence
  SiRNA target sequence
ggcgacacaaagaaattacaaga

SEQ ID NO: 256267 - DNA, 23 bp, Artificial sequence
  SiRNA target sequence
gcgacacaaagaaattacaagaa

SEQ ID NO: 256268 - DNA, 23 bp, Artificial sequence
  SiRNA target sequence
cgacacaaagaaattacaagaag

SEQ ID NO: 256269 - DNA, 23 bp, Artificial sequence
  SiRNA target sequence
gacacaaagaaattacaagaagc

SEQ ID NO: 256270 - DNA, 23 bp, Artificial sequence
  SiRNA target sequence
acacaaagaaattacaagaagct

SEQ ID NO: 256271 - DNA, 23 bp, Artificial sequence
  SiRNA target sequence
cacaaagaaattacaagaagcta

SEQ ID NO: 256272 - DNA, 23 bp, Artificial sequence
  SiRNA target sequence
acaaagaaattacaagaagctat

SEQ ID NO: 256273 - DNA, 23 bp, Artificial sequence
  SiRNA target sequence
caaagaaattacaagaagctata

SEQ ID NO: 256274 - DNA, 23 bp, Artificial sequence
  SiRNA target sequence
aaagaaattacaagaagctatag

SEQ ID NO: 256275 - DNA, 23 bp, Artificial sequence
  SiRNA target sequence
aagaaattacaagaagctataga

SEQ ID NO: 256276 - DNA, 23 bp, Artificial sequence
  SiRNA target sequence
agaaattacaagaagctatagac

SEQ ID NO: 256277 - DNA, 23 bp, Artificial sequence
  SiRNA target sequence
gaaattacaagaagctatagacc

SEQ ID NO: 256278 - DNA, 23 bp, Artificial sequence
  SiRNA target sequence
aaattacaagaagctatagaccg

SEQ ID NO: 256279 - DNA, 23 bp, Artificial sequence
  SiRNA target sequence
aattacaagaagctatagaccgt

SEQ ID NO: 256280 - DNA, 23 bp, Artificial sequence
  SiRNA target sequence
attacaagaagctatagaccgtt

SEQ ID NO: 256281 - DNA, 23 bp, Artificial sequence
  SiRNA target sequence
ttacaagaagctatagaccgttt

SEQ ID NO: 256282 - DNA, 23 bp, Artificial sequence
  SiRNA target sequence
tacaagaagctatagaccgtttt

SEQ ID NO: 256283 - DNA, 23 bp, Artificial sequence
  SiRNA target sequence
acaagaagctatagaccgttttc

SEQ ID NO: 256284 - DNA, 23 bp, Artificial sequence
  SiRNA target sequence
caagaagctatagaccgttttca

SEQ ID NO: 256285 - DNA, 23 bp, Artificial sequence
  SiRNA target sequence
aagaagctatagaccgttttcat

SEQ ID NO: 256286 - DNA, 23 bp, Artificial sequence
  SiRNA target sequence
agaagctatagaccgttttcatc

SEQ ID NO: 256287 - DNA, 23 bp, Artificial sequence
  SiRNA target sequence
gaagctatagaccgttttcatcg

SEQ ID NO: 256288 - DNA, 23 bp, Artificial sequence
  SiRNA target sequence
aagctatagaccgttttcatcga

SEQ ID NO: 256289 - DNA, 23 bp, Artificial sequence
  SiRNA target sequence
agctatagaccgttttcatcgag

SEQ ID NO: 256290 - DNA, 23 bp, Artificial sequence
  SiRNA target sequence
gctatagaccgttttcatcgagc

SEQ ID NO: 256291 - DNA, 23 bp, Artificial sequence
  SiRNA target sequence
ctatagaccgttttcatcgagcc

SEQ ID NO: 256292 - DNA, 23 bp, Artificial sequence
  SiRNA target sequence
tatagaccgttttcatcgagccg

SEQ ID NO: 256293 - DNA, 23 bp, Artificial sequence
  SiRNA target sequence
atagaccgttttcatcgagccgg

SEQ ID NO: 256294 - DNA, 23 bp, Artificial sequence
  SiRNA target sequence
tagaccgttttcatcgagccgga

SEQ ID NO: 256295 - DNA, 23 bp, Artificial sequence
  SiRNA target sequence
agaccgttttcatcgagccggaa

SEQ ID NO: 256296 - DNA, 23 bp, Artificial sequence
  SiRNA target sequence
gaccgttttcatcgagccggaag

SEQ ID NO: 256297 - DNA, 23 bp, Artificial sequence
  SiRNA target sequence
accgttttcatcgagccggaaga

SEQ ID NO: 256298 - DNA, 23 bp, Artificial sequence
  SiRNA target sequence
ccgttttcatcgagccggaagat

SEQ ID NO: 256299 - DNA, 23 bp, Artificial sequence
  SiRNA target sequence
cgttttcatcgagccggaagatg

SEQ ID NO: 256300 - DNA, 23 bp, Artificial sequence
  SiRNA target sequence
gttttcatcgagccggaagatgg

SEQ ID NO: 256301 - DNA, 23 bp, Artificial sequence
  SiRNA target sequence
ttttcatcgagccggaagatgga

SEQ ID NO: 256302 - DNA, 23 bp, Artificial sequence
  SiRNA target sequence
tttcatcgagccggaagatggat

SEQ ID NO: 256303 - DNA, 23 bp, Artificial sequence
  SiRNA target sequence
ttcatcgagccggaagatggatt

SEQ ID NO: 256304 - DNA, 23 bp, Artificial sequence
  SiRNA target sequence
tcatcgagccggaagatggatta

SEQ ID NO: 256305 - DNA, 23 bp, Artificial sequence
  SiRNA target sequence
catcgagccggaagatggattaa

SEQ ID NO: 256306 - DNA, 23 bp, Artificial sequence
  SiRNA target sequence
atcgagccggaagatggattaag

SEQ ID NO: 256307 - DNA, 23 bp, Artificial sequence
  SiRNA target sequence
tcgagccggaagatggattaaga

SEQ ID NO: 256308 - DNA, 23 bp, Artificial sequence
  SiRNA target sequence
cgagccggaagatggattaagaa

SEQ ID NO: 256309 - DNA, 23 bp, Artificial sequence
  SiRNA target sequence
gagccggaagatggattaagaaa

SEQ ID NO: 256310 - DNA, 23 bp, Artificial sequence
  SiRNA target sequence
agccggaagatggattaagaaaa

SEQ ID NO: 256311 - DNA, 23 bp, Artificial sequence
  SiRNA target sequence
gccggaagatggattaagaaaaa

SEQ ID NO: 256312 - DNA, 23 bp, Artificial sequence
  SiRNA target sequence
ccggaagatggattaagaaaaaa

SEQ ID NO: 256313 - DNA, 23 bp, Artificial sequence
  SiRNA target sequence
cggaagatggattaagaaaaaat

SEQ ID NO: 256314 - DNA, 23 bp, Artificial sequence
  SiRNA target sequence
ggaagatggattaagaaaaaatt

SEQ ID NO: 256315 - DNA, 23 bp, Artificial sequence
  SiRNA target sequence
gaagatggattaagaaaaaattt

SEQ ID NO: 256316 - DNA, 23 bp, Artificial sequence
  SiRNA target sequence
aagatggattaagaaaaaatttc

SEQ ID NO: 256317 - DNA, 23 bp, Artificial sequence
  SiRNA target sequence
agatggattaagaaaaaatttcg

SEQ ID NO: 256318 - DNA, 23 bp, Artificial sequence
  SiRNA target sequence
gatggattaagaaaaaatttcga

SEQ ID NO: 256319 - DNA, 23 bp, Artificial sequence
  SiRNA target sequence
atggattaagaaaaaatttcgag

SEQ ID NO: 256320 - DNA, 23 bp, Artificial sequence
  SiRNA target sequence
tggattaagaaaaaatttcgaga

SEQ ID NO: 256321 - DNA, 23 bp, Artificial sequence
  SiRNA target sequence
ggattaagaaaaaatttcgagat

SEQ ID NO: 256322 - DNA, 23 bp, Artificial sequence
  SiRNA target sequence
gattaagaaaaaatttcgagatc

SEQ ID NO: 256323 - DNA, 23 bp, Artificial sequence
  SiRNA target sequence
attaagaaaaaatttcgagatct

SEQ ID NO: 256324 - DNA, 23 bp, Artificial sequence
  SiRNA target sequence
ttaagaaaaaatttcgagatcta

SEQ ID NO: 256325 - DNA, 23 bp, Artificial sequence
  SiRNA target sequence
taagaaaaaatttcgagatctat

SEQ ID NO: 256326 - DNA, 23 bp, Artificial sequence
  SiRNA target sequence
aagaaaaaatttcgagatctatt

SEQ ID NO: 256327 - DNA, 23 bp, Artificial sequence
  SiRNA target sequence
agaaaaaatttcgagatctattc

SEQ ID NO: 256328 - DNA, 23 bp, Artificial sequence
  SiRNA target sequence
gaaaaaatttcgagatctattca

SEQ ID NO: 256329 - DNA, 23 bp, Artificial sequence
  SiRNA target sequence
aaaaaatttcgagatctattcat

SEQ ID NO: 256330 - DNA, 23 bp, Artificial sequence
  SiRNA target sequence
aaaaatttcgagatctattcatg

SEQ ID NO: 256331 - DNA, 23 bp, Artificial sequence
  SiRNA target sequence
aaaatttcgagatctattcatgc

SEQ ID NO: 256332 - DNA, 23 bp, Artificial sequence
  SiRNA target sequence
aaatttcgagatctattcatgct

SEQ ID NO: 256333 - DNA, 23 bp, Artificial sequence
  SiRNA target sequence
aatttcgagatctattcatgcta

SEQ ID NO: 256334 - DNA, 23 bp, Artificial sequence
  SiRNA target sequence
atttcgagatctattcatgctat

SEQ ID NO: 256335 - DNA, 23 bp, Artificial sequence
  SiRNA target sequence
tttcgagatctattcatgctatg

SEQ ID NO: 256336 - DNA, 23 bp, Artificial sequence
  SiRNA target sequence
ttcgagatctattcatgctatgt

SEQ ID NO: 256337 - DNA, 23 bp, Artificial sequence
  SiRNA target sequence
tcgagatctattcatgctatgtt

SEQ ID NO: 256338 - DNA, 23 bp, Artificial sequence
  SiRNA target sequence
cgagatctattcatgctatgttc

SEQ ID NO: 256339 - DNA, 23 bp, Artificial sequence
  SiRNA target sequence
gagatctattcatgctatgttcg

SEQ ID NO: 256340 - DNA, 23 bp, Artificial sequence
  SiRNA target sequence
agatctattcatgctatgttcgg

SEQ ID NO: 256341 - DNA, 23 bp, Artificial sequence
  SiRNA target sequence
gatctattcatgctatgttcggg

SEQ ID NO: 256342 - DNA, 23 bp, Artificial sequence
  SiRNA target sequence
atctattcatgctatgttcgggt

SEQ ID NO: 256343 - DNA, 23 bp, Artificial sequence
  SiRNA target sequence
tctattcatgctatgttcgggta

SEQ ID NO: 256344 - DNA, 23 bp, Artificial sequence
  SiRNA target sequence
ctattcatgctatgttcgggtaa

SEQ ID NO: 256345 - DNA, 23 bp, Artificial sequence
  SiRNA target sequence
tattcatgctatgttcgggtaaa

SEQ ID NO: 256346 - DNA, 23 bp, Artificial sequence
  SiRNA target sequence
attcatgctatgttcgggtaaac

SEQ ID NO: 256347 - DNA, 23 bp, Artificial sequence
  SiRNA target sequence
ttcatgctatgttcgggtaaaca

SEQ ID NO: 256348 - DNA, 23 bp, Artificial sequence
  SiRNA target sequence
tcatgctatgttcgggtaaacag

SEQ ID NO: 256349 - DNA, 23 bp, Artificial sequence
  SiRNA target sequence
catgctatgttcgggtaaacagc

SEQ ID NO: 256350 - DNA, 23 bp, Artificial sequence
  SiRNA target sequence
atgctatgttcgggtaaacagcg

SEQ ID NO: 256351 - DNA, 23 bp, Artificial sequence
  SiRNA target sequence
tgctatgttcgggtaaacagcgc

SEQ ID NO: 256352 - DNA, 23 bp, Artificial sequence
  SiRNA target sequence
gctatgttcgggtaaacagcgca

SEQ ID NO: 256353 - DNA, 23 bp, Artificial sequence
  SiRNA target sequence
ctatgttcgggtaaacagcgcaa

SEQ ID NO: 256354 - DNA, 23 bp, Artificial sequence
  SiRNA target sequence
tatgttcgggtaaacagcgcaac

SEQ ID NO: 256355 - DNA, 23 bp, Artificial sequence
  SiRNA target sequence
atgttcgggtaaacagcgcaacc

SEQ ID NO: 256356 - DNA, 23 bp, Artificial sequence
  SiRNA target sequence
tgttcgggtaaacagcgcaacca

SEQ ID NO: 256357 - DNA, 23 bp, Artificial sequence
  SiRNA target sequence
gttcgggtaaacagcgcaaccag

SEQ ID NO: 256358 - DNA, 23 bp, Artificial sequence
  SiRNA target sequence
ttcgggtaaacagcgcaaccaga

SEQ ID NO: 256359 - DNA, 23 bp, Artificial sequence
  SiRNA target sequence
tcgggtaaacagcgcaaccagat

SEQ ID NO: 256360 - DNA, 23 bp, Artificial sequence
  SiRNA target sequence
cgggtaaacagcgcaaccagatc

SEQ ID NO: 256361 - DNA, 23 bp, Artificial sequence
  SiRNA target sequence
gggtaaacagcgcaaccagatct

SEQ ID NO: 256362 - DNA, 23 bp, Artificial sequence
  SiRNA target sequence
ggtaaacagcgcaaccagatctc

SEQ ID NO: 256363 - DNA, 23 bp, Artificial sequence
  SiRNA target sequence
gtaaacagcgcaaccagatctcg

SEQ ID NO: 256364 - DNA, 23 bp, Artificial sequence
  SiRNA target sequence
taaacagcgcaaccagatctcgg

SEQ ID NO: 256365 - DNA, 23 bp, Artificial sequence
  SiRNA target sequence
aaacagcgcaaccagatctcgga

SEQ ID NO: 256366 - DNA, 23 bp, Artificial sequence
  SiRNA target sequence
aacagcgcaaccagatctcggat

SEQ ID NO: 256367 - DNA, 23 bp, Artificial sequence
  SiRNA target sequence
acagcgcaaccagatctcggatc

SEQ ID NO: 256368 - DNA, 23 bp, Artificial sequence
  SiRNA target sequence
cagcgcaaccagatctcggatca

SEQ ID NO: 256369 - DNA, 23 bp, Artificial sequence
  SiRNA target sequence
agcgcaaccagatctcggatcaa

SEQ ID NO: 256370 - DNA, 23 bp, Artificial sequence
  SiRNA target sequence
gcgcaaccagatctcggatcaaa

SEQ ID NO: 256371 - DNA, 23 bp, Artificial sequence
  SiRNA target sequence
cgcaaccagatctcggatcaaac

SEQ ID NO: 256372 - DNA, 23 bp, Artificial sequence
  SiRNA target sequence
gcaaccagatctcggatcaaacc

SEQ ID NO: 256373 - DNA, 23 bp, Artificial sequence
  SiRNA target sequence
caaccagatctcggatcaaacct

SEQ ID NO: 256374 - DNA, 23 bp, Artificial sequence
  SiRNA target sequence
aaccagatctcggatcaaaccta

SEQ ID NO: 256375 - DNA, 23 bp, Artificial sequence
  SiRNA target sequence
accagatctcggatcaaacctac

SEQ ID NO: 256376 - DNA, 23 bp, Artificial sequence
  SiRNA target sequence
ccagatctcggatcaaacctacg

SEQ ID NO: 256377 - DNA, 23 bp, Artificial sequence
  SiRNA target sequence
cagatctcggatcaaacctacgc

SEQ ID NO: 256378 - DNA, 23 bp, Artificial sequence
  SiRNA target sequence
agatctcggatcaaacctacgcc

SEQ ID NO: 256379 - DNA, 23 bp, Artificial sequence
  SiRNA target sequence
gatctcggatcaaacctacgccg

SEQ ID NO: 256380 - DNA, 23 bp, Artificial sequence
  SiRNA target sequence
atctcggatcaaacctacgccga

SEQ ID NO: 256381 - DNA, 23 bp, Artificial sequence
  SiRNA target sequence
tctcggatcaaacctacgccgaa

SEQ ID NO: 256382 - DNA, 23 bp, Artificial sequence
  SiRNA target sequence
ctcggatcaaacctacgccgaag

SEQ ID NO: 256383 - DNA, 23 bp, Artificial sequence
  SiRNA target sequence
tcggatcaaacctacgccgaaga

SEQ ID NO: 256384 - DNA, 23 bp, Artificial sequence
  SiRNA target sequence
cggatcaaacctacgccgaagac

SEQ ID NO: 256385 - DNA, 23 bp, Artificial sequence
  SiRNA target sequence
ggatcaaacctacgccgaagacc

SEQ ID NO: 256386 - DNA, 23 bp, Artificial sequence
  SiRNA target sequence
gatcaaacctacgccgaagacct

SEQ ID NO: 256387 - DNA, 23 bp, Artificial sequence
  SiRNA target sequence
atcaaacctacgccgaagacctg

SEQ ID NO: 256388 - DNA, 23 bp, Artificial sequence
  SiRNA target sequence
tcaaacctacgccgaagacctgg

SEQ ID NO: 256389 - DNA, 23 bp, Artificial sequence
  SiRNA target sequence
caaacctacgccgaagacctgga

SEQ ID NO: 256390 - DNA, 23 bp, Artificial sequence
  SiRNA target sequence
aaacctacgccgaagacctggac

SEQ ID NO: 256391 - DNA, 23 bp, Artificial sequence
  SiRNA target sequence
aacctacgccgaagacctggacc

SEQ ID NO: 256392 - DNA, 23 bp, Artificial sequence
  SiRNA target sequence
acctacgccgaagacctggacct

SEQ ID NO: 256393 - DNA, 23 bp, Artificial sequence
  SiRNA target sequence
cctacgccgaagacctggacctc

SEQ ID NO: 256394 - DNA, 23 bp, Artificial sequence
  SiRNA target sequence
ctacgccgaagacctggacctcg

SEQ ID NO: 256395 - DNA, 23 bp, Artificial sequence
  SiRNA target sequence
tacgccgaagacctggacctcga

SEQ ID NO: 256396 - DNA, 23 bp, Artificial sequence
  SiRNA target sequence
acgccgaagacctggacctcgac

SEQ ID NO: 256397 - DNA, 23 bp, Artificial sequence
  SiRNA target sequence
cgccgaagacctggacctcgaca

SEQ ID NO: 256398 - DNA, 23 bp, Artificial sequence
  SiRNA target sequence
gccgaagacctggacctcgacac

SEQ ID NO: 256399 - DNA, 23 bp, Artificial sequence
  SiRNA target sequence
ccgaagacctggacctcgacaca

SEQ ID NO: 256400 - DNA, 23 bp, Artificial sequence
  SiRNA target sequence
cgaagacctggacctcgacacag

SEQ ID NO: 256401 - DNA, 23 bp, Artificial sequence
  SiRNA target sequence
gaagacctggacctcgacacagg

SEQ ID NO: 256402 - DNA, 23 bp, Artificial sequence
  SiRNA target sequence
aagacctggacctcgacacaggg

SEQ ID NO: 256403 - DNA, 23 bp, Artificial sequence
  SiRNA target sequence
agacctggacctcgacacagggg

SEQ ID NO: 256404 - DNA, 23 bp, Artificial sequence
  SiRNA target sequence
gacctggacctcgacacaggggt

SEQ ID NO: 256405 - DNA, 23 bp, Artificial sequence
  SiRNA target sequence
acctggacctcgacacaggggtc

SEQ ID NO: 256406 - DNA, 23 bp, Artificial sequence
  SiRNA target sequence
cctggacctcgacacaggggtca

SEQ ID NO: 256407 - DNA, 23 bp, Artificial sequence
  SiRNA target sequence
ctggacctcgacacaggggtcat

SEQ ID NO: 256408 - DNA, 23 bp, Artificial sequence
  SiRNA target sequence
tggacctcgacacaggggtcatt

SEQ ID NO: 256409 - DNA, 23 bp, Artificial sequence
  SiRNA target sequence
ggacctcgacacaggggtcatta

SEQ ID NO: 256410 - DNA, 23 bp, Artificial sequence
  SiRNA target sequence
gacctcgacacaggggtcattat

SEQ ID NO: 256411 - DNA, 23 bp, Artificial sequence
  SiRNA target sequence
acctcgacacaggggtcattatt

SEQ ID NO: 256412 - DNA, 23 bp, Artificial sequence
  SiRNA target sequence
cctcgacacaggggtcattatta

SEQ ID NO: 256413 - DNA, 23 bp, Artificial sequence
  SiRNA target sequence
ctcgacacaggggtcattattat

SEQ ID NO: 256414 - DNA, 23 bp, Artificial sequence
  SiRNA target sequence
tcgacacaggggtcattattatg

SEQ ID NO: 256415 - DNA, 23 bp, Artificial sequence
  SiRNA target sequence
cgacacaggggtcattattatgg

SEQ ID NO: 256416 - DNA, 23 bp, Artificial sequence
  SiRNA target sequence
gacacaggggtcattattatgga

SEQ ID NO: 256417 - DNA, 23 bp, Artificial sequence
  SiRNA target sequence
acacaggggtcattattatggat

SEQ ID NO: 256418 - DNA, 23 bp, Artificial sequence
  SiRNA target sequence
cacaggggtcattattatggatg

SEQ ID NO: 256419 - DNA, 23 bp, Artificial sequence
  SiRNA target sequence
acaggggtcattattatggatgg

SEQ ID NO: 256420 - DNA, 23 bp, Artificial sequence
  SiRNA target sequence
caggggtcattattatggatgga

SEQ ID NO: 256421 - DNA, 23 bp, Artificial sequence
  SiRNA target sequence
aggggtcattattatggatggac

SEQ ID NO: 256422 - DNA, 23 bp, Artificial sequence
  SiRNA target sequence
ggggtcattattatggatggaca

SEQ ID NO: 256423 - DNA, 23 bp, Artificial sequence
  SiRNA target sequence
gggtcattattatggatggacag

SEQ ID NO: 256424 - DNA, 23 bp, Artificial sequence
  SiRNA target sequence
ggtcattattatggatggacagg

SEQ ID NO: 256425 - DNA, 23 bp, Artificial sequence
  SiRNA target sequence
gtcattattatggatggacaggt

SEQ ID NO: 256426 - DNA, 23 bp, Artificial sequence
  SiRNA target sequence
tcattattatggatggacaggtt

SEQ ID NO: 256427 - DNA, 23 bp, Artificial sequence
  SiRNA target sequence
cattattatggatggacaggtta

SEQ ID NO: 256428 - DNA, 23 bp, Artificial sequence
  SiRNA target sequence
attattatggatggacaggttat

SEQ ID NO: 256429 - DNA, 23 bp, Artificial sequence
  SiRNA target sequence
ttattatggatggacaggttatt

SEQ ID NO: 256430 - DNA, 23 bp, Artificial sequence
  SiRNA target sequence
tattatggatggacaggttatta

SEQ ID NO: 256431 - DNA, 23 bp, Artificial sequence
  SiRNA target sequence
attatggatggacaggttattaa

SEQ ID NO: 256432 - DNA, 23 bp, Artificial sequence
  SiRNA target sequence
ttatggatggacaggttattaag

SEQ ID NO: 256433 - DNA, 23 bp, Artificial sequence
  SiRNA target sequence
tatggatggacaggttattaaga

SEQ ID NO: 256434 - DNA, 23 bp, Artificial sequence
  SiRNA target sequence
atggatggacaggttattaagaa

SEQ ID NO: 256435 - DNA, 23 bp, Artificial sequence
  SiRNA target sequence
tggatggacaggttattaagaag

SEQ ID NO: 256436 - DNA, 23 bp, Artificial sequence
  SiRNA target sequence
ggatggacaggttattaagaagg

SEQ ID NO: 256437 - DNA, 23 bp, Artificial sequence
  SiRNA target sequence
gatggacaggttattaagaagga

SEQ ID NO: 256438 - DNA, 23 bp, Artificial sequence
  SiRNA target sequence
atggacaggttattaagaaggat

SEQ ID NO: 256439 - DNA, 23 bp, Artificial sequence
  SiRNA target sequence
tggacaggttattaagaaggata

SEQ ID NO: 256440 - DNA, 23 bp, Artificial sequence
  SiRNA target sequence
ggacaggttattaagaaggatag

SEQ ID NO: 256441 - DNA, 23 bp, Artificial sequence
  SiRNA target sequence
gacaggttattaagaaggatagc

SEQ ID NO: 256442 - DNA, 23 bp, Artificial sequence
  SiRNA target sequence
acaggttattaagaaggatagcc

SEQ ID NO: 256443 - DNA, 23 bp, Artificial sequence
  SiRNA target sequence
caggttattaagaaggatagccc

SEQ ID NO: 256444 - DNA, 23 bp, Artificial sequence
  SiRNA target sequence
aggttattaagaaggatagcccc

SEQ ID NO: 256445 - DNA, 23 bp, Artificial sequence
  SiRNA target sequence
ggttattaagaaggatagcccca

SEQ ID NO: 256446 - DNA, 23 bp, Artificial sequence
  SiRNA target sequence
gttattaagaaggatagccccac

SEQ ID NO: 256447 - DNA, 23 bp, Artificial sequence
  SiRNA target sequence
ttattaagaaggatagccccacg

SEQ ID NO: 256448 - DNA, 23 bp, Artificial sequence
  SiRNA target sequence
tattaagaaggatagccccacgc

SEQ ID NO: 256449 - DNA, 23 bp, Artificial sequence
  SiRNA target sequence
attaagaaggatagccccacgcc

SEQ ID NO: 256450 - DNA, 23 bp, Artificial sequence
  SiRNA target sequence
ttaagaaggatagccccacgccc

SEQ ID NO: 256451 - DNA, 23 bp, Artificial sequence
  SiRNA target sequence
taagaaggatagccccacgcccg

SEQ ID NO: 256452 - DNA, 23 bp, Artificial sequence
  SiRNA target sequence
aagaaggatagccccacgcccga

SEQ ID NO: 256453 - DNA, 23 bp, Artificial sequence
  SiRNA target sequence
agaaggatagccccacgcccgaa

SEQ ID NO: 256454 - DNA, 23 bp, Artificial sequence
  SiRNA target sequence
gaaggatagccccacgcccgaac

SEQ ID NO: 256455 - DNA, 23 bp, Artificial sequence
  SiRNA target sequence
aaggatagccccacgcccgaact

SEQ ID NO: 256456 - DNA, 23 bp, Artificial sequence
  SiRNA target sequence
aggatagccccacgcccgaactc

SEQ ID NO: 256457 - DNA, 23 bp, Artificial sequence
  SiRNA target sequence
ggatagccccacgcccgaactca

SEQ ID NO: 256458 - DNA, 23 bp, Artificial sequence
  SiRNA target sequence
gatagccccacgcccgaactcat

SEQ ID NO: 256459 - DNA, 23 bp, Artificial sequence
  SiRNA target sequence
atagccccacgcccgaactcatc

SEQ ID NO: 256460 - DNA, 23 bp, Artificial sequence
  SiRNA target sequence
tagccccacgcccgaactcatcg

SEQ ID NO: 256461 - DNA, 23 bp, Artificial sequence
  SiRNA target sequence
agccccacgcccgaactcatcga

SEQ ID NO: 256462 - DNA, 23 bp, Artificial sequence
  SiRNA target sequence
gccccacgcccgaactcatcgat

SEQ ID NO: 256463 - DNA, 23 bp, Artificial sequence
  SiRNA target sequence
ccccacgcccgaactcatcgatg

SEQ ID NO: 256464 - DNA, 23 bp, Artificial sequence
  SiRNA target sequence
cccacgcccgaactcatcgatgg

SEQ ID NO: 256465 - DNA, 23 bp, Artificial sequence
  SiRNA target sequence
ccacgcccgaactcatcgatggg

SEQ ID NO: 256466 - DNA, 23 bp, Artificial sequence
  SiRNA target sequence
cacgcccgaactcatcgatgggt

SEQ ID NO: 256467 - DNA, 23 bp, Artificial sequence
  SiRNA target sequence
acgcccgaactcatcgatgggtt

SEQ ID NO: 256468 - DNA, 23 bp, Artificial sequence
  SiRNA target sequence
cgcccgaactcatcgatgggttg

SEQ ID NO: 256469 - DNA, 23 bp, Artificial sequence
  SiRNA target sequence
gcccgaactcatcgatgggttgg

SEQ ID NO: 256470 - DNA, 23 bp, Artificial sequence
  SiRNA target sequence
cccgaactcatcgatgggttgga

SEQ ID NO: 256471 - DNA, 23 bp, Artificial sequence
  SiRNA target sequence
ccgaactcatcgatgggttggat

SEQ ID NO: 256472 - DNA, 23 bp, Artificial sequence
  SiRNA target sequence
cgaactcatcgatgggttggatg

SEQ ID NO: 256473 - DNA, 23 bp, Artificial sequence
  SiRNA target sequence
gaactcatcgatgggttggatgt

SEQ ID NO: 256474 - DNA, 23 bp, Artificial sequence
  SiRNA target sequence
aactcatcgatgggttggatgtt

SEQ ID NO: 256475 - DNA, 23 bp, Artificial sequence
  SiRNA target sequence
actcatcgatgggttggatgttg

SEQ ID NO: 256476 - DNA, 23 bp, Artificial sequence
  SiRNA target sequence
ctcatcgatgggttggatgttgg

SEQ ID NO: 256477 - DNA, 23 bp, Artificial sequence
  SiRNA target sequence
tcatcgatgggttggatgttggt

SEQ ID NO: 256478 - DNA, 23 bp, Artificial sequence
  SiRNA target sequence
catcgatgggttggatgttggtt

SEQ ID NO: 256479 - DNA, 23 bp, Artificial sequence
  SiRNA target sequence
atcgatgggttggatgttggttt

SEQ ID NO: 256480 - DNA, 23 bp, Artificial sequence
  SiRNA target sequence
tcgatgggttggatgttggtttt

SEQ ID NO: 256481 - DNA, 23 bp, Artificial sequence
  SiRNA target sequence
cgatgggttggatgttggttttc

SEQ ID NO: 256482 - DNA, 23 bp, Artificial sequence
  SiRNA target sequence
gatgggttggatgttggttttca

SEQ ID NO: 256483 - DNA, 23 bp, Artificial sequence
  SiRNA target sequence
atgggttggatgttggttttcaa

SEQ ID NO: 256484 - DNA, 23 bp, Artificial sequence
  SiRNA target sequence
tgggttggatgttggttttcaag

SEQ ID NO: 256485 - DNA, 23 bp, Artificial sequence
  SiRNA target sequence
gggttggatgttggttttcaagc

SEQ ID NO: 256486 - DNA, 23 bp, Artificial sequence
  SiRNA target sequence
ggttggatgttggttttcaagct

SEQ ID NO: 256487 - DNA, 23 bp, Artificial sequence
  SiRNA target sequence
gttggatgttggttttcaagctg

SEQ ID NO: 256488 - DNA, 23 bp, Artificial sequence
  SiRNA target sequence
ttggatgttggttttcaagctga

SEQ ID NO: 256489 - DNA, 23 bp, Artificial sequence
  SiRNA target sequence
tggatgttggttttcaagctgat

SEQ ID NO: 256490 - DNA, 23 bp, Artificial sequence
  SiRNA target sequence
ggatgttggttttcaagctgata

SEQ ID NO: 256491 - DNA, 23 bp, Artificial sequence
  SiRNA target sequence
gatgttggttttcaagctgataa

SEQ ID NO: 256492 - DNA, 23 bp, Artificial sequence
  SiRNA target sequence
atgttggttttcaagctgataag

SEQ ID NO: 256493 - DNA, 23 bp, Artificial sequence
  SiRNA target sequence
tgttggttttcaagctgataagc

SEQ ID NO: 256494 - DNA, 23 bp, Artificial sequence
  SiRNA target sequence
gttggttttcaagctgataagca

SEQ ID NO: 256495 - DNA, 23 bp, Artificial sequence
  SiRNA target sequence
ttggttttcaagctgataagcaa

SEQ ID NO: 256496 - DNA, 23 bp, Artificial sequence
  SiRNA target sequence
tggttttcaagctgataagcaac

SEQ ID NO: 256497 - DNA, 23 bp, Artificial sequence
  SiRNA target sequence
ggttttcaagctgataagcaaca

SEQ ID NO: 256498 - DNA, 23 bp, Artificial sequence
  SiRNA target sequence
gttttcaagctgataagcaacag

SEQ ID NO: 256499 - DNA, 23 bp, Artificial sequence
  SiRNA target sequence
ttttcaagctgataagcaacagg

SEQ ID NO: 256500 - DNA, 23 bp, Artificial sequence
  SiRNA target sequence
tttcaagctgataagcaacaggc

SEQ ID NO: 256501 - DNA, 23 bp, Artificial sequence
  SiRNA target sequence
ttcaagctgataagcaacaggcg

SEQ ID NO: 256502 - DNA, 23 bp, Artificial sequence
  SiRNA target sequence
tcaagctgataagcaacaggcgc

SEQ ID NO: 256503 - DNA, 23 bp, Artificial sequence
  SiRNA target sequence
caagctgataagcaacaggcgca

SEQ ID NO: 256504 - DNA, 23 bp, Artificial sequence
  SiRNA target sequence
aagctgataagcaacaggcgcag

SEQ ID NO: 256505 - DNA, 23 bp, Artificial sequence
  SiRNA target sequence
agctgataagcaacaggcgcagg

SEQ ID NO: 256506 - DNA, 23 bp, Artificial sequence
  SiRNA target sequence
gctgataagcaacaggcgcaggt

SEQ ID NO: 256507 - DNA, 23 bp, Artificial sequence
  SiRNA target sequence
ctgataagcaacaggcgcaggtg

SEQ ID NO: 256508 - DNA, 23 bp, Artificial sequence
  SiRNA target sequence
tgataagcaacaggcgcaggtga

SEQ ID NO: 256509 - DNA, 23 bp, Artificial sequence
  SiRNA target sequence
gataagcaacaggcgcaggtgat

SEQ ID NO: 256510 - DNA, 23 bp, Artificial sequence
  SiRNA target sequence
ataagcaacaggcgcaggtgatt

SEQ ID NO: 256511 - DNA, 23 bp, Artificial sequence
  SiRNA target sequence
taagcaacaggcgcaggtgattg

SEQ ID NO: 256512 - DNA, 23 bp, Artificial sequence
  SiRNA target sequence
aagcaacaggcgcaggtgattgt

SEQ ID NO: 256513 - DNA, 23 bp, Artificial sequence
  SiRNA target sequence
agcaacaggcgcaggtgattgta

SEQ ID NO: 256514 - DNA, 23 bp, Artificial sequence
  SiRNA target sequence
gcaacaggcgcaggtgattgtaa

SEQ ID NO: 256515 - DNA, 23 bp, Artificial sequence
  SiRNA target sequence
caacaggcgcaggtgattgtaat

SEQ ID NO: 256516 - DNA, 23 bp, Artificial sequence
  SiRNA target sequence
aacaggcgcaggtgattgtaatg

SEQ ID NO: 256517 - DNA, 23 bp, Artificial sequence
  SiRNA target sequence
acaggcgcaggtgattgtaatgc

SEQ ID NO: 256518 - DNA, 23 bp, Artificial sequence
  SiRNA target sequence
caggcgcaggtgattgtaatgca

SEQ ID NO: 256519 - DNA, 23 bp, Artificial sequence
  SiRNA target sequence
aggcgcaggtgattgtaatgcaa

SEQ ID NO: 256520 - DNA, 23 bp, Artificial sequence
  SiRNA target sequence
ggcgcaggtgattgtaatgcaaa

SEQ ID NO: 256521 - DNA, 23 bp, Artificial sequence
  SiRNA target sequence
gcgcaggtgattgtaatgcaaaa

SEQ ID NO: 256522 - DNA, 23 bp, Artificial sequence
  SiRNA target sequence
cgcaggtgattgtaatgcaaaag

SEQ ID NO: 256523 - DNA, 23 bp, Artificial sequence
  SiRNA target sequence
gcaggtgattgtaatgcaaaagc

SEQ ID NO: 256524 - DNA, 23 bp, Artificial sequence
  SiRNA target sequence
caggtgattgtaatgcaaaagct

SEQ ID NO: 256525 - DNA, 23 bp, Artificial sequence
  SiRNA target sequence
aggtgattgtaatgcaaaagctt

SEQ ID NO: 256526 - DNA, 23 bp, Artificial sequence
  SiRNA target sequence
ggtgattgtaatgcaaaagctta

SEQ ID NO: 256527 - DNA, 23 bp, Artificial sequence
  SiRNA target sequence
gtgattgtaatgcaaaagcttaa

SEQ ID NO: 256528 - DNA, 23 bp, Artificial sequence
  SiRNA target sequence
tgattgtaatgcaaaagcttaaa

SEQ ID NO: 256529 - DNA, 23 bp, Artificial sequence
  SiRNA target sequence
gattgtaatgcaaaagcttaaaa

SEQ ID NO: 256530 - DNA, 23 bp, Artificial sequence
  SiRNA target sequence
attgtaatgcaaaagcttaaaaa

SEQ ID NO: 256531 - DNA, 23 bp, Artificial sequence
  SiRNA target sequence
ttgtaatgcaaaagcttaaaaac

SEQ ID NO: 256532 - DNA, 23 bp, Artificial sequence
  SiRNA target sequence
tgtaatgcaaaagcttaaaaaca

SEQ ID NO: 256533 - DNA, 23 bp, Artificial sequence
  SiRNA target sequence
gtaatgcaaaagcttaaaaacaa

SEQ ID NO: 256534 - DNA, 23 bp, Artificial sequence
  SiRNA target sequence
taatgcaaaagcttaaaaacaat

SEQ ID NO: 256535 - DNA, 23 bp, Artificial sequence
  SiRNA target sequence
aatgcaaaagcttaaaaacaatt

SEQ ID NO: 256536 - DNA, 23 bp, Artificial sequence
  SiRNA target sequence
atgcaaaagcttaaaaacaattc

SEQ ID NO: 256537 - DNA, 23 bp, Artificial sequence
  SiRNA target sequence
tgcaaaagcttaaaaacaattcc

SEQ ID NO: 256538 - DNA, 23 bp, Artificial sequence
  SiRNA target sequence
gcaaaagcttaaaaacaattccc

SEQ ID NO: 256539 - DNA, 23 bp, Artificial sequence
  SiRNA target sequence
caaaagcttaaaaacaattcccg

SEQ ID NO: 256540 - DNA, 23 bp, Artificial sequence
  SiRNA target sequence
aaaagcttaaaaacaattcccga

SEQ ID NO: 256541 - DNA, 23 bp, Artificial sequence
  SiRNA target sequence
aaagcttaaaaacaattcccgac

SEQ ID NO: 256542 - DNA, 23 bp, Artificial sequence
  SiRNA target sequence
aagcttaaaaacaattcccgacc

SEQ ID NO: 256543 - DNA, 23 bp, Artificial sequence
  SiRNA target sequence
agcttaaaaacaattcccgacct

SEQ ID NO: 256544 - DNA, 23 bp, Artificial sequence
  SiRNA target sequence
gcttaaaaacaattcccgaccta

SEQ ID NO: 256545 - DNA, 23 bp, Artificial sequence
  SiRNA target sequence
cttaaaaacaattcccgacctat

SEQ ID NO: 256546 - DNA, 23 bp, Artificial sequence
  SiRNA target sequence
ttaaaaacaattcccgacctatc

SEQ ID NO: 256547 - DNA, 23 bp, Artificial sequence
  SiRNA target sequence
taaaaacaattcccgacctatca

SEQ ID NO: 256548 - DNA, 23 bp, Artificial sequence
  SiRNA target sequence
aaaaacaattcccgacctatcat

SEQ ID NO: 256549 - DNA, 23 bp, Artificial sequence
  SiRNA target sequence
aaaacaattcccgacctatcatt

SEQ ID NO: 256550 - DNA, 23 bp, Artificial sequence
  SiRNA target sequence
aaacaattcccgacctatcattg

SEQ ID NO: 256551 - DNA, 23 bp, Artificial sequence
  SiRNA target sequence
aacaattcccgacctatcattgg

SEQ ID NO: 256552 - DNA, 23 bp, Artificial sequence
  SiRNA target sequence
acaattcccgacctatcattggc

SEQ ID NO: 256553 - DNA, 23 bp, Artificial sequence
  SiRNA target sequence
caattcccgacctatcattggcg

SEQ ID NO: 256554 - DNA, 23 bp, Artificial sequence
  SiRNA target sequence
aattcccgacctatcattggcga

SEQ ID NO: 256555 - DNA, 23 bp, Artificial sequence
  SiRNA target sequence
attcccgacctatcattggcgac

SEQ ID NO: 256556 - DNA, 23 bp, Artificial sequence
  SiRNA target sequence
ttcccgacctatcattggcgact

SEQ ID NO: 256557 - DNA, 23 bp, Artificial sequence
  SiRNA target sequence
tcccgacctatcattggcgactc

SEQ ID NO: 256558 - DNA, 23 bp, Artificial sequence
  SiRNA target sequence
cccgacctatcattggcgactca

SEQ ID NO: 256559 - DNA, 23 bp, Artificial sequence
  SiRNA target sequence
ccgacctatcattggcgactcaa

SEQ ID NO: 256560 - DNA, 23 bp, Artificial sequence
  SiRNA target sequence
cgacctatcattggcgactcaaa

SEQ ID NO: 256561 - DNA, 23 bp, Artificial sequence
  SiRNA target sequence
gacctatcattggcgactcaaag

SEQ ID NO: 256562 - DNA, 23 bp, Artificial sequence
  SiRNA target sequence
acctatcattggcgactcaaagg

SEQ ID NO: 256563 - DNA, 23 bp, Artificial sequence
  SiRNA target sequence
cctatcattggcgactcaaagga

SEQ ID NO: 256564 - DNA, 23 bp, Artificial sequence
  SiRNA target sequence
ctatcattggcgactcaaaggaa

SEQ ID NO: 256565 - DNA, 23 bp, Artificial sequence
  SiRNA target sequence
tatcattggcgactcaaaggaat

SEQ ID NO: 256566 - DNA, 23 bp, Artificial sequence
  SiRNA target sequence
atcattggcgactcaaaggaatt

SEQ ID NO: 256567 - DNA, 23 bp, Artificial sequence
  SiRNA target sequence
tcattggcgactcaaaggaattt

SEQ ID NO: 256568 - DNA, 23 bp, Artificial sequence
  SiRNA target sequence
cattggcgactcaaaggaattta

SEQ ID NO: 256569 - DNA, 23 bp, Artificial sequence
  SiRNA target sequence
attggcgactcaaaggaatttag

SEQ ID NO: 256570 - DNA, 23 bp, Artificial sequence
  SiRNA target sequence
ttggcgactcaaaggaatttagc

SEQ ID NO: 256571 - DNA, 23 bp, Artificial sequence
  SiRNA target sequence
tggcgactcaaaggaatttagca

SEQ ID NO: 256572 - DNA, 23 bp, Artificial sequence
  SiRNA target sequence
ggcgactcaaaggaatttagcaa

SEQ ID NO: 256573 - DNA, 23 bp, Artificial sequence
  SiRNA target sequence
gcgactcaaaggaatttagcaac

SEQ ID NO: 256574 - DNA, 23 bp, Artificial sequence
  SiRNA target sequence
cgactcaaaggaatttagcaaca

SEQ ID NO: 256575 - DNA, 23 bp, Artificial sequence
  SiRNA target sequence
gactcaaaggaatttagcaacaa

SEQ ID NO: 256576 - DNA, 23 bp, Artificial sequence
  SiRNA target sequence
actcaaaggaatttagcaacaaa

SEQ ID NO: 256577 - DNA, 23 bp, Artificial sequence
  SiRNA target sequence
ctcaaaggaatttagcaacaaag

SEQ ID NO: 256578 - DNA, 23 bp, Artificial sequence
  SiRNA target sequence
tcaaaggaatttagcaacaaagt

SEQ ID NO: 256579 - DNA, 23 bp, Artificial sequence
  SiRNA target sequence
caaaggaatttagcaacaaagtt

SEQ ID NO: 256580 - DNA, 23 bp, Artificial sequence
  SiRNA target sequence
aaaggaatttagcaacaaagttc

SEQ ID NO: 256581 - DNA, 23 bp, Artificial sequence
  SiRNA target sequence
aaggaatttagcaacaaagttca

SEQ ID NO: 256582 - DNA, 23 bp, Artificial sequence
  SiRNA target sequence
aggaatttagcaacaaagttcat

SEQ ID NO: 256583 - DNA, 23 bp, Artificial sequence
  SiRNA target sequence
ggaatttagcaacaaagttcatc

SEQ ID NO: 256584 - DNA, 23 bp, Artificial sequence
  SiRNA target sequence
gaatttagcaacaaagttcatcc

SEQ ID NO: 256585 - DNA, 23 bp, Artificial sequence
  SiRNA target sequence
aatttagcaacaaagttcatcca

SEQ ID NO: 256586 - DNA, 23 bp, Artificial sequence
  SiRNA target sequence
atttagcaacaaagttcatccag

SEQ ID NO: 256587 - DNA, 23 bp, Artificial sequence
  SiRNA target sequence
tttagcaacaaagttcatccagg

SEQ ID NO: 256588 - DNA, 23 bp, Artificial sequence
  SiRNA target sequence
ttagcaacaaagttcatccaggc

SEQ ID NO: 256589 - DNA, 23 bp, Artificial sequence
  SiRNA target sequence
tagcaacaaagttcatccaggcc

SEQ ID NO: 256590 - DNA, 23 bp, Artificial sequence
  SiRNA target sequence
agcaacaaagttcatccaggccc

SEQ ID NO: 256591 - DNA, 23 bp, Artificial sequence
  SiRNA target sequence
gcaacaaagttcatccaggcccc

SEQ ID NO: 256592 - DNA, 23 bp, Artificial sequence
  SiRNA target sequence
caacaaagttcatccaggccccg

SEQ ID NO: 256593 - DNA, 23 bp, Artificial sequence
  SiRNA target sequence
aacaaagttcatccaggccccga

SEQ ID NO: 256594 - DNA, 23 bp, Artificial sequence
  SiRNA target sequence
acaaagttcatccaggccccgac

SEQ ID NO: 256595 - DNA, 23 bp, Artificial sequence
  SiRNA target sequence
caaagttcatccaggccccgact

SEQ ID NO: 256596 - DNA, 23 bp, Artificial sequence
  SiRNA target sequence
aaagttcatccaggccccgactt

SEQ ID NO: 256597 - DNA, 23 bp, Artificial sequence
  SiRNA target sequence
aagttcatccaggccccgacttt

SEQ ID NO: 256598 - DNA, 23 bp, Artificial sequence
  SiRNA target sequence
agttcatccaggccccgactttt

SEQ ID NO: 256599 - DNA, 23 bp, Artificial sequence
  SiRNA target sequence
gttcatccaggccccgacttttg

SEQ ID NO: 256600 - DNA, 23 bp, Artificial sequence
  SiRNA target sequence
ttcatccaggccccgacttttgc

SEQ ID NO: 256601 - DNA, 23 bp, Artificial sequence
  SiRNA target sequence
tcatccaggccccgacttttgcc

SEQ ID NO: 256602 - DNA, 23 bp, Artificial sequence
  SiRNA target sequence
catccaggccccgacttttgcct

SEQ ID NO: 256603 - DNA, 23 bp, Artificial sequence
  SiRNA target sequence
atccaggccccgacttttgcctg

SEQ ID NO: 256604 - DNA, 23 bp, Artificial sequence
  SiRNA target sequence
tccaggccccgacttttgcctgg

SEQ ID NO: 256605 - DNA, 23 bp, Artificial sequence
  SiRNA target sequence
ccaggccccgacttttgcctggt

SEQ ID NO: 256606 - DNA, 23 bp, Artificial sequence
  SiRNA target sequence
caggccccgacttttgcctggta

SEQ ID NO: 256607 - DNA, 23 bp, Artificial sequence
  SiRNA target sequence
aggccccgacttttgcctggtaa

SEQ ID NO: 256608 - DNA, 23 bp, Artificial sequence
  SiRNA target sequence
ggccccgacttttgcctggtaaa

SEQ ID NO: 256609 - DNA, 23 bp, Artificial sequence
  SiRNA target sequence
gccccgacttttgcctggtaaag

SEQ ID NO: 256610 - DNA, 23 bp, Artificial sequence
  SiRNA target sequence
ccccgacttttgcctggtaaagc

SEQ ID NO: 256611 - DNA, 23 bp, Artificial sequence
  SiRNA target sequence
cccgacttttgcctggtaaagcc

SEQ ID NO: 256612 - DNA, 23 bp, Artificial sequence
  SiRNA target sequence
ccgacttttgcctggtaaagccg

SEQ ID NO: 256613 - DNA, 23 bp, Artificial sequence
  SiRNA target sequence
cgacttttgcctggtaaagccga

SEQ ID NO: 256614 - DNA, 23 bp, Artificial sequence
  SiRNA target sequence
gacttttgcctggtaaagccgaa

SEQ ID NO: 256615 - DNA, 23 bp, Artificial sequence
  SiRNA target sequence
acttttgcctggtaaagccgaac

SEQ ID NO: 256616 - DNA, 23 bp, Artificial sequence
  SiRNA target sequence
cttttgcctggtaaagccgaacg

SEQ ID NO: 256617 - DNA, 23 bp, Artificial sequence
  SiRNA target sequence
ttttgcctggtaaagccgaacga

SEQ ID NO: 256618 - DNA, 23 bp, Artificial sequence
  SiRNA target sequence
tttgcctggtaaagccgaacgac

SEQ ID NO: 256619 - DNA, 23 bp, Artificial sequence
  SiRNA target sequence
ttgcctggtaaagccgaacgaca

SEQ ID NO: 256620 - DNA, 23 bp, Artificial sequence
  SiRNA target sequence
tgcctggtaaagccgaacgacaa

SEQ ID NO: 256621 - DNA, 23 bp, Artificial sequence
  SiRNA target sequence
gcctggtaaagccgaacgacaac

SEQ ID NO: 256622 - DNA, 23 bp, Artificial sequence
  SiRNA target sequence
cctggtaaagccgaacgacaacg

SEQ ID NO: 256623 - DNA, 23 bp, Artificial sequence
  SiRNA target sequence
ctggtaaagccgaacgacaacgg

SEQ ID NO: 256624 - DNA, 23 bp, Artificial sequence
  SiRNA target sequence
tggtaaagccgaacgacaacggc

SEQ ID NO: 256625 - DNA, 23 bp, Artificial sequence
  SiRNA target sequence
ggtaaagccgaacgacaacggcg

SEQ ID NO: 256626 - DNA, 23 bp, Artificial sequence
  SiRNA target sequence
gtaaagccgaacgacaacggcga

SEQ ID NO: 256627 - DNA, 23 bp, Artificial sequence
  SiRNA target sequence
taaagccgaacgacaacggcgaa

SEQ ID NO: 256628 - DNA, 23 bp, Artificial sequence
  SiRNA target sequence
aaagccgaacgacaacggcgaag

SEQ ID NO: 256629 - DNA, 23 bp, Artificial sequence
  SiRNA target sequence
aagccgaacgacaacggcgaagg

SEQ ID NO: 256630 - DNA, 23 bp, Artificial sequence
  SiRNA target sequence
agccgaacgacaacggcgaaggc

SEQ ID NO: 256631 - DNA, 23 bp, Artificial sequence
  SiRNA target sequence
gccgaacgacaacggcgaaggcc

SEQ ID NO: 256632 - DNA, 23 bp, Artificial sequence
  SiRNA target sequence
ccgaacgacaacggcgaaggcct

SEQ ID NO: 256633 - DNA, 23 bp, Artificial sequence
  SiRNA target sequence
cgaacgacaacggcgaaggcctc

SEQ ID NO: 256634 - DNA, 23 bp, Artificial sequence
  SiRNA target sequence
gaacgacaacggcgaaggcctcg

SEQ ID NO: 256635 - DNA, 23 bp, Artificial sequence
  SiRNA target sequence
aacgacaacggcgaaggcctcgt

SEQ ID NO: 256636 - DNA, 23 bp, Artificial sequence
  SiRNA target sequence
acgacaacggcgaaggcctcgtg

SEQ ID NO: 256637 - DNA, 23 bp, Artificial sequence
  SiRNA target sequence
cgacaacggcgaaggcctcgtgc

SEQ ID NO: 256638 - DNA, 23 bp, Artificial sequence
  SiRNA target sequence
gacaacggcgaaggcctcgtgca

SEQ ID NO: 256639 - DNA, 23 bp, Artificial sequence
  SiRNA target sequence
acaacggcgaaggcctcgtgcaa

SEQ ID NO: 256640 - DNA, 23 bp, Artificial sequence
  SiRNA target sequence
caacggcgaaggcctcgtgcaag

SEQ ID NO: 256641 - DNA, 23 bp, Artificial sequence
  SiRNA target sequence
aacggcgaaggcctcgtgcaaga

SEQ ID NO: 256642 - DNA, 23 bp, Artificial sequence
  SiRNA target sequence
acggcgaaggcctcgtgcaagac

SEQ ID NO: 256643 - DNA, 23 bp, Artificial sequence
  SiRNA target sequence
cggcgaaggcctcgtgcaagaca

SEQ ID NO: 256644 - DNA, 23 bp, Artificial sequence
  SiRNA target sequence
ggcgaaggcctcgtgcaagacac

SEQ ID NO: 256645 - DNA, 23 bp, Artificial sequence
  SiRNA target sequence
gcgaaggcctcgtgcaagacacc

SEQ ID NO: 256646 - DNA, 23 bp, Artificial sequence
  SiRNA target sequence
cgaaggcctcgtgcaagacaccg

SEQ ID NO: 256647 - DNA, 23 bp, Artificial sequence
  SiRNA target sequence
gaaggcctcgtgcaagacaccga

SEQ ID NO: 256648 - DNA, 23 bp, Artificial sequence
  SiRNA target sequence
aaggcctcgtgcaagacaccgag

SEQ ID NO: 256649 - DNA, 23 bp, Artificial sequence
  SiRNA target sequence
aggcctcgtgcaagacaccgagc

SEQ ID NO: 256650 - DNA, 23 bp, Artificial sequence
  SiRNA target sequence
ggcctcgtgcaagacaccgagct

SEQ ID NO: 256651 - DNA, 23 bp, Artificial sequence
  SiRNA target sequence
gcctcgtgcaagacaccgagctt

SEQ ID NO: 256652 - DNA, 23 bp, Artificial sequence
  SiRNA target sequence
cctcgtgcaagacaccgagcttg

SEQ ID NO: 256653 - DNA, 23 bp, Artificial sequence
  SiRNA target sequence
ctcgtgcaagacaccgagcttgg

SEQ ID NO: 256654 - DNA, 23 bp, Artificial sequence
  SiRNA target sequence
tcgtgcaagacaccgagcttggg

SEQ ID NO: 256655 - DNA, 23 bp, Artificial sequence
  SiRNA target sequence
cgtgcaagacaccgagcttgggg

SEQ ID NO: 256656 - DNA, 23 bp, Artificial sequence
  SiRNA target sequence
gtgcaagacaccgagcttggggc

SEQ ID NO: 256657 - DNA, 23 bp, Artificial sequence
  SiRNA target sequence
tgcaagacaccgagcttggggcc

SEQ ID NO: 256658 - DNA, 23 bp, Artificial sequence
  SiRNA target sequence
gcaagacaccgagcttggggcct

SEQ ID NO: 256659 - DNA, 23 bp, Artificial sequence
  SiRNA target sequence
caagacaccgagcttggggcctc

SEQ ID NO: 256660 - DNA, 23 bp, Artificial sequence
  SiRNA target sequence
aagacaccgagcttggggcctcc

SEQ ID NO: 256661 - DNA, 23 bp, Artificial sequence
  SiRNA target sequence
agacaccgagcttggggcctcca

SEQ ID NO: 256662 - DNA, 23 bp, Artificial sequence
  SiRNA target sequence
gacaccgagcttggggcctccac

SEQ ID NO: 256663 - DNA, 23 bp, Artificial sequence
  SiRNA target sequence
acaccgagcttggggcctccacg

SEQ ID NO: 256664 - DNA, 23 bp, Artificial sequence
  SiRNA target sequence
caccgagcttggggcctccacgc

SEQ ID NO: 256665 - DNA, 23 bp, Artificial sequence
  SiRNA target sequence
accgagcttggggcctccacgcc

SEQ ID NO: 256666 - DNA, 23 bp, Artificial sequence
  SiRNA target sequence
ccgagcttggggcctccacgccg

SEQ ID NO: 256667 - DNA, 23 bp, Artificial sequence
  SiRNA target sequence
cgagcttggggcctccacgccgc

SEQ ID NO: 256668 - DNA, 23 bp, Artificial sequence
  SiRNA target sequence
gagcttggggcctccacgccgct

SEQ ID NO: 256669 - DNA, 23 bp, Artificial sequence
  SiRNA target sequence
agcttggggcctccacgccgctc

SEQ ID NO: 256670 - DNA, 23 bp, Artificial sequence
  SiRNA target sequence
gcttggggcctccacgccgctca

SEQ ID NO: 256671 - DNA, 23 bp, Artificial sequence
  SiRNA target sequence
cttggggcctccacgccgctcag

SEQ ID NO: 256672 - DNA, 23 bp, Artificial sequence
  SiRNA target sequence
ttggggcctccacgccgctcagc

SEQ ID NO: 256673 - DNA, 23 bp, Artificial sequence
  SiRNA target sequence
tggggcctccacgccgctcagct

SEQ ID NO: 256674 - DNA, 23 bp, Artificial sequence
  SiRNA target sequence
ggggcctccacgccgctcagctc

SEQ ID NO: 256675 - DNA, 23 bp, Artificial sequence
  SiRNA target sequence
gggcctccacgccgctcagctcg

SEQ ID NO: 256676 - DNA, 23 bp, Artificial sequence
  SiRNA target sequence
ggcctccacgccgctcagctcgc

SEQ ID NO: 256677 - DNA, 23 bp, Artificial sequence
  SiRNA target sequence
gcctccacgccgctcagctcgcc

SEQ ID NO: 256678 - DNA, 23 bp, Artificial sequence
  SiRNA target sequence
cctccacgccgctcagctcgcct

SEQ ID NO: 256679 - DNA, 23 bp, Artificial sequence
  SiRNA target sequence
ctccacgccgctcagctcgcctt

SEQ ID NO: 256680 - DNA, 23 bp, Artificial sequence
  SiRNA target sequence
tccacgccgctcagctcgccttc

SEQ ID NO: 256681 - DNA, 23 bp, Artificial sequence
  SiRNA target sequence
ccacgccgctcagctcgccttcc

SEQ ID NO: 256682 - DNA, 23 bp, Artificial sequence
  SiRNA target sequence
cacgccgctcagctcgccttcct

SEQ ID NO: 256683 - DNA, 23 bp, Artificial sequence
  SiRNA target sequence
acgccgctcagctcgccttcctg

SEQ ID NO: 256684 - DNA, 23 bp, Artificial sequence
  SiRNA target sequence
cgccgctcagctcgccttcctgt

SEQ ID NO: 256685 - DNA, 23 bp, Artificial sequence
  SiRNA target sequence
gccgctcagctcgccttcctgta

SEQ ID NO: 256686 - DNA, 23 bp, Artificial sequence
  SiRNA target sequence
ccgctcagctcgccttcctgtat

SEQ ID NO: 256687 - DNA, 23 bp, Artificial sequence
  SiRNA target sequence
cgctcagctcgccttcctgtata

SEQ ID NO: 256688 - DNA, 23 bp, Artificial sequence
  SiRNA target sequence
gctcagctcgccttcctgtatag

SEQ ID NO: 256689 - DNA, 23 bp, Artificial sequence
  SiRNA target sequence
ctcagctcgccttcctgtatagt

SEQ ID NO: 256690 - DNA, 23 bp, Artificial sequence
  SiRNA target sequence
tcagctcgccttcctgtatagtt

SEQ ID NO: 256691 - DNA, 23 bp, Artificial sequence
  SiRNA target sequence
cagctcgccttcctgtatagttg

SEQ ID NO: 256692 - DNA, 23 bp, Artificial sequence
  SiRNA target sequence
agctcgccttcctgtatagttga

SEQ ID NO: 256693 - DNA, 23 bp, Artificial sequence
  SiRNA target sequence
gctcgccttcctgtatagttgaa

SEQ ID NO: 256694 - DNA, 23 bp, Artificial sequence
  SiRNA target sequence
ctcgccttcctgtatagttgaac

SEQ ID NO: 256695 - DNA, 23 bp, Artificial sequence
  SiRNA target sequence
tcgccttcctgtatagttgaaca

SEQ ID NO: 256696 - DNA, 23 bp, Artificial sequence
  SiRNA target sequence
cgccttcctgtatagttgaacag

SEQ ID NO: 256697 - DNA, 23 bp, Artificial sequence
  SiRNA target sequence
gccttcctgtatagttgaacagc

SEQ ID NO: 256698 - DNA, 23 bp, Artificial sequence
  SiRNA target sequence
ccttcctgtatagttgaacagcc

SEQ ID NO: 256699 - DNA, 23 bp, Artificial sequence
  SiRNA target sequence
cttcctgtatagttgaacagcct

SEQ ID NO: 256700 - DNA, 23 bp, Artificial sequence
  SiRNA target sequence
ttcctgtatagttgaacagcctc

SEQ ID NO: 256701 - DNA, 23 bp, Artificial sequence
  SiRNA target sequence
tcctgtatagttgaacagcctct

SEQ ID NO: 256702 - DNA, 23 bp, Artificial sequence
  SiRNA target sequence
cctgtatagttgaacagcctctg

SEQ ID NO: 256703 - DNA, 23 bp, Artificial sequence
  SiRNA target sequence
ctgtatagttgaacagcctctgt

SEQ ID NO: 256704 - DNA, 23 bp, Artificial sequence
  SiRNA target sequence
tgtatagttgaacagcctctgtc

SEQ ID NO: 256705 - DNA, 23 bp, Artificial sequence
  SiRNA target sequence
gtatagttgaacagcctctgtct

SEQ ID NO: 256706 - DNA, 23 bp, Artificial sequence
  SiRNA target sequence
tatagttgaacagcctctgtctc

SEQ ID NO: 256707 - DNA, 23 bp, Artificial sequence
  SiRNA target sequence
atagttgaacagcctctgtctca

SEQ ID NO: 256708 - DNA, 23 bp, Artificial sequence
  SiRNA target sequence
tagttgaacagcctctgtctcac

SEQ ID NO: 256709 - DNA, 23 bp, Artificial sequence
  SiRNA target sequence
agttgaacagcctctgtctcacg

SEQ ID NO: 256710 - DNA, 23 bp, Artificial sequence
  SiRNA target sequence
gttgaacagcctctgtctcacga

SEQ ID NO: 256711 - DNA, 23 bp, Artificial sequence
  SiRNA target sequence
ttgaacagcctctgtctcacgac

SEQ ID NO: 256712 - DNA, 23 bp, Artificial sequence
  SiRNA target sequence
tgaacagcctctgtctcacgaca

SEQ ID NO: 256713 - DNA, 23 bp, Artificial sequence
  SiRNA target sequence
gaacagcctctgtctcacgacag

SEQ ID NO: 256714 - DNA, 23 bp, Artificial sequence
  SiRNA target sequence
aacagcctctgtctcacgacagt

SEQ ID NO: 256715 - DNA, 23 bp, Artificial sequence
  SiRNA target sequence
acagcctctgtctcacgacagtg

SEQ ID NO: 256716 - DNA, 23 bp, Artificial sequence
  SiRNA target sequence
cagcctctgtctcacgacagtgt

SEQ ID NO: 256717 - DNA, 23 bp, Artificial sequence
  SiRNA target sequence
agcctctgtctcacgacagtgtg

SEQ ID NO: 256718 - DNA, 23 bp, Artificial sequence
  SiRNA target sequence
gcctctgtctcacgacagtgtgg

SEQ ID NO: 256719 - DNA, 23 bp, Artificial sequence
  SiRNA target sequence
cctctgtctcacgacagtgtggg

SEQ ID NO: 256720 - DNA, 23 bp, Artificial sequence
  SiRNA target sequence
ctctgtctcacgacagtgtgggc

SEQ ID NO: 256721 - DNA, 23 bp, Artificial sequence
  SiRNA target sequence
tctgtctcacgacagtgtgggcc

SEQ ID NO: 256722 - DNA, 23 bp, Artificial sequence
  SiRNA target sequence
ctgtctcacgacagtgtgggcct

SEQ ID NO: 256723 - DNA, 23 bp, Artificial sequence
  SiRNA target sequence
tgtctcacgacagtgtgggcctg

SEQ ID NO: 256724 - DNA, 23 bp, Artificial sequence
  SiRNA target sequence
gtctcacgacagtgtgggcctgc

SEQ ID NO: 256725 - DNA, 23 bp, Artificial sequence
  SiRNA target sequence
tctcacgacagtgtgggcctgcc

SEQ ID NO: 256726 - DNA, 23 bp, Artificial sequence
  SiRNA target sequence
ctcacgacagtgtgggcctgcca

SEQ ID NO: 256727 - DNA, 23 bp, Artificial sequence
  SiRNA target sequence
tcacgacagtgtgggcctgccac

SEQ ID NO: 256728 - DNA, 23 bp, Artificial sequence
  SiRNA target sequence
cacgacagtgtgggcctgccacc

SEQ ID NO: 256729 - DNA, 8550 bp, Black queen cell virus
cgcaaaattgcgtatagtatataaaatactatacgcgcttggttgttttcacatatcaagtgggttaaaagccccgtatgcttggagaccaggtttgtttgccgacttacggaatgtcgttaaactctaggctttccggatggcttctaattatccgaggcccgtacgtgggctcgaagtttagtagagagtacgcgtacaaaagtcctagttgttttcatacatcaagtgggttaaaagccccgtgtacttggaggctaggcaacacgattacagtagcctgtactacctgaagcatgtagtaaaactgcacagttgaaaattgtcacaaacgggctgaaagcgtagggctggattgttgagggatagcattctgcgggatgtgaaagaacatgttagacatgtattatggtttttcccaatacgcagtctttgctgtgcgtgtgtaggcaaaaggaagtgagagagctgaccgtctctcatgggtatctaggttattcagagtacgctgctactgcggtagcggacacaacccaggtgttcgggtctctgtcttagaactattattgatggcgaaagttgttaatgggctctctaacgtcactcttaaatggtacgtgtcgattgagtttattgcaatgaatagccaaccctataatgatggaaccaatttacgagaatactaaaactgtaactgaaccaatactttactacccattccgttacaactggaatattaagattcttgacctcacagataaggagggtcaagagagtgtcaataagaagtttttaaggaagtttactaaacttaggaagctttgtttgagacttcaaaaggacactgccttctggaaaaatactagaagtaggttagatatgattcaggatgacatagacaaaatggtcgcacaaagtggccctgttatgagtcagagcttaagtgacagggttgaccgcatgtaccatgagttaatacatacgaatgtcgctcaaatgaatttctctataccgttttcacataatttgtccaaggattcaaaggcgtttcttactcaaacagtagacacttctcttgatggtatgaagcagatttctaatgaaacagtgaataccattaaggaagtgttcgaaacgtttttgactaaaatgacgactacatttgaacaatgtgcagaagctcattgtaaaattaaaagcttctgcacattgttcaaatgtagtcgtcattttaacaatgtgcaggaagcttttaattttacaatgagctttatgagatttttagctttggcttatgccatctttttcctcatttcacgagcaactaagttctttggagcgtcattttctacgatatctactgttctgataactcttattactatgacagtaactgacaagttagttaagaaatttttggtcgattactactcaaaacacatggaaaatgctaaaatgttagcccaagcaggagaggaagactcgtcttttctatcctacgtcattcccccattgtttttagaatcagttgtagatacaaaatctaacttgtttaagaggatttggaagagtaaagacctggaccttgttgttaagaggttgtcgtattttggtgatgctaaaatatacaatgcctttgacaatataggcacgtggttgactacgatgatcaacaagacagtaaattatgtaaaggttacactcttgggccatgatcctgaagaatttttggagaatcagagtgaccctctggtggattgggaagagcagtgcaggaaacatttcgtttcagacactgatagaatagcgatctatacagagtccacgttagcggacattaaacgtctgtacaatatgggcgttagttatatgcggcatcctctgtataaaccccaccagcgtgttatttctgagattctgaatcagttactcaggtttgctgataagatcaaaaagaaggtaggcacggatgcttctgttcgaaatcccccagttactctatatttatatggagaaacaggagtaggtaaatctactttgacgtatcctttgtgtgccactcttcttaaaaccatctttacaagagaggggaatacagtgatgcttgaatctcttaaacaacattacaaagagatgatatacgtgagagctgcagaacaagagttctgggacggctacacgcagcaattagtcactgtatttgatgatttcaatcagcaagttgattcttccgcaaacccaagtttggagttatttgaaattattaggagttctaatatatttccttatccattacacatggcatcgattgaagagaaggctaataccgtttttcaatcaaaggtgatattgtgttcttctaataataagactccaaaaactgaatctctaaattatccgaaggctttgttaagaaggttcgcgaaattcgtcgaagttaagagggctccttctgaaagtggtacattctctactgattgttatactttcgtggaatatgatccatttgaccactgcaacatcgttaaatcaatgtctttcaatgaattgatagatgaggtggttgccatgtatttccacgaaggagagtttgtatcttccgtagataaatttattatggagaatgtatttgctcagggaggaggctctttatcagacgaagaagatgattttattgaagctagttcttatggtgacagtaatctggatgaagccttgacacgtgaagaaaagaaagaaattattgagtgtatcaacgatcaatttaagaatgagaatgatactagaacttccttccagttgattagagactatttccattgtgctaaggactcgttacaagagaaatttttagcttatcgccgaaagtactctttcgacgattggtttagtttctcaaaagcgtccaaagtagtattgggaatactttctctcgtattggttgggtatggcatatattcatatgtcaaaggaaatcctgcaaaagactcagctgaatcctacgagccaaaggtggcgagtaaggccaaggttgagggaagtaatggcgttcccgaggcatatgaatctaaagtcaacagaaagatcaatgttgaagggtataatgcgagagatcttaagcgtaaagtagaggcttatgctcctaaagttaatcgaactgtgcgcgtggaatctagtgaggtgataatacatcctaattctctgatcgagaaaggtgatgatattgtacagtctgaagcatgtagcgatataaatgcttcggaacaactcactgctgttacgactaataacacctatgtaatgactatcttatctaaagaatctgttattagagtggggcactgcatttttctgaaaggaaagattgcagtagctcctggtcattatcttcgtatactccaacgcgcatatgagttagatgacggtgctattttacaatttaatcatccttacggtaagagaaacttctttacgtttatcggtgatatccagttctcgttgtataaaacgaaaaatatatccaaaacgaacgatttggattctcgtgacttgatgcattttgttgttgataagtcagtagttcacagagatatttcttcgtatttctgtgaacgtttagaactgcaatctgttggttctactcgaatccaattacctgttatgcgatgggtaagagatgttggatatattttcgttaagtcgggacaaggtactagttgtataaagaacgtttccaacgttagttatatgactgatactgatcccgacgctcgagaaattcgattgagggaagcatgggagtattctttagaaacaatatctggtgattgcggagctcccctttttgtaaccaatagtaaaataggacctggtaaaattataggaattcacacagctgggggtcatcgattcggagttggcagttgctttgccactccgttttacttagaggacgtgaaagagatcttgtctcggtacgattataaagcacagtcttgtgcttttgagttagtattgcgacaggatcttgaaccatgtgctctacctaaccacttggatgaatgcgaattcatcttgatgggaaaggtaaaggatcctccagttcaaccatctagaagtaaaatatctccatctcccttgtacggacacataactgaaccctctagtgccccaacttggttatatcctagggagcttgatggacagatttttgaccctttaaaatatagaactgctagacttggaaaagatagcgttcctattagaagtaagttaattaatctggccaaaatggctcttatagatgatatatattccgtgtacttgcaaaagaaagatcttttggacggacgatttccatcatcgttgacctttgatcaagcagtgttggggatacctggagaagactatgtcaattcaataaaacgtgatacctcttgcggttatcctttcgttaaggaaggatggacacgagctaaaatcttcggtaacggtgatgaatatgacatgtctacctcgggtgttcaaatgttacgagagaaagtacaggaatgcatagaggcggcgagacaagggaagatattggaccattattttatagatacattaaaggacgaaaggaagcctaaacataaggctcataagtctcgaatgttttctaatggaccaatagattatcttgtttggagtaagatgtattttaatccgatagtagcggtgttgtctgagcttaaaaatgtagaccatatttccgtggggtccaatgtgtattctacggactgggacgttattgcaaggtacttgaagtcgaaatctcaccatatggtggctggagacttcgagggctttgatgcttcggaacagtccgacatattgtacgctgcgggagaggttctgcaagagttgagtaagaaaatctttaactcaactgaggatgagatgttgcaacagagggctatcatccactcgttggtcaattcacttcatatcaatgagaacgggattgttcttcaatggtgcaagtctcttcctagtggccattatctcaccgctattattaattccgtctttgtgaatttggttatgtgtcttgtatttatggaagccaatcaaaaatattcatttacgactgcttcttcatttttccgtgaatgtggtatagtagcatatggagacgaccatgttgtctctgttcccgaaaaatacttgtctgtgtttaatcaacagacactaccagtgttgatgagtaaattcgggatgttctataccatagaaaccaaggatgacacagagattgatttcctttcgaggagattagaggatgtgtcgtacttgaaacggaattttgtttatgacgaatctaggcaacgttatattgctcctctctctttggatgttgtattggaaatgcctatgtggaccaaatccagcaaggacattgtaactaatgtattctgtaatttggaacacgccctcaaggagttatcattgcatgataaagaattgtgggaaaaatggagtcctgtattgcattcaaagagtgaggaagtcctgaaaatggtttcttctctgaaatttcaagatgaggtcagggagattgctcttggcctttcaggttatgagtagttttcttgacttctcttaaaaccaacaatgtgatcttgcttgcggaggcaaaatttgcacagtataaaatctgcaagtagtgctattgttggaatcaccgtacctatttaggtttacgctccaagatcggtggatagcagccctatcaatatctaggagaactgtgctatgtttagaagattaggtagtctctaaacagaacaatttacctgctgaacaaattaatgaaaattatgaaaataaacaacaacttgttgaacagactgaaattaccacctttgaaaacgatttgatagtgcttgaagatggaccgcagatggaagaacctcttccttatgcattccatggacagcatactgataatcgtcaacatacggtggttaatttcttgcaacgtccccaggttattttcgattcgtcttgggcgtctgatctccctcgaaacaaacaatttatggattcgattatgataccagatgatatcatttcttttccaatgtttgcggaaaaactcaaaggattttcttctttgagagcaacagctgtaataacagtgcaatttcagacgcaaccatttcaagcgggaagggtcatgttgggatcatttccattaccaacactcaacccaactagagttaagtttgccaccaatcatgtgtctcgtttaatgcttttaaaccatgtccagtgtgatattgccaaggaaactgaagtatccttacggattccttttgtttctccatacaattcatacgacttggtgtcgaagcgttttccgtgggctaaagtggttggtttggtgtactcacctcttactacgaccattcccgtagattatatagtatacggtcattttgaggacgtggagttgggttgtccaacttcaggaatgttggctcaagcaggtcttaaagtgcaacctcctacgaactctgactctcgacagcgtgccaaagagagtaagggaaagaaggattactctaagacaggcgcagcttttaaacaatctgtttcaaagctgggcgaacatttacctttcctcaaatctggagcgaactgggtcagtgagaacattctacaacctgcagatgaaatcataggacctattttatctctttttgggttctcgaagccccttttgcccattaccaatcccaccgttttacggccagcgaatacctttgctatcactgatacaaatgatatgtcgcatagtctggcgctttctaatgataccaatgtaccatttgttaaggcgctggatggttctggtttggacgaaatgagcttcgattacctgaagaagataccccaattcatacagtcaaaattcttcaccaccacgacaaaacctcaagaggttttgtttcagactaaagtaatgcctcattactttgtcccggctggcgatgtaactgtcgccatggataaagataaaactagaactatttggcaacctagccatttagcctatatcacttccatgtttaagtattggacgggttcgctcgtgtatacattcaaatttgttaaaacagactaccattctggtagggtggagatttctttccaccctttttctgattataccgctaactcctattcggattatacctataggattatagtggatttgagggaaaagtctgagttttcggttacaatacccttcatttctccagtaccatacaaacgcatatctaggccagattgggataaaccttattccaagtacgctcatgctagtacaggaactctggtgttgaaggcgttgacatcgttaaaggcgactaataccgtggtttccaattctgtggaaatcttgatagaagtcaatgctggcgacgatttcaacgttatcgctcctatcgaaaacatcttcttccccttctctctctctccagggaggaaggggatggttgctcaatccaattcggggactgaacaacaaaaccccagaggatcatctttgttaactgatccagaatctattacaaagtctgatccttacaatccgaatatttctctcttgattagtggagaagttttcacgaacttcagaaatttgatcaagagggtaaatttcagaaaggctactacgttgaatggaaaacgtatctcagatacgtttgacatcaacagcctgattgaagcaccccgtcttgatatagcgcaatatgtcgatactgaaacaaaggaggctaaatatggatttagctacttttggtcagctcccactaccttaaacatagtggcggagatgtatgcgctttatcgaggaggagttcgagttaaagtagttactgagaagggtgtagatttcgtcagagctaccgttagtcctcaacagacttatggtagcgatgtcgctcctactactcacatcagtactcctttggcaatagaacaaatacctataaagggagtcgcagagttccaaataccgtactatgctccatgtttgtcatcttcgtttagagcgaattcggaaacattttactatagttcaggtcggaataatctcgatatagccacttcacctcccaccgtcaatcgctattatgcggttggtgcgggagatgatatggacttttccatctttatcggtacgccgccctgtattcatgcatctcagacggcccagtttaccaagataaaacaaggtaaagtgtatgatttgaggtatgatcagtacgacccttttagggaagtccaggacggtacggcgttcctcaatgctcgtagtattgaggatagcgatttgttgtgagctcctttagagggagggctcactttatctattgcttaattcggtaagccacaaatttttctaagtgtcatgagtttcttctcggttcttctcatgattactaatcgaaccgtgtgtagagtcagaatgttgtggtttacgtttcttcttgttgc

SEQ ID NO: 256730 - DNA, 8832 bp, Sacbrood virus
tacgaatcgtgattcgattcattatttcgcctgagtaaatcgagatttaccttgacggggtttgcttgacgttgcgtcagacccgttatctttgtgatttttaggttgtgaagatttattcgagtaagtttattaaacgtagagtttataatatagaaagaggcataataagtttattatggacgatatttctcctatgttttatggagatgttagaaataccaaccgattcctcagtagtggaggaatcagaagaaatcagtcttctgaatatagttcacgcgccagaatctataaaaccaagttggaggcgcgtaattgcggagtggaaagattatctacaatccttacctctagtaagaagacatttgatacagtggactcttataccgatttgtttaatggttgggtttctggtatgtttgttgacaagaacgtccactacaccgaaatgtccagtgatgagagtggacgaagaatctggaatgttagacgcgcagtgtcaattaagaccacagaaggaactatagtgtggcgaaaagttattacttcgtacagttgtaaggtagcttcagaactagctgctaagagtatattggtacaatttttaggtcctataaggacccagagtgatgaggtaccctcgaaggaatctattcagggggacgctacacagcagagttccaaggaggagaatacaataattacacgagatcagcaacaaactgtttcggaaaagataccatcaacagttggggatttggtaatagcatcttccgaaccaacgcaacaatttaggagtttaactaaccgttggatgcctattaattcaattagagtaacagtaaatggtaaaaggaatgatcttttggcacaatactatatcccagaagattttctgtcaactcacgctaagtgtgcacccaacactataccatttgagacttacgtgtatggaaaatacgagttggaaatgaagtttgtagctaatggtaataagttccagtgtgggaaagttattatttccgtaaagtttgatagttaccaagcagataatataaatacagggttccaggcagcgttatcgcgaccgcatattatgttagacttgtctaccaataatgagggagttcttaaaataccatttagatatcatcgcgcctttgttaggaaccaaacgcataaaacagctacggcagggataagacccgggaagtttgctagtatctatgtgcaagtgttatcaccgttacaaacaggagagggaggagcgaatgatatgtttatacgacctttttaccgttatacgcgtgctgaatttgcgggaatgtcatacaaagtcccattgacccagatggatgttataggtactttaatatccggggggccaacgccagctcttaaggatattttagtaggtgttgaaagaacactagatcaattgggccgaagtaataatcaagacaaaccgaaggatataagtagtataactataatcccgaaacctcgcttgggttttcctcatgggaaaggtaagagtgatgcagtagctatgcgagtgaacccggtagcattaacatcatttcaagatgtgggtgcttatcctgatgagccgcgcactacgttagatatagctcgtatatggggtttgagaagcacgtttaattggggatcaggagatgatcatgggaaagaattatttaatacagttttggatccaggtttgagattttatgaccaagattatgaagggcaaataacaccgatggaatatgtaactgggttgtataacttttggtcaggaccaatagaattacgttttgattttgtttcgaatgcgtttcatactggaactgtaattatatcagctgagtataatcgatcatctactaatacggatgagtgtcagtcccactcaacttacacaaaaacgttccatttgggagaacaaaaatcagtacattttactgtgccttacatatatgacactgtagtacgcagaaatacggctagcgcctatttaccggttactgattatgataaggtagataatgttagtagggcacaggctatggggattagagcagaatctaaaatgagagtgaaagtgagagtagttaatgttttgaggcccgtagcctccactacttcaactatagaagttttggtatatatgcgaggagggaaaaactacgcattgcatggattaaaacagtcgacttattggccgtcaaatagtgtggtacccatggatagttttccacctgatggctatgatccagttaagccaccaaatagatcaagaagggaggcctctccgaatagtgatggaggtaagggacaacctgaggtggcagtgtcagataatccgcatagatttttgcccgcaaacgtgtctaatcgttggaatgaatattctagcgcttatctgccacgggtacagatggacactggggctaaggaagatgaagatgaaactgcaaacttcagtgatggggttactgcgatgggttttcaatctttggatacccaagtgtcaattaaggatattttgcgtagaccagtgttgttgtttaatcatgtagagttggaccccgattacacaggtttctttatacctataatgccgccttctagaatgatgcaatataaatcaggagataaagaaacatcttttcagcggttaattgggcgtactccccaagcagccataatgaatttattcaggttttggagagggtcattgcgttatactataattatacatagcaccgatggtcaccctatatatgtgacacatgtaccccatacgggaaatagagtgtatggtttaatgaaagttaataatttacacgagtatactaaggttcccatttttgggtgtgggttaacaactgaaatgattattcctagtgtgaacccgagtatatgtgtagaagtaccatttgatacggaaaataattgggccgtgacatttgatgaggacgctcaaaggaattactcatggcgagataaaggggataccgtgaccgggcacttggttgtgacacctgtagtatcagtttatatgtctgtgtgggtagaagctggggatgattttgaggtttctaacttttatgggccaccaagtgtaaagacgaatgattggaactacgcattctctgacgagcatgtacaagttcagatggatgatagtgtagaaagagtttatgatgaagggaaccaagtctattactatccgccccctaaaccagagggttttagtttgaacaatgtacggacttcggttagtacgttgtgtaatatgcttggaaaagtagtaactcctgagagagcaatgaaaacagcgctgtgtgcaactccttattttggatcagcttatatgacagctactaccctagacgctataggtagtatgcagaataccgttacgggagctgcacaccagttgactgcatctgttgatgcgaggttagagcaattgtcagctaaatttggagattcaattgatgtaattactacagcggttaaggaggctataggtaaaatttcttccggtatgttcaatatggttaattatactggttattgtataaacgtgatcttggatatattggtggcatggattgatcgaagttggactgcagtcggagtgggaattattcgattcgtgactaaggttctagggttgggtgcaatttctaaagttatgaatatggccacatcttttgggcagcttatagccagagtatatgaacctccacgcccagttgtgcaggcaccacctcccactgaagctacattaactggagctttggcgggtatactgggtacgcttatgggggtttatatatcaccgttgtctggaggtagttattttaaaaatttgatgctcaggatgactagttcggctgggccttcttatttggtgggggttttacgttttgtcgaggcaacttttaatacagtaaaggatatgacattgaatgctttgggctatgtatctccagaaaatgcggcgctgaaaatgctgtccggaacatcgactacgatacagaattttataactgatgctcagcttattactacagaagctaatgcggcattggtgggacatcctagttttcgagctaagtactggaacacggtaatgcaagcgtatcaaatacaaaagttattattaactgtccctcaatctagcgcctccccaattctatctagattatgtagtgatgttatacgtaatagtaatgaaaagtttattgatatttcatcttcaccggtgcgttatgaaccttttgtaatttgtatcgagggcccagcgggtatagggaaatcggaaatagttgaaaccctggctactgaattattgaagggagttaatttaaaacgaccgcatagtggggctacgtatttccgaatgcctggttctcgattctggtctggttatagggatcaacccgtggtggtttacgatgattgggcgaatttaacggaaccccaagctttaatgcagcaaatatcggaattatatcagcttaaatcaacttctacttttattccggaaatggctcatttagaagaaaagaaaattaggggtaatcccctcatcgtgatattattgtgtaatcacgcttttccagatagtgcagttactaatatgtctcttgaacctagtgcaatttatcgtaggagagatgtgttactgtatgcggaaagaaaaccagaatatgaaggagttagtttgagagatatgagtgttaatgaacaaaccacgtttgctcatttgaatttttataagtataaggattccaccaactcatcttcgtgcacatccaaacccgttggatatgagttaactaaggattggttggttgcgaagtttgctaaatggcacgcgcaggagcaaattaaagtacagagacgtatggagaatatacgagcaggaatgtacgacgctgaggtaggatctttgcgtttggaagatccatttagtttatattactcagtttctagtgaagtcatcgaaaataatgaagatgttacgactgggtttcttcctagtgagattttggcttttgagtgtaagcgtatagcaaatgtgatagatgcccatcagtcctcggtaagggaaattgtgattccagatgagccaaaagatccatttgttactacacagggtgatttggcgggggtatttatgggagctgctttgggtcgagtggtactggaaaaagtttgtagcttttcatcggaacttattaattatgcggttgattggataatcagtaagcataatgtcacccacgagtgttgtgtgtgtaaagagacaaaaggtatctcatggtactgcttggattctgcgcaacttgcacctcaagctacgcattatatgtgtaacagttgtatggttgcatcgcgcgcagcaaaccgagaagtagtccagtgcccgatgtgtaggagtccaaattttgaaagatggggtacgtatcaacagatgacaggaataacgattgtggggcgtgcattaattatgggattgataacagttgataagggagttaatgtattacgtcgaatgttgggaggtacttttggtgctatgtatgcggctataatgcgcatagctgctacacttcacccttcgatgagtgagagaacagcggatttattaaggatgacaggggccttggtagatatgagtgaatatacggtgcgagaactgcaacatgtggttactcaaatggatgatccctttgaatcggatggtgaagatgatgatgttggtacaagtaaggtacattggcgagatattgtaacttttgatttcgaggaagacgtggctcgctcgttgatgcgagagagggaaattactaatataccttgccttcatatattgttggggggtgctttgcatcatgtctcgtatcgtgatggaggttacaacgtacccaatgggggaactatggtgagagtaccggagttgccgtgtacatcagattgttacttttctgatatggaagcatttaaaagttttgcccagcggtacaaagaggaaaagaagattgagatccaatcccatttattaggttttattaacaatcagcactctcaagattattataggaagcgagtcccgcgtattttccagcctcactggatgagagcgaatgaagatttagctttggaaatttctaatattacagcggatggttggtaccagagagtaggtgattcgtttgtgaattatagaactttgatagtggcggctgcgggtttagtgatggcagtggggagtatatttggaatgtataaattcttctctatcggtacgaatccagcgcgtgttgagtttgtacctagtggggatgaaattactagaaacttgaagcgaacaactaggactctgcaaaggacccgaacggagaggcctcactttcaacaagtgaacgaacacccatcccttgattcagtggttaagaagtatgtggctcgtaactatattactattagtttgtataaacccgcggggcgtgtgaagttaaccgcatgcggtatttatggaacagtggcgttattaccgaggcattatgtgcgtgccattaaggaggcttgggaaaagagtgtgaaaataactataactccggcactcttggagcatgaggagcatgtctatacttatgatgctgctgatttcactatatctgagtctacagatttggctatttgggtattgtctccgtcatttggaatgtttaaggatataaggaagtttatagccacagatgaggacctatctaaaccaattactacggaagggtccttgttgttggctccaaccaatcgtaatccagtgcttaaggaacagagtatagagatactgggactacaaaatgaaatgcaagtatctgagttaaatggcacggtattttatgcgaatgatgtaatctgttatgattattcacaacaaggagcttgtggatctttgtgttttttgtcccgctcgcaaagacctattgtgggaatgcattttgctggtcggggcgaaggatcctgtggagaaggttatggagttattttaactaaagaagccattggggacattttagcacttaagtcccaacctgtagtgcagttagaagattgggaaggacccagtttagaagaagcaaaaataattttacctgaaactaatgtgtcttatattggggcggtgacaaaggagcaaactccttacctccccaggaaaacgaagataaggccaagtcttattcagaatgttggtgaccttcacccagtgtcagaaccgtgtatattggataaaacggatcccagataccaacatgatgatactcctctagtagcggggtgtaagaaacatggaaggcttactgtggattttggtactactagagtagaaagtgctaaggaagctctttgggatggatggctatcgaaaatgaaacccctggtagtaaaacctaagttattaacgcccgaggaggctgctagtggttttccagatatacagtactatgatcctatgattctcaacaccagcgcgggttttccttatgtggcaacagaaaagaagcgtaaagaagattatatagtatttgagcgcaatgagaacgagcaaccgattggtgccactatagatcctggtgttttggaggagatgaagcgaaaatctgagttgagaaagcaaggggtgcagcctattacgccttttattgatacacttaaggatgaaaggaaattaccagaaaaagtacgaaagtatggtggaacccgagtgttttgtaaccctcctatcgattatattgtatcaatgaggcaatattatatgcactttgttgctgcatttatggaacagcgttttaagctaatgcatgcagtgggaattaatgttcagagtacagagtggacgcttttagcttctaagttgctagcgaaagggaataacatttgcaccattgattattcaaattttggtccgggttttaatgctcaaatagcgaaagctgctatggaattaatggtgcggtggactatggagcatgttgagggcgtaaacgagatagaggcgtatactttattacatgagtgtttaaattcggttcacttagtgtctaatacgctgtaccaacaaaagtgtggatcacctagtggcgcgcccattactgtagtgataaatactttggttaatattttatatatattcgtagcttgggagacgttagtaggaagtaaagaacgagggcaaacttgggaatcctttaaacaaaatgtagaattgttttgctatggtgatgatttaataatgtcagtaacagataaatataaggatgtttttaacgcattaacaataagtcaatttttggcacaatatggaatagtagccactgatgcaaataaaggagacgaagttgaggcttatacgacgttgttaaatagtacgtttttaaaacatgggtttcatccccacgaagtgtatccgcatttgtggcaatctgcgctggcttggagttctatcaatgatactacacaatggatatgggaatgtgctgacttgaagctggctactagggagaattgtcgagccgctctgtatcaagcgcatggtcatggaagcgtcgtttacaataagtttaagcaacaagtaaaccaagcattaattaagcggaaaatacaaccaattgctttatcttggaaagaaattgatgatttattttatcctgaaattagttattagtgttttttaaggtctcatataagctataaaggttatgggtactaatatagtggattaatatcgatatatggcatttt

SEQ ID NO: 256731 - DNA, 9491 bp, Acute bee paralysis virus
cccgtcaaaataacaacttataacacgatgttacccgaagaaaccattttagtgtaacatttaagattagaagtagttcatctaatagagataggcactattagaaggaggccttttctaaaggagccgttagtcagcccagacaagcgcagtactttagaagagagaagttccccgatagcgaccgaaaagacgcgttttccgtgctaactaatttaaatgtgggaacgaatattattattgaaattatgtgagccacgtagcaatcaagtcatgtttttgtcactacgtttactcatctaatgtagataattttgtttaagtacctatttaggtgtcatcccaccagagaagaaataatacgtaccggaacccagagtacaccccttattttaagccttactgggcttctctgttagttagtaatctggcccacgttttgcgttgagtggggtcccaacagtaggaattcgacggacaagtagcaagcgagtcggtaccaattggtttagccttcgaaattactctgggcaggaagttactaaacgagaactttctgcttaaatcccaacgcacaaacaaatagagtaaataaataattataatgaattttacaaagcaaccagcaagtctcaaatatttatcaagcatgaaacttataacttcacaagaccaagatttctttaactttggagaagtttcacgagaatttatattggaacaggcatacgtcaatggatacgatttccacatgctacatcaagacatgaattgtataggattcgtactatcaatttttgatgaagatgctagagatgagtatgaatacaaagatctgaattgtgaatatcatgagaatttatttgatgcagtagtagattctgaatttgataaaatttggccacacttggttttgaaatatataacatattatccatgtagtttgaattggaggggtatgccaactatacctattgtttatgtttcaaaacatttttggtatgaattgtatagaactggttttttaaacaagttatatcattgtggctcatggactgacatattgttgttgttgtctggagatgtagaaaccaatccaggacctgttgaaacgtataaagacttatgcagaaggaaaaatattcgtaagagaaaatctcgaattcgagaagaaatcaaaatgcaacaacatattgataagataatagggcaggagaatgaagagtataagattataaacgtcaatatgcagggaatctttagttttaatgaagaaaaagaaataattaaaagtacggcttggaaattcaatagcactctagacaaaacaaattctataatagacaatttaataccccaattagaagaaactttagcaggtttcagaaaaacatattcaaaatgtgaatcaaaaatttttggtactataagtgtggttgatgtgtgtgtagatttgattagtgctttattacaagttagttttgctaaaccagcaatgaagatagcttcattagcagtagaagtttttagattaattaagaaatatgttagcaatattaatatcaatatcgataagattaaagaattgttatcttatggtaaggtagctcttaacaataataatccaattattcatgtaacaatgcaatctaattctcccattcttgaagttttattacaacccaacattatagttagcgccatatttatagcattaagcgtagtgttccacaaaaaatttacctacaaaaaactgggaattgaagcaatgattaaaagacttggagatttgggaagagcagccaaaggctgttcagatttgaatgtggtgctcaaccaggctataaccaaccacatgttagaacattttgggaagaatgttcttggtttaaaacaagaagatgaactcaaagtcctagtggaaggatatagaaattggtgtgatgaagtcagagatttagtaggacataaaatcaattcagatggggaattagacagcaaaagtatcgttgaaaatataatgaaggatgtttatgagatacaaagaattgagaatatgtataagaaaggtttggagatttctcgtaacatagctgaattaaagttaccaacaaaattaacaattagttttaatacgcacatgagatacttgactgaagttttcaaatcagttgacacatctggagcttttggaaacaaacctcgaacgcaaccaatagttatttggctttttggagaatcaggaagaggaaaatcggggatgacttggcctctagcaatagatctaaataacagcttacttgataatgtagatgaaatgaggaatttttcaaagaacatctatatgagaaatgttgaacaggaattctgggataattatcaaggacaaaatattgtatgtyatgatgattttggacaaatgagggattcatcatctaaccctaaccctgaatttatggagttaatacgtacagctaacatagctccataccccttacacatggctcacctcgaagataaaaggaaaacaaaattcacatcaaaagtaatcattatgacatctaatgtttttgaacaggatgttaattcactaacatttccagatgcatttaggagaagagtagatttgtgcgctgaggtaaagaataaagatgaatttacaaaaatgtgctggtctaaatcagcaggaaaaatggttcagagattagataagggaaaggttaagaaaataacaggagatattcattcaacagtaccatacattgttgatctgattgatccagaaagcggggaagtgtataagactggattagaatatgaagaatttctcgatatgtgtctagaaaagactagtcaatgtagagatgattctgcaaaattaaatgattttttaatggattatgcagagaaaagagcaaatagaagcagagaaattgatgaagtttgcgcacgtactatggatgaagcttttgttgacgcatatgatgacgtcatcgatgtaaacatgcaaattgaaacagttgatgaaatggaactgattgaacccaacaaattaagagagatgatagaacaatgctcaaataagatagtatacacgtatgaaggaatagctgttaaaataacatcattagcatttaaactagccacactaaactacgaagaacaatgggaacagattaaggaaatgaaatattatgttaaagtgagttcaggtgtgaactatcttaaaagagtgttaagtcagggtatgaaagtgtgtgaagaatggatgaaagaaatgattaactacgttaaggaacatccatggatgaccgttagtttaatactgggcactctcattggaatacttactgttgtagggttttggaaatggttatgtagtggcgataaaaagaagaatccgataaaaagacattttattaatacaggcaatgttctaatcttacccgatagagaattaaacaccttttggaaaaatcaagaatcattggacttaagggatatgtatattaatcgagttgaagaacacataattagcctattgaaattgcaacataaagtagtcttagttccaaaagttactaagtatattcttacaactgttgagaaccatgctaaaatatcagataaaatcattttgattacaagaaatagatatttgaattaccagggcaagtttgttgaattgatttgtggagaaattaatcaattcttcattgacccggaaacattagataccaacgtggaagcttttgcttcagctgatcttaagacatttgtacaaaggaaacctattgtcattgaaggacctgaatttgtagaggcacaaacatcaggagatcagattacattaaggaaacaaacacaaaaagtcatagaggcattcgctagttcagatgcaatcacaatggctcgcaaaacaccaaagtttgttgagagtgatgatgtggtcgaagtttcaatgcaaatgtggaaagatcaagttgcgcaaaagttgataactaaccgagttttaacaaacctgtataaaatttgtttagttaaggagaatggtgatatggtaccgctgctaaatggtttgtttgttcgttcaaacataatgttagcccctggacacttagtgggtttcttatcagatagtgatacaattgaaataagaaatctatttgatgtagttttcagagtaccatggaaagacgtgaagaaagttgacgtagtaaacgccttcggtgagagcaaagaagcggttttgttatgttttccgaaatttgtatgtcaacacacggatttggtgaagcattttcaagattcagaatctatgtcaaaattcaaaagatgtgaggtcactcttccagtgttgagatattcagataaaatgaatagatttttagcaacattaatagaatgtgacaaagttgaagcttatgatagaccatacactttaaatgactcatcaaaaggacaatatatattaagacaaggattggaatacaccatgccaacaacaaatggggattgtggtgcaccattagtaattaatgaaacccaagttatacgtaaaatagctggaattcatgttgctggtgatgcccgaggaaaagcttatgcagaatcaataagtcaaaaagatttaataagagctttttctaaaattgacgttagtatgcagattcaattggacctagatcagacattgaattttaaccaacagcagavaataataccaccaaacgcagaattcggacctgaggatttagatttttgcgatttgccttcacttaaaatgataccagtgggtagattgagtgaacctttgttcgaacctggtaagacagacatacgaccttccctggtatatggaaaaatctcagaaattaagacaaaacccgccatcctaagaaatgtgatagtggatggaaaaattgttaatataaaacataaaaacttgaagaaatgcgccatggacacaccctatgtgtcaaaagaaatgactgaagaagcttttcagttagttaaatcagtctggttaaagggaatgcgtaatgaattgaagaaagttttgacttatgaggaagctatttgtggaaatgattcaagtgaatttatatcagcaataaatagatctagttcaccgggtttcccatggatacgcgatagaattaaaggaactaaagggaagcaaggttggtttggtgcggaaggcgaatatattctggatgaagatgtctttgaagcggttaaaacacgtattcagaatgcaaagaatggtgtgagaacacctgtaatgtgggtggatacattaaaggatgagagaagaccaattgaaaaagtagatcaactgaaaacacgtgtgttttctaatgggcctatggacttttctatcacttttagaatgtactatttgggcttcatagcacaccttatggaaaatcgaataaccaatgaagtatccataggaactaatgtttattcccaagattggaataagacagttagaaaacttaaaactatgggacccaaggttattgcaggagatttctcaacctttgatggatctttgaatgtttgcattatggaaaaatttgctgacctagcgaatgaattttatgatgacggatcagagaatgcattaattcgacatgttttgcttatggatgtatataactcaacacacatttgtggtgattccgtatatatgatgacacacagtcaaccctctggtaatccggcaacaacacctctaaattgtttcataaacagtatgggcttgcgaatggtctttgaactttgttcaaagaaatattccgcccttaacggaacaaaatgctatgtaatgaaagacttttctaagcatgtaagtatagtttcttatggagatgataatgttattaactttagtgatgaagttagtgaatggttcaacatggaaactattactgaagcttttgagaagttagggtttacgtatactgacgaacttaaaggcaagaatggagaagtaccaaaatggcgaactattgaagatgtgcaatatctcaaaaggaaatttcgatatgattctaaacggaaagtatgggaagcgccattgtgtatggacacaatactggaaatgcctaattggtgtcgaggaagtctcgacattcaagaaggaactaaagttaattgtgaaaatgcaattatggagctttctatgcatgaggaatatgtatttgataagtggtccaaagtgatttctaaggcctatcagaaggccactggagattgtttggatatcagtacatataatggttatgctcaggagagattcctaaattactacttgtaatttgggaatcgcaacacaacatggttacccatagattgaggaaatttccaataaactcagtattaaggcttgttgtgttggacaaggtgccctatttagggtgaggagccttactggcagccccagtgaatcctccattggataggaacagctatattgggtagttgtagcagttgtattcaaatgaatgcagcgttccgaaatatcatacctgccgatcaagaaacaaatacttccaacgtacataatacgcaactcgcgtcgacctctgaagaaaactcagttgaaacggaacaaatcaccacctttcatgatgtggaaactccaaataggatcaatacccccatggctcaagacacttcatcggctcggagcatggatgatacgcacagtattattcagtttttacaacgccccgtactcattgaccacattgaggtcattgctggatcaacagcagatgataacaaacccctcaatagatatgtgttaaatcgacagaatccacaaccatttgttaaatcttggacattgccttcagtagttttaagtgctggaggtaagggacaaaaattagctaattttaaatatttacgatgtgatgttaaagtcaaaattgttctaaacgcaaatcctttcatagctggaagattatacttagcatattcaccttatgatgaccgagtggacccagcgcgttcaattttaaacacctcacgagctggagttacgggataccctggaatagagattgattttcaattagataattccgtagaaatgaccataccatacgcttcttttcaagaagcatatgatttagtcacaggtactgaagattttgtcaagctatatctatttacaataacgcccatattatccccgactagcacatctgctagttcaaaggtggacctttcagtttatatgtggttggataatatttccttagtcatacccacgtatcgcgttaacacgagcatcgtaccaaatgtggggactgttgttcagacagtacaaaatatgactacacgagacagtgaaacaattaggaaagcaatggttgcattaaggaaaaataataaatcaacttacgactatatagtgcaagctttatcttctgcagttccagaagttaagaatgtaactatgcagatcaattccaagaaaaataattccaataaaatggcaacacctgttaaggaaaaaacaaaaaatatacccaaaccaaagactgaaaatccgaagattggaccaatatcagaactagccacaggagtcaacaaggtggcgaatggtattgagagaatacctgtgattggagagatggcaaaacctgtaacttcaacaattaaatgggttgctgacaagattggatctgtggcagcaatttttggatggtcgaaacccagaaatctagaacaagttaatttatatcagaatgttcctggatggggttattcactctataagggaatagataatagtgtgccattggcttttgaccccaataacgaactaggtgatttgagagatgtatttccttctggagttgatgaaatggcgataggatatgtttgtggcaatcctgctgttaaacatgtgctatcttggaatactacggataaagttcaagcaccaataagtaatggagatgactggggaggagtgatacctgttggtatgccatgttattctaaaatcatacggacaacagagaacgatacgacacggactaatactgaaattatggatcctgccccttgtgaatatgtttgcaatatgttttcatattggcgagctactatgtgctatcgtatagctatagttaaaacagcttttcacactggtaggttaggaattttcttcggacctggtaagattccaataacgacgacgaaagataatatttccccggacttgactcagttagatggaattaaagcgccttctgataacaattacaaatacatcttggatctaactaatgatacggagatcaccataagggtaccttttgtttcaaacaaaatgttcatgaaatctacgggaatttatggtggaaattctgaaaataattgggatttctctgaatcatttactggatttttgtgcataagacctattacaaaatttatgtgtccagagactgtatccaataatgtgtcgatagttgtatggaagtgggctgaagatgtggtagtagtagaacctaagcctttactttcaggaccaacgcaagtgtttcaaccacctgtaacatctgcagattctatcaataccatagatgcttcaatgcaaattaacttagcaaataaagctgatgaaaatgtagttacattctttgattctgatgatgctgaagaaaggaacatggaagcattattgaaaggaagtggtgaacaaatcatgaatttgagatccttactaagaacgtttaggaccatatcagaaaattggaatttaccacctaacacaaaaacagcaataacagatttgactgacgttgcggataaagaaggtagggattatatgtcttatttatcatacatctatagattctatagaggagggagaagatataagtttttcaatacaacagctttgaaacaatctcaaacttgctatgttcgtagcttcttaataccgcgatattatactgctgataacacaaacaacgatggaccttcacatataacatatccagttcttaatccagttcatgaagtagaagtaccatactattgtcaatataggaaattaccagtagcatctacaaccgacaaagggtatgatgcatctttgatgtattattctaatgttggtaccaatcaaattgttgctcgagctggtaatgatgatttcacttttggatggctcataggaacaccgcaaactcaaggaataacgagaacggaaactaaataaatgaatgaagatgtactttagaggacagacataccctcttttgtatggctatagtctaaatttttcagataatttcaatttggaccgaaaaaccgagcaataggagcactatggttcgagaagacattataagacaaactcactagatggagggcttataattataagcttcttgacataatctaaccattgcgtcaaaatttcgaattagtaaattaaaaaaaaaaaaaaaaaaaaa

SEQ ID NO: 256732 - DNA, 10152 bp, Kakugo virus
gaattctagggcgatttatgccttccatagcgaattacggtgcaactaacaattttagatagtagccatgaacaaacattatagtagctcactacgtattgatcatttttataatgacttgcgtagyatgaagcgctgcttgtagttgtaactatgttaytttgcaagttggagtttactattttggattatgaatatgtgcacttagtgtctgtatttatagtcgtttgtggttcaaggttttgtgttagtagtacatttatgtatgaatgtacctttagtatgaatgttatagaatgacaatatcgaaggaaaaatctttataaaatacaaaaatattgttttwattacttcgatatggtgttttatagagtagattgccatgtgaccgctcatagaagtccattatggtttatcaatcgaagttgaatgtatttataagaatattatacttaattagtaatattagtagtccgtaactattatcatccttttttacagtttgatgtgataatagaccactgcagtatcgagtagagtttcgaatgcgtagtgcaatagtacaatcactgtcaccgaccatctattgtaatgatagatctgtcggaaaccattatttatgaagtgactagcaatcatggattaaattagatggtattctagtttagaggtgattcggcgctgcggtgcgactgaaacttctaaattagcatgtcagattgtattatgaatgcgttagtagtaatttctgcgatagagctgggacccctcagtctctcaggtattgtatgaggcgaaagtgtgaaagttttgtatatgtttttatatatacgactgtatcgggaattcctttagcaagaatccttttaatacagtataatttgtgctacggtacgttacgttcgcagggcacccgttaatgtctcatagcccagacgatggcggatggaaagacatcatattttattttaatgctgtctttattgctgatttattttgctgtttttatttgctattttatatttgctaattttcattattgcgaaatatattacattgctatttttattatatacgctagattcaattttatttatcctatattttcaatttaattttgattttgaaggtaaatatatataattaattattagaaatggcctttagttgtggaactctctcttactctgccgtcacccaagctccgtctgtcgcctatgcacctcgtacatgggaagttgatgaagctaggcggcgccgagttattaaacgtttggcgctggagcaagaacgtattcgtaatgttcttgacgttgacgtctataaccaggcgacatgggaacaggaagacgtgcgcgataacgagttcctaacggaacaactaaacaatttatatactatttattccatcgctgaacgttgtacgcgccggcctatcaaagagtgctctcccatatcagtttcgaataggttcgccccattggaatcccttaaggtcgaaattggtcaagaagcaagcgaatgtatatttaagaaacctaaatatacgcgcgtttgcaagaaagtgaagcgtgttgcaactcgcttcgttcgcgaaaaagttgttcgtcctatgtgtcccagatcccctatgctattgtttaagcttaagaaaattatttatgatttgcatttatataggttaagaaaacagattaggatgttgagacgtcaaaaacagcgcgattatgaattagagtgtgtcactaatctgttacaattatcgaatccggtgcaggcaaaaccagagatggataaccctaatccaggacctgatggcgagggtgaagttgaattagaaaaagatagtaacgttgttttaacaactcagcgagatcctagtacatctattccagcgccggtgagcgtaaaatggagtagatggactagtaatgatgtagtagatgattacgccacaatcacatctcgatggtatcagattgctgaatttgtttggtcgaaggatgatccatttgataaggagttagcacgtttaattttgcctcgtgctttgttatctagtatagaggctaattctgatgctatatgtgatgtgcctaatactattccatttaaggtacccgcatattggcgaggcgatatggaagttagagttcaaattagttctaataaattccaagttggtcaattacaagctacttggtattattcggatcatgagaatttgaacatatcgtctaagagaagcgtttatggattttcacaaatggatcatgctttgattagtgcgtcagcaagtaatgaagcaaaattagttattccgttcaagcatgtttatccatttttaccgacaagaattgtgccagattggactactggcattttagatatgggtgctttgaacattcgtgtaattgctcccttacggatgagtgctactggtccaactacctgtaatgtcgtcgtgtttattaaattaaataacagcgagtttacagggacttcttctggtaagctttatgcgagtcaaatcagggcaaaacctgagrtggatcgtatattaaatttggcagagggattgctaaataacacgattggtggtaacaatatggataatccttcttatcaacaatctcctcgtcattttgtcccgactggtatgcacagtttagctttaggtactaatttagttgaaccattacatgcattacgtttggatgcggctggtacgacacaacatcctgtaggttgtgctcctgatgaagatatgactgtatcatccatagcatctcgatatggactaattagacagatacaatggaagaaagatcatgctaaaggatcacttttgttacagttagatgctgatccatttgtggagcaaagaattgaaggtacgaatccgatatctctgtattggttcgcacccgtgggtgtagtatctagtatgtttatgcaatggcgtggttcattagaatataggtttgatattatagcatcccaatttcatactggtaggttaattgtaggttatgtgcctggtttgacagcatctttacaacagcaaatggactatatgaagttgaagtcatcaagttatgtagtatttgatttacaagaaagtaatagctttacttttgaggtgccatatgtttcatacagaccatggtgggtgcgtaagtatggtggcaattatttaccctcgtcaactgacgctcctagcacattatttatgtatgtgcaggttccgttgatacctatggaagctgtttcagatactattgatatcaatgtgtacgtacggggcggtagttcatttgaagtttgtgttccagtccaacctagtttaggtttgaattggaatacagactttattttacgtaatgacgaagaatatagggctaagacaggttatgcaccatattatgctggagtatggcatagcttcaataatagtaactctcttgtttttaggtggggatctgcttctgatcaaattgctcagtggccaacaatttcagtaccaagaggtgagctagctttcttacgmattarggatggaaagcragctgctgtaggaactcaaccttggcgtacgatggttgtttggccttctggtcatggttataatattggtatacctacgtataatgctgaacgagctcgccagcttgcacagcatttatatggtggtggatcattaactgacgagaaggccaaacaattatttgttcctgctaatcaacaaggacctggtactgtaagtaatggaaatccagtatgggaagtcatgcgtgcaccattggcaacacaacgtgcgcatgttcaagattttgaatttattgaagctattccagaaggagaggagtctcgtaatactacagtcttggatacgaccactactttacagtcgagcggatttggtcgcgccttctttggagaagcttttaatgaccttaaaacgttaatgcgacgatatcaattatatggtcaattattattgtccgttactacggataaggatattgatcattgtatgtttaccttcccttgtttaccacaagggttagcgttagacattggttctgctggctctccacatgaaatctttaatagatgtcgtgatggtattataccattaattgcatctggatatagattttatagaggagayttgcgttataagattgtttttccaagtaatgttaatagcaacatttgggtacaacatcgaccggatcgtagrctggaaggatggtctgcggctaagattgtaaattgtgatgctgtgtctactggtcaaggggtgtataatcatggttatgctagtcacattcaaatcacgcgtgtaaataatgttatagaattggaagtcccattttataatgctacttgttacaattatttacaggcgtttaatgcgtctagcgctgcatctagttatgcagtatctttaggagaaatatcggttggttttcaagctacaagtgatgatattgcatctattgtyaacaaacctgtcactatttattatagtataggagatggtatgcaattttctcagtgggttggatatcaaccgatgatgatcctagaccagcttcctgcaccagtagtaagggccgtgcctgagggccctattgcgaagattaaaaacttcttccatcaaacagctgacgaggttagagaagctcaggcagcaaagatgcgtgaagatatgggtatggttgtccaagatgttattggagaacttagccaggccataccggatcttcaacaaccagaggttcaagcaaatgtcttctcactggtgtctcagttagtgcatgctattataggtactagtttaaagacagttgcttgggcgattgtttcgatttttgtgactttaggattaattggacgcgaaatgatgcattcagttattactgtagtcaagcggttacttgagaaatatcacttggcgacgcaaccccaggaatccgccagttcaagtactgttatatctgccgttccagaagctcccaatgctgaagcggaggaggcaagtgcttgggtatccattatttataatggtgtgtgtaatatgcttaatgtggctgctcaaaaaccgaaacaatttaaagattgggtaaaattagctactgtagattttagtaataattgtagaggtagtaatcaggtatttgtatttttcaagaatacatttgaagtgttgaagaaaatgtggggttatgtattttgtcagagtaatcctgcagcgcgtttgttgaaagctgtgaatgacgagcctgagattttgaaagcatgggtgaaggaatgtctgtatttggatgatcccaaatttagaatgcgtcgagcgcatgatcaagagtatatcgagagagtgtttgcggcacattcatatggacaaattttgctacatgatttaactgctgaaatgaatcaatcacgaaatttgagtgtgtttacacgtgtgtatgatcaaatttcaaaattgaagactgatcttatggaaatgggatcgaatccatatataaggcgtgaatgttttacgatatgcatgtgtggtgcatctggaattggaaaatcatatttgaccgattctttatgcagcgagctcttacgtgcgagtcgtactcctgtgacaacaggcataaaatgtgttgttaatccattatctgattattgggatcartgtgattttcagcctgttttgtgcgttgacgatatgtggagtgttgaaacatctactacgctygataagcagttgaayatgcttttycaggtccattcccctatcgtgctttctcctcctaaagctgatttagaaggcaagaaaatgcgatataacccggaaatattcatatacaatacgaataaacctttcccgaggtttgatcgtattgctatggaagctatttatcggcgtagaaatgttttgattgaatgcaaagcgagtgaagagaagaagcgagggtgcaagcattgtgagaatgatattcctattgctgaatgtagtcctaagatgttgaaagattttcatcatattaagtttaggtatgcacatgatgtatgtaattccgagaccacatggtctgaatggatgacgtataatgaatttcttgaatggataactcctgtgtatatggctaatcgtcgtaaggcgaatgaatcatttaagatgcgtgtggatgaaatgcaaatgttgcgtatggatgaaccattggaaggtgataatattctcaataagtacgttgaagtcaatcagcgcttagtggaggaaatgaaagcatttaaggagcgtacactatggtcagatttacatcgcgtaggtgcggaaattagtgcgtcagttaagaaagctttaccaaccatttccataactgaaaaactaccacattggactgttcaatgtggtattgctaaacctgagatggatcatgcttatgaggttatgagttcgtatgcagctggaatgaatgcagagattgaagcgcatgaacaagttcggcgttcatcagtggaatgtcaatatgcagagcctcaagctccaagaaaccctgatgacgaaggaccaactatagatgaagaacttatgggagacactgaatttacatcacaggctctagaacgtcttgtggatgaaggttatataactggaaaacagaagaaatacatagccacgtggtgtagtaagcgtcgtgaacatactgctgactttgatcttgtgtggactgataatttgcgtgtgttaagtgcgtatgtgcatgaacgttcagcttcaactcggctttctacggatgacgtcaagttatataaaacaattagtatgttgcatcaaaagtatgataccacagagtgtgctaagtgtcaacattggtatgctccgttgactgatatctatgttgatgacaagaaattgttttggtgtcagaaagagaaaaagacacttattgatgtccgaaaattgtcgaaagaagatgtgactgttcaatcaaaattgattaatttgtctgttccatgtggtgaagtgtgtatgttacattcaaaatatttcaattatcttttccataaagcatggttgtttgagaacccaacttggcgcctaatatataatggtactaagaagggtatgcccgagtactttatgaattgtgtggatgaaatttcattagattccaaatttggtaaagtgaaagtgtggttgcaagcgatcattgataagtatttaacccgtcccgtgaaaatgattcgtgattttcttttcaagtggtggccgcaagttgcgtatgtgttgagcttgctaggtataattggtataacagcgtatgaaatgagaaatccgaaaccaacttctgagcaattagctgatcattatgtaaataggcattgtagctctgatttttggtcaccagggttggcatcacctcaaggattgaaatatagtgaagcagtaacagcaaaggcacctagaattcatagattgccagttactactaagcctcagggatcaacacaacaagtagatgctgctgtgaataaaattttacaaaacatggtttacattggtgttgttttcccaaaagtgcctggtagtaagtggcgagatattaattttaggtgtcttatgcttcataataggcaatgtttaatgttgaggcattatattgagtcaactgccgcctttcctgagggaaccaagtactattttaagtatattcataatcaagagactagaatgtctggtgatatttctggtattgaaattgatttgttgaatttgcctagattgtattatggtggtctcgcgggagaggagtcatttgatagcaatatygtgcttgtgactatgcctaatcgtattcctgagtgtaagagcattattaaatttatagcgtcacataatgaacatatacgtgctcagaatgatggagtgttagtaactggcgaccatactcagctgttggctttcgagaataataataaaactccaataagtatcaacgctgatggtttgtatgaggttatacttcaaggagtatatacttatccataccatggcgatggtgtttgtggttcgatattgttgtctcggaatttacaacggccgattataggtatccatgttgctggtactgaaggattgcatggctttggagttgctgaaccacttgtacatgaaatgttcactggtaaagcaatcgagagtgaaagagagccgtatgatcgtgtgtatgaacttccgttgcgtgaattagatgaatctgatattggtttagatactgatttatatccaattggtagagtggatgcaaagctagctcatgctcaaagcccttctactgggattaaaaagacgcttatccatggaacatttgatgtaaggactgaaccaaatccgatgtcatcacgtgatccaagaayagcaccgcacgatcctttgaagttagggtgtgaaaagcatggcatgccctgttcaccgtttaataggaaacatctggaattagcgacaaatcatttgaaagaaaaattagtttcagtagttaaaccaataaatggttgcaagattagaagtttgcaagatgctgtatgtggtgtgcctggtttagatgggtttgattcaatatcttggaatactagtgctggttttcctttgtcttcattaaagccacctggagcatcaggtaagcgatggttgtttgacattgagctacaagactcgggatgttatctcttgcgtggaatgcgtcccgaacttgagattcaattatcaacgacacagttaatgaggaaaaagggaataaaacctcacactatattcacggattgtttgaaagatacttgtttgcctgtagaaaaatgtagaatacctggtaagactagaatatttagtataagtccagtacagtttactataccgtttagacagtattatttagattttatggcatcctatcgagctgcacgccttaatgctgagcatggtataggtattgatgttaatagcttagaatggacaaatttggcaacaagtttgtcaaagtatggcactcatatcgtgacgggtgactataagaattttggccctggattagattccgatgttgcagcttcggcgttcgaaattattatcgattgggtattacattatactgaagaagataataaagacgaaatgaagcgagtaatgtggaccatggcgcaagagattttagcgcctagtcatctatgtcgtgatttagtgtaccgggtaccttgtggaattccatcaggttctccgataacggacattttaaatacaatttcaaattgtctgttaattaggttagcttggttaggtattactgatttgcctttatccgagttctctcaaaatgttgttcttgtttgttatggtgatgatcttatcatgaatgttagtgataacatgattgataaatttaatgctgtaacaatagggaaattcttttcacaatatgagatggtatttacggatcaggacaaatcaggaaatactgtgaagtggcggacgttacagactgctactttcttgaagcatgggtttttaaaacatccaactagacctgtgtttctggctaacctagacaaggtttcggtagaaggaacgacgaattggacccatgctcgaggattgggtcgtcgtgcagcaaccatagagaatgctaaacaagcgctagagttagcattcggatggggtccagaatactttaactatgtcagaaatactattaaaatggcttttgacaagttgggtatttatgaagaccttatcacatgggaagaaatggatgttagatgttatgctagcgcgtagtatttaattttaaatacttattagttttaattttattttaggttattggaattgagggaagtaccaccccccaagaccttcgttttaaatctactaaaaggagtggacctatatataagagcctgaagacagagtggattagaccaccatttttagcttatatatgggaaaggttgagttgcctctaaagactcagctccatagtagagtagttttaattacgattaaagtggtactctaggttaggtgttactcgcgtattatcaactagtggtaatgcgtcctaattttagtatagttttaaccataatagt

SEQ ID NO: 256733 - DNA, 10112 bp, Varroa destructor virus 1
gcatagcgaattacggtgcaactaacaattttagatagtagccatgaacaaacattatgattactcactacgtattgatcatttttacaatgacttgcgtagcatgaagcgcatgcttgtagttataactatgttattttgcaagttggagataattgtattggattatggatgcgtgcactaagtgtctacatctatagtcgtttgtggttcaagtttttgtgttagtagtacaatcttgaagaatgtaagtatcgtatgaatgatatttgaatgacaacactgaagtataaaatatataaaatccaaaaatatttttaatcttattcagtgtagtgtttgatagagtagaatgccatgtgaccgctcaaaggagtccattatggtatatcattcgaagtcgaatacttgtgtatagttattgtattttattagtaatattagcagtccgtaactatcataatcctattatagtttgattatatgatagaccactgcagtatcgagtagagtttagaaagagtagtgcaatagtaagatcactgtcaccgaccactcattgtaatagtgaggtttgtcggaaaccagttattgtgcagcgactagcaatcgtgaatcaatatagttggtattctaaatatgagacgattcggcgattttattgcgactgaaatttcatatttagcatgtcaggtcttattatgaatgctcgagtatttatttttgcggtagagtagggacccctctatctctcaggtactgtatgaggcgaaagtgtgaaagtaatttatgtctctatacataagtgactgtatcgggatttcctttggcaagaatccttttaattcagtataatttatgctacggtacgttacgttcgcagggcacccgttaatgtcacatagcccagacgatgacgaatggaaagacattactttttattttaatgctacgattattgctgttttattttgctgtttttatttgttattatattttgctattttattattgctaaatatatttctttactatttttgctttatatattagattcaattctttttattttatattttcaatttgattttgattttgaaggtaaatatatataaaaatggcatttagttgtggaactctttcttatgctgctgttgcccaagctccctctgtagctcatgctccccgtagttgggagattgatgaagctaggcgtcgacgcgttatcaagcgtttggcgttggaacaggaacggattcgaaacgttcttgatgtcactgtgtatgatcatacaacgtgggagcaagaggatgcgcgtgataatgagttccttatggaacaattgaataatttatatacgatatattctatagctgaaagatgtacccgccgccctgttcaagaacatgtccccatttcaatcagtaatagatattcccctttagaatcccttaagattgaggtaggaaaagacgcgggtgagttcgtatttaagaaacccaaatatacaaagatttgtaagaaagtgaaacgggtggcatcaaaatttgtgcgcgagaaagttgttaggcccgtttgtaatcgatcgcccatgttattatttaaaattaagaaagtaatatatgatctacatttgtatcggttacggaaacaagttcggcttctcagacgcgaaaaacagcgtgaatacgagttagagtgtgttactagtttgctacagctatctaatcctgtttcagctaaacctgagatggacaatcctaatcctggtccagatggtgaaggtgaagttgaattagaaaaggatagtaatgtagtattaactacacaacgtgatcctagcacctctattcctgctccaactagtgtgaagtggagtagatggactagtaatgatgttgtggatgattatgccactataacttcgcgttggtatcagattgccgaatttgtgtggtcaaaggatgatccatttgataaggaattggcgcgcttaattttacctcgagctttgttatctagtattgaggctaattctgacgctatttgtgatgtacctaatactattccgtttaaggtacatgcatattggcgtggagatatggaagttcgagtgcagattaactcgaataaattccaggttggtcaattacaggcaacttggtactattcggatcatgaaaatttgaatatccagacgaagcgaagtgtgtatggtttttcgcatatggatcatgctttgattagcgcatcagcgagtaatgaagcaaaattagtgataccttttaaacacgtatatccattcttaccaacgcgtgtcgttcctgattggacaactggtattcttgatatgggtaccttaaatattcgtgtaattgctccactacgtatgagtgcgacgggaccaaccacttgtaatgttgtagtatttattaagttaaataatagtgaattcactggcacttcttctggtaagttttacgcgaatcaaatcagggcaaaacctgaaatggaccgtgtgttaaatttggcagaaggattactaaataataccgtaggtggttgtaatatggataatccgtcatatcagcaatctccgcgtcattttgttcctactggtatgcatagtttagctttaggcactaatttagtagagcctttgcatgcattacgattagatgcatcaggtacaacacaacatccagttgggtgtgcgcctgatgaagatatgactgtatcttccattgcatcacgatatggtttaattcgccaagtgcaatggaagaaagaccatgcgaaaggatcattattattacaacttgatgctgatcctttcgttgaacagaaaattgagggaaccaatccaatttctttgtattggtttgctccggttggagtcgtatctagtatgtttatgcaatggagaggttctttagaatatagatttgatattatagcttcccaatttcatacgggtaggttaattgtaggttatgttcctggactgactgcttctttacaacgtcaaatggactatatgaaattgaagtcatctagttatgtggtgtttgatttacaggaaagtaatagttttacgtttgaagtgccctatgtgtcatacagaccgtggtgggtgcgtaagtatggtggtaattatctgccatcttctactgatgcgcctagcacactgtttatgtatgtacaagtaccattgatacctatggaagctgtttctgatactatagatatcaatgtgtatgtgcgtggtggcagttcgtttgaggtttgtgttccagtccaacctagtttaggtttgaactggaatacagatttcatattacgtaatgatgaggagtaccgcgcaaagaatggatatgcaccgtattatgctggtgtgtggcatagcttcaataatagtaattcgcttgtttttagatggggttcggcttcagatcaaattgctcaatggccaacaataacagtgcctcgaggagagttggcattcttgcgtatccgcgatgctaagcaagctgctgtaggaacgcaaccttggcgtactatggtcgtttggccttcaggtcatggatataatattggaataccaacttataatgctgaacgagcaagacaacttgctcagcatttgtatggtggtgggtctttgacagatgaaaaggctaagcaattatttgtgcctgctaaccagcaaggacccggcaaagtaagtaatggtaaccccgtctgggaagtaatgcgcgcgcctcttgcaactcagcaagcgcatatacaagattttgaatttgttgaagctgttccagaaggcgaagaatcacgcaacactacggtgttagacacgacaacaacgttacagtctagcggatttggtcgcgctttcttcggtgaggcatttaacgatcttaagacgttaatgcgccgataccaattatatggtcaattattgttatccgttactacggataaggatattgatcattgtatgtttaccttcccttgtttacctcaagggttagcgttagatataggttcggctggatctcctcatgaaatatttaatcgctgccgtgatggtatcattccattgatagcgtcagggtatcggttttatcgaggcgatttacggttcaaaattgttttcccaagtaacgttaatagcaatatttgggtacaacatcgaccagatcgtagactgaaaggatggtctgaagcgaaaatagtaaactgtgatgctgtatctactggacaaggtgtttataatcatggatatgctagtcatattcagattacgcgtgtaaataatgttatagaattggaagtcccgttttataacgctacgtgctataattatttgcaagcgtttaacccatctagtgcagcgtcgagttatgccgtttcgctcggagagatttcggttggttttcaggctactagtgatgacattgcagccatagttaataaacctgtaactatatattacagtattggcgatggtatgcagttttcgcagtgggttggttatcaaccaatgatgattctagatcaattgccagcaccagtagttagggctgtgcctgagggccctatagcgaagataaagaattttttccaccaaacggcagatgaagttcgagaagctcaggccgcaaagatgcgtgaagatatgggtatagtagtccaggacgttataggagagttaagtcaggctatacccgatcttcaacaaccggaagttcaagcgaatgttttttctctggtgtcacagttagtgcatgctatcatcggtactagccttaagacagttgcttgggcgattgtttcgatttttgtaactttaggtttgattggacgtgaaatgatgcattcagtcataactgtagttaagcggttattagaaaaatatcacttggcgacgcaaccccaggaatccgccaattcaggtacggttatttccgctattccagaagcacccaatgctgaagcagaggaggccagtgcctgggtatccattatttataatggtgtgtgtaatatgttgaatgtagccgctcaaaaaccgaaacaatttaaagattgggtaaaattagctaccgtagattttagtaataattgtagaggtagtaatcaggtatttgtgtttttcaagaatacgtttgaagtgttgaagaaaatgtggggttatgtgttttgtcagagtaatcctgcagcgcgactcttgaaagcagtgaatgatgaacctgagattttaaaagcgtgggttaaagaatgtctgtatttagatgatcctaaatttagaatgcgacgtgcgcatgatcaagagtatattgagagagtgtttgcggcccattcgtatggacaaattttattgcatgacttaacggctgaaatgaatcaatcgcgtaatttaagtgtgtttacgagagtgtatgatcaaatatctaaattgaagacggatctcatggaaatgggatcaaacccatatatcaggcgtgaatgctttacgatttgtatgtgtggtgcatctggaattggtaagtcttatttaactgattctttatgcagcgagctcttacgtgcgagtcgtactccagtgacaacgggcattaagtgtgtcgtgaaccctttgtctgattattgggatcagtgtgattttcagcccgttttatgtgttgatgacatgtggagtgttgaaacgtctactacgctcgataaacagttaaatatgctatttcaggttcattcaccaattgtactttcacctcctaaagctgatttagaaggtaagaaaatgcgttataatcctgaaatattcatatataatacgaataaaccttttccgaggtttgatcgtatagctatggaagctatttatcgacgtagaaacgttttaattgaatgtaaggctaatgaagagaagaagcgtggatgtaaacattgtgagaataatatacccattgctgaatgtagtccaaaaattttgaaagattttcatcacattaaatttcgttatgctcatgatgtgtgtaattctgaaactacgtggtctgagtggatgtcgtataatgaatttttggaatggattactcctgtatatatggctaatcgacgtaaagcaaatgaatcgtttaagatgcgtgttgatgaaatgcaaatgttgcgtatggatgagcccttggaaggcgataatattttaaataagtatgttgaagttaatcagcgcttagttgaggaaatgaaagcttttaaagagcgaaccctctgggctgatttacaacgtgttggctcagagattagtacttcagttaagaaagcattaccaactatttccattactgagaagctaccacattggactatccaatgtggcatagctaagcctgaaatggatcatgcttatgaagttatgagttcatatgcagcaggaatgaacgcagaaattgaagcgcatgaacaagttcgtcgttcttctttggaatgtcagtatattgagccttcaacttcaagacctctggatgaagagggtcctactatcgacgaggaattacttggcgaagtagaatttacttcttcagctttggagcgtttggttgatgaggggtatattactggtaaacaaaagaagtacatggcaacttggtgtacgaaacgaagagagcatgtatccgattttgatttagtatggacggataatttgcgtgttttgagtgcgtatgtccacgagcgttctacatctacgcgtttatctaccgatgatgttaaattatttaagacgattagtatgttacatcagaggtatgataccactgattgtgcaaaatgccaacattggtatgcaccattaacagctatttatgttgatgatagaaagctattttggtgccagaaggagactaagactttgatagatgttcgtaaattgtcgaaagaggacgttacagtccaatcgaaattaattaacttatcggttccgtgcggtgatgtatgtatgttacattctaagtactttaattatttattccataaagcgtggttgtttgaaaatccaacatggcgtttaatatataatggtactaagaaaggtatgcctgagtatttcatgaattgcgtggatgaaatttcattagattcaaaattttgtaaagtaaaggtttggcttcaagcaattattgataaatatttgactcgtccagtgaaaatgattcgtgactttctatttaaatggtggccgcaagtagcatacgtgttaagtttgttaggtataattggtataactgcgtatgagatgcgtaatcctaaatcaacagcagaagacttggctgagcactatgttaataggcattgtagttcagatttttggtcaccaggtatggcgactcctcagggattaaaatatagtgaagcgataacagctaaagcgcctagaatccatagattgcccgttactactagacctcagggatcaacgcaacaagttgacgccgctgtgaataagattttgcagaatatggtgtatatcggtgttgtgtttccgaaagtgcctggtagtaagtggcgagatattaattttagatgtcttatgcttcataatcggcaatgtttgatgttgcggcattacattgagtcgacggctgcttttccggagggtaccaaatactattttaagtatattcataatcaagaaactcgaatgtcaggtgatatatctggtattgagattgatttattgagtttacctagattgtattatggtggcttagctggggaagagtcgttcgatagcaatatagtgttagtaactatgccgaatagaattcctgagtgtaagagtattgtgaagtttatagcttcacatgctgaacatgctcgtgctcaaaatgatggtgtgttagttactggtgaacatactcagttattggcattcgagaataataataaaacacctataagtattaatgctgatggtttgtatgaggttatacttcaaggagtatacacttatccataccatggtgatggtgtttgtgggtctatattattgtctcgtaatttacaacgaccgattatagggatccatgtagctggtactgaaggattacatggctttggtgttgctgaacctcttgttcatgagatgttcactgggaaagcaatagagagtgaaagggaaccgtatgatcgtgtgtatgaattacctttgcgtgaattagatgaatctgatataggtttagatactgatttatatcctataggaagagttgatgcgaaattagctcatgcccaaagtccttcaacaggaattaaaaagacgcttattcatggtacttttgatgtttggactgaaccgaatccgatgtcatcacgagacccaagaatagcaccacatgatccgttgaagttagggtgtgagaaacatggtatgccatgttctccatttaatcgaaaacatttggaattagcaacgactcatttaaaggagaagttaatttccgtagttaaacctataaacggatgcaagattagaagtttgcaagatgctgtgtgtggtgtaccaggtttggatggctttgattcaatatcctggaatactagtgctggttttcctttatcttcattaaaaccgccaggctcttctggtaagcgatggttgtttgatattgaattacaagattcaggatgttatcttttgagagggatgagacctgaacttgagatacagttgacaacaactcagttaatgaggaagaagggaatgaagcctcacactatattcacggattgtttgaaagatacatgtttgcctgtggaaaaatgcagaatacctggtaagactagaatatttagtataagtcccgtccaatttacgattccattccgacaatactatctcgattttatggcgtcgtaccgtgccgctagacttaatgctgagcatggaataggtatagacgtgaacagcttggaatggacaaacttggcaacaagtctgtcgaagtatggcacgcatattgtgacaggagattacaagaattttggtcctgggttagattctgatgttgccgcttcagctttcgaaattatcattgattgggtgttaaattacactgaagaagatgataaagacgaaatgaagcgtgtaatgtggactatggctcaggaaatcttagctcctagtcacttatgtcgtgatttagtatatcgcgtaccatgcggtattccttctggatcaccaattacggacattttgaatactatttcgaattgtttgttaattcgattggcttggcaaggtattactgatttgcctttatccgaattttctagacatgtcgtgctagtttgttacggtgatgatctcatcatgaatgtaagtgatgagatgatagataaattcaacgctgtaacaattggcgatttcttttcgcgatataagatggaatttacggatcaggataaatctggaaatacagtgcggtggcgaactttacaaactgccacgtttttgaagcatgggttcttgaaacatccaacaagacccgtgtttctagccaatctggataaggtttctatagaaggaacaaccaattggacacatgctcgaggattgggtcgtcgagtagcaaccattgagaatgctaaacaagcgctagagttggcattcggatggggtcccgaatactttaatcatgttcggaataccattaaaatggcattcgacaagttaggtatttatgaggatctcatcacatgggaagaaatggatgttagatgttatgctagcgcgtaattttaagattttaatactcattaaaattaatttatatttaggttattggaattgagggaagtaccaccccccaagaccttcgttttaaatctactaagaggagtgaacttgcatataagagtctaaaagcagagtggattagaccaccacttttagcttatatgtgaggaaggttgagttgcctctaaagactcagctccgtagtagagtagttttagttacgattaaagtggtactctaggttaggtgttactcgcgtattgtcgcataacggcaatgcgtcctaattttagtatagtttaaccataatagg

SEQ ID NO: 256734 - DNA, 9499 bp, Israel acute paralysis virus of bees
gagcgtcgatcccccgtatggagcggagaatataaggctcagctaggatgacacgcctgcactgtcgacattagttaagttgcaattacacgtctgttgccgaagaaaccattttagtcaactgattatgatttttgtataatgataaacagtgatgaactgtataactcatcaacaacaaaacggattacgaacctatttgtaactatcttgatcgaagtctagtagatccccaatatagccctgaaaagcttgagggacgagatagctctataaatagccgtgaggctttaaatcctgataagtacattacctgagaattccttcttttggagtttgaatttatataagttagtaccaatagttaatatcatttaagtatgttattattgctgaaggcatgtatttcggataataacctctacattgatatataaactatatgcaagtctcggtggatattgcattatggtcgcagttaacctgtagcttatatattcctgtgtcggagcagtggtaatggagccggacgatttcgccaaaaatgttcacttctcaacaaaataacaaaattactaaacaacccgcccccctttcttatcttgcaagtatgcgagcaattactatggatgaagagcaagaatattttcttactctaaagtctgtagaaagagctcaaatattgaagatggtttatgtggaccaaaattgatttctttatattacatcaagatatcaattgtaccggttttacattaactatagtagataaggatgaaagaacaaaggacctcgagtattttgaccttaattgtgagtattatgagaatttgtatgatgcattaatggattctgagttttctaaaacttggtttacattgttgctaaaatatattgattatgctccaattagtacgaacagtcgaggaatgccccgcccggagaccatctgtgtttcaaaacattggtggtatgagttatataggattggattcttgaataagttgtaccgatgtggagactgggatagtattttacttctcctttcaggagatattgaagaaaacccgggacctgttgatatttcttataaagaatcttgcagacagaagagaatgaagaaatgcgtttctaagacttatgaggaaatcaaaatgcaacagcatattgatagaatcaataatgaagagaaacgtgctcatatgacgaaaccccgtaagttaaaggatttgattgaagttgaaatgcaaggaatgtttaattggactgaagaaagggaaatcttgaagagtactgcattcaaattcaaccattcgatggaccgagcgaatcatattatggataatctgatcccacaacttgaggatactttgtctggtttcagacaaacgtatgcaaagtgtgaagcgaaattctttggatcaataagtgttattgatgtctgcatagatatcattagtgctttgttgcaagtgagcttcgctaaacctggactcaagttagcttctattgcagtagaagtgttcagacttattaagaaatatgtctcaggaattaagattaacaccgataagataaaagaacttttgacttttggtaaacaagctttgagtagtagtaaccctattattcaggtttccatgcaaatggatatgccagaagttgatccttcaattttattacaacctggtgttatagtaagtgcaatctttttagttttaagtgtagtttttactaagaccctcccaagtaagactggtgttgaggcgatgttaaagaggactggagaactaggacgctctgcaaagggcatcatggatctcaatacagttcttaatacatcagtaacctcaatgcttgaatactttggagtacatactttaggattaagacaagaagctgaacttcaagttctcgtagaaggttataaaacttggtgtgatgaagttgcggctttagtaggacataagattaacatggatggtactttagatggaagaagtattgttgaagatattatgagagatacaaaagaaatccaacgtgtagaaaatctctacaaacgtggattggaaatttctcgtaatattgcagacatgaaacttccaacaaaattaaccattagttttaatacacacatgagatacttgactgaagttttcaaagcagtagatacgtctggtgcttttggaaataaaccccgaactcaacctgtagttatttggctatatggtgagtctggagttggtaagtcaggtatgacatggcccctagctgtagatcttaataatagtttagtagataatgtagaggagatgcgtaatttttccaagaatatttacatgagaaatgtagaacaggaattttgggataattatcaaggacaaaacgttgtagtttatgatgattttggacagatgagggattcaacatctaatcctaatcctgaattcatggaattaatacgcacagctaacatagccccttatcctttacatatggctcatttagaagataagcgtaaaactaaatttacatctaaagtaattatcatgacatctaatgtttttgaacagtcagttaattcgttaacttttcctgatgcttttagacgcagagttgatctgtgtgctgaagtacgtaataaggttgagtttacgaaggaaggatattcaaagactaaaggatgcatggtaagacgcttggataaggatttagttaagaagaagactggagacatatgttcaacagaatgttatttagtagacttggttaatcccgagactggagagaaataccaaactgatttagaatatgaagattttttagatatgtgtttggagaaaactcaggagtgtagagataattctgctaagttgaacgaatttctgatgaactatgctgaaagtcgatcaaaacgacccgaacaaaaacacgataagtgccctgaattggaatttgaagatgcaattgaagtgtctatgcaagtagacgctgactcgtctttagttccaattgagaagtctcgtcttcaagagatgattgagagttgccaaggagttgtgtatgatgcctgcggcaagaccgtatacatttctaagttagcttttgaactagcccctcttgagtatgagaaacaaatggaaagaatttcagggatgaaattttatcagaaaatggcaagtggtgttgtataccttcgtcaagttcgtgacacgagtatgaaaatgcttaattcatggatggaagaatgtatacaatatgcaaaggatcacccttggacaatagtagctggagttctaggaaccttcattggcattctcaccattgttggtttctggaaatggctatgctctgatggacagaagaagaaacaggcaattaagcgtcatttcattaatactggatacacgcttattatacctgaacgagaattgaataaattctgggagttggatgaaactctcgatttacgtggaatgcctgtaaatcaaatagaggaacatctcgctctactactgaagccgcgtcatcgcgtggttttagtacctaaagccactaagtacataataagtttagtggataatcatgccaaattgacagataagattattcttataactgctaataggtatgtgttttataaaaatcaaaattatgaattagtgtttggagaattaaatcaatttttcgaaaaagacccagaatcccttgtgaatactcctaaggttgaagcttttgcttccgccgatttgagtacttacaaaaataggaccccgattgtgatcgaagcacagacatctggagataatgtgactcttaaacaacaaaaggttaaagtaattgaagcaaaaacatctactgatgaagttactttgaaacaacaaaaacctattgttatagaggcacagtcttctggtgattgtgtgacccgaaaacaacgagtacaacgagtgattgaagcatttgcaagtagtgatgctgtgacattgaagaaatctactgcgaaattcgtagaaagtgacccaaatgacatagttgatgttacaatgcaaatgtggaaagatcaagttgcccaacgattgataaccaaccgtgtattgacaaatttgtataaagtttgtttggtacacaatgacgatcgaataacacctcttttgaatggactttttgttcgttcaaatttgatgttagtacctggacatcttcttggattcattgctgagtatgacacaattgaaattcgaaatctctttgacgtggtatttagagtgccatggaaagatgtgaagaaagttccaattgttaatgcttttggtgaatctaaagaagcagcgttattggccttcccaaaattcgtttgccaacattctgatttagttaagcatttccaaaatgctgaatctatgtcgaaatttaaacgatgtgaagtcactctacccgttttacgtttctctgagaaagttggtaaatttttatcaacactcattgaatgtgatcgagtggaggcttatgatagaccttatacgctgaacgattctcaaaaaggacaatatattctacgtcaaggcttagaatatatgatgcccacgactaatggtgattgtggctcgccgctcatcattaatgaaacccaagttttgaggaaaattgctggtattcatgtagctggagctacaactggcaaagcctatgctgagtctataacccaaaaagatcttgagcgagcatttattaaaatagatgtaagcatgcagatccaattggatttggattcaacattggatttctcaaaacccgaacccaaattgccttctggtactgaatttggtcctgaagatctcagcttttgtgatcttcccgccctaaagatgttaccagttggtaaactttctgaatccttattcgaacctggcaagacggatataaggccctctttggtacatggtcaaattagtgacataaaaacaaaaccagcctatttacgtaatgtaattaaggatggagattttgttaatatgaaacataaaaatttgatgaaatgtgctatggatacaccctatatcgacaaggacatgattgatgaggcatatcagttaactaaatctgtttggttaaaaggtatgagagatgaattgaagaaggttctcacttatgaagaagccatttgtggctctgaagtaagtgagtacatttcttcaataaatcgaagtagttcccctggatatccttggattaaggatagaacaaaaggaactaaaggaaaacaaggctggtttggatctgaaggagaatatattctcaatgaagatgttagactggccgttcaacgacgaattcaggcagctcgtgaaggaaaacgattacctgtaatgtgggttgatacattgaaagatgagcgtcgacccattgaaaaagttaatcaattgaaaacacgagtattctcaaatggaccaatggatttctctatagcttttcgaatgtattatttgggctttatagctcatttgatggaaaatcgaattactaatgaggtgtccattggaacgaatgtgtattctcaagactggagtaaaactgttcgtaagttgactaaatttggaaataaagttattgcaggtgatttttcaacttttgatggatcactgaatgtatgtattatggaaaaatttgcagatttagcgaatgagttttatgatgatggaaaagaaaataatctgatcagacacgtattgttgatggatgtgtacaattctgtacacatttgcaatgactccgtgtatatgatgacacacagccaaccctctggaaatcccgcaacgactccgctcaattgcttcattaatagtatgggattacgaatgtgtttcgcaatttgtgttaagaatgcaggcataaagatgacaatgagagattttggtaagcatgtttccatggtctcttatggagatgacaatgtcataaacttcagtgatgaagtatgtgaatggtataacatggaaactattgctaaagcatttgaaacccttggattcacctatactgatgagcttaagggcgtaaatggcgaagtaccaaaatggcgatcaattaaggacgtgcagtatttaaaacgtaagtttagatacgatgaacaacggaaggtttgggaagccccactttgtatggacacaattcttgaaatgccaaactggtgtcgaggaggacttgacattcaagaaggtacaaagttgaattgtgaaaatgcaattatggagctttccatgcatgaagagagcgtttttaatacctggtctaaaataattgaccgagtatatgcaaatgcgactggagatcacctggacataaacacttatcgtggttatgctcaggagcggtttctggaatactatatgtaagtatagtgttctggaggcatcattctatggttacccatcattagaggaaatttccaataaactctggtgtaaggcttagagtgatggtcgaggtgccctatttagggtgaggagcctcggtggcagccccaccaaatcctctattggataggaacagctgtactgggcagttacagcagtcgtatggtaacacatgcggcgttccgaaataccatgcctggcgattcacaacaagaaagcaatactcccaacgtacacaatacggaactcgcttcgtccactagtgaaaactcggttgagacccaagaaatcacaacctttcatgatgtggaaactccaaataggatcgatacccccatggctcaggatacttcatcggctaggaacatggatgatacgcacagtattattcagtttttacagcgccccgttctcattgacaacattgagatcattgctggaacaacggccgatgcaaacaaaccccttagccgatatgtgttagatcaacaaaattcccaaaagtatgtacgaagctggacattaccatcaacggtgcttaaggctggcggaaaagctcaaaagcttgccaattttaagtacctgcgatgtgatgttcaggtgaagttagtacttaatgcgaatccctttgtagcaggaagaatgtatctagcatatagtccttacgatgataaagttgacacggcccgtagtgttttacaaacatcgcgagctggggtcacaggctatccgggagtcgaattagacttccaattggacaactctgtagaaatgactattccatatgcctctttccaagaggcttatgatttagttactggaacggaagattttgtacagttgtatttgttcccaatcacacctgtactaggacctaaatctgaatcagaaagttccaaagttgacatttcagtttatatgtggttgagtaacatatctcttgttattccaacttatcgcatgaatcctgatattgtcaaacaaggagcttcaaggatggtaactgaatttgttccaaatcctcttgaaaaagatgccaaaaccatagcagatgctcttaagaaagttcagaaaaataatccttctgggtataaatatattatgcatgtcttgactggctatgaacctgaagtaaagaatgtaacaatgcaagtgaacgctccaaaaacgaaaacaagtcaaaaatctacctcagaaaatcccaaagttggaccaatatctgaagtggcttctggagtgaagacaacagctaatggaattgagcgtatccctgtgataggtgaaattgcaaagcctgtaacaactgctgtaaagtggtttgcagatgttgtcggaactgtggcagctatttttggctggtccaaacctcgaaatcaacaacaggtatgtccattcaaaatgtgcctgcatggggatattctctctataaaggcatacgatatgagcgtaccattggcttatgatcctaataacgaacttggtgacttgaaggatgtttttccttctgcggttgacgaaatggctacagggtatgtttgcggcaatccagccgtgaaacatgttcttacctggaagacgactgacgtaattcagaaaccaatagcaaacggagatgattggggtggagttataccagtgggaatgccttgttattctaaatccattagaattacaagtatttcagaaacggaaaatcgtgaaactgaagtcatagatgccgctccatgtgaatatgttgctaacatgttctcgtattggcgtgcaactatgtgttataggattaccgtggtgaaaacagcttttcatactggcagacttgagattttctttgaaccaggagtgatacccgttaaacccactgttaataacattgggcctgatcaggatcaactcacaggaacggcggctccttccgataataactataagtacattttggacctgactaatgatacagaagttacagtacgtgttccttttgtttcaaataagatgttccttaagactgctggaatctatggtgctaacagtgaaaataactggaactttcatgaatcctttagtggattcttgtgtataagaccagtcactaaattgatggctcctgatactgtgtctgacaatgtatctatagttgtttggaagtgggcagaagatgtagtagtagtagaaccgaaaccattaacatccggaccaacgcaagtatatcgaccacccccaactgcttcaacagctgttgaagtcttaaatgtagaacttcaaattaatataggtaataagactaacgaaaatgtaatctcattttttgactctacagatgctgaaacacaaaatcacaacgctttaatgaaaggatgtggtgagtttattgtaaacttgcgaactcttctcagaacctttagaacaataacagataattggatattacaagctaataccaagacaccaatcacggacctcacaaacaccacagatgctcagggtcgagactatatgtcttacctgtcctatttataccgattttatcgaggaggtcggcgttataaattctttaataccacccctctcaaacaatctcaaacatgctatataagaagctttcttataccacgtaattactcagctgatgaaattaacgtagacggaccttcacatataacataccccgtaatcaatcctgtgcatgaagtagaagttccattctattctcagtataggaaaatacctatcgcttcaacatcggataaaggttatgattcctctctaatgtatttttcaaatacagcaacaactcaaattgttgccagagcaggaaacgatgactttacctttggttggatgataggtccaccccagctacaaggcgaatcacgctccgtagccccctagatgtgcactgggagacagacaaatctccctatgtatggctatagtctaaatttttcacaaaatttcagtttagaccgaaaaccgacacttgaactggatatagtacattaatgtcctgcagctaacactgtagtttatatctaggtagagtgggcaaaattttcgaattaggtaaatttaaaaaaaaaaaa

SEQ ID NO: 256735 - DNA, 414 bp, Cloudy wing virus
gatgaacgtcgacctattgaaaaagttaatcaattgaaaacacgagtattctcaaatggaccaatggacttctcaattgcgtttcgaatgtattatttgggctttatagctcatttgatggagaatcgaattgcaaatgaagtgtctattggaacgaatgtttattcacaagactggagtaaaactgttaggaaattaaccaaatttggaaataaagtaattgctggtgatttttcaacttttgatggatcactaaacgtttgcattatggaaaaatttgcagatttagctaatgagttttacgatgatggaccagaaaatgctttgatccgtcatgtattattggtggatgtgtacaattctgtgcatatttgtaatgactcagtatacatgatgactcatagccaacccaca

SEQ ID NO: 256736 - DNA, 9491 bp, Acute bee paralysis virus; identical to SEQ ID NO: 256731

SEQ ID NO: 256737 - DNA, 9524 bp, Kashmir bee virus
tacgtacaattttgacgcttcgttcatgcaacaatgaactcacatgtggcgctcggtagtaaccagaggggcgtcattcccccgtatggagtggagaatataagctaccgactcgagctgtagaataattcagcaacttataacgaacacgaattttagtcgacgaaaccattttagcctttaattctatgatttgattataatgataaacagctcatgtaactgtctaaactacataaatacaactggattacgaacctttaagtaactatcttagatgaagtctagtagtctcccaatatttccgtgaaaagaatgagggacgagatagctctatttaaagacgtgaggctttaaattctgataaatacattacctgagaattcctcctttaggagttagaatttgaaaagattagtacctatacttaatagaatttaaatatgttaataatgctgaagacaagtatttcgattattaacctctatatttctatataaagtatctgtgagtctcagtggacatcacagtaaggtcgcagttaacttgtaatcttttcattcctgtgtcggagcagtggtaatggagccggacgatttcgccaaaacatgttttcttcaactcaacaaaataacaagatgacaaaacaaccagcaactttaacctatctttcaagtatgaaggtgattagtatgccaccaagtgaattcttttcacttgatgacttgtgtcgccaacaaattttaaagatggtttatattgaccaatacgcttttcacatgttacatgaagacataaattgtatagggtttactctatcaatttatgatgaagataaacgaatgaaggacataacttattgggatctgaattgtgaatatcatgaaaatttatatgatgcactaatgtcggccgaatttgaacaagtttggtttacattattgcttaaatatcttgattttgtaccagtaccaatgaattggagaggaatgccagaatttcctaccatttatgtatcaaaacatttttggtatgaattatatcgcattggatttttgaataagttatataaatgtggaacttgggagtcagtattaaatctcttagccggagatatagaattgaatcctggacccactgatatttcttacaaagaacaatgccaacgacgacaacgacgcaaacgaatttctaaatcttatgaagaaatcaaaatgcaacaacatattgataaagtaataagagaagaatttcgttcccaccagacaaaacccaagaaattgaaagatgttattgatgtttctatgcagggactttttaattttcaagaagaaaaggatattattaagtcaactgcatataaattcaatgatactctggataaatctaatcatataatggataatcttataccacaattagaagaaacgttagcaggctttagaaggacttatgcgaagtgtgaacaaaagttatttggaactattagcattattgatgtctgtattgatatcattagtgctttgttacaagtaagttttgcgaaagcttcaatgaagttagcttctttagcagtagaagtatttagattaattaagaagtatgtaggcagtgttaagattaatattgataaaataaaggagttgttaacatttggtaagcaagcattagacgtggataatcccattattcaagttaaaatgcaaattgatatgccagattacacaactcttttacaacccaatgttattgttagtgctatatttttagtattaagtgttattttcaccagaactcttcccacaaaaactggaatggaagcaatgataaaaaggattggagatctaggacgtgctgcgaaaggcgtttctgatcttaattctgttttgaataattccatttcaactatgttggaacattttggcgttcatactttaggtttaaaacaagaggcagagcttcaacttttagtacaaggctataaggcctggtgcgatgaagtgagagctctagtaggacataagattaaattagacggagattttgatggaaaaagtattgttgaagaaataatgaaagatgtccacgaaattcagcgtgtagagaacctctacaagcaaggattggacattgctcgtaatatttctgatatgaaactcccatcaaaattgacaattagttttaatacccacatgagatatttgactgaagttttcaaagcagtagacacctctggcgcctttggaaacaaaccacggactcaacctgtagtcatttggctatatggtgagagtggacgtggtaagtcaggtatgacatggcccttagcagtagatttaaataatagtttattagatgatgtgacggagatgcgtaacttttccaagaatatctacatgagaaatgtagaacaggaattttgggataattatcaaggacaaaatatcgtagtttacgatgattttggacaaatgagagattcaacagctaacccaaacccagaattcatggaattgatacgtactgccaatatcgccccctatcctctacacatggcccatttggaagataagagaaagacgaagtttacgtcgaaagtgataatcatgacatccaatgtttttgaacaatctgtaaattcgcttacttttcctgatgctttcagacgcagagtagatctgtgtgctgaagtgcgcaataaggaagaatatacgaaggaaggttattctaagcagaagggatgcatggttaagcgattagatcgtgaaaaggtgcagaagttgacaggagatattcactcaacgaaaccatatttggttgacttagtgaatgcagagaccggagaaaaatataagactgacattgaatatgaagactttttagatatgtgcttggagaaaaccaagacgtgtcgagatgagtctgccaaactcaatgaatttcttatgaattatgctgaacaacgcaaagacagaagtagagatacttttatccatcctgaacctgaatatgacgatgatgagttcaaggacacattagaagtacagatgcaaattgatgctcctaatgatgaccttgttctcattgaacaagatagattgcgagagatgattgattcatgtaccggtgttgtttatgattgcaaacaacaagtagtgaagatatcaaaactcgcttttgatcttgccccattagactatgatgaacaaatgcaacgaattaaggaaatgaagtattaccagaaagtcgcaagtggcgtatcatatttgaagaaagttttggatgcaggtcttgcaatttgcaagacttggattgaagaaactgtcaaatatgtgcaggaacacccttggaccacagcaatggccattttaggaaccctattaggtattcttaccgtagtaggattttggaaatggctttgcagtggagaaaagaagaaaccacaagctacaaaacgacattttgtcaatactggtgtgactcttgtcataccacatcgagacctcaataagttttggcagttggatgaaacattagacgtatccaacatgcgtgttggagatgttgaagatcatctggcggccttacttaaacccagacatcgtgttgtcattgtacctagggtgactaaattcattttgagtattattgataaccactcgaaactctttgataaaacgattttaattaccaagaaccgattctttacttatgaaaataaatatattgaattggtgtgtggtgagatgaatcgtttctttgaagaagacccggaatcacttgtaaatacaccaaaagtagaagcttttgcttctgctgatttggctacttataaaaacaggactccgatagttattgaggcacaaacatcaggagataatatgactcttaaacaaccacgaccagttgttatagaagctcagacatctgctgattgtgttactttagctaaaaacacacaacgaatgattgaagcatttgcaagttctgatactgtaacactgaaaagaccaacaacaaaatatgttgaaggaactggatatgatacagttgatgtctctatgcaaatgtggagagatcaggtggcgcagaaattgatcactaaccgaattttaacaaatctgtataaaatttgtttagtaaatgacgacgacacagtaacaccacttttgaacggattatttattcgttcaaatgtgatgttagtacccggacatttgactggattcattgcagagcatgatacaattgaaatcagaaatctttttgatgtggtatttagagtaccatggaaagaagttaagaagataacagttgagaatgctcttggtgaatccaaggaagcagcgttattagcgttccctaagttcgtatgtcaacactctgacattgtaaagcactttcaaactgctgaatcaatgtcaaagtttaagcgatgtgaggtcacattacctgtattgcgttactctcaaaaattggaaagatttatgtcttcccttattgaatgtgataaagtagaggcatgtgataaaacttatacgctaaatgatgttaagaaaggacaatatatattgcgacaaggattagaatatacgatgccgacaattgatggtgattgtggagccccactaatcatcaatgaaacacaggttactagaaagatagctggtatacatgttgctggtgcagcatgtggtcgagcttatgcagaatctataacccaaaaagatttggagcgtacatttagtaaaatagatgttacgatgcaaatccaattggatttagattcttcattagatttttctagaaccgaacccaaaattcctgctggagtcgaatttggaccggaagctctcactttttgtgatcttccagcccttaagatgataccagtaggacgacttcccgaacccctatttgaaccaggcaaaacagatattaggccttccttagtacatggaatgatttctgatattaagactaaaccagcttacttacgtaatgtaagagtagatggtgaagttataaatatgaaacacagaaatttaatgaaatgtgctatggatacaccttatatcgacaaggacatgatcgaggaagcatatcagttaactaaatccgtttggttaaaaggtatgcgagatgaattgaaaaaggttctcacttatgaagaagccatttgtggctctgaagtaagtgaatacatttcttcaattaataggagtagctccccaggatatccttggataaaggatagagtgaaaggaactaaaggaaaacaaggctggtttggtactgatggagaatttattctcaacgaagatgtcgaattagccgtacaacgacgactacaagcagctcgtgaaggaaaacgattacctgtgatgtgggtcgacacattgaaagatgaacgtcgacctattgaaaaagttaatcaattgaaaacacgagtattctcaaatggaccaatggacttctcaattgcgtttcgaatgtattatttgggctttatagctcatttgatggaaaatcgaattacgaatgaagtgtctattggaacgaatgtttactcacaagactggagtaaaactgttaggaaattaaccaaatttggaaataaagtaattgctggtgatttttcaacttttgatggatcactaaacgtttgcattatggaaaaatttgcagatttagctaatgagttttacgatgacggaccggaaaatgctttgatacgtcatgttctattgatggatgtgtacaattctgtacatgtctgtaatgattcagtatacatgatgactcatagccaaccttcaggaaaccccgcaacaacaccccttaactgtttcattaatagcatgggattgagaatgtgtttctcaatttgtgctactaaagcagcggttaaaatgacgatgagagattttagtaaacatgtttccctcgtctcttatggagatgataatgtaattaacttcagtgatgaagttagtgcatggtataacatgtctactattgcagaggctttttcaacacttggattcacttatacagatgagctcaagggagttagaggcgaggtaccaaattggcgatcaatacaggacgtgcaatatcttaaacgtaagtttagatatgacaatcaacggaaagtttgggaagctccattgtgtatggacacgattcttgaaatgcctaattggtgtcgaggaggactcgatattcaagaaggtacaaaattgaactgtgaaaatgcaataatggaactttctatgcatgaagaggaagtctttgataagtggtcaaaagtaattgacaaagcttatgcaaaggctacaggagatcacctggacataaacacttatcgtggatatgctcaggagcggtatctcgagtattatatgtaaatataatacttgagatgcactgtttcatggttacccatcatttgaggaaatttccaataaacttgaatgtaaggcttgaaacagtggtctaggtgccctatttagggtgaggagcctagctggcagccccagtgaatcctctattggatagaaaccgctatatcgggtagctatagcagtcggatagtaatatatccggcgtttcgaaataccatacctgctgataaccaagaaaacgattctaccaatgtacataacacgaaactcgcgtcgacctcagcggagaatgccattgagaaggaacaaatcaccacctttcatgatgtggaaactccaaataggatcgatacccccatggctcaggatacttcatcggctaggagcatggatgatacgcacagtattattcagtttctacaacgccccgttctcattgacaacattgagattgttgcaggaacaactgccgataacaacacagcactcagtagatatgtgctagatagaacaaacccgcaaaaatacattaaacaatggacattaccatcaacagtgttgaaagctggtggaaaagcccaaaagcttgccaactttaaatatttgcgatgtgatgtacaagtgaaaattgtattgaatgctaatccattcattgctggtaggttatacctagcatattcaccttatgacgacaaagtagcacctgaacgtagaattatttatacttcccgtgcaggtgttacaggttatccgggagtcgaactagatttccaattagacaattcagttgagatgactattccatatgcatcttttcaagaagcatatgatttagttagtgggaatgaagattttgtgcagttgtacctttttacaattgcaccggttttgggaccttcagctgaatcagcgaattcaaaagtagacctttcagtctatatgtggttagataacatatctctcgttatccccacatatagattgaatccaaatcttccaaccggacaaactctaacccgcatagttcagaattccgattctgataaactcaaagaagcacttaagattgctaagtctaagaacccttcaggatataaatatatcatgggagttcttgaacaatacaatccaagtgtgaaacaagtttctatgcaaatcgcaacacctaacaaatcaaaatcaacaaaaccaacatccgaaaacccaaaaattggaccaatttccgaagtggcttcaggagttaagacagctgcaaatggcatcgagcgcattccagtgctaggtgaaattgcaaagccggtaactgctgcagttaaatggtttgctgatattgtaggaggtgtagcagccatattcgggtggtccaaaccccgaaatcagaatcaagtgatgccttatcagaatgtgcctggatggggatattccctatataaaggcattgacatgagtgtaccacttgcttatgaccccaataacgaattaggagacttgcgagatgtatttccatctgccgtagacgaaatggctattggatatgtttgtggcaatccagctataaaacatgtcctcacctggagtacgacagatgtggttcaaaacccgataagtaacggagatgattggggcggtgtaataccagtgggaatgccttgctactctaagactattagagcagttaaaggcgccacttcgacgtcaaaaaccgaagtgatggacccagcaccgtgtgaatatgttgcaaatcttttctcatattggcgtgcaactatgtgctatcgtattacggtagtaaagacagcttttcacacaggcaggttggaaatcttctttgaaccaggaagtattcccacggtaagaaccgcagataacttaggaccagatcagacacaattgaacggaacaatagctccatccgataacaactataagtatatattagacttaacaaatgatactgaggttacgatcaaagtaccatatgtttcgaataagatgtttatgaagaccgttggcatctacggtgcgcatgatgaggataattggaactttgatgaatccttcaccggattcttgtgcataaggccaattactaaactcatggcacctgatacggtatcgcagaaagtatctatagttgtatggaaatgggcagaagacgtagtagtagtagaacctaaaccactcacctcaggaccgactcaagtgtacaatccacctgcagtagctagagacctagttaaacagattgatgtttcaatgcaaattaatttaagtaacaagactgacgaaaacacaatctctttctttgactcaggcgacccagaacgaatgaataatgaggctctcatgaggggatgtggcgaacagatagtaaatttaagacccttacttcgcacattccgaacaataaatgataactggagtttggcagcaaacaccaagacaccgatcacagacctaacaaacaccgcagatgctgaaggccgagactatatgtcttatctttcttttctttatagattttatcgaggaggtagacgatataaattctttaacacgacccccctaaaacaatcacaaacctgttatgtgaggagttttctaattccccgtaactacacagccgacgaaattaacaccgacggaccatctcatattacatacccagtaattaacccagtacatgaagtagaagttcccttctactctcagtaccgcaaaattcctatcgcttcaacatcagacaaaggatacgattcatccctcatgtattacacaaatgttggtacccaacagattgtagcacgtgccgggaatgatgacttcacctttggttggatgataggcactccgcaacttcaaggtataactaaagaagtcgcaaactagatgtgcattaggagacagtaaaatctccttttgtatggctattagtctaaatttttcagaaaatttcagtttagaccgaaacagagtagtacgagcactatggttcgaaaagacgcttaaaagaaatctcactagaaggaggcttttaagctatcagctttttgacataatctaacgactacggcaaaatttcggaattaggataattttaaaaaaaaaaaaaaaaaa

SEQ ID NO: 256738 - DNA, 10140 bp, Deformed wing virus
cgatttatgccttccatagcgaattacggtgcaactaacaattttagatagtagccatgaacaaacattatagtagctcactacgtattgatcatttttataatgacttgcgtagcatgaagcgcatgcttgtagttgtaactatgttactttrcaagttggagtttactatyttggattatgaatatgtgcacttagtgtctgtatttatagtcgtttgtggttcaaggttttgtgttagtagtacacttatgtatgaatgtayctttagtatgaatgttatagaatgacaatatcgaargaaaaatytttataaaatacaaaaatattgtttttattatttcgatatggtgttttatagagtagattgccatgtgaccgctcrtagaagtccattatggtttatcaatcgaagttgaatgtatttataagratattatacttaattagtaatattagtagtccgtaactattatcatcctttttcagtttgatgtgataatagaccactgcagtatcgagtagagtttcgaatgcgtagtgcaatagtataatyactgtcaccgaccatctattgtaatgatagatctgtcggaaaccattatttatgaagtgactagcaatcatggattaaattagatggtattctagtttagaggtgattcggcgctgcggtgcgactgaaacttctaaattagcatgtcagattatattatgaatgcgttagtagtaatttctgcgatagagctgggacccctcagtctctcaggtattgtacgaggcgaaagtgtgaaagttttgtatgtgtttttatatgtacgactgtatcgggaattcctttagcaagaatccttttaatacagtataatttgtgctacggtacgttacgttcgcagggcacccgttaatgtctcatagcccagacgatggcggatggaaagacatcatattttattttaatgctgtctttattgctgatttattttgctgtttttatttgctattttatatttgctaattytcattattgcgaaatatattacattgctatttttattatatacgctagattcaattttatttttyctatattttcaatttaattttgatttcgaaggtaaatatatataattrattattaaaaatggcctttagttgtggaactctytcttactctgccgtcgcccaagctccgtctgtcgcytatgcacctcgtacatgggaagttgatgaagctaggcggcgccgagtcattaaacgtttggcgctggagcaagaacgtattcgtaacgttcttgacgttgccgtctatgaccaggcgacatgggaacaggaggacgcgcgcgataatgagttcctaacggaacaattaaayaatttatatactatttattcgatcgctgaacgttgtacgcgtcggcctatcaaagagyactctcctatatcagtttcgaataggtttgctccactggartccctyaaggtcgaggtcggtcaagaagcargcgaatgtatrtttaagaaacctaaatatacgcgcrtttgcaagaaagtgaagcgtgttgcaactcgcttcgttcgtgaaaaagttgttcgtcctatgtgytcwagatcccctatgctattatttaagcttaagaaaattatttatgatttgcatttatatagattaagaaaacagattaggatgttgagacgtcaaaaacagcgcgattatgagttagagtgtgtcactaatctgytacaattatcgaatccagtgcaggcaaaaccagagatggataaccctaatccaggacctgatggcgagggtgaagttgaattagaaaaggatagcaatgttgttttaacaactcagcgagatcctagtacatctattccagcgccggtgagcgtaaaatggagtagatggactagtaatgacgtagtagatgattatgccacaatcacatctcgatggtaycagattgctgaatttgtttggtcgaaggatgatccatttgataaggagttagcacgtttaattttgcctcgtgctttgttatctagtatagaggctaattctgatgctatatgtgatgtgcctaatactatcccatttaaggtacacgcatattggcgaggcgatatggaagttagagttcaaattaattcaaataaattccaagttggtcaattacaagctacttggtattattcggatcatgagaatttgaatatatcgtctaagagaagcgtttatggattttcacaaatggatcatgctttgattagtgcgtcagcaagtaatgaagcaaaattagttattccatataagcatgtttatccatttttaccgacaagaattgtgccagattggactactggcattttagatatgggtgctttgaacattcgtgtaattgctcccttacggatgagtgctactggtccaactacctgtaatgtcgtcgtgtttattaaattaaataacagcgagtttacagggacttcttctggtaagttttatgcgagccaaatcagggcaaaacctgagatggatcgtatattaaatttggcagagggattgttgaataacacgattggtggtaataatatggataatccttcttatcaacaatctcctcgtcattttgtcccgactggtatgcacagcttagctttaggtactaatttagttgaaccattacatgcattacgtttrgatgcagccggtacgacacaacatcctgtaggttgtgctcctgatgaagatatgactgtatcctccattgcatctcgatatggactaattagacgggtacaatggaagaaagatcatgctaaaggatcacttttgttacaattagatgctgatccatttgtggagcaaagaattgaaggtacgaatccaatatcyttgtattggttcgcacccgtgggtgtagtatctagtatgtttatgcaatggcgcggttcattagaatataggtttgatattatagcatcccaatttcatactggtaggttaattgtaggttatgtgcccggtttgacagcatctttgcaacttcaaatggactatatgaaattgaagtcatcgagttatgtagtatttgatttacaagaaagtaatagcttcacttttgaggtgccataygtttcatatagaccatggtgggtgcgtaaatatggtggyaattatttaccctcgtcaactgacgctcctagtacattatttatgtatgtkcaggtwccrttgatacctatggaagctgtttcagatactattgatatcaatgtgtacgtacggggcggtagttcatttgaagtttgtgttccagtccaacctagtttaggtttgaattggaatacagactttattttacgtaatgaygaagaatacagggctaagacaggttatgcaccatattatgctggagtgtggcatagcttcaataatagtaattctcttgtttttaggtggggatctgyttccgaycaaattgctcagtggccgacaatttcagtaccaagaggtgagctagctttcttacgaattaaggatggaaagcaagctgctgtaggaacycaaccttggcgtacgatggttgtttggccttctggycatggttataatattggtatacctacgtataatgctgaacgagctcgccagcttgcacaacacttatatggtggtggatcattaactgatgagaaggccaaacaattatttgttcctgctaatcaacaaggacctggtaaggtaagtaatggaaatccggtatgggaagtcatgcgtgcaccattggcaacacagcgtgcgcatattcaagattttgaatttattgaagctattccagaaggagaggagtctcgtaatactacagtcttggatacgaccactactttacagtcgagtggatttggtcgcgcyttctttggagaagcttttaatgaycttaaaacgttaatgcgacgatatcaattatatggtcaattattattgtccgttactacggataaggatattgatcattgtatgtttaccttcccttgtttaccacaagggttagcgttagacattggttctgctggctctccacatgaaatctttaatagatgtcgtgatggtattataccattaattgcatctggatatagattttatagaggagatttgcgttataagattgtttttccaagtaatgttaatagcaacatttgggtacaacatcgaccggatcgtagactggaaggatggtccgcggctaagattgtaaattgtgatgctgtgtctactggtcaaggggtgtataatcatggttatgctagtcacattcaaatcacgcgtgtaaataatgttatagaattggaagttccattttataatgctacttgttataattatttacaggcgtttaatgcgtctagcgctgcatctagttatgcagtatctttaggagaaatatcggttggttttcaagctacaagtgatgatattgcatctattgttaacaaacctgttactatttattatagtattggagatggtatgcaattttctcagtgggttggatatcaaccgatgatgatcctagatcagctycctgcaccagtagtaagggccgtgcctgagggccctattgcgaagattaaaaacttcttccatcaaacagccgaygaagttagagaagctcaggcagcaaagatgcgtgaagatatgggtatggttgtccaagatgttattggagaacttagccaggcyataccggatcttcaacaaccggaggttcaagcaaatgtcttctcactggtgtctcagttagtgcatgctattataggtactagtttgaagacagttgcttgggcgattgtttcgatttttgtgactttaggattaattggacgcgaaatgatgcattcagttattactgtagtcaagcggttacttgagaaatatcacttggcgacgcaaccccaggaatccgccagttcaagtactgttatatctgccgttccagaagctcccaatgctgaagcggaggaggcaagtgcttgggtatccattatttataatggtgtgtgtaatatgcttaatgtrgctgctcaaaaaccgaaacaatttaaagattgggtaaaattagctactgtagattttagtaataattgtagaggtagtaaccaggtatttgtatttttcaagaatacatttgaagtgttgaagaaaatgtggggttatgtattttgtcagagtaatcctgcagcgcgtttgttgaaagctgtgaatgacgagcctgagattttgaaagcatgggtgaaggaatgtctgtatttggatgatcccaaattcagaatgcgtcgagcgcatgatcaagagtatatcgagagagtgtttgcggcacattcatatggacaaattttgctacatgatttaactgctgaaatgaatcaatcacgaaatttgagtgtgtttacacgtgtgtatgatcaaatttcaaaattgaagaccgatcttatggaaatgggatcgaatccatatataaggcgtgaatgttttacgatatgcatgtgtggtgcatctggaattggaaaatcatatttgaccgattctttatgcagcgagctcttacgtgcgagtcgtactcctgtgacaacaggcataaaatgtgttgttaatccattatctgattattgggatcaatgtgattttcagcctgttttgtgcgttgacgatatgtggagtgttgaaacatctactacgctygataagcagttgaatatgcttttccaggtccattcccctatcgtgctttctcctcctaaagctgatttagaaggtaagaaaatgcgatataacccggaaatattcatatacaatacgaataaacctttcccgaggtttgatcgtattgctatggaagctatttatcggcgtagaaatgttttgattgaatgtaaagcgagtgaagagaagaagcgaggatgtaagcattgtgagaatgatattcctattgctgaatgtagtcctaagatgttgaaagattttcatcatattaaatttaggtatgcgcatgatgtatgtaattccgagaccacatggtctgaatggatgacgtataatgaatttcttgaatggataactcctgtgtatatggctaaccgtcgtaaggcgaatgaatcgtttaagatgcgtgtggatgaaatgcaaatgttacgtatggatgaaccattggaaggtgataatattctcaataagtatgttgaagttaatcagcgcttagtggaggaaatgaaggcatttaaggagcgtacactatggtcagatttacatcgcgtaggtgcggaaattagtgcgtcagttaagaaagctttaccaaccatttccataaccgaaaaaytaccacattggactgttcaatgtggtattgctaaacctgaratggaccatgcttatgaggttatgagttcgtatgcagctggaatgaatgcagagattgaagcgcatgaacaagttcggcgttcrtcagtggaatgtcaatttgcagagcctcaagctycaagaaaycctgatgatgaaggaccaaccatagatgaagaacttatgggcgacactgaattcacatcacaggctctagaacgtcttgtggatgaaggttatataactggaaaacagaagaaatatatagctatgtggtgtagtaagcgtcgtgaacatactgctgactttgatcttgtgtggactgataatttgcgtgtgttaagtgcgtatgtgcatgaacgttcatcttcaactcggctttctacggatgacgtcaagttatataaaacgattagcatgttacatcaaaagtatgataccacagagtgtgctaaatgtcaacattggtatgctccgttgactgatatctatgttgatgacaagaaattgttytggtgtcagaaagagaaaaagacacttattgatgtccgaaaattgtcgaaagaagatgtgactgttcaatcraaattgrttaatttatctgttccttgtggtgaagtktgtatgttacattcaaaatatttyaattatcttttccataaagcatggttgtttgagaacccaacttggcgcctaatatataatggtaccaagaagggtatgcccgagtactttatgaattgtgtggatgaaatttcattagattccaaatttggtaaagtgaaagtgtggttgcaagcgatcattgataagtatttaactcgtcccgtgaaaatgattcgtgattttcttttcaagtggtggccgcaagttgcgtatgtgttgagcttgctaggtataatyggtataactgcgtatgaaatgagaaatccgaaaccaacttctgaggaattagctgatcattatgtgaataggcattgtagctctgatttttggtcaccaggactggcatcacctcaaggattgaaatatagtgaagcagtaacagtaaaggcacctagaatccatagattgccagttactactaagcctcagggatcaacacaacaagtagacgctgctgtgaataaaattttacagaayatggtttacattggtgttgttttcccaaaagtgcctggtagtaagtggcgagatattaattttaggtgtcttatgcttcataataggcaatgtttaatgttgaggcattatattgagtcractgctgcctttcctgagggaaccaagtactatttyaagtatattcataatcaagagactagaatgtctggtgatatttctggtattgaaattgatttgttgaatttacctagattgtattatggtggtctcgcgggagaggagtcatttgatagcaatatcgtgcttgtgactatgcctaatcgtattcctgagtgtaagagcattattaaatttatagcgtcacataatgaacatatacgtgctcagaatgatggagtgttagtaactggcgaccatactcagttattggctttcgagaataataataagaccccaataagtatcaacgctgatggtttgtatgaggttatacttcaaggagtatatacttatccataccatggcgatggtgtttgtggttcgatattgctgtctcggaatttacaacggccaattataggtatccatgttgctggtactgaaggattgcatggctttggagtygctgaaccaytggtacatgaaatgttcaccggtaaagcaatcgagagtgaaagagagccgtatgatcgtgtgtatgaacttccgttgcgtgaattagatgaatctgatattggtttagataccgatttatatccgattggtagagtggatgcaaagttagctcatgctcaaagcccttctactgggatcaaaaagacgcttatccatggaacatttgatgtaaggactgaaccaaatccgatgtcgtcacgtgatccaagaatagcgccgcatgatcctttgaagttagggtgtgaaaagcatggtatgccttgttcaccgtttaataggaaacatctggaattagcgacaaatcatttgaaagaaaaattagtttcagtagttaaaccaataaatggttgcaagattagaagtttgcaagatgctrtatgtggtgtgcctggtttagatgggtttgattcgatatcttggaatactagtgctggttttcctttgtcttcattaaagccacctggaacatcaggyaagcgatggttgtttgayattgagctacaagaytcgggatgttatctcytgcgtggaatgcgtcccgaacttgagattcaattatcaacgacacagttaatgaggaaaaagggaataaaacctcacactatattcacggattgtttgaaagatacttgtttgcctgttgaaaaatgtagaatacctggtaagactagaatatttagtataagtccggtacagtttaccataccgtttcgacagtattacttagactttatggcatcctatcgagctgcacgacttaatgctgagcatggtattggtattgatgttaacagcttagagtggacaaatttggcaacaaggttgtctaagtwtggcactcacatcgtgacaggagattataagaattttggtcctgggttagattccgatgttgcagcttcagcgttcgaaattattatcgactgggtattacattacaccgaagaagataataaagaygaaatgaagcgagtaatgtggaccatggcgcaagagatcttagcgcctagtcatctatatcgcgacytggtgtaccgagtaccttgtggaattccatcaggttctccaataacggacatattgaayacaatttcaaattgtttgttaattaggttagcttggttaggtattactgacttgcctttgtccgagttctctcaaaatgttgttcttgtctgttatggcgacgatcttatcatgaatgttagygataacatgattgataagtttaatgccgtgacgataggaaaattcttttcacaatataagatggaatttacggatcaggataaatcaggaaatactgtaaagtggcggacgttacagactgctactttcttaaaacatgggttcttaaaacatccaactagacctgtgtttctagctaacctggacaaggtctcggtagaaggaacgacgaattggactcatgctcgaggattgggtcgtcgtacagcaaccatagaaaatgctaaacaagcgttagagttagcatttgggtggggtcctgaatattttaattatgtcagaaataccattaaaatggcttttgacaagttgggtatttatgaggaccttatcacatgggaagaaatggatgttagatgttacgctagtgcgtaatattaaattttaaatactcattaattttaattttattttaggttattggaattgagggaagtaccaccccccaagaccttcgttttaaatctactaagaggagtaaacctatatataagagtctaaagacagagtggattagaccatcatctttagcttatatacggggaaggttgagttgcctctaaagactcagctccatagtagagtagttttaattacgattaaagtggtactctaggttaggtgttactcgcgtattatcaactagtggtaatgcgtcctaattttagtatagttttaaccataatagt

SEQ ID NO: 256739 - DNA, 1414 bp, Paenibacillus larvae
aatcgctgcaaacgatgattttgcaattgagggaagtgcctgcaacatgaatccgggaaaattaaaccgccggatcacatttcaaaagcacggtgaaacgacgaatgaaaacgggtttaaaacagatggctgggtggatgtgcagacggtttgggcgtgcatcaagacgctgaaagggaaagaattttatgaagcctctactacacagaaccaaaatacaacacggtttatcatccggtatcgaaaagggcttcaccctgacatgaggatcaaatataataaccgatattttgatattgaagccatcattaatgacgacgaaatgaataaaaccctgacgatacacgccaaggagagggtacaatgagctttcaagtgtctggtatggaggaattattagcccaactccgccatatgggagaaaaaggagacaaaataaaagagcaggccgagatggaaggtgcaaaaatcatgcagcaagccatcaaggaaggtactcctattggtcctcataccaaacacgctagagaccatgtagagattgaaaagatagacgacggcatgatagtgggctacggtgaagagcatttttacatgctttttctggaagccgggacatctgagcgatatacaaaaacaaagaaatacaaaggtaaagtatccgcaagaggaaatgtagagcggatctataatagcaacgagaaaaaggcactgaaagctatgcaggaggcggtgaaacgtgagttgaacctatgaccatacaaagtttgatacttagcaaactaagggaactacccgttccagtggcgtttgagacgcattttgagaaagagaatatgtatgtggtcttttttatcaacgacgaacgcccgctgttttgtgcagatgacgaagagcaactgaccaagtactttatccaggttgatatctggtcaaaaggggattacacggaaatagagaaacaagttaagcagaagatgcaggagctgggtgccatacggacaagtgcgtttggtctttatgctcccgacatacagatgtatcaaaaagtcttgcgttttgtgatgagcatgcctgcctaggcgtgctttttatttgtaaacaagggggaacaactatgggagtaccgattggggtaaggaatttatatgtagccatcttaaaaaccgatgataaaaatggtgcgacgtacgacaaacccgtccacctggctaaagcggttgagatcagcgtaaaaccgaatgtttcatccaccacgttttacgcggatgaccaagcatctgaatctgaatccacattggccgacattgaagtagagattacggtagatcaaattggatctaaaaacgccgccatgcttctgggggctaaagtggatgaaaacggagtgctggtttggaacagagatgatcaa

SEQ ID NO: 256740 - DNA, 684 bp, Nosema ceranae
gcttaacttcggagagctgacgagttccggtgttttacagtagatatggccgtagctaagtactgcatagataaaattttattaaattaatttattgaaaaagtagttttcatattattttctaaattttcaaacttttaaattatagtacaattattttgagaaatttataattcattgatatattcttaaaagtaatctattaacattaaattataaaaatttttatgtactttgtaattacattataacacgataaaaataataatacacttttgtatttatctaatagatttatataataaacattaatgattctttttaattgttactaatttatgccatatattatatacatttctaaaattaaatcaaaaaagttatttattcttgaggagcaattttttcttatttaaaaattttctaatctgtaaattagtgattgatcaataaattactgatttattaaatgatttttttgaacccttgttaaaaaattatttattttaatttgataatatatcaatatgttttgtactttatttttattatagttttcatatattatatctgtggaatgtgttctttagaaatttattgtttctaattattttcttttatatactgacctttatggttatatataatgttgtatacacacaccaggttgattctgcctgacgt

SEQ ID NO: 256741 - DNA, 692 bp, Nosema ceranae
gcttaacttcggagagctgacgagttccggtgttttacagtagatatggccgtagctaaatgccgcatagattaaattttattaaactaatttattgaaaaaatagttttcatattatttttaaattttcaaacttttaaattatagtacaattattttgagaaatttataattcactgatatattcttaaaagtaatctattaacattaaattataaaaattttttgtactttgtaattacattataacacgataaaaataataatacacttttgtatttatctaatagatttatataataaacataaaaatgattttttttaattgttactaatttatgccatatattatatacatttctaaaattaaatcaaaaaagttatttattcttgaggagcaaatttttcttatttaaaattttctaatctgtaaattagtgattgatcaataaattactgatttattaaatgatttttttgaacccttgttaaaaaaattatttatttcaatttgatgatatatcaatatgttttgtactttatttttatttatagttttcatatattatatctgtgaaatatgtatatgtatctttagaaatttactgtttctaattattttcttttatatactgacttttatggttatatataatgttgtatacacacaccaggttgattctgcctgacgt

SEQ ID NO: 256742 - DNA, 686 bp, Nosema ceranae
gcttaacttcggagagctgatgagttccggtgttttacagtagatatggccgtagctaagcgctggatagattaaattttattaaactaatttattgaaaaagtagttttcacattattttctaaattttcaaacttttaaattatagtacaattattttgcgaaatttataattcattgatatattcttaaaagtaatctattaacattaaattataaaaatttttatgtactttgtaattacattataacacgataaaaataataatacacttttgtatttatctaatagatttatataataaacattaatgattctttttagttgttactaatttatgccatatattatatacatttctataattaaatcaaaaaagttatttattcttgaggagcaattttttcttatttaaaaattttctaatctgtaaattagtgattgatcaataaattactgatttattaaatgatttttaaacccttgttaaaaaaattatttattttaatttgataatatatcaatatgtcttgtactttatttttatttatatagttttcatatattatatctgtggaatgtgttctttagaaatttattatttctaattattttcttttatatactggcttttatggttatatataatgttgtatacacacaccaggttgattctgcctgacgt

SEQ ID NO: 256743 - DNA, 2183 bp, Nosema apis
tacttgaacaaagttaaaaaaatactcgaaagtgtgtgtttttattgttcaaaaataaaagttgataaaaaaattttaaaaccagatttaaattctgtgtggaattattgtaaatctaaaactacttgtgaaggtgaaaatacaccagacggttatactggttgtggtaataaacaacctcttattaaaaaagaaggacttggactcgttgcttttatgaaaggggaagaaaactccgacggtaaagttattttaaatggagaaagggttttgagtattttgaaaaaaatttctgaacaagatgctaattatatgggatttgattttgttaatagtaaacccgaatggttaattttgactgttttgctagttcctcctccttctgtaagaccttctattgttatggagggaatgttaagagcagaagatgatctaacacacaaattggctgatattataaaagcaaatacatatttaaaaaaatatgagttggaaggcgctcctggtcatgttataagggattatgaacaattactacaatttcatatggctacaatggtagataatgatttaagtggacaaccacaagctttacaaaaaagtggaaggcctataaagtcgattagtgctagattaaaaggaaaagaaggtcgagtacgaggaaatttgatgggcaaaagggtagattttagtgcaagatctgttatcacaccagatgcaaatatttcattaatagaacttggagttccagtagaaattgctaaaattcayacatttcctgaagcaatcacctcatacaatattcacaagttgtctgaacttgtatcaaatggaccaaacgaatatcctggtgcaaattatgttataagatctgatggtcaaagaattgatctaaaatttaatagaagtgatattaaattagaagagggatatattgtcgaaagacatatgcaaaatggggayatagtyytatttaatagacaaccttcattacataaaatgtctatgatgggtcattacgtcagagtgatggaaggaaaaacrtttagattaaatttgagtgtcacaactccgtataatgcagattttgacggagatgaaatgaatttacacatgccacaatcacataattcaagagcagagcttgaagaactctgtctggtatctaaacaagtattgacaccacaagctaatcgtcctataatgggtattgtacaagayacactaactggacttcgtttgtttactttaagagactcgttttttgataaacgagaaacgatgctattactttattcagtagatcttgagaaatatgaaaatttaaaagaaggtggaatttgtgaatttatgaatygtccagcaatttcatatccaaagmaatattggacaggaaaacaaattatcagttttattttacctgatataatttttaatggaaattcaaatgaatttgatgargaggatttagaaaatgttaaagatttaaaaatttatttaagaaacggagaacttttatctggaattttagacaaaaaaactgtcggtgctacacaaggtggttttattcatataattgcaaatgattttggatctgaacgcgtcactgcattttttgatgacgtgcaaaaattgatcaataaatttattacgyatataaatatttttagtatgggaattggagacgcagtagctgatcaagatactatgttttatgtcaaggaatctatagaaagtgctaaagagaaagtakgtgatattataaaaaaagcacataaaaattcactagaaagattgccaggtatgtcyatgaaagaaagtttcgaaagtcaagttaatcatattttaaataaagcaagagacgtttctggtacctcaactcaaaaaagtttaaatttatctaataatctaaaaactatggttttgtctggatcaaaaggttcatttatcaatatttcacaggtaatggcttgtgtaggtcagcaaaatgttgaaggaaaacgaattccttttggattcaaatatcgaactctaccacattttttgaaagaagattattctggaaaaagtcgtggttttgtagaaaacagttatgttaaaggtttatcacctgaagaattttatttccatgccatgggtggtcgtgaaggattaattgatacagctattaaaactgcagaaac

SEQ ID NO: 256744 - DNA, 9499 bp, Israel acute paralysis virus of bees; identical to SEQ ID NO: 256734

SEQ ID NO: 256745 - DNA, 241 bp, Nosema apis
tgccgacgatgtgatatgagatgttgtattacattatagaaattagagttttttggctctggggatagtatgatcgcaagattgaaaattaaagaaattgacggaagaataccacaaggagtggattgtgcggcttaatttgactcaacgcgaggtaacttaccaatattttattgttctgcgaggatatgatctgaggatgataatagtggtgcatggccgttttcaatggatgctgtga

SEQ ID NO: 256746 - DNA, 241 bp, Nosema apis; identical to SEQ ID NO: 256745

SEQ ID NO: 256747 - DNA, 241 bp, Nosema apis; identical to SEQ ID NO: 256745

SEQ ID NO: 256748 - DNA, 8302 bp, Black queen cell virus
catatcaagtgggttaaagccccgtatgcttggagaccaggtttgtttgccgacttacggaatgtcgttaaactctaggctttccggatggcttctaattatccgaggcccgtacgtgggctcgaagtttagtagagagtacgcgtacaaaagtcctagttgttttcatacatcaagtgggttgaaagccccgtgtacttggaggctaggcagcacgattacagtagcctgtactacctgaagcatgtagtaaaactgcacagttgaacattgtcacaaacgggctgatagcgtatagctggattgttgagagatagcatcttgcgggatgtgaaagagcatgttagacatgtattatggcttttctcaatacgcagtctttgctatgcgtgtgtaggcaaaaggaagtgagagagctgaccgtctctcatgggtatttaggttattcagagtacgctgctactgcggtagcggacacaacccaggtgttcgggtctctgtcttagaaactatatgaaaggcgaaagttgtgattgaactttctaacgtcactcttaattggtacgtgtcgattaagttcatagcaatgaatagccaaccctataatgatggaaccaatttacgcaaatagacctaatgtatactattatcctttcaaacacaactgggaaccaagaatcttgatccttactgataaagaaggacaagagagcgtgaacaagaagtttctgagaaaattctctaaacttcgtaatttgtgtttgcgcctgcaaaaggacactacattttggaaaaatactgctggtagactggatatgatccaggatgacattgaaagtatggttgctcaaagtggccctgttatgagtcagagcttaagtgacagggttgaccgaatgtaccatgaactgatacatactaatgttgcccagatgaacttttccataccattttcgcataatttgtctaaggactcgaaagcgttccttactcaaaccgtggatacctctcttggtggtatgagacaaatttctaatgaaacagttaatactattaaagaggtgtttgagacatttttgaccaagatgacgaccacttttgaacaatgtgccgaagcttttaactttactatgagctttatgagatttttagcattagcctatgctattttctttcttatatctcgagcgactaaatttttcggggcctctttttctactatatctactgttttgataactcttatcactatgacagttacagataagttggttaagaagttcctcgttgattattattcgaaacacatggagaatgcgaaaatgttggcacaagcaggagaagaagattcgtcatttttgtcttatgttatcccaccattgttcctagaatctgtagtcgattctaaatcaaatttgtttaagcgaatttggagaagtaaagatttggatttaatagtcaagcggttatcttattttggagattccaagatatataacgcgtttgacaatattggaacttggttaacaactatgataaacacaacggtgaattatgtgaaggttacgctcctgggtcatgatcctgaagaatttctggagaatcagagtgaccctttggtggattgggaagagcagtgtaggaaacattttgtttcagatactgacagaatagcgatctatacagagtctacgttagcggatatcaaacgtctgtacaatatgggcgttagttatatgcgacatcctttgtataaaccccaccagcgtgttatttctgaaattctcaatcagttgcttaggtttgcggataagataaagaagaaggtcggtacagatgcttctgttcgaaaccccccagttactctgtatttatatggagaaacaggggtagggaagtctactttgacataccctttgtgtgccacccttcttaagactatctttaccagagaggggaatacagtgatgcttgattctcttaaacaacattataaagagatgatatacgtaagagctgcagaacaagagttctgggatggttatacgcagcaattagtcactgtatttgatgattttaatcaacaagttgattcctctgcaaatccaagtttggagttgtttgaaattattaggagttctaatatatttccttatccattacatatggcatcgatcgaagagaaagctaacactgtttttcaatcaaaggtgatattgtgttcttctaacaataagactccaaaaactgaatccctaaactacccgaaagctttgttgaggaggtttgcgaaatttgttgaagtaaagagagctccttctgaaagtggtacattttctactgattgttatacctttgtggaatatgatccattcgaccattgtaatatcgtcaaatcaatgtctttcaaagagttgatagatgaagtggtcgctatgtatttccacgaaggagagttcgtatcttccgtagataaatttatcatggaaaatgtgtttgctcagggaggaggctctttatcagatgaggaggatgatttcactgaggctagctcctatggtgatagtaatctggatgaaaccttgactcgtgaagaaaagaaagagatcatagagtgcatcaacgaccaacttaagaatgaaaatgatactagaacttcttttcagttgattagagattatttccattgtgctaaggattcgctacaagagaaattttcagcctatcgccgaaagtactctttcgacgaatggtttagtttctcaaaggcatctaaagtagtgttgggaatactctctttggtactggttggatatggtatatattcatatgttaaaggaactcctgcgaaagactcagcggaatcttacgaaccaaaagtggcgagtaaggttaaggttgagggaaataacagtgttcctgaggcgtacgaaccaaaagttagtagaaaagtcaaggttgaaggatacaatgcgagagagattaaacgtaaagtggaagcttatgctcccaaagttagtcgagctgtgcgcgtcgaatctagtgaggttgtaatacatcctaattctctgattgagaagggtgatgatattgtgcaatctgaagcatgtagtgatataaatgcttcggaacaactcactgctgttacgacaaataacacctatgtaatgaccattttatctaaagaatctgttattagagtggggcactgtatttttctgaaaggaaaaattgcagtagctcctggtcattatttacgtatacttcagcgcgcatatgagttagatgacggtgctattttacagtttaatcatccttacgggaagaggaacttctttacgtttgttggtgacatccaattctcgttgtataaaacgaaaaatatatctaaaacaaatgatctggattctcgtgacttgatgcactttgttgttgataagtcagtagttcacagggatatttcttcatatttctgtgaacgtttagagttgcaatccgtgggttcaactcgaatccagttacctgttatgcgatgggtaagagatgttggatatattttcgttaagtcgggacagggtactagttgtataaagaacgtttctaacgttagctatatgactgataccgatcctgatgcgcgagaaattcgattgagggaagcgtgggagtattcattagaaacgatatctggggatgggggagctcctcttttcgtaactaatagtaaaataggacctggtaagatcataggaattcatacagctggaggtcaccgttttggagttggcagttgctttgccactccgttttatatagaggatgtgaaagagatcttgtctcgatatgactataaagcgcaatcttgtgcttttgagttagtgttgcgacaggatctcgaaccatgtgctttacctaaccatttagatgaatgtgagttcatcttaatggggaaggttaaggatcccccagttcaaccatctagaagtaaaatttctccatctcccttatacggacacataactgaaccctctagtgcccctacttggttatatcctagagagcttgatggacagatttttgaccctctaaaatataggactgctagactcggaaaagatagtgttcctattaggagtaagttaattaatctggctaaaatggctctcatagacgatatatattctgtgtacttacaaaagaaagatctcttggatgggcgatttccatcatcattaacctttgatcaggcagtgttgggaatacccggggaggattatgtcaactcaataaaacgcgatacctcttgcggatatcctttcgttaaagaaggatggacgcgagctaaaatctttggtaatggcgatgagtatgacatgtccacttcgggcgttcaaatgctaagggaaaaagtacaagaatgcatagaggcggcaagacaggggaagatattggaccattatttcattgatacattaaaagatgaaaggaagcctaaacataaggctcataagtctcgaatgttttctaatggaccgatagattaccttgtctggagcaagatgtattttaatccaatagtagcggtgttatctgagctcaaaaatgtggatcatatttccgtagggtccaatgtgtattctacggactgggatgttatcgcaagatacttgaagtcaaaatctcaccatatggtggcaggagactttgaaggcttcgatgcttcggaacagtccgacatattgtacgctgcgggagaagttttacaagagttgagtaagaaaatttttaactcaaccgaggatgagattttgcagcagaaggctatccttcattcgttggttaattctcttcatatcaatgaaaatggaattgtccttcaatggtgcaagtctcttcctagtggccattatctcaccgctattattaattccgtctttgtgaacttggttatgtgtctcgtatttatggaagctaatcaaaaatattcatttacgactgcttcttcatttttccgtgaatgtggtatagtagcatatggagatgatcatgtcgtttctgttcctgaaaaatacttatctgtgtttaatcaacagacacttccagtgttgatgagtaaattcgggatgttttataccatagaaaccaaggatgacacagagattgatttcctttcgaggaaattggaagatgtgtcgtacttgaagcggaattttgtttatgacgaatctaggcaacgttatattgctcctctttctctggatgttatattggaaatgcccatgtggaccaaatctagcagggacattgtaacaaatgtattctgtaatttggaacacgctctcaaggaattatcattacatgataaggaattgtgggataaatggagtcctgtactgcattcgaagagcgaggaagttctgaaaatggtttcttctctgaaatttcaagatgaggttagggaaattgctcttggccttttaggttacgagtagttttcttatcaccttttaaaccaacaatgtgatcttgctcgcagaggcaaaaatttgcacagtataaaatctgcaagtagtgctattgttggaatcaccgtacctatttaggtttacgctccaagatcggtggatagcagccctatcaatatctaggagaactgtgctatgtttagaagattaggtagtctctaaacagaacaatttacctgctgaacaaattaatgaaaattatgaaaataaacaacaacttgttgaacagaccgaaattaccacctttgaaaacgatttgatcgtgctagaggatgggccgcaaatggaagaatctcttccttttgcgtttcacgggcagcacactgataatcgtcaacatacagtggttaatttcttgcaacgtccccaggttatttttgattcgtcttgggcgtctgatgtacctcgaaacaagcaattcatggattcgattatgatacctgatgatatcatctcttttccgatgtttgcagagaaactcaaagggttttcttctttgagagcaacagctgtgataacagtacagtttcagacgcaaccatttcaagcgggaagagttatgttgggatcattcccattaccaactttaaatccaactagggttaagtttgctactaaccatgtgtcccggttgatgcttttgaaccacgtgcaatgtgatattgccaaggagactgaggtttcgttacgaattccttttgtttccccatacaattcatatgatttggtttcgaagcgttttccgtgggcaaaggtggttgggttagtgtactcccccctaactacaactattcccgtagatttcatagtatacggtcattttgaggacgtggagttgggttgcccaacttctgggatgttggctcaagccggtctgaaggtacaacctcctacaaactctgactctcgacagcgtgccaaagagagtaagggcaaaaaggattactctaagacaggagcagcttttaaacaatctgtttcgaagctgggcgaacatctacctttcctcaaatcaggagcgaactgggtcagtgagaatattctgcaacctgcagatgaaatcataggacctatattgtctctttttgggttctcgaagcctcttttgcccattactaatcccaccgttttgcggcctgcgaatacctttgctatcactgataccaatgatatgtcgcatagtctggcgctttctaacgatactaatgtaccgtttgttaaggcgcttgatgggtcaggtttggacgaaatgagtttcgattacctaaagaaaataccccaattcatacagtcaaagttcttcaccacctcaactaaacctcaagaggttctgtttcagactaaagtgatgccacattactttgtccctgctggtgatgtgaatatcgctatggacaaggatacgattagaacgatctggcaacccagtcatttagcttatatcacttccatgttcaagtattggacgggttcgctcgtgtatactttcaaatttgttaaaacagactaccattctggtagggtggaaatttctttccaccctttttctgattataccgctggtacctattcggattatacttataggatcatagtggatttgagggaaaagtctgagttttcggtcacaatacctttcatttctccagttccatataaacgcatatctaagccagattgggataagccctattccaaatttgctcatgctagtacgggtactctagtcttgaaggcgttgacatcgttaaaagcaactaataccgtggtttccaattctgtggaaatcttgatagaagttaatgctggagacgacttcaacgttattgctcccatcgaaaacatctttttccccttctctctgtctccagggagagggagtatggttgctcaatctaattcggggactgaacaacaaaatcccaggggatcttctttgttaactgacccagagtcaataacgaagtctgatccttacaatccgaatatttctctcttgattagcggagaagtttttactaacttcagaaacttgattaagagagtaaatttcagaaaggctactacattgaatggaaagcgtatcggagatacgtttcccgttaatagcctgattgaagcaccccgtcttgatatagctcaatacgtcgatactgaaaccaaggaggctaaatatggatttagtttcttttggtcggctcccactaccttaaacatagtggcggagatgtatgcgctatatcgaggaggagttcgagttaaagtagttactgagaagggtgtggattacgtccgagctactataagtcctcaacagacttatggtagtgacgtcgctccaactacccatattagtactcctttggcaatagaacaaataccaataaagggagtcgcagagttccaaataccgtactatgctccatgtttatcatcttcgtttagagcgaattcagaaacattttactatagttcaggtcggaataatctcgatatagccacttcacctccctccatcaatcgctattatgcggttggtgcgggagatgatatggacttttccatctttatcggtacgccgccctgtattcatgcatctcagacggctcagtttaccaagataaaacaaggtaaagtgtatgatttgaggtatgatcagtacgaccccttccgggaagtccaggacggtacggctttcctcaatgctcgaagtattgaggatagcgatttgttgtgagctcctttagagggagggctcactttatctattgcttaat

SEQ ID NO: 256749 - DNA, 442 bp, Melissococcus plutonius
ttatattgatactgaaacaatgcatttgcaccatgataaacatcataatacttatgtaactaaattgaatgaagcaattgaaaaacatcctgaacttggaaatcaatctgttgaggaattaattacaaatatgaatgcgattcccgaagatattcgtttagctgttcgcaataatggtggggggcatgtgaatcattcatttttctggaaagttatggggccaaatgctggtggtgaaccaactggtgctgtaaaagaagctattaatcaaacttttggtagtttcgaaaaaatgaaggaacaattcaatgcagctgcagctagtcggtttggttccggttgggcttggttggtcgttgacaaaaacaaaaaattgtcaattctatctacagccaaccaagattcaccactaatggaaggaaaaacaccaattttaggatta

SEQ ID NO: 256750 - DNA, 242 bp, Nosema apis
ttgccgacgatgtgatatgagatgttgtattacattatagaaattagagttttttggctctggggatagtatgatcgcaagattgaaaattaaagaaattgacggaagaataccacaaggagtggattgtgcggcttaatttgactcaacgcgaggtaacttaccaatattttattgttctgcgaggatatgatctgaggatgataatagtggtgcatggccgttttcaatggatgctgtga

SEQ ID NO: 256751 - DNA, 2305 bp, Chronic bee paralysis virus
gtaaaccttaggctttcatctatggatagagtcctaccattatccttcatctactactccttagctgagcagttacgcattgctgccatcatctctagcacattccacactcccgtcgttgtgttctccttggaccctcgttggactgacgccgacgccctatctcaccaaggcctacgttatctcaggtccggcaacgaacttgctgttctctccagggccgcccaacgaactttcatctgtccatctcaatacaccgaatacacaaccatcccattggactgtgacgaactcaatgtgcgatggcccgttcacgctcaatctcccgcagacgctctcgatcattgagcgccagtcgtcgtccgagccgaccacgccggtccattctagaccgcatcggccgtgcctttcaacgagtccttgccaatccaactgctgtggtagccttcgtcgtatgcgcgatcttagctgtttcccatacatcagatccagccaaatcaatcgtggttaccctcgggcagaagctccaaactgtcaatgccctcaaattcatcggggacttcatcacagaacatccggaacagacgataggcgccgtagctgtttctgctgcggtactcagctcagctcgacgctcagagaagtttgcttatatgatcggggcaatcctggtcgtatatgtgttgcctgcaacagatgcttggacatatggcgcttgggccgccgccctggcgttatttctccaactccgaaccatcgaggatcgcattctcctcagcgtctttgctctcggcgtttatgtctggactctccagactcaacagacagctcctccagcacagtaagcagcccggagaattcaagcgggatgtacacaccacccgccgggtccgattttctcgcccgacgtatcaaggccatgcttattctacccctcgccttatccatcataacatccattctgcctcccgcctccgccgcgcccaaacaaataccaatcgccaacttcaacgaattcctcatcaagaatcgtctaccaccatatcttcccttcagcatcaacgattcgaaactgttccactactacccaccgttacagttgagacgccggtgtgttgagattctacacaccagtaaacttgctcctgccgattgtagcctgccttcgtattgtggtcaggtccattggtcaaccttccaatccacctggtacgggagcgaagttggcgcatgtgttggtacaggcgtccatccgcctgttaggtacgagccatctccattttatcatatcctcaatcagggaaagtggttccggtcccataccatcataagtaccaatcaaccatatccttatcccattgtcaaaattcacaagatagacacacaagccacgctctcagaactccgcctgcttgagggcccagacgagtggcttttggtcactgctcgccagcttgacttctccttatatgtcaccgacaatcttgacgaacccaaatatcctaagtacgactggcttggaagcggtggctcttactgtttggtacagcctgaccggttcttcccacttcaaccccttgcacgcgccgacaaccctgactctctactcgaggtcttacccgtcttggtatcagcagacatcaagatatccaacatccaccgagacgttaacacaaccggactttgttatcctctctccacctactgcgtctttcggtccggttatgtcgacagccactctaacatctcacaggctgtcacttgtgatccatttaagatgacgacgcagtataacatccctgggtattcctggctcaagaaggcaatcttgttttttattgagtcagtcgttgacactctcatttccatcatattgtctctctttgatgagttcttatctttactgaggactctcaatgagaagtaccgtgtcttcgaatacctcgctctcattgggttctgcctctggcgtttccagaacccctggccaactgtatcaattgttggcttcactttggccatgatcggccttgcacggtagatactaccgttatatcgtctgacctactacactggtgccactgacagctaataacgcggtcaacaccactattctgggtcaggctggacttggtaattgggcatctgccaaccccactgtacgggcccataccgagacggatgcagcccctcttcaggaggccatgcaccctcttaccagtcctggataggtgctgtacctattcctatatgggggaacacagcagccatcgatagataagtcgtcatacgccctatcatggtt

SEQ ID NO: 256752 - DNA, 617 bp, Artificial sequence
  Multiple parasites immunity SiRNA construct
aagaaatcacaacctttcatgatgtggaaactccaaataggatcgatacccccatggctcaggatacttcatcggctaggaacatggatgatacgcacagtattattcagtttttacagcgccccgttctcattgacaacattgagatcaaatacctataaagggagtcgcagagttccaaataccgtactatgctccatgtttgtcatcttcgtttagagcgaattcggaaacattttactatagttcaggtcggaataatctcgatatagccacttcacctcccaccgtcaatcgctattaacgttaatgcgacgatatcaattatatggtcaattattattgtccgttactacggataaggatattgatcattgtatgtttaccttcccttgtttaccacaagggttagcgttagacattggttctgctggctctccacatgaaatctttaatgttggaggcgcgtaattgcggagtggaaagattatctacaatccttacctctagtaagaagacatttgatacagtggactcttataccgatttgtttaatggttgggtttctggtatgtttgttgacaagaacgtccactacaccgaaatgtccagtgatg

SEQ ID NO: 256753 - DNA, 22 bp, Artificial sequence
  Single strand DNA oligonucleotide
aagaaatcaacctttcatgatg

SEQ ID NO: 256754 - DNA, 21 bp, Artificial sequence
  Single strand DNA oligonucleotide
atctcaatgttgtcaatgaga

SEQ ID NO: 256755 - DNA, 23 bp, Artificial sequence
  Single strand DNA oligonucleotide
caatacctataaagggagtcgca

SEQ ID NO: 256756 - DNA, 20 bp, Artificial sequence
  Single strand DNA oligonucleotide
taatagcgattgacggtggg

SEQ ID NO: 256757 - DNA, 22 bp, Artificial sequence
  Single strand DNA oligonucleotide
acgttaatgcgacgatatcaat

SEQ ID NO: 256758 - DNA, 23 bp, Artificial sequence
  Single strand DNA oligonucleotide
attaaagatttcatgtggagagc

SEQ ID NO: 256759 - DNA, 19 bp, Artificial sequence
  Single strand DNA oligonucleotide
gttggaggcgcgtaattgc

SEQ ID NO: 256760 - DNA, 23 bp, Artificial sequence
  Single strand DNA oligonucleotide
catcactggacatttcgtgtagt

SEQ ID NO: 256761 - DNA, 427 bp, Israel acute paralysis virus of bees
gacacaattcttgaaatgccaaactggtgtcgaggaggacttgacattcaagaaggtacaaagttgaattgtgaaaatgcaattatggagctttccatgcatgaagagagcgtttttaatacctggtctaaaataattgaccgagtatatgcaaatgcgactggagatcacctggacataaacacttatcgtggttatgctcaggagcggtttctggaatactatatgtaagtatagtgttctggaggcatcattctatggttacccatcattagaggaaatttccaataaactctggtgtaaggcttagagtgatggtcgaggtgccctatttagggtgaggagcctcggtggcagccccaccaaatcctctattggataggaacagctgtactgggcagttacagcagtcgtatggtaacacatg

SEQ ID NO: 256762 - DNA, 434 bp, Israel acute paralysis virus of bees
ccacccctctcaaacaatctcaaacatgctatataagaagctttcttataccacgtaattactcagctgatgaaattaacgtagacggaccttcacatataacataccccgtaatcaatcctgtgcatgaagtagaagttccattctattctcagtataggaaaatacctatcgcttcaacatcggataaaggttatgattcctctctaatgtatttttcaaatacagcaacaactcaaattgttgccagagcaggaaacgatgactttacctttggttggatgataggtccaccccagctacaaggcgaatcacgctccgtagccccctagatgtgcactgggagacagacaaatctccctatgtatggctatagtctaaatttttcacaaaatttcagtttagaccgaaaaccgacacttgaactggatata

SEQ ID NO: 256763 - DNA, 22 bp, Artificial sequence
  Single strand DNA oligonucleotide
agacaccaatcacggacctcac

SEQ ID NO: 256764 - DNA, 21 bp, Artificial sequence
  Single strand DNA oligonucleotide
gagattgtttgagaggggtgg

SEQ ID NO: 256765 - DNA, 20 bp, Artificial sequence
  Single strand DNA oligonucleotide
atgaagatccttacagaaag

SEQ ID NO: 256766 - DNA, 20 bp, Artificial sequence
  Single strand DNA oligonucleotide
tcttgtttagagatccacat

SEQ ID NO: 256767 - DNA, 49 bp, Artificial sequence
  Single strand DNA oligonucleotide
taatacgactcactatagggcgaccacccctctcaaacaatctcaaaca

SEQ ID NO: 256768 - DNA, 49 bp, Artificial sequence
  Single strand DNA oligonucleotide
taatacgactcactatagggcgatatatccagttcaagtgtcggttttc

SEQ ID NO: 256769 - DNA, 48 bp, Artificial sequence
  Single strand DNA oligonucleotide
taatacgactcactatagggcgagacacaattcttgaaatgccaaact

SEQ ID NO: 256770 - DNA, 49 bp, Artificial sequence
  Single strand DNA oligonucleotide
taatacgactcactatagggcgacatgtgttaccatacgactgctgtaa

SEQ ID NO: 256771 - DNA, 49 bp, Artificial sequence
  Single strand DNA oligonucleotide
taatacgactcactatagggcgagccaacacttgtcactactttctctt

SEQ ID NO: 256772 - DNA, 49 bp, Artificial sequence
  Single strand DNA oligonucleotide
taatacgactcactatagggcgaaggtaatggttgtctggtaaaaggac

SEQ ID NO: 256773 - DNA, 20 bp, Artificial sequence
  Single strand DNA oligonucleotide
tgccaacactgtcctttctg

SEQ ID NO: 256774 - DNA, 21 bp, Artificial sequence
  Single strand DNA oligonucleotide
ttgcattctatctgcgattcc

SEQ ID NO: 256775 - DNA, 148 bp, Israel acute paralysis virus of bees
aagaaatcacaacctttcatgatgtggaaactccaaataggatcgatacccccatggctcaggatacttcatcggctaggaacatggatgatacgcacagtattattcagtttttacagcgccccgttctcattgacaacattgagat

SEQ ID NO: 256776 - DNA, 155 bp, Black queen cell virus
caaatacctataaagggagtcgcagagttccaaataccgtactatgctccatgtttgtcatcttcgtttagagcgaattcggaaacattttactatagttcaggtcggaataatctcgatatagccacttcacctcccaccgtcaatcgctatta

SEQ ID NO: 256777 - DNA, 153 bp, Deformed Wing Virus
acgttaatgcgacgatatcaattatatggtcaattattattgtccgttactacggataaggatattgatcattgtatgtttaccttcccttgtttaccacaagggttagcgttagacattggttctgctggctctccacatgaaatctttaat

SEQ ID NO: 256778 - DNA, 161 bp, Sacbrood virus
gttggaggcgcgtaattgcggagtggaaagattatctacaatccttacctctagtaagaagacatttgatacagtggactcttataccgatttgtttaatggttgggtttctggtatgtttgttgacaagaacgtccactacaccgaaatgtccagtgatg

SEQ ID NO: 256779 - protein, 1900 aa, Israel acute paralysis virus of bees
MWTKIDFFILHQDINCTGFTLTIVDKDERTKDLEYFDLNCEYYENLYDALMDSEFSKTWFTLLLKYIDYAPISTNSRGMPRPETICVSKHWWYELYRIGFLNKLYRCGDWDSILLLLSGDIEENPGPVDISYKESCRQKRMKKCVSKTYEEIKMQQHIDRINNEEKRAHMTKPRKLKDLIEVEMQGMFNWTEEREILKSTAFKFNHSMDRANHIMDNLIPQLEDTLSGFRQTYAKCEAKFFGSISVIDVCIDIISALLQVSFAKPGLKLASIAVEVFRLIKKYVSGIKINTDKIKELLTFGKQALSSSNPIIQVSMQMDMPEVDPSILLQPGVIVSAIFLVLSVVFTKTLPSKTGVEAMLKRTGELGRSAKGIMDLNTVLNTSVTSMLEYFGVHTLGLRQEAELQVLVEGYKTWCDEVAALVGHKINMDGTLDGRSIVEDIMRDTKEIQRVENLYKRGLEISRNIADMKLPTKLTISFNTHMRYLTEVFKAVDTSGAFGNKPRTQPVVIWLYGESGVGKSGMTWPLAVDLNNSLVDNVEEMRNFSKNIYMRNVEQEFWDNYQGQNVVVYDDFGQMRDSTSNPNPEFMELIRTANIAPYPLHMAHLEDKRKTKFTSKVIIMTSNVFEQSVNSLTFPDAFRRRVDLCAEVRNKVEFTKEGYSKTKGCMVRRLDKDLVKKKTGDICSTECYLVDLVNPETGEKYQTDLEYEDFLDMCLEKTQECRDNSAKLNEFLMNYAESRSKRPEQKHDKCPELEFEDAIEVSMQVDADSSLVPIEKSRLQEMIESCQGVVYDACGKTVYISKLAFELAPLEYEKQMERISGMKFYQKMASGVVYLRQVRDTSMKMLNSWMEECIQYAKDHPWTIVAGVLGTFIGILTIVGFWKWLCSDGQKKKQAIKRHFINTGYTLIIPERELNKFWELDETLDLRGMPVNQIEEHLALLLKPRHRVVLVPKATKYIISLVDNHAKLTDKIILITANRYVFYKNQNYELVFGELNQFFEKDPESLVNTPKVEAFASADLSTYKNRTPIVIEAQTSGDNVTLKQQKVKVIEAKTSTDEVTLKQQKPIVIEAQSSGDCVTRKQRVQRVIEAFASSDAVTLKKSTAKFVESDPNDIVDVTMQMWKDQVAQRLITNRVLTNLYKVCLVHNDDRITPLLNGLFVRSNLMLVPGHLLGFIAEYDTIEIRNLFDVVFRVPWKDVKKVPIVNAFGESKEAALLAFPKFVCQHSDLVKHFQNAESMSKFKRCEVTLPVLRFSEKVGKFLSTLIECDRVEAYDRPYTLNDSQKGQYILRQGLEYMMPTTNGDCGSPLIINETQVLRKIAGIHVAGATTGKAYAESITQKDLERAFIKIDVSMQIQLDLDSTLDFSKPEPKLPSGTEFGPEDLSFCDLPALKMLPVGKLSESLFEPGKTDIRPSLVHGQISDIKTKPAYLRNVIKDGDFVNMKHKNLMKCAMDTPYIDKDMIDEAYQLTKSVWLKGMRDELKKVLTYEEAICGSEVSEYISSINRSSSPGYPWIKDRTKGTKGKQGWFGSEGEYILNEDVRLAVQRRIQAAREGKRLPVMWVDTLKDERRPIEKVNQLKTRVFSNGPMDFSIAFRMYYLGFIAHLMENRITNEVSIGTNVYSQDWSKTVRKLTKFGNKVIAGDFSTFDGSLNVCIMEKFADLANEFYDDGKENNLIRHVLLMDVYNSVHICNDSVYMMTHSQPSGNPATTPLNCFINSMGLRMCFAICVKNAGIKMTMRDFGKHVSMVSYGDDNVINFSDEVCEWYNMETIAKAFETLGFTYTDELKGVNGEVPKWRSIKDVQYLKRKFRYDEQRKVWEAPLCMDTILEMPNWCRGGLDIQEGTKLNCENAIMELSMHEESVFNTWSKIIDRVYANATGDHLDINTYRGYAQERFLEYYM

SEQ ID NO: 256780 - protein, 908 aa, Israel acute paralysis virus of bees
MVTHAAFRNTMPGDSQQESNTPNVHNTELASSTSENSVETQEITTFHDVETPNRIDTPMAQDTSSARNMDDTHSIIQFLQRPVLIDNIEIIAGTTADANKPLSRYVLDQQNSQKYVRSWTLPSTVLKAGGKAQKLANFKYLRCDVQVKLVLNANPFVAGRMYLAYSPYDDKVDTARSVLQTSRAGVTGYPGVELDFQLDNSVEMTIPYASFQEAYDLVTGTEDFVQLYLFPITPVLGPKSESESSKVDISVYMWLSNISLVIPTYRMNPDIVKQGASRMVTEFVPNPLEKDAKTIADALKKVQKNNPSGYKYIMHVLTGYEPEVKNVTMQVNAPKTKTSQKSTSENPKVGPISEVASGVKTTANGIERIPVIGEIAKPVTTAVKWFADVVGTVAAIFGWSKPRNQQQVCPFKMCLHGDILSIKAYDMSVPLAYDPNNELGDLKDVFPSAVDEMATGYVCGNPAVKHVLTWKTTDVIQKPIANGDDWGGVIPVGMPCYSKSIRITSISETENRETEVIDAAPCEYVANMFSYWRATMCYRITVVKTAFHTGRLEIFFEPGVIPVKPTVNNIGPDQDQLTGTAAPSDNNYKYILDLTNDTEVTVRVPFVSNKMFLKTAGIYGANSENNWNFHESFSGFLCIRPVTKLMAPDTVSDNVSIVVWKWAEDVVVVEPKPLTSGPTQVYRPPPTASTAVEVLNVELQINIGNKTNENVISFFDSTDAETQNHNALMKGCGEFIVNLRTLLRTFRTITDNWILQANTKTPITDLTNTTDAQGRDYMSYLSYLYRFYRGGRRYKFFNTTPLKQSQTCYIRSFLIPRNYSADEINVDGPSHITYPVINPVHEVEVPFYSQYRKIPIASTSDKGYDSSLMYFSNTATTQIVARAGNDDFTFGWMIGPPQLQGESRSVAP

SEQ ID NO: 256781 - DNA, 10140 bp, Deformed Wing Virus; identical to SEQ ID NO: 256738

SEQ ID NO: 256782 - DNA, 21 bp, Artificial sequence
  SiRNA target sequence
gagcgtcgatcccccgtatgg

SEQ ID NO: 256783 - DNA, 21 bp, Artificial sequence
  SiRNA target sequence
agcgtcgatcccccgtatgga

SEQ ID NO: 256784 - DNA, 21 bp, Artificial sequence
  SiRNA target sequence
gcgtcgatcccccgtatggag

SEQ ID NO: 256785 - DNA, 21 bp, Artificial sequence
  SiRNA target sequence
cgtcgatcccccgtatggagc

SEQ ID NO: 256786 - DNA, 21 bp, Artificial sequence
  SiRNA target sequence
gtcgatcccccgtatggagcg

SEQ ID NO: 256787 - DNA, 21 bp, Artificial sequence
  SiRNA target sequence
tcgatcccccgtatggagcgg

SEQ ID NO: 256788 - DNA, 21 bp, Artificial sequence
  SiRNA target sequence
cgatcccccgtatggagcgga

SEQ ID NO: 256789 - DNA, 21 bp, Artificial sequence
  SiRNA target sequence
gatcccccgtatggagcggag

SEQ ID NO: 256790 - DNA, 21 bp, Artificial sequence
  SiRNA target sequence
atcccccgtatggagcggaga

SEQ ID NO: 256791 - DNA, 21 bp, Artificial sequence
  SiRNA target sequence
tcccccgtatggagcggagaa

SEQ ID NO: 256792 - DNA, 21 bp, Artificial sequence
  SiRNA target sequence
cccccgtatggagcggagaat

SEQ ID NO: 256793 - DNA, 21 bp, Artificial sequence
  SiRNA target sequence
ccccgtatggagcggagaata

SEQ ID NO: 256794 - DNA, 21 bp, Artificial sequence
  SiRNA target sequence
cccgtatggagcggagaatat

SEQ ID NO: 256795 - DNA, 21 bp, Artificial sequence
  SiRNA target sequence
ccgtatggagcggagaatata

SEQ ID NO: 256796 - DNA, 21 bp, Artificial sequence
  SiRNA target sequence
cgtatggagcggagaatataa

SEQ ID NO: 256797 - DNA, 21 bp, Artificial sequence
  SiRNA target sequence
gtatggagcggagaatataag

SEQ ID NO: 256798 - DNA, 21 bp, Artificial sequence
  SiRNA target sequence
tatggagcggagaatataagg

SEQ ID NO: 256799 - DNA, 21 bp, Artificial sequence
  SiRNA target sequence
atggagcggagaatataaggc

SEQ ID NO: 256800 - DNA, 21 bp, Artificial sequence
  SiRNA target sequence
tggagcggagaatataaggct

SEQ ID NO: 256801 - DNA, 21 bp, Artificial sequence
  SiRNA target sequence
ggagcggagaatataaggctc

SEQ ID NO: 256802 - DNA, 21 bp, Artificial sequence
  SiRNA target sequence
gagcggagaatataaggctca

SEQ ID NO: 256803 - DNA, 21 bp, Artificial sequence
  SiRNA target sequence
agcggagaatataaggctcag

SEQ ID NO: 256804 - DNA, 21 bp, Artificial sequence
  SiRNA target sequence
gcggagaatataaggctcagc

SEQ ID NO: 256805 - DNA, 21 bp, Artificial sequence
  SiRNA target sequence
cggagaatataaggctcagct

SEQ ID NO: 256806 - DNA, 21 bp, Artificial sequence
  SiRNA target sequence
ggagaatataaggctcagcta

SEQ ID NO: 256807 - DNA, 21 bp, Artificial sequence
  SiRNA target sequence
gagaatataaggctcagctag

SEQ ID NO: 256808 - DNA, 21 bp, Artificial sequence
  SiRNA target sequence
agaatataaggctcagctagg

SEQ ID NO: 256809 - DNA, 21 bp, Artificial sequence
  SiRNA target sequence
gaatataaggctcagctagga

SEQ ID NO: 256810 - DNA, 21 bp, Artificial sequence
  SiRNA target sequence
aatataaggctcagctaggat

SEQ ID NO: 256811 - DNA, 21 bp, Artificial sequence
  SiRNA target sequence
atataaggctcagctaggatg

SEQ ID NO: 256812 - DNA, 21 bp, Artificial sequence
  SiRNA target sequence
tataaggctcagctaggatga

SEQ ID NO: 256813 - DNA, 21 bp, Artificial sequence
  SiRNA target sequence
ataaggctcagctaggatgac

SEQ ID NO: 256814 - DNA, 21 bp, Artificial sequence
  SiRNA target sequence
taaggctcagctaggatgaca

SEQ ID NO: 256815 - DNA, 21 bp, Artificial sequence
  SiRNA target sequence
aaggctcagctaggatgacac

SEQ ID NO: 256816 - DNA, 21 bp, Artificial sequence
  SiRNA target sequence
aggctcagctaggatgacacg

SEQ ID NO: 256817 - DNA, 21 bp, Artificial sequence
  SiRNA target sequence
ggctcagctaggatgacacgc

SEQ ID NO: 256818 - DNA, 21 bp, Artificial sequence
  SiRNA target sequence
gctcagctaggatgacacgcc

SEQ ID NO: 256819 - DNA, 21 bp, Artificial sequence
  SiRNA target sequence
ctcagctaggatgacacgcct

SEQ ID NO: 256820 - DNA, 21 bp, Artificial sequence
  SiRNA target sequence
tcagctaggatgacacgcctg

SEQ ID NO: 256821 - DNA, 21 bp, Artificial sequence
  SiRNA target sequence
cagctaggatgacacgcctgc

SEQ ID NO: 256822 - DNA, 21 bp, Artificial sequence
  SiRNA target sequence
agctaggatgacacgcctgca

SEQ ID NO: 256823 - DNA, 21 bp, Artificial sequence
  SiRNA target sequence
gctaggatgacacgcctgcac

SEQ ID NO: 256824 - DNA, 21 bp, Artificial sequence
  SiRNA target sequence
ctaggatgacacgcctgcact

SEQ ID NO: 256825 - DNA, 21 bp, Artificial sequence
  SiRNA target sequence
taggatgacacgcctgcactg

SEQ ID NO: 256826 - DNA, 21 bp, Artificial sequence
  SiRNA target sequence
aggatgacacgcctgcactgt

SEQ ID NO: 256827 - DNA, 21 bp, Artificial sequence
  SiRNA target sequence
ggatgacacgcctgcactgtc

SEQ ID NO: 256828 - DNA, 21 bp, Artificial sequence
  SiRNA target sequence
gatgacacgcctgcactgtcg

SEQ ID NO: 256829 - DNA, 21 bp, Artificial sequence
  SiRNA target sequence
atgacacgcctgcactgtcga

SEQ ID NO: 256830 - DNA, 21 bp, Artificial sequence
  SiRNA target sequence
tgacacgcctgcactgtcgac

SEQ ID NO: 256831 - DNA, 21 bp, Artificial sequence
  SiRNA target sequence
gacacgcctgcactgtcgaca

SEQ ID NO: 256832 - DNA, 21 bp, Artificial sequence
  SiRNA target sequence
acacgcctgcactgtcgacat

SEQ ID NO: 256833 - DNA, 21 bp, Artificial sequence
  SiRNA target sequence
cacgcctgcactgtcgacatt

SEQ ID NO: 256834 - DNA, 21 bp, Artificial sequence
  SiRNA target sequence
acgcctgcactgtcgacatta

SEQ ID NO: 256835 - DNA, 21 bp, Artificial sequence
  SiRNA target sequence
cgcctgcactgtcgacattag

SEQ ID NO: 256836 - DNA, 21 bp, Artificial sequence
  SiRNA target sequence
gcctgcactgtcgacattagt

SEQ ID NO: 256837 - DNA, 21 bp, Artificial sequence
  SiRNA target sequence
cctgcactgtcgacattagtt

SEQ ID NO: 256838 - DNA, 21 bp, Artificial sequence
  SiRNA target sequence
ctgcactgtcgacattagtta

SEQ ID NO: 256839 - DNA, 21 bp, Artificial sequence
  SiRNA target sequence
tgcactgtcgacattagttaa

SEQ ID NO: 256840 - DNA, 21 bp, Artificial sequence
  SiRNA target sequence
gcactgtcgacattagttaag

SEQ ID NO: 256841 - DNA, 21 bp, Artificial sequence
  SiRNA target sequence
cactgtcgacattagttaagt

SEQ ID NO: 256842 - DNA, 21 bp, Artificial sequence
  SiRNA target sequence
actgtcgacattagttaagtt

SEQ ID NO: 256843 - DNA, 21 bp, Artificial sequence
  SiRNA target sequence
ctgtcgacattagttaagttg

SEQ ID NO: 256844 - DNA, 21 bp, Artificial sequence
  SiRNA target sequence
tgtcgacattagttaagttgc

SEQ ID NO: 256845 - DNA, 21 bp, Artificial sequence
  SiRNA target sequence
gtcgacattagttaagttgca

SEQ ID NO: 256846 - DNA, 21 bp, Artificial sequence
  SiRNA target sequence
tcgacattagttaagttgcaa

SEQ ID NO: 256847 - DNA, 21 bp, Artificial sequence
  SiRNA target sequence
cgacattagttaagttgcaat

SEQ ID NO: 256848 - DNA, 21 bp, Artificial sequence
  SiRNA target sequence
gacattagttaagttgcaatt

SEQ ID NO: 256849 - DNA, 21 bp, Artificial sequence
  SiRNA target sequence
acattagttaagttgcaatta

SEQ ID NO: 256850 - DNA, 21 bp, Artificial sequence
  SiRNA target sequence
cattagttaagttgcaattac

SEQ ID NO: 256851 - DNA, 21 bp, Artificial sequence
  SiRNA target sequence
attagttaagttgcaattaca

SEQ ID NO: 256852 - DNA, 21 bp, Artificial sequence
  SiRNA target sequence
ttagttaagttgcaattacac

SEQ ID NO: 256853 - DNA, 21 bp, Artificial sequence
  SiRNA target sequence
tagttaagttgcaattacacg

SEQ ID NO: 256854 - DNA, 21 bp, Artificial sequence
  SiRNA target sequence
agttaagttgcaattacacgt

SEQ ID NO: 256855 - DNA, 21 bp, Artificial sequence
  SiRNA target sequence
gttaagttgcaattacacgtc

SEQ ID NO: 256856 - DNA, 21 bp, Artificial sequence
  SiRNA target sequence
ttaagttgcaattacacgtct

SEQ ID NO: 256857 - DNA, 21 bp, Artificial sequence
  SiRNA target sequence
taagttgcaattacacgtctg

SEQ ID NO: 256858 - DNA, 21 bp, Artificial sequence
  SiRNA target sequence
aagttgcaattacacgtctgt

SEQ ID NO: 256859 - DNA, 21 bp, Artificial sequence
  SiRNA target sequence
agttgcaattacacgtctgtt

SEQ ID NO: 256860 - DNA, 21 bp, Artificial sequence
  SiRNA target sequence
gttgcaattacacgtctgttg

SEQ ID NO: 256861 - DNA, 21 bp, Artificial sequence
  SiRNA target sequence
ttgcaattacacgtctgttgc

SEQ ID NO: 256862 - DNA, 21 bp, Artificial sequence
  SiRNA target sequence
tgcaattacacgtctgttgcc

SEQ ID NO: 256863 - DNA, 21 bp, Artificial sequence
  SiRNA target sequence
gcaattacacgtctgttgccg

SEQ ID NO: 256864 - DNA, 21 bp, Artificial sequence
  SiRNA target sequence
caattacacgtctgttgccga

SEQ ID NO: 256865 - DNA, 21 bp, Artificial sequence
  SiRNA target sequence
aattacacgtctgttgccgaa

SEQ ID NO: 256866 - DNA, 21 bp, Artificial sequence
  SiRNA target sequence
attacacgtctgttgccgaag

SEQ ID NO: 256867 - DNA, 21 bp, Artificial sequence
  SiRNA target sequence
ttacacgtctgttgccgaaga

SEQ ID NO: 256868 - DNA, 21 bp, Artificial sequence
  SiRNA target sequence
tacacgtctgttgccgaagaa

SEQ ID NO: 256869 - DNA, 21 bp, Artificial sequence
  SiRNA target sequence
acacgtctgttgccgaagaaa

SEQ ID NO: 256870 - DNA, 21 bp, Artificial sequence
  SiRNA target sequence
cacgtctgttgccgaagaaac

SEQ ID NO: 256871 - DNA, 21 bp, Artificial sequence
  SiRNA target sequence
acgtctgttgccgaagaaacc

SEQ ID NO: 256872 - DNA, 21 bp, Artificial sequence
  SiRNA target sequence
cgtctgttgccgaagaaacca

SEQ ID NO: 256873 - DNA, 21 bp, Artificial sequence
  SiRNA target sequence
gtctgttgccgaagaaaccat

SEQ ID NO: 256874 - DNA, 21 bp, Artificial sequence
  SiRNA target sequence
tctgttgccgaagaaaccatt

SEQ ID NO: 256875 - DNA, 21 bp, Artificial sequence
  SiRNA target sequence
ctgttgccgaagaaaccattt

SEQ ID NO: 256876 - DNA, 21 bp, Artificial sequence
  SiRNA target sequence
tgttgccgaagaaaccatttt

SEQ ID NO: 256877 - DNA, 21 bp, Artificial sequence
  SiRNA target sequence
gttgccgaagaaaccatttta

SEQ ID NO: 256878 - DNA, 21 bp, Artificial sequence
  SiRNA target sequence
ttgccgaagaaaccattttag

SEQ ID NO: 256879 - DNA, 21 bp, Artificial sequence
  SiRNA target sequence
tgccgaagaaaccattttagt

SEQ ID NO: 256880 - DNA, 21 bp, Artificial sequence
  SiRNA target sequence
gccgaagaaaccattttagtc

SEQ ID NO: 256881 - DNA, 21 bp, Artificial sequence
  SiRNA target sequence
ccgaagaaaccattttagtca

SEQ ID NO: 256882 - DNA, 21 bp, Artificial sequence
  SiRNA target sequence
cgaagaaaccattttagtcaa

SEQ ID NO: 256883 - DNA, 21 bp, Artificial sequence
  SiRNA target sequence
gaagaaaccattttagtcaac

SEQ ID NO: 256884 - DNA, 21 bp, Artificial sequence
  SiRNA target sequence
aagaaaccattttagtcaact

SEQ ID NO: 256885 - DNA, 21 bp, Artificial sequence
  SiRNA target sequence
agaaaccattttagtcaactg

SEQ ID NO: 256886 - DNA, 21 bp, Artificial sequence
  SiRNA target sequence
gaaaccattttagtcaactga

SEQ ID NO: 256887 - DNA, 21 bp, Artificial sequence
  SiRNA target sequence
aaaccattttagtcaactgat

SEQ ID NO: 256888 - DNA, 21 bp, Artificial sequence
  SiRNA target sequence
aaccattttagtcaactgatt

SEQ ID NO: 256889 - DNA, 21 bp, Artificial sequence
  SiRNA target sequence
accattttagtcaactgatta

SEQ ID NO: 256890 - DNA, 21 bp, Artificial sequence
  SiRNA target sequence
ccattttagtcaactgattat

SEQ ID NO: 256891 - DNA, 21 bp, Artificial sequence
  SiRNA target sequence
cattttagtcaactgattatg

SEQ ID NO: 256892 - DNA, 21 bp, Artificial sequence
  SiRNA target sequence
attttagtcaactgattatga

SEQ ID NO: 256893 - DNA, 21 bp, Artificial sequence
  SiRNA target sequence
ttttagtcaactgattatgat

SEQ ID NO: 256894 - DNA, 21 bp, Artificial sequence
  SiRNA target sequence
tttagtcaactgattatgatt

SEQ ID NO: 256895 - DNA, 21 bp, Artificial sequence
  SiRNA target sequence
ttagtcaactgattatgattt

SEQ ID NO: 256896 - DNA, 21 bp, Artificial sequence
  SiRNA target sequence
tagtcaactgattatgatttt

SEQ ID NO: 256897 - DNA, 21 bp, Artificial sequence
  SiRNA target sequence
agtcaactgattatgattttt

SEQ ID NO: 256898 - DNA, 21 bp, Artificial sequence
  SiRNA target sequence
gtcaactgattatgatttttg

SEQ ID NO: 256899 - DNA, 21 bp, Artificial sequence
  SiRNA target sequence
tcaactgattatgatttttgt

SEQ ID NO: 256900 - DNA, 21 bp, Artificial sequence
  SiRNA target sequence
caactgattatgatttttgta

SEQ ID NO: 256901 - DNA, 21 bp, Artificial sequence
  SiRNA target sequence
aactgattatgatttttgtat

SEQ ID NO: 256902 - DNA, 21 bp, Artificial sequence
  SiRNA target sequence
actgattatgatttttgtata

SEQ ID NO: 256903 - DNA, 21 bp, Artificial sequence
  SiRNA target sequence
ctgattatgatttttgtataa

SEQ ID NO: 256904 - DNA, 21 bp, Artificial sequence
  SiRNA target sequence
tgattatgatttttgtataat

SEQ ID NO: 256905 - DNA, 21 bp, Artificial sequence
  SiRNA target sequence
gattatgatttttgtataatg

SEQ ID NO: 256906 - DNA, 21 bp, Artificial sequence
  SiRNA target sequence
attatgatttttgtataatga

SEQ ID NO: 256907 - DNA, 21 bp, Artificial sequence
  SiRNA target sequence
ttatgatttttgtataatgat

SEQ ID NO: 256908 - DNA, 21 bp, Artificial sequence
  SiRNA target sequence
tatgatttttgtataatgata

SEQ ID NO: 256909 - DNA, 21 bp, Artificial sequence
  SiRNA target sequence
atgatttttgtataatgataa

SEQ ID NO: 256910 - DNA, 21 bp, Artificial sequence
  SiRNA target sequence
tgatttttgtataatgataaa

SEQ ID NO: 256911 - DNA, 21 bp, Artificial sequence
  SiRNA target sequence
gatttttgtataatgataaac

SEQ ID NO: 256912 - DNA, 21 bp, Artificial sequence
  SiRNA target sequence
atttttgtataatgataaaca

SEQ ID NO: 256913 - DNA, 21 bp, Artificial sequence
  SiRNA target sequence
tttttgtataatgataaacag

SEQ ID NO: 256914 - DNA, 21 bp, Artificial sequence
  SiRNA target sequence
ttttgtataatgataaacagt

SEQ ID NO: 256915 - DNA, 21 bp, Artificial sequence
  SiRNA target sequence
tttgtataatgataaacagtg

SEQ ID NO: 256916 - DNA, 21 bp, Artificial sequence
  SiRNA target sequence
ttgtataatgataaacagtga

SEQ ID NO: 256917 - DNA, 21 bp, Artificial sequence
  SiRNA target sequence
tgtataatgataaacagtgat

SEQ ID NO: 256918 - DNA, 21 bp, Artificial sequence
  SiRNA target sequence
gtataatgataaacagtgatg

SEQ ID NO: 256919 - DNA, 21 bp, Artificial sequence
  SiRNA target sequence
tataatgataaacagtgatga

SEQ ID NO: 256920 - DNA, 21 bp, Artificial sequence
  SiRNA target sequence
ataatgataaacagtgatgaa

SEQ ID NO: 256921 - DNA, 21 bp, Artificial sequence
  SiRNA target sequence
taatgataaacagtgatgaac

SEQ ID NO: 256922 - DNA, 21 bp, Artificial sequence
  SiRNA target sequence
aatgataaacagtgatgaact

SEQ ID NO: 256923 - DNA, 21 bp, Artificial sequence
  SiRNA target sequence
atgataaacagtgatgaactg

SEQ ID NO: 256924 - DNA, 21 bp, Artificial sequence
  SiRNA target sequence
tgataaacagtgatgaactgt

SEQ ID NO: 256925 - DNA, 21 bp, Artificial sequence
  SiRNA target sequence
gataaacagtgatgaactgta

SEQ ID NO: 256926 - DNA, 21 bp, Artificial sequence
  SiRNA target sequence
ataaacagtgatgaactgtat

SEQ ID NO: 256927 - DNA, 21 bp, Artificial sequence
  SiRNA target sequence
taaacagtgatgaactgtata

SEQ ID NO: 256928 - DNA, 21 bp, Artificial sequence
  SiRNA target sequence
aaacagtgatgaactgtataa

SEQ ID NO: 256929 - DNA, 21 bp, Artificial sequence
  SiRNA target sequence
aacagtgatgaactgtataac

SEQ ID NO: 256930 - DNA, 21 bp, Artificial sequence
  SiRNA target sequence
acagtgatgaactgtataact

SEQ ID NO: 256931 - DNA, 21 bp, Artificial sequence
  SiRNA target sequence
cagtgatgaactgtataactc

SEQ ID NO: 256932 - DNA, 21 bp, Artificial sequence
  SiRNA target sequence
agtgatgaactgtataactca

SEQ ID NO: 256933 - DNA, 21 bp, Artificial sequence
  SiRNA target sequence
gtgatgaactgtataactcat

SEQ ID NO: 256934 - DNA, 21 bp, Artificial sequence
  SiRNA target sequence
tgatgaactgtataactcatc

SEQ ID NO: 256935 - DNA, 21 bp, Artificial sequence
  SiRNA target sequence
gatgaactgtataactcatca

SEQ ID NO: 256936 - DNA, 21 bp, Artificial sequence
  SiRNA target sequence
atgaactgtataactcatcaa

SEQ ID NO: 256937 - DNA, 21 bp, Artificial sequence
  SiRNA target sequence
tgaactgtataactcatcaac

SEQ ID NO: 256938 - DNA, 21 bp, Artificial sequence
  SiRNA target sequence
gaactgtataactcatcaaca

SEQ ID NO: 256939 - DNA, 21 bp, Artificial sequence
  SiRNA target sequence
aactgtataactcatcaacaa

SEQ ID NO: 256940 - DNA, 21 bp, Artificial sequence
  SiRNA target sequence
actgtataactcatcaacaac

SEQ ID NO: 256941 - DNA, 21 bp, Artificial sequence
  SiRNA target sequence
ctgtataactcatcaacaaca

SEQ ID NO: 256942 - DNA, 21 bp, Artificial sequence
  SiRNA target sequence
tgtataactcatcaacaacaa

SEQ ID NO: 256943 - DNA, 21 bp, Artificial sequence
  SiRNA target sequence
gtataactcatcaacaacaaa

SEQ ID NO: 256944 - DNA, 21 bp, Artificial sequence
  SiRNA target sequence
tataactcatcaacaacaaaa

SEQ ID NO: 256945 - DNA, 21 bp, Artificial sequence
  SiRNA target sequence
ataactcatcaacaacaaaac

SEQ ID NO: 256946 - DNA, 21 bp, Artificial sequence
  SiRNA target sequence
taactcatcaacaacaaaacg

SEQ ID NO: 256947 - DNA, 21 bp, Artificial sequence
  SiRNA target sequence
aactcatcaacaacaaaacgg

SEQ ID NO: 256948 - DNA, 21 bp, Artificial sequence
  SiRNA target sequence
actcatcaacaacaaaacgga

SEQ ID NO: 256949 - DNA, 21 bp, Artificial sequence
  SiRNA target sequence
ctcatcaacaacaaaacggat

SEQ ID NO: 256950 - DNA, 21 bp, Artificial sequence
  SiRNA target sequence
tcatcaacaacaaaacggatt

SEQ ID NO: 256951 - DNA, 21 bp, Artificial sequence
  SiRNA target sequence
catcaacaacaaaacggatta

SEQ ID NO: 256952 - DNA, 21 bp, Artificial sequence
  SiRNA target sequence
atcaacaacaaaacggattac

SEQ ID NO: 256953 - DNA, 21 bp, Artificial sequence
  SiRNA target sequence
tcaacaacaaaacggattacg

SEQ ID NO: 256954 - DNA, 21 bp, Artificial sequence
  SiRNA target sequence
caacaacaaaacggattacga

SEQ ID NO: 256955 - DNA, 21 bp, Artificial sequence
  SiRNA target sequence
aacaacaaaacggattacgaa

SEQ ID NO: 256956 - DNA, 21 bp, Artificial sequence
  SiRNA target sequence
acaacaaaacggattacgaac

SEQ ID NO: 256957 - DNA, 21 bp, Artificial sequence
  SiRNA target sequence
caacaaaacggattacgaacc

SEQ ID NO: 256958 - DNA, 21 bp, Artificial sequence
  SiRNA target sequence
aacaaaacggattacgaacct

SEQ ID NO: 256959 - DNA, 21 bp, Artificial sequence
  SiRNA target sequence
acaaaacggattacgaaccta

SEQ ID NO: 256960 - DNA, 21 bp, Artificial sequence
  SiRNA target sequence
caaaacggattacgaacctat

SEQ ID NO: 256961 - DNA, 21 bp, Artificial sequence
  SiRNA target sequence
aaaacggattacgaacctatt

SEQ ID NO: 256962 - DNA, 21 bp, Artificial sequence
  SiRNA target sequence
aaacggattacgaacctattt

SEQ ID NO: 256963 - DNA, 21 bp, Artificial sequence
  SiRNA target sequence
aacggattacgaacctatttg

SEQ ID NO: 256964 - DNA, 21 bp, Artificial sequence
  SiRNA target sequence
acggattacgaacctatttgt

SEQ ID NO: 256965 - DNA, 21 bp, Artificial sequence
  SiRNA target sequence
cggattacgaacctatttgta

SEQ ID NO: 256966 - DNA, 21 bp, Artificial sequence
  SiRNA target sequence
ggattacgaacctatttgtaa

SEQ ID NO: 256967 - DNA, 21 bp, Artificial sequence
  SiRNA target sequence
gattacgaacctatttgtaac

SEQ ID NO: 256968 - DNA, 21 bp, Artificial sequence
  SiRNA target sequence
attacgaacctatttgtaact

SEQ ID NO: 256969 - DNA, 21 bp, Artificial sequence
  SiRNA target sequence
ttacgaacctatttgtaacta

SEQ ID NO: 256970 - DNA, 21 bp, Artificial sequence
  SiRNA target sequence
tacgaacctatttgtaactat

SEQ ID NO: 256971 - DNA, 21 bp, Artificial sequence
  SiRNA target sequence
acgaacctatttgtaactatc

SEQ ID NO: 256972 - DNA, 21 bp, Artificial sequence
  SiRNA target sequence
cgaacctatttgtaactatct

SEQ ID NO: 256973 - DNA, 21 bp, Artificial sequence
  SiRNA target sequence
gaacctatttgtaactatctt

SEQ ID NO: 256974 - DNA, 21 bp, Artificial sequence
  SiRNA target sequence
aacctatttgtaactatcttg

SEQ ID NO: 256975 - DNA, 21 bp, Artificial sequence
  SiRNA target sequence
acctatttgtaactatcttga

SEQ ID NO: 256976 - DNA, 21 bp, Artificial sequence
  SiRNA target sequence
cctatttgtaactatcttgat

SEQ ID NO: 256977 - DNA, 21 bp, Artificial sequence
  SiRNA target sequence
ctatttgtaactatcttgatc

SEQ ID NO: 256978 - DNA, 21 bp, Artificial sequence
  SiRNA target sequence
tatttgtaactatcttgatcg

SEQ ID NO: 256979 - DNA, 21 bp, Artificial sequence
  SiRNA target sequence
atttgtaactatcttgatcga

SEQ ID NO: 256980 - DNA, 21 bp, Artificial sequence
  SiRNA target sequence
tttgtaactatcttgatcgaa

SEQ ID NO: 256981 - DNA, 21 bp, Artificial sequence
  SiRNA target sequence
ttgtaactatcttgatcgaag

SEQ ID NO: 256982 - DNA, 21 bp, Artificial sequence
  SiRNA target sequence
tgtaactatcttgatcgaagt

SEQ ID NO: 256983 - DNA, 21 bp, Artificial sequence
  SiRNA target sequence
gtaactatcttgatcgaagtc

SEQ ID NO: 256984 - DNA, 21 bp, Artificial sequence
  SiRNA target sequence
taactatcttgatcgaagtct

SEQ ID NO: 256985 - DNA, 21 bp, Artificial sequence
  SiRNA target sequence
aactatcttgatcgaagtcta

SEQ ID NO: 256986 - DNA, 21 bp, Artificial sequence
  SiRNA target sequence
actatcttgatcgaagtctag

SEQ ID NO: 256987 - DNA, 21 bp, Artificial sequence
  SiRNA target sequence
ctatcttgatcgaagtctagt

SEQ ID NO: 256988 - DNA, 21 bp, Artificial sequence
  SiRNA target sequence
tatcttgatcgaagtctagta

SEQ ID NO: 256989 - DNA, 21 bp, Artificial sequence
  SiRNA target sequence
atcttgatcgaagtctagtag

SEQ ID NO: 256990 - DNA, 21 bp, Artificial sequence
  SiRNA target sequence
tcttgatcgaagtctagtaga

SEQ ID NO: 256991 - DNA, 21 bp, Artificial sequence
  SiRNA target sequence
cttgatcgaagtctagtagat

SEQ ID NO: 256992 - DNA, 21 bp, Artificial sequence
  SiRNA target sequence
ttgatcgaagtctagtagatc

SEQ ID NO: 256993 - DNA, 21 bp, Artificial sequence
  SiRNA target sequence
tgatcgaagtctagtagatcc

SEQ ID NO: 256994 - DNA, 21 bp, Artificial sequence
  SiRNA target sequence
gatcgaagtctagtagatccc

SEQ ID NO: 256995 - DNA, 21 bp, Artificial sequence
  SiRNA target sequence
atcgaagtctagtagatcccc

SEQ ID NO: 256996 - DNA, 21 bp, Artificial sequence
  SiRNA target sequence
tcgaagtctagtagatcccca

SEQ ID NO: 256997 - DNA, 21 bp, Artificial sequence
  SiRNA target sequence
cgaagtctagtagatccccaa

SEQ ID NO: 256998 - DNA, 21 bp, Artificial sequence
  SiRNA target sequence
gaagtctagtagatccccaat

SEQ ID NO: 256999 - DNA, 21 bp, Artificial sequence
  SiRNA target sequence
aagtctagtagatccccaata

SEQ ID NO: 257000 - DNA, 21 bp, Artificial sequence
  SiRNA target sequence
agtctagtagatccccaatat

SEQ ID NO: 257001 - DNA, 21 bp, Artificial sequence
  SiRNA target sequence
gtctagtagatccccaatata

SEQ ID NO: 257002 - DNA, 21 bp, Artificial sequence
  SiRNA target sequence
tctagtagatccccaatatag

SEQ ID NO: 257003 - DNA, 21 bp, Artificial sequence
  SiRNA target sequence
ctagtagatccccaatatagc

SEQ ID NO: 257004 - DNA, 21 bp, Artificial sequence
  SiRNA target sequence
tagtagatccccaatatagcc

SEQ ID NO: 257005 - DNA, 21 bp, Artificial sequence
  SiRNA target sequence
agtagatccccaatatagccc

SEQ ID NO: 257006 - DNA, 21 bp, Artificial sequence
  SiRNA target sequence
gtagatccccaatatagccct

SEQ ID NO: 257007 - DNA, 21 bp, Artificial sequence
  SiRNA target sequence
tagatccccaatatagccctg

SEQ ID NO: 257008 - DNA, 21 bp, Artificial sequence
  SiRNA target sequence
agatccccaatatagccctga

SEQ ID NO: 257009 - DNA, 21 bp, Artificial sequence
  SiRNA target sequence
gatccccaatatagccctgaa

SEQ ID NO: 257010 - DNA, 21 bp, Artificial sequence
  SiRNA target sequence
atccccaatatagccctgaaa

SEQ ID NO: 257011 - DNA, 21 bp, Artificial sequence
  SiRNA target sequence
tccccaatatagccctgaaaa

SEQ ID NO: 257012 - DNA, 21 bp, Artificial sequence
  SiRNA target sequence
ccccaatatagccctgaaaag

SEQ ID NO: 257013 - DNA, 21 bp, Artificial sequence
  SiRNA target sequence
cccaatatagccctgaaaagc

SEQ ID NO: 257014 - DNA, 21 bp, Artificial sequence
  SiRNA target sequence
ccaatatagccctgaaaagct

SEQ ID NO: 257015 - DNA, 21 bp, Artificial sequence
  SiRNA target sequence
caatatagccctgaaaagctt

SEQ ID NO: 257016 - DNA, 21 bp, Artificial sequence
  SiRNA target sequence
aatatagccctgaaaagcttg

SEQ ID NO: 257017 - DNA, 21 bp, Artificial sequence
  SiRNA target sequence
atatagccctgaaaagcttga

SEQ ID NO: 257018 - DNA, 21 bp, Artificial sequence
  SiRNA target sequence
tatagccctgaaaagcttgag

SEQ ID NO: 257019 - DNA, 21 bp, Artificial sequence
  SiRNA target sequence
atagccctgaaaagcttgagg

SEQ ID NO: 257020 - DNA, 21 bp, Artificial sequence
  SiRNA target sequence
tagccctgaaaagcttgaggg

SEQ ID NO: 257021 - DNA, 21 bp, Artificial sequence
  SiRNA target sequence
agccctgaaaagcttgaggga

SEQ ID NO: 257022 - DNA, 21 bp, Artificial sequence
  SiRNA target sequence
gccctgaaaagcttgagggac

SEQ ID NO: 257023 - DNA, 21 bp, Artificial sequence
  SiRNA target sequence
ccctgaaaagcttgagggacg

SEQ ID NO: 257024 - DNA, 21 bp, Artificial sequence
  SiRNA target sequence
cctgaaaagcttgagggacga

SEQ ID NO: 257025 - DNA, 21 bp, Artificial sequence
  SiRNA target sequence
ctgaaaagcttgagggacgag

SEQ ID NO: 257026 - DNA, 21 bp, Artificial sequence
  SiRNA target sequence
tgaaaagcttgagggacgaga

SEQ ID NO: 257027 - DNA, 21 bp, Artificial sequence
  SiRNA target sequence
gaaaagcttgagggacgagat

SEQ ID NO: 257028 - DNA, 21 bp, Artificial sequence
  SiRNA target sequence
aaaagcttgagggacgagata

SEQ ID NO: 257029 - DNA, 21 bp, Artificial sequence
  SiRNA target sequence
aaagcttgagggacgagatag

SEQ ID NO: 257030 - DNA, 21 bp, Artificial sequence
  SiRNA target sequence
aagcttgagggacgagatagc

SEQ ID NO: 257031 - DNA, 21 bp, Artificial sequence
  SiRNA target sequence
agcttgagggacgagatagct

SEQ ID NO: 257032 - DNA, 21 bp, Artificial sequence
  SiRNA target sequence
gcttgagggacgagatagctc

SEQ ID NO: 257033 - DNA, 21 bp, Artificial sequence
  SiRNA target sequence
cttgagggacgagatagctct

SEQ ID NO: 257034 - DNA, 21 bp, Artificial sequence
  SiRNA target sequence
ttgagggacgagatagctcta

SEQ ID NO: 257035 - DNA, 21 bp, Artificial sequence
  SiRNA target sequence
tgagggacgagatagctctat

SEQ ID NO: 257036 - DNA, 21 bp, Artificial sequence
  SiRNA target sequence
gagggacgagatagctctata

SEQ ID NO: 257037 - DNA, 21 bp, Artificial sequence
  SiRNA target sequence
agggacgagatagctctataa

SEQ ID NO: 257038 - DNA, 21 bp, Artificial sequence
  SiRNA target sequence
gggacgagatagctctataaa

SEQ ID NO: 257039 - DNA, 21 bp, Artificial sequence
  SiRNA target sequence
ggacgagatagctctataaat

SEQ ID NO: 257040 - DNA, 21 bp, Artificial sequence
  SiRNA target sequence
gacgagatagctctataaata

SEQ ID NO: 257041 - DNA, 21 bp, Artificial sequence
  SiRNA target sequence
acgagatagctctataaatag

SEQ ID NO: 257042 - DNA, 21 bp, Artificial sequence
  SiRNA target sequence
cgagatagctctataaatagc

SEQ ID NO: 257043 - DNA, 21 bp, Artificial sequence
  SiRNA target sequence
gagatagctctataaatagcc

SEQ ID NO: 257044 - DNA, 21 bp, Artificial sequence
  SiRNA target sequence
agatagctctataaatagccg

SEQ ID NO: 257045 - DNA, 21 bp, Artificial sequence
  SiRNA target sequence
gatagctctataaatagccgt

SEQ ID NO: 257046 - DNA, 21 bp, Artificial sequence
  SiRNA target sequence
atagctctataaatagccgtg

SEQ ID NO: 257047 - DNA, 21 bp, Artificial sequence
  SiRNA target sequence
tagctctataaatagccgtga

SEQ ID NO: 257048 - DNA, 21 bp, Artificial sequence
  SiRNA target sequence
agctctataaatagccgtgag

SEQ ID NO: 257049 - DNA, 21 bp, Artificial sequence
  SiRNA target sequence
gctctataaatagccgtgagg

SEQ ID NO: 257050 - DNA, 21 bp, Artificial sequence
  SiRNA target sequence
ctctataaatagccgtgaggc

SEQ ID NO: 257051 - DNA, 21 bp, Artificial sequence
  SiRNA target sequence
tctataaatagccgtgaggct

SEQ ID NO: 257052 - DNA, 21 bp, Artificial sequence
  SiRNA target sequence
ctataaatagccgtgaggctt

SEQ ID NO: 257053 - DNA, 21 bp, Artificial sequence
  SiRNA target sequence
tataaatagccgtgaggcttt

SEQ ID NO: 257054 - DNA, 21 bp, Artificial sequence
  SiRNA target sequence
ataaatagccgtgaggcttta

SEQ ID NO: 257055 - DNA, 21 bp, Artificial sequence
  SiRNA target sequence
taaatagccgtgaggctttaa

SEQ ID NO: 257056 - DNA, 21 bp, Artificial sequence
  SiRNA target sequence
aaatagccgtgaggctttaaa

SEQ ID NO: 257057 - DNA, 21 bp, Artificial sequence
  SiRNA target sequence
aatagccgtgaggctttaaat

SEQ ID NO: 257058 - DNA, 21 bp, Artificial sequence
  SiRNA target sequence
atagccgtgaggctttaaatc

SEQ ID NO: 257059 - DNA, 21 bp, Artificial sequence
  SiRNA target sequence
tagccgtgaggctttaaatcc

SEQ ID NO: 257060 - DNA, 21 bp, Artificial sequence
  SiRNA target sequence
agccgtgaggctttaaatcct

SEQ ID NO: 257061 - DNA, 21 bp, Artificial sequence
  SiRNA target sequence
gccgtgaggctttaaatcctg

SEQ ID NO: 257062 - DNA, 21 bp, Artificial sequence
  SiRNA target sequence
ccgtgaggctttaaatcctga

SEQ ID NO: 257063 - DNA, 21 bp, Artificial sequence
  SiRNA target sequence
cgtgaggctttaaatcctgat

SEQ ID NO: 257064 - DNA, 21 bp, Artificial sequence
  SiRNA target sequence
gtgaggctttaaatcctgata

SEQ ID NO: 257065 - DNA, 21 bp, Artificial sequence
  SiRNA target sequence
tgaggctttaaatcctgataa

SEQ ID NO: 257066 - DNA, 21 bp, Artificial sequence
  SiRNA target sequence
gaggctttaaatcctgataag

SEQ ID NO: 257067 - DNA, 21 bp, Artificial sequence
  SiRNA target sequence
aggctttaaatcctgataagt

SEQ ID NO: 257068 - DNA, 21 bp, Artificial sequence
  SiRNA target sequence
ggctttaaatcctgataagta

SEQ ID NO: 257069 - DNA, 21 bp, Artificial sequence
  SiRNA target sequence
gctttaaatcctgataagtac

SEQ ID NO: 257070 - DNA, 21 bp, Artificial sequence
  SiRNA target sequence
ctttaaatcctgataagtaca

SEQ ID NO: 257071 - DNA, 21 bp, Artificial sequence
  SiRNA target sequence
tttaaatcctgataagtacat

SEQ ID NO: 257072 - DNA, 21 bp, Artificial sequence
  SiRNA target sequence
ttaaatcctgataagtacatt

SEQ ID NO: 257073 - DNA, 21 bp, Artificial sequence
  SiRNA target sequence
taaatcctgataagtacatta

SEQ ID NO: 257074 - DNA, 21 bp, Artificial sequence
  SiRNA target sequence
aaatcctgataagtacattac

SEQ ID NO: 257075 - DNA, 21 bp, Artificial sequence
  SiRNA target sequence
aatcctgataagtacattacc

SEQ ID NO: 257076 - DNA, 21 bp, Artificial sequence
  SiRNA target sequence
atcctgataagtacattacct

SEQ ID NO: 257077 - DNA, 21 bp, Artificial sequence
  SiRNA target sequence
tcctgataagtacattacctg

SEQ ID NO: 257078 - DNA, 21 bp, Artificial sequence
  SiRNA target sequence
cctgataagtacattacctga

SEQ ID NO: 257079 - DNA, 21 bp, Artificial sequence
  SiRNA target sequence
ctgataagtacattacctgag

SEQ ID NO: 257080 - DNA, 21 bp, Artificial sequence
  SiRNA target sequence
tgataagtacattacctgaga

SEQ ID NO: 257081 - DNA, 21 bp, Artificial sequence
  SiRNA target sequence
gataagtacattacctgagaa

SEQ ID NO: 257082 - DNA, 21 bp, Artificial sequence
  SiRNA target sequence
ataagtacattacctgagaat

SEQ ID NO: 257083 - DNA, 21 bp, Artificial sequence
  SiRNA target sequence
taagtacattacctgagaatt

SEQ ID NO: 257084 - DNA, 21 bp, Artificial sequence
  SiRNA target sequence
aagtacattacctgagaattc

SEQ ID NO: 257085 - DNA, 21 bp, Artificial sequence
  SiRNA target sequence
agtacattacctgagaattcc

SEQ ID NO: 257086 - DNA, 21 bp, Artificial sequence
  SiRNA target sequence
gtacattacctgagaattcct

SEQ ID NO: 257087 - DNA, 21 bp, Artificial sequence
  SiRNA target sequence
tacattacctgagaattcctt

SEQ ID NO: 257088 - DNA, 21 bp, Artificial sequence
  SiRNA target sequence
acattacctgagaattccttc

SEQ ID NO: 257089 - DNA, 21 bp, Artificial sequence
  SiRNA target sequence
cattacctgagaattccttct

SEQ ID NO: 257090 - DNA, 21 bp, Artificial sequence
  SiRNA target sequence
attacctgagaattccttctt

SEQ ID NO: 257091 - DNA, 21 bp, Artificial sequence
  SiRNA target sequence
ttacctgagaattccttcttt

SEQ ID NO: 257092 - DNA, 21 bp, Artificial sequence
  SiRNA target sequence
tacctgagaattccttctttt

SEQ ID NO: 257093 - DNA, 21 bp, Artificial sequence
  SiRNA target sequence
acctgagaattccttcttttg

SEQ ID NO: 257094 - DNA, 21 bp, Artificial sequence
  SiRNA target sequence
cctgagaattccttcttttgg

SEQ ID NO: 257095 - DNA, 21 bp, Artificial sequence
  SiRNA target sequence
ctgagaattccttcttttgga

SEQ ID NO: 257096 - DNA, 21 bp, Artificial sequence
  SiRNA target sequence
tgagaattccttcttttggag

SEQ ID NO: 257097 - DNA, 21 bp, Artificial sequence
  SiRNA target sequence
gagaattccttcttttggagt

SEQ ID NO: 257098 - DNA, 21 bp, Artificial sequence
  SiRNA target sequence
agaattccttcttttggagtt

SEQ ID NO: 257099 - DNA, 21 bp, Artificial sequence
  SiRNA target sequence
gaattccttcttttggagttt

SEQ ID NO: 257100 - DNA, 21 bp, Artificial sequence
  SiRNA target sequence
aattccttcttttggagtttg

SEQ ID NO: 257101 - DNA, 21 bp, Artificial sequence
  SiRNA target sequence
attccttcttttggagtttga

SEQ ID NO: 257102 - DNA, 21 bp, Artificial sequence
  SiRNA target sequence
ttccttcttttggagtttgaa

SEQ ID NO: 257103 - DNA, 21 bp, Artificial sequence
  SiRNA target sequence
tccttcttttggagtttgaat

SEQ ID NO: 257104 - DNA, 21 bp, Artificial sequence
  SiRNA target sequence
ccttcttttggagtttgaatt

SEQ ID NO: 257105 - DNA, 21 bp, Artificial sequence
  SiRNA target sequence
cttcttttggagtttgaattt

SEQ ID NO: 257106 - DNA, 21 bp, Artificial sequence
  SiRNA target sequence
ttcttttggagtttgaattta

SEQ ID NO: 257107 - DNA, 21 bp, Artificial sequence
  SiRNA target sequence
tcttttggagtttgaatttat

SEQ ID NO: 257108 - DNA, 21 bp, Artificial sequence
  SiRNA target sequence
cttttggagtttgaatttata

SEQ ID NO: 257109 - DNA, 21 bp, Artificial sequence
  SiRNA target sequence
ttttggagtttgaatttatat

SEQ ID NO: 257110 - DNA, 21 bp, Artificial sequence
  SiRNA target sequence
tttggagtttgaatttatata

SEQ ID NO: 257111 - DNA, 21 bp, Artificial sequence
  SiRNA target sequence
ttggagtttgaatttatataa

SEQ ID NO: 257112 - DNA, 21 bp, Artificial sequence
  SiRNA target sequence
tggagtttgaatttatataag

SEQ ID NO: 257113 - DNA, 21 bp, Artificial sequence
  SiRNA target sequence
ggagtttgaatttatataagt

SEQ ID NO: 257114 - DNA, 21 bp, Artificial sequence
  SiRNA target sequence
gagtttgaatttatataagtt

SEQ ID NO: 257115 - DNA, 21 bp, Artificial sequence
  SiRNA target sequence
agtttgaatttatataagtta

SEQ ID NO: 257116 - DNA, 21 bp, Artificial sequence
  SiRNA target sequence
gtttgaatttatataagttag

SEQ ID NO: 257117 - DNA, 21 bp, Artificial sequence
  SiRNA target sequence
tttgaatttatataagttagt

SEQ ID NO: 257118 - DNA, 21 bp, Artificial sequence
  SiRNA target sequence
ttgaatttatataagttagta

SEQ ID NO: 257119 - DNA, 21 bp, Artificial sequence
  SiRNA target sequence
tgaatttatataagttagtac

SEQ ID NO: 257120 - DNA, 21 bp, Artificial sequence
  SiRNA target sequence
gaatttatataagttagtacc

SEQ ID NO: 257121 - DNA, 21 bp, Artificial sequence
  SiRNA target sequence
aatttatataagttagtacca

SEQ ID NO: 257122 - DNA, 21 bp, Artificial sequence
  SiRNA target sequence
atttatataagttagtaccaa

SEQ ID NO: 257123 - DNA, 21 bp, Artificial sequence
  SiRNA target sequence
tttatataagttagtaccaat

SEQ ID NO: 257124 - DNA, 21 bp, Artificial sequence
  SiRNA target sequence
ttatataagttagtaccaata

SEQ ID NO: 257125 - DNA, 21 bp, Artificial sequence
  SiRNA target sequence
tatataagttagtaccaatag

SEQ ID NO: 257126 - DNA, 21 bp, Artificial sequence
  SiRNA target sequence
atataagttagtaccaatagt

SEQ ID NO: 257127 - DNA, 21 bp, Artificial sequence
  SiRNA target sequence
tataagttagtaccaatagtt

SEQ ID NO: 257128 - DNA, 21 bp, Artificial sequence
  SiRNA target sequence
ataagttagtaccaatagtta

SEQ ID NO: 257129 - DNA, 21 bp, Artificial sequence
  SiRNA target sequence
taagttagtaccaatagttaa

SEQ ID NO: 257130 - DNA, 21 bp, Artificial sequence
  SiRNA target sequence
aagttagtaccaatagttaat

SEQ ID NO: 257131 - DNA, 21 bp, Artificial sequence
  SiRNA target sequence
agttagtaccaatagttaata

SEQ ID NO: 257132 - DNA, 21 bp, Artificial sequence
  SiRNA target sequence
gttagtaccaatagttaatat

SEQ ID NO: 257133 - DNA, 21 bp, Artificial sequence
  SiRNA target sequence
ttagtaccaatagttaatatc

SEQ ID NO: 257134 - DNA, 21 bp, Artificial sequence
  SiRNA target sequence
tagtaccaatagttaatatca

SEQ ID NO: 257135 - DNA, 21 bp, Artificial sequence
  SiRNA target sequence
agtaccaatagttaatatcat

SEQ ID NO: 257136 - DNA, 21 bp, Artificial sequence
  SiRNA target sequence
gtaccaatagttaatatcatt

SEQ ID NO: 257137 - DNA, 21 bp, Artificial sequence
  SiRNA target sequence
taccaatagttaatatcattt

SEQ ID NO: 257138 - DNA, 21 bp, Artificial sequence
  SiRNA target sequence
accaatagttaatatcattta

SEQ ID NO: 257139 - DNA, 21 bp, Artificial sequence
  SiRNA target sequence
ccaatagttaatatcatttaa

SEQ ID NO: 257140 - DNA, 21 bp, Artificial sequence
  SiRNA target sequence
caatagttaatatcatttaag

SEQ ID NO: 257141 - DNA, 21 bp, Artificial sequence
  SiRNA target sequence
aatagttaatatcatttaagt

SEQ ID NO: 257142 - DNA, 21 bp, Artificial sequence
  SiRNA target sequence
atagttaatatcatttaagta

SEQ ID NO: 257143 - DNA, 21 bp, Artificial sequence
  SiRNA target sequence
tagttaatatcatttaagtat

SEQ ID NO: 257144 - DNA, 21 bp, Artificial sequence
  SiRNA target sequence
agttaatatcatttaagtatg

SEQ ID NO: 257145 - DNA, 21 bp, Artificial sequence
  SiRNA target sequence
gttaatatcatttaagtatgt

SEQ ID NO: 257146 - DNA, 21 bp, Artificial sequence
  SiRNA target sequence
ttaatatcatttaagtatgtt

SEQ ID NO: 257147 - DNA, 21 bp, Artificial sequence
  SiRNA target sequence
taatatcatttaagtatgtta

SEQ ID NO: 257148 - DNA, 21 bp, Artificial sequence
  SiRNA target sequence
aatatcatttaagtatgttat

SEQ ID NO: 257149 - DNA, 21 bp, Artificial sequence
  SiRNA target sequence
atatcatttaagtatgttatt

SEQ ID NO: 257150 - DNA, 21 bp, Artificial sequence
  SiRNA target sequence
tatcatttaagtatgttatta

SEQ ID NO: 257151 - DNA, 21 bp, Artificial sequence
  SiRNA target sequence
atcatttaagtatgttattat

SEQ ID NO: 257152 - DNA, 21 bp, Artificial sequence
  SiRNA target sequence
tcatttaagtatgttattatt

SEQ ID NO: 257153 - DNA, 21 bp, Artificial sequence
  SiRNA target sequence
catttaagtatgttattattg

SEQ ID NO: 257154 - DNA, 21 bp, Artificial sequence
  SiRNA target sequence
atttaagtatgttattattgc

SEQ ID NO: 257155 - DNA, 21 bp, Artificial sequence
  SiRNA target sequence
tttaagtatgttattattgct

SEQ ID NO: 257156 - DNA, 21 bp, Artificial sequence
  SiRNA target sequence
ttaagtatgttattattgctg

SEQ ID NO: 257157 - DNA, 21 bp, Artificial sequence
  SiRNA target sequence
taagtatgttattattgctga

SEQ ID NO: 257158 - DNA, 21 bp, Artificial sequence
  SiRNA target sequence
aagtatgttattattgctgaa

SEQ ID NO: 257159 - DNA, 21 bp, Artificial sequence
  SiRNA target sequence
agtatgttattattgctgaag

SEQ ID NO: 257160 - DNA, 21 bp, Artificial sequence
  SiRNA target sequence
gtatgttattattgctgaagg

SEQ ID NO: 257161 - DNA, 21 bp, Artificial sequence
  SiRNA target sequence
tatgttattattgctgaaggc

SEQ ID NO: 257162 - DNA, 21 bp, Artificial sequence
  SiRNA target sequence
atgttattattgctgaaggca

SEQ ID NO: 257163 - DNA, 21 bp, Artificial sequence
  SiRNA target sequence
tgttattattgctgaaggcat

SEQ ID NO: 257164 - DNA, 21 bp, Artificial sequence
  SiRNA target sequence
gttattattgctgaaggcatg

SEQ ID NO: 257165 - DNA, 21 bp, Artificial sequence
  SiRNA target sequence
ttattattgctgaaggcatgt

SEQ ID NO: 257166 - DNA, 21 bp, Artificial sequence
  SiRNA target sequence
tattattgctgaaggcatgta

SEQ ID NO: 257167 - DNA, 21 bp, Artificial sequence
  SiRNA target sequence
attattgctgaaggcatgtat

SEQ ID NO: 257168 - DNA, 21 bp, Artificial sequence
  SiRNA target sequence
ttattgctgaaggcatgtatt

SEQ ID NO: 257169 - DNA, 21 bp, Artificial sequence
  SiRNA target sequence
tattgctgaaggcatgtattt

SEQ ID NO: 257170 - DNA, 21 bp, Artificial sequence
  SiRNA target sequence
attgctgaaggcatgtatttc

SEQ ID NO: 257171 - DNA, 21 bp, Artificial sequence
  SiRNA target sequence
ttgctgaaggcatgtatttcg

SEQ ID NO: 257172 - DNA, 21 bp, Artificial sequence
  SiRNA target sequence
tgctgaaggcatgtatttcgg

SEQ ID NO: 257173 - DNA, 21 bp, Artificial sequence
  SiRNA target sequence
gctgaaggcatgtatttcgga

SEQ ID NO: 257174 - DNA, 21 bp, Artificial sequence
  SiRNA target sequence
ctgaaggcatgtatttcggat

SEQ ID NO: 257175 - DNA, 21 bp, Artificial sequence
  SiRNA target sequence
tgaaggcatgtatttcggata

SEQ ID NO: 257176 - DNA, 21 bp, Artificial sequence
  SiRNA target sequence
gaaggcatgtatttcggataa

SEQ ID NO: 257177 - DNA, 21 bp, Artificial sequence
  SiRNA target sequence
aaggcatgtatttcggataat

SEQ ID NO: 257178 - DNA, 21 bp, Artificial sequence
  SiRNA target sequence
aggcatgtatttcggataata

SEQ ID NO: 257179 - DNA, 21 bp, Artificial sequence
  SiRNA target sequence
ggcatgtatttcggataataa

SEQ ID NO: 257180 - DNA, 21 bp, Artificial sequence
  SiRNA target sequence
gcatgtatttcggataataac

SEQ ID NO: 257181 - DNA, 21 bp, Artificial sequence
  SiRNA target sequence
catgtatttcggataataacc

SEQ ID NO: 257182 - DNA, 21 bp, Artificial sequence
  SiRNA target sequence
atgtatttcggataataacct

SEQ ID NO: 257183 - DNA, 21 bp, Artificial sequence
  SiRNA target sequence
tgtatttcggataataacctc

SEQ ID NO: 257184 - DNA, 21 bp, Artificial sequence
  SiRNA target sequence
gtatttcggataataacctct

SEQ ID NO: 257185 - DNA, 21 bp, Artificial sequence
  SiRNA target sequence
tatttcggataataacctcta

SEQ ID NO: 257186 - DNA, 21 bp, Artificial sequence
  SiRNA target sequence
atttcggataataacctctac

SEQ ID NO: 257187 - DNA, 21 bp, Artificial sequence
  SiRNA target sequence
tttcggataataacctctaca

SEQ ID NO: 257188 - DNA, 21 bp, Artificial sequence
  SiRNA target sequence
ttcggataataacctctacat

SEQ ID NO: 257189 - DNA, 21 bp, Artificial sequence
  SiRNA target sequence
tcggataataacctctacatt

SEQ ID NO: 257190 - DNA, 21 bp, Artificial sequence
  SiRNA target sequence
cggataataacctctacattg

SEQ ID NO: 257191 - DNA, 21 bp, Artificial sequence
  SiRNA target sequence
ggataataacctctacattga

SEQ ID NO: 257192 - DNA, 21 bp, Artificial sequence
  SiRNA target sequence
gataataacctctacattgat

SEQ ID NO: 257193 - DNA, 21 bp, Artificial sequence
  SiRNA target sequence
ataataacctctacattgata

SEQ ID NO: 257194 - DNA, 21 bp, Artificial sequence
  SiRNA target sequence
taataacctctacattgatat

SEQ ID NO: 257195 - DNA, 21 bp, Artificial sequence
  SiRNA target sequence
aataacctctacattgatata

SEQ ID NO: 257196 - DNA, 21 bp, Artificial sequence
  SiRNA target sequence
ataacctctacattgatatat

SEQ ID NO: 257197 - DNA, 21 bp, Artificial sequence
  SiRNA target sequence
taacctctacattgatatata

SEQ ID NO: 257198 - DNA, 21 bp, Artificial sequence
  SiRNA target sequence
aacctctacattgatatataa

SEQ ID NO: 257199 - DNA, 21 bp, Artificial sequence
  SiRNA target sequence
acctctacattgatatataaa

SEQ ID NO: 257200 - DNA, 21 bp, Artificial sequence
  SiRNA target sequence
cctctacattgatatataaac

SEQ ID NO: 257201 - DNA, 21 bp, Artificial sequence
  SiRNA target sequence
ctctacattgatatataaact

SEQ ID NO: 257202 - DNA, 21 bp, Artificial sequence
  SiRNA target sequence
tctacattgatatataaacta

SEQ ID NO: 257203 - DNA, 21 bp, Artificial sequence
  SiRNA target sequence
ctacattgatatataaactat

SEQ ID NO: 257204 - DNA, 21 bp, Artificial sequence
  SiRNA target sequence
tacattgatatataaactata

SEQ ID NO: 257205 - DNA, 21 bp, Artificial sequence
  SiRNA target sequence
acattgatatataaactatat

SEQ ID NO: 257206 - DNA, 21 bp, Artificial sequence
  SiRNA target sequence
cattgatatataaactatatg

SEQ ID NO: 257207 - DNA, 21 bp, Artificial sequence
  SiRNA target sequence
attgatatataaactatatgc

SEQ ID NO: 257208 - DNA, 21 bp, Artificial sequence
  SiRNA target sequence
ttgatatataaactatatgca

SEQ ID NO: 257209 - DNA, 21 bp, Artificial sequence
  SiRNA target sequence
tgatatataaactatatgcaa

SEQ ID NO: 257210 - DNA, 21 bp, Artificial sequence
  SiRNA target sequence
gatatataaactatatgcaag

SEQ ID NO: 257211 - DNA, 21 bp, Artificial sequence
  SiRNA target sequence
atatataaactatatgcaagt

SEQ ID NO: 257212 - DNA, 21 bp, Artificial sequence
  SiRNA target sequence
tatataaactatatgcaagtc

SEQ ID NO: 257213 - DNA, 21 bp, Artificial sequence
  SiRNA target sequence
atataaactatatgcaagtct

SEQ ID NO: 257214 - DNA, 21 bp, Artificial sequence
  SiRNA target sequence
tataaactatatgcaagtctc

SEQ ID NO: 257215 - DNA, 21 bp, Artificial sequence
  SiRNA target sequence
ataaactatatgcaagtctcg

SEQ ID NO: 257216 - DNA, 21 bp, Artificial sequence
  SiRNA target sequence
taaactatatgcaagtctcgg

SEQ ID NO: 257217 - DNA, 21 bp, Artificial sequence
  SiRNA target sequence
aaactatatgcaagtctcggt

SEQ ID NO: 257218 - DNA, 21 bp, Artificial sequence
  SiRNA target sequence
aactatatgcaagtctcggtg

SEQ ID NO: 257219 - DNA, 21 bp, Artificial sequence
  SiRNA target sequence
actatatgcaagtctcggtgg

SEQ ID NO: 257220 - DNA, 21 bp, Artificial sequence
  SiRNA target sequence
ctatatgcaagtctcggtgga

SEQ ID NO: 257221 - DNA, 21 bp, Artificial sequence
  SiRNA target sequence
tatatgcaagtctcggtggat

SEQ ID NO: 257222 - DNA, 21 bp, Artificial sequence
  SiRNA target sequence
atatgcaagtctcggtggata

SEQ ID NO: 257223 - DNA, 21 bp, Artificial sequence
  SiRNA target sequence
tatgcaagtctcggtggatat

SEQ ID NO: 257224 - DNA, 21 bp, Artificial sequence
  SiRNA target sequence
atgcaagtctcggtggatatt

SEQ ID NO: 257225 - DNA, 21 bp, Artificial sequence
  SiRNA target sequence
tgcaagtctcggtggatattg

SEQ ID NO: 257226 - DNA, 21 bp, Artificial sequence
  SiRNA target sequence
gcaagtctcggtggatattgc

SEQ ID NO: 257227 - DNA, 21 bp, Artificial sequence
  SiRNA target sequence
caagtctcggtggatattgca

SEQ ID NO: 257228 - DNA, 21 bp, Artificial sequence
  SiRNA target sequence
aagtctcggtggatattgcat

SEQ ID NO: 257229 - DNA, 21 bp, Artificial sequence
  SiRNA target sequence
agtctcggtggatattgcatt

SEQ ID NO: 257230 - DNA, 21 bp, Artificial sequence
  SiRNA target sequence
gtctcggtggatattgcatta

SEQ ID NO: 257231 - DNA, 21 bp, Artificial sequence
  SiRNA target sequence
tctcggtggatattgcattat

SEQ ID NO: 257232 - DNA, 21 bp, Artificial sequence
  SiRNA target sequence
ctcggtggatattgcattatg

SEQ ID NO: 257233 - DNA, 21 bp, Artificial sequence
  SiRNA target sequence
tcggtggatattgcattatgg

SEQ ID NO: 257234 - DNA, 21 bp, Artificial sequence
  SiRNA target sequence
cggtggatattgcattatggt

SEQ ID NO: 257235 - DNA, 21 bp, Artificial sequence
  SiRNA target sequence
ggtggatattgcattatggtc

SEQ ID NO: 257236 - DNA, 21 bp, Artificial sequence
  SiRNA target sequence
gtggatattgcattatggtcg

SEQ ID NO: 257237 - DNA, 21 bp, Artificial sequence
  SiRNA target sequence
tggatattgcattatggtcgc

SEQ ID NO: 257238 - DNA, 21 bp, Artificial sequence
  SiRNA target sequence
ggatattgcattatggtcgca

SEQ ID NO: 257239 - DNA, 21 bp, Artificial sequence
  SiRNA target sequence
gatattgcattatggtcgcag

SEQ ID NO: 257240 - DNA, 21 bp, Artificial sequence
  SiRNA target sequence
atattgcattatggtcgcagt

SEQ ID NO: 257241 - DNA, 21 bp, Artificial sequence
  SiRNA target sequence
tattgcattatggtcgcagtt

SEQ ID NO: 257242 - DNA, 21 bp, Artificial sequence
  SiRNA target sequence
attgcattatggtcgcagtta

SEQ ID NO: 257243 - DNA, 21 bp, Artificial sequence
  SiRNA target sequence
ttgcattatggtcgcagttaa

SEQ ID NO: 257244 - DNA, 21 bp, Artificial sequence
  SiRNA target sequence
tgcattatggtcgcagttaac

SEQ ID NO: 257245 - DNA, 21 bp, Artificial sequence
  SiRNA target sequence
gcattatggtcgcagttaacc

SEQ ID NO: 257246 - DNA, 21 bp, Artificial sequence
  SiRNA target sequence
cattatggtcgcagttaacct

SEQ ID NO: 257247 - DNA, 21 bp, Artificial sequence
  SiRNA target sequence
attatggtcgcagttaacctg

SEQ ID NO: 257248 - DNA, 21 bp, Artificial sequence
  SiRNA target sequence
ttatggtcgcagttaacctgt

SEQ ID NO: 257249 - DNA, 21 bp, Artificial sequence
  SiRNA target sequence
tatggtcgcagttaacctgta

SEQ ID NO: 257250 - DNA, 21 bp, Artificial sequence
  SiRNA target sequence
atggtcgcagttaacctgtag

SEQ ID NO: 257251 - DNA, 21 bp, Artificial sequence
  SiRNA target sequence
tggtcgcagttaacctgtagc

SEQ ID NO: 257252 - DNA, 21 bp, Artificial sequence
  SiRNA target sequence
ggtcgcagttaacctgtagct

SEQ ID NO: 257253 - DNA, 21 bp, Artificial sequence
  SiRNA target sequence
gtcgcagttaacctgtagctt

SEQ ID NO: 257254 - DNA, 21 bp, Artificial sequence
  SiRNA target sequence
tcgcagttaacctgtagctta

SEQ ID NO: 257255 - DNA, 21 bp, Artificial sequence
  SiRNA target sequence
cgcagttaacctgtagcttat

SEQ ID NO: 257256 - DNA, 21 bp, Artificial sequence
  SiRNA target sequence
gcagttaacctgtagcttata

SEQ ID NO: 257257 - DNA, 21 bp, Artificial sequence
  SiRNA target sequence
cagttaacctgtagcttatat

SEQ ID NO: 257258 - DNA, 21 bp, Artificial sequence
  SiRNA target sequence
agttaacctgtagcttatata

SEQ ID NO: 257259 - DNA, 21 bp, Artificial sequence
  SiRNA target sequence
gttaacctgtagcttatatat

SEQ ID NO: 257260 - DNA, 21 bp, Artificial sequence
  SiRNA target sequence
ttaacctgtagcttatatatt

SEQ ID NO: 257261 - DNA, 21 bp, Artificial sequence
  SiRNA target sequence
taacctgtagcttatatattc

SEQ ID NO: 257262 - DNA, 21 bp, Artificial sequence
  SiRNA target sequence
aacctgtagcttatatattcc

SEQ ID NO: 257263 - DNA, 21 bp, Artificial sequence
  SiRNA target sequence
acctgtagcttatatattcct

SEQ ID NO: 257264 - DNA, 21 bp, Artificial sequence
  SiRNA target sequence
cctgtagcttatatattcctg

SEQ ID NO: 257265 - DNA, 21 bp, Artificial sequence
  SiRNA target sequence
ctgtagcttatatattcctgt

SEQ ID NO: 257266 - DNA, 21 bp, Artificial sequence
  SiRNA target sequence
tgtagcttatatattcctgtg

SEQ ID NO: 257267 - DNA, 21 bp, Artificial sequence
  SiRNA target sequence
gtagcttatatattcctgtgt

SEQ ID NO: 257268 - DNA, 21 bp, Artificial sequence
  SiRNA target sequence
tagcttatatattcctgtgtc

SEQ ID NO: 257269 - DNA, 21 bp, Artificial sequence
  SiRNA target sequence
agcttatatattcctgtgtcg

SEQ ID NO: 257270 - DNA, 21 bp, Artificial sequence
  SiRNA target sequence
gcttatatattcctgtgtcgg

SEQ ID NO: 257271 - DNA, 21 bp, Artificial sequence
  SiRNA target sequence
cttatatattcctgtgtcgga

SEQ ID NO: 257272 - DNA, 21 bp, Artificial sequence
  SiRNA target sequence
ttatatattcctgtgtcggag

SEQ ID NO: 257273 - DNA, 21 bp, Artificial sequence
  SiRNA target sequence
tatatattcctgtgtcggagc

SEQ ID NO: 257274 - DNA, 21 bp, Artificial sequence
  SiRNA target sequence
atatattcctgtgtcggagca

SEQ ID NO: 257275 - DNA, 21 bp, Artificial sequence
  SiRNA target sequence
tatattcctgtgtcggagcag

SEQ ID NO: 257276 - DNA, 21 bp, Artificial sequence
  SiRNA target sequence
atattcctgtgtcggagcagt

SEQ ID NO: 257277 - DNA, 21 bp, Artificial sequence
  SiRNA target sequence
tattcctgtgtcggagcagtg

SEQ ID NO: 257278 - DNA, 21 bp, Artificial sequence
  SiRNA target sequence
attcctgtgtcggagcagtgg

SEQ ID NO: 257279 - DNA, 21 bp, Artificial sequence
  SiRNA target sequence
ttcctgtgtcggagcagtggt

SEQ ID NO: 257280 - DNA, 21 bp, Artificial sequence
  SiRNA target sequence
tcctgtgtcggagcagtggta

SEQ ID NO: 257281 - DNA, 21 bp, Artificial sequence
  SiRNA target sequence
cctgtgtcggagcagtggtaa

SEQ ID NO: 257282 - DNA, 21 bp, Artificial sequence
  SiRNA target sequence
ctgtgtcggagcagtggtaat

SEQ ID NO: 257283 - DNA, 21 bp, Artificial sequence
  SiRNA target sequence
tgtgtcggagcagtggtaatg

SEQ ID NO: 257284 - DNA, 21 bp, Artificial sequence
  SiRNA target sequence
gtgtcggagcagtggtaatgg

SEQ ID NO: 257285 - DNA, 21 bp, Artificial sequence
  SiRNA target sequence
tgtcggagcagtggtaatgga

SEQ ID NO: 257286 - DNA, 21 bp, Artificial sequence
  SiRNA target sequence
gtcggagcagtggtaatggag

SEQ ID NO: 257287 - DNA, 21 bp, Artificial sequence
  SiRNA target sequence
tcggagcagtggtaatggagc

SEQ ID NO: 257288 - DNA, 21 bp, Artificial sequence
  SiRNA target sequence
cggagcagtggtaatggagcc

SEQ ID NO: 257289 - DNA, 21 bp, Artificial sequence
  SiRNA target sequence
ggagcagtggtaatggagccg

SEQ ID NO: 257290 - DNA, 21 bp, Artificial sequence
  SiRNA target sequence
gagcagtggtaatggagccgg

SEQ ID NO: 257291 - DNA, 21 bp, Artificial sequence
  SiRNA target sequence
agcagtggtaatggagccgga

SEQ ID NO: 257292 - DNA, 21 bp, Artificial sequence
  SiRNA target sequence
gcagtggtaatggagccggac

SEQ ID NO: 257293 - DNA, 21 bp, Artificial sequence
  SiRNA target sequence
cagtggtaatggagccggacg

SEQ ID NO: 257294 - DNA, 21 bp, Artificial sequence
  SiRNA target sequence
agtggtaatggagccggacga

SEQ ID NO: 257295 - DNA, 21 bp, Artificial sequence
  SiRNA target sequence
gtggtaatggagccggacgat

SEQ ID NO: 257296 - DNA, 21 bp, Artificial sequence
  SiRNA target sequence
tggtaatggagccggacgatt

SEQ ID NO: 257297 - DNA, 21 bp, Artificial sequence
  SiRNA target sequence
ggtaatggagccggacgattt

SEQ ID NO: 257298 - DNA, 21 bp, Artificial sequence
  SiRNA target sequence
gtaatggagccggacgatttc

SEQ ID NO: 257299 - DNA, 21 bp, Artificial sequence
  SiRNA target sequence
taatggagccggacgatttcg

SEQ ID NO: 257300 - DNA, 21 bp, Artificial sequence
  SiRNA target sequence
aatggagccggacgatttcgc

SEQ ID NO: 257301 - DNA, 21 bp, Artificial sequence
  SiRNA target sequence
atggagccggacgatttcgcc

SEQ ID NO: 257302 - DNA, 21 bp, Artificial sequence
  SiRNA target sequence
tggagccggacgatttcgcca

SEQ ID NO: 257303 - DNA, 21 bp, Artificial sequence
  SiRNA target sequence
ggagccggacgatttcgccaa

SEQ ID NO: 257304 - DNA, 21 bp, Artificial sequence
  SiRNA target sequence
gagccggacgatttcgccaaa

SEQ ID NO: 257305 - DNA, 21 bp, Artificial sequence
  SiRNA target sequence
agccggacgatttcgccaaaa

SEQ ID NO: 257306 - DNA, 21 bp, Artificial sequence
  SiRNA target sequence
gccggacgatttcgccaaaaa

SEQ ID NO: 257307 - DNA, 21 bp, Artificial sequence
  SiRNA target sequence
ccggacgatttcgccaaaaat

SEQ ID NO: 257308 - DNA, 21 bp, Artificial sequence
  SiRNA target sequence
cggacgatttcgccaaaaatg

SEQ ID NO: 257309 - DNA, 21 bp, Artificial sequence
  SiRNA target sequence
ggacgatttcgccaaaaatgt

SEQ ID NO: 257310 - DNA, 21 bp, Artificial sequence
  SiRNA target sequence
gacgatttcgccaaaaatgtt

SEQ ID NO: 257311 - DNA, 21 bp, Artificial sequence
  SiRNA target sequence
acgatttcgccaaaaatgttc

SEQ ID NO: 257312 - DNA, 21 bp, Artificial sequence
  SiRNA target sequence
cgatttcgccaaaaatgttca

SEQ ID NO: 257313 - DNA, 21 bp, Artificial sequence
  SiRNA target sequence
gatttcgccaaaaatgttcac

SEQ ID NO: 257314 - DNA, 21 bp, Artificial sequence
  SiRNA target sequence
atttcgccaaaaatgttcact

SEQ ID NO: 257315 - DNA, 21 bp, Artificial sequence
  SiRNA target sequence
tttcgccaaaaatgttcactt

SEQ ID NO: 257316 - DNA, 21 bp, Artificial sequence
  SiRNA target sequence
ttcgccaaaaatgttcacttc

SEQ ID NO: 257317 - DNA, 21 bp, Artificial sequence
  SiRNA target sequence
tcgccaaaaatgttcacttct

SEQ ID NO: 257318 - DNA, 21 bp, Artificial sequence
  SiRNA target sequence
cgccaaaaatgttcacttctc

SEQ ID NO: 257319 - DNA, 21 bp, Artificial sequence
  SiRNA target sequence
gccaaaaatgttcacttctca

SEQ ID NO: 257320 - DNA, 21 bp, Artificial sequence
  SiRNA target sequence
ccaaaaatgttcacttctcaa

SEQ ID NO: 257321 - DNA, 21 bp, Artificial sequence
  SiRNA target sequence
caaaaatgttcacttctcaac

SEQ ID NO: 257322 - DNA, 21 bp, Artificial sequence
  SiRNA target sequence
aaaaatgttcacttctcaaca

SEQ ID NO: 257323 - DNA, 21 bp, Artificial sequence
  SiRNA target sequence
aaaatgttcacttctcaacaa

SEQ ID NO: 257324 - DNA, 21 bp, Artificial sequence
  SiRNA target sequence
aaatgttcacttctcaacaaa

SEQ ID NO: 257325 - DNA, 21 bp, Artificial sequence
  SiRNA target sequence
aatgttcacttctcaacaaaa

SEQ ID NO: 257326 - DNA, 21 bp, Artificial sequence
  SiRNA target sequence
atgttcacttctcaacaaaat

SEQ ID NO: 257327 - DNA, 21 bp, Artificial sequence
  SiRNA target sequence
tgttcacttctcaacaaaata

SEQ ID NO: 257328 - DNA, 21 bp, Artificial sequence
  SiRNA target sequence
gttcacttctcaacaaaataa

SEQ ID NO: 257329 - DNA, 21 bp, Artificial sequence
  SiRNA target sequence
ttcacttctcaacaaaataac

SEQ ID NO: 257330 - DNA, 21 bp, Artificial sequence
  SiRNA target sequence
tcacttctcaacaaaataaca

SEQ ID NO: 257331 - DNA, 21 bp, Artificial sequence
  SiRNA target sequence
cacttctcaacaaaataacaa

SEQ ID NO: 257332 - DNA, 21 bp, Artificial sequence
  SiRNA target sequence
acttctcaacaaaataacaaa

SEQ ID NO: 257333 - DNA, 21 bp, Artificial sequence
  SiRNA target sequence
cttctcaacaaaataacaaaa

SEQ ID NO: 257334 - DNA, 21 bp, Artificial sequence
  SiRNA target sequence
ttctcaacaaaataacaaaat

SEQ ID NO: 257335 - DNA, 21 bp, Artificial sequence
  SiRNA target sequence
tctcaacaaaataacaaaatt

SEQ ID NO: 257336 - DNA, 21 bp, Artificial sequence
  SiRNA target sequence
ctcaacaaaataacaaaatta

SEQ ID NO: 257337 - DNA, 21 bp, Artificial sequence
  SiRNA target sequence
tcaacaaaataacaaaattac

SEQ ID NO: 257338 - DNA, 21 bp, Artificial sequence
  SiRNA target sequence
caacaaaataacaaaattact

SEQ ID NO: 257339 - DNA, 21 bp, Artificial sequence
  SiRNA target sequence
aacaaaataacaaaattacta

SEQ ID NO: 257340 - DNA, 21 bp, Artificial sequence
  SiRNA target sequence
acaaaataacaaaattactaa

SEQ ID NO: 257341 - DNA, 21 bp, Artificial sequence
  SiRNA target sequence
caaaataacaaaattactaaa

SEQ ID NO: 257342 - DNA, 21 bp, Artificial sequence
  SiRNA target sequence
aaaataacaaaattactaaac

SEQ ID NO: 257343 - DNA, 21 bp, Artificial sequence
  SiRNA target sequence
aaataacaaaattactaaaca

SEQ ID NO: 257344 - DNA, 21 bp, Artificial sequence
  SiRNA target sequence
aataacaaaattactaaacaa

SEQ ID NO: 257345 - DNA, 21 bp, Artificial sequence
  SiRNA target sequence
ataacaaaattactaaacaac

SEQ ID NO: 257346 - DNA, 21 bp, Artificial sequence
  SiRNA target sequence
taacaaaattactaaacaacc

SEQ ID NO: 257347 - DNA, 21 bp, Artificial sequence
  SiRNA target sequence
aacaaaattactaaacaaccc

SEQ ID NO: 257348 - DNA, 21 bp, Artificial sequence
  SiRNA target sequence
acaaaattactaaacaacccg

SEQ ID NO: 257349 - DNA, 21 bp, Artificial sequence
  SiRNA target sequence
caaaattactaaacaacccgc

SEQ ID NO: 257350 - DNA, 21 bp, Artificial sequence
  SiRNA target sequence
aaaattactaaacaacccgcc

SEQ ID NO: 257351 - DNA, 21 bp, Artificial sequence
  SiRNA target sequence
aaattactaaacaacccgccc

SEQ ID NO: 257352 - DNA, 21 bp, Artificial sequence
  SiRNA target sequence
aattactaaacaacccgcccc

SEQ ID NO: 257353 - DNA, 21 bp, Artificial sequence
  SiRNA target sequence
attactaaacaacccgccccc

SEQ ID NO: 257354 - DNA, 21 bp, Artificial sequence
  SiRNA target sequence
ttactaaacaacccgcccccc

SEQ ID NO: 257355 - DNA, 21 bp, Artificial sequence
  SiRNA target sequence
tactaaacaacccgcccccct

SEQ ID NO: 257356 - DNA, 21 bp, Artificial sequence
  SiRNA target sequence
actaaacaacccgcccccctt

SEQ ID NO: 257357 - DNA, 21 bp, Artificial sequence
  SiRNA target sequence
ctaaacaacccgccccccttt

SEQ ID NO: 257358 - DNA, 21 bp, Artificial sequence
  SiRNA target sequence
taaacaacccgcccccctttc

SEQ ID NO: 257359 - DNA, 21 bp, Artificial sequence
  SiRNA target sequence
aaacaacccgcccccctttct

SEQ ID NO: 257360 - DNA, 21 bp, Artificial sequence
  SiRNA target sequence
aacaacccgcccccctttctt

SEQ ID NO: 257361 - DNA, 21 bp, Artificial sequence
  SiRNA target sequence
acaacccgcccccctttctta

SEQ ID NO: 257362 - DNA, 21 bp, Artificial sequence
  SiRNA target sequence
caacccgcccccctttcttat

SEQ ID NO: 257363 - DNA, 21 bp, Artificial sequence
  SiRNA target sequence
aacccgcccccctttcttatc

SEQ ID NO: 257364 - DNA, 21 bp, Artificial sequence
  SiRNA target sequence
acccgcccccctttcttatct

SEQ ID NO: 257365 - DNA, 21 bp, Artificial sequence
  SiRNA target sequence
cccgcccccctttcttatctt

SEQ ID NO: 257366 - DNA, 21 bp, Artificial sequence
  SiRNA target sequence
ccgcccccctttcttatcttg

SEQ ID NO: 257367 - DNA, 21 bp, Artificial sequence
  SiRNA target sequence
cgcccccctttcttatcttgc

SEQ ID NO: 257368 - DNA, 21 bp, Artificial sequence
  SiRNA target sequence
gcccccctttcttatcttgca

SEQ ID NO: 257369 - DNA, 21 bp, Artificial sequence
  SiRNA target sequence
cccccctttcttatcttgcaa

SEQ ID NO: 257370 - DNA, 21 bp, Artificial sequence
  SiRNA target sequence
ccccctttcttatcttgcaag

SEQ ID NO: 257371 - DNA, 21 bp, Artificial sequence
  SiRNA target sequence
cccctttcttatcttgcaagt

SEQ ID NO: 257372 - DNA, 21 bp, Artificial sequence
  SiRNA target sequence
ccctttcttatcttgcaagta

SEQ ID NO: 257373 - DNA, 21 bp, Artificial sequence
  SiRNA target sequence
cctttcttatcttgcaagtat

SEQ ID NO: 257374 - DNA, 21 bp, Artificial sequence
  SiRNA target sequence
ctttcttatcttgcaagtatg

SEQ ID NO: 257375 - DNA, 21 bp, Artificial sequence
  SiRNA target sequence
tttcttatcttgcaagtatgc

SEQ ID NO: 257376 - DNA, 21 bp, Artificial sequence
  SiRNA target sequence
ttcttatcttgcaagtatgcg

SEQ ID NO: 257377 - DNA, 21 bp, Artificial sequence
  SiRNA target sequence
tcttatcttgcaagtatgcga

SEQ ID NO: 257378 - DNA, 21 bp, Artificial sequence
  SiRNA target sequence
cttatcttgcaagtatgcgag

SEQ ID NO: 257379 - DNA, 21 bp, Artificial sequence
  SiRNA target sequence
ttatcttgcaagtatgcgagc

SEQ ID NO: 257380 - DNA, 21 bp, Artificial sequence
  SiRNA target sequence
tatcttgcaagtatgcgagca

SEQ ID NO: 257381 - DNA, 21 bp, Artificial sequence
  SiRNA target sequence
atcttgcaagtatgcgagcaa

SEQ ID NO: 257382 - DNA, 21 bp, Artificial sequence
  SiRNA target sequence
tcttgcaagtatgcgagcaat

SEQ ID NO: 257383 - DNA, 21 bp, Artificial sequence
  SiRNA target sequence
cttgcaagtatgcgagcaatt

SEQ ID NO: 257384 - DNA, 21 bp, Artificial sequence
  SiRNA target sequence
ttgcaagtatgcgagcaatta

SEQ ID NO: 257385 - DNA, 21 bp, Artificial sequence
  SiRNA target sequence
tgcaagtatgcgagcaattac

SEQ ID NO: 257386 - DNA, 21 bp, Artificial sequence
  SiRNA target sequence
gcaagtatgcgagcaattact

SEQ ID NO: 257387 - DNA, 21 bp, Artificial sequence
  SiRNA target sequence
caagtatgcgagcaattacta

SEQ ID NO: 257388 - DNA, 21 bp, Artificial sequence
  SiRNA target sequence
aagtatgcgagcaattactat

SEQ ID NO: 257389 - DNA, 21 bp, Artificial sequence
  SiRNA target sequence
agtatgcgagcaattactatg

SEQ ID NO: 257390 - DNA, 21 bp, Artificial sequence
  SiRNA target sequence
gtatgcgagcaattactatgg

SEQ ID NO: 257391 - DNA, 21 bp, Artificial sequence
  SiRNA target sequence
tatgcgagcaattactatgga

SEQ ID NO: 257392 - DNA, 21 bp, Artificial sequence
  SiRNA target sequence
atgcgagcaattactatggat

SEQ ID NO: 257393 - DNA, 21 bp, Artificial sequence
  SiRNA target sequence
tgcgagcaattactatggatg

SEQ ID NO: 257394 - DNA, 21 bp, Artificial sequence
  SiRNA target sequence
gcgagcaattactatggatga

SEQ ID NO: 257395 - DNA, 21 bp, Artificial sequence
  SiRNA target sequence
cgagcaattactatggatgaa

SEQ ID NO: 257396 - DNA, 21 bp, Artificial sequence
  SiRNA target sequence
gagcaattactatggatgaag

SEQ ID NO: 257397 - DNA, 21 bp, Artificial sequence
  SiRNA target sequence
agcaattactatggatgaaga

SEQ ID NO: 257398 - DNA, 21 bp, Artificial sequence
  SiRNA target sequence
gcaattactatggatgaagag

SEQ ID NO: 257399 - DNA, 21 bp, Artificial sequence
  SiRNA target sequence
caattactatggatgaagagc

SEQ ID NO: 257400 - DNA, 21 bp, Artificial sequence
  SiRNA target sequence
aattactatggatgaagagca

SEQ ID NO: 257401 - DNA, 21 bp, Artificial sequence
  SiRNA target sequence
attactatggatgaagagcaa

SEQ ID NO: 257402 - DNA, 21 bp, Artificial sequence
  SiRNA target sequence
ttactatggatgaagagcaag

SEQ ID NO: 257403 - DNA, 21 bp, Artificial sequence
  SiRNA target sequence
tactatggatgaagagcaaga

SEQ ID NO: 257404 - DNA, 21 bp, Artificial sequence
  SiRNA target sequence
actatggatgaagagcaagaa

SEQ ID NO: 257405 - DNA, 21 bp, Artificial sequence
  SiRNA target sequence
ctatggatgaagagcaagaat

SEQ ID NO: 257406 - DNA, 21 bp, Artificial sequence
  SiRNA target sequence
tatggatgaagagcaagaata

SEQ ID NO: 257407 - DNA, 21 bp, Artificial sequence
  SiRNA target sequence
atggatgaagagcaagaatat

SEQ ID NO: 257408 - DNA, 21 bp, Artificial sequence
  SiRNA target sequence
tggatgaagagcaagaatatt

SEQ ID NO: 257409 - DNA, 21 bp, Artificial sequence
  SiRNA target sequence
ggatgaagagcaagaatattt

SEQ ID NO: 257410 - DNA, 21 bp, Artificial sequence
  SiRNA target sequence
gatgaagagcaagaatatttt

SEQ ID NO: 257411 - DNA, 21 bp, Artificial sequence
  SiRNA target sequence
atgaagagcaagaatattttc

SEQ ID NO: 257412 - DNA, 21 bp, Artificial sequence
  SiRNA target sequence
tgaagagcaagaatattttct

SEQ ID NO: 257413 - DNA, 21 bp, Artificial sequence
  SiRNA target sequence
gaagagcaagaatattttctt

SEQ ID NO: 257414 - DNA, 21 bp, Artificial sequence
  SiRNA target sequence
aagagcaagaatattttctta

SEQ ID NO: 257415 - DNA, 21 bp, Artificial sequence
  SiRNA target sequence
agagcaagaatattttcttac

SEQ ID NO: 257416 - DNA, 21 bp, Artificial sequence
  SiRNA target sequence
gagcaagaatattttcttact

SEQ ID NO: 257417 - DNA, 21 bp, Artificial sequence
  SiRNA target sequence
agcaagaatattttcttactc

SEQ ID NO: 257418 - DNA, 21 bp, Artificial sequence
  SiRNA target sequence
gcaagaatattttcttactct

SEQ ID NO: 257419 - DNA, 21 bp, Artificial sequence
  SiRNA target sequence
caagaatattttcttactcta

SEQ ID NO: 257420 - DNA, 21 bp, Artificial sequence
  SiRNA target sequence
aagaatattttcttactctaa

SEQ ID NO: 257421 - DNA, 21 bp, Artificial sequence
  SiRNA target sequence
agaatattttcttactctaaa

SEQ ID NO: 257422 - DNA, 21 bp, Artificial sequence
  SiRNA target sequence
gaatattttcttactctaaag

SEQ ID NO: 257423 - DNA, 21 bp, Artificial sequence
  SiRNA target sequence
aatattttcttactctaaagt

SEQ ID NO: 257424 - DNA, 21 bp, Artificial sequence
  SiRNA target sequence
atattttcttactctaaagtc

SEQ ID NO: 257425 - DNA, 21 bp, Artificial sequence
  SiRNA target sequence
tattttcttactctaaagtct

SEQ ID NO: 257426 - DNA, 21 bp, Artificial sequence
  SiRNA target sequence
attttcttactctaaagtctg

SEQ ID NO: 257427 - DNA, 21 bp, Artificial sequence
  SiRNA target sequence
ttttcttactctaaagtctgt

SEQ ID NO: 257428 - DNA, 21 bp, Artificial sequence
  SiRNA target sequence
tttcttactctaaagtctgta

SEQ ID NO: 257429 - DNA, 21 bp, Artificial sequence
  SiRNA target sequence
ttcttactctaaagtctgtag

SEQ ID NO: 257430 - DNA, 21 bp, Artificial sequence
  SiRNA target sequence
tcttactctaaagtctgtaga

SEQ ID NO: 257431 - DNA, 21 bp, Artificial sequence
  SiRNA target sequence
cttactctaaagtctgtagaa

SEQ ID NO: 257432 - DNA, 21 bp, Artificial sequence
  SiRNA target sequence
ttactctaaagtctgtagaaa

SEQ ID NO: 257433 - DNA, 21 bp, Artificial sequence
  SiRNA target sequence
tactctaaagtctgtagaaag

SEQ ID NO: 257434 - DNA, 21 bp, Artificial sequence
  SiRNA target sequence
actctaaagtctgtagaaaga

SEQ ID NO: 257435 - DNA, 21 bp, Artificial sequence
  SiRNA target sequence
ctctaaagtctgtagaaagag

SEQ ID NO: 257436 - DNA, 21 bp, Artificial sequence
  SiRNA target sequence
tctaaagtctgtagaaagagc

SEQ ID NO: 257437 - DNA, 21 bp, Artificial sequence
  SiRNA target sequence
ctaaagtctgtagaaagagct

SEQ ID NO: 257438 - DNA, 21 bp, Artificial sequence
  SiRNA target sequence
taaagtctgtagaaagagctc

SEQ ID NO: 257439 - DNA, 21 bp, Artificial sequence
  SiRNA target sequence
aaagtctgtagaaagagctca

SEQ ID NO: 257440 - DNA, 21 bp, Artificial sequence
  SiRNA target sequence
aagtctgtagaaagagctcaa

SEQ ID NO: 257441 - DNA, 21 bp, Artificial sequence
  SiRNA target sequence
agtctgtagaaagagctcaaa

SEQ ID NO: 257442 - DNA, 21 bp, Artificial sequence
  SiRNA target sequence
gtctgtagaaagagctcaaat

SEQ ID NO: 257443 - DNA, 21 bp, Artificial sequence
  SiRNA target sequence
tctgtagaaagagctcaaata

SEQ ID NO: 257444 - DNA, 21 bp, Artificial sequence
  SiRNA target sequence
ctgtagaaagagctcaaatat

SEQ ID NO: 257445 - DNA, 21 bp, Artificial sequence
  SiRNA target sequence
tgtagaaagagctcaaatatt

SEQ ID NO: 257446 - DNA, 21 bp, Artificial sequence
  SiRNA target sequence
gtagaaagagctcaaatattg

SEQ ID NO: 257447 - DNA, 21 bp, Artificial sequence
  SiRNA target sequence
tagaaagagctcaaatattga

SEQ ID NO: 257448 - DNA, 21 bp, Artificial sequence
  SiRNA target sequence
agaaagagctcaaatattgaa

SEQ ID NO: 257449 - DNA, 21 bp, Artificial sequence
  SiRNA target sequence
gaaagagctcaaatattgaag

SEQ ID NO: 257450 - DNA, 21 bp, Artificial sequence
  SiRNA target sequence
aaagagctcaaatattgaaga

SEQ ID NO: 257451 - DNA, 21 bp, Artificial sequence
  SiRNA target sequence
aagagctcaaatattgaagat

SEQ ID NO: 257452 - DNA, 21 bp, Artificial sequence
  SiRNA target sequence
agagctcaaatattgaagatg

SEQ ID NO: 257453 - DNA, 21 bp, Artificial sequence
  SiRNA target sequence
gagctcaaatattgaagatgg

SEQ ID NO: 257454 - DNA, 21 bp, Artificial sequence
  SiRNA target sequence
agctcaaatattgaagatggt

SEQ ID NO: 257455 - DNA, 21 bp, Artificial sequence
  SiRNA target sequence
gctcaaatattgaagatggtt

SEQ ID NO: 257456 - DNA, 21 bp, Artificial sequence
  SiRNA target sequence
ctcaaatattgaagatggttt

SEQ ID NO: 257457 - DNA, 21 bp, Artificial sequence
  SiRNA target sequence
tcaaatattgaagatggttta

SEQ ID NO: 257458 - DNA, 21 bp, Artificial sequence
  SiRNA target sequence
caaatattgaagatggtttat

SEQ ID NO: 257459 - DNA, 21 bp, Artificial sequence
  SiRNA target sequence
aaatattgaagatggtttatg

SEQ ID NO: 257460 - DNA, 21 bp, Artificial sequence
  SiRNA target sequence
aatattgaagatggtttatgt

SEQ ID NO: 257461 - DNA, 21 bp, Artificial sequence
  SiRNA target sequence
atattgaagatggtttatgtg

SEQ ID NO: 257462 - DNA, 21 bp, Artificial sequence
  SiRNA target sequence
tattgaagatggtttatgtgg

SEQ ID NO: 257463 - DNA, 21 bp, Artificial sequence
  SiRNA target sequence
attgaagatggtttatgtgga

SEQ ID NO: 257464 - DNA, 21 bp, Artificial sequence
  SiRNA target sequence
ttgaagatggtttatgtggac

SEQ ID NO: 257465 - DNA, 21 bp, Artificial sequence
  SiRNA target sequence
tgaagatggtttatgtggacc

SEQ ID NO: 257466 - DNA, 21 bp, Artificial sequence
  SiRNA target sequence
gaagatggtttatgtggacca

SEQ ID NO: 257467 - DNA, 21 bp, Artificial sequence
  SiRNA target sequence
aagatggtttatgtggaccaa

SEQ ID NO: 257468 - DNA, 21 bp, Artificial sequence
  SiRNA target sequence
agatggtttatgtggaccaaa

SEQ ID NO: 257469 - DNA, 21 bp, Artificial sequence
  SiRNA target sequence
gatggtttatgtggaccaaaa

SEQ ID NO: 257470 - DNA, 21 bp, Artificial sequence
  SiRNA target sequence
atggtttatgtggaccaaaat

SEQ ID NO: 257471 - DNA, 21 bp, Artificial sequence
  SiRNA target sequence
tggtttatgtggaccaaaatt

SEQ ID NO: 257472 - DNA, 21 bp, Artificial sequence
  SiRNA target sequence
ggtttatgtggaccaaaattg

SEQ ID NO: 257473 - DNA, 21 bp, Artificial sequence
  SiRNA target sequence
gtttatgtggaccaaaattga

SEQ ID NO: 257474 - DNA, 21 bp, Artificial sequence
  SiRNA target sequence
tttatgtggaccaaaattgat

SEQ ID NO: 257475 - DNA, 21 bp, Artificial sequence
  SiRNA target sequence
ttatgtggaccaaaattgatt

SEQ ID NO: 257476 - DNA, 21 bp, Artificial sequence
  SiRNA target sequence
tatgtggaccaaaattgattt

SEQ ID NO: 257477 - DNA, 21 bp, Artificial sequence
  SiRNA target sequence
atgtggaccaaaattgatttc

SEQ ID NO: 257478 - DNA, 21 bp, Artificial sequence
  SiRNA target sequence
tgtggaccaaaattgatttct

SEQ ID NO: 257479 - DNA, 21 bp, Artificial sequence
  SiRNA target sequence
gtggaccaaaattgatttctt

SEQ ID NO: 257480 - DNA, 21 bp, Artificial sequence
  SiRNA target sequence
tggaccaaaattgatttcttt

SEQ ID NO: 257481 - DNA, 21 bp, Artificial sequence
  SiRNA target sequence
ggaccaaaattgatttcttta

SEQ ID NO: 257482 - DNA, 21 bp, Artificial sequence
  SiRNA target sequence
gaccaaaattgatttctttat

SEQ ID NO: 257483 - DNA, 21 bp, Artificial sequence
  SiRNA target sequence
accaaaattgatttctttata

SEQ ID NO: 257484 - DNA, 21 bp, Artificial sequence
  SiRNA target sequence
ccaaaattgatttctttatat

SEQ ID NO: 257485 - DNA, 21 bp, Artificial sequence
  SiRNA target sequence
caaaattgatttctttatatt

SEQ ID NO: 257486 - DNA, 21 bp, Artificial sequence
  SiRNA target sequence
aaaattgatttctttatatta

SEQ ID NO: 257487 - DNA, 21 bp, Artificial sequence
  SiRNA target sequence
aaattgatttctttatattac

SEQ ID NO: 257488 - DNA, 21 bp, Artificial sequence
  SiRNA target sequence
aattgatttctttatattaca

SEQ ID NO: 257489 - DNA, 21 bp, Artificial sequence
  SiRNA target sequence
attgatttctttatattacat

SEQ ID NO: 257490 - DNA, 21 bp, Artificial sequence
  SiRNA target sequence
ttgatttctttatattacatc

SEQ ID NO: 257491 - DNA, 21 bp, Artificial sequence
  SiRNA target sequence
tgatttctttatattacatca

SEQ ID NO: 257492 - DNA, 21 bp, Artificial sequence
  SiRNA target sequence
gatttctttatattacatcaa

SEQ ID NO: 257493 - DNA, 21 bp, Artificial sequence
  SiRNA target sequence
atttctttatattacatcaag

SEQ ID NO: 257494 - DNA, 21 bp, Artificial sequence
  SiRNA target sequence
tttctttatattacatcaaga

SEQ ID NO: 257495 - DNA, 21 bp, Artificial sequence
  SiRNA target sequence
ttctttatattacatcaagat

SEQ ID NO: 257496 - DNA, 21 bp, Artificial sequence
  SiRNA target sequence
tctttatattacatcaagata

SEQ ID NO: 257497 - DNA, 21 bp, Artificial sequence
  SiRNA target sequence
ctttatattacatcaagatat

SEQ ID NO: 257498 - DNA, 21 bp, Artificial sequence
  SiRNA target sequence
tttatattacatcaagatatc

SEQ ID NO: 257499 - DNA, 21 bp, Artificial sequence
  SiRNA target sequence
ttatattacatcaagatatca

SEQ ID NO: 257500 - DNA, 21 bp, Artificial sequence
  SiRNA target sequence
tatattacatcaagatatcaa

SEQ ID NO: 257501 - DNA, 21 bp, Artificial sequence
  SiRNA target sequence
atattacatcaagatatcaat

SEQ ID NO: 257502 - DNA, 21 bp, Artificial sequence
  SiRNA target sequence
tattacatcaagatatcaatt

SEQ ID NO: 257503 - DNA, 21 bp, Artificial sequence
  SiRNA target sequence
attacatcaagatatcaattg

SEQ ID NO: 257504 - DNA, 21 bp, Artificial sequence
  SiRNA target sequence
ttacatcaagatatcaattgt

SEQ ID NO: 257505 - DNA, 21 bp, Artificial sequence
  SiRNA target sequence
tacatcaagatatcaattgta

SEQ ID NO: 257506 - DNA, 21 bp, Artificial sequence
  SiRNA target sequence
acatcaagatatcaattgtac

SEQ ID NO: 257507 - DNA, 21 bp, Artificial sequence
  SiRNA target sequence
catcaagatatcaattgtacc

SEQ ID NO: 257508 - DNA, 21 bp, Artificial sequence
  SiRNA target sequence
atcaagatatcaattgtaccg

SEQ ID NO: 257509 - DNA, 21 bp, Artificial sequence
  SiRNA target sequence
tcaagatatcaattgtaccgg

SEQ ID NO: 257510 - DNA, 21 bp, Artificial sequence
  SiRNA target sequence
caagatatcaattgtaccggt

SEQ ID NO: 257511 - DNA, 21 bp, Artificial sequence
  SiRNA target sequence
aagatatcaattgtaccggtt

SEQ ID NO: 257512 - DNA, 21 bp, Artificial sequence
  SiRNA target sequence
agatatcaattgtaccggttt

SEQ ID NO: 257513 - DNA, 21 bp, Artificial sequence
  SiRNA target sequence
gatatcaattgtaccggtttt

SEQ ID NO: 257514 - DNA, 21 bp, Artificial sequence
  SiRNA target sequence
atatcaattgtaccggtttta

SEQ ID NO: 257515 - DNA, 21 bp, Artificial sequence
  SiRNA target sequence
tatcaattgtaccggttttac

SEQ ID NO: 257516 - DNA, 21 bp, Artificial sequence
  SiRNA target sequence
atcaattgtaccggttttaca

SEQ ID NO: 257517 - DNA, 21 bp, Artificial sequence
  SiRNA target sequence
tcaattgtaccggttttacat

SEQ ID NO: 257518 - DNA, 21 bp, Artificial sequence
  SiRNA target sequence
caattgtaccggttttacatt

SEQ ID NO: 257519 - DNA, 21 bp, Artificial sequence
  SiRNA target sequence
aattgtaccggttttacatta

SEQ ID NO: 257520 - DNA, 21 bp, Artificial sequence
  SiRNA target sequence
attgtaccggttttacattaa

SEQ ID NO: 257521 - DNA, 21 bp, Artificial sequence
  SiRNA target sequence
ttgtaccggttttacattaac

SEQ ID NO: 257522 - DNA, 21 bp, Artificial sequence
  SiRNA target sequence
tgtaccggttttacattaact

SEQ ID NO: 257523 - DNA, 21 bp, Artificial sequence
  SiRNA target sequence
gtaccggttttacattaacta

SEQ ID NO: 257524 - DNA, 21 bp, Artificial sequence
  SiRNA target sequence
taccggttttacattaactat

SEQ ID NO: 257525 - DNA, 21 bp, Artificial sequence
  SiRNA target sequence
accggttttacattaactata

SEQ ID NO: 257526 - DNA, 21 bp, Artificial sequence
  SiRNA target sequence
ccggttttacattaactatag

SEQ ID NO: 257527 - DNA, 21 bp, Artificial sequence
  SiRNA target sequence
cggttttacattaactatagt

SEQ ID NO: 257528 - DNA, 21 bp, Artificial sequence
  SiRNA target sequence
ggttttacattaactatagta

SEQ ID NO: 257529 - DNA, 21 bp, Artificial sequence
  SiRNA target sequence
gttttacattaactatagtag

SEQ ID NO: 257530 - DNA, 21 bp, Artificial sequence
  SiRNA target sequence
ttttacattaactatagtaga

SEQ ID NO: 257531 - DNA, 21 bp, Artificial sequence
  SiRNA target sequence
tttacattaactatagtagat

SEQ ID NO: 257532 - DNA, 21 bp, Artificial sequence
  SiRNA target sequence
ttacattaactatagtagata

SEQ ID NO: 257533 - DNA, 21 bp, Artificial sequence
  SiRNA target sequence
tacattaactatagtagataa

SEQ ID NO: 257534 - DNA, 21 bp, Artificial sequence
  SiRNA target sequence
acattaactatagtagataag

SEQ ID NO: 257535 - DNA, 21 bp, Artificial sequence
  SiRNA target sequence
cattaactatagtagataagg

SEQ ID NO: 257536 - DNA, 21 bp, Artificial sequence
  SiRNA target sequence
attaactatagtagataagga

SEQ ID NO: 257537 - DNA, 21 bp, Artificial sequence
  SiRNA target sequence
ttaactatagtagataaggat

SEQ ID NO: 257538 - DNA, 21 bp, Artificial sequence
  SiRNA target sequence
taactatagtagataaggatg

SEQ ID NO: 257539 - DNA, 21 bp, Artificial sequence
  SiRNA target sequence
aactatagtagataaggatga

SEQ ID NO: 257540 - DNA, 21 bp, Artificial sequence
  SiRNA target sequence
actatagtagataaggatgaa

SEQ ID NO: 257541 - DNA, 21 bp, Artificial sequence
  SiRNA target sequence
ctatagtagataaggatgaaa

SEQ ID NO: 257542 - DNA, 21 bp, Artificial sequence
  SiRNA target sequence
tatagtagataaggatgaaag

SEQ ID NO: 257543 - DNA, 21 bp, Artificial sequence
  SiRNA target sequence
atagtagataaggatgaaaga

SEQ ID NO: 257544 - DNA, 21 bp, Artificial sequence
  SiRNA target sequence
tagtagataaggatgaaagaa

SEQ ID NO: 257545 - DNA, 21 bp, Artificial sequence
  SiRNA target sequence
agtagataaggatgaaagaac

SEQ ID NO: 257546 - DNA, 21 bp, Artificial sequence
  SiRNA target sequence
gtagataaggatgaaagaaca

SEQ ID NO: 257547 - DNA, 21 bp, Artificial sequence
  SiRNA target sequence
tagataaggatgaaagaacaa

SEQ ID NO: 257548 - DNA, 21 bp, Artificial sequence
  SiRNA target sequence
agataaggatgaaagaacaaa

SEQ ID NO: 257549 - DNA, 21 bp, Artificial sequence
  SiRNA target sequence
gataaggatgaaagaacaaag

SEQ ID NO: 257550 - DNA, 21 bp, Artificial sequence
  SiRNA target sequence
ataaggatgaaagaacaaagg

SEQ ID NO: 257551 - DNA, 21 bp, Artificial sequence
  SiRNA target sequence
taaggatgaaagaacaaagga

SEQ ID NO: 257552 - DNA, 21 bp, Artificial sequence
  SiRNA target sequence
aaggatgaaagaacaaaggac

SEQ ID NO: 257553 - DNA, 21 bp, Artificial sequence
  SiRNA target sequence
aggatgaaagaacaaaggacc

SEQ ID NO: 257554 - DNA, 21 bp, Artificial sequence
  SiRNA target sequence
ggatgaaagaacaaaggacct

SEQ ID NO: 257555 - DNA, 21 bp, Artificial sequence
  SiRNA target sequence
gatgaaagaacaaaggacctc

SEQ ID NO: 257556 - DNA, 21 bp, Artificial sequence
  SiRNA target sequence
atgaaagaacaaaggacctcg

SEQ ID NO: 257557 - DNA, 21 bp, Artificial sequence
  SiRNA target sequence
tgaaagaacaaaggacctcga

SEQ ID NO: 257558 - DNA, 21 bp, Artificial sequence
  SiRNA target sequence
gaaagaacaaaggacctcgag

SEQ ID NO: 257559 - DNA, 21 bp, Artificial sequence
  SiRNA target sequence
aaagaacaaaggacctcgagt

SEQ ID NO: 257560 - DNA, 21 bp, Artificial sequence
  SiRNA target sequence
aagaacaaaggacctcgagta

SEQ ID NO: 257561 - DNA, 21 bp, Artificial sequence
  SiRNA target sequence
agaacaaaggacctcgagtat

SEQ ID NO: 257562 - DNA, 21 bp, Artificial sequence
  SiRNA target sequence
gaacaaaggacctcgagtatt

SEQ ID NO: 257563 - DNA, 21 bp, Artificial sequence
  SiRNA target sequence
aacaaaggacctcgagtattt

SEQ ID NO: 257564 - DNA, 21 bp, Artificial sequence
  SiRNA target sequence
acaaaggacctcgagtatttt

SEQ ID NO: 257565 - DNA, 21 bp, Artificial sequence
  SiRNA target sequence
caaaggacctcgagtattttg

SEQ ID NO: 257566 - DNA, 21 bp, Artificial sequence
  SiRNA target sequence
aaaggacctcgagtattttga

SEQ ID NO: 257567 - DNA, 21 bp, Artificial sequence
  SiRNA target sequence
aaggacctcgagtattttgac

SEQ ID NO: 257568 - DNA, 21 bp, Artificial sequence
  SiRNA target sequence
aggacctcgagtattttgacc

SEQ ID NO: 257569 - DNA, 21 bp, Artificial sequence
  SiRNA target sequence
ggacctcgagtattttgacct

SEQ ID NO: 257570 - DNA, 21 bp, Artificial sequence
  SiRNA target sequence
gacctcgagtattttgacctt

SEQ ID NO: 257571 - DNA, 21 bp, Artificial sequence
  SiRNA target sequence
acctcgagtattttgacctta

SEQ ID NO: 257572 - DNA, 21 bp, Artificial sequence
  SiRNA target sequence
cctcgagtattttgaccttaa

SEQ ID NO: 257573 - DNA, 21 bp, Artificial sequence
  SiRNA target sequence
ctcgagtattttgaccttaat

SEQ ID NO: 257574 - DNA, 21 bp, Artificial sequence
  SiRNA target sequence
tcgagtattttgaccttaatt

SEQ ID NO: 257575 - DNA, 21 bp, Artificial sequence
  SiRNA target sequence
cgagtattttgaccttaattg

SEQ ID NO: 257576 - DNA, 21 bp, Artificial sequence
  SiRNA target sequence
gagtattttgaccttaattgt

SEQ ID NO: 257577 - DNA, 21 bp, Artificial sequence
  SiRNA target sequence
agtattttgaccttaattgtg

SEQ ID NO: 257578 - DNA, 21 bp, Artificial sequence
  SiRNA target sequence
gtattttgaccttaattgtga

SEQ ID NO: 257579 - DNA, 21 bp, Artificial sequence
  SiRNA target sequence
tattttgaccttaattgtgag

SEQ ID NO: 257580 - DNA, 21 bp, Artificial sequence
  SiRNA target sequence
attttgaccttaattgtgagt

SEQ ID NO: 257581 - DNA, 21 bp, Artificial sequence
  SiRNA target sequence
ttttgaccttaattgtgagta

SEQ ID NO: 257582 - DNA, 21 bp, Artificial sequence
  SiRNA target sequence
tttgaccttaattgtgagtat

SEQ ID NO: 257583 - DNA, 21 bp, Artificial sequence
  SiRNA target sequence
ttgaccttaattgtgagtatt

SEQ ID NO: 257584 - DNA, 21 bp, Artificial sequence
  SiRNA target sequence
tgaccttaattgtgagtatta

SEQ ID NO: 257585 - DNA, 21 bp, Artificial sequence
  SiRNA target sequence
gaccttaattgtgagtattat

SEQ ID NO: 257586 - DNA, 21 bp, Artificial sequence
  SiRNA target sequence
accttaattgtgagtattatg

SEQ ID NO: 257587 - DNA, 21 bp, Artificial sequence
  SiRNA target sequence
ccttaattgtgagtattatga

SEQ ID NO: 257588 - DNA, 21 bp, Artificial sequence
  SiRNA target sequence
cttaattgtgagtattatgag

SEQ ID NO: 257589 - DNA, 21 bp, Artificial sequence
  SiRNA target sequence
ttaattgtgagtattatgaga

SEQ ID NO: 257590 - DNA, 21 bp, Artificial sequence
  SiRNA target sequence
taattgtgagtattatgagaa

SEQ ID NO: 257591 - DNA, 21 bp, Artificial sequence
  SiRNA target sequence
aattgtgagtattatgagaat

SEQ ID NO: 257592 - DNA, 21 bp, Artificial sequence
  SiRNA target sequence
attgtgagtattatgagaatt

SEQ ID NO: 257593 - DNA, 21 bp, Artificial sequence
  SiRNA target sequence
ttgtgagtattatgagaattt

SEQ ID NO: 257594 - DNA, 21 bp, Artificial sequence
  SiRNA target sequence
tgtgagtattatgagaatttg

SEQ ID NO: 257595 - DNA, 21 bp, Artificial sequence
  SiRNA target sequence
gtgagtattatgagaatttgt

SEQ ID NO: 257596 - DNA, 21 bp, Artificial sequence
  SiRNA target sequence
tgagtattatgagaatttgta

SEQ ID NO: 257597 - DNA, 21 bp, Artificial sequence
  SiRNA target sequence
gagtattatgagaatttgtat

SEQ ID NO: 257598 - DNA, 21 bp, Artificial sequence
  SiRNA target sequence
agtattatgagaatttgtatg

SEQ ID NO: 257599 - DNA, 21 bp, Artificial sequence
  SiRNA target sequence
gtattatgagaatttgtatga

SEQ ID NO: 257600 - DNA, 21 bp, Artificial sequence
  SiRNA target sequence
tattatgagaatttgtatgat

SEQ ID NO: 257601 - DNA, 21 bp, Artificial sequence
  SiRNA target sequence
attatgagaatttgtatgatg

SEQ ID NO: 257602 - DNA, 21 bp, Artificial sequence
  SiRNA target sequence
ttatgagaatttgtatgatgc

SEQ ID NO: 257603 - DNA, 21 bp, Artificial sequence
  SiRNA target sequence
tatgagaatttgtatgatgca

SEQ ID NO: 257604 - DNA, 21 bp, Artificial sequence
  SiRNA target sequence
atgagaatttgtatgatgcat

SEQ ID NO: 257605 - DNA, 21 bp, Artificial sequence
  SiRNA target sequence
tgagaatttgtatgatgcatt

SEQ ID NO: 257606 - DNA, 21 bp, Artificial sequence
  SiRNA target sequence
gagaatttgtatgatgcatta

SEQ ID NO: 257607 - DNA, 21 bp, Artificial sequence
  SiRNA target sequence
agaatttgtatgatgcattaa

SEQ ID NO: 257608 - DNA, 21 bp, Artificial sequence
  SiRNA target sequence
gaatttgtatgatgcattaat

SEQ ID NO: 257609 - DNA, 21 bp, Artificial sequence
  SiRNA target sequence
aatttgtatgatgcattaatg

SEQ ID NO: 257610 - DNA, 21 bp, Artificial sequence
  SiRNA target sequence
atttgtatgatgcattaatgg

SEQ ID NO: 257611 - DNA, 21 bp, Artificial sequence
  SiRNA target sequence
tttgtatgatgcattaatgga

SEQ ID NO: 257612 - DNA, 21 bp, Artificial sequence
  SiRNA target sequence
ttgtatgatgcattaatggat

SEQ ID NO: 257613 - DNA, 21 bp, Artificial sequence
  SiRNA target sequence
tgtatgatgcattaatggatt

SEQ ID NO: 257614 - DNA, 21 bp, Artificial sequence
  SiRNA target sequence
gtatgatgcattaatggattc

SEQ ID NO: 257615 - DNA, 21 bp, Artificial sequence
  SiRNA target sequence
tatgatgcattaatggattct

SEQ ID NO: 257616 - DNA, 21 bp, Artificial sequence
  SiRNA target sequence
atgatgcattaatggattctg

SEQ ID NO: 257617 - DNA, 21 bp, Artificial sequence
  SiRNA target sequence
tgatgcattaatggattctga

SEQ ID NO: 257618 - DNA, 21 bp, Artificial sequence
  SiRNA target sequence
gatgcattaatggattctgag

SEQ ID NO: 257619 - DNA, 21 bp, Artificial sequence
  SiRNA target sequence
atgcattaatggattctgagt

SEQ ID NO: 257620 - DNA, 21 bp, Artificial sequence
  SiRNA target sequence
tgcattaatggattctgagtt

SEQ ID NO: 257621 - DNA, 21 bp, Artificial sequence
  SiRNA target sequence
gcattaatggattctgagttt

SEQ ID NO: 257622 - DNA, 21 bp, Artificial sequence
  SiRNA target sequence
cattaatggattctgagtttt

SEQ ID NO: 257623 - DNA, 21 bp, Artificial sequence
  SiRNA target sequence
attaatggattctgagttttc

SEQ ID NO: 257624 - DNA, 21 bp, Artificial sequence
  SiRNA target sequence
ttaatggattctgagttttct

SEQ ID NO: 257625 - DNA, 21 bp, Artificial sequence
  SiRNA target sequence
taatggattctgagttttcta

SEQ ID NO: 257626 - DNA, 21 bp, Artificial sequence
  SiRNA target sequence
aatggattctgagttttctaa

SEQ ID NO: 257627 - DNA, 21 bp, Artificial sequence
  SiRNA target sequence
atggattctgagttttctaaa

SEQ ID NO: 257628 - DNA, 21 bp, Artificial sequence
  SiRNA target sequence
tggattctgagttttctaaaa

SEQ ID NO: 257629 - DNA, 21 bp, Artificial sequence
  SiRNA target sequence
ggattctgagttttctaaaac

SEQ ID NO: 257630 - DNA, 21 bp, Artificial sequence
  SiRNA target sequence
gattctgagttttctaaaact

SEQ ID NO: 257631 - DNA, 21 bp, Artificial sequence
  SiRNA target sequence
attctgagttttctaaaactt

SEQ ID NO: 257632 - DNA, 21 bp, Artificial sequence
  SiRNA target sequence
ttctgagttttctaaaacttg

SEQ ID NO: 257633 - DNA, 21 bp, Artificial sequence
  SiRNA target sequence
tctgagttttctaaaacttgg

SEQ ID NO: 257634 - DNA, 21 bp, Artificial sequence
  SiRNA target sequence
ctgagttttctaaaacttggt

SEQ ID NO: 257635 - DNA, 21 bp, Artificial sequence
  SiRNA target sequence
tgagttttctaaaacttggtt

SEQ ID NO: 257636 - DNA, 21 bp, Artificial sequence
  SiRNA target sequence
gagttttctaaaacttggttt

SEQ ID NO: 257637 - DNA, 21 bp, Artificial sequence
  SiRNA target sequence
agttttctaaaacttggttta

SEQ ID NO: 257638 - DNA, 21 bp, Artificial sequence
  SiRNA target sequence
gttttctaaaacttggtttac

SEQ ID NO: 257639 - DNA, 21 bp, Artificial sequence
  SiRNA target sequence
ttttctaaaacttggtttaca

SEQ ID NO: 257640 - DNA, 21 bp, Artificial sequence
  SiRNA target sequence
tttctaaaacttggtttacat

SEQ ID NO: 257641 - DNA, 21 bp, Artificial sequence
  SiRNA target sequence
ttctaaaacttggtttacatt

SEQ ID NO: 257642 - DNA, 21 bp, Artificial sequence
  SiRNA target sequence
tctaaaacttggtttacattg

SEQ ID NO: 257643 - DNA, 21 bp, Artificial sequence
  SiRNA target sequence
ctaaaacttggtttacattgt

SEQ ID NO: 257644 - DNA, 21 bp, Artificial sequence
  SiRNA target sequence
taaaacttggtttacattgtt

SEQ ID NO: 257645 - DNA, 21 bp, Artificial sequence
  SiRNA target sequence
aaaacttggtttacattgttg

SEQ ID NO: 257646 - DNA, 21 bp, Artificial sequence
  SiRNA target sequence
aaacttggtttacattgttgc

SEQ ID NO: 257647 - DNA, 21 bp, Artificial sequence
  SiRNA target sequence
aacttggtttacattgttgct

SEQ ID NO: 257648 - DNA, 21 bp, Artificial sequence
  SiRNA target sequence
acttggtttacattgttgcta

SEQ ID NO: 257649 - DNA, 21 bp, Artificial sequence
  SiRNA target sequence
cttggtttacattgttgctaa

SEQ ID NO: 257650 - DNA, 21 bp, Artificial sequence
  SiRNA target sequence
ttggtttacattgttgctaaa

SEQ ID NO: 257651 - DNA, 21 bp, Artificial sequence
  SiRNA target sequence
tggtttacattgttgctaaaa

SEQ ID NO: 257652 - DNA, 21 bp, Artificial sequence
  SiRNA target sequence
ggtttacattgttgctaaaat

SEQ ID NO: 257653 - DNA, 21 bp, Artificial sequence
  SiRNA target sequence
gtttacattgttgctaaaata

SEQ ID NO: 257654 - DNA, 21 bp, Artificial sequence
  SiRNA target sequence
tttacattgttgctaaaatat

SEQ ID NO: 257655 - DNA, 21 bp, Artificial sequence
  SiRNA target sequence
ttacattgttgctaaaatata

SEQ ID NO: 257656 - DNA, 21 bp, Artificial sequence
  SiRNA target sequence
tacattgttgctaaaatatat

SEQ ID NO: 257657 - DNA, 21 bp, Artificial sequence
  SiRNA target sequence
acattgttgctaaaatatatt

SEQ ID NO: 257658 - DNA, 21 bp, Artificial sequence
  SiRNA target sequence
cattgttgctaaaatatattg

SEQ ID NO: 257659 - DNA, 21 bp, Artificial sequence
  SiRNA target sequence
attgttgctaaaatatattga

SEQ ID NO: 257660 - DNA, 21 bp, Artificial sequence
  SiRNA target sequence
ttgttgctaaaatatattgat

SEQ ID NO: 257661 - DNA, 21 bp, Artificial sequence
  SiRNA target sequence
tgttgctaaaatatattgatt

SEQ ID NO: 257662 - DNA, 21 bp, Artificial sequence
  SiRNA target sequence
gttgctaaaatatattgatta

SEQ ID NO: 257663 - DNA, 21 bp, Artificial sequence
  SiRNA target sequence
ttgctaaaatatattgattat

SEQ ID NO: 257664 - DNA, 21 bp, Artificial sequence
  SiRNA target sequence
tgctaaaatatattgattatg

SEQ ID NO: 257665 - DNA, 21 bp, Artificial sequence
  SiRNA target sequence
gctaaaatatattgattatgc

SEQ ID NO: 257666 - DNA, 21 bp, Artificial sequence
  SiRNA target sequence
ctaaaatatattgattatgct

SEQ ID NO: 257667 - DNA, 21 bp, Artificial sequence
  SiRNA target sequence
taaaatatattgattatgctc

SEQ ID NO: 257668 - DNA, 21 bp, Artificial sequence
  SiRNA target sequence
aaaatatattgattatgctcc

SEQ ID NO: 257669 - DNA, 21 bp, Artificial sequence
  SiRNA target sequence
aaatatattgattatgctcca

SEQ ID NO: 257670 - DNA, 21 bp, Artificial sequence
  SiRNA target sequence
aatatattgattatgctccaa

SEQ ID NO: 257671 - DNA, 21 bp, Artificial sequence
  SiRNA target sequence
atatattgattatgctccaat

SEQ ID NO: 257672 - DNA, 21 bp, Artificial sequence
  SiRNA target sequence
tatattgattatgctccaatt

SEQ ID NO: 257673 - DNA, 21 bp, Artificial sequence
  SiRNA target sequence
atattgattatgctccaatta

SEQ ID NO: 257674 - DNA, 21 bp, Artificial sequence
  SiRNA target sequence
tattgattatgctccaattag

SEQ ID NO: 257675 - DNA, 21 bp, Artificial sequence
  SiRNA target sequence
attgattatgctccaattagt

SEQ ID NO: 257676 - DNA, 21 bp, Artificial sequence
  SiRNA target sequence
ttgattatgctccaattagta

SEQ ID NO: 257677 - DNA, 21 bp, Artificial sequence
  SiRNA target sequence
tgattatgctccaattagtac

SEQ ID NO: 257678 - DNA, 21 bp, Artificial sequence
  SiRNA target sequence
gattatgctccaattagtacg

SEQ ID NO: 257679 - DNA, 21 bp, Artificial sequence
  SiRNA target sequence
attatgctccaattagtacga

SEQ ID NO: 257680 - DNA, 21 bp, Artificial sequence
  SiRNA target sequence
ttatgctccaattagtacgaa

SEQ ID NO: 257681 - DNA, 21 bp, Artificial sequence
  SiRNA target sequence
tatgctccaattagtacgaac

SEQ ID NO: 257682 - DNA, 21 bp, Artificial sequence
  SiRNA target sequence
atgctccaattagtacgaaca

SEQ ID NO: 257683 - DNA, 21 bp, Artificial sequence
  SiRNA target sequence
tgctccaattagtacgaacag

SEQ ID NO: 257684 - DNA, 21 bp, Artificial sequence
  SiRNA target sequence
gctccaattagtacgaacagt

SEQ ID NO: 257685 - DNA, 21 bp, Artificial sequence
  SiRNA target sequence
ctccaattagtacgaacagtc

SEQ ID NO: 257686 - DNA, 21 bp, Artificial sequence
  SiRNA target sequence
tccaattagtacgaacagtcg

SEQ ID NO: 257687 - DNA, 21 bp, Artificial sequence
  SiRNA target sequence
ccaattagtacgaacagtcga

SEQ ID NO: 257688 - DNA, 21 bp, Artificial sequence
  SiRNA target sequence
caattagtacgaacagtcgag

SEQ ID NO: 257689 - DNA, 21 bp, Artificial sequence
  SiRNA target sequence
aattagtacgaacagtcgagg

SEQ ID NO: 257690 - DNA, 21 bp, Artificial sequence
  SiRNA target sequence
attagtacgaacagtcgagga

SEQ ID NO: 257691 - DNA, 21 bp, Artificial sequence
  SiRNA target sequence
ttagtacgaacagtcgaggaa

SEQ ID NO: 257692 - DNA, 21 bp, Artificial sequence
  SiRNA target sequence
tagtacgaacagtcgaggaat

SEQ ID NO: 257693 - DNA, 21 bp, Artificial sequence
  SiRNA target sequence
agtacgaacagtcgaggaatg

SEQ ID NO: 257694 - DNA, 21 bp, Artificial sequence
  SiRNA target sequence
gtacgaacagtcgaggaatgc

SEQ ID NO: 257695 - DNA, 21 bp, Artificial sequence
  SiRNA target sequence
tacgaacagtcgaggaatgcc

SEQ ID NO: 257696 - DNA, 21 bp, Artificial sequence
  SiRNA target sequence
acgaacagtcgaggaatgccc

SEQ ID NO: 257697 - DNA, 21 bp, Artificial sequence
  SiRNA target sequence
cgaacagtcgaggaatgcccc

SEQ ID NO: 257698 - DNA, 21 bp, Artificial sequence
  SiRNA target sequence
gaacagtcgaggaatgccccg

SEQ ID NO: 257699 - DNA, 21 bp, Artificial sequence
  SiRNA target sequence
aacagtcgaggaatgccccgc

SEQ ID NO: 257700 - DNA, 21 bp, Artificial sequence
  SiRNA target sequence
acagtcgaggaatgccccgcc

SEQ ID NO: 257701 - DNA, 21 bp, Artificial sequence
  SiRNA target sequence
cagtcgaggaatgccccgccc

SEQ ID NO: 257702 - DNA, 21 bp, Artificial sequence
  SiRNA target sequence
agtcgaggaatgccccgcccg

SEQ ID NO: 257703 - DNA, 21 bp, Artificial sequence
  SiRNA target sequence
gtcgaggaatgccccgcccgg

SEQ ID NO: 257704 - DNA, 21 bp, Artificial sequence
  SiRNA target sequence
tcgaggaatgccccgcccgga

SEQ ID NO: 257705 - DNA, 21 bp, Artificial sequence
  SiRNA target sequence
cgaggaatgccccgcccggag

SEQ ID NO: 257706 - DNA, 21 bp, Artificial sequence
  SiRNA target sequence
gaggaatgccccgcccggaga

SEQ ID NO: 257707 - DNA, 21 bp, Artificial sequence
  SiRNA target sequence
aggaatgccccgcccggagac

SEQ ID NO: 257708 - DNA, 21 bp, Artificial sequence
  SiRNA target sequence
ggaatgccccgcccggagacc

SEQ ID NO: 257709 - DNA, 21 bp, Artificial sequence
  SiRNA target sequence
gaatgccccgcccggagacca

SEQ ID NO: 257710 - DNA, 21 bp, Artificial sequence
  SiRNA target sequence
aatgccccgcccggagaccat

SEQ ID NO: 257711 - DNA, 21 bp, Artificial sequence
  SiRNA target sequence
atgccccgcccggagaccatc

SEQ ID NO: 257712 - DNA, 21 bp, Artificial sequence
  SiRNA target sequence
tgccccgcccggagaccatct

SEQ ID NO: 257713 - DNA, 21 bp, Artificial sequence
  SiRNA target sequence
gccccgcccggagaccatctg

SEQ ID NO: 257714 - DNA, 21 bp, Artificial sequence
  SiRNA target sequence
ccccgcccggagaccatctgt

SEQ ID NO: 257715 - DNA, 21 bp, Artificial sequence
  SiRNA target sequence
cccgcccggagaccatctgtg

SEQ ID NO: 257716 - DNA, 21 bp, Artificial sequence
  SiRNA target sequence
ccgcccggagaccatctgtgt

SEQ ID NO: 257717 - DNA, 21 bp, Artificial sequence
  SiRNA target sequence
cgcccggagaccatctgtgtt

SEQ ID NO: 257718 - DNA, 21 bp, Artificial sequence
  SiRNA target sequence
gcccggagaccatctgtgttt

SEQ ID NO: 257719 - DNA, 21 bp, Artificial sequence
  SiRNA target sequence
cccggagaccatctgtgtttc

SEQ ID NO: 257720 - DNA, 21 bp, Artificial sequence
  SiRNA target sequence
ccggagaccatctgtgtttca

SEQ ID NO: 257721 - DNA, 21 bp, Artificial sequence
  SiRNA target sequence
cggagaccatctgtgtttcaa

SEQ ID NO: 257722 - DNA, 21 bp, Artificial sequence
  SiRNA target sequence
ggagaccatctgtgtttcaaa

SEQ ID NO: 257723 - DNA, 21 bp, Artificial sequence
  SiRNA target sequence
gagaccatctgtgtttcaaaa

SEQ ID NO: 257724 - DNA, 21 bp, Artificial sequence
  SiRNA target sequence
agaccatctgtgtttcaaaac

SEQ ID NO: 257725 - DNA, 21 bp, Artificial sequence
  SiRNA target sequence
gaccatctgtgtttcaaaaca

SEQ ID NO: 257726 - DNA, 21 bp, Artificial sequence
  SiRNA target sequence
accatctgtgtttcaaaacat

SEQ ID NO: 257727 - DNA, 21 bp, Artificial sequence
  SiRNA target sequence
ccatctgtgtttcaaaacatt

SEQ ID NO: 257728 - DNA, 21 bp, Artificial sequence
  SiRNA target sequence
catctgtgtttcaaaacattg

SEQ ID NO: 257729 - DNA, 21 bp, Artificial sequence
  SiRNA target sequence
atctgtgtttcaaaacattgg

SEQ ID NO: 257730 - DNA, 21 bp, Artificial sequence
  SiRNA target sequence
tctgtgtttcaaaacattggt

SEQ ID NO: 257731 - DNA, 21 bp, Artificial sequence
  SiRNA target sequence
ctgtgtttcaaaacattggtg

SEQ ID NO: 257732 - DNA, 21 bp, Artificial sequence
  SiRNA target sequence
tgtgtttcaaaacattggtgg

SEQ ID NO: 257733 - DNA, 21 bp, Artificial sequence
  SiRNA target sequence
gtgtttcaaaacattggtggt

SEQ ID NO: 257734 - DNA, 21 bp, Artificial sequence
  SiRNA target sequence
tgtttcaaaacattggtggta

SEQ ID NO: 257735 - DNA, 21 bp, Artificial sequence
  SiRNA target sequence
gtttcaaaacattggtggtat

SEQ ID NO: 257736 - DNA, 21 bp, Artificial sequence
  SiRNA target sequence
tttcaaaacattggtggtatg

SEQ ID NO: 257737 - DNA, 21 bp, Artificial sequence
  SiRNA target sequence
ttcaaaacattggtggtatga

SEQ ID NO: 257738 - DNA, 21 bp, Artificial sequence
  SiRNA target sequence
tcaaaacattggtggtatgag

SEQ ID NO: 257739 - DNA, 21 bp, Artificial sequence
  SiRNA target sequence
caaaacattggtggtatgagt

SEQ ID NO: 257740 - DNA, 21 bp, Artificial sequence
  SiRNA target sequence
aaaacattggtggtatgagtt

SEQ ID NO: 257741 - DNA, 21 bp, Artificial sequence
  SiRNA target sequence
aaacattggtggtatgagtta

SEQ ID NO: 257742 - DNA, 21 bp, Artificial sequence
  SiRNA target sequence
aacattggtggtatgagttat

SEQ ID NO: 257743 - DNA, 21 bp, Artificial sequence
  SiRNA target sequence
acattggtggtatgagttata

SEQ ID NO: 257744 - DNA, 21 bp, Artificial sequence
  SiRNA target sequence
cattggtggtatgagttatat

SEQ ID NO: 257745 - DNA, 21 bp, Artificial sequence
  SiRNA target sequence
attggtggtatgagttatata

SEQ ID NO: 257746 - DNA, 21 bp, Artificial sequence
  SiRNA target sequence
ttggtggtatgagttatatag

SEQ ID NO: 257747 - DNA, 21 bp, Artificial sequence
  SiRNA target sequence
tggtggtatgagttatatagg

SEQ ID NO: 257748 - DNA, 21 bp, Artificial sequence
  SiRNA target sequence
ggtggtatgagttatatagga

SEQ ID NO: 257749 - DNA, 21 bp, Artificial sequence
  SiRNA target sequence
gtggtatgagttatataggat

SEQ ID NO: 257750 - DNA, 21 bp, Artificial sequence
  SiRNA target sequence
tggtatgagttatataggatt

SEQ ID NO: 257751 - DNA, 21 bp, Artificial sequence
  SiRNA target sequence
ggtatgagttatataggattg

SEQ ID NO: 257752 - DNA, 21 bp, Artificial sequence
  SiRNA target sequence
gtatgagttatataggattgg

SEQ ID NO: 257753 - DNA, 21 bp, Artificial sequence
  SiRNA target sequence
tatgagttatataggattgga

SEQ ID NO: 257754 - DNA, 21 bp, Artificial sequence
  SiRNA target sequence
atgagttatataggattggat

SEQ ID NO: 257755 - DNA, 21 bp, Artificial sequence
  SiRNA target sequence
tgagttatataggattggatt

SEQ ID NO: 257756 - DNA, 21 bp, Artificial sequence
  SiRNA target sequence
gagttatataggattggattc

SEQ ID NO: 257757 - DNA, 21 bp, Artificial sequence
  SiRNA target sequence
agttatataggattggattct

SEQ ID NO: 257758 - DNA, 21 bp, Artificial sequence
  SiRNA target sequence
gttatataggattggattctt

SEQ ID NO: 257759 - DNA, 21 bp, Artificial sequence
  SiRNA target sequence
ttatataggattggattcttg

SEQ ID NO: 257760 - DNA, 21 bp, Artificial sequence
  SiRNA target sequence
tatataggattggattcttga

SEQ ID NO: 257761 - DNA, 21 bp, Artificial sequence
  SiRNA target sequence
atataggattggattcttgaa

SEQ ID NO: 257762 - DNA, 21 bp, Artificial sequence
  SiRNA target sequence
tataggattggattcttgaat

SEQ ID NO: 257763 - DNA, 21 bp, Artificial sequence
  SiRNA target sequence
ataggattggattcttgaata

SEQ ID NO: 257764 - DNA, 21 bp, Artificial sequence
  SiRNA target sequence
taggattggattcttgaataa

SEQ ID NO: 257765 - DNA, 21 bp, Artificial sequence
  SiRNA target sequence
aggattggattcttgaataag

SEQ ID NO: 257766 - DNA, 21 bp, Artificial sequence
  SiRNA target sequence
ggattggattcttgaataagt

SEQ ID NO: 257767 - DNA, 21 bp, Artificial sequence
  SiRNA target sequence
gattggattcttgaataagtt

SEQ ID NO: 257768 - DNA, 21 bp, Artificial sequence
  SiRNA target sequence
attggattcttgaataagttg

SEQ ID NO: 257769 - DNA, 21 bp, Artificial sequence
  SiRNA target sequence
ttggattcttgaataagttgt

SEQ ID NO: 257770 - DNA, 21 bp, Artificial sequence
  SiRNA target sequence
tggattcttgaataagttgta

SEQ ID NO: 257771 - DNA, 21 bp, Artificial sequence
  SiRNA target sequence
ggattcttgaataagttgtac

SEQ ID NO: 257772 - DNA, 21 bp, Artificial sequence
  SiRNA target sequence
gattcttgaataagttgtacc

SEQ ID NO: 257773 - DNA, 21 bp, Artificial sequence
  SiRNA target sequence
attcttgaataagttgtaccg

SEQ ID NO: 257774 - DNA, 21 bp, Artificial sequence
  SiRNA target sequence
ttcttgaataagttgtaccga

SEQ ID NO: 257775 - DNA, 21 bp, Artificial sequence
  SiRNA target sequence
tcttgaataagttgtaccgat

SEQ ID NO: 257776 - DNA, 21 bp, Artificial sequence
  SiRNA target sequence
cttgaataagttgtaccgatg

SEQ ID NO: 257777 - DNA, 21 bp, Artificial sequence
  SiRNA target sequence
ttgaataagttgtaccgatgt

SEQ ID NO: 257778 - DNA, 21 bp, Artificial sequence
  SiRNA target sequence
tgaataagttgtaccgatgtg

SEQ ID NO: 257779 - DNA, 21 bp, Artificial sequence
  SiRNA target sequence
gaataagttgtaccgatgtgg

SEQ ID NO: 257780 - DNA, 21 bp, Artificial sequence
  SiRNA target sequence
aataagttgtaccgatgtgga

SEQ ID NO: 257781 - DNA, 21 bp, Artificial sequence
  SiRNA target sequence
ataagttgtaccgatgtggag

SEQ ID NO: 257782 - DNA, 21 bp, Artificial sequence
  SiRNA target sequence
taagttgtaccgatgtggaga

SEQ ID NO: 257783 - DNA, 21 bp, Artificial sequence
  SiRNA target sequence
aagttgtaccgatgtggagac

SEQ ID NO: 257784 - DNA, 21 bp, Artificial sequence
  SiRNA target sequence
agttgtaccgatgtggagact

SEQ ID NO: 257785 - DNA, 21 bp, Artificial sequence
  SiRNA target sequence
gttgtaccgatgtggagactg

SEQ ID NO: 257786 - DNA, 21 bp, Artificial sequence
  SiRNA target sequence
ttgtaccgatgtggagactgg

SEQ ID NO: 257787 - DNA, 21 bp, Artificial sequence
  SiRNA target sequence
tgtaccgatgtggagactggg

SEQ ID NO: 257788 - DNA, 21 bp, Artificial sequence
  SiRNA target sequence
gtaccgatgtggagactggga

SEQ ID NO: 257789 - DNA, 21 bp, Artificial sequence
  SiRNA target sequence
taccgatgtggagactgggat

SEQ ID NO: 257790 - DNA, 21 bp, Artificial sequence
  SiRNA target sequence
accgatgtggagactgggata

SEQ ID NO: 257791 - DNA, 21 bp, Artificial sequence
  SiRNA target sequence
ccgatgtggagactgggatag

SEQ ID NO: 257792 - DNA, 21 bp, Artificial sequence
  SiRNA target sequence
cgatgtggagactgggatagt

SEQ ID NO: 257793 - DNA, 21 bp, Artificial sequence
  SiRNA target sequence
gatgtggagactgggatagta

SEQ ID NO: 257794 - DNA, 21 bp, Artificial sequence
  SiRNA target sequence
atgtggagactgggatagtat

SEQ ID NO: 257795 - DNA, 21 bp, Artificial sequence
  SiRNA target sequence
tgtggagactgggatagtatt

SEQ ID NO: 257796 - DNA, 21 bp, Artificial sequence
  SiRNA target sequence
gtggagactgggatagtattt

SEQ ID NO: 257797 - DNA, 21 bp, Artificial sequence
  SiRNA target sequence
tggagactgggatagtatttt

SEQ ID NO: 257798 - DNA, 21 bp, Artificial sequence
  SiRNA target sequence
ggagactgggatagtatttta

SEQ ID NO: 257799 - DNA, 21 bp, Artificial sequence
  SiRNA target sequence
gagactgggatagtattttac

SEQ ID NO: 257800 - DNA, 21 bp, Artificial sequence
  SiRNA target sequence
agactgggatagtattttact

SEQ ID NO: 257801 - DNA, 21 bp, Artificial sequence
  SiRNA target sequence
gactgggatagtattttactt

SEQ ID NO: 257802 - DNA, 21 bp, Artificial sequence
  SiRNA target sequence
actgggatagtattttacttc

SEQ ID NO: 257803 - DNA, 21 bp, Artificial sequence
  SiRNA target sequence
ctgggatagtattttacttct

SEQ ID NO: 257804 - DNA, 21 bp, Artificial sequence
  SiRNA target sequence
tgggatagtattttacttctc

SEQ ID NO: 257805 - DNA, 21 bp, Artificial sequence
  SiRNA target sequence
gggatagtattttacttctcc

SEQ ID NO: 257806 - DNA, 21 bp, Artificial sequence
  SiRNA target sequence
ggatagtattttacttctcct

SEQ ID NO: 257807 - DNA, 21 bp, Artificial sequence
  SiRNA target sequence
gatagtattttacttctcctt

SEQ ID NO: 257808 - DNA, 21 bp, Artificial sequence
  SiRNA target sequence
atagtattttacttctccttt

SEQ ID NO: 257809 - DNA, 21 bp, Artificial sequence
  SiRNA target sequence
tagtattttacttctcctttc

SEQ ID NO: 257810 - DNA, 21 bp, Artificial sequence
  SiRNA target sequence
agtattttacttctcctttca

SEQ ID NO: 257811 - DNA, 21 bp, Artificial sequence
  SiRNA target sequence
gtattttacttctcctttcag

SEQ ID NO: 257812 - DNA, 21 bp, Artificial sequence
  SiRNA target sequence
tattttacttctcctttcagg

SEQ ID NO: 257813 - DNA, 21 bp, Artificial sequence
  SiRNA target sequence
attttacttctcctttcagga

SEQ ID NO: 257814 - DNA, 21 bp, Artificial sequence
  SiRNA target sequence
ttttacttctcctttcaggag

SEQ ID NO: 257815 - DNA, 21 bp, Artificial sequence
  SiRNA target sequence
tttacttctcctttcaggaga

SEQ ID NO: 257816 - DNA, 21 bp, Artificial sequence
  SiRNA target sequence
ttacttctcctttcaggagat

SEQ ID NO: 257817 - DNA, 21 bp, Artificial sequence
  SiRNA target sequence
tacttctcctttcaggagata

SEQ ID NO: 257818 - DNA, 21 bp, Artificial sequence
  SiRNA target sequence
acttctcctttcaggagatat

SEQ ID NO: 257819 - DNA, 21 bp, Artificial sequence
  SiRNA target sequence
cttctcctttcaggagatatt

SEQ ID NO: 257820 - DNA, 21 bp, Artificial sequence
  SiRNA target sequence
ttctcctttcaggagatattg

SEQ ID NO: 257821 - DNA, 21 bp, Artificial sequence
  SiRNA target sequence
tctcctttcaggagatattga

SEQ ID NO: 257822 - DNA, 21 bp, Artificial sequence
  SiRNA target sequence
ctcctttcaggagatattgaa

SEQ ID NO: 257823 - DNA, 21 bp, Artificial sequence
  SiRNA target sequence
tcctttcaggagatattgaag

SEQ ID NO: 257824 - DNA, 21 bp, Artificial sequence
  SiRNA target sequence
cctttcaggagatattgaaga

SEQ ID NO: 257825 - DNA, 21 bp, Artificial sequence
  SiRNA target sequence
ctttcaggagatattgaagaa

SEQ ID NO: 257826 - DNA, 21 bp, Artificial sequence
  SiRNA target sequence
tttcaggagatattgaagaaa

SEQ ID NO: 257827 - DNA, 21 bp, Artificial sequence
  SiRNA target sequence
ttcaggagatattgaagaaaa

SEQ ID NO: 257828 - DNA, 21 bp, Artificial sequence
  SiRNA target sequence
tcaggagatattgaagaaaac

SEQ ID NO: 257829 - DNA, 21 bp, Artificial sequence
  SiRNA target sequence
caggagatattgaagaaaacc

SEQ ID NO: 257830 - DNA, 21 bp, Artificial sequence
  SiRNA target sequence
aggagatattgaagaaaaccc

SEQ ID NO: 257831 - DNA, 21 bp, Artificial sequence
  SiRNA target sequence
ggagatattgaagaaaacccg

SEQ ID NO: 257832 - DNA, 21 bp, Artificial sequence
  SiRNA target sequence
gagatattgaagaaaacccgg

SEQ ID NO: 257833 - DNA, 21 bp, Artificial sequence
  SiRNA target sequence
agatattgaagaaaacccggg

SEQ ID NO: 257834 - DNA, 21 bp, Artificial sequence
  SiRNA target sequence
gatattgaagaaaacccggga

SEQ ID NO: 257835 - DNA, 21 bp, Artificial sequence
  SiRNA target sequence
atattgaagaaaacccgggac

SEQ ID NO: 257836 - DNA, 21 bp, Artificial sequence
  SiRNA target sequence
tattgaagaaaacccgggacc

SEQ ID NO: 257837 - DNA, 21 bp, Artificial sequence
  SiRNA target sequence
attgaagaaaacccgggacct

SEQ ID NO: 257838 - DNA, 21 bp, Artificial sequence
  SiRNA target sequence
ttgaagaaaacccgggacctg

SEQ ID NO: 257839 - DNA, 21 bp, Artificial sequence
  SiRNA target sequence
tgaagaaaacccgggacctgt

SEQ ID NO: 257840 - DNA, 21 bp, Artificial sequence
  SiRNA target sequence
gaagaaaacccgggacctgtt

SEQ ID NO: 257841 - DNA, 21 bp, Artificial sequence
  SiRNA target sequence
aagaaaacccgggacctgttg

SEQ ID NO: 257842 - DNA, 21 bp, Artificial sequence
  SiRNA target sequence
agaaaacccgggacctgttga

SEQ ID NO: 257843 - DNA, 21 bp, Artificial sequence
  SiRNA target sequence
gaaaacccgggacctgttgat

SEQ ID NO: 257844 - DNA, 21 bp, Artificial sequence
  SiRNA target sequence
aaaacccgggacctgttgata

SEQ ID NO: 257845 - DNA, 21 bp, Artificial sequence
  SiRNA target sequence
aaacccgggacctgttgatat

SEQ ID NO: 257846 - DNA, 21 bp, Artificial sequence
  SiRNA target sequence
aacccgggacctgttgatatt

SEQ ID NO: 257847 - DNA, 21 bp, Artificial sequence
  SiRNA target sequence
acccgggacctgttgatattt

SEQ ID NO: 257848 - DNA, 21 bp, Artificial sequence
  SiRNA target sequence
cccgggacctgttgatatttc

SEQ ID NO: 257849 - DNA, 21 bp, Artificial sequence
  SiRNA target sequence
ccgggacctgttgatatttct

SEQ ID NO: 257850 - DNA, 21 bp, Artificial sequence
  SiRNA target sequence
cgggacctgttgatatttctt

SEQ ID NO: 257851 - DNA, 21 bp, Artificial sequence
  SiRNA target sequence
gggacctgttgatatttctta

SEQ ID NO: 257852 - DNA, 21 bp, Artificial sequence
  SiRNA target sequence
ggacctgttgatatttcttat

SEQ ID NO: 257853 - DNA, 21 bp, Artificial sequence
  SiRNA target sequence
gacctgttgatatttcttata

SEQ ID NO: 257854 - DNA, 21 bp, Artificial sequence
  SiRNA target sequence
acctgttgatatttcttataa

SEQ ID NO: 257855 - DNA, 21 bp, Artificial sequence
  SiRNA target sequence
cctgttgatatttcttataaa

SEQ ID NO: 257856 - DNA, 21 bp, Artificial sequence
  SiRNA target sequence
ctgttgatatttcttataaag

SEQ ID NO: 257857 - DNA, 21 bp, Artificial sequence
  SiRNA target sequence
tgttgatatttcttataaaga

SEQ ID NO: 257858 - DNA, 21 bp, Artificial sequence
  SiRNA target sequence
gttgatatttcttataaagaa

SEQ ID NO: 257859 - DNA, 21 bp, Artificial sequence
  SiRNA target sequence
ttgatatttcttataaagaat

SEQ ID NO: 257860 - DNA, 21 bp, Artificial sequence
  SiRNA target sequence
tgatatttcttataaagaatc

SEQ ID NO: 257861 - DNA, 21 bp, Artificial sequence
  SiRNA target sequence
gatatttcttataaagaatct

SEQ ID NO: 257862 - DNA, 21 bp, Artificial sequence
  SiRNA target sequence
atatttcttataaagaatctt

SEQ ID NO: 257863 - DNA, 21 bp, Artificial sequence
  SiRNA target sequence
tatttcttataaagaatcttg

SEQ ID NO: 257864 - DNA, 21 bp, Artificial sequence
  SiRNA target sequence
atttcttataaagaatcttgc

SEQ ID NO: 257865 - DNA, 21 bp, Artificial sequence
  SiRNA target sequence
tttcttataaagaatcttgca

SEQ ID NO: 257866 - DNA, 21 bp, Artificial sequence
  SiRNA target sequence
ttcttataaagaatcttgcag

SEQ ID NO: 257867 - DNA, 21 bp, Artificial sequence
  SiRNA target sequence
tcttataaagaatcttgcaga

SEQ ID NO: 257868 - DNA, 21 bp, Artificial sequence
  SiRNA target sequence
cttataaagaatcttgcagac

SEQ ID NO: 257869 - DNA, 21 bp, Artificial sequence
  SiRNA target sequence
ttataaagaatcttgcagaca

SEQ ID NO: 257870 - DNA, 21 bp, Artificial sequence
  SiRNA target sequence
tataaagaatcttgcagacag

SEQ ID NO: 257871 - DNA, 21 bp, Artificial sequence
  SiRNA target sequence
ataaagaatcttgcagacaga

SEQ ID NO: 257872 - DNA, 21 bp, Artificial sequence
  SiRNA target sequence
taaagaatcttgcagacagaa

SEQ ID NO: 257873 - DNA, 21 bp, Artificial sequence
  SiRNA target sequence
aaagaatcttgcagacagaag

SEQ ID NO: 257874 - DNA, 21 bp, Artificial sequence
  SiRNA target sequence
aagaatcttgcagacagaaga

SEQ ID NO: 257875 - DNA, 21 bp, Artificial sequence
  SiRNA target sequence
agaatcttgcagacagaagag

SEQ ID NO: 257876 - DNA, 21 bp, Artificial sequence
  SiRNA target sequence
gaatcttgcagacagaagaga

SEQ ID NO: 257877 - DNA, 21 bp, Artificial sequence
  SiRNA target sequence
aatcttgcagacagaagagaa

SEQ ID NO: 257878 - DNA, 21 bp, Artificial sequence
  SiRNA target sequence
atcttgcagacagaagagaat

SEQ ID NO: 257879 - DNA, 21 bp, Artificial sequence
  SiRNA target sequence
tcttgcagacagaagagaatg

SEQ ID NO: 257880 - DNA, 21 bp, Artificial sequence
  SiRNA target sequence
cttgcagacagaagagaatga

SEQ ID NO: 257881 - DNA, 21 bp, Artificial sequence
  SiRNA target sequence
ttgcagacagaagagaatgaa

SEQ ID NO: 257882 - DNA, 21 bp, Artificial sequence
  SiRNA target sequence
tgcagacagaagagaatgaag

SEQ ID NO: 257883 - DNA, 21 bp, Artificial sequence
  SiRNA target sequence
gcagacagaagagaatgaaga

SEQ ID NO: 257884 - DNA, 21 bp, Artificial sequence
  SiRNA target sequence
cagacagaagagaatgaagaa

SEQ ID NO: 257885 - DNA, 21 bp, Artificial sequence
  SiRNA target sequence
agacagaagagaatgaagaaa

SEQ ID NO: 257886 - DNA, 21 bp, Artificial sequence
  SiRNA target sequence
gacagaagagaatgaagaaat

SEQ ID NO: 257887 - DNA, 21 bp, Artificial sequence
  SiRNA target sequence
acagaagagaatgaagaaatg

SEQ ID NO: 257888 - DNA, 21 bp, Artificial sequence
  SiRNA target sequence
cagaagagaatgaagaaatgc

SEQ ID NO: 257889 - DNA, 21 bp, Artificial sequence
  SiRNA target sequence
agaagagaatgaagaaatgcg

SEQ ID NO: 257890 - DNA, 21 bp, Artificial sequence
  SiRNA target sequence
gaagagaatgaagaaatgcgt

SEQ ID NO: 257891 - DNA, 21 bp, Artificial sequence
  SiRNA target sequence
aagagaatgaagaaatgcgtt

SEQ ID NO: 257892 - DNA, 21 bp, Artificial sequence
  SiRNA target sequence
agagaatgaagaaatgcgttt

SEQ ID NO: 257893 - DNA, 21 bp, Artificial sequence
  SiRNA target sequence
gagaatgaagaaatgcgtttc

SEQ ID NO: 257894 - DNA, 21 bp, Artificial sequence
  SiRNA target sequence
agaatgaagaaatgcgtttct

SEQ ID NO: 257895 - DNA, 21 bp, Artificial sequence
  SiRNA target sequence
gaatgaagaaatgcgtttcta

SEQ ID NO: 257896 - DNA, 21 bp, Artificial sequence
  SiRNA target sequence
aatgaagaaatgcgtttctaa

SEQ ID NO: 257897 - DNA, 21 bp, Artificial sequence
  SiRNA target sequence
atgaagaaatgcgtttctaag

SEQ ID NO: 257898 - DNA, 21 bp, Artificial sequence
  SiRNA target sequence
tgaagaaatgcgtttctaaga

SEQ ID NO: 257899 - DNA, 21 bp, Artificial sequence
  SiRNA target sequence
gaagaaatgcgtttctaagac

SEQ ID NO: 257900 - DNA, 21 bp, Artificial sequence
  SiRNA target sequence
aagaaatgcgtttctaagact

SEQ ID NO: 257901 - DNA, 21 bp, Artificial sequence
  SiRNA target sequence
agaaatgcgtttctaagactt

SEQ ID NO: 257902 - DNA, 21 bp, Artificial sequence
  SiRNA target sequence
gaaatgcgtttctaagactta

SEQ ID NO: 257903 - DNA, 21 bp, Artificial sequence
  SiRNA target sequence
aaatgcgtttctaagacttat

SEQ ID NO: 257904 - DNA, 21 bp, Artificial sequence
  SiRNA target sequence
aatgcgtttctaagacttatg

SEQ ID NO: 257905 - DNA, 21 bp, Artificial sequence
  SiRNA target sequence
atgcgtttctaagacttatga

SEQ ID NO: 257906 - DNA, 21 bp, Artificial sequence
  SiRNA target sequence
tgcgtttctaagacttatgag

SEQ ID NO: 257907 - DNA, 21 bp, Artificial sequence
  SiRNA target sequence
gcgtttctaagacttatgagg

SEQ ID NO: 257908 - DNA, 21 bp, Artificial sequence
  SiRNA target sequence
cgtttctaagacttatgagga

SEQ ID NO: 257909 - DNA, 21 bp, Artificial sequence
  SiRNA target sequence
gtttctaagacttatgaggaa

SEQ ID NO: 257910 - DNA, 21 bp, Artificial sequence
  SiRNA target sequence
tttctaagacttatgaggaaa

SEQ ID NO: 257911 - DNA, 21 bp, Artificial sequence
  SiRNA target sequence
ttctaagacttatgaggaaat

SEQ ID NO: 257912 - DNA, 21 bp, Artificial sequence
  SiRNA target sequence
tctaagacttatgaggaaatc

SEQ ID NO: 257913 - DNA, 21 bp, Artificial sequence
  SiRNA target sequence
ctaagacttatgaggaaatca

SEQ ID NO: 257914 - DNA, 21 bp, Artificial sequence
  SiRNA target sequence
taagacttatgaggaaatcaa

SEQ ID NO: 257915 - DNA, 21 bp, Artificial sequence
  SiRNA target sequence
aagacttatgaggaaatcaaa

SEQ ID NO: 257916 - DNA, 21 bp, Artificial sequence
  SiRNA target sequence
agacttatgaggaaatcaaaa

SEQ ID NO: 257917 - DNA, 21 bp, Artificial sequence
  SiRNA target sequence
gacttatgaggaaatcaaaat

SEQ ID NO: 257918 - DNA, 21 bp, Artificial sequence
  SiRNA target sequence
acttatgaggaaatcaaaatg

SEQ ID NO: 257919 - DNA, 21 bp, Artificial sequence
  SiRNA target sequence
cttatgaggaaatcaaaatgc

SEQ ID NO: 257920 - DNA, 21 bp, Artificial sequence
  SiRNA target sequence
ttatgaggaaatcaaaatgca

SEQ ID NO: 257921 - DNA, 21 bp, Artificial sequence
  SiRNA target sequence
tatgaggaaatcaaaatgcaa

SEQ ID NO: 257922 - DNA, 21 bp, Artificial sequence
  SiRNA target sequence
atgaggaaatcaaaatgcaac

SEQ ID NO: 257923 - DNA, 21 bp, Artificial sequence
  SiRNA target sequence
tgaggaaatcaaaatgcaaca

SEQ ID NO: 257924 - DNA, 21 bp, Artificial sequence
  SiRNA target sequence
gaggaaatcaaaatgcaacag

SEQ ID NO: 257925 - DNA, 21 bp, Artificial sequence
  SiRNA target sequence
aggaaatcaaaatgcaacagc

SEQ ID NO: 257926 - DNA, 21 bp, Artificial sequence
  SiRNA target sequence
ggaaatcaaaatgcaacagca

SEQ ID NO: 257927 - DNA, 21 bp, Artificial sequence
  SiRNA target sequence
gaaatcaaaatgcaacagcat

SEQ ID NO: 257928 - DNA, 21 bp, Artificial sequence
  SiRNA target sequence
aaatcaaaatgcaacagcata

SEQ ID NO: 257929 - DNA, 21 bp, Artificial sequence
  SiRNA target sequence
aatcaaaatgcaacagcatat

SEQ ID NO: 257930 - DNA, 21 bp, Artificial sequence
  SiRNA target sequence
atcaaaatgcaacagcatatt

SEQ ID NO: 257931 - DNA, 21 bp, Artificial sequence
  SiRNA target sequence
tcaaaatgcaacagcatattg

SEQ ID NO: 257932 - DNA, 21 bp, Artificial sequence
  SiRNA target sequence
caaaatgcaacagcatattga

SEQ ID NO: 257933 - DNA, 21 bp, Artificial sequence
  SiRNA target sequence
aaaatgcaacagcatattgat

SEQ ID NO: 257934 - DNA, 21 bp, Artificial sequence
  SiRNA target sequence
aaatgcaacagcatattgata

SEQ ID NO: 257935 - DNA, 21 bp, Artificial sequence
  SiRNA target sequence
aatgcaacagcatattgatag

SEQ ID NO: 257936 - DNA, 21 bp, Artificial sequence
  SiRNA target sequence
atgcaacagcatattgataga

SEQ ID NO: 257937 - DNA, 21 bp, Artificial sequence
  SiRNA target sequence
tgcaacagcatattgatagaa

SEQ ID NO: 257938 - DNA, 21 bp, Artificial sequence
  SiRNA target sequence
gcaacagcatattgatagaat

SEQ ID NO: 257939 - DNA, 21 bp, Artificial sequence
  SiRNA target sequence
caacagcatattgatagaatc

SEQ ID NO: 257940 - DNA, 21 bp, Artificial sequence
  SiRNA target sequence
aacagcatattgatagaatca

SEQ ID NO: 257941 - DNA, 21 bp, Artificial sequence
  SiRNA target sequence
acagcatattgatagaatcaa

SEQ ID NO: 257942 - DNA, 21 bp, Artificial sequence
  SiRNA target sequence
cagcatattgatagaatcaat

SEQ ID NO: 257943 - DNA, 21 bp, Artificial sequence
  SiRNA target sequence
agcatattgatagaatcaata

SEQ ID NO: 257944 - DNA, 21 bp, Artificial sequence
  SiRNA target sequence
gcatattgatagaatcaataa

SEQ ID NO: 257945 - DNA, 21 bp, Artificial sequence
  SiRNA target sequence
catattgatagaatcaataat

SEQ ID NO: 257946 - DNA, 21 bp, Artificial sequence
  SiRNA target sequence
atattgatagaatcaataatg

SEQ ID NO: 257947 - DNA, 21 bp, Artificial sequence
  SiRNA target sequence
tattgatagaatcaataatga

SEQ ID NO: 257948 - DNA, 21 bp, Artificial sequence
  SiRNA target sequence
attgatagaatcaataatgaa

SEQ ID NO: 257949 - DNA, 21 bp, Artificial sequence
  SiRNA target sequence
ttgatagaatcaataatgaag

SEQ ID NO: 257950 - DNA, 21 bp, Artificial sequence
  SiRNA target sequence
tgatagaatcaataatgaaga

SEQ ID NO: 257951 - DNA, 21 bp, Artificial sequence
  SiRNA target sequence
gatagaatcaataatgaagag

SEQ ID NO: 257952 - DNA, 21 bp, Artificial sequence
  SiRNA target sequence
atagaatcaataatgaagaga

SEQ ID NO: 257953 - DNA, 21 bp, Artificial sequence
  SiRNA target sequence
tagaatcaataatgaagagaa

SEQ ID NO: 257954 - DNA, 21 bp, Artificial sequence
  SiRNA target sequence
agaatcaataatgaagagaaa

SEQ ID NO: 257955 - DNA, 21 bp, Artificial sequence
  SiRNA target sequence
gaatcaataatgaagagaaac

SEQ ID NO: 257956 - DNA, 21 bp, Artificial sequence
  SiRNA target sequence
aatcaataatgaagagaaacg

SEQ ID NO: 257957 - DNA, 21 bp, Artificial sequence
  SiRNA target sequence
atcaataatgaagagaaacgt

SEQ ID NO: 257958 - DNA, 21 bp, Artificial sequence
  SiRNA target sequence
tcaataatgaagagaaacgtg

SEQ ID NO: 257959 - DNA, 21 bp, Artificial sequence
  SiRNA target sequence
caataatgaagagaaacgtgc

SEQ ID NO: 257960 - DNA, 21 bp, Artificial sequence
  SiRNA target sequence
aataatgaagagaaacgtgct

SEQ ID NO: 257961 - DNA, 21 bp, Artificial sequence
  SiRNA target sequence
ataatgaagagaaacgtgctc

SEQ ID NO: 257962 - DNA, 21 bp, Artificial sequence
  SiRNA target sequence
taatgaagagaaacgtgctca

SEQ ID NO: 257963 - DNA, 21 bp, Artificial sequence
  SiRNA target sequence
aatgaagagaaacgtgctcat

SEQ ID NO: 257964 - DNA, 21 bp, Artificial sequence
  SiRNA target sequence
atgaagagaaacgtgctcata

SEQ ID NO: 257965 - DNA, 21 bp, Artificial sequence
  SiRNA target sequence
tgaagagaaacgtgctcatat

SEQ ID NO: 257966 - DNA, 21 bp, Artificial sequence
  SiRNA target sequence
gaagagaaacgtgctcatatg

SEQ ID NO: 257967 - DNA, 21 bp, Artificial sequence
  SiRNA target sequence
aagagaaacgtgctcatatga

SEQ ID NO: 257968 - DNA, 21 bp, Artificial sequence
  SiRNA target sequence
agagaaacgtgctcatatgac

SEQ ID NO: 257969 - DNA, 21 bp, Artificial sequence
  SiRNA target sequence
gagaaacgtgctcatatgacg

SEQ ID NO: 257970 - DNA, 21 bp, Artificial sequence
  SiRNA target sequence
agaaacgtgctcatatgacga

SEQ ID NO: 257971 - DNA, 21 bp, Artificial sequence
  SiRNA target sequence
gaaacgtgctcatatgacgaa

SEQ ID NO: 257972 - DNA, 21 bp, Artificial sequence
  SiRNA target sequence
aaacgtgctcatatgacgaaa

SEQ ID NO: 257973 - DNA, 21 bp, Artificial sequence
  SiRNA target sequence
aacgtgctcatatgacgaaac

SEQ ID NO: 257974 - DNA, 21 bp, Artificial sequence
  SiRNA target sequence
acgtgctcatatgacgaaacc

SEQ ID NO: 257975 - DNA, 21 bp, Artificial sequence
  SiRNA target sequence
cgtgctcatatgacgaaaccc

SEQ ID NO: 257976 - DNA, 21 bp, Artificial sequence
  SiRNA target sequence
gtgctcatatgacgaaacccc

SEQ ID NO: 257977 - DNA, 21 bp, Artificial sequence
  SiRNA target sequence
tgctcatatgacgaaaccccg

SEQ ID NO: 257978 - DNA, 21 bp, Artificial sequence
  SiRNA target sequence
gctcatatgacgaaaccccgt

SEQ ID NO: 257979 - DNA, 21 bp, Artificial sequence
  SiRNA target sequence
ctcatatgacgaaaccccgta

SEQ ID NO: 257980 - DNA, 21 bp, Artificial sequence
  SiRNA target sequence
tcatatgacgaaaccccgtaa

SEQ ID NO: 257981 - DNA, 21 bp, Artificial sequence
  SiRNA target sequence
catatgacgaaaccccgtaag

SEQ ID NO: 257982 - DNA, 21 bp, Artificial sequence
  SiRNA target sequence
atatgacgaaaccccgtaagt

SEQ ID NO: 257983 - DNA, 21 bp, Artificial sequence
  SiRNA target sequence
tatgacgaaaccccgtaagtt

SEQ ID NO: 257984 - DNA, 21 bp, Artificial sequence
  SiRNA target sequence
atgacgaaaccccgtaagtta

SEQ ID NO: 257985 - DNA, 21 bp, Artificial sequence
  SiRNA target sequence
tgacgaaaccccgtaagttaa

SEQ ID NO: 257986 - DNA, 21 bp, Artificial sequence
  SiRNA target sequence
gacgaaaccccgtaagttaaa

SEQ ID NO: 257987 - DNA, 21 bp, Artificial sequence
  SiRNA target sequence
acgaaaccccgtaagttaaag

SEQ ID NO: 257988 - DNA, 21 bp, Artificial sequence
  SiRNA target sequence
cgaaaccccgtaagttaaagg

SEQ ID NO: 257989 - DNA, 21 bp, Artificial sequence
  SiRNA target sequence
gaaaccccgtaagttaaagga

SEQ ID NO: 257990 - DNA, 21 bp, Artificial sequence
  SiRNA target sequence
aaaccccgtaagttaaaggat

SEQ ID NO: 257991 - DNA, 21 bp, Artificial sequence
  SiRNA target sequence
aaccccgtaagttaaaggatt

SEQ ID NO: 257992 - DNA, 21 bp, Artificial sequence
  SiRNA target sequence
accccgtaagttaaaggattt

SEQ ID NO: 257993 - DNA, 21 bp, Artificial sequence
  SiRNA target sequence
ccccgtaagttaaaggatttg

SEQ ID NO: 257994 - DNA, 21 bp, Artificial sequence
  SiRNA target sequence
cccgtaagttaaaggatttga

SEQ ID NO: 257995 - DNA, 21 bp, Artificial sequence
  SiRNA target sequence
ccgtaagttaaaggatttgat

SEQ ID NO: 257996 - DNA, 21 bp, Artificial sequence
  SiRNA target sequence
cgtaagttaaaggatttgatt

SEQ ID NO: 257997 - DNA, 21 bp, Artificial sequence
  SiRNA target sequence
gtaagttaaaggatttgattg

SEQ ID NO: 257998 - DNA, 21 bp, Artificial sequence
  SiRNA target sequence
taagttaaaggatttgattga

SEQ ID NO: 257999 - DNA, 21 bp, Artificial sequence
  SiRNA target sequence
aagttaaaggatttgattgaa

SEQ ID NO: 258000 - DNA, 21 bp, Artificial sequence
  SiRNA target sequence
agttaaaggatttgattgaag

SEQ ID NO: 258001 - DNA, 21 bp, Artificial sequence
  SiRNA target sequence
gttaaaggatttgattgaagt

SEQ ID NO: 258002 - DNA, 21 bp, Artificial sequence
  SiRNA target sequence
ttaaaggatttgattgaagtt

SEQ ID NO: 258003 - DNA, 21 bp, Artificial sequence
  SiRNA target sequence
taaaggatttgattgaagttg

SEQ ID NO: 258004 - DNA, 21 bp, Artificial sequence
  SiRNA target sequence
aaaggatttgattgaagttga

SEQ ID NO: 258005 - DNA, 21 bp, Artificial sequence
  SiRNA target sequence
aaggatttgattgaagttgaa

SEQ ID NO: 258006 - DNA, 21 bp, Artificial sequence
  SiRNA target sequence
aggatttgattgaagttgaaa

SEQ ID NO: 258007 - DNA, 21 bp, Artificial sequence
  SiRNA target sequence
ggatttgattgaagttgaaat

SEQ ID NO: 258008 - DNA, 21 bp, Artificial sequence
  SiRNA target sequence
gatttgattgaagttgaaatg

SEQ ID NO: 258009 - DNA, 21 bp, Artificial sequence
  SiRNA target sequence
atttgattgaagttgaaatgc

SEQ ID NO: 258010 - DNA, 21 bp, Artificial sequence
  SiRNA target sequence
tttgattgaagttgaaatgca

SEQ ID NO: 258011 - DNA, 21 bp, Artificial sequence
  SiRNA target sequence
ttgattgaagttgaaatgcaa

SEQ ID NO: 258012 - DNA, 21 bp, Artificial sequence
  SiRNA target sequence
tgattgaagttgaaatgcaag

SEQ ID NO: 258013 - DNA, 21 bp, Artificial sequence
  SiRNA target sequence
gattgaagttgaaatgcaagg

SEQ ID NO: 258014 - DNA, 21 bp, Artificial sequence
  SiRNA target sequence
attgaagttgaaatgcaagga

SEQ ID NO: 258015 - DNA, 21 bp, Artificial sequence
  SiRNA target sequence
ttgaagttgaaatgcaaggaa

SEQ ID NO: 258016 - DNA, 21 bp, Artificial sequence
  SiRNA target sequence
tgaagttgaaatgcaaggaat

SEQ ID NO: 258017 - DNA, 21 bp, Artificial sequence
  SiRNA target sequence
gaagttgaaatgcaaggaatg

SEQ ID NO: 258018 - DNA, 21 bp, Artificial sequence
  SiRNA target sequence
aagttgaaatgcaaggaatgt

SEQ ID NO: 258019 - DNA, 21 bp, Artificial sequence
  SiRNA target sequence
agttgaaatgcaaggaatgtt

SEQ ID NO: 258020 - DNA, 21 bp, Artificial sequence
  SiRNA target sequence
gttgaaatgcaaggaatgttt

SEQ ID NO: 258021 - DNA, 21 bp, Artificial sequence
  SiRNA target sequence
ttgaaatgcaaggaatgttta

SEQ ID NO: 258022 - DNA, 21 bp, Artificial sequence
  SiRNA target sequence
tgaaatgcaaggaatgtttaa

SEQ ID NO: 258023 - DNA, 21 bp, Artificial sequence
  SiRNA target sequence
gaaatgcaaggaatgtttaat

SEQ ID NO: 258024 - DNA, 21 bp, Artificial sequence
  SiRNA target sequence
aaatgcaaggaatgtttaatt

SEQ ID NO: 258025 - DNA, 21 bp, Artificial sequence
  SiRNA target sequence
aatgcaaggaatgtttaattg

SEQ ID NO: 258026 - DNA, 21 bp, Artificial sequence
  SiRNA target sequence
atgcaaggaatgtttaattgg

SEQ ID NO: 258027 - DNA, 21 bp, Artificial sequence
  SiRNA target sequence
tgcaaggaatgtttaattgga

SEQ ID NO: 258028 - DNA, 21 bp, Artificial sequence
  SiRNA target sequence
gcaaggaatgtttaattggac

SEQ ID NO: 258029 - DNA, 21 bp, Artificial sequence
  SiRNA target sequence
caaggaatgtttaattggact

SEQ ID NO: 258030 - DNA, 21 bp, Artificial sequence
  SiRNA target sequence
aaggaatgtttaattggactg

SEQ ID NO: 258031 - DNA, 21 bp, Artificial sequence
  SiRNA target sequence
aggaatgtttaattggactga

SEQ ID NO: 258032 - DNA, 21 bp, Artificial sequence
  SiRNA target sequence
ggaatgtttaattggactgaa

SEQ ID NO: 258033 - DNA, 21 bp, Artificial sequence
  SiRNA target sequence
gaatgtttaattggactgaag

SEQ ID NO: 258034 - DNA, 21 bp, Artificial sequence
  SiRNA target sequence
aatgtttaattggactgaaga

SEQ ID NO: 258035 - DNA, 21 bp, Artificial sequence
  SiRNA target sequence
atgtttaattggactgaagaa

SEQ ID NO: 258036 - DNA, 21 bp, Artificial sequence
  SiRNA target sequence
tgtttaattggactgaagaaa

SEQ ID NO: 258037 - DNA, 21 bp, Artificial sequence
  SiRNA target sequence
gtttaattggactgaagaaag

SEQ ID NO: 258038 - DNA, 21 bp, Artificial sequence
  SiRNA target sequence
tttaattggactgaagaaagg

SEQ ID NO: 258039 - DNA, 21 bp, Artificial sequence
  SiRNA target sequence
ttaattggactgaagaaaggg

SEQ ID NO: 258040 - DNA, 21 bp, Artificial sequence
  SiRNA target sequence
taattggactgaagaaaggga

SEQ ID NO: 258041 - DNA, 21 bp, Artificial sequence
  SiRNA target sequence
aattggactgaagaaagggaa

SEQ ID NO: 258042 - DNA, 21 bp, Artificial sequence
  SiRNA target sequence
attggactgaagaaagggaaa

SEQ ID NO: 258043 - DNA, 21 bp, Artificial sequence
  SiRNA target sequence
ttggactgaagaaagggaaat

SEQ ID NO: 258044 - DNA, 21 bp, Artificial sequence
  SiRNA target sequence
tggactgaagaaagggaaatc

SEQ ID NO: 258045 - DNA, 21 bp, Artificial sequence
  SiRNA target sequence
ggactgaagaaagggaaatct

SEQ ID NO: 258046 - DNA, 21 bp, Artificial sequence
  SiRNA target sequence
gactgaagaaagggaaatctt

SEQ ID NO: 258047 - DNA, 21 bp, Artificial sequence
  SiRNA target sequence
actgaagaaagggaaatcttg

SEQ ID NO: 258048 - DNA, 21 bp, Artificial sequence
  SiRNA target sequence
ctgaagaaagggaaatcttga

SEQ ID NO: 258049 - DNA, 21 bp, Artificial sequence
  SiRNA target sequence
tgaagaaagggaaatcttgaa

SEQ ID NO: 258050 - DNA, 21 bp, Artificial sequence
  SiRNA target sequence
gaagaaagggaaatcttgaag

SEQ ID NO: 258051 - DNA, 21 bp, Artificial sequence
  SiRNA target sequence
aagaaagggaaatcttgaaga

SEQ ID NO: 258052 - DNA, 21 bp, Artificial sequence
  SiRNA target sequence
agaaagggaaatcttgaagag

SEQ ID NO: 258053 - DNA, 21 bp, Artificial sequence
  SiRNA target sequence
gaaagggaaatcttgaagagt

SEQ ID NO: 258054 - DNA, 21 bp, Artificial sequence
  SiRNA target sequence
aaagggaaatcttgaagagta

SEQ ID NO: 258055 - DNA, 21 bp, Artificial sequence
  SiRNA target sequence
aagggaaatcttgaagagtac

SEQ ID NO: 258056 - DNA, 21 bp, Artificial sequence
  SiRNA target sequence
agggaaatcttgaagagtact

SEQ ID NO: 258057 - DNA, 21 bp, Artificial sequence
  SiRNA target sequence
gggaaatcttgaagagtactg

SEQ ID NO: 258058 - DNA, 21 bp, Artificial sequence
  SiRNA target sequence
ggaaatcttgaagagtactgc

SEQ ID NO: 258059 - DNA, 21 bp, Artificial sequence
  SiRNA target sequence
gaaatcttgaagagtactgca

SEQ ID NO: 258060 - DNA, 21 bp, Artificial sequence
  SiRNA target sequence
aaatcttgaagagtactgcat

SEQ ID NO: 258061 - DNA, 21 bp, Artificial sequence
  SiRNA target sequence
aatcttgaagagtactgcatt

SEQ ID NO: 258062 - DNA, 21 bp, Artificial sequence
  SiRNA target sequence
atcttgaagagtactgcattc

SEQ ID NO: 258063 - DNA, 21 bp, Artificial sequence
  SiRNA target sequence
tcttgaagagtactgcattca

SEQ ID NO: 258064 - DNA, 21 bp, Artificial sequence
  SiRNA target sequence
cttgaagagtactgcattcaa

SEQ ID NO: 258065 - DNA, 21 bp, Artificial sequence
  SiRNA target sequence
ttgaagagtactgcattcaaa

SEQ ID NO: 258066 - DNA, 21 bp, Artificial sequence
  SiRNA target sequence
tgaagagtactgcattcaaat

SEQ ID NO: 258067 - DNA, 21 bp, Artificial sequence
  SiRNA target sequence
gaagagtactgcattcaaatt

SEQ ID NO: 258068 - DNA, 21 bp, Artificial sequence
  SiRNA target sequence
aagagtactgcattcaaattc

SEQ ID NO: 258069 - DNA, 21 bp, Artificial sequence
  SiRNA target sequence
agagtactgcattcaaattca

SEQ ID NO: 258070 - DNA, 21 bp, Artificial sequence
  SiRNA target sequence
gagtactgcattcaaattcaa

SEQ ID NO: 258071 - DNA, 21 bp, Artificial sequence
  SiRNA target sequence
agtactgcattcaaattcaac

SEQ ID NO: 258072 - DNA, 21 bp, Artificial sequence
  SiRNA target sequence
gtactgcattcaaattcaacc

SEQ ID NO: 258073 - DNA, 21 bp, Artificial sequence
  SiRNA target sequence
tactgcattcaaattcaacca

SEQ ID NO: 258074 - DNA, 21 bp, Artificial sequence
  SiRNA target sequence
actgcattcaaattcaaccat

SEQ ID NO: 258075 - DNA, 21 bp, Artificial sequence
  SiRNA target sequence
ctgcattcaaattcaaccatt

SEQ ID NO: 258076 - DNA, 21 bp, Artificial sequence
  SiRNA target sequence
tgcattcaaattcaaccattc

SEQ ID NO: 258077 - DNA, 21 bp, Artificial sequence
  SiRNA target sequence
gcattcaaattcaaccattcg

SEQ ID NO: 258078 - DNA, 21 bp, Artificial sequence
  SiRNA target sequence
cattcaaattcaaccattcga

SEQ ID NO: 258079 - DNA, 21 bp, Artificial sequence
  SiRNA target sequence
attcaaattcaaccattcgat

SEQ ID NO: 258080 - DNA, 21 bp, Artificial sequence
  SiRNA target sequence
ttcaaattcaaccattcgatg

SEQ ID NO: 258081 - DNA, 21 bp, Artificial sequence
  SiRNA target sequence
tcaaattcaaccattcgatgg

SEQ ID NO: 258082 - DNA, 21 bp, Artificial sequence
  SiRNA target sequence
caaattcaaccattcgatgga

SEQ ID NO: 258083 - DNA, 21 bp, Artificial sequence
  SiRNA target sequence
aaattcaaccattcgatggac

SEQ ID NO: 258084 - DNA, 21 bp, Artificial sequence
  SiRNA target sequence
aattcaaccattcgatggacc

SEQ ID NO: 258085 - DNA, 21 bp, Artificial sequence
  SiRNA target sequence
attcaaccattcgatggaccg

SEQ ID NO: 258086 - DNA, 21 bp, Artificial sequence
  SiRNA target sequence
ttcaaccattcgatggaccga

SEQ ID NO: 258087 - DNA, 21 bp, Artificial sequence
  SiRNA target sequence
tcaaccattcgatggaccgag

SEQ ID NO: 258088 - DNA, 21 bp, Artificial sequence
  SiRNA target sequence
caaccattcgatggaccgagc

SEQ ID NO: 258089 - DNA, 21 bp, Artificial sequence
  SiRNA target sequence
aaccattcgatggaccgagcg

SEQ ID NO: 258090 - DNA, 21 bp, Artificial sequence
  SiRNA target sequence
accattcgatggaccgagcga

SEQ ID NO: 258091 - DNA, 21 bp, Artificial sequence
  SiRNA target sequence
ccattcgatggaccgagcgaa

SEQ ID NO: 258092 - DNA, 21 bp, Artificial sequence
  SiRNA target sequence
cattcgatggaccgagcgaat

SEQ ID NO: 258093 - DNA, 21 bp, Artificial sequence
  SiRNA target sequence
attcgatggaccgagcgaatc

SEQ ID NO: 258094 - DNA, 21 bp, Artificial sequence
  SiRNA target sequence
ttcgatggaccgagcgaatca

SEQ ID NO: 258095 - DNA, 21 bp, Artificial sequence
  SiRNA target sequence
tcgatggaccgagcgaatcat

SEQ ID NO: 258096 - DNA, 21 bp, Artificial sequence
  SiRNA target sequence
cgatggaccgagcgaatcata

SEQ ID NO: 258097 - DNA, 21 bp, Artificial sequence
  SiRNA target sequence
gatggaccgagcgaatcatat

SEQ ID NO: 258098 - DNA, 21 bp, Artificial sequence
  SiRNA target sequence
atggaccgagcgaatcatatt

SEQ ID NO: 258099 - DNA, 21 bp, Artificial sequence
  SiRNA target sequence
tggaccgagcgaatcatatta

SEQ ID NO: 258100 - DNA, 21 bp, Artificial sequence
  SiRNA target sequence
ggaccgagcgaatcatattat

SEQ ID NO: 258101 - DNA, 21 bp, Artificial sequence
  SiRNA target sequence
gaccgagcgaatcatattatg

SEQ ID NO: 258102 - DNA, 21 bp, Artificial sequence
  SiRNA target sequence
accgagcgaatcatattatgg

SEQ ID NO: 258103 - DNA, 21 bp, Artificial sequence
  SiRNA target sequence
ccgagcgaatcatattatgga

SEQ ID NO: 258104 - DNA, 21 bp, Artificial sequence
  SiRNA target sequence
cgagcgaatcatattatggat

SEQ ID NO: 258105 - DNA, 21 bp, Artificial sequence
  SiRNA target sequence
gagcgaatcatattatggata

SEQ ID NO: 258106 - DNA, 21 bp, Artificial sequence
  SiRNA target sequence
agcgaatcatattatggataa

SEQ ID NO: 258107 - DNA, 21 bp, Artificial sequence
  SiRNA target sequence
gcgaatcatattatggataat

SEQ ID NO: 258108 - DNA, 21 bp, Artificial sequence
  SiRNA target sequence
cgaatcatattatggataatc

SEQ ID NO: 258109 - DNA, 21 bp, Artificial sequence
  SiRNA target sequence
gaatcatattatggataatct

SEQ ID NO: 258110 - DNA, 21 bp, Artificial sequence
  SiRNA target sequence
aatcatattatggataatctg

SEQ ID NO: 258111 - DNA, 21 bp, Artificial sequence
  SiRNA target sequence
atcatattatggataatctga

SEQ ID NO: 258112 - DNA, 21 bp, Artificial sequence
  SiRNA target sequence
tcatattatggataatctgat

SEQ ID NO: 258113 - DNA, 21 bp, Artificial sequence
  SiRNA target sequence
catattatggataatctgatc

SEQ ID NO: 258114 - DNA, 21 bp, Artificial sequence
  SiRNA target sequence
atattatggataatctgatcc

SEQ ID NO: 258115 - DNA, 21 bp, Artificial sequence
  SiRNA target sequence
tattatggataatctgatccc

SEQ ID NO: 258116 - DNA, 21 bp, Artificial sequence
  SiRNA target sequence
attatggataatctgatccca

SEQ ID NO: 258117 - DNA, 21 bp, Artificial sequence
  SiRNA target sequence
ttatggataatctgatcccac

SEQ ID NO: 258118 - DNA, 21 bp, Artificial sequence
  SiRNA target sequence
tatggataatctgatcccaca

SEQ ID NO: 258119 - DNA, 21 bp, Artificial sequence
  SiRNA target sequence
atggataatctgatcccacaa

SEQ ID NO: 258120 - DNA, 21 bp, Artificial sequence
  SiRNA target sequence
tggataatctgatcccacaac

SEQ ID NO: 258121 - DNA, 21 bp, Artificial sequence
  SiRNA target sequence
ggataatctgatcccacaact

SEQ ID NO: 258122 - DNA, 21 bp, Artificial sequence
  SiRNA target sequence
gataatctgatcccacaactt

SEQ ID NO: 258123 - DNA, 21 bp, Artificial sequence
  SiRNA target sequence
ataatctgatcccacaacttg

SEQ ID NO: 258124 - DNA, 21 bp, Artificial sequence
  SiRNA target sequence
taatctgatcccacaacttga

SEQ ID NO: 258125 - DNA, 21 bp, Artificial sequence
  SiRNA target sequence
aatctgatcccacaacttgag

SEQ ID NO: 258126 - DNA, 21 bp, Artificial sequence
  SiRNA target sequence
atctgatcccacaacttgagg

SEQ ID NO: 258127 - DNA, 21 bp, Artificial sequence
  SiRNA target sequence
tctgatcccacaacttgagga

SEQ ID NO: 258128 - DNA, 21 bp, Artificial sequence
  SiRNA target sequence
ctgatcccacaacttgaggat

SEQ ID NO: 258129 - DNA, 21 bp, Artificial sequence
  SiRNA target sequence
tgatcccacaacttgaggata

SEQ ID NO: 258130 - DNA, 21 bp, Artificial sequence
  SiRNA target sequence
gatcccacaacttgaggatac

SEQ ID NO: 258131 - DNA, 21 bp, Artificial sequence
  SiRNA target sequence
atcccacaacttgaggatact

SEQ ID NO: 258132 - DNA, 21 bp, Artificial sequence
  SiRNA target sequence
tcccacaacttgaggatactt

SEQ ID NO: 258133 - DNA, 21 bp, Artificial sequence
  SiRNA target sequence
cccacaacttgaggatacttt

SEQ ID NO: 258134 - DNA, 21 bp, Artificial sequence
  SiRNA target sequence
ccacaacttgaggatactttg

SEQ ID NO: 258135 - DNA, 21 bp, Artificial sequence
  SiRNA target sequence
cacaacttgaggatactttgt

SEQ ID NO: 258136 - DNA, 21 bp, Artificial sequence
  SiRNA target sequence
acaacttgaggatactttgtc

SEQ ID NO: 258137 - DNA, 21 bp, Artificial sequence
  SiRNA target sequence
caacttgaggatactttgtct

SEQ ID NO: 258138 - DNA, 21 bp, Artificial sequence
  SiRNA target sequence
aacttgaggatactttgtctg

SEQ ID NO: 258139 - DNA, 21 bp, Artificial sequence
  SiRNA target sequence
acttgaggatactttgtctgg

SEQ ID NO: 258140 - DNA, 21 bp, Artificial sequence
  SiRNA target sequence
cttgaggatactttgtctggt

SEQ ID NO: 258141 - DNA, 21 bp, Artificial sequence
  SiRNA target sequence
ttgaggatactttgtctggtt

SEQ ID NO: 258142 - DNA, 21 bp, Artificial sequence
  SiRNA target sequence
tgaggatactttgtctggttt

SEQ ID NO: 258143 - DNA, 21 bp, Artificial sequence
  SiRNA target sequence
gaggatactttgtctggtttc

SEQ ID NO: 258144 - DNA, 21 bp, Artificial sequence
  SiRNA target sequence
aggatactttgtctggtttca

SEQ ID NO: 258145 - DNA, 21 bp, Artificial sequence
  SiRNA target sequence
ggatactttgtctggtttcag

SEQ ID NO: 258146 - DNA, 21 bp, Artificial sequence
  SiRNA target sequence
gatactttgtctggtttcaga

SEQ ID NO: 258147 - DNA, 21 bp, Artificial sequence
  SiRNA target sequence
atactttgtctggtttcagac

SEQ ID NO: 258148 - DNA, 21 bp, Artificial sequence
  SiRNA target sequence
tactttgtctggtttcagaca

SEQ ID NO: 258149 - DNA, 21 bp, Artificial sequence
  SiRNA target sequence
actttgtctggtttcagacaa

SEQ ID NO: 258150 - DNA, 21 bp, Artificial sequence
  SiRNA target sequence
ctttgtctggtttcagacaaa

SEQ ID NO: 258151 - DNA, 21 bp, Artificial sequence
  SiRNA target sequence
tttgtctggtttcagacaaac

SEQ ID NO: 258152 - DNA, 21 bp, Artificial sequence
  SiRNA target sequence
ttgtctggtttcagacaaacg

SEQ ID NO: 258153 - DNA, 21 bp, Artificial sequence
  SiRNA target sequence
tgtctggtttcagacaaacgt

SEQ ID NO: 258154 - DNA, 21 bp, Artificial sequence
  SiRNA target sequence
gtctggtttcagacaaacgta

SEQ ID NO: 258155 - DNA, 21 bp, Artificial sequence
  SiRNA target sequence
tctggtttcagacaaacgtat

SEQ ID NO: 258156 - DNA, 21 bp, Artificial sequence
  SiRNA target sequence
ctggtttcagacaaacgtatg

SEQ ID NO: 258157 - DNA, 21 bp, Artificial sequence
  SiRNA target sequence
tggtttcagacaaacgtatgc

SEQ ID NO: 258158 - DNA, 21 bp, Artificial sequence
  SiRNA target sequence
ggtttcagacaaacgtatgca

SEQ ID NO: 258159 - DNA, 21 bp, Artificial sequence
  SiRNA target sequence
gtttcagacaaacgtatgcaa

SEQ ID NO: 258160 - DNA, 21 bp, Artificial sequence
  SiRNA target sequence
tttcagacaaacgtatgcaaa

SEQ ID NO: 258161 - DNA, 21 bp, Artificial sequence
  SiRNA target sequence
ttcagacaaacgtatgcaaag

SEQ ID NO: 258162 - DNA, 21 bp, Artificial sequence
  SiRNA target sequence
tcagacaaacgtatgcaaagt

SEQ ID NO: 258163 - DNA, 21 bp, Artificial sequence
  SiRNA target sequence
cagacaaacgtatgcaaagtg

SEQ ID NO: 258164 - DNA, 21 bp, Artificial sequence
  SiRNA target sequence
agacaaacgtatgcaaagtgt

SEQ ID NO: 258165 - DNA, 21 bp, Artificial sequence
  SiRNA target sequence
gacaaacgtatgcaaagtgtg

SEQ ID NO: 258166 - DNA, 21 bp, Artificial sequence
  SiRNA target sequence
acaaacgtatgcaaagtgtga

SEQ ID NO: 258167 - DNA, 21 bp, Artificial sequence
  SiRNA target sequence
caaacgtatgcaaagtgtgaa

SEQ ID NO: 258168 - DNA, 21 bp, Artificial sequence
  SiRNA target sequence
aaacgtatgcaaagtgtgaag

SEQ ID NO: 258169 - DNA, 21 bp, Artificial sequence
  SiRNA target sequence
aacgtatgcaaagtgtgaagc

SEQ ID NO: 258170 - DNA, 21 bp, Artificial sequence
  SiRNA target sequence
acgtatgcaaagtgtgaagcg

SEQ ID NO: 258171 - DNA, 21 bp, Artificial sequence
  SiRNA target sequence
cgtatgcaaagtgtgaagcga

SEQ ID NO: 258172 - DNA, 21 bp, Artificial sequence
  SiRNA target sequence
gtatgcaaagtgtgaagcgaa

SEQ ID NO: 258173 - DNA, 21 bp, Artificial sequence
  SiRNA target sequence
tatgcaaagtgtgaagcgaaa

SEQ ID NO: 258174 - DNA, 21 bp, Artificial sequence
  SiRNA target sequence
atgcaaagtgtgaagcgaaat

SEQ ID NO: 258175 - DNA, 21 bp, Artificial sequence
  SiRNA target sequence
tgcaaagtgtgaagcgaaatt

SEQ ID NO: 258176 - DNA, 21 bp, Artificial sequence
  SiRNA target sequence
gcaaagtgtgaagcgaaattc

SEQ ID NO: 258177 - DNA, 21 bp, Artificial sequence
  SiRNA target sequence
caaagtgtgaagcgaaattct

SEQ ID NO: 258178 - DNA, 21 bp, Artificial sequence
  SiRNA target sequence
aaagtgtgaagcgaaattctt

SEQ ID NO: 258179 - DNA, 21 bp, Artificial sequence
  SiRNA target sequence
aagtgtgaagcgaaattcttt

SEQ ID NO: 258180 - DNA, 21 bp, Artificial sequence
  SiRNA target sequence
agtgtgaagcgaaattctttg

SEQ ID NO: 258181 - DNA, 21 bp, Artificial sequence
  SiRNA target sequence
gtgtgaagcgaaattctttgg

SEQ ID NO: 258182 - DNA, 21 bp, Artificial sequence
  SiRNA target sequence
tgtgaagcgaaattctttgga

SEQ ID NO: 258183 - DNA, 21 bp, Artificial sequence
  SiRNA target sequence
gtgaagcgaaattctttggat

SEQ ID NO: 258184 - DNA, 21 bp, Artificial sequence
  SiRNA target sequence
tgaagcgaaattctttggatc

SEQ ID NO: 258185 - DNA, 21 bp, Artificial sequence
  SiRNA target sequence
gaagcgaaattctttggatca

SEQ ID NO: 258186 - DNA, 21 bp, Artificial sequence
  SiRNA target sequence
aagcgaaattctttggatcaa

SEQ ID NO: 258187 - DNA, 21 bp, Artificial sequence
  SiRNA target sequence
agcgaaattctttggatcaat

SEQ ID NO: 258188 - DNA, 21 bp, Artificial sequence
  SiRNA target sequence
gcgaaattctttggatcaata

SEQ ID NO: 258189 - DNA, 21 bp, Artificial sequence
  SiRNA target sequence
cgaaattctttggatcaataa

SEQ ID NO: 258190 - DNA, 21 bp, Artificial sequence
  SiRNA target sequence
gaaattctttggatcaataag

SEQ ID NO: 258191 - DNA, 21 bp, Artificial sequence
  SiRNA target sequence
aaattctttggatcaataagt

SEQ ID NO: 258192 - DNA, 21 bp, Artificial sequence
  SiRNA target sequence
aattctttggatcaataagtg

SEQ ID NO: 258193 - DNA, 21 bp, Artificial sequence
  SiRNA target sequence
attctttggatcaataagtgt

SEQ ID NO: 258194 - DNA, 21 bp, Artificial sequence
  SiRNA target sequence
ttctttggatcaataagtgtt

SEQ ID NO: 258195 - DNA, 21 bp, Artificial sequence
  SiRNA target sequence
tctttggatcaataagtgtta

SEQ ID NO: 258196 - DNA, 21 bp, Artificial sequence
  SiRNA target sequence
ctttggatcaataagtgttat

SEQ ID NO: 258197 - DNA, 21 bp, Artificial sequence
  SiRNA target sequence
tttggatcaataagtgttatt

SEQ ID NO: 258198 - DNA, 21 bp, Artificial sequence
  SiRNA target sequence
ttggatcaataagtgttattg

SEQ ID NO: 258199 - DNA, 21 bp, Artificial sequence
  SiRNA target sequence
tggatcaataagtgttattga

SEQ ID NO: 258200 - DNA, 21 bp, Artificial sequence
  SiRNA target sequence
ggatcaataagtgttattgat

SEQ ID NO: 258201 - DNA, 21 bp, Artificial sequence
  SiRNA target sequence
gatcaataagtgttattgatg

SEQ ID NO: 258202 - DNA, 21 bp, Artificial sequence
  SiRNA target sequence
atcaataagtgttattgatgt

SEQ ID NO: 258203 - DNA, 21 bp, Artificial sequence
  SiRNA target sequence
tcaataagtgttattgatgtc

SEQ ID NO: 258204 - DNA, 21 bp, Artificial sequence
  SiRNA target sequence
caataagtgttattgatgtct

SEQ ID NO: 258205 - DNA, 21 bp, Artificial sequence
  SiRNA target sequence
aataagtgttattgatgtctg

SEQ ID NO: 258206 - DNA, 21 bp, Artificial sequence
  SiRNA target sequence
ataagtgttattgatgtctgc

SEQ ID NO: 258207 - DNA, 21 bp, Artificial sequence
  SiRNA target sequence
taagtgttattgatgtctgca

SEQ ID NO: 258208 - DNA, 21 bp, Artificial sequence
  SiRNA target sequence
aagtgttattgatgtctgcat

SEQ ID NO: 258209 - DNA, 21 bp, Artificial sequence
  SiRNA target sequence
agtgttattgatgtctgcata

SEQ ID NO: 258210 - DNA, 21 bp, Artificial sequence
  SiRNA target sequence
gtgttattgatgtctgcatag

SEQ ID NO: 258211 - DNA, 21 bp, Artificial sequence
  SiRNA target sequence
tgttattgatgtctgcataga

SEQ ID NO: 258212 - DNA, 21 bp, Artificial sequence
  SiRNA target sequence
gttattgatgtctgcatagat

SEQ ID NO: 258213 - DNA, 21 bp, Artificial sequence
  SiRNA target sequence
ttattgatgtctgcatagata

SEQ ID NO: 258214 - DNA, 21 bp, Artificial sequence
  SiRNA target sequence
tattgatgtctgcatagatat

SEQ ID NO: 258215 - DNA, 21 bp, Artificial sequence
  SiRNA target sequence
attgatgtctgcatagatatc

SEQ ID NO: 258216 - DNA, 21 bp, Artificial sequence
  SiRNA target sequence
ttgatgtctgcatagatatca

SEQ ID NO: 258217 - DNA, 21 bp, Artificial sequence
  SiRNA target sequence
tgatgtctgcatagatatcat

SEQ ID NO: 258218 - DNA, 21 bp, Artificial sequence
  SiRNA target sequence
gatgtctgcatagatatcatt

SEQ ID NO: 258219 - DNA, 21 bp, Artificial sequence
  SiRNA target sequence
atgtctgcatagatatcatta

SEQ ID NO: 258220 - DNA, 21 bp, Artificial sequence
  SiRNA target sequence
tgtctgcatagatatcattag

SEQ ID NO: 258221 - DNA, 21 bp, Artificial sequence
  SiRNA target sequence
gtctgcatagatatcattagt

SEQ ID NO: 258222 - DNA, 21 bp, Artificial sequence
  SiRNA target sequence
tctgcatagatatcattagtg

SEQ ID NO: 258223 - DNA, 21 bp, Artificial sequence
  SiRNA target sequence
ctgcatagatatcattagtgc

SEQ ID NO: 258224 - DNA, 21 bp, Artificial sequence
  SiRNA target sequence
tgcatagatatcattagtgct

SEQ ID NO: 258225 - DNA, 21 bp, Artificial sequence
  SiRNA target sequence
gcatagatatcattagtgctt

SEQ ID NO: 258226 - DNA, 21 bp, Artificial sequence
  SiRNA target sequence
catagatatcattagtgcttt

SEQ ID NO: 258227 - DNA, 21 bp, Artificial sequence
  SiRNA target sequence
atagatatcattagtgctttg

SEQ ID NO: 258228 - DNA, 21 bp, Artificial sequence
  SiRNA target sequence
tagatatcattagtgctttgt

SEQ ID NO: 258229 - DNA, 21 bp, Artificial sequence
  SiRNA target sequence
agatatcattagtgctttgtt

SEQ ID NO: 258230 - DNA, 21 bp, Artificial sequence
  SiRNA target sequence
gatatcattagtgctttgttg

SEQ ID NO: 258231 - DNA, 21 bp, Artificial sequence
  SiRNA target sequence
atatcattagtgctttgttgc

SEQ ID NO: 258232 - DNA, 21 bp, Artificial sequence
  SiRNA target sequence
tatcattagtgctttgttgca

SEQ ID NO: 258233 - DNA, 21 bp, Artificial sequence
  SiRNA target sequence
atcattagtgctttgttgcaa

SEQ ID NO: 258234 - DNA, 21 bp, Artificial sequence
  SiRNA target sequence
tcattagtgctttgttgcaag

SEQ ID NO: 258235 - DNA, 21 bp, Artificial sequence
  SiRNA target sequence
cattagtgctttgttgcaagt

SEQ ID NO: 258236 - DNA, 21 bp, Artificial sequence
  SiRNA target sequence
attagtgctttgttgcaagtg

SEQ ID NO: 258237 - DNA, 21 bp, Artificial sequence
  SiRNA target sequence
ttagtgctttgttgcaagtga

SEQ ID NO: 258238 - DNA, 21 bp, Artificial sequence
  SiRNA target sequence
tagtgctttgttgcaagtgag

SEQ ID NO: 258239 - DNA, 21 bp, Artificial sequence
  SiRNA target sequence
agtgctttgttgcaagtgagc

SEQ ID NO: 258240 - DNA, 21 bp, Artificial sequence
  SiRNA target sequence
gtgctttgttgcaagtgagct

SEQ ID NO: 258241 - DNA, 21 bp, Artificial sequence
  SiRNA target sequence
tgctttgttgcaagtgagctt

SEQ ID NO: 258242 - DNA, 21 bp, Artificial sequence
  SiRNA target sequence
gctttgttgcaagtgagcttc

SEQ ID NO: 258243 - DNA, 21 bp, Artificial sequence
  SiRNA target sequence
ctttgttgcaagtgagcttcg

SEQ ID NO: 258244 - DNA, 21 bp, Artificial sequence
  SiRNA target sequence
tttgttgcaagtgagcttcgc

SEQ ID NO: 258245 - DNA, 21 bp, Artificial sequence
  SiRNA target sequence
ttgttgcaagtgagcttcgct

SEQ ID NO: 258246 - DNA, 21 bp, Artificial sequence
  SiRNA target sequence
tgttgcaagtgagcttcgcta

SEQ ID NO: 258247 - DNA, 21 bp, Artificial sequence
  SiRNA target sequence
gttgcaagtgagcttcgctaa

SEQ ID NO: 258248 - DNA, 21 bp, Artificial sequence
  SiRNA target sequence
ttgcaagtgagcttcgctaaa

SEQ ID NO: 258249 - DNA, 21 bp, Artificial sequence
  SiRNA target sequence
tgcaagtgagcttcgctaaac

SEQ ID NO: 258250 - DNA, 21 bp, Artificial sequence
  SiRNA target sequence
gcaagtgagcttcgctaaacc

SEQ ID NO: 258251 - DNA, 21 bp, Artificial sequence
  SiRNA target sequence
caagtgagcttcgctaaacct

SEQ ID NO: 258252 - DNA, 21 bp, Artificial sequence
  SiRNA target sequence
aagtgagcttcgctaaacctg

SEQ ID NO: 258253 - DNA, 21 bp, Artificial sequence
  SiRNA target sequence
agtgagcttcgctaaacctgg

SEQ ID NO: 258254 - DNA, 21 bp, Artificial sequence
  SiRNA target sequence
gtgagcttcgctaaacctgga

SEQ ID NO: 258255 - DNA, 21 bp, Artificial sequence
  SiRNA target sequence
tgagcttcgctaaacctggac

SEQ ID NO: 258256 - DNA, 21 bp, Artificial sequence
  SiRNA target sequence
gagcttcgctaaacctggact

SEQ ID NO: 258257 - DNA, 21 bp, Artificial sequence
  SiRNA target sequence
agcttcgctaaacctggactc

SEQ ID NO: 258258 - DNA, 21 bp, Artificial sequence
  SiRNA target sequence
gcttcgctaaacctggactca

SEQ ID NO: 258259 - DNA, 21 bp, Artificial sequence
  SiRNA target sequence
cttcgctaaacctggactcaa

SEQ ID NO: 258260 - DNA, 21 bp, Artificial sequence
  SiRNA target sequence
ttcgctaaacctggactcaag

SEQ ID NO: 258261 - DNA, 21 bp, Artificial sequence
  SiRNA target sequence
tcgctaaacctggactcaagt

SEQ ID NO: 258262 - DNA, 21 bp, Artificial sequence
  SiRNA target sequence
cgctaaacctggactcaagtt

SEQ ID NO: 258263 - DNA, 21 bp, Artificial sequence
  SiRNA target sequence
gctaaacctggactcaagtta

SEQ ID NO: 258264 - DNA, 21 bp, Artificial sequence
  SiRNA target sequence
ctaaacctggactcaagttag

SEQ ID NO: 258265 - DNA, 21 bp, Artificial sequence
  SiRNA target sequence
taaacctggactcaagttagc

SEQ ID NO: 258266 - DNA, 21 bp, Artificial sequence
  SiRNA target sequence
aaacctggactcaagttagct

SEQ ID NO: 258267 - DNA, 21 bp, Artificial sequence
  SiRNA target sequence
aacctggactcaagttagctt

SEQ ID NO: 258268 - DNA, 21 bp, Artificial sequence
  SiRNA target sequence
acctggactcaagttagcttc

SEQ ID NO: 258269 - DNA, 21 bp, Artificial sequence
  SiRNA target sequence
cctggactcaagttagcttct

SEQ ID NO: 258270 - DNA, 21 bp, Artificial sequence
  SiRNA target sequence
ctggactcaagttagcttcta

SEQ ID NO: 258271 - DNA, 21 bp, Artificial sequence
  SiRNA target sequence
tggactcaagttagcttctat

SEQ ID NO: 258272 - DNA, 21 bp, Artificial sequence
  SiRNA target sequence
ggactcaagttagcttctatt

SEQ ID NO: 258273 - DNA, 21 bp, Artificial sequence
  SiRNA target sequence
gactcaagttagcttctattg

SEQ ID NO: 258274 - DNA, 21 bp, Artificial sequence
  SiRNA target sequence
actcaagttagcttctattgc

SEQ ID NO: 258275 - DNA, 21 bp, Artificial sequence
  SiRNA target sequence
ctcaagttagcttctattgca

SEQ ID NO: 258276 - DNA, 21 bp, Artificial sequence
  SiRNA target sequence
tcaagttagcttctattgcag

SEQ ID NO: 258277 - DNA, 21 bp, Artificial sequence
  SiRNA target sequence
caagttagcttctattgcagt

SEQ ID NO: 258278 - DNA, 21 bp, Artificial sequence
  SiRNA target sequence
aagttagcttctattgcagta

SEQ ID NO: 258279 - DNA, 21 bp, Artificial sequence
  SiRNA target sequence
agttagcttctattgcagtag

SEQ ID NO: 258280 - DNA, 21 bp, Artificial sequence
  SiRNA target sequence
gttagcttctattgcagtaga

SEQ ID NO: 258281 - DNA, 21 bp, Artificial sequence
  SiRNA target sequence
ttagcttctattgcagtagaa

SEQ ID NO: 258282 - DNA, 21 bp, Artificial sequence
  SiRNA target sequence
tagcttctattgcagtagaag

SEQ ID NO: 258283 - DNA, 21 bp, Artificial sequence
  SiRNA target sequence
agcttctattgcagtagaagt

SEQ ID NO: 258284 - DNA, 21 bp, Artificial sequence
  SiRNA target sequence
gcttctattgcagtagaagtg

SEQ ID NO: 258285 - DNA, 21 bp, Artificial sequence
  SiRNA target sequence
cttctattgcagtagaagtgt

SEQ ID NO: 258286 - DNA, 21 bp, Artificial sequence
  SiRNA target sequence
ttctattgcagtagaagtgtt

SEQ ID NO: 258287 - DNA, 21 bp, Artificial sequence
  SiRNA target sequence
tctattgcagtagaagtgttc

SEQ ID NO: 258288 - DNA, 21 bp, Artificial sequence
  SiRNA target sequence
ctattgcagtagaagtgttca

SEQ ID NO: 258289 - DNA, 21 bp, Artificial sequence
  SiRNA target sequence
tattgcagtagaagtgttcag

SEQ ID NO: 258290 - DNA, 21 bp, Artificial sequence
  SiRNA target sequence
attgcagtagaagtgttcaga

SEQ ID NO: 258291 - DNA, 21 bp, Artificial sequence
  SiRNA target sequence
ttgcagtagaagtgttcagac

SEQ ID NO: 258292 - DNA, 21 bp, Artificial sequence
  SiRNA target sequence
tgcagtagaagtgttcagact

SEQ ID NO: 258293 - DNA, 21 bp, Artificial sequence
  SiRNA target sequence
gcagtagaagtgttcagactt

SEQ ID NO: 258294 - DNA, 21 bp, Artificial sequence
  SiRNA target sequence
cagtagaagtgttcagactta

SEQ ID NO: 258295 - DNA, 21 bp, Artificial sequence
  SiRNA target sequence
agtagaagtgttcagacttat

SEQ ID NO: 258296 - DNA, 21 bp, Artificial sequence
  SiRNA target sequence
gtagaagtgttcagacttatt

SEQ ID NO: 258297 - DNA, 21 bp, Artificial sequence
  SiRNA target sequence
tagaagtgttcagacttatta

SEQ ID NO: 258298 - DNA, 21 bp, Artificial sequence
  SiRNA target sequence
agaagtgttcagacttattaa

SEQ ID NO: 258299 - DNA, 21 bp, Artificial sequence
  SiRNA target sequence
gaagtgttcagacttattaag

SEQ ID NO: 258300 - DNA, 21 bp, Artificial sequence
  SiRNA target sequence
aagtgttcagacttattaaga

SEQ ID NO: 258301 - DNA, 21 bp, Artificial sequence
  SiRNA target sequence
agtgttcagacttattaagaa

SEQ ID NO: 258302 - DNA, 21 bp, Artificial sequence
  SiRNA target sequence
gtgttcagacttattaagaaa

SEQ ID NO: 258303 - DNA, 21 bp, Artificial sequence
  SiRNA target sequence
tgttcagacttattaagaaat

SEQ ID NO: 258304 - DNA, 21 bp, Artificial sequence
  SiRNA target sequence
gttcagacttattaagaaata

SEQ ID NO: 258305 - DNA, 21 bp, Artificial sequence
  SiRNA target sequence
ttcagacttattaagaaatat

SEQ ID NO: 258306 - DNA, 21 bp, Artificial sequence
  SiRNA target sequence
tcagacttattaagaaatatg

SEQ ID NO: 258307 - DNA, 21 bp, Artificial sequence
  SiRNA target sequence
cagacttattaagaaatatgt

SEQ ID NO: 258308 - DNA, 21 bp, Artificial sequence
  SiRNA target sequence
agacttattaagaaatatgtc

SEQ ID NO: 258309 - DNA, 21 bp, Artificial sequence
  SiRNA target sequence
gacttattaagaaatatgtct

SEQ ID NO: 258310 - DNA, 21 bp, Artificial sequence
  SiRNA target sequence
acttattaagaaatatgtctc

SEQ ID NO: 258311 - DNA, 21 bp, Artificial sequence
  SiRNA target sequence
cttattaagaaatatgtctca

SEQ ID NO: 258312 - DNA, 21 bp, Artificial sequence
  SiRNA target sequence
ttattaagaaatatgtctcag

SEQ ID NO: 258313 - DNA, 21 bp, Artificial sequence
  SiRNA target sequence
tattaagaaatatgtctcagg

SEQ ID NO: 258314 - DNA, 21 bp, Artificial sequence
  SiRNA target sequence
attaagaaatatgtctcagga

SEQ ID NO: 258315 - DNA, 21 bp, Artificial sequence
  SiRNA target sequence
ttaagaaatatgtctcaggaa

SEQ ID NO: 258316 - DNA, 21 bp, Artificial sequence
  SiRNA target sequence
taagaaatatgtctcaggaat

SEQ ID NO: 258317 - DNA, 21 bp, Artificial sequence
  SiRNA target sequence
aagaaatatgtctcaggaatt

SEQ ID NO: 258318 - DNA, 21 bp, Artificial sequence
  SiRNA target sequence
agaaatatgtctcaggaatta

SEQ ID NO: 258319 - DNA, 21 bp, Artificial sequence
  SiRNA target sequence
gaaatatgtctcaggaattaa

SEQ ID NO: 258320 - DNA, 21 bp, Artificial sequence
  SiRNA target sequence
aaatatgtctcaggaattaag

SEQ ID NO: 258321 - DNA, 21 bp, Artificial sequence
  SiRNA target sequence
aatatgtctcaggaattaaga

SEQ ID NO: 258322 - DNA, 21 bp, Artificial sequence
  SiRNA target sequence
atatgtctcaggaattaagat

SEQ ID NO: 258323 - DNA, 21 bp, Artificial sequence
  SiRNA target sequence
tatgtctcaggaattaagatt

SEQ ID NO: 258324 - DNA, 21 bp, Artificial sequence
  SiRNA target sequence
atgtctcaggaattaagatta

SEQ ID NO: 258325 - DNA, 21 bp, Artificial sequence
  SiRNA target sequence
tgtctcaggaattaagattaa

SEQ ID NO: 258326 - DNA, 21 bp, Artificial sequence
  SiRNA target sequence
gtctcaggaattaagattaac

SEQ ID NO: 258327 - DNA, 21 bp, Artificial sequence
  SiRNA target sequence
tctcaggaattaagattaaca

SEQ ID NO: 258328 - DNA, 21 bp, Artificial sequence
  SiRNA target sequence
ctcaggaattaagattaacac

SEQ ID NO: 258329 - DNA, 21 bp, Artificial sequence
  SiRNA target sequence
tcaggaattaagattaacacc

SEQ ID NO: 258330 - DNA, 21 bp, Artificial sequence
  SiRNA target sequence
caggaattaagattaacaccg

SEQ ID NO: 258331 - DNA, 21 bp, Artificial sequence
  SiRNA target sequence
aggaattaagattaacaccga

SEQ ID NO: 258332 - DNA, 21 bp, Artificial sequence
  SiRNA target sequence
ggaattaagattaacaccgat

SEQ ID NO: 258333 - DNA, 21 bp, Artificial sequence
  SiRNA target sequence
gaattaagattaacaccgata

SEQ ID NO: 258334 - DNA, 21 bp, Artificial sequence
  SiRNA target sequence
aattaagattaacaccgataa

SEQ ID NO: 258335 - DNA, 21 bp, Artificial sequence
  SiRNA target sequence
attaagattaacaccgataag

SEQ ID NO: 258336 - DNA, 21 bp, Artificial sequence
  SiRNA target sequence
ttaagattaacaccgataaga

SEQ ID NO: 258337 - DNA, 21 bp, Artificial sequence
  SiRNA target sequence
taagattaacaccgataagat

SEQ ID NO: 258338 - DNA, 21 bp, Artificial sequence
  SiRNA target sequence
aagattaacaccgataagata

SEQ ID NO: 258339 - DNA, 21 bp, Artificial sequence
  SiRNA target sequence
agattaacaccgataagataa

SEQ ID NO: 258340 - DNA, 21 bp, Artificial sequence
  SiRNA target sequence
gattaacaccgataagataaa

SEQ ID NO: 258341 - DNA, 21 bp, Artificial sequence
  SiRNA target sequence
attaacaccgataagataaaa

SEQ ID NO: 258342 - DNA, 21 bp, Artificial sequence
  SiRNA target sequence
ttaacaccgataagataaaag

SEQ ID NO: 258343 - DNA, 21 bp, Artificial sequence
  SiRNA target sequence
taacaccgataagataaaaga

SEQ ID NO: 258344 - DNA, 21 bp, Artificial sequence
  SiRNA target sequence
aacaccgataagataaaagaa

SEQ ID NO: 258345 - DNA, 21 bp, Artificial sequence
  SiRNA target sequence
acaccgataagataaaagaac

SEQ ID NO: 258346 - DNA, 21 bp, Artificial sequence
  SiRNA target sequence
caccgataagataaaagaact

SEQ ID NO: 258347 - DNA, 21 bp, Artificial sequence
  SiRNA target sequence
accgataagataaaagaactt

SEQ ID NO: 258348 - DNA, 21 bp, Artificial sequence
  SiRNA target sequence
ccgataagataaaagaacttt

SEQ ID NO: 258349 - DNA, 21 bp, Artificial sequence
  SiRNA target sequence
cgataagataaaagaactttt

SEQ ID NO: 258350 - DNA, 21 bp, Artificial sequence
  SiRNA target sequence
gataagataaaagaacttttg

SEQ ID NO: 258351 - DNA, 21 bp, Artificial sequence
  SiRNA target sequence
ataagataaaagaacttttga

SEQ ID NO: 258352 - DNA, 21 bp, Artificial sequence
  SiRNA target sequence
taagataaaagaacttttgac

SEQ ID NO: 258353 - DNA, 21 bp, Artificial sequence
  SiRNA target sequence
aagataaaagaacttttgact

SEQ ID NO: 258354 - DNA, 21 bp, Artificial sequence
  SiRNA target sequence
agataaaagaacttttgactt

SEQ ID NO: 258355 - DNA, 21 bp, Artificial sequence
  SiRNA target sequence
gataaaagaacttttgacttt

SEQ ID NO: 258356 - DNA, 21 bp, Artificial sequence
  SiRNA target sequence
ataaaagaacttttgactttt

SEQ ID NO: 258357 - DNA, 21 bp, Artificial sequence
  SiRNA target sequence
taaaagaacttttgacttttg

SEQ ID NO: 258358 - DNA, 21 bp, Artificial sequence
  SiRNA target sequence
aaaagaacttttgacttttgg

SEQ ID NO: 258359 - DNA, 21 bp, Artificial sequence
  SiRNA target sequence
aaagaacttttgacttttggt

SEQ ID NO: 258360 - DNA, 21 bp, Artificial sequence
  SiRNA target sequence
aagaacttttgacttttggta

SEQ ID NO: 258361 - DNA, 21 bp, Artificial sequence
  SiRNA target sequence
agaacttttgacttttggtaa

SEQ ID NO: 258362 - DNA, 21 bp, Artificial sequence
  SiRNA target sequence
gaacttttgacttttggtaaa

SEQ ID NO: 258363 - DNA, 21 bp, Artificial sequence
  SiRNA target sequence
aacttttgacttttggtaaac

SEQ ID NO: 258364 - DNA, 21 bp, Artificial sequence
  SiRNA target sequence
acttttgacttttggtaaaca

SEQ ID NO: 258365 - DNA, 21 bp, Artificial sequence
  SiRNA target sequence
cttttgacttttggtaaacaa

SEQ ID NO: 258366 - DNA, 21 bp, Artificial sequence
  SiRNA target sequence
ttttgacttttggtaaacaag

SEQ ID NO: 258367 - DNA, 21 bp, Artificial sequence
  SiRNA target sequence
tttgacttttggtaaacaagc

SEQ ID NO: 258368 - DNA, 21 bp, Artificial sequence
  SiRNA target sequence
ttgacttttggtaaacaagct

SEQ ID NO: 258369 - DNA, 21 bp, Artificial sequence
  SiRNA target sequence
tgacttttggtaaacaagctt

SEQ ID NO: 258370 - DNA, 21 bp, Artificial sequence
  SiRNA target sequence
gacttttggtaaacaagcttt

SEQ ID NO: 258371 - DNA, 21 bp, Artificial sequence
  SiRNA target sequence
acttttggtaaacaagctttg

SEQ ID NO: 258372 - DNA, 21 bp, Artificial sequence
  SiRNA target sequence
cttttggtaaacaagctttga

SEQ ID NO: 258373 - DNA, 21 bp, Artificial sequence
  SiRNA target sequence
ttttggtaaacaagctttgag

SEQ ID NO: 258374 - DNA, 21 bp, Artificial sequence
  SiRNA target sequence
tttggtaaacaagctttgagt

SEQ ID NO: 258375 - DNA, 21 bp, Artificial sequence
  SiRNA target sequence
ttggtaaacaagctttgagta

SEQ ID NO: 258376 - DNA, 21 bp, Artificial sequence
  SiRNA target sequence
tggtaaacaagctttgagtag

SEQ ID NO: 258377 - DNA, 21 bp, Artificial sequence
  SiRNA target sequence
ggtaaacaagctttgagtagt

SEQ ID NO: 258378 - DNA, 21 bp, Artificial sequence
  SiRNA target sequence
gtaaacaagctttgagtagta

SEQ ID NO: 258379 - DNA, 21 bp, Artificial sequence
  SiRNA target sequence
taaacaagctttgagtagtag

SEQ ID NO: 258380 - DNA, 21 bp, Artificial sequence
  SiRNA target sequence
aaacaagctttgagtagtagt

SEQ ID NO: 258381 - DNA, 21 bp, Artificial sequence
  SiRNA target sequence
aacaagctttgagtagtagta

SEQ ID NO: 258382 - DNA, 21 bp, Artificial sequence
  SiRNA target sequence
acaagctttgagtagtagtaa

SEQ ID NO: 258383 - DNA, 21 bp, Artificial sequence
  SiRNA target sequence
caagctttgagtagtagtaac

SEQ ID NO: 258384 - DNA, 21 bp, Artificial sequence
  SiRNA target sequence
aagctttgagtagtagtaacc

SEQ ID NO: 258385 - DNA, 21 bp, Artificial sequence
  SiRNA target sequence
agctttgagtagtagtaaccc

SEQ ID NO: 258386 - DNA, 21 bp, Artificial sequence
  SiRNA target sequence
gctttgagtagtagtaaccct

SEQ ID NO: 258387 - DNA, 21 bp, Artificial sequence
  SiRNA target sequence
ctttgagtagtagtaacccta

SEQ ID NO: 258388 - DNA, 21 bp, Artificial sequence
  SiRNA target sequence
tttgagtagtagtaaccctat

SEQ ID NO: 258389 - DNA, 21 bp, Artificial sequence
  SiRNA target sequence
ttgagtagtagtaaccctatt

SEQ ID NO: 258390 - DNA, 21 bp, Artificial sequence
  SiRNA target sequence
tgagtagtagtaaccctatta

SEQ ID NO: 258391 - DNA, 21 bp, Artificial sequence
  SiRNA target sequence
gagtagtagtaaccctattat

SEQ ID NO: 258392 - DNA, 21 bp, Artificial sequence
  SiRNA target sequence
agtagtagtaaccctattatt

SEQ ID NO: 258393 - DNA, 21 bp, Artificial sequence
  SiRNA target sequence
gtagtagtaaccctattattc

SEQ ID NO: 258394 - DNA, 21 bp, Artificial sequence
  SiRNA target sequence
tagtagtaaccctattattca

SEQ ID NO: 258395 - DNA, 21 bp, Artificial sequence
  SiRNA target sequence
agtagtaaccctattattcag

SEQ ID NO: 258396 - DNA, 21 bp, Artificial sequence
  SiRNA target sequence
gtagtaaccctattattcagg

SEQ ID NO: 258397 - DNA, 21 bp, Artificial sequence
  SiRNA target sequence
tagtaaccctattattcaggt

SEQ ID NO: 258398 - DNA, 21 bp, Artificial sequence
  SiRNA target sequence
agtaaccctattattcaggtt

SEQ ID NO: 258399 - DNA, 21 bp, Artificial sequence
  SiRNA target sequence
gtaaccctattattcaggttt

SEQ ID NO: 258400 - DNA, 21 bp, Artificial sequence
  SiRNA target sequence
taaccctattattcaggtttc

SEQ ID NO: 258401 - DNA, 21 bp, Artificial sequence
  SiRNA target sequence
aaccctattattcaggtttcc

SEQ ID NO: 258402 - DNA, 21 bp, Artificial sequence
  SiRNA target sequence
accctattattcaggtttcca

SEQ ID NO: 258403 - DNA, 21 bp, Artificial sequence
  SiRNA target sequence
ccctattattcaggtttccat

SEQ ID NO: 258404 - DNA, 21 bp, Artificial sequence
  SiRNA target sequence
cctattattcaggtttccatg

SEQ ID NO: 258405 - DNA, 21 bp, Artificial sequence
  SiRNA target sequence
ctattattcaggtttccatgc

SEQ ID NO: 258406 - DNA, 21 bp, Artificial sequence
  SiRNA target sequence
tattattcaggtttccatgca

SEQ ID NO: 258407 - DNA, 21 bp, Artificial sequence
  SiRNA target sequence
attattcaggtttccatgcaa

SEQ ID NO: 258408 - DNA, 21 bp, Artificial sequence
  SiRNA target sequence
ttattcaggtttccatgcaaa

SEQ ID NO: 258409 - DNA, 21 bp, Artificial sequence
  SiRNA target sequence
tattcaggtttccatgcaaat

SEQ ID NO: 258410 - DNA, 21 bp, Artificial sequence
  SiRNA target sequence
attcaggtttccatgcaaatg

SEQ ID NO: 258411 - DNA, 21 bp, Artificial sequence
  SiRNA target sequence
ttcaggtttccatgcaaatgg

SEQ ID NO: 258412 - DNA, 21 bp, Artificial sequence
  SiRNA target sequence
tcaggtttccatgcaaatgga

SEQ ID NO: 258413 - DNA, 21 bp, Artificial sequence
  SiRNA target sequence
caggtttccatgcaaatggat

SEQ ID NO: 258414 - DNA, 21 bp, Artificial sequence
  SiRNA target sequence
aggtttccatgcaaatggata

SEQ ID NO: 258415 - DNA, 21 bp, Artificial sequence
  SiRNA target sequence
ggtttccatgcaaatggatat

SEQ ID NO: 258416 - DNA, 21 bp, Artificial sequence
  SiRNA target sequence
gtttccatgcaaatggatatg

SEQ ID NO: 258417 - DNA, 21 bp, Artificial sequence
  SiRNA target sequence
tttccatgcaaatggatatgc

SEQ ID NO: 258418 - DNA, 21 bp, Artificial sequence
  SiRNA target sequence
ttccatgcaaatggatatgcc

SEQ ID NO: 258419 - DNA, 21 bp, Artificial sequence
  SiRNA target sequence
tccatgcaaatggatatgcca

SEQ ID NO: 258420 - DNA, 21 bp, Artificial sequence
  SiRNA target sequence
ccatgcaaatggatatgccag

SEQ ID NO: 258421 - DNA, 21 bp, Artificial sequence
  SiRNA target sequence
catgcaaatggatatgccaga

SEQ ID NO: 258422 - DNA, 21 bp, Artificial sequence
  SiRNA target sequence
atgcaaatggatatgccagaa

SEQ ID NO: 258423 - DNA, 21 bp, Artificial sequence
  SiRNA target sequence
tgcaaatggatatgccagaag

SEQ ID NO: 258424 - DNA, 21 bp, Artificial sequence
  SiRNA target sequence
gcaaatggatatgccagaagt

SEQ ID NO: 258425 - DNA, 21 bp, Artificial sequence
  SiRNA target sequence
caaatggatatgccagaagtt

SEQ ID NO: 258426 - DNA, 21 bp, Artificial sequence
  SiRNA target sequence
aaatggatatgccagaagttg

SEQ ID NO: 258427 - DNA, 21 bp, Artificial sequence
  SiRNA target sequence
aatggatatgccagaagttga

SEQ ID NO: 258428 - DNA, 21 bp, Artificial sequence
  SiRNA target sequence
atggatatgccagaagttgat

SEQ ID NO: 258429 - DNA, 21 bp, Artificial sequence
  SiRNA target sequence
tggatatgccagaagttgatc

SEQ ID NO: 258430 - DNA, 21 bp, Artificial sequence
  SiRNA target sequence
ggatatgccagaagttgatcc

SEQ ID NO: 258431 - DNA, 21 bp, Artificial sequence
  SiRNA target sequence
gatatgccagaagttgatcct

SEQ ID NO: 258432 - DNA, 21 bp, Artificial sequence
  SiRNA target sequence
atatgccagaagttgatcctt

SEQ ID NO: 258433 - DNA, 21 bp, Artificial sequence
  SiRNA target sequence
tatgccagaagttgatccttc

SEQ ID NO: 258434 - DNA, 21 bp, Artificial sequence
  SiRNA target sequence
atgccagaagttgatccttca

SEQ ID NO: 258435 - DNA, 21 bp, Artificial sequence
  SiRNA target sequence
tgccagaagttgatccttcaa

SEQ ID NO: 258436 - DNA, 21 bp, Artificial sequence
  SiRNA target sequence
gccagaagttgatccttcaat

SEQ ID NO: 258437 - DNA, 21 bp, Artificial sequence
  SiRNA target sequence
ccagaagttgatccttcaatt

SEQ ID NO: 258438 - DNA, 21 bp, Artificial sequence
  SiRNA target sequence
cagaagttgatccttcaattt

SEQ ID NO: 258439 - DNA, 21 bp, Artificial sequence
  SiRNA target sequence
agaagttgatccttcaatttt

SEQ ID NO: 258440 - DNA, 21 bp, Artificial sequence
  SiRNA target sequence
gaagttgatccttcaatttta

SEQ ID NO: 258441 - DNA, 21 bp, Artificial sequence
  SiRNA target sequence
aagttgatccttcaattttat

SEQ ID NO: 258442 - DNA, 21 bp, Artificial sequence
  SiRNA target sequence
agttgatccttcaattttatt

SEQ ID NO: 258443 - DNA, 21 bp, Artificial sequence
  SiRNA target sequence
gttgatccttcaattttatta

SEQ ID NO: 258444 - DNA, 21 bp, Artificial sequence
  SiRNA target sequence
ttgatccttcaattttattac

SEQ ID NO: 258445 - DNA, 21 bp, Artificial sequence
  SiRNA target sequence
tgatccttcaattttattaca

SEQ ID NO: 258446 - DNA, 21 bp, Artificial sequence
  SiRNA target sequence
gatccttcaattttattacaa

SEQ ID NO: 258447 - DNA, 21 bp, Artificial sequence
  SiRNA target sequence
atccttcaattttattacaac

SEQ ID NO: 258448 - DNA, 21 bp, Artificial sequence
  SiRNA target sequence
tccttcaattttattacaacc

SEQ ID NO: 258449 - DNA, 21 bp, Artificial sequence
  SiRNA target sequence
ccttcaattttattacaacct

SEQ ID NO: 258450 - DNA, 21 bp, Artificial sequence
  SiRNA target sequence
cttcaattttattacaacctg

SEQ ID NO: 258451 - DNA, 21 bp, Artificial sequence
  SiRNA target sequence
ttcaattttattacaacctgg

SEQ ID NO: 258452 - DNA, 21 bp, Artificial sequence
  SiRNA target sequence
tcaattttattacaacctggt

SEQ ID NO: 258453 - DNA, 21 bp, Artificial sequence
  SiRNA target sequence
caattttattacaacctggtg

SEQ ID NO: 258454 - DNA, 21 bp, Artificial sequence
  SiRNA target sequence
aattttattacaacctggtgt

SEQ ID NO: 258455 - DNA, 21 bp, Artificial sequence
  SiRNA target sequence
attttattacaacctggtgtt

SEQ ID NO: 258456 - DNA, 21 bp, Artificial sequence
  SiRNA target sequence
ttttattacaacctggtgtta

SEQ ID NO: 258457 - DNA, 21 bp, Artificial sequence
  SiRNA target sequence
tttattacaacctggtgttat

SEQ ID NO: 258458 - DNA, 21 bp, Artificial sequence
  SiRNA target sequence
ttattacaacctggtgttata

SEQ ID NO: 258459 - DNA, 21 bp, Artificial sequence
  SiRNA target sequence
tattacaacctggtgttatag

SEQ ID NO: 258460 - DNA, 21 bp, Artificial sequence
  SiRNA target sequence
attacaacctggtgttatagt

SEQ ID NO: 258461 - DNA, 21 bp, Artificial sequence
  SiRNA target sequence
ttacaacctggtgttatagta

SEQ ID NO: 258462 - DNA, 21 bp, Artificial sequence
  SiRNA target sequence
tacaacctggtgttatagtaa

SEQ ID NO: 258463 - DNA, 21 bp, Artificial sequence
  SiRNA target sequence
acaacctggtgttatagtaag

SEQ ID NO: 258464 - DNA, 21 bp, Artificial sequence
  SiRNA target sequence
caacctggtgttatagtaagt

SEQ ID NO: 258465 - DNA, 21 bp, Artificial sequence
  SiRNA target sequence
aacctggtgttatagtaagtg

SEQ ID NO: 258466 - DNA, 21 bp, Artificial sequence
  SiRNA target sequence
acctggtgttatagtaagtgc

SEQ ID NO: 258467 - DNA, 21 bp, Artificial sequence
  SiRNA target sequence
cctggtgttatagtaagtgca

SEQ ID NO: 258468 - DNA, 21 bp, Artificial sequence
  SiRNA target sequence
ctggtgttatagtaagtgcaa

SEQ ID NO: 258469 - DNA, 21 bp, Artificial sequence
  SiRNA target sequence
tggtgttatagtaagtgcaat

SEQ ID NO: 258470 - DNA, 21 bp, Artificial sequence
  SiRNA target sequence
ggtgttatagtaagtgcaatc

SEQ ID NO: 258471 - DNA, 21 bp, Artificial sequence
  SiRNA target sequence
gtgttatagtaagtgcaatct

SEQ ID NO: 258472 - DNA, 21 bp, Artificial sequence
  SiRNA target sequence
tgttatagtaagtgcaatctt

SEQ ID NO: 258473 - DNA, 21 bp, Artificial sequence
  SiRNA target sequence
gttatagtaagtgcaatcttt

SEQ ID NO: 258474 - DNA, 21 bp, Artificial sequence
  SiRNA target sequence
ttatagtaagtgcaatctttt

SEQ ID NO: 258475 - DNA, 21 bp, Artificial sequence
  SiRNA target sequence
tatagtaagtgcaatcttttt

SEQ ID NO: 258476 - DNA, 21 bp, Artificial sequence
  SiRNA target sequence
atagtaagtgcaatcttttta

SEQ ID NO: 258477 - DNA, 21 bp, Artificial sequence
  SiRNA target sequence
tagtaagtgcaatctttttag

SEQ ID NO: 258478 - DNA, 21 bp, Artificial sequence
  SiRNA target sequence
agtaagtgcaatctttttagt

SEQ ID NO: 258479 - DNA, 21 bp, Artificial sequence
  SiRNA target sequence
gtaagtgcaatctttttagtt

SEQ ID NO: 258480 - DNA, 21 bp, Artificial sequence
  SiRNA target sequence
taagtgcaatctttttagttt

SEQ ID NO: 258481 - DNA, 21 bp, Artificial sequence
  SiRNA target sequence
aagtgcaatctttttagtttt

SEQ ID NO: 258482 - DNA, 21 bp, Artificial sequence
  SiRNA target sequence
agtgcaatctttttagtttta

SEQ ID NO: 258483 - DNA, 21 bp, Artificial sequence
  SiRNA target sequence
gtgcaatctttttagttttaa

SEQ ID NO: 258484 - DNA, 21 bp, Artificial sequence
  SiRNA target sequence
tgcaatctttttagttttaag

SEQ ID NO: 258485 - DNA, 21 bp, Artificial sequence
  SiRNA target sequence
gcaatctttttagttttaagt

SEQ ID NO: 258486 - DNA, 21 bp, Artificial sequence
  SiRNA target sequence
caatctttttagttttaagtg

SEQ ID NO: 258487 - DNA, 21 bp, Artificial sequence
  SiRNA target sequence
aatctttttagttttaagtgt

SEQ ID NO: 258488 - DNA, 21 bp, Artificial sequence
  SiRNA target sequence
atctttttagttttaagtgta

SEQ ID NO: 258489 - DNA, 21 bp, Artificial sequence
  SiRNA target sequence
tctttttagttttaagtgtag

SEQ ID NO: 258490 - DNA, 21 bp, Artificial sequence
  SiRNA target sequence
ctttttagttttaagtgtagt

SEQ ID NO: 258491 - DNA, 21 bp, Artificial sequence
  SiRNA target sequence
tttttagttttaagtgtagtt

SEQ ID NO: 258492 - DNA, 21 bp, Artificial sequence
  SiRNA target sequence
ttttagttttaagtgtagttt

SEQ ID NO: 258493 - DNA, 21 bp, Artificial sequence
  SiRNA target sequence
tttagttttaagtgtagtttt

SEQ ID NO: 258494 - DNA, 21 bp, Artificial sequence
  SiRNA target sequence
ttagttttaagtgtagttttt

SEQ ID NO: 258495 - DNA, 21 bp, Artificial sequence
  SiRNA target sequence
tagttttaagtgtagttttta

SEQ ID NO: 258496 - DNA, 21 bp, Artificial sequence
  SiRNA target sequence
agttttaagtgtagtttttac

SEQ ID NO: 258497 - DNA, 21 bp, Artificial sequence
  SiRNA target sequence
gttttaagtgtagtttttact

SEQ ID NO: 258498 - DNA, 21 bp, Artificial sequence
  SiRNA target sequence
ttttaagtgtagtttttacta

SEQ ID NO: 258499 - DNA, 21 bp, Artificial sequence
  SiRNA target sequence
tttaagtgtagtttttactaa

SEQ ID NO: 258500 - DNA, 21 bp, Artificial sequence
  SiRNA target sequence
ttaagtgtagtttttactaag

SEQ ID NO: 258501 - DNA, 21 bp, Artificial sequence
  SiRNA target sequence
taagtgtagtttttactaaga

SEQ ID NO: 258502 - DNA, 21 bp, Artificial sequence
  SiRNA target sequence
aagtgtagtttttactaagac

SEQ ID NO: 258503 - DNA, 21 bp, Artificial sequence
  SiRNA target sequence
agtgtagtttttactaagacc

SEQ ID NO: 258504 - DNA, 21 bp, Artificial sequence
  SiRNA target sequence
gtgtagtttttactaagaccc

SEQ ID NO: 258505 - DNA, 21 bp, Artificial sequence
  SiRNA target sequence
tgtagtttttactaagaccct

SEQ ID NO: 258506 - DNA, 21 bp, Artificial sequence
  SiRNA target sequence
gtagtttttactaagaccctc

SEQ ID NO: 258507 - DNA, 21 bp, Artificial sequence
  SiRNA target sequence
tagtttttactaagaccctcc

SEQ ID NO: 258508 - DNA, 21 bp, Artificial sequence
  SiRNA target sequence
agtttttactaagaccctccc

SEQ ID NO: 258509 - DNA, 21 bp, Artificial sequence
  SiRNA target sequence
gtttttactaagaccctccca

SEQ ID NO: 258510 - DNA, 21 bp, Artificial sequence
  SiRNA target sequence
tttttactaagaccctcccaa

SEQ ID NO: 258511 - DNA, 21 bp, Artificial sequence
  SiRNA target sequence
ttttactaagaccctcccaag

SEQ ID NO: 258512 - DNA, 21 bp, Artificial sequence
  SiRNA target sequence
tttactaagaccctcccaagt

SEQ ID NO: 258513 - DNA, 21 bp, Artificial sequence
  SiRNA target sequence
ttactaagaccctcccaagta

SEQ ID NO: 258514 - DNA, 21 bp, Artificial sequence
  SiRNA target sequence
tactaagaccctcccaagtaa

SEQ ID NO: 258515 - DNA, 21 bp, Artificial sequence
  SiRNA target sequence
actaagaccctcccaagtaag

SEQ ID NO: 258516 - DNA, 21 bp, Artificial sequence
  SiRNA target sequence
ctaagaccctcccaagtaaga

SEQ ID NO: 258517 - DNA, 21 bp, Artificial sequence
  SiRNA target sequence
taagaccctcccaagtaagac

SEQ ID NO: 258518 - DNA, 21 bp, Artificial sequence
  SiRNA target sequence
aagaccctcccaagtaagact

SEQ ID NO: 258519 - DNA, 21 bp, Artificial sequence
  SiRNA target sequence
agaccctcccaagtaagactg

SEQ ID NO: 258520 - DNA, 21 bp, Artificial sequence
  SiRNA target sequence
gaccctcccaagtaagactgg

SEQ ID NO: 258521 - DNA, 21 bp, Artificial sequence
  SiRNA target sequence
accctcccaagtaagactggt

SEQ ID NO: 258522 - DNA, 21 bp, Artificial sequence
  SiRNA target sequence
ccctcccaagtaagactggtg

SEQ ID NO: 258523 - DNA, 21 bp, Artificial sequence
  SiRNA target sequence
cctcccaagtaagactggtgt

SEQ ID NO: 258524 - DNA, 21 bp, Artificial sequence
  SiRNA target sequence
ctcccaagtaagactggtgtt

SEQ ID NO: 258525 - DNA, 21 bp, Artificial sequence
  SiRNA target sequence
tcccaagtaagactggtgttg

SEQ ID NO: 258526 - DNA, 21 bp, Artificial sequence
  SiRNA target sequence
cccaagtaagactggtgttga

SEQ ID NO: 258527 - DNA, 21 bp, Artificial sequence
  SiRNA target sequence
ccaagtaagactggtgttgag

SEQ ID NO: 258528 - DNA, 21 bp, Artificial sequence
  SiRNA target sequence
caagtaagactggtgttgagg

SEQ ID NO: 258529 - DNA, 21 bp, Artificial sequence
  SiRNA target sequence
aagtaagactggtgttgaggc

SEQ ID NO: 258530 - DNA, 21 bp, Artificial sequence
  SiRNA target sequence
agtaagactggtgttgaggcg

SEQ ID NO: 258531 - DNA, 21 bp, Artificial sequence
  SiRNA target sequence
gtaagactggtgttgaggcga

SEQ ID NO: 258532 - DNA, 21 bp, Artificial sequence
  SiRNA target sequence
taagactggtgttgaggcgat

SEQ ID NO: 258533 - DNA, 21 bp, Artificial sequence
  SiRNA target sequence
aagactggtgttgaggcgatg

SEQ ID NO: 258534 - DNA, 21 bp, Artificial sequence
  SiRNA target sequence
agactggtgttgaggcgatgt

SEQ ID NO: 258535 - DNA, 21 bp, Artificial sequence
  SiRNA target sequence
gactggtgttgaggcgatgtt

SEQ ID NO: 258536 - DNA, 21 bp, Artificial sequence
  SiRNA target sequence
actggtgttgaggcgatgtta

SEQ ID NO: 258537 - DNA, 21 bp, Artificial sequence
  SiRNA target sequence
ctggtgttgaggcgatgttaa

SEQ ID NO: 258538 - DNA, 21 bp, Artificial sequence
  SiRNA target sequence
tggtgttgaggcgatgttaaa

SEQ ID NO: 258539 - DNA, 21 bp, Artificial sequence
  SiRNA target sequence
ggtgttgaggcgatgttaaag

SEQ ID NO: 258540 - DNA, 21 bp, Artificial sequence
  SiRNA target sequence
gtgttgaggcgatgttaaaga

SEQ ID NO: 258541 - DNA, 21 bp, Artificial sequence
  SiRNA target sequence
tgttgaggcgatgttaaagag

SEQ ID NO: 258542 - DNA, 21 bp, Artificial sequence
  SiRNA target sequence
gttgaggcgatgttaaagagg

SEQ ID NO: 258543 - DNA, 21 bp, Artificial sequence
  SiRNA target sequence
ttgaggcgatgttaaagagga

SEQ ID NO: 258544 - DNA, 21 bp, Artificial sequence
  SiRNA target sequence
tgaggcgatgttaaagaggac

SEQ ID NO: 258545 - DNA, 21 bp, Artificial sequence
  SiRNA target sequence
gaggcgatgttaaagaggact

SEQ ID NO: 258546 - DNA, 21 bp, Artificial sequence
  SiRNA target sequence
aggcgatgttaaagaggactg

SEQ ID NO: 258547 - DNA, 21 bp, Artificial sequence
  SiRNA target sequence
ggcgatgttaaagaggactgg

SEQ ID NO: 258548 - DNA, 21 bp, Artificial sequence
  SiRNA target sequence
gcgatgttaaagaggactgga

SEQ ID NO: 258549 - DNA, 21 bp, Artificial sequence
  SiRNA target sequence
cgatgttaaagaggactggag

SEQ ID NO: 258550 - DNA, 21 bp, Artificial sequence
  SiRNA target sequence
gatgttaaagaggactggaga

SEQ ID NO: 258551 - DNA, 21 bp, Artificial sequence
  SiRNA target sequence
atgttaaagaggactggagaa

SEQ ID NO: 258552 - DNA, 21 bp, Artificial sequence
  SiRNA target sequence
tgttaaagaggactggagaac

SEQ ID NO: 258553 - DNA, 21 bp, Artificial sequence
  SiRNA target sequence
gttaaagaggactggagaact

SEQ ID NO: 258554 - DNA, 21 bp, Artificial sequence
  SiRNA target sequence
ttaaagaggactggagaacta

SEQ ID NO: 258555 - DNA, 21 bp, Artificial sequence
  SiRNA target sequence
taaagaggactggagaactag

SEQ ID NO: 258556 - DNA, 21 bp, Artificial sequence
  SiRNA target sequence
aaagaggactggagaactagg

SEQ ID NO: 258557 - DNA, 21 bp, Artificial sequence
  SiRNA target sequence
aagaggactggagaactagga

SEQ ID NO: 258558 - DNA, 21 bp, Artificial sequence
  SiRNA target sequence
agaggactggagaactaggac

SEQ ID NO: 258559 - DNA, 21 bp, Artificial sequence
  SiRNA target sequence
gaggactggagaactaggacg

SEQ ID NO: 258560 - DNA, 21 bp, Artificial sequence
  SiRNA target sequence
aggactggagaactaggacgc

SEQ ID NO: 258561 - DNA, 21 bp, Artificial sequence
  SiRNA target sequence
ggactggagaactaggacgct

SEQ ID NO: 258562 - DNA, 21 bp, Artificial sequence
  SiRNA target sequence
gactggagaactaggacgctc

SEQ ID NO: 258563 - DNA, 21 bp, Artificial sequence
  SiRNA target sequence
actggagaactaggacgctct

SEQ ID NO: 258564 - DNA, 21 bp, Artificial sequence
  SiRNA target sequence
ctggagaactaggacgctctg

SEQ ID NO: 258565 - DNA, 21 bp, Artificial sequence
  SiRNA target sequence
tggagaactaggacgctctgc

SEQ ID NO: 258566 - DNA, 21 bp, Artificial sequence
  SiRNA target sequence
ggagaactaggacgctctgca

SEQ ID NO: 258567 - DNA, 21 bp, Artificial sequence
  SiRNA target sequence
gagaactaggacgctctgcaa

SEQ ID NO: 258568 - DNA, 21 bp, Artificial sequence
  SiRNA target sequence
agaactaggacgctctgcaaa

SEQ ID NO: 258569 - DNA, 21 bp, Artificial sequence
  SiRNA target sequence
gaactaggacgctctgcaaag

SEQ ID NO: 258570 - DNA, 21 bp, Artificial sequence
  SiRNA target sequence
aactaggacgctctgcaaagg

SEQ ID NO: 258571 - DNA, 21 bp, Artificial sequence
  SiRNA target sequence
actaggacgctctgcaaaggg

SEQ ID NO: 258572 - DNA, 21 bp, Artificial sequence
  SiRNA target sequence
ctaggacgctctgcaaagggc

SEQ ID NO: 258573 - DNA, 21 bp, Artificial sequence
  SiRNA target sequence
taggacgctctgcaaagggca

SEQ ID NO: 258574 - DNA, 21 bp, Artificial sequence
  SiRNA target sequence
aggacgctctgcaaagggcat

SEQ ID NO: 258575 - DNA, 21 bp, Artificial sequence
  SiRNA target sequence
ggacgctctgcaaagggcatc

SEQ ID NO: 258576 - DNA, 21 bp, Artificial sequence
  SiRNA target sequence
gacgctctgcaaagggcatca

SEQ ID NO: 258577 - DNA, 21 bp, Artificial sequence
  SiRNA target sequence
acgctctgcaaagggcatcat

SEQ ID NO: 258578 - DNA, 21 bp, Artificial sequence
  SiRNA target sequence
cgctctgcaaagggcatcatg

SEQ ID NO: 258579 - DNA, 21 bp, Artificial sequence
  SiRNA target sequence
gctctgcaaagggcatcatgg

SEQ ID NO: 258580 - DNA, 21 bp, Artificial sequence
  SiRNA target sequence
ctctgcaaagggcatcatgga

SEQ ID NO: 258581 - DNA, 21 bp, Artificial sequence
  SiRNA target sequence
tctgcaaagggcatcatggat

SEQ ID NO: 258582 - DNA, 21 bp, Artificial sequence
  SiRNA target sequence
ctgcaaagggcatcatggatc

SEQ ID NO: 258583 - DNA, 21 bp, Artificial sequence
  SiRNA target sequence
tgcaaagggcatcatggatct

SEQ ID NO: 258584 - DNA, 21 bp, Artificial sequence
  SiRNA target sequence
gcaaagggcatcatggatctc

SEQ ID NO: 258585 - DNA, 21 bp, Artificial sequence
  SiRNA target sequence
caaagggcatcatggatctca

SEQ ID NO: 258586 - DNA, 21 bp, Artificial sequence
  SiRNA target sequence
aaagggcatcatggatctcaa

SEQ ID NO: 258587 - DNA, 21 bp, Artificial sequence
  SiRNA target sequence
aagggcatcatggatctcaat

SEQ ID NO: 258588 - DNA, 21 bp, Artificial sequence
  SiRNA target sequence
agggcatcatggatctcaata

SEQ ID NO: 258589 - DNA, 21 bp, Artificial sequence
  SiRNA target sequence
gggcatcatggatctcaatac

SEQ ID NO: 258590 - DNA, 21 bp, Artificial sequence
  SiRNA target sequence
ggcatcatggatctcaataca

SEQ ID NO: 258591 - DNA, 21 bp, Artificial sequence
  SiRNA target sequence
gcatcatggatctcaatacag

SEQ ID NO: 258592 - DNA, 21 bp, Artificial sequence
  SiRNA target sequence
catcatggatctcaatacagt

SEQ ID NO: 258593 - DNA, 21 bp, Artificial sequence
  SiRNA target sequence
atcatggatctcaatacagtt

SEQ ID NO: 258594 - DNA, 21 bp, Artificial sequence
  SiRNA target sequence
tcatggatctcaatacagttc

SEQ ID NO: 258595 - DNA, 21 bp, Artificial sequence
  SiRNA target sequence
catggatctcaatacagttct

SEQ ID NO: 258596 - DNA, 21 bp, Artificial sequence
  SiRNA target sequence
atggatctcaatacagttctt

SEQ ID NO: 258597 - DNA, 21 bp, Artificial sequence
  SiRNA target sequence
tggatctcaatacagttctta

SEQ ID NO: 258598 - DNA, 21 bp, Artificial sequence
  SiRNA target sequence
ggatctcaatacagttcttaa

SEQ ID NO: 258599 - DNA, 21 bp, Artificial sequence
  SiRNA target sequence
gatctcaatacagttcttaat

SEQ ID NO: 258600 - DNA, 21 bp, Artificial sequence
  SiRNA target sequence
atctcaatacagttcttaata

SEQ ID NO: 258601 - DNA, 21 bp, Artificial sequence
  SiRNA target sequence
tctcaatacagttcttaatac

SEQ ID NO: 258602 - DNA, 21 bp, Artificial sequence
  SiRNA target sequence
ctcaatacagttcttaataca

SEQ ID NO: 258603 - DNA, 21 bp, Artificial sequence
  SiRNA target sequence
tcaatacagttcttaatacat

SEQ ID NO: 258604 - DNA, 21 bp, Artificial sequence
  SiRNA target sequence
caatacagttcttaatacatc

SEQ ID NO: 258605 - DNA, 21 bp, Artificial sequence
  SiRNA target sequence
aatacagttcttaatacatca

SEQ ID NO: 258606 - DNA, 21 bp, Artificial sequence
  SiRNA target sequence
atacagttcttaatacatcag

SEQ ID NO: 258607 - DNA, 21 bp, Artificial sequence
  SiRNA target sequence
tacagttcttaatacatcagt

SEQ ID NO: 258608 - DNA, 21 bp, Artificial sequence
  SiRNA target sequence
acagttcttaatacatcagta

SEQ ID NO: 258609 - DNA, 21 bp, Artificial sequence
  SiRNA target sequence
cagttcttaatacatcagtaa

SEQ ID NO: 258610 - DNA, 21 bp, Artificial sequence
  SiRNA target sequence
agttcttaatacatcagtaac

SEQ ID NO: 258611 - DNA, 21 bp, Artificial sequence
  SiRNA target sequence
gttcttaatacatcagtaacc

SEQ ID NO: 258612 - DNA, 21 bp, Artificial sequence
  SiRNA target sequence
ttcttaatacatcagtaacct

SEQ ID NO: 258613 - DNA, 21 bp, Artificial sequence
  SiRNA target sequence
tcttaatacatcagtaacctc

SEQ ID NO: 258614 - DNA, 21 bp, Artificial sequence
  SiRNA target sequence
cttaatacatcagtaacctca

SEQ ID NO: 258615 - DNA, 21 bp, Artificial sequence
  SiRNA target sequence
ttaatacatcagtaacctcaa

SEQ ID NO: 258616 - DNA, 21 bp, Artificial sequence
  SiRNA target sequence
taatacatcagtaacctcaat

SEQ ID NO: 258617 - DNA, 21 bp, Artificial sequence
  SiRNA target sequence
aatacatcagtaacctcaatg

SEQ ID NO: 258618 - DNA, 21 bp, Artificial sequence
  SiRNA target sequence
atacatcagtaacctcaatgc

SEQ ID NO: 258619 - DNA, 21 bp, Artificial sequence
  SiRNA target sequence
tacatcagtaacctcaatgct

SEQ ID NO: 258620 - DNA, 21 bp, Artificial sequence
  SiRNA target sequence
acatcagtaacctcaatgctt

SEQ ID NO: 258621 - DNA, 21 bp, Artificial sequence
  SiRNA target sequence
catcagtaacctcaatgcttg

SEQ ID NO: 258622 - DNA, 21 bp, Artificial sequence
  SiRNA target sequence
atcagtaacctcaatgcttga

SEQ ID NO: 258623 - DNA, 21 bp, Artificial sequence
  SiRNA target sequence
tcagtaacctcaatgcttgaa

SEQ ID NO: 258624 - DNA, 21 bp, Artificial sequence
  SiRNA target sequence
cagtaacctcaatgcttgaat

SEQ ID NO: 258625 - DNA, 21 bp, Artificial sequence
  SiRNA target sequence
agtaacctcaatgcttgaata

SEQ ID NO: 258626 - DNA, 21 bp, Artificial sequence
  SiRNA target sequence
gtaacctcaatgcttgaatac

SEQ ID NO: 258627 - DNA, 21 bp, Artificial sequence
  SiRNA target sequence
taacctcaatgcttgaatact

SEQ ID NO: 258628 - DNA, 21 bp, Artificial sequence
  SiRNA target sequence
aacctcaatgcttgaatactt

SEQ ID NO: 258629 - DNA, 21 bp, Artificial sequence
  SiRNA target sequence
acctcaatgcttgaatacttt

SEQ ID NO: 258630 - DNA, 21 bp, Artificial sequence
  SiRNA target sequence
cctcaatgcttgaatactttg

SEQ ID NO: 258631 - DNA, 21 bp, Artificial sequence
  SiRNA target sequence
ctcaatgcttgaatactttgg

SEQ ID NO: 258632 - DNA, 21 bp, Artificial sequence
  SiRNA target sequence
tcaatgcttgaatactttgga

SEQ ID NO: 258633 - DNA, 21 bp, Artificial sequence
  SiRNA target sequence
caatgcttgaatactttggag

SEQ ID NO: 258634 - DNA, 21 bp, Artificial sequence
  SiRNA target sequence
aatgcttgaatactttggagt

SEQ ID NO: 258635 - DNA, 21 bp, Artificial sequence
  SiRNA target sequence
atgcttgaatactttggagta

SEQ ID NO: 258636 - DNA, 21 bp, Artificial sequence
  SiRNA target sequence
tgcttgaatactttggagtac

SEQ ID NO: 258637 - DNA, 21 bp, Artificial sequence
  SiRNA target sequence
gcttgaatactttggagtaca

SEQ ID NO: 258638 - DNA, 21 bp, Artificial sequence
  SiRNA target sequence
cttgaatactttggagtacat

SEQ ID NO: 258639 - DNA, 21 bp, Artificial sequence
  SiRNA target sequence
ttgaatactttggagtacata

SEQ ID NO: 258640 - DNA, 21 bp, Artificial sequence
  SiRNA target sequence
tgaatactttggagtacatac

SEQ ID NO: 258641 - DNA, 21 bp, Artificial sequence
  SiRNA target sequence
gaatactttggagtacatact

SEQ ID NO: 258642 - DNA, 21 bp, Artificial sequence
  SiRNA target sequence
aatactttggagtacatactt

SEQ ID NO: 258643 - DNA, 21 bp, Artificial sequence
  SiRNA target sequence
atactttggagtacatacttt

SEQ ID NO: 258644 - DNA, 21 bp, Artificial sequence
  SiRNA target sequence
tactttggagtacatacttta

SEQ ID NO: 258645 - DNA, 21 bp, Artificial sequence
  SiRNA target sequence
actttggagtacatactttag

SEQ ID NO: 258646 - DNA, 21 bp, Artificial sequence
  SiRNA target sequence
ctttggagtacatactttagg

SEQ ID NO: 258647 - DNA, 21 bp, Artificial sequence
  SiRNA target sequence
tttggagtacatactttagga

SEQ ID NO: 258648 - DNA, 21 bp, Artificial sequence
  SiRNA target sequence
ttggagtacatactttaggat

SEQ ID NO: 258649 - DNA, 21 bp, Artificial sequence
  SiRNA target sequence
tggagtacatactttaggatt

SEQ ID NO: 258650 - DNA, 21 bp, Artificial sequence
  SiRNA target sequence
ggagtacatactttaggatta

SEQ ID NO: 258651 - DNA, 21 bp, Artificial sequence
  SiRNA target sequence
gagtacatactttaggattaa

SEQ ID NO: 258652 - DNA, 21 bp, Artificial sequence
  SiRNA target sequence
agtacatactttaggattaag

SEQ ID NO: 258653 - DNA, 21 bp, Artificial sequence
  SiRNA target sequence
gtacatactttaggattaaga

SEQ ID NO: 258654 - DNA, 21 bp, Artificial sequence
  SiRNA target sequence
tacatactttaggattaagac

SEQ ID NO: 258655 - DNA, 21 bp, Artificial sequence
  SiRNA target sequence
acatactttaggattaagaca

SEQ ID NO: 258656 - DNA, 21 bp, Artificial sequence
  SiRNA target sequence
catactttaggattaagacaa

SEQ ID NO: 258657 - DNA, 21 bp, Artificial sequence
  SiRNA target sequence
atactttaggattaagacaag

SEQ ID NO: 258658 - DNA, 21 bp, Artificial sequence
  SiRNA target sequence
tactttaggattaagacaaga

SEQ ID NO: 258659 - DNA, 21 bp, Artificial sequence
  SiRNA target sequence
actttaggattaagacaagaa

SEQ ID NO: 258660 - DNA, 21 bp, Artificial sequence
  SiRNA target sequence
ctttaggattaagacaagaag

SEQ ID NO: 258661 - DNA, 21 bp, Artificial sequence
  SiRNA target sequence
tttaggattaagacaagaagc

SEQ ID NO: 258662 - DNA, 21 bp, Artificial sequence
  SiRNA target sequence
ttaggattaagacaagaagct

SEQ ID NO: 258663 - DNA, 21 bp, Artificial sequence
  SiRNA target sequence
taggattaagacaagaagctg

SEQ ID NO: 258664 - DNA, 21 bp, Artificial sequence
  SiRNA target sequence
aggattaagacaagaagctga

SEQ ID NO: 258665 - DNA, 21 bp, Artificial sequence
  SiRNA target sequence
ggattaagacaagaagctgaa

SEQ ID NO: 258666 - DNA, 21 bp, Artificial sequence
  SiRNA target sequence
gattaagacaagaagctgaac

SEQ ID NO: 258667 - DNA, 21 bp, Artificial sequence
  SiRNA target sequence
attaagacaagaagctgaact

SEQ ID NO: 258668 - DNA, 21 bp, Artificial sequence
  SiRNA target sequence
ttaagacaagaagctgaactt

SEQ ID NO: 258669 - DNA, 21 bp, Artificial sequence
  SiRNA target sequence
taagacaagaagctgaacttc

SEQ ID NO: 258670 - DNA, 21 bp, Artificial sequence
  SiRNA target sequence
aagacaagaagctgaacttca

SEQ ID NO: 258671 - DNA, 21 bp, Artificial sequence
  SiRNA target sequence
agacaagaagctgaacttcaa

SEQ ID NO: 258672 - DNA, 21 bp, Artificial sequence
  SiRNA target sequence
gacaagaagctgaacttcaag

SEQ ID NO: 258673 - DNA, 21 bp, Artificial sequence
  SiRNA target sequence
acaagaagctgaacttcaagt

SEQ ID NO: 258674 - DNA, 21 bp, Artificial sequence
  SiRNA target sequence
caagaagctgaacttcaagtt

SEQ ID NO: 258675 - DNA, 21 bp, Artificial sequence
  SiRNA target sequence
aagaagctgaacttcaagttc

SEQ ID NO: 258676 - DNA, 21 bp, Artificial sequence
  SiRNA target sequence
agaagctgaacttcaagttct

SEQ ID NO: 258677 - DNA, 21 bp, Artificial sequence
  SiRNA target sequence
gaagctgaacttcaagttctc

SEQ ID NO: 258678 - DNA, 21 bp, Artificial sequence
  SiRNA target sequence
aagctgaacttcaagttctcg

SEQ ID NO: 258679 - DNA, 21 bp, Artificial sequence
  SiRNA target sequence
agctgaacttcaagttctcgt

SEQ ID NO: 258680 - DNA, 21 bp, Artificial sequence
  SiRNA target sequence
gctgaacttcaagttctcgta

SEQ ID NO: 258681 - DNA, 21 bp, Artificial sequence
  SiRNA target sequence
ctgaacttcaagttctcgtag

SEQ ID NO: 258682 - DNA, 21 bp, Artificial sequence
  SiRNA target sequence
tgaacttcaagttctcgtaga

SEQ ID NO: 258683 - DNA, 21 bp, Artificial sequence
  SiRNA target sequence
gaacttcaagttctcgtagaa

SEQ ID NO: 258684 - DNA, 21 bp, Artificial sequence
  SiRNA target sequence
aacttcaagttctcgtagaag

SEQ ID NO: 258685 - DNA, 21 bp, Artificial sequence
  SiRNA target sequence
acttcaagttctcgtagaagg

SEQ ID NO: 258686 - DNA, 21 bp, Artificial sequence
  SiRNA target sequence
cttcaagttctcgtagaaggt

SEQ ID NO: 258687 - DNA, 21 bp, Artificial sequence
  SiRNA target sequence
ttcaagttctcgtagaaggtt

SEQ ID NO: 258688 - DNA, 21 bp, Artificial sequence
  SiRNA target sequence
tcaagttctcgtagaaggtta

SEQ ID NO: 258689 - DNA, 21 bp, Artificial sequence
  SiRNA target sequence
caagttctcgtagaaggttat

SEQ ID NO: 258690 - DNA, 21 bp, Artificial sequence
  SiRNA target sequence
aagttctcgtagaaggttata

SEQ ID NO: 258691 - DNA, 21 bp, Artificial sequence
  SiRNA target sequence
agttctcgtagaaggttataa

SEQ ID NO: 258692 - DNA, 21 bp, Artificial sequence
  SiRNA target sequence
gttctcgtagaaggttataaa

SEQ ID NO: 258693 - DNA, 21 bp, Artificial sequence
  SiRNA target sequence
ttctcgtagaaggttataaaa

SEQ ID NO: 258694 - DNA, 21 bp, Artificial sequence
  SiRNA target sequence
tctcgtagaaggttataaaac

SEQ ID NO: 258695 - DNA, 21 bp, Artificial sequence
  SiRNA target sequence
ctcgtagaaggttataaaact

SEQ ID NO: 258696 - DNA, 21 bp, Artificial sequence
  SiRNA target sequence
tcgtagaaggttataaaactt

SEQ ID NO: 258697 - DNA, 21 bp, Artificial sequence
  SiRNA target sequence
cgtagaaggttataaaacttg

SEQ ID NO: 258698 - DNA, 21 bp, Artificial sequence
  SiRNA target sequence
gtagaaggttataaaacttgg

SEQ ID NO: 258699 - DNA, 21 bp, Artificial sequence
  SiRNA target sequence
tagaaggttataaaacttggt

SEQ ID NO: 258700 - DNA, 21 bp, Artificial sequence
  SiRNA target sequence
agaaggttataaaacttggtg

SEQ ID NO: 258701 - DNA, 21 bp, Artificial sequence
  SiRNA target sequence
gaaggttataaaacttggtgt

SEQ ID NO: 258702 - DNA, 21 bp, Artificial sequence
  SiRNA target sequence
aaggttataaaacttggtgtg

SEQ ID NO: 258703 - DNA, 21 bp, Artificial sequence
  SiRNA target sequence
aggttataaaacttggtgtga

SEQ ID NO: 258704 - DNA, 21 bp, Artificial sequence
  SiRNA target sequence
ggttataaaacttggtgtgat

SEQ ID NO: 258705 - DNA, 21 bp, Artificial sequence
  SiRNA target sequence
gttataaaacttggtgtgatg

SEQ ID NO: 258706 - DNA, 21 bp, Artificial sequence
  SiRNA target sequence
ttataaaacttggtgtgatga

SEQ ID NO: 258707 - DNA, 21 bp, Artificial sequence
  SiRNA target sequence
tataaaacttggtgtgatgaa

SEQ ID NO: 258708 - DNA, 21 bp, Artificial sequence
  SiRNA target sequence
ataaaacttggtgtgatgaag

SEQ ID NO: 258709 - DNA, 21 bp, Artificial sequence
  SiRNA target sequence
taaaacttggtgtgatgaagt

SEQ ID NO: 258710 - DNA, 21 bp, Artificial sequence
  SiRNA target sequence
aaaacttggtgtgatgaagtt

SEQ ID NO: 258711 - DNA, 21 bp, Artificial sequence
  SiRNA target sequence
aaacttggtgtgatgaagttg

SEQ ID NO: 258712 - DNA, 21 bp, Artificial sequence
  SiRNA target sequence
aacttggtgtgatgaagttgc

SEQ ID NO: 258713 - DNA, 21 bp, Artificial sequence
  SiRNA target sequence
acttggtgtgatgaagttgcg

SEQ ID NO: 258714 - DNA, 21 bp, Artificial sequence
  SiRNA target sequence
cttggtgtgatgaagttgcgg

SEQ ID NO: 258715 - DNA, 21 bp, Artificial sequence
  SiRNA target sequence
ttggtgtgatgaagttgcggc

SEQ ID NO: 258716 - DNA, 21 bp, Artificial sequence
  SiRNA target sequence
tggtgtgatgaagttgcggct

SEQ ID NO: 258717 - DNA, 21 bp, Artificial sequence
  SiRNA target sequence
ggtgtgatgaagttgcggctt

SEQ ID NO: 258718 - DNA, 21 bp, Artificial sequence
  SiRNA target sequence
gtgtgatgaagttgcggcttt

SEQ ID NO: 258719 - DNA, 21 bp, Artificial sequence
  SiRNA target sequence
tgtgatgaagttgcggcttta

SEQ ID NO: 258720 - DNA, 21 bp, Artificial sequence
  SiRNA target sequence
gtgatgaagttgcggctttag

SEQ ID NO: 258721 - DNA, 21 bp, Artificial sequence
  SiRNA target sequence
tgatgaagttgcggctttagt

SEQ ID NO: 258722 - DNA, 21 bp, Artificial sequence
  SiRNA target sequence
gatgaagttgcggctttagta

SEQ ID NO: 258723 - DNA, 21 bp, Artificial sequence
  SiRNA target sequence
atgaagttgcggctttagtag

SEQ ID NO: 258724 - DNA, 21 bp, Artificial sequence
  SiRNA target sequence
tgaagttgcggctttagtagg

SEQ ID NO: 258725 - DNA, 21 bp, Artificial sequence
  SiRNA target sequence
gaagttgcggctttagtagga

SEQ ID NO: 258726 - DNA, 21 bp, Artificial sequence
  SiRNA target sequence
aagttgcggctttagtaggac

SEQ ID NO: 258727 - DNA, 21 bp, Artificial sequence
  SiRNA target sequence
agttgcggctttagtaggaca

SEQ ID NO: 258728 - DNA, 21 bp, Artificial sequence
  SiRNA target sequence
gttgcggctttagtaggacat

SEQ ID NO: 258729 - DNA, 21 bp, Artificial sequence
  SiRNA target sequence
ttgcggctttagtaggacata

SEQ ID NO: 258730 - DNA, 21 bp, Artificial sequence
  SiRNA target sequence
tgcggctttagtaggacataa

SEQ ID NO: 258731 - DNA, 21 bp, Artificial sequence
  SiRNA target sequence
gcggctttagtaggacataag

SEQ ID NO: 258732 - DNA, 21 bp, Artificial sequence
  SiRNA target sequence
cggctttagtaggacataaga

SEQ ID NO: 258733 - DNA, 21 bp, Artificial sequence
  SiRNA target sequence
ggctttagtaggacataagat

SEQ ID NO: 258734 - DNA, 21 bp, Artificial sequence
  SiRNA target sequence
gctttagtaggacataagatt

SEQ ID NO: 258735 - DNA, 21 bp, Artificial sequence
  SiRNA target sequence
ctttagtaggacataagatta

SEQ ID NO: 258736 - DNA, 21 bp, Artificial sequence
  SiRNA target sequence
tttagtaggacataagattaa

SEQ ID NO: 258737 - DNA, 21 bp, Artificial sequence
  SiRNA target sequence
ttagtaggacataagattaac

SEQ ID NO: 258738 - DNA, 21 bp, Artificial sequence
  SiRNA target sequence
tagtaggacataagattaaca

SEQ ID NO: 258739 - DNA, 21 bp, Artificial sequence
  SiRNA target sequence
agtaggacataagattaacat

SEQ ID NO: 258740 - DNA, 21 bp, Artificial sequence
  SiRNA target sequence
gtaggacataagattaacatg

SEQ ID NO: 258741 - DNA, 21 bp, Artificial sequence
  SiRNA target sequence
taggacataagattaacatgg

SEQ ID NO: 258742 - DNA, 21 bp, Artificial sequence
  SiRNA target sequence
aggacataagattaacatgga

SEQ ID NO: 258743 - DNA, 21 bp, Artificial sequence
  SiRNA target sequence
ggacataagattaacatggat

SEQ ID NO: 258744 - DNA, 21 bp, Artificial sequence
  SiRNA target sequence
gacataagattaacatggatg

SEQ ID NO: 258745 - DNA, 21 bp, Artificial sequence
  SiRNA target sequence
acataagattaacatggatgg

SEQ ID NO: 258746 - DNA, 21 bp, Artificial sequence
  SiRNA target sequence
cataagattaacatggatggt

SEQ ID NO: 258747 - DNA, 21 bp, Artificial sequence
  SiRNA target sequence
ataagattaacatggatggta

SEQ ID NO: 258748 - DNA, 21 bp, Artificial sequence
  SiRNA target sequence
taagattaacatggatggtac

SEQ ID NO: 258749 - DNA, 21 bp, Artificial sequence
  SiRNA target sequence
aagattaacatggatggtact

SEQ ID NO: 258750 - DNA, 21 bp, Artificial sequence
  SiRNA target sequence
agattaacatggatggtactt

SEQ ID NO: 258751 - DNA, 21 bp, Artificial sequence
  SiRNA target sequence
gattaacatggatggtacttt

SEQ ID NO: 258752 - DNA, 21 bp, Artificial sequence
  SiRNA target sequence
attaacatggatggtacttta

SEQ ID NO: 258753 - DNA, 21 bp, Artificial sequence
  SiRNA target sequence
ttaacatggatggtactttag

SEQ ID NO: 258754 - DNA, 21 bp, Artificial sequence
  SiRNA target sequence
taacatggatggtactttaga

SEQ ID NO: 258755 - DNA, 21 bp, Artificial sequence
  SiRNA target sequence
aacatggatggtactttagat

SEQ ID NO: 258756 - DNA, 21 bp, Artificial sequence
  SiRNA target sequence
acatggatggtactttagatg

SEQ ID NO: 258757 - DNA, 21 bp, Artificial sequence
  SiRNA target sequence
catggatggtactttagatgg

SEQ ID NO: 258758 - DNA, 21 bp, Artificial sequence
  SiRNA target sequence
atggatggtactttagatgga

SEQ ID NO: 258759 - DNA, 21 bp, Artificial sequence
  SiRNA target sequence
tggatggtactttagatggaa

SEQ ID NO: 258760 - DNA, 21 bp, Artificial sequence
  SiRNA target sequence
ggatggtactttagatggaag

SEQ ID NO: 258761 - DNA, 21 bp, Artificial sequence
  SiRNA target sequence
gatggtactttagatggaaga

SEQ ID NO: 258762 - DNA, 21 bp, Artificial sequence
  SiRNA target sequence
atggtactttagatggaagaa

SEQ ID NO: 258763 - DNA, 21 bp, Artificial sequence
  SiRNA target sequence
tggtactttagatggaagaag

SEQ ID NO: 258764 - DNA, 21 bp, Artificial sequence
  SiRNA target sequence
ggtactttagatggaagaagt

SEQ ID NO: 258765 - DNA, 21 bp, Artificial sequence
  SiRNA target sequence
gtactttagatggaagaagta

SEQ ID NO: 258766 - DNA, 21 bp, Artificial sequence
  SiRNA target sequence
tactttagatggaagaagtat

SEQ ID NO: 258767 - DNA, 21 bp, Artificial sequence
  SiRNA target sequence
actttagatggaagaagtatt

SEQ ID NO: 258768 - DNA, 21 bp, Artificial sequence
  SiRNA target sequence
ctttagatggaagaagtattg

SEQ ID NO: 258769 - DNA, 21 bp, Artificial sequence
  SiRNA target sequence
tttagatggaagaagtattgt

SEQ ID NO: 258770 - DNA, 21 bp, Artificial sequence
  SiRNA target sequence
ttagatggaagaagtattgtt

SEQ ID NO: 258771 - DNA, 21 bp, Artificial sequence
  SiRNA target sequence
tagatggaagaagtattgttg

SEQ ID NO: 258772 - DNA, 21 bp, Artificial sequence
  SiRNA target sequence
agatggaagaagtattgttga

SEQ ID NO: 258773 - DNA, 21 bp, Artificial sequence
  SiRNA target sequence
gatggaagaagtattgttgaa

SEQ ID NO: 258774 - DNA, 21 bp, Artificial sequence
  SiRNA target sequence
atggaagaagtattgttgaag

SEQ ID NO: 258775 - DNA, 21 bp, Artificial sequence
  SiRNA target sequence
tggaagaagtattgttgaaga

SEQ ID NO: 258776 - DNA, 21 bp, Artificial sequence
  SiRNA target sequence
ggaagaagtattgttgaagat

SEQ ID NO: 258777 - DNA, 21 bp, Artificial sequence
  SiRNA target sequence
gaagaagtattgttgaagata

SEQ ID NO: 258778 - DNA, 21 bp, Artificial sequence
  SiRNA target sequence
aagaagtattgttgaagatat

SEQ ID NO: 258779 - DNA, 21 bp, Artificial sequence
  SiRNA target sequence
agaagtattgttgaagatatt

SEQ ID NO: 258780 - DNA, 21 bp, Artificial sequence
  SiRNA target sequence
gaagtattgttgaagatatta

SEQ ID NO: 258781 - DNA, 21 bp, Artificial sequence
  SiRNA target sequence
aagtattgttgaagatattat

SEQ ID NO: 258782 - DNA, 21 bp, Artificial sequence
  SiRNA target sequence
agtattgttgaagatattatg

SEQ ID NO: 258783 - DNA, 21 bp, Artificial sequence
  SiRNA target sequence
gtattgttgaagatattatga

SEQ ID NO: 258784 - DNA, 21 bp, Artificial sequence
  SiRNA target sequence
tattgttgaagatattatgag

SEQ ID NO: 258785 - DNA, 21 bp, Artificial sequence
  SiRNA target sequence
attgttgaagatattatgaga

SEQ ID NO: 258786 - DNA, 21 bp, Artificial sequence
  SiRNA target sequence
ttgttgaagatattatgagag

SEQ ID NO: 258787 - DNA, 21 bp, Artificial sequence
  SiRNA target sequence
tgttgaagatattatgagaga

SEQ ID NO: 258788 - DNA, 21 bp, Artificial sequence
  SiRNA target sequence
gttgaagatattatgagagat

SEQ ID NO: 258789 - DNA, 21 bp, Artificial sequence
  SiRNA target sequence
ttgaagatattatgagagata

SEQ ID NO: 258790 - DNA, 21 bp, Artificial sequence
  SiRNA target sequence
tgaagatattatgagagatac

SEQ ID NO: 258791 - DNA, 21 bp, Artificial sequence
  SiRNA target sequence
gaagatattatgagagataca

SEQ ID NO: 258792 - DNA, 21 bp, Artificial sequence
  SiRNA target sequence
aagatattatgagagatacaa

SEQ ID NO: 258793 - DNA, 21 bp, Artificial sequence
  SiRNA target sequence
agatattatgagagatacaaa

SEQ ID NO: 258794 - DNA, 21 bp, Artificial sequence
  SiRNA target sequence
gatattatgagagatacaaaa

SEQ ID NO: 258795 - DNA, 21 bp, Artificial sequence
  SiRNA target sequence
atattatgagagatacaaaag

SEQ ID NO: 258796 - DNA, 21 bp, Artificial sequence
  SiRNA target sequence
tattatgagagatacaaaaga

SEQ ID NO: 258797 - DNA, 21 bp, Artificial sequence
  SiRNA target sequence
attatgagagatacaaaagaa

SEQ ID NO: 258798 - DNA, 21 bp, Artificial sequence
  SiRNA target sequence
ttatgagagatacaaaagaaa

SEQ ID NO: 258799 - DNA, 21 bp, Artificial sequence
  SiRNA target sequence
tatgagagatacaaaagaaat

SEQ ID NO: 258800 - DNA, 21 bp, Artificial sequence
  SiRNA target sequence
atgagagatacaaaagaaatc

SEQ ID NO: 258801 - DNA, 21 bp, Artificial sequence
  SiRNA target sequence
tgagagatacaaaagaaatcc

SEQ ID NO: 258802 - DNA, 21 bp, Artificial sequence
  SiRNA target sequence
gagagatacaaaagaaatcca

SEQ ID NO: 258803 - DNA, 21 bp, Artificial sequence
  SiRNA target sequence
agagatacaaaagaaatccaa

SEQ ID NO: 258804 - DNA, 21 bp, Artificial sequence
  SiRNA target sequence
gagatacaaaagaaatccaac

SEQ ID NO: 258805 - DNA, 21 bp, Artificial sequence
  SiRNA target sequence
agatacaaaagaaatccaacg

SEQ ID NO: 258806 - DNA, 21 bp, Artificial sequence
  SiRNA target sequence
gatacaaaagaaatccaacgt

SEQ ID NO: 258807 - DNA, 21 bp, Artificial sequence
  SiRNA target sequence
atacaaaagaaatccaacgtg

SEQ ID NO: 258808 - DNA, 21 bp, Artificial sequence
  SiRNA target sequence
tacaaaagaaatccaacgtgt

SEQ ID NO: 258809 - DNA, 21 bp, Artificial sequence
  SiRNA target sequence
acaaaagaaatccaacgtgta

SEQ ID NO: 258810 - DNA, 21 bp, Artificial sequence
  SiRNA target sequence
caaaagaaatccaacgtgtag

SEQ ID NO: 258811 - DNA, 21 bp, Artificial sequence
  SiRNA target sequence
aaaagaaatccaacgtgtaga

SEQ ID NO: 258812 - DNA, 21 bp, Artificial sequence
  SiRNA target sequence
aaagaaatccaacgtgtagaa

SEQ ID NO: 258813 - DNA, 21 bp, Artificial sequence
  SiRNA target sequence
aagaaatccaacgtgtagaaa

SEQ ID NO: 258814 - DNA, 21 bp, Artificial sequence
  SiRNA target sequence
agaaatccaacgtgtagaaaa

SEQ ID NO: 258815 - DNA, 21 bp, Artificial sequence
  SiRNA target sequence
gaaatccaacgtgtagaaaat

SEQ ID NO: 258816 - DNA, 21 bp, Artificial sequence
  SiRNA target sequence
aaatccaacgtgtagaaaatc

SEQ ID NO: 258817 - DNA, 21 bp, Artificial sequence
  SiRNA target sequence
aatccaacgtgtagaaaatct

SEQ ID NO: 258818 - DNA, 21 bp, Artificial sequence
  SiRNA target sequence
atccaacgtgtagaaaatctc

SEQ ID NO: 258819 - DNA, 21 bp, Artificial sequence
  SiRNA target sequence
tccaacgtgtagaaaatctct

SEQ ID NO: 258820 - DNA, 21 bp, Artificial sequence
  SiRNA target sequence
ccaacgtgtagaaaatctcta

SEQ ID NO: 258821 - DNA, 21 bp, Artificial sequence
  SiRNA target sequence
caacgtgtagaaaatctctac

SEQ ID NO: 258822 - DNA, 21 bp, Artificial sequence
  SiRNA target sequence
aacgtgtagaaaatctctaca

SEQ ID NO: 258823 - DNA, 21 bp, Artificial sequence
  SiRNA target sequence
acgtgtagaaaatctctacaa

SEQ ID NO: 258824 - DNA, 21 bp, Artificial sequence
  SiRNA target sequence
cgtgtagaaaatctctacaaa

SEQ ID NO: 258825 - DNA, 21 bp, Artificial sequence
  SiRNA target sequence
gtgtagaaaatctctacaaac

SEQ ID NO: 258826 - DNA, 21 bp, Artificial sequence
  SiRNA target sequence
tgtagaaaatctctacaaacg

SEQ ID NO: 258827 - DNA, 21 bp, Artificial sequence
  SiRNA target sequence
gtagaaaatctctacaaacgt

SEQ ID NO: 258828 - DNA, 21 bp, Artificial sequence
  SiRNA target sequence
tagaaaatctctacaaacgtg

SEQ ID NO: 258829 - DNA, 21 bp, Artificial sequence
  SiRNA target sequence
agaaaatctctacaaacgtgg

SEQ ID NO: 258830 - DNA, 21 bp, Artificial sequence
  SiRNA target sequence
gaaaatctctacaaacgtgga

SEQ ID NO: 258831 - DNA, 21 bp, Artificial sequence
  SiRNA target sequence
aaaatctctacaaacgtggat

SEQ ID NO: 258832 - DNA, 21 bp, Artificial sequence
  SiRNA target sequence
aaatctctacaaacgtggatt

SEQ ID NO: 258833 - DNA, 21 bp, Artificial sequence
  SiRNA target sequence
aatctctacaaacgtggattg

SEQ ID NO: 258834 - DNA, 21 bp, Artificial sequence
  SiRNA target sequence
atctctacaaacgtggattgg

SEQ ID NO: 258835 - DNA, 21 bp, Artificial sequence
  SiRNA target sequence
tctctacaaacgtggattgga

SEQ ID NO: 258836 - DNA, 21 bp, Artificial sequence
  SiRNA target sequence
ctctacaaacgtggattggaa

SEQ ID NO: 258837 - DNA, 21 bp, Artificial sequence
  SiRNA target sequence
tctacaaacgtggattggaaa

SEQ ID NO: 258838 - DNA, 21 bp, Artificial sequence
  SiRNA target sequence
ctacaaacgtggattggaaat

SEQ ID NO: 258839 - DNA, 21 bp, Artificial sequence
  SiRNA target sequence
tacaaacgtggattggaaatt

SEQ ID NO: 258840 - DNA, 21 bp, Artificial sequence
  SiRNA target sequence
acaaacgtggattggaaattt

SEQ ID NO: 258841 - DNA, 21 bp, Artificial sequence
  SiRNA target sequence
caaacgtggattggaaatttc

SEQ ID NO: 258842 - DNA, 21 bp, Artificial sequence
  SiRNA target sequence
aaacgtggattggaaatttct

SEQ ID NO: 258843 - DNA, 21 bp, Artificial sequence
  SiRNA target sequence
aacgtggattggaaatttctc

SEQ ID NO: 258844 - DNA, 21 bp, Artificial sequence
  SiRNA target sequence
acgtggattggaaatttctcg

SEQ ID NO: 258845 - DNA, 21 bp, Artificial sequence
  SiRNA target sequence
cgtggattggaaatttctcgt

SEQ ID NO: 258846 - DNA, 21 bp, Artificial sequence
  SiRNA target sequence
gtggattggaaatttctcgta

SEQ ID NO: 258847 - DNA, 21 bp, Artificial sequence
  SiRNA target sequence
tggattggaaatttctcgtaa

SEQ ID NO: 258848 - DNA, 21 bp, Artificial sequence
  SiRNA target sequence
ggattggaaatttctcgtaat

SEQ ID NO: 258849 - DNA, 21 bp, Artificial sequence
  SiRNA target sequence
gattggaaatttctcgtaata

SEQ ID NO: 258850 - DNA, 21 bp, Artificial sequence
  SiRNA target sequence
attggaaatttctcgtaatat

SEQ ID NO: 258851 - DNA, 21 bp, Artificial sequence
  SiRNA target sequence
ttggaaatttctcgtaatatt

SEQ ID NO: 258852 - DNA, 21 bp, Artificial sequence
  SiRNA target sequence
tggaaatttctcgtaatattg

SEQ ID NO: 258853 - DNA, 21 bp, Artificial sequence
  SiRNA target sequence
ggaaatttctcgtaatattgc

SEQ ID NO: 258854 - DNA, 21 bp, Artificial sequence
  SiRNA target sequence
gaaatttctcgtaatattgca

SEQ ID NO: 258855 - DNA, 21 bp, Artificial sequence
  SiRNA target sequence
aaatttctcgtaatattgcag

SEQ ID NO: 258856 - DNA, 21 bp, Artificial sequence
  SiRNA target sequence
aatttctcgtaatattgcaga

SEQ ID NO: 258857 - DNA, 21 bp, Artificial sequence
  SiRNA target sequence
atttctcgtaatattgcagac

SEQ ID NO: 258858 - DNA, 21 bp, Artificial sequence
  SiRNA target sequence
tttctcgtaatattgcagaca

SEQ ID NO: 258859 - DNA, 21 bp, Artificial sequence
  SiRNA target sequence
ttctcgtaatattgcagacat

SEQ ID NO: 258860 - DNA, 21 bp, Artificial sequence
  SiRNA target sequence
tctcgtaatattgcagacatg

SEQ ID NO: 258861 - DNA, 21 bp, Artificial sequence
  SiRNA target sequence
ctcgtaatattgcagacatga

SEQ ID NO: 258862 - DNA, 21 bp, Artificial sequence
  SiRNA target sequence
tcgtaatattgcagacatgaa

SEQ ID NO: 258863 - DNA, 21 bp, Artificial sequence
  SiRNA target sequence
cgtaatattgcagacatgaaa

SEQ ID NO: 258864 - DNA, 21 bp, Artificial sequence
  SiRNA target sequence
gtaatattgcagacatgaaac

SEQ ID NO: 258865 - DNA, 21 bp, Artificial sequence
  SiRNA target sequence
taatattgcagacatgaaact

SEQ ID NO: 258866 - DNA, 21 bp, Artificial sequence
  SiRNA target sequence
aatattgcagacatgaaactt

SEQ ID NO: 258867 - DNA, 21 bp, Artificial sequence
  SiRNA target sequence
atattgcagacatgaaacttc

SEQ ID NO: 258868 - DNA, 21 bp, Artificial sequence
  SiRNA target sequence
tattgcagacatgaaacttcc

SEQ ID NO: 258869 - DNA, 21 bp, Artificial sequence
  SiRNA target sequence
attgcagacatgaaacttcca

SEQ ID NO: 258870 - DNA, 21 bp, Artificial sequence
  SiRNA target sequence
ttgcagacatgaaacttccaa

SEQ ID NO: 258871 - DNA, 21 bp, Artificial sequence
  SiRNA target sequence
tgcagacatgaaacttccaac

SEQ ID NO: 258872 - DNA, 21 bp, Artificial sequence
  SiRNA target sequence
gcagacatgaaacttccaaca

SEQ ID NO: 258873 - DNA, 21 bp, Artificial sequence
  SiRNA target sequence
cagacatgaaacttccaacaa

SEQ ID NO: 258874 - DNA, 21 bp, Artificial sequence
  SiRNA target sequence
agacatgaaacttccaacaaa

SEQ ID NO: 258875 - DNA, 21 bp, Artificial sequence
  SiRNA target sequence
gacatgaaacttccaacaaaa

SEQ ID NO: 258876 - DNA, 21 bp, Artificial sequence
  SiRNA target sequence
acatgaaacttccaacaaaat

SEQ ID NO: 258877 - DNA, 21 bp, Artificial sequence
  SiRNA target sequence
catgaaacttccaacaaaatt

SEQ ID NO: 258878 - DNA, 21 bp, Artificial sequence
  SiRNA target sequence
atgaaacttccaacaaaatta

SEQ ID NO: 258879 - DNA, 21 bp, Artificial sequence
  SiRNA target sequence
tgaaacttccaacaaaattaa

SEQ ID NO: 258880 - DNA, 21 bp, Artificial sequence
  SiRNA target sequence
gaaacttccaacaaaattaac

SEQ ID NO: 258881 - DNA, 21 bp, Artificial sequence
  SiRNA target sequence
aaacttccaacaaaattaacc

SEQ ID NO: 258882 - DNA, 21 bp, Artificial sequence
  SiRNA target sequence
aacttccaacaaaattaacca

SEQ ID NO: 258883 - DNA, 21 bp, Artificial sequence
  SiRNA target sequence
acttccaacaaaattaaccat

SEQ ID NO: 258884 - DNA, 21 bp, Artificial sequence
  SiRNA target sequence
cttccaacaaaattaaccatt

SEQ ID NO: 258885 - DNA, 21 bp, Artificial sequence
  SiRNA target sequence
ttccaacaaaattaaccatta

SEQ ID NO: 258886 - DNA, 21 bp, Artificial sequence
  SiRNA target sequence
tccaacaaaattaaccattag

SEQ ID NO: 258887 - DNA, 21 bp, Artificial sequence
  SiRNA target sequence
ccaacaaaattaaccattagt

SEQ ID NO: 258888 - DNA, 21 bp, Artificial sequence
  SiRNA target sequence
caacaaaattaaccattagtt

SEQ ID NO: 258889 - DNA, 21 bp, Artificial sequence
  SiRNA target sequence
aacaaaattaaccattagttt

SEQ ID NO: 258890 - DNA, 21 bp, Artificial sequence
  SiRNA target sequence
acaaaattaaccattagtttt

SEQ ID NO: 258891 - DNA, 21 bp, Artificial sequence
  SiRNA target sequence
caaaattaaccattagtttta

SEQ ID NO: 258892 - DNA, 21 bp, Artificial sequence
  SiRNA target sequence
aaaattaaccattagttttaa

SEQ ID NO: 258893 - DNA, 21 bp, Artificial sequence
  SiRNA target sequence
aaattaaccattagttttaat

SEQ ID NO: 258894 - DNA, 21 bp, Artificial sequence
  SiRNA target sequence
aattaaccattagttttaata

SEQ ID NO: 258895 - DNA, 21 bp, Artificial sequence
  SiRNA target sequence
attaaccattagttttaatac

SEQ ID NO: 258896 - DNA, 21 bp, Artificial sequence
  SiRNA target sequence
ttaaccattagttttaataca

SEQ ID NO: 258897 - DNA, 21 bp, Artificial sequence
  SiRNA target sequence
taaccattagttttaatacac

SEQ ID NO: 258898 - DNA, 21 bp, Artificial sequence
  SiRNA target sequence
aaccattagttttaatacaca

SEQ ID NO: 258899 - DNA, 21 bp, Artificial sequence
  SiRNA target sequence
accattagttttaatacacac

SEQ ID NO: 258900 - DNA, 21 bp, Artificial sequence
  SiRNA target sequence
ccattagttttaatacacaca

SEQ ID NO: 258901 - DNA, 21 bp, Artificial sequence
  SiRNA target sequence
cattagttttaatacacacat

SEQ ID NO: 258902 - DNA, 21 bp, Artificial sequence
  SiRNA target sequence
attagttttaatacacacatg

SEQ ID NO: 258903 - DNA, 21 bp, Artificial sequence
  SiRNA target sequence
ttagttttaatacacacatga

SEQ ID NO: 258904 - DNA, 21 bp, Artificial sequence
  SiRNA target sequence
tagttttaatacacacatgag

SEQ ID NO: 258905 - DNA, 21 bp, Artificial sequence
  SiRNA target sequence
agttttaatacacacatgaga

SEQ ID NO: 258906 - DNA, 21 bp, Artificial sequence
  SiRNA target sequence
gttttaatacacacatgagat

SEQ ID NO: 258907 - DNA, 21 bp, Artificial sequence
  SiRNA target sequence
ttttaatacacacatgagata

SEQ ID NO: 258908 - DNA, 21 bp, Artificial sequence
  SiRNA target sequence
tttaatacacacatgagatac

SEQ ID NO: 258909 - DNA, 21 bp, Artificial sequence
  SiRNA target sequence
ttaatacacacatgagatact

SEQ ID NO: 258910 - DNA, 21 bp, Artificial sequence
  SiRNA target sequence
taatacacacatgagatactt

SEQ ID NO: 258911 - DNA, 21 bp, Artificial sequence
  SiRNA target sequence
aatacacacatgagatacttg

SEQ ID NO: 258912 - DNA, 21 bp, Artificial sequence
  SiRNA target sequence
atacacacatgagatacttga

SEQ ID NO: 258913 - DNA, 21 bp, Artificial sequence
  SiRNA target sequence
tacacacatgagatacttgac

SEQ ID NO: 258914 - DNA, 21 bp, Artificial sequence
  SiRNA target sequence
acacacatgagatacttgact

SEQ ID NO: 258915 - DNA, 21 bp, Artificial sequence
  SiRNA target sequence
cacacatgagatacttgactg

SEQ ID NO: 258916 - DNA, 21 bp, Artificial sequence
  SiRNA target sequence
acacatgagatacttgactga

SEQ ID NO: 258917 - DNA, 21 bp, Artificial sequence
  SiRNA target sequence
cacatgagatacttgactgaa

SEQ ID NO: 258918 - DNA, 21 bp, Artificial sequence
  SiRNA target sequence
acatgagatacttgactgaag

SEQ ID NO: 258919 - DNA, 21 bp, Artificial sequence
  SiRNA target sequence
catgagatacttgactgaagt

SEQ ID NO: 258920 - DNA, 21 bp, Artificial sequence
  SiRNA target sequence
atgagatacttgactgaagtt

SEQ ID NO: 258921 - DNA, 21 bp, Artificial sequence
  SiRNA target sequence
tgagatacttgactgaagttt

SEQ ID NO: 258922 - DNA, 21 bp, Artificial sequence
  SiRNA target sequence
gagatacttgactgaagtttt

SEQ ID NO: 258923 - DNA, 21 bp, Artificial sequence
  SiRNA target sequence
agatacttgactgaagttttc

SEQ ID NO: 258924 - DNA, 21 bp, Artificial sequence
  SiRNA target sequence
gatacttgactgaagttttca

SEQ ID NO: 258925 - DNA, 21 bp, Artificial sequence
  SiRNA target sequence
atacttgactgaagttttcaa

SEQ ID NO: 258926 - DNA, 21 bp, Artificial sequence
  SiRNA target sequence
tacttgactgaagttttcaaa

SEQ ID NO: 258927 - DNA, 21 bp, Artificial sequence
  SiRNA target sequence
acttgactgaagttttcaaag

SEQ ID NO: 258928 - DNA, 21 bp, Artificial sequence
  SiRNA target sequence
cttgactgaagttttcaaagc

SEQ ID NO: 258929 - DNA, 21 bp, Artificial sequence
  SiRNA target sequence
ttgactgaagttttcaaagca

SEQ ID NO: 258930 - DNA, 21 bp, Artificial sequence
  SiRNA target sequence
tgactgaagttttcaaagcag

SEQ ID NO: 258931 - DNA, 21 bp, Artificial sequence
  SiRNA target sequence
gactgaagttttcaaagcagt

SEQ ID NO: 258932 - DNA, 21 bp, Artificial sequence
  SiRNA target sequence
actgaagttttcaaagcagta

SEQ ID NO: 258933 - DNA, 21 bp, Artificial sequence
  SiRNA target sequence
ctgaagttttcaaagcagtag

SEQ ID NO: 258934 - DNA, 21 bp, Artificial sequence
  SiRNA target sequence
tgaagttttcaaagcagtaga

SEQ ID NO: 258935 - DNA, 21 bp, Artificial sequence
  SiRNA target sequence
gaagttttcaaagcagtagat

SEQ ID NO: 258936 - DNA, 21 bp, Artificial sequence
  SiRNA target sequence
aagttttcaaagcagtagata

SEQ ID NO: 258937 - DNA, 21 bp, Artificial sequence
  SiRNA target sequence
agttttcaaagcagtagatac

SEQ ID NO: 258938 - DNA, 21 bp, Artificial sequence
  SiRNA target sequence
gttttcaaagcagtagatacg

SEQ ID NO: 258939 - DNA, 21 bp, Artificial sequence
  SiRNA target sequence
ttttcaaagcagtagatacgt

SEQ ID NO: 258940 - DNA, 21 bp, Artificial sequence
  SiRNA target sequence
tttcaaagcagtagatacgtc

SEQ ID NO: 258941 - DNA, 21 bp, Artificial sequence
  SiRNA target sequence
ttcaaagcagtagatacgtct

SEQ ID NO: 258942 - DNA, 21 bp, Artificial sequence
  SiRNA target sequence
tcaaagcagtagatacgtctg

SEQ ID NO: 258943 - DNA, 21 bp, Artificial sequence
  SiRNA target sequence
caaagcagtagatacgtctgg

SEQ ID NO: 258944 - DNA, 21 bp, Artificial sequence
  SiRNA target sequence
aaagcagtagatacgtctggt

SEQ ID NO: 258945 - DNA, 21 bp, Artificial sequence
  SiRNA target sequence
aagcagtagatacgtctggtg

SEQ ID NO: 258946 - DNA, 21 bp, Artificial sequence
  SiRNA target sequence
agcagtagatacgtctggtgc

SEQ ID NO: 258947 - DNA, 21 bp, Artificial sequence
  SiRNA target sequence
gcagtagatacgtctggtgct

SEQ ID NO: 258948 - DNA, 21 bp, Artificial sequence
  SiRNA target sequence
cagtagatacgtctggtgctt

SEQ ID NO: 258949 - DNA, 21 bp, Artificial sequence
  SiRNA target sequence
agtagatacgtctggtgcttt

SEQ ID NO: 258950 - DNA, 21 bp, Artificial sequence
  SiRNA target sequence
gtagatacgtctggtgctttt

SEQ ID NO: 258951 - DNA, 21 bp, Artificial sequence
  SiRNA target sequence
tagatacgtctggtgcttttg

SEQ ID NO: 258952 - DNA, 21 bp, Artificial sequence
  SiRNA target sequence
agatacgtctggtgcttttgg

SEQ ID NO: 258953 - DNA, 21 bp, Artificial sequence
  SiRNA target sequence
gatacgtctggtgcttttgga

SEQ ID NO: 258954 - DNA, 21 bp, Artificial sequence
  SiRNA target sequence
atacgtctggtgcttttggaa

SEQ ID NO: 258955 - DNA, 21 bp, Artificial sequence
  SiRNA target sequence
tacgtctggtgcttttggaaa

SEQ ID NO: 258956 - DNA, 21 bp, Artificial sequence
  SiRNA target sequence
acgtctggtgcttttggaaat

SEQ ID NO: 258957 - DNA, 21 bp, Artificial sequence
  SiRNA target sequence
cgtctggtgcttttggaaata

SEQ ID NO: 258958 - DNA, 21 bp, Artificial sequence
  SiRNA target sequence
gtctggtgcttttggaaataa

SEQ ID NO: 258959 - DNA, 21 bp, Artificial sequence
  SiRNA target sequence
tctggtgcttttggaaataaa

SEQ ID NO: 258960 - DNA, 21 bp, Artificial sequence
  SiRNA target sequence
ctggtgcttttggaaataaac

SEQ ID NO: 258961 - DNA, 21 bp, Artificial sequence
  SiRNA target sequence
tggtgcttttggaaataaacc

SEQ ID NO: 258962 - DNA, 21 bp, Artificial sequence
  SiRNA target sequence
ggtgcttttggaaataaaccc

SEQ ID NO: 258963 - DNA, 21 bp, Artificial sequence
  SiRNA target sequence
gtgcttttggaaataaacccc

SEQ ID NO: 258964 - DNA, 21 bp, Artificial sequence
  SiRNA target sequence
tgcttttggaaataaaccccg

SEQ ID NO: 258965 - DNA, 21 bp, Artificial sequence
  SiRNA target sequence
gcttttggaaataaaccccga

SEQ ID NO: 258966 - DNA, 21 bp, Artificial sequence
  SiRNA target sequence
cttttggaaataaaccccgaa

SEQ ID NO: 258967 - DNA, 21 bp, Artificial sequence
  SiRNA target sequence
ttttggaaataaaccccgaac

SEQ ID NO: 258968 - DNA, 21 bp, Artificial sequence
  SiRNA target sequence
tttggaaataaaccccgaact

SEQ ID NO: 258969 - DNA, 21 bp, Artificial sequence
  SiRNA target sequence
ttggaaataaaccccgaactc

SEQ ID NO: 258970 - DNA, 21 bp, Artificial sequence
  SiRNA target sequence
tggaaataaaccccgaactca

SEQ ID NO: 258971 - DNA, 21 bp, Artificial sequence
  SiRNA target sequence
ggaaataaaccccgaactcaa

SEQ ID NO: 258972 - DNA, 21 bp, Artificial sequence
  SiRNA target sequence
gaaataaaccccgaactcaac

SEQ ID NO: 258973 - DNA, 21 bp, Artificial sequence
  SiRNA target sequence
aaataaaccccgaactcaacc

SEQ ID NO: 258974 - DNA, 21 bp, Artificial sequence
  SiRNA target sequence
aataaaccccgaactcaacct

SEQ ID NO: 258975 - DNA, 21 bp, Artificial sequence
  SiRNA target sequence
ataaaccccgaactcaacctg

SEQ ID NO: 258976 - DNA, 21 bp, Artificial sequence
  SiRNA target sequence
taaaccccgaactcaacctgt

SEQ ID NO: 258977 - DNA, 21 bp, Artificial sequence
  SiRNA target sequence
aaaccccgaactcaacctgta

SEQ ID NO: 258978 - DNA, 21 bp, Artificial sequence
  SiRNA target sequence
aaccccgaactcaacctgtag

SEQ ID NO: 258979 - DNA, 21 bp, Artificial sequence
  SiRNA target sequence
accccgaactcaacctgtagt

SEQ ID NO: 258980 - DNA, 21 bp, Artificial sequence
  SiRNA target sequence
ccccgaactcaacctgtagtt

SEQ ID NO: 258981 - DNA, 21 bp, Artificial sequence
  SiRNA target sequence
cccgaactcaacctgtagtta

SEQ ID NO: 258982 - DNA, 21 bp, Artificial sequence
  SiRNA target sequence
ccgaactcaacctgtagttat

SEQ ID NO: 258983 - DNA, 21 bp, Artificial sequence
  SiRNA target sequence
cgaactcaacctgtagttatt

SEQ ID NO: 258984 - DNA, 21 bp, Artificial sequence
  SiRNA target sequence
gaactcaacctgtagttattt

SEQ ID NO: 258985 - DNA, 21 bp, Artificial sequence
  SiRNA target sequence
aactcaacctgtagttatttg

SEQ ID NO: 258986 - DNA, 21 bp, Artificial sequence
  SiRNA target sequence
actcaacctgtagttatttgg

SEQ ID NO: 258987 - DNA, 21 bp, Artificial sequence
  SiRNA target sequence
ctcaacctgtagttatttggc

SEQ ID NO: 258988 - DNA, 21 bp, Artificial sequence
  SiRNA target sequence
tcaacctgtagttatttggct

SEQ ID NO: 258989 - DNA, 21 bp, Artificial sequence
  SiRNA target sequence
caacctgtagttatttggcta

SEQ ID NO: 258990 - DNA, 21 bp, Artificial sequence
  SiRNA target sequence
aacctgtagttatttggctat

SEQ ID NO: 258991 - DNA, 21 bp, Artificial sequence
  SiRNA target sequence
acctgtagttatttggctata

SEQ ID NO: 258992 - DNA, 21 bp, Artificial sequence
  SiRNA target sequence
cctgtagttatttggctatat

SEQ ID NO: 258993 - DNA, 21 bp, Artificial sequence
  SiRNA target sequence
ctgtagttatttggctatatg

SEQ ID NO: 258994 - DNA, 21 bp, Artificial sequence
  SiRNA target sequence
tgtagttatttggctatatgg

SEQ ID NO: 258995 - DNA, 21 bp, Artificial sequence
  SiRNA target sequence
gtagttatttggctatatggt

SEQ ID NO: 258996 - DNA, 21 bp, Artificial sequence
  SiRNA target sequence
tagttatttggctatatggtg

SEQ ID NO: 258997 - DNA, 21 bp, Artificial sequence
  SiRNA target sequence
agttatttggctatatggtga

SEQ ID NO: 258998 - DNA, 21 bp, Artificial sequence
  SiRNA target sequence
gttatttggctatatggtgag

SEQ ID NO: 258999 - DNA, 21 bp, Artificial sequence
  SiRNA target sequence
ttatttggctatatggtgagt

SEQ ID NO: 259000 - DNA, 21 bp, Artificial sequence
  SiRNA target sequence
tatttggctatatggtgagtc

SEQ ID NO: 259001 - DNA, 21 bp, Artificial sequence
  SiRNA target sequence
atttggctatatggtgagtct

SEQ ID NO: 259002 - DNA, 21 bp, Artificial sequence
  SiRNA target sequence
tttggctatatggtgagtctg

SEQ ID NO: 259003 - DNA, 21 bp, Artificial sequence
  SiRNA target sequence
ttggctatatggtgagtctgg

SEQ ID NO: 259004 - DNA, 21 bp, Artificial sequence
  SiRNA target sequence
tggctatatggtgagtctgga

SEQ ID NO: 259005 - DNA, 21 bp, Artificial sequence
  SiRNA target sequence
ggctatatggtgagtctggag

SEQ ID NO: 259006 - DNA, 21 bp, Artificial sequence
  SiRNA target sequence
gctatatggtgagtctggagt

SEQ ID NO: 259007 - DNA, 21 bp, Artificial sequence
  SiRNA target sequence
ctatatggtgagtctggagtt

SEQ ID NO: 259008 - DNA, 21 bp, Artificial sequence
  SiRNA target sequence
tatatggtgagtctggagttg

SEQ ID NO: 259009 - DNA, 21 bp, Artificial sequence
  SiRNA target sequence
atatggtgagtctggagttgg

SEQ ID NO: 259010 - DNA, 21 bp, Artificial sequence
  SiRNA target sequence
tatggtgagtctggagttggt

SEQ ID NO: 259011 - DNA, 21 bp, Artificial sequence
  SiRNA target sequence
atggtgagtctggagttggta

SEQ ID NO: 259012 - DNA, 21 bp, Artificial sequence
  SiRNA target sequence
tggtgagtctggagttggtaa

SEQ ID NO: 259013 - DNA, 21 bp, Artificial sequence
  SiRNA target sequence
ggtgagtctggagttggtaag

SEQ ID NO: 259014 - DNA, 21 bp, Artificial sequence
  SiRNA target sequence
gtgagtctggagttggtaagt

SEQ ID NO: 259015 - DNA, 21 bp, Artificial sequence
  SiRNA target sequence
tgagtctggagttggtaagtc

SEQ ID NO: 259016 - DNA, 21 bp, Artificial sequence
  SiRNA target sequence
gagtctggagttggtaagtca

SEQ ID NO: 259017 - DNA, 21 bp, Artificial sequence
  SiRNA target sequence
agtctggagttggtaagtcag

SEQ ID NO: 259018 - DNA, 21 bp, Artificial sequence
  SiRNA target sequence
gtctggagttggtaagtcagg

SEQ ID NO: 259019 - DNA, 21 bp, Artificial sequence
  SiRNA target sequence
tctggagttggtaagtcaggt

SEQ ID NO: 259020 - DNA, 21 bp, Artificial sequence
  SiRNA target sequence
ctggagttggtaagtcaggta

SEQ ID NO: 259021 - DNA, 21 bp, Artificial sequence
  SiRNA target sequence
tggagttggtaagtcaggtat

SEQ ID NO: 259022 - DNA, 21 bp, Artificial sequence
  SiRNA target sequence
ggagttggtaagtcaggtatg

SEQ ID NO: 259023 - DNA, 21 bp, Artificial sequence
  SiRNA target sequence
gagttggtaagtcaggtatga

SEQ ID NO: 259024 - DNA, 21 bp, Artificial sequence
  SiRNA target sequence
agttggtaagtcaggtatgac

SEQ ID NO: 259025 - DNA, 21 bp, Artificial sequence
  SiRNA target sequence
gttggtaagtcaggtatgaca

SEQ ID NO: 259026 - DNA, 21 bp, Artificial sequence
  SiRNA target sequence
ttggtaagtcaggtatgacat

SEQ ID NO: 259027 - DNA, 21 bp, Artificial sequence
  SiRNA target sequence
tggtaagtcaggtatgacatg

SEQ ID NO: 259028 - DNA, 21 bp, Artificial sequence
  SiRNA target sequence
ggtaagtcaggtatgacatgg

SEQ ID NO: 259029 - DNA, 21 bp, Artificial sequence
  SiRNA target sequence
gtaagtcaggtatgacatggc

SEQ ID NO: 259030 - DNA, 21 bp, Artificial sequence
  SiRNA target sequence
taagtcaggtatgacatggcc

SEQ ID NO: 259031 - DNA, 21 bp, Artificial sequence
  SiRNA target sequence
aagtcaggtatgacatggccc

SEQ ID NO: 259032 - DNA, 21 bp, Artificial sequence
  SiRNA target sequence
agtcaggtatgacatggcccc

SEQ ID NO: 259033 - DNA, 21 bp, Artificial sequence
  SiRNA target sequence
gtcaggtatgacatggcccct

SEQ ID NO: 259034 - DNA, 21 bp, Artificial sequence
  SiRNA target sequence
tcaggtatgacatggccccta

SEQ ID NO: 259035 - DNA, 21 bp, Artificial sequence
  SiRNA target sequence
caggtatgacatggcccctag

SEQ ID NO: 259036 - DNA, 21 bp, Artificial sequence
  SiRNA target sequence
aggtatgacatggcccctagc

SEQ ID NO: 259037 - DNA, 21 bp, Artificial sequence
  SiRNA target sequence
ggtatgacatggcccctagct

SEQ ID NO: 259038 - DNA, 21 bp, Artificial sequence
  SiRNA target sequence
gtatgacatggcccctagctg

SEQ ID NO: 259039 - DNA, 21 bp, Artificial sequence
  SiRNA target sequence
tatgacatggcccctagctgt

SEQ ID NO: 259040 - DNA, 21 bp, Artificial sequence
  SiRNA target sequence
atgacatggcccctagctgta

SEQ ID NO: 259041 - DNA, 21 bp, Artificial sequence
  SiRNA target sequence
tgacatggcccctagctgtag

SEQ ID NO: 259042 - DNA, 21 bp, Artificial sequence
  SiRNA target sequence
gacatggcccctagctgtaga

SEQ ID NO: 259043 - DNA, 21 bp, Artificial sequence
  SiRNA target sequence
acatggcccctagctgtagat

SEQ ID NO: 259044 - DNA, 21 bp, Artificial sequence
  SiRNA target sequence
catggcccctagctgtagatc

SEQ ID NO: 259045 - DNA, 21 bp, Artificial sequence
  SiRNA target sequence
atggcccctagctgtagatct

SEQ ID NO: 259046 - DNA, 21 bp, Artificial sequence
  SiRNA target sequence
tggcccctagctgtagatctt

SEQ ID NO: 259047 - DNA, 21 bp, Artificial sequence
  SiRNA target sequence
ggcccctagctgtagatctta

SEQ ID NO: 259048 - DNA, 21 bp, Artificial sequence
  SiRNA target sequence
gcccctagctgtagatcttaa

SEQ ID NO: 259049 - DNA, 21 bp, Artificial sequence
  SiRNA target sequence
cccctagctgtagatcttaat

SEQ ID NO: 259050 - DNA, 21 bp, Artificial sequence
  SiRNA target sequence
ccctagctgtagatcttaata

SEQ ID NO: 259051 - DNA, 21 bp, Artificial sequence
  SiRNA target sequence
cctagctgtagatcttaataa

SEQ ID NO: 259052 - DNA, 21 bp, Artificial sequence
  SiRNA target sequence
ctagctgtagatcttaataat

SEQ ID NO: 259053 - DNA, 21 bp, Artificial sequence
  SiRNA target sequence
tagctgtagatcttaataata

SEQ ID NO: 259054 - DNA, 21 bp, Artificial sequence
  SiRNA target sequence
agctgtagatcttaataatag

SEQ ID NO: 259055 - DNA, 21 bp, Artificial sequence
  SiRNA target sequence
gctgtagatcttaataatagt

SEQ ID NO: 259056 - DNA, 21 bp, Artificial sequence
  SiRNA target sequence
ctgtagatcttaataatagtt

SEQ ID NO: 259057 - DNA, 21 bp, Artificial sequence
  SiRNA target sequence
tgtagatcttaataatagttt

SEQ ID NO: 259058 - DNA, 21 bp, Artificial sequence
  SiRNA target sequence
gtagatcttaataatagttta

SEQ ID NO: 259059 - DNA, 21 bp, Artificial sequence
  SiRNA target sequence
tagatcttaataatagtttag

SEQ ID NO: 259060 - DNA, 21 bp, Artificial sequence
  SiRNA target sequence
agatcttaataatagtttagt

SEQ ID NO: 259061 - DNA, 21 bp, Artificial sequence
  SiRNA target sequence
gatcttaataatagtttagta

SEQ ID NO: 259062 - DNA, 21 bp, Artificial sequence
  SiRNA target sequence
atcttaataatagtttagtag

SEQ ID NO: 259063 - DNA, 21 bp, Artificial sequence
  SiRNA target sequence
tcttaataatagtttagtaga

SEQ ID NO: 259064 - DNA, 21 bp, Artificial sequence
  SiRNA target sequence
cttaataatagtttagtagat

SEQ ID NO: 259065 - DNA, 21 bp, Artificial sequence
  SiRNA target sequence
ttaataatagtttagtagata

SEQ ID NO: 259066 - DNA, 21 bp, Artificial sequence
  SiRNA target sequence
taataatagtttagtagataa

SEQ ID NO: 259067 - DNA, 21 bp, Artificial sequence
  SiRNA target sequence
aataatagtttagtagataat

SEQ ID NO: 259068 - DNA, 21 bp, Artificial sequence
  SiRNA target sequence
ataatagtttagtagataatg

SEQ ID NO: 259069 - DNA, 21 bp, Artificial sequence
  SiRNA target sequence
taatagtttagtagataatgt

SEQ ID NO: 259070 - DNA, 21 bp, Artificial sequence
  SiRNA target sequence
aatagtttagtagataatgta

SEQ ID NO: 259071 - DNA, 21 bp, Artificial sequence
  SiRNA target sequence
atagtttagtagataatgtag

SEQ ID NO: 259072 - DNA, 21 bp, Artificial sequence
  SiRNA target sequence
tagtttagtagataatgtaga

SEQ ID NO: 259073 - DNA, 21 bp, Artificial sequence
  SiRNA target sequence
agtttagtagataatgtagag

SEQ ID NO: 259074 - DNA, 21 bp, Artificial sequence
  SiRNA target sequence
gtttagtagataatgtagagg

SEQ ID NO: 259075 - DNA, 21 bp, Artificial sequence
  SiRNA target sequence
tttagtagataatgtagagga

SEQ ID NO: 259076 - DNA, 21 bp, Artificial sequence
  SiRNA target sequence
ttagtagataatgtagaggag

SEQ ID NO: 259077 - DNA, 21 bp, Artificial sequence
  SiRNA target sequence
tagtagataatgtagaggaga

SEQ ID NO: 259078 - DNA, 21 bp, Artificial sequence
  SiRNA target sequence
agtagataatgtagaggagat

SEQ ID NO: 259079 - DNA, 21 bp, Artificial sequence
  SiRNA target sequence
gtagataatgtagaggagatg

SEQ ID NO: 259080 - DNA, 21 bp, Artificial sequence
  SiRNA target sequence
tagataatgtagaggagatgc

SEQ ID NO: 259081 - DNA, 21 bp, Artificial sequence
  SiRNA target sequence
agataatgtagaggagatgcg

SEQ ID NO: 259082 - DNA, 21 bp, Artificial sequence
  SiRNA target sequence
gataatgtagaggagatgcgt

SEQ ID NO: 259083 - DNA, 21 bp, Artificial sequence
  SiRNA target sequence
ataatgtagaggagatgcgta

SEQ ID NO: 259084 - DNA, 21 bp, Artificial sequence
  SiRNA target sequence
taatgtagaggagatgcgtaa

SEQ ID NO: 259085 - DNA, 21 bp, Artificial sequence
  SiRNA target sequence
aatgtagaggagatgcgtaat

SEQ ID NO: 259086 - DNA, 21 bp, Artificial sequence
  SiRNA target sequence
atgtagaggagatgcgtaatt

SEQ ID NO: 259087 - DNA, 21 bp, Artificial sequence
  SiRNA target sequence
tgtagaggagatgcgtaattt

SEQ ID NO: 259088 - DNA, 21 bp, Artificial sequence
  SiRNA target sequence
gtagaggagatgcgtaatttt

SEQ ID NO: 259089 - DNA, 21 bp, Artificial sequence
  SiRNA target sequence
tagaggagatgcgtaattttt

SEQ ID NO: 259090 - DNA, 21 bp, Artificial sequence
  SiRNA target sequence
agaggagatgcgtaatttttc

SEQ ID NO: 259091 - DNA, 21 bp, Artificial sequence
  SiRNA target sequence
gaggagatgcgtaatttttcc

SEQ ID NO: 259092 - DNA, 21 bp, Artificial sequence
  SiRNA target sequence
aggagatgcgtaatttttcca

SEQ ID NO: 259093 - DNA, 21 bp, Artificial sequence
  SiRNA target sequence
ggagatgcgtaatttttccaa

SEQ ID NO: 259094 - DNA, 21 bp, Artificial sequence
  SiRNA target sequence
gagatgcgtaatttttccaag

SEQ ID NO: 259095 - DNA, 21 bp, Artificial sequence
  SiRNA target sequence
agatgcgtaatttttccaaga

SEQ ID NO: 259096 - DNA, 21 bp, Artificial sequence
  SiRNA target sequence
gatgcgtaatttttccaagaa

SEQ ID NO: 259097 - DNA, 21 bp, Artificial sequence
  SiRNA target sequence
atgcgtaatttttccaagaat

SEQ ID NO: 259098 - DNA, 21 bp, Artificial sequence
  SiRNA target sequence
tgcgtaatttttccaagaata

SEQ ID NO: 259099 - DNA, 21 bp, Artificial sequence
  SiRNA target sequence
gcgtaatttttccaagaatat

SEQ ID NO: 259100 - DNA, 21 bp, Artificial sequence
  SiRNA target sequence
cgtaatttttccaagaatatt

SEQ ID NO: 259101 - DNA, 21 bp, Artificial sequence
  SiRNA target sequence
gtaatttttccaagaatattt

SEQ ID NO: 259102 - DNA, 21 bp, Artificial sequence
  SiRNA target sequence
taatttttccaagaatattta

SEQ ID NO: 259103 - DNA, 21 bp, Artificial sequence
  SiRNA target sequence
aatttttccaagaatatttac

SEQ ID NO: 259104 - DNA, 21 bp, Artificial sequence
  SiRNA target sequence
atttttccaagaatatttaca

SEQ ID NO: 259105 - DNA, 21 bp, Artificial sequence
  SiRNA target sequence
tttttccaagaatatttacat

SEQ ID NO: 259106 - DNA, 21 bp, Artificial sequence
  SiRNA target sequence
ttttccaagaatatttacatg

SEQ ID NO: 259107 - DNA, 21 bp, Artificial sequence
  SiRNA target sequence
tttccaagaatatttacatga

SEQ ID NO: 259108 - DNA, 21 bp, Artificial sequence
  SiRNA target sequence
ttccaagaatatttacatgag

SEQ ID NO: 259109 - DNA, 21 bp, Artificial sequence
  SiRNA target sequence
tccaagaatatttacatgaga

SEQ ID NO: 259110 - DNA, 21 bp, Artificial sequence
  SiRNA target sequence
ccaagaatatttacatgagaa

SEQ ID NO: 259111 - DNA, 21 bp, Artificial sequence
  SiRNA target sequence
caagaatatttacatgagaaa

SEQ ID NO: 259112 - DNA, 21 bp, Artificial sequence
  SiRNA target sequence
aagaatatttacatgagaaat

SEQ ID NO: 259113 - DNA, 21 bp, Artificial sequence
  SiRNA target sequence
agaatatttacatgagaaatg

SEQ ID NO: 259114 - DNA, 21 bp, Artificial sequence
  SiRNA target sequence
gaatatttacatgagaaatgt

SEQ ID NO: 259115 - DNA, 21 bp, Artificial sequence
  SiRNA target sequence
aatatttacatgagaaatgta

SEQ ID NO: 259116 - DNA, 21 bp, Artificial sequence
  SiRNA target sequence
atatttacatgagaaatgtag

SEQ ID NO: 259117 - DNA, 21 bp, Artificial sequence
  SiRNA target sequence
tatttacatgagaaatgtaga

SEQ ID NO: 259118 - DNA, 21 bp, Artificial sequence
  SiRNA target sequence
atttacatgagaaatgtagaa

SEQ ID NO: 259119 - DNA, 21 bp, Artificial sequence
  SiRNA target sequence
tttacatgagaaatgtagaac

SEQ ID NO: 259120 - DNA, 21 bp, Artificial sequence
  SiRNA target sequence
ttacatgagaaatgtagaaca

SEQ ID NO: 259121 - DNA, 21 bp, Artificial sequence
  SiRNA target sequence
tacatgagaaatgtagaacag

SEQ ID NO: 259122 - DNA, 21 bp, Artificial sequence
  SiRNA target sequence
acatgagaaatgtagaacagg

SEQ ID NO: 259123 - DNA, 21 bp, Artificial sequence
  SiRNA target sequence
catgagaaatgtagaacagga

SEQ ID NO: 259124 - DNA, 21 bp, Artificial sequence
  SiRNA target sequence
atgagaaatgtagaacaggaa

SEQ ID NO: 259125 - DNA, 21 bp, Artificial sequence
  SiRNA target sequence
tgagaaatgtagaacaggaat

SEQ ID NO: 259126 - DNA, 21 bp, Artificial sequence
  SiRNA target sequence
gagaaatgtagaacaggaatt

SEQ ID NO: 259127 - DNA, 21 bp, Artificial sequence
  SiRNA target sequence
agaaatgtagaacaggaattt

SEQ ID NO: 259128 - DNA, 21 bp, Artificial sequence
  SiRNA target sequence
gaaatgtagaacaggaatttt

SEQ ID NO: 259129 - DNA, 21 bp, Artificial sequence
  SiRNA target sequence
aaatgtagaacaggaattttg

SEQ ID NO: 259130 - DNA, 21 bp, Artificial sequence
  SiRNA target sequence
aatgtagaacaggaattttgg

SEQ ID NO: 259131 - DNA, 21 bp, Artificial sequence
  SiRNA target sequence
atgtagaacaggaattttggg

SEQ ID NO: 259132 - DNA, 21 bp, Artificial sequence
  SiRNA target sequence
tgtagaacaggaattttggga

SEQ ID NO: 259133 - DNA, 21 bp, Artificial sequence
  SiRNA target sequence
gtagaacaggaattttgggat

SEQ ID NO: 259134 - DNA, 21 bp, Artificial sequence
  SiRNA target sequence
tagaacaggaattttgggata

SEQ ID NO: 259135 - DNA, 21 bp, Artificial sequence
  SiRNA target sequence
agaacaggaattttgggataa

SEQ ID NO: 259136 - DNA, 21 bp, Artificial sequence
  SiRNA target sequence
gaacaggaattttgggataat

SEQ ID NO: 259137 - DNA, 21 bp, Artificial sequence
  SiRNA target sequence
aacaggaattttgggataatt

SEQ ID NO: 259138 - DNA, 21 bp, Artificial sequence
  SiRNA target sequence
acaggaattttgggataatta

SEQ ID NO: 259139 - DNA, 21 bp, Artificial sequence
  SiRNA target sequence
caggaattttgggataattat

SEQ ID NO: 259140 - DNA, 21 bp, Artificial sequence
  SiRNA target sequence
aggaattttgggataattatc

SEQ ID NO: 259141 - DNA, 21 bp, Artificial sequence
  SiRNA target sequence
ggaattttgggataattatca

SEQ ID NO: 259142 - DNA, 21 bp, Artificial sequence
  SiRNA target sequence
gaattttgggataattatcaa

SEQ ID NO: 259143 - DNA, 21 bp, Artificial sequence
  SiRNA target sequence
aattttgggataattatcaag

SEQ ID NO: 259144 - DNA, 21 bp, Artificial sequence
  SiRNA target sequence
attttgggataattatcaagg

SEQ ID NO: 259145 - DNA, 21 bp, Artificial sequence
  SiRNA target sequence
ttttgggataattatcaagga

SEQ ID NO: 259146 - DNA, 21 bp, Artificial sequence
  SiRNA target sequence
tttgggataattatcaaggac

SEQ ID NO: 259147 - DNA, 21 bp, Artificial sequence
  SiRNA target sequence
ttgggataattatcaaggaca

SEQ ID NO: 259148 - DNA, 21 bp, Artificial sequence
  SiRNA target sequence
tgggataattatcaaggacaa

SEQ ID NO: 259149 - DNA, 21 bp, Artificial sequence
  SiRNA target sequence
gggataattatcaaggacaaa

SEQ ID NO: 259150 - DNA, 21 bp, Artificial sequence
  SiRNA target sequence
ggataattatcaaggacaaaa

SEQ ID NO: 259151 - DNA, 21 bp, Artificial sequence
  SiRNA target sequence
gataattatcaaggacaaaac

SEQ ID NO: 259152 - DNA, 21 bp, Artificial sequence
  SiRNA target sequence
ataattatcaaggacaaaacg

SEQ ID NO: 259153 - DNA, 21 bp, Artificial sequence
  SiRNA target sequence
taattatcaaggacaaaacgt

SEQ ID NO: 259154 - DNA, 21 bp, Artificial sequence
  SiRNA target sequence
aattatcaaggacaaaacgtt

SEQ ID NO: 259155 - DNA, 21 bp, Artificial sequence
  SiRNA target sequence
attatcaaggacaaaacgttg

SEQ ID NO: 259156 - DNA, 21 bp, Artificial sequence
  SiRNA target sequence
ttatcaaggacaaaacgttgt

SEQ ID NO: 259157 - DNA, 21 bp, Artificial sequence
  SiRNA target sequence
tatcaaggacaaaacgttgta

SEQ ID NO: 259158 - DNA, 21 bp, Artificial sequence
  SiRNA target sequence
atcaaggacaaaacgttgtag

SEQ ID NO: 259159 - DNA, 21 bp, Artificial sequence
  SiRNA target sequence
tcaaggacaaaacgttgtagt

SEQ ID NO: 259160 - DNA, 21 bp, Artificial sequence
  SiRNA target sequence
caaggacaaaacgttgtagtt

SEQ ID NO: 259161 - DNA, 21 bp, Artificial sequence
  SiRNA target sequence
aaggacaaaacgttgtagttt

SEQ ID NO: 259162 - DNA, 21 bp, Artificial sequence
  SiRNA target sequence
aggacaaaacgttgtagttta

SEQ ID NO: 259163 - DNA, 21 bp, Artificial sequence
  SiRNA target sequence
ggacaaaacgttgtagtttat

SEQ ID NO: 259164 - DNA, 21 bp, Artificial sequence
  SiRNA target sequence
gacaaaacgttgtagtttatg

SEQ ID NO: 259165 - DNA, 21 bp, Artificial sequence
  SiRNA target sequence
acaaaacgttgtagtttatga

SEQ ID NO: 259166 - DNA, 21 bp, Artificial sequence
  SiRNA target sequence
caaaacgttgtagtttatgat

SEQ ID NO: 259167 - DNA, 21 bp, Artificial sequence
  SiRNA target sequence
aaaacgttgtagtttatgatg

SEQ ID NO: 259168 - DNA, 21 bp, Artificial sequence
  SiRNA target sequence
aaacgttgtagtttatgatga

SEQ ID NO: 259169 - DNA, 21 bp, Artificial sequence
  SiRNA target sequence
aacgttgtagtttatgatgat

SEQ ID NO: 259170 - DNA, 21 bp, Artificial sequence
  SiRNA target sequence
acgttgtagtttatgatgatt

SEQ ID NO: 259171 - DNA, 21 bp, Artificial sequence
  SiRNA target sequence
cgttgtagtttatgatgattt

SEQ ID NO: 259172 - DNA, 21 bp, Artificial sequence
  SiRNA target sequence
gttgtagtttatgatgatttt

SEQ ID NO: 259173 - DNA, 21 bp, Artificial sequence
  SiRNA target sequence
ttgtagtttatgatgattttg

SEQ ID NO: 259174 - DNA, 21 bp, Artificial sequence
  SiRNA target sequence
tgtagtttatgatgattttgg

SEQ ID NO: 259175 - DNA, 21 bp, Artificial sequence
  SiRNA target sequence
gtagtttatgatgattttgga

SEQ ID NO: 259176 - DNA, 21 bp, Artificial sequence
  SiRNA target sequence
tagtttatgatgattttggac

SEQ ID NO: 259177 - DNA, 21 bp, Artificial sequence
  SiRNA target sequence
agtttatgatgattttggaca

SEQ ID NO: 259178 - DNA, 21 bp, Artificial sequence
  SiRNA target sequence
gtttatgatgattttggacag

SEQ ID NO: 259179 - DNA, 21 bp, Artificial sequence
  SiRNA target sequence
tttatgatgattttggacaga

SEQ ID NO: 259180 - DNA, 21 bp, Artificial sequence
  SiRNA target sequence
ttatgatgattttggacagat

SEQ ID NO: 259181 - DNA, 21 bp, Artificial sequence
  SiRNA target sequence
tatgatgattttggacagatg

SEQ ID NO: 259182 - DNA, 21 bp, Artificial sequence
  SiRNA target sequence
atgatgattttggacagatga

SEQ ID NO: 259183 - DNA, 21 bp, Artificial sequence
  SiRNA target sequence
tgatgattttggacagatgag

SEQ ID NO: 259184 - DNA, 21 bp, Artificial sequence
  SiRNA target sequence
gatgattttggacagatgagg

SEQ ID NO: 259185 - DNA, 21 bp, Artificial sequence
  SiRNA target sequence
atgattttggacagatgaggg

SEQ ID NO: 259186 - DNA, 21 bp, Artificial sequence
  SiRNA target sequence
tgattttggacagatgaggga

SEQ ID NO: 259187 - DNA, 21 bp, Artificial sequence
  SiRNA target sequence
gattttggacagatgagggat

SEQ ID NO: 259188 - DNA, 21 bp, Artificial sequence
  SiRNA target sequence
attttggacagatgagggatt

SEQ ID NO: 259189 - DNA, 21 bp, Artificial sequence
  SiRNA target sequence
ttttggacagatgagggattc

SEQ ID NO: 259190 - DNA, 21 bp, Artificial sequence
  SiRNA target sequence
tttggacagatgagggattca

SEQ ID NO: 259191 - DNA, 21 bp, Artificial sequence
  SiRNA target sequence
ttggacagatgagggattcaa

SEQ ID NO: 259192 - DNA, 21 bp, Artificial sequence
  SiRNA target sequence
tggacagatgagggattcaac

SEQ ID NO: 259193 - DNA, 21 bp, Artificial sequence
  SiRNA target sequence
ggacagatgagggattcaaca

SEQ ID NO: 259194 - DNA, 21 bp, Artificial sequence
  SiRNA target sequence
gacagatgagggattcaacat

SEQ ID NO: 259195 - DNA, 21 bp, Artificial sequence
  SiRNA target sequence
acagatgagggattcaacatc

SEQ ID NO: 259196 - DNA, 21 bp, Artificial sequence
  SiRNA target sequence
cagatgagggattcaacatct

SEQ ID NO: 259197 - DNA, 21 bp, Artificial sequence
  SiRNA target sequence
agatgagggattcaacatcta

SEQ ID NO: 259198 - DNA, 21 bp, Artificial sequence
  SiRNA target sequence
gatgagggattcaacatctaa

SEQ ID NO: 259199 - DNA, 21 bp, Artificial sequence
  SiRNA target sequence
atgagggattcaacatctaat

SEQ ID NO: 259200 - DNA, 21 bp, Artificial sequence
  SiRNA target sequence
tgagggattcaacatctaatc

SEQ ID NO: 259201 - DNA, 21 bp, Artificial sequence
  SiRNA target sequence
gagggattcaacatctaatcc

SEQ ID NO: 259202 - DNA, 21 bp, Artificial sequence
  SiRNA target sequence
agggattcaacatctaatcct

SEQ ID NO: 259203 - DNA, 21 bp, Artificial sequence
  SiRNA target sequence
gggattcaacatctaatccta

SEQ ID NO: 259204 - DNA, 21 bp, Artificial sequence
  SiRNA target sequence
ggattcaacatctaatcctaa

SEQ ID NO: 259205 - DNA, 21 bp, Artificial sequence
  SiRNA target sequence
gattcaacatctaatcctaat

SEQ ID NO: 259206 - DNA, 21 bp, Artificial sequence
  SiRNA target sequence
attcaacatctaatcctaatc

SEQ ID NO: 259207 - DNA, 21 bp, Artificial sequence
  SiRNA target sequence
ttcaacatctaatcctaatcc

SEQ ID NO: 259208 - DNA, 21 bp, Artificial sequence
  SiRNA target sequence
tcaacatctaatcctaatcct

SEQ ID NO: 259209 - DNA, 21 bp, Artificial sequence
  SiRNA target sequence
caacatctaatcctaatcctg

SEQ ID NO: 259210 - DNA, 21 bp, Artificial sequence
  SiRNA target sequence
aacatctaatcctaatcctga

SEQ ID NO: 259211 - DNA, 21 bp, Artificial sequence
  SiRNA target sequence
acatctaatcctaatcctgaa

SEQ ID NO: 259212 - DNA, 21 bp, Artificial sequence
  SiRNA target sequence
catctaatcctaatcctgaat

SEQ ID NO: 259213 - DNA, 21 bp, Artificial sequence
  SiRNA target sequence
atctaatcctaatcctgaatt

SEQ ID NO: 259214 - DNA, 21 bp, Artificial sequence
  SiRNA target sequence
tctaatcctaatcctgaattc

SEQ ID NO: 259215 - DNA, 21 bp, Artificial sequence
  SiRNA target sequence
ctaatcctaatcctgaattca

SEQ ID NO: 259216 - DNA, 21 bp, Artificial sequence
  SiRNA target sequence
taatcctaatcctgaattcat

SEQ ID NO: 259217 - DNA, 21 bp, Artificial sequence
  SiRNA target sequence
aatcctaatcctgaattcatg

SEQ ID NO: 259218 - DNA, 21 bp, Artificial sequence
  SiRNA target sequence
atcctaatcctgaattcatgg

SEQ ID NO: 259219 - DNA, 21 bp, Artificial sequence
  SiRNA target sequence
tcctaatcctgaattcatgga

SEQ ID NO: 259220 - DNA, 21 bp, Artificial sequence
  SiRNA target sequence
cctaatcctgaattcatggaa

SEQ ID NO: 259221 - DNA, 21 bp, Artificial sequence
  SiRNA target sequence
ctaatcctgaattcatggaat

SEQ ID NO: 259222 - DNA, 21 bp, Artificial sequence
  SiRNA target sequence
taatcctgaattcatggaatt

SEQ ID NO: 259223 - DNA, 21 bp, Artificial sequence
  SiRNA target sequence
aatcctgaattcatggaatta

SEQ ID NO: 259224 - DNA, 21 bp, Artificial sequence
  SiRNA target sequence
atcctgaattcatggaattaa

SEQ ID NO: 259225 - DNA, 21 bp, Artificial sequence
  SiRNA target sequence
tcctgaattcatggaattaat

SEQ ID NO: 259226 - DNA, 21 bp, Artificial sequence
  SiRNA target sequence
cctgaattcatggaattaata

SEQ ID NO: 259227 - DNA, 21 bp, Artificial sequence
  SiRNA target sequence
ctgaattcatggaattaatac

SEQ ID NO: 259228 - DNA, 21 bp, Artificial sequence
  SiRNA target sequence
tgaattcatggaattaatacg

SEQ ID NO: 259229 - DNA, 21 bp, Artificial sequence
  SiRNA target sequence
gaattcatggaattaatacgc

SEQ ID NO: 259230 - DNA, 21 bp, Artificial sequence
  SiRNA target sequence
aattcatggaattaatacgca

SEQ ID NO: 259231 - DNA, 21 bp, Artificial sequence
  SiRNA target sequence
attcatggaattaatacgcac

SEQ ID NO: 259232 - DNA, 21 bp, Artificial sequence
  SiRNA target sequence
ttcatggaattaatacgcaca

SEQ ID NO: 259233 - DNA, 21 bp, Artificial sequence
  SiRNA target sequence
tcatggaattaatacgcacag

SEQ ID NO: 259234 - DNA, 21 bp, Artificial sequence
  SiRNA target sequence
catggaattaatacgcacagc

SEQ ID NO: 259235 - DNA, 21 bp, Artificial sequence
  SiRNA target sequence
atggaattaatacgcacagct

SEQ ID NO: 259236 - DNA, 21 bp, Artificial sequence
  SiRNA target sequence
tggaattaatacgcacagcta

SEQ ID NO: 259237 - DNA, 21 bp, Artificial sequence
  SiRNA target sequence
ggaattaatacgcacagctaa

SEQ ID NO: 259238 - DNA, 21 bp, Artificial sequence
  SiRNA target sequence
gaattaatacgcacagctaac

SEQ ID NO: 259239 - DNA, 21 bp, Artificial sequence
  SiRNA target sequence
aattaatacgcacagctaaca

SEQ ID NO: 259240 - DNA, 21 bp, Artificial sequence
  SiRNA target sequence
attaatacgcacagctaacat

SEQ ID NO: 259241 - DNA, 21 bp, Artificial sequence
  SiRNA target sequence
ttaatacgcacagctaacata

SEQ ID NO: 259242 - DNA, 21 bp, Artificial sequence
  SiRNA target sequence
taatacgcacagctaacatag

SEQ ID NO: 259243 - DNA, 21 bp, Artificial sequence
  SiRNA target sequence
aatacgcacagctaacatagc

SEQ ID NO: 259244 - DNA, 21 bp, Artificial sequence
  SiRNA target sequence
atacgcacagctaacatagcc

SEQ ID NO: 259245 - DNA, 21 bp, Artificial sequence
  SiRNA target sequence
tacgcacagctaacatagccc

SEQ ID NO: 259246 - DNA, 21 bp, Artificial sequence
  SiRNA target sequence
acgcacagctaacatagcccc

SEQ ID NO: 259247 - DNA, 21 bp, Artificial sequence
  SiRNA target sequence
cgcacagctaacatagcccct

SEQ ID NO: 259248 - DNA, 21 bp, Artificial sequence
  SiRNA target sequence
gcacagctaacatagcccctt

SEQ ID NO: 259249 - DNA, 21 bp, Artificial sequence
  SiRNA target sequence
cacagctaacatagcccctta

SEQ ID NO: 259250 - DNA, 21 bp, Artificial sequence
  SiRNA target sequence
acagctaacatagccccttat

SEQ ID NO: 259251 - DNA, 21 bp, Artificial sequence
  SiRNA target sequence
cagctaacatagccccttatc

SEQ ID NO: 259252 - DNA, 21 bp, Artificial sequence
  SiRNA target sequence
agctaacatagccccttatcc

SEQ ID NO: 259253 - DNA, 21 bp, Artificial sequence
  SiRNA target sequence
gctaacatagccccttatcct

SEQ ID NO: 259254 - DNA, 21 bp, Artificial sequence
  SiRNA target sequence
ctaacatagccccttatcctt

SEQ ID NO: 259255 - DNA, 21 bp, Artificial sequence
  SiRNA target sequence
taacatagccccttatccttt

SEQ ID NO: 259256 - DNA, 21 bp, Artificial sequence
  SiRNA target sequence
aacatagccccttatccttta

SEQ ID NO: 259257 - DNA, 21 bp, Artificial sequence
  SiRNA target sequence
acatagccccttatcctttac

SEQ ID NO: 259258 - DNA, 21 bp, Artificial sequence
  SiRNA target sequence
catagccccttatcctttaca

SEQ ID NO: 259259 - DNA, 21 bp, Artificial sequence
  SiRNA target sequence
atagccccttatcctttacat

SEQ ID NO: 259260 - DNA, 21 bp, Artificial sequence
  SiRNA target sequence
tagccccttatcctttacata

SEQ ID NO: 259261 - DNA, 21 bp, Artificial sequence
  SiRNA target sequence
agccccttatcctttacatat

SEQ ID NO: 259262 - DNA, 21 bp, Artificial sequence
  SiRNA target sequence
gccccttatcctttacatatg

SEQ ID NO: 259263 - DNA, 21 bp, Artificial sequence
  SiRNA target sequence
ccccttatcctttacatatgg

SEQ ID NO: 259264 - DNA, 21 bp, Artificial sequence
  SiRNA target sequence
cccttatcctttacatatggc

SEQ ID NO: 259265 - DNA, 21 bp, Artificial sequence
  SiRNA target sequence
ccttatcctttacatatggct

SEQ ID NO: 259266 - DNA, 21 bp, Artificial sequence
  SiRNA target sequence
cttatcctttacatatggctc

SEQ ID NO: 259267 - DNA, 21 bp, Artificial sequence
  SiRNA target sequence
ttatcctttacatatggctca

SEQ ID NO: 259268 - DNA, 21 bp, Artificial sequence
  SiRNA target sequence
tatcctttacatatggctcat

SEQ ID NO: 259269 - DNA, 21 bp, Artificial sequence
  SiRNA target sequence
atcctttacatatggctcatt

SEQ ID NO: 259270 - DNA, 21 bp, Artificial sequence
  SiRNA target sequence
tcctttacatatggctcattt

SEQ ID NO: 259271 - DNA, 21 bp, Artificial sequence
  SiRNA target sequence
cctttacatatggctcattta

SEQ ID NO: 259272 - DNA, 21 bp, Artificial sequence
  SiRNA target sequence
ctttacatatggctcatttag

SEQ ID NO: 259273 - DNA, 21 bp, Artificial sequence
  SiRNA target sequence
tttacatatggctcatttaga

SEQ ID NO: 259274 - DNA, 21 bp, Artificial sequence
  SiRNA target sequence
ttacatatggctcatttagaa

SEQ ID NO: 259275 - DNA, 21 bp, Artificial sequence
  SiRNA target sequence
tacatatggctcatttagaag

SEQ ID NO: 259276 - DNA, 21 bp, Artificial sequence
  SiRNA target sequence
acatatggctcatttagaaga

SEQ ID NO: 259277 - DNA, 21 bp, Artificial sequence
  SiRNA target sequence
catatggctcatttagaagat

SEQ ID NO: 259278 - DNA, 21 bp, Artificial sequence
  SiRNA target sequence
atatggctcatttagaagata

SEQ ID NO: 259279 - DNA, 21 bp, Artificial sequence
  SiRNA target sequence
tatggctcatttagaagataa

SEQ ID NO: 259280 - DNA, 21 bp, Artificial sequence
  SiRNA target sequence
atggctcatttagaagataag

SEQ ID NO: 259281 - DNA, 21 bp, Artificial sequence
  SiRNA target sequence
tggctcatttagaagataagc

SEQ ID NO: 259282 - DNA, 21 bp, Artificial sequence
  SiRNA target sequence
ggctcatttagaagataagcg

SEQ ID NO: 259283 - DNA, 21 bp, Artificial sequence
  SiRNA target sequence
gctcatttagaagataagcgt

SEQ ID NO: 259284 - DNA, 21 bp, Artificial sequence
  SiRNA target sequence
ctcatttagaagataagcgta

SEQ ID NO: 259285 - DNA, 21 bp, Artificial sequence
  SiRNA target sequence
tcatttagaagataagcgtaa

SEQ ID NO: 259286 - DNA, 21 bp, Artificial sequence
  SiRNA target sequence
catttagaagataagcgtaaa

SEQ ID NO: 259287 - DNA, 21 bp, Artificial sequence
  SiRNA target sequence
atttagaagataagcgtaaaa

SEQ ID NO: 259288 - DNA, 21 bp, Artificial sequence
  SiRNA target sequence
tttagaagataagcgtaaaac

SEQ ID NO: 259289 - DNA, 21 bp, Artificial sequence
  SiRNA target sequence
ttagaagataagcgtaaaact

SEQ ID NO: 259290 - DNA, 21 bp, Artificial sequence
  SiRNA target sequence
tagaagataagcgtaaaacta

SEQ ID NO: 259291 - DNA, 21 bp, Artificial sequence
  SiRNA target sequence
agaagataagcgtaaaactaa

SEQ ID NO: 259292 - DNA, 21 bp, Artificial sequence
  SiRNA target sequence
gaagataagcgtaaaactaaa

SEQ ID NO: 259293 - DNA, 21 bp, Artificial sequence
  SiRNA target sequence
aagataagcgtaaaactaaat

SEQ ID NO: 259294 - DNA, 21 bp, Artificial sequence
  SiRNA target sequence
agataagcgtaaaactaaatt

SEQ ID NO: 259295 - DNA, 21 bp, Artificial sequence
  SiRNA target sequence
gataagcgtaaaactaaattt

SEQ ID NO: 259296 - DNA, 21 bp, Artificial sequence
  SiRNA target sequence
ataagcgtaaaactaaattta

SEQ ID NO: 259297 - DNA, 21 bp, Artificial sequence
  SiRNA target sequence
taagcgtaaaactaaatttac

SEQ ID NO: 259298 - DNA, 21 bp, Artificial sequence
  SiRNA target sequence
aagcgtaaaactaaatttaca

SEQ ID NO: 259299 - DNA, 21 bp, Artificial sequence
  SiRNA target sequence
agcgtaaaactaaatttacat

SEQ ID NO: 259300 - DNA, 21 bp, Artificial sequence
  SiRNA target sequence
gcgtaaaactaaatttacatc

SEQ ID NO: 259301 - DNA, 21 bp, Artificial sequence
  SiRNA target sequence
cgtaaaactaaatttacatct

SEQ ID NO: 259302 - DNA, 21 bp, Artificial sequence
  SiRNA target sequence
gtaaaactaaatttacatcta

SEQ ID NO: 259303 - DNA, 21 bp, Artificial sequence
  SiRNA target sequence
taaaactaaatttacatctaa

SEQ ID NO: 259304 - DNA, 21 bp, Artificial sequence
  SiRNA target sequence
aaaactaaatttacatctaaa

SEQ ID NO: 259305 - DNA, 21 bp, Artificial sequence
  SiRNA target sequence
aaactaaatttacatctaaag

SEQ ID NO: 259306 - DNA, 21 bp, Artificial sequence
  SiRNA target sequence
aactaaatttacatctaaagt

SEQ ID NO: 259307 - DNA, 21 bp, Artificial sequence
  SiRNA target sequence
actaaatttacatctaaagta

SEQ ID NO: 259308 - DNA, 21 bp, Artificial sequence
  SiRNA target sequence
ctaaatttacatctaaagtaa

SEQ ID NO: 259309 - DNA, 21 bp, Artificial sequence
  SiRNA target sequence
taaatttacatctaaagtaat

SEQ ID NO: 259310 - DNA, 21 bp, Artificial sequence
  SiRNA target sequence
aaatttacatctaaagtaatt

SEQ ID NO: 259311 - DNA, 21 bp, Artificial sequence
  SiRNA target sequence
aatttacatctaaagtaatta

SEQ ID NO: 259312 - DNA, 21 bp, Artificial sequence
  SiRNA target sequence
atttacatctaaagtaattat

SEQ ID NO: 259313 - DNA, 21 bp, Artificial sequence
  SiRNA target sequence
tttacatctaaagtaattatc

SEQ ID NO: 259314 - DNA, 21 bp, Artificial sequence
  SiRNA target sequence
ttacatctaaagtaattatca

SEQ ID NO: 259315 - DNA, 21 bp, Artificial sequence
  SiRNA target sequence
tacatctaaagtaattatcat

SEQ ID NO: 259316 - DNA, 21 bp, Artificial sequence
  SiRNA target sequence
acatctaaagtaattatcatg

SEQ ID NO: 259317 - DNA, 21 bp, Artificial sequence
  SiRNA target sequence
catctaaagtaattatcatga

SEQ ID NO: 259318 - DNA, 21 bp, Artificial sequence
  SiRNA target sequence
atctaaagtaattatcatgac

SEQ ID NO: 259319 - DNA, 21 bp, Artificial sequence
  SiRNA target sequence
tctaaagtaattatcatgaca

SEQ ID NO: 259320 - DNA, 21 bp, Artificial sequence
  SiRNA target sequence
ctaaagtaattatcatgacat

SEQ ID NO: 259321 - DNA, 21 bp, Artificial sequence
  SiRNA target sequence
taaagtaattatcatgacatc

SEQ ID NO: 259322 - DNA, 21 bp, Artificial sequence
  SiRNA target sequence
aaagtaattatcatgacatct

SEQ ID NO: 259323 - DNA, 21 bp, Artificial sequence
  SiRNA target sequence
aagtaattatcatgacatcta

SEQ ID NO: 259324 - DNA, 21 bp, Artificial sequence
  SiRNA target sequence
agtaattatcatgacatctaa

SEQ ID NO: 259325 - DNA, 21 bp, Artificial sequence
  SiRNA target sequence
gtaattatcatgacatctaat

SEQ ID NO: 259326 - DNA, 21 bp, Artificial sequence
  SiRNA target sequence
taattatcatgacatctaatg

SEQ ID NO: 259327 - DNA, 21 bp, Artificial sequence
  SiRNA target sequence
aattatcatgacatctaatgt

SEQ ID NO: 259328 - DNA, 21 bp, Artificial sequence
  SiRNA target sequence
attatcatgacatctaatgtt

SEQ ID NO: 259329 - DNA, 21 bp, Artificial sequence
  SiRNA target sequence
ttatcatgacatctaatgttt

SEQ ID NO: 259330 - DNA, 21 bp, Artificial sequence
  SiRNA target sequence
tatcatgacatctaatgtttt

SEQ ID NO: 259331 - DNA, 21 bp, Artificial sequence
  SiRNA target sequence
atcatgacatctaatgttttt

SEQ ID NO: 259332 - DNA, 21 bp, Artificial sequence
  SiRNA target sequence
tcatgacatctaatgtttttg

SEQ ID NO: 259333 - DNA, 21 bp, Artificial sequence
  SiRNA target sequence
catgacatctaatgtttttga

SEQ ID NO: 259334 - DNA, 21 bp, Artificial sequence
  SiRNA target sequence
atgacatctaatgtttttgaa

SEQ ID NO: 259335 - DNA, 21 bp, Artificial sequence
  SiRNA target sequence
tgacatctaatgtttttgaac

SEQ ID NO: 259336 - DNA, 21 bp, Artificial sequence
  SiRNA target sequence
gacatctaatgtttttgaaca

SEQ ID NO: 259337 - DNA, 21 bp, Artificial sequence
  SiRNA target sequence
acatctaatgtttttgaacag

SEQ ID NO: 259338 - DNA, 21 bp, Artificial sequence
  SiRNA target sequence
catctaatgtttttgaacagt

SEQ ID NO: 259339 - DNA, 21 bp, Artificial sequence
  SiRNA target sequence
atctaatgtttttgaacagtc

SEQ ID NO: 259340 - DNA, 21 bp, Artificial sequence
  SiRNA target sequence
tctaatgtttttgaacagtca

SEQ ID NO: 259341 - DNA, 21 bp, Artificial sequence
  SiRNA target sequence
ctaatgtttttgaacagtcag

SEQ ID NO: 259342 - DNA, 21 bp, Artificial sequence
  SiRNA target sequence
taatgtttttgaacagtcagt

SEQ ID NO: 259343 - DNA, 21 bp, Artificial sequence
  SiRNA target sequence
aatgtttttgaacagtcagtt

SEQ ID NO: 259344 - DNA, 21 bp, Artificial sequence
  SiRNA target sequence
atgtttttgaacagtcagtta

SEQ ID NO: 259345 - DNA, 21 bp, Artificial sequence
  SiRNA target sequence
tgtttttgaacagtcagttaa

SEQ ID NO: 259346 - DNA, 21 bp, Artificial sequence
  SiRNA target sequence
gtttttgaacagtcagttaat

SEQ ID NO: 259347 - DNA, 21 bp, Artificial sequence
  SiRNA target sequence
tttttgaacagtcagttaatt

SEQ ID NO: 259348 - DNA, 21 bp, Artificial sequence
  SiRNA target sequence
ttttgaacagtcagttaattc

SEQ ID NO: 259349 - DNA, 21 bp, Artificial sequence
  SiRNA target sequence
tttgaacagtcagttaattcg

SEQ ID NO: 259350 - DNA, 21 bp, Artificial sequence
  SiRNA target sequence
ttgaacagtcagttaattcgt

SEQ ID NO: 259351 - DNA, 21 bp, Artificial sequence
  SiRNA target sequence
tgaacagtcagttaattcgtt

SEQ ID NO: 259352 - DNA, 21 bp, Artificial sequence
  SiRNA target sequence
gaacagtcagttaattcgtta

SEQ ID NO: 259353 - DNA, 21 bp, Artificial sequence
  SiRNA target sequence
aacagtcagttaattcgttaa

SEQ ID NO: 259354 - DNA, 21 bp, Artificial sequence
  SiRNA target sequence
acagtcagttaattcgttaac

SEQ ID NO: 259355 - DNA, 21 bp, Artificial sequence
  SiRNA target sequence
cagtcagttaattcgttaact

SEQ ID NO: 259356 - DNA, 21 bp, Artificial sequence
  SiRNA target sequence
agtcagttaattcgttaactt

SEQ ID NO: 259357 - DNA, 21 bp, Artificial sequence
  SiRNA target sequence
gtcagttaattcgttaacttt

SEQ ID NO: 259358 - DNA, 21 bp, Artificial sequence
  SiRNA target sequence
tcagttaattcgttaactttt

SEQ ID NO: 259359 - DNA, 21 bp, Artificial sequence
  SiRNA target sequence
cagttaattcgttaacttttc

SEQ ID NO: 259360 - DNA, 21 bp, Artificial sequence
  SiRNA target sequence
agttaattcgttaacttttcc

SEQ ID NO: 259361 - DNA, 21 bp, Artificial sequence
  SiRNA target sequence
gttaattcgttaacttttcct

SEQ ID NO: 259362 - DNA, 21 bp, Artificial sequence
  SiRNA target sequence
ttaattcgttaacttttcctg

SEQ ID NO: 259363 - DNA, 21 bp, Artificial sequence
  SiRNA target sequence
taattcgttaacttttcctga

SEQ ID NO: 259364 - DNA, 21 bp, Artificial sequence
  SiRNA target sequence
aattcgttaacttttcctgat

SEQ ID NO: 259365 - DNA, 21 bp, Artificial sequence
  SiRNA target sequence
attcgttaacttttcctgatg

SEQ ID NO: 259366 - DNA, 21 bp, Artificial sequence
  SiRNA target sequence
ttcgttaacttttcctgatgc

SEQ ID NO: 259367 - DNA, 21 bp, Artificial sequence
  SiRNA target sequence
tcgttaacttttcctgatgct

SEQ ID NO: 259368 - DNA, 21 bp, Artificial sequence
  SiRNA target sequence
cgttaacttttcctgatgctt

SEQ ID NO: 259369 - DNA, 21 bp, Artificial sequence
  SiRNA target sequence
gttaacttttcctgatgcttt

SEQ ID NO: 259370 - DNA, 21 bp, Artificial sequence
  SiRNA target sequence
ttaacttttcctgatgctttt

SEQ ID NO: 259371 - DNA, 21 bp, Artificial sequence
  SiRNA target sequence
taacttttcctgatgctttta

SEQ ID NO: 259372 - DNA, 21 bp, Artificial sequence
  SiRNA target sequence
aacttttcctgatgcttttag

SEQ ID NO: 259373 - DNA, 21 bp, Artificial sequence
  SiRNA target sequence
acttttcctgatgcttttaga

SEQ ID NO: 259374 - DNA, 21 bp, Artificial sequence
  SiRNA target sequence
cttttcctgatgcttttagac

SEQ ID NO: 259375 - DNA, 21 bp, Artificial sequence
  SiRNA target sequence
ttttcctgatgcttttagacg

SEQ ID NO: 259376 - DNA, 21 bp, Artificial sequence
  SiRNA target sequence
tttcctgatgcttttagacgc

SEQ ID NO: 259377 - DNA, 21 bp, Artificial sequence
  SiRNA target sequence
ttcctgatgcttttagacgca

SEQ ID NO: 259378 - DNA, 21 bp, Artificial sequence
  SiRNA target sequence
tcctgatgcttttagacgcag

SEQ ID NO: 259379 - DNA, 21 bp, Artificial sequence
  SiRNA target sequence
cctgatgcttttagacgcaga

SEQ ID NO: 259380 - DNA, 21 bp, Artificial sequence
  SiRNA target sequence
ctgatgcttttagacgcagag

SEQ ID NO: 259381 - DNA, 21 bp, Artificial sequence
  SiRNA target sequence
tgatgcttttagacgcagagt

SEQ ID NO: 259382 - DNA, 21 bp, Artificial sequence
  SiRNA target sequence
gatgcttttagacgcagagtt

SEQ ID NO: 259383 - DNA, 21 bp, Artificial sequence
  SiRNA target sequence
atgcttttagacgcagagttg

SEQ ID NO: 259384 - DNA, 21 bp, Artificial sequence
  SiRNA target sequence
tgcttttagacgcagagttga

SEQ ID NO: 259385 - DNA, 21 bp, Artificial sequence
  SiRNA target sequence
gcttttagacgcagagttgat

SEQ ID NO: 259386 - DNA, 21 bp, Artificial sequence
  SiRNA target sequence
cttttagacgcagagttgatc

SEQ ID NO: 259387 - DNA, 21 bp, Artificial sequence
  SiRNA target sequence
ttttagacgcagagttgatct

SEQ ID NO: 259388 - DNA, 21 bp, Artificial sequence
  SiRNA target sequence
tttagacgcagagttgatctg

SEQ ID NO: 259389 - DNA, 21 bp, Artificial sequence
  SiRNA target sequence
ttagacgcagagttgatctgt

SEQ ID NO: 259390 - DNA, 21 bp, Artificial sequence
  SiRNA target sequence
tagacgcagagttgatctgtg

SEQ ID NO: 259391 - DNA, 21 bp, Artificial sequence
  SiRNA target sequence
agacgcagagttgatctgtgt

SEQ ID NO: 259392 - DNA, 21 bp, Artificial sequence
  SiRNA target sequence
gacgcagagttgatctgtgtg

SEQ ID NO: 259393 - DNA, 21 bp, Artificial sequence
  SiRNA target sequence
acgcagagttgatctgtgtgc

SEQ ID NO: 259394 - DNA, 21 bp, Artificial sequence
  SiRNA target sequence
cgcagagttgatctgtgtgct

SEQ ID NO: 259395 - DNA, 21 bp, Artificial sequence
  SiRNA target sequence
gcagagttgatctgtgtgctg

SEQ ID NO: 259396 - DNA, 21 bp, Artificial sequence
  SiRNA target sequence
cagagttgatctgtgtgctga

SEQ ID NO: 259397 - DNA, 21 bp, Artificial sequence
  SiRNA target sequence
agagttgatctgtgtgctgaa

SEQ ID NO: 259398 - DNA, 21 bp, Artificial sequence
  SiRNA target sequence
gagttgatctgtgtgctgaag

SEQ ID NO: 259399 - DNA, 21 bp, Artificial sequence
  SiRNA target sequence
agttgatctgtgtgctgaagt

SEQ ID NO: 259400 - DNA, 21 bp, Artificial sequence
  SiRNA target sequence
gttgatctgtgtgctgaagta

SEQ ID NO: 259401 - DNA, 21 bp, Artificial sequence
  SiRNA target sequence
ttgatctgtgtgctgaagtac

SEQ ID NO: 259402 - DNA, 21 bp, Artificial sequence
  SiRNA target sequence
tgatctgtgtgctgaagtacg

SEQ ID NO: 259403 - DNA, 21 bp, Artificial sequence
  SiRNA target sequence
gatctgtgtgctgaagtacgt

SEQ ID NO: 259404 - DNA, 21 bp, Artificial sequence
  SiRNA target sequence
atctgtgtgctgaagtacgta

SEQ ID NO: 259405 - DNA, 21 bp, Artificial sequence
  SiRNA target sequence
tctgtgtgctgaagtacgtaa

SEQ ID NO: 259406 - DNA, 21 bp, Artificial sequence
  SiRNA target sequence
ctgtgtgctgaagtacgtaat

SEQ ID NO: 259407 - DNA, 21 bp, Artificial sequence
  SiRNA target sequence
tgtgtgctgaagtacgtaata

SEQ ID NO: 259408 - DNA, 21 bp, Artificial sequence
  SiRNA target sequence
gtgtgctgaagtacgtaataa

SEQ ID NO: 259409 - DNA, 21 bp, Artificial sequence
  SiRNA target sequence
tgtgctgaagtacgtaataag

SEQ ID NO: 259410 - DNA, 21 bp, Artificial sequence
  SiRNA target sequence
gtgctgaagtacgtaataagg

SEQ ID NO: 259411 - DNA, 21 bp, Artificial sequence
  SiRNA target sequence
tgctgaagtacgtaataaggt

SEQ ID NO: 259412 - DNA, 21 bp, Artificial sequence
  SiRNA target sequence
gctgaagtacgtaataaggtt

SEQ ID NO: 259413 - DNA, 21 bp, Artificial sequence
  SiRNA target sequence
ctgaagtacgtaataaggttg

SEQ ID NO: 259414 - DNA, 21 bp, Artificial sequence
  SiRNA target sequence
tgaagtacgtaataaggttga

SEQ ID NO: 259415 - DNA, 21 bp, Artificial sequence
  SiRNA target sequence
gaagtacgtaataaggttgag

SEQ ID NO: 259416 - DNA, 21 bp, Artificial sequence
  SiRNA target sequence
aagtacgtaataaggttgagt

SEQ ID NO: 259417 - DNA, 21 bp, Artificial sequence
  SiRNA target sequence
agtacgtaataaggttgagtt

SEQ ID NO: 259418 - DNA, 21 bp, Artificial sequence
  SiRNA target sequence
gtacgtaataaggttgagttt

SEQ ID NO: 259419 - DNA, 21 bp, Artificial sequence
  SiRNA target sequence
tacgtaataaggttgagttta

SEQ ID NO: 259420 - DNA, 21 bp, Artificial sequence
  SiRNA target sequence
acgtaataaggttgagtttac

SEQ ID NO: 259421 - DNA, 21 bp, Artificial sequence
  SiRNA target sequence
cgtaataaggttgagtttacg

SEQ ID NO: 259422 - DNA, 21 bp, Artificial sequence
  SiRNA target sequence
gtaataaggttgagtttacga

SEQ ID NO: 259423 - DNA, 21 bp, Artificial sequence
  SiRNA target sequence
taataaggttgagtttacgaa

SEQ ID NO: 259424 - DNA, 21 bp, Artificial sequence
  SiRNA target sequence
aataaggttgagtttacgaag

SEQ ID NO: 259425 - DNA, 21 bp, Artificial sequence
  SiRNA target sequence
ataaggttgagtttacgaagg

SEQ ID NO: 259426 - DNA, 21 bp, Artificial sequence
  SiRNA target sequence
taaggttgagtttacgaagga

SEQ ID NO: 259427 - DNA, 21 bp, Artificial sequence
  SiRNA target sequence
aaggttgagtttacgaaggaa

SEQ ID NO: 259428 - DNA, 21 bp, Artificial sequence
  SiRNA target sequence
aggttgagtttacgaaggaag

SEQ ID NO: 259429 - DNA, 21 bp, Artificial sequence
  SiRNA target sequence
ggttgagtttacgaaggaagg

SEQ ID NO: 259430 - DNA, 21 bp, Artificial sequence
  SiRNA target sequence
gttgagtttacgaaggaagga

SEQ ID NO: 259431 - DNA, 21 bp, Artificial sequence
  SiRNA target sequence
ttgagtttacgaaggaaggat

SEQ ID NO: 259432 - DNA, 21 bp, Artificial sequence
  SiRNA target sequence
tgagtttacgaaggaaggata

SEQ ID NO: 259433 - DNA, 21 bp, Artificial sequence
  SiRNA target sequence
gagtttacgaaggaaggatat

SEQ ID NO: 259434 - DNA, 21 bp, Artificial sequence
  SiRNA target sequence
agtttacgaaggaaggatatt

SEQ ID NO: 259435 - DNA, 21 bp, Artificial sequence
  SiRNA target sequence
gtttacgaaggaaggatattc

SEQ ID NO: 259436 - DNA, 21 bp, Artificial sequence
  SiRNA target sequence
tttacgaaggaaggatattca

SEQ ID NO: 259437 - DNA, 21 bp, Artificial sequence
  SiRNA target sequence
ttacgaaggaaggatattcaa

SEQ ID NO: 259438 - DNA, 21 bp, Artificial sequence
  SiRNA target sequence
tacgaaggaaggatattcaaa

SEQ ID NO: 259439 - DNA, 21 bp, Artificial sequence
  SiRNA target sequence
acgaaggaaggatattcaaag

SEQ ID NO: 259440 - DNA, 21 bp, Artificial sequence
  SiRNA target sequence
cgaaggaaggatattcaaaga

SEQ ID NO: 259441 - DNA, 21 bp, Artificial sequence
  SiRNA target sequence
gaaggaaggatattcaaagac

SEQ ID NO: 259442 - DNA, 21 bp, Artificial sequence
  SiRNA target sequence
aaggaaggatattcaaagact

SEQ ID NO: 259443 - DNA, 21 bp, Artificial sequence
  SiRNA target sequence
aggaaggatattcaaagacta

SEQ ID NO: 259444 - DNA, 21 bp, Artificial sequence
  SiRNA target sequence
ggaaggatattcaaagactaa

SEQ ID NO: 259445 - DNA, 21 bp, Artificial sequence
  SiRNA target sequence
gaaggatattcaaagactaaa

SEQ ID NO: 259446 - DNA, 21 bp, Artificial sequence
  SiRNA target sequence
aaggatattcaaagactaaag

SEQ ID NO: 259447 - DNA, 21 bp, Artificial sequence
  SiRNA target sequence
aggatattcaaagactaaagg

SEQ ID NO: 259448 - DNA, 21 bp, Artificial sequence
  SiRNA target sequence
ggatattcaaagactaaagga

SEQ ID NO: 259449 - DNA, 21 bp, Artificial sequence
  SiRNA target sequence
gatattcaaagactaaaggat

SEQ ID NO: 259450 - DNA, 21 bp, Artificial sequence
  SiRNA target sequence
atattcaaagactaaaggatg

SEQ ID NO: 259451 - DNA, 21 bp, Artificial sequence
  SiRNA target sequence
tattcaaagactaaaggatgc

SEQ ID NO: 259452 - DNA, 21 bp, Artificial sequence
  SiRNA target sequence
attcaaagactaaaggatgca

SEQ ID NO: 259453 - DNA, 21 bp, Artificial sequence
  SiRNA target sequence
ttcaaagactaaaggatgcat

SEQ ID NO: 259454 - DNA, 21 bp, Artificial sequence
  SiRNA target sequence
tcaaagactaaaggatgcatg

SEQ ID NO: 259455 - DNA, 21 bp, Artificial sequence
  SiRNA target sequence
caaagactaaaggatgcatgg

SEQ ID NO: 259456 - DNA, 21 bp, Artificial sequence
  SiRNA target sequence
aaagactaaaggatgcatggt

SEQ ID NO: 259457 - DNA, 21 bp, Artificial sequence
  SiRNA target sequence
aagactaaaggatgcatggta

SEQ ID NO: 259458 - DNA, 21 bp, Artificial sequence
  SiRNA target sequence
agactaaaggatgcatggtaa

SEQ ID NO: 259459 - DNA, 21 bp, Artificial sequence
  SiRNA target sequence
gactaaaggatgcatggtaag

SEQ ID NO: 259460 - DNA, 21 bp, Artificial sequence
  SiRNA target sequence
actaaaggatgcatggtaaga

SEQ ID NO: 259461 - DNA, 21 bp, Artificial sequence
  SiRNA target sequence
ctaaaggatgcatggtaagac

SEQ ID NO: 259462 - DNA, 21 bp, Artificial sequence
  SiRNA target sequence
taaaggatgcatggtaagacg

SEQ ID NO: 259463 - DNA, 21 bp, Artificial sequence
  SiRNA target sequence
aaaggatgcatggtaagacgc

SEQ ID NO: 259464 - DNA, 21 bp, Artificial sequence
  SiRNA target sequence
aaggatgcatggtaagacgct

SEQ ID NO: 259465 - DNA, 21 bp, Artificial sequence
  SiRNA target sequence
aggatgcatggtaagacgctt

SEQ ID NO: 259466 - DNA, 21 bp, Artificial sequence
  SiRNA target sequence
ggatgcatggtaagacgcttg

SEQ ID NO: 259467 - DNA, 21 bp, Artificial sequence
  SiRNA target sequence
gatgcatggtaagacgcttgg

SEQ ID NO: 259468 - DNA, 21 bp, Artificial sequence
  SiRNA target sequence
atgcatggtaagacgcttgga

SEQ ID NO: 259469 - DNA, 21 bp, Artificial sequence
  SiRNA target sequence
tgcatggtaagacgcttggat

SEQ ID NO: 259470 - DNA, 21 bp, Artificial sequence
  SiRNA target sequence
gcatggtaagacgcttggata

SEQ ID NO: 259471 - DNA, 21 bp, Artificial sequence
  SiRNA target sequence
catggtaagacgcttggataa

SEQ ID NO: 259472 - DNA, 21 bp, Artificial sequence
  SiRNA target sequence
atggtaagacgcttggataag

SEQ ID NO: 259473 - DNA, 21 bp, Artificial sequence
  SiRNA target sequence
tggtaagacgcttggataagg

SEQ ID NO: 259474 - DNA, 21 bp, Artificial sequence
  SiRNA target sequence
ggtaagacgcttggataagga

SEQ ID NO: 259475 - DNA, 21 bp, Artificial sequence
  SiRNA target sequence
gtaagacgcttggataaggat

SEQ ID NO: 259476 - DNA, 21 bp, Artificial sequence
  SiRNA target sequence
taagacgcttggataaggatt

SEQ ID NO: 259477 - DNA, 21 bp, Artificial sequence
  SiRNA target sequence
aagacgcttggataaggattt

SEQ ID NO: 259478 - DNA, 21 bp, Artificial sequence
  SiRNA target sequence
agacgcttggataaggattta

SEQ ID NO: 259479 - DNA, 21 bp, Artificial sequence
  SiRNA target sequence
gacgcttggataaggatttag

SEQ ID NO: 259480 - DNA, 21 bp, Artificial sequence
  SiRNA target sequence
acgcttggataaggatttagt

SEQ ID NO: 259481 - DNA, 21 bp, Artificial sequence
  SiRNA target sequence
cgcttggataaggatttagtt

SEQ ID NO: 259482 - DNA, 21 bp, Artificial sequence
  SiRNA target sequence
gcttggataaggatttagtta

SEQ ID NO: 259483 - DNA, 21 bp, Artificial sequence
  SiRNA target sequence
cttggataaggatttagttaa

SEQ ID NO: 259484 - DNA, 21 bp, Artificial sequence
  SiRNA target sequence
ttggataaggatttagttaag

SEQ ID NO: 259485 - DNA, 21 bp, Artificial sequence
  SiRNA target sequence
tggataaggatttagttaaga

SEQ ID NO: 259486 - DNA, 21 bp, Artificial sequence
  SiRNA target sequence
ggataaggatttagttaagaa

SEQ ID NO: 259487 - DNA, 21 bp, Artificial sequence
  SiRNA target sequence
gataaggatttagttaagaag

SEQ ID NO: 259488 - DNA, 21 bp, Artificial sequence
  SiRNA target sequence
ataaggatttagttaagaaga

SEQ ID NO: 259489 - DNA, 21 bp, Artificial sequence
  SiRNA target sequence
taaggatttagttaagaagaa

SEQ ID NO: 259490 - DNA, 21 bp, Artificial sequence
  SiRNA target sequence
aaggatttagttaagaagaag

SEQ ID NO: 259491 - DNA, 21 bp, Artificial sequence
  SiRNA target sequence
aggatttagttaagaagaaga

SEQ ID NO: 259492 - DNA, 21 bp, Artificial sequence
  SiRNA target sequence
ggatttagttaagaagaagac

SEQ ID NO: 259493 - DNA, 21 bp, Artificial sequence
  SiRNA target sequence
gatttagttaagaagaagact

SEQ ID NO: 259494 - DNA, 21 bp, Artificial sequence
  SiRNA target sequence
atttagttaagaagaagactg

SEQ ID NO: 259495 - DNA, 21 bp, Artificial sequence
  SiRNA target sequence
tttagttaagaagaagactgg

SEQ ID NO: 259496 - DNA, 21 bp, Artificial sequence
  SiRNA target sequence
ttagttaagaagaagactgga

SEQ ID NO: 259497 - DNA, 21 bp, Artificial sequence
  SiRNA target sequence
tagttaagaagaagactggag

SEQ ID NO: 259498 - DNA, 21 bp, Artificial sequence
  SiRNA target sequence
agttaagaagaagactggaga

SEQ ID NO: 259499 - DNA, 21 bp, Artificial sequence
  SiRNA target sequence
gttaagaagaagactggagac

SEQ ID NO: 259500 - DNA, 21 bp, Artificial sequence
  SiRNA target sequence
ttaagaagaagactggagaca

SEQ ID NO: 259501 - DNA, 21 bp, Artificial sequence
  SiRNA target sequence
taagaagaagactggagacat

SEQ ID NO: 259502 - DNA, 21 bp, Artificial sequence
  SiRNA target sequence
aagaagaagactggagacata

SEQ ID NO: 259503 - DNA, 21 bp, Artificial sequence
  SiRNA target sequence
agaagaagactggagacatat

SEQ ID NO: 259504 - DNA, 21 bp, Artificial sequence
  SiRNA target sequence
gaagaagactggagacatatg

SEQ ID NO: 259505 - DNA, 21 bp, Artificial sequence
  SiRNA target sequence
aagaagactggagacatatgt

SEQ ID NO: 259506 - DNA, 21 bp, Artificial sequence
  SiRNA target sequence
agaagactggagacatatgtt

SEQ ID NO: 259507 - DNA, 21 bp, Artificial sequence
  SiRNA target sequence
gaagactggagacatatgttc

SEQ ID NO: 259508 - DNA, 21 bp, Artificial sequence
  SiRNA target sequence
aagactggagacatatgttca

SEQ ID NO: 259509 - DNA, 21 bp, Artificial sequence
  SiRNA target sequence
agactggagacatatgttcaa

SEQ ID NO: 259510 - DNA, 21 bp, Artificial sequence
  SiRNA target sequence
gactggagacatatgttcaac

SEQ ID NO: 259511 - DNA, 21 bp, Artificial sequence
  SiRNA target sequence
actggagacatatgttcaaca

SEQ ID NO: 259512 - DNA, 21 bp, Artificial sequence
  SiRNA target sequence
ctggagacatatgttcaacag

SEQ ID NO: 259513 - DNA, 21 bp, Artificial sequence
  SiRNA target sequence
tggagacatatgttcaacaga

SEQ ID NO: 259514 - DNA, 21 bp, Artificial sequence
  SiRNA target sequence
ggagacatatgttcaacagaa

SEQ ID NO: 259515 - DNA, 21 bp, Artificial sequence
  SiRNA target sequence
gagacatatgttcaacagaat

SEQ ID NO: 259516 - DNA, 21 bp, Artificial sequence
  SiRNA target sequence
agacatatgttcaacagaatg

SEQ ID NO: 259517 - DNA, 21 bp, Artificial sequence
  SiRNA target sequence
gacatatgttcaacagaatgt

SEQ ID NO: 259518 - DNA, 21 bp, Artificial sequence
  SiRNA target sequence
acatatgttcaacagaatgtt

SEQ ID NO: 259519 - DNA, 21 bp, Artificial sequence
  SiRNA target sequence
catatgttcaacagaatgtta

SEQ ID NO: 259520 - DNA, 21 bp, Artificial sequence
  SiRNA target sequence
atatgttcaacagaatgttat

SEQ ID NO: 259521 - DNA, 21 bp, Artificial sequence
  SiRNA target sequence
tatgttcaacagaatgttatt

SEQ ID NO: 259522 - DNA, 21 bp, Artificial sequence
  SiRNA target sequence
atgttcaacagaatgttattt

SEQ ID NO: 259523 - DNA, 21 bp, Artificial sequence
  SiRNA target sequence
tgttcaacagaatgttattta

SEQ ID NO: 259524 - DNA, 21 bp, Artificial sequence
  SiRNA target sequence
gttcaacagaatgttatttag

SEQ ID NO: 259525 - DNA, 21 bp, Artificial sequence
  SiRNA target sequence
ttcaacagaatgttatttagt

SEQ ID NO: 259526 - DNA, 21 bp, Artificial sequence
  SiRNA target sequence
tcaacagaatgttatttagta

SEQ ID NO: 259527 - DNA, 21 bp, Artificial sequence
  SiRNA target sequence
caacagaatgttatttagtag

SEQ ID NO: 259528 - DNA, 21 bp, Artificial sequence
  SiRNA target sequence
aacagaatgttatttagtaga

SEQ ID NO: 259529 - DNA, 21 bp, Artificial sequence
  SiRNA target sequence
acagaatgttatttagtagac

SEQ ID NO: 259530 - DNA, 21 bp, Artificial sequence
  SiRNA target sequence
cagaatgttatttagtagact

SEQ ID NO: 259531 - DNA, 21 bp, Artificial sequence
  SiRNA target sequence
agaatgttatttagtagactt

SEQ ID NO: 259532 - DNA, 21 bp, Artificial sequence
  SiRNA target sequence
gaatgttatttagtagacttg

SEQ ID NO: 259533 - DNA, 21 bp, Artificial sequence
  SiRNA target sequence
aatgttatttagtagacttgg

SEQ ID NO: 259534 - DNA, 21 bp, Artificial sequence
  SiRNA target sequence
atgttatttagtagacttggt

SEQ ID NO: 259535 - DNA, 21 bp, Artificial sequence
  SiRNA target sequence
tgttatttagtagacttggtt

SEQ ID NO: 259536 - DNA, 21 bp, Artificial sequence
  SiRNA target sequence
gttatttagtagacttggtta

SEQ ID NO: 259537 - DNA, 21 bp, Artificial sequence
  SiRNA target sequence
ttatttagtagacttggttaa

SEQ ID NO: 259538 - DNA, 21 bp, Artificial sequence
  SiRNA target sequence
tatttagtagacttggttaat

SEQ ID NO: 259539 - DNA, 21 bp, Artificial sequence
  SiRNA target sequence
atttagtagacttggttaatc

SEQ ID NO: 259540 - DNA, 21 bp, Artificial sequence
  SiRNA target sequence
tttagtagacttggttaatcc

SEQ ID NO: 259541 - DNA, 21 bp, Artificial sequence
  SiRNA target sequence
ttagtagacttggttaatccc

SEQ ID NO: 259542 - DNA, 21 bp, Artificial sequence
  SiRNA target sequence
tagtagacttggttaatcccg

SEQ ID NO: 259543 - DNA, 21 bp, Artificial sequence
  SiRNA target sequence
agtagacttggttaatcccga

SEQ ID NO: 259544 - DNA, 21 bp, Artificial sequence
  SiRNA target sequence
gtagacttggttaatcccgag

SEQ ID NO: 259545 - DNA, 21 bp, Artificial sequence
  SiRNA target sequence
tagacttggttaatcccgaga

SEQ ID NO: 259546 - DNA, 21 bp, Artificial sequence
  SiRNA target sequence
agacttggttaatcccgagac

SEQ ID NO: 259547 - DNA, 21 bp, Artificial sequence
  SiRNA target sequence
gacttggttaatcccgagact

SEQ ID NO: 259548 - DNA, 21 bp, Artificial sequence
  SiRNA target sequence
acttggttaatcccgagactg

SEQ ID NO: 259549 - DNA, 21 bp, Artificial sequence
  SiRNA target sequence
cttggttaatcccgagactgg

SEQ ID NO: 259550 - DNA, 21 bp, Artificial sequence
  SiRNA target sequence
ttggttaatcccgagactgga

SEQ ID NO: 259551 - DNA, 21 bp, Artificial sequence
  SiRNA target sequence
tggttaatcccgagactggag

SEQ ID NO: 259552 - DNA, 21 bp, Artificial sequence
  SiRNA target sequence
ggttaatcccgagactggaga

SEQ ID NO: 259553 - DNA, 21 bp, Artificial sequence
  SiRNA target sequence
gttaatcccgagactggagag

SEQ ID NO: 259554 - DNA, 21 bp, Artificial sequence
  SiRNA target sequence
ttaatcccgagactggagaga

SEQ ID NO: 259555 - DNA, 21 bp, Artificial sequence
  SiRNA target sequence
taatcccgagactggagagaa

SEQ ID NO: 259556 - DNA, 21 bp, Artificial sequence
  SiRNA target sequence
aatcccgagactggagagaaa

SEQ ID NO: 259557 - DNA, 21 bp, Artificial sequence
  SiRNA target sequence
atcccgagactggagagaaat

SEQ ID NO: 259558 - DNA, 21 bp, Artificial sequence
  SiRNA target sequence
tcccgagactggagagaaata

SEQ ID NO: 259559 - DNA, 21 bp, Artificial sequence
  SiRNA target sequence
cccgagactggagagaaatac

SEQ ID NO: 259560 - DNA, 21 bp, Artificial sequence
  SiRNA target sequence
ccgagactggagagaaatacc

SEQ ID NO: 259561 - DNA, 21 bp, Artificial sequence
  SiRNA target sequence
cgagactggagagaaatacca

SEQ ID NO: 259562 - DNA, 21 bp, Artificial sequence
  SiRNA target sequence
gagactggagagaaataccaa

SEQ ID NO: 259563 - DNA, 21 bp, Artificial sequence
  SiRNA target sequence
agactggagagaaataccaaa

SEQ ID NO: 259564 - DNA, 21 bp, Artificial sequence
  SiRNA target sequence
gactggagagaaataccaaac

SEQ ID NO: 259565 - DNA, 21 bp, Artificial sequence
  SiRNA target sequence
actggagagaaataccaaact

SEQ ID NO: 259566 - DNA, 21 bp, Artificial sequence
  SiRNA target sequence
ctggagagaaataccaaactg

SEQ ID NO: 259567 - DNA, 21 bp, Artificial sequence
  SiRNA target sequence
tggagagaaataccaaactga

SEQ ID NO: 259568 - DNA, 21 bp, Artificial sequence
  SiRNA target sequence
ggagagaaataccaaactgat

SEQ ID NO: 259569 - DNA, 21 bp, Artificial sequence
  SiRNA target sequence
gagagaaataccaaactgatt

SEQ ID NO: 259570 - DNA, 21 bp, Artificial sequence
  SiRNA target sequence
agagaaataccaaactgattt

SEQ ID NO: 259571 - DNA, 21 bp, Artificial sequence
  SiRNA target sequence
gagaaataccaaactgattta

SEQ ID NO: 259572 - DNA, 21 bp, Artificial sequence
  SiRNA target sequence
agaaataccaaactgatttag

SEQ ID NO: 259573 - DNA, 21 bp, Artificial sequence
  SiRNA target sequence
gaaataccaaactgatttaga

SEQ ID NO: 259574 - DNA, 21 bp, Artificial sequence
  SiRNA target sequence
aaataccaaactgatttagaa

SEQ ID NO: 259575 - DNA, 21 bp, Artificial sequence
  SiRNA target sequence
aataccaaactgatttagaat

SEQ ID NO: 259576 - DNA, 21 bp, Artificial sequence
  SiRNA target sequence
ataccaaactgatttagaata

SEQ ID NO: 259577 - DNA, 21 bp, Artificial sequence
  SiRNA target sequence
taccaaactgatttagaatat

SEQ ID NO: 259578 - DNA, 21 bp, Artificial sequence
  SiRNA target sequence
accaaactgatttagaatatg

SEQ ID NO: 259579 - DNA, 21 bp, Artificial sequence
  SiRNA target sequence
ccaaactgatttagaatatga

SEQ ID NO: 259580 - DNA, 21 bp, Artificial sequence
  SiRNA target sequence
caaactgatttagaatatgaa

SEQ ID NO: 259581 - DNA, 21 bp, Artificial sequence
  SiRNA target sequence
aaactgatttagaatatgaag

SEQ ID NO: 259582 - DNA, 21 bp, Artificial sequence
  SiRNA target sequence
aactgatttagaatatgaaga

SEQ ID NO: 259583 - DNA, 21 bp, Artificial sequence
  SiRNA target sequence
actgatttagaatatgaagat

SEQ ID NO: 259584 - DNA, 21 bp, Artificial sequence
  SiRNA target sequence
ctgatttagaatatgaagatt

SEQ ID NO: 259585 - DNA, 21 bp, Artificial sequence
  SiRNA target sequence
tgatttagaatatgaagattt

SEQ ID NO: 259586 - DNA, 21 bp, Artificial sequence
  SiRNA target sequence
gatttagaatatgaagatttt

SEQ ID NO: 259587 - DNA, 21 bp, Artificial sequence
  SiRNA target sequence
atttagaatatgaagattttt

SEQ ID NO: 259588 - DNA, 21 bp, Artificial sequence
  SiRNA target sequence
tttagaatatgaagatttttt

SEQ ID NO: 259589 - DNA, 21 bp, Artificial sequence
  SiRNA target sequence
ttagaatatgaagatttttta

SEQ ID NO: 259590 - DNA, 21 bp, Artificial sequence
  SiRNA target sequence
tagaatatgaagattttttag

SEQ ID NO: 259591 - DNA, 21 bp, Artificial sequence
  SiRNA target sequence
agaatatgaagattttttaga

SEQ ID NO: 259592 - DNA, 21 bp, Artificial sequence
  SiRNA target sequence
gaatatgaagattttttagat

SEQ ID NO: 259593 - DNA, 21 bp, Artificial sequence
  SiRNA target sequence
aatatgaagattttttagata

SEQ ID NO: 259594 - DNA, 21 bp, Artificial sequence
  SiRNA target sequence
atatgaagattttttagatat

SEQ ID NO: 259595 - DNA, 21 bp, Artificial sequence
  SiRNA target sequence
tatgaagattttttagatatg

SEQ ID NO: 259596 - DNA, 21 bp, Artificial sequence
  SiRNA target sequence
atgaagattttttagatatgt

SEQ ID NO: 259597 - DNA, 21 bp, Artificial sequence
  SiRNA target sequence
tgaagattttttagatatgtg

SEQ ID NO: 259598 - DNA, 21 bp, Artificial sequence
  SiRNA target sequence
gaagattttttagatatgtgt

SEQ ID NO: 259599 - DNA, 21 bp, Artificial sequence
  SiRNA target sequence
aagattttttagatatgtgtt

SEQ ID NO: 259600 - DNA, 21 bp, Artificial sequence
  SiRNA target sequence
agattttttagatatgtgttt

SEQ ID NO: 259601 - DNA, 21 bp, Artificial sequence
  SiRNA target sequence
gattttttagatatgtgtttg

SEQ ID NO: 259602 - DNA, 21 bp, Artificial sequence
  SiRNA target sequence
attttttagatatgtgtttgg

SEQ ID NO: 259603 - DNA, 21 bp, Artificial sequence
  SiRNA target sequence
ttttttagatatgtgtttgga

SEQ ID NO: 259604 - DNA, 21 bp, Artificial sequence
  SiRNA target sequence
tttttagatatgtgtttggag

SEQ ID NO: 259605 - DNA, 21 bp, Artificial sequence
  SiRNA target sequence
ttttagatatgtgtttggaga

SEQ ID NO: 259606 - DNA, 21 bp, Artificial sequence
  SiRNA target sequence
tttagatatgtgtttggagaa

SEQ ID NO: 259607 - DNA, 21 bp, Artificial sequence
  SiRNA target sequence
ttagatatgtgtttggagaaa

SEQ ID NO: 259608 - DNA, 21 bp, Artificial sequence
  SiRNA target sequence
tagatatgtgtttggagaaaa

SEQ ID NO: 259609 - DNA, 21 bp, Artificial sequence
  SiRNA target sequence
agatatgtgtttggagaaaac

SEQ ID NO: 259610 - DNA, 21 bp, Artificial sequence
  SiRNA target sequence
gatatgtgtttggagaaaact

SEQ ID NO: 259611 - DNA, 21 bp, Artificial sequence
  SiRNA target sequence
atatgtgtttggagaaaactc

SEQ ID NO: 259612 - DNA, 21 bp, Artificial sequence
  SiRNA target sequence
tatgtgtttggagaaaactca

SEQ ID NO: 259613 - DNA, 21 bp, Artificial sequence
  SiRNA target sequence
atgtgtttggagaaaactcag

SEQ ID NO: 259614 - DNA, 21 bp, Artificial sequence
  SiRNA target sequence
tgtgtttggagaaaactcagg

SEQ ID NO: 259615 - DNA, 21 bp, Artificial sequence
  SiRNA target sequence
gtgtttggagaaaactcagga

SEQ ID NO: 259616 - DNA, 21 bp, Artificial sequence
  SiRNA target sequence
tgtttggagaaaactcaggag

SEQ ID NO: 259617 - DNA, 21 bp, Artificial sequence
  SiRNA target sequence
gtttggagaaaactcaggagt

SEQ ID NO: 259618 - DNA, 21 bp, Artificial sequence
  SiRNA target sequence
tttggagaaaactcaggagtg

SEQ ID NO: 259619 - DNA, 21 bp, Artificial sequence
  SiRNA target sequence
ttggagaaaactcaggagtgt

SEQ ID NO: 259620 - DNA, 21 bp, Artificial sequence
  SiRNA target sequence
tggagaaaactcaggagtgta

SEQ ID NO: 259621 - DNA, 21 bp, Artificial sequence
  SiRNA target sequence
ggagaaaactcaggagtgtag

SEQ ID NO: 259622 - DNA, 21 bp, Artificial sequence
  SiRNA target sequence
gagaaaactcaggagtgtaga

SEQ ID NO: 259623 - DNA, 21 bp, Artificial sequence
  SiRNA target sequence
agaaaactcaggagtgtagag

SEQ ID NO: 259624 - DNA, 21 bp, Artificial sequence
  SiRNA target sequence
gaaaactcaggagtgtagaga

SEQ ID NO: 259625 - DNA, 21 bp, Artificial sequence
  SiRNA target sequence
aaaactcaggagtgtagagat

SEQ ID NO: 259626 - DNA, 21 bp, Artificial sequence
  SiRNA target sequence
aaactcaggagtgtagagata

SEQ ID NO: 259627 - DNA, 21 bp, Artificial sequence
  SiRNA target sequence
aactcaggagtgtagagataa

SEQ ID NO: 259628 - DNA, 21 bp, Artificial sequence
  SiRNA target sequence
actcaggagtgtagagataat

SEQ ID NO: 259629 - DNA, 21 bp, Artificial sequence
  SiRNA target sequence
ctcaggagtgtagagataatt

SEQ ID NO: 259630 - DNA, 21 bp, Artificial sequence
  SiRNA target sequence
tcaggagtgtagagataattc

SEQ ID NO: 259631 - DNA, 21 bp, Artificial sequence
  SiRNA target sequence
caggagtgtagagataattct

SEQ ID NO: 259632 - DNA, 21 bp, Artificial sequence
  SiRNA target sequence
aggagtgtagagataattctg

SEQ ID NO: 259633 - DNA, 21 bp, Artificial sequence
  SiRNA target sequence
ggagtgtagagataattctgc

SEQ ID NO: 259634 - DNA, 21 bp, Artificial sequence
  SiRNA target sequence
gagtgtagagataattctgct

SEQ ID NO: 259635 - DNA, 21 bp, Artificial sequence
  SiRNA target sequence
agtgtagagataattctgcta

SEQ ID NO: 259636 - DNA, 21 bp, Artificial sequence
  SiRNA target sequence
gtgtagagataattctgctaa

SEQ ID NO: 259637 - DNA, 21 bp, Artificial sequence
  SiRNA target sequence
tgtagagataattctgctaag

SEQ ID NO: 259638 - DNA, 21 bp, Artificial sequence
  SiRNA target sequence
gtagagataattctgctaagt

SEQ ID NO: 259639 - DNA, 21 bp, Artificial sequence
  SiRNA target sequence
tagagataattctgctaagtt

SEQ ID NO: 259640 - DNA, 21 bp, Artificial sequence
  SiRNA target sequence
agagataattctgctaagttg

SEQ ID NO: 259641 - DNA, 21 bp, Artificial sequence
  SiRNA target sequence
gagataattctgctaagttga

SEQ ID NO: 259642 - DNA, 21 bp, Artificial sequence
  SiRNA target sequence
agataattctgctaagttgaa

SEQ ID NO: 259643 - DNA, 21 bp, Artificial sequence
  SiRNA target sequence
gataattctgctaagttgaac

SEQ ID NO: 259644 - DNA, 21 bp, Artificial sequence
  SiRNA target sequence
ataattctgctaagttgaacg

SEQ ID NO: 259645 - DNA, 21 bp, Artificial sequence
  SiRNA target sequence
taattctgctaagttgaacga

SEQ ID NO: 259646 - DNA, 21 bp, Artificial sequence
  SiRNA target sequence
aattctgctaagttgaacgaa

SEQ ID NO: 259647 - DNA, 21 bp, Artificial sequence
  SiRNA target sequence
attctgctaagttgaacgaat

SEQ ID NO: 259648 - DNA, 21 bp, Artificial sequence
  SiRNA target sequence
ttctgctaagttgaacgaatt

SEQ ID NO: 259649 - DNA, 21 bp, Artificial sequence
  SiRNA target sequence
tctgctaagttgaacgaattt

SEQ ID NO: 259650 - DNA, 21 bp, Artificial sequence
  SiRNA target sequence
ctgctaagttgaacgaatttc

SEQ ID NO: 259651 - DNA, 21 bp, Artificial sequence
  SiRNA target sequence
tgctaagttgaacgaatttct

SEQ ID NO: 259652 - DNA, 21 bp, Artificial sequence
  SiRNA target sequence
gctaagttgaacgaatttctg

SEQ ID NO: 259653 - DNA, 21 bp, Artificial sequence
  SiRNA target sequence
ctaagttgaacgaatttctga

SEQ ID NO: 259654 - DNA, 21 bp, Artificial sequence
  SiRNA target sequence
taagttgaacgaatttctgat

SEQ ID NO: 259655 - DNA, 21 bp, Artificial sequence
  SiRNA target sequence
aagttgaacgaatttctgatg

SEQ ID NO: 259656 - DNA, 21 bp, Artificial sequence
  SiRNA target sequence
agttgaacgaatttctgatga

SEQ ID NO: 259657 - DNA, 21 bp, Artificial sequence
  SiRNA target sequence
gttgaacgaatttctgatgaa

SEQ ID NO: 259658 - DNA, 21 bp, Artificial sequence
  SiRNA target sequence
ttgaacgaatttctgatgaac

SEQ ID NO: 259659 - DNA, 21 bp, Artificial sequence
  SiRNA target sequence
tgaacgaatttctgatgaact

SEQ ID NO: 259660 - DNA, 21 bp, Artificial sequence
  SiRNA target sequence
gaacgaatttctgatgaacta

SEQ ID NO: 259661 - DNA, 21 bp, Artificial sequence
  SiRNA target sequence
aacgaatttctgatgaactat

SEQ ID NO: 259662 - DNA, 21 bp, Artificial sequence
  SiRNA target sequence
acgaatttctgatgaactatg

SEQ ID NO: 259663 - DNA, 21 bp, Artificial sequence
  SiRNA target sequence
cgaatttctgatgaactatgc

SEQ ID NO: 259664 - DNA, 21 bp, Artificial sequence
  SiRNA target sequence
gaatttctgatgaactatgct

SEQ ID NO: 259665 - DNA, 21 bp, Artificial sequence
  SiRNA target sequence
aatttctgatgaactatgctg

SEQ ID NO: 259666 - DNA, 21 bp, Artificial sequence
  SiRNA target sequence
atttctgatgaactatgctga

SEQ ID NO: 259667 - DNA, 21 bp, Artificial sequence
  SiRNA target sequence
tttctgatgaactatgctgaa

SEQ ID NO: 259668 - DNA, 21 bp, Artificial sequence
  SiRNA target sequence
ttctgatgaactatgctgaaa

SEQ ID NO: 259669 - DNA, 21 bp, Artificial sequence
  SiRNA target sequence
tctgatgaactatgctgaaag

SEQ ID NO: 259670 - DNA, 21 bp, Artificial sequence
  SiRNA target sequence
ctgatgaactatgctgaaagt

SEQ ID NO: 259671 - DNA, 21 bp, Artificial sequence
  SiRNA target sequence
tgatgaactatgctgaaagtc

SEQ ID NO: 259672 - DNA, 21 bp, Artificial sequence
  SiRNA target sequence
gatgaactatgctgaaagtcg

SEQ ID NO: 259673 - DNA, 21 bp, Artificial sequence
  SiRNA target sequence
atgaactatgctgaaagtcga

SEQ ID NO: 259674 - DNA, 21 bp, Artificial sequence
  SiRNA target sequence
tgaactatgctgaaagtcgat

SEQ ID NO: 259675 - DNA, 21 bp, Artificial sequence
  SiRNA target sequence
gaactatgctgaaagtcgatc

SEQ ID NO: 259676 - DNA, 21 bp, Artificial sequence
  SiRNA target sequence
aactatgctgaaagtcgatca

SEQ ID NO: 259677 - DNA, 21 bp, Artificial sequence
  SiRNA target sequence
actatgctgaaagtcgatcaa

SEQ ID NO: 259678 - DNA, 21 bp, Artificial sequence
  SiRNA target sequence
ctatgctgaaagtcgatcaaa

SEQ ID NO: 259679 - DNA, 21 bp, Artificial sequence
  SiRNA target sequence
tatgctgaaagtcgatcaaaa

SEQ ID NO: 259680 - DNA, 21 bp, Artificial sequence
  SiRNA target sequence
atgctgaaagtcgatcaaaac

SEQ ID NO: 259681 - DNA, 21 bp, Artificial sequence
  SiRNA target sequence
tgctgaaagtcgatcaaaacg

SEQ ID NO: 259682 - DNA, 21 bp, Artificial sequence
  SiRNA target sequence
gctgaaagtcgatcaaaacga

SEQ ID NO: 259683 - DNA, 21 bp, Artificial sequence
  SiRNA target sequence
ctgaaagtcgatcaaaacgac

SEQ ID NO: 259684 - DNA, 21 bp, Artificial sequence
  SiRNA target sequence
tgaaagtcgatcaaaacgacc

SEQ ID NO: 259685 - DNA, 21 bp, Artificial sequence
  SiRNA target sequence
gaaagtcgatcaaaacgaccc

SEQ ID NO: 259686 - DNA, 21 bp, Artificial sequence
  SiRNA target sequence
aaagtcgatcaaaacgacccg

SEQ ID NO: 259687 - DNA, 21 bp, Artificial sequence
  SiRNA target sequence
aagtcgatcaaaacgacccga

SEQ ID NO: 259688 - DNA, 21 bp, Artificial sequence
  SiRNA target sequence
agtcgatcaaaacgacccgaa

SEQ ID NO: 259689 - DNA, 21 bp, Artificial sequence
  SiRNA target sequence
gtcgatcaaaacgacccgaac

SEQ ID NO: 259690 - DNA, 21 bp, Artificial sequence
  SiRNA target sequence
tcgatcaaaacgacccgaaca

SEQ ID NO: 259691 - DNA, 21 bp, Artificial sequence
  SiRNA target sequence
cgatcaaaacgacccgaacaa

SEQ ID NO: 259692 - DNA, 21 bp, Artificial sequence
  SiRNA target sequence
gatcaaaacgacccgaacaaa

SEQ ID NO: 259693 - DNA, 21 bp, Artificial sequence
  SiRNA target sequence
atcaaaacgacccgaacaaaa

SEQ ID NO: 259694 - DNA, 21 bp, Artificial sequence
  SiRNA target sequence
tcaaaacgacccgaacaaaaa

SEQ ID NO: 259695 - DNA, 21 bp, Artificial sequence
  SiRNA target sequence
caaaacgacccgaacaaaaac

SEQ ID NO: 259696 - DNA, 21 bp, Artificial sequence
  SiRNA target sequence
aaaacgacccgaacaaaaaca

SEQ ID NO: 259697 - DNA, 21 bp, Artificial sequence
  SiRNA target sequence
aaacgacccgaacaaaaacac

SEQ ID NO: 259698 - DNA, 21 bp, Artificial sequence
  SiRNA target sequence
aacgacccgaacaaaaacacg

SEQ ID NO: 259699 - DNA, 21 bp, Artificial sequence
  SiRNA target sequence
acgacccgaacaaaaacacga

SEQ ID NO: 259700 - DNA, 21 bp, Artificial sequence
  SiRNA target sequence
cgacccgaacaaaaacacgat

SEQ ID NO: 259701 - DNA, 21 bp, Artificial sequence
  SiRNA target sequence
gacccgaacaaaaacacgata

SEQ ID NO: 259702 - DNA, 21 bp, Artificial sequence
  SiRNA target sequence
acccgaacaaaaacacgataa

SEQ ID NO: 259703 - DNA, 21 bp, Artificial sequence
  SiRNA target sequence
cccgaacaaaaacacgataag

SEQ ID NO: 259704 - DNA, 21 bp, Artificial sequence
  SiRNA target sequence
ccgaacaaaaacacgataagt

SEQ ID NO: 259705 - DNA, 21 bp, Artificial sequence
  SiRNA target sequence
cgaacaaaaacacgataagtg

SEQ ID NO: 259706 - DNA, 21 bp, Artificial sequence
  SiRNA target sequence
gaacaaaaacacgataagtgc

SEQ ID NO: 259707 - DNA, 21 bp, Artificial sequence
  SiRNA target sequence
aacaaaaacacgataagtgcc

SEQ ID NO: 259708 - DNA, 21 bp, Artificial sequence
  SiRNA target sequence
acaaaaacacgataagtgccc

SEQ ID NO: 259709 - DNA, 21 bp, Artificial sequence
  SiRNA target sequence
caaaaacacgataagtgccct

SEQ ID NO: 259710 - DNA, 21 bp, Artificial sequence
  SiRNA target sequence
aaaaacacgataagtgccctg

SEQ ID NO: 259711 - DNA, 21 bp, Artificial sequence
  SiRNA target sequence
aaaacacgataagtgccctga

SEQ ID NO: 259712 - DNA, 21 bp, Artificial sequence
  SiRNA target sequence
aaacacgataagtgccctgaa

SEQ ID NO: 259713 - DNA, 21 bp, Artificial sequence
  SiRNA target sequence
aacacgataagtgccctgaat

SEQ ID NO: 259714 - DNA, 21 bp, Artificial sequence
  SiRNA target sequence
acacgataagtgccctgaatt

SEQ ID NO: 259715 - DNA, 21 bp, Artificial sequence
  SiRNA target sequence
cacgataagtgccctgaattg

SEQ ID NO: 259716 - DNA, 21 bp, Artificial sequence
  SiRNA target sequence
acgataagtgccctgaattgg

SEQ ID NO: 259717 - DNA, 21 bp, Artificial sequence
  SiRNA target sequence
cgataagtgccctgaattgga

SEQ ID NO: 259718 - DNA, 21 bp, Artificial sequence
  SiRNA target sequence
gataagtgccctgaattggaa

SEQ ID NO: 259719 - DNA, 21 bp, Artificial sequence
  SiRNA target sequence
ataagtgccctgaattggaat

SEQ ID NO: 259720 - DNA, 21 bp, Artificial sequence
  SiRNA target sequence
taagtgccctgaattggaatt

SEQ ID NO: 259721 - DNA, 21 bp, Artificial sequence
  SiRNA target sequence
aagtgccctgaattggaattt

SEQ ID NO: 259722 - DNA, 21 bp, Artificial sequence
  SiRNA target sequence
agtgccctgaattggaatttg

SEQ ID NO: 259723 - DNA, 21 bp, Artificial sequence
  SiRNA target sequence
gtgccctgaattggaatttga

SEQ ID NO: 259724 - DNA, 21 bp, Artificial sequence
  SiRNA target sequence
tgccctgaattggaatttgaa

SEQ ID NO: 259725 - DNA, 21 bp, Artificial sequence
  SiRNA target sequence
gccctgaattggaatttgaag

SEQ ID NO: 259726 - DNA, 21 bp, Artificial sequence
  SiRNA target sequence
ccctgaattggaatttgaaga

SEQ ID NO: 259727 - DNA, 21 bp, Artificial sequence
  SiRNA target sequence
cctgaattggaatttgaagat

SEQ ID NO: 259728 - DNA, 21 bp, Artificial sequence
  SiRNA target sequence
ctgaattggaatttgaagatg

SEQ ID NO: 259729 - DNA, 21 bp, Artificial sequence
  SiRNA target sequence
tgaattggaatttgaagatgc

SEQ ID NO: 259730 - DNA, 21 bp, Artificial sequence
  SiRNA target sequence
gaattggaatttgaagatgca

SEQ ID NO: 259731 - DNA, 21 bp, Artificial sequence
  SiRNA target sequence
aattggaatttgaagatgcaa

SEQ ID NO: 259732 - DNA, 21 bp, Artificial sequence
  SiRNA target sequence
attggaatttgaagatgcaat

SEQ ID NO: 259733 - DNA, 21 bp, Artificial sequence
  SiRNA target sequence
ttggaatttgaagatgcaatt

SEQ ID NO: 259734 - DNA, 21 bp, Artificial sequence
  SiRNA target sequence
tggaatttgaagatgcaattg

SEQ ID NO: 259735 - DNA, 21 bp, Artificial sequence
  SiRNA target sequence
ggaatttgaagatgcaattga

SEQ ID NO: 259736 - DNA, 21 bp, Artificial sequence
  SiRNA target sequence
gaatttgaagatgcaattgaa

SEQ ID NO: 259737 - DNA, 21 bp, Artificial sequence
  SiRNA target sequence
aatttgaagatgcaattgaag

SEQ ID NO: 259738 - DNA, 21 bp, Artificial sequence
  SiRNA target sequence
atttgaagatgcaattgaagt

SEQ ID NO: 259739 - DNA, 21 bp, Artificial sequence
  SiRNA target sequence
tttgaagatgcaattgaagtg

SEQ ID NO: 259740 - DNA, 21 bp, Artificial sequence
  SiRNA target sequence
ttgaagatgcaattgaagtgt

SEQ ID NO: 259741 - DNA, 21 bp, Artificial sequence
  SiRNA target sequence
tgaagatgcaattgaagtgtc

SEQ ID NO: 259742 - DNA, 21 bp, Artificial sequence
  SiRNA target sequence
gaagatgcaattgaagtgtct

SEQ ID NO: 259743 - DNA, 21 bp, Artificial sequence
  SiRNA target sequence
aagatgcaattgaagtgtcta

SEQ ID NO: 259744 - DNA, 21 bp, Artificial sequence
  SiRNA target sequence
agatgcaattgaagtgtctat

SEQ ID NO: 259745 - DNA, 21 bp, Artificial sequence
  SiRNA target sequence
gatgcaattgaagtgtctatg

SEQ ID NO: 259746 - DNA, 21 bp, Artificial sequence
  SiRNA target sequence
atgcaattgaagtgtctatgc

SEQ ID NO: 259747 - DNA, 21 bp, Artificial sequence
  SiRNA target sequence
tgcaattgaagtgtctatgca

SEQ ID NO: 259748 - DNA, 21 bp, Artificial sequence
  SiRNA target sequence
gcaattgaagtgtctatgcaa

SEQ ID NO: 259749 - DNA, 21 bp, Artificial sequence
  SiRNA target sequence
caattgaagtgtctatgcaag

SEQ ID NO: 259750 - DNA, 21 bp, Artificial sequence
  SiRNA target sequence
aattgaagtgtctatgcaagt

SEQ ID NO: 259751 - DNA, 21 bp, Artificial sequence
  SiRNA target sequence
attgaagtgtctatgcaagta

SEQ ID NO: 259752 - DNA, 21 bp, Artificial sequence
  SiRNA target sequence
ttgaagtgtctatgcaagtag

SEQ ID NO: 259753 - DNA, 21 bp, Artificial sequence
  SiRNA target sequence
tgaagtgtctatgcaagtaga

SEQ ID NO: 259754 - DNA, 21 bp, Artificial sequence
  SiRNA target sequence
gaagtgtctatgcaagtagac

SEQ ID NO: 259755 - DNA, 21 bp, Artificial sequence
  SiRNA target sequence
aagtgtctatgcaagtagacg

SEQ ID NO: 259756 - DNA, 21 bp, Artificial sequence
  SiRNA target sequence
agtgtctatgcaagtagacgc

SEQ ID NO: 259757 - DNA, 21 bp, Artificial sequence
  SiRNA target sequence
gtgtctatgcaagtagacgct

SEQ ID NO: 259758 - DNA, 21 bp, Artificial sequence
  SiRNA target sequence
tgtctatgcaagtagacgctg

SEQ ID NO: 259759 - DNA, 21 bp, Artificial sequence
  SiRNA target sequence
gtctatgcaagtagacgctga

SEQ ID NO: 259760 - DNA, 21 bp, Artificial sequence
  SiRNA target sequence
tctatgcaagtagacgctgac

SEQ ID NO: 259761 - DNA, 21 bp, Artificial sequence
  SiRNA target sequence
ctatgcaagtagacgctgact

SEQ ID NO: 259762 - DNA, 21 bp, Artificial sequence
  SiRNA target sequence
tatgcaagtagacgctgactc

SEQ ID NO: 259763 - DNA, 21 bp, Artificial sequence
  SiRNA target sequence
atgcaagtagacgctgactcg

SEQ ID NO: 259764 - DNA, 21 bp, Artificial sequence
  SiRNA target sequence
tgcaagtagacgctgactcgt

SEQ ID NO: 259765 - DNA, 21 bp, Artificial sequence
  SiRNA target sequence
gcaagtagacgctgactcgtc

SEQ ID NO: 259766 - DNA, 21 bp, Artificial sequence
  SiRNA target sequence
caagtagacgctgactcgtct

SEQ ID NO: 259767 - DNA, 21 bp, Artificial sequence
  SiRNA target sequence
aagtagacgctgactcgtctt

SEQ ID NO: 259768 - DNA, 21 bp, Artificial sequence
  SiRNA target sequence
agtagacgctgactcgtcttt

SEQ ID NO: 259769 - DNA, 21 bp, Artificial sequence
  SiRNA target sequence
gtagacgctgactcgtcttta

SEQ ID NO: 259770 - DNA, 21 bp, Artificial sequence
  SiRNA target sequence
tagacgctgactcgtctttag

SEQ ID NO: 259771 - DNA, 21 bp, Artificial sequence
  SiRNA target sequence
agacgctgactcgtctttagt

SEQ ID NO: 259772 - DNA, 21 bp, Artificial sequence
  SiRNA target sequence
gacgctgactcgtctttagtt

SEQ ID NO: 259773 - DNA, 21 bp, Artificial sequence
  SiRNA target sequence
acgctgactcgtctttagttc

SEQ ID NO: 259774 - DNA, 21 bp, Artificial sequence
  SiRNA target sequence
cgctgactcgtctttagttcc

SEQ ID NO: 259775 - DNA, 21 bp, Artificial sequence
  SiRNA target sequence
gctgactcgtctttagttcca

SEQ ID NO: 259776 - DNA, 21 bp, Artificial sequence
  SiRNA target sequence
ctgactcgtctttagttccaa

SEQ ID NO: 259777 - DNA, 21 bp, Artificial sequence
  SiRNA target sequence
tgactcgtctttagttccaat

SEQ ID NO: 259778 - DNA, 21 bp, Artificial sequence
  SiRNA target sequence
gactcgtctttagttccaatt

SEQ ID NO: 259779 - DNA, 21 bp, Artificial sequence
  SiRNA target sequence
actcgtctttagttccaattg

SEQ ID NO: 259780 - DNA, 21 bp, Artificial sequence
  SiRNA target sequence
ctcgtctttagttccaattga

SEQ ID NO: 259781 - DNA, 21 bp, Artificial sequence
  SiRNA target sequence
tcgtctttagttccaattgag

SEQ ID NO: 259782 - DNA, 21 bp, Artificial sequence
  SiRNA target sequence
cgtctttagttccaattgaga

SEQ ID NO: 259783 - DNA, 21 bp, Artificial sequence
  SiRNA target sequence
gtctttagttccaattgagaa

SEQ ID NO: 259784 - DNA, 21 bp, Artificial sequence
  SiRNA target sequence
tctttagttccaattgagaag

SEQ ID NO: 259785 - DNA, 21 bp, Artificial sequence
  SiRNA target sequence
ctttagttccaattgagaagt

SEQ ID NO: 259786 - DNA, 21 bp, Artificial sequence
  SiRNA target sequence
tttagttccaattgagaagtc

SEQ ID NO: 259787 - DNA, 21 bp, Artificial sequence
  SiRNA target sequence
ttagttccaattgagaagtct

SEQ ID NO: 259788 - DNA, 21 bp, Artificial sequence
  SiRNA target sequence
tagttccaattgagaagtctc

SEQ ID NO: 259789 - DNA, 21 bp, Artificial sequence
  SiRNA target sequence
agttccaattgagaagtctcg

SEQ ID NO: 259790 - DNA, 21 bp, Artificial sequence
  SiRNA target sequence
gttccaattgagaagtctcgt

SEQ ID NO: 259791 - DNA, 21 bp, Artificial sequence
  SiRNA target sequence
ttccaattgagaagtctcgtc

SEQ ID NO: 259792 - DNA, 21 bp, Artificial sequence
  SiRNA target sequence
tccaattgagaagtctcgtct

SEQ ID NO: 259793 - DNA, 21 bp, Artificial sequence
  SiRNA target sequence
ccaattgagaagtctcgtctt

SEQ ID NO: 259794 - DNA, 21 bp, Artificial sequence
  SiRNA target sequence
caattgagaagtctcgtcttc

SEQ ID NO: 259795 - DNA, 21 bp, Artificial sequence
  SiRNA target sequence
aattgagaagtctcgtcttca

SEQ ID NO: 259796 - DNA, 21 bp, Artificial sequence
  SiRNA target sequence
attgagaagtctcgtcttcaa

SEQ ID NO: 259797 - DNA, 21 bp, Artificial sequence
  SiRNA target sequence
ttgagaagtctcgtcttcaag

SEQ ID NO: 259798 - DNA, 21 bp, Artificial sequence
  SiRNA target sequence
tgagaagtctcgtcttcaaga

SEQ ID NO: 259799 - DNA, 21 bp, Artificial sequence
  SiRNA target sequence
gagaagtctcgtcttcaagag

SEQ ID NO: 259800 - DNA, 21 bp, Artificial sequence
  SiRNA target sequence
agaagtctcgtcttcaagaga

SEQ ID NO: 259801 - DNA, 21 bp, Artificial sequence
  SiRNA target sequence
gaagtctcgtcttcaagagat

SEQ ID NO: 259802 - DNA, 21 bp, Artificial sequence
  SiRNA target sequence
aagtctcgtcttcaagagatg

SEQ ID NO: 259803 - DNA, 21 bp, Artificial sequence
  SiRNA target sequence
agtctcgtcttcaagagatga

SEQ ID NO: 259804 - DNA, 21 bp, Artificial sequence
  SiRNA target sequence
gtctcgtcttcaagagatgat

SEQ ID NO: 259805 - DNA, 21 bp, Artificial sequence
  SiRNA target sequence
tctcgtcttcaagagatgatt

SEQ ID NO: 259806 - DNA, 21 bp, Artificial sequence
  SiRNA target sequence
ctcgtcttcaagagatgattg

SEQ ID NO: 259807 - DNA, 21 bp, Artificial sequence
  SiRNA target sequence
tcgtcttcaagagatgattga

SEQ ID NO: 259808 - DNA, 21 bp, Artificial sequence
  SiRNA target sequence
cgtcttcaagagatgattgag

SEQ ID NO: 259809 - DNA, 21 bp, Artificial sequence
  SiRNA target sequence
gtcttcaagagatgattgaga

SEQ ID NO: 259810 - DNA, 21 bp, Artificial sequence
  SiRNA target sequence
tcttcaagagatgattgagag

SEQ ID NO: 259811 - DNA, 21 bp, Artificial sequence
  SiRNA target sequence
cttcaagagatgattgagagt

SEQ ID NO: 259812 - DNA, 21 bp, Artificial sequence
  SiRNA target sequence
ttcaagagatgattgagagtt

SEQ ID NO: 259813 - DNA, 21 bp, Artificial sequence
  SiRNA target sequence
tcaagagatgattgagagttg

SEQ ID NO: 259814 - DNA, 21 bp, Artificial sequence
  SiRNA target sequence
caagagatgattgagagttgc

SEQ ID NO: 259815 - DNA, 21 bp, Artificial sequence
  SiRNA target sequence
aagagatgattgagagttgcc

SEQ ID NO: 259816 - DNA, 21 bp, Artificial sequence
  SiRNA target sequence
agagatgattgagagttgcca

SEQ ID NO: 259817 - DNA, 21 bp, Artificial sequence
  SiRNA target sequence
gagatgattgagagttgccaa

SEQ ID NO: 259818 - DNA, 21 bp, Artificial sequence
  SiRNA target sequence
agatgattgagagttgccaag

SEQ ID NO: 259819 - DNA, 21 bp, Artificial sequence
  SiRNA target sequence
gatgattgagagttgccaagg

SEQ ID NO: 259820 - DNA, 21 bp, Artificial sequence
  SiRNA target sequence
atgattgagagttgccaagga

SEQ ID NO: 259821 - DNA, 21 bp, Artificial sequence
  SiRNA target sequence
tgattgagagttgccaaggag

SEQ ID NO: 259822 - DNA, 21 bp, Artificial sequence
  SiRNA target sequence
gattgagagttgccaaggagt

SEQ ID NO: 259823 - DNA, 21 bp, Artificial sequence
  SiRNA target sequence
attgagagttgccaaggagtt

SEQ ID NO: 259824 - DNA, 21 bp, Artificial sequence
  SiRNA target sequence
ttgagagttgccaaggagttg

SEQ ID NO: 259825 - DNA, 21 bp, Artificial sequence
  SiRNA target sequence
tgagagttgccaaggagttgt

SEQ ID NO: 259826 - DNA, 21 bp, Artificial sequence
  SiRNA target sequence
gagagttgccaaggagttgtg

SEQ ID NO: 259827 - DNA, 21 bp, Artificial sequence
  SiRNA target sequence
agagttgccaaggagttgtgt

SEQ ID NO: 259828 - DNA, 21 bp, Artificial sequence
  SiRNA target sequence
gagttgccaaggagttgtgta

SEQ ID NO: 259829 - DNA, 21 bp, Artificial sequence
  SiRNA target sequence
agttgccaaggagttgtgtat

SEQ ID NO: 259830 - DNA, 21 bp, Artificial sequence
  SiRNA target sequence
gttgccaaggagttgtgtatg

SEQ ID NO: 259831 - DNA, 21 bp, Artificial sequence
  SiRNA target sequence
ttgccaaggagttgtgtatga

SEQ ID NO: 259832 - DNA, 21 bp, Artificial sequence
  SiRNA target sequence
tgccaaggagttgtgtatgat

SEQ ID NO: 259833 - DNA, 21 bp, Artificial sequence
  SiRNA target sequence
gccaaggagttgtgtatgatg

SEQ ID NO: 259834 - DNA, 21 bp, Artificial sequence
  SiRNA target sequence
ccaaggagttgtgtatgatgc

SEQ ID NO: 259835 - DNA, 21 bp, Artificial sequence
  SiRNA target sequence
caaggagttgtgtatgatgcc

SEQ ID NO: 259836 - DNA, 21 bp, Artificial sequence
  SiRNA target sequence
aaggagttgtgtatgatgcct

SEQ ID NO: 259837 - DNA, 21 bp, Artificial sequence
  SiRNA target sequence
aggagttgtgtatgatgcctg

SEQ ID NO: 259838 - DNA, 21 bp, Artificial sequence
  SiRNA target sequence
ggagttgtgtatgatgcctgc

SEQ ID NO: 259839 - DNA, 21 bp, Artificial sequence
  SiRNA target sequence
gagttgtgtatgatgcctgcg

SEQ ID NO: 259840 - DNA, 21 bp, Artificial sequence
  SiRNA target sequence
agttgtgtatgatgcctgcgg

SEQ ID NO: 259841 - DNA, 21 bp, Artificial sequence
  SiRNA target sequence
gttgtgtatgatgcctgcggc

SEQ ID NO: 259842 - DNA, 21 bp, Artificial sequence
  SiRNA target sequence
ttgtgtatgatgcctgcggca

SEQ ID NO: 259843 - DNA, 21 bp, Artificial sequence
  SiRNA target sequence
tgtgtatgatgcctgcggcaa

SEQ ID NO: 259844 - DNA, 21 bp, Artificial sequence
  SiRNA target sequence
gtgtatgatgcctgcggcaag

SEQ ID NO: 259845 - DNA, 21 bp, Artificial sequence
  SiRNA target sequence
tgtatgatgcctgcggcaaga

SEQ ID NO: 259846 - DNA, 21 bp, Artificial sequence
  SiRNA target sequence
gtatgatgcctgcggcaagac

SEQ ID NO: 259847 - DNA, 21 bp, Artificial sequence
  SiRNA target sequence
tatgatgcctgcggcaagacc

SEQ ID NO: 259848 - DNA, 21 bp, Artificial sequence
  SiRNA target sequence
atgatgcctgcggcaagaccg

SEQ ID NO: 259849 - DNA, 21 bp, Artificial sequence
  SiRNA target sequence
tgatgcctgcggcaagaccgt

SEQ ID NO: 259850 - DNA, 21 bp, Artificial sequence
  SiRNA target sequence
gatgcctgcggcaagaccgta

SEQ ID NO: 259851 - DNA, 21 bp, Artificial sequence
  SiRNA target sequence
atgcctgcggcaagaccgtat

SEQ ID NO: 259852 - DNA, 21 bp, Artificial sequence
  SiRNA target sequence
tgcctgcggcaagaccgtata

SEQ ID NO: 259853 - DNA, 21 bp, Artificial sequence
  SiRNA target sequence
gcctgcggcaagaccgtatac

SEQ ID NO: 259854 - DNA, 21 bp, Artificial sequence
  SiRNA target sequence
cctgcggcaagaccgtataca

SEQ ID NO: 259855 - DNA, 21 bp, Artificial sequence
  SiRNA target sequence
ctgcggcaagaccgtatacat

SEQ ID NO: 259856 - DNA, 21 bp, Artificial sequence
  SiRNA target sequence
tgcggcaagaccgtatacatt

SEQ ID NO: 259857 - DNA, 21 bp, Artificial sequence
  SiRNA target sequence
gcggcaagaccgtatacattt

SEQ ID NO: 259858 - DNA, 21 bp, Artificial sequence
  SiRNA target sequence
cggcaagaccgtatacatttc

SEQ ID NO: 259859 - DNA, 21 bp, Artificial sequence
  SiRNA target sequence
ggcaagaccgtatacatttct

SEQ ID NO: 259860 - DNA, 21 bp, Artificial sequence
  SiRNA target sequence
gcaagaccgtatacatttcta

SEQ ID NO: 259861 - DNA, 21 bp, Artificial sequence
  SiRNA target sequence
caagaccgtatacatttctaa

SEQ ID NO: 259862 - DNA, 21 bp, Artificial sequence
  SiRNA target sequence
aagaccgtatacatttctaag

SEQ ID NO: 259863 - DNA, 21 bp, Artificial sequence
  SiRNA target sequence
agaccgtatacatttctaagt

SEQ ID NO: 259864 - DNA, 21 bp, Artificial sequence
  SiRNA target sequence
gaccgtatacatttctaagtt

SEQ ID NO: 259865 - DNA, 21 bp, Artificial sequence
  SiRNA target sequence
accgtatacatttctaagtta

SEQ ID NO: 259866 - DNA, 21 bp, Artificial sequence
  SiRNA target sequence
ccgtatacatttctaagttag

SEQ ID NO: 259867 - DNA, 21 bp, Artificial sequence
  SiRNA target sequence
cgtatacatttctaagttagc

SEQ ID NO: 259868 - DNA, 21 bp, Artificial sequence
  SiRNA target sequence
gtatacatttctaagttagct

SEQ ID NO: 259869 - DNA, 21 bp, Artificial sequence
  SiRNA target sequence
tatacatttctaagttagctt

SEQ ID NO: 259870 - DNA, 21 bp, Artificial sequence
  SiRNA target sequence
atacatttctaagttagcttt

SEQ ID NO: 259871 - DNA, 21 bp, Artificial sequence
  SiRNA target sequence
tacatttctaagttagctttt

SEQ ID NO: 259872 - DNA, 21 bp, Artificial sequence
  SiRNA target sequence
acatttctaagttagcttttg

SEQ ID NO: 259873 - DNA, 21 bp, Artificial sequence
  SiRNA target sequence
catttctaagttagcttttga

SEQ ID NO: 259874 - DNA, 21 bp, Artificial sequence
  SiRNA target sequence
atttctaagttagcttttgaa

SEQ ID NO: 259875 - DNA, 21 bp, Artificial sequence
  SiRNA target sequence
tttctaagttagcttttgaac

SEQ ID NO: 259876 - DNA, 21 bp, Artificial sequence
  SiRNA target sequence
ttctaagttagcttttgaact

SEQ ID NO: 259877 - DNA, 21 bp, Artificial sequence
  SiRNA target sequence
tctaagttagcttttgaacta

SEQ ID NO: 259878 - DNA, 21 bp, Artificial sequence
  SiRNA target sequence
ctaagttagcttttgaactag

SEQ ID NO: 259879 - DNA, 21 bp, Artificial sequence
  SiRNA target sequence
taagttagcttttgaactagc

SEQ ID NO: 259880 - DNA, 21 bp, Artificial sequence
  SiRNA target sequence
aagttagcttttgaactagcc

SEQ ID NO: 259881 - DNA, 21 bp, Artificial sequence
  SiRNA target sequence
agttagcttttgaactagccc

SEQ ID NO: 259882 - DNA, 21 bp, Artificial sequence
  SiRNA target sequence
gttagcttttgaactagcccc

SEQ ID NO: 259883 - DNA, 21 bp, Artificial sequence
  SiRNA target sequence
ttagcttttgaactagcccct

SEQ ID NO: 259884 - DNA, 21 bp, Artificial sequence
  SiRNA target sequence
tagcttttgaactagcccctc

SEQ ID NO: 259885 - DNA, 21 bp, Artificial sequence
  SiRNA target sequence
agcttttgaactagcccctct

SEQ ID NO: 259886 - DNA, 21 bp, Artificial sequence
  SiRNA target sequence
gcttttgaactagcccctctt

SEQ ID NO: 259887 - DNA, 21 bp, Artificial sequence
  SiRNA target sequence
cttttgaactagcccctcttg

SEQ ID NO: 259888 - DNA, 21 bp, Artificial sequence
  SiRNA target sequence
ttttgaactagcccctcttga

SEQ ID NO: 259889 - DNA, 21 bp, Artificial sequence
  SiRNA target sequence
tttgaactagcccctcttgag

SEQ ID NO: 259890 - DNA, 21 bp, Artificial sequence
  SiRNA target sequence
ttgaactagcccctcttgagt

SEQ ID NO: 259891 - DNA, 21 bp, Artificial sequence
  SiRNA target sequence
tgaactagcccctcttgagta

SEQ ID NO: 259892 - DNA, 21 bp, Artificial sequence
  SiRNA target sequence
gaactagcccctcttgagtat

SEQ ID NO: 259893 - DNA, 21 bp, Artificial sequence
  SiRNA target sequence
aactagcccctcttgagtatg

SEQ ID NO: 259894 - DNA, 21 bp, Artificial sequence
  SiRNA target sequence
actagcccctcttgagtatga

SEQ ID NO: 259895 - DNA, 21 bp, Artificial sequence
  SiRNA target sequence
ctagcccctcttgagtatgag

SEQ ID NO: 259896 - DNA, 21 bp, Artificial sequence
  SiRNA target sequence
tagcccctcttgagtatgaga

SEQ ID NO: 259897 - DNA, 21 bp, Artificial sequence
  SiRNA target sequence
agcccctcttgagtatgagaa

SEQ ID NO: 259898 - DNA, 21 bp, Artificial sequence
  SiRNA target sequence
gcccctcttgagtatgagaaa

SEQ ID NO: 259899 - DNA, 21 bp, Artificial sequence
  SiRNA target sequence
cccctcttgagtatgagaaac

SEQ ID NO: 259900 - DNA, 21 bp, Artificial sequence
  SiRNA target sequence
ccctcttgagtatgagaaaca

SEQ ID NO: 259901 - DNA, 21 bp, Artificial sequence
  SiRNA target sequence
cctcttgagtatgagaaacaa

SEQ ID NO: 259902 - DNA, 21 bp, Artificial sequence
  SiRNA target sequence
ctcttgagtatgagaaacaaa

SEQ ID NO: 259903 - DNA, 21 bp, Artificial sequence
  SiRNA target sequence
tcttgagtatgagaaacaaat

SEQ ID NO: 259904 - DNA, 21 bp, Artificial sequence
  SiRNA target sequence
cttgagtatgagaaacaaatg

SEQ ID NO: 259905 - DNA, 21 bp, Artificial sequence
  SiRNA target sequence
ttgagtatgagaaacaaatgg

SEQ ID NO: 259906 - DNA, 21 bp, Artificial sequence
  SiRNA target sequence
tgagtatgagaaacaaatgga

SEQ ID NO: 259907 - DNA, 21 bp, Artificial sequence
  SiRNA target sequence
gagtatgagaaacaaatggaa

SEQ ID NO: 259908 - DNA, 21 bp, Artificial sequence
  SiRNA target sequence
agtatgagaaacaaatggaaa

SEQ ID NO: 259909 - DNA, 21 bp, Artificial sequence
  SiRNA target sequence
gtatgagaaacaaatggaaag

SEQ ID NO: 259910 - DNA, 21 bp, Artificial sequence
  SiRNA target sequence
tatgagaaacaaatggaaaga

SEQ ID NO: 259911 - DNA, 21 bp, Artificial sequence
  SiRNA target sequence
atgagaaacaaatggaaagaa

SEQ ID NO: 259912 - DNA, 21 bp, Artificial sequence
  SiRNA target sequence
tgagaaacaaatggaaagaat

SEQ ID NO: 259913 - DNA, 21 bp, Artificial sequence
  SiRNA target sequence
gagaaacaaatggaaagaatt

SEQ ID NO: 259914 - DNA, 21 bp, Artificial sequence
  SiRNA target sequence
agaaacaaatggaaagaattt

SEQ ID NO: 259915 - DNA, 21 bp, Artificial sequence
  SiRNA target sequence
gaaacaaatggaaagaatttc

SEQ ID NO: 259916 - DNA, 21 bp, Artificial sequence
  SiRNA target sequence
aaacaaatggaaagaatttca

SEQ ID NO: 259917 - DNA, 21 bp, Artificial sequence
  SiRNA target sequence
aacaaatggaaagaatttcag

SEQ ID NO: 259918 - DNA, 21 bp, Artificial sequence
  SiRNA target sequence
acaaatggaaagaatttcagg

SEQ ID NO: 259919 - DNA, 21 bp, Artificial sequence
  SiRNA target sequence
caaatggaaagaatttcaggg

SEQ ID NO: 259920 - DNA, 21 bp, Artificial sequence
  SiRNA target sequence
aaatggaaagaatttcaggga

SEQ ID NO: 259921 - DNA, 21 bp, Artificial sequence
  SiRNA target sequence
aatggaaagaatttcagggat

SEQ ID NO: 259922 - DNA, 21 bp, Artificial sequence
  SiRNA target sequence
atggaaagaatttcagggatg

SEQ ID NO: 259923 - DNA, 21 bp, Artificial sequence
  SiRNA target sequence
tggaaagaatttcagggatga

SEQ ID NO: 259924 - DNA, 21 bp, Artificial sequence
  SiRNA target sequence
ggaaagaatttcagggatgaa

SEQ ID NO: 259925 - DNA, 21 bp, Artificial sequence
  SiRNA target sequence
gaaagaatttcagggatgaaa

SEQ ID NO: 259926 - DNA, 21 bp, Artificial sequence
  SiRNA target sequence
aaagaatttcagggatgaaat

SEQ ID NO: 259927 - DNA, 21 bp, Artificial sequence
  SiRNA target sequence
aagaatttcagggatgaaatt

SEQ ID NO: 259928 - DNA, 21 bp, Artificial sequence
  SiRNA target sequence
agaatttcagggatgaaattt

SEQ ID NO: 259929 - DNA, 21 bp, Artificial sequence
  SiRNA target sequence
gaatttcagggatgaaatttt

SEQ ID NO: 259930 - DNA, 21 bp, Artificial sequence
  SiRNA target sequence
aatttcagggatgaaatttta

SEQ ID NO: 259931 - DNA, 21 bp, Artificial sequence
  SiRNA target sequence
atttcagggatgaaattttat

SEQ ID NO: 259932 - DNA, 21 bp, Artificial sequence
  SiRNA target sequence
tttcagggatgaaattttatc

SEQ ID NO: 259933 - DNA, 21 bp, Artificial sequence
  SiRNA target sequence
ttcagggatgaaattttatca

SEQ ID NO: 259934 - DNA, 21 bp, Artificial sequence
  SiRNA target sequence
tcagggatgaaattttatcag

SEQ ID NO: 259935 - DNA, 21 bp, Artificial sequence
  SiRNA target sequence
cagggatgaaattttatcaga

SEQ ID NO: 259936 - DNA, 21 bp, Artificial sequence
  SiRNA target sequence
agggatgaaattttatcagaa

SEQ ID NO: 259937 - DNA, 21 bp, Artificial sequence
  SiRNA target sequence
gggatgaaattttatcagaaa

SEQ ID NO: 259938 - DNA, 21 bp, Artificial sequence
  SiRNA target sequence
ggatgaaattttatcagaaaa

SEQ ID NO: 259939 - DNA, 21 bp, Artificial sequence
  SiRNA target sequence
gatgaaattttatcagaaaat

SEQ ID NO: 259940 - DNA, 21 bp, Artificial sequence
  SiRNA target sequence
atgaaattttatcagaaaatg

SEQ ID NO: 259941 - DNA, 21 bp, Artificial sequence
  SiRNA target sequence
tgaaattttatcagaaaatgg

SEQ ID NO: 259942 - DNA, 21 bp, Artificial sequence
  SiRNA target sequence
gaaattttatcagaaaatggc

SEQ ID NO: 259943 - DNA, 21 bp, Artificial sequence
  SiRNA target sequence
aaattttatcagaaaatggca

SEQ ID NO: 259944 - DNA, 21 bp, Artificial sequence
  SiRNA target sequence
aattttatcagaaaatggcaa

SEQ ID NO: 259945 - DNA, 21 bp, Artificial sequence
  SiRNA target sequence
attttatcagaaaatggcaag

SEQ ID NO: 259946 - DNA, 21 bp, Artificial sequence
  SiRNA target sequence
ttttatcagaaaatggcaagt

SEQ ID NO: 259947 - DNA, 21 bp, Artificial sequence
  SiRNA target sequence
tttatcagaaaatggcaagtg

SEQ ID NO: 259948 - DNA, 21 bp, Artificial sequence
  SiRNA target sequence
ttatcagaaaatggcaagtgg

SEQ ID NO: 259949 - DNA, 21 bp, Artificial sequence
  SiRNA target sequence
tatcagaaaatggcaagtggt

SEQ ID NO: 259950 - DNA, 21 bp, Artificial sequence
  SiRNA target sequence
atcagaaaatggcaagtggtg

SEQ ID NO: 259951 - DNA, 21 bp, Artificial sequence
  SiRNA target sequence
tcagaaaatggcaagtggtgt

SEQ ID NO: 259952 - DNA, 21 bp, Artificial sequence
  SiRNA target sequence
cagaaaatggcaagtggtgtt

SEQ ID NO: 259953 - DNA, 21 bp, Artificial sequence
  SiRNA target sequence
agaaaatggcaagtggtgttg

SEQ ID NO: 259954 - DNA, 21 bp, Artificial sequence
  SiRNA target sequence
gaaaatggcaagtggtgttgt

SEQ ID NO: 259955 - DNA, 21 bp, Artificial sequence
  SiRNA target sequence
aaaatggcaagtggtgttgta

SEQ ID NO: 259956 - DNA, 21 bp, Artificial sequence
  SiRNA target sequence
aaatggcaagtggtgttgtat

SEQ ID NO: 259957 - DNA, 21 bp, Artificial sequence
  SiRNA target sequence
aatggcaagtggtgttgtata

SEQ ID NO: 259958 - DNA, 21 bp, Artificial sequence
  SiRNA target sequence
atggcaagtggtgttgtatac

SEQ ID NO: 259959 - DNA, 21 bp, Artificial sequence
  SiRNA target sequence
tggcaagtggtgttgtatacc

SEQ ID NO: 259960 - DNA, 21 bp, Artificial sequence
  SiRNA target sequence
ggcaagtggtgttgtatacct

SEQ ID NO: 259961 - DNA, 21 bp, Artificial sequence
  SiRNA target sequence
gcaagtggtgttgtatacctt

SEQ ID NO: 259962 - DNA, 21 bp, Artificial sequence
  SiRNA target sequence
caagtggtgttgtataccttc

SEQ ID NO: 259963 - DNA, 21 bp, Artificial sequence
  SiRNA target sequence
aagtggtgttgtataccttcg

SEQ ID NO: 259964 - DNA, 21 bp, Artificial sequence
  SiRNA target sequence
agtggtgttgtataccttcgt

SEQ ID NO: 259965 - DNA, 21 bp, Artificial sequence
  SiRNA target sequence
gtggtgttgtataccttcgtc

SEQ ID NO: 259966 - DNA, 21 bp, Artificial sequence
  SiRNA target sequence
tggtgttgtataccttcgtca

SEQ ID NO: 259967 - DNA, 21 bp, Artificial sequence
  SiRNA target sequence
ggtgttgtataccttcgtcaa

SEQ ID NO: 259968 - DNA, 21 bp, Artificial sequence
  SiRNA target sequence
gtgttgtataccttcgtcaag

SEQ ID NO: 259969 - DNA, 21 bp, Artificial sequence
  SiRNA target sequence
tgttgtataccttcgtcaagt

SEQ ID NO: 259970 - DNA, 21 bp, Artificial sequence
  SiRNA target sequence
gttgtataccttcgtcaagtt

SEQ ID NO: 259971 - DNA, 21 bp, Artificial sequence
  SiRNA target sequence
ttgtataccttcgtcaagttc

SEQ ID NO: 259972 - DNA, 21 bp, Artificial sequence
  SiRNA target sequence
tgtataccttcgtcaagttcg

SEQ ID NO: 259973 - DNA, 21 bp, Artificial sequence
  SiRNA target sequence
gtataccttcgtcaagttcgt

SEQ ID NO: 259974 - DNA, 21 bp, Artificial sequence
  SiRNA target sequence
tataccttcgtcaagttcgtg

SEQ ID NO: 259975 - DNA, 21 bp, Artificial sequence
  SiRNA target sequence
ataccttcgtcaagttcgtga

SEQ ID NO: 259976 - DNA, 21 bp, Artificial sequence
  SiRNA target sequence
taccttcgtcaagttcgtgac

SEQ ID NO: 259977 - DNA, 21 bp, Artificial sequence
  SiRNA target sequence
accttcgtcaagttcgtgaca

SEQ ID NO: 259978 - DNA, 21 bp, Artificial sequence
  SiRNA target sequence
ccttcgtcaagttcgtgacac

SEQ ID NO: 259979 - DNA, 21 bp, Artificial sequence
  SiRNA target sequence
cttcgtcaagttcgtgacacg

SEQ ID NO: 259980 - DNA, 21 bp, Artificial sequence
  SiRNA target sequence
ttcgtcaagttcgtgacacga

SEQ ID NO: 259981 - DNA, 21 bp, Artificial sequence
  SiRNA target sequence
tcgtcaagttcgtgacacgag

SEQ ID NO: 259982 - DNA, 21 bp, Artificial sequence
  SiRNA target sequence
cgtcaagttcgtgacacgagt

SEQ ID NO: 259983 - DNA, 21 bp, Artificial sequence
  SiRNA target sequence
gtcaagttcgtgacacgagta

SEQ ID NO: 259984 - DNA, 21 bp, Artificial sequence
  SiRNA target sequence
tcaagttcgtgacacgagtat

SEQ ID NO: 259985 - DNA, 21 bp, Artificial sequence
  SiRNA target sequence
caagttcgtgacacgagtatg

SEQ ID NO: 259986 - DNA, 21 bp, Artificial sequence
  SiRNA target sequence
aagttcgtgacacgagtatga

SEQ ID NO: 259987 - DNA, 21 bp, Artificial sequence
  SiRNA target sequence
agttcgtgacacgagtatgaa

SEQ ID NO: 259988 - DNA, 21 bp, Artificial sequence
  SiRNA target sequence
gttcgtgacacgagtatgaaa

SEQ ID NO: 259989 - DNA, 21 bp, Artificial sequence
  SiRNA target sequence
ttcgtgacacgagtatgaaaa

SEQ ID NO: 259990 - DNA, 21 bp, Artificial sequence
  SiRNA target sequence
tcgtgacacgagtatgaaaat

SEQ ID NO: 259991 - DNA, 21 bp, Artificial sequence
  SiRNA target sequence
cgtgacacgagtatgaaaatg

SEQ ID NO: 259992 - DNA, 21 bp, Artificial sequence
  SiRNA target sequence
gtgacacgagtatgaaaatgc

SEQ ID NO: 259993 - DNA, 21 bp, Artificial sequence
  SiRNA target sequence
tgacacgagtatgaaaatgct

SEQ ID NO: 259994 - DNA, 21 bp, Artificial sequence
  SiRNA target sequence
gacacgagtatgaaaatgctt

SEQ ID NO: 259995 - DNA, 21 bp, Artificial sequence
  SiRNA target sequence
acacgagtatgaaaatgctta

SEQ ID NO: 259996 - DNA, 21 bp, Artificial sequence
  SiRNA target sequence
cacgagtatgaaaatgcttaa

SEQ ID NO: 259997 - DNA, 21 bp, Artificial sequence
  SiRNA target sequence
acgagtatgaaaatgcttaat

SEQ ID NO: 259998 - DNA, 21 bp, Artificial sequence
  SiRNA target sequence
cgagtatgaaaatgcttaatt

SEQ ID NO: 259999 - DNA, 21 bp, Artificial sequence
  SiRNA target sequence
gagtatgaaaatgcttaattc

SEQ ID NO: 260000 - DNA, 21 bp, Artificial sequence
  SiRNA target sequence
agtatgaaaatgcttaattca

SEQ ID NO: 260001 - DNA, 21 bp, Artificial sequence
  SiRNA target sequence
gtatgaaaatgcttaattcat

SEQ ID NO: 260002 - DNA, 21 bp, Artificial sequence
  SiRNA target sequence
tatgaaaatgcttaattcatg

SEQ ID NO: 260003 - DNA, 21 bp, Artificial sequence
  SiRNA target sequence
atgaaaatgcttaattcatgg

SEQ ID NO: 260004 - DNA, 21 bp, Artificial sequence
  SiRNA target sequence
tgaaaatgcttaattcatgga

SEQ ID NO: 260005 - DNA, 21 bp, Artificial sequence
  SiRNA target sequence
gaaaatgcttaattcatggat

SEQ ID NO: 260006 - DNA, 21 bp, Artificial sequence
  SiRNA target sequence
aaaatgcttaattcatggatg

SEQ ID NO: 260007 - DNA, 21 bp, Artificial sequence
  SiRNA target sequence
aaatgcttaattcatggatgg

SEQ ID NO: 260008 - DNA, 21 bp, Artificial sequence
  SiRNA target sequence
aatgcttaattcatggatgga

SEQ ID NO: 260009 - DNA, 21 bp, Artificial sequence
  SiRNA target sequence
atgcttaattcatggatggaa

SEQ ID NO: 260010 - DNA, 21 bp, Artificial sequence
  SiRNA target sequence
tgcttaattcatggatggaag

SEQ ID NO: 260011 - DNA, 21 bp, Artificial sequence
  SiRNA target sequence
gcttaattcatggatggaaga

SEQ ID NO: 260012 - DNA, 21 bp, Artificial sequence
  SiRNA target sequence
cttaattcatggatggaagaa

SEQ ID NO: 260013 - DNA, 21 bp, Artificial sequence
  SiRNA target sequence
ttaattcatggatggaagaat

SEQ ID NO: 260014 - DNA, 21 bp, Artificial sequence
  SiRNA target sequence
taattcatggatggaagaatg

SEQ ID NO: 260015 - DNA, 21 bp, Artificial sequence
  SiRNA target sequence
aattcatggatggaagaatgt

SEQ ID NO: 260016 - DNA, 21 bp, Artificial sequence
  SiRNA target sequence
attcatggatggaagaatgta

SEQ ID NO: 260017 - DNA, 21 bp, Artificial sequence
  SiRNA target sequence
ttcatggatggaagaatgtat

SEQ ID NO: 260018 - DNA, 21 bp, Artificial sequence
  SiRNA target sequence
tcatggatggaagaatgtata

SEQ ID NO: 260019 - DNA, 21 bp, Artificial sequence
  SiRNA target sequence
catggatggaagaatgtatac

SEQ ID NO: 260020 - DNA, 21 bp, Artificial sequence
  SiRNA target sequence
atggatggaagaatgtataca

SEQ ID NO: 260021 - DNA, 21 bp, Artificial sequence
  SiRNA target sequence
tggatggaagaatgtatacaa

SEQ ID NO: 260022 - DNA, 21 bp, Artificial sequence
  SiRNA target sequence
ggatggaagaatgtatacaat

SEQ ID NO: 260023 - DNA, 21 bp, Artificial sequence
  SiRNA target sequence
gatggaagaatgtatacaata

SEQ ID NO: 260024 - DNA, 21 bp, Artificial sequence
  SiRNA target sequence
atggaagaatgtatacaatat

SEQ ID NO: 260025 - DNA, 21 bp, Artificial sequence
  SiRNA target sequence
tggaagaatgtatacaatatg

SEQ ID NO: 260026 - DNA, 21 bp, Artificial sequence
  SiRNA target sequence
ggaagaatgtatacaatatgc

SEQ ID NO: 260027 - DNA, 21 bp, Artificial sequence
  SiRNA target sequence
gaagaatgtatacaatatgca

SEQ ID NO: 260028 - DNA, 21 bp, Artificial sequence
  SiRNA target sequence
aagaatgtatacaatatgcaa

SEQ ID NO: 260029 - DNA, 21 bp, Artificial sequence
  SiRNA target sequence
agaatgtatacaatatgcaaa

SEQ ID NO: 260030 - DNA, 21 bp, Artificial sequence
  SiRNA target sequence
gaatgtatacaatatgcaaag

SEQ ID NO: 260031 - DNA, 21 bp, Artificial sequence
  SiRNA target sequence
aatgtatacaatatgcaaagg

SEQ ID NO: 260032 - DNA, 21 bp, Artificial sequence
  SiRNA target sequence
atgtatacaatatgcaaagga

SEQ ID NO: 260033 - DNA, 21 bp, Artificial sequence
  SiRNA target sequence
tgtatacaatatgcaaaggat

SEQ ID NO: 260034 - DNA, 21 bp, Artificial sequence
  SiRNA target sequence
gtatacaatatgcaaaggatc

SEQ ID NO: 260035 - DNA, 21 bp, Artificial sequence
  SiRNA target sequence
tatacaatatgcaaaggatca

SEQ ID NO: 260036 - DNA, 21 bp, Artificial sequence
  SiRNA target sequence
atacaatatgcaaaggatcac

SEQ ID NO: 260037 - DNA, 21 bp, Artificial sequence
  SiRNA target sequence
tacaatatgcaaaggatcacc

SEQ ID NO: 260038 - DNA, 21 bp, Artificial sequence
  SiRNA target sequence
acaatatgcaaaggatcaccc

SEQ ID NO: 260039 - DNA, 21 bp, Artificial sequence
  SiRNA target sequence
caatatgcaaaggatcaccct

SEQ ID NO: 260040 - DNA, 21 bp, Artificial sequence
  SiRNA target sequence
aatatgcaaaggatcaccctt

SEQ ID NO: 260041 - DNA, 21 bp, Artificial sequence
  SiRNA target sequence
atatgcaaaggatcacccttg

SEQ ID NO: 260042 - DNA, 21 bp, Artificial sequence
  SiRNA target sequence
tatgcaaaggatcacccttgg

SEQ ID NO: 260043 - DNA, 21 bp, Artificial sequence
  SiRNA target sequence
atgcaaaggatcacccttgga

SEQ ID NO: 260044 - DNA, 21 bp, Artificial sequence
  SiRNA target sequence
tgcaaaggatcacccttggac

SEQ ID NO: 260045 - DNA, 21 bp, Artificial sequence
  SiRNA target sequence
gcaaaggatcacccttggaca

SEQ ID NO: 260046 - DNA, 21 bp, Artificial sequence
  SiRNA target sequence
caaaggatcacccttggacaa

SEQ ID NO: 260047 - DNA, 21 bp, Artificial sequence
  SiRNA target sequence
aaaggatcacccttggacaat

SEQ ID NO: 260048 - DNA, 21 bp, Artificial sequence
  SiRNA target sequence
aaggatcacccttggacaata

SEQ ID NO: 260049 - DNA, 21 bp, Artificial sequence
  SiRNA target sequence
aggatcacccttggacaatag

SEQ ID NO: 260050 - DNA, 21 bp, Artificial sequence
  SiRNA target sequence
ggatcacccttggacaatagt

SEQ ID NO: 260051 - DNA, 21 bp, Artificial sequence
  SiRNA target sequence
gatcacccttggacaatagta

SEQ ID NO: 260052 - DNA, 21 bp, Artificial sequence
  SiRNA target sequence
atcacccttggacaatagtag

SEQ ID NO: 260053 - DNA, 21 bp, Artificial sequence
  SiRNA target sequence
tcacccttggacaatagtagc

SEQ ID NO: 260054 - DNA, 21 bp, Artificial sequence
  SiRNA target sequence
cacccttggacaatagtagct

SEQ ID NO: 260055 - DNA, 21 bp, Artificial sequence
  SiRNA target sequence
acccttggacaatagtagctg

SEQ ID NO: 260056 - DNA, 21 bp, Artificial sequence
  SiRNA target sequence
cccttggacaatagtagctgg

SEQ ID NO: 260057 - DNA, 21 bp, Artificial sequence
  SiRNA target sequence
ccttggacaatagtagctgga

SEQ ID NO: 260058 - DNA, 21 bp, Artificial sequence
  SiRNA target sequence
cttggacaatagtagctggag

SEQ ID NO: 260059 - DNA, 21 bp, Artificial sequence
  SiRNA target sequence
ttggacaatagtagctggagt

SEQ ID NO: 260060 - DNA, 21 bp, Artificial sequence
  SiRNA target sequence
tggacaatagtagctggagtt

SEQ ID NO: 260061 - DNA, 21 bp, Artificial sequence
  SiRNA target sequence
ggacaatagtagctggagttc

SEQ ID NO: 260062 - DNA, 21 bp, Artificial sequence
  SiRNA target sequence
gacaatagtagctggagttct

SEQ ID NO: 260063 - DNA, 21 bp, Artificial sequence
  SiRNA target sequence
acaatagtagctggagttcta

SEQ ID NO: 260064 - DNA, 21 bp, Artificial sequence
  SiRNA target sequence
caatagtagctggagttctag

SEQ ID NO: 260065 - DNA, 21 bp, Artificial sequence
  SiRNA target sequence
aatagtagctggagttctagg

SEQ ID NO: 260066 - DNA, 21 bp, Artificial sequence
  SiRNA target sequence
atagtagctggagttctagga

SEQ ID NO: 260067 - DNA, 21 bp, Artificial sequence
  SiRNA target sequence
tagtagctggagttctaggaa

SEQ ID NO: 260068 - DNA, 21 bp, Artificial sequence
  SiRNA target sequence
agtagctggagttctaggaac

SEQ ID NO: 260069 - DNA, 21 bp, Artificial sequence
  SiRNA target sequence
gtagctggagttctaggaacc

SEQ ID NO: 260070 - DNA, 21 bp, Artificial sequence
  SiRNA target sequence
tagctggagttctaggaacct

SEQ ID NO: 260071 - DNA, 21 bp, Artificial sequence
  SiRNA target sequence
agctggagttctaggaacctt

SEQ ID NO: 260072 - DNA, 21 bp, Artificial sequence
  SiRNA target sequence
gctggagttctaggaaccttc

SEQ ID NO: 260073 - DNA, 21 bp, Artificial sequence
  SiRNA target sequence
ctggagttctaggaaccttca

SEQ ID NO: 260074 - DNA, 21 bp, Artificial sequence
  SiRNA target sequence
tggagttctaggaaccttcat

SEQ ID NO: 260075 - DNA, 21 bp, Artificial sequence
  SiRNA target sequence
ggagttctaggaaccttcatt

SEQ ID NO: 260076 - DNA, 21 bp, Artificial sequence
  SiRNA target sequence
gagttctaggaaccttcattg

SEQ ID NO: 260077 - DNA, 21 bp, Artificial sequence
  SiRNA target sequence
agttctaggaaccttcattgg

SEQ ID NO: 260078 - DNA, 21 bp, Artificial sequence
  SiRNA target sequence
gttctaggaaccttcattggc

SEQ ID NO: 260079 - DNA, 21 bp, Artificial sequence
  SiRNA target sequence
ttctaggaaccttcattggca

SEQ ID NO: 260080 - DNA, 21 bp, Artificial sequence
  SiRNA target sequence
tctaggaaccttcattggcat

SEQ ID NO: 260081 - DNA, 21 bp, Artificial sequence
  SiRNA target sequence
ctaggaaccttcattggcatt

SEQ ID NO: 260082 - DNA, 21 bp, Artificial sequence
  SiRNA target sequence
taggaaccttcattggcattc

SEQ ID NO: 260083 - DNA, 21 bp, Artificial sequence
  SiRNA target sequence
aggaaccttcattggcattct

SEQ ID NO: 260084 - DNA, 21 bp, Artificial sequence
  SiRNA target sequence
ggaaccttcattggcattctc

SEQ ID NO: 260085 - DNA, 21 bp, Artificial sequence
  SiRNA target sequence
gaaccttcattggcattctca

SEQ ID NO: 260086 - DNA, 21 bp, Artificial sequence
  SiRNA target sequence
aaccttcattggcattctcac

SEQ ID NO: 260087 - DNA, 21 bp, Artificial sequence
  SiRNA target sequence
accttcattggcattctcacc

SEQ ID NO: 260088 - DNA, 21 bp, Artificial sequence
  SiRNA target sequence
ccttcattggcattctcacca

SEQ ID NO: 260089 - DNA, 21 bp, Artificial sequence
  SiRNA target sequence
cttcattggcattctcaccat

SEQ ID NO: 260090 - DNA, 21 bp, Artificial sequence
  SiRNA target sequence
ttcattggcattctcaccatt

SEQ ID NO: 260091 - DNA, 21 bp, Artificial sequence
  SiRNA target sequence
tcattggcattctcaccattg

SEQ ID NO: 260092 - DNA, 21 bp, Artificial sequence
  SiRNA target sequence
cattggcattctcaccattgt

SEQ ID NO: 260093 - DNA, 21 bp, Artificial sequence
  SiRNA target sequence
attggcattctcaccattgtt

SEQ ID NO: 260094 - DNA, 21 bp, Artificial sequence
  SiRNA target sequence
ttggcattctcaccattgttg

SEQ ID NO: 260095 - DNA, 21 bp, Artificial sequence
  SiRNA target sequence
tggcattctcaccattgttgg

SEQ ID NO: 260096 - DNA, 21 bp, Artificial sequence
  SiRNA target sequence
ggcattctcaccattgttggt

SEQ ID NO: 260097 - DNA, 21 bp, Artificial sequence
  SiRNA target sequence
gcattctcaccattgttggtt

SEQ ID NO: 260098 - DNA, 21 bp, Artificial sequence
  SiRNA target sequence
cattctcaccattgttggttt

SEQ ID NO: 260099 - DNA, 21 bp, Artificial sequence
  SiRNA target sequence
attctcaccattgttggtttc

SEQ ID NO: 260100 - DNA, 21 bp, Artificial sequence
  SiRNA target sequence
ttctcaccattgttggtttct

SEQ ID NO: 260101 - DNA, 21 bp, Artificial sequence
  SiRNA target sequence
tctcaccattgttggtttctg

SEQ ID NO: 260102 - DNA, 21 bp, Artificial sequence
  SiRNA target sequence
ctcaccattgttggtttctgg

SEQ ID NO: 260103 - DNA, 21 bp, Artificial sequence
  SiRNA target sequence
tcaccattgttggtttctgga

SEQ ID NO: 260104 - DNA, 21 bp, Artificial sequence
  SiRNA target sequence
caccattgttggtttctggaa

SEQ ID NO: 260105 - DNA, 21 bp, Artificial sequence
  SiRNA target sequence
accattgttggtttctggaaa

SEQ ID NO: 260106 - DNA, 21 bp, Artificial sequence
  SiRNA target sequence
ccattgttggtttctggaaat

SEQ ID NO: 260107 - DNA, 21 bp, Artificial sequence
  SiRNA target sequence
cattgttggtttctggaaatg

SEQ ID NO: 260108 - DNA, 21 bp, Artificial sequence
  SiRNA target sequence
attgttggtttctggaaatgg

SEQ ID NO: 260109 - DNA, 21 bp, Artificial sequence
  SiRNA target sequence
ttgttggtttctggaaatggc

SEQ ID NO: 260110 - DNA, 21 bp, Artificial sequence
  SiRNA target sequence
tgttggtttctggaaatggct

SEQ ID NO: 260111 - DNA, 21 bp, Artificial sequence
  SiRNA target sequence
gttggtttctggaaatggcta

SEQ ID NO: 260112 - DNA, 21 bp, Artificial sequence
  SiRNA target sequence
ttggtttctggaaatggctat

SEQ ID NO: 260113 - DNA, 21 bp, Artificial sequence
  SiRNA target sequence
tggtttctggaaatggctatg

SEQ ID NO: 260114 - DNA, 21 bp, Artificial sequence
  SiRNA target sequence
ggtttctggaaatggctatgc

SEQ ID NO: 260115 - DNA, 21 bp, Artificial sequence
  SiRNA target sequence
gtttctggaaatggctatgct

SEQ ID NO: 260116 - DNA, 21 bp, Artificial sequence
  SiRNA target sequence
tttctggaaatggctatgctc

SEQ ID NO: 260117 - DNA, 21 bp, Artificial sequence
  SiRNA target sequence
ttctggaaatggctatgctct

SEQ ID NO: 260118 - DNA, 21 bp, Artificial sequence
  SiRNA target sequence
tctggaaatggctatgctctg

SEQ ID NO: 260119 - DNA, 21 bp, Artificial sequence
  SiRNA target sequence
ctggaaatggctatgctctga

SEQ ID NO: 260120 - DNA, 21 bp, Artificial sequence
  SiRNA target sequence
tggaaatggctatgctctgat

SEQ ID NO: 260121 - DNA, 21 bp, Artificial sequence
  SiRNA target sequence
ggaaatggctatgctctgatg

SEQ ID NO: 260122 - DNA, 21 bp, Artificial sequence
  SiRNA target sequence
gaaatggctatgctctgatgg

SEQ ID NO: 260123 - DNA, 21 bp, Artificial sequence
  SiRNA target sequence
aaatggctatgctctgatgga

SEQ ID NO: 260124 - DNA, 21 bp, Artificial sequence
  SiRNA target sequence
aatggctatgctctgatggac

SEQ ID NO: 260125 - DNA, 21 bp, Artificial sequence
  SiRNA target sequence
atggctatgctctgatggaca

SEQ ID NO: 260126 - DNA, 21 bp, Artificial sequence
  SiRNA target sequence
tggctatgctctgatggacag

SEQ ID NO: 260127 - DNA, 21 bp, Artificial sequence
  SiRNA target sequence
ggctatgctctgatggacaga

SEQ ID NO: 260128 - DNA, 21 bp, Artificial sequence
  SiRNA target sequence
gctatgctctgatggacagaa

SEQ ID NO: 260129 - DNA, 21 bp, Artificial sequence
  SiRNA target sequence
ctatgctctgatggacagaag

SEQ ID NO: 260130 - DNA, 21 bp, Artificial sequence
  SiRNA target sequence
tatgctctgatggacagaaga

SEQ ID NO: 260131 - DNA, 21 bp, Artificial sequence
  SiRNA target sequence
atgctctgatggacagaagaa

SEQ ID NO: 260132 - DNA, 21 bp, Artificial sequence
  SiRNA target sequence
tgctctgatggacagaagaag

SEQ ID NO: 260133 - DNA, 21 bp, Artificial sequence
  SiRNA target sequence
gctctgatggacagaagaaga

SEQ ID NO: 260134 - DNA, 21 bp, Artificial sequence
  SiRNA target sequence
ctctgatggacagaagaagaa

SEQ ID NO: 260135 - DNA, 21 bp, Artificial sequence
  SiRNA target sequence
tctgatggacagaagaagaaa

SEQ ID NO: 260136 - DNA, 21 bp, Artificial sequence
  SiRNA target sequence
ctgatggacagaagaagaaac

SEQ ID NO: 260137 - DNA, 21 bp, Artificial sequence
  SiRNA target sequence
tgatggacagaagaagaaaca

SEQ ID NO: 260138 - DNA, 21 bp, Artificial sequence
  SiRNA target sequence
gatggacagaagaagaaacag

SEQ ID NO: 260139 - DNA, 21 bp, Artificial sequence
  SiRNA target sequence
atggacagaagaagaaacagg

SEQ ID NO: 260140 - DNA, 21 bp, Artificial sequence
  SiRNA target sequence
tggacagaagaagaaacaggc

SEQ ID NO: 260141 - DNA, 21 bp, Artificial sequence
  SiRNA target sequence
ggacagaagaagaaacaggca

SEQ ID NO: 260142 - DNA, 21 bp, Artificial sequence
  SiRNA target sequence
gacagaagaagaaacaggcaa

SEQ ID NO: 260143 - DNA, 21 bp, Artificial sequence
  SiRNA target sequence
acagaagaagaaacaggcaat

SEQ ID NO: 260144 - DNA, 21 bp, Artificial sequence
  SiRNA target sequence
cagaagaagaaacaggcaatt

SEQ ID NO: 260145 - DNA, 21 bp, Artificial sequence
  SiRNA target sequence
agaagaagaaacaggcaatta

SEQ ID NO: 260146 - DNA, 21 bp, Artificial sequence
  SiRNA target sequence
gaagaagaaacaggcaattaa

SEQ ID NO: 260147 - DNA, 21 bp, Artificial sequence
  SiRNA target sequence
aagaagaaacaggcaattaag

SEQ ID NO: 260148 - DNA, 21 bp, Artificial sequence
  SiRNA target sequence
agaagaaacaggcaattaagc

SEQ ID NO: 260149 - DNA, 21 bp, Artificial sequence
  SiRNA target sequence
gaagaaacaggcaattaagcg

SEQ ID NO: 260150 - DNA, 21 bp, Artificial sequence
  SiRNA target sequence
aagaaacaggcaattaagcgt

SEQ ID NO: 260151 - DNA, 21 bp, Artificial sequence
  SiRNA target sequence
agaaacaggcaattaagcgtc

SEQ ID NO: 260152 - DNA, 21 bp, Artificial sequence
  SiRNA target sequence
gaaacaggcaattaagcgtca

SEQ ID NO: 260153 - DNA, 21 bp, Artificial sequence
  SiRNA target sequence
aaacaggcaattaagcgtcat

SEQ ID NO: 260154 - DNA, 21 bp, Artificial sequence
  SiRNA target sequence
aacaggcaattaagcgtcatt

SEQ ID NO: 260155 - DNA, 21 bp, Artificial sequence
  SiRNA target sequence
acaggcaattaagcgtcattt

SEQ ID NO: 260156 - DNA, 21 bp, Artificial sequence
  SiRNA target sequence
caggcaattaagcgtcatttc

SEQ ID NO: 260157 - DNA, 21 bp, Artificial sequence
  SiRNA target sequence
aggcaattaagcgtcatttca

SEQ ID NO: 260158 - DNA, 21 bp, Artificial sequence
  SiRNA target sequence
ggcaattaagcgtcatttcat

SEQ ID NO: 260159 - DNA, 21 bp, Artificial sequence
  SiRNA target sequence
gcaattaagcgtcatttcatt

SEQ ID NO: 260160 - DNA, 21 bp, Artificial sequence
  SiRNA target sequence
caattaagcgtcatttcatta

SEQ ID NO: 260161 - DNA, 21 bp, Artificial sequence
  SiRNA target sequence
aattaagcgtcatttcattaa

SEQ ID NO: 260162 - DNA, 21 bp, Artificial sequence
  SiRNA target sequence
attaagcgtcatttcattaat

SEQ ID NO: 260163 - DNA, 21 bp, Artificial sequence
  SiRNA target sequence
ttaagcgtcatttcattaata

SEQ ID NO: 260164 - DNA, 21 bp, Artificial sequence
  SiRNA target sequence
taagcgtcatttcattaatac

SEQ ID NO: 260165 - DNA, 21 bp, Artificial sequence
  SiRNA target sequence
aagcgtcatttcattaatact

SEQ ID NO: 260166 - DNA, 21 bp, Artificial sequence
  SiRNA target sequence
agcgtcatttcattaatactg

SEQ ID NO: 260167 - DNA, 21 bp, Artificial sequence
  SiRNA target sequence
gcgtcatttcattaatactgg

SEQ ID NO: 260168 - DNA, 21 bp, Artificial sequence
  SiRNA target sequence
cgtcatttcattaatactgga

SEQ ID NO: 260169 - DNA, 21 bp, Artificial sequence
  SiRNA target sequence
gtcatttcattaatactggat

SEQ ID NO: 260170 - DNA, 21 bp, Artificial sequence
  SiRNA target sequence
tcatttcattaatactggata

SEQ ID NO: 260171 - DNA, 21 bp, Artificial sequence
  SiRNA target sequence
catttcattaatactggatac

SEQ ID NO: 260172 - DNA, 21 bp, Artificial sequence
  SiRNA target sequence
atttcattaatactggataca

SEQ ID NO: 260173 - DNA, 21 bp, Artificial sequence
  SiRNA target sequence
tttcattaatactggatacac

SEQ ID NO: 260174 - DNA, 21 bp, Artificial sequence
  SiRNA target sequence
ttcattaatactggatacacg

SEQ ID NO: 260175 - DNA, 21 bp, Artificial sequence
  SiRNA target sequence
tcattaatactggatacacgc

SEQ ID NO: 260176 - DNA, 21 bp, Artificial sequence
  SiRNA target sequence
cattaatactggatacacgct

SEQ ID NO: 260177 - DNA, 21 bp, Artificial sequence
  SiRNA target sequence
attaatactggatacacgctt

SEQ ID NO: 260178 - DNA, 21 bp, Artificial sequence
  SiRNA target sequence
ttaatactggatacacgctta

SEQ ID NO: 260179 - DNA, 21 bp, Artificial sequence
  SiRNA target sequence
taatactggatacacgcttat

SEQ ID NO: 260180 - DNA, 21 bp, Artificial sequence
  SiRNA target sequence
aatactggatacacgcttatt

SEQ ID NO: 260181 - DNA, 21 bp, Artificial sequence
  SiRNA target sequence
atactggatacacgcttatta

SEQ ID NO: 260182 - DNA, 21 bp, Artificial sequence
  SiRNA target sequence
tactggatacacgcttattat

SEQ ID NO: 260183 - DNA, 21 bp, Artificial sequence
  SiRNA target sequence
actggatacacgcttattata

SEQ ID NO: 260184 - DNA, 21 bp, Artificial sequence
  SiRNA target sequence
ctggatacacgcttattatac

SEQ ID NO: 260185 - DNA, 21 bp, Artificial sequence
  SiRNA target sequence
tggatacacgcttattatacc

SEQ ID NO: 260186 - DNA, 21 bp, Artificial sequence
  SiRNA target sequence
ggatacacgcttattatacct

SEQ ID NO: 260187 - DNA, 21 bp, Artificial sequence
  SiRNA target sequence
gatacacgcttattatacctg

SEQ ID NO: 260188 - DNA, 21 bp, Artificial sequence
  SiRNA target sequence
atacacgcttattatacctga

SEQ ID NO: 260189 - DNA, 21 bp, Artificial sequence
  SiRNA target sequence
tacacgcttattatacctgaa

SEQ ID NO: 260190 - DNA, 21 bp, Artificial sequence
  SiRNA target sequence
acacgcttattatacctgaac

SEQ ID NO: 260191 - DNA, 21 bp, Artificial sequence
  SiRNA target sequence
cacgcttattatacctgaacg

SEQ ID NO: 260192 - DNA, 21 bp, Artificial sequence
  SiRNA target sequence
acgcttattatacctgaacga

SEQ ID NO: 260193 - DNA, 21 bp, Artificial sequence
  SiRNA target sequence
cgcttattatacctgaacgag

SEQ ID NO: 260194 - DNA, 21 bp, Artificial sequence
  SiRNA target sequence
gcttattatacctgaacgaga

SEQ ID NO: 260195 - DNA, 21 bp, Artificial sequence
  SiRNA target sequence
cttattatacctgaacgagaa

SEQ ID NO: 260196 - DNA, 21 bp, Artificial sequence
  SiRNA target sequence
ttattatacctgaacgagaat

SEQ ID NO: 260197 - DNA, 21 bp, Artificial sequence
  SiRNA target sequence
tattatacctgaacgagaatt

SEQ ID NO: 260198 - DNA, 21 bp, Artificial sequence
  SiRNA target sequence
attatacctgaacgagaattg

SEQ ID NO: 260199 - DNA, 21 bp, Artificial sequence
  SiRNA target sequence
ttatacctgaacgagaattga

SEQ ID NO: 260200 - DNA, 21 bp, Artificial sequence
  SiRNA target sequence
tatacctgaacgagaattgaa

SEQ ID NO: 260201 - DNA, 21 bp, Artificial sequence
  SiRNA target sequence
atacctgaacgagaattgaat

SEQ ID NO: 260202 - DNA, 21 bp, Artificial sequence
  SiRNA target sequence
tacctgaacgagaattgaata

SEQ ID NO: 260203 - DNA, 21 bp, Artificial sequence
  SiRNA target sequence
acctgaacgagaattgaataa

SEQ ID NO: 260204 - DNA, 21 bp, Artificial sequence
  SiRNA target sequence
cctgaacgagaattgaataaa

SEQ ID NO: 260205 - DNA, 21 bp, Artificial sequence
  SiRNA target sequence
ctgaacgagaattgaataaat

SEQ ID NO: 260206 - DNA, 21 bp, Artificial sequence
  SiRNA target sequence
tgaacgagaattgaataaatt

SEQ ID NO: 260207 - DNA, 21 bp, Artificial sequence
  SiRNA target sequence
gaacgagaattgaataaattc

SEQ ID NO: 260208 - DNA, 21 bp, Artificial sequence
  SiRNA target sequence
aacgagaattgaataaattct

SEQ ID NO: 260209 - DNA, 21 bp, Artificial sequence
  SiRNA target sequence
acgagaattgaataaattctg

SEQ ID NO: 260210 - DNA, 21 bp, Artificial sequence
  SiRNA target sequence
cgagaattgaataaattctgg

SEQ ID NO: 260211 - DNA, 21 bp, Artificial sequence
  SiRNA target sequence
gagaattgaataaattctggg

SEQ ID NO: 260212 - DNA, 21 bp, Artificial sequence
  SiRNA target sequence
agaattgaataaattctggga

SEQ ID NO: 260213 - DNA, 21 bp, Artificial sequence
  SiRNA target sequence
gaattgaataaattctgggag

SEQ ID NO: 260214 - DNA, 21 bp, Artificial sequence
  SiRNA target sequence
aattgaataaattctgggagt

SEQ ID NO: 260215 - DNA, 21 bp, Artificial sequence
  SiRNA target sequence
attgaataaattctgggagtt

SEQ ID NO: 260216 - DNA, 21 bp, Artificial sequence
  SiRNA target sequence
ttgaataaattctgggagttg

SEQ ID NO: 260217 - DNA, 21 bp, Artificial sequence
  SiRNA target sequence
tgaataaattctgggagttgg

SEQ ID NO: 260218 - DNA, 21 bp, Artificial sequence
  SiRNA target sequence
gaataaattctgggagttgga

SEQ ID NO: 260219 - DNA, 21 bp, Artificial sequence
  SiRNA target sequence
aataaattctgggagttggat

SEQ ID NO: 260220 - DNA, 21 bp, Artificial sequence
  SiRNA target sequence
ataaattctgggagttggatg

SEQ ID NO: 260221 - DNA, 21 bp, Artificial sequence
  SiRNA target sequence
taaattctgggagttggatga

SEQ ID NO: 260222 - DNA, 21 bp, Artificial sequence
  SiRNA target sequence
aaattctgggagttggatgaa

SEQ ID NO: 260223 - DNA, 21 bp, Artificial sequence
  SiRNA target sequence
aattctgggagttggatgaaa

SEQ ID NO: 260224 - DNA, 21 bp, Artificial sequence
  SiRNA target sequence
attctgggagttggatgaaac

SEQ ID NO: 260225 - DNA, 21 bp, Artificial sequence
  SiRNA target sequence
ttctgggagttggatgaaact

SEQ ID NO: 260226 - DNA, 21 bp, Artificial sequence
  SiRNA target sequence
tctgggagttggatgaaactc

SEQ ID NO: 260227 - DNA, 21 bp, Artificial sequence
  SiRNA target sequence
ctgggagttggatgaaactct

SEQ ID NO: 260228 - DNA, 21 bp, Artificial sequence
  SiRNA target sequence
tgggagttggatgaaactctc

SEQ ID NO: 260229 - DNA, 21 bp, Artificial sequence
  SiRNA target sequence
gggagttggatgaaactctcg

SEQ ID NO: 260230 - DNA, 21 bp, Artificial sequence
  SiRNA target sequence
ggagttggatgaaactctcga

SEQ ID NO: 260231 - DNA, 21 bp, Artificial sequence
  SiRNA target sequence
gagttggatgaaactctcgat

SEQ ID NO: 260232 - DNA, 21 bp, Artificial sequence
  SiRNA target sequence
agttggatgaaactctcgatt

SEQ ID NO: 260233 - DNA, 21 bp, Artificial sequence
  SiRNA target sequence
gttggatgaaactctcgattt

SEQ ID NO: 260234 - DNA, 21 bp, Artificial sequence
  SiRNA target sequence
ttggatgaaactctcgattta

SEQ ID NO: 260235 - DNA, 21 bp, Artificial sequence
  SiRNA target sequence
tggatgaaactctcgatttac

SEQ ID NO: 260236 - DNA, 21 bp, Artificial sequence
  SiRNA target sequence
ggatgaaactctcgatttacg

SEQ ID NO: 260237 - DNA, 21 bp, Artificial sequence
  SiRNA target sequence
gatgaaactctcgatttacgt

SEQ ID NO: 260238 - DNA, 21 bp, Artificial sequence
  SiRNA target sequence
atgaaactctcgatttacgtg

SEQ ID NO: 260239 - DNA, 21 bp, Artificial sequence
  SiRNA target sequence
tgaaactctcgatttacgtgg

SEQ ID NO: 260240 - DNA, 21 bp, Artificial sequence
  SiRNA target sequence
gaaactctcgatttacgtgga

SEQ ID NO: 260241 - DNA, 21 bp, Artificial sequence
  SiRNA target sequence
aaactctcgatttacgtggaa

SEQ ID NO: 260242 - DNA, 21 bp, Artificial sequence
  SiRNA target sequence
aactctcgatttacgtggaat

SEQ ID NO: 260243 - DNA, 21 bp, Artificial sequence
  SiRNA target sequence
actctcgatttacgtggaatg

SEQ ID NO: 260244 - DNA, 21 bp, Artificial sequence
  SiRNA target sequence
ctctcgatttacgtggaatgc

SEQ ID NO: 260245 - DNA, 21 bp, Artificial sequence
  SiRNA target sequence
tctcgatttacgtggaatgcc

SEQ ID NO: 260246 - DNA, 21 bp, Artificial sequence
  SiRNA target sequence
ctcgatttacgtggaatgcct

SEQ ID NO: 260247 - DNA, 21 bp, Artificial sequence
  SiRNA target sequence
tcgatttacgtggaatgcctg

SEQ ID NO: 260248 - DNA, 21 bp, Artificial sequence
  SiRNA target sequence
cgatttacgtggaatgcctgt

SEQ ID NO: 260249 - DNA, 21 bp, Artificial sequence
  SiRNA target sequence
gatttacgtggaatgcctgta

SEQ ID NO: 260250 - DNA, 21 bp, Artificial sequence
  SiRNA target sequence
atttacgtggaatgcctgtaa

SEQ ID NO: 260251 - DNA, 21 bp, Artificial sequence
  SiRNA target sequence
tttacgtggaatgcctgtaaa

SEQ ID NO: 260252 - DNA, 21 bp, Artificial sequence
  SiRNA target sequence
ttacgtggaatgcctgtaaat

SEQ ID NO: 260253 - DNA, 21 bp, Artificial sequence
  SiRNA target sequence
tacgtggaatgcctgtaaatc

SEQ ID NO: 260254 - DNA, 21 bp, Artificial sequence
  SiRNA target sequence
acgtggaatgcctgtaaatca

SEQ ID NO: 260255 - DNA, 21 bp, Artificial sequence
  SiRNA target sequence
cgtggaatgcctgtaaatcaa

SEQ ID NO: 260256 - DNA, 21 bp, Artificial sequence
  SiRNA target sequence
gtggaatgcctgtaaatcaaa

SEQ ID NO: 260257 - DNA, 21 bp, Artificial sequence
  SiRNA target sequence
tggaatgcctgtaaatcaaat

SEQ ID NO: 260258 - DNA, 21 bp, Artificial sequence
  SiRNA target sequence
ggaatgcctgtaaatcaaata

SEQ ID NO: 260259 - DNA, 21 bp, Artificial sequence
  SiRNA target sequence
gaatgcctgtaaatcaaatag

SEQ ID NO: 260260 - DNA, 21 bp, Artificial sequence
  SiRNA target sequence
aatgcctgtaaatcaaataga

SEQ ID NO: 260261 - DNA, 21 bp, Artificial sequence
  SiRNA target sequence
atgcctgtaaatcaaatagag

SEQ ID NO: 260262 - DNA, 21 bp, Artificial sequence
  SiRNA target sequence
tgcctgtaaatcaaatagagg

SEQ ID NO: 260263 - DNA, 21 bp, Artificial sequence
  SiRNA target sequence
gcctgtaaatcaaatagagga

SEQ ID NO: 260264 - DNA, 21 bp, Artificial sequence
  SiRNA target sequence
cctgtaaatcaaatagaggaa

SEQ ID NO: 260265 - DNA, 21 bp, Artificial sequence
  SiRNA target sequence
ctgtaaatcaaatagaggaac

SEQ ID NO: 260266 - DNA, 21 bp, Artificial sequence
  SiRNA target sequence
tgtaaatcaaatagaggaaca

SEQ ID NO: 260267 - DNA, 21 bp, Artificial sequence
  SiRNA target sequence
gtaaatcaaatagaggaacat

SEQ ID NO: 260268 - DNA, 21 bp, Artificial sequence
  SiRNA target sequence
taaatcaaatagaggaacatc

SEQ ID NO: 260269 - DNA, 21 bp, Artificial sequence
  SiRNA target sequence
aaatcaaatagaggaacatct

SEQ ID NO: 260270 - DNA, 21 bp, Artificial sequence
  SiRNA target sequence
aatcaaatagaggaacatctc

SEQ ID NO: 260271 - DNA, 21 bp, Artificial sequence
  SiRNA target sequence
atcaaatagaggaacatctcg

SEQ ID NO: 260272 - DNA, 21 bp, Artificial sequence
  SiRNA target sequence
tcaaatagaggaacatctcgc

SEQ ID NO: 260273 - DNA, 21 bp, Artificial sequence
  SiRNA target sequence
caaatagaggaacatctcgct

SEQ ID NO: 260274 - DNA, 21 bp, Artificial sequence
  SiRNA target sequence
aaatagaggaacatctcgctc

SEQ ID NO: 260275 - DNA, 21 bp, Artificial sequence
  SiRNA target sequence
aatagaggaacatctcgctct

SEQ ID NO: 260276 - DNA, 21 bp, Artificial sequence
  SiRNA target sequence
atagaggaacatctcgctcta

SEQ ID NO: 260277 - DNA, 21 bp, Artificial sequence
  SiRNA target sequence
tagaggaacatctcgctctac

SEQ ID NO: 260278 - DNA, 21 bp, Artificial sequence
  SiRNA target sequence
agaggaacatctcgctctact

SEQ ID NO: 260279 - DNA, 21 bp, Artificial sequence
  SiRNA target sequence
gaggaacatctcgctctacta

SEQ ID NO: 260280 - DNA, 21 bp, Artificial sequence
  SiRNA target sequence
aggaacatctcgctctactac

SEQ ID NO: 260281 - DNA, 21 bp, Artificial sequence
  SiRNA target sequence
ggaacatctcgctctactact

SEQ ID NO: 260282 - DNA, 21 bp, Artificial sequence
  SiRNA target sequence
gaacatctcgctctactactg

SEQ ID NO: 260283 - DNA, 21 bp, Artificial sequence
  SiRNA target sequence
aacatctcgctctactactga

SEQ ID NO: 260284 - DNA, 21 bp, Artificial sequence
  SiRNA target sequence
acatctcgctctactactgaa

SEQ ID NO: 260285 - DNA, 21 bp, Artificial sequence
  SiRNA target sequence
catctcgctctactactgaag

SEQ ID NO: 260286 - DNA, 21 bp, Artificial sequence
  SiRNA target sequence
atctcgctctactactgaagc

SEQ ID NO: 260287 - DNA, 21 bp, Artificial sequence
  SiRNA target sequence
tctcgctctactactgaagcc

SEQ ID NO: 260288 - DNA, 21 bp, Artificial sequence
  SiRNA target sequence
ctcgctctactactgaagccg

SEQ ID NO: 260289 - DNA, 21 bp, Artificial sequence
  SiRNA target sequence
tcgctctactactgaagccgc

SEQ ID NO: 260290 - DNA, 21 bp, Artificial sequence
  SiRNA target sequence
cgctctactactgaagccgcg

SEQ ID NO: 260291 - DNA, 21 bp, Artificial sequence
  SiRNA target sequence
gctctactactgaagccgcgt

SEQ ID NO: 260292 - DNA, 21 bp, Artificial sequence
  SiRNA target sequence
ctctactactgaagccgcgtc

SEQ ID NO: 260293 - DNA, 21 bp, Artificial sequence
  SiRNA target sequence
tctactactgaagccgcgtca

SEQ ID NO: 260294 - DNA, 21 bp, Artificial sequence
  SiRNA target sequence
ctactactgaagccgcgtcat

SEQ ID NO: 260295 - DNA, 21 bp, Artificial sequence
  SiRNA target sequence
tactactgaagccgcgtcatc

SEQ ID NO: 260296 - DNA, 21 bp, Artificial sequence
  SiRNA target sequence
actactgaagccgcgtcatcg

SEQ ID NO: 260297 - DNA, 21 bp, Artificial sequence
  SiRNA target sequence
ctactgaagccgcgtcatcgc

SEQ ID NO: 260298 - DNA, 21 bp, Artificial sequence
  SiRNA target sequence
tactgaagccgcgtcatcgcg

SEQ ID NO: 260299 - DNA, 21 bp, Artificial sequence
  SiRNA target sequence
actgaagccgcgtcatcgcgt

SEQ ID NO: 260300 - DNA, 21 bp, Artificial sequence
  SiRNA target sequence
ctgaagccgcgtcatcgcgtg

SEQ ID NO: 260301 - DNA, 21 bp, Artificial sequence
  SiRNA target sequence
tgaagccgcgtcatcgcgtgg

SEQ ID NO: 260302 - DNA, 21 bp, Artificial sequence
  SiRNA target sequence
gaagccgcgtcatcgcgtggt

SEQ ID NO: 260303 - DNA, 21 bp, Artificial sequence
  SiRNA target sequence
aagccgcgtcatcgcgtggtt

SEQ ID NO: 260304 - DNA, 21 bp, Artificial sequence
  SiRNA target sequence
agccgcgtcatcgcgtggttt

SEQ ID NO: 260305 - DNA, 21 bp, Artificial sequence
  SiRNA target sequence
gccgcgtcatcgcgtggtttt

SEQ ID NO: 260306 - DNA, 21 bp, Artificial sequence
  SiRNA target sequence
ccgcgtcatcgcgtggtttta

SEQ ID NO: 260307 - DNA, 21 bp, Artificial sequence
  SiRNA target sequence
cgcgtcatcgcgtggttttag

SEQ ID NO: 260308 - DNA, 21 bp, Artificial sequence
  SiRNA target sequence
gcgtcatcgcgtggttttagt

SEQ ID NO: 260309 - DNA, 21 bp, Artificial sequence
  SiRNA target sequence
cgtcatcgcgtggttttagta

SEQ ID NO: 260310 - DNA, 21 bp, Artificial sequence
  SiRNA target sequence
gtcatcgcgtggttttagtac

SEQ ID NO: 260311 - DNA, 21 bp, Artificial sequence
  SiRNA target sequence
tcatcgcgtggttttagtacc

SEQ ID NO: 260312 - DNA, 21 bp, Artificial sequence
  SiRNA target sequence
catcgcgtggttttagtacct

SEQ ID NO: 260313 - DNA, 21 bp, Artificial sequence
  SiRNA target sequence
atcgcgtggttttagtaccta

SEQ ID NO: 260314 - DNA, 21 bp, Artificial sequence
  SiRNA target sequence
tcgcgtggttttagtacctaa

SEQ ID NO: 260315 - DNA, 21 bp, Artificial sequence
  SiRNA target sequence
cgcgtggttttagtacctaaa

SEQ ID NO: 260316 - DNA, 21 bp, Artificial sequence
  SiRNA target sequence
gcgtggttttagtacctaaag

SEQ ID NO: 260317 - DNA, 21 bp, Artificial sequence
  SiRNA target sequence
cgtggttttagtacctaaagc

SEQ ID NO: 260318 - DNA, 21 bp, Artificial sequence
  SiRNA target sequence
gtggttttagtacctaaagcc

SEQ ID NO: 260319 - DNA, 21 bp, Artificial sequence
  SiRNA target sequence
tggttttagtacctaaagcca

SEQ ID NO: 260320 - DNA, 21 bp, Artificial sequence
  SiRNA target sequence
ggttttagtacctaaagccac

SEQ ID NO: 260321 - DNA, 21 bp, Artificial sequence
  SiRNA target sequence
gttttagtacctaaagccact

SEQ ID NO: 260322 - DNA, 21 bp, Artificial sequence
  SiRNA target sequence
ttttagtacctaaagccacta

SEQ ID NO: 260323 - DNA, 21 bp, Artificial sequence
  SiRNA target sequence
tttagtacctaaagccactaa

SEQ ID NO: 260324 - DNA, 21 bp, Artificial sequence
  SiRNA target sequence
ttagtacctaaagccactaag

SEQ ID NO: 260325 - DNA, 21 bp, Artificial sequence
  SiRNA target sequence
tagtacctaaagccactaagt

SEQ ID NO: 260326 - DNA, 21 bp, Artificial sequence
  SiRNA target sequence
agtacctaaagccactaagta

SEQ ID NO: 260327 - DNA, 21 bp, Artificial sequence
  SiRNA target sequence
gtacctaaagccactaagtac

SEQ ID NO: 260328 - DNA, 21 bp, Artificial sequence
  SiRNA target sequence
tacctaaagccactaagtaca

SEQ ID NO: 260329 - DNA, 21 bp, Artificial sequence
  SiRNA target sequence
acctaaagccactaagtacat

SEQ ID NO: 260330 - DNA, 21 bp, Artificial sequence
  SiRNA target sequence
cctaaagccactaagtacata

SEQ ID NO: 260331 - DNA, 21 bp, Artificial sequence
  SiRNA target sequence
ctaaagccactaagtacataa

SEQ ID NO: 260332 - DNA, 21 bp, Artificial sequence
  SiRNA target sequence
taaagccactaagtacataat

SEQ ID NO: 260333 - DNA, 21 bp, Artificial sequence
  SiRNA target sequence
aaagccactaagtacataata

SEQ ID NO: 260334 - DNA, 21 bp, Artificial sequence
  SiRNA target sequence
aagccactaagtacataataa

SEQ ID NO: 260335 - DNA, 21 bp, Artificial sequence
  SiRNA target sequence
agccactaagtacataataag

SEQ ID NO: 260336 - DNA, 21 bp, Artificial sequence
  SiRNA target sequence
gccactaagtacataataagt

SEQ ID NO: 260337 - DNA, 21 bp, Artificial sequence
  SiRNA target sequence
ccactaagtacataataagtt

SEQ ID NO: 260338 - DNA, 21 bp, Artificial sequence
  SiRNA target sequence
cactaagtacataataagttt

SEQ ID NO: 260339 - DNA, 21 bp, Artificial sequence
  SiRNA target sequence
actaagtacataataagttta

SEQ ID NO: 260340 - DNA, 21 bp, Artificial sequence
  SiRNA target sequence
ctaagtacataataagtttag

SEQ ID NO: 260341 - DNA, 21 bp, Artificial sequence
  SiRNA target sequence
taagtacataataagtttagt

SEQ ID NO: 260342 - DNA, 21 bp, Artificial sequence
  SiRNA target sequence
aagtacataataagtttagtg

SEQ ID NO: 260343 - DNA, 21 bp, Artificial sequence
  SiRNA target sequence
agtacataataagtttagtgg

SEQ ID NO: 260344 - DNA, 21 bp, Artificial sequence
  SiRNA target sequence
gtacataataagtttagtgga

SEQ ID NO: 260345 - DNA, 21 bp, Artificial sequence
  SiRNA target sequence
tacataataagtttagtggat

SEQ ID NO: 260346 - DNA, 21 bp, Artificial sequence
  SiRNA target sequence
acataataagtttagtggata

SEQ ID NO: 260347 - DNA, 21 bp, Artificial sequence
  SiRNA target sequence
cataataagtttagtggataa

SEQ ID NO: 260348 - DNA, 21 bp, Artificial sequence
  SiRNA target sequence
ataataagtttagtggataat

SEQ ID NO: 260349 - DNA, 21 bp, Artificial sequence
  SiRNA target sequence
taataagtttagtggataatc

SEQ ID NO: 260350 - DNA, 21 bp, Artificial sequence
  SiRNA target sequence
aataagtttagtggataatca

SEQ ID NO: 260351 - DNA, 21 bp, Artificial sequence
  SiRNA target sequence
ataagtttagtggataatcat

SEQ ID NO: 260352 - DNA, 21 bp, Artificial sequence
  SiRNA target sequence
taagtttagtggataatcatg

SEQ ID NO: 260353 - DNA, 21 bp, Artificial sequence
  SiRNA target sequence
aagtttagtggataatcatgc

SEQ ID NO: 260354 - DNA, 21 bp, Artificial sequence
  SiRNA target sequence
agtttagtggataatcatgcc

SEQ ID NO: 260355 - DNA, 21 bp, Artificial sequence
  SiRNA target sequence
gtttagtggataatcatgcca

SEQ ID NO: 260356 - DNA, 21 bp, Artificial sequence
  SiRNA target sequence
tttagtggataatcatgccaa

SEQ ID NO: 260357 - DNA, 21 bp, Artificial sequence
  SiRNA target sequence
ttagtggataatcatgccaaa

SEQ ID NO: 260358 - DNA, 21 bp, Artificial sequence
  SiRNA target sequence
tagtggataatcatgccaaat

SEQ ID NO: 260359 - DNA, 21 bp, Artificial sequence
  SiRNA target sequence
agtggataatcatgccaaatt

SEQ ID NO: 260360 - DNA, 21 bp, Artificial sequence
  SiRNA target sequence
gtggataatcatgccaaattg

SEQ ID NO: 260361 - DNA, 21 bp, Artificial sequence
  SiRNA target sequence
tggataatcatgccaaattga

SEQ ID NO: 260362 - DNA, 21 bp, Artificial sequence
  SiRNA target sequence
ggataatcatgccaaattgac

SEQ ID NO: 260363 - DNA, 21 bp, Artificial sequence
  SiRNA target sequence
gataatcatgccaaattgaca

SEQ ID NO: 260364 - DNA, 21 bp, Artificial sequence
  SiRNA target sequence
ataatcatgccaaattgacag

SEQ ID NO: 260365 - DNA, 21 bp, Artificial sequence
  SiRNA target sequence
taatcatgccaaattgacaga

SEQ ID NO: 260366 - DNA, 21 bp, Artificial sequence
  SiRNA target sequence
aatcatgccaaattgacagat

SEQ ID NO: 260367 - DNA, 21 bp, Artificial sequence
  SiRNA target sequence
atcatgccaaattgacagata

SEQ ID NO: 260368 - DNA, 21 bp, Artificial sequence
  SiRNA target sequence
tcatgccaaattgacagataa

SEQ ID NO: 260369 - DNA, 21 bp, Artificial sequence
  SiRNA target sequence
catgccaaattgacagataag

SEQ ID NO: 260370 - DNA, 21 bp, Artificial sequence
  SiRNA target sequence
atgccaaattgacagataaga

SEQ ID NO: 260371 - DNA, 21 bp, Artificial sequence
  SiRNA target sequence
tgccaaattgacagataagat

SEQ ID NO: 260372 - DNA, 21 bp, Artificial sequence
  SiRNA target sequence
gccaaattgacagataagatt

SEQ ID NO: 260373 - DNA, 21 bp, Artificial sequence
  SiRNA target sequence
ccaaattgacagataagatta

SEQ ID NO: 260374 - DNA, 21 bp, Artificial sequence
  SiRNA target sequence
caaattgacagataagattat

SEQ ID NO: 260375 - DNA, 21 bp, Artificial sequence
  SiRNA target sequence
aaattgacagataagattatt

SEQ ID NO: 260376 - DNA, 21 bp, Artificial sequence
  SiRNA target sequence
aattgacagataagattattc

SEQ ID NO: 260377 - DNA, 21 bp, Artificial sequence
  SiRNA target sequence
attgacagataagattattct

SEQ ID NO: 260378 - DNA, 21 bp, Artificial sequence
  SiRNA target sequence
ttgacagataagattattctt

SEQ ID NO: 260379 - DNA, 21 bp, Artificial sequence
  SiRNA target sequence
tgacagataagattattctta

SEQ ID NO: 260380 - DNA, 21 bp, Artificial sequence
  SiRNA target sequence
gacagataagattattcttat

SEQ ID NO: 260381 - DNA, 21 bp, Artificial sequence
  SiRNA target sequence
acagataagattattcttata

SEQ ID NO: 260382 - DNA, 21 bp, Artificial sequence
  SiRNA target sequence
cagataagattattcttataa

SEQ ID NO: 260383 - DNA, 21 bp, Artificial sequence
  SiRNA target sequence
agataagattattcttataac

SEQ ID NO: 260384 - DNA, 21 bp, Artificial sequence
  SiRNA target sequence
gataagattattcttataact

SEQ ID NO: 260385 - DNA, 21 bp, Artificial sequence
  SiRNA target sequence
ataagattattcttataactg

SEQ ID NO: 260386 - DNA, 21 bp, Artificial sequence
  SiRNA target sequence
taagattattcttataactgc

SEQ ID NO: 260387 - DNA, 21 bp, Artificial sequence
  SiRNA target sequence
aagattattcttataactgct

SEQ ID NO: 260388 - DNA, 21 bp, Artificial sequence
  SiRNA target sequence
agattattcttataactgcta

SEQ ID NO: 260389 - DNA, 21 bp, Artificial sequence
  SiRNA target sequence
gattattcttataactgctaa

SEQ ID NO: 260390 - DNA, 21 bp, Artificial sequence
  SiRNA target sequence
attattcttataactgctaat

SEQ ID NO: 260391 - DNA, 21 bp, Artificial sequence
  SiRNA target sequence
ttattcttataactgctaata

SEQ ID NO: 260392 - DNA, 21 bp, Artificial sequence
  SiRNA target sequence
tattcttataactgctaatag

SEQ ID NO: 260393 - DNA, 21 bp, Artificial sequence
  SiRNA target sequence
attcttataactgctaatagg

SEQ ID NO: 260394 - DNA, 21 bp, Artificial sequence
  SiRNA target sequence
ttcttataactgctaataggt

SEQ ID NO: 260395 - DNA, 21 bp, Artificial sequence
  SiRNA target sequence
tcttataactgctaataggta

SEQ ID NO: 260396 - DNA, 21 bp, Artificial sequence
  SiRNA target sequence
cttataactgctaataggtat

SEQ ID NO: 260397 - DNA, 21 bp, Artificial sequence
  SiRNA target sequence
ttataactgctaataggtatg

SEQ ID NO: 260398 - DNA, 21 bp, Artificial sequence
  SiRNA target sequence
tataactgctaataggtatgt

SEQ ID NO: 260399 - DNA, 21 bp, Artificial sequence
  SiRNA target sequence
ataactgctaataggtatgtg

SEQ ID NO: 260400 - DNA, 21 bp, Artificial sequence
  SiRNA target sequence
taactgctaataggtatgtgt

SEQ ID NO: 260401 - DNA, 21 bp, Artificial sequence
  SiRNA target sequence
aactgctaataggtatgtgtt

SEQ ID NO: 260402 - DNA, 21 bp, Artificial sequence
  SiRNA target sequence
actgctaataggtatgtgttt

SEQ ID NO: 260403 - DNA, 21 bp, Artificial sequence
  SiRNA target sequence
ctgctaataggtatgtgtttt

SEQ ID NO: 260404 - DNA, 21 bp, Artificial sequence
  SiRNA target sequence
tgctaataggtatgtgtttta

SEQ ID NO: 260405 - DNA, 21 bp, Artificial sequence
  SiRNA target sequence
gctaataggtatgtgttttat

SEQ ID NO: 260406 - DNA, 21 bp, Artificial sequence
  SiRNA target sequence
ctaataggtatgtgttttata

SEQ ID NO: 260407 - DNA, 21 bp, Artificial sequence
  SiRNA target sequence
taataggtatgtgttttataa

SEQ ID NO: 260408 - DNA, 21 bp, Artificial sequence
  SiRNA target sequence
aataggtatgtgttttataaa

SEQ ID NO: 260409 - DNA, 21 bp, Artificial sequence
  SiRNA target sequence
ataggtatgtgttttataaaa

SEQ ID NO: 260410 - DNA, 21 bp, Artificial sequence
  SiRNA target sequence
taggtatgtgttttataaaaa

SEQ ID NO: 260411 - DNA, 21 bp, Artificial sequence
  SiRNA target sequence
aggtatgtgttttataaaaat

SEQ ID NO: 260412 - DNA, 21 bp, Artificial sequence
  SiRNA target sequence
ggtatgtgttttataaaaatc

SEQ ID NO: 260413 - DNA, 21 bp, Artificial sequence
  SiRNA target sequence
gtatgtgttttataaaaatca

SEQ ID NO: 260414 - DNA, 21 bp, Artificial sequence
  SiRNA target sequence
tatgtgttttataaaaatcaa

SEQ ID NO: 260415 - DNA, 21 bp, Artificial sequence
  SiRNA target sequence
atgtgttttataaaaatcaaa

SEQ ID NO: 260416 - DNA, 21 bp, Artificial sequence
  SiRNA target sequence
tgtgttttataaaaatcaaaa

SEQ ID NO: 260417 - DNA, 21 bp, Artificial sequence
  SiRNA target sequence
gtgttttataaaaatcaaaat

SEQ ID NO: 260418 - DNA, 21 bp, Artificial sequence
  SiRNA target sequence
tgttttataaaaatcaaaatt

SEQ ID NO: 260419 - DNA, 21 bp, Artificial sequence
  SiRNA target sequence
gttttataaaaatcaaaatta

SEQ ID NO: 260420 - DNA, 21 bp, Artificial sequence
  SiRNA target sequence
ttttataaaaatcaaaattat

SEQ ID NO: 260421 - DNA, 21 bp, Artificial sequence
  SiRNA target sequence
tttataaaaatcaaaattatg

SEQ ID NO: 260422 - DNA, 21 bp, Artificial sequence
  SiRNA target sequence
ttataaaaatcaaaattatga

SEQ ID NO: 260423 - DNA, 21 bp, Artificial sequence
  SiRNA target sequence
tataaaaatcaaaattatgaa

SEQ ID NO: 260424 - DNA, 21 bp, Artificial sequence
  SiRNA target sequence
ataaaaatcaaaattatgaat

SEQ ID NO: 260425 - DNA, 21 bp, Artificial sequence
  SiRNA target sequence
taaaaatcaaaattatgaatt

SEQ ID NO: 260426 - DNA, 21 bp, Artificial sequence
  SiRNA target sequence
aaaaatcaaaattatgaatta

SEQ ID NO: 260427 - DNA, 21 bp, Artificial sequence
  SiRNA target sequence
aaaatcaaaattatgaattag

SEQ ID NO: 260428 - DNA, 21 bp, Artificial sequence
  SiRNA target sequence
aaatcaaaattatgaattagt

SEQ ID NO: 260429 - DNA, 21 bp, Artificial sequence
  SiRNA target sequence
aatcaaaattatgaattagtg

SEQ ID NO: 260430 - DNA, 21 bp, Artificial sequence
  SiRNA target sequence
atcaaaattatgaattagtgt

SEQ ID NO: 260431 - DNA, 21 bp, Artificial sequence
  SiRNA target sequence
tcaaaattatgaattagtgtt

SEQ ID NO: 260432 - DNA, 21 bp, Artificial sequence
  SiRNA target sequence
caaaattatgaattagtgttt

SEQ ID NO: 260433 - DNA, 21 bp, Artificial sequence
  SiRNA target sequence
aaaattatgaattagtgtttg

SEQ ID NO: 260434 - DNA, 21 bp, Artificial sequence
  SiRNA target sequence
aaattatgaattagtgtttgg

SEQ ID NO: 260435 - DNA, 21 bp, Artificial sequence
  SiRNA target sequence
aattatgaattagtgtttgga

SEQ ID NO: 260436 - DNA, 21 bp, Artificial sequence
  SiRNA target sequence
attatgaattagtgtttggag

SEQ ID NO: 260437 - DNA, 21 bp, Artificial sequence
  SiRNA target sequence
ttatgaattagtgtttggaga

SEQ ID NO: 260438 - DNA, 21 bp, Artificial sequence
  SiRNA target sequence
tatgaattagtgtttggagaa

SEQ ID NO: 260439 - DNA, 21 bp, Artificial sequence
  SiRNA target sequence
atgaattagtgtttggagaat

SEQ ID NO: 260440 - DNA, 21 bp, Artificial sequence
  SiRNA target sequence
tgaattagtgtttggagaatt

SEQ ID NO: 260441 - DNA, 21 bp, Artificial sequence
  SiRNA target sequence
gaattagtgtttggagaatta

SEQ ID NO: 260442 - DNA, 21 bp, Artificial sequence
  SiRNA target sequence
aattagtgtttggagaattaa

SEQ ID NO: 260443 - DNA, 21 bp, Artificial sequence
  SiRNA target sequence
attagtgtttggagaattaaa

SEQ ID NO: 260444 - DNA, 21 bp, Artificial sequence
  SiRNA target sequence
ttagtgtttggagaattaaat

SEQ ID NO: 260445 - DNA, 21 bp, Artificial sequence
  SiRNA target sequence
tagtgtttggagaattaaatc

SEQ ID NO: 260446 - DNA, 21 bp, Artificial sequence
  SiRNA target sequence
agtgtttggagaattaaatca

SEQ ID NO: 260447 - DNA, 21 bp, Artificial sequence
  SiRNA target sequence
gtgtttggagaattaaatcaa

SEQ ID NO: 260448 - DNA, 21 bp, Artificial sequence
  SiRNA target sequence
tgtttggagaattaaatcaat

SEQ ID NO: 260449 - DNA, 21 bp, Artificial sequence
  SiRNA target sequence
gtttggagaattaaatcaatt

SEQ ID NO: 260450 - DNA, 21 bp, Artificial sequence
  SiRNA target sequence
tttggagaattaaatcaattt

SEQ ID NO: 260451 - DNA, 21 bp, Artificial sequence
  SiRNA target sequence
ttggagaattaaatcaatttt

SEQ ID NO: 260452 - DNA, 21 bp, Artificial sequence
  SiRNA target sequence
tggagaattaaatcaattttt

SEQ ID NO: 260453 - DNA, 21 bp, Artificial sequence
  SiRNA target sequence
ggagaattaaatcaatttttc

SEQ ID NO: 260454 - DNA, 21 bp, Artificial sequence
  SiRNA target sequence
gagaattaaatcaatttttcg

SEQ ID NO: 260455 - DNA, 21 bp, Artificial sequence
  SiRNA target sequence
agaattaaatcaatttttcga

SEQ ID NO: 260456 - DNA, 21 bp, Artificial sequence
  SiRNA target sequence
gaattaaatcaatttttcgaa

SEQ ID NO: 260457 - DNA, 21 bp, Artificial sequence
  SiRNA target sequence
aattaaatcaatttttcgaaa

SEQ ID NO: 260458 - DNA, 21 bp, Artificial sequence
  SiRNA target sequence
attaaatcaatttttcgaaaa

SEQ ID NO: 260459 - DNA, 21 bp, Artificial sequence
  SiRNA target sequence
ttaaatcaatttttcgaaaaa

SEQ ID NO: 260460 - DNA, 21 bp, Artificial sequence
  SiRNA target sequence
taaatcaatttttcgaaaaag

SEQ ID NO: 260461 - DNA, 21 bp, Artificial sequence
  SiRNA target sequence
aaatcaatttttcgaaaaaga

SEQ ID NO: 260462 - DNA, 21 bp, Artificial sequence
  SiRNA target sequence
aatcaatttttcgaaaaagac

SEQ ID NO: 260463 - DNA, 21 bp, Artificial sequence
  SiRNA target sequence
atcaatttttcgaaaaagacc

SEQ ID NO: 260464 - DNA, 21 bp, Artificial sequence
  SiRNA target sequence
tcaatttttcgaaaaagaccc

SEQ ID NO: 260465 - DNA, 21 bp, Artificial sequence
  SiRNA target sequence
caatttttcgaaaaagaccca

SEQ ID NO: 260466 - DNA, 21 bp, Artificial sequence
  SiRNA target sequence
aatttttcgaaaaagacccag

SEQ ID NO: 260467 - DNA, 21 bp, Artificial sequence
  SiRNA target sequence
atttttcgaaaaagacccaga

SEQ ID NO: 260468 - DNA, 21 bp, Artificial sequence
  SiRNA target sequence
tttttcgaaaaagacccagaa

SEQ ID NO: 260469 - DNA, 21 bp, Artificial sequence
  SiRNA target sequence
ttttcgaaaaagacccagaat

SEQ ID NO: 260470 - DNA, 21 bp, Artificial sequence
  SiRNA target sequence
tttcgaaaaagacccagaatc

SEQ ID NO: 260471 - DNA, 21 bp, Artificial sequence
  SiRNA target sequence
ttcgaaaaagacccagaatcc

SEQ ID NO: 260472 - DNA, 21 bp, Artificial sequence
  SiRNA target sequence
tcgaaaaagacccagaatccc

SEQ ID NO: 260473 - DNA, 21 bp, Artificial sequence
  SiRNA target sequence
cgaaaaagacccagaatccct

SEQ ID NO: 260474 - DNA, 21 bp, Artificial sequence
  SiRNA target sequence
gaaaaagacccagaatccctt

SEQ ID NO: 260475 - DNA, 21 bp, Artificial sequence
  SiRNA target sequence
aaaaagacccagaatcccttg

SEQ ID NO: 260476 - DNA, 21 bp, Artificial sequence
  SiRNA target sequence
aaaagacccagaatcccttgt

SEQ ID NO: 260477 - DNA, 21 bp, Artificial sequence
  SiRNA target sequence
aaagacccagaatcccttgtg

SEQ ID NO: 260478 - DNA, 21 bp, Artificial sequence
  SiRNA target sequence
aagacccagaatcccttgtga

SEQ ID NO: 260479 - DNA, 21 bp, Artificial sequence
  SiRNA target sequence
agacccagaatcccttgtgaa

SEQ ID NO: 260480 - DNA, 21 bp, Artificial sequence
  SiRNA target sequence
gacccagaatcccttgtgaat

SEQ ID NO: 260481 - DNA, 21 bp, Artificial sequence
  SiRNA target sequence
acccagaatcccttgtgaata

SEQ ID NO: 260482 - DNA, 21 bp, Artificial sequence
  SiRNA target sequence
cccagaatcccttgtgaatac

SEQ ID NO: 260483 - DNA, 21 bp, Artificial sequence
  SiRNA target sequence
ccagaatcccttgtgaatact

SEQ ID NO: 260484 - DNA, 21 bp, Artificial sequence
  SiRNA target sequence
cagaatcccttgtgaatactc

SEQ ID NO: 260485 - DNA, 21 bp, Artificial sequence
  SiRNA target sequence
agaatcccttgtgaatactcc

SEQ ID NO: 260486 - DNA, 21 bp, Artificial sequence
  SiRNA target sequence
gaatcccttgtgaatactcct

SEQ ID NO: 260487 - DNA, 21 bp, Artificial sequence
  SiRNA target sequence
aatcccttgtgaatactccta

SEQ ID NO: 260488 - DNA, 21 bp, Artificial sequence
  SiRNA target sequence
atcccttgtgaatactcctaa

SEQ ID NO: 260489 - DNA, 21 bp, Artificial sequence
  SiRNA target sequence
tcccttgtgaatactcctaag

SEQ ID NO: 260490 - DNA, 21 bp, Artificial sequence
  SiRNA target sequence
cccttgtgaatactcctaagg

SEQ ID NO: 260491 - DNA, 21 bp, Artificial sequence
  SiRNA target sequence
ccttgtgaatactcctaaggt

SEQ ID NO: 260492 - DNA, 21 bp, Artificial sequence
  SiRNA target sequence
cttgtgaatactcctaaggtt

SEQ ID NO: 260493 - DNA, 21 bp, Artificial sequence
  SiRNA target sequence
ttgtgaatactcctaaggttg

SEQ ID NO: 260494 - DNA, 21 bp, Artificial sequence
  SiRNA target sequence
tgtgaatactcctaaggttga

SEQ ID NO: 260495 - DNA, 21 bp, Artificial sequence
  SiRNA target sequence
gtgaatactcctaaggttgaa

SEQ ID NO: 260496 - DNA, 21 bp, Artificial sequence
  SiRNA target sequence
tgaatactcctaaggttgaag

SEQ ID NO: 260497 - DNA, 21 bp, Artificial sequence
  SiRNA target sequence
gaatactcctaaggttgaagc

SEQ ID NO: 260498 - DNA, 21 bp, Artificial sequence
  SiRNA target sequence
aatactcctaaggttgaagct

SEQ ID NO: 260499 - DNA, 21 bp, Artificial sequence
  SiRNA target sequence
atactcctaaggttgaagctt

SEQ ID NO: 260500 - DNA, 21 bp, Artificial sequence
  SiRNA target sequence
tactcctaaggttgaagcttt

SEQ ID NO: 260501 - DNA, 21 bp, Artificial sequence
  SiRNA target sequence
actcctaaggttgaagctttt

SEQ ID NO: 260502 - DNA, 21 bp, Artificial sequence
  SiRNA target sequence
ctcctaaggttgaagcttttg

SEQ ID NO: 260503 - DNA, 21 bp, Artificial sequence
  SiRNA target sequence
tcctaaggttgaagcttttgc

SEQ ID NO: 260504 - DNA, 21 bp, Artificial sequence
  SiRNA target sequence
cctaaggttgaagcttttgct

SEQ ID NO: 260505 - DNA, 21 bp, Artificial sequence
  SiRNA target sequence
ctaaggttgaagcttttgctt

SEQ ID NO: 260506 - DNA, 21 bp, Artificial sequence
  SiRNA target sequence
taaggttgaagcttttgcttc

SEQ ID NO: 260507 - DNA, 21 bp, Artificial sequence
  SiRNA target sequence
aaggttgaagcttttgcttcc

SEQ ID NO: 260508 - DNA, 21 bp, Artificial sequence
  SiRNA target sequence
aggttgaagcttttgcttccg

SEQ ID NO: 260509 - DNA, 21 bp, Artificial sequence
  SiRNA target sequence
ggttgaagcttttgcttccgc

SEQ ID NO: 260510 - DNA, 21 bp, Artificial sequence
  SiRNA target sequence
gttgaagcttttgcttccgcc

SEQ ID NO: 260511 - DNA, 21 bp, Artificial sequence
  SiRNA target sequence
ttgaagcttttgcttccgccg

SEQ ID NO: 260512 - DNA, 21 bp, Artificial sequence
  SiRNA target sequence
tgaagcttttgcttccgccga

SEQ ID NO: 260513 - DNA, 21 bp, Artificial sequence
  SiRNA target sequence
gaagcttttgcttccgccgat

SEQ ID NO: 260514 - DNA, 21 bp, Artificial sequence
  SiRNA target sequence
aagcttttgcttccgccgatt

SEQ ID NO: 260515 - DNA, 21 bp, Artificial sequence
  SiRNA target sequence
agcttttgcttccgccgattt

SEQ ID NO: 260516 - DNA, 21 bp, Artificial sequence
  SiRNA target sequence
gcttttgcttccgccgatttg

SEQ ID NO: 260517 - DNA, 21 bp, Artificial sequence
  SiRNA target sequence
cttttgcttccgccgatttga

SEQ ID NO: 260518 - DNA, 21 bp, Artificial sequence
  SiRNA target sequence
ttttgcttccgccgatttgag

SEQ ID NO: 260519 - DNA, 21 bp, Artificial sequence
  SiRNA target sequence
tttgcttccgccgatttgagt

SEQ ID NO: 260520 - DNA, 21 bp, Artificial sequence
  SiRNA target sequence
ttgcttccgccgatttgagta

SEQ ID NO: 260521 - DNA, 21 bp, Artificial sequence
  SiRNA target sequence
tgcttccgccgatttgagtac

SEQ ID NO: 260522 - DNA, 21 bp, Artificial sequence
  SiRNA target sequence
gcttccgccgatttgagtact

SEQ ID NO: 260523 - DNA, 21 bp, Artificial sequence
  SiRNA target sequence
cttccgccgatttgagtactt

SEQ ID NO: 260524 - DNA, 21 bp, Artificial sequence
  SiRNA target sequence
ttccgccgatttgagtactta

SEQ ID NO: 260525 - DNA, 21 bp, Artificial sequence
  SiRNA target sequence
tccgccgatttgagtacttac

SEQ ID NO: 260526 - DNA, 21 bp, Artificial sequence
  SiRNA target sequence
ccgccgatttgagtacttaca

SEQ ID NO: 260527 - DNA, 21 bp, Artificial sequence
  SiRNA target sequence
cgccgatttgagtacttacaa

SEQ ID NO: 260528 - DNA, 21 bp, Artificial sequence
  SiRNA target sequence
gccgatttgagtacttacaaa

SEQ ID NO: 260529 - DNA, 21 bp, Artificial sequence
  SiRNA target sequence
ccgatttgagtacttacaaaa

SEQ ID NO: 260530 - DNA, 21 bp, Artificial sequence
  SiRNA target sequence
cgatttgagtacttacaaaaa

SEQ ID NO: 260531 - DNA, 21 bp, Artificial sequence
  SiRNA target sequence
gatttgagtacttacaaaaat

SEQ ID NO: 260532 - DNA, 21 bp, Artificial sequence
  SiRNA target sequence
atttgagtacttacaaaaata

SEQ ID NO: 260533 - DNA, 21 bp, Artificial sequence
  SiRNA target sequence
tttgagtacttacaaaaatag

SEQ ID NO: 260534 - DNA, 21 bp, Artificial sequence
  SiRNA target sequence
ttgagtacttacaaaaatagg

SEQ ID NO: 260535 - DNA, 21 bp, Artificial sequence
  SiRNA target sequence
tgagtacttacaaaaatagga

SEQ ID NO: 260536 - DNA, 21 bp, Artificial sequence
  SiRNA target sequence
gagtacttacaaaaataggac

SEQ ID NO: 260537 - DNA, 21 bp, Artificial sequence
  SiRNA target sequence
agtacttacaaaaataggacc

SEQ ID NO: 260538 - DNA, 21 bp, Artificial sequence
  SiRNA target sequence
gtacttacaaaaataggaccc

SEQ ID NO: 260539 - DNA, 21 bp, Artificial sequence
  SiRNA target sequence
tacttacaaaaataggacccc

SEQ ID NO: 260540 - DNA, 21 bp, Artificial sequence
  SiRNA target sequence
acttacaaaaataggaccccg

SEQ ID NO: 260541 - DNA, 21 bp, Artificial sequence
  SiRNA target sequence
cttacaaaaataggaccccga

SEQ ID NO: 260542 - DNA, 21 bp, Artificial sequence
  SiRNA target sequence
ttacaaaaataggaccccgat

SEQ ID NO: 260543 - DNA, 21 bp, Artificial sequence
  SiRNA target sequence
tacaaaaataggaccccgatt

SEQ ID NO: 260544 - DNA, 21 bp, Artificial sequence
  SiRNA target sequence
acaaaaataggaccccgattg

SEQ ID NO: 260545 - DNA, 21 bp, Artificial sequence
  SiRNA target sequence
caaaaataggaccccgattgt

SEQ ID NO: 260546 - DNA, 21 bp, Artificial sequence
  SiRNA target sequence
aaaaataggaccccgattgtg

SEQ ID NO: 260547 - DNA, 21 bp, Artificial sequence
  SiRNA target sequence
aaaataggaccccgattgtga

SEQ ID NO: 260548 - DNA, 21 bp, Artificial sequence
  SiRNA target sequence
aaataggaccccgattgtgat

SEQ ID NO: 260549 - DNA, 21 bp, Artificial sequence
  SiRNA target sequence
aataggaccccgattgtgatc

SEQ ID NO: 260550 - DNA, 21 bp, Artificial sequence
  SiRNA target sequence
ataggaccccgattgtgatcg

SEQ ID NO: 260551 - DNA, 21 bp, Artificial sequence
  SiRNA target sequence
taggaccccgattgtgatcga

SEQ ID NO: 260552 - DNA, 21 bp, Artificial sequence
  SiRNA target sequence
aggaccccgattgtgatcgaa

SEQ ID NO: 260553 - DNA, 21 bp, Artificial sequence
  SiRNA target sequence
ggaccccgattgtgatcgaag

SEQ ID NO: 260554 - DNA, 21 bp, Artificial sequence
  SiRNA target sequence
gaccccgattgtgatcgaagc

SEQ ID NO: 260555 - DNA, 21 bp, Artificial sequence
  SiRNA target sequence
accccgattgtgatcgaagca

SEQ ID NO: 260556 - DNA, 21 bp, Artificial sequence
  SiRNA target sequence
ccccgattgtgatcgaagcac

SEQ ID NO: 260557 - DNA, 21 bp, Artificial sequence
  SiRNA target sequence
cccgattgtgatcgaagcaca

SEQ ID NO: 260558 - DNA, 21 bp, Artificial sequence
  SiRNA target sequence
ccgattgtgatcgaagcacag

SEQ ID NO: 260559 - DNA, 21 bp, Artificial sequence
  SiRNA target sequence
cgattgtgatcgaagcacaga

SEQ ID NO: 260560 - DNA, 21 bp, Artificial sequence
  SiRNA target sequence
gattgtgatcgaagcacagac

SEQ ID NO: 260561 - DNA, 21 bp, Artificial sequence
  SiRNA target sequence
attgtgatcgaagcacagaca

SEQ ID NO: 260562 - DNA, 21 bp, Artificial sequence
  SiRNA target sequence
ttgtgatcgaagcacagacat

SEQ ID NO: 260563 - DNA, 21 bp, Artificial sequence
  SiRNA target sequence
tgtgatcgaagcacagacatc

SEQ ID NO: 260564 - DNA, 21 bp, Artificial sequence
  SiRNA target sequence
gtgatcgaagcacagacatct

SEQ ID NO: 260565 - DNA, 21 bp, Artificial sequence
  SiRNA target sequence
tgatcgaagcacagacatctg

SEQ ID NO: 260566 - DNA, 21 bp, Artificial sequence
  SiRNA target sequence
gatcgaagcacagacatctgg

SEQ ID NO: 260567 - DNA, 21 bp, Artificial sequence
  SiRNA target sequence
atcgaagcacagacatctgga

SEQ ID NO: 260568 - DNA, 21 bp, Artificial sequence
  SiRNA target sequence
tcgaagcacagacatctggag

SEQ ID NO: 260569 - DNA, 21 bp, Artificial sequence
  SiRNA target sequence
cgaagcacagacatctggaga

SEQ ID NO: 260570 - DNA, 21 bp, Artificial sequence
  SiRNA target sequence
gaagcacagacatctggagat

SEQ ID NO: 260571 - DNA, 21 bp, Artificial sequence
  SiRNA target sequence
aagcacagacatctggagata

SEQ ID NO: 260572 - DNA, 21 bp, Artificial sequence
  SiRNA target sequence
agcacagacatctggagataa

SEQ ID NO: 260573 - DNA, 21 bp, Artificial sequence
  SiRNA target sequence
gcacagacatctggagataat

SEQ ID NO: 260574 - DNA, 21 bp, Artificial sequence
  SiRNA target sequence
cacagacatctggagataatg

SEQ ID NO: 260575 - DNA, 21 bp, Artificial sequence
  SiRNA target sequence
acagacatctggagataatgt

SEQ ID NO: 260576 - DNA, 21 bp, Artificial sequence
  SiRNA target sequence
cagacatctggagataatgtg

SEQ ID NO: 260577 - DNA, 21 bp, Artificial sequence
  SiRNA target sequence
agacatctggagataatgtga

SEQ ID NO: 260578 - DNA, 21 bp, Artificial sequence
  SiRNA target sequence
gacatctggagataatgtgac

SEQ ID NO: 260579 - DNA, 21 bp, Artificial sequence
  SiRNA target sequence
acatctggagataatgtgact

SEQ ID NO: 260580 - DNA, 21 bp, Artificial sequence
  SiRNA target sequence
catctggagataatgtgactc

SEQ ID NO: 260581 - DNA, 21 bp, Artificial sequence
  SiRNA target sequence
atctggagataatgtgactct

SEQ ID NO: 260582 - DNA, 21 bp, Artificial sequence
  SiRNA target sequence
tctggagataatgtgactctt

SEQ ID NO: 260583 - DNA, 21 bp, Artificial sequence
  SiRNA target sequence
ctggagataatgtgactctta

SEQ ID NO: 260584 - DNA, 21 bp, Artificial sequence
  SiRNA target sequence
tggagataatgtgactcttaa

SEQ ID NO: 260585 - DNA, 21 bp, Artificial sequence
  SiRNA target sequence
ggagataatgtgactcttaaa

SEQ ID NO: 260586 - DNA, 21 bp, Artificial sequence
  SiRNA target sequence
gagataatgtgactcttaaac

SEQ ID NO: 260587 - DNA, 21 bp, Artificial sequence
  SiRNA target sequence
agataatgtgactcttaaaca

SEQ ID NO: 260588 - DNA, 21 bp, Artificial sequence
  SiRNA target sequence
gataatgtgactcttaaacaa

SEQ ID NO: 260589 - DNA, 21 bp, Artificial sequence
  SiRNA target sequence
ataatgtgactcttaaacaac

SEQ ID NO: 260590 - DNA, 21 bp, Artificial sequence
  SiRNA target sequence
taatgtgactcttaaacaaca

SEQ ID NO: 260591 - DNA, 21 bp, Artificial sequence
  SiRNA target sequence
aatgtgactcttaaacaacaa

SEQ ID NO: 260592 - DNA, 21 bp, Artificial sequence
  SiRNA target sequence
atgtgactcttaaacaacaaa

SEQ ID NO: 260593 - DNA, 21 bp, Artificial sequence
  SiRNA target sequence
tgtgactcttaaacaacaaaa

SEQ ID NO: 260594 - DNA, 21 bp, Artificial sequence
  SiRNA target sequence
gtgactcttaaacaacaaaag

SEQ ID NO: 260595 - DNA, 21 bp, Artificial sequence
  SiRNA target sequence
tgactcttaaacaacaaaagg

SEQ ID NO: 260596 - DNA, 21 bp, Artificial sequence
  SiRNA target sequence
gactcttaaacaacaaaaggt

SEQ ID NO: 260597 - DNA, 21 bp, Artificial sequence
  SiRNA target sequence
actcttaaacaacaaaaggtt

SEQ ID NO: 260598 - DNA, 21 bp, Artificial sequence
  SiRNA target sequence
ctcttaaacaacaaaaggtta

SEQ ID NO: 260599 - DNA, 21 bp, Artificial sequence
  SiRNA target sequence
tcttaaacaacaaaaggttaa

SEQ ID NO: 260600 - DNA, 21 bp, Artificial sequence
  SiRNA target sequence
cttaaacaacaaaaggttaaa

SEQ ID NO: 260601 - DNA, 21 bp, Artificial sequence
  SiRNA target sequence
ttaaacaacaaaaggttaaag

SEQ ID NO: 260602 - DNA, 21 bp, Artificial sequence
  SiRNA target sequence
taaacaacaaaaggttaaagt

SEQ ID NO: 260603 - DNA, 21 bp, Artificial sequence
  SiRNA target sequence
aaacaacaaaaggttaaagta

SEQ ID NO: 260604 - DNA, 21 bp, Artificial sequence
  SiRNA target sequence
aacaacaaaaggttaaagtaa

SEQ ID NO: 260605 - DNA, 21 bp, Artificial sequence
  SiRNA target sequence
acaacaaaaggttaaagtaat

SEQ ID NO: 260606 - DNA, 21 bp, Artificial sequence
  SiRNA target sequence
caacaaaaggttaaagtaatt

SEQ ID NO: 260607 - DNA, 21 bp, Artificial sequence
  SiRNA target sequence
aacaaaaggttaaagtaattg

SEQ ID NO: 260608 - DNA, 21 bp, Artificial sequence
  SiRNA target sequence
acaaaaggttaaagtaattga

SEQ ID NO: 260609 - DNA, 21 bp, Artificial sequence
  SiRNA target sequence
caaaaggttaaagtaattgaa

SEQ ID NO: 260610 - DNA, 21 bp, Artificial sequence
  SiRNA target sequence
aaaaggttaaagtaattgaag

SEQ ID NO: 260611 - DNA, 21 bp, Artificial sequence
  SiRNA target sequence
aaaggttaaagtaattgaagc

SEQ ID NO: 260612 - DNA, 21 bp, Artificial sequence
  SiRNA target sequence
aaggttaaagtaattgaagca

SEQ ID NO: 260613 - DNA, 21 bp, Artificial sequence
  SiRNA target sequence
aggttaaagtaattgaagcaa

SEQ ID NO: 260614 - DNA, 21 bp, Artificial sequence
  SiRNA target sequence
ggttaaagtaattgaagcaaa

SEQ ID NO: 260615 - DNA, 21 bp, Artificial sequence
  SiRNA target sequence
gttaaagtaattgaagcaaaa

SEQ ID NO: 260616 - DNA, 21 bp, Artificial sequence
  SiRNA target sequence
ttaaagtaattgaagcaaaaa

SEQ ID NO: 260617 - DNA, 21 bp, Artificial sequence
  SiRNA target sequence
taaagtaattgaagcaaaaac

SEQ ID NO: 260618 - DNA, 21 bp, Artificial sequence
  SiRNA target sequence
aaagtaattgaagcaaaaaca

SEQ ID NO: 260619 - DNA, 21 bp, Artificial sequence
  SiRNA target sequence
aagtaattgaagcaaaaacat

SEQ ID NO: 260620 - DNA, 21 bp, Artificial sequence
  SiRNA target sequence
agtaattgaagcaaaaacatc

SEQ ID NO: 260621 - DNA, 21 bp, Artificial sequence
  SiRNA target sequence
gtaattgaagcaaaaacatct

SEQ ID NO: 260622 - DNA, 21 bp, Artificial sequence
  SiRNA target sequence
taattgaagcaaaaacatcta

SEQ ID NO: 260623 - DNA, 21 bp, Artificial sequence
  SiRNA target sequence
aattgaagcaaaaacatctac

SEQ ID NO: 260624 - DNA, 21 bp, Artificial sequence
  SiRNA target sequence
attgaagcaaaaacatctact

SEQ ID NO: 260625 - DNA, 21 bp, Artificial sequence
  SiRNA target sequence
ttgaagcaaaaacatctactg

SEQ ID NO: 260626 - DNA, 21 bp, Artificial sequence
  SiRNA target sequence
tgaagcaaaaacatctactga

SEQ ID NO: 260627 - DNA, 21 bp, Artificial sequence
  SiRNA target sequence
gaagcaaaaacatctactgat

SEQ ID NO: 260628 - DNA, 21 bp, Artificial sequence
  SiRNA target sequence
aagcaaaaacatctactgatg

SEQ ID NO: 260629 - DNA, 21 bp, Artificial sequence
  SiRNA target sequence
agcaaaaacatctactgatga

SEQ ID NO: 260630 - DNA, 21 bp, Artificial sequence
  SiRNA target sequence
gcaaaaacatctactgatgaa

SEQ ID NO: 260631 - DNA, 21 bp, Artificial sequence
  SiRNA target sequence
caaaaacatctactgatgaag

SEQ ID NO: 260632 - DNA, 21 bp, Artificial sequence
  SiRNA target sequence
aaaaacatctactgatgaagt

SEQ ID NO: 260633 - DNA, 21 bp, Artificial sequence
  SiRNA target sequence
aaaacatctactgatgaagtt

SEQ ID NO: 260634 - DNA, 21 bp, Artificial sequence
  SiRNA target sequence
aaacatctactgatgaagtta

SEQ ID NO: 260635 - DNA, 21 bp, Artificial sequence
  SiRNA target sequence
aacatctactgatgaagttac

SEQ ID NO: 260636 - DNA, 21 bp, Artificial sequence
  SiRNA target sequence
acatctactgatgaagttact

SEQ ID NO: 260637 - DNA, 21 bp, Artificial sequence
  SiRNA target sequence
catctactgatgaagttactt

SEQ ID NO: 260638 - DNA, 21 bp, Artificial sequence
  SiRNA target sequence
atctactgatgaagttacttt

SEQ ID NO: 260639 - DNA, 21 bp, Artificial sequence
  SiRNA target sequence
tctactgatgaagttactttg

SEQ ID NO: 260640 - DNA, 21 bp, Artificial sequence
  SiRNA target sequence
ctactgatgaagttactttga

SEQ ID NO: 260641 - DNA, 21 bp, Artificial sequence
  SiRNA target sequence
tactgatgaagttactttgaa

SEQ ID NO: 260642 - DNA, 21 bp, Artificial sequence
  SiRNA target sequence
actgatgaagttactttgaaa

SEQ ID NO: 260643 - DNA, 21 bp, Artificial sequence
  SiRNA target sequence
ctgatgaagttactttgaaac

SEQ ID NO: 260644 - DNA, 21 bp, Artificial sequence
  SiRNA target sequence
tgatgaagttactttgaaaca

SEQ ID NO: 260645 - DNA, 21 bp, Artificial sequence
  SiRNA target sequence
gatgaagttactttgaaacaa

SEQ ID NO: 260646 - DNA, 21 bp, Artificial sequence
  SiRNA target sequence
atgaagttactttgaaacaac

SEQ ID NO: 260647 - DNA, 21 bp, Artificial sequence
  SiRNA target sequence
tgaagttactttgaaacaaca

SEQ ID NO: 260648 - DNA, 21 bp, Artificial sequence
  SiRNA target sequence
gaagttactttgaaacaacaa

SEQ ID NO: 260649 - DNA, 21 bp, Artificial sequence
  SiRNA target sequence
aagttactttgaaacaacaaa

SEQ ID NO: 260650 - DNA, 21 bp, Artificial sequence
  SiRNA target sequence
agttactttgaaacaacaaaa

SEQ ID NO: 260651 - DNA, 21 bp, Artificial sequence
  SiRNA target sequence
gttactttgaaacaacaaaaa

SEQ ID NO: 260652 - DNA, 21 bp, Artificial sequence
  SiRNA target sequence
ttactttgaaacaacaaaaac

SEQ ID NO: 260653 - DNA, 21 bp, Artificial sequence
  SiRNA target sequence
tactttgaaacaacaaaaacc

SEQ ID NO: 260654 - DNA, 21 bp, Artificial sequence
  SiRNA target sequence
actttgaaacaacaaaaacct

SEQ ID NO: 260655 - DNA, 21 bp, Artificial sequence
  SiRNA target sequence
ctttgaaacaacaaaaaccta

SEQ ID NO: 260656 - DNA, 21 bp, Artificial sequence
  SiRNA target sequence
tttgaaacaacaaaaacctat

SEQ ID NO: 260657 - DNA, 21 bp, Artificial sequence
  SiRNA target sequence
ttgaaacaacaaaaacctatt

SEQ ID NO: 260658 - DNA, 21 bp, Artificial sequence
  SiRNA target sequence
tgaaacaacaaaaacctattg

SEQ ID NO: 260659 - DNA, 21 bp, Artificial sequence
  SiRNA target sequence
gaaacaacaaaaacctattgt

SEQ ID NO: 260660 - DNA, 21 bp, Artificial sequence
  SiRNA target sequence
aaacaacaaaaacctattgtt

SEQ ID NO: 260661 - DNA, 21 bp, Artificial sequence
  SiRNA target sequence
aacaacaaaaacctattgtta

SEQ ID NO: 260662 - DNA, 21 bp, Artificial sequence
  SiRNA target sequence
acaacaaaaacctattgttat

SEQ ID NO: 260663 - DNA, 21 bp, Artificial sequence
  SiRNA target sequence
caacaaaaacctattgttata

SEQ ID NO: 260664 - DNA, 21 bp, Artificial sequence
  SiRNA target sequence
aacaaaaacctattgttatag

SEQ ID NO: 260665 - DNA, 21 bp, Artificial sequence
  SiRNA target sequence
acaaaaacctattgttataga

SEQ ID NO: 260666 - DNA, 21 bp, Artificial sequence
  SiRNA target sequence
caaaaacctattgttatagag

SEQ ID NO: 260667 - DNA, 21 bp, Artificial sequence
  SiRNA target sequence
aaaaacctattgttatagagg

SEQ ID NO: 260668 - DNA, 21 bp, Artificial sequence
  SiRNA target sequence
aaaacctattgttatagaggc

SEQ ID NO: 260669 - DNA, 21 bp, Artificial sequence
  SiRNA target sequence
aaacctattgttatagaggca

SEQ ID NO: 260670 - DNA, 21 bp, Artificial sequence
  SiRNA target sequence
aacctattgttatagaggcac

SEQ ID NO: 260671 - DNA, 21 bp, Artificial sequence
  SiRNA target sequence
acctattgttatagaggcaca

SEQ ID NO: 260672 - DNA, 21 bp, Artificial sequence
  SiRNA target sequence
cctattgttatagaggcacag

SEQ ID NO: 260673 - DNA, 21 bp, Artificial sequence
  SiRNA target sequence
ctattgttatagaggcacagt

SEQ ID NO: 260674 - DNA, 21 bp, Artificial sequence
  SiRNA target sequence
tattgttatagaggcacagtc

SEQ ID NO: 260675 - DNA, 21 bp, Artificial sequence
  SiRNA target sequence
attgttatagaggcacagtct

SEQ ID NO: 260676 - DNA, 21 bp, Artificial sequence
  SiRNA target sequence
ttgttatagaggcacagtctt

SEQ ID NO: 260677 - DNA, 21 bp, Artificial sequence
  SiRNA target sequence
tgttatagaggcacagtcttc

SEQ ID NO: 260678 - DNA, 21 bp, Artificial sequence
  SiRNA target sequence
gttatagaggcacagtcttct

SEQ ID NO: 260679 - DNA, 21 bp, Artificial sequence
  SiRNA target sequence
ttatagaggcacagtcttctg

SEQ ID NO: 260680 - DNA, 21 bp, Artificial sequence
  SiRNA target sequence
tatagaggcacagtcttctgg

SEQ ID NO: 260681 - DNA, 21 bp, Artificial sequence
  SiRNA target sequence
atagaggcacagtcttctggt

SEQ ID NO: 260682 - DNA, 21 bp, Artificial sequence
  SiRNA target sequence
tagaggcacagtcttctggtg

SEQ ID NO: 260683 - DNA, 21 bp, Artificial sequence
  SiRNA target sequence
agaggcacagtcttctggtga

SEQ ID NO: 260684 - DNA, 21 bp, Artificial sequence
  SiRNA target sequence
gaggcacagtcttctggtgat

SEQ ID NO: 260685 - DNA, 21 bp, Artificial sequence
  SiRNA target sequence
aggcacagtcttctggtgatt

SEQ ID NO: 260686 - DNA, 21 bp, Artificial sequence
  SiRNA target sequence
ggcacagtcttctggtgattg

SEQ ID NO: 260687 - DNA, 21 bp, Artificial sequence
  SiRNA target sequence
gcacagtcttctggtgattgt

SEQ ID NO: 260688 - DNA, 21 bp, Artificial sequence
  SiRNA target sequence
cacagtcttctggtgattgtg

SEQ ID NO: 260689 - DNA, 21 bp, Artificial sequence
  SiRNA target sequence
acagtcttctggtgattgtgt

SEQ ID NO: 260690 - DNA, 21 bp, Artificial sequence
  SiRNA target sequence
cagtcttctggtgattgtgtg

SEQ ID NO: 260691 - DNA, 21 bp, Artificial sequence
  SiRNA target sequence
agtcttctggtgattgtgtga

SEQ ID NO: 260692 - DNA, 21 bp, Artificial sequence
  SiRNA target sequence
gtcttctggtgattgtgtgac

SEQ ID NO: 260693 - DNA, 21 bp, Artificial sequence
  SiRNA target sequence
tcttctggtgattgtgtgacc

SEQ ID NO: 260694 - DNA, 21 bp, Artificial sequence
  SiRNA target sequence
cttctggtgattgtgtgaccc

SEQ ID NO: 260695 - DNA, 21 bp, Artificial sequence
  SiRNA target sequence
ttctggtgattgtgtgacccg

SEQ ID NO: 260696 - DNA, 21 bp, Artificial sequence
  SiRNA target sequence
tctggtgattgtgtgacccga

SEQ ID NO: 260697 - DNA, 21 bp, Artificial sequence
  SiRNA target sequence
ctggtgattgtgtgacccgaa

SEQ ID NO: 260698 - DNA, 21 bp, Artificial sequence
  SiRNA target sequence
tggtgattgtgtgacccgaaa

SEQ ID NO: 260699 - DNA, 21 bp, Artificial sequence
  SiRNA target sequence
ggtgattgtgtgacccgaaaa

SEQ ID NO: 260700 - DNA, 21 bp, Artificial sequence
  SiRNA target sequence
gtgattgtgtgacccgaaaac

SEQ ID NO: 260701 - DNA, 21 bp, Artificial sequence
  SiRNA target sequence
tgattgtgtgacccgaaaaca

SEQ ID NO: 260702 - DNA, 21 bp, Artificial sequence
  SiRNA target sequence
gattgtgtgacccgaaaacaa

SEQ ID NO: 260703 - DNA, 21 bp, Artificial sequence
  SiRNA target sequence
attgtgtgacccgaaaacaac

SEQ ID NO: 260704 - DNA, 21 bp, Artificial sequence
  SiRNA target sequence
ttgtgtgacccgaaaacaacg

SEQ ID NO: 260705 - DNA, 21 bp, Artificial sequence
  SiRNA target sequence
tgtgtgacccgaaaacaacga

SEQ ID NO: 260706 - DNA, 21 bp, Artificial sequence
  SiRNA target sequence
gtgtgacccgaaaacaacgag

SEQ ID NO: 260707 - DNA, 21 bp, Artificial sequence
  SiRNA target sequence
tgtgacccgaaaacaacgagt

SEQ ID NO: 260708 - DNA, 21 bp, Artificial sequence
  SiRNA target sequence
gtgacccgaaaacaacgagta

SEQ ID NO: 260709 - DNA, 21 bp, Artificial sequence
  SiRNA target sequence
tgacccgaaaacaacgagtac

SEQ ID NO: 260710 - DNA, 21 bp, Artificial sequence
  SiRNA target sequence
gacccgaaaacaacgagtaca

SEQ ID NO: 260711 - DNA, 21 bp, Artificial sequence
  SiRNA target sequence
acccgaaaacaacgagtacaa

SEQ ID NO: 260712 - DNA, 21 bp, Artificial sequence
  SiRNA target sequence
cccgaaaacaacgagtacaac

SEQ ID NO: 260713 - DNA, 21 bp, Artificial sequence
  SiRNA target sequence
ccgaaaacaacgagtacaacg

SEQ ID NO: 260714 - DNA, 21 bp, Artificial sequence
  SiRNA target sequence
cgaaaacaacgagtacaacga

SEQ ID NO: 260715 - DNA, 21 bp, Artificial sequence
  SiRNA target sequence
gaaaacaacgagtacaacgag

SEQ ID NO: 260716 - DNA, 21 bp, Artificial sequence
  SiRNA target sequence
aaaacaacgagtacaacgagt

SEQ ID NO: 260717 - DNA, 21 bp, Artificial sequence
  SiRNA target sequence
aaacaacgagtacaacgagtg

SEQ ID NO: 260718 - DNA, 21 bp, Artificial sequence
  SiRNA target sequence
aacaacgagtacaacgagtga

SEQ ID NO: 260719 - DNA, 21 bp, Artificial sequence
  SiRNA target sequence
acaacgagtacaacgagtgat

SEQ ID NO: 260720 - DNA, 21 bp, Artificial sequence
  SiRNA target sequence
caacgagtacaacgagtgatt

SEQ ID NO: 260721 - DNA, 21 bp, Artificial sequence
  SiRNA target sequence
aacgagtacaacgagtgattg

SEQ ID NO: 260722 - DNA, 21 bp, Artificial sequence
  SiRNA target sequence
acgagtacaacgagtgattga

SEQ ID NO: 260723 - DNA, 21 bp, Artificial sequence
  SiRNA target sequence
cgagtacaacgagtgattgaa

SEQ ID NO: 260724 - DNA, 21 bp, Artificial sequence
  SiRNA target sequence
gagtacaacgagtgattgaag

SEQ ID NO: 260725 - DNA, 21 bp, Artificial sequence
  SiRNA target sequence
agtacaacgagtgattgaagc

SEQ ID NO: 260726 - DNA, 21 bp, Artificial sequence
  SiRNA target sequence
gtacaacgagtgattgaagca

SEQ ID NO: 260727 - DNA, 21 bp, Artificial sequence
  SiRNA target sequence
tacaacgagtgattgaagcat

SEQ ID NO: 260728 - DNA, 21 bp, Artificial sequence
  SiRNA target sequence
acaacgagtgattgaagcatt

SEQ ID NO: 260729 - DNA, 21 bp, Artificial sequence
  SiRNA target sequence
caacgagtgattgaagcattt

SEQ ID NO: 260730 - DNA, 21 bp, Artificial sequence
  SiRNA target sequence
aacgagtgattgaagcatttg

SEQ ID NO: 260731 - DNA, 21 bp, Artificial sequence
  SiRNA target sequence
acgagtgattgaagcatttgc

SEQ ID NO: 260732 - DNA, 21 bp, Artificial sequence
  SiRNA target sequence
cgagtgattgaagcatttgca

SEQ ID NO: 260733 - DNA, 21 bp, Artificial sequence
  SiRNA target sequence
gagtgattgaagcatttgcaa

SEQ ID NO: 260734 - DNA, 21 bp, Artificial sequence
  SiRNA target sequence
agtgattgaagcatttgcaag

SEQ ID NO: 260735 - DNA, 21 bp, Artificial sequence
  SiRNA target sequence
gtgattgaagcatttgcaagt

SEQ ID NO: 260736 - DNA, 21 bp, Artificial sequence
  SiRNA target sequence
tgattgaagcatttgcaagta

SEQ ID NO: 260737 - DNA, 21 bp, Artificial sequence
  SiRNA target sequence
gattgaagcatttgcaagtag

SEQ ID NO: 260738 - DNA, 21 bp, Artificial sequence
  SiRNA target sequence
attgaagcatttgcaagtagt

SEQ ID NO: 260739 - DNA, 21 bp, Artificial sequence
  SiRNA target sequence
ttgaagcatttgcaagtagtg

SEQ ID NO: 260740 - DNA, 21 bp, Artificial sequence
  SiRNA target sequence
tgaagcatttgcaagtagtga

SEQ ID NO: 260741 - DNA, 21 bp, Artificial sequence
  SiRNA target sequence
gaagcatttgcaagtagtgat

SEQ ID NO: 260742 - DNA, 21 bp, Artificial sequence
  SiRNA target sequence
aagcatttgcaagtagtgatg

SEQ ID NO: 260743 - DNA, 21 bp, Artificial sequence
  SiRNA target sequence
agcatttgcaagtagtgatgc

SEQ ID NO: 260744 - DNA, 21 bp, Artificial sequence
  SiRNA target sequence
gcatttgcaagtagtgatgct

SEQ ID NO: 260745 - DNA, 21 bp, Artificial sequence
  SiRNA target sequence
catttgcaagtagtgatgctg

SEQ ID NO: 260746 - DNA, 21 bp, Artificial sequence
  SiRNA target sequence
atttgcaagtagtgatgctgt

SEQ ID NO: 260747 - DNA, 21 bp, Artificial sequence
  SiRNA target sequence
tttgcaagtagtgatgctgtg

SEQ ID NO: 260748 - DNA, 21 bp, Artificial sequence
  SiRNA target sequence
ttgcaagtagtgatgctgtga

SEQ ID NO: 260749 - DNA, 21 bp, Artificial sequence
  SiRNA target sequence
tgcaagtagtgatgctgtgac

SEQ ID NO: 260750 - DNA, 21 bp, Artificial sequence
  SiRNA target sequence
gcaagtagtgatgctgtgaca

SEQ ID NO: 260751 - DNA, 21 bp, Artificial sequence
  SiRNA target sequence
caagtagtgatgctgtgacat

SEQ ID NO: 260752 - DNA, 21 bp, Artificial sequence
  SiRNA target sequence
aagtagtgatgctgtgacatt

SEQ ID NO: 260753 - DNA, 21 bp, Artificial sequence
  SiRNA target sequence
agtagtgatgctgtgacattg

SEQ ID NO: 260754 - DNA, 21 bp, Artificial sequence
  SiRNA target sequence
gtagtgatgctgtgacattga

SEQ ID NO: 260755 - DNA, 21 bp, Artificial sequence
  SiRNA target sequence
tagtgatgctgtgacattgaa

SEQ ID NO: 260756 - DNA, 21 bp, Artificial sequence
  SiRNA target sequence
agtgatgctgtgacattgaag

SEQ ID NO: 260757 - DNA, 21 bp, Artificial sequence
  SiRNA target sequence
gtgatgctgtgacattgaaga

SEQ ID NO: 260758 - DNA, 21 bp, Artificial sequence
  SiRNA target sequence
tgatgctgtgacattgaagaa

SEQ ID NO: 260759 - DNA, 21 bp, Artificial sequence
  SiRNA target sequence
gatgctgtgacattgaagaaa

SEQ ID NO: 260760 - DNA, 21 bp, Artificial sequence
  SiRNA target sequence
atgctgtgacattgaagaaat

SEQ ID NO: 260761 - DNA, 21 bp, Artificial sequence
  SiRNA target sequence
tgctgtgacattgaagaaatc

SEQ ID NO: 260762 - DNA, 21 bp, Artificial sequence
  SiRNA target sequence
gctgtgacattgaagaaatct

SEQ ID NO: 260763 - DNA, 21 bp, Artificial sequence
  SiRNA target sequence
ctgtgacattgaagaaatcta

SEQ ID NO: 260764 - DNA, 21 bp, Artificial sequence
  SiRNA target sequence
tgtgacattgaagaaatctac

SEQ ID NO: 260765 - DNA, 21 bp, Artificial sequence
  SiRNA target sequence
gtgacattgaagaaatctact

SEQ ID NO: 260766 - DNA, 21 bp, Artificial sequence
  SiRNA target sequence
tgacattgaagaaatctactg

SEQ ID NO: 260767 - DNA, 21 bp, Artificial sequence
  SiRNA target sequence
gacattgaagaaatctactgc

SEQ ID NO: 260768 - DNA, 21 bp, Artificial sequence
  SiRNA target sequence
acattgaagaaatctactgcg

SEQ ID NO: 260769 - DNA, 21 bp, Artificial sequence
  SiRNA target sequence
cattgaagaaatctactgcga

SEQ ID NO: 260770 - DNA, 21 bp, Artificial sequence
  SiRNA target sequence
attgaagaaatctactgcgaa

SEQ ID NO: 260771 - DNA, 21 bp, Artificial sequence
  SiRNA target sequence
ttgaagaaatctactgcgaaa

SEQ ID NO: 260772 - DNA, 21 bp, Artificial sequence
  SiRNA target sequence
tgaagaaatctactgcgaaat

SEQ ID NO: 260773 - DNA, 21 bp, Artificial sequence
  SiRNA target sequence
gaagaaatctactgcgaaatt

SEQ ID NO: 260774 - DNA, 21 bp, Artificial sequence
  SiRNA target sequence
aagaaatctactgcgaaattc

SEQ ID NO: 260775 - DNA, 21 bp, Artificial sequence
  SiRNA target sequence
agaaatctactgcgaaattcg

SEQ ID NO: 260776 - DNA, 21 bp, Artificial sequence
  SiRNA target sequence
gaaatctactgcgaaattcgt

SEQ ID NO: 260777 - DNA, 21 bp, Artificial sequence
  SiRNA target sequence
aaatctactgcgaaattcgta

SEQ ID NO: 260778 - DNA, 21 bp, Artificial sequence
  SiRNA target sequence
aatctactgcgaaattcgtag

SEQ ID NO: 260779 - DNA, 21 bp, Artificial sequence
  SiRNA target sequence
atctactgcgaaattcgtaga

SEQ ID NO: 260780 - DNA, 21 bp, Artificial sequence
  SiRNA target sequence
tctactgcgaaattcgtagaa

SEQ ID NO: 260781 - DNA, 21 bp, Artificial sequence
  SiRNA target sequence
ctactgcgaaattcgtagaaa

SEQ ID NO: 260782 - DNA, 21 bp, Artificial sequence
  SiRNA target sequence
tactgcgaaattcgtagaaag

SEQ ID NO: 260783 - DNA, 21 bp, Artificial sequence
  SiRNA target sequence
actgcgaaattcgtagaaagt

SEQ ID NO: 260784 - DNA, 21 bp, Artificial sequence
  SiRNA target sequence
ctgcgaaattcgtagaaagtg

SEQ ID NO: 260785 - DNA, 21 bp, Artificial sequence
  SiRNA target sequence
tgcgaaattcgtagaaagtga

SEQ ID NO: 260786 - DNA, 21 bp, Artificial sequence
  SiRNA target sequence
gcgaaattcgtagaaagtgac

SEQ ID NO: 260787 - DNA, 21 bp, Artificial sequence
  SiRNA target sequence
cgaaattcgtagaaagtgacc

SEQ ID NO: 260788 - DNA, 21 bp, Artificial sequence
  SiRNA target sequence
gaaattcgtagaaagtgaccc

SEQ ID NO: 260789 - DNA, 21 bp, Artificial sequence
  SiRNA target sequence
aaattcgtagaaagtgaccca

SEQ ID NO: 260790 - DNA, 21 bp, Artificial sequence
  SiRNA target sequence
aattcgtagaaagtgacccaa

SEQ ID NO: 260791 - DNA, 21 bp, Artificial sequence
  SiRNA target sequence
attcgtagaaagtgacccaaa

SEQ ID NO: 260792 - DNA, 21 bp, Artificial sequence
  SiRNA target sequence
ttcgtagaaagtgacccaaat

SEQ ID NO: 260793 - DNA, 21 bp, Artificial sequence
  SiRNA target sequence
tcgtagaaagtgacccaaatg

SEQ ID NO: 260794 - DNA, 21 bp, Artificial sequence
  SiRNA target sequence
cgtagaaagtgacccaaatga

SEQ ID NO: 260795 - DNA, 21 bp, Artificial sequence
  SiRNA target sequence
gtagaaagtgacccaaatgac

SEQ ID NO: 260796 - DNA, 21 bp, Artificial sequence
  SiRNA target sequence
tagaaagtgacccaaatgaca

SEQ ID NO: 260797 - DNA, 21 bp, Artificial sequence
  SiRNA target sequence
agaaagtgacccaaatgacat

SEQ ID NO: 260798 - DNA, 21 bp, Artificial sequence
  SiRNA target sequence
gaaagtgacccaaatgacata

SEQ ID NO: 260799 - DNA, 21 bp, Artificial sequence
  SiRNA target sequence
aaagtgacccaaatgacatag

SEQ ID NO: 260800 - DNA, 21 bp, Artificial sequence
  SiRNA target sequence
aagtgacccaaatgacatagt

SEQ ID NO: 260801 - DNA, 21 bp, Artificial sequence
  SiRNA target sequence
agtgacccaaatgacatagtt

SEQ ID NO: 260802 - DNA, 21 bp, Artificial sequence
  SiRNA target sequence
gtgacccaaatgacatagttg

SEQ ID NO: 260803 - DNA, 21 bp, Artificial sequence
  SiRNA target sequence
tgacccaaatgacatagttga

SEQ ID NO: 260804 - DNA, 21 bp, Artificial sequence
  SiRNA target sequence
gacccaaatgacatagttgat

SEQ ID NO: 260805 - DNA, 21 bp, Artificial sequence
  SiRNA target sequence
acccaaatgacatagttgatg

SEQ ID NO: 260806 - DNA, 21 bp, Artificial sequence
  SiRNA target sequence
cccaaatgacatagttgatgt

SEQ ID NO: 260807 - DNA, 21 bp, Artificial sequence
  SiRNA target sequence
ccaaatgacatagttgatgtt

SEQ ID NO: 260808 - DNA, 21 bp, Artificial sequence
  SiRNA target sequence
caaatgacatagttgatgtta

SEQ ID NO: 260809 - DNA, 21 bp, Artificial sequence
  SiRNA target sequence
aaatgacatagttgatgttac

SEQ ID NO: 260810 - DNA, 21 bp, Artificial sequence
  SiRNA target sequence
aatgacatagttgatgttaca

SEQ ID NO: 260811 - DNA, 21 bp, Artificial sequence
  SiRNA target sequence
atgacatagttgatgttacaa

SEQ ID NO: 260812 - DNA, 21 bp, Artificial sequence
  SiRNA target sequence
tgacatagttgatgttacaat

SEQ ID NO: 260813 - DNA, 21 bp, Artificial sequence
  SiRNA target sequence
gacatagttgatgttacaatg

SEQ ID NO: 260814 - DNA, 21 bp, Artificial sequence
  SiRNA target sequence
acatagttgatgttacaatgc

SEQ ID NO: 260815 - DNA, 21 bp, Artificial sequence
  SiRNA target sequence
catagttgatgttacaatgca

SEQ ID NO: 260816 - DNA, 21 bp, Artificial sequence
  SiRNA target sequence
atagttgatgttacaatgcaa

SEQ ID NO: 260817 - DNA, 21 bp, Artificial sequence
  SiRNA target sequence
tagttgatgttacaatgcaaa

SEQ ID NO: 260818 - DNA, 21 bp, Artificial sequence
  SiRNA target sequence
agttgatgttacaatgcaaat

SEQ ID NO: 260819 - DNA, 21 bp, Artificial sequence
  SiRNA target sequence
gttgatgttacaatgcaaatg

SEQ ID NO: 260820 - DNA, 21 bp, Artificial sequence
  SiRNA target sequence
ttgatgttacaatgcaaatgt

SEQ ID NO: 260821 - DNA, 21 bp, Artificial sequence
  SiRNA target sequence
tgatgttacaatgcaaatgtg

SEQ ID NO: 260822 - DNA, 21 bp, Artificial sequence
  SiRNA target sequence
gatgttacaatgcaaatgtgg

SEQ ID NO: 260823 - DNA, 21 bp, Artificial sequence
  SiRNA target sequence
atgttacaatgcaaatgtgga

SEQ ID NO: 260824 - DNA, 21 bp, Artificial sequence
  SiRNA target sequence
tgttacaatgcaaatgtggaa

SEQ ID NO: 260825 - DNA, 21 bp, Artificial sequence
  SiRNA target sequence
gttacaatgcaaatgtggaaa

SEQ ID NO: 260826 - DNA, 21 bp, Artificial sequence
  SiRNA target sequence
ttacaatgcaaatgtggaaag

SEQ ID NO: 260827 - DNA, 21 bp, Artificial sequence
  SiRNA target sequence
tacaatgcaaatgtggaaaga

SEQ ID NO: 260828 - DNA, 21 bp, Artificial sequence
  SiRNA target sequence
acaatgcaaatgtggaaagat

SEQ ID NO: 260829 - DNA, 21 bp, Artificial sequence
  SiRNA target sequence
caatgcaaatgtggaaagatc

SEQ ID NO: 260830 - DNA, 21 bp, Artificial sequence
  SiRNA target sequence
aatgcaaatgtggaaagatca

SEQ ID NO: 260831 - DNA, 21 bp, Artificial sequence
  SiRNA target sequence
atgcaaatgtggaaagatcaa

SEQ ID NO: 260832 - DNA, 21 bp, Artificial sequence
  SiRNA target sequence
tgcaaatgtggaaagatcaag

SEQ ID NO: 260833 - DNA, 21 bp, Artificial sequence
  SiRNA target sequence
gcaaatgtggaaagatcaagt

SEQ ID NO: 260834 - DNA, 21 bp, Artificial sequence
  SiRNA target sequence
caaatgtggaaagatcaagtt

SEQ ID NO: 260835 - DNA, 21 bp, Artificial sequence
  SiRNA target sequence
aaatgtggaaagatcaagttg

SEQ ID NO: 260836 - DNA, 21 bp, Artificial sequence
  SiRNA target sequence
aatgtggaaagatcaagttgc

SEQ ID NO: 260837 - DNA, 21 bp, Artificial sequence
  SiRNA target sequence
atgtggaaagatcaagttgcc

SEQ ID NO: 260838 - DNA, 21 bp, Artificial sequence
  SiRNA target sequence
tgtggaaagatcaagttgccc

SEQ ID NO: 260839 - DNA, 21 bp, Artificial sequence
  SiRNA target sequence
gtggaaagatcaagttgccca

SEQ ID NO: 260840 - DNA, 21 bp, Artificial sequence
  SiRNA target sequence
tggaaagatcaagttgcccaa

SEQ ID NO: 260841 - DNA, 21 bp, Artificial sequence
  SiRNA target sequence
ggaaagatcaagttgcccaac

SEQ ID NO: 260842 - DNA, 21 bp, Artificial sequence
  SiRNA target sequence
gaaagatcaagttgcccaacg

SEQ ID NO: 260843 - DNA, 21 bp, Artificial sequence
  SiRNA target sequence
aaagatcaagttgcccaacga

SEQ ID NO: 260844 - DNA, 21 bp, Artificial sequence
  SiRNA target sequence
aagatcaagttgcccaacgat

SEQ ID NO: 260845 - DNA, 21 bp, Artificial sequence
  SiRNA target sequence
agatcaagttgcccaacgatt

SEQ ID NO: 260846 - DNA, 21 bp, Artificial sequence
  SiRNA target sequence
gatcaagttgcccaacgattg

SEQ ID NO: 260847 - DNA, 21 bp, Artificial sequence
  SiRNA target sequence
atcaagttgcccaacgattga

SEQ ID NO: 260848 - DNA, 21 bp, Artificial sequence
  SiRNA target sequence
tcaagttgcccaacgattgat

SEQ ID NO: 260849 - DNA, 21 bp, Artificial sequence
  SiRNA target sequence
caagttgcccaacgattgata

SEQ ID NO: 260850 - DNA, 21 bp, Artificial sequence
  SiRNA target sequence
aagttgcccaacgattgataa

SEQ ID NO: 260851 - DNA, 21 bp, Artificial sequence
  SiRNA target sequence
agttgcccaacgattgataac

SEQ ID NO: 260852 - DNA, 21 bp, Artificial sequence
  SiRNA target sequence
gttgcccaacgattgataacc

SEQ ID NO: 260853 - DNA, 21 bp, Artificial sequence
  SiRNA target sequence
ttgcccaacgattgataacca

SEQ ID NO: 260854 - DNA, 21 bp, Artificial sequence
  SiRNA target sequence
tgcccaacgattgataaccaa

SEQ ID NO: 260855 - DNA, 21 bp, Artificial sequence
  SiRNA target sequence
gcccaacgattgataaccaac

SEQ ID NO: 260856 - DNA, 21 bp, Artificial sequence
  SiRNA target sequence
cccaacgattgataaccaacc

SEQ ID NO: 260857 - DNA, 21 bp, Artificial sequence
  SiRNA target sequence
ccaacgattgataaccaaccg

SEQ ID NO: 260858 - DNA, 21 bp, Artificial sequence
  SiRNA target sequence
caacgattgataaccaaccgt

SEQ ID NO: 260859 - DNA, 21 bp, Artificial sequence
  SiRNA target sequence
aacgattgataaccaaccgtg

SEQ ID NO: 260860 - DNA, 21 bp, Artificial sequence
  SiRNA target sequence
acgattgataaccaaccgtgt

SEQ ID NO: 260861 - DNA, 21 bp, Artificial sequence
  SiRNA target sequence
cgattgataaccaaccgtgta

SEQ ID NO: 260862 - DNA, 21 bp, Artificial sequence
  SiRNA target sequence
gattgataaccaaccgtgtat

SEQ ID NO: 260863 - DNA, 21 bp, Artificial sequence
  SiRNA target sequence
attgataaccaaccgtgtatt

SEQ ID NO: 260864 - DNA, 21 bp, Artificial sequence
  SiRNA target sequence
ttgataaccaaccgtgtattg

SEQ ID NO: 260865 - DNA, 21 bp, Artificial sequence
  SiRNA target sequence
tgataaccaaccgtgtattga

SEQ ID NO: 260866 - DNA, 21 bp, Artificial sequence
  SiRNA target sequence
gataaccaaccgtgtattgac

SEQ ID NO: 260867 - DNA, 21 bp, Artificial sequence
  SiRNA target sequence
ataaccaaccgtgtattgaca

SEQ ID NO: 260868 - DNA, 21 bp, Artificial sequence
  SiRNA target sequence
taaccaaccgtgtattgacaa

SEQ ID NO: 260869 - DNA, 21 bp, Artificial sequence
  SiRNA target sequence
aaccaaccgtgtattgacaaa

SEQ ID NO: 260870 - DNA, 21 bp, Artificial sequence
  SiRNA target sequence
accaaccgtgtattgacaaat

SEQ ID NO: 260871 - DNA, 21 bp, Artificial sequence
  SiRNA target sequence
ccaaccgtgtattgacaaatt

SEQ ID NO: 260872 - DNA, 21 bp, Artificial sequence
  SiRNA target sequence
caaccgtgtattgacaaattt

SEQ ID NO: 260873 - DNA, 21 bp, Artificial sequence
  SiRNA target sequence
aaccgtgtattgacaaatttg

SEQ ID NO: 260874 - DNA, 21 bp, Artificial sequence
  SiRNA target sequence
accgtgtattgacaaatttgt

SEQ ID NO: 260875 - DNA, 21 bp, Artificial sequence
  SiRNA target sequence
ccgtgtattgacaaatttgta

SEQ ID NO: 260876 - DNA, 21 bp, Artificial sequence
  SiRNA target sequence
cgtgtattgacaaatttgtat

SEQ ID NO: 260877 - DNA, 21 bp, Artificial sequence
  SiRNA target sequence
gtgtattgacaaatttgtata

SEQ ID NO: 260878 - DNA, 21 bp, Artificial sequence
  SiRNA target sequence
tgtattgacaaatttgtataa

SEQ ID NO: 260879 - DNA, 21 bp, Artificial sequence
  SiRNA target sequence
gtattgacaaatttgtataaa

SEQ ID NO: 260880 - DNA, 21 bp, Artificial sequence
  SiRNA target sequence
tattgacaaatttgtataaag

SEQ ID NO: 260881 - DNA, 21 bp, Artificial sequence
  SiRNA target sequence
attgacaaatttgtataaagt

SEQ ID NO: 260882 - DNA, 21 bp, Artificial sequence
  SiRNA target sequence
ttgacaaatttgtataaagtt

SEQ ID NO: 260883 - DNA, 21 bp, Artificial sequence
  SiRNA target sequence
tgacaaatttgtataaagttt

SEQ ID NO: 260884 - DNA, 21 bp, Artificial sequence
  SiRNA target sequence
gacaaatttgtataaagtttg

SEQ ID NO: 260885 - DNA, 21 bp, Artificial sequence
  SiRNA target sequence
acaaatttgtataaagtttgt

SEQ ID NO: 260886 - DNA, 21 bp, Artificial sequence
  SiRNA target sequence
caaatttgtataaagtttgtt

SEQ ID NO: 260887 - DNA, 21 bp, Artificial sequence
  SiRNA target sequence
aaatttgtataaagtttgttt

SEQ ID NO: 260888 - DNA, 21 bp, Artificial sequence
  SiRNA target sequence
aatttgtataaagtttgtttg

SEQ ID NO: 260889 - DNA, 21 bp, Artificial sequence
  SiRNA target sequence
atttgtataaagtttgtttgg

SEQ ID NO: 260890 - DNA, 21 bp, Artificial sequence
  SiRNA target sequence
tttgtataaagtttgtttggt

SEQ ID NO: 260891 - DNA, 21 bp, Artificial sequence
  SiRNA target sequence
ttgtataaagtttgtttggta

SEQ ID NO: 260892 - DNA, 21 bp, Artificial sequence
  SiRNA target sequence
tgtataaagtttgtttggtac

SEQ ID NO: 260893 - DNA, 21 bp, Artificial sequence
  SiRNA target sequence
gtataaagtttgtttggtaca

SEQ ID NO: 260894 - DNA, 21 bp, Artificial sequence
  SiRNA target sequence
tataaagtttgtttggtacac

SEQ ID NO: 260895 - DNA, 21 bp, Artificial sequence
  SiRNA target sequence
ataaagtttgtttggtacaca

SEQ ID NO: 260896 - DNA, 21 bp, Artificial sequence
  SiRNA target sequence
taaagtttgtttggtacacaa

SEQ ID NO: 260897 - DNA, 21 bp, Artificial sequence
  SiRNA target sequence
aaagtttgtttggtacacaat

SEQ ID NO: 260898 - DNA, 21 bp, Artificial sequence
  SiRNA target sequence
aagtttgtttggtacacaatg

SEQ ID NO: 260899 - DNA, 21 bp, Artificial sequence
  SiRNA target sequence
agtttgtttggtacacaatga

SEQ ID NO: 260900 - DNA, 21 bp, Artificial sequence
  SiRNA target sequence
gtttgtttggtacacaatgac

SEQ ID NO: 260901 - DNA, 21 bp, Artificial sequence
  SiRNA target sequence
tttgtttggtacacaatgacg

SEQ ID NO: 260902 - DNA, 21 bp, Artificial sequence
  SiRNA target sequence
ttgtttggtacacaatgacga

SEQ ID NO: 260903 - DNA, 21 bp, Artificial sequence
  SiRNA target sequence
tgtttggtacacaatgacgat

SEQ ID NO: 260904 - DNA, 21 bp, Artificial sequence
  SiRNA target sequence
gtttggtacacaatgacgatc

SEQ ID NO: 260905 - DNA, 21 bp, Artificial sequence
  SiRNA target sequence
tttggtacacaatgacgatcg

SEQ ID NO: 260906 - DNA, 21 bp, Artificial sequence
  SiRNA target sequence
ttggtacacaatgacgatcga

SEQ ID NO: 260907 - DNA, 21 bp, Artificial sequence
  SiRNA target sequence
tggtacacaatgacgatcgaa

SEQ ID NO: 260908 - DNA, 21 bp, Artificial sequence
  SiRNA target sequence
ggtacacaatgacgatcgaat

SEQ ID NO: 260909 - DNA, 21 bp, Artificial sequence
  SiRNA target sequence
gtacacaatgacgatcgaata

SEQ ID NO: 260910 - DNA, 21 bp, Artificial sequence
  SiRNA target sequence
tacacaatgacgatcgaataa

SEQ ID NO: 260911 - DNA, 21 bp, Artificial sequence
  SiRNA target sequence
acacaatgacgatcgaataac

SEQ ID NO: 260912 - DNA, 21 bp, Artificial sequence
  SiRNA target sequence
cacaatgacgatcgaataaca

SEQ ID NO: 260913 - DNA, 21 bp, Artificial sequence
  SiRNA target sequence
acaatgacgatcgaataacac

SEQ ID NO: 260914 - DNA, 21 bp, Artificial sequence
  SiRNA target sequence
caatgacgatcgaataacacc

SEQ ID NO: 260915 - DNA, 21 bp, Artificial sequence
  SiRNA target sequence
aatgacgatcgaataacacct

SEQ ID NO: 260916 - DNA, 21 bp, Artificial sequence
  SiRNA target sequence
atgacgatcgaataacacctc

SEQ ID NO: 260917 - DNA, 21 bp, Artificial sequence
  SiRNA target sequence
tgacgatcgaataacacctct

SEQ ID NO: 260918 - DNA, 21 bp, Artificial sequence
  SiRNA target sequence
gacgatcgaataacacctctt

SEQ ID NO: 260919 - DNA, 21 bp, Artificial sequence
  SiRNA target sequence
acgatcgaataacacctcttt

SEQ ID NO: 260920 - DNA, 21 bp, Artificial sequence
  SiRNA target sequence
cgatcgaataacacctctttt

SEQ ID NO: 260921 - DNA, 21 bp, Artificial sequence
  SiRNA target sequence
gatcgaataacacctcttttg

SEQ ID NO: 260922 - DNA, 21 bp, Artificial sequence
  SiRNA target sequence
atcgaataacacctcttttga

SEQ ID NO: 260923 - DNA, 21 bp, Artificial sequence
  SiRNA target sequence
tcgaataacacctcttttgaa

SEQ ID NO: 260924 - DNA, 21 bp, Artificial sequence
  SiRNA target sequence
cgaataacacctcttttgaat

SEQ ID NO: 260925 - DNA, 21 bp, Artificial sequence
  SiRNA target sequence
gaataacacctcttttgaatg

SEQ ID NO: 260926 - DNA, 21 bp, Artificial sequence
  SiRNA target sequence
aataacacctcttttgaatgg

SEQ ID NO: 260927 - DNA, 21 bp, Artificial sequence
  SiRNA target sequence
ataacacctcttttgaatgga

SEQ ID NO: 260928 - DNA, 21 bp, Artificial sequence
  SiRNA target sequence
taacacctcttttgaatggac

SEQ ID NO: 260929 - DNA, 21 bp, Artificial sequence
  SiRNA target sequence
aacacctcttttgaatggact

SEQ ID NO: 260930 - DNA, 21 bp, Artificial sequence
  SiRNA target sequence
acacctcttttgaatggactt

SEQ ID NO: 260931 - DNA, 21 bp, Artificial sequence
  SiRNA target sequence
cacctcttttgaatggacttt

SEQ ID NO: 260932 - DNA, 21 bp, Artificial sequence
  SiRNA target sequence
acctcttttgaatggactttt

SEQ ID NO: 260933 - DNA, 21 bp, Artificial sequence
  SiRNA target sequence
cctcttttgaatggacttttt

SEQ ID NO: 260934 - DNA, 21 bp, Artificial sequence
  SiRNA target sequence
ctcttttgaatggactttttg

SEQ ID NO: 260935 - DNA, 21 bp, Artificial sequence
  SiRNA target sequence
tcttttgaatggactttttgt

SEQ ID NO: 260936 - DNA, 21 bp, Artificial sequence
  SiRNA target sequence
cttttgaatggactttttgtt

SEQ ID NO: 260937 - DNA, 21 bp, Artificial sequence
  SiRNA target sequence
ttttgaatggactttttgttc

SEQ ID NO: 260938 - DNA, 21 bp, Artificial sequence
  SiRNA target sequence
tttgaatggactttttgttcg

SEQ ID NO: 260939 - DNA, 21 bp, Artificial sequence
  SiRNA target sequence
ttgaatggactttttgttcgt

SEQ ID NO: 260940 - DNA, 21 bp, Artificial sequence
  SiRNA target sequence
tgaatggactttttgttcgtt

SEQ ID NO: 260941 - DNA, 21 bp, Artificial sequence
  SiRNA target sequence
gaatggactttttgttcgttc

SEQ ID NO: 260942 - DNA, 21 bp, Artificial sequence
  SiRNA target sequence
aatggactttttgttcgttca

SEQ ID NO: 260943 - DNA, 21 bp, Artificial sequence
  SiRNA target sequence
atggactttttgttcgttcaa

SEQ ID NO: 260944 - DNA, 21 bp, Artificial sequence
  SiRNA target sequence
tggactttttgttcgttcaaa

SEQ ID NO: 260945 - DNA, 21 bp, Artificial sequence
  SiRNA target sequence
ggactttttgttcgttcaaat

SEQ ID NO: 260946 - DNA, 21 bp, Artificial sequence
  SiRNA target sequence
gactttttgttcgttcaaatt

SEQ ID NO: 260947 - DNA, 21 bp, Artificial sequence
  SiRNA target sequence
actttttgttcgttcaaattt

SEQ ID NO: 260948 - DNA, 21 bp, Artificial sequence
  SiRNA target sequence
ctttttgttcgttcaaatttg

SEQ ID NO: 260949 - DNA, 21 bp, Artificial sequence
  SiRNA target sequence
tttttgttcgttcaaatttga

SEQ ID NO: 260950 - DNA, 21 bp, Artificial sequence
  SiRNA target sequence
ttttgttcgttcaaatttgat

SEQ ID NO: 260951 - DNA, 21 bp, Artificial sequence
  SiRNA target sequence
tttgttcgttcaaatttgatg

SEQ ID NO: 260952 - DNA, 21 bp, Artificial sequence
  SiRNA target sequence
ttgttcgttcaaatttgatgt

SEQ ID NO: 260953 - DNA, 21 bp, Artificial sequence
  SiRNA target sequence
tgttcgttcaaatttgatgtt

SEQ ID NO: 260954 - DNA, 21 bp, Artificial sequence
  SiRNA target sequence
gttcgttcaaatttgatgtta

SEQ ID NO: 260955 - DNA, 21 bp, Artificial sequence
  SiRNA target sequence
ttcgttcaaatttgatgttag

SEQ ID NO: 260956 - DNA, 21 bp, Artificial sequence
  SiRNA target sequence
tcgttcaaatttgatgttagt

SEQ ID NO: 260957 - DNA, 21 bp, Artificial sequence
  SiRNA target sequence
cgttcaaatttgatgttagta

SEQ ID NO: 260958 - DNA, 21 bp, Artificial sequence
  SiRNA target sequence
gttcaaatttgatgttagtac

SEQ ID NO: 260959 - DNA, 21 bp, Artificial sequence
  SiRNA target sequence
ttcaaatttgatgttagtacc

SEQ ID NO: 260960 - DNA, 21 bp, Artificial sequence
  SiRNA target sequence
tcaaatttgatgttagtacct

SEQ ID NO: 260961 - DNA, 21 bp, Artificial sequence
  SiRNA target sequence
caaatttgatgttagtacctg

SEQ ID NO: 260962 - DNA, 21 bp, Artificial sequence
  SiRNA target sequence
aaatttgatgttagtacctgg

SEQ ID NO: 260963 - DNA, 21 bp, Artificial sequence
  SiRNA target sequence
aatttgatgttagtacctgga

SEQ ID NO: 260964 - DNA, 21 bp, Artificial sequence
  SiRNA target sequence
atttgatgttagtacctggac

SEQ ID NO: 260965 - DNA, 21 bp, Artificial sequence
  SiRNA target sequence
tttgatgttagtacctggaca

SEQ ID NO: 260966 - DNA, 21 bp, Artificial sequence
  SiRNA target sequence
ttgatgttagtacctggacat

SEQ ID NO: 260967 - DNA, 21 bp, Artificial sequence
  SiRNA target sequence
tgatgttagtacctggacatc

SEQ ID NO: 260968 - DNA, 21 bp, Artificial sequence
  SiRNA target sequence
gatgttagtacctggacatct

SEQ ID NO: 260969 - DNA, 21 bp, Artificial sequence
  SiRNA target sequence
atgttagtacctggacatctt

SEQ ID NO: 260970 - DNA, 21 bp, Artificial sequence
  SiRNA target sequence
tgttagtacctggacatcttc

SEQ ID NO: 260971 - DNA, 21 bp, Artificial sequence
  SiRNA target sequence
gttagtacctggacatcttct

SEQ ID NO: 260972 - DNA, 21 bp, Artificial sequence
  SiRNA target sequence
ttagtacctggacatcttctt

SEQ ID NO: 260973 - DNA, 21 bp, Artificial sequence
  SiRNA target sequence
tagtacctggacatcttcttg

SEQ ID NO: 260974 - DNA, 21 bp, Artificial sequence
  SiRNA target sequence
agtacctggacatcttcttgg

SEQ ID NO: 260975 - DNA, 21 bp, Artificial sequence
  SiRNA target sequence
gtacctggacatcttcttgga

SEQ ID NO: 260976 - DNA, 21 bp, Artificial sequence
  SiRNA target sequence
tacctggacatcttcttggat

SEQ ID NO: 260977 - DNA, 21 bp, Artificial sequence
  SiRNA target sequence
acctggacatcttcttggatt

SEQ ID NO: 260978 - DNA, 21 bp, Artificial sequence
  SiRNA target sequence
cctggacatcttcttggattc

SEQ ID NO: 260979 - DNA, 21 bp, Artificial sequence
  SiRNA target sequence
ctggacatcttcttggattca

SEQ ID NO: 260980 - DNA, 21 bp, Artificial sequence
  SiRNA target sequence
tggacatcttcttggattcat

SEQ ID NO: 260981 - DNA, 21 bp, Artificial sequence
  SiRNA target sequence
ggacatcttcttggattcatt

SEQ ID NO: 260982 - DNA, 21 bp, Artificial sequence
  SiRNA target sequence
gacatcttcttggattcattg

SEQ ID NO: 260983 - DNA, 21 bp, Artificial sequence
  SiRNA target sequence
acatcttcttggattcattgc

SEQ ID NO: 260984 - DNA, 21 bp, Artificial sequence
  SiRNA target sequence
catcttcttggattcattgct

SEQ ID NO: 260985 - DNA, 21 bp, Artificial sequence
  SiRNA target sequence
atcttcttggattcattgctg

SEQ ID NO: 260986 - DNA, 21 bp, Artificial sequence
  SiRNA target sequence
tcttcttggattcattgctga

SEQ ID NO: 260987 - DNA, 21 bp, Artificial sequence
  SiRNA target sequence
cttcttggattcattgctgag

SEQ ID NO: 260988 - DNA, 21 bp, Artificial sequence
  SiRNA target sequence
ttcttggattcattgctgagt

SEQ ID NO: 260989 - DNA, 21 bp, Artificial sequence
  SiRNA target sequence
tcttggattcattgctgagta

SEQ ID NO: 260990 - DNA, 21 bp, Artificial sequence
  SiRNA target sequence
cttggattcattgctgagtat

SEQ ID NO: 260991 - DNA, 21 bp, Artificial sequence
  SiRNA target sequence
ttggattcattgctgagtatg

SEQ ID NO: 260992 - DNA, 21 bp, Artificial sequence
  SiRNA target sequence
tggattcattgctgagtatga

SEQ ID NO: 260993 - DNA, 21 bp, Artificial sequence
  SiRNA target sequence
ggattcattgctgagtatgac

SEQ ID NO: 260994 - DNA, 21 bp, Artificial sequence
  SiRNA target sequence
gattcattgctgagtatgaca

SEQ ID NO: 260995 - DNA, 21 bp, Artificial sequence
  SiRNA target sequence
attcattgctgagtatgacac

SEQ ID NO: 260996 - DNA, 21 bp, Artificial sequence
  SiRNA target sequence
ttcattgctgagtatgacaca

SEQ ID NO: 260997 - DNA, 21 bp, Artificial sequence
  SiRNA target sequence
tcattgctgagtatgacacaa

SEQ ID NO: 260998 - DNA, 21 bp, Artificial sequence
  SiRNA target sequence
cattgctgagtatgacacaat

SEQ ID NO: 260999 - DNA, 21 bp, Artificial sequence
  SiRNA target sequence
attgctgagtatgacacaatt

SEQ ID NO: 261000 - DNA, 21 bp, Artificial sequence
  SiRNA target sequence
ttgctgagtatgacacaattg

SEQ ID NO: 261001 - DNA, 21 bp, Artificial sequence
  SiRNA target sequence
tgctgagtatgacacaattga

SEQ ID NO: 261002 - DNA, 21 bp, Artificial sequence
  SiRNA target sequence
gctgagtatgacacaattgaa

SEQ ID NO: 261003 - DNA, 21 bp, Artificial sequence
  SiRNA target sequence
ctgagtatgacacaattgaaa

SEQ ID NO: 261004 - DNA, 21 bp, Artificial sequence
  SiRNA target sequence
tgagtatgacacaattgaaat

SEQ ID NO: 261005 - DNA, 21 bp, Artificial sequence
  SiRNA target sequence
gagtatgacacaattgaaatt

SEQ ID NO: 261006 - DNA, 21 bp, Artificial sequence
  SiRNA target sequence
agtatgacacaattgaaattc

SEQ ID NO: 261007 - DNA, 21 bp, Artificial sequence
  SiRNA target sequence
gtatgacacaattgaaattcg

SEQ ID NO: 261008 - DNA, 21 bp, Artificial sequence
  SiRNA target sequence
tatgacacaattgaaattcga

SEQ ID NO: 261009 - DNA, 21 bp, Artificial sequence
  SiRNA target sequence
atgacacaattgaaattcgaa

SEQ ID NO: 261010 - DNA, 21 bp, Artificial sequence
  SiRNA target sequence
tgacacaattgaaattcgaaa

SEQ ID NO: 261011 - DNA, 21 bp, Artificial sequence
  SiRNA target sequence
gacacaattgaaattcgaaat

SEQ ID NO: 261012 - DNA, 21 bp, Artificial sequence
  SiRNA target sequence
acacaattgaaattcgaaatc

SEQ ID NO: 261013 - DNA, 21 bp, Artificial sequence
  SiRNA target sequence
cacaattgaaattcgaaatct

SEQ ID NO: 261014 - DNA, 21 bp, Artificial sequence
  SiRNA target sequence
acaattgaaattcgaaatctc

SEQ ID NO: 261015 - DNA, 21 bp, Artificial sequence
  SiRNA target sequence
caattgaaattcgaaatctct

SEQ ID NO: 261016 - DNA, 21 bp, Artificial sequence
  SiRNA target sequence
aattgaaattcgaaatctctt

SEQ ID NO: 261017 - DNA, 21 bp, Artificial sequence
  SiRNA target sequence
attgaaattcgaaatctcttt

SEQ ID NO: 261018 - DNA, 21 bp, Artificial sequence
  SiRNA target sequence
ttgaaattcgaaatctctttg

SEQ ID NO: 261019 - DNA, 21 bp, Artificial sequence
  SiRNA target sequence
tgaaattcgaaatctctttga

SEQ ID NO: 261020 - DNA, 21 bp, Artificial sequence
  SiRNA target sequence
gaaattcgaaatctctttgac

SEQ ID NO: 261021 - DNA, 21 bp, Artificial sequence
  SiRNA target sequence
aaattcgaaatctctttgacg

SEQ ID NO: 261022 - DNA, 21 bp, Artificial sequence
  SiRNA target sequence
aattcgaaatctctttgacgt

SEQ ID NO: 261023 - DNA, 21 bp, Artificial sequence
  SiRNA target sequence
attcgaaatctctttgacgtg

SEQ ID NO: 261024 - DNA, 21 bp, Artificial sequence
  SiRNA target sequence
ttcgaaatctctttgacgtgg

SEQ ID NO: 261025 - DNA, 21 bp, Artificial sequence
  SiRNA target sequence
tcgaaatctctttgacgtggt

SEQ ID NO: 261026 - DNA, 21 bp, Artificial sequence
  SiRNA target sequence
cgaaatctctttgacgtggta

SEQ ID NO: 261027 - DNA, 21 bp, Artificial sequence
  SiRNA target sequence
gaaatctctttgacgtggtat

SEQ ID NO: 261028 - DNA, 21 bp, Artificial sequence
  SiRNA target sequence
aaatctctttgacgtggtatt

SEQ ID NO: 261029 - DNA, 21 bp, Artificial sequence
  SiRNA target sequence
aatctctttgacgtggtattt

SEQ ID NO: 261030 - DNA, 21 bp, Artificial sequence
  SiRNA target sequence
atctctttgacgtggtattta

SEQ ID NO: 261031 - DNA, 21 bp, Artificial sequence
  SiRNA target sequence
tctctttgacgtggtatttag

SEQ ID NO: 261032 - DNA, 21 bp, Artificial sequence
  SiRNA target sequence
ctctttgacgtggtatttaga

SEQ ID NO: 261033 - DNA, 21 bp, Artificial sequence
  SiRNA target sequence
tctttgacgtggtatttagag

SEQ ID NO: 261034 - DNA, 21 bp, Artificial sequence
  SiRNA target sequence
ctttgacgtggtatttagagt

SEQ ID NO: 261035 - DNA, 21 bp, Artificial sequence
  SiRNA target sequence
tttgacgtggtatttagagtg

SEQ ID NO: 261036 - DNA, 21 bp, Artificial sequence
  SiRNA target sequence
ttgacgtggtatttagagtgc

SEQ ID NO: 261037 - DNA, 21 bp, Artificial sequence
  SiRNA target sequence
tgacgtggtatttagagtgcc

SEQ ID NO: 261038 - DNA, 21 bp, Artificial sequence
  SiRNA target sequence
gacgtggtatttagagtgcca

SEQ ID NO: 261039 - DNA, 21 bp, Artificial sequence
  SiRNA target sequence
acgtggtatttagagtgccat

SEQ ID NO: 261040 - DNA, 21 bp, Artificial sequence
  SiRNA target sequence
cgtggtatttagagtgccatg

SEQ ID NO: 261041 - DNA, 21 bp, Artificial sequence
  SiRNA target sequence
gtggtatttagagtgccatgg

SEQ ID NO: 261042 - DNA, 21 bp, Artificial sequence
  SiRNA target sequence
tggtatttagagtgccatgga

SEQ ID NO: 261043 - DNA, 21 bp, Artificial sequence
  SiRNA target sequence
ggtatttagagtgccatggaa

SEQ ID NO: 261044 - DNA, 21 bp, Artificial sequence
  SiRNA target sequence
gtatttagagtgccatggaaa

SEQ ID NO: 261045 - DNA, 21 bp, Artificial sequence
  SiRNA target sequence
tatttagagtgccatggaaag

SEQ ID NO: 261046 - DNA, 21 bp, Artificial sequence
  SiRNA target sequence
atttagagtgccatggaaaga

SEQ ID NO: 261047 - DNA, 21 bp, Artificial sequence
  SiRNA target sequence
tttagagtgccatggaaagat

SEQ ID NO: 261048 - DNA, 21 bp, Artificial sequence
  SiRNA target sequence
ttagagtgccatggaaagatg

SEQ ID NO: 261049 - DNA, 21 bp, Artificial sequence
  SiRNA target sequence
tagagtgccatggaaagatgt

SEQ ID NO: 261050 - DNA, 21 bp, Artificial sequence
  SiRNA target sequence
agagtgccatggaaagatgtg

SEQ ID NO: 261051 - DNA, 21 bp, Artificial sequence
  SiRNA target sequence
gagtgccatggaaagatgtga

SEQ ID NO: 261052 - DNA, 21 bp, Artificial sequence
  SiRNA target sequence
agtgccatggaaagatgtgaa

SEQ ID NO: 261053 - DNA, 21 bp, Artificial sequence
  SiRNA target sequence
gtgccatggaaagatgtgaag

SEQ ID NO: 261054 - DNA, 21 bp, Artificial sequence
  SiRNA target sequence
tgccatggaaagatgtgaaga

SEQ ID NO: 261055 - DNA, 21 bp, Artificial sequence
  SiRNA target sequence
gccatggaaagatgtgaagaa

SEQ ID NO: 261056 - DNA, 21 bp, Artificial sequence
  SiRNA target sequence
ccatggaaagatgtgaagaaa

SEQ ID NO: 261057 - DNA, 21 bp, Artificial sequence
  SiRNA target sequence
catggaaagatgtgaagaaag

SEQ ID NO: 261058 - DNA, 21 bp, Artificial sequence
  SiRNA target sequence
atggaaagatgtgaagaaagt

SEQ ID NO: 261059 - DNA, 21 bp, Artificial sequence
  SiRNA target sequence
tggaaagatgtgaagaaagtt

SEQ ID NO: 261060 - DNA, 21 bp, Artificial sequence
  SiRNA target sequence
ggaaagatgtgaagaaagttc

SEQ ID NO: 261061 - DNA, 21 bp, Artificial sequence
  SiRNA target sequence
gaaagatgtgaagaaagttcc

SEQ ID NO: 261062 - DNA, 21 bp, Artificial sequence
  SiRNA target sequence
aaagatgtgaagaaagttcca

SEQ ID NO: 261063 - DNA, 21 bp, Artificial sequence
  SiRNA target sequence
aagatgtgaagaaagttccaa

SEQ ID NO: 261064 - DNA, 21 bp, Artificial sequence
  SiRNA target sequence
agatgtgaagaaagttccaat

SEQ ID NO: 261065 - DNA, 21 bp, Artificial sequence
  SiRNA target sequence
gatgtgaagaaagttccaatt

SEQ ID NO: 261066 - DNA, 21 bp, Artificial sequence
  SiRNA target sequence
atgtgaagaaagttccaattg

SEQ ID NO: 261067 - DNA, 21 bp, Artificial sequence
  SiRNA target sequence
tgtgaagaaagttccaattgt

SEQ ID NO: 261068 - DNA, 21 bp, Artificial sequence
  SiRNA target sequence
gtgaagaaagttccaattgtt

SEQ ID NO: 261069 - DNA, 21 bp, Artificial sequence
  SiRNA target sequence
tgaagaaagttccaattgtta

SEQ ID NO: 261070 - DNA, 21 bp, Artificial sequence
  SiRNA target sequence
gaagaaagttccaattgttaa

SEQ ID NO: 261071 - DNA, 21 bp, Artificial sequence
  SiRNA target sequence
aagaaagttccaattgttaat

SEQ ID NO: 261072 - DNA, 21 bp, Artificial sequence
  SiRNA target sequence
agaaagttccaattgttaatg

SEQ ID NO: 261073 - DNA, 21 bp, Artificial sequence
  SiRNA target sequence
gaaagttccaattgttaatgc

SEQ ID NO: 261074 - DNA, 21 bp, Artificial sequence
  SiRNA target sequence
aaagttccaattgttaatgct

SEQ ID NO: 261075 - DNA, 21 bp, Artificial sequence
  SiRNA target sequence
aagttccaattgttaatgctt

SEQ ID NO: 261076 - DNA, 21 bp, Artificial sequence
  SiRNA target sequence
agttccaattgttaatgcttt

SEQ ID NO: 261077 - DNA, 21 bp, Artificial sequence
  SiRNA target sequence
gttccaattgttaatgctttt

SEQ ID NO: 261078 - DNA, 21 bp, Artificial sequence
  SiRNA target sequence
ttccaattgttaatgcttttg

SEQ ID NO: 261079 - DNA, 21 bp, Artificial sequence
  SiRNA target sequence
tccaattgttaatgcttttgg

SEQ ID NO: 261080 - DNA, 21 bp, Artificial sequence
  SiRNA target sequence
ccaattgttaatgcttttggt

SEQ ID NO: 261081 - DNA, 21 bp, Artificial sequence
  SiRNA target sequence
caattgttaatgcttttggtg

SEQ ID NO: 261082 - DNA, 21 bp, Artificial sequence
  SiRNA target sequence
aattgttaatgcttttggtga

SEQ ID NO: 261083 - DNA, 21 bp, Artificial sequence
  SiRNA target sequence
attgttaatgcttttggtgaa

SEQ ID NO: 261084 - DNA, 21 bp, Artificial sequence
  SiRNA target sequence
ttgttaatgcttttggtgaat

SEQ ID NO: 261085 - DNA, 21 bp, Artificial sequence
  SiRNA target sequence
tgttaatgcttttggtgaatc

SEQ ID NO: 261086 - DNA, 21 bp, Artificial sequence
  SiRNA target sequence
gttaatgcttttggtgaatct

SEQ ID NO: 261087 - DNA, 21 bp, Artificial sequence
  SiRNA target sequence
ttaatgcttttggtgaatcta

SEQ ID NO: 261088 - DNA, 21 bp, Artificial sequence
  SiRNA target sequence
taatgcttttggtgaatctaa

SEQ ID NO: 261089 - DNA, 21 bp, Artificial sequence
  SiRNA target sequence
aatgcttttggtgaatctaaa

SEQ ID NO: 261090 - DNA, 21 bp, Artificial sequence
  SiRNA target sequence
atgcttttggtgaatctaaag

SEQ ID NO: 261091 - DNA, 21 bp, Artificial sequence
  SiRNA target sequence
tgcttttggtgaatctaaaga

SEQ ID NO: 261092 - DNA, 21 bp, Artificial sequence
  SiRNA target sequence
gcttttggtgaatctaaagaa

SEQ ID NO: 261093 - DNA, 21 bp, Artificial sequence
  SiRNA target sequence
cttttggtgaatctaaagaag

SEQ ID NO: 261094 - DNA, 21 bp, Artificial sequence
  SiRNA target sequence
ttttggtgaatctaaagaagc

SEQ ID NO: 261095 - DNA, 21 bp, Artificial sequence
  SiRNA target sequence
tttggtgaatctaaagaagca

SEQ ID NO: 261096 - DNA, 21 bp, Artificial sequence
  SiRNA target sequence
ttggtgaatctaaagaagcag

SEQ ID NO: 261097 - DNA, 21 bp, Artificial sequence
  SiRNA target sequence
tggtgaatctaaagaagcagc

SEQ ID NO: 261098 - DNA, 21 bp, Artificial sequence
  SiRNA target sequence
ggtgaatctaaagaagcagcg

SEQ ID NO: 261099 - DNA, 21 bp, Artificial sequence
  SiRNA target sequence
gtgaatctaaagaagcagcgt

SEQ ID NO: 261100 - DNA, 21 bp, Artificial sequence
  SiRNA target sequence
tgaatctaaagaagcagcgtt

SEQ ID NO: 261101 - DNA, 21 bp, Artificial sequence
  SiRNA target sequence
gaatctaaagaagcagcgtta

SEQ ID NO: 261102 - DNA, 21 bp, Artificial sequence
  SiRNA target sequence
aatctaaagaagcagcgttat

SEQ ID NO: 261103 - DNA, 21 bp, Artificial sequence
  SiRNA target sequence
atctaaagaagcagcgttatt

SEQ ID NO: 261104 - DNA, 21 bp, Artificial sequence
  SiRNA target sequence
tctaaagaagcagcgttattg

SEQ ID NO: 261105 - DNA, 21 bp, Artificial sequence
  SiRNA target sequence
ctaaagaagcagcgttattgg

SEQ ID NO: 261106 - DNA, 21 bp, Artificial sequence
  SiRNA target sequence
taaagaagcagcgttattggc

SEQ ID NO: 261107 - DNA, 21 bp, Artificial sequence
  SiRNA target sequence
aaagaagcagcgttattggcc

SEQ ID NO: 261108 - DNA, 21 bp, Artificial sequence
  SiRNA target sequence
aagaagcagcgttattggcct

SEQ ID NO: 261109 - DNA, 21 bp, Artificial sequence
  SiRNA target sequence
agaagcagcgttattggcctt

SEQ ID NO: 261110 - DNA, 21 bp, Artificial sequence
  SiRNA target sequence
gaagcagcgttattggccttc

SEQ ID NO: 261111 - DNA, 21 bp, Artificial sequence
  SiRNA target sequence
aagcagcgttattggccttcc

SEQ ID NO: 261112 - DNA, 21 bp, Artificial sequence
  SiRNA target sequence
agcagcgttattggccttccc

SEQ ID NO: 261113 - DNA, 21 bp, Artificial sequence
  SiRNA target sequence
gcagcgttattggccttccca

SEQ ID NO: 261114 - DNA, 21 bp, Artificial sequence
  SiRNA target sequence
cagcgttattggccttcccaa

SEQ ID NO: 261115 - DNA, 21 bp, Artificial sequence
  SiRNA target sequence
agcgttattggccttcccaaa

SEQ ID NO: 261116 - DNA, 21 bp, Artificial sequence
  SiRNA target sequence
gcgttattggccttcccaaaa

SEQ ID NO: 261117 - DNA, 21 bp, Artificial sequence
  SiRNA target sequence
cgttattggccttcccaaaat

SEQ ID NO: 261118 - DNA, 21 bp, Artificial sequence
  SiRNA target sequence
gttattggccttcccaaaatt

SEQ ID NO: 261119 - DNA, 21 bp, Artificial sequence
  SiRNA target sequence
ttattggccttcccaaaattc

SEQ ID NO: 261120 - DNA, 21 bp, Artificial sequence
  SiRNA target sequence
tattggccttcccaaaattcg

SEQ ID NO: 261121 - DNA, 21 bp, Artificial sequence
  SiRNA target sequence
attggccttcccaaaattcgt

SEQ ID NO: 261122 - DNA, 21 bp, Artificial sequence
  SiRNA target sequence
ttggccttcccaaaattcgtt

SEQ ID NO: 261123 - DNA, 21 bp, Artificial sequence
  SiRNA target sequence
tggccttcccaaaattcgttt

SEQ ID NO: 261124 - DNA, 21 bp, Artificial sequence
  SiRNA target sequence
ggccttcccaaaattcgtttg

SEQ ID NO: 261125 - DNA, 21 bp, Artificial sequence
  SiRNA target sequence
gccttcccaaaattcgtttgc

SEQ ID NO: 261126 - DNA, 21 bp, Artificial sequence
  SiRNA target sequence
ccttcccaaaattcgtttgcc

SEQ ID NO: 261127 - DNA, 21 bp, Artificial sequence
  SiRNA target sequence
cttcccaaaattcgtttgcca

SEQ ID NO: 261128 - DNA, 21 bp, Artificial sequence
  SiRNA target sequence
ttcccaaaattcgtttgccaa
